United States Patent Application Publication US 2014/0004565 A1 - sequence listing, part 119

SEQ ID NO: 2984136 - RNA, 19 nt, Artificial Sequence
  Description of Artificial Sequence: Synthetic oligonucleotide
gcaggcaguggcaccccug

SEQ ID NO: 2984137 - RNA, 19 nt, Artificial Sequence
  Description of Artificial Sequence: Synthetic oligonucleotide
uauuggccgcuggccuguc

SEQ ID NO: 2984138 - RNA, 19 nt, Artificial Sequence
  Description of Artificial Sequence: Synthetic oligonucleotide
gcaggaggggcaacccuga

SEQ ID NO: 2984139 - RNA, 19 nt, Artificial Sequence
  Description of Artificial Sequence: Synthetic oligonucleotide
ggguggcuacaggagguga

SEQ ID NO: 2984140 - RNA, 19 nt, Artificial Sequence
  Description of Artificial Sequence: Synthetic oligonucleotide
agcuagggaugggccccug

SEQ ID NO: 2984141 - RNA, 19 nt, Artificial Sequence
  Description of Artificial Sequence: Synthetic oligonucleotide
cggacaugccccaucccca

SEQ ID NO: 2984142 - RNA, 19 nt, Artificial Sequence
  Description of Artificial Sequence: Synthetic oligonucleotide
gggaugggccccugcccca

SEQ ID NO: 2984143 - RNA, 19 nt, Artificial Sequence
  Description of Artificial Sequence: Synthetic oligonucleotide
gcaccccugggguggcuac

SEQ ID NO: 2984144 - RNA, 19 nt, Artificial Sequence
  Description of Artificial Sequence: Synthetic oligonucleotide
gccuuccgagcuagggaug

SEQ ID NO: 2984145 - RNA, 19 nt, Artificial Sequence
  Description of Artificial Sequence: Synthetic oligonucleotide
ggcgcacccgcauagccuu

SEQ ID NO: 2984146 - RNA, 19 nt, Artificial Sequence
  Description of Artificial Sequence: Synthetic oligonucleotide
ccguccacucccuggggca

SEQ ID NO: 2984147 - RNA, 19 nt, Artificial Sequence
  Description of Artificial Sequence: Synthetic oligonucleotide
ccgcauagccuuccgagcu

SEQ ID NO: 2984148 - RNA, 19 nt, Artificial Sequence
  Description of Artificial Sequence: Synthetic oligonucleotide
cguuaccagcaccuuauua

SEQ ID NO: 2984149 - RNA, 19 nt, Artificial Sequence
  Description of Artificial Sequence: Synthetic oligonucleotide
guggcaccccugggguggc

SEQ ID NO: 2984150 - RNA, 19 nt, Artificial Sequence
  Description of Artificial Sequence: Synthetic oligonucleotide
gccccaucuguccguccac

SEQ ID NO: 2984151 - RNA, 19 nt, Artificial Sequence
  Description of Artificial Sequence: Synthetic oligonucleotide
gguccucuggcgguggggu

SEQ ID NO: 2984152 - RNA, 19 nt, Artificial Sequence
  Description of Artificial Sequence: Synthetic oligonucleotide
ggacaugccccauccccau

SEQ ID NO: 2984153 - RNA, 19 nt, Artificial Sequence
  Description of Artificial Sequence: Synthetic oligonucleotide
gcagcaaggugcggcugca

SEQ ID NO: 2984154 - RNA, 19 nt, Artificial Sequence
  Description of Artificial Sequence: Synthetic oligonucleotide
ggguagccuggcgcacccg

SEQ ID NO: 2984155 - RNA, 19 nt, Artificial Sequence
  Description of Artificial Sequence: Synthetic oligonucleotide
ccccauccccaucccugcc

SEQ ID NO: 2984156 - RNA, 19 nt, Artificial Sequence
  Description of Artificial Sequence: Synthetic oligonucleotide
ggccgcuggccugucugug

SEQ ID NO: 2984157 - RNA, 19 nt, Artificial Sequence
  Description of Artificial Sequence: Synthetic oligonucleotide
ccuggcgcacccgcauagc

SEQ ID NO: 2984158 - RNA, 19 nt, Artificial Sequence
  Description of Artificial Sequence: Synthetic oligonucleotide
cuucuggguaaggccggcu

SEQ ID NO: 2984159 - RNA, 19 nt, Artificial Sequence
  Description of Artificial Sequence: Synthetic oligonucleotide
ggccccugccccaucuguc

SEQ ID NO: 2984160 - RNA, 19 nt, Artificial Sequence
  Description of Artificial Sequence: Synthetic oligonucleotide
gagcuagggaugggccccu

SEQ ID NO: 2984161 - RNA, 19 nt, Artificial Sequence
  Description of Artificial Sequence: Synthetic oligonucleotide
ccccugggguggcuacagg

SEQ ID NO: 2984162 - RNA, 19 nt, Artificial Sequence
  Description of Artificial Sequence: Synthetic oligonucleotide
ggcccagcuucuccagucu

SEQ ID NO: 2984163 - RNA, 19 nt, Artificial Sequence
  Description of Artificial Sequence: Synthetic oligonucleotide
cuucuccagucuccaugau

SEQ ID NO: 2984164 - RNA, 19 nt, Artificial Sequence
  Description of Artificial Sequence: Synthetic oligonucleotide
cgcuggccugucuguggcg

SEQ ID NO: 2984165 - RNA, 19 nt, Artificial Sequence
  Description of Artificial Sequence: Synthetic oligonucleotide
ccacuagagccaggcagga

SEQ ID NO: 2984166 - RNA, 19 nt, Artificial Sequence
  Description of Artificial Sequence: Synthetic oligonucleotide
ccugagcugccaggccaag

SEQ ID NO: 2984167 - RNA, 19 nt, Artificial Sequence
  Description of Artificial Sequence: Synthetic oligonucleotide
ccugccccaucuguccguc

SEQ ID NO: 2984168 - RNA, 19 nt, Artificial Sequence
  Description of Artificial Sequence: Synthetic oligonucleotide
cuggccugucuguggcggu

SEQ ID NO: 2984169 - RNA, 19 nt, Artificial Sequence
  Description of Artificial Sequence: Synthetic oligonucleotide
cgacgccuccaucguuagg

SEQ ID NO: 2984170 - RNA, 19 nt, Artificial Sequence
  Description of Artificial Sequence: Synthetic oligonucleotide
cgcacccgcauagccuucc

SEQ ID NO: 2984171 - RNA, 19 nt, Artificial Sequence
  Description of Artificial Sequence: Synthetic oligonucleotide
gggcaggcaguggcacccc

SEQ ID NO: 2984172 - RNA, 19 nt, Artificial Sequence
  Description of Artificial Sequence: Synthetic oligonucleotide
cguccacucccuggggcag

SEQ ID NO: 2984173 - RNA, 19 nt, Artificial Sequence
  Description of Artificial Sequence: Synthetic oligonucleotide
uggcaccccugggguggcu

SEQ ID NO: 2984174 - RNA, 19 nt, Artificial Sequence
  Description of Artificial Sequence: Synthetic oligonucleotide
gcggcugcaggggccucug

SEQ ID NO: 2984175 - RNA, 19 nt, Artificial Sequence
  Description of Artificial Sequence: Synthetic oligonucleotide
cugccaggccaagcagcaa

SEQ ID NO: 2984176 - RNA, 19 nt, Artificial Sequence
  Description of Artificial Sequence: Synthetic oligonucleotide
aggggccucuggggcaaua

SEQ ID NO: 2984177 - RNA, 19 nt, Artificial Sequence
  Description of Artificial Sequence: Synthetic oligonucleotide
gcaggggccucuggggcaa

SEQ ID NO: 2984178 - RNA, 19 nt, Artificial Sequence
  Description of Artificial Sequence: Synthetic oligonucleotide
cccuuccggacaugcccca

SEQ ID NO: 2984179 - RNA, 19 nt, Artificial Sequence
  Description of Artificial Sequence: Synthetic oligonucleotide
cagcuucuccagucuccau

SEQ ID NO: 2984180 - RNA, 19 nt, Artificial Sequence
  Description of Artificial Sequence: Synthetic oligonucleotide
cugccuggaggcccagcuu

SEQ ID NO: 2984181 - RNA, 19 nt, Artificial Sequence
  Description of Artificial Sequence: Synthetic oligonucleotide
ggcaggcaguggcaccccu

SEQ ID NO: 2984182 - RNA, 19 nt, Artificial Sequence
  Description of Artificial Sequence: Synthetic oligonucleotide
  modified_base (12)..(12): a, c, u, g, unknown or other
ggcggucuggcnggguccu

SEQ ID NO: 2984183 - RNA, 19 nt, Artificial Sequence
  Description of Artificial Sequence: Synthetic oligonucleotide
gggccucuggggcaauauu

SEQ ID NO: 2984184 - RNA, 19 nt, Artificial Sequence
  Description of Artificial Sequence: Synthetic oligonucleotide
cccauccccaucccugccu

SEQ ID NO: 2984185 - RNA, 19 nt, Artificial Sequence
  Description of Artificial Sequence: Synthetic oligonucleotide
ggacgacgccuccaucguu

SEQ ID NO: 2984186 - RNA, 19 nt, Artificial Sequence
  Description of Artificial Sequence: Synthetic oligonucleotide
cgccuccaucguuaggaaa

SEQ ID NO: 2984187 - RNA, 19 nt, Artificial Sequence
  Description of Artificial Sequence: Synthetic oligonucleotide
ggcaccccugggguggcua

SEQ ID NO: 2984188 - RNA, 19 nt, Artificial Sequence
  Description of Artificial Sequence: Synthetic oligonucleotide
ggccugucuguggcggucu

SEQ ID NO: 2984189 - RNA, 19 nt, Artificial Sequence
  Description of Artificial Sequence: Synthetic oligonucleotide
gccaggcaggaggggcaac

SEQ ID NO: 2984190 - RNA, 19 nt, Artificial Sequence
  Description of Artificial Sequence: Synthetic oligonucleotide
gggcaacccugagcugcca

SEQ ID NO: 2984191 - RNA, 19 nt, Artificial Sequence
  Description of Artificial Sequence: Synthetic oligonucleotide
ggggccucuggggcaauau

SEQ ID NO: 2984192 - RNA, 19 nt, Artificial Sequence
  Description of Artificial Sequence: Synthetic oligonucleotide
cgcauagccuuccgagcua

SEQ ID NO: 2984193 - RNA, 19 nt, Artificial Sequence
  Description of Artificial Sequence: Synthetic oligonucleotide
ccacucccuggggcaggcc

SEQ ID NO: 2984194 - RNA, 19 nt, Artificial Sequence
  Description of Artificial Sequence: Synthetic oligonucleotide
cccugccuggaggcccagc

SEQ ID NO: 2984195 - RNA, 19 nt, Artificial Sequence
  Description of Artificial Sequence: Synthetic oligonucleotide
gugcggcugcaggggccuc

SEQ ID NO: 2984196 - RNA, 19 nt, Artificial Sequence
  Description of Artificial Sequence: Synthetic oligonucleotide
ccaggccaagcagcaaggu

SEQ ID NO: 2984197 - RNA, 19 nt, Artificial Sequence
  Description of Artificial Sequence: Synthetic oligonucleotide
ggaugggccccugccccau

SEQ ID NO: 2984198 - RNA, 19 nt, Artificial Sequence
  Description of Artificial Sequence: Synthetic oligonucleotide
  modified_base (10)..(10): a, c, u, g, unknown or other
cggucuggcnggguccucu

SEQ ID NO: 2984199 - RNA, 19 nt, Artificial Sequence
  Description of Artificial Sequence: Synthetic oligonucleotide
gcgcacccgcauagccuuc

SEQ ID NO: 2984200 - RNA, 19 nt, Artificial Sequence
  Description of Artificial Sequence: Synthetic oligonucleotide
  modified_base (11)..(11): a, c, u, g, unknown or other
gcggucuggcnggguccuc

SEQ ID NO: 2984201 - RNA, 19 nt, Artificial Sequence
  Description of Artificial Sequence: Synthetic oligonucleotide
ccccaucuguccguccacu

SEQ ID NO: 2984202 - RNA, 19 nt, Artificial Sequence
  Description of Artificial Sequence: Synthetic oligonucleotide
ccaucguuaccagcaccuu

SEQ ID NO: 2984203 - RNA, 19 nt, Artificial Sequence
  Description of Artificial Sequence: Synthetic oligonucleotide
ccuuccggacaugccccau

SEQ ID NO: 2984204 - RNA, 19 nt, Artificial Sequence
  Description of Artificial Sequence: Synthetic oligonucleotide
gaugacuucaaucaaaucc

SEQ ID NO: 2984205 - RNA, 19 nt, Artificial Sequence
  Description of Artificial Sequence: Synthetic oligonucleotide
auuacaggcacaucaaacc

SEQ ID NO: 2984206 - RNA, 19 nt, Artificial Sequence
  Description of Artificial Sequence: Synthetic oligonucleotide
cuuuucaucuccaacagcc

SEQ ID NO: 2984207 - RNA, 19 nt, Artificial Sequence
  Description of Artificial Sequence: Synthetic oligonucleotide
auugauuacaggcacauca

SEQ ID NO: 2984208 - RNA, 19 nt, Artificial Sequence
  Description of Artificial Sequence: Synthetic oligonucleotide
uauucuugggaucaauagg

SEQ ID NO: 2984209 - RNA, 19 nt, Artificial Sequence
  Description of Artificial Sequence: Synthetic oligonucleotide
gugaacaugucucugaggg

SEQ ID NO: 2984210 - RNA, 19 nt, Artificial Sequence
  Description of Artificial Sequence: Synthetic oligonucleotide
uacaaauuuagugugaucu

SEQ ID NO: 2984211 - RNA, 19 nt, Artificial Sequence
  Description of Artificial Sequence: Synthetic oligonucleotide
uggacaauaaguuuucccc

SEQ ID NO: 2984212 - RNA, 19 nt, Artificial Sequence
  Description of Artificial Sequence: Synthetic oligonucleotide
uucaaucaaauccaugaag

SEQ ID NO: 2984213 - RNA, 19 nt, Artificial Sequence
  Description of Artificial Sequence: Synthetic oligonucleotide
aucaauaggacucuggaca

SEQ ID NO: 2984214 - RNA, 19 nt, Artificial Sequence
  Description of Artificial Sequence: Synthetic oligonucleotide
agggaauggacacucaggc

SEQ ID NO: 2984215 - RNA, 19 nt, Artificial Sequence
  Description of Artificial Sequence: Synthetic oligonucleotide
uauuugggaauauucuugg

SEQ ID NO: 2984216 - RNA, 19 nt, Artificial Sequence
  Description of Artificial Sequence: Synthetic oligonucleotide
auaaguuuuccccucauug

SEQ ID NO: 2984217 - RNA, 19 nt, Artificial Sequence
  Description of Artificial Sequence: Synthetic oligonucleotide
uaaaugucuugauagagga

SEQ ID NO: 2984218 - RNA, 19 nt, Artificial Sequence
  Description of Artificial Sequence: Synthetic oligonucleotide
agacccauaauccacuuuc

SEQ ID NO: 2984219 - RNA, 19 nt, Artificial Sequence
  Description of Artificial Sequence: Synthetic oligonucleotide
auaauccacuuucaugugc

SEQ ID NO: 2984220 - RNA, 19 nt, Artificial Sequence
  Description of Artificial Sequence: Synthetic oligonucleotide
caucaaaccucuuugcugg

SEQ ID NO: 2984221 - RNA, 19 nt, Artificial Sequence
  Description of Artificial Sequence: Synthetic oligonucleotide
ucauauuugggaauauucu

SEQ ID NO: 2984222 - RNA, 19 nt, Artificial Sequence
  Description of Artificial Sequence: Synthetic oligonucleotide
cuaaaugucuugauagagg

SEQ ID NO: 2984223 - RNA, 19 nt, Artificial Sequence
  Description of Artificial Sequence: Synthetic oligonucleotide
uuugggaauauucuuggga

SEQ ID NO: 2984224 - RNA, 19 nt, Artificial Sequence
  Description of Artificial Sequence: Synthetic oligonucleotide
aauuuagugugaucuggag

SEQ ID NO: 2984225 - RNA, 19 nt, Artificial Sequence
  Description of Artificial Sequence: Synthetic oligonucleotide
auauucuugggaucaauag

SEQ ID NO: 2984226 - RNA, 19 nt, Artificial Sequence
  Description of Artificial Sequence: Synthetic oligonucleotide
gauucuugggaguacuggg

SEQ ID NO: 2984227 - RNA, 19 nt, Artificial Sequence
  Description of Artificial Sequence: Synthetic oligonucleotide
gugcuaaaugucuugauag

SEQ ID NO: 2984228 - RNA, 19 nt, Artificial Sequence
  Description of Artificial Sequence: Synthetic oligonucleotide
cuugggaucaauaggacuc

SEQ ID NO: 2984229 - RNA, 19 nt, Artificial Sequence
  Description of Artificial Sequence: Synthetic oligonucleotide
uagaggaggucauauuugg

SEQ ID NO: 2984230 - RNA, 19 nt, Artificial Sequence
  Description of Artificial Sequence: Synthetic oligonucleotide
uuugaagcuuccuacaaau

SEQ ID NO: 2984231 - RNA, 19 nt, Artificial Sequence
  Description of Artificial Sequence: Synthetic oligonucleotide
uaaguuuuccccucauugc

SEQ ID NO: 2984232 - RNA, 19 nt, Artificial Sequence
  Description of Artificial Sequence: Synthetic oligonucleotide
uuuucaucuccaacagccg

SEQ ID NO: 2984233 - RNA, 19 nt, Artificial Sequence
  Description of Artificial Sequence: Synthetic oligonucleotide
gaucuggagacccauaauc

SEQ ID NO: 2984234 - RNA, 19 nt, Artificial Sequence
  Description of Artificial Sequence: Synthetic oligonucleotide
aauccaugaagucuuguuu

SEQ ID NO: 2984235 - RNA, 19 nt, Artificial Sequence
  Description of Artificial Sequence: Synthetic oligonucleotide
caaauuuagugugaucugg

SEQ ID NO: 2984236 - RNA, 19 nt, Artificial Sequence
  Description of Artificial Sequence: Synthetic oligonucleotide
ucuccaacagccgugagug

SEQ ID NO: 2984237 - RNA, 19 nt, Artificial Sequence
  Description of Artificial Sequence: Synthetic oligonucleotide
uuccuacaaauuuagugug

SEQ ID NO: 2984238 - RNA, 19 nt, Artificial Sequence
  Description of Artificial Sequence: Synthetic oligonucleotide
uggacacucaggcaccugg

SEQ ID NO: 2984239 - RNA, 19 nt, Artificial Sequence
  Description of Artificial Sequence: Synthetic oligonucleotide
acaucaaaccucuuugcug

SEQ ID NO: 2984240 - RNA, 19 nt, Artificial Sequence
  Description of Artificial Sequence: Synthetic oligonucleotide
uuugcuggggcagugaaca

SEQ ID NO: 2984241 - RNA, 19 nt, Artificial Sequence
  Description of Artificial Sequence: Synthetic oligonucleotide
uuacaggcacaucaaaccu

SEQ ID NO: 2984242 - RNA, 19 nt, Artificial Sequence
  Description of Artificial Sequence: Synthetic oligonucleotide
uuucaugugcuguccauug

SEQ ID NO: 2984243 - RNA, 19 nt, Artificial Sequence
  Description of Artificial Sequence: Synthetic oligonucleotide
aucuggagacccauaaucc

SEQ ID NO: 2984244 - RNA, 19 nt, Artificial Sequence
  Description of Artificial Sequence: Synthetic oligonucleotide
aaauccaugaagucuuguu

SEQ ID NO: 2984245 - RNA, 19 nt, Artificial Sequence
  Description of Artificial Sequence: Synthetic oligonucleotide
auuuagugugaucuggaga

SEQ ID NO: 2984246 - RNA, 19 nt, Artificial Sequence
  Description of Artificial Sequence: Synthetic oligonucleotide
uugggaauauucuugggau

SEQ ID NO: 2984247 - RNA, 19 nt, Artificial Sequence
  Description of Artificial Sequence: Synthetic oligonucleotide
ucagggaauggacacucag

SEQ ID NO: 2984248 - RNA, 19 nt, Artificial Sequence
  Description of Artificial Sequence: Synthetic oligonucleotide
ugugcuaaaugucuugaua

SEQ ID NO: 2984249 - RNA, 19 nt, Artificial Sequence
  Description of Artificial Sequence: Synthetic oligonucleotide
acaaauuuagugugaucug

SEQ ID NO: 2984250 - RNA, 19 nt, Artificial Sequence
  Description of Artificial Sequence: Synthetic oligonucleotide
ucaggucccauuuccaccc

SEQ ID NO: 2984251 - RNA, 19 nt, Artificial Sequence
  Description of Artificial Sequence: Synthetic oligonucleotide
gauuacaggcacaucaaac

SEQ ID NO: 2984252 - RNA, 19 nt, Artificial Sequence
  Description of Artificial Sequence: Synthetic oligonucleotide
cuggacaauaaguuuuccc

SEQ ID NO: 2984253 - RNA, 19 nt, Artificial Sequence
  Description of Artificial Sequence: Synthetic oligonucleotide
auucuugggaucaauagga

SEQ ID NO: 2984254 - RNA, 19 nt, Artificial Sequence
  Description of Artificial Sequence: Synthetic oligonucleotide
gcuuccuacaaauuuagug

SEQ ID NO: 2984255 - RNA, 19 nt, Artificial Sequence
  Description of Artificial Sequence: Synthetic oligonucleotide
gaacaugucucugagggac

SEQ ID NO: 2984256 - RNA, 19 nt, Artificial Sequence
  Description of Artificial Sequence: Synthetic oligonucleotide
caugacucuuuucaucucc

SEQ ID NO: 2984257 - RNA, 19 nt, Artificial Sequence
  Description of Artificial Sequence: Synthetic oligonucleotide
ugaagucuuguuuugguuu

SEQ ID NO: 2984258 - RNA, 19 nt, Artificial Sequence
  Description of Artificial Sequence: Synthetic oligonucleotide
auugcuccccgguagauga

SEQ ID NO: 2984259 - RNA, 19 nt, Artificial Sequence
  Description of Artificial Sequence: Synthetic oligonucleotide
uuuugaagcuuccuacaaa

SEQ ID NO: 2984260 - RNA, 19 nt, Artificial Sequence
  Description of Artificial Sequence: Synthetic oligonucleotide
uuucaucuccaacagccgu

SEQ ID NO: 2984261 - RNA, 19 nt, Artificial Sequence
  Description of Artificial Sequence: Synthetic oligonucleotide
ggaauggacacucaggcac

SEQ ID NO: 2984262 - RNA, 19 nt, Artificial Sequence
  Description of Artificial Sequence: Synthetic oligonucleotide
gaggaggucauauuuggga

SEQ ID NO: 2984263 - RNA, 19 nt, Artificial Sequence
  Description of Artificial Sequence: Synthetic oligonucleotide
gaucaauaggacucuggac

SEQ ID NO: 2984264 - RNA, 19 nt, Artificial Sequence
  Description of Artificial Sequence: Synthetic oligonucleotide
uaggacucuggacaauaag

SEQ ID NO: 2984265 - RNA, 19 nt, Artificial Sequence
  Description of Artificial Sequence: Synthetic oligonucleotide
auuugggaauauucuuggg

SEQ ID NO: 2984266 - RNA, 19 nt, Artificial Sequence
  Description of Artificial Sequence: Synthetic oligonucleotide
gacuccagaccacaggccc

SEQ ID NO: 2984267 - RNA, 19 nt, Artificial Sequence
  Description of Artificial Sequence: Synthetic oligonucleotide
ucuggagacccauaaucca

SEQ ID NO: 2984268 - RNA, 19 nt, Artificial Sequence
  Description of Artificial Sequence: Synthetic oligonucleotide
uucaucuccaacagccgug

SEQ ID NO: 2984269 - RNA, 19 nt, Artificial Sequence
  Description of Artificial Sequence: Synthetic oligonucleotide
ugugcuguccauugaagaa

SEQ ID NO: 2984270 - RNA, 19 nt, Artificial Sequence
  Description of Artificial Sequence: Synthetic oligonucleotide
aaauuuagugugaucugga

SEQ ID NO: 2984271 - RNA, 19 nt, Artificial Sequence
  Description of Artificial Sequence: Synthetic oligonucleotide
ucuugggaucaauaggacu

SEQ ID NO: 2984272 - RNA, 19 nt, Artificial Sequence
  Description of Artificial Sequence: Synthetic oligonucleotide
aauaaguuuuccccucauu

SEQ ID NO: 2984273 - RNA, 19 nt, Artificial Sequence
  Description of Artificial Sequence: Synthetic oligonucleotide
ucuuuucaucuccaacagc

SEQ ID NO: 2984274 - RNA, 19 nt, Artificial Sequence
  Description of Artificial Sequence: Synthetic oligonucleotide
ugcuaaaugucuugauaga

SEQ ID NO: 2984275 - RNA, 19 nt, Artificial Sequence
  Description of Artificial Sequence: Synthetic oligonucleotide
ucaauaggacucuggacaa

SEQ ID NO: 2984276 - RNA, 19 nt, Artificial Sequence
  Description of Artificial Sequence: Synthetic oligonucleotide
gacaauaaguuuuccccuc

SEQ ID NO: 2984277 - RNA, 19 nt, Artificial Sequence
  Description of Artificial Sequence: Synthetic oligonucleotide
uucaggucccauuuccacc

SEQ ID NO: 2984278 - RNA, 19 nt, Artificial Sequence
  Description of Artificial Sequence: Synthetic oligonucleotide
ggggccauugauuacaggc

SEQ ID NO: 2984279 - RNA, 19 nt, Artificial Sequence
  Description of Artificial Sequence: Synthetic oligonucleotide
cuuccuacaaauuuagugu

SEQ ID NO: 2984280 - RNA, 19 nt, Artificial Sequence
  Description of Artificial Sequence: Synthetic oligonucleotide
gucauauuugggaauauuc

SEQ ID NO: 2984281 - RNA, 19 nt, Artificial Sequence
  Description of Artificial Sequence: Synthetic oligonucleotide
agugaacaugucucugagg

SEQ ID NO: 2984282 - RNA, 19 nt, Artificial Sequence
  Description of Artificial Sequence: Synthetic oligonucleotide
agaugacuucaaucaaauc

SEQ ID NO: 2984283 - RNA, 19 nt, Artificial Sequence
  Description of Artificial Sequence: Synthetic oligonucleotide
ucaugugcuguccauugaa

SEQ ID NO: 2984284 - RNA, 19 nt, Artificial Sequence
  Description of Artificial Sequence: Synthetic oligonucleotide
aagcuuccuacaaauuuag

SEQ ID NO: 2984285 - RNA, 19 nt, Artificial Sequence
  Description of Artificial Sequence: Synthetic oligonucleotide
uccuacaaauuuaguguga

SEQ ID NO: 2984286 - RNA, 19 nt, Artificial Sequence
  Description of Artificial Sequence: Synthetic oligonucleotide
uccaugaagucuuguuuug

SEQ ID NO: 2984287 - RNA, 19 nt, Artificial Sequence
  Description of Artificial Sequence: Synthetic oligonucleotide
aauauucuugggaucaaua

SEQ ID NO: 2984288 - RNA, 19 nt, Artificial Sequence
  Description of Artificial Sequence: Synthetic oligonucleotide
acccaugacucuuuucauc

SEQ ID NO: 2984289 - RNA, 19 nt, Artificial Sequence
  Description of Artificial Sequence: Synthetic oligonucleotide
gacucuuuucaucuccaac

SEQ ID NO: 2984290 - RNA, 19 nt, Artificial Sequence
  Description of Artificial Sequence: Synthetic oligonucleotide
cacucaggcaccuggauuc

SEQ ID NO: 2984291 - RNA, 19 nt, Artificial Sequence
  Description of Artificial Sequence: Synthetic oligonucleotide
cagggaauggacacucagg

SEQ ID NO: 2984292 - RNA, 19 nt, Artificial Sequence
  Description of Artificial Sequence: Synthetic oligonucleotide
ugauuacaggcacaucaaa

SEQ ID NO: 2984293 - RNA, 19 nt, Artificial Sequence
  Description of Artificial Sequence: Synthetic oligonucleotide
guuuuccccucauugcucc

SEQ ID NO: 2984294 - RNA, 19 nt, Artificial Sequence
  Description of Artificial Sequence: Synthetic oligonucleotide
aauaggacucuggacaaua

SEQ ID NO: 2984295 - RNA, 19 nt, Artificial Sequence
  Description of Artificial Sequence: Synthetic oligonucleotide
caaaccucuuugcuggggc

SEQ ID NO: 2984296 - RNA, 19 nt, Artificial Sequence
  Description of Artificial Sequence: Synthetic oligonucleotide
aaaugucuugauagaggag

SEQ ID NO: 2984297 - RNA, 19 nt, Artificial Sequence
  Description of Artificial Sequence: Synthetic oligonucleotide
acaauaaguuuuccccuca

SEQ ID NO: 2984298 - RNA, 19 nt, Artificial Sequence
  Description of Artificial Sequence: Synthetic oligonucleotide
gauagaggaggucauauuu

SEQ ID NO: 2984299 - RNA, 19 nt, Artificial Sequence
  Description of Artificial Sequence: Synthetic oligonucleotide
ucaggcaccuggauucuug

SEQ ID NO: 2984300 - RNA, 19 nt, Artificial Sequence
  Description of Artificial Sequence: Synthetic oligonucleotide
ggcacaucaaaccucuuug

SEQ ID NO: 2984301 - RNA, 19 nt, Artificial Sequence
  Description of Artificial Sequence: Synthetic oligonucleotide
uccacuuucaugugcuguc

SEQ ID NO: 2984302 - RNA, 19 nt, Artificial Sequence
  Description of Artificial Sequence: Synthetic oligonucleotide
cuggagacccauaauccac

SEQ ID NO: 2984303 - RNA, 19 nt, Artificial Sequence
  Description of Artificial Sequence: Synthetic oligonucleotide
uagugugaucuggagaccc

SEQ ID NO: 2984304 - RNA, 19 nt, Artificial Sequence
  Description of Artificial Sequence: Synthetic oligonucleotide
auccaugaagucuuguuuu

SEQ ID NO: 2984305 - RNA, 19 nt, Artificial Sequence
  Description of Artificial Sequence: Synthetic oligonucleotide
ucaaauccaugaagucuug

SEQ ID NO: 2984306 - RNA, 19 nt, Artificial Sequence
  Description of Artificial Sequence: Synthetic oligonucleotide
uggggcagugaacaugucu

SEQ ID NO: 2984307 - RNA, 19 nt, Artificial Sequence
  Description of Artificial Sequence: Synthetic oligonucleotide
augugcuguccauugaaga

SEQ ID NO: 2984308 - RNA, 19 nt, Artificial Sequence
  Description of Artificial Sequence: Synthetic oligonucleotide
gagugugcuaaaugucuug

SEQ ID NO: 2984309 - RNA, 19 nt, Artificial Sequence
  Description of Artificial Sequence: Synthetic oligonucleotide
uacaggcacaucaaaccuc

SEQ ID NO: 2984310 - RNA, 19 nt, Artificial Sequence
  Description of Artificial Sequence: Synthetic oligonucleotide
caugugcuguccauugaag

SEQ ID NO: 2984311 - RNA, 19 nt, Artificial Sequence
  Description of Artificial Sequence: Synthetic oligonucleotide
uccaacagccgugagugug

SEQ ID NO: 2984312 - RNA, 19 nt, Artificial Sequence
  Description of Artificial Sequence: Synthetic oligonucleotide
ucuugauagaggaggucau

SEQ ID NO: 2984313 - RNA, 19 nt, Artificial Sequence
  Description of Artificial Sequence: Synthetic oligonucleotide
ugcuguccauugaagaaaa

SEQ ID NO: 2984314 - RNA, 19 nt, Artificial Sequence
  Description of Artificial Sequence: Synthetic oligonucleotide
uugauagaggaggucauau

SEQ ID NO: 2984315 - RNA, 19 nt, Artificial Sequence
  Description of Artificial Sequence: Synthetic oligonucleotide
aucaaauccaugaagucuu

SEQ ID NO: 2984316 - RNA, 19 nt, Artificial Sequence
  Description of Artificial Sequence: Synthetic oligonucleotide
aaaccucuuugcuggggca

SEQ ID NO: 2984317 - RNA, 19 nt, Artificial Sequence
  Description of Artificial Sequence: Synthetic oligonucleotide
aauccacuuucaugugcug

SEQ ID NO: 2984318 - RNA, 19 nt, Artificial Sequence
  Description of Artificial Sequence: Synthetic oligonucleotide
uucuugggaucaauaggac

SEQ ID NO: 2984319 - RNA, 19 nt, Artificial Sequence
  Description of Artificial Sequence: Synthetic oligonucleotide
gcuaaaugucuugauagag

SEQ ID NO: 2984320 - RNA, 19 nt, Artificial Sequence
  Description of Artificial Sequence: Synthetic oligonucleotide
auagaggaggucauauuug

SEQ ID NO: 2984321 - RNA, 19 nt, Artificial Sequence
  Description of Artificial Sequence: Synthetic oligonucleotide
aggacucuggacaauaagu

SEQ ID NO: 2984322 - RNA, 19 nt, Artificial Sequence
  Description of Artificial Sequence: Synthetic oligonucleotide
aggaggucauauuugggaa

SEQ ID NO: 2984323 - RNA, 19 nt, Artificial Sequence
  Description of Artificial Sequence: Synthetic oligonucleotide
agggacuccagaccacagg

SEQ ID NO: 2984324 - RNA, 19 nt, Artificial Sequence
  Description of Artificial Sequence: Synthetic oligonucleotide
ucaaaccucuuugcugggg

SEQ ID NO: 2984325 - RNA, 19 nt, Artificial Sequence
  Description of Artificial Sequence: Synthetic oligonucleotide
cauaauccacuuucaugug

SEQ ID NO: 2984326 - RNA, 19 nt, Artificial Sequence
  Description of Artificial Sequence: Synthetic oligonucleotide
ucuuugcuggggcagugaa

SEQ ID NO: 2984327 - RNA, 19 nt, Artificial Sequence
  Description of Artificial Sequence: Synthetic oligonucleotide
uucaugugcuguccauuga

SEQ ID NO: 2984328 - RNA, 19 nt, Artificial Sequence
  Description of Artificial Sequence: Synthetic oligonucleotide
cagugaacaugucucugag

SEQ ID NO: 2984329 - RNA, 19 nt, Artificial Sequence
  Description of Artificial Sequence: Synthetic oligonucleotide
agaccacaggcccucuggg

SEQ ID NO: 2984330 - RNA, 19 nt, Artificial Sequence
  Description of Artificial Sequence: Synthetic oligonucleotide
aucuccaacagccgugagu

SEQ ID NO: 2984331 - RNA, 19 nt, Artificial Sequence
  Description of Artificial Sequence: Synthetic oligonucleotide
ugagugugcuaaaugucuu

SEQ ID NO: 2984332 - RNA, 19 nt, Artificial Sequence
  Description of Artificial Sequence: Synthetic oligonucleotide
gaagcuuccuacaaauuua

SEQ ID NO: 2984333 - RNA, 19 nt, Artificial Sequence
  Description of Artificial Sequence: Synthetic oligonucleotide
cagaccacaggcccucugg

SEQ ID NO: 2984334 - RNA, 19 nt, Artificial Sequence
  Description of Artificial Sequence: Synthetic oligonucleotide
ugggaauauucuugggauc

SEQ ID NO: 2984335 - RNA, 19 nt, Artificial Sequence
  Description of Artificial Sequence: Synthetic oligonucleotide
gaauggacacucaggcacc

SEQ ID NO: 2984336 - RNA, 19 nt, Artificial Sequence
  Description of Artificial Sequence: Synthetic oligonucleotide
aaccucuuugcuggggcag

SEQ ID NO: 2984337 - RNA, 19 nt, Artificial Sequence
  Description of Artificial Sequence: Synthetic oligonucleotide
ggaucaauaggacucugga

SEQ ID NO: 2984338 - RNA, 19 nt, Artificial Sequence
  Description of Artificial Sequence: Synthetic oligonucleotide
cucugagggacuccagacc

SEQ ID NO: 2984339 - RNA, 19 nt, Artificial Sequence
  Description of Artificial Sequence: Synthetic oligonucleotide
cucuggacaauaaguuuuc

SEQ ID NO: 2984340 - RNA, 19 nt, Artificial Sequence
  Description of Artificial Sequence: Synthetic oligonucleotide
uuccccucauugcuccccg

SEQ ID NO: 2984341 - RNA, 19 nt, Artificial Sequence
  Description of Artificial Sequence: Synthetic oligonucleotide
agugugcuaaaugucuuga

SEQ ID NO: 2984342 - RNA, 19 nt, Artificial Sequence
  Description of Artificial Sequence: Synthetic oligonucleotide
aucaaaccucuuugcuggg

SEQ ID NO: 2984343 - RNA, 19 nt, Artificial Sequence
  Description of Artificial Sequence: Synthetic oligonucleotide
cuacaaauuuagugugauc

SEQ ID NO: 2984344 - RNA, 19 nt, Artificial Sequence
  Description of Artificial Sequence: Synthetic oligonucleotide
guucaggucccauuuccac

SEQ ID NO: 2984345 - RNA, 19 nt, Artificial Sequence
  Description of Artificial Sequence: Synthetic oligonucleotide
ugacuucaaucaaauccau

SEQ ID NO: 2984346 - RNA, 19 nt, Artificial Sequence
  Description of Artificial Sequence: Synthetic oligonucleotide
ucuugggaguacuggggcu

SEQ ID NO: 2984347 - RNA, 19 nt, Artificial Sequence
  Description of Artificial Sequence: Synthetic oligonucleotide
acucuggacaauaaguuuu

SEQ ID NO: 2984348 - RNA, 19 nt, Artificial Sequence
  Description of Artificial Sequence: Synthetic oligonucleotide
augaagucuuguuuugguu

SEQ ID NO: 2984349 - RNA, 19 nt, Artificial Sequence
  Description of Artificial Sequence: Synthetic oligonucleotide
aguuuuccccucauugcuc

SEQ ID NO: 2984350 - RNA, 19 nt, Artificial Sequence
  Description of Artificial Sequence: Synthetic oligonucleotide
ucuggacaauaaguuuucc

SEQ ID NO: 2984351 - RNA, 19 nt, Artificial Sequence
  Description of Artificial Sequence: Synthetic oligonucleotide
ccauaauccacuuucaugu

SEQ ID NO: 2984352 - RNA, 19 nt, Artificial Sequence
  Description of Artificial Sequence: Synthetic oligonucleotide
ucccauuuccacccaugac

SEQ ID NO: 2984353 - RNA, 19 nt, Artificial Sequence
  Description of Artificial Sequence: Synthetic oligonucleotide
acagccgugagugugcuaa

SEQ ID NO: 2984354 - RNA, 19 nt, Artificial Sequence
  Description of Artificial Sequence: Synthetic oligonucleotide
ucaucuccaacagccguga

SEQ ID NO: 2984355 - RNA, 19 nt, Artificial Sequence
  Description of Artificial Sequence: Synthetic oligonucleotide
ugauagaggaggucauauu

SEQ ID NO: 2984356 - RNA, 19 nt, Artificial Sequence
  Description of Artificial Sequence: Synthetic oligonucleotide
acaggcacaucaaaccucu

SEQ ID NO: 2984357 - RNA, 19 nt, Artificial Sequence
  Description of Artificial Sequence: Synthetic oligonucleotide
cccauaauccacuuucaug

SEQ ID NO: 2984358 - RNA, 19 nt, Artificial Sequence
  Description of Artificial Sequence: Synthetic oligonucleotide
agaggaggucauauuuggg

SEQ ID NO: 2984359 - RNA, 19 nt, Artificial Sequence
  Description of Artificial Sequence: Synthetic oligonucleotide
guagaugacuucaaucaaa

SEQ ID NO: 2984360 - RNA, 19 nt, Artificial Sequence
  Description of Artificial Sequence: Synthetic oligonucleotide
uugaagcuuccuacaaauu

SEQ ID NO: 2984361 - RNA, 19 nt, Artificial Sequence
  Description of Artificial Sequence: Synthetic oligonucleotide
acuuucaugugcuguccau

SEQ ID NO: 2984362 - RNA, 19 nt, Artificial Sequence
  Description of Artificial Sequence: Synthetic oligonucleotide
caggcaccuggauucuugg

SEQ ID NO: 2984363 - RNA, 19 nt, Artificial Sequence
  Description of Artificial Sequence: Synthetic oligonucleotide
aauggacacucaggcaccu

SEQ ID NO: 2984364 - RNA, 19 nt, Artificial Sequence
  Description of Artificial Sequence: Synthetic oligonucleotide
gggaauauucuugggauca

SEQ ID NO: 2984365 - RNA, 19 nt, Artificial Sequence
  Description of Artificial Sequence: Synthetic oligonucleotide
ugagggacuccagaccaca

SEQ ID NO: 2984366 - RNA, 19 nt, Artificial Sequence
  Description of Artificial Sequence: Synthetic oligonucleotide
ugaggcucucagggaaugg

SEQ ID NO: 2984367 - RNA, 19 nt, Artificial Sequence
  Description of Artificial Sequence: Synthetic oligonucleotide
uugggaucaauaggacucu

SEQ ID NO: 2984368 - RNA, 19 nt, Artificial Sequence
  Description of Artificial Sequence: Synthetic oligonucleotide
cauauuugggaauauucuu

SEQ ID NO: 2984369 - RNA, 19 nt, Artificial Sequence
  Description of Artificial Sequence: Synthetic oligonucleotide
uccccgguagaugacuuca

SEQ ID NO: 2984370 - RNA, 19 nt, Artificial Sequence
  Description of Artificial Sequence: Synthetic oligonucleotide
aggcacaucaaaccucuuu

SEQ ID NO: 2984371 - RNA, 19 nt, Artificial Sequence
  Description of Artificial Sequence: Synthetic oligonucleotide
gcaccuggauucuugggag

SEQ ID NO: 2984372 - RNA, 19 nt, Artificial Sequence
  Description of Artificial Sequence: Synthetic oligonucleotide
ggguucaggucccauuucc

SEQ ID NO: 2984373 - RNA, 19 nt, Artificial Sequence
  Description of Artificial Sequence: Synthetic oligonucleotide
cuuugcuggggcagugaac

SEQ ID NO: 2984374 - RNA, 19 nt, Artificial Sequence
  Description of Artificial Sequence: Synthetic oligonucleotide
uuuccccucauugcucccc

SEQ ID NO: 2984375 - RNA, 19 nt, Artificial Sequence
  Description of Artificial Sequence: Synthetic oligonucleotide
aggcaccuggauucuuggg

SEQ ID NO: 2984376 - RNA, 19 nt, Artificial Sequence
  Description of Artificial Sequence: Synthetic oligonucleotide
ucugaggcucucagggaau

SEQ ID NO: 2984377 - RNA, 19 nt, Artificial Sequence
  Description of Artificial Sequence: Synthetic oligonucleotide
ugcgcaggggccauugauu

SEQ ID NO: 2984378 - RNA, 19 nt, Artificial Sequence
  Description of Artificial Sequence: Synthetic oligonucleotide
ucuggguucaggucccauu

SEQ ID NO: 2984379 - RNA, 19 nt, Artificial Sequence
  Description of Artificial Sequence: Synthetic oligonucleotide
ugacucuuuucaucuccaa

SEQ ID NO: 2984380 - RNA, 19 nt, Artificial Sequence
  Description of Artificial Sequence: Synthetic oligonucleotide
auuuccacccaugacucuu

SEQ ID NO: 2984381 - RNA, 19 nt, Artificial Sequence
  Description of Artificial Sequence: Synthetic oligonucleotide
accacaggcccucuggguu

SEQ ID NO: 2984382 - RNA, 19 nt, Artificial Sequence
  Description of Artificial Sequence: Synthetic oligonucleotide
gcacaucaaaccucuuugc

SEQ ID NO: 2984383 - RNA, 19 nt, Artificial Sequence
  Description of Artificial Sequence: Synthetic oligonucleotide
aggcucucagggaauggac

SEQ ID NO: 2984384 - RNA, 19 nt, Artificial Sequence
  Description of Artificial Sequence: Synthetic oligonucleotide
uuuuccccucauugcuccc

SEQ ID NO: 2984385 - RNA, 19 nt, Artificial Sequence
  Description of Artificial Sequence: Synthetic oligonucleotide
ggggcuucugcgcaggggc

SEQ ID NO: 2984386 - RNA, 19 nt, Artificial Sequence
  Description of Artificial Sequence: Synthetic oligonucleotide
acacucaggcaccuggauu

SEQ ID NO: 2984387 - RNA, 19 nt, Artificial Sequence
  Description of Artificial Sequence: Synthetic oligonucleotide
auccacuuucaugugcugu

SEQ ID NO: 2984388 - RNA, 19 nt, Artificial Sequence
  Description of Artificial Sequence: Synthetic oligonucleotide
gaggucauauuugggaaua

SEQ ID NO: 2984389 - RNA, 19 nt, Artificial Sequence
  Description of Artificial Sequence: Synthetic oligonucleotide
aacaugucucugagggacu

SEQ ID NO: 2984390 - RNA, 19 nt, Artificial Sequence
  Description of Artificial Sequence: Synthetic oligonucleotide
gggaucaauaggacucugg

SEQ ID NO: 2984391 - RNA, 19 nt, Artificial Sequence
  Description of Artificial Sequence: Synthetic oligonucleotide
gaagucuuguuuugguuuu

SEQ ID NO: 2984392 - RNA, 19 nt, Artificial Sequence
  Description of Artificial Sequence: Synthetic oligonucleotide
ccauuuccacccaugacuc

SEQ ID NO: 2984393 - RNA, 19 nt, Artificial Sequence
  Description of Artificial Sequence: Synthetic oligonucleotide
gguagaugacuucaaucaa

SEQ ID NO: 2984394 - RNA, 19 nt, Artificial Sequence
  Description of Artificial Sequence: Synthetic oligonucleotide
ggcaccuggauucuuggga

SEQ ID NO: 2984395 - RNA, 19 nt, Artificial Sequence
  Description of Artificial Sequence: Synthetic oligonucleotide
cgguagaugacuucaauca

SEQ ID NO: 2984396 - RNA, 19 nt, Artificial Sequence
  Description of Artificial Sequence: Synthetic oligonucleotide
ugucuugauagaggagguc

SEQ ID NO: 2984397 - RNA, 19 nt, Artificial Sequence
  Description of Artificial Sequence: Synthetic oligonucleotide
uuuccacccaugacucuuu

SEQ ID NO: 2984398 - RNA, 19 nt, Artificial Sequence
  Description of Artificial Sequence: Synthetic oligonucleotide
augucuugauagaggaggu

SEQ ID NO: 2984399 - RNA, 19 nt, Artificial Sequence
  Description of Artificial Sequence: Synthetic oligonucleotide
gcucucagggaauggacac

SEQ ID NO: 2984400 - RNA, 19 nt, Artificial Sequence
  Description of Artificial Sequence: Synthetic oligonucleotide
augucucugagggacucca

SEQ ID NO: 2984401 - RNA, 19 nt, Artificial Sequence
  Description of Artificial Sequence: Synthetic oligonucleotide
uacuggggcuucugcgcag

SEQ ID NO: 2984402 - RNA, 19 nt, Artificial Sequence
  Description of Artificial Sequence: Synthetic oligonucleotide
gacucuggacaauaaguuu

SEQ ID NO: 2984403 - RNA, 19 nt, Artificial Sequence
  Description of Artificial Sequence: Synthetic oligonucleotide
aggggccauugauuacagg

SEQ ID NO: 2984404 - RNA, 19 nt, Artificial Sequence
  Description of Artificial Sequence: Synthetic oligonucleotide
gcccucuggguucaggucc

SEQ ID NO: 2984405 - RNA, 19 nt, Artificial Sequence
  Description of Artificial Sequence: Synthetic oligonucleotide
uggguucaggucccauuuc

SEQ ID NO: 2984406 - RNA, 19 nt, Artificial Sequence
  Description of Artificial Sequence: Synthetic oligonucleotide
uggggcuucugcgcagggg

SEQ ID NO: 2984407 - RNA, 19 nt, Artificial Sequence
  Description of Artificial Sequence: Synthetic oligonucleotide
augacucuuuucaucucca

SEQ ID NO: 2984408 - RNA, 19 nt, Artificial Sequence
  Description of Artificial Sequence: Synthetic oligonucleotide
ggaguacuggggcuucugc

SEQ ID NO: 2984409 - RNA, 19 nt, Artificial Sequence
  Description of Artificial Sequence: Synthetic oligonucleotide
gaggcucucagggaaugga

SEQ ID NO: 2984410 - RNA, 19 nt, Artificial Sequence
  Description of Artificial Sequence: Synthetic oligonucleotide
gcagugaacaugucucuga

SEQ ID NO: 2984411 - RNA, 19 nt, Artificial Sequence
  Description of Artificial Sequence: Synthetic oligonucleotide
ccacccaugacucuuuuca

SEQ ID NO: 2984412 - RNA, 19 nt, Artificial Sequence
  Description of Artificial Sequence: Synthetic oligonucleotide
cucugaggcucucagggaa

SEQ ID NO: 2984413 - RNA, 19 nt, Artificial Sequence
  Description of Artificial Sequence: Synthetic oligonucleotide
caggggccauugauuacag

SEQ ID NO: 2984414 - RNA, 19 nt, Artificial Sequence
  Description of Artificial Sequence: Synthetic oligonucleotide
ggacaauaaguuuuccccu

SEQ ID NO: 2984415 - RNA, 19 nt, Artificial Sequence
  Description of Artificial Sequence: Synthetic oligonucleotide
ugggaucaauaggacucug

SEQ ID NO: 2984416 - RNA, 19 nt, Artificial Sequence
  Description of Artificial Sequence: Synthetic oligonucleotide
uucugcgcaggggccauug

SEQ ID NO: 2984417 - RNA, 19 nt, Artificial Sequence
  Description of Artificial Sequence: Synthetic oligonucleotide
ccgguagaugacuucaauc

SEQ ID NO: 2984418 - RNA, 19 nt, Artificial Sequence
  Description of Artificial Sequence: Synthetic oligonucleotide
gacccauaauccacuuuca

SEQ ID NO: 2984419 - RNA, 19 nt, Artificial Sequence
  Description of Artificial Sequence: Synthetic oligonucleotide
acuggggcuucugcgcagg

SEQ ID NO: 2984420 - RNA, 19 nt, Artificial Sequence
  Description of Artificial Sequence: Synthetic oligonucleotide
gagggacuccagaccacag

SEQ ID NO: 2984421 - RNA, 19 nt, Artificial Sequence
  Description of Artificial Sequence: Synthetic oligonucleotide
uccacccaugacucuuuuc

SEQ ID NO: 2984422 - RNA, 19 nt, Artificial Sequence
  Description of Artificial Sequence: Synthetic oligonucleotide
ccaacagccgugagugugc

SEQ ID NO: 2984423 - RNA, 19 nt, Artificial Sequence
  Description of Artificial Sequence: Synthetic oligonucleotide
ccucauugcuccccgguag

SEQ ID NO: 2984424 - RNA, 19 nt, Artificial Sequence
  Description of Artificial Sequence: Synthetic oligonucleotide
cauugcuccccgguagaug

SEQ ID NO: 2984425 - RNA, 19 nt, Artificial Sequence
  Description of Artificial Sequence: Synthetic oligonucleotide
gccgugagugugcuaaaug

SEQ ID NO: 2984426 - RNA, 19 nt, Artificial Sequence
  Description of Artificial Sequence: Synthetic oligonucleotide
ucugcgcaggggccauuga

SEQ ID NO: 2984427 - RNA, 19 nt, Artificial Sequence
  Description of Artificial Sequence: Synthetic oligonucleotide
caugucucugagggacucc

SEQ ID NO: 2984428 - RNA, 19 nt, Artificial Sequence
  Description of Artificial Sequence: Synthetic oligonucleotide
gugcuguccauugaagaaa

SEQ ID NO: 2984429 - RNA, 19 nt, Artificial Sequence
  Description of Artificial Sequence: Synthetic oligonucleotide
cugagggacuccagaccac

SEQ ID NO: 2984430 - RNA, 19 nt, Artificial Sequence
  Description of Artificial Sequence: Synthetic oligonucleotide
cauugauuacaggcacauc

SEQ ID NO: 2984431 - RNA, 19 nt, Artificial Sequence
  Description of Artificial Sequence: Synthetic oligonucleotide
uccccucauugcuccccgg

SEQ ID NO: 2984432 - RNA, 19 nt, Artificial Sequence
  Description of Artificial Sequence: Synthetic oligonucleotide
agugugaucuggagaccca

SEQ ID NO: 2984433 - RNA, 19 nt, Artificial Sequence
  Description of Artificial Sequence: Synthetic oligonucleotide
ugcuccccgguagaugacu

SEQ ID NO: 2984434 - RNA, 19 nt, Artificial Sequence
  Description of Artificial Sequence: Synthetic oligonucleotide
cucauugcuccccgguaga

SEQ ID NO: 2984435 - RNA, 19 nt, Artificial Sequence
  Description of Artificial Sequence: Synthetic oligonucleotide
cugaggcucucagggaaug

SEQ ID NO: 2984436 - RNA, 19 nt, Artificial Sequence
  Description of Artificial Sequence: Synthetic oligonucleotide
ucauugcuccccgguagau

SEQ ID NO: 2984437 - RNA, 19 nt, Artificial Sequence
  Description of Artificial Sequence: Synthetic oligonucleotide
gaauauucuugggaucaau

SEQ ID NO: 2984438 - RNA, 19 nt, Artificial Sequence
  Description of Artificial Sequence: Synthetic oligonucleotide
cacuuucaugugcugucca

SEQ ID NO: 2984439 - RNA, 19 nt, Artificial Sequence
  Description of Artificial Sequence: Synthetic oligonucleotide
cccauuuccacccaugacu

SEQ ID NO: 2984440 - RNA, 19 nt, Artificial Sequence
  Description of Artificial Sequence: Synthetic oligonucleotide
gggaauggacacucaggca

SEQ ID NO: 2984441 - RNA, 19 nt, Artificial Sequence
  Description of Artificial Sequence: Synthetic oligonucleotide
cgugagugugcuaaauguc

SEQ ID NO: 2984442 - RNA, 19 nt, Artificial Sequence
  Description of Artificial Sequence: Synthetic oligonucleotide
ggcagugaacaugucucug

SEQ ID NO: 2984443 - RNA, 19 nt, Artificial Sequence
  Description of Artificial Sequence: Synthetic oligonucleotide
accuggauucuugggagua

SEQ ID NO: 2984444 - RNA, 19 nt, Artificial Sequence
  Description of Artificial Sequence: Synthetic oligonucleotide
gggccauugauuacaggca

SEQ ID NO: 2984445 - RNA, 19 nt, Artificial Sequence
  Description of Artificial Sequence: Synthetic oligonucleotide
uuccacccaugacucuuuu

SEQ ID NO: 2984446 - RNA, 19 nt, Artificial Sequence
  Description of Artificial Sequence: Synthetic oligonucleotide
agcuuccuacaaauuuagu

SEQ ID NO: 2984447 - RNA, 19 nt, Artificial Sequence
  Description of Artificial Sequence: Synthetic oligonucleotide
caucuccaacagccgugag

SEQ ID NO: 2984448 - RNA, 19 nt, Artificial Sequence
  Description of Artificial Sequence: Synthetic oligonucleotide
uugggaguacuggggcuuc

SEQ ID NO: 2984449 - RNA, 19 nt, Artificial Sequence
  Description of Artificial Sequence: Synthetic oligonucleotide
uugcuccccgguagaugac

SEQ ID NO: 2984450 - RNA, 19 nt, Artificial Sequence
  Description of Artificial Sequence: Synthetic oligonucleotide
gcaggggccauugauuaca

SEQ ID NO: 2984451 - RNA, 19 nt, Artificial Sequence
  Description of Artificial Sequence: Synthetic oligonucleotide
aggucauauuugggaauau

SEQ ID NO: 2984452 - RNA, 19 nt, Artificial Sequence
  Description of Artificial Sequence: Synthetic oligonucleotide
ccugacugcucugaggcuc

SEQ ID NO: 2984453 - RNA, 19 nt, Artificial Sequence
  Description of Artificial Sequence: Synthetic oligonucleotide
cuugauagaggaggucaua

SEQ ID NO: 2984454 - RNA, 19 nt, Artificial Sequence
  Description of Artificial Sequence: Synthetic oligonucleotide
cccaugacucuuuucaucu

SEQ ID NO: 2984455 - RNA, 19 nt, Artificial Sequence
  Description of Artificial Sequence: Synthetic oligonucleotide
acuccagaccacaggcccu

SEQ ID NO: 2984456 - RNA, 19 nt, Artificial Sequence
  Description of Artificial Sequence: Synthetic oligonucleotide
cuccccgguagaugacuuc

SEQ ID NO: 2984457 - RNA, 19 nt, Artificial Sequence
  Description of Artificial Sequence: Synthetic oligonucleotide
cucagggaauggacacuca

SEQ ID NO: 2984458 - RNA, 19 nt, Artificial Sequence
  Description of Artificial Sequence: Synthetic oligonucleotide
accucuuugcuggggcagu

SEQ ID NO: 2984459 - RNA, 19 nt, Artificial Sequence
  Description of Artificial Sequence: Synthetic oligonucleotide
cuccagaccacaggcccuc

SEQ ID NO: 2984460 - RNA, 19 nt, Artificial Sequence
  Description of Artificial Sequence: Synthetic oligonucleotide
aacagccgugagugugcua

SEQ ID NO: 2984461 - RNA, 19 nt, Artificial Sequence
  Description of Artificial Sequence: Synthetic oligonucleotide
cuggggcuucugcgcaggg

SEQ ID NO: 2984462 - RNA, 19 nt, Artificial Sequence
  Description of Artificial Sequence: Synthetic oligonucleotide
acucaggcaccuggauucu

SEQ ID NO: 2984463 - RNA, 19 nt, Artificial Sequence
  Description of Artificial Sequence: Synthetic oligonucleotide
aggucccauuuccacccau

SEQ ID NO: 2984464 - RNA, 19 nt, Artificial Sequence
  Description of Artificial Sequence: Synthetic oligonucleotide
gaccacaggcccucugggu

SEQ ID NO: 2984465 - RNA, 19 nt, Artificial Sequence
  Description of Artificial Sequence: Synthetic oligonucleotide
uugcuggggcagugaacau

SEQ ID NO: 2984466 - RNA, 19 nt, Artificial Sequence
  Description of Artificial Sequence: Synthetic oligonucleotide
ccacuuucaugugcugucc

SEQ ID NO: 2984467 - RNA, 19 nt, Artificial Sequence
  Description of Artificial Sequence: Synthetic oligonucleotide
ggcucucagggaauggaca

SEQ ID NO: 2984468 - RNA, 19 nt, Artificial Sequence
  Description of Artificial Sequence: Synthetic oligonucleotide
gguucaggucccauuucca

SEQ ID NO: 2984469 - RNA, 19 nt, Artificial Sequence
  Description of Artificial Sequence: Synthetic oligonucleotide
gugugcuaaaugucuugau

SEQ ID NO: 2984470 - RNA, 19 nt, Artificial Sequence
  Description of Artificial Sequence: Synthetic oligonucleotide
ccgugagugugcuaaaugu

SEQ ID NO: 2984471 - RNA, 19 nt, Artificial Sequence
  Description of Artificial Sequence: Synthetic oligonucleotide
cuggguucaggucccauuu

SEQ ID NO: 2984472 - RNA, 19 nt, Artificial Sequence
  Description of Artificial Sequence: Synthetic oligonucleotide
agccgugagugugcuaaau

SEQ ID NO: 2984473 - RNA, 19 nt, Artificial Sequence
  Description of Artificial Sequence: Synthetic oligonucleotide
ugggaguacuggggcuucu

SEQ ID NO: 2984474 - RNA, 19 nt, Artificial Sequence
  Description of Artificial Sequence: Synthetic oligonucleotide
caauaaguuuuccccucau

SEQ ID NO: 2984475 - RNA, 19 nt, Artificial Sequence
  Description of Artificial Sequence: Synthetic oligonucleotide
gagacccauaauccacuuu

SEQ ID NO: 2984476 - RNA, 19 nt, Artificial Sequence
  Description of Artificial Sequence: Synthetic oligonucleotide
cccucuggguucagguccc

SEQ ID NO: 2984477 - RNA, 19 nt, Artificial Sequence
  Description of Artificial Sequence: Synthetic oligonucleotide
ggacucuggacaauaaguu

SEQ ID NO: 2984478 - RNA, 19 nt, Artificial Sequence
  Description of Artificial Sequence: Synthetic oligonucleotide
ggaggucauauuugggaau

SEQ ID NO: 2984479 - RNA, 19 nt, Artificial Sequence
  Description of Artificial Sequence: Synthetic oligonucleotide
gacugcucugaggcucuca

SEQ ID NO: 2984480 - RNA, 19 nt, Artificial Sequence
  Description of Artificial Sequence: Synthetic oligonucleotide
cuggauucuugggaguacu

SEQ ID NO: 2984481 - RNA, 19 nt, Artificial Sequence
  Description of Artificial Sequence: Synthetic oligonucleotide
caggcccucuggguucagg

SEQ ID NO: 2984482 - RNA, 19 nt, Artificial Sequence
  Description of Artificial Sequence: Synthetic oligonucleotide
ccaugacucuuuucaucuc

SEQ ID NO: 2984483 - RNA, 19 nt, Artificial Sequence
  Description of Artificial Sequence: Synthetic oligonucleotide
ggaauauucuugggaucaa

SEQ ID NO: 2984484 - RNA, 19 nt, Artificial Sequence
  Description of Artificial Sequence: Synthetic oligonucleotide
caaauccaugaagucuugu

SEQ ID NO: 2984485 - RNA, 19 nt, Artificial Sequence
  Description of Artificial Sequence: Synthetic oligonucleotide
cugacugcucugaggcucu

SEQ ID NO: 2984486 - RNA, 19 nt, Artificial Sequence
  Description of Artificial Sequence: Synthetic oligonucleotide
gcuggggcagugaacaugu

SEQ ID NO: 2984487 - RNA, 19 nt, Artificial Sequence
  Description of Artificial Sequence: Synthetic oligonucleotide
gcgcaggggccauugauua

SEQ ID NO: 2984488 - RNA, 19 nt, Artificial Sequence
  Description of Artificial Sequence: Synthetic oligonucleotide
gccauugauuacaggcaca

SEQ ID NO: 2984489 - RNA, 19 nt, Artificial Sequence
  Description of Artificial Sequence: Synthetic oligonucleotide
cuuucaugugcuguccauu

SEQ ID NO: 2984490 - RNA, 19 nt, Artificial Sequence
  Description of Artificial Sequence: Synthetic oligonucleotide
cucuuugcuggggcaguga

SEQ ID NO: 2984491 - RNA, 19 nt, Artificial Sequence
  Description of Artificial Sequence: Synthetic oligonucleotide
cauuuccacccaugacucu

SEQ ID NO: 2984492 - RNA, 19 nt, Artificial Sequence
  Description of Artificial Sequence: Synthetic oligonucleotide
gggaguacuggggcuucug

SEQ ID NO: 2984493 - RNA, 19 nt, Artificial Sequence
  Description of Artificial Sequence: Synthetic oligonucleotide
uccagaccacaggcccucu

SEQ ID NO: 2984494 - RNA, 19 nt, Artificial Sequence
  Description of Artificial Sequence: Synthetic oligonucleotide
ccacaggcccucuggguuc

SEQ ID NO: 2984495 - RNA, 19 nt, Artificial Sequence
  Description of Artificial Sequence: Synthetic oligonucleotide
ccuggauucuugggaguac

SEQ ID NO: 2984496 - RNA, 19 nt, Artificial Sequence
  Description of Artificial Sequence: Synthetic oligonucleotide
cuggggcagugaacauguc

SEQ ID NO: 2984497 - RNA, 19 nt, Artificial Sequence
  Description of Artificial Sequence: Synthetic oligonucleotide
ggcccucuggguucagguc

SEQ ID NO: 2984498 - RNA, 19 nt, Artificial Sequence
  Description of Artificial Sequence: Synthetic oligonucleotide
ggacacucaggcaccugga

SEQ ID NO: 2984499 - RNA, 19 nt, Artificial Sequence
  Description of Artificial Sequence: Synthetic oligonucleotide
cacccaugacucuuuucau

SEQ ID NO: 2984500 - RNA, 19 nt, Artificial Sequence
  Description of Artificial Sequence: Synthetic oligonucleotide
gggcagugaacaugucucu

SEQ ID NO: 2984501 - RNA, 19 nt, Artificial Sequence
  Description of Artificial Sequence: Synthetic oligonucleotide
ccuacaaauuuagugugau

SEQ ID NO: 2984502 - RNA, 19 nt, Artificial Sequence
  Description of Artificial Sequence: Synthetic oligonucleotide
ggucauauuugggaauauu

SEQ ID NO: 2984503 - RNA, 19 nt, Artificial Sequence
  Description of Artificial Sequence: Synthetic oligonucleotide
caccuggauucuugggagu

SEQ ID NO: 2984504 - RNA, 19 nt, Artificial Sequence
  Description of Artificial Sequence: Synthetic oligonucleotide
ugacugcucugaggcucuc

SEQ ID NO: 2984505 - RNA, 19 nt, Artificial Sequence
  Description of Artificial Sequence: Synthetic oligonucleotide
cucucagggaauggacacu

SEQ ID NO: 2984506 - RNA, 19 nt, Artificial Sequence
  Description of Artificial Sequence: Synthetic oligonucleotide
gggcuucugcgcaggggcc

SEQ ID NO: 2984507 - RNA, 19 nt, Artificial Sequence
  Description of Artificial Sequence: Synthetic oligonucleotide
ccauugauuacaggcacau

SEQ ID NO: 2984508 - RNA, 19 nt, Artificial Sequence
  Description of Artificial Sequence: Synthetic oligonucleotide
caggucccauuuccaccca

SEQ ID NO: 2984509 - RNA, 19 nt, Artificial Sequence
  Description of Artificial Sequence: Synthetic oligonucleotide
cugcgcaggggccauugau

SEQ ID NO: 2984510 - RNA, 19 nt, Artificial Sequence
  Description of Artificial Sequence: Synthetic oligonucleotide
ggcuucugcgcaggggcca

SEQ ID NO: 2984511 - RNA, 19 nt, Artificial Sequence
  Description of Artificial Sequence: Synthetic oligonucleotide
cacaggcccucuggguuca

SEQ ID NO: 2984512 - RNA, 19 nt, Artificial Sequence
  Description of Artificial Sequence: Synthetic oligonucleotide
ccagaccacaggcccucug

SEQ ID NO: 2984513 - RNA, 19 nt, Artificial Sequence
  Description of Artificial Sequence: Synthetic oligonucleotide
cagccgugagugugcuaaa

SEQ ID NO: 2984514 - RNA, 19 nt, Artificial Sequence
  Description of Artificial Sequence: Synthetic oligonucleotide
caauaggacucuggacaau

SEQ ID NO: 2984515 - RNA, 19 nt, Artificial Sequence
  Description of Artificial Sequence: Synthetic oligonucleotide
cgcaggggccauugauuac

SEQ ID NO: 2984516 - RNA, 19 nt, Artificial Sequence
  Description of Artificial Sequence: Synthetic oligonucleotide
caacagccgugagugugcu

SEQ ID NO: 2984517 - RNA, 19 nt, Artificial Sequence
  Description of Artificial Sequence: Synthetic oligonucleotide
cuccaacagccgugagugu

SEQ ID NO: 2984518 - RNA, 19 nt, Artificial Sequence
  Description of Artificial Sequence: Synthetic oligonucleotide
cccucauugcuccccggua

SEQ ID NO: 2984519 - RNA, 19 nt, Artificial Sequence
  Description of Artificial Sequence: Synthetic oligonucleotide
ccccgguagaugacuucaa

SEQ ID NO: 2984520 - RNA, 19 nt, Artificial Sequence
  Description of Artificial Sequence: Synthetic oligonucleotide
cccgguagaugacuucaau

SEQ ID NO: 2984521 - RNA, 19 nt, Artificial Sequence
  Description of Artificial Sequence: Synthetic oligonucleotide
cucuggguucaggucccau

SEQ ID NO: 2984522 - RNA, 19 nt, Artificial Sequence
  Description of Artificial Sequence: Synthetic oligonucleotide
caggcacaucaaaccucuu

SEQ ID NO: 2984523 - RNA, 19 nt, Artificial Sequence
  Description of Artificial Sequence: Synthetic oligonucleotide
ccccucauugcuccccggu

SEQ ID NO: 2984524 - RNA, 19 nt, Artificial Sequence
  Description of Artificial Sequence: Synthetic oligonucleotide
cucaggcaccuggauucuu

SEQ ID NO: 2984525 - RNA, 19 nt, Artificial Sequence
  Description of Artificial Sequence: Synthetic oligonucleotide
gcuccccgguagaugacuu

SEQ ID NO: 2984526 - RNA, 19 nt, Artificial Sequence
  Description of Artificial Sequence: Synthetic oligonucleotide
gcuucugcgcaggggccau

SEQ ID NO: 2984527 - RNA, 19 nt, Artificial Sequence
  Description of Artificial Sequence: Synthetic oligonucleotide
ccucuggguucagguccca

SEQ ID NO: 2984528 - RNA, 19 nt, Artificial Sequence
  Description of Artificial Sequence: Synthetic oligonucleotide
cuucugcgcaggggccauu

SEQ ID NO: 2984529 - RNA, 19 nt, Artificial Sequence
  Description of Artificial Sequence: Synthetic oligonucleotide
ucaaauuucacucaucacc

SEQ ID NO: 2984530 - RNA, 19 nt, Artificial Sequence
  Description of Artificial Sequence: Synthetic oligonucleotide
acaaauucugcacacauac

SEQ ID NO: 2984531 - RNA, 19 nt, Artificial Sequence
  Description of Artificial Sequence: Synthetic oligonucleotide
auuuaagaaguccaaaacg

SEQ ID NO: 2984532 - RNA, 19 nt, Artificial Sequence
  Description of Artificial Sequence: Synthetic oligonucleotide
uccaauguaaggcagaaag

SEQ ID NO: 2984533 - RNA, 19 nt, Artificial Sequence
  Description of Artificial Sequence: Synthetic oligonucleotide
uuuaacaucguuuacaaau

SEQ ID NO: 2984534 - RNA, 19 nt, Artificial Sequence
  Description of Artificial Sequence: Synthetic oligonucleotide
aaacauauuuaagaagucc

SEQ ID NO: 2984535 - RNA, 19 nt, Artificial Sequence
  Description of Artificial Sequence: Synthetic oligonucleotide
uuuaagaaguccaaaacga

SEQ ID NO: 2984536 - RNA, 19 nt, Artificial Sequence
  Description of Artificial Sequence: Synthetic oligonucleotide
aacuauuccuguuguaggc

SEQ ID NO: 2984537 - RNA, 19 nt, Artificial Sequence
  Description of Artificial Sequence: Synthetic oligonucleotide
uuuaauucuuccuaacucc

SEQ ID NO: 2984538 - RNA, 19 nt, Artificial Sequence
  Description of Artificial Sequence: Synthetic oligonucleotide
aauugcguauuuaacaucg

SEQ ID NO: 2984539 - RNA, 19 nt, Artificial Sequence
  Description of Artificial Sequence: Synthetic oligonucleotide
acgaaggucaacuaacugc

SEQ ID NO: 2984540 - RNA, 19 nt, Artificial Sequence
  Description of Artificial Sequence: Synthetic oligonucleotide
auaaauugcguauuuaaca

SEQ ID NO: 2984541 - RNA, 19 nt, Artificial Sequence
  Description of Artificial Sequence: Synthetic oligonucleotide
ucagguauagcuuuguuga

SEQ ID NO: 2984542 - RNA, 19 nt, Artificial Sequence
  Description of Artificial Sequence: Synthetic oligonucleotide
uuuguugagcaaacgaagg

SEQ ID NO: 2984543 - RNA, 19 nt, Artificial Sequence
  Description of Artificial Sequence: Synthetic oligonucleotide
aaaacuauggacuuuucuu

SEQ ID NO: 2984544 - RNA, 19 nt, Artificial Sequence
  Description of Artificial Sequence: Synthetic oligonucleotide
aaauucugcacacauacaa

SEQ ID NO: 2984545 - RNA, 19 nt, Artificial Sequence
  Description of Artificial Sequence: Synthetic oligonucleotide
acacauacaaguuuuccac

SEQ ID NO: 2984546 - RNA, 19 nt, Artificial Sequence
  Description of Artificial Sequence: Synthetic oligonucleotide
uuuuaauucuuccuaacuc

SEQ ID NO: 2984547 - RNA, 19 nt, Artificial Sequence
  Description of Artificial Sequence: Synthetic oligonucleotide
uauuuaagaaguccaaaac

SEQ ID NO: 2984548 - RNA, 19 nt, Artificial Sequence
  Description of Artificial Sequence: Synthetic oligonucleotide
ucucaaauuucacucauca

SEQ ID NO: 2984549 - RNA, 19 nt, Artificial Sequence
  Description of Artificial Sequence: Synthetic oligonucleotide
uuucuauagaacaugcacu

SEQ ID NO: 2984550 - RNA, 19 nt, Artificial Sequence
  Description of Artificial Sequence: Synthetic oligonucleotide
aagaaguccaaaacgaguc

SEQ ID NO: 2984551 - RNA, 19 nt, Artificial Sequence
  Description of Artificial Sequence: Synthetic oligonucleotide
cuuucuauagaacaugcac

SEQ ID NO: 2984552 - RNA, 19 nt, Artificial Sequence
  Description of Artificial Sequence: Synthetic oligonucleotide
uuaagaaguccaaaacgag

SEQ ID NO: 2984553 - RNA, 19 nt, Artificial Sequence
  Description of Artificial Sequence: Synthetic oligonucleotide
acaaguuuuccacagcuag

SEQ ID NO: 2984554 - RNA, 19 nt, Artificial Sequence
  Description of Artificial Sequence: Synthetic oligonucleotide
uucuauagaacaugcacug

SEQ ID NO: 2984555 - RNA, 19 nt, Artificial Sequence
  Description of Artificial Sequence: Synthetic oligonucleotide
aaauugcguauuuaacauc

SEQ ID NO: 2984556 - RNA, 19 nt, Artificial Sequence
  Description of Artificial Sequence: Synthetic oligonucleotide
ucuacaaauaucucaauuu

SEQ ID NO: 2984557 - RNA, 19 nt, Artificial Sequence
  Description of Artificial Sequence: Synthetic oligonucleotide
ucaacuaacugcccugagg

SEQ ID NO: 2984558 - RNA, 19 nt, Artificial Sequence
  Description of Artificial Sequence: Synthetic oligonucleotide
aauucuuccuaacuccaug

SEQ ID NO: 2984559 - RNA, 19 nt, Artificial Sequence
  Description of Artificial Sequence: Synthetic oligonucleotide
aacuccauggcauuguuaa

SEQ ID NO: 2984560 - RNA, 19 nt, Artificial Sequence
  Description of Artificial Sequence: Synthetic oligonucleotide
aaggcagaaagaguuggcc

SEQ ID NO: 2984561 - RNA, 19 nt, Artificial Sequence
  Description of Artificial Sequence: Synthetic oligonucleotide
acuaacugcccugaggucc

SEQ ID NO: 2984562 - RNA, 19 nt, Artificial Sequence
  Description of Artificial Sequence: Synthetic oligonucleotide
ucuucaggaaucuacaaau

SEQ ID NO: 2984563 - RNA, 19 nt, Artificial Sequence
  Description of Artificial Sequence: Synthetic oligonucleotide
uaaauugcguauuuaacau

SEQ ID NO: 2984564 - RNA, 19 nt, Artificial Sequence
  Description of Artificial Sequence: Synthetic oligonucleotide
uauuuaacaucguuuacaa

SEQ ID NO: 2984565 - RNA, 19 nt, Artificial Sequence
  Description of Artificial Sequence: Synthetic oligonucleotide
auauuuaagaaguccaaaa

SEQ ID NO: 2984566 - RNA, 19 nt, Artificial Sequence
  Description of Artificial Sequence: Synthetic oligonucleotide
uaagaaguccaaaacgagu

SEQ ID NO: 2984567 - RNA, 19 nt, Artificial Sequence
  Description of Artificial Sequence: Synthetic oligonucleotide
aaaacauauuuaagaaguc

SEQ ID NO: 2984568 - RNA, 19 nt, Artificial Sequence
  Description of Artificial Sequence: Synthetic oligonucleotide
cuuuguugagcaaacgaag

SEQ ID NO: 2984569 - RNA, 19 nt, Artificial Sequence
  Description of Artificial Sequence: Synthetic oligonucleotide
uuguuaagggcagaggagg

SEQ ID NO: 2984570 - RNA, 19 nt, Artificial Sequence
  Description of Artificial Sequence: Synthetic oligonucleotide
cacagcuagaaaacuaugg

SEQ ID NO: 2984571 - RNA, 19 nt, Artificial Sequence
  Description of Artificial Sequence: Synthetic oligonucleotide
uaaucuucaggaaucuaca

SEQ ID NO: 2984572 - RNA, 19 nt, Artificial Sequence
  Description of Artificial Sequence: Synthetic oligonucleotide
caauguaaggcagaaagag

SEQ ID NO: 2984573 - RNA, 19 nt, Artificial Sequence
  Description of Artificial Sequence: Synthetic oligonucleotide
uggacuuuucuuuuaauuc

SEQ ID NO: 2984574 - RNA, 19 nt, Artificial Sequence
  Description of Artificial Sequence: Synthetic oligonucleotide
uuaauucuuccuaacucca

SEQ ID NO: 2984575 - RNA, 19 nt, Artificial Sequence
  Description of Artificial Sequence: Synthetic oligonucleotide
auucuuccuaacuccaugg

SEQ ID NO: 2984576 - RNA, 19 nt, Artificial Sequence
  Description of Artificial Sequence: Synthetic oligonucleotide
aaacuauggacuuuucuuu

SEQ ID NO: 2984577 - RNA, 19 nt, Artificial Sequence
  Description of Artificial Sequence: Synthetic oligonucleotide
ugccaaacaacuauuccug

SEQ ID NO: 2984578 - RNA, 19 nt, Artificial Sequence
  Description of Artificial Sequence: Synthetic oligonucleotide
ugaauccaauguaaggcag

SEQ ID NO: 2984579 - RNA, 19 nt, Artificial Sequence
  Description of Artificial Sequence: Synthetic oligonucleotide
uccugaauccaauguaagg

SEQ ID NO: 2984580 - RNA, 19 nt, Artificial Sequence
  Description of Artificial Sequence: Synthetic oligonucleotide
agauaaauugcguauuuaa

SEQ ID NO: 2984581 - RNA, 19 nt, Artificial Sequence
  Description of Artificial Sequence: Synthetic oligonucleotide
uauagaacaugcacuguga

SEQ ID NO: 2984582 - RNA, 19 nt, Artificial Sequence
  Description of Artificial Sequence: Synthetic oligonucleotide
auaagggguaaucuucagg

SEQ ID NO: 2984583 - RNA, 19 nt, Artificial Sequence
  Description of Artificial Sequence: Synthetic oligonucleotide
acauacaaguuuuccacag

SEQ ID NO: 2984584 - RNA, 19 nt, Artificial Sequence
  Description of Artificial Sequence: Synthetic oligonucleotide
aucguuuacaaauucugca

SEQ ID NO: 2984585 - RNA, 19 nt, Artificial Sequence
  Description of Artificial Sequence: Synthetic oligonucleotide
ucaggaaucuacaaauauc

SEQ ID NO: 2984586 - RNA, 19 nt, Artificial Sequence
  Description of Artificial Sequence: Synthetic oligonucleotide
gaugccaaacaacuauucc

SEQ ID NO: 2984587 - RNA, 19 nt, Artificial Sequence
  Description of Artificial Sequence: Synthetic oligonucleotide
caaacgaaggucaacuaac

SEQ ID NO: 2984588 - RNA, 19 nt, Artificial Sequence
  Description of Artificial Sequence: Synthetic oligonucleotide
acaacuauuccuguuguag

SEQ ID NO: 2984589 - RNA, 19 nt, Artificial Sequence
  Description of Artificial Sequence: Synthetic oligonucleotide
uuacaaauucugcacacau

SEQ ID NO: 2984590 - RNA, 19 nt, Artificial Sequence
  Description of Artificial Sequence: Synthetic oligonucleotide
auacaaguuuuccacagcu

SEQ ID NO: 2984591 - RNA, 19 nt, Artificial Sequence
  Description of Artificial Sequence: Synthetic oligonucleotide
aaacaacuauuccuguugu

SEQ ID NO: 2984592 - RNA, 19 nt, Artificial Sequence
  Description of Artificial Sequence: Synthetic oligonucleotide
caaacaacuauuccuguug

SEQ ID NO: 2984593 - RNA, 19 nt, Artificial Sequence
  Description of Artificial Sequence: Synthetic oligonucleotide
cuauagaacaugcacugug

SEQ ID NO: 2984594 - RNA, 19 nt, Artificial Sequence
  Description of Artificial Sequence: Synthetic oligonucleotide
uccauggcauuguuaaggg

SEQ ID NO: 2984595 - RNA, 19 nt, Artificial Sequence
  Description of Artificial Sequence: Synthetic oligonucleotide
acagcuagaaaacuaugga

SEQ ID NO: 2984596 - RNA, 19 nt, Artificial Sequence
  Description of Artificial Sequence: Synthetic oligonucleotide
ugauaagggguaaucuuca

SEQ ID NO: 2984597 - RNA, 19 nt, Artificial Sequence
  Description of Artificial Sequence: Synthetic oligonucleotide
uucaggaaucuacaaauau

SEQ ID NO: 2984598 - RNA, 19 nt, Artificial Sequence
  Description of Artificial Sequence: Synthetic oligonucleotide
augccaaacaacuauuccu

SEQ ID NO: 2984599 - RNA, 19 nt, Artificial Sequence
  Description of Artificial Sequence: Synthetic oligonucleotide
ucguuuacaaauucugcac

SEQ ID NO: 2984600 - RNA, 19 nt, Artificial Sequence
  Description of Artificial Sequence: Synthetic oligonucleotide
uuucacucaucaccaauug

SEQ ID NO: 2984601 - RNA, 19 nt, Artificial Sequence
  Description of Artificial Sequence: Synthetic oligonucleotide
auucugcacacauacaagu

SEQ ID NO: 2984602 - RNA, 19 nt, Artificial Sequence
  Description of Artificial Sequence: Synthetic oligonucleotide
aacaugcacugugauaagg

SEQ ID NO: 2984603 - RNA, 19 nt, Artificial Sequence
  Description of Artificial Sequence: Synthetic oligonucleotide
agaaguccaaaacgagucg

SEQ ID NO: 2984604 - RNA, 19 nt, Artificial Sequence
  Description of Artificial Sequence: Synthetic oligonucleotide
aacgaaggucaacuaacug

SEQ ID NO: 2984605 - RNA, 19 nt, Artificial Sequence
  Description of Artificial Sequence: Synthetic oligonucleotide
caaauuucacucaucacca

SEQ ID NO: 2984606 - RNA, 19 nt, Artificial Sequence
  Description of Artificial Sequence: Synthetic oligonucleotide
aaggucaacuaacugcccu

SEQ ID NO: 2984607 - RNA, 19 nt, Artificial Sequence
  Description of Artificial Sequence: Synthetic oligonucleotide
cucaucaccaauugccagg

SEQ ID NO: 2984608 - RNA, 19 nt, Artificial Sequence
  Description of Artificial Sequence: Synthetic oligonucleotide
ucuuccuaacuccauggca

SEQ ID NO: 2984609 - RNA, 19 nt, Artificial Sequence
  Description of Artificial Sequence: Synthetic oligonucleotide
caacuauuccuguuguagg

SEQ ID NO: 2984610 - RNA, 19 nt, Artificial Sequence
  Description of Artificial Sequence: Synthetic oligonucleotide
ucaccaauugccaggucag

SEQ ID NO: 2984611 - RNA, 19 nt, Artificial Sequence
  Description of Artificial Sequence: Synthetic oligonucleotide
aauucugcacacauacaag

SEQ ID NO: 2984612 - RNA, 19 nt, Artificial Sequence
  Description of Artificial Sequence: Synthetic oligonucleotide
gaaguccaaaacgagucgg

SEQ ID NO: 2984613 - RNA, 19 nt, Artificial Sequence
  Description of Artificial Sequence: Synthetic oligonucleotide
aucaccaauugccagguca

SEQ ID NO: 2984614 - RNA, 19 nt, Artificial Sequence
  Description of Artificial Sequence: Synthetic oligonucleotide
uuaacaucguuuacaaauu

SEQ ID NO: 2984615 - RNA, 19 nt, Artificial Sequence
  Description of Artificial Sequence: Synthetic oligonucleotide
uguaaggcagaaagaguug

SEQ ID NO: 2984616 - RNA, 19 nt, Artificial Sequence
  Description of Artificial Sequence: Synthetic oligonucleotide
caucguuuacaaauucugc

SEQ ID NO: 2984617 - RNA, 19 nt, Artificial Sequence
  Description of Artificial Sequence: Synthetic oligonucleotide
ugcguauuuaacaucguuu

SEQ ID NO: 2984618 - RNA, 19 nt, Artificial Sequence
  Description of Artificial Sequence: Synthetic oligonucleotide
uuggccacgcuuucuauag

SEQ ID NO: 2984619 - RNA, 19 nt, Artificial Sequence
  Description of Artificial Sequence: Synthetic oligonucleotide
agguauagcuuuguugagc

SEQ ID NO: 2984620 - RNA, 19 nt, Artificial Sequence
  Description of Artificial Sequence: Synthetic oligonucleotide
ucuuuuaauucuuccuaac

SEQ ID NO: 2984621 - RNA, 19 nt, Artificial Sequence
  Description of Artificial Sequence: Synthetic oligonucleotide
aaguccaaaacgagucggc

SEQ ID NO: 2984622 - RNA, 19 nt, Artificial Sequence
  Description of Artificial Sequence: Synthetic oligonucleotide
agcuagaaaacuauggacu

SEQ ID NO: 2984623 - RNA, 19 nt, Artificial Sequence
  Description of Artificial Sequence: Synthetic oligonucleotide
uccaaaacgagucggcaaa

SEQ ID NO: 2984624 - RNA, 19 nt, Artificial Sequence
  Description of Artificial Sequence: Synthetic oligonucleotide
ggaaucuacaaauaucuca

SEQ ID NO: 2984625 - RNA, 19 nt, Artificial Sequence
  Description of Artificial Sequence: Synthetic oligonucleotide
caugcacugugauaagggg

SEQ ID NO: 2984626 - RNA, 19 nt, Artificial Sequence
  Description of Artificial Sequence: Synthetic oligonucleotide
uuguugagcaaacgaaggu

SEQ ID NO: 2984627 - RNA, 19 nt, Artificial Sequence
  Description of Artificial Sequence: Synthetic oligonucleotide
guuuuccacagcuagaaaa

SEQ ID NO: 2984628 - RNA, 19 nt, Artificial Sequence
  Description of Artificial Sequence: Synthetic oligonucleotide
uauagcuuuguugagcaaa

SEQ ID NO: 2984629 - RNA, 19 nt, Artificial Sequence
  Description of Artificial Sequence: Synthetic oligonucleotide
ucacugaugcuguggaugc

SEQ ID NO: 2984630 - RNA, 19 nt, Artificial Sequence
  Description of Artificial Sequence: Synthetic oligonucleotide
uucuuuuaauucuuccuaa

SEQ ID NO: 2984631 - RNA, 19 nt, Artificial Sequence
  Description of Artificial Sequence: Synthetic oligonucleotide
guaaggcagaaagaguugg

SEQ ID NO: 2984632 - RNA, 19 nt, Artificial Sequence
  Description of Artificial Sequence: Synthetic oligonucleotide
ugccaggucagguauagcu

SEQ ID NO: 2984633 - RNA, 19 nt, Artificial Sequence
  Description of Artificial Sequence: Synthetic oligonucleotide
gucagguauagcuuuguug

SEQ ID NO: 2984634 - RNA, 19 nt, Artificial Sequence
  Description of Artificial Sequence: Synthetic oligonucleotide
guuuacaaauucugcacac

SEQ ID NO: 2984635 - RNA, 19 nt, Artificial Sequence
  Description of Artificial Sequence: Synthetic oligonucleotide
ugugauaagggguaaucuu

SEQ ID NO: 2984636 - RNA, 19 nt, Artificial Sequence
  Description of Artificial Sequence: Synthetic oligonucleotide
cauuguuaagggcagagga

SEQ ID NO: 2984637 - RNA, 19 nt, Artificial Sequence
  Description of Artificial Sequence: Synthetic oligonucleotide
guauuuaacaucguuuaca

SEQ ID NO: 2984638 - RNA, 19 nt, Artificial Sequence
  Description of Artificial Sequence: Synthetic oligonucleotide
aauguaaggcagaaagagu

SEQ ID NO: 2984639 - RNA, 19 nt, Artificial Sequence
  Description of Artificial Sequence: Synthetic oligonucleotide
uguuaagggcagaggaggc

SEQ ID NO: 2984640 - RNA, 19 nt, Artificial Sequence
  Description of Artificial Sequence: Synthetic oligonucleotide
cagcuagaaaacuauggac

SEQ ID NO: 2984641 - RNA, 19 nt, Artificial Sequence
  Description of Artificial Sequence: Synthetic oligonucleotide
uccacagcuagaaaacuau

SEQ ID NO: 2984642 - RNA, 19 nt, Artificial Sequence
  Description of Artificial Sequence: Synthetic oligonucleotide
aacuaacugcccugagguc

SEQ ID NO: 2984643 - RNA, 19 nt, Artificial Sequence
  Description of Artificial Sequence: Synthetic oligonucleotide
cuccauggcauuguuaagg

SEQ ID NO: 2984644 - RNA, 19 nt, Artificial Sequence
  Description of Artificial Sequence: Synthetic oligonucleotide
aaguuuuccacagcuagaa

SEQ ID NO: 2984645 - RNA, 19 nt, Artificial Sequence
  Description of Artificial Sequence: Synthetic oligonucleotide
ugcacugugauaaggggua

SEQ ID NO: 2984646 - RNA, 19 nt, Artificial Sequence
  Description of Artificial Sequence: Synthetic oligonucleotide
aagaguuggccacgcuuuc

SEQ ID NO: 2984647 - RNA, 19 nt, Artificial Sequence
  Description of Artificial Sequence: Synthetic oligonucleotide
aacaucguuuacaaauucu

SEQ ID NO: 2984648 - RNA, 19 nt, Artificial Sequence
  Description of Artificial Sequence: Synthetic oligonucleotide
ucugcacacauacaaguuu

SEQ ID NO: 2984649 - RNA, 19 nt, Artificial Sequence
  Description of Artificial Sequence: Synthetic oligonucleotide
acugugauaagggguaauc

SEQ ID NO: 2984650 - RNA, 19 nt, Artificial Sequence
  Description of Artificial Sequence: Synthetic oligonucleotide
acaaauaucucaauuuaaa

SEQ ID NO: 2984651 - RNA, 19 nt, Artificial Sequence
  Description of Artificial Sequence: Synthetic oligonucleotide
auagcuuuguugagcaaac

SEQ ID NO: 2984652 - RNA, 19 nt, Artificial Sequence
  Description of Artificial Sequence: Synthetic oligonucleotide
aucuacaaauaucucaauu

SEQ ID NO: 2984653 - RNA, 19 nt, Artificial Sequence
  Description of Artificial Sequence: Synthetic oligonucleotide
aacuauggacuuuucuuuu

SEQ ID NO: 2984654 - RNA, 19 nt, Artificial Sequence
  Description of Artificial Sequence: Synthetic oligonucleotide
gauaagggguaaucuucag

SEQ ID NO: 2984655 - RNA, 19 nt, Artificial Sequence
  Description of Artificial Sequence: Synthetic oligonucleotide
uaaggcagaaagaguuggc

SEQ ID NO: 2984656 - RNA, 19 nt, Artificial Sequence
  Description of Artificial Sequence: Synthetic oligonucleotide
acaucguuuacaaauucug

SEQ ID NO: 2984657 - RNA, 19 nt, Artificial Sequence
  Description of Artificial Sequence: Synthetic oligonucleotide
aauugcugcccuucacuga

SEQ ID NO: 2984658 - RNA, 19 nt, Artificial Sequence
  Description of Artificial Sequence: Synthetic oligonucleotide
uguugagcaaacgaagguc

SEQ ID NO: 2984659 - RNA, 19 nt, Artificial Sequence
  Description of Artificial Sequence: Synthetic oligonucleotide
uaacaucguuuacaaauuc

SEQ ID NO: 2984660 - RNA, 19 nt, Artificial Sequence
  Description of Artificial Sequence: Synthetic oligonucleotide
gaugcuguggaugccaaac

SEQ ID NO: 2984661 - RNA, 19 nt, Artificial Sequence
  Description of Artificial Sequence: Synthetic oligonucleotide
caaauaucucaauuuaaaa

SEQ ID NO: 2984662 - RNA, 19 nt, Artificial Sequence
  Description of Artificial Sequence: Synthetic oligonucleotide
uguaggcagucucaaauuu

SEQ ID NO: 2984663 - RNA, 19 nt, Artificial Sequence
  Description of Artificial Sequence: Synthetic oligonucleotide
acaugcacugugauaaggg

SEQ ID NO: 2984664 - RNA, 19 nt, Artificial Sequence
  Description of Artificial Sequence: Synthetic oligonucleotide
cuauuccuguuguaggcag

SEQ ID NO: 2984665 - RNA, 19 nt, Artificial Sequence
  Description of Artificial Sequence: Synthetic oligonucleotide
ugcccugagguccugaauc

SEQ ID NO: 2984666 - RNA, 19 nt, Artificial Sequence
  Description of Artificial Sequence: Synthetic oligonucleotide
auuguuaagggcagaggag

SEQ ID NO: 2984667 - RNA, 19 nt, Artificial Sequence
  Description of Artificial Sequence: Synthetic oligonucleotide
aaucuacaaauaucucaau

SEQ ID NO: 2984668 - RNA, 19 nt, Artificial Sequence
  Description of Artificial Sequence: Synthetic oligonucleotide
auggacuuuucuuuuaauu

SEQ ID NO: 2984669 - RNA, 19 nt, Artificial Sequence
  Description of Artificial Sequence: Synthetic oligonucleotide
ugaaauugcugcccuucac

SEQ ID NO: 2984670 - RNA, 19 nt, Artificial Sequence
  Description of Artificial Sequence: Synthetic oligonucleotide
caggaaucuacaaauaucu

SEQ ID NO: 2984671 - RNA, 19 nt, Artificial Sequence
  Description of Artificial Sequence: Synthetic oligonucleotide
uucuuccuaacuccauggc

SEQ ID NO: 2984672 - RNA, 19 nt, Artificial Sequence
  Description of Artificial Sequence: Synthetic oligonucleotide
cauacaaguuuuccacagc

SEQ ID NO: 2984673 - RNA, 19 nt, Artificial Sequence
  Description of Artificial Sequence: Synthetic oligonucleotide
acucaucaccaauugccag

SEQ ID NO: 2984674 - RNA, 19 nt, Artificial Sequence
  Description of Artificial Sequence: Synthetic oligonucleotide
aucuucaggaaucuacaaa

SEQ ID NO: 2984675 - RNA, 19 nt, Artificial Sequence
  Description of Artificial Sequence: Synthetic oligonucleotide
ccugaauccaauguaaggc

SEQ ID NO: 2984676 - RNA, 19 nt, Artificial Sequence
  Description of Artificial Sequence: Synthetic oligonucleotide
aauccaauguaaggcagaa

SEQ ID NO: 2984677 - RNA, 19 nt, Artificial Sequence
  Description of Artificial Sequence: Synthetic oligonucleotide
uagaaaacuauggacuuuu

SEQ ID NO: 2984678 - RNA, 19 nt, Artificial Sequence
  Description of Artificial Sequence: Synthetic oligonucleotide
aaacgaaggucaacuaacu

SEQ ID NO: 2984679 - RNA, 19 nt, Artificial Sequence
  Description of Artificial Sequence: Synthetic oligonucleotide
auguaaggcagaaagaguu

SEQ ID NO: 2984680 - RNA, 19 nt, Artificial Sequence
  Description of Artificial Sequence: Synthetic oligonucleotide
cucaaauuucacucaucac

SEQ ID NO: 2984681 - RNA, 19 nt, Artificial Sequence
  Description of Artificial Sequence: Synthetic oligonucleotide
cacacauacaaguuuucca

SEQ ID NO: 2984682 - RNA, 19 nt, Artificial Sequence
  Description of Artificial Sequence: Synthetic oligonucleotide
agggguaaucuucaggaau

SEQ ID NO: 2984683 - RNA, 19 nt, Artificial Sequence
  Description of Artificial Sequence: Synthetic oligonucleotide
auugcugcccuucacugau

SEQ ID NO: 2984684 - RNA, 19 nt, Artificial Sequence
  Description of Artificial Sequence: Synthetic oligonucleotide
gaaaacuauggacuuuucu

SEQ ID NO: 2984685 - RNA, 19 nt, Artificial Sequence
  Description of Artificial Sequence: Synthetic oligonucleotide
ugcuguggaugccaaacaa

SEQ ID NO: 2984686 - RNA, 19 nt, Artificial Sequence
  Description of Artificial Sequence: Synthetic oligonucleotide
uuaagggcagaggaggcac

SEQ ID NO: 2984687 - RNA, 19 nt, Artificial Sequence
  Description of Artificial Sequence: Synthetic oligonucleotide
aaagaguuggccacgcuuu

SEQ ID NO: 2984688 - RNA, 19 nt, Artificial Sequence
  Description of Artificial Sequence: Synthetic oligonucleotide
cugaauccaauguaaggca

SEQ ID NO: 2984689 - RNA, 19 nt, Artificial Sequence
  Description of Artificial Sequence: Synthetic oligonucleotide
gguauagcuuuguugagca

SEQ ID NO: 2984690 - RNA, 19 nt, Artificial Sequence
  Description of Artificial Sequence: Synthetic oligonucleotide
uacaaauucugcacacaua

SEQ ID NO: 2984691 - RNA, 19 nt, Artificial Sequence
  Description of Artificial Sequence: Synthetic oligonucleotide
aaauuucacucaucaccaa

SEQ ID NO: 2984692 - RNA, 19 nt, Artificial Sequence
  Description of Artificial Sequence: Synthetic oligonucleotide
uccuguuguaggcagucuc

SEQ ID NO: 2984693 - RNA, 19 nt, Artificial Sequence
  Description of Artificial Sequence: Synthetic oligonucleotide
agucucaaauuucacucau

SEQ ID NO: 2984694 - RNA, 19 nt, Artificial Sequence
  Description of Artificial Sequence: Synthetic oligonucleotide
auagaacaugcacugugau

SEQ ID NO: 2984695 - RNA, 19 nt, Artificial Sequence
  Description of Artificial Sequence: Synthetic oligonucleotide
uuccacagcuagaaaacua

SEQ ID NO: 2984696 - RNA, 19 nt, Artificial Sequence
  Description of Artificial Sequence: Synthetic oligonucleotide
ugcugcccuucacugaugc

SEQ ID NO: 2984697 - RNA, 19 nt, Artificial Sequence
  Description of Artificial Sequence: Synthetic oligonucleotide
cagaggaggcacuugcuac

SEQ ID NO: 2984698 - RNA, 19 nt, Artificial Sequence
  Description of Artificial Sequence: Synthetic oligonucleotide
guugagcaaacgaagguca

SEQ ID NO: 2984699 - RNA, 19 nt, Artificial Sequence
  Description of Artificial Sequence: Synthetic oligonucleotide
aagauaaauugcguauuua

SEQ ID NO: 2984700 - RNA, 19 nt, Artificial Sequence
  Description of Artificial Sequence: Synthetic oligonucleotide
gugauaagggguaaucuuc

SEQ ID NO: 2984701 - RNA, 19 nt, Artificial Sequence
  Description of Artificial Sequence: Synthetic oligonucleotide
aggucaacuaacugcccug

SEQ ID NO: 2984702 - RNA, 19 nt, Artificial Sequence
  Description of Artificial Sequence: Synthetic oligonucleotide
uaauucuuccuaacuccau

SEQ ID NO: 2984703 - RNA, 19 nt, Artificial Sequence
  Description of Artificial Sequence: Synthetic oligonucleotide
auugccaggucagguauag

SEQ ID NO: 2984704 - RNA, 19 nt, Artificial Sequence
  Description of Artificial Sequence: Synthetic oligonucleotide
uagaacaugcacugugaua

SEQ ID NO: 2984705 - RNA, 19 nt, Artificial Sequence
  Description of Artificial Sequence: Synthetic oligonucleotide
uugcguauuuaacaucguu

SEQ ID NO: 2984706 - RNA, 19 nt, Artificial Sequence
  Description of Artificial Sequence: Synthetic oligonucleotide
uguggaugccaaacaacua

SEQ ID NO: 2984707 - RNA, 19 nt, Artificial Sequence
  Description of Artificial Sequence: Synthetic oligonucleotide
cgaaggucaacuaacugcc

SEQ ID NO: 2984708 - RNA, 19 nt, Artificial Sequence
  Description of Artificial Sequence: Synthetic oligonucleotide
uacaaguuuuccacagcua

SEQ ID NO: 2984709 - RNA, 19 nt, Artificial Sequence
  Description of Artificial Sequence: Synthetic oligonucleotide
uucugcacacauacaaguu

SEQ ID NO: 2984710 - RNA, 19 nt, Artificial Sequence
  Description of Artificial Sequence: Synthetic oligonucleotide
aagggguaaucuucaggaa

SEQ ID NO: 2984711 - RNA, 19 nt, Artificial Sequence
  Description of Artificial Sequence: Synthetic oligonucleotide
aacaacuauuccuguugua

SEQ ID NO: 2984712 - RNA, 19 nt, Artificial Sequence
  Description of Artificial Sequence: Synthetic oligonucleotide
uuuccacagcuagaaaacu

SEQ ID NO: 2984713 - RNA, 19 nt, Artificial Sequence
  Description of Artificial Sequence: Synthetic oligonucleotide
ucaucaccaauugccaggu

SEQ ID NO: 2984714 - RNA, 19 nt, Artificial Sequence
  Description of Artificial Sequence: Synthetic oligonucleotide
ucuauagaacaugcacugu

SEQ ID NO: 2984715 - RNA, 19 nt, Artificial Sequence
  Description of Artificial Sequence: Synthetic oligonucleotide
gaacaugcacugugauaag

SEQ ID NO: 2984716 - RNA, 19 nt, Artificial Sequence
  Description of Artificial Sequence: Synthetic oligonucleotide
ugcccuucacugaugcugu

SEQ ID NO: 2984717 - RNA, 19 nt, Artificial Sequence
  Description of Artificial Sequence: Synthetic oligonucleotide
aggaaucuacaaauaucuc

SEQ ID NO: 2984718 - RNA, 19 nt, Artificial Sequence
  Description of Artificial Sequence: Synthetic oligonucleotide
uauggacuuuucuuuuaau

SEQ ID NO: 2984719 - RNA, 19 nt, Artificial Sequence
  Description of Artificial Sequence: Synthetic oligonucleotide
cuuuuaauucuuccuaacu

SEQ ID NO: 2984720 - RNA, 19 nt, Artificial Sequence
  Description of Artificial Sequence: Synthetic oligonucleotide
guuguaggcagucucaaau

SEQ ID NO: 2984721 - RNA, 19 nt, Artificial Sequence
  Description of Artificial Sequence: Synthetic oligonucleotide
uggaugccaaacaacuauu

SEQ ID NO: 2984722 - RNA, 19 nt, Artificial Sequence
  Description of Artificial Sequence: Synthetic oligonucleotide
uauuccuguuguaggcagu

SEQ ID NO: 2984723 - RNA, 19 nt, Artificial Sequence
  Description of Artificial Sequence: Synthetic oligonucleotide
auuuaacaucguuuacaaa

SEQ ID NO: 2984724 - RNA, 19 nt, Artificial Sequence
  Description of Artificial Sequence: Synthetic oligonucleotide
uugagcaaacgaaggucaa

SEQ ID NO: 2984725 - RNA, 19 nt, Artificial Sequence
  Description of Artificial Sequence: Synthetic oligonucleotide
uuguaggcagucucaaauu

SEQ ID NO: 2984726 - RNA, 19 nt, Artificial Sequence
  Description of Artificial Sequence: Synthetic oligonucleotide
ggcagaaagaguuggccac

SEQ ID NO: 2984727 - RNA, 19 nt, Artificial Sequence
  Description of Artificial Sequence: Synthetic oligonucleotide
acauauuuaagaaguccaa

SEQ ID NO: 2984728 - RNA, 19 nt, Artificial Sequence
  Description of Artificial Sequence: Synthetic oligonucleotide
caacuaacugcccugaggu

SEQ ID NO: 2984729 - RNA, 19 nt, Artificial Sequence
  Description of Artificial Sequence: Synthetic oligonucleotide
uagcuuuguugagcaaacg

SEQ ID NO: 2984730 - RNA, 19 nt, Artificial Sequence
  Description of Artificial Sequence: Synthetic oligonucleotide
cugcccuucacugaugcug

SEQ ID NO: 2984731 - RNA, 19 nt, Artificial Sequence
  Description of Artificial Sequence: Synthetic oligonucleotide
cauauuuaagaaguccaaa

SEQ ID NO: 2984732 - RNA, 19 nt, Artificial Sequence
  Description of Artificial Sequence: Synthetic oligonucleotide
acuauuccuguuguaggca

SEQ ID NO: 2984733 - RNA, 19 nt, Artificial Sequence
  Description of Artificial Sequence: Synthetic oligonucleotide
ugagcaaacgaaggucaac

SEQ ID NO: 2984734 - RNA, 19 nt, Artificial Sequence
  Description of Artificial Sequence: Synthetic oligonucleotide
auuucacucaucaccaauu

SEQ ID NO: 2984735 - RNA, 19 nt, Artificial Sequence
  Description of Artificial Sequence: Synthetic oligonucleotide
acuauggacuuuucuuuua

SEQ ID NO: 2984736 - RNA, 19 nt, Artificial Sequence
  Description of Artificial Sequence: Synthetic oligonucleotide
cagguauagcuuuguugag

SEQ ID NO: 2984737 - RNA, 19 nt, Artificial Sequence
  Description of Artificial Sequence: Synthetic oligonucleotide
agguccugaauccaaugua

SEQ ID NO: 2984738 - RNA, 19 nt, Artificial Sequence
  Description of Artificial Sequence: Synthetic oligonucleotide
auggcauuguuaagggcag

SEQ ID NO: 2984739 - RNA, 19 nt, Artificial Sequence
  Description of Artificial Sequence: Synthetic oligonucleotide
agaaaacuauggacuuuuc

SEQ ID NO: 2984740 - RNA, 19 nt, Artificial Sequence
  Description of Artificial Sequence: Synthetic oligonucleotide
cacauacaaguuuuccaca

SEQ ID NO: 2984741 - RNA, 19 nt, Artificial Sequence
  Description of Artificial Sequence: Synthetic oligonucleotide
uguuguaggcagucucaaa

SEQ ID NO: 2984742 - RNA, 19 nt, Artificial Sequence
  Description of Artificial Sequence: Synthetic oligonucleotide
acgcuuucuauagaacaug

SEQ ID NO: 2984743 - RNA, 19 nt, Artificial Sequence
  Description of Artificial Sequence: Synthetic oligonucleotide
caaguuuuccacagcuaga

SEQ ID NO: 2984744 - RNA, 19 nt, Artificial Sequence
  Description of Artificial Sequence: Synthetic oligonucleotide
ggacuuuucuuuuaauucu

SEQ ID NO: 2984745 - RNA, 19 nt, Artificial Sequence
  Description of Artificial Sequence: Synthetic oligonucleotide
gaaagaguuggccacgcuu

SEQ ID NO: 2984746 - RNA, 19 nt, Artificial Sequence
  Description of Artificial Sequence: Synthetic oligonucleotide
accaauugccaggucaggu

SEQ ID NO: 2984747 - RNA, 19 nt, Artificial Sequence
  Description of Artificial Sequence: Synthetic oligonucleotide
guccugaauccaauguaag

SEQ ID NO: 2984748 - RNA, 19 nt, Artificial Sequence
  Description of Artificial Sequence: Synthetic oligonucleotide
cacucaucaccaauugcca

SEQ ID NO: 2984749 - RNA, 19 nt, Artificial Sequence
  Description of Artificial Sequence: Synthetic oligonucleotide
aguccaaaacgagucggca

SEQ ID NO: 2984750 - RNA, 19 nt, Artificial Sequence
  Description of Artificial Sequence: Synthetic oligonucleotide
cuuccuaacuccauggcau

SEQ ID NO: 2984751 - RNA, 19 nt, Artificial Sequence
  Description of Artificial Sequence: Synthetic oligonucleotide
augcuguggaugccaaaca

SEQ ID NO: 2984752 - RNA, 19 nt, Artificial Sequence
  Description of Artificial Sequence: Synthetic oligonucleotide
uccuaacuccauggcauug

SEQ ID NO: 2984753 - RNA, 19 nt, Artificial Sequence
  Description of Artificial Sequence: Synthetic oligonucleotide
gagcaaacgaaggucaacu

SEQ ID NO: 2984754 - RNA, 19 nt, Artificial Sequence
  Description of Artificial Sequence: Synthetic oligonucleotide
caaauucugcacacauaca

SEQ ID NO: 2984755 - RNA, 19 nt, Artificial Sequence
  Description of Artificial Sequence: Synthetic oligonucleotide
guggaugccaaacaacuau

SEQ ID NO: 2984756 - RNA, 19 nt, Artificial Sequence
  Description of Artificial Sequence: Synthetic oligonucleotide
gcguauuuaacaucguuua

SEQ ID NO: 2984757 - RNA, 19 nt, Artificial Sequence
  Description of Artificial Sequence: Synthetic oligonucleotide
gucaacuaacugcccugag

SEQ ID NO: 2984758 - RNA, 19 nt, Artificial Sequence
  Description of Artificial Sequence: Synthetic oligonucleotide
gaaggucaacuaacugccc

SEQ ID NO: 2984759 - RNA, 19 nt, Artificial Sequence
  Description of Artificial Sequence: Synthetic oligonucleotide
ggcauuguuaagggcagag

SEQ ID NO: 2984760 - RNA, 19 nt, Artificial Sequence
  Description of Artificial Sequence: Synthetic oligonucleotide
augcacugugauaaggggu

SEQ ID NO: 2984761 - RNA, 19 nt, Artificial Sequence
  Description of Artificial Sequence: Synthetic oligonucleotide
agaaagaguuggccacgcu

SEQ ID NO: 2984762 - RNA, 19 nt, Artificial Sequence
  Description of Artificial Sequence: Synthetic oligonucleotide
gagguccugaauccaaugu

SEQ ID NO: 2984763 - RNA, 19 nt, Artificial Sequence
  Description of Artificial Sequence: Synthetic oligonucleotide
uaagggcagaggaggcacu

SEQ ID NO: 2984764 - RNA, 19 nt, Artificial Sequence
  Description of Artificial Sequence: Synthetic oligonucleotide
aguuuuccacagcuagaaa

SEQ ID NO: 2984765 - RNA, 19 nt, Artificial Sequence
  Description of Artificial Sequence: Synthetic oligonucleotide
cuauggacuuuucuuuuaa

SEQ ID NO: 2984766 - RNA, 19 nt, Artificial Sequence
  Description of Artificial Sequence: Synthetic oligonucleotide
cagucucaaauuucacuca

SEQ ID NO: 2984767 - RNA, 19 nt, Artificial Sequence
  Description of Artificial Sequence: Synthetic oligonucleotide
agcaaacgaaggucaacua

SEQ ID NO: 2984768 - RNA, 19 nt, Artificial Sequence
  Description of Artificial Sequence: Synthetic oligonucleotide
cagaaagaguuggccacgc

SEQ ID NO: 2984769 - RNA, 19 nt, Artificial Sequence
  Description of Artificial Sequence: Synthetic oligonucleotide
gcaaacgaaggucaacuaa

SEQ ID NO: 2984770 - RNA, 19 nt, Artificial Sequence
  Description of Artificial Sequence: Synthetic oligonucleotide
guccaaaacgagucggcaa

SEQ ID NO: 2984771 - RNA, 19 nt, Artificial Sequence
  Description of Artificial Sequence: Synthetic oligonucleotide
caggucagguauagcuuug

SEQ ID NO: 2984772 - RNA, 19 nt, Artificial Sequence
  Description of Artificial Sequence: Synthetic oligonucleotide
gggguaaucuucaggaauc

SEQ ID NO: 2984773 - RNA, 19 nt, Artificial Sequence
  Description of Artificial Sequence: Synthetic oligonucleotide
cuucaggaaucuacaaaua

SEQ ID NO: 2984774 - RNA, 19 nt, Artificial Sequence
  Description of Artificial Sequence: Synthetic oligonucleotide
gcauuguuaagggcagagg

SEQ ID NO: 2984775 - RNA, 19 nt, Artificial Sequence
  Description of Artificial Sequence: Synthetic oligonucleotide
cgcuuucuauagaacaugc

SEQ ID NO: 2984776 - RNA, 19 nt, Artificial Sequence
  Description of Artificial Sequence: Synthetic oligonucleotide
gcuuuguugagcaaacgaa

SEQ ID NO: 2984777 - RNA, 19 nt, Artificial Sequence
  Description of Artificial Sequence: Synthetic oligonucleotide
uuccuaacuccauggcauu

SEQ ID NO: 2984778 - RNA, 19 nt, Artificial Sequence
  Description of Artificial Sequence: Synthetic oligonucleotide
gcagaaagaguuggccacg

SEQ ID NO: 2984779 - RNA, 19 nt, Artificial Sequence
  Description of Artificial Sequence: Synthetic oligonucleotide
guuaagggcagaggaggca

SEQ ID NO: 2984780 - RNA, 19 nt, Artificial Sequence
  Description of Artificial Sequence: Synthetic oligonucleotide
aggcagucucaaauuucac

SEQ ID NO: 2984781 - RNA, 19 nt, Artificial Sequence
  Description of Artificial Sequence: Synthetic oligonucleotide
ccacgcuuucuauagaaca

SEQ ID NO: 2984782 - RNA, 19 nt, Artificial Sequence
  Description of Artificial Sequence: Synthetic oligonucleotide
gaguuggccacgcuuucua

SEQ ID NO: 2984783 - RNA, 19 nt, Artificial Sequence
  Description of Artificial Sequence: Synthetic oligonucleotide
aguuggccacgcuuucuau

SEQ ID NO: 2984784 - RNA, 19 nt, Artificial Sequence
  Description of Artificial Sequence: Synthetic oligonucleotide
ugaugcuguggaugccaaa

SEQ ID NO: 2984785 - RNA, 19 nt, Artificial Sequence
  Description of Artificial Sequence: Synthetic oligonucleotide
auugcguauuuaacaucgu

SEQ ID NO: 2984786 - RNA, 19 nt, Artificial Sequence
  Description of Artificial Sequence: Synthetic oligonucleotide
uggccacgcuuucuauaga

SEQ ID NO: 2984787 - RNA, 19 nt, Artificial Sequence
  Description of Artificial Sequence: Synthetic oligonucleotide
caccaauugccaggucagg

SEQ ID NO: 2984788 - RNA, 19 nt, Artificial Sequence
  Description of Artificial Sequence: Synthetic oligonucleotide
ggcagucucaaauuucacu

SEQ ID NO: 2984789 - RNA, 19 nt, Artificial Sequence
  Description of Artificial Sequence: Synthetic oligonucleotide
cguauuuaacaucguuuac

SEQ ID NO: 2984790 - RNA, 19 nt, Artificial Sequence
  Description of Artificial Sequence: Synthetic oligonucleotide
gguccugaauccaauguaa

SEQ ID NO: 2984791 - RNA, 19 nt, Artificial Sequence
  Description of Artificial Sequence: Synthetic oligonucleotide
ggaugccaaacaacuauuc

SEQ ID NO: 2984792 - RNA, 19 nt, Artificial Sequence
  Description of Artificial Sequence: Synthetic oligonucleotide
guuggccacgcuuucuaua

SEQ ID NO: 2984793 - RNA, 19 nt, Artificial Sequence
  Description of Artificial Sequence: Synthetic oligonucleotide
gucucaaauuucacucauc

SEQ ID NO: 2984794 - RNA, 19 nt, Artificial Sequence
  Description of Artificial Sequence: Synthetic oligonucleotide
acugcccugagguccugaa

SEQ ID NO: 2984795 - RNA, 19 nt, Artificial Sequence
  Description of Artificial Sequence: Synthetic oligonucleotide
aauugccaggucagguaua

SEQ ID NO: 2984796 - RNA, 19 nt, Artificial Sequence
  Description of Artificial Sequence: Synthetic oligonucleotide
cacgcuuucuauagaacau

SEQ ID NO: 2984797 - RNA, 19 nt, Artificial Sequence
  Description of Artificial Sequence: Synthetic oligonucleotide
aagggcagaggaggcacuu

SEQ ID NO: 2984798 - RNA, 19 nt, Artificial Sequence
  Description of Artificial Sequence: Synthetic oligonucleotide
uuccuguuguaggcagucu

SEQ ID NO: 2984799 - RNA, 19 nt, Artificial Sequence
  Description of Artificial Sequence: Synthetic oligonucleotide
gcuagaaaacuauggacuu

SEQ ID NO: 2984800 - RNA, 19 nt, Artificial Sequence
  Description of Artificial Sequence: Synthetic oligonucleotide
ccacagcuagaaaacuaug

SEQ ID NO: 2984801 - RNA, 19 nt, Artificial Sequence
  Description of Artificial Sequence: Synthetic oligonucleotide
gcuguggaugccaaacaac

SEQ ID NO: 2984802 - RNA, 19 nt, Artificial Sequence
  Description of Artificial Sequence: Synthetic oligonucleotide
aggucagguauagcuuugu

SEQ ID NO: 2984803 - RNA, 19 nt, Artificial Sequence
  Description of Artificial Sequence: Synthetic oligonucleotide
gcccugagguccugaaucc

SEQ ID NO: 2984804 - RNA, 19 nt, Artificial Sequence
  Description of Artificial Sequence: Synthetic oligonucleotide
cugcacacauacaaguuuu

SEQ ID NO: 2984805 - RNA, 19 nt, Artificial Sequence
  Description of Artificial Sequence: Synthetic oligonucleotide
aggaggcacuugcuacugu

SEQ ID NO: 2984806 - RNA, 19 nt, Artificial Sequence
  Description of Artificial Sequence: Synthetic oligonucleotide
caauugccaggucagguau

SEQ ID NO: 2984807 - RNA, 19 nt, Artificial Sequence
  Description of Artificial Sequence: Synthetic oligonucleotide
ccauggcauuguuaagggc

SEQ ID NO: 2984808 - RNA, 19 nt, Artificial Sequence
  Description of Artificial Sequence: Synthetic oligonucleotide
cguuuacaaauucugcaca

SEQ ID NO: 2984809 - RNA, 19 nt, Artificial Sequence
  Description of Artificial Sequence: Synthetic oligonucleotide
cugugauaagggguaaucu

SEQ ID NO: 2984810 - RNA, 19 nt, Artificial Sequence
  Description of Artificial Sequence: Synthetic oligonucleotide
guauagcuuuguugagcaa

SEQ ID NO: 2984811 - RNA, 19 nt, Artificial Sequence
  Description of Artificial Sequence: Synthetic oligonucleotide
uggcauuguuaagggcaga

SEQ ID NO: 2984812 - RNA, 19 nt, Artificial Sequence
  Description of Artificial Sequence: Synthetic oligonucleotide
cuaacugcccugagguccu

SEQ ID NO: 2984813 - RNA, 19 nt, Artificial Sequence
  Description of Artificial Sequence: Synthetic oligonucleotide
ggccacgcuuucuauagaa

SEQ ID NO: 2984814 - RNA, 19 nt, Artificial Sequence
  Description of Artificial Sequence: Synthetic oligonucleotide
ccuguuguaggcagucuca

SEQ ID NO: 2984815 - RNA, 19 nt, Artificial Sequence
  Description of Artificial Sequence: Synthetic oligonucleotide
ccuucacugaugcugugga

SEQ ID NO: 2984816 - RNA, 19 nt, Artificial Sequence
  Description of Artificial Sequence: Synthetic oligonucleotide
cacugaugcuguggaugcc

SEQ ID NO: 2984817 - RNA, 19 nt, Artificial Sequence
  Description of Artificial Sequence: Synthetic oligonucleotide
gcuuucuauagaacaugca

SEQ ID NO: 2984818 - RNA, 19 nt, Artificial Sequence
  Description of Artificial Sequence: Synthetic oligonucleotide
uugccaggucagguauagc

SEQ ID NO: 2984819 - RNA, 19 nt, Artificial Sequence
  Description of Artificial Sequence: Synthetic oligonucleotide
cugaugcuguggaugccaa

SEQ ID NO: 2984820 - RNA, 19 nt, Artificial Sequence
  Description of Artificial Sequence: Synthetic oligonucleotide
auccaauguaaggcagaaa

SEQ ID NO: 2984821 - RNA, 19 nt, Artificial Sequence
  Description of Artificial Sequence: Synthetic oligonucleotide
ggucaacuaacugcccuga

SEQ ID NO: 2984822 - RNA, 19 nt, Artificial Sequence
  Description of Artificial Sequence: Synthetic oligonucleotide
cccuucacugaugcugugg

SEQ ID NO: 2984823 - RNA, 19 nt, Artificial Sequence
  Description of Artificial Sequence: Synthetic oligonucleotide
cuguuguaggcagucucaa

SEQ ID NO: 2984824 - RNA, 19 nt, Artificial Sequence
  Description of Artificial Sequence: Synthetic oligonucleotide
gcagaggaggcacuugcua

SEQ ID NO: 2984825 - RNA, 19 nt, Artificial Sequence
  Description of Artificial Sequence: Synthetic oligonucleotide
caucaccaauugccagguc

SEQ ID NO: 2984826 - RNA, 19 nt, Artificial Sequence
  Description of Artificial Sequence: Synthetic oligonucleotide
ccaauugccaggucaggua

SEQ ID NO: 2984827 - RNA, 19 nt, Artificial Sequence
  Description of Artificial Sequence: Synthetic oligonucleotide
cuagaaaacuauggacuuu

SEQ ID NO: 2984828 - RNA, 19 nt, Artificial Sequence
  Description of Artificial Sequence: Synthetic oligonucleotide
gccacgcuuucuauagaac

SEQ ID NO: 2984829 - RNA, 19 nt, Artificial Sequence
  Description of Artificial Sequence: Synthetic oligonucleotide
cuaacuccauggcauuguu

SEQ ID NO: 2984830 - RNA, 19 nt, Artificial Sequence
  Description of Artificial Sequence: Synthetic oligonucleotide
gccaaacaacuauuccugu

SEQ ID NO: 2984831 - RNA, 19 nt, Artificial Sequence
  Description of Artificial Sequence: Synthetic oligonucleotide
ccugagguccugaauccaa

SEQ ID NO: 2984832 - RNA, 19 nt, Artificial Sequence
  Description of Artificial Sequence: Synthetic oligonucleotide
uaacugcccugagguccug

SEQ ID NO: 2984833 - RNA, 19 nt, Artificial Sequence
  Description of Artificial Sequence: Synthetic oligonucleotide
ggaggcacuugcuacuguu

SEQ ID NO: 2984834 - RNA, 19 nt, Artificial Sequence
  Description of Artificial Sequence: Synthetic oligonucleotide
cuucacugaugcuguggau

SEQ ID NO: 2984835 - RNA, 19 nt, Artificial Sequence
  Description of Artificial Sequence: Synthetic oligonucleotide
gaggcacuugcuacuguuu

SEQ ID NO: 2984836 - RNA, 19 nt, Artificial Sequence
  Description of Artificial Sequence: Synthetic oligonucleotide
gcacuugcuacuguuuuau

SEQ ID NO: 2984837 - RNA, 19 nt, Artificial Sequence
  Description of Artificial Sequence: Synthetic oligonucleotide
ggguaaucuucaggaaucu

SEQ ID NO: 2984838 - RNA, 19 nt, Artificial Sequence
  Description of Artificial Sequence: Synthetic oligonucleotide
ccaaacaacuauuccuguu

SEQ ID NO: 2984839 - RNA, 19 nt, Artificial Sequence
  Description of Artificial Sequence: Synthetic oligonucleotide
ccaggucagguauagcuuu

SEQ ID NO: 2984840 - RNA, 19 nt, Artificial Sequence
  Description of Artificial Sequence: Synthetic oligonucleotide
ggucagguauagcuuuguu

SEQ ID NO: 2984841 - RNA, 19 nt, Artificial Sequence
  Description of Artificial Sequence: Synthetic oligonucleotide
gcccuucacugaugcugug

SEQ ID NO: 2984842 - RNA, 19 nt, Artificial Sequence
  Description of Artificial Sequence: Synthetic oligonucleotide
ccuaacuccauggcauugu

SEQ ID NO: 2984843 - RNA, 19 nt, Artificial Sequence
  Description of Artificial Sequence: Synthetic oligonucleotide
ccaaaacgagucggcaaaa

SEQ ID NO: 2984844 - RNA, 19 nt, Artificial Sequence
  Description of Artificial Sequence: Synthetic oligonucleotide
cacugugauaagggguaau

SEQ ID NO: 2984845 - RNA, 19 nt, Artificial Sequence
  Description of Artificial Sequence: Synthetic oligonucleotide
gcacugugauaagggguaa

SEQ ID NO: 2984846 - RNA, 19 nt, Artificial Sequence
  Description of Artificial Sequence: Synthetic oligonucleotide
gccaggucagguauagcuu

SEQ ID NO: 2984847 - RNA, 19 nt, Artificial Sequence
  Description of Artificial Sequence: Synthetic oligonucleotide
cugcccugagguccugaau

SEQ ID NO: 2984848 - RNA, 19 nt, Artificial Sequence
  Description of Artificial Sequence: Synthetic oligonucleotide
gcugcccuucacugaugcu

SEQ ID NO: 2984849 - RNA, 19 nt, Artificial Sequence
  Description of Artificial Sequence: Synthetic oligonucleotide
cccugagguccugaaucca

SEQ ID NO: 2984850 - RNA, 19 nt, Artificial Sequence
  Description of Artificial Sequence: Synthetic oligonucleotide
aacagguucaucaucaugc

SEQ ID NO: 2984851 - RNA, 19 nt, Artificial Sequence
  Description of Artificial Sequence: Synthetic oligonucleotide
acuuuggagacucaguccc

SEQ ID NO: 2984852 - RNA, 19 nt, Artificial Sequence
  Description of Artificial Sequence: Synthetic oligonucleotide
auuguaaggagucacaugu

SEQ ID NO: 2984853 - RNA, 19 nt, Artificial Sequence
  Description of Artificial Sequence: Synthetic oligonucleotide
acaacggugagcaugaugc

SEQ ID NO: 2984854 - RNA, 19 nt, Artificial Sequence
  Description of Artificial Sequence: Synthetic oligonucleotide
aacaguagaggccacagcu

SEQ ID NO: 2984855 - RNA, 19 nt, Artificial Sequence
  Description of Artificial Sequence: Synthetic oligonucleotide
uguaaggagucacaugugg

SEQ ID NO: 2984856 - RNA, 19 nt, Artificial Sequence
  Description of Artificial Sequence: Synthetic oligonucleotide
gauuaagcugcucacaccc

SEQ ID NO: 2984857 - RNA, 19 nt, Artificial Sequence
  Description of Artificial Sequence: Synthetic oligonucleotide
uauucuuugcaccucuccg

SEQ ID NO: 2984858 - RNA, 19 nt, Artificial Sequence
  Description of Artificial Sequence: Synthetic oligonucleotide
gacacaacaaucuucagga

SEQ ID NO: 2984859 - RNA, 19 nt, Artificial Sequence
  Description of Artificial Sequence: Synthetic oligonucleotide
ucacauguggaccugaucu

SEQ ID NO: 2984860 - RNA, 19 nt, Artificial Sequence
  Description of Artificial Sequence: Synthetic oligonucleotide
uaggauaccaggaaucucc

SEQ ID NO: 2984861 - RNA, 19 nt, Artificial Sequence
  Description of Artificial Sequence: Synthetic oligonucleotide
gugagcaugaugcagauug

SEQ ID NO: 2984862 - RNA, 19 nt, Artificial Sequence
  Description of Artificial Sequence: Synthetic oligonucleotide
auacuuuggagacucaguc

SEQ ID NO: 2984863 - RNA, 19 nt, Artificial Sequence
  Description of Artificial Sequence: Synthetic oligonucleotide
gauaccaggaaucuccuug

SEQ ID NO: 2984864 - RNA, 19 nt, Artificial Sequence
  Description of Artificial Sequence: Synthetic oligonucleotide
agacacaacaaucuucagg

SEQ ID NO: 2984865 - RNA, 19 nt, Artificial Sequence
  Description of Artificial Sequence: Synthetic oligonucleotide
caaucuucaggauacagac

SEQ ID NO: 2984866 - RNA, 19 nt, Artificial Sequence
  Description of Artificial Sequence: Synthetic oligonucleotide
aaagacacaacaaucuuca

SEQ ID NO: 2984867 - RNA, 19 nt, Artificial Sequence
  Description of Artificial Sequence: Synthetic oligonucleotide
aaugcaagccaggaugagc

SEQ ID NO: 2984868 - RNA, 19 nt, Artificial Sequence
  Description of Artificial Sequence: Synthetic oligonucleotide
gaaagcacugguuugccag

SEQ ID NO: 2984869 - RNA, 19 nt, Artificial Sequence
  Description of Artificial Sequence: Synthetic oligonucleotide
aaacaguagaggccacagc

SEQ ID NO: 2984870 - RNA, 19 nt, Artificial Sequence
  Description of Artificial Sequence: Synthetic oligonucleotide
uucaucaucaugcccaggu

SEQ ID NO: 2984871 - RNA, 19 nt, Artificial Sequence
  Description of Artificial Sequence: Synthetic oligonucleotide
uucaggauacagacaacgg

SEQ ID NO: 2984872 - RNA, 19 nt, Artificial Sequence
  Description of Artificial Sequence: Synthetic oligonucleotide
aaggagucacauguggacc

SEQ ID NO: 2984873 - RNA, 19 nt, Artificial Sequence
  Description of Artificial Sequence: Synthetic oligonucleotide
ugguuugccagauuaagcu

SEQ ID NO: 2984874 - RNA, 19 nt, Artificial Sequence
  Description of Artificial Sequence: Synthetic oligonucleotide
ugagucaucagugaaucgc

SEQ ID NO: 2984875 - RNA, 19 nt, Artificial Sequence
  Description of Artificial Sequence: Synthetic oligonucleotide
aucuucaggauacagacaa

SEQ ID NO: 2984876 - RNA, 19 nt, Artificial Sequence
  Description of Artificial Sequence: Synthetic oligonucleotide
aaaacaguagaggccacag

SEQ ID NO: 2984877 - RNA, 19 nt, Artificial Sequence
  Description of Artificial Sequence: Synthetic oligonucleotide
agauuaagcugcucacacc

SEQ ID NO: 2984878 - RNA, 19 nt, Artificial Sequence
  Description of Artificial Sequence: Synthetic oligonucleotide
ucaggauacagacaacggu

SEQ ID NO: 2984879 - RNA, 19 nt, Artificial Sequence
  Description of Artificial Sequence: Synthetic oligonucleotide
gauugcuaggaacagguuc

SEQ ID NO: 2984880 - RNA, 19 nt, Artificial Sequence
  Description of Artificial Sequence: Synthetic oligonucleotide
agaagcuuuucccugucuc

SEQ ID NO: 2984881 - RNA, 19 nt, Artificial Sequence
  Description of Artificial Sequence: Synthetic oligonucleotide
aagccaaagacacaacaau

SEQ ID NO: 2984882 - RNA, 19 nt, Artificial Sequence
  Description of Artificial Sequence: Synthetic oligonucleotide
gaugcagauugcuaggaac

SEQ ID NO: 2984883 - RNA, 19 nt, Artificial Sequence
  Description of Artificial Sequence: Synthetic oligonucleotide
cuucaggauacagacaacg

SEQ ID NO: 2984884 - RNA, 19 nt, Artificial Sequence
  Description of Artificial Sequence: Synthetic oligonucleotide
ucaucagugaaucgcacuc

SEQ ID NO: 2984885 - RNA, 19 nt, Artificial Sequence
  Description of Artificial Sequence: Synthetic oligonucleotide
caggauacagacaacggug

SEQ ID NO: 2984886 - RNA, 19 nt, Artificial Sequence
  Description of Artificial Sequence: Synthetic oligonucleotide
ugacuugguagaaagcacu

SEQ ID NO: 2984887 - RNA, 19 nt, Artificial Sequence
  Description of Artificial Sequence: Synthetic oligonucleotide
ugccagauuaagcugcuca

SEQ ID NO: 2984888 - RNA, 19 nt, Artificial Sequence
  Description of Artificial Sequence: Synthetic oligonucleotide
acugagucaucagugaauc

SEQ ID NO: 2984889 - RNA, 19 nt, Artificial Sequence
  Description of Artificial Sequence: Synthetic oligonucleotide
aacaaucuucaggauacag

SEQ ID NO: 2984890 - RNA, 19 nt, Artificial Sequence
  Description of Artificial Sequence: Synthetic oligonucleotide
uaaggagucacauguggac

SEQ ID NO: 2984891 - RNA, 19 nt, Artificial Sequence
  Description of Artificial Sequence: Synthetic oligonucleotide
auaccaggaaucuccuugg

SEQ ID NO: 2984892 - RNA, 19 nt, Artificial Sequence
  Description of Artificial Sequence: Synthetic oligonucleotide
caaagacacaacaaucuuc

SEQ ID NO: 2984893 - RNA, 19 nt, Artificial Sequence
  Description of Artificial Sequence: Synthetic oligonucleotide
aucgcacucucccauacuc

SEQ ID NO: 2984894 - RNA, 19 nt, Artificial Sequence
  Description of Artificial Sequence: Synthetic oligonucleotide
auacagacaacggugagca

SEQ ID NO: 2984895 - RNA, 19 nt, Artificial Sequence
  Description of Artificial Sequence: Synthetic oligonucleotide
ugcuagauuguaaggaguc

SEQ ID NO: 2984896 - RNA, 19 nt, Artificial Sequence
  Description of Artificial Sequence: Synthetic oligonucleotide
gauuguaaggagucacaug

SEQ ID NO: 2984897 - RNA, 19 nt, Artificial Sequence
  Description of Artificial Sequence: Synthetic oligonucleotide
caugaugcagauugcuagg

SEQ ID NO: 2984898 - RNA, 19 nt, Artificial Sequence
  Description of Artificial Sequence: Synthetic oligonucleotide
acacauacuuuggagacuc

SEQ ID NO: 2984899 - RNA, 19 nt, Artificial Sequence
  Description of Artificial Sequence: Synthetic oligonucleotide
ucucccauacucacugucc

SEQ ID NO: 2984900 - RNA, 19 nt, Artificial Sequence
  Description of Artificial Sequence: Synthetic oligonucleotide
uagauuguaaggagucaca

SEQ ID NO: 2984901 - RNA, 19 nt, Artificial Sequence
  Description of Artificial Sequence: Synthetic oligonucleotide
ugguagaaagcacugguuu

SEQ ID NO: 2984902 - RNA, 19 nt, Artificial Sequence
  Description of Artificial Sequence: Synthetic oligonucleotide
acacccaaaacaguagagg

SEQ ID NO: 2984903 - RNA, 19 nt, Artificial Sequence
  Description of Artificial Sequence: Synthetic oligonucleotide
ggcaaugcaagccaggaug

SEQ ID NO: 2984904 - RNA, 19 nt, Artificial Sequence
  Description of Artificial Sequence: Synthetic oligonucleotide
uugacuugguagaaagcac

SEQ ID NO: 2984905 - RNA, 19 nt, Artificial Sequence
  Description of Artificial Sequence: Synthetic oligonucleotide
uguggcaaugcaagccagg

SEQ ID NO: 2984906 - RNA, 19 nt, Artificial Sequence
  Description of Artificial Sequence: Synthetic oligonucleotide
uacuuuggagacucagucc

SEQ ID NO: 2984907 - RNA, 19 nt, Artificial Sequence
  Description of Artificial Sequence: Synthetic oligonucleotide
ucacacccaaaacaguaga

SEQ ID NO: 2984908 - RNA, 19 nt, Artificial Sequence
  Description of Artificial Sequence: Synthetic oligonucleotide
cugcucacacccaaaacag

SEQ ID NO: 2984909 - RNA, 19 nt, Artificial Sequence
  Description of Artificial Sequence: Synthetic oligonucleotide
aucagugaaucgcacucuc

SEQ ID NO: 2984910 - RNA, 19 nt, Artificial Sequence
  Description of Artificial Sequence: Synthetic oligonucleotide
cagauuaagcugcucacac

SEQ ID NO: 2984911 - RNA, 19 nt, Artificial Sequence
  Description of Artificial Sequence: Synthetic oligonucleotide
uccagacugagucaucagu

SEQ ID NO: 2984912 - RNA, 19 nt, Artificial Sequence
  Description of Artificial Sequence: Synthetic oligonucleotide
cagugaaucgcacucuccc

SEQ ID NO: 2984913 - RNA, 19 nt, Artificial Sequence
  Description of Artificial Sequence: Synthetic oligonucleotide
cucuccgucuuccagacug

SEQ ID NO: 2984914 - RNA, 19 nt, Artificial Sequence
  Description of Artificial Sequence: Synthetic oligonucleotide
cugguuugccagauuaagc

SEQ ID NO: 2984915 - RNA, 19 nt, Artificial Sequence
  Description of Artificial Sequence: Synthetic oligonucleotide
auugcuaggaacagguuca

SEQ ID NO: 2984916 - RNA, 19 nt, Artificial Sequence
  Description of Artificial Sequence: Synthetic oligonucleotide
acagcuguggcaaugcaag

SEQ ID NO: 2984917 - RNA, 19 nt, Artificial Sequence
  Description of Artificial Sequence: Synthetic oligonucleotide
uccgugcuagauuguaagg

SEQ ID NO: 2984918 - RNA, 19 nt, Artificial Sequence
  Description of Artificial Sequence: Synthetic oligonucleotide
ucccagggaagccaaagac

SEQ ID NO: 2984919 - RNA, 19 nt, Artificial Sequence
  Description of Artificial Sequence: Synthetic oligonucleotide
cuagauuguaaggagucac

SEQ ID NO: 2984920 - RNA, 19 nt, Artificial Sequence
  Description of Artificial Sequence: Synthetic oligonucleotide
acccaaaacaguagaggcc

SEQ ID NO: 2984921 - RNA, 19 nt, Artificial Sequence
  Description of Artificial Sequence: Synthetic oligonucleotide
aucuccuuggguuggggag

SEQ ID NO: 2984922 - RNA, 19 nt, Artificial Sequence
  Description of Artificial Sequence: Synthetic oligonucleotide
guuugccagauuaagcugc

SEQ ID NO: 2984923 - RNA, 19 nt, Artificial Sequence
  Description of Artificial Sequence: Synthetic oligonucleotide
cuugacuugguagaaagca

SEQ ID NO: 2984924 - RNA, 19 nt, Artificial Sequence
  Description of Artificial Sequence: Synthetic oligonucleotide
acagacaacggugagcaug

SEQ ID NO: 2984925 - RNA, 19 nt, Artificial Sequence
  Description of Artificial Sequence: Synthetic oligonucleotide
aacggugagcaugaugcag

SEQ ID NO: 2984926 - RNA, 19 nt, Artificial Sequence
  Description of Artificial Sequence: Synthetic oligonucleotide
gcaugaugcagauugcuag

SEQ ID NO: 2984927 - RNA, 19 nt, Artificial Sequence
  Description of Artificial Sequence: Synthetic oligonucleotide
auucuuugcaccucuccgu

SEQ ID NO: 2984928 - RNA, 19 nt, Artificial Sequence
  Description of Artificial Sequence: Synthetic oligonucleotide
ucuuccucauccagggucu

SEQ ID NO: 2984929 - RNA, 19 nt, Artificial Sequence
  Description of Artificial Sequence: Synthetic oligonucleotide
uuaagcugcucacacccaa

SEQ ID NO: 2984930 - RNA, 19 nt, Artificial Sequence
  Description of Artificial Sequence: Synthetic oligonucleotide
gaacagguucaucaucaug

SEQ ID NO: 2984931 - RNA, 19 nt, Artificial Sequence
  Description of Artificial Sequence: Synthetic oligonucleotide
gcuaggaacagguucauca

SEQ ID NO: 2984932 - RNA, 19 nt, Artificial Sequence
  Description of Artificial Sequence: Synthetic oligonucleotide
aaucuccuuggguugggga

SEQ ID NO: 2984933 - RNA, 19 nt, Artificial Sequence
  Description of Artificial Sequence: Synthetic oligonucleotide
aaagcacugguuugccaga

SEQ ID NO: 2984934 - RNA, 19 nt, Artificial Sequence
  Description of Artificial Sequence: Synthetic oligonucleotide
agguucaucaucaugccca

SEQ ID NO: 2984935 - RNA, 19 nt, Artificial Sequence
  Description of Artificial Sequence: Synthetic oligonucleotide
acugguuugccagauuaag

SEQ ID NO: 2984936 - RNA, 19 nt, Artificial Sequence
  Description of Artificial Sequence: Synthetic oligonucleotide
guauucuuugcaccucucc

SEQ ID NO: 2984937 - RNA, 19 nt, Artificial Sequence
  Description of Artificial Sequence: Synthetic oligonucleotide
ucagugaaucgcacucucc

SEQ ID NO: 2984938 - RNA, 19 nt, Artificial Sequence
  Description of Artificial Sequence: Synthetic oligonucleotide
cacuguccgugcuagauug

SEQ ID NO: 2984939 - RNA, 19 nt, Artificial Sequence
  Description of Artificial Sequence: Synthetic oligonucleotide
cucacacccaaaacaguag

SEQ ID NO: 2984940 - RNA, 19 nt, Artificial Sequence
  Description of Artificial Sequence: Synthetic oligonucleotide
augcccagguauucuuugc

SEQ ID NO: 2984941 - RNA, 19 nt, Artificial Sequence
  Description of Artificial Sequence: Synthetic oligonucleotide
guccgugcuagauuguaag

SEQ ID NO: 2984942 - RNA, 19 nt, Artificial Sequence
  Description of Artificial Sequence: Synthetic oligonucleotide
uuguaaggagucacaugug

SEQ ID NO: 2984943 - RNA, 19 nt, Artificial Sequence
  Description of Artificial Sequence: Synthetic oligonucleotide
cuuggguuggggagggagg

SEQ ID NO: 2984944 - RNA, 19 nt, Artificial Sequence
  Description of Artificial Sequence: Synthetic oligonucleotide
cugaucuugacuugguaga

SEQ ID NO: 2984945 - RNA, 19 nt, Artificial Sequence
  Description of Artificial Sequence: Synthetic oligonucleotide
ugagcaugaugcagauugc

SEQ ID NO: 2984946 - RNA, 19 nt, Artificial Sequence
  Description of Artificial Sequence: Synthetic oligonucleotide
acauacuuuggagacucag

SEQ ID NO: 2984947 - RNA, 19 nt, Artificial Sequence
  Description of Artificial Sequence: Synthetic oligonucleotide
cacacccaaaacaguagag

SEQ ID NO: 2984948 - RNA, 19 nt, Artificial Sequence
  Description of Artificial Sequence: Synthetic oligonucleotide
agcugcucacacccaaaac

SEQ ID NO: 2984949 - RNA, 19 nt, Artificial Sequence
  Description of Artificial Sequence: Synthetic oligonucleotide
uuuggagacucagucccag

SEQ ID NO: 2984950 - RNA, 19 nt, Artificial Sequence
  Description of Artificial Sequence: Synthetic oligonucleotide
cucuuccucauccaggguc

SEQ ID NO: 2984951 - RNA, 19 nt, Artificial Sequence
  Description of Artificial Sequence: Synthetic oligonucleotide
uccggccacacauacuuug

SEQ ID NO: 2984952 - RNA, 19 nt, Artificial Sequence
  Description of Artificial Sequence: Synthetic oligonucleotide
acuugguagaaagcacugg

SEQ ID NO: 2984953 - RNA, 19 nt, Artificial Sequence
  Description of Artificial Sequence: Synthetic oligonucleotide
cacucucccauacucacug

SEQ ID NO: 2984954 - RNA, 19 nt, Artificial Sequence
  Description of Artificial Sequence: Synthetic oligonucleotide
accucuccgucuuccagac

SEQ ID NO: 2984955 - RNA, 19 nt, Artificial Sequence
  Description of Artificial Sequence: Synthetic oligonucleotide
aggaacagguucaucauca

SEQ ID NO: 2984956 - RNA, 19 nt, Artificial Sequence
  Description of Artificial Sequence: Synthetic oligonucleotide
uucuuugcaccucuccguc

SEQ ID NO: 2984957 - RNA, 19 nt, Artificial Sequence
  Description of Artificial Sequence: Synthetic oligonucleotide
gacaacggugagcaugaug

SEQ ID NO: 2984958 - RNA, 19 nt, Artificial Sequence
  Description of Artificial Sequence: Synthetic oligonucleotide
acaaucuucaggauacaga

SEQ ID NO: 2984959 - RNA, 19 nt, Artificial Sequence
  Description of Artificial Sequence: Synthetic oligonucleotide
aggagucacauguggaccu

SEQ ID NO: 2984960 - RNA, 19 nt, Artificial Sequence
  Description of Artificial Sequence: Synthetic oligonucleotide
auguggaccugaucuugac

SEQ ID NO: 2984961 - RNA, 19 nt, Artificial Sequence
  Description of Artificial Sequence: Synthetic oligonucleotide
uguggaccugaucuugacu

SEQ ID NO: 2984962 - RNA, 19 nt, Artificial Sequence
  Description of Artificial Sequence: Synthetic oligonucleotide
uuugccagauuaagcugcu

SEQ ID NO: 2984963 - RNA, 19 nt, Artificial Sequence
  Description of Artificial Sequence: Synthetic oligonucleotide
aagaagcuuuucccugucu

SEQ ID NO: 2984964 - RNA, 19 nt, Artificial Sequence
  Description of Artificial Sequence: Synthetic oligonucleotide
ugcagauugcuaggaacag

SEQ ID NO: 2984965 - RNA, 19 nt, Artificial Sequence
  Description of Artificial Sequence: Synthetic oligonucleotide
ucuccuuggguuggggagg

SEQ ID NO: 2984966 - RNA, 19 nt, Artificial Sequence
  Description of Artificial Sequence: Synthetic oligonucleotide
ccugaucuugacuugguag

SEQ ID NO: 2984967 - RNA, 19 nt, Artificial Sequence
  Description of Artificial Sequence: Synthetic oligonucleotide
auaggauaccaggaaucuc

SEQ ID NO: 2984968 - RNA, 19 nt, Artificial Sequence
  Description of Artificial Sequence: Synthetic oligonucleotide
uaccaggaaucuccuuggg

SEQ ID NO: 2984969 - RNA, 19 nt, Artificial Sequence
  Description of Artificial Sequence: Synthetic oligonucleotide
uaggaacagguucaucauc

SEQ ID NO: 2984970 - RNA, 19 nt, Artificial Sequence
  Description of Artificial Sequence: Synthetic oligonucleotide
ugcccagguauucuuugca

SEQ ID NO: 2984971 - RNA, 19 nt, Artificial Sequence
  Description of Artificial Sequence: Synthetic oligonucleotide
agugaaucgcacucuccca

SEQ ID NO: 2984972 - RNA, 19 nt, Artificial Sequence
  Description of Artificial Sequence: Synthetic oligonucleotide
gaagccaaagacacaacaa

SEQ ID NO: 2984973 - RNA, 19 nt, Artificial Sequence
  Description of Artificial Sequence: Synthetic oligonucleotide
agcuuuucccugucucuuc

SEQ ID NO: 2984974 - RNA, 19 nt, Artificial Sequence
  Description of Artificial Sequence: Synthetic oligonucleotide
uacucacuguccgugcuag

SEQ ID NO: 2984975 - RNA, 19 nt, Artificial Sequence
  Description of Artificial Sequence: Synthetic oligonucleotide
agggaagccaaagacacaa

SEQ ID NO: 2984976 - RNA, 19 nt, Artificial Sequence
  Description of Artificial Sequence: Synthetic oligonucleotide
agguauucuuugcaccucu

SEQ ID NO: 2984977 - RNA, 19 nt, Artificial Sequence
  Description of Artificial Sequence: Synthetic oligonucleotide
uugguagaaagcacugguu

SEQ ID NO: 2984978 - RNA, 19 nt, Artificial Sequence
  Description of Artificial Sequence: Synthetic oligonucleotide
gaaucgcacucucccauac

SEQ ID NO: 2984979 - RNA, 19 nt, Artificial Sequence
  Description of Artificial Sequence: Synthetic oligonucleotide
augcaagccaggaugagca

SEQ ID NO: 2984980 - RNA, 19 nt, Artificial Sequence
  Description of Artificial Sequence: Synthetic oligonucleotide
ugaugcagauugcuaggaa

SEQ ID NO: 2984981 - RNA, 19 nt, Artificial Sequence
  Description of Artificial Sequence: Synthetic oligonucleotide
gacuugguagaaagcacug

SEQ ID NO: 2984982 - RNA, 19 nt, Artificial Sequence
  Description of Artificial Sequence: Synthetic oligonucleotide
aagcugcucacacccaaaa

SEQ ID NO: 2984983 - RNA, 19 nt, Artificial Sequence
  Description of Artificial Sequence: Synthetic oligonucleotide
gcugcucacacccaaaaca

SEQ ID NO: 2984984 - RNA, 19 nt, Artificial Sequence
  Description of Artificial Sequence: Synthetic oligonucleotide
agggucugggagcuccggc

SEQ ID NO: 2984985 - RNA, 19 nt, Artificial Sequence
  Description of Artificial Sequence: Synthetic oligonucleotide
aaucgcacucucccauacu

SEQ ID NO: 2984986 - RNA, 19 nt, Artificial Sequence
  Description of Artificial Sequence: Synthetic oligonucleotide
cugagucaucagugaaucg

SEQ ID NO: 2984987 - RNA, 19 nt, Artificial Sequence
  Description of Artificial Sequence: Synthetic oligonucleotide
agggagguguugaaucccc

SEQ ID NO: 2984988 - RNA, 19 nt, Artificial Sequence
  Description of Artificial Sequence: Synthetic oligonucleotide
augcagauugcuaggaaca

SEQ ID NO: 2984989 - RNA, 19 nt, Artificial Sequence
  Description of Artificial Sequence: Synthetic oligonucleotide
gagacucagucccagggaa

SEQ ID NO: 2984990 - RNA, 19 nt, Artificial Sequence
  Description of Artificial Sequence: Synthetic oligonucleotide
ggaagccaaagacacaaca

SEQ ID NO: 2984991 - RNA, 19 nt, Artificial Sequence
  Description of Artificial Sequence: Synthetic oligonucleotide
agacugagucaucagugaa

SEQ ID NO: 2984992 - RNA, 19 nt, Artificial Sequence
  Description of Artificial Sequence: Synthetic oligonucleotide
aaucuucaggauacagaca

SEQ ID NO: 2984993 - RNA, 19 nt, Artificial Sequence
  Description of Artificial Sequence: Synthetic oligonucleotide
uagaaagcacugguuugcc

SEQ ID NO: 2984994 - RNA, 19 nt, Artificial Sequence
  Description of Artificial Sequence: Synthetic oligonucleotide
caugcccagguauucuuug

SEQ ID NO: 2984995 - RNA, 19 nt, Artificial Sequence
  Description of Artificial Sequence: Synthetic oligonucleotide
ucuucaggauacagacaac

SEQ ID NO: 2984996 - RNA, 19 nt, Artificial Sequence
  Description of Artificial Sequence: Synthetic oligonucleotide
accaggaaucuccuugggu

SEQ ID NO: 2984997 - RNA, 19 nt, Artificial Sequence
  Description of Artificial Sequence: Synthetic oligonucleotide
agaaagcacugguuugcca

SEQ ID NO: 2984998 - RNA, 19 nt, Artificial Sequence
  Description of Artificial Sequence: Synthetic oligonucleotide
uuccagacugagucaucag

SEQ ID NO: 2984999 - RNA, 19 nt, Artificial Sequence
  Description of Artificial Sequence: Synthetic oligonucleotide
uggaccugaucuugacuug

SEQ ID NO: 2985000 - RNA, 19 nt, Artificial Sequence
  Description of Artificial Sequence: Synthetic oligonucleotide
gguuugccagauuaagcug

SEQ ID NO: 2985001 - RNA, 19 nt, Artificial Sequence
  Description of Artificial Sequence: Synthetic oligonucleotide
aggaaucuccuuggguugg

SEQ ID NO: 2985002 - RNA, 19 nt, Artificial Sequence
  Description of Artificial Sequence: Synthetic oligonucleotide
acauguggaccugaucuug

SEQ ID NO: 2985003 - RNA, 19 nt, Artificial Sequence
  Description of Artificial Sequence: Synthetic oligonucleotide
cagacaacggugagcauga

SEQ ID NO: 2985004 - RNA, 19 nt, Artificial Sequence
  Description of Artificial Sequence: Synthetic oligonucleotide
ugcucacacccaaaacagu

SEQ ID NO: 2985005 - RNA, 19 nt, Artificial Sequence
  Description of Artificial Sequence: Synthetic oligonucleotide
cagauugcuaggaacaggu

SEQ ID NO: 2985006 - RNA, 19 nt, Artificial Sequence
  Description of Artificial Sequence: Synthetic oligonucleotide
cagguucaucaucaugccc

SEQ ID NO: 2985007 - RNA, 19 nt, Artificial Sequence
  Description of Artificial Sequence: Synthetic oligonucleotide
agucaucagugaaucgcac

SEQ ID NO: 2985008 - RNA, 19 nt, Artificial Sequence
  Description of Artificial Sequence: Synthetic oligonucleotide
uguccgugcuagauuguaa

SEQ ID NO: 2985009 - RNA, 19 nt, Artificial Sequence
  Description of Artificial Sequence: Synthetic oligonucleotide
ugaucuugacuugguagaa

SEQ ID NO: 2985010 - RNA, 19 nt, Artificial Sequence
  Description of Artificial Sequence: Synthetic oligonucleotide
gagucaucagugaaucgca

SEQ ID NO: 2985011 - RNA, 19 nt, Artificial Sequence
  Description of Artificial Sequence: Synthetic oligonucleotide
ccagacugagucaucagug

SEQ ID NO: 2985012 - RNA, 19 nt, Artificial Sequence
  Description of Artificial Sequence: Synthetic oligonucleotide
cacaacaaucuucaggaua

SEQ ID NO: 2985013 - RNA, 19 nt, Artificial Sequence
  Description of Artificial Sequence: Synthetic oligonucleotide
ucgcacucucccauacuca

SEQ ID NO: 2985014 - RNA, 19 nt, Artificial Sequence
  Description of Artificial Sequence: Synthetic oligonucleotide
cuugguagaaagcacuggu

SEQ ID NO: 2985015 - RNA, 19 nt, Artificial Sequence
  Description of Artificial Sequence: Synthetic oligonucleotide
uaagcugcucacacccaaa

SEQ ID NO: 2985016 - RNA, 19 nt, Artificial Sequence
  Description of Artificial Sequence: Synthetic oligonucleotide
ccacacauacuuuggagac

SEQ ID NO: 2985017 - RNA, 19 nt, Artificial Sequence
  Description of Artificial Sequence: Synthetic oligonucleotide
acucagucccagggaagcc

SEQ ID NO: 2985018 - RNA, 19 nt, Artificial Sequence
  Description of Artificial Sequence: Synthetic oligonucleotide
gaagcuuuucccugucucu

SEQ ID NO: 2985019 - RNA, 19 nt, Artificial Sequence
  Description of Artificial Sequence: Synthetic oligonucleotide
ggagggagguguugaaucc

SEQ ID NO: 2985020 - RNA, 19 nt, Artificial Sequence
  Description of Artificial Sequence: Synthetic oligonucleotide
ccgucuuccagacugaguc

SEQ ID NO: 2985021 - RNA, 19 nt, Artificial Sequence
  Description of Artificial Sequence: Synthetic oligonucleotide
ggccacacauacuuuggag

SEQ ID NO: 2985022 - RNA, 19 nt, Artificial Sequence
  Description of Artificial Sequence: Synthetic oligonucleotide
aggauacagacaacgguga

SEQ ID NO: 2985023 - RNA, 19 nt, Artificial Sequence
  Description of Artificial Sequence: Synthetic oligonucleotide
guaaggagucacaugugga

SEQ ID NO: 2985024 - RNA, 19 nt, Artificial Sequence
  Description of Artificial Sequence: Synthetic oligonucleotide
agucccagggaagccaaag

SEQ ID NO: 2985025 - RNA, 19 nt, Artificial Sequence
  Description of Artificial Sequence: Synthetic oligonucleotide
gaaucuccuuggguugggg

SEQ ID NO: 2985026 - RNA, 19 nt, Artificial Sequence
  Description of Artificial Sequence: Synthetic oligonucleotide
ucaucaugcccagguauuc

SEQ ID NO: 2985027 - RNA, 19 nt, Artificial Sequence
  Description of Artificial Sequence: Synthetic oligonucleotide
ucuuugcaccucuccgucu

SEQ ID NO: 2985028 - RNA, 19 nt, Artificial Sequence
  Description of Artificial Sequence: Synthetic oligonucleotide
uagaggccacagcuguggc

SEQ ID NO: 2985029 - RNA, 19 nt, Artificial Sequence
  Description of Artificial Sequence: Synthetic oligonucleotide
gagggagguguugaauccc

SEQ ID NO: 2985030 - RNA, 19 nt, Artificial Sequence
  Description of Artificial Sequence: Synthetic oligonucleotide
aagcuuuucccugucucuu

SEQ ID NO: 2985031 - RNA, 19 nt, Artificial Sequence
  Description of Artificial Sequence: Synthetic oligonucleotide
cuguggcaaugcaagccag

SEQ ID NO: 2985032 - RNA, 19 nt, Artificial Sequence
  Description of Artificial Sequence: Synthetic oligonucleotide
gguucaucaucaugcccag

SEQ ID NO: 2985033 - RNA, 19 nt, Artificial Sequence
  Description of Artificial Sequence: Synthetic oligonucleotide
ggauacagacaacggugag

SEQ ID NO: 2985034 - RNA, 19 nt, Artificial Sequence
  Description of Artificial Sequence: Synthetic oligonucleotide
uuggggagggagguguuga

SEQ ID NO: 2985035 - RNA, 19 nt, Artificial Sequence
  Description of Artificial Sequence: Synthetic oligonucleotide
cagacugagucaucaguga

SEQ ID NO: 2985036 - RNA, 19 nt, Artificial Sequence
  Description of Artificial Sequence: Synthetic oligonucleotide
cucucccauacucacuguc

SEQ ID NO: 2985037 - RNA, 19 nt, Artificial Sequence
  Description of Artificial Sequence: Synthetic oligonucleotide
ucacuguccgugcuagauu

SEQ ID NO: 2985038 - RNA, 19 nt, Artificial Sequence
  Description of Artificial Sequence: Synthetic oligonucleotide
uccgucuuccagacugagu

SEQ ID NO: 2985039 - RNA, 19 nt, Artificial Sequence
  Description of Artificial Sequence: Synthetic oligonucleotide
acaguagaggccacagcug

SEQ ID NO: 2985040 - RNA, 19 nt, Artificial Sequence
  Description of Artificial Sequence: Synthetic oligonucleotide
ucuccgucuuccagacuga

SEQ ID NO: 2985041 - RNA, 19 nt, Artificial Sequence
  Description of Artificial Sequence: Synthetic oligonucleotide
ugaaucgcacucucccaua

SEQ ID NO: 2985042 - RNA, 19 nt, Artificial Sequence
  Description of Artificial Sequence: Synthetic oligonucleotide
aucaugcccagguauucuu

SEQ ID NO: 2985043 - RNA, 19 nt, Artificial Sequence
  Description of Artificial Sequence: Synthetic oligonucleotide
uucccugucucuuccucau

SEQ ID NO: 2985044 - RNA, 19 nt, Artificial Sequence
  Description of Artificial Sequence: Synthetic oligonucleotide
ucaugcccagguauucuuu

SEQ ID NO: 2985045 - RNA, 19 nt, Artificial Sequence
  Description of Artificial Sequence: Synthetic oligonucleotide
cgugcuagauuguaaggag

SEQ ID NO: 2985046 - RNA, 19 nt, Artificial Sequence
  Description of Artificial Sequence: Synthetic oligonucleotide
gggagggagguguugaauc

SEQ ID NO: 2985047 - RNA, 19 nt, Artificial Sequence
  Description of Artificial Sequence: Synthetic oligonucleotide
cauacuuuggagacucagu

SEQ ID NO: 2985048 - RNA, 19 nt, Artificial Sequence
  Description of Artificial Sequence: Synthetic oligonucleotide
cccagguauucuuugcacc

SEQ ID NO: 2985049 - RNA, 19 nt, Artificial Sequence
  Description of Artificial Sequence: Synthetic oligonucleotide
uggcaaugcaagccaggau

SEQ ID NO: 2985050 - RNA, 19 nt, Artificial Sequence
  Description of Artificial Sequence: Synthetic oligonucleotide
acggugagcaugaugcaga

SEQ ID NO: 2985051 - RNA, 19 nt, Artificial Sequence
  Description of Artificial Sequence: Synthetic oligonucleotide
ggaccugaucuugacuugg

SEQ ID NO: 2985052 - RNA, 19 nt, Artificial Sequence
  Description of Artificial Sequence: Synthetic oligonucleotide
guggaccugaucuugacuu

SEQ ID NO: 2985053 - RNA, 19 nt, Artificial Sequence
  Description of Artificial Sequence: Synthetic oligonucleotide
caagaagcuuuucccuguc

SEQ ID NO: 2985054 - RNA, 19 nt, Artificial Sequence
  Description of Artificial Sequence: Synthetic oligonucleotide
gagcuccggccacacauac

SEQ ID NO: 2985055 - RNA, 19 nt, Artificial Sequence
  Description of Artificial Sequence: Synthetic oligonucleotide
cauguggaccugaucuuga

SEQ ID NO: 2985056 - RNA, 19 nt, Artificial Sequence
  Description of Artificial Sequence: Synthetic oligonucleotide
gcagauugcuaggaacagg

SEQ ID NO: 2985057 - RNA, 19 nt, Artificial Sequence
  Description of Artificial Sequence: Synthetic oligonucleotide
gccagauuaagcugcucac

SEQ ID NO: 2985058 - RNA, 19 nt, Artificial Sequence
  Description of Artificial Sequence: Synthetic oligonucleotide
gcuuuucccugucucuucc

SEQ ID NO: 2985059 - RNA, 19 nt, Artificial Sequence
  Description of Artificial Sequence: Synthetic oligonucleotide
acacaacaaucuucaggau

SEQ ID NO: 2985060 - RNA, 19 nt, Artificial Sequence
  Description of Artificial Sequence: Synthetic oligonucleotide
cagcuguggcaaugcaagc

SEQ ID NO: 2985061 - RNA, 19 nt, Artificial Sequence
  Description of Artificial Sequence: Synthetic oligonucleotide
cccaagaagcuuuucccug

SEQ ID NO: 2985062 - RNA, 19 nt, Artificial Sequence
  Description of Artificial Sequence: Synthetic oligonucleotide
uugcaccucuccgucuucc

SEQ ID NO: 2985063 - RNA, 19 nt, Artificial Sequence
  Description of Artificial Sequence: Synthetic oligonucleotide
gcuguggcaaugcaagcca

SEQ ID NO: 2985064 - RNA, 19 nt, Artificial Sequence
  Description of Artificial Sequence: Synthetic oligonucleotide
cccugucucuuccucaucc

SEQ ID NO: 2985065 - RNA, 19 nt, Artificial Sequence
  Description of Artificial Sequence: Synthetic oligonucleotide
gucacauguggaccugauc

SEQ ID NO: 2985066 - RNA, 19 nt, Artificial Sequence
  Description of Artificial Sequence: Synthetic oligonucleotide
uuugcaccucuccgucuuc

SEQ ID NO: 2985067 - RNA, 19 nt, Artificial Sequence
  Description of Artificial Sequence: Synthetic oligonucleotide
auacucacuguccgugcua

SEQ ID NO: 2985068 - RNA, 19 nt, Artificial Sequence
  Description of Artificial Sequence: Synthetic oligonucleotide
aucaucaugcccagguauu

SEQ ID NO: 2985069 - RNA, 19 nt, Artificial Sequence
  Description of Artificial Sequence: Synthetic oligonucleotide
auuaagcugcucacaccca

SEQ ID NO: 2985070 - RNA, 19 nt, Artificial Sequence
  Description of Artificial Sequence: Synthetic oligonucleotide
caaugcaagccaggaugag

SEQ ID NO: 2985071 - RNA, 19 nt, Artificial Sequence
  Description of Artificial Sequence: Synthetic oligonucleotide
agacucagucccagggaag

SEQ ID NO: 2985072 - RNA, 19 nt, Artificial Sequence
  Description of Artificial Sequence: Synthetic oligonucleotide
gggucugggagcuccggcc

SEQ ID NO: 2985073 - RNA, 19 nt, Artificial Sequence
  Description of Artificial Sequence: Synthetic oligonucleotide
aagcacugguuugccagau

SEQ ID NO: 2985074 - RNA, 19 nt, Artificial Sequence
  Description of Artificial Sequence: Synthetic oligonucleotide
cccaaaacaguagaggcca

SEQ ID NO: 2985075 - RNA, 19 nt, Artificial Sequence
  Description of Artificial Sequence: Synthetic oligonucleotide
cacagcuguggcaaugcaa

SEQ ID NO: 2985076 - RNA, 19 nt, Artificial Sequence
  Description of Artificial Sequence: Synthetic oligonucleotide
accugaucuugacuuggua

SEQ ID NO: 2985077 - RNA, 19 nt, Artificial Sequence
  Description of Artificial Sequence: Synthetic oligonucleotide
gucccagggaagccaaaga

SEQ ID NO: 2985078 - RNA, 19 nt, Artificial Sequence
  Description of Artificial Sequence: Synthetic oligonucleotide
aggauaccaggaaucuccu

SEQ ID NO: 2985079 - RNA, 19 nt, Artificial Sequence
  Description of Artificial Sequence: Synthetic oligonucleotide
cuccuuggguuggggaggg

SEQ ID NO: 2985080 - RNA, 19 nt, Artificial Sequence
  Description of Artificial Sequence: Synthetic oligonucleotide
aguagaggccacagcugug

SEQ ID NO: 2985081 - RNA, 19 nt, Artificial Sequence
  Description of Artificial Sequence: Synthetic oligonucleotide
gcacugguuugccagauua

SEQ ID NO: 2985082 - RNA, 19 nt, Artificial Sequence
  Description of Artificial Sequence: Synthetic oligonucleotide
cuaggaacagguucaucau

SEQ ID NO: 2985083 - RNA, 19 nt, Artificial Sequence
  Description of Artificial Sequence: Synthetic oligonucleotide
caguagaggccacagcugu

SEQ ID NO: 2985084 - RNA, 19 nt, Artificial Sequence
  Description of Artificial Sequence: Synthetic oligonucleotide
acucucccauacucacugu

SEQ ID NO: 2985085 - RNA, 19 nt, Artificial Sequence
  Description of Artificial Sequence: Synthetic oligonucleotide
gugaaucgcacucucccau

SEQ ID NO: 2985086 - RNA, 19 nt, Artificial Sequence
  Description of Artificial Sequence: Synthetic oligonucleotide
ucugggagcuccggccaca

SEQ ID NO: 2985087 - RNA, 19 nt, Artificial Sequence
  Description of Artificial Sequence: Synthetic oligonucleotide
cagguauucuuugcaccuc

SEQ ID NO: 2985088 - RNA, 19 nt, Artificial Sequence
  Description of Artificial Sequence: Synthetic oligonucleotide
gacugagucaucagugaau

SEQ ID NO: 2985089 - RNA, 19 nt, Artificial Sequence
  Description of Artificial Sequence: Synthetic oligonucleotide
ccggccacacauacuuugg

SEQ ID NO: 2985090 - RNA, 19 nt, Artificial Sequence
  Description of Artificial Sequence: Synthetic oligonucleotide
uggggagggagguguugaa

SEQ ID NO: 2985091 - RNA, 19 nt, Artificial Sequence
  Description of Artificial Sequence: Synthetic oligonucleotide
gcaaugcaagccaggauga

SEQ ID NO: 2985092 - RNA, 19 nt, Artificial Sequence
  Description of Artificial Sequence: Synthetic oligonucleotide
cucagucccagggaagcca

SEQ ID NO: 2985093 - RNA, 19 nt, Artificial Sequence
  Description of Artificial Sequence: Synthetic oligonucleotide
gcccagguauucuuugcac

SEQ ID NO: 2985094 - RNA, 19 nt, Artificial Sequence
  Description of Artificial Sequence: Synthetic oligonucleotide
cacugguuugccagauuaa

SEQ ID NO: 2985095 - RNA, 19 nt, Artificial Sequence
  Description of Artificial Sequence: Synthetic oligonucleotide
gcuagauuguaaggaguca

SEQ ID NO: 2985096 - RNA, 19 nt, Artificial Sequence
  Description of Artificial Sequence: Synthetic oligonucleotide
ugcuaggaacagguucauc

SEQ ID NO: 2985097 - RNA, 19 nt, Artificial Sequence
  Description of Artificial Sequence: Synthetic oligonucleotide
gagucacauguggaccuga

SEQ ID NO: 2985098 - RNA, 19 nt, Artificial Sequence
  Description of Artificial Sequence: Synthetic oligonucleotide
caacggugagcaugaugca

SEQ ID NO: 2985099 - RNA, 19 nt, Artificial Sequence
  Description of Artificial Sequence: Synthetic oligonucleotide
uugcuaggaacagguucau

SEQ ID NO: 2985100 - RNA, 19 nt, Artificial Sequence
  Description of Artificial Sequence: Synthetic oligonucleotide
cuccgucuuccagacugag

SEQ ID NO: 2985101 - RNA, 19 nt, Artificial Sequence
  Description of Artificial Sequence: Synthetic oligonucleotide
cauacucacuguccgugcu

SEQ ID NO: 2985102 - RNA, 19 nt, Artificial Sequence
  Description of Artificial Sequence: Synthetic oligonucleotide
ucccugucucuuccucauc

SEQ ID NO: 2985103 - RNA, 19 nt, Artificial Sequence
  Description of Artificial Sequence: Synthetic oligonucleotide
uacagacaacggugagcau

SEQ ID NO: 2985104 - RNA, 19 nt, Artificial Sequence
  Description of Artificial Sequence: Synthetic oligonucleotide
acucacuguccgugcuaga

SEQ ID NO: 2985105 - RNA, 19 nt, Artificial Sequence
  Description of Artificial Sequence: Synthetic oligonucleotide
cagggaagccaaagacaca

SEQ ID NO: 2985106 - RNA, 19 nt, Artificial Sequence
  Description of Artificial Sequence: Synthetic oligonucleotide
gugcuagauuguaaggagu

SEQ ID NO: 2985107 - RNA, 19 nt, Artificial Sequence
  Description of Artificial Sequence: Synthetic oligonucleotide
ccuuggguuggggagggag

SEQ ID NO: 2985108 - RNA, 19 nt, Artificial Sequence
  Description of Artificial Sequence: Synthetic oligonucleotide
agucacauguggaccugau

SEQ ID NO: 2985109 - RNA, 19 nt, Artificial Sequence
  Description of Artificial Sequence: Synthetic oligonucleotide
agcacugguuugccagauu

SEQ ID NO: 2985110 - RNA, 19 nt, Artificial Sequence
  Description of Artificial Sequence: Synthetic oligonucleotide
ugggagcuccggccacaca

SEQ ID NO: 2985111 - RNA, 19 nt, Artificial Sequence
  Description of Artificial Sequence: Synthetic oligonucleotide
cgcacucucccauacucac

SEQ ID NO: 2985112 - RNA, 19 nt, Artificial Sequence
  Description of Artificial Sequence: Synthetic oligonucleotide
cacauacuuuggagacuca

SEQ ID NO: 2985113 - RNA, 19 nt, Artificial Sequence
  Description of Artificial Sequence: Synthetic oligonucleotide
ggucugggagcuccggcca

SEQ ID NO: 2985114 - RNA, 19 nt, Artificial Sequence
  Description of Artificial Sequence: Synthetic oligonucleotide
agauugcuaggaacagguu

SEQ ID NO: 2985115 - RNA, 19 nt, Artificial Sequence
  Description of Artificial Sequence: Synthetic oligonucleotide
gucugggagcuccggccac

SEQ ID NO: 2985116 - RNA, 19 nt, Artificial Sequence
  Description of Artificial Sequence: Synthetic oligonucleotide
ccaggaaucuccuuggguu

SEQ ID NO: 2985117 - RNA, 19 nt, Artificial Sequence
  Description of Artificial Sequence: Synthetic oligonucleotide
ccaaaacaguagaggccac

SEQ ID NO: 2985118 - RNA, 19 nt, Artificial Sequence
  Description of Artificial Sequence: Synthetic oligonucleotide
ccgugcuagauuguaagga

SEQ ID NO: 2985119 - RNA, 19 nt, Artificial Sequence
  Description of Artificial Sequence: Synthetic oligonucleotide
uugccagauuaagcugcuc

SEQ ID NO: 2985120 - RNA, 19 nt, Artificial Sequence
  Description of Artificial Sequence: Synthetic oligonucleotide
ccagguauucuuugcaccu

SEQ ID NO: 2985121 - RNA, 19 nt, Artificial Sequence
  Description of Artificial Sequence: Synthetic oligonucleotide
gucuuccagacugagucau

SEQ ID NO: 2985122 - RNA, 19 nt, Artificial Sequence
  Description of Artificial Sequence: Synthetic oligonucleotide
gcaagccaggaugagcaga

SEQ ID NO: 2985123 - RNA, 19 nt, Artificial Sequence
  Description of Artificial Sequence: Synthetic oligonucleotide
gguauucuuugcaccucuc

SEQ ID NO: 2985124 - RNA, 19 nt, Artificial Sequence
  Description of Artificial Sequence: Synthetic oligonucleotide
ggagucacauguggaccug

SEQ ID NO: 2985125 - RNA, 19 nt, Artificial Sequence
  Description of Artificial Sequence: Synthetic oligonucleotide
cuuugcaccucuccgucuu

SEQ ID NO: 2985126 - RNA, 19 nt, Artificial Sequence
  Description of Artificial Sequence: Synthetic oligonucleotide
gcuccggccacacauacuu

SEQ ID NO: 2985127 - RNA, 19 nt, Artificial Sequence
  Description of Artificial Sequence: Synthetic oligonucleotide
cuuccucauccagggucug

SEQ ID NO: 2985128 - RNA, 19 nt, Artificial Sequence
  Description of Artificial Sequence: Synthetic oligonucleotide
cucacuguccgugcuagau

SEQ ID NO: 2985129 - RNA, 19 nt, Artificial Sequence
  Description of Artificial Sequence: Synthetic oligonucleotide
acuguccgugcuagauugu

SEQ ID NO: 2985130 - RNA, 19 nt, Artificial Sequence
  Description of Artificial Sequence: Synthetic oligonucleotide
ccagauuaagcugcucaca

SEQ ID NO: 2985131 - RNA, 19 nt, Artificial Sequence
  Description of Artificial Sequence: Synthetic oligonucleotide
caucagugaaucgcacucu

SEQ ID NO: 2985132 - RNA, 19 nt, Artificial Sequence
  Description of Artificial Sequence: Synthetic oligonucleotide
cacauguggaccugaucuu

SEQ ID NO: 2985133 - RNA, 19 nt, Artificial Sequence
  Description of Artificial Sequence: Synthetic oligonucleotide
gaccugaucuugacuuggu

SEQ ID NO: 2985134 - RNA, 19 nt, Artificial Sequence
  Description of Artificial Sequence: Synthetic oligonucleotide
cacacauacuuuggagacu

SEQ ID NO: 2985135 - RNA, 19 nt, Artificial Sequence
  Description of Artificial Sequence: Synthetic oligonucleotide
caucaugcccagguauucu

SEQ ID NO: 2985136 - RNA, 19 nt, Artificial Sequence
  Description of Artificial Sequence: Synthetic oligonucleotide
cuguccgugcuagauugua

SEQ ID NO: 2985137 - RNA, 19 nt, Artificial Sequence
  Description of Artificial Sequence: Synthetic oligonucleotide
ccaagaagcuuuucccugu

SEQ ID NO: 2985138 - RNA, 19 nt, Artificial Sequence
  Description of Artificial Sequence: Synthetic oligonucleotide
ccagggucugggagcuccg

SEQ ID NO: 2985139 - RNA, 19 nt, Artificial Sequence
  Description of Artificial Sequence: Synthetic oligonucleotide
agcuccggccacacauacu

SEQ ID NO: 2985140 - RNA, 19 nt, Artificial Sequence
  Description of Artificial Sequence: Synthetic oligonucleotide
ccaaagacacaacaaucuu

SEQ ID NO: 2985141 - RNA, 19 nt, Artificial Sequence
  Description of Artificial Sequence: Synthetic oligonucleotide
ggaacagguucaucaucau

SEQ ID NO: 2985142 - RNA, 19 nt, Artificial Sequence
  Description of Artificial Sequence: Synthetic oligonucleotide
auccagggucugggagcuc

SEQ ID NO: 2985143 - RNA, 19 nt, Artificial Sequence
  Description of Artificial Sequence: Synthetic oligonucleotide
uccuuggguuggggaggga

SEQ ID NO: 2985144 - RNA, 19 nt, Artificial Sequence
  Description of Artificial Sequence: Synthetic oligonucleotide
ccccaagaagcuuuucccu

SEQ ID NO: 2985145 - RNA, 19 nt, Artificial Sequence
  Description of Artificial Sequence: Synthetic oligonucleotide
agacaacggugagcaugau

SEQ ID NO: 2985146 - RNA, 19 nt, Artificial Sequence
  Description of Artificial Sequence: Synthetic oligonucleotide
cgucuuccagacugaguca

SEQ ID NO: 2985147 - RNA, 19 nt, Artificial Sequence
  Description of Artificial Sequence: Synthetic oligonucleotide
cagucccagggaagccaaa

SEQ ID NO: 2985148 - RNA, 19 nt, Artificial Sequence
  Description of Artificial Sequence: Synthetic oligonucleotide
ggagcuccggccacacaua

SEQ ID NO: 2985149 - RNA, 19 nt, Artificial Sequence
  Description of Artificial Sequence: Synthetic oligonucleotide
ggauaccaggaaucuccuu

SEQ ID NO: 2985150 - RNA, 19 nt, Artificial Sequence
  Description of Artificial Sequence: Synthetic oligonucleotide
cggccacacauacuuugga

SEQ ID NO: 2985151 - RNA, 19 nt, Artificial Sequence
  Description of Artificial Sequence: Synthetic oligonucleotide
gcacucucccauacucacu

SEQ ID NO: 2985152 - RNA, 19 nt, Artificial Sequence
  Description of Artificial Sequence: Synthetic oligonucleotide
cuccggccacacauacuuu

SEQ ID NO: 2985153 - RNA, 19 nt, Artificial Sequence
  Description of Artificial Sequence: Synthetic oligonucleotide
ggugagcaugaugcagauu

SEQ ID NO: 2985154 - RNA, 19 nt, Artificial Sequence
  Description of Artificial Sequence: Synthetic oligonucleotide
cggugagcaugaugcagau

SEQ ID NO: 2985155 - RNA, 19 nt, Artificial Sequence
  Description of Artificial Sequence: Synthetic oligonucleotide
ccucuccgucuuccagacu

SEQ ID NO: 2985156 - RNA, 19 nt, Artificial Sequence
  Description of Artificial Sequence: Synthetic oligonucleotide
acuucaaagagacugaugg

SEQ ID NO: 2985157 - RNA, 19 nt, Artificial Sequence
  Description of Artificial Sequence: Synthetic oligonucleotide
aauucuuucugcuugcaac

SEQ ID NO: 2985158 - RNA, 19 nt, Artificial Sequence
  Description of Artificial Sequence: Synthetic oligonucleotide
aauuauuuugacuucagaa

SEQ ID NO: 2985159 - RNA, 19 nt, Artificial Sequence
  Description of Artificial Sequence: Synthetic oligonucleotide
auuauuuugacuucagaag

SEQ ID NO: 2985160 - RNA, 19 nt, Artificial Sequence
  Description of Artificial Sequence: Synthetic oligonucleotide
uuauuuugacuucagaaga

SEQ ID NO: 2985161 - RNA, 19 nt, Artificial Sequence
  Description of Artificial Sequence: Synthetic oligonucleotide
uguggaauuauuuugacuu

SEQ ID NO: 2985162 - RNA, 19 nt, Artificial Sequence
  Description of Artificial Sequence: Synthetic oligonucleotide
cuugagaagacacagguug

SEQ ID NO: 2985163 - RNA, 19 nt, Artificial Sequence
  Description of Artificial Sequence: Synthetic oligonucleotide
ugagccauagauaugagau

SEQ ID NO: 2985164 - RNA, 19 nt, Artificial Sequence
  Description of Artificial Sequence: Synthetic oligonucleotide
auucuuucugcuugcaacc

SEQ ID NO: 2985165 - RNA, 19 nt, Artificial Sequence
  Description of Artificial Sequence: Synthetic oligonucleotide
uaugagauggugaagguau

SEQ ID NO: 2985166 - RNA, 19 nt, Artificial Sequence
  Description of Artificial Sequence: Synthetic oligonucleotide
agauaugagauggugaagg

SEQ ID NO: 2985167 - RNA, 19 nt, Artificial Sequence
  Description of Artificial Sequence: Synthetic oligonucleotide
uuucguaaccugcagaggu

SEQ ID NO: 2985168 - RNA, 19 nt, Artificial Sequence
  Description of Artificial Sequence: Synthetic oligonucleotide
ugaagguauuauauuagca

SEQ ID NO: 2985169 - RNA, 19 nt, Artificial Sequence
  Description of Artificial Sequence: Synthetic oligonucleotide
ucuuguggaauuauuuuga

SEQ ID NO: 2985170 - RNA, 19 nt, Artificial Sequence
  Description of Artificial Sequence: Synthetic oligonucleotide
gaggacuucaaagagacug

SEQ ID NO: 2985171 - RNA, 19 nt, Artificial Sequence
  Description of Artificial Sequence: Synthetic oligonucleotide
uucaaagagacugaugggc

SEQ ID NO: 2985172 - RNA, 19 nt, Artificial Sequence
  Description of Artificial Sequence: Synthetic oligonucleotide
uucucgaggagcucgaugc

SEQ ID NO: 2985173 - RNA, 19 nt, Artificial Sequence
  Description of Artificial Sequence: Synthetic oligonucleotide
uguggcuugagaacucugg

SEQ ID NO: 2985174 - RNA, 19 nt, Artificial Sequence
  Description of Artificial Sequence: Synthetic oligonucleotide
uccuugauuuccuuucucg

SEQ ID NO: 2985175 - RNA, 19 nt, Artificial Sequence
  Description of Artificial Sequence: Synthetic oligonucleotide
auagauaugagauggugaa

SEQ ID NO: 2985176 - RNA, 19 nt, Artificial Sequence
  Description of Artificial Sequence: Synthetic oligonucleotide
aagacacagguugagcagc

SEQ ID NO: 2985177 - RNA, 19 nt, Artificial Sequence
  Description of Artificial Sequence: Synthetic oligonucleotide
auuuugacuucagaagacc

SEQ ID NO: 2985178 - RNA, 19 nt, Artificial Sequence
  Description of Artificial Sequence: Synthetic oligonucleotide
auuuccuuucucgaggagc

SEQ ID NO: 2985179 - RNA, 19 nt, Artificial Sequence
  Description of Artificial Sequence: Synthetic oligonucleotide
aggauaugcaggaugaugg

SEQ ID NO: 2985180 - RNA, 19 nt, Artificial Sequence
  Description of Artificial Sequence: Synthetic oligonucleotide
cacuccauggccuuggagg

SEQ ID NO: 2985181 - RNA, 19 nt, Artificial Sequence
  Description of Artificial Sequence: Synthetic oligonucleotide
gucuccauggcacugagcc

SEQ ID NO: 2985182 - RNA, 19 nt, Artificial Sequence
  Description of Artificial Sequence: Synthetic oligonucleotide
agccauagauaugagaugg

SEQ ID NO: 2985183 - RNA, 19 nt, Artificial Sequence
  Description of Artificial Sequence: Synthetic oligonucleotide
uaugcaggaugauggaagg

SEQ ID NO: 2985184 - RNA, 19 nt, Artificial Sequence
  Description of Artificial Sequence: Synthetic oligonucleotide
uuagucucaaaauucuuuc

SEQ ID NO: 2985185 - RNA, 19 nt, Artificial Sequence
  Description of Artificial Sequence: Synthetic oligonucleotide
uaugaacugauugugcacc

SEQ ID NO: 2985186 - RNA, 19 nt, Artificial Sequence
  Description of Artificial Sequence: Synthetic oligonucleotide
agaagacacagguugagca

SEQ ID NO: 2985187 - RNA, 19 nt, Artificial Sequence
  Description of Artificial Sequence: Synthetic oligonucleotide
uauuuugacuucagaagac

SEQ ID NO: 2985188 - RNA, 19 nt, Artificial Sequence
  Description of Artificial Sequence: Synthetic oligonucleotide
agagguaugaacugauugu

SEQ ID NO: 2985189 - RNA, 19 nt, Artificial Sequence
  Description of Artificial Sequence: Synthetic oligonucleotide
agugguguggcuugagaac

SEQ ID NO: 2985190 - RNA, 19 nt, Artificial Sequence
  Description of Artificial Sequence: Synthetic oligonucleotide
agucucaaaauucuuucug

SEQ ID NO: 2985191 - RNA, 19 nt, Artificial Sequence
  Description of Artificial Sequence: Synthetic oligonucleotide
ucaaagagacugaugggcu

SEQ ID NO: 2985192 - RNA, 19 nt, Artificial Sequence
  Description of Artificial Sequence: Synthetic oligonucleotide
gaacugauugugcaccccg

SEQ ID NO: 2985193 - RNA, 19 nt, Artificial Sequence
  Description of Artificial Sequence: Synthetic oligonucleotide
ugauggaaggccuucccag

SEQ ID NO: 2985194 - RNA, 19 nt, Artificial Sequence
  Description of Artificial Sequence: Synthetic oligonucleotide
uccaggauaugcaggauga

SEQ ID NO: 2985195 - RNA, 19 nt, Artificial Sequence
  Description of Artificial Sequence: Synthetic oligonucleotide
cuugauuuccuuucucgag

SEQ ID NO: 2985196 - RNA, 19 nt, Artificial Sequence
  Description of Artificial Sequence: Synthetic oligonucleotide
ucgacuugagaagacacag

SEQ ID NO: 2985197 - RNA, 19 nt, Artificial Sequence
  Description of Artificial Sequence: Synthetic oligonucleotide
cauuccuccagccaagggc

SEQ ID NO: 2985198 - RNA, 19 nt, Artificial Sequence
  Description of Artificial Sequence: Synthetic oligonucleotide
uccuuagucucaaaauucu

SEQ ID NO: 2985199 - RNA, 19 nt, Artificial Sequence
  Description of Artificial Sequence: Synthetic oligonucleotide
gaagacacagguugagcag

SEQ ID NO: 2985200 - RNA, 19 nt, Artificial Sequence
  Description of Artificial Sequence: Synthetic oligonucleotide
ugauugugcaccccgcuug

SEQ ID NO: 2985201 - RNA, 19 nt, Artificial Sequence
  Description of Artificial Sequence: Synthetic oligonucleotide
aaccugcagagguaugaac

SEQ ID NO: 2985202 - RNA, 19 nt, Artificial Sequence
  Description of Artificial Sequence: Synthetic oligonucleotide
ucucaaaauucuuucugcu

SEQ ID NO: 2985203 - RNA, 19 nt, Artificial Sequence
  Description of Artificial Sequence: Synthetic oligonucleotide
uggcuugcuagucugaagu

SEQ ID NO: 2985204 - RNA, 19 nt, Artificial Sequence
  Description of Artificial Sequence: Synthetic oligonucleotide
augaacugauugugcaccc

SEQ ID NO: 2985205 - RNA, 19 nt, Artificial Sequence
  Description of Artificial Sequence: Synthetic oligonucleotide
gucucaaaauucuuucugc

SEQ ID NO: 2985206 - RNA, 19 nt, Artificial Sequence
  Description of Artificial Sequence: Synthetic oligonucleotide
ucgaggagcucgaugcugg

SEQ ID NO: 2985207 - RNA, 19 nt, Artificial Sequence
  Description of Artificial Sequence: Synthetic oligonucleotide
uggugaagguauuauauua

SEQ ID NO: 2985208 - RNA, 19 nt, Artificial Sequence
  Description of Artificial Sequence: Synthetic oligonucleotide
caaaauucuuucugcuugc

SEQ ID NO: 2985209 - RNA, 19 nt, Artificial Sequence
  Description of Artificial Sequence: Synthetic oligonucleotide
acacagguugagcagcugg

SEQ ID NO: 2985210 - RNA, 19 nt, Artificial Sequence
  Description of Artificial Sequence: Synthetic oligonucleotide
ugcaggaugauggaaggcc

SEQ ID NO: 2985211 - RNA, 19 nt, Artificial Sequence
  Description of Artificial Sequence: Synthetic oligonucleotide
gugaagguauuauauuagc

SEQ ID NO: 2985212 - RNA, 19 nt, Artificial Sequence
  Description of Artificial Sequence: Synthetic oligonucleotide
uuucuggugggucacucca

SEQ ID NO: 2985213 - RNA, 19 nt, Artificial Sequence
  Description of Artificial Sequence: Synthetic oligonucleotide
cuucaaagagacugauggg

SEQ ID NO: 2985214 - RNA, 19 nt, Artificial Sequence
  Description of Artificial Sequence: Synthetic oligonucleotide
aagugguguggcuugagaa

SEQ ID NO: 2985215 - RNA, 19 nt, Artificial Sequence
  Description of Artificial Sequence: Synthetic oligonucleotide
cagagguaugaacugauug

SEQ ID NO: 2985216 - RNA, 19 nt, Artificial Sequence
  Description of Artificial Sequence: Synthetic oligonucleotide
uuucuuguggaauuauuuu

SEQ ID NO: 2985217 - RNA, 19 nt, Artificial Sequence
  Description of Artificial Sequence: Synthetic oligonucleotide
uuccaggauaugcaggaug

SEQ ID NO: 2985218 - RNA, 19 nt, Artificial Sequence
  Description of Artificial Sequence: Synthetic oligonucleotide
ucugaagugguguggcuug

SEQ ID NO: 2985219 - RNA, 19 nt, Artificial Sequence
  Description of Artificial Sequence: Synthetic oligonucleotide
ugucgacuugagaagacac

SEQ ID NO: 2985220 - RNA, 19 nt, Artificial Sequence
  Description of Artificial Sequence: Synthetic oligonucleotide
auaugcaggaugauggaag

SEQ ID NO: 2985221 - RNA, 19 nt, Artificial Sequence
  Description of Artificial Sequence: Synthetic oligonucleotide
uuggcauuccuccagccaa

SEQ ID NO: 2985222 - RNA, 19 nt, Artificial Sequence
  Description of Artificial Sequence: Synthetic oligonucleotide
gaugcugguuucugguggg

SEQ ID NO: 2985223 - RNA, 19 nt, Artificial Sequence
  Description of Artificial Sequence: Synthetic oligonucleotide
cauagauaugagaugguga

SEQ ID NO: 2985224 - RNA, 19 nt, Artificial Sequence
  Description of Artificial Sequence: Synthetic oligonucleotide
ugguuccaggauaugcagg

SEQ ID NO: 2985225 - RNA, 19 nt, Artificial Sequence
  Description of Artificial Sequence: Synthetic oligonucleotide
uggaauuauuuugacuuca

SEQ ID NO: 2985226 - RNA, 19 nt, Artificial Sequence
  Description of Artificial Sequence: Synthetic oligonucleotide
uucagaagacccuggcuug

SEQ ID NO: 2985227 - RNA, 19 nt, Artificial Sequence
  Description of Artificial Sequence: Synthetic oligonucleotide
gaagacccuggcuugcuag

SEQ ID NO: 2985228 - RNA, 19 nt, Artificial Sequence
  Description of Artificial Sequence: Synthetic oligonucleotide
gagguaugaacugauugug

SEQ ID NO: 2985229 - RNA, 19 nt, Artificial Sequence
  Description of Artificial Sequence: Synthetic oligonucleotide
uugagaagacacagguuga

SEQ ID NO: 2985230 - RNA, 19 nt, Artificial Sequence
  Description of Artificial Sequence: Synthetic oligonucleotide
cuccuuagucucaaaauuc

SEQ ID NO: 2985231 - RNA, 19 nt, Artificial Sequence
  Description of Artificial Sequence: Synthetic oligonucleotide
uugacuucagaagacccug

SEQ ID NO: 2985232 - RNA, 19 nt, Artificial Sequence
  Description of Artificial Sequence: Synthetic oligonucleotide
gaauuauuuugacuucaga

SEQ ID NO: 2985233 - RNA, 19 nt, Artificial Sequence
  Description of Artificial Sequence: Synthetic oligonucleotide
uccuuucucgaggagcucg

SEQ ID NO: 2985234 - RNA, 19 nt, Artificial Sequence
  Description of Artificial Sequence: Synthetic oligonucleotide
uuguggaauuauuuugacu

SEQ ID NO: 2985235 - RNA, 19 nt, Artificial Sequence
  Description of Artificial Sequence: Synthetic oligonucleotide
gaugauggaaggccuuccc

SEQ ID NO: 2985236 - RNA, 19 nt, Artificial Sequence
  Description of Artificial Sequence: Synthetic oligonucleotide
ugauuuccuuucucgagga

SEQ ID NO: 2985237 - RNA, 19 nt, Artificial Sequence
  Description of Artificial Sequence: Synthetic oligonucleotide
gauugugcaccccgcuugg

SEQ ID NO: 2985238 - RNA, 19 nt, Artificial Sequence
  Description of Artificial Sequence: Synthetic oligonucleotide
ugacuucagaagacccugg

SEQ ID NO: 2985239 - RNA, 19 nt, Artificial Sequence
  Description of Artificial Sequence: Synthetic oligonucleotide
aacugauugugcaccccgc

SEQ ID NO: 2985240 - RNA, 19 nt, Artificial Sequence
  Description of Artificial Sequence: Synthetic oligonucleotide
uuuucguaaccugcagagg

SEQ ID NO: 2985241 - RNA, 19 nt, Artificial Sequence
  Description of Artificial Sequence: Synthetic oligonucleotide
augguuccaggauaugcag

SEQ ID NO: 2985242 - RNA, 19 nt, Artificial Sequence
  Description of Artificial Sequence: Synthetic oligonucleotide
auggcacugagccauagau

SEQ ID NO: 2985243 - RNA, 19 nt, Artificial Sequence
  Description of Artificial Sequence: Synthetic oligonucleotide
gacuugagaagacacaggu

SEQ ID NO: 2985244 - RNA, 19 nt, Artificial Sequence
  Description of Artificial Sequence: Synthetic oligonucleotide
agguugagcagcuggggag

SEQ ID NO: 2985245 - RNA, 19 nt, Artificial Sequence
  Description of Artificial Sequence: Synthetic oligonucleotide
cuuguggaauuauuuugac

SEQ ID NO: 2985246 - RNA, 19 nt, Artificial Sequence
  Description of Artificial Sequence: Synthetic oligonucleotide
agguaugaacugauugugc

SEQ ID NO: 2985247 - RNA, 19 nt, Artificial Sequence
  Description of Artificial Sequence: Synthetic oligonucleotide
gauggaaggccuucccagc

SEQ ID NO: 2985248 - RNA, 19 nt, Artificial Sequence
  Description of Artificial Sequence: Synthetic oligonucleotide
ggcuugagaacucugggcc

SEQ ID NO: 2985249 - RNA, 19 nt, Artificial Sequence
  Description of Artificial Sequence: Synthetic oligonucleotide
uuuccuugauuuccuuucu

SEQ ID NO: 2985250 - RNA, 19 nt, Artificial Sequence
  Description of Artificial Sequence: Synthetic oligonucleotide
uuucucgaggagcucgaug

SEQ ID NO: 2985251 - RNA, 19 nt, Artificial Sequence
  Description of Artificial Sequence: Synthetic oligonucleotide
cugaugggcuuucuugugg

SEQ ID NO: 2985252 - RNA, 19 nt, Artificial Sequence
  Description of Artificial Sequence: Synthetic oligonucleotide
gagccauagauaugagaug

SEQ ID NO: 2985253 - RNA, 19 nt, Artificial Sequence
  Description of Artificial Sequence: Synthetic oligonucleotide
aagggcaugguuccaggau

SEQ ID NO: 2985254 - RNA, 19 nt, Artificial Sequence
  Description of Artificial Sequence: Synthetic oligonucleotide
gguaugaacugauugugca

SEQ ID NO: 2985255 - RNA, 19 nt, Artificial Sequence
  Description of Artificial Sequence: Synthetic oligonucleotide
gacuucagaagacccuggc

SEQ ID NO: 2985256 - RNA, 19 nt, Artificial Sequence
  Description of Artificial Sequence: Synthetic oligonucleotide
cagcaacuggcacuggugg

SEQ ID NO: 2985257 - RNA, 19 nt, Artificial Sequence
  Description of Artificial Sequence: Synthetic oligonucleotide
guaugaacugauugugcac

SEQ ID NO: 2985258 - RNA, 19 nt, Artificial Sequence
  Description of Artificial Sequence: Synthetic oligonucleotide
ugaugggcuuucuugugga

SEQ ID NO: 2985259 - RNA, 19 nt, Artificial Sequence
  Description of Artificial Sequence: Synthetic oligonucleotide
uggugggucacuccauggc

SEQ ID NO: 2985260 - RNA, 19 nt, Artificial Sequence
  Description of Artificial Sequence: Synthetic oligonucleotide
gaacucugggccuccuuag

SEQ ID NO: 2985261 - RNA, 19 nt, Artificial Sequence
  Description of Artificial Sequence: Synthetic oligonucleotide
ggugaagguauuauauuag

SEQ ID NO: 2985262 - RNA, 19 nt, Artificial Sequence
  Description of Artificial Sequence: Synthetic oligonucleotide
ggcagugucgacuugagaa

SEQ ID NO: 2985263 - RNA, 19 nt, Artificial Sequence
  Description of Artificial Sequence: Synthetic oligonucleotide
ucuuucugcuugcaacccu

SEQ ID NO: 2985264 - RNA, 19 nt, Artificial Sequence
  Description of Artificial Sequence: Synthetic oligonucleotide
caugguuccaggauaugca

SEQ ID NO: 2985265 - RNA, 19 nt, Artificial Sequence
  Description of Artificial Sequence: Synthetic oligonucleotide
uagauaugagauggugaag

SEQ ID NO: 2985266 - RNA, 19 nt, Artificial Sequence
  Description of Artificial Sequence: Synthetic oligonucleotide
cugguggucuccauggcac

SEQ ID NO: 2985267 - RNA, 19 nt, Artificial Sequence
  Description of Artificial Sequence: Synthetic oligonucleotide
cuagucugaaguggugugg

SEQ ID NO: 2985268 - RNA, 19 nt, Artificial Sequence
  Description of Artificial Sequence: Synthetic oligonucleotide
ugcagagguaugaacugau

SEQ ID NO: 2985269 - RNA, 19 nt, Artificial Sequence
  Description of Artificial Sequence: Synthetic oligonucleotide
gauggugaagguauuauau

SEQ ID NO: 2985270 - RNA, 19 nt, Artificial Sequence
  Description of Artificial Sequence: Synthetic oligonucleotide
acugaugggcuuucuugug

SEQ ID NO: 2985271 - RNA, 19 nt, Artificial Sequence
  Description of Artificial Sequence: Synthetic oligonucleotide
augauggaaggccuuccca

SEQ ID NO: 2985272 - RNA, 19 nt, Artificial Sequence
  Description of Artificial Sequence: Synthetic oligonucleotide
gauuuccuuucucgaggag

SEQ ID NO: 2985273 - RNA, 19 nt, Artificial Sequence
  Description of Artificial Sequence: Synthetic oligonucleotide
uugugcaccccgcuuggca

SEQ ID NO: 2985274 - RNA, 19 nt, Artificial Sequence
  Description of Artificial Sequence: Synthetic oligonucleotide
aagagacugaugggcuuuc

SEQ ID NO: 2985275 - RNA, 19 nt, Artificial Sequence
  Description of Artificial Sequence: Synthetic oligonucleotide
gcuggggaggacuucaaag

SEQ ID NO: 2985276 - RNA, 19 nt, Artificial Sequence
  Description of Artificial Sequence: Synthetic oligonucleotide
aagacccuggcuugcuagu

SEQ ID NO: 2985277 - RNA, 19 nt, Artificial Sequence
  Description of Artificial Sequence: Synthetic oligonucleotide
aaggccuucccagcaacug

SEQ ID NO: 2985278 - RNA, 19 nt, Artificial Sequence
  Description of Artificial Sequence: Synthetic oligonucleotide
accugcagagguaugaacu

SEQ ID NO: 2985279 - RNA, 19 nt, Artificial Sequence
  Description of Artificial Sequence: Synthetic oligonucleotide
auggugaagguauuauauu

SEQ ID NO: 2985280 - RNA, 19 nt, Artificial Sequence
  Description of Artificial Sequence: Synthetic oligonucleotide
ugcuagucugaaguggugu

SEQ ID NO: 2985281 - RNA, 19 nt, Artificial Sequence
  Description of Artificial Sequence: Synthetic oligonucleotide
aaagagacugaugggcuuu

SEQ ID NO: 2985282 - RNA, 19 nt, Artificial Sequence
  Description of Artificial Sequence: Synthetic oligonucleotide
uggccuuggaggcaguguc

SEQ ID NO: 2985283 - RNA, 19 nt, Artificial Sequence
  Description of Artificial Sequence: Synthetic oligonucleotide
uucuuucugcuugcaaccc

SEQ ID NO: 2985284 - RNA, 19 nt, Artificial Sequence
  Description of Artificial Sequence: Synthetic oligonucleotide
cacugagccauagauauga

SEQ ID NO: 2985285 - RNA, 19 nt, Artificial Sequence
  Description of Artificial Sequence: Synthetic oligonucleotide
agauggugaagguauuaua

SEQ ID NO: 2985286 - RNA, 19 nt, Artificial Sequence
  Description of Artificial Sequence: Synthetic oligonucleotide
cagccaagggcaugguucc

SEQ ID NO: 2985287 - RNA, 19 nt, Artificial Sequence
  Description of Artificial Sequence: Synthetic oligonucleotide
caggauaugcaggaugaug

SEQ ID NO: 2985288 - RNA, 19 nt, Artificial Sequence
  Description of Artificial Sequence: Synthetic oligonucleotide
aggagcucgaugcugguuu

SEQ ID NO: 2985289 - RNA, 19 nt, Artificial Sequence
  Description of Artificial Sequence: Synthetic oligonucleotide
ucgaugcugguuucuggug

SEQ ID NO: 2985290 - RNA, 19 nt, Artificial Sequence
  Description of Artificial Sequence: Synthetic oligonucleotide
acugauugugcaccccgcu

SEQ ID NO: 2985291 - RNA, 19 nt, Artificial Sequence
  Description of Artificial Sequence: Synthetic oligonucleotide
auuccuccagccaagggca

SEQ ID NO: 2985292 - RNA, 19 nt, Artificial Sequence
  Description of Artificial Sequence: Synthetic oligonucleotide
agaacucugggccuccuua

SEQ ID NO: 2985293 - RNA, 19 nt, Artificial Sequence
  Description of Artificial Sequence: Synthetic oligonucleotide
ugggcuuucuuguggaauu

SEQ ID NO: 2985294 - RNA, 19 nt, Artificial Sequence
  Description of Artificial Sequence: Synthetic oligonucleotide
ucacuccauggccuuggag

SEQ ID NO: 2985295 - RNA, 19 nt, Artificial Sequence
  Description of Artificial Sequence: Synthetic oligonucleotide
guggaauuauuuugacuuc

SEQ ID NO: 2985296 - RNA, 19 nt, Artificial Sequence
  Description of Artificial Sequence: Synthetic oligonucleotide
uugcuagucugaaguggug

SEQ ID NO: 2985297 - RNA, 19 nt, Artificial Sequence
  Description of Artificial Sequence: Synthetic oligonucleotide
uucccagcaacuggcacug

SEQ ID NO: 2985298 - RNA, 19 nt, Artificial Sequence
  Description of Artificial Sequence: Synthetic oligonucleotide
acagguugagcagcugggg

SEQ ID NO: 2985299 - RNA, 19 nt, Artificial Sequence
  Description of Artificial Sequence: Synthetic oligonucleotide
uggcauuccuccagccaag

SEQ ID NO: 2985300 - RNA, 19 nt, Artificial Sequence
  Description of Artificial Sequence: Synthetic oligonucleotide
augcaggaugauggaaggc

SEQ ID NO: 2985301 - RNA, 19 nt, Artificial Sequence
  Description of Artificial Sequence: Synthetic oligonucleotide
gacuucaaagagacugaug

SEQ ID NO: 2985302 - RNA, 19 nt, Artificial Sequence
  Description of Artificial Sequence: Synthetic oligonucleotide
cuggugggucacuccaugg

SEQ ID NO: 2985303 - RNA, 19 nt, Artificial Sequence
  Description of Artificial Sequence: Synthetic oligonucleotide
gauaugagauggugaaggu

SEQ ID NO: 2985304 - RNA, 19 nt, Artificial Sequence
  Description of Artificial Sequence: Synthetic oligonucleotide
aguuuccuugauuuccuuu

SEQ ID NO: 2985305 - RNA, 19 nt, Artificial Sequence
  Description of Artificial Sequence: Synthetic oligonucleotide
agugucgacuugagaagac

SEQ ID NO: 2985306 - RNA, 19 nt, Artificial Sequence
  Description of Artificial Sequence: Synthetic oligonucleotide
gaagugguguggcuugaga

SEQ ID NO: 2985307 - RNA, 19 nt, Artificial Sequence
  Description of Artificial Sequence: Synthetic oligonucleotide
auggaaggccuucccagca

SEQ ID NO: 2985308 - RNA, 19 nt, Artificial Sequence
  Description of Artificial Sequence: Synthetic oligonucleotide
ugaacugauugugcacccc

SEQ ID NO: 2985309 - RNA, 19 nt, Artificial Sequence
  Description of Artificial Sequence: Synthetic oligonucleotide
guuucuggugggucacucc

SEQ ID NO: 2985310 - RNA, 19 nt, Artificial Sequence
  Description of Artificial Sequence: Synthetic oligonucleotide
ugagcagcuggggaggacu

SEQ ID NO: 2985311 - RNA, 19 nt, Artificial Sequence
  Description of Artificial Sequence: Synthetic oligonucleotide
uuccuugauuuccuuucuc

SEQ ID NO: 2985312 - RNA, 19 nt, Artificial Sequence
  Description of Artificial Sequence: Synthetic oligonucleotide
uucguaaccugcagaggua

SEQ ID NO: 2985313 - RNA, 19 nt, Artificial Sequence
  Description of Artificial Sequence: Synthetic oligonucleotide
gcagugucgacuugagaag

SEQ ID NO: 2985314 - RNA, 19 nt, Artificial Sequence
  Description of Artificial Sequence: Synthetic oligonucleotide
guaaccugcagagguauga

SEQ ID NO: 2985315 - RNA, 19 nt, Artificial Sequence
  Description of Artificial Sequence: Synthetic oligonucleotide
ggaauuauuuugacuucag

SEQ ID NO: 2985316 - RNA, 19 nt, Artificial Sequence
  Description of Artificial Sequence: Synthetic oligonucleotide
gauaugcaggaugauggaa

SEQ ID NO: 2985317 - RNA, 19 nt, Artificial Sequence
  Description of Artificial Sequence: Synthetic oligonucleotide
ucagaagacccuggcuugc

SEQ ID NO: 2985318 - RNA, 19 nt, Artificial Sequence
  Description of Artificial Sequence: Synthetic oligonucleotide
gcuugcuagucugaagugg

SEQ ID NO: 2985319 - RNA, 19 nt, Artificial Sequence
  Description of Artificial Sequence: Synthetic oligonucleotide
gacugaugggcuuucuugu

SEQ ID NO: 2985320 - RNA, 19 nt, Artificial Sequence
  Description of Artificial Sequence: Synthetic oligonucleotide
ugugcaccccgcuuggcau

SEQ ID NO: 2985321 - RNA, 19 nt, Artificial Sequence
  Description of Artificial Sequence: Synthetic oligonucleotide
ggugggucacuccauggcc

SEQ ID NO: 2985322 - RNA, 19 nt, Artificial Sequence
  Description of Artificial Sequence: Synthetic oligonucleotide
cuuagucucaaaauucuuu

SEQ ID NO: 2985323 - RNA, 19 nt, Artificial Sequence
  Description of Artificial Sequence: Synthetic oligonucleotide
uuggaggcagugucgacuu

SEQ ID NO: 2985324 - RNA, 19 nt, Artificial Sequence
  Description of Artificial Sequence: Synthetic oligonucleotide
cuuucuuguggaauuauuu

SEQ ID NO: 2985325 - RNA, 19 nt, Artificial Sequence
  Description of Artificial Sequence: Synthetic oligonucleotide
agggcaugguuccaggaua

SEQ ID NO: 2985326 - RNA, 19 nt, Artificial Sequence
  Description of Artificial Sequence: Synthetic oligonucleotide
ucuccauggcacugagcca

SEQ ID NO: 2985327 - RNA, 19 nt, Artificial Sequence
  Description of Artificial Sequence: Synthetic oligonucleotide
ugagauggugaagguauua

SEQ ID NO: 2985328 - RNA, 19 nt, Artificial Sequence
  Description of Artificial Sequence: Synthetic oligonucleotide
uggcacugagccauagaua

SEQ ID NO: 2985329 - RNA, 19 nt, Artificial Sequence
  Description of Artificial Sequence: Synthetic oligonucleotide
ucugggccuccuuagucuc

SEQ ID NO: 2985330 - RNA, 19 nt, Artificial Sequence
  Description of Artificial Sequence: Synthetic oligonucleotide
ggcacugagccauagauau

SEQ ID NO: 2985331 - RNA, 19 nt, Artificial Sequence
  Description of Artificial Sequence: Synthetic oligonucleotide
ccagccaagggcaugguuc

SEQ ID NO: 2985332 - RNA, 19 nt, Artificial Sequence
  Description of Artificial Sequence: Synthetic oligonucleotide
cuggcuugcuagucugaag

SEQ ID NO: 2985333 - RNA, 19 nt, Artificial Sequence
  Description of Artificial Sequence: Synthetic oligonucleotide
auaugagauggugaaggua

SEQ ID NO: 2985334 - RNA, 19 nt, Artificial Sequence
  Description of Artificial Sequence: Synthetic oligonucleotide
agcaacuggcacugguggu

SEQ ID NO: 2985335 - RNA, 19 nt, Artificial Sequence
  Description of Artificial Sequence: Synthetic oligonucleotide
cugagccauagauaugaga

SEQ ID NO: 2985336 - RNA, 19 nt, Artificial Sequence
  Description of Artificial Sequence: Synthetic oligonucleotide
aacuggcacugguggucuc

SEQ ID NO: 2985337 - RNA, 19 nt, Artificial Sequence
  Description of Artificial Sequence: Synthetic oligonucleotide
ucucgaggagcucgaugcu

SEQ ID NO: 2985338 - RNA, 19 nt, Artificial Sequence
  Description of Artificial Sequence: Synthetic oligonucleotide
gcuagucugaaguggugug

SEQ ID NO: 2985339 - RNA, 19 nt, Artificial Sequence
  Description of Artificial Sequence: Synthetic oligonucleotide
cuugcuagucugaaguggu

SEQ ID NO: 2985340 - RNA, 19 nt, Artificial Sequence
  Description of Artificial Sequence: Synthetic oligonucleotide
ugaagugguguggcuugag

SEQ ID NO: 2985341 - RNA, 19 nt, Artificial Sequence
  Description of Artificial Sequence: Synthetic oligonucleotide
cuugagaacucugggccuc

SEQ ID NO: 2985342 - RNA, 19 nt, Artificial Sequence
  Description of Artificial Sequence: Synthetic oligonucleotide
ucguaaccugcagagguau

SEQ ID NO: 2985343 - RNA, 19 nt, Artificial Sequence
  Description of Artificial Sequence: Synthetic oligonucleotide
aggacuucaaagagacuga

SEQ ID NO: 2985344 - RNA, 19 nt, Artificial Sequence
  Description of Artificial Sequence: Synthetic oligonucleotide
cuucagaagacccuggcuu

SEQ ID NO: 2985345 - RNA, 19 nt, Artificial Sequence
  Description of Artificial Sequence: Synthetic oligonucleotide
gcaugguuccaggauaugc

SEQ ID NO: 2985346 - RNA, 19 nt, Artificial Sequence
  Description of Artificial Sequence: Synthetic oligonucleotide
auugugcaccccgcuuggc

SEQ ID NO: 2985347 - RNA, 19 nt, Artificial Sequence
  Description of Artificial Sequence: Synthetic oligonucleotide
acccuggcuugcuagucug

SEQ ID NO: 2985348 - RNA, 19 nt, Artificial Sequence
  Description of Artificial Sequence: Synthetic oligonucleotide
agucugaagugguguggcu

SEQ ID NO: 2985349 - RNA, 19 nt, Artificial Sequence
  Description of Artificial Sequence: Synthetic oligonucleotide
uaaccugcagagguaugaa

SEQ ID NO: 2985350 - RNA, 19 nt, Artificial Sequence
  Description of Artificial Sequence: Synthetic oligonucleotide
gguugagcagcuggggagg

SEQ ID NO: 2985351 - RNA, 19 nt, Artificial Sequence
  Description of Artificial Sequence: Synthetic oligonucleotide
uggaaggccuucccagcaa

SEQ ID NO: 2985352 - RNA, 19 nt, Artificial Sequence
  Description of Artificial Sequence: Synthetic oligonucleotide
cuuggcauuccuccagcca

SEQ ID NO: 2985353 - RNA, 19 nt, Artificial Sequence
  Description of Artificial Sequence: Synthetic oligonucleotide
gaggcagugucgacuugag

SEQ ID NO: 2985354 - RNA, 19 nt, Artificial Sequence
  Description of Artificial Sequence: Synthetic oligonucleotide
ccauagauaugagauggug

SEQ ID NO: 2985355 - RNA, 19 nt, Artificial Sequence
  Description of Artificial Sequence: Synthetic oligonucleotide
uucugcuugcaacccuuuu

SEQ ID NO: 2985356 - RNA, 19 nt, Artificial Sequence
  Description of Artificial Sequence: Synthetic oligonucleotide
uugagaacucugggccucc

SEQ ID NO: 2985357 - RNA, 19 nt, Artificial Sequence
  Description of Artificial Sequence: Synthetic oligonucleotide
ugguguggcuugagaacuc

SEQ ID NO: 2985358 - RNA, 19 nt, Artificial Sequence
  Description of Artificial Sequence: Synthetic oligonucleotide
gcucgaugcugguuucugg

SEQ ID NO: 2985359 - RNA, 19 nt, Artificial Sequence
  Description of Artificial Sequence: Synthetic oligonucleotide
uuucugcuugcaacccuuu

SEQ ID NO: 2985360 - RNA, 19 nt, Artificial Sequence
  Description of Artificial Sequence: Synthetic oligonucleotide
uucuggugggucacuccau

SEQ ID NO: 2985361 - RNA, 19 nt, Artificial Sequence
  Description of Artificial Sequence: Synthetic oligonucleotide
gucgacuugagaagacaca

SEQ ID NO: 2985362 - RNA, 19 nt, Artificial Sequence
  Description of Artificial Sequence: Synthetic oligonucleotide
ggauaugcaggaugaugga

SEQ ID NO: 2985363 - RNA, 19 nt, Artificial Sequence
  Description of Artificial Sequence: Synthetic oligonucleotide
cucgaggagcucgaugcug

SEQ ID NO: 2985364 - RNA, 19 nt, Artificial Sequence
  Description of Artificial Sequence: Synthetic oligonucleotide
agcucgaugcugguuucug

SEQ ID NO: 2985365 - RNA, 19 nt, Artificial Sequence
  Description of Artificial Sequence: Synthetic oligonucleotide
augggcuuucuuguggaau

SEQ ID NO: 2985366 - RNA, 19 nt, Artificial Sequence
  Description of Artificial Sequence: Synthetic oligonucleotide
cgaugcugguuucuggugg

SEQ ID NO: 2985367 - RNA, 19 nt, Artificial Sequence
  Description of Artificial Sequence: Synthetic oligonucleotide
ggcuugcuagucugaagug

SEQ ID NO: 2985368 - RNA, 19 nt, Artificial Sequence
  Description of Artificial Sequence: Synthetic oligonucleotide
ggcacugguggucuccaug

SEQ ID NO: 2985369 - RNA, 19 nt, Artificial Sequence
  Description of Artificial Sequence: Synthetic oligonucleotide
cuucccagcaacuggcacu

SEQ ID NO: 2985370 - RNA, 19 nt, Artificial Sequence
  Description of Artificial Sequence: Synthetic oligonucleotide
ugguggucuccauggcacu

SEQ ID NO: 2985371 - RNA, 19 nt, Artificial Sequence
  Description of Artificial Sequence: Synthetic oligonucleotide
acugagccauagauaugag

SEQ ID NO: 2985372 - RNA, 19 nt, Artificial Sequence
  Description of Artificial Sequence: Synthetic oligonucleotide
cagguugagcagcugggga

SEQ ID NO: 2985373 - RNA, 19 nt, Artificial Sequence
  Description of Artificial Sequence: Synthetic oligonucleotide
gcugguuucugguggguca

SEQ ID NO: 2985374 - RNA, 19 nt, Artificial Sequence
  Description of Artificial Sequence: Synthetic oligonucleotide
ggucacuccauggccuugg

SEQ ID NO: 2985375 - RNA, 19 nt, Artificial Sequence
  Description of Artificial Sequence: Synthetic oligonucleotide
gagauggugaagguauuau

SEQ ID NO: 2985376 - RNA, 19 nt, Artificial Sequence
  Description of Artificial Sequence: Synthetic oligonucleotide
gaugggcuuucuuguggaa

SEQ ID NO: 2985377 - RNA, 19 nt, Artificial Sequence
  Description of Artificial Sequence: Synthetic oligonucleotide
uccagccaagggcaugguu

SEQ ID NO: 2985378 - RNA, 19 nt, Artificial Sequence
  Description of Artificial Sequence: Synthetic oligonucleotide
gcauuccuccagccaaggg

SEQ ID NO: 2985379 - RNA, 19 nt, Artificial Sequence
  Description of Artificial Sequence: Synthetic oligonucleotide
ugcugguuucugguggguc

SEQ ID NO: 2985380 - RNA, 19 nt, Artificial Sequence
  Description of Artificial Sequence: Synthetic oligonucleotide
cucgaugcugguuucuggu

SEQ ID NO: 2985381 - RNA, 19 nt, Artificial Sequence
  Description of Artificial Sequence: Synthetic oligonucleotide
acuugagaagacacagguu

SEQ ID NO: 2985382 - RNA, 19 nt, Artificial Sequence
  Description of Artificial Sequence: Synthetic oligonucleotide
ccagcaacuggcacuggug

SEQ ID NO: 2985383 - RNA, 19 nt, Artificial Sequence
  Description of Artificial Sequence: Synthetic oligonucleotide
uggaggcagugucgacuug

SEQ ID NO: 2985384 - RNA, 19 nt, Artificial Sequence
  Description of Artificial Sequence: Synthetic oligonucleotide
gugucgacuugagaagaca

SEQ ID NO: 2985385 - RNA, 19 nt, Artificial Sequence
  Description of Artificial Sequence: Synthetic oligonucleotide
ccuugauuuccuuucucga

SEQ ID NO: 2985386 - RNA, 19 nt, Artificial Sequence
  Description of Artificial Sequence: Synthetic oligonucleotide
agaagacccuggcuugcua

SEQ ID NO: 2985387 - RNA, 19 nt, Artificial Sequence
  Description of Artificial Sequence: Synthetic oligonucleotide
ggaugauggaaggccuucc

SEQ ID NO: 2985388 - RNA, 19 nt, Artificial Sequence
  Description of Artificial Sequence: Synthetic oligonucleotide
cagugucgacuugagaaga

SEQ ID NO: 2985389 - RNA, 19 nt, Artificial Sequence
  Description of Artificial Sequence: Synthetic oligonucleotide
agacacagguugagcagcu

SEQ ID NO: 2985390 - RNA, 19 nt, Artificial Sequence
  Description of Artificial Sequence: Synthetic oligonucleotide
ccaagggcaugguuccagg

SEQ ID NO: 2985391 - RNA, 19 nt, Artificial Sequence
  Description of Artificial Sequence: Synthetic oligonucleotide
caagggcaugguuccagga

SEQ ID NO: 2985392 - RNA, 19 nt, Artificial Sequence
  Description of Artificial Sequence: Synthetic oligonucleotide
gacacagguugagcagcug

SEQ ID NO: 2985393 - RNA, 19 nt, Artificial Sequence
  Description of Artificial Sequence: Synthetic oligonucleotide
gugguguggcuugagaacu

SEQ ID NO: 2985394 - RNA, 19 nt, Artificial Sequence
  Description of Artificial Sequence: Synthetic oligonucleotide
aggcagugucgacuugaga

SEQ ID NO: 2985395 - RNA, 19 nt, Artificial Sequence
  Description of Artificial Sequence: Synthetic oligonucleotide
ccccgcuuggcauuccucc

SEQ ID NO: 2985396 - RNA, 19 nt, Artificial Sequence
  Description of Artificial Sequence: Synthetic oligonucleotide
ugggucacuccauggccuu

SEQ ID NO: 2985397 - RNA, 19 nt, Artificial Sequence
  Description of Artificial Sequence: Synthetic oligonucleotide
agcuggggaggacuucaaa

SEQ ID NO: 2985398 - RNA, 19 nt, Artificial Sequence
  Description of Artificial Sequence: Synthetic oligonucleotide
auggccuuggaggcagugu

SEQ ID NO: 2985399 - RNA, 19 nt, Artificial Sequence
  Description of Artificial Sequence: Synthetic oligonucleotide
agcagcuggggaggacuuc

SEQ ID NO: 2985400 - RNA, 19 nt, Artificial Sequence
  Description of Artificial Sequence: Synthetic oligonucleotide
cuuggaggcagugucgacu

SEQ ID NO: 2985401 - RNA, 19 nt, Artificial Sequence
  Description of Artificial Sequence: Synthetic oligonucleotide
gcuuggcauuccuccagcc

SEQ ID NO: 2985402 - RNA, 19 nt, Artificial Sequence
  Description of Artificial Sequence: Synthetic oligonucleotide
cugcagagguaugaacuga

SEQ ID NO: 2985403 - RNA, 19 nt, Artificial Sequence
  Description of Artificial Sequence: Synthetic oligonucleotide
cauggcacugagccauaga

SEQ ID NO: 2985404 - RNA, 19 nt, Artificial Sequence
  Description of Artificial Sequence: Synthetic oligonucleotide
ugggccuccuuagucucaa

SEQ ID NO: 2985405 - RNA, 19 nt, Artificial Sequence
  Description of Artificial Sequence: Synthetic oligonucleotide
ggcauuccuccagccaagg

SEQ ID NO: 2985406 - RNA, 19 nt, Artificial Sequence
  Description of Artificial Sequence: Synthetic oligonucleotide
cucugggccuccuuagucu

SEQ ID NO: 2985407 - RNA, 19 nt, Artificial Sequence
  Description of Artificial Sequence: Synthetic oligonucleotide
agagacugaugggcuuucu

SEQ ID NO: 2985408 - RNA, 19 nt, Artificial Sequence
  Description of Artificial Sequence: Synthetic oligonucleotide
cuuucugcuugcaacccuu

SEQ ID NO: 2985409 - RNA, 19 nt, Artificial Sequence
  Description of Artificial Sequence: Synthetic oligonucleotide
ggaggcagugucgacuuga

SEQ ID NO: 2985410 - RNA, 19 nt, Artificial Sequence
  Description of Artificial Sequence: Synthetic oligonucleotide
gacccuggcuugcuagucu

SEQ ID NO: 2985411 - RNA, 19 nt, Artificial Sequence
  Description of Artificial Sequence: Synthetic oligonucleotide
guguggcuugagaacucug

SEQ ID NO: 2985412 - RNA, 19 nt, Artificial Sequence
  Description of Artificial Sequence: Synthetic oligonucleotide
gagacugaugggcuuucuu

SEQ ID NO: 2985413 - RNA, 19 nt, Artificial Sequence
  Description of Artificial Sequence: Synthetic oligonucleotide
ggccuuggaggcagugucg

SEQ ID NO: 2985414 - RNA, 19 nt, Artificial Sequence
  Description of Artificial Sequence: Synthetic oligonucleotide
uccauggcacugagccaua

SEQ ID NO: 2985415 - RNA, 19 nt, Artificial Sequence
  Description of Artificial Sequence: Synthetic oligonucleotide
ggccuccuuagucucaaaa

SEQ ID NO: 2985416 - RNA, 19 nt, Artificial Sequence
  Description of Artificial Sequence: Synthetic oligonucleotide
gguggucuccauggcacug

SEQ ID NO: 2985417 - RNA, 19 nt, Artificial Sequence
  Description of Artificial Sequence: Synthetic oligonucleotide
gccaagggcaugguuccag

SEQ ID NO: 2985418 - RNA, 19 nt, Artificial Sequence
  Description of Artificial Sequence: Synthetic oligonucleotide
caaagagacugaugggcuu

SEQ ID NO: 2985419 - RNA, 19 nt, Artificial Sequence
  Description of Artificial Sequence: Synthetic oligonucleotide
cuccauggcacugagccau

SEQ ID NO: 2985420 - RNA, 19 nt, Artificial Sequence
  Description of Artificial Sequence: Synthetic oligonucleotide
ugcaccccgcuuggcauuc

SEQ ID NO: 2985421 - RNA, 19 nt, Artificial Sequence
  Description of Artificial Sequence: Synthetic oligonucleotide
gguuucuggugggucacuc

SEQ ID NO: 2985422 - RNA, 19 nt, Artificial Sequence
  Description of Artificial Sequence: Synthetic oligonucleotide
augagauggugaagguauu

SEQ ID NO: 2985423 - RNA, 19 nt, Artificial Sequence
  Description of Artificial Sequence: Synthetic oligonucleotide
ggagcucgaugcugguuuc

SEQ ID NO: 2985424 - RNA, 19 nt, Artificial Sequence
  Description of Artificial Sequence: Synthetic oligonucleotide
ccuucccagcaacuggcac

SEQ ID NO: 2985425 - RNA, 19 nt, Artificial Sequence
  Description of Artificial Sequence: Synthetic oligonucleotide
guugagcagcuggggagga

SEQ ID NO: 2985426 - RNA, 19 nt, Artificial Sequence
  Description of Artificial Sequence: Synthetic oligonucleotide
accccgcuuggcauuccuc

SEQ ID NO: 2985427 - RNA, 19 nt, Artificial Sequence
  Description of Artificial Sequence: Synthetic oligonucleotide
gccuccuuagucucaaaau

SEQ ID NO: 2985428 - RNA, 19 nt, Artificial Sequence
  Description of Artificial Sequence: Synthetic oligonucleotide
gaaggccuucccagcaacu

SEQ ID NO: 2985429 - RNA, 19 nt, Artificial Sequence
  Description of Artificial Sequence: Synthetic oligonucleotide
gucacuccauggccuugga

SEQ ID NO: 2985430 - RNA, 19 nt, Artificial Sequence
  Description of Artificial Sequence: Synthetic oligonucleotide
ucccagcaacuggcacugg

SEQ ID NO: 2985431 - RNA, 19 nt, Artificial Sequence
  Description of Artificial Sequence: Synthetic oligonucleotide
gcagcuggggaggacuuca

SEQ ID NO: 2985432 - RNA, 19 nt, Artificial Sequence
  Description of Artificial Sequence: Synthetic oligonucleotide
augcugguuucuggugggu

SEQ ID NO: 2985433 - RNA, 19 nt, Artificial Sequence
  Description of Artificial Sequence: Synthetic oligonucleotide
gugggucacuccauggccu

SEQ ID NO: 2985434 - RNA, 19 nt, Artificial Sequence
  Description of Artificial Sequence: Synthetic oligonucleotide
ccgcuuggcauuccuccag

SEQ ID NO: 2985435 - RNA, 19 nt, Artificial Sequence
  Description of Artificial Sequence: Synthetic oligonucleotide
gucugaagugguguggcuu

SEQ ID NO: 2985436 - RNA, 19 nt, Artificial Sequence
  Description of Artificial Sequence: Synthetic oligonucleotide
cugggccuccuuagucuca

SEQ ID NO: 2985437 - RNA, 19 nt, Artificial Sequence
  Description of Artificial Sequence: Synthetic oligonucleotide
cugaagugguguggcuuga

SEQ ID NO: 2985438 - RNA, 19 nt, Artificial Sequence
  Description of Artificial Sequence: Synthetic oligonucleotide
ccuccuuagucucaaaauu

SEQ ID NO: 2985439 - RNA, 19 nt, Artificial Sequence
  Description of Artificial Sequence: Synthetic oligonucleotide
uggcacugguggucuccau

SEQ ID NO: 2985440 - RNA, 19 nt, Artificial Sequence
  Description of Artificial Sequence: Synthetic oligonucleotide
cugauugugcaccccgcuu

SEQ ID NO: 2985441 - RNA, 19 nt, Artificial Sequence
  Description of Artificial Sequence: Synthetic oligonucleotide
gcacugagccauagauaug

SEQ ID NO: 2985442 - RNA, 19 nt, Artificial Sequence
  Description of Artificial Sequence: Synthetic oligonucleotide
cuggcacugguggucucca

SEQ ID NO: 2985443 - RNA, 19 nt, Artificial Sequence
  Description of Artificial Sequence: Synthetic oligonucleotide
ccaguuuccuugauuuccu

SEQ ID NO: 2985444 - RNA, 19 nt, Artificial Sequence
  Description of Artificial Sequence: Synthetic oligonucleotide
ccuuucucgaggagcucga

SEQ ID NO: 2985445 - RNA, 19 nt, Artificial Sequence
  Description of Artificial Sequence: Synthetic oligonucleotide
gccuuggaggcagugucga

SEQ ID NO: 2985446 - RNA, 19 nt, Artificial Sequence
  Description of Artificial Sequence: Synthetic oligonucleotide
ggcaugguuccaggauaug

SEQ ID NO: 2985447 - RNA, 19 nt, Artificial Sequence
  Description of Artificial Sequence: Synthetic oligonucleotide
cguaaccugcagagguaug

SEQ ID NO: 2985448 - RNA, 19 nt, Artificial Sequence
  Description of Artificial Sequence: Synthetic oligonucleotide
gcaggaugauggaaggccu

SEQ ID NO: 2985449 - RNA, 19 nt, Artificial Sequence
  Description of Artificial Sequence: Synthetic oligonucleotide
ccuuggaggcagugucgac

SEQ ID NO: 2985450 - RNA, 19 nt, Artificial Sequence
  Description of Artificial Sequence: Synthetic oligonucleotide
agccaagggcaugguucca

SEQ ID NO: 2985451 - RNA, 19 nt, Artificial Sequence
  Description of Artificial Sequence: Synthetic oligonucleotide
gagaacucugggccuccuu

SEQ ID NO: 2985452 - RNA, 19 nt, Artificial Sequence
  Description of Artificial Sequence: Synthetic oligonucleotide
cgcuuggcauuccuccagc

SEQ ID NO: 2985453 - RNA, 19 nt, Artificial Sequence
  Description of Artificial Sequence: Synthetic oligonucleotide
ggucuccauggcacugagc

SEQ ID NO: 2985454 - RNA, 19 nt, Artificial Sequence
  Description of Artificial Sequence: Synthetic oligonucleotide
cuccauggccuuggaggca

SEQ ID NO: 2985455 - RNA, 19 nt, Artificial Sequence
  Description of Artificial Sequence: Synthetic oligonucleotide
caggaugauggaaggccuu

SEQ ID NO: 2985456 - RNA, 19 nt, Artificial Sequence
  Description of Artificial Sequence: Synthetic oligonucleotide
ggacuucaaagagacugau

SEQ ID NO: 2985457 - RNA, 19 nt, Artificial Sequence
  Description of Artificial Sequence: Synthetic oligonucleotide
gguguggcuugagaacucu

SEQ ID NO: 2985458 - RNA, 19 nt, Artificial Sequence
  Description of Artificial Sequence: Synthetic oligonucleotide
ccauggcacugagccauag

SEQ ID NO: 2985459 - RNA, 19 nt, Artificial Sequence
  Description of Artificial Sequence: Synthetic oligonucleotide
gagcucgaugcugguuucu

SEQ ID NO: 2985460 - RNA, 19 nt, Artificial Sequence
  Description of Artificial Sequence: Synthetic oligonucleotide
cagcuggggaggacuucaa

SEQ ID NO: 2985461 - RNA, 19 nt, Artificial Sequence
  Description of Artificial Sequence: Synthetic oligonucleotide
gggucacuccauggccuug

SEQ ID NO: 2985462 - RNA, 19 nt, Artificial Sequence
  Description of Artificial Sequence: Synthetic oligonucleotide
gcuuucuuguggaauuauu

SEQ ID NO: 2985463 - RNA, 19 nt, Artificial Sequence
  Description of Artificial Sequence: Synthetic oligonucleotide
ccuuagucucaaaauucuu

SEQ ID NO: 2985464 - RNA, 19 nt, Artificial Sequence
  Description of Artificial Sequence: Synthetic oligonucleotide
cccgcuuggcauuccucca

SEQ ID NO: 2985465 - RNA, 19 nt, Artificial Sequence
  Description of Artificial Sequence: Synthetic oligonucleotide
cagaagacccuggcuugcu

SEQ ID NO: 2985466 - RNA, 19 nt, Artificial Sequence
  Description of Artificial Sequence: Synthetic oligonucleotide
gaggagcucgaugcugguu

SEQ ID NO: 2985467 - RNA, 19 nt, Artificial Sequence
  Description of Artificial Sequence: Synthetic oligonucleotide
gggcuuucuuguggaauua

SEQ ID NO: 2985468 - RNA, 19 nt, Artificial Sequence
  Description of Artificial Sequence: Synthetic oligonucleotide
gccauagauaugagauggu

SEQ ID NO: 2985469 - RNA, 19 nt, Artificial Sequence
  Description of Artificial Sequence: Synthetic oligonucleotide
ggcuuucuuguggaauuau

SEQ ID NO: 2985470 - RNA, 19 nt, Artificial Sequence
  Description of Artificial Sequence: Synthetic oligonucleotide
ccuggcuugcuagucugaa

SEQ ID NO: 2985471 - RNA, 19 nt, Artificial Sequence
  Description of Artificial Sequence: Synthetic oligonucleotide
gggcaugguuccaggauau

SEQ ID NO: 2985472 - RNA, 19 nt, Artificial Sequence
  Description of Artificial Sequence: Synthetic oligonucleotide
gagcagcuggggaggacuu

SEQ ID NO: 2985473 - RNA, 19 nt, Artificial Sequence
  Description of Artificial Sequence: Synthetic oligonucleotide
cuuucucgaggagcucgau

SEQ ID NO: 2985474 - RNA, 19 nt, Artificial Sequence
  Description of Artificial Sequence: Synthetic oligonucleotide
cccagcaacuggcacuggu

SEQ ID NO: 2985475 - RNA, 19 nt, Artificial Sequence
  Description of Artificial Sequence: Synthetic oligonucleotide
gugcaccccgcuuggcauu

SEQ ID NO: 2985476 - RNA, 19 nt, Artificial Sequence
  Description of Artificial Sequence: Synthetic oligonucleotide
ggaggacuucaaagagacu

SEQ ID NO: 2985477 - RNA, 19 nt, Artificial Sequence
  Description of Artificial Sequence: Synthetic oligonucleotide
caccccgcuuggcauuccu

SEQ ID NO: 2985478 - RNA, 19 nt, Artificial Sequence
  Description of Artificial Sequence: Synthetic oligonucleotide
cccuggcuugcuagucuga

SEQ ID NO: 2985479 - RNA, 19 nt, Artificial Sequence
  Description of Artificial Sequence: Synthetic oligonucleotide
gcagagguaugaacugauu

SEQ ID NO: 2985480 - RNA, 19 nt, Artificial Sequence
  Description of Artificial Sequence: Synthetic oligonucleotide
gggccuccuuagucucaaa

SEQ ID NO: 2985481 - RNA, 19 nt, Artificial Sequence
  Description of Artificial Sequence: Synthetic oligonucleotide
gcaccccgcuuggcauucc

SEQ ID NO: 2985482 - RNA, 19 nt, Artificial Sequence
  Description of Artificial Sequence: Synthetic oligonucleotide
cuccagccaagggcauggu

SEQ ID NO: 2985483 - RNA, 19 nt, Artificial Sequence
  Description of Artificial Sequence: Synthetic oligonucleotide
ccaggauaugcaggaugau

SEQ ID NO: 2985484 - RNA, 19 nt, Artificial Sequence
  Description of Artificial Sequence: Synthetic oligonucleotide
cgaggagcucgaugcuggu

SEQ ID NO: 2985485 - RNA, 19 nt, Artificial Sequence
  Description of Artificial Sequence: Synthetic oligonucleotide
aauaauaugauauccaaau

SEQ ID NO: 2985486 - RNA, 19 nt, Artificial Sequence
  Description of Artificial Sequence: Synthetic oligonucleotide
uuugccaccaccuuuaggg

SEQ ID NO: 2985487 - RNA, 19 nt, Artificial Sequence
  Description of Artificial Sequence: Synthetic oligonucleotide
caaauuuugucuuaacugg

SEQ ID NO: 2985488 - RNA, 19 nt, Artificial Sequence
  Description of Artificial Sequence: Synthetic oligonucleotide
uuauccaucccacuuauag

SEQ ID NO: 2985489 - RNA, 19 nt, Artificial Sequence
  Description of Artificial Sequence: Synthetic oligonucleotide
ugugauuuuauuuucuccc

SEQ ID NO: 2985490 - RNA, 19 nt, Artificial Sequence
  Description of Artificial Sequence: Synthetic oligonucleotide
accuuuagggcccugagcc

SEQ ID NO: 2985491 - RNA, 19 nt, Artificial Sequence
  Description of Artificial Sequence: Synthetic oligonucleotide
aacacaggcuuauccaucc

SEQ ID NO: 2985492 - RNA, 19 nt, Artificial Sequence
  Description of Artificial Sequence: Synthetic oligonucleotide
auccaucccacuuauaggc

SEQ ID NO: 2985493 - RNA, 19 nt, Artificial Sequence
  Description of Artificial Sequence: Synthetic oligonucleotide
uaauaugauauccaaauuu

SEQ ID NO: 2985494 - RNA, 19 nt, Artificial Sequence
  Description of Artificial Sequence: Synthetic oligonucleotide
uaugauauccaaauuuugu

SEQ ID NO: 2985495 - RNA, 19 nt, Artificial Sequence
  Description of Artificial Sequence: Synthetic oligonucleotide
acuucacugaaucucauuc

SEQ ID NO: 2985496 - RNA, 19 nt, Artificial Sequence
  Description of Artificial Sequence: Synthetic oligonucleotide
uuauuuucucccuucaacc

SEQ ID NO: 2985497 - RNA, 19 nt, Artificial Sequence
  Description of Artificial Sequence: Synthetic oligonucleotide
uuuauuuucucccuucaac

SEQ ID NO: 2985498 - RNA, 19 nt, Artificial Sequence
  Description of Artificial Sequence: Synthetic oligonucleotide
augauauccaaauuuuguc

SEQ ID NO: 2985499 - RNA, 19 nt, Artificial Sequence
  Description of Artificial Sequence: Synthetic oligonucleotide
uucaaccauaauaauauga

SEQ ID NO: 2985500 - RNA, 19 nt, Artificial Sequence
  Description of Artificial Sequence: Synthetic oligonucleotide
aaaggguccuaccauggac

SEQ ID NO: 2985501 - RNA, 19 nt, Artificial Sequence
  Description of Artificial Sequence: Synthetic oligonucleotide
aaccauaauaauaugauau

SEQ ID NO: 2985502 - RNA, 19 nt, Artificial Sequence
  Description of Artificial Sequence: Synthetic oligonucleotide
augugauuuuauuuucucc

SEQ ID NO: 2985503 - RNA, 19 nt, Artificial Sequence
  Description of Artificial Sequence: Synthetic oligonucleotide
ucaaccauaauaauaugau

SEQ ID NO: 2985504 - RNA, 19 nt, Artificial Sequence
  Description of Artificial Sequence: Synthetic oligonucleotide
auuuugucuuaacuggugg

SEQ ID NO: 2985505 - RNA, 19 nt, Artificial Sequence
  Description of Artificial Sequence: Synthetic oligonucleotide
accauaauaauaugauauc

SEQ ID NO: 2985506 - RNA, 19 nt, Artificial Sequence
  Description of Artificial Sequence: Synthetic oligonucleotide
auugcgugcuucuugaaag

SEQ ID NO: 2985507 - RNA, 19 nt, Artificial Sequence
  Description of Artificial Sequence: Synthetic oligonucleotide
auaauaauaugauauccaa

SEQ ID NO: 2985508 - RNA, 19 nt, Artificial Sequence
  Description of Artificial Sequence: Synthetic oligonucleotide
ugaaucucauuccagauuu

SEQ ID NO: 2985509 - RNA, 19 nt, Artificial Sequence
  Description of Artificial Sequence: Synthetic oligonucleotide
uuaucuucacuauauugug

SEQ ID NO: 2985510 - RNA, 19 nt, Artificial Sequence
  Description of Artificial Sequence: Synthetic oligonucleotide
ugauauccaaauuuugucu

SEQ ID NO: 2985511 - RNA, 19 nt, Artificial Sequence
  Description of Artificial Sequence: Synthetic oligonucleotide
cuuuaucuucacuauauug

SEQ ID NO: 2985512 - RNA, 19 nt, Artificial Sequence
  Description of Artificial Sequence: Synthetic oligonucleotide
uuauaggcaaggcaauugc

SEQ ID NO: 2985513 - RNA, 19 nt, Artificial Sequence
  Description of Artificial Sequence: Synthetic oligonucleotide
uccaaauuuugucuuaacu

SEQ ID NO: 2985514 - RNA, 19 nt, Artificial Sequence
  Description of Artificial Sequence: Synthetic oligonucleotide
agcacugucacucccagag

SEQ ID NO: 2985515 - RNA, 19 nt, Artificial Sequence
  Description of Artificial Sequence: Synthetic oligonucleotide
uuuugucuuaacugguggg

SEQ ID NO: 2985516 - RNA, 19 nt, Artificial Sequence
  Description of Artificial Sequence: Synthetic oligonucleotide
uauaggcaaggcaauugcg

SEQ ID NO: 2985517 - RNA, 19 nt, Artificial Sequence
  Description of Artificial Sequence: Synthetic oligonucleotide
accacuuuccccuucggcg

SEQ ID NO: 2985518 - RNA, 19 nt, Artificial Sequence
  Description of Artificial Sequence: Synthetic oligonucleotide
uuucaugugauuuuauuuu

SEQ ID NO: 2985519 - RNA, 19 nt, Artificial Sequence
  Description of Artificial Sequence: Synthetic oligonucleotide
ucucccuucaaccauaaua

SEQ ID NO: 2985520 - RNA, 19 nt, Artificial Sequence
  Description of Artificial Sequence: Synthetic oligonucleotide
ugaaaggguccuaccaugg

SEQ ID NO: 2985521 - RNA, 19 nt, Artificial Sequence
  Description of Artificial Sequence: Synthetic oligonucleotide
uuuaacuuuuccauggcuu

SEQ ID NO: 2985522 - RNA, 19 nt, Artificial Sequence
  Description of Artificial Sequence: Synthetic oligonucleotide
ucuugaaaggguccuacca

SEQ ID NO: 2985523 - RNA, 19 nt, Artificial Sequence
  Description of Artificial Sequence: Synthetic oligonucleotide
aauaugauauccaaauuuu

SEQ ID NO: 2985524 - RNA, 19 nt, Artificial Sequence
  Description of Artificial Sequence: Synthetic oligonucleotide
aaccacuuuccccuucggc

SEQ ID NO: 2985525 - RNA, 19 nt, Artificial Sequence
  Description of Artificial Sequence: Synthetic oligonucleotide
uaauaauaugauauccaaa

SEQ ID NO: 2985526 - RNA, 19 nt, Artificial Sequence
  Description of Artificial Sequence: Synthetic oligonucleotide
uucacugaaucucauucca

SEQ ID NO: 2985527 - RNA, 19 nt, Artificial Sequence
  Description of Artificial Sequence: Synthetic oligonucleotide
uccagaaccacuuuccccu

SEQ ID NO: 2985528 - RNA, 19 nt, Artificial Sequence
  Description of Artificial Sequence: Synthetic oligonucleotide
ucucauuccagauuuuaac

SEQ ID NO: 2985529 - RNA, 19 nt, Artificial Sequence
  Description of Artificial Sequence: Synthetic oligonucleotide
cauaauaauaugauaucca

SEQ ID NO: 2985530 - RNA, 19 nt, Artificial Sequence
  Description of Artificial Sequence: Synthetic oligonucleotide
aaggguccuaccauggacc

SEQ ID NO: 2985531 - RNA, 19 nt, Artificial Sequence
  Description of Artificial Sequence: Synthetic oligonucleotide
augugucugaccuuuacug

SEQ ID NO: 2985532 - RNA, 19 nt, Artificial Sequence
  Description of Artificial Sequence: Synthetic oligonucleotide
aaugugucugaccuuuacu

SEQ ID NO: 2985533 - RNA, 19 nt, Artificial Sequence
  Description of Artificial Sequence: Synthetic oligonucleotide
uccagauuuuaacuuuucc

SEQ ID NO: 2985534 - RNA, 19 nt, Artificial Sequence
  Description of Artificial Sequence: Synthetic oligonucleotide
uuuuaacuuuuccauggcu

SEQ ID NO: 2985535 - RNA, 19 nt, Artificial Sequence
  Description of Artificial Sequence: Synthetic oligonucleotide
uuuucacacagaauguguc

SEQ ID NO: 2985536 - RNA, 19 nt, Artificial Sequence
  Description of Artificial Sequence: Synthetic oligonucleotide
uucacuauauuguguggcc

SEQ ID NO: 2985537 - RNA, 19 nt, Artificial Sequence
  Description of Artificial Sequence: Synthetic oligonucleotide
ugaccuuuacugcauuugc

SEQ ID NO: 2985538 - RNA, 19 nt, Artificial Sequence
  Description of Artificial Sequence: Synthetic oligonucleotide
gauuuuauuuucucccuuc

SEQ ID NO: 2985539 - RNA, 19 nt, Artificial Sequence
  Description of Artificial Sequence: Synthetic oligonucleotide
auggcuuccaugauuuugc

SEQ ID NO: 2985540 - RNA, 19 nt, Artificial Sequence
  Description of Artificial Sequence: Synthetic oligonucleotide
ucuucacuauauugugugg

SEQ ID NO: 2985541 - RNA, 19 nt, Artificial Sequence
  Description of Artificial Sequence: Synthetic oligonucleotide
ccaaauuuugucuuaacug

SEQ ID NO: 2985542 - RNA, 19 nt, Artificial Sequence
  Description of Artificial Sequence: Synthetic oligonucleotide
aauuuugucuuaacuggug

SEQ ID NO: 2985543 - RNA, 19 nt, Artificial Sequence
  Description of Artificial Sequence: Synthetic oligonucleotide
cuuuacugcauuugccacc

SEQ ID NO: 2985544 - RNA, 19 nt, Artificial Sequence
  Description of Artificial Sequence: Synthetic oligonucleotide
ugugucugaccuuuacugc

SEQ ID NO: 2985545 - RNA, 19 nt, Artificial Sequence
  Description of Artificial Sequence: Synthetic oligonucleotide
uugaaaggguccuaccaug

SEQ ID NO: 2985546 - RNA, 19 nt, Artificial Sequence
  Description of Artificial Sequence: Synthetic oligonucleotide
guaaacacaggcuuaucca

SEQ ID NO: 2985547 - RNA, 19 nt, Artificial Sequence
  Description of Artificial Sequence: Synthetic oligonucleotide
acacagaaugugucugacc

SEQ ID NO: 2985548 - RNA, 19 nt, Artificial Sequence
  Description of Artificial Sequence: Synthetic oligonucleotide
cuucacugaaucucauucc

SEQ ID NO: 2985549 - RNA, 19 nt, Artificial Sequence
  Description of Artificial Sequence: Synthetic oligonucleotide
aauugcgugcuucuugaaa

SEQ ID NO: 2985550 - RNA, 19 nt, Artificial Sequence
  Description of Artificial Sequence: Synthetic oligonucleotide
ugucuuaacuggugggucc

SEQ ID NO: 2985551 - RNA, 19 nt, Artificial Sequence
  Description of Artificial Sequence: Synthetic oligonucleotide
uuuccagaaccacuuuccc

SEQ ID NO: 2985552 - RNA, 19 nt, Artificial Sequence
  Description of Artificial Sequence: Synthetic oligonucleotide
aggcaaggcaauugcgugc

SEQ ID NO: 2985553 - RNA, 19 nt, Artificial Sequence
  Description of Artificial Sequence: Synthetic oligonucleotide
uucaugugauuuuauuuuc

SEQ ID NO: 2985554 - RNA, 19 nt, Artificial Sequence
  Description of Artificial Sequence: Synthetic oligonucleotide
aaauuuugucuuaacuggu

SEQ ID NO: 2985555 - RNA, 19 nt, Artificial Sequence
  Description of Artificial Sequence: Synthetic oligonucleotide
uucuugucagcacugucac

SEQ ID NO: 2985556 - RNA, 19 nt, Artificial Sequence
  Description of Artificial Sequence: Synthetic oligonucleotide
accuuuacugcauuugcca

SEQ ID NO: 2985557 - RNA, 19 nt, Artificial Sequence
  Description of Artificial Sequence: Synthetic oligonucleotide
uuuacugcauuugccacca

SEQ ID NO: 2985558 - RNA, 19 nt, Artificial Sequence
  Description of Artificial Sequence: Synthetic oligonucleotide
uacugcauuugccaccacc

SEQ ID NO: 2985559 - RNA, 19 nt, Artificial Sequence
  Description of Artificial Sequence: Synthetic oligonucleotide
uuuuauuuucucccuucaa

SEQ ID NO: 2985560 - RNA, 19 nt, Artificial Sequence
  Description of Artificial Sequence: Synthetic oligonucleotide
uaaacacaggcuuauccau

SEQ ID NO: 2985561 - RNA, 19 nt, Artificial Sequence
  Description of Artificial Sequence: Synthetic oligonucleotide
cuugucagcacugucacuc

SEQ ID NO: 2985562 - RNA, 19 nt, Artificial Sequence
  Description of Artificial Sequence: Synthetic oligonucleotide
uaucuucacuauauugugu

SEQ ID NO: 2985563 - RNA, 19 nt, Artificial Sequence
  Description of Artificial Sequence: Synthetic oligonucleotide
cuucacuauauuguguggc

SEQ ID NO: 2985564 - RNA, 19 nt, Artificial Sequence
  Description of Artificial Sequence: Synthetic oligonucleotide
aaggcaauugcgugcuucu

SEQ ID NO: 2985565 - RNA, 19 nt, Artificial Sequence
  Description of Artificial Sequence: Synthetic oligonucleotide
uguguggccacuucacuga

SEQ ID NO: 2985566 - RNA, 19 nt, Artificial Sequence
  Description of Artificial Sequence: Synthetic oligonucleotide
uaggcaaggcaauugcgug

SEQ ID NO: 2985567 - RNA, 19 nt, Artificial Sequence
  Description of Artificial Sequence: Synthetic oligonucleotide
uuguguggccacuucacug

SEQ ID NO: 2985568 - RNA, 19 nt, Artificial Sequence
  Description of Artificial Sequence: Synthetic oligonucleotide
ucacugaaucucauuccag

SEQ ID NO: 2985569 - RNA, 19 nt, Artificial Sequence
  Description of Artificial Sequence: Synthetic oligonucleotide
aaacacaggcuuauccauc

SEQ ID NO: 2985570 - RNA, 19 nt, Artificial Sequence
  Description of Artificial Sequence: Synthetic oligonucleotide
ucauuccagauuuuaacuu

SEQ ID NO: 2985571 - RNA, 19 nt, Artificial Sequence
  Description of Artificial Sequence: Synthetic oligonucleotide
uuugucuuaacuggugggu

SEQ ID NO: 2985572 - RNA, 19 nt, Artificial Sequence
  Description of Artificial Sequence: Synthetic oligonucleotide
auaauaugauauccaaauu

SEQ ID NO: 2985573 - RNA, 19 nt, Artificial Sequence
  Description of Artificial Sequence: Synthetic oligonucleotide
uucacacagaaugugucug

SEQ ID NO: 2985574 - RNA, 19 nt, Artificial Sequence
  Description of Artificial Sequence: Synthetic oligonucleotide
auauuguguggccacuuca

SEQ ID NO: 2985575 - RNA, 19 nt, Artificial Sequence
  Description of Artificial Sequence: Synthetic oligonucleotide
auccaaauuuugucuuaac

SEQ ID NO: 2985576 - RNA, 19 nt, Artificial Sequence
  Description of Artificial Sequence: Synthetic oligonucleotide
uuccagaaccacuuucccc

SEQ ID NO: 2985577 - RNA, 19 nt, Artificial Sequence
  Description of Artificial Sequence: Synthetic oligonucleotide
aggguccuaccauggaccc

SEQ ID NO: 2985578 - RNA, 19 nt, Artificial Sequence
  Description of Artificial Sequence: Synthetic oligonucleotide
cuuauaggcaaggcaauug

SEQ ID NO: 2985579 - RNA, 19 nt, Artificial Sequence
  Description of Artificial Sequence: Synthetic oligonucleotide
cucccuucaaccauaauaa

SEQ ID NO: 2985580 - RNA, 19 nt, Artificial Sequence
  Description of Artificial Sequence: Synthetic oligonucleotide
uccauggcuuccaugauuu

SEQ ID NO: 2985581 - RNA, 19 nt, Artificial Sequence
  Description of Artificial Sequence: Synthetic oligonucleotide
ccauaauaauaugauaucc

SEQ ID NO: 2985582 - RNA, 19 nt, Artificial Sequence
  Description of Artificial Sequence: Synthetic oligonucleotide
uauauuguguggccacuuc

SEQ ID NO: 2985583 - RNA, 19 nt, Artificial Sequence
  Description of Artificial Sequence: Synthetic oligonucleotide
uggguccguaaacacaggc

SEQ ID NO: 2985584 - RNA, 19 nt, Artificial Sequence
  Description of Artificial Sequence: Synthetic oligonucleotide
uugcgugcuucuugaaagg

SEQ ID NO: 2985585 - RNA, 19 nt, Artificial Sequence
  Description of Artificial Sequence: Synthetic oligonucleotide
auaugauauccaaauuuug

SEQ ID NO: 2985586 - RNA, 19 nt, Artificial Sequence
  Description of Artificial Sequence: Synthetic oligonucleotide
ucagcacugucacucccag

SEQ ID NO: 2985587 - RNA, 19 nt, Artificial Sequence
  Description of Artificial Sequence: Synthetic oligonucleotide
cuucuugucagcacuguca

SEQ ID NO: 2985588 - RNA, 19 nt, Artificial Sequence
  Description of Artificial Sequence: Synthetic oligonucleotide
cuuuuccagaaccacuuuc

SEQ ID NO: 2985589 - RNA, 19 nt, Artificial Sequence
  Description of Artificial Sequence: Synthetic oligonucleotide
ugauuuuauuuucucccuu

SEQ ID NO: 2985590 - RNA, 19 nt, Artificial Sequence
  Description of Artificial Sequence: Synthetic oligonucleotide
accauggacccucugguca

SEQ ID NO: 2985591 - RNA, 19 nt, Artificial Sequence
  Description of Artificial Sequence: Synthetic oligonucleotide
gaaugugucugaccuuuac

SEQ ID NO: 2985592 - RNA, 19 nt, Artificial Sequence
  Description of Artificial Sequence: Synthetic oligonucleotide
acccucuggucauccaacc

SEQ ID NO: 2985593 - RNA, 19 nt, Artificial Sequence
  Description of Artificial Sequence: Synthetic oligonucleotide
cacuauauuguguggccac

SEQ ID NO: 2985594 - RNA, 19 nt, Artificial Sequence
  Description of Artificial Sequence: Synthetic oligonucleotide
uucuugaaaggguccuacc

SEQ ID NO: 2985595 - RNA, 19 nt, Artificial Sequence
  Description of Artificial Sequence: Synthetic oligonucleotide
cuugccuggcuuuaucuuc

SEQ ID NO: 2985596 - RNA, 19 nt, Artificial Sequence
  Description of Artificial Sequence: Synthetic oligonucleotide
auuugccaccaccuuuagg

SEQ ID NO: 2985597 - RNA, 19 nt, Artificial Sequence
  Description of Artificial Sequence: Synthetic oligonucleotide
aaucucauuccagauuuua

SEQ ID NO: 2985598 - RNA, 19 nt, Artificial Sequence
  Description of Artificial Sequence: Synthetic oligonucleotide
ugcauuugccaccaccuuu

SEQ ID NO: 2985599 - RNA, 19 nt, Artificial Sequence
  Description of Artificial Sequence: Synthetic oligonucleotide
cuucaaccauaauaauaug

SEQ ID NO: 2985600 - RNA, 19 nt, Artificial Sequence
  Description of Artificial Sequence: Synthetic oligonucleotide
ucacacagaaugugucuga

SEQ ID NO: 2985601 - RNA, 19 nt, Artificial Sequence
  Description of Artificial Sequence: Synthetic oligonucleotide
ugcgugcuucuugaaaggg

SEQ ID NO: 2985602 - RNA, 19 nt, Artificial Sequence
  Description of Artificial Sequence: Synthetic oligonucleotide
uggucauccaacccagguc

SEQ ID NO: 2985603 - RNA, 19 nt, Artificial Sequence
  Description of Artificial Sequence: Synthetic oligonucleotide
acaggcuuauccaucccac

SEQ ID NO: 2985604 - RNA, 19 nt, Artificial Sequence
  Description of Artificial Sequence: Synthetic oligonucleotide
ucacuauauuguguggcca

SEQ ID NO: 2985605 - RNA, 19 nt, Artificial Sequence
  Description of Artificial Sequence: Synthetic oligonucleotide
gauauccaaauuuugucuu

SEQ ID NO: 2985606 - RNA, 19 nt, Artificial Sequence
  Description of Artificial Sequence: Synthetic oligonucleotide
ugguggguccguaaacaca

SEQ ID NO: 2985607 - RNA, 19 nt, Artificial Sequence
  Description of Artificial Sequence: Synthetic oligonucleotide
uauccaaauuuugucuuaa

SEQ ID NO: 2985608 - RNA, 19 nt, Artificial Sequence
  Description of Artificial Sequence: Synthetic oligonucleotide
auuguguggccacuucacu

SEQ ID NO: 2985609 - RNA, 19 nt, Artificial Sequence
  Description of Artificial Sequence: Synthetic oligonucleotide
cacagaaugugucugaccu

SEQ ID NO: 2985610 - RNA, 19 nt, Artificial Sequence
  Description of Artificial Sequence: Synthetic oligonucleotide
uuaacugguggguccguaa

SEQ ID NO: 2985611 - RNA, 19 nt, Artificial Sequence
  Description of Artificial Sequence: Synthetic oligonucleotide
ggucauccaacccagguca

SEQ ID NO: 2985612 - RNA, 19 nt, Artificial Sequence
  Description of Artificial Sequence: Synthetic oligonucleotide
acugcauuugccaccaccu

SEQ ID NO: 2985613 - RNA, 19 nt, Artificial Sequence
  Description of Artificial Sequence: Synthetic oligonucleotide
gaccuuuacugcauuugcc

SEQ ID NO: 2985614 - RNA, 19 nt, Artificial Sequence
  Description of Artificial Sequence: Synthetic oligonucleotide
auaggcaaggcaauugcgu

SEQ ID NO: 2985615 - RNA, 19 nt, Artificial Sequence
  Description of Artificial Sequence: Synthetic oligonucleotide
cucuggucauccaacccag

SEQ ID NO: 2985616 - RNA, 19 nt, Artificial Sequence
  Description of Artificial Sequence: Synthetic oligonucleotide
ugucagcacugucacuccc

SEQ ID NO: 2985617 - RNA, 19 nt, Artificial Sequence
  Description of Artificial Sequence: Synthetic oligonucleotide
cauggcuuccaugauuuug

SEQ ID NO: 2985618 - RNA, 19 nt, Artificial Sequence
  Description of Artificial Sequence: Synthetic oligonucleotide
gguggguccguaaacacag

SEQ ID NO: 2985619 - RNA, 19 nt, Artificial Sequence
  Description of Artificial Sequence: Synthetic oligonucleotide
uccaucccacuuauaggca

SEQ ID NO: 2985620 - RNA, 19 nt, Artificial Sequence
  Description of Artificial Sequence: Synthetic oligonucleotide
cauccaacccaggucaccc

SEQ ID NO: 2985621 - RNA, 19 nt, Artificial Sequence
  Description of Artificial Sequence: Synthetic oligonucleotide
ucuggucauccaacccagg

SEQ ID NO: 2985622 - RNA, 19 nt, Artificial Sequence
  Description of Artificial Sequence: Synthetic oligonucleotide
uucggcggcaucuccuaag

SEQ ID NO: 2985623 - RNA, 19 nt, Artificial Sequence
  Description of Artificial Sequence: Synthetic oligonucleotide
caugauuuugccauguuuu

SEQ ID NO: 2985624 - RNA, 19 nt, Artificial Sequence
  Description of Artificial Sequence: Synthetic oligonucleotide
auccaacccaggucacccc

SEQ ID NO: 2985625 - RNA, 19 nt, Artificial Sequence
  Description of Artificial Sequence: Synthetic oligonucleotide
cacugaaucucauuccaga

SEQ ID NO: 2985626 - RNA, 19 nt, Artificial Sequence
  Description of Artificial Sequence: Synthetic oligonucleotide
gugucugaccuuuacugca

SEQ ID NO: 2985627 - RNA, 19 nt, Artificial Sequence
  Description of Artificial Sequence: Synthetic oligonucleotide
ccagauuuuaacuuuucca

SEQ ID NO: 2985628 - RNA, 19 nt, Artificial Sequence
  Description of Artificial Sequence: Synthetic oligonucleotide
ucggcggcaucuccuaagc

SEQ ID NO: 2985629 - RNA, 19 nt, Artificial Sequence
  Description of Artificial Sequence: Synthetic oligonucleotide
gaggcugcaccuccuuucc

SEQ ID NO: 2985630 - RNA, 19 nt, Artificial Sequence
  Description of Artificial Sequence: Synthetic oligonucleotide
cuucuugaaaggguccuac

SEQ ID NO: 2985631 - RNA, 19 nt, Artificial Sequence
  Description of Artificial Sequence: Synthetic oligonucleotide
cguaaacacaggcuuaucc

SEQ ID NO: 2985632 - RNA, 19 nt, Artificial Sequence
  Description of Artificial Sequence: Synthetic oligonucleotide
ugucacucccagaggcugc

SEQ ID NO: 2985633 - RNA, 19 nt, Artificial Sequence
  Description of Artificial Sequence: Synthetic oligonucleotide
caucccacuuauaggcaag

SEQ ID NO: 2985634 - RNA, 19 nt, Artificial Sequence
  Description of Artificial Sequence: Synthetic oligonucleotide
ugucugaccuuuacugcau

SEQ ID NO: 2985635 - RNA, 19 nt, Artificial Sequence
  Description of Artificial Sequence: Synthetic oligonucleotide
cucauuccagauuuuaacu

SEQ ID NO: 2985636 - RNA, 19 nt, Artificial Sequence
  Description of Artificial Sequence: Synthetic oligonucleotide
cugaccuuuacugcauuug

SEQ ID NO: 2985637 - RNA, 19 nt, Artificial Sequence
  Description of Artificial Sequence: Synthetic oligonucleotide
gucuuaacugguggguccg

SEQ ID NO: 2985638 - RNA, 19 nt, Artificial Sequence
  Description of Artificial Sequence: Synthetic oligonucleotide
ccuaccauggacccucugg

SEQ ID NO: 2985639 - RNA, 19 nt, Artificial Sequence
  Description of Artificial Sequence: Synthetic oligonucleotide
acucccagaggcugcaccu

SEQ ID NO: 2985640 - RNA, 19 nt, Artificial Sequence
  Description of Artificial Sequence: Synthetic oligonucleotide
ugcuucuugaaaggguccu

SEQ ID NO: 2985641 - RNA, 19 nt, Artificial Sequence
  Description of Artificial Sequence: Synthetic oligonucleotide
gaaccacuuuccccuucgg

SEQ ID NO: 2985642 - RNA, 19 nt, Artificial Sequence
  Description of Artificial Sequence: Synthetic oligonucleotide
uuccauggcuuccaugauu

SEQ ID NO: 2985643 - RNA, 19 nt, Artificial Sequence
  Description of Artificial Sequence: Synthetic oligonucleotide
acugguggguccguaaaca

SEQ ID NO: 2985644 - RNA, 19 nt, Artificial Sequence
  Description of Artificial Sequence: Synthetic oligonucleotide
uugucuuaacugguggguc

SEQ ID NO: 2985645 - RNA, 19 nt, Artificial Sequence
  Description of Artificial Sequence: Synthetic oligonucleotide
uggcuuuaucuucacuaua

SEQ ID NO: 2985646 - RNA, 19 nt, Artificial Sequence
  Description of Artificial Sequence: Synthetic oligonucleotide
gaaaggguccuaccaugga

SEQ ID NO: 2985647 - RNA, 19 nt, Artificial Sequence
  Description of Artificial Sequence: Synthetic oligonucleotide
ggcaauugcgugcuucuug

SEQ ID NO: 2985648 - RNA, 19 nt, Artificial Sequence
  Description of Artificial Sequence: Synthetic oligonucleotide
aggcuuauccaucccacuu

SEQ ID NO: 2985649 - RNA, 19 nt, Artificial Sequence
  Description of Artificial Sequence: Synthetic oligonucleotide
caaccauaauaauaugaua

SEQ ID NO: 2985650 - RNA, 19 nt, Artificial Sequence
  Description of Artificial Sequence: Synthetic oligonucleotide
uccguaaacacaggcuuau

SEQ ID NO: 2985651 - RNA, 19 nt, Artificial Sequence
  Description of Artificial Sequence: Synthetic oligonucleotide
agggcccugagccuucuug

SEQ ID NO: 2985652 - RNA, 19 nt, Artificial Sequence
  Description of Artificial Sequence: Synthetic oligonucleotide
uuccaugauuuugccaugu

SEQ ID NO: 2985653 - RNA, 19 nt, Artificial Sequence
  Description of Artificial Sequence: Synthetic oligonucleotide
cugguggguccguaaacac

SEQ ID NO: 2985654 - RNA, 19 nt, Artificial Sequence
  Description of Artificial Sequence: Synthetic oligonucleotide
acuauauuguguggccacu

SEQ ID NO: 2985655 - RNA, 19 nt, Artificial Sequence
  Description of Artificial Sequence: Synthetic oligonucleotide
aucccacuuauaggcaagg

SEQ ID NO: 2985656 - RNA, 19 nt, Artificial Sequence
  Description of Artificial Sequence: Synthetic oligonucleotide
auggacccucuggucaucc

SEQ ID NO: 2985657 - RNA, 19 nt, Artificial Sequence
  Description of Artificial Sequence: Synthetic oligonucleotide
ucugaccuuuacugcauuu

SEQ ID NO: 2985658 - RNA, 19 nt, Artificial Sequence
  Description of Artificial Sequence: Synthetic oligonucleotide
uggcuuccaugauuuugcc

SEQ ID NO: 2985659 - RNA, 19 nt, Artificial Sequence
  Description of Artificial Sequence: Synthetic oligonucleotide
caccuuuagggcccugagc

SEQ ID NO: 2985660 - RNA, 19 nt, Artificial Sequence
  Description of Artificial Sequence: Synthetic oligonucleotide
ucauccaacccaggucacc

SEQ ID NO: 2985661 - RNA, 19 nt, Artificial Sequence
  Description of Artificial Sequence: Synthetic oligonucleotide
ccacuuauaggcaaggcaa

SEQ ID NO: 2985662 - RNA, 19 nt, Artificial Sequence
  Description of Artificial Sequence: Synthetic oligonucleotide
ccuucaaccauaauaauau

SEQ ID NO: 2985663 - RNA, 19 nt, Artificial Sequence
  Description of Artificial Sequence: Synthetic oligonucleotide
aggcugcaccuccuuuccc

SEQ ID NO: 2985664 - RNA, 19 nt, Artificial Sequence
  Description of Artificial Sequence: Synthetic oligonucleotide
gcaauugcgugcuucuuga

SEQ ID NO: 2985665 - RNA, 19 nt, Artificial Sequence
  Description of Artificial Sequence: Synthetic oligonucleotide
caaggcaauugcgugcuuc

SEQ ID NO: 2985666 - RNA, 19 nt, Artificial Sequence
  Description of Artificial Sequence: Synthetic oligonucleotide
uuuagggcccugagccuuc

SEQ ID NO: 2985667 - RNA, 19 nt, Artificial Sequence
  Description of Artificial Sequence: Synthetic oligonucleotide
cacucccagaggcugcacc

SEQ ID NO: 2985668 - RNA, 19 nt, Artificial Sequence
  Description of Artificial Sequence: Synthetic oligonucleotide
cacacagaaugugucugac

SEQ ID NO: 2985669 - RNA, 19 nt, Artificial Sequence
  Description of Artificial Sequence: Synthetic oligonucleotide
ccacuuuccccuucggcgg

SEQ ID NO: 2985670 - RNA, 19 nt, Artificial Sequence
  Description of Artificial Sequence: Synthetic oligonucleotide
ucuugucagcacugucacu

SEQ ID NO: 2985671 - RNA, 19 nt, Artificial Sequence
  Description of Artificial Sequence: Synthetic oligonucleotide
ucccacuuauaggcaaggc

SEQ ID NO: 2985672 - RNA, 19 nt, Artificial Sequence
  Description of Artificial Sequence: Synthetic oligonucleotide
ucccuucaaccauaauaau

SEQ ID NO: 2985673 - RNA, 19 nt, Artificial Sequence
  Description of Artificial Sequence: Synthetic oligonucleotide
ccuuuacugcauuugccac

SEQ ID NO: 2985674 - RNA, 19 nt, Artificial Sequence
  Description of Artificial Sequence: Synthetic oligonucleotide
uuccccuucggcggcaucu

SEQ ID NO: 2985675 - RNA, 19 nt, Artificial Sequence
  Description of Artificial Sequence: Synthetic oligonucleotide
aucucauuccagauuuuaa

SEQ ID NO: 2985676 - RNA, 19 nt, Artificial Sequence
  Description of Artificial Sequence: Synthetic oligonucleotide
acuuauaggcaaggcaauu

SEQ ID NO: 2985677 - RNA, 19 nt, Artificial Sequence
  Description of Artificial Sequence: Synthetic oligonucleotide
uccaugauuuugccauguu

SEQ ID NO: 2985678 - RNA, 19 nt, Artificial Sequence
  Description of Artificial Sequence: Synthetic oligonucleotide
cugucacucccagaggcug

SEQ ID NO: 2985679 - RNA, 19 nt, Artificial Sequence
  Description of Artificial Sequence: Synthetic oligonucleotide
ggcugcaccuccuuucccc

SEQ ID NO: 2985680 - RNA, 19 nt, Artificial Sequence
  Description of Artificial Sequence: Synthetic oligonucleotide
uaccauggacccucugguc

SEQ ID NO: 2985681 - RNA, 19 nt, Artificial Sequence
  Description of Artificial Sequence: Synthetic oligonucleotide
cacaggcuuauccauccca

SEQ ID NO: 2985682 - RNA, 19 nt, Artificial Sequence
  Description of Artificial Sequence: Synthetic oligonucleotide
cauuugccaccaccuuuag

SEQ ID NO: 2985683 - RNA, 19 nt, Artificial Sequence
  Description of Artificial Sequence: Synthetic oligonucleotide
cauuccagauuuuaacuuu

SEQ ID NO: 2985684 - RNA, 19 nt, Artificial Sequence
  Description of Artificial Sequence: Synthetic oligonucleotide
cuugaaaggguccuaccau

SEQ ID NO: 2985685 - RNA, 19 nt, Artificial Sequence
  Description of Artificial Sequence: Synthetic oligonucleotide
gacccucuggucauccaac

SEQ ID NO: 2985686 - RNA, 19 nt, Artificial Sequence
  Description of Artificial Sequence: Synthetic oligonucleotide
ccuggcuuuaucuucacua

SEQ ID NO: 2985687 - RNA, 19 nt, Artificial Sequence
  Description of Artificial Sequence: Synthetic oligonucleotide
gugcuucuugaaagggucc

SEQ ID NO: 2985688 - RNA, 19 nt, Artificial Sequence
  Description of Artificial Sequence: Synthetic oligonucleotide
cgugcuucuugaaaggguc

SEQ ID NO: 2985689 - RNA, 19 nt, Artificial Sequence
  Description of Artificial Sequence: Synthetic oligonucleotide
uguggccacuucacugaau

SEQ ID NO: 2985690 - RNA, 19 nt, Artificial Sequence
  Description of Artificial Sequence: Synthetic oligonucleotide
cuaccauggacccucuggu

SEQ ID NO: 2985691 - RNA, 19 nt, Artificial Sequence
  Description of Artificial Sequence: Synthetic oligonucleotide
gguccuaccauggacccuc

SEQ ID NO: 2985692 - RNA, 19 nt, Artificial Sequence
  Description of Artificial Sequence: Synthetic oligonucleotide
cacuuuccccuucggcggc

SEQ ID NO: 2985693 - RNA, 19 nt, Artificial Sequence
  Description of Artificial Sequence: Synthetic oligonucleotide
ggccacuucacugaaucuc

SEQ ID NO: 2985694 - RNA, 19 nt, Artificial Sequence
  Description of Artificial Sequence: Synthetic oligonucleotide
acugucacucccagaggcu

SEQ ID NO: 2985695 - RNA, 19 nt, Artificial Sequence
  Description of Artificial Sequence: Synthetic oligonucleotide
uccuaccauggacccucug

SEQ ID NO: 2985696 - RNA, 19 nt, Artificial Sequence
  Description of Artificial Sequence: Synthetic oligonucleotide
cccacuuauaggcaaggca

SEQ ID NO: 2985697 - RNA, 19 nt, Artificial Sequence
  Description of Artificial Sequence: Synthetic oligonucleotide
ucuuaacugguggguccgu

SEQ ID NO: 2985698 - RNA, 19 nt, Artificial Sequence
  Description of Artificial Sequence: Synthetic oligonucleotide
accaccuuuagggcccuga

SEQ ID NO: 2985699 - RNA, 19 nt, Artificial Sequence
  Description of Artificial Sequence: Synthetic oligonucleotide
gguccguaaacacaggcuu

SEQ ID NO: 2985700 - RNA, 19 nt, Artificial Sequence
  Description of Artificial Sequence: Synthetic oligonucleotide
cccuucaaccauaauaaua

SEQ ID NO: 2985701 - RNA, 19 nt, Artificial Sequence
  Description of Artificial Sequence: Synthetic oligonucleotide
uggacccucuggucaucca

SEQ ID NO: 2985702 - RNA, 19 nt, Artificial Sequence
  Description of Artificial Sequence: Synthetic oligonucleotide
cuggcuuuaucuucacuau

SEQ ID NO: 2985703 - RNA, 19 nt, Artificial Sequence
  Description of Artificial Sequence: Synthetic oligonucleotide
cuggucauccaacccaggu

SEQ ID NO: 2985704 - RNA, 19 nt, Artificial Sequence
  Description of Artificial Sequence: Synthetic oligonucleotide
agccuucuugucagcacug

SEQ ID NO: 2985705 - RNA, 19 nt, Artificial Sequence
  Description of Artificial Sequence: Synthetic oligonucleotide
ccucuggucauccaaccca

SEQ ID NO: 2985706 - RNA, 19 nt, Artificial Sequence
  Description of Artificial Sequence: Synthetic oligonucleotide
ggcuuuaucuucacuauau

SEQ ID NO: 2985707 - RNA, 19 nt, Artificial Sequence
  Description of Artificial Sequence: Synthetic oligonucleotide
cagaaccacuuuccccuuc

SEQ ID NO: 2985708 - RNA, 19 nt, Artificial Sequence
  Description of Artificial Sequence: Synthetic oligonucleotide
ggcuuauccaucccacuua

SEQ ID NO: 2985709 - RNA, 19 nt, Artificial Sequence
  Description of Artificial Sequence: Synthetic oligonucleotide
ugccuggcuuuaucuucac

SEQ ID NO: 2985710 - RNA, 19 nt, Artificial Sequence
  Description of Artificial Sequence: Synthetic oligonucleotide
cugaaucucauuccagauu

SEQ ID NO: 2985711 - RNA, 19 nt, Artificial Sequence
  Description of Artificial Sequence: Synthetic oligonucleotide
uuacugcauuugccaccac

SEQ ID NO: 2985712 - RNA, 19 nt, Artificial Sequence
  Description of Artificial Sequence: Synthetic oligonucleotide
cugagccuucuugucagca

SEQ ID NO: 2985713 - RNA, 19 nt, Artificial Sequence
  Description of Artificial Sequence: Synthetic oligonucleotide
guggguccguaaacacagg

SEQ ID NO: 2985714 - RNA, 19 nt, Artificial Sequence
  Description of Artificial Sequence: Synthetic oligonucleotide
ggcuuccaugauuuugcca

SEQ ID NO: 2985715 - RNA, 19 nt, Artificial Sequence
  Description of Artificial Sequence: Synthetic oligonucleotide
cacuuauaggcaaggcaau

SEQ ID NO: 2985716 - RNA, 19 nt, Artificial Sequence
  Description of Artificial Sequence: Synthetic oligonucleotide
cagaaugugucugaccuuu

SEQ ID NO: 2985717 - RNA, 19 nt, Artificial Sequence
  Description of Artificial Sequence: Synthetic oligonucleotide
ccuucuugucagcacuguc

SEQ ID NO: 2985718 - RNA, 19 nt, Artificial Sequence
  Description of Artificial Sequence: Synthetic oligonucleotide
cccucuggucauccaaccc

SEQ ID NO: 2985719 - RNA, 19 nt, Artificial Sequence
  Description of Artificial Sequence: Synthetic oligonucleotide
ccaccuuuagggcccugag

SEQ ID NO: 2985720 - RNA, 19 nt, Artificial Sequence
  Description of Artificial Sequence: Synthetic oligonucleotide
gucauccaacccaggucac

SEQ ID NO: 2985721 - RNA, 19 nt, Artificial Sequence
  Description of Artificial Sequence: Synthetic oligonucleotide
cuuauccaucccacuuaua

SEQ ID NO: 2985722 - RNA, 19 nt, Artificial Sequence
  Description of Artificial Sequence: Synthetic oligonucleotide
uuuccccuucggcggcauc

SEQ ID NO: 2985723 - RNA, 19 nt, Artificial Sequence
  Description of Artificial Sequence: Synthetic oligonucleotide
uuagggcccugagccuucu

SEQ ID NO: 2985724 - RNA, 19 nt, Artificial Sequence
  Description of Artificial Sequence: Synthetic oligonucleotide
ggacccucuggucauccaa

SEQ ID NO: 2985725 - RNA, 19 nt, Artificial Sequence
  Description of Artificial Sequence: Synthetic oligonucleotide
caauugcgugcuucuugaa

SEQ ID NO: 2985726 - RNA, 19 nt, Artificial Sequence
  Description of Artificial Sequence: Synthetic oligonucleotide
guccguaaacacaggcuua

SEQ ID NO: 2985727 - RNA, 19 nt, Artificial Sequence
  Description of Artificial Sequence: Synthetic oligonucleotide
gcccugagccuucuuguca

SEQ ID NO: 2985728 - RNA, 19 nt, Artificial Sequence
  Description of Artificial Sequence: Synthetic oligonucleotide
gcuuauccaucccacuuau

SEQ ID NO: 2985729 - RNA, 19 nt, Artificial Sequence
  Description of Artificial Sequence: Synthetic oligonucleotide
cuuaacugguggguccgua

SEQ ID NO: 2985730 - RNA, 19 nt, Artificial Sequence
  Description of Artificial Sequence: Synthetic oligonucleotide
guguggccacuucacugaa

SEQ ID NO: 2985731 - RNA, 19 nt, Artificial Sequence
  Description of Artificial Sequence: Synthetic oligonucleotide
agaaugugucugaccuuua

SEQ ID NO: 2985732 - RNA, 19 nt, Artificial Sequence
  Description of Artificial Sequence: Synthetic oligonucleotide
ccaucccacuuauaggcaa

SEQ ID NO: 2985733 - RNA, 19 nt, Artificial Sequence
  Description of Artificial Sequence: Synthetic oligonucleotide
caggcuuauccaucccacu

SEQ ID NO: 2985734 - RNA, 19 nt, Artificial Sequence
  Description of Artificial Sequence: Synthetic oligonucleotide
acuuuccccuucggcggca

SEQ ID NO: 2985735 - RNA, 19 nt, Artificial Sequence
  Description of Artificial Sequence: Synthetic oligonucleotide
uccccuucggcggcaucuc

SEQ ID NO: 2985736 - RNA, 19 nt, Artificial Sequence
  Description of Artificial Sequence: Synthetic oligonucleotide
ggcaaggcaauugcgugcu

SEQ ID NO: 2985737 - RNA, 19 nt, Artificial Sequence
  Description of Artificial Sequence: Synthetic oligonucleotide
ggcccugagccuucuuguc

SEQ ID NO: 2985738 - RNA, 19 nt, Artificial Sequence
  Description of Artificial Sequence: Synthetic oligonucleotide
cauggacccucuggucauc

SEQ ID NO: 2985739 - RNA, 19 nt, Artificial Sequence
  Description of Artificial Sequence: Synthetic oligonucleotide
ccugagccuucuugucagc

SEQ ID NO: 2985740 - RNA, 19 nt, Artificial Sequence
  Description of Artificial Sequence: Synthetic oligonucleotide
gcuuuaucuucacuauauu

SEQ ID NO: 2985741 - RNA, 19 nt, Artificial Sequence
  Description of Artificial Sequence: Synthetic oligonucleotide
cuuuagggcccugagccuu

SEQ ID NO: 2985742 - RNA, 19 nt, Artificial Sequence
  Description of Artificial Sequence: Synthetic oligonucleotide
aggcaauugcgugcuucuu

SEQ ID NO: 2985743 - RNA, 19 nt, Artificial Sequence
  Description of Artificial Sequence: Synthetic oligonucleotide
cuauauuguguggccacuu

SEQ ID NO: 2985744 - RNA, 19 nt, Artificial Sequence
  Description of Artificial Sequence: Synthetic oligonucleotide
cacuucacugaaucucauu

SEQ ID NO: 2985745 - RNA, 19 nt, Artificial Sequence
  Description of Artificial Sequence: Synthetic oligonucleotide
ggguccguaaacacaggcu

SEQ ID NO: 2985746 - RNA, 19 nt, Artificial Sequence
  Description of Artificial Sequence: Synthetic oligonucleotide
gaaucucauuccagauuuu

SEQ ID NO: 2985747 - RNA, 19 nt, Artificial Sequence
  Description of Artificial Sequence: Synthetic oligonucleotide
cagcacugucacucccaga

SEQ ID NO: 2985748 - RNA, 19 nt, Artificial Sequence
  Description of Artificial Sequence: Synthetic oligonucleotide
cuucggcggcaucuccuaa

SEQ ID NO: 2985749 - RNA, 19 nt, Artificial Sequence
  Description of Artificial Sequence: Synthetic oligonucleotide
gggcccugagccuucuugu

SEQ ID NO: 2985750 - RNA, 19 nt, Artificial Sequence
  Description of Artificial Sequence: Synthetic oligonucleotide
ccaugauuuugccauguuu

SEQ ID NO: 2985751 - RNA, 19 nt, Artificial Sequence
  Description of Artificial Sequence: Synthetic oligonucleotide
gucugaccuuuacugcauu

SEQ ID NO: 2985752 - RNA, 19 nt, Artificial Sequence
  Description of Artificial Sequence: Synthetic oligonucleotide
gcuucuugaaaggguccua

SEQ ID NO: 2985753 - RNA, 19 nt, Artificial Sequence
  Description of Artificial Sequence: Synthetic oligonucleotide
cugcauuugccaccaccuu

SEQ ID NO: 2985754 - RNA, 19 nt, Artificial Sequence
  Description of Artificial Sequence: Synthetic oligonucleotide
ccccuuuuccagaaccacu

SEQ ID NO: 2985755 - RNA, 19 nt, Artificial Sequence
  Description of Artificial Sequence: Synthetic oligonucleotide
gcgugcuucuugaaagggu

SEQ ID NO: 2985756 - RNA, 19 nt, Artificial Sequence
  Description of Artificial Sequence: Synthetic oligonucleotide
cccuugccuggcuuuaucu

SEQ ID NO: 2985757 - RNA, 19 nt, Artificial Sequence
  Description of Artificial Sequence: Synthetic oligonucleotide
ccccuugccuggcuuuauc

SEQ ID NO: 2985758 - RNA, 19 nt, Artificial Sequence
  Description of Artificial Sequence: Synthetic oligonucleotide
ccguaaacacaggcuuauc

SEQ ID NO: 2985759 - RNA, 19 nt, Artificial Sequence
  Description of Artificial Sequence: Synthetic oligonucleotide
ccccuucggcggcaucucc

SEQ ID NO: 2985760 - RNA, 19 nt, Artificial Sequence
  Description of Artificial Sequence: Synthetic oligonucleotide
cagaggcugcaccuccuuu

SEQ ID NO: 2985761 - RNA, 19 nt, Artificial Sequence
  Description of Artificial Sequence: Synthetic oligonucleotide
ccuucggcggcaucuccua

SEQ ID NO: 2985762 - RNA, 19 nt, Artificial Sequence
  Description of Artificial Sequence: Synthetic oligonucleotide
ccuuuagggcccugagccu

SEQ ID NO: 2985763 - RNA, 19 nt, Artificial Sequence
  Description of Artificial Sequence: Synthetic oligonucleotide
ccuugccuggcuuuaucuu

SEQ ID NO: 2985764 - RNA, 19 nt, Artificial Sequence
  Description of Artificial Sequence: Synthetic oligonucleotide
gccuggcuuuaucuucacu

SEQ ID NO: 2985765 - RNA, 19 nt, Artificial Sequence
  Description of Artificial Sequence: Synthetic oligonucleotide
ccauggacccucuggucau

SEQ ID NO: 2985766 - RNA, 19 nt, Artificial Sequence
  Description of Artificial Sequence: Synthetic oligonucleotide
gccuucuugucagcacugu

SEQ ID NO: 2985767 - RNA, 19 nt, Artificial Sequence
  Description of Artificial Sequence: Synthetic oligonucleotide
cccuucggcggcaucuccu

SEQ ID NO: 2985768 - RNA, 19 nt, Artificial Sequence
  Description of Artificial Sequence: Synthetic oligonucleotide
guccuaccauggacccucu

SEQ ID NO: 2985769 - RNA, 19 nt, Artificial Sequence
  Description of Artificial Sequence: Synthetic oligonucleotide
cuuuccccuucggcggcau

SEQ ID NO: 2985770 - RNA, 19 nt, Artificial Sequence
  Description of Artificial Sequence: Synthetic oligonucleotide
ggguccuaccauggacccu

SEQ ID NO: 2985771 - RNA, 19 nt, Artificial Sequence
  Description of Artificial Sequence: Synthetic oligonucleotide
cccagaggcugcaccuccu

SEQ ID NO: 2985772 - RNA, 19 nt, Artificial Sequence
  Description of Artificial Sequence: Synthetic oligonucleotide
ccagaaccacuuuccccuu

SEQ ID NO: 2985773 - RNA, 19 nt, Artificial Sequence
  Description of Artificial Sequence: Synthetic oligonucleotide
gcaaggcaauugcgugcuu

SEQ ID NO: 2985774 - RNA, 19 nt, Artificial Sequence
  Description of Artificial Sequence: Synthetic oligonucleotide
ccagaggcugcaccuccuu

SEQ ID NO: 2985775 - RNA, 19 nt, Artificial Sequence
  Description of Artificial Sequence: Synthetic oligonucleotide
ccauggcuuccaugauuuu

SEQ ID NO: 2985776 - RNA, 19 nt, Artificial Sequence
  Description of Artificial Sequence: Synthetic oligonucleotide
cggcggcaucuccuaagcu

SEQ ID NO: 2985777 - RNA, 19 nt, Artificial Sequence
  Description of Artificial Sequence: Synthetic oligonucleotide
ccaccaccuuuagggcccu

SEQ ID NO: 2985778 - RNA, 19 nt, Artificial Sequence
  Description of Artificial Sequence: Synthetic oligonucleotide
uuuggcuacacucaaguag

SEQ ID NO: 2985779 - RNA, 19 nt, Artificial Sequence
  Description of Artificial Sequence: Synthetic oligonucleotide
uuucuugcugcucugauag

SEQ ID NO: 2985780 - RNA, 19 nt, Artificial Sequence
  Description of Artificial Sequence: Synthetic oligonucleotide
ucaaguaggaaccauccag

SEQ ID NO: 2985781 - RNA, 19 nt, Artificial Sequence
  Description of Artificial Sequence: Synthetic oligonucleotide
ucuagcagcaccaaguucu

SEQ ID NO: 2985782 - RNA, 19 nt, Artificial Sequence
  Description of Artificial Sequence: Synthetic oligonucleotide
guaggaaccauccaggucc

SEQ ID NO: 2985783 - RNA, 19 nt, Artificial Sequence
  Description of Artificial Sequence: Synthetic oligonucleotide
uuggcuacacucaaguagg

SEQ ID NO: 2985784 - RNA, 19 nt, Artificial Sequence
  Description of Artificial Sequence: Synthetic oligonucleotide
acuuacucuggccaguucc

SEQ ID NO: 2985785 - RNA, 19 nt, Artificial Sequence
  Description of Artificial Sequence: Synthetic oligonucleotide
acauucucuauacuguagc

SEQ ID NO: 2985786 - RNA, 19 nt, Artificial Sequence
  Description of Artificial Sequence: Synthetic oligonucleotide
uauacuguagcugaagagc

SEQ ID NO: 2985787 - RNA, 19 nt, Artificial Sequence
  Description of Artificial Sequence: Synthetic oligonucleotide
ugauagguacuucugguag

SEQ ID NO: 2985788 - RNA, 19 nt, Artificial Sequence
  Description of Artificial Sequence: Synthetic oligonucleotide
aguuccuuaauuaaguuag

SEQ ID NO: 2985789 - RNA, 19 nt, Artificial Sequence
  Description of Artificial Sequence: Synthetic oligonucleotide
uaauuaaguuagcaaugcg

SEQ ID NO: 2985790 - RNA, 19 nt, Artificial Sequence
  Description of Artificial Sequence: Synthetic oligonucleotide
ucugacaguagguuugugg

SEQ ID NO: 2985791 - RNA, 19 nt, Artificial Sequence
  Description of Artificial Sequence: Synthetic oligonucleotide
cuugacauucucuauacug

SEQ ID NO: 2985792 - RNA, 19 nt, Artificial Sequence
  Description of Artificial Sequence: Synthetic oligonucleotide
aauuaaguuagcaaugcgu

SEQ ID NO: 2985793 - RNA, 19 nt, Artificial Sequence
  Description of Artificial Sequence: Synthetic oligonucleotide
uuaggcauugccuuggucu

SEQ ID NO: 2985794 - RNA, 19 nt, Artificial Sequence
  Description of Artificial Sequence: Synthetic oligonucleotide
agguacuucugguagagac

SEQ ID NO: 2985795 - RNA, 19 nt, Artificial Sequence
  Description of Artificial Sequence: Synthetic oligonucleotide
auuaaguuagcaaugcguc

SEQ ID NO: 2985796 - RNA, 19 nt, Artificial Sequence
  Description of Artificial Sequence: Synthetic oligonucleotide
uucuuugaugaucaguuca

SEQ ID NO: 2985797 - RNA, 19 nt, Artificial Sequence
  Description of Artificial Sequence: Synthetic oligonucleotide
uucucuauacuguagcuga

SEQ ID NO: 2985798 - RNA, 19 nt, Artificial Sequence
  Description of Artificial Sequence: Synthetic oligonucleotide
accaaguucugacagugac

SEQ ID NO: 2985799 - RNA, 19 nt, Artificial Sequence
  Description of Artificial Sequence: Synthetic oligonucleotide
uuagcaaugcgucuuuugu

SEQ ID NO: 2985800 - RNA, 19 nt, Artificial Sequence
  Description of Artificial Sequence: Synthetic oligonucleotide
ucuauacuguagcugaaga

SEQ ID NO: 2985801 - RNA, 19 nt, Artificial Sequence
  Description of Artificial Sequence: Synthetic oligonucleotide
uugacauucucuauacugu

SEQ ID NO: 2985802 - RNA, 19 nt, Artificial Sequence
  Description of Artificial Sequence: Synthetic oligonucleotide
ugaugaucaguucauucug

SEQ ID NO: 2985803 - RNA, 19 nt, Artificial Sequence
  Description of Artificial Sequence: Synthetic oligonucleotide
ugaguacuuuuccuguugg

SEQ ID NO: 2985804 - RNA, 19 nt, Artificial Sequence
  Description of Artificial Sequence: Synthetic oligonucleotide
cuacacucaaguaggaacc

SEQ ID NO: 2985805 - RNA, 19 nt, Artificial Sequence
  Description of Artificial Sequence: Synthetic oligonucleotide
caaguaggaaccauccagg

SEQ ID NO: 2985806 - RNA, 19 nt, Artificial Sequence
  Description of Artificial Sequence: Synthetic oligonucleotide
uccagguccaucaucgaag

SEQ ID NO: 2985807 - RNA, 19 nt, Artificial Sequence
  Description of Artificial Sequence: Synthetic oligonucleotide
agcagcaccaaguucugac

SEQ ID NO: 2985808 - RNA, 19 nt, Artificial Sequence
  Description of Artificial Sequence: Synthetic oligonucleotide
uuccuguugguuaugcugc

SEQ ID NO: 2985809 - RNA, 19 nt, Artificial Sequence
  Description of Artificial Sequence: Synthetic oligonucleotide
auacuguagcugaagagcc

SEQ ID NO: 2985810 - RNA, 19 nt, Artificial Sequence
  Description of Artificial Sequence: Synthetic oligonucleotide
uuugaugaucaguucauuc

SEQ ID NO: 2985811 - RNA, 19 nt, Artificial Sequence
  Description of Artificial Sequence: Synthetic oligonucleotide
ugugguuuggcuacacuca

SEQ ID NO: 2985812 - RNA, 19 nt, Artificial Sequence
  Description of Artificial Sequence: Synthetic oligonucleotide
agguuugugguuuggcuac

SEQ ID NO: 2985813 - RNA, 19 nt, Artificial Sequence
  Description of Artificial Sequence: Synthetic oligonucleotide
ucugguagagacucagaag

SEQ ID NO: 2985814 - RNA, 19 nt, Artificial Sequence
  Description of Artificial Sequence: Synthetic oligonucleotide
agaaguucuugacauucuc

SEQ ID NO: 2985815 - RNA, 19 nt, Artificial Sequence
  Description of Artificial Sequence: Synthetic oligonucleotide
acucaaguaggaaccaucc

SEQ ID NO: 2985816 - RNA, 19 nt, Artificial Sequence
  Description of Artificial Sequence: Synthetic oligonucleotide
uccuuaauuaaguuagcaa

SEQ ID NO: 2985817 - RNA, 19 nt, Artificial Sequence
  Description of Artificial Sequence: Synthetic oligonucleotide
ucugauagguacuucuggu

SEQ ID NO: 2985818 - RNA, 19 nt, Artificial Sequence
  Description of Artificial Sequence: Synthetic oligonucleotide
cuucucaaaggauuccugc

SEQ ID NO: 2985819 - RNA, 19 nt, Artificial Sequence
  Description of Artificial Sequence: Synthetic oligonucleotide
agacucagaaguucuugac

SEQ ID NO: 2985820 - RNA, 19 nt, Artificial Sequence
  Description of Artificial Sequence: Synthetic oligonucleotide
cuauacuguagcugaagag

SEQ ID NO: 2985821 - RNA, 19 nt, Artificial Sequence
  Description of Artificial Sequence: Synthetic oligonucleotide
ucaguuuucagccguuccu

SEQ ID NO: 2985822 - RNA, 19 nt, Artificial Sequence
  Description of Artificial Sequence: Synthetic oligonucleotide
agcaaugcgucuuuugucu

SEQ ID NO: 2985823 - RNA, 19 nt, Artificial Sequence
  Description of Artificial Sequence: Synthetic oligonucleotide
ugcuccugcacucuagcag

SEQ ID NO: 2985824 - RNA, 19 nt, Artificial Sequence
  Description of Artificial Sequence: Synthetic oligonucleotide
uucugguagagacucagaa

SEQ ID NO: 2985825 - RNA, 19 nt, Artificial Sequence
  Description of Artificial Sequence: Synthetic oligonucleotide
acucagaaguucuugacau

SEQ ID NO: 2985826 - RNA, 19 nt, Artificial Sequence
  Description of Artificial Sequence: Synthetic oligonucleotide
uuaaguuagcaaugcgucu

SEQ ID NO: 2985827 - RNA, 19 nt, Artificial Sequence
  Description of Artificial Sequence: Synthetic oligonucleotide
uucuugacauucucuauac

SEQ ID NO: 2985828 - RNA, 19 nt, Artificial Sequence
  Description of Artificial Sequence: Synthetic oligonucleotide
caaguucugacagugacac

SEQ ID NO: 2985829 - RNA, 19 nt, Artificial Sequence
  Description of Artificial Sequence: Synthetic oligonucleotide
aacugacgaaucuucuucu

SEQ ID NO: 2985830 - RNA, 19 nt, Artificial Sequence
  Description of Artificial Sequence: Synthetic oligonucleotide
ucccuuucuuugaugauca

SEQ ID NO: 2985831 - RNA, 19 nt, Artificial Sequence
  Description of Artificial Sequence: Synthetic oligonucleotide
uggucugacaguagguuug

SEQ ID NO: 2985832 - RNA, 19 nt, Artificial Sequence
  Description of Artificial Sequence: Synthetic oligonucleotide
aguaggaaccauccagguc

SEQ ID NO: 2985833 - RNA, 19 nt, Artificial Sequence
  Description of Artificial Sequence: Synthetic oligonucleotide
ucuuugaugaucaguucau

SEQ ID NO: 2985834 - RNA, 19 nt, Artificial Sequence
  Description of Artificial Sequence: Synthetic oligonucleotide
uagcugaagagccuuuccc

SEQ ID NO: 2985835 - RNA, 19 nt, Artificial Sequence
  Description of Artificial Sequence: Synthetic oligonucleotide
ucuuccaacugacgaaucu

SEQ ID NO: 2985836 - RNA, 19 nt, Artificial Sequence
  Description of Artificial Sequence: Synthetic oligonucleotide
ucuguucuuccaacugacg

SEQ ID NO: 2985837 - RNA, 19 nt, Artificial Sequence
  Description of Artificial Sequence: Synthetic oligonucleotide
uugugguuuggcuacacuc

SEQ ID NO: 2985838 - RNA, 19 nt, Artificial Sequence
  Description of Artificial Sequence: Synthetic oligonucleotide
cucugauagguacuucugg

SEQ ID NO: 2985839 - RNA, 19 nt, Artificial Sequence
  Description of Artificial Sequence: Synthetic oligonucleotide
aaguaggaaccauccaggu

SEQ ID NO: 2985840 - RNA, 19 nt, Artificial Sequence
  Description of Artificial Sequence: Synthetic oligonucleotide
aguagguuugugguuuggc

SEQ ID NO: 2985841 - RNA, 19 nt, Artificial Sequence
  Description of Artificial Sequence: Synthetic oligonucleotide
ucugacagugacacaguga

SEQ ID NO: 2985842 - RNA, 19 nt, Artificial Sequence
  Description of Artificial Sequence: Synthetic oligonucleotide
uguucuuccaacugacgaa

SEQ ID NO: 2985843 - RNA, 19 nt, Artificial Sequence
  Description of Artificial Sequence: Synthetic oligonucleotide
ucucaaaggauuccugcuc

SEQ ID NO: 2985844 - RNA, 19 nt, Artificial Sequence
  Description of Artificial Sequence: Synthetic oligonucleotide
uucuguucuuccaacugac

SEQ ID NO: 2985845 - RNA, 19 nt, Artificial Sequence
  Description of Artificial Sequence: Synthetic oligonucleotide
uucucaaaggauuccugcu

SEQ ID NO: 2985846 - RNA, 19 nt, Artificial Sequence
  Description of Artificial Sequence: Synthetic oligonucleotide
uuuucagccguuccucugu

SEQ ID NO: 2985847 - RNA, 19 nt, Artificial Sequence
  Description of Artificial Sequence: Synthetic oligonucleotide
ugcucugauagguacuucu

SEQ ID NO: 2985848 - RNA, 19 nt, Artificial Sequence
  Description of Artificial Sequence: Synthetic oligonucleotide
gaaccauccagguccauca

SEQ ID NO: 2985849 - RNA, 19 nt, Artificial Sequence
  Description of Artificial Sequence: Synthetic oligonucleotide
uuccuuaauuaaguuagca

SEQ ID NO: 2985850 - RNA, 19 nt, Artificial Sequence
  Description of Artificial Sequence: Synthetic oligonucleotide
aucaucgaagacuggugag

SEQ ID NO: 2985851 - RNA, 19 nt, Artificial Sequence
  Description of Artificial Sequence: Synthetic oligonucleotide
acacagugagcuuuucuug

SEQ ID NO: 2985852 - RNA, 19 nt, Artificial Sequence
  Description of Artificial Sequence: Synthetic oligonucleotide
cauugccuuggucugacag

SEQ ID NO: 2985853 - RNA, 19 nt, Artificial Sequence
  Description of Artificial Sequence: Synthetic oligonucleotide
cuuucccuuucuuugauga

SEQ ID NO: 2985854 - RNA, 19 nt, Artificial Sequence
  Description of Artificial Sequence: Synthetic oligonucleotide
uucauucuguucuuccaac

SEQ ID NO: 2985855 - RNA, 19 nt, Artificial Sequence
  Description of Artificial Sequence: Synthetic oligonucleotide
ugacgaaucuucuucucaa

SEQ ID NO: 2985856 - RNA, 19 nt, Artificial Sequence
  Description of Artificial Sequence: Synthetic oligonucleotide
caacugacgaaucuucuuc

SEQ ID NO: 2985857 - RNA, 19 nt, Artificial Sequence
  Description of Artificial Sequence: Synthetic oligonucleotide
ugcgucuuuugucuucaag

SEQ ID NO: 2985858 - RNA, 19 nt, Artificial Sequence
  Description of Artificial Sequence: Synthetic oligonucleotide
aagacuggugaguacuuuu

SEQ ID NO: 2985859 - RNA, 19 nt, Artificial Sequence
  Description of Artificial Sequence: Synthetic oligonucleotide
uccaucaucgaagacuggu

SEQ ID NO: 2985860 - RNA, 19 nt, Artificial Sequence
  Description of Artificial Sequence: Synthetic oligonucleotide
acugacgaaucuucuucuc

SEQ ID NO: 2985861 - RNA, 19 nt, Artificial Sequence
  Description of Artificial Sequence: Synthetic oligonucleotide
cauucuguucuuccaacug

SEQ ID NO: 2985862 - RNA, 19 nt, Artificial Sequence
  Description of Artificial Sequence: Synthetic oligonucleotide
uggguugcugacuuaggca

SEQ ID NO: 2985863 - RNA, 19 nt, Artificial Sequence
  Description of Artificial Sequence: Synthetic oligonucleotide
gacagugacacagugagcu

SEQ ID NO: 2985864 - RNA, 19 nt, Artificial Sequence
  Description of Artificial Sequence: Synthetic oligonucleotide
gacucagaaguucuugaca

SEQ ID NO: 2985865 - RNA, 19 nt, Artificial Sequence
  Description of Artificial Sequence: Synthetic oligonucleotide
gcuacacucaaguaggaac

SEQ ID NO: 2985866 - RNA, 19 nt, Artificial Sequence
  Description of Artificial Sequence: Synthetic oligonucleotide
ucauucuguucuuccaacu

SEQ ID NO: 2985867 - RNA, 19 nt, Artificial Sequence
  Description of Artificial Sequence: Synthetic oligonucleotide
uuccaacugacgaaucuuc

SEQ ID NO: 2985868 - RNA, 19 nt, Artificial Sequence
  Description of Artificial Sequence: Synthetic oligonucleotide
agguccaucaucgaagacu

SEQ ID NO: 2985869 - RNA, 19 nt, Artificial Sequence
  Description of Artificial Sequence: Synthetic oligonucleotide
auagguacuucugguagag

SEQ ID NO: 2985870 - RNA, 19 nt, Artificial Sequence
  Description of Artificial Sequence: Synthetic oligonucleotide
ucagccguuccucugucac

SEQ ID NO: 2985871 - RNA, 19 nt, Artificial Sequence
  Description of Artificial Sequence: Synthetic oligonucleotide
gacuggugaguacuuuucc

SEQ ID NO: 2985872 - RNA, 19 nt, Artificial Sequence
  Description of Artificial Sequence: Synthetic oligonucleotide
guuagcaaugcgucuuuug

SEQ ID NO: 2985873 - RNA, 19 nt, Artificial Sequence
  Description of Artificial Sequence: Synthetic oligonucleotide
ucgaagacuggugaguacu

SEQ ID NO: 2985874 - RNA, 19 nt, Artificial Sequence
  Description of Artificial Sequence: Synthetic oligonucleotide
acuggugaguacuuuuccu

SEQ ID NO: 2985875 - RNA, 19 nt, Artificial Sequence
  Description of Artificial Sequence: Synthetic oligonucleotide
auucucuauacuguagcug

SEQ ID NO: 2985876 - RNA, 19 nt, Artificial Sequence
  Description of Artificial Sequence: Synthetic oligonucleotide
ucuugcugcucugauaggu

SEQ ID NO: 2985877 - RNA, 19 nt, Artificial Sequence
  Description of Artificial Sequence: Synthetic oligonucleotide
uaggcauugccuuggucug

SEQ ID NO: 2985878 - RNA, 19 nt, Artificial Sequence
  Description of Artificial Sequence: Synthetic oligonucleotide
gacauucucuauacuguag

SEQ ID NO: 2985879 - RNA, 19 nt, Artificial Sequence
  Description of Artificial Sequence: Synthetic oligonucleotide
aaugcgucuuuugucuuca

SEQ ID NO: 2985880 - RNA, 19 nt, Artificial Sequence
  Description of Artificial Sequence: Synthetic oligonucleotide
ugaucaguucauucuguuc

SEQ ID NO: 2985881 - RNA, 19 nt, Artificial Sequence
  Description of Artificial Sequence: Synthetic oligonucleotide
gauagguacuucugguaga

SEQ ID NO: 2985882 - RNA, 19 nt, Artificial Sequence
  Description of Artificial Sequence: Synthetic oligonucleotide
ucaaaggauuccugcucag

SEQ ID NO: 2985883 - RNA, 19 nt, Artificial Sequence
  Description of Artificial Sequence: Synthetic oligonucleotide
agcugaagagccuuucccu

SEQ ID NO: 2985884 - RNA, 19 nt, Artificial Sequence
  Description of Artificial Sequence: Synthetic oligonucleotide
gacuuaggcauugccuugg

SEQ ID NO: 2985885 - RNA, 19 nt, Artificial Sequence
  Description of Artificial Sequence: Synthetic oligonucleotide
gagacucagaaguucuuga

SEQ ID NO: 2985886 - RNA, 19 nt, Artificial Sequence
  Description of Artificial Sequence: Synthetic oligonucleotide
ugcugacuuaggcauugcc

SEQ ID NO: 2985887 - RNA, 19 nt, Artificial Sequence
  Description of Artificial Sequence: Synthetic oligonucleotide
uaaguuagcaaugcgucuu

SEQ ID NO: 2985888 - RNA, 19 nt, Artificial Sequence
  Description of Artificial Sequence: Synthetic oligonucleotide
uccaacugacgaaucuucu

SEQ ID NO: 2985889 - RNA, 19 nt, Artificial Sequence
  Description of Artificial Sequence: Synthetic oligonucleotide
uagguuugugguuuggcua

SEQ ID NO: 2985890 - RNA, 19 nt, Artificial Sequence
  Description of Artificial Sequence: Synthetic oligonucleotide
aaggauuccugcucaguuu

SEQ ID NO: 2985891 - RNA, 19 nt, Artificial Sequence
  Description of Artificial Sequence: Synthetic oligonucleotide
ccauccagguccaucaucg

SEQ ID NO: 2985892 - RNA, 19 nt, Artificial Sequence
  Description of Artificial Sequence: Synthetic oligonucleotide
aucgaagacuggugaguac

SEQ ID NO: 2985893 - RNA, 19 nt, Artificial Sequence
  Description of Artificial Sequence: Synthetic oligonucleotide
cuggguugcugacuuaggc

SEQ ID NO: 2985894 - RNA, 19 nt, Artificial Sequence
  Description of Artificial Sequence: Synthetic oligonucleotide
cugguagagacucagaagu

SEQ ID NO: 2985895 - RNA, 19 nt, Artificial Sequence
  Description of Artificial Sequence: Synthetic oligonucleotide
cuuucuuugaugaucaguu

SEQ ID NO: 2985896 - RNA, 19 nt, Artificial Sequence
  Description of Artificial Sequence: Synthetic oligonucleotide
uccucugucacuuccuuuu

SEQ ID NO: 2985897 - RNA, 19 nt, Artificial Sequence
  Description of Artificial Sequence: Synthetic oligonucleotide
ugacuuaggcauugccuug

SEQ ID NO: 2985898 - RNA, 19 nt, Artificial Sequence
  Description of Artificial Sequence: Synthetic oligonucleotide
uuucuuugaugaucaguuc

SEQ ID NO: 2985899 - RNA, 19 nt, Artificial Sequence
  Description of Artificial Sequence: Synthetic oligonucleotide
acuucugguagagacucag

SEQ ID NO: 2985900 - RNA, 19 nt, Artificial Sequence
  Description of Artificial Sequence: Synthetic oligonucleotide
ugacacagugagcuuuucu

SEQ ID NO: 2985901 - RNA, 19 nt, Artificial Sequence
  Description of Artificial Sequence: Synthetic oligonucleotide
cucaguuuucagccguucc

SEQ ID NO: 2985902 - RNA, 19 nt, Artificial Sequence
  Description of Artificial Sequence: Synthetic oligonucleotide
auugccuuggucugacagu

SEQ ID NO: 2985903 - RNA, 19 nt, Artificial Sequence
  Description of Artificial Sequence: Synthetic oligonucleotide
uuugugguuuggcuacacu

SEQ ID NO: 2985904 - RNA, 19 nt, Artificial Sequence
  Description of Artificial Sequence: Synthetic oligonucleotide
ugacauucucuauacugua

SEQ ID NO: 2985905 - RNA, 19 nt, Artificial Sequence
  Description of Artificial Sequence: Synthetic oligonucleotide
gugaguacuuuuccuguug

SEQ ID NO: 2985906 - RNA, 19 nt, Artificial Sequence
  Description of Artificial Sequence: Synthetic oligonucleotide
ucaucgaagacuggugagu

SEQ ID NO: 2985907 - RNA, 19 nt, Artificial Sequence
  Description of Artificial Sequence: Synthetic oligonucleotide
uacuuuuccuguugguuau

SEQ ID NO: 2985908 - RNA, 19 nt, Artificial Sequence
  Description of Artificial Sequence: Synthetic oligonucleotide
accauccagguccaucauc

SEQ ID NO: 2985909 - RNA, 19 nt, Artificial Sequence
  Description of Artificial Sequence: Synthetic oligonucleotide
ucuugacauucucuauacu

SEQ ID NO: 2985910 - RNA, 19 nt, Artificial Sequence
  Description of Artificial Sequence: Synthetic oligonucleotide
agagacucagaaguucuug

SEQ ID NO: 2985911 - RNA, 19 nt, Artificial Sequence
  Description of Artificial Sequence: Synthetic oligonucleotide
uuuucuugcugcucugaua

SEQ ID NO: 2985912 - RNA, 19 nt, Artificial Sequence
  Description of Artificial Sequence: Synthetic oligonucleotide
cacucaaguaggaaccauc

SEQ ID NO: 2985913 - RNA, 19 nt, Artificial Sequence
  Description of Artificial Sequence: Synthetic oligonucleotide
uugcugcucugauagguac

SEQ ID NO: 2985914 - RNA, 19 nt, Artificial Sequence
  Description of Artificial Sequence: Synthetic oligonucleotide
uagcaaugcgucuuuuguc

SEQ ID NO: 2985915 - RNA, 19 nt, Artificial Sequence
  Description of Artificial Sequence: Synthetic oligonucleotide
guacuuuuccuguugguua

SEQ ID NO: 2985916 - RNA, 19 nt, Artificial Sequence
  Description of Artificial Sequence: Synthetic oligonucleotide
ucugucacuuccuuuucuu

SEQ ID NO: 2985917 - RNA, 19 nt, Artificial Sequence
  Description of Artificial Sequence: Synthetic oligonucleotide
uucccuuucuuugaugauc

SEQ ID NO: 2985918 - RNA, 19 nt, Artificial Sequence
  Description of Artificial Sequence: Synthetic oligonucleotide
guacuucugguagagacuc

SEQ ID NO: 2985919 - RNA, 19 nt, Artificial Sequence
  Description of Artificial Sequence: Synthetic oligonucleotide
ugguuuggcuacacucaag

SEQ ID NO: 2985920 - RNA, 19 nt, Artificial Sequence
  Description of Artificial Sequence: Synthetic oligonucleotide
aguuuucagccguuccucu

SEQ ID NO: 2985921 - RNA, 19 nt, Artificial Sequence
  Description of Artificial Sequence: Synthetic oligonucleotide
aguacuuuuccuguugguu

SEQ ID NO: 2985922 - RNA, 19 nt, Artificial Sequence
  Description of Artificial Sequence: Synthetic oligonucleotide
agacuggugaguacuuuuc

SEQ ID NO: 2985923 - RNA, 19 nt, Artificial Sequence
  Description of Artificial Sequence: Synthetic oligonucleotide
gucacuuccuuuucuucac

SEQ ID NO: 2985924 - RNA, 19 nt, Artificial Sequence
  Description of Artificial Sequence: Synthetic oligonucleotide
aaucuucuucucaaaggau

SEQ ID NO: 2985925 - RNA, 19 nt, Artificial Sequence
  Description of Artificial Sequence: Synthetic oligonucleotide
guucuugacauucucuaua

SEQ ID NO: 2985926 - RNA, 19 nt, Artificial Sequence
  Description of Artificial Sequence: Synthetic oligonucleotide
uggccaguuccuuaauuaa

SEQ ID NO: 2985927 - RNA, 19 nt, Artificial Sequence
  Description of Artificial Sequence: Synthetic oligonucleotide
uguugguuaugcugcugcu

SEQ ID NO: 2985928 - RNA, 19 nt, Artificial Sequence
  Description of Artificial Sequence: Synthetic oligonucleotide
aggauuccugcucaguuuu

SEQ ID NO: 2985929 - RNA, 19 nt, Artificial Sequence
  Description of Artificial Sequence: Synthetic oligonucleotide
cucaaaggauuccugcuca

SEQ ID NO: 2985930 - RNA, 19 nt, Artificial Sequence
  Description of Artificial Sequence: Synthetic oligonucleotide
uacuguagcugaagagccu

SEQ ID NO: 2985931 - RNA, 19 nt, Artificial Sequence
  Description of Artificial Sequence: Synthetic oligonucleotide
aaguuagcaaugcgucuuu

SEQ ID NO: 2985932 - RNA, 19 nt, Artificial Sequence
  Description of Artificial Sequence: Synthetic oligonucleotide
agagccuuucccuuucuuu

SEQ ID NO: 2985933 - RNA, 19 nt, Artificial Sequence
  Description of Artificial Sequence: Synthetic oligonucleotide
caucaucgaagacugguga

SEQ ID NO: 2985934 - RNA, 19 nt, Artificial Sequence
  Description of Artificial Sequence: Synthetic oligonucleotide
uuggucugacaguagguuu

SEQ ID NO: 2985935 - RNA, 19 nt, Artificial Sequence
  Description of Artificial Sequence: Synthetic oligonucleotide
cucuauacuguagcugaag

SEQ ID NO: 2985936 - RNA, 19 nt, Artificial Sequence
  Description of Artificial Sequence: Synthetic oligonucleotide
cuucuucucaaaggauucc

SEQ ID NO: 2985937 - RNA, 19 nt, Artificial Sequence
  Description of Artificial Sequence: Synthetic oligonucleotide
guuuucagccguuccucug

SEQ ID NO: 2985938 - RNA, 19 nt, Artificial Sequence
  Description of Artificial Sequence: Synthetic oligonucleotide
ugacagugacacagugagc

SEQ ID NO: 2985939 - RNA, 19 nt, Artificial Sequence
  Description of Artificial Sequence: Synthetic oligonucleotide
guugcugacuuaggcauug

SEQ ID NO: 2985940 - RNA, 19 nt, Artificial Sequence
  Description of Artificial Sequence: Synthetic oligonucleotide
gguccaucaucgaagacug

SEQ ID NO: 2985941 - RNA, 19 nt, Artificial Sequence
  Description of Artificial Sequence: Synthetic oligonucleotide
uucuugcugcucugauagg

SEQ ID NO: 2985942 - RNA, 19 nt, Artificial Sequence
  Description of Artificial Sequence: Synthetic oligonucleotide
gacacagugagcuuuucuu

SEQ ID NO: 2985943 - RNA, 19 nt, Artificial Sequence
  Description of Artificial Sequence: Synthetic oligonucleotide
guucauucuguucuuccaa

SEQ ID NO: 2985944 - RNA, 19 nt, Artificial Sequence
  Description of Artificial Sequence: Synthetic oligonucleotide
ucucuauacuguagcugaa

SEQ ID NO: 2985945 - RNA, 19 nt, Artificial Sequence
  Description of Artificial Sequence: Synthetic oligonucleotide
cugacaguagguuuguggu

SEQ ID NO: 2985946 - RNA, 19 nt, Artificial Sequence
  Description of Artificial Sequence: Synthetic oligonucleotide
uacacucaaguaggaacca

SEQ ID NO: 2985947 - RNA, 19 nt, Artificial Sequence
  Description of Artificial Sequence: Synthetic oligonucleotide
aucuucuucucaaaggauu

SEQ ID NO: 2985948 - RNA, 19 nt, Artificial Sequence
  Description of Artificial Sequence: Synthetic oligonucleotide
ugcugcuccugcacucuag

SEQ ID NO: 2985949 - RNA, 19 nt, Artificial Sequence
  Description of Artificial Sequence: Synthetic oligonucleotide
augaucaguucauucuguu

SEQ ID NO: 2985950 - RNA, 19 nt, Artificial Sequence
  Description of Artificial Sequence: Synthetic oligonucleotide
ucacuuccuuuucuucacu

SEQ ID NO: 2985951 - RNA, 19 nt, Artificial Sequence
  Description of Artificial Sequence: Synthetic oligonucleotide
ugcugcucugauagguacu

SEQ ID NO: 2985952 - RNA, 19 nt, Artificial Sequence
  Description of Artificial Sequence: Synthetic oligonucleotide
gauuccugcucaguuuuca

SEQ ID NO: 2985953 - RNA, 19 nt, Artificial Sequence
  Description of Artificial Sequence: Synthetic oligonucleotide
acuuccuuuucuucacuua

SEQ ID NO: 2985954 - RNA, 19 nt, Artificial Sequence
  Description of Artificial Sequence: Synthetic oligonucleotide
agcaccaaguucugacagu

SEQ ID NO: 2985955 - RNA, 19 nt, Artificial Sequence
  Description of Artificial Sequence: Synthetic oligonucleotide
gccuuggucugacaguagg

SEQ ID NO: 2985956 - RNA, 19 nt, Artificial Sequence
  Description of Artificial Sequence: Synthetic oligonucleotide
accuggguugcugacuuag

SEQ ID NO: 2985957 - RNA, 19 nt, Artificial Sequence
  Description of Artificial Sequence: Synthetic oligonucleotide
acucuagcagcaccaaguu

SEQ ID NO: 2985958 - RNA, 19 nt, Artificial Sequence
  Description of Artificial Sequence: Synthetic oligonucleotide
acaguagguuugugguuug

SEQ ID NO: 2985959 - RNA, 19 nt, Artificial Sequence
  Description of Artificial Sequence: Synthetic oligonucleotide
cugacgaaucuucuucuca

SEQ ID NO: 2985960 - RNA, 19 nt, Artificial Sequence
  Description of Artificial Sequence: Synthetic oligonucleotide
gcuccugcacucuagcagc

SEQ ID NO: 2985961 - RNA, 19 nt, Artificial Sequence
  Description of Artificial Sequence: Synthetic oligonucleotide
ucuggccaguuccuuaauu

SEQ ID NO: 2985962 - RNA, 19 nt, Artificial Sequence
  Description of Artificial Sequence: Synthetic oligonucleotide
ugguagagacucagaaguu

SEQ ID NO: 2985963 - RNA, 19 nt, Artificial Sequence
  Description of Artificial Sequence: Synthetic oligonucleotide
caaugcgucuuuugucuuc

SEQ ID NO: 2985964 - RNA, 19 nt, Artificial Sequence
  Description of Artificial Sequence: Synthetic oligonucleotide
uugccuuggucugacagua

SEQ ID NO: 2985965 - RNA, 19 nt, Artificial Sequence
  Description of Artificial Sequence: Synthetic oligonucleotide
cugucacuuccuuuucuuc

SEQ ID NO: 2985966 - RNA, 19 nt, Artificial Sequence
  Description of Artificial Sequence: Synthetic oligonucleotide
aaguucugacagugacaca

SEQ ID NO: 2985967 - RNA, 19 nt, Artificial Sequence
  Description of Artificial Sequence: Synthetic oligonucleotide
uucacuuacucuggccagu

SEQ ID NO: 2985968 - RNA, 19 nt, Artificial Sequence
  Description of Artificial Sequence: Synthetic oligonucleotide
agccuuucccuuucuuuga

SEQ ID NO: 2985969 - RNA, 19 nt, Artificial Sequence
  Description of Artificial Sequence: Synthetic oligonucleotide
acucuggccaguuccuuaa

SEQ ID NO: 2985970 - RNA, 19 nt, Artificial Sequence
  Description of Artificial Sequence: Synthetic oligonucleotide
guagguuugugguuuggcu

SEQ ID NO: 2985971 - RNA, 19 nt, Artificial Sequence
  Description of Artificial Sequence: Synthetic oligonucleotide
uucuuccaacugacgaauc

SEQ ID NO: 2985972 - RNA, 19 nt, Artificial Sequence
  Description of Artificial Sequence: Synthetic oligonucleotide
auccagguccaucaucgaa

SEQ ID NO: 2985973 - RNA, 19 nt, Artificial Sequence
  Description of Artificial Sequence: Synthetic oligonucleotide
guuccuuaauuaaguuagc

SEQ ID NO: 2985974 - RNA, 19 nt, Artificial Sequence
  Description of Artificial Sequence: Synthetic oligonucleotide
uuucccuuucuuugaugau

SEQ ID NO: 2985975 - RNA, 19 nt, Artificial Sequence
  Description of Artificial Sequence: Synthetic oligonucleotide
ugagaccuggguugcugac

SEQ ID NO: 2985976 - RNA, 19 nt, Artificial Sequence
  Description of Artificial Sequence: Synthetic oligonucleotide
agaccuggguugcugacuu

SEQ ID NO: 2985977 - RNA, 19 nt, Artificial Sequence
  Description of Artificial Sequence: Synthetic oligonucleotide
caguuccuuaauuaaguua

SEQ ID NO: 2985978 - RNA, 19 nt, Artificial Sequence
  Description of Artificial Sequence: Synthetic oligonucleotide
gaaguucuugacauucucu

SEQ ID NO: 2985979 - RNA, 19 nt, Artificial Sequence
  Description of Artificial Sequence: Synthetic oligonucleotide
agcuuuucuugcugcucug

SEQ ID NO: 2985980 - RNA, 19 nt, Artificial Sequence
  Description of Artificial Sequence: Synthetic oligonucleotide
gacgaaucuucuucucaaa

SEQ ID NO: 2985981 - RNA, 19 nt, Artificial Sequence
  Description of Artificial Sequence: Synthetic oligonucleotide
uagagacucagaaguucuu

SEQ ID NO: 2985982 - RNA, 19 nt, Artificial Sequence
  Description of Artificial Sequence: Synthetic oligonucleotide
aagagccuuucccuuucuu

SEQ ID NO: 2985983 - RNA, 19 nt, Artificial Sequence
  Description of Artificial Sequence: Synthetic oligonucleotide
uacuucugguagagacuca

SEQ ID NO: 2985984 - RNA, 19 nt, Artificial Sequence
  Description of Artificial Sequence: Synthetic oligonucleotide
uuucagccguuccucuguc

SEQ ID NO: 2985985 - RNA, 19 nt, Artificial Sequence
  Description of Artificial Sequence: Synthetic oligonucleotide
gguagagacucagaaguuc

SEQ ID NO: 2985986 - RNA, 19 nt, Artificial Sequence
  Description of Artificial Sequence: Synthetic oligonucleotide
uggcuacacucaaguagga

SEQ ID NO: 2985987 - RNA, 19 nt, Artificial Sequence
  Description of Artificial Sequence: Synthetic oligonucleotide
cagugagcuuuucuugcug

SEQ ID NO: 2985988 - RNA, 19 nt, Artificial Sequence
  Description of Artificial Sequence: Synthetic oligonucleotide
caguuuucagccguuccuc

SEQ ID NO: 2985989 - RNA, 19 nt, Artificial Sequence
  Description of Artificial Sequence: Synthetic oligonucleotide
uacucuggccaguuccuua

SEQ ID NO: 2985990 - RNA, 19 nt, Artificial Sequence
  Description of Artificial Sequence: Synthetic oligonucleotide
acuguagcugaagagccuu

SEQ ID NO: 2985991 - RNA, 19 nt, Artificial Sequence
  Description of Artificial Sequence: Synthetic oligonucleotide
ugccuuggucugacaguag

SEQ ID NO: 2985992 - RNA, 19 nt, Artificial Sequence
  Description of Artificial Sequence: Synthetic oligonucleotide
uccuguugguuaugcugcu

SEQ ID NO: 2985993 - RNA, 19 nt, Artificial Sequence
  Description of Artificial Sequence: Synthetic oligonucleotide
cucuagcagcaccaaguuc

SEQ ID NO: 2985994 - RNA, 19 nt, Artificial Sequence
  Description of Artificial Sequence: Synthetic oligonucleotide
gguuuggcuacacucaagu

SEQ ID NO: 2985995 - RNA, 19 nt, Artificial Sequence
  Description of Artificial Sequence: Synthetic oligonucleotide
cugauagguacuucuggua

SEQ ID NO: 2985996 - RNA, 19 nt, Artificial Sequence
  Description of Artificial Sequence: Synthetic oligonucleotide
gaugaucaguucauucugu

SEQ ID NO: 2985997 - RNA, 19 nt, Artificial Sequence
  Description of Artificial Sequence: Synthetic oligonucleotide
guagagacucagaaguucu

SEQ ID NO: 2985998 - RNA, 19 nt, Artificial Sequence
  Description of Artificial Sequence: Synthetic oligonucleotide
cucaaguaggaaccaucca

SEQ ID NO: 2985999 - RNA, 19 nt, Artificial Sequence
  Description of Artificial Sequence: Synthetic oligonucleotide
cuuaggcauugccuugguc

SEQ ID NO: 2986000 - RNA, 19 nt, Artificial Sequence
  Description of Artificial Sequence: Synthetic oligonucleotide
ugguuaugcugcugcuccu

SEQ ID NO: 2986001 - RNA, 19 nt, Artificial Sequence
  Description of Artificial Sequence: Synthetic oligonucleotide
cauucucuauacuguagcu

SEQ ID NO: 2986002 - RNA, 19 nt, Artificial Sequence
  Description of Artificial Sequence: Synthetic oligonucleotide
cugacuuaggcauugccuu

SEQ ID NO: 2986003 - RNA, 19 nt, Artificial Sequence
  Description of Artificial Sequence: Synthetic oligonucleotide
gcaccaaguucugacagug

SEQ ID NO: 2986004 - RNA, 19 nt, Artificial Sequence
  Description of Artificial Sequence: Synthetic oligonucleotide
ggccaguuccuuaauuaag

SEQ ID NO: 2986005 - RNA, 19 nt, Artificial Sequence
  Description of Artificial Sequence: Synthetic oligonucleotide
acuuaggcauugccuuggu

SEQ ID NO: 2986006 - RNA, 19 nt, Artificial Sequence
  Description of Artificial Sequence: Synthetic oligonucleotide
uucagccguuccucuguca

SEQ ID NO: 2986007 - RNA, 19 nt, Artificial Sequence
  Description of Artificial Sequence: Synthetic oligonucleotide
ccaucaucgaagacuggug

SEQ ID NO: 2986008 - RNA, 19 nt, Artificial Sequence
  Description of Artificial Sequence: Synthetic oligonucleotide
gacaguagguuugugguuu

SEQ ID NO: 2986009 - RNA, 19 nt, Artificial Sequence
  Description of Artificial Sequence: Synthetic oligonucleotide
cugcacucuagcagcacca

SEQ ID NO: 2986010 - RNA, 19 nt, Artificial Sequence
  Description of Artificial Sequence: Synthetic oligonucleotide
guuuggcuacacucaagua

SEQ ID NO: 2986011 - RNA, 19 nt, Artificial Sequence
  Description of Artificial Sequence: Synthetic oligonucleotide
caguagguuugugguuugg

SEQ ID NO: 2986012 - RNA, 19 nt, Artificial Sequence
  Description of Artificial Sequence: Synthetic oligonucleotide
acagugacacagugagcuu

SEQ ID NO: 2986013 - RNA, 19 nt, Artificial Sequence
  Description of Artificial Sequence: Synthetic oligonucleotide
cuuacucuggccaguuccu

SEQ ID NO: 2986014 - RNA, 19 nt, Artificial Sequence
  Description of Artificial Sequence: Synthetic oligonucleotide
cuugcugcucugauaggua

SEQ ID NO: 2986015 - RNA, 19 nt, Artificial Sequence
  Description of Artificial Sequence: Synthetic oligonucleotide
gaguacuuuuccuguuggu

SEQ ID NO: 2986016 - RNA, 19 nt, Artificial Sequence
  Description of Artificial Sequence: Synthetic oligonucleotide
ugcucaguuuucagccguu

SEQ ID NO: 2986017 - RNA, 19 nt, Artificial Sequence
  Description of Artificial Sequence: Synthetic oligonucleotide
cugagaccuggguugcuga

SEQ ID NO: 2986018 - RNA, 19 nt, Artificial Sequence
  Description of Artificial Sequence: Synthetic oligonucleotide
ugcacucuagcagcaccaa

SEQ ID NO: 2986019 - RNA, 19 nt, Artificial Sequence
  Description of Artificial Sequence: Synthetic oligonucleotide
ucacuuacucuggccaguu

SEQ ID NO: 2986020 - RNA, 19 nt, Artificial Sequence
  Description of Artificial Sequence: Synthetic oligonucleotide
acuuuuccuguugguuaug

SEQ ID NO: 2986021 - RNA, 19 nt, Artificial Sequence
  Description of Artificial Sequence: Synthetic oligonucleotide
guuugugguuuggcuacac

SEQ ID NO: 2986022 - RNA, 19 nt, Artificial Sequence
  Description of Artificial Sequence: Synthetic oligonucleotide
gguuaugcugcugcuccug

SEQ ID NO: 2986023 - RNA, 19 nt, Artificial Sequence
  Description of Artificial Sequence: Synthetic oligonucleotide
agccguuccucugucacuu

SEQ ID NO: 2986024 - RNA, 19 nt, Artificial Sequence
  Description of Artificial Sequence: Synthetic oligonucleotide
gcucugauagguacuucug

SEQ ID NO: 2986025 - RNA, 19 nt, Artificial Sequence
  Description of Artificial Sequence: Synthetic oligonucleotide
gcacucuagcagcaccaag

SEQ ID NO: 2986026 - RNA, 19 nt, Artificial Sequence
  Description of Artificial Sequence: Synthetic oligonucleotide
uugcugacuuaggcauugc

SEQ ID NO: 2986027 - RNA, 19 nt, Artificial Sequence
  Description of Artificial Sequence: Synthetic oligonucleotide
caucgaagacuggugagua

SEQ ID NO: 2986028 - RNA, 19 nt, Artificial Sequence
  Description of Artificial Sequence: Synthetic oligonucleotide
agugacacagugagcuuuu

SEQ ID NO: 2986029 - RNA, 19 nt, Artificial Sequence
  Description of Artificial Sequence: Synthetic oligonucleotide
guucuuccaacugacgaau

SEQ ID NO: 2986030 - RNA, 19 nt, Artificial Sequence
  Description of Artificial Sequence: Synthetic oligonucleotide
ggguugcugacuuaggcau

SEQ ID NO: 2986031 - RNA, 19 nt, Artificial Sequence
  Description of Artificial Sequence: Synthetic oligonucleotide
ggaaccauccagguccauc

SEQ ID NO: 2986032 - RNA, 19 nt, Artificial Sequence
  Description of Artificial Sequence: Synthetic oligonucleotide
cagaaguucuugacauucu

SEQ ID NO: 2986033 - RNA, 19 nt, Artificial Sequence
  Description of Artificial Sequence: Synthetic oligonucleotide
ccuggguugcugacuuagg

SEQ ID NO: 2986034 - RNA, 19 nt, Artificial Sequence
  Description of Artificial Sequence: Synthetic oligonucleotide
uuacucuggccaguuccuu

SEQ ID NO: 2986035 - RNA, 19 nt, Artificial Sequence
  Description of Artificial Sequence: Synthetic oligonucleotide
uagcagcaccaaguucuga

SEQ ID NO: 2986036 - RNA, 19 nt, Artificial Sequence
  Description of Artificial Sequence: Synthetic oligonucleotide
caccaaguucugacaguga

SEQ ID NO: 2986037 - RNA, 19 nt, Artificial Sequence
  Description of Artificial Sequence: Synthetic oligonucleotide
uccugcacucuagcagcac

SEQ ID NO: 2986038 - RNA, 19 nt, Artificial Sequence
  Description of Artificial Sequence: Synthetic oligonucleotide
cuuuucuugcugcucugau

SEQ ID NO: 2986039 - RNA, 19 nt, Artificial Sequence
  Description of Artificial Sequence: Synthetic oligonucleotide
cugcuccugcacucuagca

SEQ ID NO: 2986040 - RNA, 19 nt, Artificial Sequence
  Description of Artificial Sequence: Synthetic oligonucleotide
gcugacuuaggcauugccu

SEQ ID NO: 2986041 - RNA, 19 nt, Artificial Sequence
  Description of Artificial Sequence: Synthetic oligonucleotide
ccuuucccuuucuuugaug

SEQ ID NO: 2986042 - RNA, 19 nt, Artificial Sequence
  Description of Artificial Sequence: Synthetic oligonucleotide
ccguuccucugucacuucc

SEQ ID NO: 2986043 - RNA, 19 nt, Artificial Sequence
  Description of Artificial Sequence: Synthetic oligonucleotide
guccaucaucgaagacugg

SEQ ID NO: 2986044 - RNA, 19 nt, Artificial Sequence
  Description of Artificial Sequence: Synthetic oligonucleotide
gccaguuccuuaauuaagu

SEQ ID NO: 2986045 - RNA, 19 nt, Artificial Sequence
  Description of Artificial Sequence: Synthetic oligonucleotide
cauccagguccaucaucga

SEQ ID NO: 2986046 - RNA, 19 nt, Artificial Sequence
  Description of Artificial Sequence: Synthetic oligonucleotide
cuuggucugacaguagguu

SEQ ID NO: 2986047 - RNA, 19 nt, Artificial Sequence
  Description of Artificial Sequence: Synthetic oligonucleotide
cuccugcacucuagcagca

SEQ ID NO: 2986048 - RNA, 19 nt, Artificial Sequence
  Description of Artificial Sequence: Synthetic oligonucleotide
gguacuucugguagagacu

SEQ ID NO: 2986049 - RNA, 19 nt, Artificial Sequence
  Description of Artificial Sequence: Synthetic oligonucleotide
ggcauugccuuggucugac

SEQ ID NO: 2986050 - RNA, 19 nt, Artificial Sequence
  Description of Artificial Sequence: Synthetic oligonucleotide
cugcucaguuuucagccgu

SEQ ID NO: 2986051 - RNA, 19 nt, Artificial Sequence
  Description of Artificial Sequence: Synthetic oligonucleotide
gucugacaguagguuugug

SEQ ID NO: 2986052 - RNA, 19 nt, Artificial Sequence
  Description of Artificial Sequence: Synthetic oligonucleotide
aggcauugccuuggucuga

SEQ ID NO: 2986053 - RNA, 19 nt, Artificial Sequence
  Description of Artificial Sequence: Synthetic oligonucleotide
cucugucacuuccuuuucu

SEQ ID NO: 2986054 - RNA, 19 nt, Artificial Sequence
  Description of Artificial Sequence: Synthetic oligonucleotide
gaagacuggugaguacuuu

SEQ ID NO: 2986055 - RNA, 19 nt, Artificial Sequence
  Description of Artificial Sequence: Synthetic oligonucleotide
cuuccaacugacgaaucuu

SEQ ID NO: 2986056 - RNA, 19 nt, Artificial Sequence
  Description of Artificial Sequence: Synthetic oligonucleotide
caaaggauuccugcucagu

SEQ ID NO: 2986057 - RNA, 19 nt, Artificial Sequence
  Description of Artificial Sequence: Synthetic oligonucleotide
cugaagagccuuucccuuu

SEQ ID NO: 2986058 - RNA, 19 nt, Artificial Sequence
  Description of Artificial Sequence: Synthetic oligonucleotide
cacuuccuuuucuucacuu

SEQ ID NO: 2986059 - RNA, 19 nt, Artificial Sequence
  Description of Artificial Sequence: Synthetic oligonucleotide
augcgucuuuugucuucaa

SEQ ID NO: 2986060 - RNA, 19 nt, Artificial Sequence
  Description of Artificial Sequence: Synthetic oligonucleotide
guucugacagugacacagu

SEQ ID NO: 2986061 - RNA, 19 nt, Artificial Sequence
  Description of Artificial Sequence: Synthetic oligonucleotide
guuccucugucacuuccuu

SEQ ID NO: 2986062 - RNA, 19 nt, Artificial Sequence
  Description of Artificial Sequence: Synthetic oligonucleotide
gugacacagugagcuuuuc

SEQ ID NO: 2986063 - RNA, 19 nt, Artificial Sequence
  Description of Artificial Sequence: Synthetic oligonucleotide
gcugaagagccuuucccuu

SEQ ID NO: 2986064 - RNA, 19 nt, Artificial Sequence
  Description of Artificial Sequence: Synthetic oligonucleotide
cucagaaguucuugacauu

SEQ ID NO: 2986065 - RNA, 19 nt, Artificial Sequence
  Description of Artificial Sequence: Synthetic oligonucleotide
ggcuacacucaaguaggaa

SEQ ID NO: 2986066 - RNA, 19 nt, Artificial Sequence
  Description of Artificial Sequence: Synthetic oligonucleotide
cccuuucuuugaugaucag

SEQ ID NO: 2986067 - RNA, 19 nt, Artificial Sequence
  Description of Artificial Sequence: Synthetic oligonucleotide
cuuugaugaucaguucauu

SEQ ID NO: 2986068 - RNA, 19 nt, Artificial Sequence
  Description of Artificial Sequence: Synthetic oligonucleotide
gcucaguuuucagccguuc

SEQ ID NO: 2986069 - RNA, 19 nt, Artificial Sequence
  Description of Artificial Sequence: Synthetic oligonucleotide
gguuugugguuuggcuaca

SEQ ID NO: 2986070 - RNA, 19 nt, Artificial Sequence
  Description of Artificial Sequence: Synthetic oligonucleotide
ggauuccugcucaguuuuc

SEQ ID NO: 2986071 - RNA, 19 nt, Artificial Sequence
  Description of Artificial Sequence: Synthetic oligonucleotide
gaccuggguugcugacuua

SEQ ID NO: 2986072 - RNA, 19 nt, Artificial Sequence
  Description of Artificial Sequence: Synthetic oligonucleotide
ccuuggucugacaguaggu

SEQ ID NO: 2986073 - RNA, 19 nt, Artificial Sequence
  Description of Artificial Sequence: Synthetic oligonucleotide
cagccguuccucugucacu

SEQ ID NO: 2986074 - RNA, 19 nt, Artificial Sequence
  Description of Artificial Sequence: Synthetic oligonucleotide
ccaacugacgaaucuucuu

SEQ ID NO: 2986075 - RNA, 19 nt, Artificial Sequence
  Description of Artificial Sequence: Synthetic oligonucleotide
ggucugacaguagguuugu

SEQ ID NO: 2986076 - RNA, 19 nt, Artificial Sequence
  Description of Artificial Sequence: Synthetic oligonucleotide
ccaguuccuuaauuaaguu

SEQ ID NO: 2986077 - RNA, 19 nt, Artificial Sequence
  Description of Artificial Sequence: Synthetic oligonucleotide
aggaaccauccagguccau

SEQ ID NO: 2986078 - RNA, 19 nt, Artificial Sequence
  Description of Artificial Sequence: Synthetic oligonucleotide
gcaaugcgucuuuugucuu

SEQ ID NO: 2986079 - RNA, 19 nt, Artificial Sequence
  Description of Artificial Sequence: Synthetic oligonucleotide
gcauugccuuggucugaca

SEQ ID NO: 2986080 - RNA, 19 nt, Artificial Sequence
  Description of Artificial Sequence: Synthetic oligonucleotide
gccuuucccuuucuuugau

SEQ ID NO: 2986081 - RNA, 19 nt, Artificial Sequence
  Description of Artificial Sequence: Synthetic oligonucleotide
gccguuccucugucacuuc

SEQ ID NO: 2986082 - RNA, 19 nt, Artificial Sequence
  Description of Artificial Sequence: Synthetic oligonucleotide
cucuggccaguuccuuaau

SEQ ID NO: 2986083 - RNA, 19 nt, Artificial Sequence
  Description of Artificial Sequence: Synthetic oligonucleotide
gguugcugacuuaggcauu

SEQ ID NO: 2986084 - RNA, 19 nt, Artificial Sequence
  Description of Artificial Sequence: Synthetic oligonucleotide
cgaagacuggugaguacuu

SEQ ID NO: 2986085 - RNA, 19 nt, Artificial Sequence
  Description of Artificial Sequence: Synthetic oligonucleotide
auauucauaauacauagag

SEQ ID NO: 2986086 - RNA, 19 nt, Artificial Sequence
  Description of Artificial Sequence: Synthetic oligonucleotide
auuaguucagcuucuaugc

SEQ ID NO: 2986087 - RNA, 19 nt, Artificial Sequence
  Description of Artificial Sequence: Synthetic oligonucleotide
ucauaauacauagagaagg

SEQ ID NO: 2986088 - RNA, 19 nt, Artificial Sequence
  Description of Artificial Sequence: Synthetic oligonucleotide
ugauauucauaauacauag

SEQ ID NO: 2986089 - RNA, 19 nt, Artificial Sequence
  Description of Artificial Sequence: Synthetic oligonucleotide
aauuaguucagcuucuaug

SEQ ID NO: 2986090 - RNA, 19 nt, Artificial Sequence
  Description of Artificial Sequence: Synthetic oligonucleotide
aaaauguagcuacugguuc

SEQ ID NO: 2986091 - RNA, 19 nt, Artificial Sequence
  Description of Artificial Sequence: Synthetic oligonucleotide
uauguuuacacuuuuguac

SEQ ID NO: 2986092 - RNA, 19 nt, Artificial Sequence
  Description of Artificial Sequence: Synthetic oligonucleotide
uuguacaaaacauagaaaa

SEQ ID NO: 2986093 - RNA, 19 nt, Artificial Sequence
  Description of Artificial Sequence: Synthetic oligonucleotide
ugauaaaagagaaaggaaa

SEQ ID NO: 2986094 - RNA, 19 nt, Artificial Sequence
  Description of Artificial Sequence: Synthetic oligonucleotide
ucugacuuuaugcagagca

SEQ ID NO: 2986095 - RNA, 19 nt, Artificial Sequence
  Description of Artificial Sequence: Synthetic oligonucleotide
aaaaucuccagucugacuu

SEQ ID NO: 2986096 - RNA, 19 nt, Artificial Sequence
  Description of Artificial Sequence: Synthetic oligonucleotide
aauaauuuagaugcauuuc

SEQ ID NO: 2986097 - RNA, 19 nt, Artificial Sequence
  Description of Artificial Sequence: Synthetic oligonucleotide
ucugauauucauaauacau

SEQ ID NO: 2986098 - RNA, 19 nt, Artificial Sequence
  Description of Artificial Sequence: Synthetic oligonucleotide
uauauguuuacacuuuugu

SEQ ID NO: 2986099 - RNA, 19 nt, Artificial Sequence
  Description of Artificial Sequence: Synthetic oligonucleotide
caauacaauacaaagccag

SEQ ID NO: 2986100 - RNA, 19 nt, Artificial Sequence
  Description of Artificial Sequence: Synthetic oligonucleotide
auaauuuagaugcauuucu

SEQ ID NO: 2986101 - RNA, 19 nt, Artificial Sequence
  Description of Artificial Sequence: Synthetic oligonucleotide
uuuguucugauauucauaa

SEQ ID NO: 2986102 - RNA, 19 nt, Artificial Sequence
  Description of Artificial Sequence: Synthetic oligonucleotide
uuuagaugcauuucugugc

SEQ ID NO: 2986103 - RNA, 19 nt, Artificial Sequence
  Description of Artificial Sequence: Synthetic oligonucleotide
aauacaaagccagcucucc

SEQ ID NO: 2986104 - RNA, 19 nt, Artificial Sequence
  Description of Artificial Sequence: Synthetic oligonucleotide
aauacaauacaaagccagc

SEQ ID NO: 2986105 - RNA, 19 nt, Artificial Sequence
  Description of Artificial Sequence: Synthetic oligonucleotide
ggcaauacaauacaaagcc

SEQ ID NO: 2986106 - RNA, 19 nt, Artificial Sequence
  Description of Artificial Sequence: Synthetic oligonucleotide
ugcaucauggaguacaggc

SEQ ID NO: 2986107 - RNA, 19 nt, Artificial Sequence
  Description of Artificial Sequence: Synthetic oligonucleotide
ucacauguacacaaugcgg

SEQ ID NO: 2986108 - RNA, 19 nt, Artificial Sequence
  Description of Artificial Sequence: Synthetic oligonucleotide
uaauacauagagaagggau

SEQ ID NO: 2986109 - RNA, 19 nt, Artificial Sequence
  Description of Artificial Sequence: Synthetic oligonucleotide
aucacauguacacaaugcg

SEQ ID NO: 2986110 - RNA, 19 nt, Artificial Sequence
  Description of Artificial Sequence: Synthetic oligonucleotide
cauaauacauagagaaggg

SEQ ID NO: 2986111 - RNA, 19 nt, Artificial Sequence
  Description of Artificial Sequence: Synthetic oligonucleotide
aaugcggcaauacaauaca

SEQ ID NO: 2986112 - RNA, 19 nt, Artificial Sequence
  Description of Artificial Sequence: Synthetic oligonucleotide
uggcugauaaaagagaaag

SEQ ID NO: 2986113 - RNA, 19 nt, Artificial Sequence
  Description of Artificial Sequence: Synthetic oligonucleotide
auggaauugccauauaugu

SEQ ID NO: 2986114 - RNA, 19 nt, Artificial Sequence
  Description of Artificial Sequence: Synthetic oligonucleotide
aacauuggcacguuacaug

SEQ ID NO: 2986115 - RNA, 19 nt, Artificial Sequence
  Description of Artificial Sequence: Synthetic oligonucleotide
uuagaugcauuucugugca

SEQ ID NO: 2986116 - RNA, 19 nt, Artificial Sequence
  Description of Artificial Sequence: Synthetic oligonucleotide
aaaugcaucauggaguaca

SEQ ID NO: 2986117 - RNA, 19 nt, Artificial Sequence
  Description of Artificial Sequence: Synthetic oligonucleotide
uauucauaauacauagaga

SEQ ID NO: 2986118 - RNA, 19 nt, Artificial Sequence
  Description of Artificial Sequence: Synthetic oligonucleotide
auuuagaugcauuucugug

SEQ ID NO: 2986119 - RNA, 19 nt, Artificial Sequence
  Description of Artificial Sequence: Synthetic oligonucleotide
aauacauagagaagggaug

SEQ ID NO: 2986120 - RNA, 19 nt, Artificial Sequence
  Description of Artificial Sequence: Synthetic oligonucleotide
caaucaagccuucuuaccg

SEQ ID NO: 2986121 - RNA, 19 nt, Artificial Sequence
  Description of Artificial Sequence: Synthetic oligonucleotide
uggaguacaggcaaaacaa

SEQ ID NO: 2986122 - RNA, 19 nt, Artificial Sequence
  Description of Artificial Sequence: Synthetic oligonucleotide
uuacauauucugcagucca

SEQ ID NO: 2986123 - RNA, 19 nt, Artificial Sequence
  Description of Artificial Sequence: Synthetic oligonucleotide
aaaacauuggcacguuaca

SEQ ID NO: 2986124 - RNA, 19 nt, Artificial Sequence
  Description of Artificial Sequence: Synthetic oligonucleotide
caaaacaaaacuaaggugu

SEQ ID NO: 2986125 - RNA, 19 nt, Artificial Sequence
  Description of Artificial Sequence: Synthetic oligonucleotide
aaagccagcucuccccacc

SEQ ID NO: 2986126 - RNA, 19 nt, Artificial Sequence
  Description of Artificial Sequence: Synthetic oligonucleotide
uaauuuagaugcauuucug

SEQ ID NO: 2986127 - RNA, 19 nt, Artificial Sequence
  Description of Artificial Sequence: Synthetic oligonucleotide
acuuuuguacaaaacauag

SEQ ID NO: 2986128 - RNA, 19 nt, Artificial Sequence
  Description of Artificial Sequence: Synthetic oligonucleotide
aaauguagcuacugguuca

SEQ ID NO: 2986129 - RNA, 19 nt, Artificial Sequence
  Description of Artificial Sequence: Synthetic oligonucleotide
cacauguacacaaugcggc

SEQ ID NO: 2986130 - RNA, 19 nt, Artificial Sequence
  Description of Artificial Sequence: Synthetic oligonucleotide
gaugcauuucugugcaugg

SEQ ID NO: 2986131 - RNA, 19 nt, Artificial Sequence
  Description of Artificial Sequence: Synthetic oligonucleotide
uuuuacauauucugcaguc

SEQ ID NO: 2986132 - RNA, 19 nt, Artificial Sequence
  Description of Artificial Sequence: Synthetic oligonucleotide
acaauacaaagccagcucu

SEQ ID NO: 2986133 - RNA, 19 nt, Artificial Sequence
  Description of Artificial Sequence: Synthetic oligonucleotide
uccaauuuucauuuggaaa

SEQ ID NO: 2986134 - RNA, 19 nt, Artificial Sequence
  Description of Artificial Sequence: Synthetic oligonucleotide
aauugccauauauguuuac

SEQ ID NO: 2986135 - RNA, 19 nt, Artificial Sequence
  Description of Artificial Sequence: Synthetic oligonucleotide
guucaauuaguucagcuuc

SEQ ID NO: 2986136 - RNA, 19 nt, Artificial Sequence
  Description of Artificial Sequence: Synthetic oligonucleotide
auacauagagaagggaugg

SEQ ID NO: 2986137 - RNA, 19 nt, Artificial Sequence
  Description of Artificial Sequence: Synthetic oligonucleotide
aguacaggcaaaacaaaac

SEQ ID NO: 2986138 - RNA, 19 nt, Artificial Sequence
  Description of Artificial Sequence: Synthetic oligonucleotide
auguuuacacuuuuguaca

SEQ ID NO: 2986139 - RNA, 19 nt, Artificial Sequence
  Description of Artificial Sequence: Synthetic oligonucleotide
cauggaauugccauauaug

SEQ ID NO: 2986140 - RNA, 19 nt, Artificial Sequence
  Description of Artificial Sequence: Synthetic oligonucleotide
auacaaagccagcucuccc

SEQ ID NO: 2986141 - RNA, 19 nt, Artificial Sequence
  Description of Artificial Sequence: Synthetic oligonucleotide
uacacaaugcggcaauaca

SEQ ID NO: 2986142 - RNA, 19 nt, Artificial Sequence
  Description of Artificial Sequence: Synthetic oligonucleotide
auggaguacaggcaaaaca

SEQ ID NO: 2986143 - RNA, 19 nt, Artificial Sequence
  Description of Artificial Sequence: Synthetic oligonucleotide
uacaauacaaagccagcuc

SEQ ID NO: 2986144 - RNA, 19 nt, Artificial Sequence
  Description of Artificial Sequence: Synthetic oligonucleotide
aaucaagccuucuuaccgu

SEQ ID NO: 2986145 - RNA, 19 nt, Artificial Sequence
  Description of Artificial Sequence: Synthetic oligonucleotide
uccagucugacuuuaugca

SEQ ID NO: 2986146 - RNA, 19 nt, Artificial Sequence
  Description of Artificial Sequence: Synthetic oligonucleotide
cacguuacaugauaaguug

SEQ ID NO: 2986147 - RNA, 19 nt, Artificial Sequence
  Description of Artificial Sequence: Synthetic oligonucleotide
uauucugcaguccaauuuu

SEQ ID NO: 2986148 - RNA, 19 nt, Artificial Sequence
  Description of Artificial Sequence: Synthetic oligonucleotide
aacaaaacuaagguguuuu

SEQ ID NO: 2986149 - RNA, 19 nt, Artificial Sequence
  Description of Artificial Sequence: Synthetic oligonucleotide
acauuggcacguuacauga

SEQ ID NO: 2986150 - RNA, 19 nt, Artificial Sequence
  Description of Artificial Sequence: Synthetic oligonucleotide
uacaaagccagcucucccc

SEQ ID NO: 2986151 - RNA, 19 nt, Artificial Sequence
  Description of Artificial Sequence: Synthetic oligonucleotide
uugccauauauguuuacac

SEQ ID NO: 2986152 - RNA, 19 nt, Artificial Sequence
  Description of Artificial Sequence: Synthetic oligonucleotide
aggcaaaacaaaacuaagg

SEQ ID NO: 2986153 - RNA, 19 nt, Artificial Sequence
  Description of Artificial Sequence: Synthetic oligonucleotide
uuuacauauucugcagucc

SEQ ID NO: 2986154 - RNA, 19 nt, Artificial Sequence
  Description of Artificial Sequence: Synthetic oligonucleotide
uuaguucagcuucuaugcc

SEQ ID NO: 2986155 - RNA, 19 nt, Artificial Sequence
  Description of Artificial Sequence: Synthetic oligonucleotide
cuccagucugacuuuaugc

SEQ ID NO: 2986156 - RNA, 19 nt, Artificial Sequence
  Description of Artificial Sequence: Synthetic oligonucleotide
guucugauauucauaauac

SEQ ID NO: 2986157 - RNA, 19 nt, Artificial Sequence
  Description of Artificial Sequence: Synthetic oligonucleotide
uucugauauucauaauaca

SEQ ID NO: 2986158 - RNA, 19 nt, Artificial Sequence
  Description of Artificial Sequence: Synthetic oligonucleotide
ugccauauauguuuacacu

SEQ ID NO: 2986159 - RNA, 19 nt, Artificial Sequence
  Description of Artificial Sequence: Synthetic oligonucleotide
uacaggcaaaacaaaacua

SEQ ID NO: 2986160 - RNA, 19 nt, Artificial Sequence
  Description of Artificial Sequence: Synthetic oligonucleotide
uucaauuaguucagcuucu

SEQ ID NO: 2986161 - RNA, 19 nt, Artificial Sequence
  Description of Artificial Sequence: Synthetic oligonucleotide
cauagagaagggauggcug

SEQ ID NO: 2986162 - RNA, 19 nt, Artificial Sequence
  Description of Artificial Sequence: Synthetic oligonucleotide
ugcaguccaauuuucauuu

SEQ ID NO: 2986163 - RNA, 19 nt, Artificial Sequence
  Description of Artificial Sequence: Synthetic oligonucleotide
uagcuacugguucaauuag

SEQ ID NO: 2986164 - RNA, 19 nt, Artificial Sequence
  Description of Artificial Sequence: Synthetic oligonucleotide
caaugcggcaauacaauac

SEQ ID NO: 2986165 - RNA, 19 nt, Artificial Sequence
  Description of Artificial Sequence: Synthetic oligonucleotide
gaagggauggcugauaaaa

SEQ ID NO: 2986166 - RNA, 19 nt, Artificial Sequence
  Description of Artificial Sequence: Synthetic oligonucleotide
gcaaaacaaaacuaaggug

SEQ ID NO: 2986167 - RNA, 19 nt, Artificial Sequence
  Description of Artificial Sequence: Synthetic oligonucleotide
auagagaagggauggcuga

SEQ ID NO: 2986168 - RNA, 19 nt, Artificial Sequence
  Description of Artificial Sequence: Synthetic oligonucleotide
uacaugauaaguugucuuu

SEQ ID NO: 2986169 - RNA, 19 nt, Artificial Sequence
  Description of Artificial Sequence: Synthetic oligonucleotide
uucuuaccgucuaacaaaa

SEQ ID NO: 2986170 - RNA, 19 nt, Artificial Sequence
  Description of Artificial Sequence: Synthetic oligonucleotide
uuacuuuguucugauauuc

SEQ ID NO: 2986171 - RNA, 19 nt, Artificial Sequence
  Description of Artificial Sequence: Synthetic oligonucleotide
caguccaauuuucauuugg

SEQ ID NO: 2986172 - RNA, 19 nt, Artificial Sequence
  Description of Artificial Sequence: Synthetic oligonucleotide
uuacaugauaaguugucuu

SEQ ID NO: 2986173 - RNA, 19 nt, Artificial Sequence
  Description of Artificial Sequence: Synthetic oligonucleotide
auauguuuacacuuuugua

SEQ ID NO: 2986174 - RNA, 19 nt, Artificial Sequence
  Description of Artificial Sequence: Synthetic oligonucleotide
uacuuuguucugauauuca

SEQ ID NO: 2986175 - RNA, 19 nt, Artificial Sequence
  Description of Artificial Sequence: Synthetic oligonucleotide
guuuacuuuguucugauau

SEQ ID NO: 2986176 - RNA, 19 nt, Artificial Sequence
  Description of Artificial Sequence: Synthetic oligonucleotide
gcggcaauacaauacaaag

SEQ ID NO: 2986177 - RNA, 19 nt, Artificial Sequence
  Description of Artificial Sequence: Synthetic oligonucleotide
ugcauuucugugcauggaa

SEQ ID NO: 2986178 - RNA, 19 nt, Artificial Sequence
  Description of Artificial Sequence: Synthetic oligonucleotide
uaguucagcuucuaugccu

SEQ ID NO: 2986179 - RNA, 19 nt, Artificial Sequence
  Description of Artificial Sequence: Synthetic oligonucleotide
ugacuuuaugcagagcaca

SEQ ID NO: 2986180 - RNA, 19 nt, Artificial Sequence
  Description of Artificial Sequence: Synthetic oligonucleotide
agggauggcugauaaaaga

SEQ ID NO: 2986181 - RNA, 19 nt, Artificial Sequence
  Description of Artificial Sequence: Synthetic oligonucleotide
auacaauacaaagccagcu

SEQ ID NO: 2986182 - RNA, 19 nt, Artificial Sequence
  Description of Artificial Sequence: Synthetic oligonucleotide
auauucugcaguccaauuu

SEQ ID NO: 2986183 - RNA, 19 nt, Artificial Sequence
  Description of Artificial Sequence: Synthetic oligonucleotide
uuuucucccauguaccgau

SEQ ID NO: 2986184 - RNA, 19 nt, Artificial Sequence
  Description of Artificial Sequence: Synthetic oligonucleotide
aaugcaucauggaguacag

SEQ ID NO: 2986185 - RNA, 19 nt, Artificial Sequence
  Description of Artificial Sequence: Synthetic oligonucleotide
uuuacuuuguucugauauu

SEQ ID NO: 2986186 - RNA, 19 nt, Artificial Sequence
  Description of Artificial Sequence: Synthetic oligonucleotide
uucugugcauggaauugcc

SEQ ID NO: 2986187 - RNA, 19 nt, Artificial Sequence
  Description of Artificial Sequence: Synthetic oligonucleotide
ugguucaauuaguucagcu

SEQ ID NO: 2986188 - RNA, 19 nt, Artificial Sequence
  Description of Artificial Sequence: Synthetic oligonucleotide
ucuccagucugacuuuaug

SEQ ID NO: 2986189 - RNA, 19 nt, Artificial Sequence
  Description of Artificial Sequence: Synthetic oligonucleotide
uuucugugcauggaauugc

SEQ ID NO: 2986190 - RNA, 19 nt, Artificial Sequence
  Description of Artificial Sequence: Synthetic oligonucleotide
gacuuuaugcagagcacag

SEQ ID NO: 2986191 - RNA, 19 nt, Artificial Sequence
  Description of Artificial Sequence: Synthetic oligonucleotide
acuuuguucugauauucau

SEQ ID NO: 2986192 - RNA, 19 nt, Artificial Sequence
  Description of Artificial Sequence: Synthetic oligonucleotide
auuucugugcauggaauug

SEQ ID NO: 2986193 - RNA, 19 nt, Artificial Sequence
  Description of Artificial Sequence: Synthetic oligonucleotide
agucugacuuuaugcagag

SEQ ID NO: 2986194 - RNA, 19 nt, Artificial Sequence
  Description of Artificial Sequence: Synthetic oligonucleotide
ugcggcaauacaauacaaa

SEQ ID NO: 2986195 - RNA, 19 nt, Artificial Sequence
  Description of Artificial Sequence: Synthetic oligonucleotide
aaacauuggcacguuacau

SEQ ID NO: 2986196 - RNA, 19 nt, Artificial Sequence
  Description of Artificial Sequence: Synthetic oligonucleotide
cuucuuaccgucuaacaaa

SEQ ID NO: 2986197 - RNA, 19 nt, Artificial Sequence
  Description of Artificial Sequence: Synthetic oligonucleotide
auaauacauagagaaggga

SEQ ID NO: 2986198 - RNA, 19 nt, Artificial Sequence
  Description of Artificial Sequence: Synthetic oligonucleotide
auugccauauauguuuaca

SEQ ID NO: 2986199 - RNA, 19 nt, Artificial Sequence
  Description of Artificial Sequence: Synthetic oligonucleotide
cugauauucauaauacaua

SEQ ID NO: 2986200 - RNA, 19 nt, Artificial Sequence
  Description of Artificial Sequence: Synthetic oligonucleotide
aaaacaaaacuaagguguu

SEQ ID NO: 2986201 - RNA, 19 nt, Artificial Sequence
  Description of Artificial Sequence: Synthetic oligonucleotide
uucugcaguccaauuuuca

SEQ ID NO: 2986202 - RNA, 19 nt, Artificial Sequence
  Description of Artificial Sequence: Synthetic oligonucleotide
uguagcuacugguucaauu

SEQ ID NO: 2986203 - RNA, 19 nt, Artificial Sequence
  Description of Artificial Sequence: Synthetic oligonucleotide
ccaauuuucauuuggaaaa

SEQ ID NO: 2986204 - RNA, 19 nt, Artificial Sequence
  Description of Artificial Sequence: Synthetic oligonucleotide
aaaaugcaucauggaguac

SEQ ID NO: 2986205 - RNA, 19 nt, Artificial Sequence
  Description of Artificial Sequence: Synthetic oligonucleotide
aagggauggcugauaaaag

SEQ ID NO: 2986206 - RNA, 19 nt, Artificial Sequence
  Description of Artificial Sequence: Synthetic oligonucleotide
ggcaaaacaaaacuaaggu

SEQ ID NO: 2986207 - RNA, 19 nt, Artificial Sequence
  Description of Artificial Sequence: Synthetic oligonucleotide
aguucagcuucuaugccuc

SEQ ID NO: 2986208 - RNA, 19 nt, Artificial Sequence
  Description of Artificial Sequence: Synthetic oligonucleotide
acaggcaaaacaaaacuaa

SEQ ID NO: 2986209 - RNA, 19 nt, Artificial Sequence
  Description of Artificial Sequence: Synthetic oligonucleotide
acacuuuuguacaaaacau

SEQ ID NO: 2986210 - RNA, 19 nt, Artificial Sequence
  Description of Artificial Sequence: Synthetic oligonucleotide
guagcuacugguucaauua

SEQ ID NO: 2986211 - RNA, 19 nt, Artificial Sequence
  Description of Artificial Sequence: Synthetic oligonucleotide
uggaauugccauauauguu

SEQ ID NO: 2986212 - RNA, 19 nt, Artificial Sequence
  Description of Artificial Sequence: Synthetic oligonucleotide
uuggcacguuacaugauaa

SEQ ID NO: 2986213 - RNA, 19 nt, Artificial Sequence
  Description of Artificial Sequence: Synthetic oligonucleotide
acauguacacaaugcggca

SEQ ID NO: 2986214 - RNA, 19 nt, Artificial Sequence
  Description of Artificial Sequence: Synthetic oligonucleotide
gauauucauaauacauaga

SEQ ID NO: 2986215 - RNA, 19 nt, Artificial Sequence
  Description of Artificial Sequence: Synthetic oligonucleotide
acauagagaagggauggcu

SEQ ID NO: 2986216 - RNA, 19 nt, Artificial Sequence
  Description of Artificial Sequence: Synthetic oligonucleotide
cugacuuuaugcagagcac

SEQ ID NO: 2986217 - RNA, 19 nt, Artificial Sequence
  Description of Artificial Sequence: Synthetic oligonucleotide
acugguucaauuaguucag

SEQ ID NO: 2986218 - RNA, 19 nt, Artificial Sequence
  Description of Artificial Sequence: Synthetic oligonucleotide
uacauauucugcaguccaa

SEQ ID NO: 2986219 - RNA, 19 nt, Artificial Sequence
  Description of Artificial Sequence: Synthetic oligonucleotide
uguuuacacuuuuguacaa

SEQ ID NO: 2986220 - RNA, 19 nt, Artificial Sequence
  Description of Artificial Sequence: Synthetic oligonucleotide
auuggcacguuacaugaua

SEQ ID NO: 2986221 - RNA, 19 nt, Artificial Sequence
  Description of Artificial Sequence: Synthetic oligonucleotide
auauauguuuacacuuuug

SEQ ID NO: 2986222 - RNA, 19 nt, Artificial Sequence
  Description of Artificial Sequence: Synthetic oligonucleotide
caauacaaagccagcucuc

SEQ ID NO: 2986223 - RNA, 19 nt, Artificial Sequence
  Description of Artificial Sequence: Synthetic oligonucleotide
gcuucuaugccucuuaaaa

SEQ ID NO: 2986224 - RNA, 19 nt, Artificial Sequence
  Description of Artificial Sequence: Synthetic oligonucleotide
uuguuuacuuuguucugau

SEQ ID NO: 2986225 - RNA, 19 nt, Artificial Sequence
  Description of Artificial Sequence: Synthetic oligonucleotide
ucugugcauggaauugcca

SEQ ID NO: 2986226 - RNA, 19 nt, Artificial Sequence
  Description of Artificial Sequence: Synthetic oligonucleotide
ugugcauggaauugccaua

SEQ ID NO: 2986227 - RNA, 19 nt, Artificial Sequence
  Description of Artificial Sequence: Synthetic oligonucleotide
aaaucuccagucugacuuu

SEQ ID NO: 2986228 - RNA, 19 nt, Artificial Sequence
  Description of Artificial Sequence: Synthetic oligonucleotide
uggcacguuacaugauaag

SEQ ID NO: 2986229 - RNA, 19 nt, Artificial Sequence
  Description of Artificial Sequence: Synthetic oligonucleotide
cuacugguucaauuaguuc

SEQ ID NO: 2986230 - RNA, 19 nt, Artificial Sequence
  Description of Artificial Sequence: Synthetic oligonucleotide
aauguagcuacugguucaa

SEQ ID NO: 2986231 - RNA, 19 nt, Artificial Sequence
  Description of Artificial Sequence: Synthetic oligonucleotide
gagaagggauggcugauaa

SEQ ID NO: 2986232 - RNA, 19 nt, Artificial Sequence
  Description of Artificial Sequence: Synthetic oligonucleotide
gaguacaggcaaaacaaaa

SEQ ID NO: 2986233 - RNA, 19 nt, Artificial Sequence
  Description of Artificial Sequence: Synthetic oligonucleotide
uacauagagaagggauggc

SEQ ID NO: 2986234 - RNA, 19 nt, Artificial Sequence
  Description of Artificial Sequence: Synthetic oligonucleotide
cucuccccaccaaucaagc

SEQ ID NO: 2986235 - RNA, 19 nt, Artificial Sequence
  Description of Artificial Sequence: Synthetic oligonucleotide
aguccaauuuucauuugga

SEQ ID NO: 2986236 - RNA, 19 nt, Artificial Sequence
  Description of Artificial Sequence: Synthetic oligonucleotide
acacaaugcggcaauacaa

SEQ ID NO: 2986237 - RNA, 19 nt, Artificial Sequence
  Description of Artificial Sequence: Synthetic oligonucleotide
ggaauugccauauauguuu

SEQ ID NO: 2986238 - RNA, 19 nt, Artificial Sequence
  Description of Artificial Sequence: Synthetic oligonucleotide
cuuuguucugauauucaua

SEQ ID NO: 2986239 - RNA, 19 nt, Artificial Sequence
  Description of Artificial Sequence: Synthetic oligonucleotide
ggcugauaaaagagaaagg

SEQ ID NO: 2986240 - RNA, 19 nt, Artificial Sequence
  Description of Artificial Sequence: Synthetic oligonucleotide
agccuucuuaccgucuaac

SEQ ID NO: 2986241 - RNA, 19 nt, Artificial Sequence
  Description of Artificial Sequence: Synthetic oligonucleotide
acaaugcggcaauacaaua

SEQ ID NO: 2986242 - RNA, 19 nt, Artificial Sequence
  Description of Artificial Sequence: Synthetic oligonucleotide
caucauggaguacaggcaa

SEQ ID NO: 2986243 - RNA, 19 nt, Artificial Sequence
  Description of Artificial Sequence: Synthetic oligonucleotide
ucauggaguacaggcaaaa

SEQ ID NO: 2986244 - RNA, 19 nt, Artificial Sequence
  Description of Artificial Sequence: Synthetic oligonucleotide
cagucugacuuuaugcaga

SEQ ID NO: 2986245 - RNA, 19 nt, Artificial Sequence
  Description of Artificial Sequence: Synthetic oligonucleotide
cacuuuuguacaaaacaua

SEQ ID NO: 2986246 - RNA, 19 nt, Artificial Sequence
  Description of Artificial Sequence: Synthetic oligonucleotide
auucugcaguccaauuuuc

SEQ ID NO: 2986247 - RNA, 19 nt, Artificial Sequence
  Description of Artificial Sequence: Synthetic oligonucleotide
aagccagcucuccccacca

SEQ ID NO: 2986248 - RNA, 19 nt, Artificial Sequence
  Description of Artificial Sequence: Synthetic oligonucleotide
ccaaucaagccuucuuacc

SEQ ID NO: 2986249 - RNA, 19 nt, Artificial Sequence
  Description of Artificial Sequence: Synthetic oligonucleotide
guccaauuuucauuuggaa

SEQ ID NO: 2986250 - RNA, 19 nt, Artificial Sequence
  Description of Artificial Sequence: Synthetic oligonucleotide
acauauucugcaguccaau

SEQ ID NO: 2986251 - RNA, 19 nt, Artificial Sequence
  Description of Artificial Sequence: Synthetic oligonucleotide
uccccaccaaucaagccuu

SEQ ID NO: 2986252 - RNA, 19 nt, Artificial Sequence
  Description of Artificial Sequence: Synthetic oligonucleotide
uguuuacuuuguucugaua

SEQ ID NO: 2986253 - RNA, 19 nt, Artificial Sequence
  Description of Artificial Sequence: Synthetic oligonucleotide
acaugauaaguugucuuuu

SEQ ID NO: 2986254 - RNA, 19 nt, Artificial Sequence
  Description of Artificial Sequence: Synthetic oligonucleotide
acuuuaugcagagcacaga

SEQ ID NO: 2986255 - RNA, 19 nt, Artificial Sequence
  Description of Artificial Sequence: Synthetic oligonucleotide
uucucccauguaccgauuu

SEQ ID NO: 2986256 - RNA, 19 nt, Artificial Sequence
  Description of Artificial Sequence: Synthetic oligonucleotide
guacacaaugcggcaauac

SEQ ID NO: 2986257 - RNA, 19 nt, Artificial Sequence
  Description of Artificial Sequence: Synthetic oligonucleotide
acguuacaugauaaguugu

SEQ ID NO: 2986258 - RNA, 19 nt, Artificial Sequence
  Description of Artificial Sequence: Synthetic oligonucleotide
ucucccauguaccgauuuu

SEQ ID NO: 2986259 - RNA, 19 nt, Artificial Sequence
  Description of Artificial Sequence: Synthetic oligonucleotide
ccagucugacuuuaugcag

SEQ ID NO: 2986260 - RNA, 19 nt, Artificial Sequence
  Description of Artificial Sequence: Synthetic oligonucleotide
ucaauuaguucagcuucua

SEQ ID NO: 2986261 - RNA, 19 nt, Artificial Sequence
  Description of Artificial Sequence: Synthetic oligonucleotide
guuacaugauaaguugucu

SEQ ID NO: 2986262 - RNA, 19 nt, Artificial Sequence
  Description of Artificial Sequence: Synthetic oligonucleotide
cauggaguacaggcaaaac

SEQ ID NO: 2986263 - RNA, 19 nt, Artificial Sequence
  Description of Artificial Sequence: Synthetic oligonucleotide
cggcaauacaauacaaagc

SEQ ID NO: 2986264 - RNA, 19 nt, Artificial Sequence
  Description of Artificial Sequence: Synthetic oligonucleotide
aagccuucuuaccgucuaa

SEQ ID NO: 2986265 - RNA, 19 nt, Artificial Sequence
  Description of Artificial Sequence: Synthetic oligonucleotide
agcuucuaugccucuuaaa

SEQ ID NO: 2986266 - RNA, 19 nt, Artificial Sequence
  Description of Artificial Sequence: Synthetic oligonucleotide
gaauugccauauauguuua

SEQ ID NO: 2986267 - RNA, 19 nt, Artificial Sequence
  Description of Artificial Sequence: Synthetic oligonucleotide
guuuacacuuuuguacaaa

SEQ ID NO: 2986268 - RNA, 19 nt, Artificial Sequence
  Description of Artificial Sequence: Synthetic oligonucleotide
aaucuccagucugacuuua

SEQ ID NO: 2986269 - RNA, 19 nt, Artificial Sequence
  Description of Artificial Sequence: Synthetic oligonucleotide
agaagggauggcugauaaa

SEQ ID NO: 2986270 - RNA, 19 nt, Artificial Sequence
  Description of Artificial Sequence: Synthetic oligonucleotide
augcaucauggaguacagg

SEQ ID NO: 2986271 - RNA, 19 nt, Artificial Sequence
  Description of Artificial Sequence: Synthetic oligonucleotide
agcuacugguucaauuagu

SEQ ID NO: 2986272 - RNA, 19 nt, Artificial Sequence
  Description of Artificial Sequence: Synthetic oligonucleotide
cguuacaugauaaguuguc

SEQ ID NO: 2986273 - RNA, 19 nt, Artificial Sequence
  Description of Artificial Sequence: Synthetic oligonucleotide
caccaaucaagccuucuua

SEQ ID NO: 2986274 - RNA, 19 nt, Artificial Sequence
  Description of Artificial Sequence: Synthetic oligonucleotide
cuccccaccaaucaagccu

SEQ ID NO: 2986275 - RNA, 19 nt, Artificial Sequence
  Description of Artificial Sequence: Synthetic oligonucleotide
cugguucaauuaguucagc

SEQ ID NO: 2986276 - RNA, 19 nt, Artificial Sequence
  Description of Artificial Sequence: Synthetic oligonucleotide
uagagaagggauggcugau

SEQ ID NO: 2986277 - RNA, 19 nt, Artificial Sequence
  Description of Artificial Sequence: Synthetic oligonucleotide
uguacacaaugcggcaaua

SEQ ID NO: 2986278 - RNA, 19 nt, Artificial Sequence
  Description of Artificial Sequence: Synthetic oligonucleotide
gguucaauuaguucagcuu

SEQ ID NO: 2986279 - RNA, 19 nt, Artificial Sequence
  Description of Artificial Sequence: Synthetic oligonucleotide
cugugcauggaauugccau

SEQ ID NO: 2986280 - RNA, 19 nt, Artificial Sequence
  Description of Artificial Sequence: Synthetic oligonucleotide
gccauauauguuuacacuu

SEQ ID NO: 2986281 - RNA, 19 nt, Artificial Sequence
  Description of Artificial Sequence: Synthetic oligonucleotide
cacaaugcggcaauacaau

SEQ ID NO: 2986282 - RNA, 19 nt, Artificial Sequence
  Description of Artificial Sequence: Synthetic oligonucleotide
agcucuccccaccaaucaa

SEQ ID NO: 2986283 - RNA, 19 nt, Artificial Sequence
  Description of Artificial Sequence: Synthetic oligonucleotide
augcauuucugugcaugga

SEQ ID NO: 2986284 - RNA, 19 nt, Artificial Sequence
  Description of Artificial Sequence: Synthetic oligonucleotide
cauauauguuuacacuuuu

SEQ ID NO: 2986285 - RNA, 19 nt, Artificial Sequence
  Description of Artificial Sequence: Synthetic oligonucleotide
gcaauacaauacaaagcca

SEQ ID NO: 2986286 - RNA, 19 nt, Artificial Sequence
  Description of Artificial Sequence: Synthetic oligonucleotide
ugcauggaauugccauaua

SEQ ID NO: 2986287 - RNA, 19 nt, Artificial Sequence
  Description of Artificial Sequence: Synthetic oligonucleotide
cauguacacaaugcggcaa

SEQ ID NO: 2986288 - RNA, 19 nt, Artificial Sequence
  Description of Artificial Sequence: Synthetic oligonucleotide
ccuucuuaccgucuaacaa

SEQ ID NO: 2986289 - RNA, 19 nt, Artificial Sequence
  Description of Artificial Sequence: Synthetic oligonucleotide
uucagcuucuaugccucuu

SEQ ID NO: 2986290 - RNA, 19 nt, Artificial Sequence
  Description of Artificial Sequence: Synthetic oligonucleotide
gcucuccccaccaaucaag

SEQ ID NO: 2986291 - RNA, 19 nt, Artificial Sequence
  Description of Artificial Sequence: Synthetic oligonucleotide
uuucucccauguaccgauu

SEQ ID NO: 2986292 - RNA, 19 nt, Artificial Sequence
  Description of Artificial Sequence: Synthetic oligonucleotide
ggcacguuacaugauaagu

SEQ ID NO: 2986293 - RNA, 19 nt, Artificial Sequence
  Description of Artificial Sequence: Synthetic oligonucleotide
gcauggaauugccauauau

SEQ ID NO: 2986294 - RNA, 19 nt, Artificial Sequence
  Description of Artificial Sequence: Synthetic oligonucleotide
caagccuucuuaccgucua

SEQ ID NO: 2986295 - RNA, 19 nt, Artificial Sequence
  Description of Artificial Sequence: Synthetic oligonucleotide
agagaagggauggcugaua

SEQ ID NO: 2986296 - RNA, 19 nt, Artificial Sequence
  Description of Artificial Sequence: Synthetic oligonucleotide
gccuucuuaccgucuaaca

SEQ ID NO: 2986297 - RNA, 19 nt, Artificial Sequence
  Description of Artificial Sequence: Synthetic oligonucleotide
cagcucuccccaccaauca

SEQ ID NO: 2986298 - RNA, 19 nt, Artificial Sequence
  Description of Artificial Sequence: Synthetic oligonucleotide
aucauggaguacaggcaaa

SEQ ID NO: 2986299 - RNA, 19 nt, Artificial Sequence
  Description of Artificial Sequence: Synthetic oligonucleotide
gcaguccaauuuucauuug

SEQ ID NO: 2986300 - RNA, 19 nt, Artificial Sequence
  Description of Artificial Sequence: Synthetic oligonucleotide
cauauucugcaguccaauu

SEQ ID NO: 2986301 - RNA, 19 nt, Artificial Sequence
  Description of Artificial Sequence: Synthetic oligonucleotide
cugcaguccaauuuucauu

SEQ ID NO: 2986302 - RNA, 19 nt, Artificial Sequence
  Description of Artificial Sequence: Synthetic oligonucleotide
gucugacuuuaugcagagc

SEQ ID NO: 2986303 - RNA, 19 nt, Artificial Sequence
  Description of Artificial Sequence: Synthetic oligonucleotide
ggaguacaggcaaaacaaa

SEQ ID NO: 2986304 - RNA, 19 nt, Artificial Sequence
  Description of Artificial Sequence: Synthetic oligonucleotide
augcggcaauacaauacaa

SEQ ID NO: 2986305 - RNA, 19 nt, Artificial Sequence
  Description of Artificial Sequence: Synthetic oligonucleotide
gugcauggaauugccauau

SEQ ID NO: 2986306 - RNA, 19 nt, Artificial Sequence
  Description of Artificial Sequence: Synthetic oligonucleotide
cagcuucuaugccucuuaa

SEQ ID NO: 2986307 - RNA, 19 nt, Artificial Sequence
  Description of Artificial Sequence: Synthetic oligonucleotide
gcacguuacaugauaaguu

SEQ ID NO: 2986308 - RNA, 19 nt, Artificial Sequence
  Description of Artificial Sequence: Synthetic oligonucleotide
auguagcuacugguucaau

SEQ ID NO: 2986309 - RNA, 19 nt, Artificial Sequence
  Description of Artificial Sequence: Synthetic oligonucleotide
gcuacugguucaauuaguu

SEQ ID NO: 2986310 - RNA, 19 nt, Artificial Sequence
  Description of Artificial Sequence: Synthetic oligonucleotide
aucuccagucugacuuuau

SEQ ID NO: 2986311 - RNA, 19 nt, Artificial Sequence
  Description of Artificial Sequence: Synthetic oligonucleotide
guucagcuucuaugccucu

SEQ ID NO: 2986312 - RNA, 19 nt, Artificial Sequence
  Description of Artificial Sequence: Synthetic oligonucleotide
agccagcucuccccaccaa

SEQ ID NO: 2986313 - RNA, 19 nt, Artificial Sequence
  Description of Artificial Sequence: Synthetic oligonucleotide
gcauuucugugcauggaau

SEQ ID NO: 2986314 - RNA, 19 nt, Artificial Sequence
  Description of Artificial Sequence: Synthetic oligonucleotide
cauuggcacguuacaugau

SEQ ID NO: 2986315 - RNA, 19 nt, Artificial Sequence
  Description of Artificial Sequence: Synthetic oligonucleotide
gccagcucuccccaccaau

SEQ ID NO: 2986316 - RNA, 19 nt, Artificial Sequence
  Description of Artificial Sequence: Synthetic oligonucleotide
ccaccaaucaagccuucuu

SEQ ID NO: 2986317 - RNA, 19 nt, Artificial Sequence
  Description of Artificial Sequence: Synthetic oligonucleotide
cccaccaaucaagccuucu

SEQ ID NO: 2986318 - RNA, 19 nt, Artificial Sequence
  Description of Artificial Sequence: Synthetic oligonucleotide
agugucauggauuugaagg

SEQ ID NO: 2986319 - RNA, 19 nt, Artificial Sequence
  Description of Artificial Sequence: Synthetic oligonucleotide
aaaaguguggaacuucugg

SEQ ID NO: 2986320 - RNA, 19 nt, Artificial Sequence
  Description of Artificial Sequence: Synthetic oligonucleotide
aauagauauauauuucugu

SEQ ID NO: 2986321 - RNA, 19 nt, Artificial Sequence
  Description of Artificial Sequence: Synthetic oligonucleotide
uauauuucugugcaguggg

SEQ ID NO: 2986322 - RNA, 19 nt, Artificial Sequence
  Description of Artificial Sequence: Synthetic oligonucleotide
ugaaaauagauauauauuu

SEQ ID NO: 2986323 - RNA, 19 nt, Artificial Sequence
  Description of Artificial Sequence: Synthetic oligonucleotide
ugugaaaauagauauauau

SEQ ID NO: 2986324 - RNA, 19 nt, Artificial Sequence
  Description of Artificial Sequence: Synthetic oligonucleotide
auagauauauauuucugug

SEQ ID NO: 2986325 - RNA, 19 nt, Artificial Sequence
  Description of Artificial Sequence: Synthetic oligonucleotide
agauauauauuucugugca

SEQ ID NO: 2986326 - RNA, 19 nt, Artificial Sequence
  Description of Artificial Sequence: Synthetic oligonucleotide
auggauuugaaggugcucc

SEQ ID NO: 2986327 - RNA, 19 nt, Artificial Sequence
  Description of Artificial Sequence: Synthetic oligonucleotide
uagauauauauuucugugc

SEQ ID NO: 2986328 - RNA, 19 nt, Artificial Sequence
  Description of Artificial Sequence: Synthetic oligonucleotide
aaaguguggaacuucuggu

SEQ ID NO: 2986329 - RNA, 19 nt, Artificial Sequence
  Description of Artificial Sequence: Synthetic oligonucleotide
uacgguagcggucaaaagu

SEQ ID NO: 2986330 - RNA, 19 nt, Artificial Sequence
  Description of Artificial Sequence: Synthetic oligonucleotide
uauauauuucugugcagug

SEQ ID NO: 2986331 - RNA, 19 nt, Artificial Sequence
  Description of Artificial Sequence: Synthetic oligonucleotide
ucaaaaguguggaacuucu

SEQ ID NO: 2986332 - RNA, 19 nt, Artificial Sequence
  Description of Artificial Sequence: Synthetic oligonucleotide
agugugaaaauagauauau

SEQ ID NO: 2986333 - RNA, 19 nt, Artificial Sequence
  Description of Artificial Sequence: Synthetic oligonucleotide
gaacuucugguugaguucg

SEQ ID NO: 2986334 - RNA, 19 nt, Artificial Sequence
  Description of Artificial Sequence: Synthetic oligonucleotide
uugaaggugcuccagcucu

SEQ ID NO: 2986335 - RNA, 19 nt, Artificial Sequence
  Description of Artificial Sequence: Synthetic oligonucleotide
auauauuucugugcagugg

SEQ ID NO: 2986336 - RNA, 19 nt, Artificial Sequence
  Description of Artificial Sequence: Synthetic oligonucleotide
auauauauuucugugcagu

SEQ ID NO: 2986337 - RNA, 19 nt, Artificial Sequence
  Description of Artificial Sequence: Synthetic oligonucleotide
uggagugugaaaauagaua

SEQ ID NO: 2986338 - RNA, 19 nt, Artificial Sequence
  Description of Artificial Sequence: Synthetic oligonucleotide
gauuugaaggugcuccagc

SEQ ID NO: 2986339 - RNA, 19 nt, Artificial Sequence
  Description of Artificial Sequence: Synthetic oligonucleotide
ugaggacuggcuacgguag

SEQ ID NO: 2986340 - RNA, 19 nt, Artificial Sequence
  Description of Artificial Sequence: Synthetic oligonucleotide
aaguggagugugaaaauag

SEQ ID NO: 2986341 - RNA, 19 nt, Artificial Sequence
  Description of Artificial Sequence: Synthetic oligonucleotide
uccugguaguuccaaagug

SEQ ID NO: 2986342 - RNA, 19 nt, Artificial Sequence
  Description of Artificial Sequence: Synthetic oligonucleotide
aguguggaacuucugguug

SEQ ID NO: 2986343 - RNA, 19 nt, Artificial Sequence
  Description of Artificial Sequence: Synthetic oligonucleotide
uccgguguggcacucacac

SEQ ID NO: 2986344 - RNA, 19 nt, Artificial Sequence
  Description of Artificial Sequence: Synthetic oligonucleotide
agugagcccagugucaugg

SEQ ID NO: 2986345 - RNA, 19 nt, Artificial Sequence
  Description of Artificial Sequence: Synthetic oligonucleotide
uugaguucgugguagaguu

SEQ ID NO: 2986346 - RNA, 19 nt, Artificial Sequence
  Description of Artificial Sequence: Synthetic oligonucleotide
auuugaaggugcuccagcu

SEQ ID NO: 2986347 - RNA, 19 nt, Artificial Sequence
  Description of Artificial Sequence: Synthetic oligonucleotide
ugugcagugggcaguccgg

SEQ ID NO: 2986348 - RNA, 19 nt, Artificial Sequence
  Description of Artificial Sequence: Synthetic oligonucleotide
gcugagacaggccagggcg

SEQ ID NO: 2986349 - RNA, 19 nt, Artificial Sequence
  Description of Artificial Sequence: Synthetic oligonucleotide
auuucugugcagugggcag

SEQ ID NO: 2986350 - RNA, 19 nt, Artificial Sequence
  Description of Artificial Sequence: Synthetic oligonucleotide
cuucugguugaguucgugg

SEQ ID NO: 2986351 - RNA, 19 nt, Artificial Sequence
  Description of Artificial Sequence: Synthetic oligonucleotide
guaguuccaaaguggagug

SEQ ID NO: 2986352 - RNA, 19 nt, Artificial Sequence
  Description of Artificial Sequence: Synthetic oligonucleotide
aguccucugcaccuccugc

SEQ ID NO: 2986353 - RNA, 19 nt, Artificial Sequence
  Description of Artificial Sequence: Synthetic oligonucleotide
gaguucgugguagaguucc

SEQ ID NO: 2986354 - RNA, 19 nt, Artificial Sequence
  Description of Artificial Sequence: Synthetic oligonucleotide
uucgugguagaguuccgag

SEQ ID NO: 2986355 - RNA, 19 nt, Artificial Sequence
  Description of Artificial Sequence: Synthetic oligonucleotide
cuggguuucuccuugccug

SEQ ID NO: 2986356 - RNA, 19 nt, Artificial Sequence
  Description of Artificial Sequence: Synthetic oligonucleotide
ucacaccucugucuggaag

SEQ ID NO: 2986357 - RNA, 19 nt, Artificial Sequence
  Description of Artificial Sequence: Synthetic oligonucleotide
ucuggaagucaccgucugg

SEQ ID NO: 2986358 - RNA, 19 nt, Artificial Sequence
  Description of Artificial Sequence: Synthetic oligonucleotide
guagcggucaaaagugugg

SEQ ID NO: 2986359 - RNA, 19 nt, Artificial Sequence
  Description of Artificial Sequence: Synthetic oligonucleotide
uauuucugugcagugggca

SEQ ID NO: 2986360 - RNA, 19 nt, Artificial Sequence
  Description of Artificial Sequence: Synthetic oligonucleotide
aaguguggaacuucugguu

SEQ ID NO: 2986361 - RNA, 19 nt, Artificial Sequence
  Description of Artificial Sequence: Synthetic oligonucleotide
aguuccaaaguggagugug

SEQ ID NO: 2986362 - RNA, 19 nt, Artificial Sequence
  Description of Artificial Sequence: Synthetic oligonucleotide
ugugcugagacaggccagg

SEQ ID NO: 2986363 - RNA, 19 nt, Artificial Sequence
  Description of Artificial Sequence: Synthetic oligonucleotide
aguuccgagugccguuucc

SEQ ID NO: 2986364 - RNA, 19 nt, Artificial Sequence
  Description of Artificial Sequence: Synthetic oligonucleotide
aaaguggagugugaaaaua

SEQ ID NO: 2986365 - RNA, 19 nt, Artificial Sequence
  Description of Artificial Sequence: Synthetic oligonucleotide
uucuccuugccugaggacu

SEQ ID NO: 2986366 - RNA, 19 nt, Artificial Sequence
  Description of Artificial Sequence: Synthetic oligonucleotide
ugguaguuccaaaguggag

SEQ ID NO: 2986367 - RNA, 19 nt, Artificial Sequence
  Description of Artificial Sequence: Synthetic oligonucleotide
gaagucaccgucuggaggu

SEQ ID NO: 2986368 - RNA, 19 nt, Artificial Sequence
  Description of Artificial Sequence: Synthetic oligonucleotide
ugucauggauuugaaggug

SEQ ID NO: 2986369 - RNA, 19 nt, Artificial Sequence
  Description of Artificial Sequence: Synthetic oligonucleotide
ucauggauuugaaggugcu

SEQ ID NO: 2986370 - RNA, 19 nt, Artificial Sequence
  Description of Artificial Sequence: Synthetic oligonucleotide
augccuccugugcugagac

SEQ ID NO: 2986371 - RNA, 19 nt, Artificial Sequence
  Description of Artificial Sequence: Synthetic oligonucleotide
ccugguaguuccaaagugg

SEQ ID NO: 2986372 - RNA, 19 nt, Artificial Sequence
  Description of Artificial Sequence: Synthetic oligonucleotide
uuugaaggugcuccagcuc

SEQ ID NO: 2986373 - RNA, 19 nt, Artificial Sequence
  Description of Artificial Sequence: Synthetic oligonucleotide
ucuccuugccugaggacug

SEQ ID NO: 2986374 - RNA, 19 nt, Artificial Sequence
  Description of Artificial Sequence: Synthetic oligonucleotide
auauuucugugcagugggc

SEQ ID NO: 2986375 - RNA, 19 nt, Artificial Sequence
  Description of Artificial Sequence: Synthetic oligonucleotide
cucugucuggaagucaccg

SEQ ID NO: 2986376 - RNA, 19 nt, Artificial Sequence
  Description of Artificial Sequence: Synthetic oligonucleotide
ggagugugaaaauagauau

SEQ ID NO: 2986377 - RNA, 19 nt, Artificial Sequence
  Description of Artificial Sequence: Synthetic oligonucleotide
uggauuugaaggugcucca

SEQ ID NO: 2986378 - RNA, 19 nt, Artificial Sequence
  Description of Artificial Sequence: Synthetic oligonucleotide
ugcuguccggugcagggcc

SEQ ID NO: 2986379 - RNA, 19 nt, Artificial Sequence
  Description of Artificial Sequence: Synthetic oligonucleotide
ugucuggaagucaccgucu

SEQ ID NO: 2986380 - RNA, 19 nt, Artificial Sequence
  Description of Artificial Sequence: Synthetic oligonucleotide
ggaagucaccgucuggagg

SEQ ID NO: 2986381 - RNA, 19 nt, Artificial Sequence
  Description of Artificial Sequence: Synthetic oligonucleotide
ugguagaguuccgagugcc

SEQ ID NO: 2986382 - RNA, 19 nt, Artificial Sequence
  Description of Artificial Sequence: Synthetic oligonucleotide
acgguagcggucaaaagug

SEQ ID NO: 2986383 - RNA, 19 nt, Artificial Sequence
  Description of Artificial Sequence: Synthetic oligonucleotide
aguccgguguggcacucac

SEQ ID NO: 2986384 - RNA, 19 nt, Artificial Sequence
  Description of Artificial Sequence: Synthetic oligonucleotide
gguucugugggcucccagg

SEQ ID NO: 2986385 - RNA, 19 nt, Artificial Sequence
  Description of Artificial Sequence: Synthetic oligonucleotide
cugucuggaagucaccguc

SEQ ID NO: 2986386 - RNA, 19 nt, Artificial Sequence
  Description of Artificial Sequence: Synthetic oligonucleotide
uggaagucaccgucuggag

SEQ ID NO: 2986387 - RNA, 19 nt, Artificial Sequence
  Description of Artificial Sequence: Synthetic oligonucleotide
guuucuccuugccugagga

SEQ ID NO: 2986388 - RNA, 19 nt, Artificial Sequence
  Description of Artificial Sequence: Synthetic oligonucleotide
guucugugggcucccaggc

SEQ ID NO: 2986389 - RNA, 19 nt, Artificial Sequence
  Description of Artificial Sequence: Synthetic oligonucleotide
gucauggauuugaaggugc

SEQ ID NO: 2986390 - RNA, 19 nt, Artificial Sequence
  Description of Artificial Sequence: Synthetic oligonucleotide
uccaaaguggagugugaaa

SEQ ID NO: 2986391 - RNA, 19 nt, Artificial Sequence
  Description of Artificial Sequence: Synthetic oligonucleotide
agacaggccagggcguucc

SEQ ID NO: 2986392 - RNA, 19 nt, Artificial Sequence
  Description of Artificial Sequence: Synthetic oligonucleotide
uccucugcaccuccugccc

SEQ ID NO: 2986393 - RNA, 19 nt, Artificial Sequence
  Description of Artificial Sequence: Synthetic oligonucleotide
ugcugagacaggccagggc

SEQ ID NO: 2986394 - RNA, 19 nt, Artificial Sequence
  Description of Artificial Sequence: Synthetic oligonucleotide
cugugcagugggcaguccg

SEQ ID NO: 2986395 - RNA, 19 nt, Artificial Sequence
  Description of Artificial Sequence: Synthetic oligonucleotide
cugguaguuccaaagugga

SEQ ID NO: 2986396 - RNA, 19 nt, Artificial Sequence
  Description of Artificial Sequence: Synthetic oligonucleotide
caaaaguguggaacuucug

SEQ ID NO: 2986397 - RNA, 19 nt, Artificial Sequence
  Description of Artificial Sequence: Synthetic oligonucleotide
ucugucuggaagucaccgu

SEQ ID NO: 2986398 - RNA, 19 nt, Artificial Sequence
  Description of Artificial Sequence: Synthetic oligonucleotide
ucgugguagaguuccgagu

SEQ ID NO: 2986399 - RNA, 19 nt, Artificial Sequence
  Description of Artificial Sequence: Synthetic oligonucleotide
uguggaacuucugguugag

SEQ ID NO: 2986400 - RNA, 19 nt, Artificial Sequence
  Description of Artificial Sequence: Synthetic oligonucleotide
uugccugaggacuggcuac

SEQ ID NO: 2986401 - RNA, 19 nt, Artificial Sequence
  Description of Artificial Sequence: Synthetic oligonucleotide
aggugcuccagcucugaug

SEQ ID NO: 2986402 - RNA, 19 nt, Artificial Sequence
  Description of Artificial Sequence: Synthetic oligonucleotide
ugcaccuccugcccaggcc

SEQ ID NO: 2986403 - RNA, 19 nt, Artificial Sequence
  Description of Artificial Sequence: Synthetic oligonucleotide
ugggcucccaggcugcugu

SEQ ID NO: 2986404 - RNA, 19 nt, Artificial Sequence
  Description of Artificial Sequence: Synthetic oligonucleotide
aguggagugugaaaauaga

SEQ ID NO: 2986405 - RNA, 19 nt, Artificial Sequence
  Description of Artificial Sequence: Synthetic oligonucleotide
uagcggucaaaagugugga

SEQ ID NO: 2986406 - RNA, 19 nt, Artificial Sequence
  Description of Artificial Sequence: Synthetic oligonucleotide
accgucuggagguucugug

SEQ ID NO: 2986407 - RNA, 19 nt, Artificial Sequence
  Description of Artificial Sequence: Synthetic oligonucleotide
agcucugaugccuccugug

SEQ ID NO: 2986408 - RNA, 19 nt, Artificial Sequence
  Description of Artificial Sequence: Synthetic oligonucleotide
cagugucauggauuugaag

SEQ ID NO: 2986409 - RNA, 19 nt, Artificial Sequence
  Description of Artificial Sequence: Synthetic oligonucleotide
aggacuggcuacgguagcg

SEQ ID NO: 2986410 - RNA, 19 nt, Artificial Sequence
  Description of Artificial Sequence: Synthetic oligonucleotide
uccggugcagggccagccg

SEQ ID NO: 2986411 - RNA, 19 nt, Artificial Sequence
  Description of Artificial Sequence: Synthetic oligonucleotide
guuccgagugccguuuccg

SEQ ID NO: 2986412 - RNA, 19 nt, Artificial Sequence
  Description of Artificial Sequence: Synthetic oligonucleotide
uccugugcugagacaggcc

SEQ ID NO: 2986413 - RNA, 19 nt, Artificial Sequence
  Description of Artificial Sequence: Synthetic oligonucleotide
gcuccugguaguuccaaag

SEQ ID NO: 2986414 - RNA, 19 nt, Artificial Sequence
  Description of Artificial Sequence: Synthetic oligonucleotide
agggcuggguuucuccuug

SEQ ID NO: 2986415 - RNA, 19 nt, Artificial Sequence
  Description of Artificial Sequence: Synthetic oligonucleotide
uggguuucuccuugccuga

SEQ ID NO: 2986416 - RNA, 19 nt, Artificial Sequence
  Description of Artificial Sequence: Synthetic oligonucleotide
ugcuccagcucugaugccu

SEQ ID NO: 2986417 - RNA, 19 nt, Artificial Sequence
  Description of Artificial Sequence: Synthetic oligonucleotide
gucaaaaguguggaacuuc

SEQ ID NO: 2986418 - RNA, 19 nt, Artificial Sequence
  Description of Artificial Sequence: Synthetic oligonucleotide
cuacgguagcggucaaaag

SEQ ID NO: 2986419 - RNA, 19 nt, Artificial Sequence
  Description of Artificial Sequence: Synthetic oligonucleotide
ggaacuucugguugaguuc

SEQ ID NO: 2986420 - RNA, 19 nt, Artificial Sequence
  Description of Artificial Sequence: Synthetic oligonucleotide
uuccaaaguggagugugaa

SEQ ID NO: 2986421 - RNA, 19 nt, Artificial Sequence
  Description of Artificial Sequence: Synthetic oligonucleotide
ugagcccagugucauggau

SEQ ID NO: 2986422 - RNA, 19 nt, Artificial Sequence
  Description of Artificial Sequence: Synthetic oligonucleotide
agcccagugucauggauuu

SEQ ID NO: 2986423 - RNA, 19 nt, Artificial Sequence
  Description of Artificial Sequence: Synthetic oligonucleotide
uuucugugcagugggcagu

SEQ ID NO: 2986424 - RNA, 19 nt, Artificial Sequence
  Description of Artificial Sequence: Synthetic oligonucleotide
uuucuccuugccugaggac

SEQ ID NO: 2986425 - RNA, 19 nt, Artificial Sequence
  Description of Artificial Sequence: Synthetic oligonucleotide
uggagguucugugggcucc

SEQ ID NO: 2986426 - RNA, 19 nt, Artificial Sequence
  Description of Artificial Sequence: Synthetic oligonucleotide
gugucauggauuugaaggu

SEQ ID NO: 2986427 - RNA, 19 nt, Artificial Sequence
  Description of Artificial Sequence: Synthetic oligonucleotide
agggccagccguucucggg

SEQ ID NO: 2986428 - RNA, 19 nt, Artificial Sequence
  Description of Artificial Sequence: Synthetic oligonucleotide
guccucugcaccuccugcc

SEQ ID NO: 2986429 - RNA, 19 nt, Artificial Sequence
  Description of Artificial Sequence: Synthetic oligonucleotide
gcuggcuccugguaguucc

SEQ ID NO: 2986430 - RNA, 19 nt, Artificial Sequence
  Description of Artificial Sequence: Synthetic oligonucleotide
gcugcuguccggugcaggg

SEQ ID NO: 2986431 - RNA, 19 nt, Artificial Sequence
  Description of Artificial Sequence: Synthetic oligonucleotide
gugaaaauagauauauauu

SEQ ID NO: 2986432 - RNA, 19 nt, Artificial Sequence
  Description of Artificial Sequence: Synthetic oligonucleotide
ugaguucgugguagaguuc

SEQ ID NO: 2986433 - RNA, 19 nt, Artificial Sequence
  Description of Artificial Sequence: Synthetic oligonucleotide
cuggaagucaccgucugga

SEQ ID NO: 2986434 - RNA, 19 nt, Artificial Sequence
  Description of Artificial Sequence: Synthetic oligonucleotide
gguaguuccaaaguggagu

SEQ ID NO: 2986435 - RNA, 19 nt, Artificial Sequence
  Description of Artificial Sequence: Synthetic oligonucleotide
gugguagaguuccgagugc

SEQ ID NO: 2986436 - RNA, 19 nt, Artificial Sequence
  Description of Artificial Sequence: Synthetic oligonucleotide
gaggacuggcuacgguagc

SEQ ID NO: 2986437 - RNA, 19 nt, Artificial Sequence
  Description of Artificial Sequence: Synthetic oligonucleotide
cugugcugagacaggccag

SEQ ID NO: 2986438 - RNA, 19 nt, Artificial Sequence
  Description of Artificial Sequence: Synthetic oligonucleotide
acucacaccucugucugga

SEQ ID NO: 2986439 - RNA, 19 nt, Artificial Sequence
  Description of Artificial Sequence: Synthetic oligonucleotide
caggcugaguccucugcac

SEQ ID NO: 2986440 - RNA, 19 nt, Artificial Sequence
  Description of Artificial Sequence: Synthetic oligonucleotide
guguggaacuucugguuga

SEQ ID NO: 2986441 - RNA, 19 nt, Artificial Sequence
  Description of Artificial Sequence: Synthetic oligonucleotide
acuggcuacgguagcgguc

SEQ ID NO: 2986442 - RNA, 19 nt, Artificial Sequence
  Description of Artificial Sequence: Synthetic oligonucleotide
cugccagucuggcugcccc

SEQ ID NO: 2986443 - RNA, 19 nt, Artificial Sequence
  Description of Artificial Sequence: Synthetic oligonucleotide
gguuucuccuugccugagg

SEQ ID NO: 2986444 - RNA, 19 nt, Artificial Sequence
  Description of Artificial Sequence: Synthetic oligonucleotide
cugaguccucugcaccucc

SEQ ID NO: 2986445 - RNA, 19 nt, Artificial Sequence
  Description of Artificial Sequence: Synthetic oligonucleotide
gaguccucugcaccuccug

SEQ ID NO: 2986446 - RNA, 19 nt, Artificial Sequence
  Description of Artificial Sequence: Synthetic oligonucleotide
cacucacaccucugucugg

SEQ ID NO: 2986447 - RNA, 19 nt, Artificial Sequence
  Description of Artificial Sequence: Synthetic oligonucleotide
ugaguccucugcaccuccu

SEQ ID NO: 2986448 - RNA, 19 nt, Artificial Sequence
  Description of Artificial Sequence: Synthetic oligonucleotide
cgugguagaguuccgagug

SEQ ID NO: 2986449 - RNA, 19 nt, Artificial Sequence
  Description of Artificial Sequence: Synthetic oligonucleotide
gcacucacaccucugucug

SEQ ID NO: 2986450 - RNA, 19 nt, Artificial Sequence
  Description of Artificial Sequence: Synthetic oligonucleotide
ugcagugggcaguccggug

SEQ ID NO: 2986451 - RNA, 19 nt, Artificial Sequence
  Description of Artificial Sequence: Synthetic oligonucleotide
ugguugaguucgugguaga

SEQ ID NO: 2986452 - RNA, 19 nt, Artificial Sequence
  Description of Artificial Sequence: Synthetic oligonucleotide
cugaggacuggcuacggua

SEQ ID NO: 2986453 - RNA, 19 nt, Artificial Sequence
  Description of Artificial Sequence: Synthetic oligonucleotide
acaggccagggcguucccc

SEQ ID NO: 2986454 - RNA, 19 nt, Artificial Sequence
  Description of Artificial Sequence: Synthetic oligonucleotide
uggcacucacaccucuguc

SEQ ID NO: 2986455 - RNA, 19 nt, Artificial Sequence
  Description of Artificial Sequence: Synthetic oligonucleotide
gcucugaugccuccugugc

SEQ ID NO: 2986456 - RNA, 19 nt, Artificial Sequence
  Description of Artificial Sequence: Synthetic oligonucleotide
agguucugugggcucccag

SEQ ID NO: 2986457 - RNA, 19 nt, Artificial Sequence
  Description of Artificial Sequence: Synthetic oligonucleotide
gcggucaaaaguguggaac

SEQ ID NO: 2986458 - RNA, 19 nt, Artificial Sequence
  Description of Artificial Sequence: Synthetic oligonucleotide
acuucugguugaguucgug

SEQ ID NO: 2986459 - RNA, 19 nt, Artificial Sequence
  Description of Artificial Sequence: Synthetic oligonucleotide
aaggugcuccagcucugau

SEQ ID NO: 2986460 - RNA, 19 nt, Artificial Sequence
  Description of Artificial Sequence: Synthetic oligonucleotide
gccuccugugcugagacag

SEQ ID NO: 2986461 - RNA, 19 nt, Artificial Sequence
  Description of Artificial Sequence: Synthetic oligonucleotide
uagaguuccgagugccguu

SEQ ID NO: 2986462 - RNA, 19 nt, Artificial Sequence
  Description of Artificial Sequence: Synthetic oligonucleotide
ugcagggccagccguucuc

SEQ ID NO: 2986463 - RNA, 19 nt, Artificial Sequence
  Description of Artificial Sequence: Synthetic oligonucleotide
cauggauuugaaggugcuc

SEQ ID NO: 2986464 - RNA, 19 nt, Artificial Sequence
  Description of Artificial Sequence: Synthetic oligonucleotide
gggccagccguucucgggg

SEQ ID NO: 2986465 - RNA, 19 nt, Artificial Sequence
  Description of Artificial Sequence: Synthetic oligonucleotide
cuugccugaggacuggcua

SEQ ID NO: 2986466 - RNA, 19 nt, Artificial Sequence
  Description of Artificial Sequence: Synthetic oligonucleotide
ugaugccuccugugcugag

SEQ ID NO: 2986467 - RNA, 19 nt, Artificial Sequence
  Description of Artificial Sequence: Synthetic oligonucleotide
gguagcggucaaaagugug

SEQ ID NO: 2986468 - RNA, 19 nt, Artificial Sequence
  Description of Artificial Sequence: Synthetic oligonucleotide
cuggcuacgguagcgguca

SEQ ID NO: 2986469 - RNA, 19 nt, Artificial Sequence
  Description of Artificial Sequence: Synthetic oligonucleotide
ugggcaguccgguguggca

SEQ ID NO: 2986470 - RNA, 19 nt, Artificial Sequence
  Description of Artificial Sequence: Synthetic oligonucleotide
gagugugaaaauagauaua

SEQ ID NO: 2986471 - RNA, 19 nt, Artificial Sequence
  Description of Artificial Sequence: Synthetic oligonucleotide
gguagaguuccgagugccg

SEQ ID NO: 2986472 - RNA, 19 nt, Artificial Sequence
  Description of Artificial Sequence: Synthetic oligonucleotide
uccugcccaggccucggga

SEQ ID NO: 2986473 - RNA, 19 nt, Artificial Sequence
  Description of Artificial Sequence: Synthetic oligonucleotide
ggauuugaaggugcuccag

SEQ ID NO: 2986474 - RNA, 19 nt, Artificial Sequence
  Description of Artificial Sequence: Synthetic oligonucleotide
gguugaguucgugguagag

SEQ ID NO: 2986475 - RNA, 19 nt, Artificial Sequence
  Description of Artificial Sequence: Synthetic oligonucleotide
uucugugcagugggcaguc

SEQ ID NO: 2986476 - RNA, 19 nt, Artificial Sequence
  Description of Artificial Sequence: Synthetic oligonucleotide
aguucgugguagaguuccg

SEQ ID NO: 2986477 - RNA, 19 nt, Artificial Sequence
  Description of Artificial Sequence: Synthetic oligonucleotide
cacaccucugucuggaagu

SEQ ID NO: 2986478 - RNA, 19 nt, Artificial Sequence
  Description of Artificial Sequence: Synthetic oligonucleotide
guugaguucgugguagagu

SEQ ID NO: 2986479 - RNA, 19 nt, Artificial Sequence
  Description of Artificial Sequence: Synthetic oligonucleotide
gcucccaggcugcuguccg

SEQ ID NO: 2986480 - RNA, 19 nt, Artificial Sequence
  Description of Artificial Sequence: Synthetic oligonucleotide
agcggucaaaaguguggaa

SEQ ID NO: 2986481 - RNA, 19 nt, Artificial Sequence
  Description of Artificial Sequence: Synthetic oligonucleotide
ccgucuggagguucugugg

SEQ ID NO: 2986482 - RNA, 19 nt, Artificial Sequence
  Description of Artificial Sequence: Synthetic oligonucleotide
ggacuggcuacgguagcgg

SEQ ID NO: 2986483 - RNA, 19 nt, Artificial Sequence
  Description of Artificial Sequence: Synthetic oligonucleotide
cgucuggagguucuguggg

SEQ ID NO: 2986484 - RNA, 19 nt, Artificial Sequence
  Description of Artificial Sequence: Synthetic oligonucleotide
cuggagguucugugggcuc

SEQ ID NO: 2986485 - RNA, 19 nt, Artificial Sequence
  Description of Artificial Sequence: Synthetic oligonucleotide
guucgugguagaguuccga

SEQ ID NO: 2986486 - RNA, 19 nt, Artificial Sequence
  Description of Artificial Sequence: Synthetic oligonucleotide
guuccaaaguggaguguga

SEQ ID NO: 2986487 - RNA, 19 nt, Artificial Sequence
  Description of Artificial Sequence: Synthetic oligonucleotide
uccagcucugaugccuccu

SEQ ID NO: 2986488 - RNA, 19 nt, Artificial Sequence
  Description of Artificial Sequence: Synthetic oligonucleotide
caaaguggagugugaaaau

SEQ ID NO: 2986489 - RNA, 19 nt, Artificial Sequence
  Description of Artificial Sequence: Synthetic oligonucleotide
cucccaggcugcuguccgg

SEQ ID NO: 2986490 - RNA, 19 nt, Artificial Sequence
  Description of Artificial Sequence: Synthetic oligonucleotide
uuccccagggcuggguuuc

SEQ ID NO: 2986491 - RNA, 19 nt, Artificial Sequence
  Description of Artificial Sequence: Synthetic oligonucleotide
gaaggugcuccagcucuga

SEQ ID NO: 2986492 - RNA, 19 nt, Artificial Sequence
  Description of Artificial Sequence: Synthetic oligonucleotide
ccugugcugagacaggcca

SEQ ID NO: 2986493 - RNA, 19 nt, Artificial Sequence
  Description of Artificial Sequence: Synthetic oligonucleotide
gugcugagacaggccaggg

SEQ ID NO: 2986494 - RNA, 19 nt, Artificial Sequence
  Description of Artificial Sequence: Synthetic oligonucleotide
agaguuccgagugccguuu

SEQ ID NO: 2986495 - RNA, 19 nt, Artificial Sequence
  Description of Artificial Sequence: Synthetic oligonucleotide
agugggcaguccggugugg

SEQ ID NO: 2986496 - RNA, 19 nt, Artificial Sequence
  Description of Artificial Sequence: Synthetic oligonucleotide
guagaguuccgagugccgu

SEQ ID NO: 2986497 - RNA, 19 nt, Artificial Sequence
  Description of Artificial Sequence: Synthetic oligonucleotide
caggccucgggaggggagg

SEQ ID NO: 2986498 - RNA, 19 nt, Artificial Sequence
  Description of Artificial Sequence: Synthetic oligonucleotide
gggcagugagcccaguguc

SEQ ID NO: 2986499 - RNA, 19 nt, Artificial Sequence
  Description of Artificial Sequence: Synthetic oligonucleotide
gaggggcgcuggcuccugg

SEQ ID NO: 2986500 - RNA, 19 nt, Artificial Sequence
  Description of Artificial Sequence: Synthetic oligonucleotide
agggcguuccccagggcug

SEQ ID NO: 2986501 - RNA, 19 nt, Artificial Sequence
  Description of Artificial Sequence: Synthetic oligonucleotide
aacuucugguugaguucgu

SEQ ID NO: 2986502 - RNA, 19 nt, Artificial Sequence
  Description of Artificial Sequence: Synthetic oligonucleotide
gcuacgguagcggucaaaa

SEQ ID NO: 2986503 - RNA, 19 nt, Artificial Sequence
  Description of Artificial Sequence: Synthetic oligonucleotide
gugugaaaauagauauaua

SEQ ID NO: 2986504 - RNA, 19 nt, Artificial Sequence
  Description of Artificial Sequence: Synthetic oligonucleotide
cagggccagccguucucgg

SEQ ID NO: 2986505 - RNA, 19 nt, Artificial Sequence
  Description of Artificial Sequence: Synthetic oligonucleotide
ucugugcagugggcagucc

SEQ ID NO: 2986506 - RNA, 19 nt, Artificial Sequence
  Description of Artificial Sequence: Synthetic oligonucleotide
ggcacucacaccucugucu

SEQ ID NO: 2986507 - RNA, 19 nt, Artificial Sequence
  Description of Artificial Sequence: Synthetic oligonucleotide
uccuugccugaggacuggc

SEQ ID NO: 2986508 - RNA, 19 nt, Artificial Sequence
  Description of Artificial Sequence: Synthetic oligonucleotide
ugagacaggccagggcguu

SEQ ID NO: 2986509 - RNA, 19 nt, Artificial Sequence
  Description of Artificial Sequence: Synthetic oligonucleotide
cuccuugccugaggacugg

SEQ ID NO: 2986510 - RNA, 19 nt, Artificial Sequence
  Description of Artificial Sequence: Synthetic oligonucleotide
gggcgcuggcuccugguag

SEQ ID NO: 2986511 - RNA, 19 nt, Artificial Sequence
  Description of Artificial Sequence: Synthetic oligonucleotide
gaguuccgagugccguuuc

SEQ ID NO: 2986512 - RNA, 19 nt, Artificial Sequence
  Description of Artificial Sequence: Synthetic oligonucleotide
ugccuccugugcugagaca

SEQ ID NO: 2986513 - RNA, 19 nt, Artificial Sequence
  Description of Artificial Sequence: Synthetic oligonucleotide
cucgggaggggaggggcgc

SEQ ID NO: 2986514 - RNA, 19 nt, Artificial Sequence
  Description of Artificial Sequence: Synthetic oligonucleotide
gacuggcuacgguagcggu

SEQ ID NO: 2986515 - RNA, 19 nt, Artificial Sequence
  Description of Artificial Sequence: Synthetic oligonucleotide
cugcuguccggugcagggc

SEQ ID NO: 2986516 - RNA, 19 nt, Artificial Sequence
  Description of Artificial Sequence: Synthetic oligonucleotide
cucugaugccuccugugcu

SEQ ID NO: 2986517 - RNA, 19 nt, Artificial Sequence
  Description of Artificial Sequence: Synthetic oligonucleotide
agccaggcugaguccucug

SEQ ID NO: 2986518 - RNA, 19 nt, Artificial Sequence
  Description of Artificial Sequence: Synthetic oligonucleotide
cagugagcccagugucaug

SEQ ID NO: 2986519 - RNA, 19 nt, Artificial Sequence
  Description of Artificial Sequence: Synthetic oligonucleotide
ucaccgucuggagguucug

SEQ ID NO: 2986520 - RNA, 19 nt, Artificial Sequence
  Description of Artificial Sequence: Synthetic oligonucleotide
accuccugcccaggccucg

SEQ ID NO: 2986521 - RNA, 19 nt, Artificial Sequence
  Description of Artificial Sequence: Synthetic oligonucleotide
gccaggcugaguccucugc

SEQ ID NO: 2986522 - RNA, 19 nt, Artificial Sequence
  Description of Artificial Sequence: Synthetic oligonucleotide
cuccugguaguuccaaagu

SEQ ID NO: 2986523 - RNA, 19 nt, Artificial Sequence
  Description of Artificial Sequence: Synthetic oligonucleotide
caggcugcuguccggugca

SEQ ID NO: 2986524 - RNA, 19 nt, Artificial Sequence
  Description of Artificial Sequence: Synthetic oligonucleotide
gugggcaguccgguguggc

SEQ ID NO: 2986525 - RNA, 19 nt, Artificial Sequence
  Description of Artificial Sequence: Synthetic oligonucleotide
ggcuggguuucuccuugcc

SEQ ID NO: 2986526 - RNA, 19 nt, Artificial Sequence
  Description of Artificial Sequence: Synthetic oligonucleotide
ccugcccaggccucgggag

SEQ ID NO: 2986527 - RNA, 19 nt, Artificial Sequence
  Description of Artificial Sequence: Synthetic oligonucleotide
ccaggcugcuguccggugc

SEQ ID NO: 2986528 - RNA, 19 nt, Artificial Sequence
  Description of Artificial Sequence: Synthetic oligonucleotide
ccguucucggggcuugggg

SEQ ID NO: 2986529 - RNA, 19 nt, Artificial Sequence
  Description of Artificial Sequence: Synthetic oligonucleotide
guccggugcagggccagcc

SEQ ID NO: 2986530 - RNA, 19 nt, Artificial Sequence
  Description of Artificial Sequence: Synthetic oligonucleotide
aggccucgggaggggaggg

SEQ ID NO: 2986531 - RNA, 19 nt, Artificial Sequence
  Description of Artificial Sequence: Synthetic oligonucleotide
ccuccugugcugagacagg

SEQ ID NO: 2986532 - RNA, 19 nt, Artificial Sequence
  Description of Artificial Sequence: Synthetic oligonucleotide
aggggcgcuggcuccuggu

SEQ ID NO: 2986533 - RNA, 19 nt, Artificial Sequence
  Description of Artificial Sequence: Synthetic oligonucleotide
cuccugcccaggccucggg

SEQ ID NO: 2986534 - RNA, 19 nt, Artificial Sequence
  Description of Artificial Sequence: Synthetic oligonucleotide
gcagggccagccguucucg

SEQ ID NO: 2986535 - RNA, 19 nt, Artificial Sequence
  Description of Artificial Sequence: Synthetic oligonucleotide
aagucaccgucuggagguu

SEQ ID NO: 2986536 - RNA, 19 nt, Artificial Sequence
  Description of Artificial Sequence: Synthetic oligonucleotide
cagggcguuccccagggcu

SEQ ID NO: 2986537 - RNA, 19 nt, Artificial Sequence
  Description of Artificial Sequence: Synthetic oligonucleotide
ccucugucuggaagucacc

SEQ ID NO: 2986538 - RNA, 19 nt, Artificial Sequence
  Description of Artificial Sequence: Synthetic oligonucleotide
uguccggugcagggccagc

SEQ ID NO: 2986539 - RNA, 19 nt, Artificial Sequence
  Description of Artificial Sequence: Synthetic oligonucleotide
ggccagggcguuccccagg

SEQ ID NO: 2986540 - RNA, 19 nt, Artificial Sequence
  Description of Artificial Sequence: Synthetic oligonucleotide
cugaugccuccugugcuga

SEQ ID NO: 2986541 - RNA, 19 nt, Artificial Sequence
  Description of Artificial Sequence: Synthetic oligonucleotide
gggcaguccgguguggcac

SEQ ID NO: 2986542 - RNA, 19 nt, Artificial Sequence
  Description of Artificial Sequence: Synthetic oligonucleotide
ugugggcucccaggcugcu

SEQ ID NO: 2986543 - RNA, 19 nt, Artificial Sequence
  Description of Artificial Sequence: Synthetic oligonucleotide
ggggcagugagcccagugu

SEQ ID NO: 2986544 - RNA, 19 nt, Artificial Sequence
  Description of Artificial Sequence: Synthetic oligonucleotide
gugcuccagcucugaugcc

SEQ ID NO: 2986545 - RNA, 19 nt, Artificial Sequence
  Description of Artificial Sequence: Synthetic oligonucleotide
ccagcucugaugccuccug

SEQ ID NO: 2986546 - RNA, 19 nt, Artificial Sequence
  Description of Artificial Sequence: Synthetic oligonucleotide
cuguccggugcagggccag

SEQ ID NO: 2986547 - RNA, 19 nt, Artificial Sequence
  Description of Artificial Sequence: Synthetic oligonucleotide
gugagcccagugucaugga

SEQ ID NO: 2986548 - RNA, 19 nt, Artificial Sequence
  Description of Artificial Sequence: Synthetic oligonucleotide
gcagugggcaguccggugu

SEQ ID NO: 2986549 - RNA, 19 nt, Artificial Sequence
  Description of Artificial Sequence: Synthetic oligonucleotide
ggcagugagcccaguguca

SEQ ID NO: 2986550 - RNA, 19 nt, Artificial Sequence
  Description of Artificial Sequence: Synthetic oligonucleotide
gagcccagugucauggauu

SEQ ID NO: 2986551 - RNA, 19 nt, Artificial Sequence
  Description of Artificial Sequence: Synthetic oligonucleotide
cuggcuccugguaguucca

SEQ ID NO: 2986552 - RNA, 19 nt, Artificial Sequence
  Description of Artificial Sequence: Synthetic oligonucleotide
cugagacaggccagggcgu

SEQ ID NO: 2986553 - RNA, 19 nt, Artificial Sequence
  Description of Artificial Sequence: Synthetic oligonucleotide
ggcugaguccucugcaccu

SEQ ID NO: 2986554 - RNA, 19 nt, Artificial Sequence
  Description of Artificial Sequence: Synthetic oligonucleotide
gcuggguuucuccuugccu

SEQ ID NO: 2986555 - RNA, 19 nt, Artificial Sequence
  Description of Artificial Sequence: Synthetic oligonucleotide
gggcguuccccagggcugg

SEQ ID NO: 2986556 - RNA, 19 nt, Artificial Sequence
  Description of Artificial Sequence: Synthetic oligonucleotide
agccguucucggggcuugg

SEQ ID NO: 2986557 - RNA, 19 nt, Artificial Sequence
  Description of Artificial Sequence: Synthetic oligonucleotide
ggguuucuccuugccugag

SEQ ID NO: 2986558 - RNA, 19 nt, Artificial Sequence
  Description of Artificial Sequence: Synthetic oligonucleotide
ggagguucugugggcuccc

SEQ ID NO: 2986559 - RNA, 19 nt, Artificial Sequence
  Description of Artificial Sequence: Synthetic oligonucleotide
ggcugcuguccggugcagg

SEQ ID NO: 2986560 - RNA, 19 nt, Artificial Sequence
  Description of Artificial Sequence: Synthetic oligonucleotide
cagccguucucggggcuug

SEQ ID NO: 2986561 - RNA, 19 nt, Artificial Sequence
  Description of Artificial Sequence: Synthetic oligonucleotide
ucgggaggggaggggcgcu

SEQ ID NO: 2986562 - RNA, 19 nt, Artificial Sequence
  Description of Artificial Sequence: Synthetic oligonucleotide
ccaggcugaguccucugca

SEQ ID NO: 2986563 - RNA, 19 nt, Artificial Sequence
  Description of Artificial Sequence: Synthetic oligonucleotide
ggccagccguucucggggc

SEQ ID NO: 2986564 - RNA, 19 nt, Artificial Sequence
  Description of Artificial Sequence: Synthetic oligonucleotide
cucacaccucugucuggaa

SEQ ID NO: 2986565 - RNA, 19 nt, Artificial Sequence
  Description of Artificial Sequence: Synthetic oligonucleotide
ccgguguggcacucacacc

SEQ ID NO: 2986566 - RNA, 19 nt, Artificial Sequence
  Description of Artificial Sequence: Synthetic oligonucleotide
uggcuacgguagcggucaa

SEQ ID NO: 2986567 - RNA, 19 nt, Artificial Sequence
  Description of Artificial Sequence: Synthetic oligonucleotide
gccugaggacuggcuacgg

SEQ ID NO: 2986568 - RNA, 19 nt, Artificial Sequence
  Description of Artificial Sequence: Synthetic oligonucleotide
gagguucugugggcuccca

SEQ ID NO: 2986569 - RNA, 19 nt, Artificial Sequence
  Description of Artificial Sequence: Synthetic oligonucleotide
ggaggggaggggcgcuggc

SEQ ID NO: 2986570 - RNA, 19 nt, Artificial Sequence
  Description of Artificial Sequence: Synthetic oligonucleotide
gggcuggguuucuccuugc

SEQ ID NO: 2986571 - RNA, 19 nt, Artificial Sequence
  Description of Artificial Sequence: Synthetic oligonucleotide
gccucgggaggggaggggc

SEQ ID NO: 2986572 - RNA, 19 nt, Artificial Sequence
  Description of Artificial Sequence: Synthetic oligonucleotide
ccaggccucgggaggggag

SEQ ID NO: 2986573 - RNA, 19 nt, Artificial Sequence
  Description of Artificial Sequence: Synthetic oligonucleotide
cgguguggcacucacaccu

SEQ ID NO: 2986574 - RNA, 19 nt, Artificial Sequence
  Description of Artificial Sequence: Synthetic oligonucleotide
ggcuccugguaguuccaaa

SEQ ID NO: 2986575 - RNA, 19 nt, Artificial Sequence
  Description of Artificial Sequence: Synthetic oligonucleotide
ggcucccaggcugcugucc

SEQ ID NO: 2986576 - RNA, 19 nt, Artificial Sequence
  Description of Artificial Sequence: Synthetic oligonucleotide
gguguggcacucacaccuc

SEQ ID NO: 2986577 - RNA, 19 nt, Artificial Sequence
  Description of Artificial Sequence: Synthetic oligonucleotide
ccagugucauggauuugaa

SEQ ID NO: 2986578 - RNA, 19 nt, Artificial Sequence
  Description of Artificial Sequence: Synthetic oligonucleotide
gcugaguccucugcaccuc

SEQ ID NO: 2986579 - RNA, 19 nt, Artificial Sequence
  Description of Artificial Sequence: Synthetic oligonucleotide
cggucaaaaguguggaacu

SEQ ID NO: 2986580 - RNA, 19 nt, Artificial Sequence
  Description of Artificial Sequence: Synthetic oligonucleotide
ggugcagggccagccguuc

SEQ ID NO: 2986581 - RNA, 19 nt, Artificial Sequence
  Description of Artificial Sequence: Synthetic oligonucleotide
gugggcucccaggcugcug

SEQ ID NO: 2986582 - RNA, 19 nt, Artificial Sequence
  Description of Artificial Sequence: Synthetic oligonucleotide
gccguucucggggcuuggg

SEQ ID NO: 2986583 - RNA, 19 nt, Artificial Sequence
  Description of Artificial Sequence: Synthetic oligonucleotide
ggucaaaaguguggaacuu

SEQ ID NO: 2986584 - RNA, 19 nt, Artificial Sequence
  Description of Artificial Sequence: Synthetic oligonucleotide
gaggggaggggcgcuggcu

SEQ ID NO: 2986585 - RNA, 19 nt, Artificial Sequence
  Description of Artificial Sequence: Synthetic oligonucleotide
gcuccagcucugaugccuc

SEQ ID NO: 2986586 - RNA, 19 nt, Artificial Sequence
  Description of Artificial Sequence: Synthetic oligonucleotide
guuccccagggcuggguuu

SEQ ID NO: 2986587 - RNA, 19 nt, Artificial Sequence
  Description of Artificial Sequence: Synthetic oligonucleotide
uccccagggcuggguuucu

SEQ ID NO: 2986588 - RNA, 19 nt, Artificial Sequence
  Description of Artificial Sequence: Synthetic oligonucleotide
cagcucugaugccuccugu

SEQ ID NO: 2986589 - RNA, 19 nt, Artificial Sequence
  Description of Artificial Sequence: Synthetic oligonucleotide
ccccagccaggcugagucc

SEQ ID NO: 2986590 - RNA, 19 nt, Artificial Sequence
  Description of Artificial Sequence: Synthetic oligonucleotide
ggcgcuggcuccugguagu

SEQ ID NO: 2986591 - RNA, 19 nt, Artificial Sequence
  Description of Artificial Sequence: Synthetic oligonucleotide
guggaacuucugguugagu

SEQ ID NO: 2986592 - RNA, 19 nt, Artificial Sequence
  Description of Artificial Sequence: Synthetic oligonucleotide
guccgguguggcacucaca

SEQ ID NO: 2986593 - RNA, 19 nt, Artificial Sequence
  Description of Artificial Sequence: Synthetic oligonucleotide
gugcagugggcaguccggu

SEQ ID NO: 2986594 - RNA, 19 nt, Artificial Sequence
  Description of Artificial Sequence: Synthetic oligonucleotide
ccugccagucuggcugccc

SEQ ID NO: 2986595 - RNA, 19 nt, Artificial Sequence
  Description of Artificial Sequence: Synthetic oligonucleotide
ggccucgggaggggagggg

SEQ ID NO: 2986596 - RNA, 19 nt, Artificial Sequence
  Description of Artificial Sequence: Synthetic oligonucleotide
ccagccaggcugaguccuc

SEQ ID NO: 2986597 - RNA, 19 nt, Artificial Sequence
  Description of Artificial Sequence: Synthetic oligonucleotide
gcagugagcccagugucau

SEQ ID NO: 2986598 - RNA, 19 nt, Artificial Sequence
  Description of Artificial Sequence: Synthetic oligonucleotide
gugcagggccagccguucu

SEQ ID NO: 2986599 - RNA, 19 nt, Artificial Sequence
  Description of Artificial Sequence: Synthetic oligonucleotide
ggcaguccgguguggcacu

SEQ ID NO: 2986600 - RNA, 19 nt, Artificial Sequence
  Description of Artificial Sequence: Synthetic oligonucleotide
ccuccugcccaggccucgg

SEQ ID NO: 2986601 - RNA, 19 nt, Artificial Sequence
  Description of Artificial Sequence: Synthetic oligonucleotide
ggcguuccccagggcuggg

SEQ ID NO: 2986602 - RNA, 19 nt, Artificial Sequence
  Description of Artificial Sequence: Synthetic oligonucleotide
cccaggcugcuguccggug

SEQ ID NO: 2986603 - RNA, 19 nt, Artificial Sequence
  Description of Artificial Sequence: Synthetic oligonucleotide
caguccgguguggcacuca

SEQ ID NO: 2986604 - RNA, 19 nt, Artificial Sequence
  Description of Artificial Sequence: Synthetic oligonucleotide
ccagggcuggguuucuccu

SEQ ID NO: 2986605 - RNA, 19 nt, Artificial Sequence
  Description of Artificial Sequence: Synthetic oligonucleotide
ggggcgcuggcuccuggua

SEQ ID NO: 2986606 - RNA, 19 nt, Artificial Sequence
  Description of Artificial Sequence: Synthetic oligonucleotide
ccagggcguuccccagggc

SEQ ID NO: 2986607 - RNA, 19 nt, Artificial Sequence
  Description of Artificial Sequence: Synthetic oligonucleotide
caccgucuggagguucugu

SEQ ID NO: 2986608 - RNA, 19 nt, Artificial Sequence
  Description of Artificial Sequence: Synthetic oligonucleotide
gcccagugucauggauuug

SEQ ID NO: 2986609 - RNA, 19 nt, Artificial Sequence
  Description of Artificial Sequence: Synthetic oligonucleotide
ccuugccugaggacuggcu

SEQ ID NO: 2986610 - RNA, 19 nt, Artificial Sequence
  Description of Artificial Sequence: Synthetic oligonucleotide
ggaggggcgcuggcuccug

SEQ ID NO: 2986611 - RNA, 19 nt, Artificial Sequence
  Description of Artificial Sequence: Synthetic oligonucleotide
ggcuacgguagcggucaaa

SEQ ID NO: 2986612 - RNA, 19 nt, Artificial Sequence
  Description of Artificial Sequence: Synthetic oligonucleotide
gcccaggccucgggagggg

SEQ ID NO: 2986613 - RNA, 19 nt, Artificial Sequence
  Description of Artificial Sequence: Synthetic oligonucleotide
gcuguccggugcagggcca

SEQ ID NO: 2986614 - RNA, 19 nt, Artificial Sequence
  Description of Artificial Sequence: Synthetic oligonucleotide
ccugaggacuggcuacggu

SEQ ID NO: 2986615 - RNA, 19 nt, Artificial Sequence
  Description of Artificial Sequence: Synthetic oligonucleotide
gggcucccaggcugcuguc

SEQ ID NO: 2986616 - RNA, 19 nt, Artificial Sequence
  Description of Artificial Sequence: Synthetic oligonucleotide
gcaguccgguguggcacuc

SEQ ID NO: 2986617 - RNA, 19 nt, Artificial Sequence
  Description of Artificial Sequence: Synthetic oligonucleotide
cccagccaggcugaguccu

SEQ ID NO: 2986618 - RNA, 19 nt, Artificial Sequence
  Description of Artificial Sequence: Synthetic oligonucleotide
cgguagcggucaaaagugu

SEQ ID NO: 2986619 - RNA, 19 nt, Artificial Sequence
  Description of Artificial Sequence: Synthetic oligonucleotide
ccggugcagggccagccgu

SEQ ID NO: 2986620 - RNA, 19 nt, Artificial Sequence
  Description of Artificial Sequence: Synthetic oligonucleotide
gccagccguucucggggcu

SEQ ID NO: 2986621 - RNA, 19 nt, Artificial Sequence
  Description of Artificial Sequence: Synthetic oligonucleotide
gggaggggcgcuggcuccu

SEQ ID NO: 2986622 - RNA, 19 nt, Artificial Sequence
  Description of Artificial Sequence: Synthetic oligonucleotide
cccaggccucgggagggga

SEQ ID NO: 2986623 - RNA, 19 nt, Artificial Sequence
  Description of Artificial Sequence: Synthetic oligonucleotide
cguuccccagggcuggguu

SEQ ID NO: 2986624 - RNA, 19 nt, Artificial Sequence
  Description of Artificial Sequence: Synthetic oligonucleotide
gcguuccccagggcugggu

SEQ ID NO: 2986625 - RNA, 19 nt, Artificial Sequence
  Description of Artificial Sequence: Synthetic oligonucleotide
ccagccguucucggggcuu

SEQ ID NO: 2986626 - RNA, 19 nt, Artificial Sequence
  Description of Artificial Sequence: Synthetic oligonucleotide
gcgcuggcuccugguaguu

SEQ ID NO: 2986627 - RNA, 19 nt, Artificial Sequence
  Description of Artificial Sequence: Synthetic oligonucleotide
cggugcagggccagccguu

SEQ ID NO: 2986628 - RNA, 19 nt, Artificial Sequence
  Description of Artificial Sequence: Synthetic oligonucleotide
uuauuugacauucagcagg

SEQ ID NO: 2986629 - RNA, 19 nt, Artificial Sequence
  Description of Artificial Sequence: Synthetic oligonucleotide
ugugguaacaggcacauag

SEQ ID NO: 2986630 - RNA, 19 nt, Artificial Sequence
  Description of Artificial Sequence: Synthetic oligonucleotide
aauguguacagcuuguuug

SEQ ID NO: 2986631 - RNA, 19 nt, Artificial Sequence
  Description of Artificial Sequence: Synthetic oligonucleotide
agcagguuaguucucaucc

SEQ ID NO: 2986632 - RNA, 19 nt, Artificial Sequence
  Description of Artificial Sequence: Synthetic oligonucleotide
uuugaaugugguaacaggc

SEQ ID NO: 2986633 - RNA, 19 nt, Artificial Sequence
  Description of Artificial Sequence: Synthetic oligonucleotide
uuaguucucauccacguug

SEQ ID NO: 2986634 - RNA, 19 nt, Artificial Sequence
  Description of Artificial Sequence: Synthetic oligonucleotide
uuuugaaugugguaacagg

SEQ ID NO: 2986635 - RNA, 19 nt, Artificial Sequence
  Description of Artificial Sequence: Synthetic oligonucleotide
ucuucauuacguuuucugg

SEQ ID NO: 2986636 - RNA, 19 nt, Artificial Sequence
  Description of Artificial Sequence: Synthetic oligonucleotide
aacuuuauuugacauucag

SEQ ID NO: 2986637 - RNA, 19 nt, Artificial Sequence
  Description of Artificial Sequence: Synthetic oligonucleotide
uugacauucagcagguuag

SEQ ID NO: 2986638 - RNA, 19 nt, Artificial Sequence
  Description of Artificial Sequence: Synthetic oligonucleotide
ucuggacaaacguacacgg

SEQ ID NO: 2986639 - RNA, 19 nt, Artificial Sequence
  Description of Artificial Sequence: Synthetic oligonucleotide
auuccuuauuccuuuuggc

SEQ ID NO: 2986640 - RNA, 19 nt, Artificial Sequence
  Description of Artificial Sequence: Synthetic oligonucleotide
uaucaaugcgcacauccgg

SEQ ID NO: 2986641 - RNA, 19 nt, Artificial Sequence
  Description of Artificial Sequence: Synthetic oligonucleotide
uauggaacauuccuuauuc

SEQ ID NO: 2986642 - RNA, 19 nt, Artificial Sequence
  Description of Artificial Sequence: Synthetic oligonucleotide
aagcccacgccauggaugc

SEQ ID NO: 2986643 - RNA, 19 nt, Artificial Sequence
  Description of Artificial Sequence: Synthetic oligonucleotide
aaugcgcacauccggaguc

SEQ ID NO: 2986644 - RNA, 19 nt, Artificial Sequence
  Description of Artificial Sequence: Synthetic oligonucleotide
uuuauuugacauucagcag

SEQ ID NO: 2986645 - RNA, 19 nt, Artificial Sequence
  Description of Artificial Sequence: Synthetic oligonucleotide
uccuuauuccuuuuggccc

SEQ ID NO: 2986646 - RNA, 19 nt, Artificial Sequence
  Description of Artificial Sequence: Synthetic oligonucleotide
uacguuuucuggacaaacg

SEQ ID NO: 2986647 - RNA, 19 nt, Artificial Sequence
  Description of Artificial Sequence: Synthetic oligonucleotide
caaacguacacggauacgg

SEQ ID NO: 2986648 - RNA, 19 nt, Artificial Sequence
  Description of Artificial Sequence: Synthetic oligonucleotide
acuuuauuugacauucagc

SEQ ID NO: 2986649 - RNA, 19 nt, Artificial Sequence
  Description of Artificial Sequence: Synthetic oligonucleotide
cuucauggcaaauuuccgg

SEQ ID NO: 2986650 - RNA, 19 nt, Artificial Sequence
  Description of Artificial Sequence: Synthetic oligonucleotide
uguacagcuuguuugguga

SEQ ID NO: 2986651 - RNA, 19 nt, Artificial Sequence
  Description of Artificial Sequence: Synthetic oligonucleotide
uuccuuauuccuuuuggcc

SEQ ID NO: 2986652 - RNA, 19 nt, Artificial Sequence
  Description of Artificial Sequence: Synthetic oligonucleotide
uuccggauuucuuugagug

SEQ ID NO: 2986653 - RNA, 19 nt, Artificial Sequence
  Description of Artificial Sequence: Synthetic oligonucleotide
uacgguauggaacauuccu

SEQ ID NO: 2986654 - RNA, 19 nt, Artificial Sequence
  Description of Artificial Sequence: Synthetic oligonucleotide
uuugacauucagcagguua

SEQ ID NO: 2986655 - RNA, 19 nt, Artificial Sequence
  Description of Artificial Sequence: Synthetic oligonucleotide
uagguuaccaauguguaca

SEQ ID NO: 2986656 - RNA, 19 nt, Artificial Sequence
  Description of Artificial Sequence: Synthetic oligonucleotide
auguugaugguguauucuc

SEQ ID NO: 2986657 - RNA, 19 nt, Artificial Sequence
  Description of Artificial Sequence: Synthetic oligonucleotide
guccccaucuccuucaugg

SEQ ID NO: 2986658 - RNA, 19 nt, Artificial Sequence
  Description of Artificial Sequence: Synthetic oligonucleotide
auagguuaccaauguguac

SEQ ID NO: 2986659 - RNA, 19 nt, Artificial Sequence
  Description of Artificial Sequence: Synthetic oligonucleotide
ugagccugguaucaaugcg

SEQ ID NO: 2986660 - RNA, 19 nt, Artificial Sequence
  Description of Artificial Sequence: Synthetic oligonucleotide
uugugaauguugauggugu

SEQ ID NO: 2986661 - RNA, 19 nt, Artificial Sequence
  Description of Artificial Sequence: Synthetic oligonucleotide
uugaaugugguaacaggca

SEQ ID NO: 2986662 - RNA, 19 nt, Artificial Sequence
  Description of Artificial Sequence: Synthetic oligonucleotide
ugaaugugguaacaggcac

SEQ ID NO: 2986663 - RNA, 19 nt, Artificial Sequence
  Description of Artificial Sequence: Synthetic oligonucleotide
auguguacagcuuguuugg

SEQ ID NO: 2986664 - RNA, 19 nt, Artificial Sequence
  Description of Artificial Sequence: Synthetic oligonucleotide
gguaucaaugcgcacaucc

SEQ ID NO: 2986665 - RNA, 19 nt, Artificial Sequence
  Description of Artificial Sequence: Synthetic oligonucleotide
aucuucauuacguuuucug

SEQ ID NO: 2986666 - RNA, 19 nt, Artificial Sequence
  Description of Artificial Sequence: Synthetic oligonucleotide
guugaugguguauucucgg

SEQ ID NO: 2986667 - RNA, 19 nt, Artificial Sequence
  Description of Artificial Sequence: Synthetic oligonucleotide
uauuugacauucagcaggu

SEQ ID NO: 2986668 - RNA, 19 nt, Artificial Sequence
  Description of Artificial Sequence: Synthetic oligonucleotide
guaacaggcacauagguua

SEQ ID NO: 2986669 - RNA, 19 nt, Artificial Sequence
  Description of Artificial Sequence: Synthetic oligonucleotide
uuugcgggagccauucucc

SEQ ID NO: 2986670 - RNA, 19 nt, Artificial Sequence
  Description of Artificial Sequence: Synthetic oligonucleotide
uucuggacaaacguacacg

SEQ ID NO: 2986671 - RNA, 19 nt, Artificial Sequence
  Description of Artificial Sequence: Synthetic oligonucleotide
auggaacauuccuuauucc

SEQ ID NO: 2986672 - RNA, 19 nt, Artificial Sequence
  Description of Artificial Sequence: Synthetic oligonucleotide
uucauuacguuuucuggac

SEQ ID NO: 2986673 - RNA, 19 nt, Artificial Sequence
  Description of Artificial Sequence: Synthetic oligonucleotide
uggacaaacguacacggau

SEQ ID NO: 2986674 - RNA, 19 nt, Artificial Sequence
  Description of Artificial Sequence: Synthetic oligonucleotide
uuuauugagccugguauca

SEQ ID NO: 2986675 - RNA, 19 nt, Artificial Sequence
  Description of Artificial Sequence: Synthetic oligonucleotide
ugaguccucaucuucauua

SEQ ID NO: 2986676 - RNA, 19 nt, Artificial Sequence
  Description of Artificial Sequence: Synthetic oligonucleotide
auuccuuuuggcccagacg

SEQ ID NO: 2986677 - RNA, 19 nt, Artificial Sequence
  Description of Artificial Sequence: Synthetic oligonucleotide
aauguugaugguguauucu

SEQ ID NO: 2986678 - RNA, 19 nt, Artificial Sequence
  Description of Artificial Sequence: Synthetic oligonucleotide
uaccaauguguacagcuug

SEQ ID NO: 2986679 - RNA, 19 nt, Artificial Sequence
  Description of Artificial Sequence: Synthetic oligonucleotide
acggauacgguauggaaca

SEQ ID NO: 2986680 - RNA, 19 nt, Artificial Sequence
  Description of Artificial Sequence: Synthetic oligonucleotide
uuucuuugagugcccgagg

SEQ ID NO: 2986681 - RNA, 19 nt, Artificial Sequence
  Description of Artificial Sequence: Synthetic oligonucleotide
uugaugguguauucucggg

SEQ ID NO: 2986682 - RNA, 19 nt, Artificial Sequence
  Description of Artificial Sequence: Synthetic oligonucleotide
uucuuugagugcccgagga

SEQ ID NO: 2986683 - RNA, 19 nt, Artificial Sequence
  Description of Artificial Sequence: Synthetic oligonucleotide
cagacggcuuuauugagcc

SEQ ID NO: 2986684 - RNA, 19 nt, Artificial Sequence
  Description of Artificial Sequence: Synthetic oligonucleotide
aauuuccggauuucuuuga

SEQ ID NO: 2986685 - RNA, 19 nt, Artificial Sequence
  Description of Artificial Sequence: Synthetic oligonucleotide
gauacgguauggaacauuc

SEQ ID NO: 2986686 - RNA, 19 nt, Artificial Sequence
  Description of Artificial Sequence: Synthetic oligonucleotide
ugguaacaggcacauaggu

SEQ ID NO: 2986687 - RNA, 19 nt, Artificial Sequence
  Description of Artificial Sequence: Synthetic oligonucleotide
uuuucuggacaaacguaca

SEQ ID NO: 2986688 - RNA, 19 nt, Artificial Sequence
  Description of Artificial Sequence: Synthetic oligonucleotide
auuucuuugagugcccgag

SEQ ID NO: 2986689 - RNA, 19 nt, Artificial Sequence
  Description of Artificial Sequence: Synthetic oligonucleotide
guuuucuggacaaacguac

SEQ ID NO: 2986690 - RNA, 19 nt, Artificial Sequence
  Description of Artificial Sequence: Synthetic oligonucleotide
agaacggcccuucuucuuc

SEQ ID NO: 2986691 - RNA, 19 nt, Artificial Sequence
  Description of Artificial Sequence: Synthetic oligonucleotide
ugaugguguauucucgggu

SEQ ID NO: 2986692 - RNA, 19 nt, Artificial Sequence
  Description of Artificial Sequence: Synthetic oligonucleotide
acauagguuaccaaugugu

SEQ ID NO: 2986693 - RNA, 19 nt, Artificial Sequence
  Description of Artificial Sequence: Synthetic oligonucleotide
gaugguguauucucggguc

SEQ ID NO: 2986694 - RNA, 19 nt, Artificial Sequence
  Description of Artificial Sequence: Synthetic oligonucleotide
gacaaacguacacggauac

SEQ ID NO: 2986695 - RNA, 19 nt, Artificial Sequence
  Description of Artificial Sequence: Synthetic oligonucleotide
uuugagugcccgaggagca

SEQ ID NO: 2986696 - RNA, 19 nt, Artificial Sequence
  Description of Artificial Sequence: Synthetic oligonucleotide
cuuuauugagccugguauc

SEQ ID NO: 2986697 - RNA, 19 nt, Artificial Sequence
  Description of Artificial Sequence: Synthetic oligonucleotide
acguuuucuggacaaacgu

SEQ ID NO: 2986698 - RNA, 19 nt, Artificial Sequence
  Description of Artificial Sequence: Synthetic oligonucleotide
aaugugguaacaggcacau

SEQ ID NO: 2986699 - RNA, 19 nt, Artificial Sequence
  Description of Artificial Sequence: Synthetic oligonucleotide
guauucucgggucaccacc

SEQ ID NO: 2986700 - RNA, 19 nt, Artificial Sequence
  Description of Artificial Sequence: Synthetic oligonucleotide
cuuugagugcccgaggagc

SEQ ID NO: 2986701 - RNA, 19 nt, Artificial Sequence
  Description of Artificial Sequence: Synthetic oligonucleotide
guuaccaauguguacagcu

SEQ ID NO: 2986702 - RNA, 19 nt, Artificial Sequence
  Description of Artificial Sequence: Synthetic oligonucleotide
uugagccugguaucaaugc

SEQ ID NO: 2986703 - RNA, 19 nt, Artificial Sequence
  Description of Artificial Sequence: Synthetic oligonucleotide
ucuuugagugcccgaggag

SEQ ID NO: 2986704 - RNA, 19 nt, Artificial Sequence
  Description of Artificial Sequence: Synthetic oligonucleotide
cacggauacgguauggaac

SEQ ID NO: 2986705 - RNA, 19 nt, Artificial Sequence
  Description of Artificial Sequence: Synthetic oligonucleotide
auuuccggauuucuuugag

SEQ ID NO: 2986706 - RNA, 19 nt, Artificial Sequence
  Description of Artificial Sequence: Synthetic oligonucleotide
cuucauuacguuuucugga

SEQ ID NO: 2986707 - RNA, 19 nt, Artificial Sequence
  Description of Artificial Sequence: Synthetic oligonucleotide
cuugugaauguugauggug

SEQ ID NO: 2986708 - RNA, 19 nt, Artificial Sequence
  Description of Artificial Sequence: Synthetic oligonucleotide
gacggcuuuauugagccug

SEQ ID NO: 2986709 - RNA, 19 nt, Artificial Sequence
  Description of Artificial Sequence: Synthetic oligonucleotide
ucuccuucauggcaaauuu

SEQ ID NO: 2986710 - RNA, 19 nt, Artificial Sequence
  Description of Artificial Sequence: Synthetic oligonucleotide
ucaaugcgcacauccggag

SEQ ID NO: 2986711 - RNA, 19 nt, Artificial Sequence
  Description of Artificial Sequence: Synthetic oligonucleotide
uucucgggucaccaccucg

SEQ ID NO: 2986712 - RNA, 19 nt, Artificial Sequence
  Description of Artificial Sequence: Synthetic oligonucleotide
ucauuacguuuucuggaca

SEQ ID NO: 2986713 - RNA, 19 nt, Artificial Sequence
  Description of Artificial Sequence: Synthetic oligonucleotide
auccggaguccccaucucc

SEQ ID NO: 2986714 - RNA, 19 nt, Artificial Sequence
  Description of Artificial Sequence: Synthetic oligonucleotide
cucguugauggcagaacgg

SEQ ID NO: 2986715 - RNA, 19 nt, Artificial Sequence
  Description of Artificial Sequence: Synthetic oligonucleotide
guugauggcagaacggccc

SEQ ID NO: 2986716 - RNA, 19 nt, Artificial Sequence
  Description of Artificial Sequence: Synthetic oligonucleotide
uggugaguccucaucuuca

SEQ ID NO: 2986717 - RNA, 19 nt, Artificial Sequence
  Description of Artificial Sequence: Synthetic oligonucleotide
uauucucgggucaccaccu

SEQ ID NO: 2986718 - RNA, 19 nt, Artificial Sequence
  Description of Artificial Sequence: Synthetic oligonucleotide
guaucaaugcgcacauccg

SEQ ID NO: 2986719 - RNA, 19 nt, Artificial Sequence
  Description of Artificial Sequence: Synthetic oligonucleotide
aggagcacgcuucuugaag

SEQ ID NO: 2986720 - RNA, 19 nt, Artificial Sequence
  Description of Artificial Sequence: Synthetic oligonucleotide
aguccucaucuucauuacg

SEQ ID NO: 2986721 - RNA, 19 nt, Artificial Sequence
  Description of Artificial Sequence: Synthetic oligonucleotide
uauuccuuuuggcccagac

SEQ ID NO: 2986722 - RNA, 19 nt, Artificial Sequence
  Description of Artificial Sequence: Synthetic oligonucleotide
ucguugauggcagaacggc

SEQ ID NO: 2986723 - RNA, 19 nt, Artificial Sequence
  Description of Artificial Sequence: Synthetic oligonucleotide
ugaauguugaugguguauu

SEQ ID NO: 2986724 - RNA, 19 nt, Artificial Sequence
  Description of Artificial Sequence: Synthetic oligonucleotide
aacaggcacauagguuacc

SEQ ID NO: 2986725 - RNA, 19 nt, Artificial Sequence
  Description of Artificial Sequence: Synthetic oligonucleotide
uuacguuuucuggacaaac

SEQ ID NO: 2986726 - RNA, 19 nt, Artificial Sequence
  Description of Artificial Sequence: Synthetic oligonucleotide
acagcuuguuuggugaguc

SEQ ID NO: 2986727 - RNA, 19 nt, Artificial Sequence
  Description of Artificial Sequence: Synthetic oligonucleotide
cuugaagcccacgccaugg

SEQ ID NO: 2986728 - RNA, 19 nt, Artificial Sequence
  Description of Artificial Sequence: Synthetic oligonucleotide
uaguucucauccacguuga

SEQ ID NO: 2986729 - RNA, 19 nt, Artificial Sequence
  Description of Artificial Sequence: Synthetic oligonucleotide
gaauguugaugguguauuc

SEQ ID NO: 2986730 - RNA, 19 nt, Artificial Sequence
  Description of Artificial Sequence: Synthetic oligonucleotide
aacguacacggauacggua

SEQ ID NO: 2986731 - RNA, 19 nt, Artificial Sequence
  Description of Artificial Sequence: Synthetic oligonucleotide
cucgccacccuucuuugcg

SEQ ID NO: 2986732 - RNA, 19 nt, Artificial Sequence
  Description of Artificial Sequence: Synthetic oligonucleotide
uuggugaguccucaucuuc

SEQ ID NO: 2986733 - RNA, 19 nt, Artificial Sequence
  Description of Artificial Sequence: Synthetic oligonucleotide
uuaccaauguguacagcuu

SEQ ID NO: 2986734 - RNA, 19 nt, Artificial Sequence
  Description of Artificial Sequence: Synthetic oligonucleotide
ucaucuucauuacguuuuc

SEQ ID NO: 2986735 - RNA, 19 nt, Artificial Sequence
  Description of Artificial Sequence: Synthetic oligonucleotide
aggcacauagguuaccaau

SEQ ID NO: 2986736 - RNA, 19 nt, Artificial Sequence
  Description of Artificial Sequence: Synthetic oligonucleotide
uccggauuucuuugagugc

SEQ ID NO: 2986737 - RNA, 19 nt, Artificial Sequence
  Description of Artificial Sequence: Synthetic oligonucleotide
ucauccacguugacugucu

SEQ ID NO: 2986738 - RNA, 19 nt, Artificial Sequence
  Description of Artificial Sequence: Synthetic oligonucleotide
cauucagcagguuaguucu

SEQ ID NO: 2986739 - RNA, 19 nt, Artificial Sequence
  Description of Artificial Sequence: Synthetic oligonucleotide
acauuccuuauuccuuuug

SEQ ID NO: 2986740 - RNA, 19 nt, Artificial Sequence
  Description of Artificial Sequence: Synthetic oligonucleotide
uuuccggauuucuuugagu

SEQ ID NO: 2986741 - RNA, 19 nt, Artificial Sequence
  Description of Artificial Sequence: Synthetic oligonucleotide
agguuaccaauguguacag

SEQ ID NO: 2986742 - RNA, 19 nt, Artificial Sequence
  Description of Artificial Sequence: Synthetic oligonucleotide
ccaacuuuauuugacauuc

SEQ ID NO: 2986743 - RNA, 19 nt, Artificial Sequence
  Description of Artificial Sequence: Synthetic oligonucleotide
uaacaggcacauagguuac

SEQ ID NO: 2986744 - RNA, 19 nt, Artificial Sequence
  Description of Artificial Sequence: Synthetic oligonucleotide
uccaacuuuauuugacauu

SEQ ID NO: 2986745 - RNA, 19 nt, Artificial Sequence
  Description of Artificial Sequence: Synthetic oligonucleotide
gagccugguaucaaugcgc

SEQ ID NO: 2986746 - RNA, 19 nt, Artificial Sequence
  Description of Artificial Sequence: Synthetic oligonucleotide
cagguuaguucucauccac

SEQ ID NO: 2986747 - RNA, 19 nt, Artificial Sequence
  Description of Artificial Sequence: Synthetic oligonucleotide
uguauucucgggucaccac

SEQ ID NO: 2986748 - RNA, 19 nt, Artificial Sequence
  Description of Artificial Sequence: Synthetic oligonucleotide
gaagcccacgccauggaug

SEQ ID NO: 2986749 - RNA, 19 nt, Artificial Sequence
  Description of Artificial Sequence: Synthetic oligonucleotide
auggcaaauuuccggauuu

SEQ ID NO: 2986750 - RNA, 19 nt, Artificial Sequence
  Description of Artificial Sequence: Synthetic oligonucleotide
gaugcgcuugugaauguug

SEQ ID NO: 2986751 - RNA, 19 nt, Artificial Sequence
  Description of Artificial Sequence: Synthetic oligonucleotide
cgcuugugaauguugaugg

SEQ ID NO: 2986752 - RNA, 19 nt, Artificial Sequence
  Description of Artificial Sequence: Synthetic oligonucleotide
cauagguuaccaaugugua

SEQ ID NO: 2986753 - RNA, 19 nt, Artificial Sequence
  Description of Artificial Sequence: Synthetic oligonucleotide
ucucgggucaccaccucgu

SEQ ID NO: 2986754 - RNA, 19 nt, Artificial Sequence
  Description of Artificial Sequence: Synthetic oligonucleotide
uccggaguccccaucuccu

SEQ ID NO: 2986755 - RNA, 19 nt, Artificial Sequence
  Description of Artificial Sequence: Synthetic oligonucleotide
acaaacguacacggauacg

SEQ ID NO: 2986756 - RNA, 19 nt, Artificial Sequence
  Description of Artificial Sequence: Synthetic oligonucleotide
uugacugucuguagauuuu

SEQ ID NO: 2986757 - RNA, 19 nt, Artificial Sequence
  Description of Artificial Sequence: Synthetic oligonucleotide
guguacagcuuguuuggug

SEQ ID NO: 2986758 - RNA, 19 nt, Artificial Sequence
  Description of Artificial Sequence: Synthetic oligonucleotide
agcacgcuucuugaagccc

SEQ ID NO: 2986759 - RNA, 19 nt, Artificial Sequence
  Description of Artificial Sequence: Synthetic oligonucleotide
cuuugcgggagccauucuc

SEQ ID NO: 2986760 - RNA, 19 nt, Artificial Sequence
  Description of Artificial Sequence: Synthetic oligonucleotide
ugagugcccgaggagcacg

SEQ ID NO: 2986761 - RNA, 19 nt, Artificial Sequence
  Description of Artificial Sequence: Synthetic oligonucleotide
ggagcacgcuucuugaagc

SEQ ID NO: 2986762 - RNA, 19 nt, Artificial Sequence
  Description of Artificial Sequence: Synthetic oligonucleotide
auacgguauggaacauucc

SEQ ID NO: 2986763 - RNA, 19 nt, Artificial Sequence
  Description of Artificial Sequence: Synthetic oligonucleotide
gaguccucaucuucauuac

SEQ ID NO: 2986764 - RNA, 19 nt, Artificial Sequence
  Description of Artificial Sequence: Synthetic oligonucleotide
aaacguacacggauacggu

SEQ ID NO: 2986765 - RNA, 19 nt, Artificial Sequence
  Description of Artificial Sequence: Synthetic oligonucleotide
uucagcagguuaguucuca

SEQ ID NO: 2986766 - RNA, 19 nt, Artificial Sequence
  Description of Artificial Sequence: Synthetic oligonucleotide
cacauagguuaccaaugug

SEQ ID NO: 2986767 - RNA, 19 nt, Artificial Sequence
  Description of Artificial Sequence: Synthetic oligonucleotide
agguuaguucucauccacg

SEQ ID NO: 2986768 - RNA, 19 nt, Artificial Sequence
  Description of Artificial Sequence: Synthetic oligonucleotide
ugcgggagccauucucccg

SEQ ID NO: 2986769 - RNA, 19 nt, Artificial Sequence
  Description of Artificial Sequence: Synthetic oligonucleotide
aacauuccuuauuccuuuu

SEQ ID NO: 2986770 - RNA, 19 nt, Artificial Sequence
  Description of Artificial Sequence: Synthetic oligonucleotide
gagcacgcuucuugaagcc

SEQ ID NO: 2986771 - RNA, 19 nt, Artificial Sequence
  Description of Artificial Sequence: Synthetic oligonucleotide
cauuacguuuucuggacaa

SEQ ID NO: 2986772 - RNA, 19 nt, Artificial Sequence
  Description of Artificial Sequence: Synthetic oligonucleotide
gaaugugguaacaggcaca

SEQ ID NO: 2986773 - RNA, 19 nt, Artificial Sequence
  Description of Artificial Sequence: Synthetic oligonucleotide
agcuuguuuggugaguccu

SEQ ID NO: 2986774 - RNA, 19 nt, Artificial Sequence
  Description of Artificial Sequence: Synthetic oligonucleotide
gauuucuuugagugcccga

SEQ ID NO: 2986775 - RNA, 19 nt, Artificial Sequence
  Description of Artificial Sequence: Synthetic oligonucleotide
augguguauucucggguca

SEQ ID NO: 2986776 - RNA, 19 nt, Artificial Sequence
  Description of Artificial Sequence: Synthetic oligonucleotide
acacggauacgguauggaa

SEQ ID NO: 2986777 - RNA, 19 nt, Artificial Sequence
  Description of Artificial Sequence: Synthetic oligonucleotide
uacacggauacgguaugga

SEQ ID NO: 2986778 - RNA, 19 nt, Artificial Sequence
  Description of Artificial Sequence: Synthetic oligonucleotide
guacagcuuguuuggugag

SEQ ID NO: 2986779 - RNA, 19 nt, Artificial Sequence
  Description of Artificial Sequence: Synthetic oligonucleotide
ggcccagacggcuuuauug

SEQ ID NO: 2986780 - RNA, 19 nt, Artificial Sequence
  Description of Artificial Sequence: Synthetic oligonucleotide
uucuucucgccacccuucu

SEQ ID NO: 2986781 - RNA, 19 nt, Artificial Sequence
  Description of Artificial Sequence: Synthetic oligonucleotide
ucgccacccuucuuugcgg

SEQ ID NO: 2986782 - RNA, 19 nt, Artificial Sequence
  Description of Artificial Sequence: Synthetic oligonucleotide
ccucguugauggcagaacg

SEQ ID NO: 2986783 - RNA, 19 nt, Artificial Sequence
  Description of Artificial Sequence: Synthetic oligonucleotide
uucucgccacccuucuuug

SEQ ID NO: 2986784 - RNA, 19 nt, Artificial Sequence
  Description of Artificial Sequence: Synthetic oligonucleotide
uuuggugaguccucaucuu

SEQ ID NO: 2986785 - RNA, 19 nt, Artificial Sequence
  Description of Artificial Sequence: Synthetic oligonucleotide
ugugaauguugauggugua

SEQ ID NO: 2986786 - RNA, 19 nt, Artificial Sequence
  Description of Artificial Sequence: Synthetic oligonucleotide
uucuuugcgggagccauuc

SEQ ID NO: 2986787 - RNA, 19 nt, Artificial Sequence
  Description of Artificial Sequence: Synthetic oligonucleotide
acguugacugucuguagau

SEQ ID NO: 2986788 - RNA, 19 nt, Artificial Sequence
  Description of Artificial Sequence: Synthetic oligonucleotide
accucguugauggcagaac

SEQ ID NO: 2986789 - RNA, 19 nt, Artificial Sequence
  Description of Artificial Sequence: Synthetic oligonucleotide
uugaagcccacgccaugga

SEQ ID NO: 2986790 - RNA, 19 nt, Artificial Sequence
  Description of Artificial Sequence: Synthetic oligonucleotide
gcuuuauugagccugguau

SEQ ID NO: 2986791 - RNA, 19 nt, Artificial Sequence
  Description of Artificial Sequence: Synthetic oligonucleotide
ccuucauggcaaauuuccg

SEQ ID NO: 2986792 - RNA, 19 nt, Artificial Sequence
  Description of Artificial Sequence: Synthetic oligonucleotide
cuucuucucgccacccuuc

SEQ ID NO: 2986793 - RNA, 19 nt, Artificial Sequence
  Description of Artificial Sequence: Synthetic oligonucleotide
aacggcccuucuucuucuc

SEQ ID NO: 2986794 - RNA, 19 nt, Artificial Sequence
  Description of Artificial Sequence: Synthetic oligonucleotide
acaggcacauagguuacca

SEQ ID NO: 2986795 - RNA, 19 nt, Artificial Sequence
  Description of Artificial Sequence: Synthetic oligonucleotide
ggcacauagguuaccaaug

SEQ ID NO: 2986796 - RNA, 19 nt, Artificial Sequence
  Description of Artificial Sequence: Synthetic oligonucleotide
aucaaugcgcacauccgga

SEQ ID NO: 2986797 - RNA, 19 nt, Artificial Sequence
  Description of Artificial Sequence: Synthetic oligonucleotide
ugaagcccacgccauggau

SEQ ID NO: 2986798 - RNA, 19 nt, Artificial Sequence
  Description of Artificial Sequence: Synthetic oligonucleotide
ugcccgaggagcacgcuuc

SEQ ID NO: 2986799 - RNA, 19 nt, Artificial Sequence
  Description of Artificial Sequence: Synthetic oligonucleotide
guacacggauacgguaugg

SEQ ID NO: 2986800 - RNA, 19 nt, Artificial Sequence
  Description of Artificial Sequence: Synthetic oligonucleotide
caguucuccaacuuuauuu

SEQ ID NO: 2986801 - RNA, 19 nt, Artificial Sequence
  Description of Artificial Sequence: Synthetic oligonucleotide
guugacugucuguagauuu

SEQ ID NO: 2986802 - RNA, 19 nt, Artificial Sequence
  Description of Artificial Sequence: Synthetic oligonucleotide
uugcgggagccauucuccc

SEQ ID NO: 2986803 - RNA, 19 nt, Artificial Sequence
  Description of Artificial Sequence: Synthetic oligonucleotide
ggcagaacggcccuucuuc

SEQ ID NO: 2986804 - RNA, 19 nt, Artificial Sequence
  Description of Artificial Sequence: Synthetic oligonucleotide
ccggauuucuuugagugcc

SEQ ID NO: 2986805 - RNA, 19 nt, Artificial Sequence
  Description of Artificial Sequence: Synthetic oligonucleotide
accaccucguugauggcag

SEQ ID NO: 2986806 - RNA, 19 nt, Artificial Sequence
  Description of Artificial Sequence: Synthetic oligonucleotide
cacguugacugucuguaga

SEQ ID NO: 2986807 - RNA, 19 nt, Artificial Sequence
  Description of Artificial Sequence: Synthetic oligonucleotide
uuauugagccugguaucaa

SEQ ID NO: 2986808 - RNA, 19 nt, Artificial Sequence
  Description of Artificial Sequence: Synthetic oligonucleotide
uuuuggcccagacggcuuu

SEQ ID NO: 2986809 - RNA, 19 nt, Artificial Sequence
  Description of Artificial Sequence: Synthetic oligonucleotide
auucucgggucaccaccuc

SEQ ID NO: 2986810 - RNA, 19 nt, Artificial Sequence
  Description of Artificial Sequence: Synthetic oligonucleotide
augcgcacauccggagucc

SEQ ID NO: 2986811 - RNA, 19 nt, Artificial Sequence
  Description of Artificial Sequence: Synthetic oligonucleotide
cacgccauggaugcgcuug

SEQ ID NO: 2986812 - RNA, 19 nt, Artificial Sequence
  Description of Artificial Sequence: Synthetic oligonucleotide
uguguacagcuuguuuggu

SEQ ID NO: 2986813 - RNA, 19 nt, Artificial Sequence
  Description of Artificial Sequence: Synthetic oligonucleotide
ggauuucuuugagugcccg

SEQ ID NO: 2986814 - RNA, 19 nt, Artificial Sequence
  Description of Artificial Sequence: Synthetic oligonucleotide
uccccaucuccuucauggc

SEQ ID NO: 2986815 - RNA, 19 nt, Artificial Sequence
  Description of Artificial Sequence: Synthetic oligonucleotide
auccacguugacugucugu

SEQ ID NO: 2986816 - RNA, 19 nt, Artificial Sequence
  Description of Artificial Sequence: Synthetic oligonucleotide
gcgggagccauucucccgg

SEQ ID NO: 2986817 - RNA, 19 nt, Artificial Sequence
  Description of Artificial Sequence: Synthetic oligonucleotide
ucagcagguuaguucucau

SEQ ID NO: 2986818 - RNA, 19 nt, Artificial Sequence
  Description of Artificial Sequence: Synthetic oligonucleotide
uacagcuuguuuggugagu

SEQ ID NO: 2986819 - RNA, 19 nt, Artificial Sequence
  Description of Artificial Sequence: Synthetic oligonucleotide
accaauguguacagcuugu

SEQ ID NO: 2986820 - RNA, 19 nt, Artificial Sequence
  Description of Artificial Sequence: Synthetic oligonucleotide
cagcuuguuuggugagucc

SEQ ID NO: 2986821 - RNA, 19 nt, Artificial Sequence
  Description of Artificial Sequence: Synthetic oligonucleotide
ucucauccacguugacugu

SEQ ID NO: 2986822 - RNA, 19 nt, Artificial Sequence
  Description of Artificial Sequence: Synthetic oligonucleotide
ugguguauucucgggucac

SEQ ID NO: 2986823 - RNA, 19 nt, Artificial Sequence
  Description of Artificial Sequence: Synthetic oligonucleotide
gauggcagaacggcccuuc

SEQ ID NO: 2986824 - RNA, 19 nt, Artificial Sequence
  Description of Artificial Sequence: Synthetic oligonucleotide
acguacacggauacgguau

SEQ ID NO: 2986825 - RNA, 19 nt, Artificial Sequence
  Description of Artificial Sequence: Synthetic oligonucleotide
acggcuuuauugagccugg

SEQ ID NO: 2986826 - RNA, 19 nt, Artificial Sequence
  Description of Artificial Sequence: Synthetic oligonucleotide
cuuguuuggugaguccuca

SEQ ID NO: 2986827 - RNA, 19 nt, Artificial Sequence
  Description of Artificial Sequence: Synthetic oligonucleotide
cagcagguuaguucucauc

SEQ ID NO: 2986828 - RNA, 19 nt, Artificial Sequence
  Description of Artificial Sequence: Synthetic oligonucleotide
aucuccuucauggcaaauu

SEQ ID NO: 2986829 - RNA, 19 nt, Artificial Sequence
  Description of Artificial Sequence: Synthetic oligonucleotide
ucucgccacccuucuuugc

SEQ ID NO: 2986830 - RNA, 19 nt, Artificial Sequence
  Description of Artificial Sequence: Synthetic oligonucleotide
ccagacggcuuuauugagc

SEQ ID NO: 2986831 - RNA, 19 nt, Artificial Sequence
  Description of Artificial Sequence: Synthetic oligonucleotide
gguuaguucucauccacgu

SEQ ID NO: 2986832 - RNA, 19 nt, Artificial Sequence
  Description of Artificial Sequence: Synthetic oligonucleotide
auuacguuuucuggacaaa

SEQ ID NO: 2986833 - RNA, 19 nt, Artificial Sequence
  Description of Artificial Sequence: Synthetic oligonucleotide
caacuuuauuugacauuca

SEQ ID NO: 2986834 - RNA, 19 nt, Artificial Sequence
  Description of Artificial Sequence: Synthetic oligonucleotide
ucuuugcgggagccauucu

SEQ ID NO: 2986835 - RNA, 19 nt, Artificial Sequence
  Description of Artificial Sequence: Synthetic oligonucleotide
augcgcuugugaauguuga

SEQ ID NO: 2986836 - RNA, 19 nt, Artificial Sequence
  Description of Artificial Sequence: Synthetic oligonucleotide
uggaugcgcuugugaaugu

SEQ ID NO: 2986837 - RNA, 19 nt, Artificial Sequence
  Description of Artificial Sequence: Synthetic oligonucleotide
uuguuuggugaguccucau

SEQ ID NO: 2986838 - RNA, 19 nt, Artificial Sequence
  Description of Artificial Sequence: Synthetic oligonucleotide
cucauccacguugacuguc

SEQ ID NO: 2986839 - RNA, 19 nt, Artificial Sequence
  Description of Artificial Sequence: Synthetic oligonucleotide
cuggacaaacguacacgga

SEQ ID NO: 2986840 - RNA, 19 nt, Artificial Sequence
  Description of Artificial Sequence: Synthetic oligonucleotide
agccugguaucaaugcgca

SEQ ID NO: 2986841 - RNA, 19 nt, Artificial Sequence
  Description of Artificial Sequence: Synthetic oligonucleotide
cuuauuccuuuuggcccag

SEQ ID NO: 2986842 - RNA, 19 nt, Artificial Sequence
  Description of Artificial Sequence: Synthetic oligonucleotide
guauggaacauuccuuauu

SEQ ID NO: 2986843 - RNA, 19 nt, Artificial Sequence
  Description of Artificial Sequence: Synthetic oligonucleotide
gcgcuugugaauguugaug

SEQ ID NO: 2986844 - RNA, 19 nt, Artificial Sequence
  Description of Artificial Sequence: Synthetic oligonucleotide
guguauucucgggucacca

SEQ ID NO: 2986845 - RNA, 19 nt, Artificial Sequence
  Description of Artificial Sequence: Synthetic oligonucleotide
auucagcagguuaguucuc

SEQ ID NO: 2986846 - RNA, 19 nt, Artificial Sequence
  Description of Artificial Sequence: Synthetic oligonucleotide
uggcaaauuuccggauuuc

SEQ ID NO: 2986847 - RNA, 19 nt, Artificial Sequence
  Description of Artificial Sequence: Synthetic oligonucleotide
acgguauggaacauuccuu

SEQ ID NO: 2986848 - RNA, 19 nt, Artificial Sequence
  Description of Artificial Sequence: Synthetic oligonucleotide
ccugguaucaaugcgcaca

SEQ ID NO: 2986849 - RNA, 19 nt, Artificial Sequence
  Description of Artificial Sequence: Synthetic oligonucleotide
aguccccaucuccuucaug

SEQ ID NO: 2986850 - RNA, 19 nt, Artificial Sequence
  Description of Artificial Sequence: Synthetic oligonucleotide
cacgcuucuugaagcccac

SEQ ID NO: 2986851 - RNA, 19 nt, Artificial Sequence
  Description of Artificial Sequence: Synthetic oligonucleotide
gcccagacggcuuuauuga

SEQ ID NO: 2986852 - RNA, 19 nt, Artificial Sequence
  Description of Artificial Sequence: Synthetic oligonucleotide
ugcgcacauccggaguccc

SEQ ID NO: 2986853 - RNA, 19 nt, Artificial Sequence
  Description of Artificial Sequence: Synthetic oligonucleotide
cuccaacuuuauuugacau

SEQ ID NO: 2986854 - RNA, 19 nt, Artificial Sequence
  Description of Artificial Sequence: Synthetic oligonucleotide
cacccuucuuugcgggagc

SEQ ID NO: 2986855 - RNA, 19 nt, Artificial Sequence
  Description of Artificial Sequence: Synthetic oligonucleotide
cauccacguugacugucug

SEQ ID NO: 2986856 - RNA, 19 nt, Artificial Sequence
  Description of Artificial Sequence: Synthetic oligonucleotide
ccuuauuccuuuuggccca

SEQ ID NO: 2986857 - RNA, 19 nt, Artificial Sequence
  Description of Artificial Sequence: Synthetic oligonucleotide
uggcagaacggcccuucuu

SEQ ID NO: 2986858 - RNA, 19 nt, Artificial Sequence
  Description of Artificial Sequence: Synthetic oligonucleotide
cguugauggcagaacggcc

SEQ ID NO: 2986859 - RNA, 19 nt, Artificial Sequence
  Description of Artificial Sequence: Synthetic oligonucleotide
gaggagcacgcuucuugaa

SEQ ID NO: 2986860 - RNA, 19 nt, Artificial Sequence
  Description of Artificial Sequence: Synthetic oligonucleotide
uugagugcccgaggagcac

SEQ ID NO: 2986861 - RNA, 19 nt, Artificial Sequence
  Description of Artificial Sequence: Synthetic oligonucleotide
acgccauggaugcgcuugu

SEQ ID NO: 2986862 - RNA, 19 nt, Artificial Sequence
  Description of Artificial Sequence: Synthetic oligonucleotide
agacggcuuuauugagccu

SEQ ID NO: 2986863 - RNA, 19 nt, Artificial Sequence
  Description of Artificial Sequence: Synthetic oligonucleotide
ccgaggagcacgcuucuug

SEQ ID NO: 2986864 - RNA, 19 nt, Artificial Sequence
  Description of Artificial Sequence: Synthetic oligonucleotide
ggaguccccaucuccuuca

SEQ ID NO: 2986865 - RNA, 19 nt, Artificial Sequence
  Description of Artificial Sequence: Synthetic oligonucleotide
gcagguuaguucucaucca

SEQ ID NO: 2986866 - RNA, 19 nt, Artificial Sequence
  Description of Artificial Sequence: Synthetic oligonucleotide
ucuucucgccacccuucuu

SEQ ID NO: 2986867 - RNA, 19 nt, Artificial Sequence
  Description of Artificial Sequence: Synthetic oligonucleotide
gguguauucucgggucacc

SEQ ID NO: 2986868 - RNA, 19 nt, Artificial Sequence
  Description of Artificial Sequence: Synthetic oligonucleotide
gagugcccgaggagcacgc

SEQ ID NO: 2986869 - RNA, 19 nt, Artificial Sequence
  Description of Artificial Sequence: Synthetic oligonucleotide
gguuaccaauguguacagc

SEQ ID NO: 2986870 - RNA, 19 nt, Artificial Sequence
  Description of Artificial Sequence: Synthetic oligonucleotide
uuauuccuuuuggcccaga

SEQ ID NO: 2986871 - RNA, 19 nt, Artificial Sequence
  Description of Artificial Sequence: Synthetic oligonucleotide
cccuucuucuucucgccac

SEQ ID NO: 2986872 - RNA, 19 nt, Artificial Sequence
  Description of Artificial Sequence: Synthetic oligonucleotide
ccauggaugcgcuugugaa

SEQ ID NO: 2986873 - RNA, 19 nt, Artificial Sequence
  Description of Artificial Sequence: Synthetic oligonucleotide
acgcuucuugaagcccacg

SEQ ID NO: 2986874 - RNA, 19 nt, Artificial Sequence
  Description of Artificial Sequence: Synthetic oligonucleotide
gcacauagguuaccaaugu

SEQ ID NO: 2986875 - RNA, 19 nt, Artificial Sequence
  Description of Artificial Sequence: Synthetic oligonucleotide
gaacggcccuucuucuucu

SEQ ID NO: 2986876 - RNA, 19 nt, Artificial Sequence
  Description of Artificial Sequence: Synthetic oligonucleotide
cauggaugcgcuugugaau

SEQ ID NO: 2986877 - RNA, 19 nt, Artificial Sequence
  Description of Artificial Sequence: Synthetic oligonucleotide
caauguguacagcuuguuu

SEQ ID NO: 2986878 - RNA, 19 nt, Artificial Sequence
  Description of Artificial Sequence: Synthetic oligonucleotide
cccagacggcuuuauugag

SEQ ID NO: 2986879 - RNA, 19 nt, Artificial Sequence
  Description of Artificial Sequence: Synthetic oligonucleotide
guuaguucucauccacguu

SEQ ID NO: 2986880 - RNA, 19 nt, Artificial Sequence
  Description of Artificial Sequence: Synthetic oligonucleotide
cuucucgccacccuucuuu

SEQ ID NO: 2986881 - RNA, 19 nt, Artificial Sequence
  Description of Artificial Sequence: Synthetic oligonucleotide
ggcuuuauugagccuggua

SEQ ID NO: 2986882 - RNA, 19 nt, Artificial Sequence
  Description of Artificial Sequence: Synthetic oligonucleotide
gugaauguugaugguguau

SEQ ID NO: 2986883 - RNA, 19 nt, Artificial Sequence
  Description of Artificial Sequence: Synthetic oligonucleotide
cugguaucaaugcgcacau

SEQ ID NO: 2986884 - RNA, 19 nt, Artificial Sequence
  Description of Artificial Sequence: Synthetic oligonucleotide
gccauggaugcgcuuguga

SEQ ID NO: 2986885 - RNA, 19 nt, Artificial Sequence
  Description of Artificial Sequence: Synthetic oligonucleotide
cauggcaaauuuccggauu

SEQ ID NO: 2986886 - RNA, 19 nt, Artificial Sequence
  Description of Artificial Sequence: Synthetic oligonucleotide
caccaccucguugauggca

SEQ ID NO: 2986887 - RNA, 19 nt, Artificial Sequence
  Description of Artificial Sequence: Synthetic oligonucleotide
caggcacauagguuaccaa

SEQ ID NO: 2986888 - RNA, 19 nt, Artificial Sequence
  Description of Artificial Sequence: Synthetic oligonucleotide
ggaacauuccuuauuccuu

SEQ ID NO: 2986889 - RNA, 19 nt, Artificial Sequence
  Description of Artificial Sequence: Synthetic oligonucleotide
uggcccagacggcuuuauu

SEQ ID NO: 2986890 - RNA, 19 nt, Artificial Sequence
  Description of Artificial Sequence: Synthetic oligonucleotide
ccacguugacugucuguag

SEQ ID NO: 2986891 - RNA, 19 nt, Artificial Sequence
  Description of Artificial Sequence: Synthetic oligonucleotide
ggacaaacguacacggaua

SEQ ID NO: 2986892 - RNA, 19 nt, Artificial Sequence
  Description of Artificial Sequence: Synthetic oligonucleotide
ggcaaauuuccggauuucu

SEQ ID NO: 2986893 - RNA, 19 nt, Artificial Sequence
  Description of Artificial Sequence: Synthetic oligonucleotide
gguauggaacauuccuuau

SEQ ID NO: 2986894 - RNA, 19 nt, Artificial Sequence
  Description of Artificial Sequence: Synthetic oligonucleotide
uuuggcccagacggcuuua

SEQ ID NO: 2986895 - RNA, 19 nt, Artificial Sequence
  Description of Artificial Sequence: Synthetic oligonucleotide
gacauucagcagguuaguu

SEQ ID NO: 2986896 - RNA, 19 nt, Artificial Sequence
  Description of Artificial Sequence: Synthetic oligonucleotide
auuugacauucagcagguu

SEQ ID NO: 2986897 - RNA, 19 nt, Artificial Sequence
  Description of Artificial Sequence: Synthetic oligonucleotide
gcacgcuucuugaagccca

SEQ ID NO: 2986898 - RNA, 19 nt, Artificial Sequence
  Description of Artificial Sequence: Synthetic oligonucleotide
caaugcgcacauccggagu

SEQ ID NO: 2986899 - RNA, 19 nt, Artificial Sequence
  Description of Artificial Sequence: Synthetic oligonucleotide
uuggcccagacggcuuuau

SEQ ID NO: 2986900 - RNA, 19 nt, Artificial Sequence
  Description of Artificial Sequence: Synthetic oligonucleotide
cguacacggauacgguaug

SEQ ID NO: 2986901 - RNA, 19 nt, Artificial Sequence
  Description of Artificial Sequence: Synthetic oligonucleotide
gguaacaggcacauagguu

SEQ ID NO: 2986902 - RNA, 19 nt, Artificial Sequence
  Description of Artificial Sequence: Synthetic oligonucleotide
gcuuguuuggugaguccuc

SEQ ID NO: 2986903 - RNA, 19 nt, Artificial Sequence
  Description of Artificial Sequence: Synthetic oligonucleotide
gcccacgccauggaugcgc

SEQ ID NO: 2986904 - RNA, 19 nt, Artificial Sequence
  Description of Artificial Sequence: Synthetic oligonucleotide
cguuuucuggacaaacgua

SEQ ID NO: 2986905 - RNA, 19 nt, Artificial Sequence
  Description of Artificial Sequence: Synthetic oligonucleotide
ugauggcagaacggcccuu

SEQ ID NO: 2986906 - RNA, 19 nt, Artificial Sequence
  Description of Artificial Sequence: Synthetic oligonucleotide
cggcccuucuucuucucgc

SEQ ID NO: 2986907 - RNA, 19 nt, Artificial Sequence
  Description of Artificial Sequence: Synthetic oligonucleotide
cgguauggaacauuccuua

SEQ ID NO: 2986908 - RNA, 19 nt, Artificial Sequence
  Description of Artificial Sequence: Synthetic oligonucleotide
ggugaguccucaucuucau

SEQ ID NO: 2986909 - RNA, 19 nt, Artificial Sequence
  Description of Artificial Sequence: Synthetic oligonucleotide
gcagaacggcccuucuucu

SEQ ID NO: 2986910 - RNA, 19 nt, Artificial Sequence
  Description of Artificial Sequence: Synthetic oligonucleotide
agugcccgaggagcacgcu

SEQ ID NO: 2986911 - RNA, 19 nt, Artificial Sequence
  Description of Artificial Sequence: Synthetic oligonucleotide
agcccacgccauggaugcg

SEQ ID NO: 2986912 - RNA, 19 nt, Artificial Sequence
  Description of Artificial Sequence: Synthetic oligonucleotide
caccucguugauggcagaa

SEQ ID NO: 2986913 - RNA, 19 nt, Artificial Sequence
  Description of Artificial Sequence: Synthetic oligonucleotide
cuuuuggcccagacggcuu

SEQ ID NO: 2986914 - RNA, 19 nt, Artificial Sequence
  Description of Artificial Sequence: Synthetic oligonucleotide
gcccuucuucuucucgcca

SEQ ID NO: 2986915 - RNA, 19 nt, Artificial Sequence
  Description of Artificial Sequence: Synthetic oligonucleotide
cgaggagcacgcuucuuga

SEQ ID NO: 2986916 - RNA, 19 nt, Artificial Sequence
  Description of Artificial Sequence: Synthetic oligonucleotide
cgccacccuucuuugcggg

SEQ ID NO: 2986917 - RNA, 19 nt, Artificial Sequence
  Description of Artificial Sequence: Synthetic oligonucleotide
gugaguccucaucuucauu

SEQ ID NO: 2986918 - RNA, 19 nt, Artificial Sequence
  Description of Artificial Sequence: Synthetic oligonucleotide
augugguaacaggcacaua

SEQ ID NO: 2986919 - RNA, 19 nt, Artificial Sequence
  Description of Artificial Sequence: Synthetic oligonucleotide
cuucuuugcgggagccauu

SEQ ID NO: 2986920 - RNA, 19 nt, Artificial Sequence
  Description of Artificial Sequence: Synthetic oligonucleotide
gaguccccaucuccuucau

SEQ ID NO: 2986921 - RNA, 19 nt, Artificial Sequence
  Description of Artificial Sequence: Synthetic oligonucleotide
cagaacggcccuucuucuu

SEQ ID NO: 2986922 - RNA, 19 nt, Artificial Sequence
  Description of Artificial Sequence: Synthetic oligonucleotide
ggauacgguauggaacauu

SEQ ID NO: 2986923 - RNA, 19 nt, Artificial Sequence
  Description of Artificial Sequence: Synthetic oligonucleotide
gugcccgaggagcacgcuu

SEQ ID NO: 2986924 - RNA, 19 nt, Artificial Sequence
  Description of Artificial Sequence: Synthetic oligonucleotide
ccuuuuggcccagacggcu

SEQ ID NO: 2986925 - RNA, 19 nt, Artificial Sequence
  Description of Artificial Sequence: Synthetic oligonucleotide
ccaucuccuucauggcaaa

SEQ ID NO: 2986926 - RNA, 19 nt, Artificial Sequence
  Description of Artificial Sequence: Synthetic oligonucleotide
gcgcacauccggagucccc

SEQ ID NO: 2986927 - RNA, 19 nt, Artificial Sequence
  Description of Artificial Sequence: Synthetic oligonucleotide
cgggagccauucucccggg

SEQ ID NO: 2986928 - RNA, 19 nt, Artificial Sequence
  Description of Artificial Sequence: Synthetic oligonucleotide
ccuucuuugcgggagccau

SEQ ID NO: 2986929 - RNA, 19 nt, Artificial Sequence
  Description of Artificial Sequence: Synthetic oligonucleotide
cgcacauccggagucccca

SEQ ID NO: 2986930 - RNA, 19 nt, Artificial Sequence
  Description of Artificial Sequence: Synthetic oligonucleotide
caucuccuucauggcaaau

SEQ ID NO: 2986931 - RNA, 19 nt, Artificial Sequence
  Description of Artificial Sequence: Synthetic oligonucleotide
ggaugcgcuugugaauguu

SEQ ID NO: 2986932 - RNA, 19 nt, Artificial Sequence
  Description of Artificial Sequence: Synthetic oligonucleotide
ccaccucguugauggcaga

SEQ ID NO: 2986933 - RNA, 19 nt, Artificial Sequence
  Description of Artificial Sequence: Synthetic oligonucleotide
ccaauguguacagcuuguu

SEQ ID NO: 2986934 - RNA, 19 nt, Artificial Sequence
  Description of Artificial Sequence: Synthetic oligonucleotide
gcccgaggagcacgcuucu

SEQ ID NO: 2986935 - RNA, 19 nt, Artificial Sequence
  Description of Artificial Sequence: Synthetic oligonucleotide
cccacgccauggaugcgcu

SEQ ID NO: 2986936 - RNA, 19 nt, Artificial Sequence
  Description of Artificial Sequence: Synthetic oligonucleotide
gggucaccaccucguugau

SEQ ID NO: 2986937 - RNA, 19 nt, Artificial Sequence
  Description of Artificial Sequence: Synthetic oligonucleotide
cgccauggaugcgcuugug

SEQ ID NO: 2986938 - RNA, 19 nt, Artificial Sequence
  Description of Artificial Sequence: Synthetic oligonucleotide
cguugacugucuguagauu

SEQ ID NO: 2986939 - RNA, 19 nt, Artificial Sequence
  Description of Artificial Sequence: Synthetic oligonucleotide
ccggaguccccaucuccuu

SEQ ID NO: 2986940 - RNA, 19 nt, Artificial Sequence
  Description of Artificial Sequence: Synthetic oligonucleotide
cggauacgguauggaacau

SEQ ID NO: 2986941 - RNA, 19 nt, Artificial Sequence
  Description of Artificial Sequence: Synthetic oligonucleotide
cggcuuuauugagccuggu

SEQ ID NO: 2986942 - RNA, 19 nt, Artificial Sequence
  Description of Artificial Sequence: Synthetic oligonucleotide
ccacgccauggaugcgcuu

SEQ ID NO: 2986943 - RNA, 19 nt, Artificial Sequence
  Description of Artificial Sequence: Synthetic oligonucleotide
cccgaggagcacgcuucuu

SEQ ID NO: 2986944 - RNA, 19 nt, Artificial Sequence
  Description of Artificial Sequence: Synthetic oligonucleotide
aaggguuucccucuguugc

SEQ ID NO: 2986945 - RNA, 19 nt, Artificial Sequence
  Description of Artificial Sequence: Synthetic oligonucleotide
auucguagcgcuuaauuuc

SEQ ID NO: 2986946 - RNA, 19 nt, Artificial Sequence
  Description of Artificial Sequence: Synthetic oligonucleotide
uccuguuugacaagcacgg

SEQ ID NO: 2986947 - RNA, 19 nt, Artificial Sequence
  Description of Artificial Sequence: Synthetic oligonucleotide
uguuugacaagcacgggcc

SEQ ID NO: 2986948 - RNA, 19 nt, Artificial Sequence
  Description of Artificial Sequence: Synthetic oligonucleotide
auguaguccagccucuucc

SEQ ID NO: 2986949 - RNA, 19 nt, Artificial Sequence
  Description of Artificial Sequence: Synthetic oligonucleotide
uuaauuucggcggugaugu

SEQ ID NO: 2986950 - RNA, 19 nt, Artificial Sequence
  Description of Artificial Sequence: Synthetic oligonucleotide
guuggauccauccagcaag

SEQ ID NO: 2986951 - RNA, 19 nt, Artificial Sequence
  Description of Artificial Sequence: Synthetic oligonucleotide
cauggauuugcucaagucc

SEQ ID NO: 2986952 - RNA, 19 nt, Artificial Sequence
  Description of Artificial Sequence: Synthetic oligonucleotide
uucguagcgcuuaauuucg

SEQ ID NO: 2986953 - RNA, 19 nt, Artificial Sequence
  Description of Artificial Sequence: Synthetic oligonucleotide
uugaagaccacguuggauc

SEQ ID NO: 2986954 - RNA, 19 nt, Artificial Sequence
  Description of Artificial Sequence: Synthetic oligonucleotide
cuucuucuggaucagcucg

SEQ ID NO: 2986955 - RNA, 19 nt, Artificial Sequence
  Description of Artificial Sequence: Synthetic oligonucleotide
auuuucuguuagcugugcc

SEQ ID NO: 2986956 - RNA, 19 nt, Artificial Sequence
  Description of Artificial Sequence: Synthetic oligonucleotide
uguuauuuucuguuagcug

SEQ ID NO: 2986957 - RNA, 19 nt, Artificial Sequence
  Description of Artificial Sequence: Synthetic oligonucleotide
gauguuauuuucuguuagc

SEQ ID NO: 2986958 - RNA, 19 nt, Artificial Sequence
  Description of Artificial Sequence: Synthetic oligonucleotide
uucacgauguuauuuucug

SEQ ID NO: 2986959 - RNA, 19 nt, Artificial Sequence
  Description of Artificial Sequence: Synthetic oligonucleotide
guuauuuucuguuagcugu

SEQ ID NO: 2986960 - RNA, 19 nt, Artificial Sequence
  Description of Artificial Sequence: Synthetic oligonucleotide
uagcgcuuaauuucggcgg

SEQ ID NO: 2986961 - RNA, 19 nt, Artificial Sequence
  Description of Artificial Sequence: Synthetic oligonucleotide
aagcacgggccccaggagc

SEQ ID NO: 2986962 - RNA, 19 nt, Artificial Sequence
  Description of Artificial Sequence: Synthetic oligonucleotide
aauuucggcggugauguag

SEQ ID NO: 2986963 - RNA, 19 nt, Artificial Sequence
  Description of Artificial Sequence: Synthetic oligonucleotide
guagcgcuuaauuucggcg

SEQ ID NO: 2986964 - RNA, 19 nt, Artificial Sequence
  Description of Artificial Sequence: Synthetic oligonucleotide
uuuucuguuagcugugccu

SEQ ID NO: 2986965 - RNA, 19 nt, Artificial Sequence
  Description of Artificial Sequence: Synthetic oligonucleotide
ugugccucgagcuucugcc

SEQ ID NO: 2986966 - RNA, 19 nt, Artificial Sequence
  Description of Artificial Sequence: Synthetic oligonucleotide
uuauuuucuguuagcugug

SEQ ID NO: 2986967 - RNA, 19 nt, Artificial Sequence
  Description of Artificial Sequence: Synthetic oligonucleotide
acauggauuugcucaaguc

SEQ ID NO: 2986968 - RNA, 19 nt, Artificial Sequence
  Description of Artificial Sequence: Synthetic oligonucleotide
cuccuguuugacaagcacg

SEQ ID NO: 2986969 - RNA, 19 nt, Artificial Sequence
  Description of Artificial Sequence: Synthetic oligonucleotide
ugaagaccacguuggaucc

SEQ ID NO: 2986970 - RNA, 19 nt, Artificial Sequence
  Description of Artificial Sequence: Synthetic oligonucleotide
cuguuugacaagcacgggc

SEQ ID NO: 2986971 - RNA, 19 nt, Artificial Sequence
  Description of Artificial Sequence: Synthetic oligonucleotide
gauccauccagcaaggcca

SEQ ID NO: 2986972 - RNA, 19 nt, Artificial Sequence
  Description of Artificial Sequence: Synthetic oligonucleotide
auccagcaaggccaguucc

SEQ ID NO: 2986973 - RNA, 19 nt, Artificial Sequence
  Description of Artificial Sequence: Synthetic oligonucleotide
uccuccuucacgauguuau

SEQ ID NO: 2986974 - RNA, 19 nt, Artificial Sequence
  Description of Artificial Sequence: Synthetic oligonucleotide
gagcuugaagaccacguug

SEQ ID NO: 2986975 - RNA, 19 nt, Artificial Sequence
  Description of Artificial Sequence: Synthetic oligonucleotide
uucuucuggaucagcucgg

SEQ ID NO: 2986976 - RNA, 19 nt, Artificial Sequence
  Description of Artificial Sequence: Synthetic oligonucleotide
uuggauccauccagcaagg

SEQ ID NO: 2986977 - RNA, 19 nt, Artificial Sequence
  Description of Artificial Sequence: Synthetic oligonucleotide
ucggcggugauguagucca

SEQ ID NO: 2986978 - RNA, 19 nt, Artificial Sequence
  Description of Artificial Sequence: Synthetic oligonucleotide
ugagcaaggguuucccucu

SEQ ID NO: 2986979 - RNA, 19 nt, Artificial Sequence
  Description of Artificial Sequence: Synthetic oligonucleotide
guauuucuccacuucuccc

SEQ ID NO: 2986980 - RNA, 19 nt, Artificial Sequence
  Description of Artificial Sequence: Synthetic oligonucleotide
auuugcucaaguccuucug

SEQ ID NO: 2986981 - RNA, 19 nt, Artificial Sequence
  Description of Artificial Sequence: Synthetic oligonucleotide
auguuauuuucuguuagcu

SEQ ID NO: 2986982 - RNA, 19 nt, Artificial Sequence
  Description of Artificial Sequence: Synthetic oligonucleotide
ucucccugcagcuucuucu

SEQ ID NO: 2986983 - RNA, 19 nt, Artificial Sequence
  Description of Artificial Sequence: Synthetic oligonucleotide
uguuagcugugccucgagc

SEQ ID NO: 2986984 - RNA, 19 nt, Artificial Sequence
  Description of Artificial Sequence: Synthetic oligonucleotide
cuuaauuucggcggugaug

SEQ ID NO: 2986985 - RNA, 19 nt, Artificial Sequence
  Description of Artificial Sequence: Synthetic oligonucleotide
gaccacguuggauccaucc

SEQ ID NO: 2986986 - RNA, 19 nt, Artificial Sequence
  Description of Artificial Sequence: Synthetic oligonucleotide
uguaguccagccucuuccc

SEQ ID NO: 2986987 - RNA, 19 nt, Artificial Sequence
  Description of Artificial Sequence: Synthetic oligonucleotide
cucugacugccucucaagg

SEQ ID NO: 2986988 - RNA, 19 nt, Artificial Sequence
  Description of Artificial Sequence: Synthetic oligonucleotide
auggauuugcucaaguccu

SEQ ID NO: 2986989 - RNA, 19 nt, Artificial Sequence
  Description of Artificial Sequence: Synthetic oligonucleotide
ucugacugccucucaaggu

SEQ ID NO: 2986990 - RNA, 19 nt, Artificial Sequence
  Description of Artificial Sequence: Synthetic oligonucleotide
uucuguuagcugugccucg

SEQ ID NO: 2986991 - RNA, 19 nt, Artificial Sequence
  Description of Artificial Sequence: Synthetic oligonucleotide
uuucuguuagcugugccuc

SEQ ID NO: 2986992 - RNA, 19 nt, Artificial Sequence
  Description of Artificial Sequence: Synthetic oligonucleotide
ucaaggucccgcagcugcg

SEQ ID NO: 2986993 - RNA, 19 nt, Artificial Sequence
  Description of Artificial Sequence: Synthetic oligonucleotide
gcagcugcgauucguagcg

SEQ ID NO: 2986994 - RNA, 19 nt, Artificial Sequence
  Description of Artificial Sequence: Synthetic oligonucleotide
ugacugccucucaaggucc

SEQ ID NO: 2986995 - RNA, 19 nt, Artificial Sequence
  Description of Artificial Sequence: Synthetic oligonucleotide
acaagcacgggccccagga

SEQ ID NO: 2986996 - RNA, 19 nt, Artificial Sequence
  Description of Artificial Sequence: Synthetic oligonucleotide
ugguauuucuccacuucuc

SEQ ID NO: 2986997 - RNA, 19 nt, Artificial Sequence
  Description of Artificial Sequence: Synthetic oligonucleotide
ugcucaaguccuucugcag

SEQ ID NO: 2986998 - RNA, 19 nt, Artificial Sequence
  Description of Artificial Sequence: Synthetic oligonucleotide
cugacugccucucaagguc

SEQ ID NO: 2986999 - RNA, 19 nt, Artificial Sequence
  Description of Artificial Sequence: Synthetic oligonucleotide
uccuucacgauguuauuuu

SEQ ID NO: 2987000 - RNA, 19 nt, Artificial Sequence
  Description of Artificial Sequence: Synthetic oligonucleotide
cuccacuucucccugcagc

SEQ ID NO: 2987001 - RNA, 19 nt, Artificial Sequence
  Description of Artificial Sequence: Synthetic oligonucleotide
uauuuucuguuagcugugc

SEQ ID NO: 2987002 - RNA, 19 nt, Artificial Sequence
  Description of Artificial Sequence: Synthetic oligonucleotide
uuugacaagcacgggcccc

SEQ ID NO: 2987003 - RNA, 19 nt, Artificial Sequence
  Description of Artificial Sequence: Synthetic oligonucleotide
aguccagccucuuccccac

SEQ ID NO: 2987004 - RNA, 19 nt, Artificial Sequence
  Description of Artificial Sequence: Synthetic oligonucleotide
ucgagcuucugccucccug

SEQ ID NO: 2987005 - RNA, 19 nt, Artificial Sequence
  Description of Artificial Sequence: Synthetic oligonucleotide
ucacgauguuauuuucugu

SEQ ID NO: 2987006 - RNA, 19 nt, Artificial Sequence
  Description of Artificial Sequence: Synthetic oligonucleotide
uggaucagcucggccaugg

SEQ ID NO: 2987007 - RNA, 19 nt, Artificial Sequence
  Description of Artificial Sequence: Synthetic oligonucleotide
agcugagcaaggguuuccc

SEQ ID NO: 2987008 - RNA, 19 nt, Artificial Sequence
  Description of Artificial Sequence: Synthetic oligonucleotide
cugagcaaggguuucccuc

SEQ ID NO: 2987009 - RNA, 19 nt, Artificial Sequence
  Description of Artificial Sequence: Synthetic oligonucleotide
aaggccaguuccuccuuca

SEQ ID NO: 2987010 - RNA, 19 nt, Artificial Sequence
  Description of Artificial Sequence: Synthetic oligonucleotide
ggauccauccagcaaggcc

SEQ ID NO: 2987011 - RNA, 19 nt, Artificial Sequence
  Description of Artificial Sequence: Synthetic oligonucleotide
cacguuggauccauccagc

SEQ ID NO: 2987012 - RNA, 19 nt, Artificial Sequence
  Description of Artificial Sequence: Synthetic oligonucleotide
ccugacauggauuugcuca

SEQ ID NO: 2987013 - RNA, 19 nt, Artificial Sequence
  Description of Artificial Sequence: Synthetic oligonucleotide
aguuccuccuucacgaugu

SEQ ID NO: 2987014 - RNA, 19 nt, Artificial Sequence
  Description of Artificial Sequence: Synthetic oligonucleotide
ucguagcgcuuaauuucgg

SEQ ID NO: 2987015 - RNA, 19 nt, Artificial Sequence
  Description of Artificial Sequence: Synthetic oligonucleotide
ucgcuggaacuccugcugc

SEQ ID NO: 2987016 - RNA, 19 nt, Artificial Sequence
  Description of Artificial Sequence: Synthetic oligonucleotide
caaggguuucccucuguug

SEQ ID NO: 2987017 - RNA, 19 nt, Artificial Sequence
  Description of Artificial Sequence: Synthetic oligonucleotide
gauucguagcgcuuaauuu

SEQ ID NO: 2987018 - RNA, 19 nt, Artificial Sequence
  Description of Artificial Sequence: Synthetic oligonucleotide
ugcagcugcugguauuucu

SEQ ID NO: 2987019 - RNA, 19 nt, Artificial Sequence
  Description of Artificial Sequence: Synthetic oligonucleotide
guuugacaagcacgggccc

SEQ ID NO: 2987020 - RNA, 19 nt, Artificial Sequence
  Description of Artificial Sequence: Synthetic oligonucleotide
uguugcucugacugccucu

SEQ ID NO: 2987021 - RNA, 19 nt, Artificial Sequence
  Description of Artificial Sequence: Synthetic oligonucleotide
uggggucaggccuucccag

SEQ ID NO: 2987022 - RNA, 19 nt, Artificial Sequence
  Description of Artificial Sequence: Synthetic oligonucleotide
guuagcugugccucgagcu

SEQ ID NO: 2987023 - RNA, 19 nt, Artificial Sequence
  Description of Artificial Sequence: Synthetic oligonucleotide
cucgcuggaacuccugcug

SEQ ID NO: 2987024 - RNA, 19 nt, Artificial Sequence
  Description of Artificial Sequence: Synthetic oligonucleotide
ucuguugcucugacugccu

SEQ ID NO: 2987025 - RNA, 19 nt, Artificial Sequence
  Description of Artificial Sequence: Synthetic oligonucleotide
ugcucugacugccucucaa

SEQ ID NO: 2987026 - RNA, 19 nt, Artificial Sequence
  Description of Artificial Sequence: Synthetic oligonucleotide
ucagcccucccuccucucc

SEQ ID NO: 2987027 - RNA, 19 nt, Artificial Sequence
  Description of Artificial Sequence: Synthetic oligonucleotide
gcucaaguccuucugcagc

SEQ ID NO: 2987028 - RNA, 19 nt, Artificial Sequence
  Description of Artificial Sequence: Synthetic oligonucleotide
agcgcuuaauuucggcggu

SEQ ID NO: 2987029 - RNA, 19 nt, Artificial Sequence
  Description of Artificial Sequence: Synthetic oligonucleotide
cauggggucaggccuuccc

SEQ ID NO: 2987030 - RNA, 19 nt, Artificial Sequence
  Description of Artificial Sequence: Synthetic oligonucleotide
cccucuguugcucugacug

SEQ ID NO: 2987031 - RNA, 19 nt, Artificial Sequence
  Description of Artificial Sequence: Synthetic oligonucleotide
cuagcuccuguuugacaag

SEQ ID NO: 2987032 - RNA, 19 nt, Artificial Sequence
  Description of Artificial Sequence: Synthetic oligonucleotide
ucuguuagcugugccucga

SEQ ID NO: 2987033 - RNA, 19 nt, Artificial Sequence
  Description of Artificial Sequence: Synthetic oligonucleotide
uuucuccacuucucccugc

SEQ ID NO: 2987034 - RNA, 19 nt, Artificial Sequence
  Description of Artificial Sequence: Synthetic oligonucleotide
cagcugcugguauuucucc

SEQ ID NO: 2987035 - RNA, 19 nt, Artificial Sequence
  Description of Artificial Sequence: Synthetic oligonucleotide
aagaccacguuggauccau

SEQ ID NO: 2987036 - RNA, 19 nt, Artificial Sequence
  Description of Artificial Sequence: Synthetic oligonucleotide
uugacaagcacgggcccca

SEQ ID NO: 2987037 - RNA, 19 nt, Artificial Sequence
  Description of Artificial Sequence: Synthetic oligonucleotide
cucuuccccaccguggccc

SEQ ID NO: 2987038 - RNA, 19 nt, Artificial Sequence
  Description of Artificial Sequence: Synthetic oligonucleotide
ugcagcugagcaaggguuu

SEQ ID NO: 2987039 - RNA, 19 nt, Artificial Sequence
  Description of Artificial Sequence: Synthetic oligonucleotide
ggccccaggagcuugaaga

SEQ ID NO: 2987040 - RNA, 19 nt, Artificial Sequence
  Description of Artificial Sequence: Synthetic oligonucleotide
uucggcggugauguagucc

SEQ ID NO: 2987041 - RNA, 19 nt, Artificial Sequence
  Description of Artificial Sequence: Synthetic oligonucleotide
uccccuagcuccuguuuga

SEQ ID NO: 2987042 - RNA, 19 nt, Artificial Sequence
  Description of Artificial Sequence: Synthetic oligonucleotide
aggagcuugaagaccacgu

SEQ ID NO: 2987043 - RNA, 19 nt, Artificial Sequence
  Description of Artificial Sequence: Synthetic oligonucleotide
ucccugacauggauuugcu

SEQ ID NO: 2987044 - RNA, 19 nt, Artificial Sequence
  Description of Artificial Sequence: Synthetic oligonucleotide
ugacauggauuugcucaag

SEQ ID NO: 2987045 - RNA, 19 nt, Artificial Sequence
  Description of Artificial Sequence: Synthetic oligonucleotide
agcugcgauucguagcgcu

SEQ ID NO: 2987046 - RNA, 19 nt, Artificial Sequence
  Description of Artificial Sequence: Synthetic oligonucleotide
auuucggcggugauguagu

SEQ ID NO: 2987047 - RNA, 19 nt, Artificial Sequence
  Description of Artificial Sequence: Synthetic oligonucleotide
guaguccagccucuucccc

SEQ ID NO: 2987048 - RNA, 19 nt, Artificial Sequence
  Description of Artificial Sequence: Synthetic oligonucleotide
gucaggccuucccaggagc

SEQ ID NO: 2987049 - RNA, 19 nt, Artificial Sequence
  Description of Artificial Sequence: Synthetic oligonucleotide
gauuugcucaaguccuucu

SEQ ID NO: 2987050 - RNA, 19 nt, Artificial Sequence
  Description of Artificial Sequence: Synthetic oligonucleotide
gccaguuccuccuucacga

SEQ ID NO: 2987051 - RNA, 19 nt, Artificial Sequence
  Description of Artificial Sequence: Synthetic oligonucleotide
ucuuccccaccguggcccg

SEQ ID NO: 2987052 - RNA, 19 nt, Artificial Sequence
  Description of Artificial Sequence: Synthetic oligonucleotide
cacuucucccugcagcuuc

SEQ ID NO: 2987053 - RNA, 19 nt, Artificial Sequence
  Description of Artificial Sequence: Synthetic oligonucleotide
cuccccuagcuccuguuug

SEQ ID NO: 2987054 - RNA, 19 nt, Artificial Sequence
  Description of Artificial Sequence: Synthetic oligonucleotide
auggggucaggccuuccca

SEQ ID NO: 2987055 - RNA, 19 nt, Artificial Sequence
  Description of Artificial Sequence: Synthetic oligonucleotide
aggguuucccucuguugcu

SEQ ID NO: 2987056 - RNA, 19 nt, Artificial Sequence
  Description of Artificial Sequence: Synthetic oligonucleotide
acguuggauccauccagca

SEQ ID NO: 2987057 - RNA, 19 nt, Artificial Sequence
  Description of Artificial Sequence: Synthetic oligonucleotide
gagccuuugcugccugggc

SEQ ID NO: 2987058 - RNA, 19 nt, Artificial Sequence
  Description of Artificial Sequence: Synthetic oligonucleotide
agcccucccuccucucccc

SEQ ID NO: 2987059 - RNA, 19 nt, Artificial Sequence
  Description of Artificial Sequence: Synthetic oligonucleotide
caguuccuccuucacgaug

SEQ ID NO: 2987060 - RNA, 19 nt, Artificial Sequence
  Description of Artificial Sequence: Synthetic oligonucleotide
gacaagcacgggccccagg

SEQ ID NO: 2987061 - RNA, 19 nt, Artificial Sequence
  Description of Artificial Sequence: Synthetic oligonucleotide
cauccagcaaggccaguuc

SEQ ID NO: 2987062 - RNA, 19 nt, Artificial Sequence
  Description of Artificial Sequence: Synthetic oligonucleotide
uuucccucuguugcucuga

SEQ ID NO: 2987063 - RNA, 19 nt, Artificial Sequence
  Description of Artificial Sequence: Synthetic oligonucleotide
ugcgauucguagcgcuuaa

SEQ ID NO: 2987064 - RNA, 19 nt, Artificial Sequence
  Description of Artificial Sequence: Synthetic oligonucleotide
cugacauggauuugcucaa

SEQ ID NO: 2987065 - RNA, 19 nt, Artificial Sequence
  Description of Artificial Sequence: Synthetic oligonucleotide
uggauuugcucaaguccuu

SEQ ID NO: 2987066 - RNA, 19 nt, Artificial Sequence
  Description of Artificial Sequence: Synthetic oligonucleotide
gacauggauuugcucaagu

SEQ ID NO: 2987067 - RNA, 19 nt, Artificial Sequence
  Description of Artificial Sequence: Synthetic oligonucleotide
uucccucuguugcucugac

SEQ ID NO: 2987068 - RNA, 19 nt, Artificial Sequence
  Description of Artificial Sequence: Synthetic oligonucleotide
ccugcugcagcugagcaag

SEQ ID NO: 2987069 - RNA, 19 nt, Artificial Sequence
  Description of Artificial Sequence: Synthetic oligonucleotide
caggagcuugaagaccacg

SEQ ID NO: 2987070 - RNA, 19 nt, Artificial Sequence
  Description of Artificial Sequence: Synthetic oligonucleotide
ccacguuggauccauccag

SEQ ID NO: 2987071 - RNA, 19 nt, Artificial Sequence
  Description of Artificial Sequence: Synthetic oligonucleotide
ugccucgagcuucugccuc

SEQ ID NO: 2987072 - RNA, 19 nt, Artificial Sequence
  Description of Artificial Sequence: Synthetic oligonucleotide
ugccucucaaggucccgca

SEQ ID NO: 2987073 - RNA, 19 nt, Artificial Sequence
  Description of Artificial Sequence: Synthetic oligonucleotide
cuucacgauguuauuuucu

SEQ ID NO: 2987074 - RNA, 19 nt, Artificial Sequence
  Description of Artificial Sequence: Synthetic oligonucleotide
cacgauguuauuuucuguu

SEQ ID NO: 2987075 - RNA, 19 nt, Artificial Sequence
  Description of Artificial Sequence: Synthetic oligonucleotide
aggagccuuugcugccugg

SEQ ID NO: 2987076 - RNA, 19 nt, Artificial Sequence
  Description of Artificial Sequence: Synthetic oligonucleotide
agccucuuccccaccgugg

SEQ ID NO: 2987077 - RNA, 19 nt, Artificial Sequence
  Description of Artificial Sequence: Synthetic oligonucleotide
ccuagcuccuguuugacaa

SEQ ID NO: 2987078 - RNA, 19 nt, Artificial Sequence
  Description of Artificial Sequence: Synthetic oligonucleotide
uucucccugcagcuucuuc

SEQ ID NO: 2987079 - RNA, 19 nt, Artificial Sequence
  Description of Artificial Sequence: Synthetic oligonucleotide
guugcucugacugccucuc

SEQ ID NO: 2987080 - RNA, 19 nt, Artificial Sequence
  Description of Artificial Sequence: Synthetic oligonucleotide
caagcacgggccccaggag

SEQ ID NO: 2987081 - RNA, 19 nt, Artificial Sequence
  Description of Artificial Sequence: Synthetic oligonucleotide
gagcaaggguuucccucug

SEQ ID NO: 2987082 - RNA, 19 nt, Artificial Sequence
  Description of Artificial Sequence: Synthetic oligonucleotide
gcucugacugccucucaag

SEQ ID NO: 2987083 - RNA, 19 nt, Artificial Sequence
  Description of Artificial Sequence: Synthetic oligonucleotide
agcaaggguuucccucugu

SEQ ID NO: 2987084 - RNA, 19 nt, Artificial Sequence
  Description of Artificial Sequence: Synthetic oligonucleotide
aaggucccgcagcugcgau

SEQ ID NO: 2987085 - RNA, 19 nt, Artificial Sequence
  Description of Artificial Sequence: Synthetic oligonucleotide
uggcccgagccuccccuag

SEQ ID NO: 2987086 - RNA, 19 nt, Artificial Sequence
  Description of Artificial Sequence: Synthetic oligonucleotide
agcuucugccucccugaca

SEQ ID NO: 2987087 - RNA, 19 nt, Artificial Sequence
  Description of Artificial Sequence: Synthetic oligonucleotide
uagcugugccucgagcuuc

SEQ ID NO: 2987088 - RNA, 19 nt, Artificial Sequence
  Description of Artificial Sequence: Synthetic oligonucleotide
uuugcugccugggcucgcu

SEQ ID NO: 2987089 - RNA, 19 nt, Artificial Sequence
  Description of Artificial Sequence: Synthetic oligonucleotide
ugggcucgcuggaacuccu

SEQ ID NO: 2987090 - RNA, 19 nt, Artificial Sequence
  Description of Artificial Sequence: Synthetic oligonucleotide
cuguugcucugacugccuc

SEQ ID NO: 2987091 - RNA, 19 nt, Artificial Sequence
  Description of Artificial Sequence: Synthetic oligonucleotide
ccgagccuccccuagcucc

SEQ ID NO: 2987092 - RNA, 19 nt, Artificial Sequence
  Description of Artificial Sequence: Synthetic oligonucleotide
uugcucugacugccucuca

SEQ ID NO: 2987093 - RNA, 19 nt, Artificial Sequence
  Description of Artificial Sequence: Synthetic oligonucleotide
cagcccucccuccucuccc

SEQ ID NO: 2987094 - RNA, 19 nt, Artificial Sequence
  Description of Artificial Sequence: Synthetic oligonucleotide
ggggucaggccuucccagg

SEQ ID NO: 2987095 - RNA, 19 nt, Artificial Sequence
  Description of Artificial Sequence: Synthetic oligonucleotide
acugccucucaaggucccg

SEQ ID NO: 2987096 - RNA, 19 nt, Artificial Sequence
  Description of Artificial Sequence: Synthetic oligonucleotide
cugccucucaaggucccgc

SEQ ID NO: 2987097 - RNA, 19 nt, Artificial Sequence
  Description of Artificial Sequence: Synthetic oligonucleotide
cccaggagcuugaagacca

SEQ ID NO: 2987098 - RNA, 19 nt, Artificial Sequence
  Description of Artificial Sequence: Synthetic oligonucleotide
gacugccucucaagguccc

SEQ ID NO: 2987099 - RNA, 19 nt, Artificial Sequence
  Description of Artificial Sequence: Synthetic oligonucleotide
ucucaaggucccgcagcug

SEQ ID NO: 2987100 - RNA, 19 nt, Artificial Sequence
  Description of Artificial Sequence: Synthetic oligonucleotide
cugggcucgcuggaacucc

SEQ ID NO: 2987101 - RNA, 19 nt, Artificial Sequence
  Description of Artificial Sequence: Synthetic oligonucleotide
caaggccaguuccuccuuc

SEQ ID NO: 2987102 - RNA, 19 nt, Artificial Sequence
  Description of Artificial Sequence: Synthetic oligonucleotide
ccucucaaggucccgcagc

SEQ ID NO: 2987103 - RNA, 19 nt, Artificial Sequence
  Description of Artificial Sequence: Synthetic oligonucleotide
ugccucccugacauggauu

SEQ ID NO: 2987104 - RNA, 19 nt, Artificial Sequence
  Description of Artificial Sequence: Synthetic oligonucleotide
gcuucugccucccugacau

SEQ ID NO: 2987105 - RNA, 19 nt, Artificial Sequence
  Description of Artificial Sequence: Synthetic oligonucleotide
uuucggcggugauguaguc

SEQ ID NO: 2987106 - RNA, 19 nt, Artificial Sequence
  Description of Artificial Sequence: Synthetic oligonucleotide
ccuucacgauguuauuuuc

SEQ ID NO: 2987107 - RNA, 19 nt, Artificial Sequence
  Description of Artificial Sequence: Synthetic oligonucleotide
cagcugagcaaggguuucc

SEQ ID NO: 2987108 - RNA, 19 nt, Artificial Sequence
  Description of Artificial Sequence: Synthetic oligonucleotide
ucccucuguugcucugacu

SEQ ID NO: 2987109 - RNA, 19 nt, Artificial Sequence
  Description of Artificial Sequence: Synthetic oligonucleotide
cagccucuuccccaccgug

SEQ ID NO: 2987110 - RNA, 19 nt, Artificial Sequence
  Description of Artificial Sequence: Synthetic oligonucleotide
ggcucgcuggaacuccugc

SEQ ID NO: 2987111 - RNA, 19 nt, Artificial Sequence
  Description of Artificial Sequence: Synthetic oligonucleotide
ggucaggccuucccaggag

SEQ ID NO: 2987112 - RNA, 19 nt, Artificial Sequence
  Description of Artificial Sequence: Synthetic oligonucleotide
uuccccaccguggcccgag

SEQ ID NO: 2987113 - RNA, 19 nt, Artificial Sequence
  Description of Artificial Sequence: Synthetic oligonucleotide
cguagcgcuuaauuucggc

SEQ ID NO: 2987114 - RNA, 19 nt, Artificial Sequence
  Description of Artificial Sequence: Synthetic oligonucleotide
uugcugccugggcucgcug

SEQ ID NO: 2987115 - RNA, 19 nt, Artificial Sequence
  Description of Artificial Sequence: Synthetic oligonucleotide
ccucuguugcucugacugc

SEQ ID NO: 2987116 - RNA, 19 nt, Artificial Sequence
  Description of Artificial Sequence: Synthetic oligonucleotide
ugacaagcacgggccccag

SEQ ID NO: 2987117 - RNA, 19 nt, Artificial Sequence
  Description of Artificial Sequence: Synthetic oligonucleotide
gaagaccacguuggaucca

SEQ ID NO: 2987118 - RNA, 19 nt, Artificial Sequence
  Description of Artificial Sequence: Synthetic oligonucleotide
uaauuucggcggugaugua

SEQ ID NO: 2987119 - RNA, 19 nt, Artificial Sequence
  Description of Artificial Sequence: Synthetic oligonucleotide
ggauuugcucaaguccuuc

SEQ ID NO: 2987120 - RNA, 19 nt, Artificial Sequence
  Description of Artificial Sequence: Synthetic oligonucleotide
ucccgcagcugcgauucgu

SEQ ID NO: 2987121 - RNA, 19 nt, Artificial Sequence
  Description of Artificial Sequence: Synthetic oligonucleotide
uuccuccuucacgauguua

SEQ ID NO: 2987122 - RNA, 19 nt, Artificial Sequence
  Description of Artificial Sequence: Synthetic oligonucleotide
ggucccgcagcugcgauuc

SEQ ID NO: 2987123 - RNA, 19 nt, Artificial Sequence
  Description of Artificial Sequence: Synthetic oligonucleotide
cucucaaggucccgcagcu

SEQ ID NO: 2987124 - RNA, 19 nt, Artificial Sequence
  Description of Artificial Sequence: Synthetic oligonucleotide
acuucucccugcagcuucu

SEQ ID NO: 2987125 - RNA, 19 nt, Artificial Sequence
  Description of Artificial Sequence: Synthetic oligonucleotide
cuugaagaccacguuggau

SEQ ID NO: 2987126 - RNA, 19 nt, Artificial Sequence
  Description of Artificial Sequence: Synthetic oligonucleotide
agcuccuguuugacaagca

SEQ ID NO: 2987127 - RNA, 19 nt, Artificial Sequence
  Description of Artificial Sequence: Synthetic oligonucleotide
gccccaggagcuugaagac

SEQ ID NO: 2987128 - RNA, 19 nt, Artificial Sequence
  Description of Artificial Sequence: Synthetic oligonucleotide
ccuguuugacaagcacggg

SEQ ID NO: 2987129 - RNA, 19 nt, Artificial Sequence
  Description of Artificial Sequence: Synthetic oligonucleotide
ggcggugauguaguccagc

SEQ ID NO: 2987130 - RNA, 19 nt, Artificial Sequence
  Description of Artificial Sequence: Synthetic oligonucleotide
cuucugccucccugacaug

SEQ ID NO: 2987131 - RNA, 19 nt, Artificial Sequence
  Description of Artificial Sequence: Synthetic oligonucleotide
cgcagcugcgauucguagc

SEQ ID NO: 2987132 - RNA, 19 nt, Artificial Sequence
  Description of Artificial Sequence: Synthetic oligonucleotide
gccucgagcuucugccucc

SEQ ID NO: 2987133 - RNA, 19 nt, Artificial Sequence
  Description of Artificial Sequence: Synthetic oligonucleotide
cugcagcugagcaaggguu

SEQ ID NO: 2987134 - RNA, 19 nt, Artificial Sequence
  Description of Artificial Sequence: Synthetic oligonucleotide
gcuugaagaccacguugga

SEQ ID NO: 2987135 - RNA, 19 nt, Artificial Sequence
  Description of Artificial Sequence: Synthetic oligonucleotide
gccucucaaggucccgcag

SEQ ID NO: 2987136 - RNA, 19 nt, Artificial Sequence
  Description of Artificial Sequence: Synthetic oligonucleotide
cuuugcugccugggcucgc

SEQ ID NO: 2987137 - RNA, 19 nt, Artificial Sequence
  Description of Artificial Sequence: Synthetic oligonucleotide
gggucaggccuucccagga

SEQ ID NO: 2987138 - RNA, 19 nt, Artificial Sequence
  Description of Artificial Sequence: Synthetic oligonucleotide
agaccacguuggauccauc

SEQ ID NO: 2987139 - RNA, 19 nt, Artificial Sequence
  Description of Artificial Sequence: Synthetic oligonucleotide
uccauggggucaggccuuc

SEQ ID NO: 2987140 - RNA, 19 nt, Artificial Sequence
  Description of Artificial Sequence: Synthetic oligonucleotide
agcugugccucgagcuucu

SEQ ID NO: 2987141 - RNA, 19 nt, Artificial Sequence
  Description of Artificial Sequence: Synthetic oligonucleotide
agccuccccuagcuccugu

SEQ ID NO: 2987142 - RNA, 19 nt, Artificial Sequence
  Description of Artificial Sequence: Synthetic oligonucleotide
aggccuucccaggagccuu

SEQ ID NO: 2987143 - RNA, 19 nt, Artificial Sequence
  Description of Artificial Sequence: Synthetic oligonucleotide
uccccaccguggcccgagc

SEQ ID NO: 2987144 - RNA, 19 nt, Artificial Sequence
  Description of Artificial Sequence: Synthetic oligonucleotide
ccuuugcugccugggcucg

SEQ ID NO: 2987145 - RNA, 19 nt, Artificial Sequence
  Description of Artificial Sequence: Synthetic oligonucleotide
ccuuuccauggggucaggc

SEQ ID NO: 2987146 - RNA, 19 nt, Artificial Sequence
  Description of Artificial Sequence: Synthetic oligonucleotide
aggucccgcagcugcgauu

SEQ ID NO: 2987147 - RNA, 19 nt, Artificial Sequence
  Description of Artificial Sequence: Synthetic oligonucleotide
gucccgcagcugcgauucg

SEQ ID NO: 2987148 - RNA, 19 nt, Artificial Sequence
  Description of Artificial Sequence: Synthetic oligonucleotide
cugcgauucguagcgcuua

SEQ ID NO: 2987149 - RNA, 19 nt, Artificial Sequence
  Description of Artificial Sequence: Synthetic oligonucleotide
cagcugcgauucguagcgc

SEQ ID NO: 2987150 - RNA, 19 nt, Artificial Sequence
  Description of Artificial Sequence: Synthetic oligonucleotide
ccgcagcugcgauucguag

SEQ ID NO: 2987151 - RNA, 19 nt, Artificial Sequence
  Description of Artificial Sequence: Synthetic oligonucleotide
cacgggccccaggagcuug

SEQ ID NO: 2987152 - RNA, 19 nt, Artificial Sequence
  Description of Artificial Sequence: Synthetic oligonucleotide
caaggucccgcagcugcga

SEQ ID NO: 2987153 - RNA, 19 nt, Artificial Sequence
  Description of Artificial Sequence: Synthetic oligonucleotide
ccagcaaggccaguuccuc

SEQ ID NO: 2987154 - RNA, 19 nt, Artificial Sequence
  Description of Artificial Sequence: Synthetic oligonucleotide
guccagccucuuccccacc

SEQ ID NO: 2987155 - RNA, 19 nt, Artificial Sequence
  Description of Artificial Sequence: Synthetic oligonucleotide
ccccaggagcuugaagacc

SEQ ID NO: 2987156 - RNA, 19 nt, Artificial Sequence
  Description of Artificial Sequence: Synthetic oligonucleotide
cuggaucagcucggccaug

SEQ ID NO: 2987157 - RNA, 19 nt, Artificial Sequence
  Description of Artificial Sequence: Synthetic oligonucleotide
cccugacauggauuugcuc

SEQ ID NO: 2987158 - RNA, 19 nt, Artificial Sequence
  Description of Artificial Sequence: Synthetic oligonucleotide
gcagcugagcaaggguuuc

SEQ ID NO: 2987159 - RNA, 19 nt, Artificial Sequence
  Description of Artificial Sequence: Synthetic oligonucleotide
gguuucccucuguugcucu

SEQ ID NO: 2987160 - RNA, 19 nt, Artificial Sequence
  Description of Artificial Sequence: Synthetic oligonucleotide
cuccuucacgauguuauuu

SEQ ID NO: 2987161 - RNA, 19 nt, Artificial Sequence
  Description of Artificial Sequence: Synthetic oligonucleotide
gggccccaggagcuugaag

SEQ ID NO: 2987162 - RNA, 19 nt, Artificial Sequence
  Description of Artificial Sequence: Synthetic oligonucleotide
cgagcuucugccucccuga

SEQ ID NO: 2987163 - RNA, 19 nt, Artificial Sequence
  Description of Artificial Sequence: Synthetic oligonucleotide
gcugccugggcucgcugga

SEQ ID NO: 2987164 - RNA, 19 nt, Artificial Sequence
  Description of Artificial Sequence: Synthetic oligonucleotide
ggguuucccucuguugcuc

SEQ ID NO: 2987165 - RNA, 19 nt, Artificial Sequence
  Description of Artificial Sequence: Synthetic oligonucleotide
gccucccugacauggauuu

SEQ ID NO: 2987166 - RNA, 19 nt, Artificial Sequence
  Description of Artificial Sequence: Synthetic oligonucleotide
ccccuuuccauggggucag

SEQ ID NO: 2987167 - RNA, 19 nt, Artificial Sequence
  Description of Artificial Sequence: Synthetic oligonucleotide
gagccuccccuagcuccug

SEQ ID NO: 2987168 - RNA, 19 nt, Artificial Sequence
  Description of Artificial Sequence: Synthetic oligonucleotide
gugccucgagcuucugccu

SEQ ID NO: 2987169 - RNA, 19 nt, Artificial Sequence
  Description of Artificial Sequence: Synthetic oligonucleotide
ccaggagcuugaagaccac

SEQ ID NO: 2987170 - RNA, 19 nt, Artificial Sequence
  Description of Artificial Sequence: Synthetic oligonucleotide
ggcccgagccuccccuagc

SEQ ID NO: 2987171 - RNA, 19 nt, Artificial Sequence
  Description of Artificial Sequence: Synthetic oligonucleotide
ccucuuccccaccguggcc

SEQ ID NO: 2987172 - RNA, 19 nt, Artificial Sequence
  Description of Artificial Sequence: Synthetic oligonucleotide
gcgcuuaauuucggcggug

SEQ ID NO: 2987173 - RNA, 19 nt, Artificial Sequence
  Description of Artificial Sequence: Synthetic oligonucleotide
gcucgcuggaacuccugcu

SEQ ID NO: 2987174 - RNA, 19 nt, Artificial Sequence
  Description of Artificial Sequence: Synthetic oligonucleotide
gcuuaauuucggcggugau

SEQ ID NO: 2987175 - RNA, 19 nt, Artificial Sequence
  Description of Artificial Sequence: Synthetic oligonucleotide
gcaaggguuucccucuguu

SEQ ID NO: 2987176 - RNA, 19 nt, Artificial Sequence
  Description of Artificial Sequence: Synthetic oligonucleotide
cccuagcuccuguuugaca

SEQ ID NO: 2987177 - RNA, 19 nt, Artificial Sequence
  Description of Artificial Sequence: Synthetic oligonucleotide
cguuggauccauccagcaa

SEQ ID NO: 2987178 - RNA, 19 nt, Artificial Sequence
  Description of Artificial Sequence: Synthetic oligonucleotide
ccccaccguggcccgagcc

SEQ ID NO: 2987179 - RNA, 19 nt, Artificial Sequence
  Description of Artificial Sequence: Synthetic oligonucleotide
cugccucccugacauggau

SEQ ID NO: 2987180 - RNA, 19 nt, Artificial Sequence
  Description of Artificial Sequence: Synthetic oligonucleotide
ccucgagcuucugccuccc

SEQ ID NO: 2987181 - RNA, 19 nt, Artificial Sequence
  Description of Artificial Sequence: Synthetic oligonucleotide
acgggccccaggagcuuga

SEQ ID NO: 2987182 - RNA, 19 nt, Artificial Sequence
  Description of Artificial Sequence: Synthetic oligonucleotide
cgcuuaauuucggcgguga

SEQ ID NO: 2987183 - RNA, 19 nt, Artificial Sequence
  Description of Artificial Sequence: Synthetic oligonucleotide
cgauucguagcgcuuaauu

SEQ ID NO: 2987184 - RNA, 19 nt, Artificial Sequence
  Description of Artificial Sequence: Synthetic oligonucleotide
guggcccgagccuccccua

SEQ ID NO: 2987185 - RNA, 19 nt, Artificial Sequence
  Description of Artificial Sequence: Synthetic oligonucleotide
gcccgagccuccccuagcu

SEQ ID NO: 2987186 - RNA, 19 nt, Artificial Sequence
  Description of Artificial Sequence: Synthetic oligonucleotide
caggccuucccaggagccu

SEQ ID NO: 2987187 - RNA, 19 nt, Artificial Sequence
  Description of Artificial Sequence: Synthetic oligonucleotide
guuccuccuucacgauguu

SEQ ID NO: 2987188 - RNA, 19 nt, Artificial Sequence
  Description of Artificial Sequence: Synthetic oligonucleotide
cccgagccuccccuagcuc

SEQ ID NO: 2987189 - RNA, 19 nt, Artificial Sequence
  Description of Artificial Sequence: Synthetic oligonucleotide
cugccugggcucgcuggaa

SEQ ID NO: 2987190 - RNA, 19 nt, Artificial Sequence
  Description of Artificial Sequence: Synthetic oligonucleotide
cccgcagcugcgauucgua

SEQ ID NO: 2987191 - RNA, 19 nt, Artificial Sequence
  Description of Artificial Sequence: Synthetic oligonucleotide
ccauggggucaggccuucc

SEQ ID NO: 2987192 - RNA, 19 nt, Artificial Sequence
  Description of Artificial Sequence: Synthetic oligonucleotide
cccuuuccauggggucagg

SEQ ID NO: 2987193 - RNA, 19 nt, Artificial Sequence
  Description of Artificial Sequence: Synthetic oligonucleotide
cuuccccaccguggcccga

SEQ ID NO: 2987194 - RNA, 19 nt, Artificial Sequence
  Description of Artificial Sequence: Synthetic oligonucleotide
gcugugccucgagcuucug

SEQ ID NO: 2987195 - RNA, 19 nt, Artificial Sequence
  Description of Artificial Sequence: Synthetic oligonucleotide
cucgagcuucugccucccu

SEQ ID NO: 2987196 - RNA, 19 nt, Artificial Sequence
  Description of Artificial Sequence: Synthetic oligonucleotide
gcugcgauucguagcgcuu

SEQ ID NO: 2987197 - RNA, 19 nt, Artificial Sequence
  Description of Artificial Sequence: Synthetic oligonucleotide
cggcggugauguaguccag

SEQ ID NO: 2987198 - RNA, 19 nt, Artificial Sequence
  Description of Artificial Sequence: Synthetic oligonucleotide
ccguggcccgagccucccc

SEQ ID NO: 2987199 - RNA, 19 nt, Artificial Sequence
  Description of Artificial Sequence: Synthetic oligonucleotide
cggugauguaguccagccu

SEQ ID NO: 2987200 - RNA, 19 nt, Artificial Sequence
  Description of Artificial Sequence: Synthetic oligonucleotide
ccaguuccuccuucacgau

SEQ ID NO: 2987201 - RNA, 19 nt, Artificial Sequence
  Description of Artificial Sequence: Synthetic oligonucleotide
ccuccuucacgauguuauu

SEQ ID NO: 2987202 - RNA, 19 nt, Artificial Sequence
  Description of Artificial Sequence: Synthetic oligonucleotide
ccagccucuuccccaccgu

SEQ ID NO: 2987203 - RNA, 19 nt, Artificial Sequence
  Description of Artificial Sequence: Synthetic oligonucleotide
cgagccuccccuagcuccu

SEQ ID NO: 2987204 - RNA, 19 nt, Artificial Sequence
  Description of Artificial Sequence: Synthetic oligonucleotide
gcgauucguagcgcuuaau

SEQ ID NO: 2987205 - RNA, 19 nt, Artificial Sequence
  Description of Artificial Sequence: Synthetic oligonucleotide
cguggcccgagccuccccu

SEQ ID NO: 2987206 - RNA, 19 nt, Artificial Sequence
  Description of Artificial Sequence: Synthetic oligonucleotide
gccuccccuagcuccuguu

SEQ ID NO: 2987207 - RNA, 19 nt, Artificial Sequence
  Description of Artificial Sequence: Synthetic oligonucleotide
gcacgggccccaggagcuu

SEQ ID NO: 2987208 - RNA, 19 nt, Artificial Sequence
  Description of Artificial Sequence: Synthetic oligonucleotide
cgggccccaggagcuugaa

SEQ ID NO: 2987209 - RNA, 19 nt, Artificial Sequence
  Description of Artificial Sequence: Synthetic oligonucleotide
uuuuccaucaucaaggagc

SEQ ID NO: 2987210 - RNA, 19 nt, Artificial Sequence
  Description of Artificial Sequence: Synthetic oligonucleotide
gaaauggguaucuagaggg

SEQ ID NO: 2987211 - RNA, 19 nt, Artificial Sequence
  Description of Artificial Sequence: Synthetic oligonucleotide
agugaagccacacucgccc

SEQ ID NO: 2987212 - RNA, 19 nt, Artificial Sequence
  Description of Artificial Sequence: Synthetic oligonucleotide
augagaaacucguccaucc

SEQ ID NO: 2987213 - RNA, 19 nt, Artificial Sequence
  Description of Artificial Sequence: Synthetic oligonucleotide
aauccuguggcuucaucac

SEQ ID NO: 2987214 - RNA, 19 nt, Artificial Sequence
  Description of Artificial Sequence: Synthetic oligonucleotide
gaucaugagaaacucgucc

SEQ ID NO: 2987215 - RNA, 19 nt, Artificial Sequence
  Description of Artificial Sequence: Synthetic oligonucleotide
uccaucaucaaggagcugg

SEQ ID NO: 2987216 - RNA, 19 nt, Artificial Sequence
  Description of Artificial Sequence: Synthetic oligonucleotide
uuuauugaggaaaugggua

SEQ ID NO: 2987217 - RNA, 19 nt, Artificial Sequence
  Description of Artificial Sequence: Synthetic oligonucleotide
aacucguccaucccggugg

SEQ ID NO: 2987218 - RNA, 19 nt, Artificial Sequence
  Description of Artificial Sequence: Synthetic oligonucleotide
uggagaagggcucaaugcg

SEQ ID NO: 2987219 - RNA, 19 nt, Artificial Sequence
  Description of Artificial Sequence: Synthetic oligonucleotide
aaaggcaucugcucggaag

SEQ ID NO: 2987220 - RNA, 19 nt, Artificial Sequence
  Description of Artificial Sequence: Synthetic oligonucleotide
aaggcaucugcucggaagg

SEQ ID NO: 2987221 - RNA, 19 nt, Artificial Sequence
  Description of Artificial Sequence: Synthetic oligonucleotide
uguucauuggcacugccug

SEQ ID NO: 2987222 - RNA, 19 nt, Artificial Sequence
  Description of Artificial Sequence: Synthetic oligonucleotide
aaugcgcagggcuucaaag

SEQ ID NO: 2987223 - RNA, 19 nt, Artificial Sequence
  Description of Artificial Sequence: Synthetic oligonucleotide
ugaggaaauggguaucuag

SEQ ID NO: 2987224 - RNA, 19 nt, Artificial Sequence
  Description of Artificial Sequence: Synthetic oligonucleotide
gagaaacucguccaucccg

SEQ ID NO: 2987225 - RNA, 19 nt, Artificial Sequence
  Description of Artificial Sequence: Synthetic oligonucleotide
cuucaaaggcaucugcucg

SEQ ID NO: 2987226 - RNA, 19 nt, Artificial Sequence
  Description of Artificial Sequence: Synthetic oligonucleotide
cuucaucacaucuggaagc

SEQ ID NO: 2987227 - RNA, 19 nt, Artificial Sequence
  Description of Artificial Sequence: Synthetic oligonucleotide
uucaaaggcaucugcucgg

SEQ ID NO: 2987228 - RNA, 19 nt, Artificial Sequence
  Description of Artificial Sequence: Synthetic oligonucleotide
caggaugugcuucagcucg

SEQ ID NO: 2987229 - RNA, 19 nt, Artificial Sequence
  Description of Artificial Sequence: Synthetic oligonucleotide
aggaaauggguaucuagag

SEQ ID NO: 2987230 - RNA, 19 nt, Artificial Sequence
  Description of Artificial Sequence: Synthetic oligonucleotide
uuauugaggaaauggguau

SEQ ID NO: 2987231 - RNA, 19 nt, Artificial Sequence
  Description of Artificial Sequence: Synthetic oligonucleotide
uuuccaucaucaaggagcu

SEQ ID NO: 2987232 - RNA, 19 nt, Artificial Sequence
  Description of Artificial Sequence: Synthetic oligonucleotide
uucagcucgaacacgguac

SEQ ID NO: 2987233 - RNA, 19 nt, Artificial Sequence
  Description of Artificial Sequence: Synthetic oligonucleotide
aagggcucaaugcgcaggg

SEQ ID NO: 2987234 - RNA, 19 nt, Artificial Sequence
  Description of Artificial Sequence: Synthetic oligonucleotide
uggucauccuuguacagcc

SEQ ID NO: 2987235 - RNA, 19 nt, Artificial Sequence
  Description of Artificial Sequence: Synthetic oligonucleotide
uguggcuucaucacaucug

SEQ ID NO: 2987236 - RNA, 19 nt, Artificial Sequence
  Description of Artificial Sequence: Synthetic oligonucleotide
aucaugagaaacucgucca

SEQ ID NO: 2987237 - RNA, 19 nt, Artificial Sequence
  Description of Artificial Sequence: Synthetic oligonucleotide
gaauccuguggcuucauca

SEQ ID NO: 2987238 - RNA, 19 nt, Artificial Sequence
  Description of Artificial Sequence: Synthetic oligonucleotide
uguggugccagaucaugag

SEQ ID NO: 2987239 - RNA, 19 nt, Artificial Sequence
  Description of Artificial Sequence: Synthetic oligonucleotide
guaucuagagggguggugg

SEQ ID NO: 2987240 - RNA, 19 nt, Artificial Sequence
  Description of Artificial Sequence: Synthetic oligonucleotide
cuggagaagggcucaaugc

SEQ ID NO: 2987241 - RNA, 19 nt, Artificial Sequence
  Description of Artificial Sequence: Synthetic oligonucleotide
caucuggaagcucuggagg

SEQ ID NO: 2987242 - RNA, 19 nt, Artificial Sequence
  Description of Artificial Sequence: Synthetic oligonucleotide
guggcuucaucacaucugg

SEQ ID NO: 2987243 - RNA, 19 nt, Artificial Sequence
  Description of Artificial Sequence: Synthetic oligonucleotide
ucuggaggacuggagaagg

SEQ ID NO: 2987244 - RNA, 19 nt, Artificial Sequence
  Description of Artificial Sequence: Synthetic oligonucleotide
ucgaacacgguacucgacu

SEQ ID NO: 2987245 - RNA, 19 nt, Artificial Sequence
  Description of Artificial Sequence: Synthetic oligonucleotide
aucaaggagcuggucaucc

SEQ ID NO: 2987246 - RNA, 19 nt, Artificial Sequence
  Description of Artificial Sequence: Synthetic oligonucleotide
uugaggaugcccuccagga

SEQ ID NO: 2987247 - RNA, 19 nt, Artificial Sequence
  Description of Artificial Sequence: Synthetic oligonucleotide
acaucuggaagcucuggag

SEQ ID NO: 2987248 - RNA, 19 nt, Artificial Sequence
  Description of Artificial Sequence: Synthetic oligonucleotide
gaggaugcccuccaggaug

SEQ ID NO: 2987249 - RNA, 19 nt, Artificial Sequence
  Description of Artificial Sequence: Synthetic oligonucleotide
ggaaauggguaucuagagg

SEQ ID NO: 2987250 - RNA, 19 nt, Artificial Sequence
  Description of Artificial Sequence: Synthetic oligonucleotide
cuagugaagccacacucgc

SEQ ID NO: 2987251 - RNA, 19 nt, Artificial Sequence
  Description of Artificial Sequence: Synthetic oligonucleotide
aaauggguaucuagagggg

SEQ ID NO: 2987252 - RNA, 19 nt, Artificial Sequence
  Description of Artificial Sequence: Synthetic oligonucleotide
ugccagaucaugagaaacu

SEQ ID NO: 2987253 - RNA, 19 nt, Artificial Sequence
  Description of Artificial Sequence: Synthetic oligonucleotide
ugcucggaaggccaggccc

SEQ ID NO: 2987254 - RNA, 19 nt, Artificial Sequence
  Description of Artificial Sequence: Synthetic oligonucleotide
aggaugguggucuuguggu

SEQ ID NO: 2987255 - RNA, 19 nt, Artificial Sequence
  Description of Artificial Sequence: Synthetic oligonucleotide
uaucuagaggggugguggg

SEQ ID NO: 2987256 - RNA, 19 nt, Artificial Sequence
  Description of Artificial Sequence: Synthetic oligonucleotide
aauggguaucuagaggggu

SEQ ID NO: 2987257 - RNA, 19 nt, Artificial Sequence
  Description of Artificial Sequence: Synthetic oligonucleotide
ucacugcacagcuuguuca

SEQ ID NO: 2987258 - RNA, 19 nt, Artificial Sequence
  Description of Artificial Sequence: Synthetic oligonucleotide
cuugaggaugcccuccagg

SEQ ID NO: 2987259 - RNA, 19 nt, Artificial Sequence
  Description of Artificial Sequence: Synthetic oligonucleotide
augcgcagggcuucaaagg

SEQ ID NO: 2987260 - RNA, 19 nt, Artificial Sequence
  Description of Artificial Sequence: Synthetic oligonucleotide
gagcuggucauccuuguac

SEQ ID NO: 2987261 - RNA, 19 nt, Artificial Sequence
  Description of Artificial Sequence: Synthetic oligonucleotide
ugcacagcuuguucauugg

SEQ ID NO: 2987262 - RNA, 19 nt, Artificial Sequence
  Description of Artificial Sequence: Synthetic oligonucleotide
uggugccagaucaugagaa

SEQ ID NO: 2987263 - RNA, 19 nt, Artificial Sequence
  Description of Artificial Sequence: Synthetic oligonucleotide
aaacucguccaucccggug

SEQ ID NO: 2987264 - RNA, 19 nt, Artificial Sequence
  Description of Artificial Sequence: Synthetic oligonucleotide
agaaacucguccaucccgg

SEQ ID NO: 2987265 - RNA, 19 nt, Artificial Sequence
  Description of Artificial Sequence: Synthetic oligonucleotide
agcucgaacacgguacucg

SEQ ID NO: 2987266 - RNA, 19 nt, Artificial Sequence
  Description of Artificial Sequence: Synthetic oligonucleotide
augguggucuuguggugcc

SEQ ID NO: 2987267 - RNA, 19 nt, Artificial Sequence
  Description of Artificial Sequence: Synthetic oligonucleotide
gaggaaauggguaucuaga

SEQ ID NO: 2987268 - RNA, 19 nt, Artificial Sequence
  Description of Artificial Sequence: Synthetic oligonucleotide
uggguaucuagaggggugg

SEQ ID NO: 2987269 - RNA, 19 nt, Artificial Sequence
  Description of Artificial Sequence: Synthetic oligonucleotide
gaugguggucuuguggugc

SEQ ID NO: 2987270 - RNA, 19 nt, Artificial Sequence
  Description of Artificial Sequence: Synthetic oligonucleotide
aucuggaagcucuggagga

SEQ ID NO: 2987271 - RNA, 19 nt, Artificial Sequence
  Description of Artificial Sequence: Synthetic oligonucleotide
ucuagagggguggugggcc

SEQ ID NO: 2987272 - RNA, 19 nt, Artificial Sequence
  Description of Artificial Sequence: Synthetic oligonucleotide
gucuuguggugccagauca

SEQ ID NO: 2987273 - RNA, 19 nt, Artificial Sequence
  Description of Artificial Sequence: Synthetic oligonucleotide
uucaucacaucuggaagcu

SEQ ID NO: 2987274 - RNA, 19 nt, Artificial Sequence
  Description of Artificial Sequence: Synthetic oligonucleotide
aucggaggccgcuugagga

SEQ ID NO: 2987275 - RNA, 19 nt, Artificial Sequence
  Description of Artificial Sequence: Synthetic oligonucleotide
ugaagccacacucgcccag

SEQ ID NO: 2987276 - RNA, 19 nt, Artificial Sequence
  Description of Artificial Sequence: Synthetic oligonucleotide
ucaugagaaacucguccau

SEQ ID NO: 2987277 - RNA, 19 nt, Artificial Sequence
  Description of Artificial Sequence: Synthetic oligonucleotide
gaagggcucaaugcgcagg

SEQ ID NO: 2987278 - RNA, 19 nt, Artificial Sequence
  Description of Artificial Sequence: Synthetic oligonucleotide
aacacgguacucgacuccu

SEQ ID NO: 2987279 - RNA, 19 nt, Artificial Sequence
  Description of Artificial Sequence: Synthetic oligonucleotide
agccgcugcacaucggagg

SEQ ID NO: 2987280 - RNA, 19 nt, Artificial Sequence
  Description of Artificial Sequence: Synthetic oligonucleotide
auugaggaaauggguaucu

SEQ ID NO: 2987281 - RNA, 19 nt, Artificial Sequence
  Description of Artificial Sequence: Synthetic oligonucleotide
uucauuggcacugccugca

SEQ ID NO: 2987282 - RNA, 19 nt, Artificial Sequence
  Description of Artificial Sequence: Synthetic oligonucleotide
uagugaagccacacucgcc

SEQ ID NO: 2987283 - RNA, 19 nt, Artificial Sequence
  Description of Artificial Sequence: Synthetic oligonucleotide
gaacacgguacucgacucc

SEQ ID NO: 2987284 - RNA, 19 nt, Artificial Sequence
  Description of Artificial Sequence: Synthetic oligonucleotide
guacagccgcugcacaucg

SEQ ID NO: 2987285 - RNA, 19 nt, Artificial Sequence
  Description of Artificial Sequence: Synthetic oligonucleotide
gucauccuuguacagccgc

SEQ ID NO: 2987286 - RNA, 19 nt, Artificial Sequence
  Description of Artificial Sequence: Synthetic oligonucleotide
cugcacagcuuguucauug

SEQ ID NO: 2987287 - RNA, 19 nt, Artificial Sequence
  Description of Artificial Sequence: Synthetic oligonucleotide
ucagcucgaacacgguacu

SEQ ID NO: 2987288 - RNA, 19 nt, Artificial Sequence
  Description of Artificial Sequence: Synthetic oligonucleotide
agcuggucauccuuguaca

SEQ ID NO: 2987289 - RNA, 19 nt, Artificial Sequence
  Description of Artificial Sequence: Synthetic oligonucleotide
acgguacucgacuccuugg

SEQ ID NO: 2987290 - RNA, 19 nt, Artificial Sequence
  Description of Artificial Sequence: Synthetic oligonucleotide
uccuguggcuucaucacau

SEQ ID NO: 2987291 - RNA, 19 nt, Artificial Sequence
  Description of Artificial Sequence: Synthetic oligonucleotide
agaauccuguggcuucauc

SEQ ID NO: 2987292 - RNA, 19 nt, Artificial Sequence
  Description of Artificial Sequence: Synthetic oligonucleotide
agcucuggaggacuggaga

SEQ ID NO: 2987293 - RNA, 19 nt, Artificial Sequence
  Description of Artificial Sequence: Synthetic oligonucleotide
ugucuggcuagugaagcca

SEQ ID NO: 2987294 - RNA, 19 nt, Artificial Sequence
  Description of Artificial Sequence: Synthetic oligonucleotide
ucauccuuguacagccgcu

SEQ ID NO: 2987295 - RNA, 19 nt, Artificial Sequence
  Description of Artificial Sequence: Synthetic oligonucleotide
uggaggacuggagaagggc

SEQ ID NO: 2987296 - RNA, 19 nt, Artificial Sequence
  Description of Artificial Sequence: Synthetic oligonucleotide
uccuuguacagccgcugca

SEQ ID NO: 2987297 - RNA, 19 nt, Artificial Sequence
  Description of Artificial Sequence: Synthetic oligonucleotide
cagaucaugagaaacucgu

SEQ ID NO: 2987298 - RNA, 19 nt, Artificial Sequence
  Description of Artificial Sequence: Synthetic oligonucleotide
uauugaggaaauggguauc

SEQ ID NO: 2987299 - RNA, 19 nt, Artificial Sequence
  Description of Artificial Sequence: Synthetic oligonucleotide
ucacaucuggaagcucugg

SEQ ID NO: 2987300 - RNA, 19 nt, Artificial Sequence
  Description of Artificial Sequence: Synthetic oligonucleotide
aucuagagggguggugggc

SEQ ID NO: 2987301 - RNA, 19 nt, Artificial Sequence
  Description of Artificial Sequence: Synthetic oligonucleotide
agaucaugagaaacucguc

SEQ ID NO: 2987302 - RNA, 19 nt, Artificial Sequence
  Description of Artificial Sequence: Synthetic oligonucleotide
gguacucgacuccuuggcg

SEQ ID NO: 2987303 - RNA, 19 nt, Artificial Sequence
  Description of Artificial Sequence: Synthetic oligonucleotide
cuuguucauuggcacugcc

SEQ ID NO: 2987304 - RNA, 19 nt, Artificial Sequence
  Description of Artificial Sequence: Synthetic oligonucleotide
aaggagcuggucauccuug

SEQ ID NO: 2987305 - RNA, 19 nt, Artificial Sequence
  Description of Artificial Sequence: Synthetic oligonucleotide
uggaagcucuggaggacug

SEQ ID NO: 2987306 - RNA, 19 nt, Artificial Sequence
  Description of Artificial Sequence: Synthetic oligonucleotide
uccuuggcguccgugagga

SEQ ID NO: 2987307 - RNA, 19 nt, Artificial Sequence
  Description of Artificial Sequence: Synthetic oligonucleotide
guucauuggcacugccugc

SEQ ID NO: 2987308 - RNA, 19 nt, Artificial Sequence
  Description of Artificial Sequence: Synthetic oligonucleotide
cugucuggcuagugaagcc

SEQ ID NO: 2987309 - RNA, 19 nt, Artificial Sequence
  Description of Artificial Sequence: Synthetic oligonucleotide
cuggucauccuuguacagc

SEQ ID NO: 2987310 - RNA, 19 nt, Artificial Sequence
  Description of Artificial Sequence: Synthetic oligonucleotide
acucguccaucccgguggc

SEQ ID NO: 2987311 - RNA, 19 nt, Artificial Sequence
  Description of Artificial Sequence: Synthetic oligonucleotide
ucauuggcacugccugcag

SEQ ID NO: 2987312 - RNA, 19 nt, Artificial Sequence
  Description of Artificial Sequence: Synthetic oligonucleotide
ggcuagugaagccacacuc

SEQ ID NO: 2987313 - RNA, 19 nt, Artificial Sequence
  Description of Artificial Sequence: Synthetic oligonucleotide
gcuagugaagccacacucg

SEQ ID NO: 2987314 - RNA, 19 nt, Artificial Sequence
  Description of Artificial Sequence: Synthetic oligonucleotide
acagccgcugcacaucgga

SEQ ID NO: 2987315 - RNA, 19 nt, Artificial Sequence
  Description of Artificial Sequence: Synthetic oligonucleotide
cucacugcacagcuuguuc

SEQ ID NO: 2987316 - RNA, 19 nt, Artificial Sequence
  Description of Artificial Sequence: Synthetic oligonucleotide
cuuguggugccagaucaug

SEQ ID NO: 2987317 - RNA, 19 nt, Artificial Sequence
  Description of Artificial Sequence: Synthetic oligonucleotide
cuggaggacuggagaaggg

SEQ ID NO: 2987318 - RNA, 19 nt, Artificial Sequence
  Description of Artificial Sequence: Synthetic oligonucleotide
ucguccaucccgguggcug

SEQ ID NO: 2987319 - RNA, 19 nt, Artificial Sequence
  Description of Artificial Sequence: Synthetic oligonucleotide
agaagggcucaaugcgcag

SEQ ID NO: 2987320 - RNA, 19 nt, Artificial Sequence
  Description of Artificial Sequence: Synthetic oligonucleotide
gacuccuuggcguccguga

SEQ ID NO: 2987321 - RNA, 19 nt, Artificial Sequence
  Description of Artificial Sequence: Synthetic oligonucleotide
acugccugcagaauccugu

SEQ ID NO: 2987322 - RNA, 19 nt, Artificial Sequence
  Description of Artificial Sequence: Synthetic oligonucleotide
uggcuagugaagccacacu

SEQ ID NO: 2987323 - RNA, 19 nt, Artificial Sequence
  Description of Artificial Sequence: Synthetic oligonucleotide
ccagaucaugagaaacucg

SEQ ID NO: 2987324 - RNA, 19 nt, Artificial Sequence
  Description of Artificial Sequence: Synthetic oligonucleotide
ucuggcuagugaagccaca

SEQ ID NO: 2987325 - RNA, 19 nt, Artificial Sequence
  Description of Artificial Sequence: Synthetic oligonucleotide
caugagaaacucguccauc

SEQ ID NO: 2987326 - RNA, 19 nt, Artificial Sequence
  Description of Artificial Sequence: Synthetic oligonucleotide
ucugcucggaaggccaggc

SEQ ID NO: 2987327 - RNA, 19 nt, Artificial Sequence
  Description of Artificial Sequence: Synthetic oligonucleotide
caucggaggccgcuugagg

SEQ ID NO: 2987328 - RNA, 19 nt, Artificial Sequence
  Description of Artificial Sequence: Synthetic oligonucleotide
ugaggaugcccuccaggau

SEQ ID NO: 2987329 - RNA, 19 nt, Artificial Sequence
  Description of Artificial Sequence: Synthetic oligonucleotide
gagaagggcucaaugcgca

SEQ ID NO: 2987330 - RNA, 19 nt, Artificial Sequence
  Description of Artificial Sequence: Synthetic oligonucleotide
gaugugcuucagcucgaac

SEQ ID NO: 2987331 - RNA, 19 nt, Artificial Sequence
  Description of Artificial Sequence: Synthetic oligonucleotide
ugaggaugguggucuugug

SEQ ID NO: 2987332 - RNA, 19 nt, Artificial Sequence
  Description of Artificial Sequence: Synthetic oligonucleotide
cacgguacucgacuccuug

SEQ ID NO: 2987333 - RNA, 19 nt, Artificial Sequence
  Description of Artificial Sequence: Synthetic oligonucleotide
gugccagaucaugagaaac

SEQ ID NO: 2987334 - RNA, 19 nt, Artificial Sequence
  Description of Artificial Sequence: Synthetic oligonucleotide
uacucgacuccuuggcguc

SEQ ID NO: 2987335 - RNA, 19 nt, Artificial Sequence
  Description of Artificial Sequence: Synthetic oligonucleotide
auggguaucuagaggggug

SEQ ID NO: 2987336 - RNA, 19 nt, Artificial Sequence
  Description of Artificial Sequence: Synthetic oligonucleotide
ucuuguggugccagaucau

SEQ ID NO: 2987337 - RNA, 19 nt, Artificial Sequence
  Description of Artificial Sequence: Synthetic oligonucleotide
ucuggaagcucuggaggac

SEQ ID NO: 2987338 - RNA, 19 nt, Artificial Sequence
  Description of Artificial Sequence: Synthetic oligonucleotide
auccuguggcuucaucaca

SEQ ID NO: 2987339 - RNA, 19 nt, Artificial Sequence
  Description of Artificial Sequence: Synthetic oligonucleotide
gcuucaaaggcaucugcuc

SEQ ID NO: 2987340 - RNA, 19 nt, Artificial Sequence
  Description of Artificial Sequence: Synthetic oligonucleotide
gaagcucuggaggacugga

SEQ ID NO: 2987341 - RNA, 19 nt, Artificial Sequence
  Description of Artificial Sequence: Synthetic oligonucleotide
aagcucuggaggacuggag

SEQ ID NO: 2987342 - RNA, 19 nt, Artificial Sequence
  Description of Artificial Sequence: Synthetic oligonucleotide
aggcaucugcucggaaggc

SEQ ID NO: 2987343 - RNA, 19 nt, Artificial Sequence
  Description of Artificial Sequence: Synthetic oligonucleotide
cuggcuagugaagccacac

SEQ ID NO: 2987344 - RNA, 19 nt, Artificial Sequence
  Description of Artificial Sequence: Synthetic oligonucleotide
gcguccgugaggauggugg

SEQ ID NO: 2987345 - RNA, 19 nt, Artificial Sequence
  Description of Artificial Sequence: Synthetic oligonucleotide
ucccgguggcugcuucugg

SEQ ID NO: 2987346 - RNA, 19 nt, Artificial Sequence
  Description of Artificial Sequence: Synthetic oligonucleotide
uacagccgcugcacaucgg

SEQ ID NO: 2987347 - RNA, 19 nt, Artificial Sequence
  Description of Artificial Sequence: Synthetic oligonucleotide
cucuggaggacuggagaag

SEQ ID NO: 2987348 - RNA, 19 nt, Artificial Sequence
  Description of Artificial Sequence: Synthetic oligonucleotide
ggagaagggcucaaugcgc

SEQ ID NO: 2987349 - RNA, 19 nt, Artificial Sequence
  Description of Artificial Sequence: Synthetic oligonucleotide
acucgacuccuuggcgucc

SEQ ID NO: 2987350 - RNA, 19 nt, Artificial Sequence
  Description of Artificial Sequence: Synthetic oligonucleotide
cuccuuggcguccgugagg

SEQ ID NO: 2987351 - RNA, 19 nt, Artificial Sequence
  Description of Artificial Sequence: Synthetic oligonucleotide
cucgaacacgguacucgac

SEQ ID NO: 2987352 - RNA, 19 nt, Artificial Sequence
  Description of Artificial Sequence: Synthetic oligonucleotide
gaggacuggagaagggcuc

SEQ ID NO: 2987353 - RNA, 19 nt, Artificial Sequence
  Description of Artificial Sequence: Synthetic oligonucleotide
cauccuuguacagccgcug

SEQ ID NO: 2987354 - RNA, 19 nt, Artificial Sequence
  Description of Artificial Sequence: Synthetic oligonucleotide
aggagcuggucauccuugu

SEQ ID NO: 2987355 - RNA, 19 nt, Artificial Sequence
  Description of Artificial Sequence: Synthetic oligonucleotide
guacucgacuccuuggcgu

SEQ ID NO: 2987356 - RNA, 19 nt, Artificial Sequence
  Description of Artificial Sequence: Synthetic oligonucleotide
guggcugggccuguggccc

SEQ ID NO: 2987357 - RNA, 19 nt, Artificial Sequence
  Description of Artificial Sequence: Synthetic oligonucleotide
gcccucacugcacagcuug

SEQ ID NO: 2987358 - RNA, 19 nt, Artificial Sequence
  Description of Artificial Sequence: Synthetic oligonucleotide
ggcacugccugcagaaucc

SEQ ID NO: 2987359 - RNA, 19 nt, Artificial Sequence
  Description of Artificial Sequence: Synthetic oligonucleotide
acaucggaggccgcuugag

SEQ ID NO: 2987360 - RNA, 19 nt, Artificial Sequence
  Description of Artificial Sequence: Synthetic oligonucleotide
guggugccagaucaugaga

SEQ ID NO: 2987361 - RNA, 19 nt, Artificial Sequence
  Description of Artificial Sequence: Synthetic oligonucleotide
ucggaggccgcuugaggau

SEQ ID NO: 2987362 - RNA, 19 nt, Artificial Sequence
  Description of Artificial Sequence: Synthetic oligonucleotide
aucacaucuggaagcucug

SEQ ID NO: 2987363 - RNA, 19 nt, Artificial Sequence
  Description of Artificial Sequence: Synthetic oligonucleotide
aggacuggagaagggcuca

SEQ ID NO: 2987364 - RNA, 19 nt, Artificial Sequence
  Description of Artificial Sequence: Synthetic oligonucleotide
uggucuuguggugccagau

SEQ ID NO: 2987365 - RNA, 19 nt, Artificial Sequence
  Description of Artificial Sequence: Synthetic oligonucleotide
uguggcccugcugucuggc

SEQ ID NO: 2987366 - RNA, 19 nt, Artificial Sequence
  Description of Artificial Sequence: Synthetic oligonucleotide
gugcuucagcucgaacacg

SEQ ID NO: 2987367 - RNA, 19 nt, Artificial Sequence
  Description of Artificial Sequence: Synthetic oligonucleotide
ugggccuguggcccugcug

SEQ ID NO: 2987368 - RNA, 19 nt, Artificial Sequence
  Description of Artificial Sequence: Synthetic oligonucleotide
cugcugucuggcuagugaa

SEQ ID NO: 2987369 - RNA, 19 nt, Artificial Sequence
  Description of Artificial Sequence: Synthetic oligonucleotide
gcuggucauccuuguacag

SEQ ID NO: 2987370 - RNA, 19 nt, Artificial Sequence
  Description of Artificial Sequence: Synthetic oligonucleotide
uugaggaaauggguaucua

SEQ ID NO: 2987371 - RNA, 19 nt, Artificial Sequence
  Description of Artificial Sequence: Synthetic oligonucleotide
gggcuucaaaggcaucugc

SEQ ID NO: 2987372 - RNA, 19 nt, Artificial Sequence
  Description of Artificial Sequence: Synthetic oligonucleotide
agggguggugggccugggg

SEQ ID NO: 2987373 - RNA, 19 nt, Artificial Sequence
  Description of Artificial Sequence: Synthetic oligonucleotide
gcacagcuuguucauuggc

SEQ ID NO: 2987374 - RNA, 19 nt, Artificial Sequence
  Description of Artificial Sequence: Synthetic oligonucleotide
agggcucaaugcgcagggc

SEQ ID NO: 2987375 - RNA, 19 nt, Artificial Sequence
  Description of Artificial Sequence: Synthetic oligonucleotide
aggccgcuugaggaugccc

SEQ ID NO: 2987376 - RNA, 19 nt, Artificial Sequence
  Description of Artificial Sequence: Synthetic oligonucleotide
gguggcugcuucuggcuug

SEQ ID NO: 2987377 - RNA, 19 nt, Artificial Sequence
  Description of Artificial Sequence: Synthetic oligonucleotide
cucgacuccuuggcguccg

SEQ ID NO: 2987378 - RNA, 19 nt, Artificial Sequence
  Description of Artificial Sequence: Synthetic oligonucleotide
aucugcucggaaggccagg

SEQ ID NO: 2987379 - RNA, 19 nt, Artificial Sequence
  Description of Artificial Sequence: Synthetic oligonucleotide
gguaucuagagggguggug

SEQ ID NO: 2987380 - RNA, 19 nt, Artificial Sequence
  Description of Artificial Sequence: Synthetic oligonucleotide
gccgcugcacaucggaggc

SEQ ID NO: 2987381 - RNA, 19 nt, Artificial Sequence
  Description of Artificial Sequence: Synthetic oligonucleotide
cuucagcucgaacacggua

SEQ ID NO: 2987382 - RNA, 19 nt, Artificial Sequence
  Description of Artificial Sequence: Synthetic oligonucleotide
ggaugguggucuuguggug

SEQ ID NO: 2987383 - RNA, 19 nt, Artificial Sequence
  Description of Artificial Sequence: Synthetic oligonucleotide
gucuggcuagugaagccac

SEQ ID NO: 2987384 - RNA, 19 nt, Artificial Sequence
  Description of Artificial Sequence: Synthetic oligonucleotide
cagccgcugcacaucggag

SEQ ID NO: 2987385 - RNA, 19 nt, Artificial Sequence
  Description of Artificial Sequence: Synthetic oligonucleotide
aggaugcccuccaggaugu

SEQ ID NO: 2987386 - RNA, 19 nt, Artificial Sequence
  Description of Artificial Sequence: Synthetic oligonucleotide
ugggccuggggcccucacu

SEQ ID NO: 2987387 - RNA, 19 nt, Artificial Sequence
  Description of Artificial Sequence: Synthetic oligonucleotide
cacugccugcagaauccug

SEQ ID NO: 2987388 - RNA, 19 nt, Artificial Sequence
  Description of Artificial Sequence: Synthetic oligonucleotide
gccagaucaugagaaacuc

SEQ ID NO: 2987389 - RNA, 19 nt, Artificial Sequence
  Description of Artificial Sequence: Synthetic oligonucleotide
aagccacacucgcccaguu

SEQ ID NO: 2987390 - RNA, 19 nt, Artificial Sequence
  Description of Artificial Sequence: Synthetic oligonucleotide
uggggcccucacugcacag

SEQ ID NO: 2987391 - RNA, 19 nt, Artificial Sequence
  Description of Artificial Sequence: Synthetic oligonucleotide
aggcccacuguggcugggc

SEQ ID NO: 2987392 - RNA, 19 nt, Artificial Sequence
  Description of Artificial Sequence: Synthetic oligonucleotide
cugcucggaaggccaggcc

SEQ ID NO: 2987393 - RNA, 19 nt, Artificial Sequence
  Description of Artificial Sequence: Synthetic oligonucleotide
ggcccugcugucuggcuag

SEQ ID NO: 2987394 - RNA, 19 nt, Artificial Sequence
  Description of Artificial Sequence: Synthetic oligonucleotide
ggaagcucuggaggacugg

SEQ ID NO: 2987395 - RNA, 19 nt, Artificial Sequence
  Description of Artificial Sequence: Synthetic oligonucleotide
gguggucuuguggugccag

SEQ ID NO: 2987396 - RNA, 19 nt, Artificial Sequence
  Description of Artificial Sequence: Synthetic oligonucleotide
cauuggcacugccugcaga

SEQ ID NO: 2987397 - RNA, 19 nt, Artificial Sequence
  Description of Artificial Sequence: Synthetic oligonucleotide
gugaagccacacucgccca

SEQ ID NO: 2987398 - RNA, 19 nt, Artificial Sequence
  Description of Artificial Sequence: Synthetic oligonucleotide
ggucuuguggugccagauc

SEQ ID NO: 2987399 - RNA, 19 nt, Artificial Sequence
  Description of Artificial Sequence: Synthetic oligonucleotide
cuguggcccugcugucugg

SEQ ID NO: 2987400 - RNA, 19 nt, Artificial Sequence
  Description of Artificial Sequence: Synthetic oligonucleotide
ggcaucugcucggaaggcc

SEQ ID NO: 2987401 - RNA, 19 nt, Artificial Sequence
  Description of Artificial Sequence: Synthetic oligonucleotide
gaaacucguccaucccggu

SEQ ID NO: 2987402 - RNA, 19 nt, Artificial Sequence
  Description of Artificial Sequence: Synthetic oligonucleotide
uagagggguggugggccug

SEQ ID NO: 2987403 - RNA, 19 nt, Artificial Sequence
  Description of Artificial Sequence: Synthetic oligonucleotide
gcucgaacacgguacucga

SEQ ID NO: 2987404 - RNA, 19 nt, Artificial Sequence
  Description of Artificial Sequence: Synthetic oligonucleotide
cuguggcuucaucacaucu

SEQ ID NO: 2987405 - RNA, 19 nt, Artificial Sequence
  Description of Artificial Sequence: Synthetic oligonucleotide
ggucauccuuguacagccg

SEQ ID NO: 2987406 - RNA, 19 nt, Artificial Sequence
  Description of Artificial Sequence: Synthetic oligonucleotide
ggugccagaucaugagaaa

SEQ ID NO: 2987407 - RNA, 19 nt, Artificial Sequence
  Description of Artificial Sequence: Synthetic oligonucleotide
aucccgguggcugcuucug

SEQ ID NO: 2987408 - RNA, 19 nt, Artificial Sequence
  Description of Artificial Sequence: Synthetic oligonucleotide
ucaaugcgcagggcuucaa

SEQ ID NO: 2987409 - RNA, 19 nt, Artificial Sequence
  Description of Artificial Sequence: Synthetic oligonucleotide
ccaggaugugcuucagcuc

SEQ ID NO: 2987410 - RNA, 19 nt, Artificial Sequence
  Description of Artificial Sequence: Synthetic oligonucleotide
ugcacaucggaggccgcuu

SEQ ID NO: 2987411 - RNA, 19 nt, Artificial Sequence
  Description of Artificial Sequence: Synthetic oligonucleotide
caaugcgcagggcuucaaa

SEQ ID NO: 2987412 - RNA, 19 nt, Artificial Sequence
  Description of Artificial Sequence: Synthetic oligonucleotide
uuccaucaucaaggagcug

SEQ ID NO: 2987413 - RNA, 19 nt, Artificial Sequence
  Description of Artificial Sequence: Synthetic oligonucleotide
uuggcacugccugcagaau

SEQ ID NO: 2987414 - RNA, 19 nt, Artificial Sequence
  Description of Artificial Sequence: Synthetic oligonucleotide
agccacacucgcccaguuu

SEQ ID NO: 2987415 - RNA, 19 nt, Artificial Sequence
  Description of Artificial Sequence: Synthetic oligonucleotide
ccugcugucuggcuaguga

SEQ ID NO: 2987416 - RNA, 19 nt, Artificial Sequence
  Description of Artificial Sequence: Synthetic oligonucleotide
guggucuuguggugccaga

SEQ ID NO: 2987417 - RNA, 19 nt, Artificial Sequence
  Description of Artificial Sequence: Synthetic oligonucleotide
gcaucugcucggaaggcca

SEQ ID NO: 2987418 - RNA, 19 nt, Artificial Sequence
  Description of Artificial Sequence: Synthetic oligonucleotide
cgguacucgacuccuuggc

SEQ ID NO: 2987419 - RNA, 19 nt, Artificial Sequence
  Description of Artificial Sequence: Synthetic oligonucleotide
acugcacagcuuguucauu

SEQ ID NO: 2987420 - RNA, 19 nt, Artificial Sequence
  Description of Artificial Sequence: Synthetic oligonucleotide
cacaucggaggccgcuuga

SEQ ID NO: 2987421 - RNA, 19 nt, Artificial Sequence
  Description of Artificial Sequence: Synthetic oligonucleotide
ugguggucuuguggugcca

SEQ ID NO: 2987422 - RNA, 19 nt, Artificial Sequence
  Description of Artificial Sequence: Synthetic oligonucleotide
cgaacacgguacucgacuc

SEQ ID NO: 2987423 - RNA, 19 nt, Artificial Sequence
  Description of Artificial Sequence: Synthetic oligonucleotide
cccgguggcugcuucuggc

SEQ ID NO: 2987424 - RNA, 19 nt, Artificial Sequence
  Description of Artificial Sequence: Synthetic oligonucleotide
aggaugugcuucagcucga

SEQ ID NO: 2987425 - RNA, 19 nt, Artificial Sequence
  Description of Artificial Sequence: Synthetic oligonucleotide
gcacaucggaggccgcuug

SEQ ID NO: 2987426 - RNA, 19 nt, Artificial Sequence
  Description of Artificial Sequence: Synthetic oligonucleotide
gggccuguggcccugcugu

SEQ ID NO: 2987427 - RNA, 19 nt, Artificial Sequence
  Description of Artificial Sequence: Synthetic oligonucleotide
ucgacuccuuggcguccgu

SEQ ID NO: 2987428 - RNA, 19 nt, Artificial Sequence
  Description of Artificial Sequence: Synthetic oligonucleotide
ggaggacuggagaagggcu

SEQ ID NO: 2987429 - RNA, 19 nt, Artificial Sequence
  Description of Artificial Sequence: Synthetic oligonucleotide
cagcuuguucauuggcacu

SEQ ID NO: 2987430 - RNA, 19 nt, Artificial Sequence
  Description of Artificial Sequence: Synthetic oligonucleotide
gggcucaaugcgcagggcu

SEQ ID NO: 2987431 - RNA, 19 nt, Artificial Sequence
  Description of Artificial Sequence: Synthetic oligonucleotide
ggcuucaaaggcaucugcu

SEQ ID NO: 2987432 - RNA, 19 nt, Artificial Sequence
  Description of Artificial Sequence: Synthetic oligonucleotide
cucaaugcgcagggcuuca

SEQ ID NO: 2987433 - RNA, 19 nt, Artificial Sequence
  Description of Artificial Sequence: Synthetic oligonucleotide
cuggggcccucacugcaca

SEQ ID NO: 2987434 - RNA, 19 nt, Artificial Sequence
  Description of Artificial Sequence: Synthetic oligonucleotide
gaggccgcuugaggaugcc

SEQ ID NO: 2987435 - RNA, 19 nt, Artificial Sequence
  Description of Artificial Sequence: Synthetic oligonucleotide
cgcugcacaucggaggccg

SEQ ID NO: 2987436 - RNA, 19 nt, Artificial Sequence
  Description of Artificial Sequence: Synthetic oligonucleotide
gccacacucgcccaguuuu

SEQ ID NO: 2987437 - RNA, 19 nt, Artificial Sequence
  Description of Artificial Sequence: Synthetic oligonucleotide
guccgugaggauggugguc

SEQ ID NO: 2987438 - RNA, 19 nt, Artificial Sequence
  Description of Artificial Sequence: Synthetic oligonucleotide
uggcugggccuguggcccu

SEQ ID NO: 2987439 - RNA, 19 nt, Artificial Sequence
  Description of Artificial Sequence: Synthetic oligonucleotide
gcucaaugcgcagggcuuc

SEQ ID NO: 2987440 - RNA, 19 nt, Artificial Sequence
  Description of Artificial Sequence: Synthetic oligonucleotide
gcagaauccuguggcuuca

SEQ ID NO: 2987441 - RNA, 19 nt, Artificial Sequence
  Description of Artificial Sequence: Synthetic oligonucleotide
cagcucgaacacgguacuc

SEQ ID NO: 2987442 - RNA, 19 nt, Artificial Sequence
  Description of Artificial Sequence: Synthetic oligonucleotide
ucggaaggccaggcccacu

SEQ ID NO: 2987443 - RNA, 19 nt, Artificial Sequence
  Description of Artificial Sequence: Synthetic oligonucleotide
ggaggccgcuugaggaugc

SEQ ID NO: 2987444 - RNA, 19 nt, Artificial Sequence
  Description of Artificial Sequence: Synthetic oligonucleotide
cuggaagcucuggaggacu

SEQ ID NO: 2987445 - RNA, 19 nt, Artificial Sequence
  Description of Artificial Sequence: Synthetic oligonucleotide
guggcugcuucuggcuuga

SEQ ID NO: 2987446 - RNA, 19 nt, Artificial Sequence
  Description of Artificial Sequence: Synthetic oligonucleotide
ccuguggcuucaucacauc

SEQ ID NO: 2987447 - RNA, 19 nt, Artificial Sequence
  Description of Artificial Sequence: Synthetic oligonucleotide
cuagagggguggugggccu

SEQ ID NO: 2987448 - RNA, 19 nt, Artificial Sequence
  Description of Artificial Sequence: Synthetic oligonucleotide
ggggcccucacugcacagc

SEQ ID NO: 2987449 - RNA, 19 nt, Artificial Sequence
  Description of Artificial Sequence: Synthetic oligonucleotide
ccuggggcccucacugcac

SEQ ID NO: 2987450 - RNA, 19 nt, Artificial Sequence
  Description of Artificial Sequence: Synthetic oligonucleotide
cguccaucccgguggcugc

SEQ ID NO: 2987451 - RNA, 19 nt, Artificial Sequence
  Description of Artificial Sequence: Synthetic oligonucleotide
gccgcuugaggaugcccuc

SEQ ID NO: 2987452 - RNA, 19 nt, Artificial Sequence
  Description of Artificial Sequence: Synthetic oligonucleotide
gcucggaaggccaggccca

SEQ ID NO: 2987453 - RNA, 19 nt, Artificial Sequence
  Description of Artificial Sequence: Synthetic oligonucleotide
ggccuggggcccucacugc

SEQ ID NO: 2987454 - RNA, 19 nt, Artificial Sequence
  Description of Artificial Sequence: Synthetic oligonucleotide
gccuggggcccucacugca

SEQ ID NO: 2987455 - RNA, 19 nt, Artificial Sequence
  Description of Artificial Sequence: Synthetic oligonucleotide
ggagcuggucauccuugua

SEQ ID NO: 2987456 - RNA, 19 nt, Artificial Sequence
  Description of Artificial Sequence: Synthetic oligonucleotide
caggcccacuguggcuggg

SEQ ID NO: 2987457 - RNA, 19 nt, Artificial Sequence
  Description of Artificial Sequence: Synthetic oligonucleotide
ccgcuugaggaugcccucc

SEQ ID NO: 2987458 - RNA, 19 nt, Artificial Sequence
  Description of Artificial Sequence: Synthetic oligonucleotide
gggcccucacugcacagcu

SEQ ID NO: 2987459 - RNA, 19 nt, Artificial Sequence
  Description of Artificial Sequence: Synthetic oligonucleotide
gacuggagaagggcucaau

SEQ ID NO: 2987460 - RNA, 19 nt, Artificial Sequence
  Description of Artificial Sequence: Synthetic oligonucleotide
gugggccuggggcccucac

SEQ ID NO: 2987461 - RNA, 19 nt, Artificial Sequence
  Description of Artificial Sequence: Synthetic oligonucleotide
caucccgguggcugcuucu

SEQ ID NO: 2987462 - RNA, 19 nt, Artificial Sequence
  Description of Artificial Sequence: Synthetic oligonucleotide
cugcagaauccuguggcuu

SEQ ID NO: 2987463 - RNA, 19 nt, Artificial Sequence
  Description of Artificial Sequence: Synthetic oligonucleotide
ccugcagaauccuguggcu

SEQ ID NO: 2987464 - RNA, 19 nt, Artificial Sequence
  Description of Artificial Sequence: Synthetic oligonucleotide
ggccgcuugaggaugcccu

SEQ ID NO: 2987465 - RNA, 19 nt, Artificial Sequence
  Description of Artificial Sequence: Synthetic oligonucleotide
uccaucccgguggcugcuu

SEQ ID NO: 2987466 - RNA, 19 nt, Artificial Sequence
  Description of Artificial Sequence: Synthetic oligonucleotide
ggaugugcuucagcucgaa

SEQ ID NO: 2987467 - RNA, 19 nt, Artificial Sequence
  Description of Artificial Sequence: Synthetic oligonucleotide
acacgguacucgacuccuu

SEQ ID NO: 2987468 - RNA, 19 nt, Artificial Sequence
  Description of Artificial Sequence: Synthetic oligonucleotide
ggcguccgugaggauggug

SEQ ID NO: 2987469 - RNA, 19 nt, Artificial Sequence
  Description of Artificial Sequence: Synthetic oligonucleotide
ccuccaggaugugcuucag

SEQ ID NO: 2987470 - RNA, 19 nt, Artificial Sequence
  Description of Artificial Sequence: Synthetic oligonucleotide
ccaucccgguggcugcuuc

SEQ ID NO: 2987471 - RNA, 19 nt, Artificial Sequence
  Description of Artificial Sequence: Synthetic oligonucleotide
cugcacaucggaggccgcu

SEQ ID NO: 2987472 - RNA, 19 nt, Artificial Sequence
  Description of Artificial Sequence: Synthetic oligonucleotide
uggcguccgugaggauggu

SEQ ID NO: 2987473 - RNA, 19 nt, Artificial Sequence
  Description of Artificial Sequence: Synthetic oligonucleotide
uggcugcuucuggcuugac

SEQ ID NO: 2987474 - RNA, 19 nt, Artificial Sequence
  Description of Artificial Sequence: Synthetic oligonucleotide
ggcucaaugcgcagggcuu

SEQ ID NO: 2987475 - RNA, 19 nt, Artificial Sequence
  Description of Artificial Sequence: Synthetic oligonucleotide
cgugaggaugguggucuug

SEQ ID NO: 2987476 - RNA, 19 nt, Artificial Sequence
  Description of Artificial Sequence: Synthetic oligonucleotide
gcugcacaucggaggccgc

SEQ ID NO: 2987477 - RNA, 19 nt, Artificial Sequence
  Description of Artificial Sequence: Synthetic oligonucleotide
ggacuggagaagggcucaa

SEQ ID NO: 2987478 - RNA, 19 nt, Artificial Sequence
  Description of Artificial Sequence: Synthetic oligonucleotide
cggaggccgcuugaggaug

SEQ ID NO: 2987479 - RNA, 19 nt, Artificial Sequence
  Description of Artificial Sequence: Synthetic oligonucleotide
ggguaucuagagggguggu

SEQ ID NO: 2987480 - RNA, 19 nt, Artificial Sequence
  Description of Artificial Sequence: Synthetic oligonucleotide
ccgcugcacaucggaggcc

SEQ ID NO: 2987481 - RNA, 19 nt, Artificial Sequence
  Description of Artificial Sequence: Synthetic oligonucleotide
gcuucagcucgaacacggu

SEQ ID NO: 2987482 - RNA, 19 nt, Artificial Sequence
  Description of Artificial Sequence: Synthetic oligonucleotide
ggcugggccuguggcccug

SEQ ID NO: 2987483 - RNA, 19 nt, Artificial Sequence
  Description of Artificial Sequence: Synthetic oligonucleotide
guccaucccgguggcugcu

SEQ ID NO: 2987484 - RNA, 19 nt, Artificial Sequence
  Description of Artificial Sequence: Synthetic oligonucleotide
cccugcugucuggcuagug

SEQ ID NO: 2987485 - RNA, 19 nt, Artificial Sequence
  Description of Artificial Sequence: Synthetic oligonucleotide
cgcagggcuucaaaggcau

SEQ ID NO: 2987486 - RNA, 19 nt, Artificial Sequence
  Description of Artificial Sequence: Synthetic oligonucleotide
cgacuccuuggcguccgug

SEQ ID NO: 2987487 - RNA, 19 nt, Artificial Sequence
  Description of Artificial Sequence: Synthetic oligonucleotide
cagaauccuguggcuucau

SEQ ID NO: 2987488 - RNA, 19 nt, Artificial Sequence
  Description of Artificial Sequence: Synthetic oligonucleotide
gcacugccugcagaauccu

SEQ ID NO: 2987489 - RNA, 19 nt, Artificial Sequence
  Description of Artificial Sequence: Synthetic oligonucleotide
ggugggccuggggcccuca

SEQ ID NO: 2987490 - RNA, 19 nt, Artificial Sequence
  Description of Artificial Sequence: Synthetic oligonucleotide
cguccgugaggaugguggu

SEQ ID NO: 2987491 - RNA, 19 nt, Artificial Sequence
  Description of Artificial Sequence: Synthetic oligonucleotide
cccucacugcacagcuugu

SEQ ID NO: 2987492 - RNA, 19 nt, Artificial Sequence
  Description of Artificial Sequence: Synthetic oligonucleotide
cucguccaucccgguggcu

SEQ ID NO: 2987493 - RNA, 19 nt, Artificial Sequence
  Description of Artificial Sequence: Synthetic oligonucleotide
ccucacugcacagcuuguu

SEQ ID NO: 2987494 - RNA, 19 nt, Artificial Sequence
  Description of Artificial Sequence: Synthetic oligonucleotide
ggcccucacugcacagcuu

SEQ ID NO: 2987495 - RNA, 19 nt, Artificial Sequence
  Description of Artificial Sequence: Synthetic oligonucleotide
ccgugaggaugguggucuu

SEQ ID NO: 2987496 - RNA, 19 nt, Artificial Sequence
  Description of Artificial Sequence: Synthetic oligonucleotide
aauucagacauuuacuugc

SEQ ID NO: 2987497 - RNA, 19 nt, Artificial Sequence
  Description of Artificial Sequence: Synthetic oligonucleotide
aaagacaaggccuaccagg

SEQ ID NO: 2987498 - RNA, 19 nt, Artificial Sequence
  Description of Artificial Sequence: Synthetic oligonucleotide
uuaggagacaguuaaauac

SEQ ID NO: 2987499 - RNA, 19 nt, Artificial Sequence
  Description of Artificial Sequence: Synthetic oligonucleotide
uaaguuauaauguugguau

SEQ ID NO: 2987500 - RNA, 19 nt, Artificial Sequence
  Description of Artificial Sequence: Synthetic oligonucleotide
agaacuucccauuggaccc

SEQ ID NO: 2987501 - RNA, 19 nt, Artificial Sequence
  Description of Artificial Sequence: Synthetic oligonucleotide
augaaagccauucacagag

SEQ ID NO: 2987502 - RNA, 19 nt, Artificial Sequence
  Description of Artificial Sequence: Synthetic oligonucleotide
ugaccuugaacucacagag

SEQ ID NO: 2987503 - RNA, 19 nt, Artificial Sequence
  Description of Artificial Sequence: Synthetic oligonucleotide
ugcauuuaaaggcacagcc

SEQ ID NO: 2987504 - RNA, 19 nt, Artificial Sequence
  Description of Artificial Sequence: Synthetic oligonucleotide
aauaccgaaccuuauucuc

SEQ ID NO: 2987505 - RNA, 19 nt, Artificial Sequence
  Description of Artificial Sequence: Synthetic oligonucleotide
cuagugaaggacaugaaag

SEQ ID NO: 2987506 - RNA, 19 nt, Artificial Sequence
  Description of Artificial Sequence: Synthetic oligonucleotide
aaaggcacagccuauggug

SEQ ID NO: 2987507 - RNA, 19 nt, Artificial Sequence
  Description of Artificial Sequence: Synthetic oligonucleotide
uagguuacugcauuuaaag

SEQ ID NO: 2987508 - RNA, 19 nt, Artificial Sequence
  Description of Artificial Sequence: Synthetic oligonucleotide
uacuaauucagacauuuac

SEQ ID NO: 2987509 - RNA, 19 nt, Artificial Sequence
  Description of Artificial Sequence: Synthetic oligonucleotide
uccaggauaaucaaaucug

SEQ ID NO: 2987510 - RNA, 19 nt, Artificial Sequence
  Description of Artificial Sequence: Synthetic oligonucleotide
aggauaaucaaaucuggag

SEQ ID NO: 2987511 - RNA, 19 nt, Artificial Sequence
  Description of Artificial Sequence: Synthetic oligonucleotide
uaaauaccgaaccuuauuc

SEQ ID NO: 2987512 - RNA, 19 nt, Artificial Sequence
  Description of Artificial Sequence: Synthetic oligonucleotide
ugcacauccaggauaauca

SEQ ID NO: 2987513 - RNA, 19 nt, Artificial Sequence
  Description of Artificial Sequence: Synthetic oligonucleotide
auaauguugguauagguua

SEQ ID NO: 2987514 - RNA, 19 nt, Artificial Sequence
  Description of Artificial Sequence: Synthetic oligonucleotide
ucagacauuuacuugcuca

SEQ ID NO: 2987515 - RNA, 19 nt, Artificial Sequence
  Description of Artificial Sequence: Synthetic oligonucleotide
agugaaggacaugaaagcc

SEQ ID NO: 2987516 - RNA, 19 nt, Artificial Sequence
  Description of Artificial Sequence: Synthetic oligonucleotide
gguuacugcauuuaaaggc

SEQ ID NO: 2987517 - RNA, 19 nt, Artificial Sequence
  Description of Artificial Sequence: Synthetic oligonucleotide
uaggagacaguuaaauacc

SEQ ID NO: 2987518 - RNA, 19 nt, Artificial Sequence
  Description of Artificial Sequence: Synthetic oligonucleotide
uuaaaggcacagccuaugg

SEQ ID NO: 2987519 - RNA, 19 nt, Artificial Sequence
  Description of Artificial Sequence: Synthetic oligonucleotide
aaauaccgaaccuuauucu

SEQ ID NO: 2987520 - RNA, 19 nt, Artificial Sequence
  Description of Artificial Sequence: Synthetic oligonucleotide
uauaauguugguauagguu

SEQ ID NO: 2987521 - RNA, 19 nt, Artificial Sequence
  Description of Artificial Sequence: Synthetic oligonucleotide
aagccauucacagagagaa

SEQ ID NO: 2987522 - RNA, 19 nt, Artificial Sequence
  Description of Artificial Sequence: Synthetic oligonucleotide
accuuauucuccuugggag

SEQ ID NO: 2987523 - RNA, 19 nt, Artificial Sequence
  Description of Artificial Sequence: Synthetic oligonucleotide
agagaacggcucuucagcc

SEQ ID NO: 2987524 - RNA, 19 nt, Artificial Sequence
  Description of Artificial Sequence: Synthetic oligonucleotide
uaccagguuacuaauucag

SEQ ID NO: 2987525 - RNA, 19 nt, Artificial Sequence
  Description of Artificial Sequence: Synthetic oligonucleotide
guugguauagguuacugca

SEQ ID NO: 2987526 - RNA, 19 nt, Artificial Sequence
  Description of Artificial Sequence: Synthetic oligonucleotide
uuauaauguugguauaggu

SEQ ID NO: 2987527 - RNA, 19 nt, Artificial Sequence
  Description of Artificial Sequence: Synthetic oligonucleotide
aaaagacaaggccuaccag

SEQ ID NO: 2987528 - RNA, 19 nt, Artificial Sequence
  Description of Artificial Sequence: Synthetic oligonucleotide
gaaagccauucacagagag

SEQ ID NO: 2987529 - RNA, 19 nt, Artificial Sequence
  Description of Artificial Sequence: Synthetic oligonucleotide
uaauucagacauuuacuug

SEQ ID NO: 2987530 - RNA, 19 nt, Artificial Sequence
  Description of Artificial Sequence: Synthetic oligonucleotide
agcuaaguuauaauguugg

SEQ ID NO: 2987531 - RNA, 19 nt, Artificial Sequence
  Description of Artificial Sequence: Synthetic oligonucleotide
cagaacuucccauuggacc

SEQ ID NO: 2987532 - RNA, 19 nt, Artificial Sequence
  Description of Artificial Sequence: Synthetic oligonucleotide
uagugaaggacaugaaagc

SEQ ID NO: 2987533 - RNA, 19 nt, Artificial Sequence
  Description of Artificial Sequence: Synthetic oligonucleotide
aguuauaauguugguauag

SEQ ID NO: 2987534 - RNA, 19 nt, Artificial Sequence
  Description of Artificial Sequence: Synthetic oligonucleotide
ugugacaucaguacauaaa

SEQ ID NO: 2987535 - RNA, 19 nt, Artificial Sequence
  Description of Artificial Sequence: Synthetic oligonucleotide
agguuacugcauuuaaagg

SEQ ID NO: 2987536 - RNA, 19 nt, Artificial Sequence
  Description of Artificial Sequence: Synthetic oligonucleotide
agguuacuaauucagacau

SEQ ID NO: 2987537 - RNA, 19 nt, Artificial Sequence
  Description of Artificial Sequence: Synthetic oligonucleotide
auccaggauaaucaaaucu

SEQ ID NO: 2987538 - RNA, 19 nt, Artificial Sequence
  Description of Artificial Sequence: Synthetic oligonucleotide
guuauaauguugguauagg

SEQ ID NO: 2987539 - RNA, 19 nt, Artificial Sequence
  Description of Artificial Sequence: Synthetic oligonucleotide
aaccuuauucuccuuggga

SEQ ID NO: 2987540 - RNA, 19 nt, Artificial Sequence
  Description of Artificial Sequence: Synthetic oligonucleotide
gagagaacggcucuucagc

SEQ ID NO: 2987541 - RNA, 19 nt, Artificial Sequence
  Description of Artificial Sequence: Synthetic oligonucleotide
uuagcuaaguuauaauguu

SEQ ID NO: 2987542 - RNA, 19 nt, Artificial Sequence
  Description of Artificial Sequence: Synthetic oligonucleotide
uuacuugcucagcagaagu

SEQ ID NO: 2987543 - RNA, 19 nt, Artificial Sequence
  Description of Artificial Sequence: Synthetic oligonucleotide
uuaaauaccgaaccuuauu

SEQ ID NO: 2987544 - RNA, 19 nt, Artificial Sequence
  Description of Artificial Sequence: Synthetic oligonucleotide
uagcuaaguuauaauguug

SEQ ID NO: 2987545 - RNA, 19 nt, Artificial Sequence
  Description of Artificial Sequence: Synthetic oligonucleotide
uauagguuacugcauuuaa

SEQ ID NO: 2987546 - RNA, 19 nt, Artificial Sequence
  Description of Artificial Sequence: Synthetic oligonucleotide
ucucagaacuucccauugg

SEQ ID NO: 2987547 - RNA, 19 nt, Artificial Sequence
  Description of Artificial Sequence: Synthetic oligonucleotide
aaggcacagccuauggugc

SEQ ID NO: 2987548 - RNA, 19 nt, Artificial Sequence
  Description of Artificial Sequence: Synthetic oligonucleotide
uguugguauagguuacugc

SEQ ID NO: 2987549 - RNA, 19 nt, Artificial Sequence
  Description of Artificial Sequence: Synthetic oligonucleotide
uggcuuaggagacaguuaa

SEQ ID NO: 2987550 - RNA, 19 nt, Artificial Sequence
  Description of Artificial Sequence: Synthetic oligonucleotide
gacauuuacuugcucagca

SEQ ID NO: 2987551 - RNA, 19 nt, Artificial Sequence
  Description of Artificial Sequence: Synthetic oligonucleotide
ugaaggacaugaaagccau

SEQ ID NO: 2987552 - RNA, 19 nt, Artificial Sequence
  Description of Artificial Sequence: Synthetic oligonucleotide
auaccgaaccuuauucucc

SEQ ID NO: 2987553 - RNA, 19 nt, Artificial Sequence
  Description of Artificial Sequence: Synthetic oligonucleotide
ucagccuugugugacauca

SEQ ID NO: 2987554 - RNA, 19 nt, Artificial Sequence
  Description of Artificial Sequence: Synthetic oligonucleotide
cauuggaccccacugauuc

SEQ ID NO: 2987555 - RNA, 19 nt, Artificial Sequence
  Description of Artificial Sequence: Synthetic oligonucleotide
acaguuaaauaccgaaccu

SEQ ID NO: 2987556 - RNA, 19 nt, Artificial Sequence
  Description of Artificial Sequence: Synthetic oligonucleotide
gagacaguuaaauaccgaa

SEQ ID NO: 2987557 - RNA, 19 nt, Artificial Sequence
  Description of Artificial Sequence: Synthetic oligonucleotide
cuugcucagcagaaguugg

SEQ ID NO: 2987558 - RNA, 19 nt, Artificial Sequence
  Description of Artificial Sequence: Synthetic oligonucleotide
uucucagaacuucccauug

SEQ ID NO: 2987559 - RNA, 19 nt, Artificial Sequence
  Description of Artificial Sequence: Synthetic oligonucleotide
uucacagagagaacggcuc

SEQ ID NO: 2987560 - RNA, 19 nt, Artificial Sequence
  Description of Artificial Sequence: Synthetic oligonucleotide
acuaauucagacauuuacu

SEQ ID NO: 2987561 - RNA, 19 nt, Artificial Sequence
  Description of Artificial Sequence: Synthetic oligonucleotide
uaauguugguauagguuac

SEQ ID NO: 2987562 - RNA, 19 nt, Artificial Sequence
  Description of Artificial Sequence: Synthetic oligonucleotide
cagacauuuacuugcucag

SEQ ID NO: 2987563 - RNA, 19 nt, Artificial Sequence
  Description of Artificial Sequence: Synthetic oligonucleotide
agacaguuaaauaccgaac

SEQ ID NO: 2987564 - RNA, 19 nt, Artificial Sequence
  Description of Artificial Sequence: Synthetic oligonucleotide
acauuuacuugcucagcag

SEQ ID NO: 2987565 - RNA, 19 nt, Artificial Sequence
  Description of Artificial Sequence: Synthetic oligonucleotide
uauggugcuagugaaggac

SEQ ID NO: 2987566 - RNA, 19 nt, Artificial Sequence
  Description of Artificial Sequence: Synthetic oligonucleotide
agagagaacggcucuucag

SEQ ID NO: 2987567 - RNA, 19 nt, Artificial Sequence
  Description of Artificial Sequence: Synthetic oligonucleotide
gaaccuuauucuccuuggg

SEQ ID NO: 2987568 - RNA, 19 nt, Artificial Sequence
  Description of Artificial Sequence: Synthetic oligonucleotide
acugcauuuaaaggcacag

SEQ ID NO: 2987569 - RNA, 19 nt, Artificial Sequence
  Description of Artificial Sequence: Synthetic oligonucleotide
uucucagcugcacugcaca

SEQ ID NO: 2987570 - RNA, 19 nt, Artificial Sequence
  Description of Artificial Sequence: Synthetic oligonucleotide
uuuacuugcucagcagaag

SEQ ID NO: 2987571 - RNA, 19 nt, Artificial Sequence
  Description of Artificial Sequence: Synthetic oligonucleotide
uugugugacaucaguacau

SEQ ID NO: 2987572 - RNA, 19 nt, Artificial Sequence
  Description of Artificial Sequence: Synthetic oligonucleotide
cuuagcuaaguuauaaugu

SEQ ID NO: 2987573 - RNA, 19 nt, Artificial Sequence
  Description of Artificial Sequence: Synthetic oligonucleotide
cugauucucagcugcacug

SEQ ID NO: 2987574 - RNA, 19 nt, Artificial Sequence
  Description of Artificial Sequence: Synthetic oligonucleotide
gugacaucaguacauaaaa

SEQ ID NO: 2987575 - RNA, 19 nt, Artificial Sequence
  Description of Artificial Sequence: Synthetic oligonucleotide
uaaaggcacagccuauggu

SEQ ID NO: 2987576 - RNA, 19 nt, Artificial Sequence
  Description of Artificial Sequence: Synthetic oligonucleotide
aaguuggcuuaggagacag

SEQ ID NO: 2987577 - RNA, 19 nt, Artificial Sequence
  Description of Artificial Sequence: Synthetic oligonucleotide
agacauuuacuugcucagc

SEQ ID NO: 2987578 - RNA, 19 nt, Artificial Sequence
  Description of Artificial Sequence: Synthetic oligonucleotide
ucagaacuucccauuggac

SEQ ID NO: 2987579 - RNA, 19 nt, Artificial Sequence
  Description of Artificial Sequence: Synthetic oligonucleotide
ccuuagcuaaguuauaaug

SEQ ID NO: 2987580 - RNA, 19 nt, Artificial Sequence
  Description of Artificial Sequence: Synthetic oligonucleotide
aagacaaggccuaccaggu

SEQ ID NO: 2987581 - RNA, 19 nt, Artificial Sequence
  Description of Artificial Sequence: Synthetic oligonucleotide
gccauucacagagagaacg

SEQ ID NO: 2987582 - RNA, 19 nt, Artificial Sequence
  Description of Artificial Sequence: Synthetic oligonucleotide
gacaugaaagccauucaca

SEQ ID NO: 2987583 - RNA, 19 nt, Artificial Sequence
  Description of Artificial Sequence: Synthetic oligonucleotide
cauuuaaaggcacagccua

SEQ ID NO: 2987584 - RNA, 19 nt, Artificial Sequence
  Description of Artificial Sequence: Synthetic oligonucleotide
aguucucagaacuucccau

SEQ ID NO: 2987585 - RNA, 19 nt, Artificial Sequence
  Description of Artificial Sequence: Synthetic oligonucleotide
acugauucucagcugcacu

SEQ ID NO: 2987586 - RNA, 19 nt, Artificial Sequence
  Description of Artificial Sequence: Synthetic oligonucleotide
aaguuauaauguugguaua

SEQ ID NO: 2987587 - RNA, 19 nt, Artificial Sequence
  Description of Artificial Sequence: Synthetic oligonucleotide
aggagacaguuaaauaccg

SEQ ID NO: 2987588 - RNA, 19 nt, Artificial Sequence
  Description of Artificial Sequence: Synthetic oligonucleotide
acauccaggauaaucaaau

SEQ ID NO: 2987589 - RNA, 19 nt, Artificial Sequence
  Description of Artificial Sequence: Synthetic oligonucleotide
uccuugggaguucucagaa

SEQ ID NO: 2987590 - RNA, 19 nt, Artificial Sequence
  Description of Artificial Sequence: Synthetic oligonucleotide
aauguugguauagguuacu

SEQ ID NO: 2987591 - RNA, 19 nt, Artificial Sequence
  Description of Artificial Sequence: Synthetic oligonucleotide
ugguauagguuacugcauu

SEQ ID NO: 2987592 - RNA, 19 nt, Artificial Sequence
  Description of Artificial Sequence: Synthetic oligonucleotide
accccacugauucucagcu

SEQ ID NO: 2987593 - RNA, 19 nt, Artificial Sequence
  Description of Artificial Sequence: Synthetic oligonucleotide
ucacagagagaacggcucu

SEQ ID NO: 2987594 - RNA, 19 nt, Artificial Sequence
  Description of Artificial Sequence: Synthetic oligonucleotide
acuugcucagcagaaguug

SEQ ID NO: 2987595 - RNA, 19 nt, Artificial Sequence
  Description of Artificial Sequence: Synthetic oligonucleotide
uugguauagguuacugcau

SEQ ID NO: 2987596 - RNA, 19 nt, Artificial Sequence
  Description of Artificial Sequence: Synthetic oligonucleotide
ccaggauaaucaaaucugg

SEQ ID NO: 2987597 - RNA, 19 nt, Artificial Sequence
  Description of Artificial Sequence: Synthetic oligonucleotide
uaccuuagcuaaguuauaa

SEQ ID NO: 2987598 - RNA, 19 nt, Artificial Sequence
  Description of Artificial Sequence: Synthetic oligonucleotide
cagguuacuaauucagaca

SEQ ID NO: 2987599 - RNA, 19 nt, Artificial Sequence
  Description of Artificial Sequence: Synthetic oligonucleotide
cauuuacuugcucagcaga

SEQ ID NO: 2987600 - RNA, 19 nt, Artificial Sequence
  Description of Artificial Sequence: Synthetic oligonucleotide
aguuaaauaccgaaccuua

SEQ ID NO: 2987601 - RNA, 19 nt, Artificial Sequence
  Description of Artificial Sequence: Synthetic oligonucleotide
ggcucuucagccuugugug

SEQ ID NO: 2987602 - RNA, 19 nt, Artificial Sequence
  Description of Artificial Sequence: Synthetic oligonucleotide
gacaaggccuaccagguua

SEQ ID NO: 2987603 - RNA, 19 nt, Artificial Sequence
  Description of Artificial Sequence: Synthetic oligonucleotide
cauucacagagagaacggc

SEQ ID NO: 2987604 - RNA, 19 nt, Artificial Sequence
  Description of Artificial Sequence: Synthetic oligonucleotide
acugccuggcuaccuuagc

SEQ ID NO: 2987605 - RNA, 19 nt, Artificial Sequence
  Description of Artificial Sequence: Synthetic oligonucleotide
ggacaugaaagccauucac

SEQ ID NO: 2987606 - RNA, 19 nt, Artificial Sequence
  Description of Artificial Sequence: Synthetic oligonucleotide
uaccgaaccuuauucuccu

SEQ ID NO: 2987607 - RNA, 19 nt, Artificial Sequence
  Description of Artificial Sequence: Synthetic oligonucleotide
uugcucagcagaaguuggc

SEQ ID NO: 2987608 - RNA, 19 nt, Artificial Sequence
  Description of Artificial Sequence: Synthetic oligonucleotide
cuugugugacaucaguaca

SEQ ID NO: 2987609 - RNA, 19 nt, Artificial Sequence
  Description of Artificial Sequence: Synthetic oligonucleotide
ugauucucagcugcacugc

SEQ ID NO: 2987610 - RNA, 19 nt, Artificial Sequence
  Description of Artificial Sequence: Synthetic oligonucleotide
aggacaugaaagccauuca

SEQ ID NO: 2987611 - RNA, 19 nt, Artificial Sequence
  Description of Artificial Sequence: Synthetic oligonucleotide
uuacuaauucagacauuua

SEQ ID NO: 2987612 - RNA, 19 nt, Artificial Sequence
  Description of Artificial Sequence: Synthetic oligonucleotide
aaagccauucacagagaga

SEQ ID NO: 2987613 - RNA, 19 nt, Artificial Sequence
  Description of Artificial Sequence: Synthetic oligonucleotide
uucuccuugggaguucuca

SEQ ID NO: 2987614 - RNA, 19 nt, Artificial Sequence
  Description of Artificial Sequence: Synthetic oligonucleotide
ugaaagccauucacagaga

SEQ ID NO: 2987615 - RNA, 19 nt, Artificial Sequence
  Description of Artificial Sequence: Synthetic oligonucleotide
ucuguaaaccaggcugacc

SEQ ID NO: 2987616 - RNA, 19 nt, Artificial Sequence
  Description of Artificial Sequence: Synthetic oligonucleotide
ccagguuacuaauucagac

SEQ ID NO: 2987617 - RNA, 19 nt, Artificial Sequence
  Description of Artificial Sequence: Synthetic oligonucleotide
ucagcagaaguuggcuuag

SEQ ID NO: 2987618 - RNA, 19 nt, Artificial Sequence
  Description of Artificial Sequence: Synthetic oligonucleotide
aggccuaccagguuacuaa

SEQ ID NO: 2987619 - RNA, 19 nt, Artificial Sequence
  Description of Artificial Sequence: Synthetic oligonucleotide
acagagagaacggcucuuc

SEQ ID NO: 2987620 - RNA, 19 nt, Artificial Sequence
  Description of Artificial Sequence: Synthetic oligonucleotide
cuaaguuauaauguuggua

SEQ ID NO: 2987621 - RNA, 19 nt, Artificial Sequence
  Description of Artificial Sequence: Synthetic oligonucleotide
gaguucucagaacuuccca

SEQ ID NO: 2987622 - RNA, 19 nt, Artificial Sequence
  Description of Artificial Sequence: Synthetic oligonucleotide
guuacuaauucagacauuu

SEQ ID NO: 2987623 - RNA, 19 nt, Artificial Sequence
  Description of Artificial Sequence: Synthetic oligonucleotide
ccuauggugcuagugaagg

SEQ ID NO: 2987624 - RNA, 19 nt, Artificial Sequence
  Description of Artificial Sequence: Synthetic oligonucleotide
ccuugugugacaucaguac

SEQ ID NO: 2987625 - RNA, 19 nt, Artificial Sequence
  Description of Artificial Sequence: Synthetic oligonucleotide
auucacagagagaacggcu

SEQ ID NO: 2987626 - RNA, 19 nt, Artificial Sequence
  Description of Artificial Sequence: Synthetic oligonucleotide
cuuaggagacaguuaaaua

SEQ ID NO: 2987627 - RNA, 19 nt, Artificial Sequence
  Description of Artificial Sequence: Synthetic oligonucleotide
cugaccuugaacucacaga

SEQ ID NO: 2987628 - RNA, 19 nt, Artificial Sequence
  Description of Artificial Sequence: Synthetic oligonucleotide
uuggcuuaggagacaguua

SEQ ID NO: 2987629 - RNA, 19 nt, Artificial Sequence
  Description of Artificial Sequence: Synthetic oligonucleotide
cuugggaguucucagaacu

SEQ ID NO: 2987630 - RNA, 19 nt, Artificial Sequence
  Description of Artificial Sequence: Synthetic oligonucleotide
gugaaggacaugaaagcca

SEQ ID NO: 2987631 - RNA, 19 nt, Artificial Sequence
  Description of Artificial Sequence: Synthetic oligonucleotide
gugcuagugaaggacauga

SEQ ID NO: 2987632 - RNA, 19 nt, Artificial Sequence
  Description of Artificial Sequence: Synthetic oligonucleotide
cucagaacuucccauugga

SEQ ID NO: 2987633 - RNA, 19 nt, Artificial Sequence
  Description of Artificial Sequence: Synthetic oligonucleotide
accuuagcuaaguuauaau

SEQ ID NO: 2987634 - RNA, 19 nt, Artificial Sequence
  Description of Artificial Sequence: Synthetic oligonucleotide
caugaaagccauucacaga

SEQ ID NO: 2987635 - RNA, 19 nt, Artificial Sequence
  Description of Artificial Sequence: Synthetic oligonucleotide
cauccaggauaaucaaauc

SEQ ID NO: 2987636 - RNA, 19 nt, Artificial Sequence
  Description of Artificial Sequence: Synthetic oligonucleotide
caggauaaucaaaucugga

SEQ ID NO: 2987637 - RNA, 19 nt, Artificial Sequence
  Description of Artificial Sequence: Synthetic oligonucleotide
uacuugcucagcagaaguu

SEQ ID NO: 2987638 - RNA, 19 nt, Artificial Sequence
  Description of Artificial Sequence: Synthetic oligonucleotide
acaaggccuaccagguuac

SEQ ID NO: 2987639 - RNA, 19 nt, Artificial Sequence
  Description of Artificial Sequence: Synthetic oligonucleotide
uucagacauuuacuugcuc

SEQ ID NO: 2987640 - RNA, 19 nt, Artificial Sequence
  Description of Artificial Sequence: Synthetic oligonucleotide
gauucucagcugcacugca

SEQ ID NO: 2987641 - RNA, 19 nt, Artificial Sequence
  Description of Artificial Sequence: Synthetic oligonucleotide
agccuugugugacaucagu

SEQ ID NO: 2987642 - RNA, 19 nt, Artificial Sequence
  Description of Artificial Sequence: Synthetic oligonucleotide
auuuacuugcucagcagaa

SEQ ID NO: 2987643 - RNA, 19 nt, Artificial Sequence
  Description of Artificial Sequence: Synthetic oligonucleotide
agaacggcucuucagccuu

SEQ ID NO: 2987644 - RNA, 19 nt, Artificial Sequence
  Description of Artificial Sequence: Synthetic oligonucleotide
auguugguauagguuacug

SEQ ID NO: 2987645 - RNA, 19 nt, Artificial Sequence
  Description of Artificial Sequence: Synthetic oligonucleotide
ugggaguucucagaacuuc

SEQ ID NO: 2987646 - RNA, 19 nt, Artificial Sequence
  Description of Artificial Sequence: Synthetic oligonucleotide
uauucuccuugggaguucu

SEQ ID NO: 2987647 - RNA, 19 nt, Artificial Sequence
  Description of Artificial Sequence: Synthetic oligonucleotide
ccauucacagagagaacgg

SEQ ID NO: 2987648 - RNA, 19 nt, Artificial Sequence
  Description of Artificial Sequence: Synthetic oligonucleotide
gcugaccuugaacucacag

SEQ ID NO: 2987649 - RNA, 19 nt, Artificial Sequence
  Description of Artificial Sequence: Synthetic oligonucleotide
ugcucagcagaaguuggcu

SEQ ID NO: 2987650 - RNA, 19 nt, Artificial Sequence
  Description of Artificial Sequence: Synthetic oligonucleotide
auucucagcugcacugcac

SEQ ID NO: 2987651 - RNA, 19 nt, Artificial Sequence
  Description of Artificial Sequence: Synthetic oligonucleotide
cugcauuuaaaggcacagc

SEQ ID NO: 2987652 - RNA, 19 nt, Artificial Sequence
  Description of Artificial Sequence: Synthetic oligonucleotide
cuaccagguuacuaauuca

SEQ ID NO: 2987653 - RNA, 19 nt, Artificial Sequence
  Description of Artificial Sequence: Synthetic oligonucleotide
agccuauggugcuagugaa

SEQ ID NO: 2987654 - RNA, 19 nt, Artificial Sequence
  Description of Artificial Sequence: Synthetic oligonucleotide
ccuaccagguuacuaauuc

SEQ ID NO: 2987655 - RNA, 19 nt, Artificial Sequence
  Description of Artificial Sequence: Synthetic oligonucleotide
cccacugauucucagcugc

SEQ ID NO: 2987656 - RNA, 19 nt, Artificial Sequence
  Description of Artificial Sequence: Synthetic oligonucleotide
acucuguaaaccaggcuga

SEQ ID NO: 2987657 - RNA, 19 nt, Artificial Sequence
  Description of Artificial Sequence: Synthetic oligonucleotide
ugugugacaucaguacaua

SEQ ID NO: 2987658 - RNA, 19 nt, Artificial Sequence
  Description of Artificial Sequence: Synthetic oligonucleotide
auagguuacugcauuuaaa

SEQ ID NO: 2987659 - RNA, 19 nt, Artificial Sequence
  Description of Artificial Sequence: Synthetic oligonucleotide
uggugcuagugaaggacau

SEQ ID NO: 2987660 - RNA, 19 nt, Artificial Sequence
  Description of Artificial Sequence: Synthetic oligonucleotide
ugcuagugaaggacaugaa

SEQ ID NO: 2987661 - RNA, 19 nt, Artificial Sequence
  Description of Artificial Sequence: Synthetic oligonucleotide
cugcacauccaggauaauc

SEQ ID NO: 2987662 - RNA, 19 nt, Artificial Sequence
  Description of Artificial Sequence: Synthetic oligonucleotide
acagccuauggugcuagug

SEQ ID NO: 2987663 - RNA, 19 nt, Artificial Sequence
  Description of Artificial Sequence: Synthetic oligonucleotide
cucuucagccuugugugac

SEQ ID NO: 2987664 - RNA, 19 nt, Artificial Sequence
  Description of Artificial Sequence: Synthetic oligonucleotide
cugcacugcacauccagga

SEQ ID NO: 2987665 - RNA, 19 nt, Artificial Sequence
  Description of Artificial Sequence: Synthetic oligonucleotide
cagccuauggugcuaguga

SEQ ID NO: 2987666 - RNA, 19 nt, Artificial Sequence
  Description of Artificial Sequence: Synthetic oligonucleotide
auucagacauuuacuugcu

SEQ ID NO: 2987667 - RNA, 19 nt, Artificial Sequence
  Description of Artificial Sequence: Synthetic oligonucleotide
uugggaguucucagaacuu

SEQ ID NO: 2987668 - RNA, 19 nt, Artificial Sequence
  Description of Artificial Sequence: Synthetic oligonucleotide
ugccuggcuaccuuagcua

SEQ ID NO: 2987669 - RNA, 19 nt, Artificial Sequence
  Description of Artificial Sequence: Synthetic oligonucleotide
cacugcacauccaggauaa

SEQ ID NO: 2987670 - RNA, 19 nt, Artificial Sequence
  Description of Artificial Sequence: Synthetic oligonucleotide
gcuagugaaggacaugaaa

SEQ ID NO: 2987671 - RNA, 19 nt, Artificial Sequence
  Description of Artificial Sequence: Synthetic oligonucleotide
uuggaccccacugauucuc

SEQ ID NO: 2987672 - RNA, 19 nt, Artificial Sequence
  Description of Artificial Sequence: Synthetic oligonucleotide
gaacuucccauuggacccc

SEQ ID NO: 2987673 - RNA, 19 nt, Artificial Sequence
  Description of Artificial Sequence: Synthetic oligonucleotide
cucagcagaaguuggcuua

SEQ ID NO: 2987674 - RNA, 19 nt, Artificial Sequence
  Description of Artificial Sequence: Synthetic oligonucleotide
auuggaccccacugauucu

SEQ ID NO: 2987675 - RNA, 19 nt, Artificial Sequence
  Description of Artificial Sequence: Synthetic oligonucleotide
auuuaaaggcacagccuau

SEQ ID NO: 2987676 - RNA, 19 nt, Artificial Sequence
  Description of Artificial Sequence: Synthetic oligonucleotide
cgaaccuuauucuccuugg

SEQ ID NO: 2987677 - RNA, 19 nt, Artificial Sequence
  Description of Artificial Sequence: Synthetic oligonucleotide
aggcugaccuugaacucac

SEQ ID NO: 2987678 - RNA, 19 nt, Artificial Sequence
  Description of Artificial Sequence: Synthetic oligonucleotide
auggugcuagugaaggaca

SEQ ID NO: 2987679 - RNA, 19 nt, Artificial Sequence
  Description of Artificial Sequence: Synthetic oligonucleotide
aaggccuaccagguuacua

SEQ ID NO: 2987680 - RNA, 19 nt, Artificial Sequence
  Description of Artificial Sequence: Synthetic oligonucleotide
cacugccuggcuaccuuag

SEQ ID NO: 2987681 - RNA, 19 nt, Artificial Sequence
  Description of Artificial Sequence: Synthetic oligonucleotide
accagguuacuaauucaga

SEQ ID NO: 2987682 - RNA, 19 nt, Artificial Sequence
  Description of Artificial Sequence: Synthetic oligonucleotide
ggaguucucagaacuuccc

SEQ ID NO: 2987683 - RNA, 19 nt, Artificial Sequence
  Description of Artificial Sequence: Synthetic oligonucleotide
gcuaccuuagcuaaguuau

SEQ ID NO: 2987684 - RNA, 19 nt, Artificial Sequence
  Description of Artificial Sequence: Synthetic oligonucleotide
ucucagcugcacugcacau

SEQ ID NO: 2987685 - RNA, 19 nt, Artificial Sequence
  Description of Artificial Sequence: Synthetic oligonucleotide
cuauggugcuagugaagga

SEQ ID NO: 2987686 - RNA, 19 nt, Artificial Sequence
  Description of Artificial Sequence: Synthetic oligonucleotide
cacauccaggauaaucaaa

SEQ ID NO: 2987687 - RNA, 19 nt, Artificial Sequence
  Description of Artificial Sequence: Synthetic oligonucleotide
guauagguuacugcauuua

SEQ ID NO: 2987688 - RNA, 19 nt, Artificial Sequence
  Description of Artificial Sequence: Synthetic oligonucleotide
uuauucuccuugggaguuc

SEQ ID NO: 2987689 - RNA, 19 nt, Artificial Sequence
  Description of Artificial Sequence: Synthetic oligonucleotide
gugugacaucaguacauaa

SEQ ID NO: 2987690 - RNA, 19 nt, Artificial Sequence
  Description of Artificial Sequence: Synthetic oligonucleotide
agccauucacagagagaac

SEQ ID NO: 2987691 - RNA, 19 nt, Artificial Sequence
  Description of Artificial Sequence: Synthetic oligonucleotide
gggaguucucagaacuucc

SEQ ID NO: 2987692 - RNA, 19 nt, Artificial Sequence
  Description of Artificial Sequence: Synthetic oligonucleotide
gaaguuggcuuaggagaca

SEQ ID NO: 2987693 - RNA, 19 nt, Artificial Sequence
  Description of Artificial Sequence: Synthetic oligonucleotide
cacugauucucagcugcac

SEQ ID NO: 2987694 - RNA, 19 nt, Artificial Sequence
  Description of Artificial Sequence: Synthetic oligonucleotide
guuggcuuaggagacaguu

SEQ ID NO: 2987695 - RNA, 19 nt, Artificial Sequence
  Description of Artificial Sequence: Synthetic oligonucleotide
cucuguaaaccaggcugac

SEQ ID NO: 2987696 - RNA, 19 nt, Artificial Sequence
  Description of Artificial Sequence: Synthetic oligonucleotide
cuccuugggaguucucaga

SEQ ID NO: 2987697 - RNA, 19 nt, Artificial Sequence
  Description of Artificial Sequence: Synthetic oligonucleotide
gagaacggcucuucagccu

SEQ ID NO: 2987698 - RNA, 19 nt, Artificial Sequence
  Description of Artificial Sequence: Synthetic oligonucleotide
aacuucccauuggacccca

SEQ ID NO: 2987699 - RNA, 19 nt, Artificial Sequence
  Description of Artificial Sequence: Synthetic oligonucleotide
cucagcugcacugcacauc

SEQ ID NO: 2987700 - RNA, 19 nt, Artificial Sequence
  Description of Artificial Sequence: Synthetic oligonucleotide
aacggcucuucagccuugu

SEQ ID NO: 2987701 - RNA, 19 nt, Artificial Sequence
  Description of Artificial Sequence: Synthetic oligonucleotide
ggcuaccuuagcuaaguua

SEQ ID NO: 2987702 - RNA, 19 nt, Artificial Sequence
  Description of Artificial Sequence: Synthetic oligonucleotide
guuaaauaccgaaccuuau

SEQ ID NO: 2987703 - RNA, 19 nt, Artificial Sequence
  Description of Artificial Sequence: Synthetic oligonucleotide
cagccuugugugacaucag

SEQ ID NO: 2987704 - RNA, 19 nt, Artificial Sequence
  Description of Artificial Sequence: Synthetic oligonucleotide
cagagagaacggcucuuca

SEQ ID NO: 2987705 - RNA, 19 nt, Artificial Sequence
  Description of Artificial Sequence: Synthetic oligonucleotide
guucucagaacuucccauu

SEQ ID NO: 2987706 - RNA, 19 nt, Artificial Sequence
  Description of Artificial Sequence: Synthetic oligonucleotide
accacugccuggcuaccuu

SEQ ID NO: 2987707 - RNA, 19 nt, Artificial Sequence
  Description of Artificial Sequence: Synthetic oligonucleotide
uucagccuugugugacauc

SEQ ID NO: 2987708 - RNA, 19 nt, Artificial Sequence
  Description of Artificial Sequence: Synthetic oligonucleotide
agacaaggccuaccagguu

SEQ ID NO: 2987709 - RNA, 19 nt, Artificial Sequence
  Description of Artificial Sequence: Synthetic oligonucleotide
uggcuaccuuagcuaaguu

SEQ ID NO: 2987710 - RNA, 19 nt, Artificial Sequence
  Description of Artificial Sequence: Synthetic oligonucleotide
gcuaaguuauaauguuggu

SEQ ID NO: 2987711 - RNA, 19 nt, Artificial Sequence
  Description of Artificial Sequence: Synthetic oligonucleotide
ggagacaguuaaauaccga

SEQ ID NO: 2987712 - RNA, 19 nt, Artificial Sequence
  Description of Artificial Sequence: Synthetic oligonucleotide
cagcagaaguuggcuuagg

SEQ ID NO: 2987713 - RNA, 19 nt, Artificial Sequence
  Description of Artificial Sequence: Synthetic oligonucleotide
cuaccuuagcuaaguuaua

SEQ ID NO: 2987714 - RNA, 19 nt, Artificial Sequence
  Description of Artificial Sequence: Synthetic oligonucleotide
gaacggcucuucagccuug

SEQ ID NO: 2987715 - RNA, 19 nt, Artificial Sequence
  Description of Artificial Sequence: Synthetic oligonucleotide
caguuaaauaccgaaccuu

SEQ ID NO: 2987716 - RNA, 19 nt, Artificial Sequence
  Description of Artificial Sequence: Synthetic oligonucleotide
ggaccccacugauucucag

SEQ ID NO: 2987717 - RNA, 19 nt, Artificial Sequence
  Description of Artificial Sequence: Synthetic oligonucleotide
cuuauucuccuugggaguu

SEQ ID NO: 2987718 - RNA, 19 nt, Artificial Sequence
  Description of Artificial Sequence: Synthetic oligonucleotide
cugccuggcuaccuuagcu

SEQ ID NO: 2987719 - RNA, 19 nt, Artificial Sequence
  Description of Artificial Sequence: Synthetic oligonucleotide
ccuggcuaccuuagcuaag

SEQ ID NO: 2987720 - RNA, 19 nt, Artificial Sequence
  Description of Artificial Sequence: Synthetic oligonucleotide
gcacauccaggauaaucaa

SEQ ID NO: 2987721 - RNA, 19 nt, Artificial Sequence
  Description of Artificial Sequence: Synthetic oligonucleotide
gcacugcacauccaggaua

SEQ ID NO: 2987722 - RNA, 19 nt, Artificial Sequence
  Description of Artificial Sequence: Synthetic oligonucleotide
gccuauggugcuagugaag

SEQ ID NO: 2987723 - RNA, 19 nt, Artificial Sequence
  Description of Artificial Sequence: Synthetic oligonucleotide
ccuugggaguucucagaac

SEQ ID NO: 2987724 - RNA, 19 nt, Artificial Sequence
  Description of Artificial Sequence: Synthetic oligonucleotide
acggcucuucagccuugug

SEQ ID NO: 2987725 - RNA, 19 nt, Artificial Sequence
  Description of Artificial Sequence: Synthetic oligonucleotide
auucuccuugggaguucuc

SEQ ID NO: 2987726 - RNA, 19 nt, Artificial Sequence
  Description of Artificial Sequence: Synthetic oligonucleotide
gguauagguuacugcauuu

SEQ ID NO: 2987727 - RNA, 19 nt, Artificial Sequence
  Description of Artificial Sequence: Synthetic oligonucleotide
cuggcuaccuuagcuaagu

SEQ ID NO: 2987728 - RNA, 19 nt, Artificial Sequence
  Description of Artificial Sequence: Synthetic oligonucleotide
gccuggcuaccuuagcuaa

SEQ ID NO: 2987729 - RNA, 19 nt, Artificial Sequence
  Description of Artificial Sequence: Synthetic oligonucleotide
aguuggcuuaggagacagu

SEQ ID NO: 2987730 - RNA, 19 nt, Artificial Sequence
  Description of Artificial Sequence: Synthetic oligonucleotide
accgaaccuuauucuccuu

SEQ ID NO: 2987731 - RNA, 19 nt, Artificial Sequence
  Description of Artificial Sequence: Synthetic oligonucleotide
acuucccauuggaccccac

SEQ ID NO: 2987732 - RNA, 19 nt, Artificial Sequence
  Description of Artificial Sequence: Synthetic oligonucleotide
gcucuucagccuuguguga

SEQ ID NO: 2987733 - RNA, 19 nt, Artificial Sequence
  Description of Artificial Sequence: Synthetic oligonucleotide
gccuugugugacaucagua

SEQ ID NO: 2987734 - RNA, 19 nt, Artificial Sequence
  Description of Artificial Sequence: Synthetic oligonucleotide
acugcacauccaggauaau

SEQ ID NO: 2987735 - RNA, 19 nt, Artificial Sequence
  Description of Artificial Sequence: Synthetic oligonucleotide
ccccacugauucucagcug

SEQ ID NO: 2987736 - RNA, 19 nt, Artificial Sequence
  Description of Artificial Sequence: Synthetic oligonucleotide
cuucagccuugugugacau

SEQ ID NO: 2987737 - RNA, 19 nt, Artificial Sequence
  Description of Artificial Sequence: Synthetic oligonucleotide
ggcuuaggagacaguuaaa

SEQ ID NO: 2987738 - RNA, 19 nt, Artificial Sequence
  Description of Artificial Sequence: Synthetic oligonucleotide
ggccuaccagguuacuaau

SEQ ID NO: 2987739 - RNA, 19 nt, Artificial Sequence
  Description of Artificial Sequence: Synthetic oligonucleotide
gaaggacaugaaagccauu

SEQ ID NO: 2987740 - RNA, 19 nt, Artificial Sequence
  Description of Artificial Sequence: Synthetic oligonucleotide
gguuacuaauucagacauu

SEQ ID NO: 2987741 - RNA, 19 nt, Artificial Sequence
  Description of Artificial Sequence: Synthetic oligonucleotide
cacagagagaacggcucuu

SEQ ID NO: 2987742 - RNA, 19 nt, Artificial Sequence
  Description of Artificial Sequence: Synthetic oligonucleotide
ggcacagccuauggugcua

SEQ ID NO: 2987743 - RNA, 19 nt, Artificial Sequence
  Description of Artificial Sequence: Synthetic oligonucleotide
cggcucuucagccuugugu

SEQ ID NO: 2987744 - RNA, 19 nt, Artificial Sequence
  Description of Artificial Sequence: Synthetic oligonucleotide
cccauuggaccccacugau

SEQ ID NO: 2987745 - RNA, 19 nt, Artificial Sequence
  Description of Artificial Sequence: Synthetic oligonucleotide
cacagccuauggugcuagu

SEQ ID NO: 2987746 - RNA, 19 nt, Artificial Sequence
  Description of Artificial Sequence: Synthetic oligonucleotide
ccacugccuggcuaccuua

SEQ ID NO: 2987747 - RNA, 19 nt, Artificial Sequence
  Description of Artificial Sequence: Synthetic oligonucleotide
caaggccuaccagguuacu

SEQ ID NO: 2987748 - RNA, 19 nt, Artificial Sequence
  Description of Artificial Sequence: Synthetic oligonucleotide
ggcugaccuugaacucaca

SEQ ID NO: 2987749 - RNA, 19 nt, Artificial Sequence
  Description of Artificial Sequence: Synthetic oligonucleotide
ccauuggaccccacugauu

SEQ ID NO: 2987750 - RNA, 19 nt, Artificial Sequence
  Description of Artificial Sequence: Synthetic oligonucleotide
gccuaccagguuacuaauu

SEQ ID NO: 2987751 - RNA, 19 nt, Artificial Sequence
  Description of Artificial Sequence: Synthetic oligonucleotide
aauucauccaacuguaggc

SEQ ID NO: 2987752 - RNA, 19 nt, Artificial Sequence
  Description of Artificial Sequence: Synthetic oligonucleotide
aaauucauccaacuguagg

SEQ ID NO: 2987753 - RNA, 19 nt, Artificial Sequence
  Description of Artificial Sequence: Synthetic oligonucleotide
aauucaaacggacuccacg

SEQ ID NO: 2987754 - RNA, 19 nt, Artificial Sequence
  Description of Artificial Sequence: Synthetic oligonucleotide
aacauaauuaucucuccuc

SEQ ID NO: 2987755 - RNA, 19 nt, Artificial Sequence
  Description of Artificial Sequence: Synthetic oligonucleotide
acugccgaaguccagaagc

SEQ ID NO: 2987756 - RNA, 19 nt, Artificial Sequence
  Description of Artificial Sequence: Synthetic oligonucleotide
ugcaacuugauagagaugc

SEQ ID NO: 2987757 - RNA, 19 nt, Artificial Sequence
  Description of Artificial Sequence: Synthetic oligonucleotide
acagaauucaaacggacuc

SEQ ID NO: 2987758 - RNA, 19 nt, Artificial Sequence
  Description of Artificial Sequence: Synthetic oligonucleotide
gauaauggcgaucuccucg

SEQ ID NO: 2987759 - RNA, 19 nt, Artificial Sequence
  Description of Artificial Sequence: Synthetic oligonucleotide
aauccucuucaugagaugc

SEQ ID NO: 2987760 - RNA, 19 nt, Artificial Sequence
  Description of Artificial Sequence: Synthetic oligonucleotide
gguguuuugaaauucaucc

SEQ ID NO: 2987761 - RNA, 19 nt, Artificial Sequence
  Description of Artificial Sequence: Synthetic oligonucleotide
gaagcuucaacauuccuug

SEQ ID NO: 2987762 - RNA, 19 nt, Artificial Sequence
  Description of Artificial Sequence: Synthetic oligonucleotide
agaugcgugacauagccgg

SEQ ID NO: 2987763 - RNA, 19 nt, Artificial Sequence
  Description of Artificial Sequence: Synthetic oligonucleotide
auagagaugccucucacag

SEQ ID NO: 2987764 - RNA, 19 nt, Artificial Sequence
  Description of Artificial Sequence: Synthetic oligonucleotide
uccuccugcaacuugauag

SEQ ID NO: 2987765 - RNA, 19 nt, Artificial Sequence
  Description of Artificial Sequence: Synthetic oligonucleotide
aaguccagaagcuucaaca

SEQ ID NO: 2987766 - RNA, 19 nt, Artificial Sequence
  Description of Artificial Sequence: Synthetic oligonucleotide
uacuucucgaugaugaccc

SEQ ID NO: 2987767 - RNA, 19 nt, Artificial Sequence
  Description of Artificial Sequence: Synthetic oligonucleotide
ucgaugaugacccgggccg

SEQ ID NO: 2987768 - RNA, 19 nt, Artificial Sequence
  Description of Artificial Sequence: Synthetic oligonucleotide
ugagaugcgugacauagcc

SEQ ID NO: 2987769 - RNA, 19 nt, Artificial Sequence
  Description of Artificial Sequence: Synthetic oligonucleotide
uucuucacagucuuggugc

SEQ ID NO: 2987770 - RNA, 19 nt, Artificial Sequence
  Description of Artificial Sequence: Synthetic oligonucleotide
uguuuugaaauucauccaa

SEQ ID NO: 2987771 - RNA, 19 nt, Artificial Sequence
  Description of Artificial Sequence: Synthetic oligonucleotide
auaauggcgaucuccucgc

SEQ ID NO: 2987772 - RNA, 19 nt, Artificial Sequence
  Description of Artificial Sequence: Synthetic oligonucleotide
uaguacuucucgaugauga

SEQ ID NO: 2987773 - RNA, 19 nt, Artificial Sequence
  Description of Artificial Sequence: Synthetic oligonucleotide
ucaaacggacuccacgugg

SEQ ID NO: 2987774 - RNA, 19 nt, Artificial Sequence
  Description of Artificial Sequence: Synthetic oligonucleotide
cuugcuggggauaauggcg

SEQ ID NO: 2987775 - RNA, 19 nt, Artificial Sequence
  Description of Artificial Sequence: Synthetic oligonucleotide
auccacuucaaugaucucc

SEQ ID NO: 2987776 - RNA, 19 nt, Artificial Sequence
  Description of Artificial Sequence: Synthetic oligonucleotide
uucaaugaucuccuggucu

SEQ ID NO: 2987777 - RNA, 19 nt, Artificial Sequence
  Description of Artificial Sequence: Synthetic oligonucleotide
uuuugaaauucauccaacu

SEQ ID NO: 2987778 - RNA, 19 nt, Artificial Sequence
  Description of Artificial Sequence: Synthetic oligonucleotide
ugaaauucauccaacugua

SEQ ID NO: 2987779 - RNA, 19 nt, Artificial Sequence
  Description of Artificial Sequence: Synthetic oligonucleotide
uccagaagcuucaacauuc

SEQ ID NO: 2987780 - RNA, 19 nt, Artificial Sequence
  Description of Artificial Sequence: Synthetic oligonucleotide
uccaacuguaggcugagug

SEQ ID NO: 2987781 - RNA, 19 nt, Artificial Sequence
  Description of Artificial Sequence: Synthetic oligonucleotide
agaugccucucacaggacc

SEQ ID NO: 2987782 - RNA, 19 nt, Artificial Sequence
  Description of Artificial Sequence: Synthetic oligonucleotide
auuccuuggugucaggauc

SEQ ID NO: 2987783 - RNA, 19 nt, Artificial Sequence
  Description of Artificial Sequence: Synthetic oligonucleotide
aggaacauaauuaucucuc

SEQ ID NO: 2987784 - RNA, 19 nt, Artificial Sequence
  Description of Artificial Sequence: Synthetic oligonucleotide
agagaugccucucacagga

SEQ ID NO: 2987785 - RNA, 19 nt, Artificial Sequence
  Description of Artificial Sequence: Synthetic oligonucleotide
aacuugauagagaugccuc

SEQ ID NO: 2987786 - RNA, 19 nt, Artificial Sequence
  Description of Artificial Sequence: Synthetic oligonucleotide
acauaauuaucucuccucu

SEQ ID NO: 2987787 - RNA, 19 nt, Artificial Sequence
  Description of Artificial Sequence: Synthetic oligonucleotide
aauuaucucuccucucucu

SEQ ID NO: 2987788 - RNA, 19 nt, Artificial Sequence
  Description of Artificial Sequence: Synthetic oligonucleotide
acuucaaugaucuccuggu

SEQ ID NO: 2987789 - RNA, 19 nt, Artificial Sequence
  Description of Artificial Sequence: Synthetic oligonucleotide
caugagaugcgugacauag

SEQ ID NO: 2987790 - RNA, 19 nt, Artificial Sequence
  Description of Artificial Sequence: Synthetic oligonucleotide
aauggcgaucuccucgcac

SEQ ID NO: 2987791 - RNA, 19 nt, Artificial Sequence
  Description of Artificial Sequence: Synthetic oligonucleotide
uucuugcuggggauaaugg

SEQ ID NO: 2987792 - RNA, 19 nt, Artificial Sequence
  Description of Artificial Sequence: Synthetic oligonucleotide
gacauagccggcuaucuug

SEQ ID NO: 2987793 - RNA, 19 nt, Artificial Sequence
  Description of Artificial Sequence: Synthetic oligonucleotide
uucucgaugaugacccggg

SEQ ID NO: 2987794 - RNA, 19 nt, Artificial Sequence
  Description of Artificial Sequence: Synthetic oligonucleotide
ugagaccucaggaacauaa

SEQ ID NO: 2987795 - RNA, 19 nt, Artificial Sequence
  Description of Artificial Sequence: Synthetic oligonucleotide
gucaggauccacuucaaug

SEQ ID NO: 2987796 - RNA, 19 nt, Artificial Sequence
  Description of Artificial Sequence: Synthetic oligonucleotide
auuaucucuccucucucuc

SEQ ID NO: 2987797 - RNA, 19 nt, Artificial Sequence
  Description of Artificial Sequence: Synthetic oligonucleotide
ugaauccucuucaugagau

SEQ ID NO: 2987798 - RNA, 19 nt, Artificial Sequence
  Description of Artificial Sequence: Synthetic oligonucleotide
ugagugaccugcagguugg

SEQ ID NO: 2987799 - RNA, 19 nt, Artificial Sequence
  Description of Artificial Sequence: Synthetic oligonucleotide
auucaaacggacuccacgu

SEQ ID NO: 2987800 - RNA, 19 nt, Artificial Sequence
  Description of Artificial Sequence: Synthetic oligonucleotide
acagucuuggugcgaacgc

SEQ ID NO: 2987801 - RNA, 19 nt, Artificial Sequence
  Description of Artificial Sequence: Synthetic oligonucleotide
ucugaauccucuucaugag

SEQ ID NO: 2987802 - RNA, 19 nt, Artificial Sequence
  Description of Artificial Sequence: Synthetic oligonucleotide
ugguguggaagucauugcc

SEQ ID NO: 2987803 - RNA, 19 nt, Artificial Sequence
  Description of Artificial Sequence: Synthetic oligonucleotide
uggucuagggcugagaccu

SEQ ID NO: 2987804 - RNA, 19 nt, Artificial Sequence
  Description of Artificial Sequence: Synthetic oligonucleotide
aguacuucucgaugaugac

SEQ ID NO: 2987805 - RNA, 19 nt, Artificial Sequence
  Description of Artificial Sequence: Synthetic oligonucleotide
guugguguggaagucauug

SEQ ID NO: 2987806 - RNA, 19 nt, Artificial Sequence
  Description of Artificial Sequence: Synthetic oligonucleotide
cucugaauccucuucauga

SEQ ID NO: 2987807 - RNA, 19 nt, Artificial Sequence
  Description of Artificial Sequence: Synthetic oligonucleotide
ucuugcuggggauaauggc

SEQ ID NO: 2987808 - RNA, 19 nt, Artificial Sequence
  Description of Artificial Sequence: Synthetic oligonucleotide
cacuucaaugaucuccugg

SEQ ID NO: 2987809 - RNA, 19 nt, Artificial Sequence
  Description of Artificial Sequence: Synthetic oligonucleotide
uugauagagaugccucuca

SEQ ID NO: 2987810 - RNA, 19 nt, Artificial Sequence
  Description of Artificial Sequence: Synthetic oligonucleotide
ucgcacacgcgcuuguugg

SEQ ID NO: 2987811 - RNA, 19 nt, Artificial Sequence
  Description of Artificial Sequence: Synthetic oligonucleotide
ucuucacagucuuggugcg

SEQ ID NO: 2987812 - RNA, 19 nt, Artificial Sequence
  Description of Artificial Sequence: Synthetic oligonucleotide
aacagaauucaaacggacu

SEQ ID NO: 2987813 - RNA, 19 nt, Artificial Sequence
  Description of Artificial Sequence: Synthetic oligonucleotide
ucuccucucucucucuucc

SEQ ID NO: 2987814 - RNA, 19 nt, Artificial Sequence
  Description of Artificial Sequence: Synthetic oligonucleotide
ucaggaacauaauuaucuc

SEQ ID NO: 2987815 - RNA, 19 nt, Artificial Sequence
  Description of Artificial Sequence: Synthetic oligonucleotide
ucauccaacuguaggcuga

SEQ ID NO: 2987816 - RNA, 19 nt, Artificial Sequence
  Description of Artificial Sequence: Synthetic oligonucleotide
cucaggaacauaauuaucu

SEQ ID NO: 2987817 - RNA, 19 nt, Artificial Sequence
  Description of Artificial Sequence: Synthetic oligonucleotide
ucucacaggaccucucuga

SEQ ID NO: 2987818 - RNA, 19 nt, Artificial Sequence
  Description of Artificial Sequence: Synthetic oligonucleotide
uugcggaguuucuugcugg

SEQ ID NO: 2987819 - RNA, 19 nt, Artificial Sequence
  Description of Artificial Sequence: Synthetic oligonucleotide
uucaacauuccuugguguc

SEQ ID NO: 2987820 - RNA, 19 nt, Artificial Sequence
  Description of Artificial Sequence: Synthetic oligonucleotide
ucucucuuccuccugcaac

SEQ ID NO: 2987821 - RNA, 19 nt, Artificial Sequence
  Description of Artificial Sequence: Synthetic oligonucleotide
ucucugaauccucuucaug

SEQ ID NO: 2987822 - RNA, 19 nt, Artificial Sequence
  Description of Artificial Sequence: Synthetic oligonucleotide
uguaggcugagugaccugc

SEQ ID NO: 2987823 - RNA, 19 nt, Artificial Sequence
  Description of Artificial Sequence: Synthetic oligonucleotide
aagcuucaacauuccuugg

SEQ ID NO: 2987824 - RNA, 19 nt, Artificial Sequence
  Description of Artificial Sequence: Synthetic oligonucleotide
uagccggcuaucuuguugc

SEQ ID NO: 2987825 - RNA, 19 nt, Artificial Sequence
  Description of Artificial Sequence: Synthetic oligonucleotide
acaggaccucucugaaucc

SEQ ID NO: 2987826 - RNA, 19 nt, Artificial Sequence
  Description of Artificial Sequence: Synthetic oligonucleotide
ugauagagaugccucucac

SEQ ID NO: 2987827 - RNA, 19 nt, Artificial Sequence
  Description of Artificial Sequence: Synthetic oligonucleotide
ucaaugaucuccuggucua

SEQ ID NO: 2987828 - RNA, 19 nt, Artificial Sequence
  Description of Artificial Sequence: Synthetic oligonucleotide
acuugauagagaugccucu

SEQ ID NO: 2987829 - RNA, 19 nt, Artificial Sequence
  Description of Artificial Sequence: Synthetic oligonucleotide
uuucuugcuggggauaaug

SEQ ID NO: 2987830 - RNA, 19 nt, Artificial Sequence
  Description of Artificial Sequence: Synthetic oligonucleotide
uagggcugagaccucagga

SEQ ID NO: 2987831 - RNA, 19 nt, Artificial Sequence
  Description of Artificial Sequence: Synthetic oligonucleotide
uaauuaucucuccucucuc

SEQ ID NO: 2987832 - RNA, 19 nt, Artificial Sequence
  Description of Artificial Sequence: Synthetic oligonucleotide
ugguguuuugaaauucauc

SEQ ID NO: 2987833 - RNA, 19 nt, Artificial Sequence
  Description of Artificial Sequence: Synthetic oligonucleotide
accucaggaacauaauuau

SEQ ID NO: 2987834 - RNA, 19 nt, Artificial Sequence
  Description of Artificial Sequence: Synthetic oligonucleotide
uugcuggggauaauggcga

SEQ ID NO: 2987835 - RNA, 19 nt, Artificial Sequence
  Description of Artificial Sequence: Synthetic oligonucleotide
uagagaugccucucacagg

SEQ ID NO: 2987836 - RNA, 19 nt, Artificial Sequence
  Description of Artificial Sequence: Synthetic oligonucleotide
uucaaacggacuccacgug

SEQ ID NO: 2987837 - RNA, 19 nt, Artificial Sequence
  Description of Artificial Sequence: Synthetic oligonucleotide
cuucuucacagucuuggug

SEQ ID NO: 2987838 - RNA, 19 nt, Artificial Sequence
  Description of Artificial Sequence: Synthetic oligonucleotide
ucaacauuccuugguguca

SEQ ID NO: 2987839 - RNA, 19 nt, Artificial Sequence
  Description of Artificial Sequence: Synthetic oligonucleotide
gauagagaugccucucaca

SEQ ID NO: 2987840 - RNA, 19 nt, Artificial Sequence
  Description of Artificial Sequence: Synthetic oligonucleotide
auagccggcuaucuuguug

SEQ ID NO: 2987841 - RNA, 19 nt, Artificial Sequence
  Description of Artificial Sequence: Synthetic oligonucleotide
cauaauuaucucuccucuc

SEQ ID NO: 2987842 - RNA, 19 nt, Artificial Sequence
  Description of Artificial Sequence: Synthetic oligonucleotide
aacuguaggcugagugacc

SEQ ID NO: 2987843 - RNA, 19 nt, Artificial Sequence
  Description of Artificial Sequence: Synthetic oligonucleotide
gaucuccucgcacacgcgc

SEQ ID NO: 2987844 - RNA, 19 nt, Artificial Sequence
  Description of Artificial Sequence: Synthetic oligonucleotide
cagaauucaaacggacucc

SEQ ID NO: 2987845 - RNA, 19 nt, Artificial Sequence
  Description of Artificial Sequence: Synthetic oligonucleotide
uggaagucauugcccaggc

SEQ ID NO: 2987846 - RNA, 19 nt, Artificial Sequence
  Description of Artificial Sequence: Synthetic oligonucleotide
uguaguacuucucgaugau

SEQ ID NO: 2987847 - RNA, 19 nt, Artificial Sequence
  Description of Artificial Sequence: Synthetic oligonucleotide
uucaugagaugcgugacau

SEQ ID NO: 2987848 - RNA, 19 nt, Artificial Sequence
  Description of Artificial Sequence: Synthetic oligonucleotide
cugagugaccugcagguug

SEQ ID NO: 2987849 - RNA, 19 nt, Artificial Sequence
  Description of Artificial Sequence: Synthetic oligonucleotide
ggaacauaauuaucucucc

SEQ ID NO: 2987850 - RNA, 19 nt, Artificial Sequence
  Description of Artificial Sequence: Synthetic oligonucleotide
gaaauucauccaacuguag

SEQ ID NO: 2987851 - RNA, 19 nt, Artificial Sequence
  Description of Artificial Sequence: Synthetic oligonucleotide
aguccagaagcuucaacau

SEQ ID NO: 2987852 - RNA, 19 nt, Artificial Sequence
  Description of Artificial Sequence: Synthetic oligonucleotide
uuaucucuccucucucucu

SEQ ID NO: 2987853 - RNA, 19 nt, Artificial Sequence
  Description of Artificial Sequence: Synthetic oligonucleotide
cucgaugaugacccgggcc

SEQ ID NO: 2987854 - RNA, 19 nt, Artificial Sequence
  Description of Artificial Sequence: Synthetic oligonucleotide
uuggagagacugccgaagu

SEQ ID NO: 2987855 - RNA, 19 nt, Artificial Sequence
  Description of Artificial Sequence: Synthetic oligonucleotide
guuuugaaauucauccaac

SEQ ID NO: 2987856 - RNA, 19 nt, Artificial Sequence
  Description of Artificial Sequence: Synthetic oligonucleotide
aggcugagugaccugcagg

SEQ ID NO: 2987857 - RNA, 19 nt, Artificial Sequence
  Description of Artificial Sequence: Synthetic oligonucleotide
uguggaagucauugcccag

SEQ ID NO: 2987858 - RNA, 19 nt, Artificial Sequence
  Description of Artificial Sequence: Synthetic oligonucleotide
cuuggugcgaacgcggccc

SEQ ID NO: 2987859 - RNA, 19 nt, Artificial Sequence
  Description of Artificial Sequence: Synthetic oligonucleotide
aacauuccuuggugucagg

SEQ ID NO: 2987860 - RNA, 19 nt, Artificial Sequence
  Description of Artificial Sequence: Synthetic oligonucleotide
uccugcaacuugauagaga

SEQ ID NO: 2987861 - RNA, 19 nt, Artificial Sequence
  Description of Artificial Sequence: Synthetic oligonucleotide
auucauccaacuguaggcu

SEQ ID NO: 2987862 - RNA, 19 nt, Artificial Sequence
  Description of Artificial Sequence: Synthetic oligonucleotide
agaauucaaacggacucca

SEQ ID NO: 2987863 - RNA, 19 nt, Artificial Sequence
  Description of Artificial Sequence: Synthetic oligonucleotide
uaucucuccucucucucuc

SEQ ID NO: 2987864 - RNA, 19 nt, Artificial Sequence
  Description of Artificial Sequence: Synthetic oligonucleotide
gaauccucuucaugagaug

SEQ ID NO: 2987865 - RNA, 19 nt, Artificial Sequence
  Description of Artificial Sequence: Synthetic oligonucleotide
guguuuugaaauucaucca

SEQ ID NO: 2987866 - RNA, 19 nt, Artificial Sequence
  Description of Artificial Sequence: Synthetic oligonucleotide
guacuucucgaugaugacc

SEQ ID NO: 2987867 - RNA, 19 nt, Artificial Sequence
  Description of Artificial Sequence: Synthetic oligonucleotide
auggcgaucuccucgcaca

SEQ ID NO: 2987868 - RNA, 19 nt, Artificial Sequence
  Description of Artificial Sequence: Synthetic oligonucleotide
guggaagucauugcccagg

SEQ ID NO: 2987869 - RNA, 19 nt, Artificial Sequence
  Description of Artificial Sequence: Synthetic oligonucleotide
ugcggaguuucuugcuggg

SEQ ID NO: 2987870 - RNA, 19 nt, Artificial Sequence
  Description of Artificial Sequence: Synthetic oligonucleotide
gaacauaauuaucucuccu

SEQ ID NO: 2987871 - RNA, 19 nt, Artificial Sequence
  Description of Artificial Sequence: Synthetic oligonucleotide
ugcagguuggagagacugc

SEQ ID NO: 2987872 - RNA, 19 nt, Artificial Sequence
  Description of Artificial Sequence: Synthetic oligonucleotide
agguuggagagacugccga

SEQ ID NO: 2987873 - RNA, 19 nt, Artificial Sequence
  Description of Artificial Sequence: Synthetic oligonucleotide
ucuucaugagaugcgugac

SEQ ID NO: 2987874 - RNA, 19 nt, Artificial Sequence
  Description of Artificial Sequence: Synthetic oligonucleotide
guuggagagacugccgaag

SEQ ID NO: 2987875 - RNA, 19 nt, Artificial Sequence
  Description of Artificial Sequence: Synthetic oligonucleotide
gaaguccagaagcuucaac

SEQ ID NO: 2987876 - RNA, 19 nt, Artificial Sequence
  Description of Artificial Sequence: Synthetic oligonucleotide
ucuuggugcgaacgcggcc

SEQ ID NO: 2987877 - RNA, 19 nt, Artificial Sequence
  Description of Artificial Sequence: Synthetic oligonucleotide
cacagucuuggugcgaacg

SEQ ID NO: 2987878 - RNA, 19 nt, Artificial Sequence
  Description of Artificial Sequence: Synthetic oligonucleotide
uuguugguguggaagucau

SEQ ID NO: 2987879 - RNA, 19 nt, Artificial Sequence
  Description of Artificial Sequence: Synthetic oligonucleotide
aaacggacuccacguggug

SEQ ID NO: 2987880 - RNA, 19 nt, Artificial Sequence
  Description of Artificial Sequence: Synthetic oligonucleotide
caacuguaggcugagugac

SEQ ID NO: 2987881 - RNA, 19 nt, Artificial Sequence
  Description of Artificial Sequence: Synthetic oligonucleotide
uaggcugagugaccugcag

SEQ ID NO: 2987882 - RNA, 19 nt, Artificial Sequence
  Description of Artificial Sequence: Synthetic oligonucleotide
gcuucaacauuccuuggug

SEQ ID NO: 2987883 - RNA, 19 nt, Artificial Sequence
  Description of Artificial Sequence: Synthetic oligonucleotide
agaagcuucaacauuccuu

SEQ ID NO: 2987884 - RNA, 19 nt, Artificial Sequence
  Description of Artificial Sequence: Synthetic oligonucleotide
acuguaggcugagugaccu

SEQ ID NO: 2987885 - RNA, 19 nt, Artificial Sequence
  Description of Artificial Sequence: Synthetic oligonucleotide
ucuagggcugagaccucag

SEQ ID NO: 2987886 - RNA, 19 nt, Artificial Sequence
  Description of Artificial Sequence: Synthetic oligonucleotide
agaccucaggaacauaauu

SEQ ID NO: 2987887 - RNA, 19 nt, Artificial Sequence
  Description of Artificial Sequence: Synthetic oligonucleotide
gaccucaggaacauaauua

SEQ ID NO: 2987888 - RNA, 19 nt, Artificial Sequence
  Description of Artificial Sequence: Synthetic oligonucleotide
acgugguguuuugaaauuc

SEQ ID NO: 2987889 - RNA, 19 nt, Artificial Sequence
  Description of Artificial Sequence: Synthetic oligonucleotide
ggagagacugccgaagucc

SEQ ID NO: 2987890 - RNA, 19 nt, Artificial Sequence
  Description of Artificial Sequence: Synthetic oligonucleotide
uccacgugguguuuugaaa

SEQ ID NO: 2987891 - RNA, 19 nt, Artificial Sequence
  Description of Artificial Sequence: Synthetic oligonucleotide
aacggacuccacguggugu

SEQ ID NO: 2987892 - RNA, 19 nt, Artificial Sequence
  Description of Artificial Sequence: Synthetic oligonucleotide
cuucucgaugaugacccgg

SEQ ID NO: 2987893 - RNA, 19 nt, Artificial Sequence
  Description of Artificial Sequence: Synthetic oligonucleotide
uguugcggaguuucuugcu

SEQ ID NO: 2987894 - RNA, 19 nt, Artificial Sequence
  Description of Artificial Sequence: Synthetic oligonucleotide
augagaugcgugacauagc

SEQ ID NO: 2987895 - RNA, 19 nt, Artificial Sequence
  Description of Artificial Sequence: Synthetic oligonucleotide
agucuuggugcgaacgcgg

SEQ ID NO: 2987896 - RNA, 19 nt, Artificial Sequence
  Description of Artificial Sequence: Synthetic oligonucleotide
gagaugcgugacauagccg

SEQ ID NO: 2987897 - RNA, 19 nt, Artificial Sequence
  Description of Artificial Sequence: Synthetic oligonucleotide
guguggaagucauugccca

SEQ ID NO: 2987898 - RNA, 19 nt, Artificial Sequence
  Description of Artificial Sequence: Synthetic oligonucleotide
agggcugagaccucaggaa

SEQ ID NO: 2987899 - RNA, 19 nt, Artificial Sequence
  Description of Artificial Sequence: Synthetic oligonucleotide
caacauuccuuggugucag

SEQ ID NO: 2987900 - RNA, 19 nt, Artificial Sequence
  Description of Artificial Sequence: Synthetic oligonucleotide
cuggucuagggcugagacc

SEQ ID NO: 2987901 - RNA, 19 nt, Artificial Sequence
  Description of Artificial Sequence: Synthetic oligonucleotide
uccucuucaugagaugcgu

SEQ ID NO: 2987902 - RNA, 19 nt, Artificial Sequence
  Description of Artificial Sequence: Synthetic oligonucleotide
uggagagacugccgaaguc

SEQ ID NO: 2987903 - RNA, 19 nt, Artificial Sequence
  Description of Artificial Sequence: Synthetic oligonucleotide
gccuucuucacagucuugg

SEQ ID NO: 2987904 - RNA, 19 nt, Artificial Sequence
  Description of Artificial Sequence: Synthetic oligonucleotide
cagguuggagagacugccg

SEQ ID NO: 2987905 - RNA, 19 nt, Artificial Sequence
  Description of Artificial Sequence: Synthetic oligonucleotide
ucucgaugaugacccgggc

SEQ ID NO: 2987906 - RNA, 19 nt, Artificial Sequence
  Description of Artificial Sequence: Synthetic oligonucleotide
cugcagguuggagagacug

SEQ ID NO: 2987907 - RNA, 19 nt, Artificial Sequence
  Description of Artificial Sequence: Synthetic oligonucleotide
cuagggcugagaccucagg

SEQ ID NO: 2987908 - RNA, 19 nt, Artificial Sequence
  Description of Artificial Sequence: Synthetic oligonucleotide
acuucucgaugaugacccg

SEQ ID NO: 2987909 - RNA, 19 nt, Artificial Sequence
  Description of Artificial Sequence: Synthetic oligonucleotide
uccucucucucucuuccuc

SEQ ID NO: 2987910 - RNA, 19 nt, Artificial Sequence
  Description of Artificial Sequence: Synthetic oligonucleotide
cagucuuggugcgaacgcg

SEQ ID NO: 2987911 - RNA, 19 nt, Artificial Sequence
  Description of Artificial Sequence: Synthetic oligonucleotide
ggggauaauggcgaucucc

SEQ ID NO: 2987912 - RNA, 19 nt, Artificial Sequence
  Description of Artificial Sequence: Synthetic oligonucleotide
auccucuucaugagaugcg

SEQ ID NO: 2987913 - RNA, 19 nt, Artificial Sequence
  Description of Artificial Sequence: Synthetic oligonucleotide
aggauccacuucaaugauc

SEQ ID NO: 2987914 - RNA, 19 nt, Artificial Sequence
  Description of Artificial Sequence: Synthetic oligonucleotide
guaguacuucucgaugaug

SEQ ID NO: 2987915 - RNA, 19 nt, Artificial Sequence
  Description of Artificial Sequence: Synthetic oligonucleotide
cuuggugucaggauccacu

SEQ ID NO: 2987916 - RNA, 19 nt, Artificial Sequence
  Description of Artificial Sequence: Synthetic oligonucleotide
gguguggaagucauugccc

SEQ ID NO: 2987917 - RNA, 19 nt, Artificial Sequence
  Description of Artificial Sequence: Synthetic oligonucleotide
ugacauagccggcuaucuu

SEQ ID NO: 2987918 - RNA, 19 nt, Artificial Sequence
  Description of Artificial Sequence: Synthetic oligonucleotide
acauuccuuggugucagga

SEQ ID NO: 2987919 - RNA, 19 nt, Artificial Sequence
  Description of Artificial Sequence: Synthetic oligonucleotide
gacuccacgugguguuuug

SEQ ID NO: 2987920 - RNA, 19 nt, Artificial Sequence
  Description of Artificial Sequence: Synthetic oligonucleotide
aguuucuugcuggggauaa

SEQ ID NO: 2987921 - RNA, 19 nt, Artificial Sequence
  Description of Artificial Sequence: Synthetic oligonucleotide
gagacugccgaaguccaga

SEQ ID NO: 2987922 - RNA, 19 nt, Artificial Sequence
  Description of Artificial Sequence: Synthetic oligonucleotide
gacugccgaaguccagaag

SEQ ID NO: 2987923 - RNA, 19 nt, Artificial Sequence
  Description of Artificial Sequence: Synthetic oligonucleotide
gcgcguguaguacuucucg

SEQ ID NO: 2987924 - RNA, 19 nt, Artificial Sequence
  Description of Artificial Sequence: Synthetic oligonucleotide
auugcccaggcgcguguag

SEQ ID NO: 2987925 - RNA, 19 nt, Artificial Sequence
  Description of Artificial Sequence: Synthetic oligonucleotide
gaauucaaacggacuccac

SEQ ID NO: 2987926 - RNA, 19 nt, Artificial Sequence
  Description of Artificial Sequence: Synthetic oligonucleotide
caggaacauaauuaucucu

SEQ ID NO: 2987927 - RNA, 19 nt, Artificial Sequence
  Description of Artificial Sequence: Synthetic oligonucleotide
cugaauccucuucaugaga

SEQ ID NO: 2987928 - RNA, 19 nt, Artificial Sequence
  Description of Artificial Sequence: Synthetic oligonucleotide
gcgaucuccucgcacacgc

SEQ ID NO: 2987929 - RNA, 19 nt, Artificial Sequence
  Description of Artificial Sequence: Synthetic oligonucleotide
gaugcgugacauagccggc

SEQ ID NO: 2987930 - RNA, 19 nt, Artificial Sequence
  Description of Artificial Sequence: Synthetic oligonucleotide
ucauugcccaggcgcgugu

SEQ ID NO: 2987931 - RNA, 19 nt, Artificial Sequence
  Description of Artificial Sequence: Synthetic oligonucleotide
gagagacugccgaagucca

SEQ ID NO: 2987932 - RNA, 19 nt, Artificial Sequence
  Description of Artificial Sequence: Synthetic oligonucleotide
cucucacaggaccucucug

SEQ ID NO: 2987933 - RNA, 19 nt, Artificial Sequence
  Description of Artificial Sequence: Synthetic oligonucleotide
cucgcacacgcgcuuguug

SEQ ID NO: 2987934 - RNA, 19 nt, Artificial Sequence
  Description of Artificial Sequence: Synthetic oligonucleotide
uaauggcgaucuccucgca

SEQ ID NO: 2987935 - RNA, 19 nt, Artificial Sequence
  Description of Artificial Sequence: Synthetic oligonucleotide
ggauccacuucaaugaucu

SEQ ID NO: 2987936 - RNA, 19 nt, Artificial Sequence
  Description of Artificial Sequence: Synthetic oligonucleotide
aggcgcguguaguacuucu

SEQ ID NO: 2987937 - RNA, 19 nt, Artificial Sequence
  Description of Artificial Sequence: Synthetic oligonucleotide
uggcgaucuccucgcacac

SEQ ID NO: 2987938 - RNA, 19 nt, Artificial Sequence
  Description of Artificial Sequence: Synthetic oligonucleotide
ggaagucauugcccaggcg

SEQ ID NO: 2987939 - RNA, 19 nt, Artificial Sequence
  Description of Artificial Sequence: Synthetic oligonucleotide
ugcgugacauagccggcua

SEQ ID NO: 2987940 - RNA, 19 nt, Artificial Sequence
  Description of Artificial Sequence: Synthetic oligonucleotide
cuccugcaacuugauagag

SEQ ID NO: 2987941 - RNA, 19 nt, Artificial Sequence
  Description of Artificial Sequence: Synthetic oligonucleotide
aggaccucucugaauccuc

SEQ ID NO: 2987942 - RNA, 19 nt, Artificial Sequence
  Description of Artificial Sequence: Synthetic oligonucleotide
acauagccggcuaucuugu

SEQ ID NO: 2987943 - RNA, 19 nt, Artificial Sequence
  Description of Artificial Sequence: Synthetic oligonucleotide
agugaccugcagguuggag

SEQ ID NO: 2987944 - RNA, 19 nt, Artificial Sequence
  Description of Artificial Sequence: Synthetic oligonucleotide
gcgaacgcggcccaucuug

SEQ ID NO: 2987945 - RNA, 19 nt, Artificial Sequence
  Description of Artificial Sequence: Synthetic oligonucleotide
caaugaucuccuggucuag

SEQ ID NO: 2987946 - RNA, 19 nt, Artificial Sequence
  Description of Artificial Sequence: Synthetic oligonucleotide
ccuggucuagggcugagac

SEQ ID NO: 2987947 - RNA, 19 nt, Artificial Sequence
  Description of Artificial Sequence: Synthetic oligonucleotide
agacugccgaaguccagaa

SEQ ID NO: 2987948 - RNA, 19 nt, Artificial Sequence
  Description of Artificial Sequence: Synthetic oligonucleotide
cugcaacuugauagagaug

SEQ ID NO: 2987949 - RNA, 19 nt, Artificial Sequence
  Description of Artificial Sequence: Synthetic oligonucleotide
cuucaacauuccuuggugu

SEQ ID NO: 2987950 - RNA, 19 nt, Artificial Sequence
  Description of Artificial Sequence: Synthetic oligonucleotide
ucucuccucucucucucuu

SEQ ID NO: 2987951 - RNA, 19 nt, Artificial Sequence
  Description of Artificial Sequence: Synthetic oligonucleotide
cauccaacuguaggcugag

SEQ ID NO: 2987952 - RNA, 19 nt, Artificial Sequence
  Description of Artificial Sequence: Synthetic oligonucleotide
ucaugagaugcgugacaua

SEQ ID NO: 2987953 - RNA, 19 nt, Artificial Sequence
  Description of Artificial Sequence: Synthetic oligonucleotide
ccagaagcuucaacauucc

SEQ ID NO: 2987954 - RNA, 19 nt, Artificial Sequence
  Description of Artificial Sequence: Synthetic oligonucleotide
acggacuccacgugguguu

SEQ ID NO: 2987955 - RNA, 19 nt, Artificial Sequence
  Description of Artificial Sequence: Synthetic oligonucleotide
agccggcuaucuuguugcg

SEQ ID NO: 2987956 - RNA, 19 nt, Artificial Sequence
  Description of Artificial Sequence: Synthetic oligonucleotide
aucucuccucucucucucu

SEQ ID NO: 2987957 - RNA, 19 nt, Artificial Sequence
  Description of Artificial Sequence: Synthetic oligonucleotide
gggcugagaccucaggaac

SEQ ID NO: 2987958 - RNA, 19 nt, Artificial Sequence
  Description of Artificial Sequence: Synthetic oligonucleotide
uuggugcgaacgcggccca

SEQ ID NO: 2987959 - RNA, 19 nt, Artificial Sequence
  Description of Artificial Sequence: Synthetic oligonucleotide
gaugccucucacaggaccu

SEQ ID NO: 2987960 - RNA, 19 nt, Artificial Sequence
  Description of Artificial Sequence: Synthetic oligonucleotide
uuccuccugcaacuugaua

SEQ ID NO: 2987961 - RNA, 19 nt, Artificial Sequence
  Description of Artificial Sequence: Synthetic oligonucleotide
cucuccucucucucucuuc

SEQ ID NO: 2987962 - RNA, 19 nt, Artificial Sequence
  Description of Artificial Sequence: Synthetic oligonucleotide
ccaacuguaggcugaguga

SEQ ID NO: 2987963 - RNA, 19 nt, Artificial Sequence
  Description of Artificial Sequence: Synthetic oligonucleotide
cuggggauaauggcgaucu

SEQ ID NO: 2987964 - RNA, 19 nt, Artificial Sequence
  Description of Artificial Sequence: Synthetic oligonucleotide
ucacagucuuggugcgaac

SEQ ID NO: 2987965 - RNA, 19 nt, Artificial Sequence
  Description of Artificial Sequence: Synthetic oligonucleotide
augccucucacaggaccuc

SEQ ID NO: 2987966 - RNA, 19 nt, Artificial Sequence
  Description of Artificial Sequence: Synthetic oligonucleotide
acacgcgcuuguuggugug

SEQ ID NO: 2987967 - RNA, 19 nt, Artificial Sequence
  Description of Artificial Sequence: Synthetic oligonucleotide
uguugguguggaagucauu

SEQ ID NO: 2987968 - RNA, 19 nt, Artificial Sequence
  Description of Artificial Sequence: Synthetic oligonucleotide
augcgugacauagccggcu

SEQ ID NO: 2987969 - RNA, 19 nt, Artificial Sequence
  Description of Artificial Sequence: Synthetic oligonucleotide
ccucucucucucuuccucc

SEQ ID NO: 2987970 - RNA, 19 nt, Artificial Sequence
  Description of Artificial Sequence: Synthetic oligonucleotide
cucacaggaccucucugaa

SEQ ID NO: 2987971 - RNA, 19 nt, Artificial Sequence
  Description of Artificial Sequence: Synthetic oligonucleotide
gucuuggugcgaacgcggc

SEQ ID NO: 2987972 - RNA, 19 nt, Artificial Sequence
  Description of Artificial Sequence: Synthetic oligonucleotide
aucuccuggucuagggcug

SEQ ID NO: 2987973 - RNA, 19 nt, Artificial Sequence
  Description of Artificial Sequence: Synthetic oligonucleotide
uccucgcacacgcgcuugu

SEQ ID NO: 2987974 - RNA, 19 nt, Artificial Sequence
  Description of Artificial Sequence: Synthetic oligonucleotide
caacuugauagagaugccu

SEQ ID NO: 2987975 - RNA, 19 nt, Artificial Sequence
  Description of Artificial Sequence: Synthetic oligonucleotide
ucuccucgcacacgcgcuu

SEQ ID NO: 2987976 - RNA, 19 nt, Artificial Sequence
  Description of Artificial Sequence: Synthetic oligonucleotide
ccucaggaacauaauuauc

SEQ ID NO: 2987977 - RNA, 19 nt, Artificial Sequence
  Description of Artificial Sequence: Synthetic oligonucleotide
ccugcaacuugauagagau

SEQ ID NO: 2987978 - RNA, 19 nt, Artificial Sequence
  Description of Artificial Sequence: Synthetic oligonucleotide
uugcccaggcgcguguagu

SEQ ID NO: 2987979 - RNA, 19 nt, Artificial Sequence
  Description of Artificial Sequence: Synthetic oligonucleotide
gaugacccgggccgccuuc

SEQ ID NO: 2987980 - RNA, 19 nt, Artificial Sequence
  Description of Artificial Sequence: Synthetic oligonucleotide
caaacggacuccacguggu

SEQ ID NO: 2987981 - RNA, 19 nt, Artificial Sequence
  Description of Artificial Sequence: Synthetic oligonucleotide
ggcugagugaccugcaggu

SEQ ID NO: 2987982 - RNA, 19 nt, Artificial Sequence
  Description of Artificial Sequence: Synthetic oligonucleotide
agagacugccgaaguccag

SEQ ID NO: 2987983 - RNA, 19 nt, Artificial Sequence
  Description of Artificial Sequence: Synthetic oligonucleotide
ucuccuggucuagggcuga

SEQ ID NO: 2987984 - RNA, 19 nt, Artificial Sequence
  Description of Artificial Sequence: Synthetic oligonucleotide
gucauugcccaggcgcgug

SEQ ID NO: 2987985 - RNA, 19 nt, Artificial Sequence
  Description of Artificial Sequence: Synthetic oligonucleotide
cuccacgugguguuuugaa

SEQ ID NO: 2987986 - RNA, 19 nt, Artificial Sequence
  Description of Artificial Sequence: Synthetic oligonucleotide
ugccucucacaggaccucu

SEQ ID NO: 2987987 - RNA, 19 nt, Artificial Sequence
  Description of Artificial Sequence: Synthetic oligonucleotide
ggauaauggcgaucuccuc

SEQ ID NO: 2987988 - RNA, 19 nt, Artificial Sequence
  Description of Artificial Sequence: Synthetic oligonucleotide
cuguaggcugagugaccug

SEQ ID NO: 2987989 - RNA, 19 nt, Artificial Sequence
  Description of Artificial Sequence: Synthetic oligonucleotide
uccuuggugucaggaucca

SEQ ID NO: 2987990 - RNA, 19 nt, Artificial Sequence
  Description of Artificial Sequence: Synthetic oligonucleotide
ugcccaggcgcguguagua

SEQ ID NO: 2987991 - RNA, 19 nt, Artificial Sequence
  Description of Artificial Sequence: Synthetic oligonucleotide
ccggcuaucuuguugcgga

SEQ ID NO: 2987992 - RNA, 19 nt, Artificial Sequence
  Description of Artificial Sequence: Synthetic oligonucleotide
ugcuggggauaauggcgau

SEQ ID NO: 2987993 - RNA, 19 nt, Artificial Sequence
  Description of Artificial Sequence: Synthetic oligonucleotide
uccuggucuagggcugaga

SEQ ID NO: 2987994 - RNA, 19 nt, Artificial Sequence
  Description of Artificial Sequence: Synthetic oligonucleotide
agucauugcccaggcgcgu

SEQ ID NO: 2987995 - RNA, 19 nt, Artificial Sequence
  Description of Artificial Sequence: Synthetic oligonucleotide
gcaacuugauagagaugcc

SEQ ID NO: 2987996 - RNA, 19 nt, Artificial Sequence
  Description of Artificial Sequence: Synthetic oligonucleotide
cacgcgcuuguuggugugg

SEQ ID NO: 2987997 - RNA, 19 nt, Artificial Sequence
  Description of Artificial Sequence: Synthetic oligonucleotide
cauuccuuggugucaggau

SEQ ID NO: 2987998 - RNA, 19 nt, Artificial Sequence
  Description of Artificial Sequence: Synthetic oligonucleotide
gucuagggcugagaccuca

SEQ ID NO: 2987999 - RNA, 19 nt, Artificial Sequence
  Description of Artificial Sequence: Synthetic oligonucleotide
ugaugacccgggccgccuu

SEQ ID NO: 2988000 - RNA, 19 nt, Artificial Sequence
  Description of Artificial Sequence: Synthetic oligonucleotide
ugccgaaguccagaagcuu

SEQ ID NO: 2988001 - RNA, 19 nt, Artificial Sequence
  Description of Artificial Sequence: Synthetic oligonucleotide
acuccacgugguguuuuga

SEQ ID NO: 2988002 - RNA, 19 nt, Artificial Sequence
  Description of Artificial Sequence: Synthetic oligonucleotide
gacccgggccgccuucuuc

SEQ ID NO: 2988003 - RNA, 19 nt, Artificial Sequence
  Description of Artificial Sequence: Synthetic oligonucleotide
augaugacccgggccgccu

SEQ ID NO: 2988004 - RNA, 19 nt, Artificial Sequence
  Description of Artificial Sequence: Synthetic oligonucleotide
gugacauagccggcuaucu

SEQ ID NO: 2988005 - RNA, 19 nt, Artificial Sequence
  Description of Artificial Sequence: Synthetic oligonucleotide
gagaugccucucacaggac

SEQ ID NO: 2988006 - RNA, 19 nt, Artificial Sequence
  Description of Artificial Sequence: Synthetic oligonucleotide
ccuccugcaacuugauaga

SEQ ID NO: 2988007 - RNA, 19 nt, Artificial Sequence
  Description of Artificial Sequence: Synthetic oligonucleotide
gguuggagagacugccgaa

SEQ ID NO: 2988008 - RNA, 19 nt, Artificial Sequence
  Description of Artificial Sequence: Synthetic oligonucleotide
ggcugagaccucaggaaca

SEQ ID NO: 2988009 - RNA, 19 nt, Artificial Sequence
  Description of Artificial Sequence: Synthetic oligonucleotide
cugccgaaguccagaagcu

SEQ ID NO: 2988010 - RNA, 19 nt, Artificial Sequence
  Description of Artificial Sequence: Synthetic oligonucleotide
cgugguguuuugaaauuca

SEQ ID NO: 2988011 - RNA, 19 nt, Artificial Sequence
  Description of Artificial Sequence: Synthetic oligonucleotide
guccagaagcuucaacauu

SEQ ID NO: 2988012 - RNA, 19 nt, Artificial Sequence
  Description of Artificial Sequence: Synthetic oligonucleotide
guaggcugagugaccugca

SEQ ID NO: 2988013 - RNA, 19 nt, Artificial Sequence
  Description of Artificial Sequence: Synthetic oligonucleotide
ccgaaguccagaagcuuca

SEQ ID NO: 2988014 - RNA, 19 nt, Artificial Sequence
  Description of Artificial Sequence: Synthetic oligonucleotide
gcggaguuucuugcugggg

SEQ ID NO: 2988015 - RNA, 19 nt, Artificial Sequence
  Description of Artificial Sequence: Synthetic oligonucleotide
acgcgcuuguuggugugga

SEQ ID NO: 2988016 - RNA, 19 nt, Artificial Sequence
  Description of Artificial Sequence: Synthetic oligonucleotide
gccggcuaucuuguugcgg

SEQ ID NO: 2988017 - RNA, 19 nt, Artificial Sequence
  Description of Artificial Sequence: Synthetic oligonucleotide
ugcgaacgcggcccaucuu

SEQ ID NO: 2988018 - RNA, 19 nt, Artificial Sequence
  Description of Artificial Sequence: Synthetic oligonucleotide
ggcgaucuccucgcacacg

SEQ ID NO: 2988019 - RNA, 19 nt, Artificial Sequence
  Description of Artificial Sequence: Synthetic oligonucleotide
cgggccgccuucuucacag

SEQ ID NO: 2988020 - RNA, 19 nt, Artificial Sequence
  Description of Artificial Sequence: Synthetic oligonucleotide
cagaagcuucaacauuccu

SEQ ID NO: 2988021 - RNA, 19 nt, Artificial Sequence
  Description of Artificial Sequence: Synthetic oligonucleotide
cucucucucucuuccuccu

SEQ ID NO: 2988022 - RNA, 19 nt, Artificial Sequence
  Description of Artificial Sequence: Synthetic oligonucleotide
cucucugaauccucuucau

SEQ ID NO: 2988023 - RNA, 19 nt, Artificial Sequence
  Description of Artificial Sequence: Synthetic oligonucleotide
gcuaucuuguugcggaguu

SEQ ID NO: 2988024 - RNA, 19 nt, Artificial Sequence
  Description of Artificial Sequence: Synthetic oligonucleotide
cuccucgcacacgcgcuug

SEQ ID NO: 2988025 - RNA, 19 nt, Artificial Sequence
  Description of Artificial Sequence: Synthetic oligonucleotide
gugguguuuugaaauucau

SEQ ID NO: 2988026 - RNA, 19 nt, Artificial Sequence
  Description of Artificial Sequence: Synthetic oligonucleotide
cucucucuuccuccugcaa

SEQ ID NO: 2988027 - RNA, 19 nt, Artificial Sequence
  Description of Artificial Sequence: Synthetic oligonucleotide
cuucacagucuuggugcga

SEQ ID NO: 2988028 - RNA, 19 nt, Artificial Sequence
  Description of Artificial Sequence: Synthetic oligonucleotide
cacgugguguuuugaaauu

SEQ ID NO: 2988029 - RNA, 19 nt, Artificial Sequence
  Description of Artificial Sequence: Synthetic oligonucleotide
ggccgccuucuucacaguc

SEQ ID NO: 2988030 - RNA, 19 nt, Artificial Sequence
  Description of Artificial Sequence: Synthetic oligonucleotide
gcacacgcgcuuguuggug

SEQ ID NO: 2988031 - RNA, 19 nt, Artificial Sequence
  Description of Artificial Sequence: Synthetic oligonucleotide
cacacgcgcuuguuggugu

SEQ ID NO: 2988032 - RNA, 19 nt, Artificial Sequence
  Description of Artificial Sequence: Synthetic oligonucleotide
augacccgggccgccuucu

SEQ ID NO: 2988033 - RNA, 19 nt, Artificial Sequence
  Description of Artificial Sequence: Synthetic oligonucleotide
gugcgaacgcggcccaucu

SEQ ID NO: 2988034 - RNA, 19 nt, Artificial Sequence
  Description of Artificial Sequence: Synthetic oligonucleotide
auccaacuguaggcugagu

SEQ ID NO: 2988035 - RNA, 19 nt, Artificial Sequence
  Description of Artificial Sequence: Synthetic oligonucleotide
ccacgugguguuuugaaau

SEQ ID NO: 2988036 - RNA, 19 nt, Artificial Sequence
  Description of Artificial Sequence: Synthetic oligonucleotide
caggauccacuucaaugau

SEQ ID NO: 2988037 - RNA, 19 nt, Artificial Sequence
  Description of Artificial Sequence: Synthetic oligonucleotide
gcguguaguacuucucgau

SEQ ID NO: 2988038 - RNA, 19 nt, Artificial Sequence
  Description of Artificial Sequence: Synthetic oligonucleotide
cuccuggucuagggcugag

SEQ ID NO: 2988039 - RNA, 19 nt, Artificial Sequence
  Description of Artificial Sequence: Synthetic oligonucleotide
ccacuucaaugaucuccug

SEQ ID NO: 2988040 - RNA, 19 nt, Artificial Sequence
  Description of Artificial Sequence: Synthetic oligonucleotide
ggugcgaacgcggcccauc

SEQ ID NO: 2988041 - RNA, 19 nt, Artificial Sequence
  Description of Artificial Sequence: Synthetic oligonucleotide
gaccucucugaauccucuu

SEQ ID NO: 2988042 - RNA, 19 nt, Artificial Sequence
  Description of Artificial Sequence: Synthetic oligonucleotide
cgugacauagccggcuauc

SEQ ID NO: 2988043 - RNA, 19 nt, Artificial Sequence
  Description of Artificial Sequence: Synthetic oligonucleotide
gcuggggauaauggcgauc

SEQ ID NO: 2988044 - RNA, 19 nt, Artificial Sequence
  Description of Artificial Sequence: Synthetic oligonucleotide
gagugaccugcagguugga

SEQ ID NO: 2988045 - RNA, 19 nt, Artificial Sequence
  Description of Artificial Sequence: Synthetic oligonucleotide
cgaucuccucgcacacgcg

SEQ ID NO: 2988046 - RNA, 19 nt, Artificial Sequence
  Description of Artificial Sequence: Synthetic oligonucleotide
ggcgcguguaguacuucuc

SEQ ID NO: 2988047 - RNA, 19 nt, Artificial Sequence
  Description of Artificial Sequence: Synthetic oligonucleotide
caggcgcguguaguacuuc

SEQ ID NO: 2988048 - RNA, 19 nt, Artificial Sequence
  Description of Artificial Sequence: Synthetic oligonucleotide
caggaccucucugaauccu

SEQ ID NO: 2988049 - RNA, 19 nt, Artificial Sequence
  Description of Artificial Sequence: Synthetic oligonucleotide
ggaccucucugaauccucu

SEQ ID NO: 2988050 - RNA, 19 nt, Artificial Sequence
  Description of Artificial Sequence: Synthetic oligonucleotide
ggcuaucuuguugcggagu

SEQ ID NO: 2988051 - RNA, 19 nt, Artificial Sequence
  Description of Artificial Sequence: Synthetic oligonucleotide
cuccucucucucucuuccu

SEQ ID NO: 2988052 - RNA, 19 nt, Artificial Sequence
  Description of Artificial Sequence: Synthetic oligonucleotide
cgcguguaguacuucucga

SEQ ID NO: 2988053 - RNA, 19 nt, Artificial Sequence
  Description of Artificial Sequence: Synthetic oligonucleotide
cggcuaucuuguugcggag

SEQ ID NO: 2988054 - RNA, 19 nt, Artificial Sequence
  Description of Artificial Sequence: Synthetic oligonucleotide
gcugagaccucaggaacau

SEQ ID NO: 2988055 - RNA, 19 nt, Artificial Sequence
  Description of Artificial Sequence: Synthetic oligonucleotide
guuucuugcuggggauaau

SEQ ID NO: 2988056 - RNA, 19 nt, Artificial Sequence
  Description of Artificial Sequence: Synthetic oligonucleotide
uggugcgaacgcggcccau

SEQ ID NO: 2988057 - RNA, 19 nt, Artificial Sequence
  Description of Artificial Sequence: Synthetic oligonucleotide
cgaugaugacccgggccgc

SEQ ID NO: 2988058 - RNA, 19 nt, Artificial Sequence
  Description of Artificial Sequence: Synthetic oligonucleotide
gcccaggcgcguguaguac

SEQ ID NO: 2988059 - RNA, 19 nt, Artificial Sequence
  Description of Artificial Sequence: Synthetic oligonucleotide
cuaucuuguugcggaguuu

SEQ ID NO: 2988060 - RNA, 19 nt, Artificial Sequence
  Description of Artificial Sequence: Synthetic oligonucleotide
cauugcccaggcgcgugua

SEQ ID NO: 2988061 - RNA, 19 nt, Artificial Sequence
  Description of Artificial Sequence: Synthetic oligonucleotide
gccgccuucuucacagucu

SEQ ID NO: 2988062 - RNA, 19 nt, Artificial Sequence
  Description of Artificial Sequence: Synthetic oligonucleotide
cugagaccucaggaacaua

SEQ ID NO: 2988063 - RNA, 19 nt, Artificial Sequence
  Description of Artificial Sequence: Synthetic oligonucleotide
cauagccggcuaucuuguu

SEQ ID NO: 2988064 - RNA, 19 nt, Artificial Sequence
  Description of Artificial Sequence: Synthetic oligonucleotide
ggucuagggcugagaccuc

SEQ ID NO: 2988065 - RNA, 19 nt, Artificial Sequence
  Description of Artificial Sequence: Synthetic oligonucleotide
cccaggcgcguguaguacu

SEQ ID NO: 2988066 - RNA, 19 nt, Artificial Sequence
  Description of Artificial Sequence: Synthetic oligonucleotide
gcgugacauagccggcuau

SEQ ID NO: 2988067 - RNA, 19 nt, Artificial Sequence
  Description of Artificial Sequence: Synthetic oligonucleotide
ccgccuucuucacagucuu

SEQ ID NO: 2988068 - RNA, 19 nt, Artificial Sequence
  Description of Artificial Sequence: Synthetic oligonucleotide
ggacuccacgugguguuuu

SEQ ID NO: 2988069 - RNA, 19 nt, Artificial Sequence
  Description of Artificial Sequence: Synthetic oligonucleotide
ccaggcgcguguaguacuu

SEQ ID NO: 2988070 - RNA, 19 nt, Artificial Sequence
  Description of Artificial Sequence: Synthetic oligonucleotide
ccugcagguuggagagacu

SEQ ID NO: 2988071 - RNA, 19 nt, Artificial Sequence
  Description of Artificial Sequence: Synthetic oligonucleotide
ccgggccgccuucuucaca

SEQ ID NO: 2988072 - RNA, 19 nt, Artificial Sequence
  Description of Artificial Sequence: Synthetic oligonucleotide
gggccgccuucuucacagu

SEQ ID NO: 2988073 - RNA, 19 nt, Artificial Sequence
  Description of Artificial Sequence: Synthetic oligonucleotide
cgcacacgcgcuuguuggu

SEQ ID NO: 2988074 - RNA, 19 nt, Artificial Sequence
  Description of Artificial Sequence: Synthetic oligonucleotide
ccucgcacacgcgcuuguu

SEQ ID NO: 2988075 - RNA, 19 nt, Artificial Sequence
  Description of Artificial Sequence: Synthetic oligonucleotide
cggacuccacgugguguuu

SEQ ID NO: 2988076 - RNA, 19 nt, Artificial Sequence
  Description of Artificial Sequence: Synthetic oligonucleotide
cauuugaaagguaagaagg

SEQ ID NO: 2988077 - RNA, 19 nt, Artificial Sequence
  Description of Artificial Sequence: Synthetic oligonucleotide
uuaguugggaacaugaccu

SEQ ID NO: 2988078 - RNA, 19 nt, Artificial Sequence
  Description of Artificial Sequence: Synthetic oligonucleotide
agggcuacuacgcacaggc

SEQ ID NO: 2988079 - RNA, 19 nt, Artificial Sequence
  Description of Artificial Sequence: Synthetic oligonucleotide
ucagacuggaacuugagca

SEQ ID NO: 2988080 - RNA, 19 nt, Artificial Sequence
  Description of Artificial Sequence: Synthetic oligonucleotide
aacaugaccuccuucuggg

SEQ ID NO: 2988081 - RNA, 19 nt, Artificial Sequence
  Description of Artificial Sequence: Synthetic oligonucleotide
ucauuugaaagguaagaag

SEQ ID NO: 2988082 - RNA, 19 nt, Artificial Sequence
  Description of Artificial Sequence: Synthetic oligonucleotide
uggaacuugagcauccagg

SEQ ID NO: 2988083 - RNA, 19 nt, Artificial Sequence
  Description of Artificial Sequence: Synthetic oligonucleotide
aagaagggcuacuacgcac

SEQ ID NO: 2988084 - RNA, 19 nt, Artificial Sequence
  Description of Artificial Sequence: Synthetic oligonucleotide
aaagcugccacaguagguc

SEQ ID NO: 2988085 - RNA, 19 nt, Artificial Sequence
  Description of Artificial Sequence: Synthetic oligonucleotide
acauccaggauguuggcac

SEQ ID NO: 2988086 - RNA, 19 nt, Artificial Sequence
  Description of Artificial Sequence: Synthetic oligonucleotide
agaguguagaggaugacgc

SEQ ID NO: 2988087 - RNA, 19 nt, Artificial Sequence
  Description of Artificial Sequence: Synthetic oligonucleotide
uggaagaucagguucuugc

SEQ ID NO: 2988088 - RNA, 19 nt, Artificial Sequence
  Description of Artificial Sequence: Synthetic oligonucleotide
agacacugagguuaguugg

SEQ ID NO: 2988089 - RNA, 19 nt, Artificial Sequence
  Description of Artificial Sequence: Synthetic oligonucleotide
accacuagaguguagagga

SEQ ID NO: 2988090 - RNA, 19 nt, Artificial Sequence
  Description of Artificial Sequence: Synthetic oligonucleotide
uugaaagguaagaagggcu

SEQ ID NO: 2988091 - RNA, 19 nt, Artificial Sequence
  Description of Artificial Sequence: Synthetic oligonucleotide
ugacacauggccucgagca

SEQ ID NO: 2988092 - RNA, 19 nt, Artificial Sequence
  Description of Artificial Sequence: Synthetic oligonucleotide
aaggccgcucauuugaaag

SEQ ID NO: 2988093 - RNA, 19 nt, Artificial Sequence
  Description of Artificial Sequence: Synthetic oligonucleotide
acugagguuaguugggaac

SEQ ID NO: 2988094 - RNA, 19 nt, Artificial Sequence
  Description of Artificial Sequence: Synthetic oligonucleotide
gguaagaagggcuacuacg

SEQ ID NO: 2988095 - RNA, 19 nt, Artificial Sequence
  Description of Artificial Sequence: Synthetic oligonucleotide
guuaguugggaacaugacc

SEQ ID NO: 2988096 - RNA, 19 nt, Artificial Sequence
  Description of Artificial Sequence: Synthetic oligonucleotide
cuugaggacauccaggaug

SEQ ID NO: 2988097 - RNA, 19 nt, Artificial Sequence
  Description of Artificial Sequence: Synthetic oligonucleotide
aagaucagguucuugcacu

SEQ ID NO: 2988098 - RNA, 19 nt, Artificial Sequence
  Description of Artificial Sequence: Synthetic oligonucleotide
ugcuccaggugucagacag

SEQ ID NO: 2988099 - RNA, 19 nt, Artificial Sequence
  Description of Artificial Sequence: Synthetic oligonucleotide
uccagggagacacugaggu

SEQ ID NO: 2988100 - RNA, 19 nt, Artificial Sequence
  Description of Artificial Sequence: Synthetic oligonucleotide
gacaggaagggguuguagg

SEQ ID NO: 2988101 - RNA, 19 nt, Artificial Sequence
  Description of Artificial Sequence: Synthetic oligonucleotide
caggcauaagcaaagcugc

SEQ ID NO: 2988102 - RNA, 19 nt, Artificial Sequence
  Description of Artificial Sequence: Synthetic oligonucleotide
uuugaaagguaagaagggc

SEQ ID NO: 2988103 - RNA, 19 nt, Artificial Sequence
  Description of Artificial Sequence: Synthetic oligonucleotide
auuugaaagguaagaaggg

SEQ ID NO: 2988104 - RNA, 19 nt, Artificial Sequence
  Description of Artificial Sequence: Synthetic oligonucleotide
ucguggguugcucagacug

SEQ ID NO: 2988105 - RNA, 19 nt, Artificial Sequence
  Description of Artificial Sequence: Synthetic oligonucleotide
uagaguguagaggaugacg

SEQ ID NO: 2988106 - RNA, 19 nt, Artificial Sequence
  Description of Artificial Sequence: Synthetic oligonucleotide
ugugcgaccacuagagugu

SEQ ID NO: 2988107 - RNA, 19 nt, Artificial Sequence
  Description of Artificial Sequence: Synthetic oligonucleotide
ggaacuugagcauccaggg

SEQ ID NO: 2988108 - RNA, 19 nt, Artificial Sequence
  Description of Artificial Sequence: Synthetic oligonucleotide
ucucucagcagcuucuuga

SEQ ID NO: 2988109 - RNA, 19 nt, Artificial Sequence
  Description of Artificial Sequence: Synthetic oligonucleotide
uuggcguagcaucuggaag

SEQ ID NO: 2988110 - RNA, 19 nt, Artificial Sequence
  Description of Artificial Sequence: Synthetic oligonucleotide
uccugauuucaguucgugg

SEQ ID NO: 2988111 - RNA, 19 nt, Artificial Sequence
  Description of Artificial Sequence: Synthetic oligonucleotide
augugcgaccacuagagug

SEQ ID NO: 2988112 - RNA, 19 nt, Artificial Sequence
  Description of Artificial Sequence: Synthetic oligonucleotide
ugaaagguaagaagggcua

SEQ ID NO: 2988113 - RNA, 19 nt, Artificial Sequence
  Description of Artificial Sequence: Synthetic oligonucleotide
auaagcaaagcugccacag

SEQ ID NO: 2988114 - RNA, 19 nt, Artificial Sequence
  Description of Artificial Sequence: Synthetic oligonucleotide
ccugauuucaguucguggg

SEQ ID NO: 2988115 - RNA, 19 nt, Artificial Sequence
  Description of Artificial Sequence: Synthetic oligonucleotide
gagacacugagguuaguug

SEQ ID NO: 2988116 - RNA, 19 nt, Artificial Sequence
  Description of Artificial Sequence: Synthetic oligonucleotide
guaggucuggcugaggugg

SEQ ID NO: 2988117 - RNA, 19 nt, Artificial Sequence
  Description of Artificial Sequence: Synthetic oligonucleotide
guucuugcacuccagggag

SEQ ID NO: 2988118 - RNA, 19 nt, Artificial Sequence
  Description of Artificial Sequence: Synthetic oligonucleotide
agcauccugauuucaguuc

SEQ ID NO: 2988119 - RNA, 19 nt, Artificial Sequence
  Description of Artificial Sequence: Synthetic oligonucleotide
agcccagcaagauuucugg

SEQ ID NO: 2988120 - RNA, 19 nt, Artificial Sequence
  Description of Artificial Sequence: Synthetic oligonucleotide
guaagaagggcuacuacgc

SEQ ID NO: 2988121 - RNA, 19 nt, Artificial Sequence
  Description of Artificial Sequence: Synthetic oligonucleotide
uucugggcaggcauaagca

SEQ ID NO: 2988122 - RNA, 19 nt, Artificial Sequence
  Description of Artificial Sequence: Synthetic oligonucleotide
uggcguagcaucuggaaga

SEQ ID NO: 2988123 - RNA, 19 nt, Artificial Sequence
  Description of Artificial Sequence: Synthetic oligonucleotide
gauguuggcacgcuuggca

SEQ ID NO: 2988124 - RNA, 19 nt, Artificial Sequence
  Description of Artificial Sequence: Synthetic oligonucleotide
aagcaaagcugccacagua

SEQ ID NO: 2988125 - RNA, 19 nt, Artificial Sequence
  Description of Artificial Sequence: Synthetic oligonucleotide
gaagaucagguucuugcac

SEQ ID NO: 2988126 - RNA, 19 nt, Artificial Sequence
  Description of Artificial Sequence: Synthetic oligonucleotide
ugggcaggcauaagcaaag

SEQ ID NO: 2988127 - RNA, 19 nt, Artificial Sequence
  Description of Artificial Sequence: Synthetic oligonucleotide
agguaagaagggcuacuac

SEQ ID NO: 2988128 - RNA, 19 nt, Artificial Sequence
  Description of Artificial Sequence: Synthetic oligonucleotide
aguugggaacaugaccucc

SEQ ID NO: 2988129 - RNA, 19 nt, Artificial Sequence
  Description of Artificial Sequence: Synthetic oligonucleotide
ucgagcauccugauuucag

SEQ ID NO: 2988130 - RNA, 19 nt, Artificial Sequence
  Description of Artificial Sequence: Synthetic oligonucleotide
caggugucagacaggaagg

SEQ ID NO: 2988131 - RNA, 19 nt, Artificial Sequence
  Description of Artificial Sequence: Synthetic oligonucleotide
agaugugcgaccacuagag

SEQ ID NO: 2988132 - RNA, 19 nt, Artificial Sequence
  Description of Artificial Sequence: Synthetic oligonucleotide
gaacuugagcauccagggg

SEQ ID NO: 2988133 - RNA, 19 nt, Artificial Sequence
  Description of Artificial Sequence: Synthetic oligonucleotide
auuucaguucguggguugc

SEQ ID NO: 2988134 - RNA, 19 nt, Artificial Sequence
  Description of Artificial Sequence: Synthetic oligonucleotide
uaagaagggcuacuacgca

SEQ ID NO: 2988135 - RNA, 19 nt, Artificial Sequence
  Description of Artificial Sequence: Synthetic oligonucleotide
gaccacuagaguguagagg

SEQ ID NO: 2988136 - RNA, 19 nt, Artificial Sequence
  Description of Artificial Sequence: Synthetic oligonucleotide
aggauguuggcacgcuugg

SEQ ID NO: 2988137 - RNA, 19 nt, Artificial Sequence
  Description of Artificial Sequence: Synthetic oligonucleotide
gauuucaguucguggguug

SEQ ID NO: 2988138 - RNA, 19 nt, Artificial Sequence
  Description of Artificial Sequence: Synthetic oligonucleotide
aaagguaagaagggcuacu

SEQ ID NO: 2988139 - RNA, 19 nt, Artificial Sequence
  Description of Artificial Sequence: Synthetic oligonucleotide
gacacugagguuaguuggg

SEQ ID NO: 2988140 - RNA, 19 nt, Artificial Sequence
  Description of Artificial Sequence: Synthetic oligonucleotide
ucaucgaagggcagaugug

SEQ ID NO: 2988141 - RNA, 19 nt, Artificial Sequence
  Description of Artificial Sequence: Synthetic oligonucleotide
gcauccugauuucaguucg

SEQ ID NO: 2988142 - RNA, 19 nt, Artificial Sequence
  Description of Artificial Sequence: Synthetic oligonucleotide
ugagguuggugucaucgaa

SEQ ID NO: 2988143 - RNA, 19 nt, Artificial Sequence
  Description of Artificial Sequence: Synthetic oligonucleotide
uuguagggcaagcccagca

SEQ ID NO: 2988144 - RNA, 19 nt, Artificial Sequence
  Description of Artificial Sequence: Synthetic oligonucleotide
aagggguuguagggcaagc

SEQ ID NO: 2988145 - RNA, 19 nt, Artificial Sequence
  Description of Artificial Sequence: Synthetic oligonucleotide
uugcacuccagggagacac

SEQ ID NO: 2988146 - RNA, 19 nt, Artificial Sequence
  Description of Artificial Sequence: Synthetic oligonucleotide
caucgaagggcagaugugc

SEQ ID NO: 2988147 - RNA, 19 nt, Artificial Sequence
  Description of Artificial Sequence: Synthetic oligonucleotide
ccaggugucagacaggaag

SEQ ID NO: 2988148 - RNA, 19 nt, Artificial Sequence
  Description of Artificial Sequence: Synthetic oligonucleotide
cucagacuggaacuugagc

SEQ ID NO: 2988149 - RNA, 19 nt, Artificial Sequence
  Description of Artificial Sequence: Synthetic oligonucleotide
aggccgcucauuugaaagg

SEQ ID NO: 2988150 - RNA, 19 nt, Artificial Sequence
  Description of Artificial Sequence: Synthetic oligonucleotide
uagcaucuggaagaucagg

SEQ ID NO: 2988151 - RNA, 19 nt, Artificial Sequence
  Description of Artificial Sequence: Synthetic oligonucleotide
cauccagggguccuugagg

SEQ ID NO: 2988152 - RNA, 19 nt, Artificial Sequence
  Description of Artificial Sequence: Synthetic oligonucleotide
gaguguagaggaugacgcc

SEQ ID NO: 2988153 - RNA, 19 nt, Artificial Sequence
  Description of Artificial Sequence: Synthetic oligonucleotide
uguagggcaagcccagcaa

SEQ ID NO: 2988154 - RNA, 19 nt, Artificial Sequence
  Description of Artificial Sequence: Synthetic oligonucleotide
agcaagauuucugggcagg

SEQ ID NO: 2988155 - RNA, 19 nt, Artificial Sequence
  Description of Artificial Sequence: Synthetic oligonucleotide
guagggcaagcccagcaag

SEQ ID NO: 2988156 - RNA, 19 nt, Artificial Sequence
  Description of Artificial Sequence: Synthetic oligonucleotide
auccagggguccuugagga

SEQ ID NO: 2988157 - RNA, 19 nt, Artificial Sequence
  Description of Artificial Sequence: Synthetic oligonucleotide
ucuggcugaggugggaaag

SEQ ID NO: 2988158 - RNA, 19 nt, Artificial Sequence
  Description of Artificial Sequence: Synthetic oligonucleotide
augaccuccuucugggucu

SEQ ID NO: 2988159 - RNA, 19 nt, Artificial Sequence
  Description of Artificial Sequence: Synthetic oligonucleotide
gcugaggugggaaaggccg

SEQ ID NO: 2988160 - RNA, 19 nt, Artificial Sequence
  Description of Artificial Sequence: Synthetic oligonucleotide
cugggucucucucagcagc

SEQ ID NO: 2988161 - RNA, 19 nt, Artificial Sequence
  Description of Artificial Sequence: Synthetic oligonucleotide
aucagguucuugcacucca

SEQ ID NO: 2988162 - RNA, 19 nt, Artificial Sequence
  Description of Artificial Sequence: Synthetic oligonucleotide
uaagcaaagcugccacagu

SEQ ID NO: 2988163 - RNA, 19 nt, Artificial Sequence
  Description of Artificial Sequence: Synthetic oligonucleotide
agcuuggcguagcaucugg

SEQ ID NO: 2988164 - RNA, 19 nt, Artificial Sequence
  Description of Artificial Sequence: Synthetic oligonucleotide
acgcccaugcuccaggugu

SEQ ID NO: 2988165 - RNA, 19 nt, Artificial Sequence
  Description of Artificial Sequence: Synthetic oligonucleotide
uagggcaagcccagcaaga

SEQ ID NO: 2988166 - RNA, 19 nt, Artificial Sequence
  Description of Artificial Sequence: Synthetic oligonucleotide
acgcuuggcagcuuggcgu

SEQ ID NO: 2988167 - RNA, 19 nt, Artificial Sequence
  Description of Artificial Sequence: Synthetic oligonucleotide
ugggaaaggccgcucauuu

SEQ ID NO: 2988168 - RNA, 19 nt, Artificial Sequence
  Description of Artificial Sequence: Synthetic oligonucleotide
ucaguucguggguugcuca

SEQ ID NO: 2988169 - RNA, 19 nt, Artificial Sequence
  Description of Artificial Sequence: Synthetic oligonucleotide
aggaagggguuguagggca

SEQ ID NO: 2988170 - RNA, 19 nt, Artificial Sequence
  Description of Artificial Sequence: Synthetic oligonucleotide
caggauguuggcacgcuug

SEQ ID NO: 2988171 - RNA, 19 nt, Artificial Sequence
  Description of Artificial Sequence: Synthetic oligonucleotide
augacgcccaugcuccagg

SEQ ID NO: 2988172 - RNA, 19 nt, Artificial Sequence
  Description of Artificial Sequence: Synthetic oligonucleotide
gcaaagcugccacaguagg

SEQ ID NO: 2988173 - RNA, 19 nt, Artificial Sequence
  Description of Artificial Sequence: Synthetic oligonucleotide
gaaagguaagaagggcuac

SEQ ID NO: 2988174 - RNA, 19 nt, Artificial Sequence
  Description of Artificial Sequence: Synthetic oligonucleotide
aguaggucuggcugaggug

SEQ ID NO: 2988175 - RNA, 19 nt, Artificial Sequence
  Description of Artificial Sequence: Synthetic oligonucleotide
acuagaguguagaggauga

SEQ ID NO: 2988176 - RNA, 19 nt, Artificial Sequence
  Description of Artificial Sequence: Synthetic oligonucleotide
aagcugccacaguaggucu

SEQ ID NO: 2988177 - RNA, 19 nt, Artificial Sequence
  Description of Artificial Sequence: Synthetic oligonucleotide
agggguuguagggcaagcc

SEQ ID NO: 2988178 - RNA, 19 nt, Artificial Sequence
  Description of Artificial Sequence: Synthetic oligonucleotide
agcaucuggaagaucaggu

SEQ ID NO: 2988179 - RNA, 19 nt, Artificial Sequence
  Description of Artificial Sequence: Synthetic oligonucleotide
gcaggcauaagcaaagcug

SEQ ID NO: 2988180 - RNA, 19 nt, Artificial Sequence
  Description of Artificial Sequence: Synthetic oligonucleotide
agguuaguugggaacauga

SEQ ID NO: 2988181 - RNA, 19 nt, Artificial Sequence
  Description of Artificial Sequence: Synthetic oligonucleotide
agacuggaacuugagcauc

SEQ ID NO: 2988182 - RNA, 19 nt, Artificial Sequence
  Description of Artificial Sequence: Synthetic oligonucleotide
cauccaggauguuggcacg

SEQ ID NO: 2988183 - RNA, 19 nt, Artificial Sequence
  Description of Artificial Sequence: Synthetic oligonucleotide
ugggcugacacauggccuc

SEQ ID NO: 2988184 - RNA, 19 nt, Artificial Sequence
  Description of Artificial Sequence: Synthetic oligonucleotide
aaaggccgcucauuugaaa

SEQ ID NO: 2988185 - RNA, 19 nt, Artificial Sequence
  Description of Artificial Sequence: Synthetic oligonucleotide
acacauggccucgagcauc

SEQ ID NO: 2988186 - RNA, 19 nt, Artificial Sequence
  Description of Artificial Sequence: Synthetic oligonucleotide
cacauggccucgagcaucc

SEQ ID NO: 2988187 - RNA, 19 nt, Artificial Sequence
  Description of Artificial Sequence: Synthetic oligonucleotide
cacuagaguguagaggaug

SEQ ID NO: 2988188 - RNA, 19 nt, Artificial Sequence
  Description of Artificial Sequence: Synthetic oligonucleotide
aagcccagcaagauuucug

SEQ ID NO: 2988189 - RNA, 19 nt, Artificial Sequence
  Description of Artificial Sequence: Synthetic oligonucleotide
ucugggcaggcauaagcaa

SEQ ID NO: 2988190 - RNA, 19 nt, Artificial Sequence
  Description of Artificial Sequence: Synthetic oligonucleotide
caugaccuccuucuggguc

SEQ ID NO: 2988191 - RNA, 19 nt, Artificial Sequence
  Description of Artificial Sequence: Synthetic oligonucleotide
ugucagacaggaagggguu

SEQ ID NO: 2988192 - RNA, 19 nt, Artificial Sequence
  Description of Artificial Sequence: Synthetic oligonucleotide
gacuggaacuugagcaucc

SEQ ID NO: 2988193 - RNA, 19 nt, Artificial Sequence
  Description of Artificial Sequence: Synthetic oligonucleotide
cucauuugaaagguaagaa

SEQ ID NO: 2988194 - RNA, 19 nt, Artificial Sequence
  Description of Artificial Sequence: Synthetic oligonucleotide
uguuggcacgcuuggcagc

SEQ ID NO: 2988195 - RNA, 19 nt, Artificial Sequence
  Description of Artificial Sequence: Synthetic oligonucleotide
gaagggcuacuacgcacag

SEQ ID NO: 2988196 - RNA, 19 nt, Artificial Sequence
  Description of Artificial Sequence: Synthetic oligonucleotide
gucaucgaagggcagaugu

SEQ ID NO: 2988197 - RNA, 19 nt, Artificial Sequence
  Description of Artificial Sequence: Synthetic oligonucleotide
aagggcagaugugcgacca

SEQ ID NO: 2988198 - RNA, 19 nt, Artificial Sequence
  Description of Artificial Sequence: Synthetic oligonucleotide
ucgaagggcagaugugcga

SEQ ID NO: 2988199 - RNA, 19 nt, Artificial Sequence
  Description of Artificial Sequence: Synthetic oligonucleotide
aagguaagaagggcuacua

SEQ ID NO: 2988200 - RNA, 19 nt, Artificial Sequence
  Description of Artificial Sequence: Synthetic oligonucleotide
ucagacaggaagggguugu

SEQ ID NO: 2988201 - RNA, 19 nt, Artificial Sequence
  Description of Artificial Sequence: Synthetic oligonucleotide
agcaaagcugccacaguag

SEQ ID NO: 2988202 - RNA, 19 nt, Artificial Sequence
  Description of Artificial Sequence: Synthetic oligonucleotide
gccacaguaggucuggcug

SEQ ID NO: 2988203 - RNA, 19 nt, Artificial Sequence
  Description of Artificial Sequence: Synthetic oligonucleotide
gcauaagcaaagcugccac

SEQ ID NO: 2988204 - RNA, 19 nt, Artificial Sequence
  Description of Artificial Sequence: Synthetic oligonucleotide
aggcauaagcaaagcugcc

SEQ ID NO: 2988205 - RNA, 19 nt, Artificial Sequence
  Description of Artificial Sequence: Synthetic oligonucleotide
aucgaagggcagaugugcg

SEQ ID NO: 2988206 - RNA, 19 nt, Artificial Sequence
  Description of Artificial Sequence: Synthetic oligonucleotide
cacgcuuggcagcuuggcg

SEQ ID NO: 2988207 - RNA, 19 nt, Artificial Sequence
  Description of Artificial Sequence: Synthetic oligonucleotide
uaggucuggcugagguggg

SEQ ID NO: 2988208 - RNA, 19 nt, Artificial Sequence
  Description of Artificial Sequence: Synthetic oligonucleotide
aggugucagacaggaaggg

SEQ ID NO: 2988209 - RNA, 19 nt, Artificial Sequence
  Description of Artificial Sequence: Synthetic oligonucleotide
acuugagcauccagggguc

SEQ ID NO: 2988210 - RNA, 19 nt, Artificial Sequence
  Description of Artificial Sequence: Synthetic oligonucleotide
gaagggcagaugugcgacc

SEQ ID NO: 2988211 - RNA, 19 nt, Artificial Sequence
  Description of Artificial Sequence: Synthetic oligonucleotide
auccaggauguuggcacgc

SEQ ID NO: 2988212 - RNA, 19 nt, Artificial Sequence
  Description of Artificial Sequence: Synthetic oligonucleotide
cugacacauggccucgagc

SEQ ID NO: 2988213 - RNA, 19 nt, Artificial Sequence
  Description of Artificial Sequence: Synthetic oligonucleotide
aagggcuacuacgcacagg

SEQ ID NO: 2988214 - RNA, 19 nt, Artificial Sequence
  Description of Artificial Sequence: Synthetic oligonucleotide
agaagggcuacuacgcaca

SEQ ID NO: 2988215 - RNA, 19 nt, Artificial Sequence
  Description of Artificial Sequence: Synthetic oligonucleotide
cguagcaucuggaagauca

SEQ ID NO: 2988216 - RNA, 19 nt, Artificial Sequence
  Description of Artificial Sequence: Synthetic oligonucleotide
gguucuugcacuccaggga

SEQ ID NO: 2988217 - RNA, 19 nt, Artificial Sequence
  Description of Artificial Sequence: Synthetic oligonucleotide
cccagcaagauuucugggc

SEQ ID NO: 2988218 - RNA, 19 nt, Artificial Sequence
  Description of Artificial Sequence: Synthetic oligonucleotide
guucguggguugcucagac

SEQ ID NO: 2988219 - RNA, 19 nt, Artificial Sequence
  Description of Artificial Sequence: Synthetic oligonucleotide
cugaggugggaaaggccgc

SEQ ID NO: 2988220 - RNA, 19 nt, Artificial Sequence
  Description of Artificial Sequence: Synthetic oligonucleotide
uucuugcacuccagggaga

SEQ ID NO: 2988221 - RNA, 19 nt, Artificial Sequence
  Description of Artificial Sequence: Synthetic oligonucleotide
gggguuguagggcaagccc

SEQ ID NO: 2988222 - RNA, 19 nt, Artificial Sequence
  Description of Artificial Sequence: Synthetic oligonucleotide
agcagcuucuugagguugg

SEQ ID NO: 2988223 - RNA, 19 nt, Artificial Sequence
  Description of Artificial Sequence: Synthetic oligonucleotide
ugggucucucucagcagcu

SEQ ID NO: 2988224 - RNA, 19 nt, Artificial Sequence
  Description of Artificial Sequence: Synthetic oligonucleotide
gaagggguuguagggcaag

SEQ ID NO: 2988225 - RNA, 19 nt, Artificial Sequence
  Description of Artificial Sequence: Synthetic oligonucleotide
cuccagggagacacugagg

SEQ ID NO: 2988226 - RNA, 19 nt, Artificial Sequence
  Description of Artificial Sequence: Synthetic oligonucleotide
caggaagggguuguagggc

SEQ ID NO: 2988227 - RNA, 19 nt, Artificial Sequence
  Description of Artificial Sequence: Synthetic oligonucleotide
agacaggaagggguuguag

SEQ ID NO: 2988228 - RNA, 19 nt, Artificial Sequence
  Description of Artificial Sequence: Synthetic oligonucleotide
ggaagaucagguucuugca

SEQ ID NO: 2988229 - RNA, 19 nt, Artificial Sequence
  Description of Artificial Sequence: Synthetic oligonucleotide
cugagguuaguugggaaca

SEQ ID NO: 2988230 - RNA, 19 nt, Artificial Sequence
  Description of Artificial Sequence: Synthetic oligonucleotide
cauaagcaaagcugccaca

SEQ ID NO: 2988231 - RNA, 19 nt, Artificial Sequence
  Description of Artificial Sequence: Synthetic oligonucleotide
gagguuaguugggaacaug

SEQ ID NO: 2988232 - RNA, 19 nt, Artificial Sequence
  Description of Artificial Sequence: Synthetic oligonucleotide
gguuggugucaucgaaggg

SEQ ID NO: 2988233 - RNA, 19 nt, Artificial Sequence
  Description of Artificial Sequence: Synthetic oligonucleotide
uaguugggaacaugaccuc

SEQ ID NO: 2988234 - RNA, 19 nt, Artificial Sequence
  Description of Artificial Sequence: Synthetic oligonucleotide
uuggcagcuuggcguagca

SEQ ID NO: 2988235 - RNA, 19 nt, Artificial Sequence
  Description of Artificial Sequence: Synthetic oligonucleotide
ggcagcuuggcguagcauc

SEQ ID NO: 2988236 - RNA, 19 nt, Artificial Sequence
  Description of Artificial Sequence: Synthetic oligonucleotide
cagcaagauuucugggcag

SEQ ID NO: 2988237 - RNA, 19 nt, Artificial Sequence
  Description of Artificial Sequence: Synthetic oligonucleotide
gauuucugggcaggcauaa

SEQ ID NO: 2988238 - RNA, 19 nt, Artificial Sequence
  Description of Artificial Sequence: Synthetic oligonucleotide
guagcaucuggaagaucag

SEQ ID NO: 2988239 - RNA, 19 nt, Artificial Sequence
  Description of Artificial Sequence: Synthetic oligonucleotide
ggugucagacaggaagggg

SEQ ID NO: 2988240 - RNA, 19 nt, Artificial Sequence
  Description of Artificial Sequence: Synthetic oligonucleotide
ugauuucaguucguggguu

SEQ ID NO: 2988241 - RNA, 19 nt, Artificial Sequence
  Description of Artificial Sequence: Synthetic oligonucleotide
ugccacaguaggucuggcu

SEQ ID NO: 2988242 - RNA, 19 nt, Artificial Sequence
  Description of Artificial Sequence: Synthetic oligonucleotide
cagaugugcgaccacuaga

SEQ ID NO: 2988243 - RNA, 19 nt, Artificial Sequence
  Description of Artificial Sequence: Synthetic oligonucleotide
uggcugaggugggaaaggc

SEQ ID NO: 2988244 - RNA, 19 nt, Artificial Sequence
  Description of Artificial Sequence: Synthetic oligonucleotide
auccugauuucaguucgug

SEQ ID NO: 2988245 - RNA, 19 nt, Artificial Sequence
  Description of Artificial Sequence: Synthetic oligonucleotide
uucaguucguggguugcuc

SEQ ID NO: 2988246 - RNA, 19 nt, Artificial Sequence
  Description of Artificial Sequence: Synthetic oligonucleotide
uuucaguucguggguugcu

SEQ ID NO: 2988247 - RNA, 19 nt, Artificial Sequence
  Description of Artificial Sequence: Synthetic oligonucleotide
uggugggcugacacauggc

SEQ ID NO: 2988248 - RNA, 19 nt, Artificial Sequence
  Description of Artificial Sequence: Synthetic oligonucleotide
cuuggcguagcaucuggaa

SEQ ID NO: 2988249 - RNA, 19 nt, Artificial Sequence
  Description of Artificial Sequence: Synthetic oligonucleotide
cauggccucgagcauccug

SEQ ID NO: 2988250 - RNA, 19 nt, Artificial Sequence
  Description of Artificial Sequence: Synthetic oligonucleotide
aggugggaaaggccgcuca

SEQ ID NO: 2988251 - RNA, 19 nt, Artificial Sequence
  Description of Artificial Sequence: Synthetic oligonucleotide
gcucauuugaaagguaaga

SEQ ID NO: 2988252 - RNA, 19 nt, Artificial Sequence
  Description of Artificial Sequence: Synthetic oligonucleotide
cagggagacacugagguua

SEQ ID NO: 2988253 - RNA, 19 nt, Artificial Sequence
  Description of Artificial Sequence: Synthetic oligonucleotide
ugcgaccacuagaguguag

SEQ ID NO: 2988254 - RNA, 19 nt, Artificial Sequence
  Description of Artificial Sequence: Synthetic oligonucleotide
gacauccaggauguuggca

SEQ ID NO: 2988255 - RNA, 19 nt, Artificial Sequence
  Description of Artificial Sequence: Synthetic oligonucleotide
gcagaugugcgaccacuag

SEQ ID NO: 2988256 - RNA, 19 nt, Artificial Sequence
  Description of Artificial Sequence: Synthetic oligonucleotide
agggcagaugugcgaccac

SEQ ID NO: 2988257 - RNA, 19 nt, Artificial Sequence
  Description of Artificial Sequence: Synthetic oligonucleotide
ggguugcucagacuggaac

SEQ ID NO: 2988258 - RNA, 19 nt, Artificial Sequence
  Description of Artificial Sequence: Synthetic oligonucleotide
ugaggugggaaaggccgcu

SEQ ID NO: 2988259 - RNA, 19 nt, Artificial Sequence
  Description of Artificial Sequence: Synthetic oligonucleotide
uugagcauccagggguccu

SEQ ID NO: 2988260 - RNA, 19 nt, Artificial Sequence
  Description of Artificial Sequence: Synthetic oligonucleotide
ugagguuaguugggaacau

SEQ ID NO: 2988261 - RNA, 19 nt, Artificial Sequence
  Description of Artificial Sequence: Synthetic oligonucleotide
cuagaguguagaggaugac

SEQ ID NO: 2988262 - RNA, 19 nt, Artificial Sequence
  Description of Artificial Sequence: Synthetic oligonucleotide
cacaguaggucuggcugag

SEQ ID NO: 2988263 - RNA, 19 nt, Artificial Sequence
  Description of Artificial Sequence: Synthetic oligonucleotide
uucuugagguuggugucau

SEQ ID NO: 2988264 - RNA, 19 nt, Artificial Sequence
  Description of Artificial Sequence: Synthetic oligonucleotide
acaugaccuccuucugggu

SEQ ID NO: 2988265 - RNA, 19 nt, Artificial Sequence
  Description of Artificial Sequence: Synthetic oligonucleotide
gugucagacaggaaggggu

SEQ ID NO: 2988266 - RNA, 19 nt, Artificial Sequence
  Description of Artificial Sequence: Synthetic oligonucleotide
auuucugggcaggcauaag

SEQ ID NO: 2988267 - RNA, 19 nt, Artificial Sequence
  Description of Artificial Sequence: Synthetic oligonucleotide
uucguggguugcucagacu

SEQ ID NO: 2988268 - RNA, 19 nt, Artificial Sequence
  Description of Artificial Sequence: Synthetic oligonucleotide
cuuggcagcuuggcguagc

SEQ ID NO: 2988269 - RNA, 19 nt, Artificial Sequence
  Description of Artificial Sequence: Synthetic oligonucleotide
ugucaucgaagggcagaug

SEQ ID NO: 2988270 - RNA, 19 nt, Artificial Sequence
  Description of Artificial Sequence: Synthetic oligonucleotide
gguugcucagacuggaacu

SEQ ID NO: 2988271 - RNA, 19 nt, Artificial Sequence
  Description of Artificial Sequence: Synthetic oligonucleotide
gguuaguugggaacaugac

SEQ ID NO: 2988272 - RNA, 19 nt, Artificial Sequence
  Description of Artificial Sequence: Synthetic oligonucleotide
agggagacacugagguuag

SEQ ID NO: 2988273 - RNA, 19 nt, Artificial Sequence
  Description of Artificial Sequence: Synthetic oligonucleotide
cuugagcauccaggggucc

SEQ ID NO: 2988274 - RNA, 19 nt, Artificial Sequence
  Description of Artificial Sequence: Synthetic oligonucleotide
ugcacuccagggagacacu

SEQ ID NO: 2988275 - RNA, 19 nt, Artificial Sequence
  Description of Artificial Sequence: Synthetic oligonucleotide
cuccaggugucagacagga

SEQ ID NO: 2988276 - RNA, 19 nt, Artificial Sequence
  Description of Artificial Sequence: Synthetic oligonucleotide
accuccuucugggucucuc

SEQ ID NO: 2988277 - RNA, 19 nt, Artificial Sequence
  Description of Artificial Sequence: Synthetic oligonucleotide
cuucuugagguugguguca

SEQ ID NO: 2988278 - RNA, 19 nt, Artificial Sequence
  Description of Artificial Sequence: Synthetic oligonucleotide
ggcauaagcaaagcugcca

SEQ ID NO: 2988279 - RNA, 19 nt, Artificial Sequence
  Description of Artificial Sequence: Synthetic oligonucleotide
caagauuucugggcaggca

SEQ ID NO: 2988280 - RNA, 19 nt, Artificial Sequence
  Description of Artificial Sequence: Synthetic oligonucleotide
ugacgcccaugcuccaggu

SEQ ID NO: 2988281 - RNA, 19 nt, Artificial Sequence
  Description of Artificial Sequence: Synthetic oligonucleotide
gucagacaggaagggguug

SEQ ID NO: 2988282 - RNA, 19 nt, Artificial Sequence
  Description of Artificial Sequence: Synthetic oligonucleotide
uccagggguccuugaggac

SEQ ID NO: 2988283 - RNA, 19 nt, Artificial Sequence
  Description of Artificial Sequence: Synthetic oligonucleotide
cugauuucaguucgugggu

SEQ ID NO: 2988284 - RNA, 19 nt, Artificial Sequence
  Description of Artificial Sequence: Synthetic oligonucleotide
uccaggauguuggcacgcu

SEQ ID NO: 2988285 - RNA, 19 nt, Artificial Sequence
  Description of Artificial Sequence: Synthetic oligonucleotide
gagcauccugauuucaguu

SEQ ID NO: 2988286 - RNA, 19 nt, Artificial Sequence
  Description of Artificial Sequence: Synthetic oligonucleotide
aguucguggguugcucaga

SEQ ID NO: 2988287 - RNA, 19 nt, Artificial Sequence
  Description of Artificial Sequence: Synthetic oligonucleotide
acuggaacuugagcaucca

SEQ ID NO: 2988288 - RNA, 19 nt, Artificial Sequence
  Description of Artificial Sequence: Synthetic oligonucleotide
gcugccacaguaggucugg

SEQ ID NO: 2988289 - RNA, 19 nt, Artificial Sequence
  Description of Artificial Sequence: Synthetic oligonucleotide
gcccagcaagauuucuggg

SEQ ID NO: 2988290 - RNA, 19 nt, Artificial Sequence
  Description of Artificial Sequence: Synthetic oligonucleotide
cagcagcuucuugagguug

SEQ ID NO: 2988291 - RNA, 19 nt, Artificial Sequence
  Description of Artificial Sequence: Synthetic oligonucleotide
guuguagggcaagcccagc

SEQ ID NO: 2988292 - RNA, 19 nt, Artificial Sequence
  Description of Artificial Sequence: Synthetic oligonucleotide
uccaggugucagacaggaa

SEQ ID NO: 2988293 - RNA, 19 nt, Artificial Sequence
  Description of Artificial Sequence: Synthetic oligonucleotide
caaagcugccacaguaggu

SEQ ID NO: 2988294 - RNA, 19 nt, Artificial Sequence
  Description of Artificial Sequence: Synthetic oligonucleotide
caguaggucuggcugaggu

SEQ ID NO: 2988295 - RNA, 19 nt, Artificial Sequence
  Description of Artificial Sequence: Synthetic oligonucleotide
agcauccagggguccuuga

SEQ ID NO: 2988296 - RNA, 19 nt, Artificial Sequence
  Description of Artificial Sequence: Synthetic oligonucleotide
ggucucucucagcagcuuc

SEQ ID NO: 2988297 - RNA, 19 nt, Artificial Sequence
  Description of Artificial Sequence: Synthetic oligonucleotide
gaaaggccgcucauuugaa

SEQ ID NO: 2988298 - RNA, 19 nt, Artificial Sequence
  Description of Artificial Sequence: Synthetic oligonucleotide
agggcaagcccagcaagau

SEQ ID NO: 2988299 - RNA, 19 nt, Artificial Sequence
  Description of Artificial Sequence: Synthetic oligonucleotide
gccucgagcauccugauuu

SEQ ID NO: 2988300 - RNA, 19 nt, Artificial Sequence
  Description of Artificial Sequence: Synthetic oligonucleotide
gaugugcgaccacuagagu

SEQ ID NO: 2988301 - RNA, 19 nt, Artificial Sequence
  Description of Artificial Sequence: Synthetic oligonucleotide
ucuugagguuggugucauc

SEQ ID NO: 2988302 - RNA, 19 nt, Artificial Sequence
  Description of Artificial Sequence: Synthetic oligonucleotide
gcugacacauggccucgag

SEQ ID NO: 2988303 - RNA, 19 nt, Artificial Sequence
  Description of Artificial Sequence: Synthetic oligonucleotide
ggguuguagggcaagccca

SEQ ID NO: 2988304 - RNA, 19 nt, Artificial Sequence
  Description of Artificial Sequence: Synthetic oligonucleotide
guggguugcucagacugga

SEQ ID NO: 2988305 - RNA, 19 nt, Artificial Sequence
  Description of Artificial Sequence: Synthetic oligonucleotide
gcaagauuucugggcaggc

SEQ ID NO: 2988306 - RNA, 19 nt, Artificial Sequence
  Description of Artificial Sequence: Synthetic oligonucleotide
cagacuggaacuugagcau

SEQ ID NO: 2988307 - RNA, 19 nt, Artificial Sequence
  Description of Artificial Sequence: Synthetic oligonucleotide
ggacauccaggauguuggc

SEQ ID NO: 2988308 - RNA, 19 nt, Artificial Sequence
  Description of Artificial Sequence: Synthetic oligonucleotide
cacugagguuaguugggaa

SEQ ID NO: 2988309 - RNA, 19 nt, Artificial Sequence
  Description of Artificial Sequence: Synthetic oligonucleotide
guugggaacaugaccuccu

SEQ ID NO: 2988310 - RNA, 19 nt, Artificial Sequence
  Description of Artificial Sequence: Synthetic oligonucleotide
gggguccuugaggacaucc

SEQ ID NO: 2988311 - RNA, 19 nt, Artificial Sequence
  Description of Artificial Sequence: Synthetic oligonucleotide
cgcucauuugaaagguaag

SEQ ID NO: 2988312 - RNA, 19 nt, Artificial Sequence
  Description of Artificial Sequence: Synthetic oligonucleotide
agauuucugggcaggcaua

SEQ ID NO: 2988313 - RNA, 19 nt, Artificial Sequence
  Description of Artificial Sequence: Synthetic oligonucleotide
cacuccagggagacacuga

SEQ ID NO: 2988314 - RNA, 19 nt, Artificial Sequence
  Description of Artificial Sequence: Synthetic oligonucleotide
gcgaccacuagaguguaga

SEQ ID NO: 2988315 - RNA, 19 nt, Artificial Sequence
  Description of Artificial Sequence: Synthetic oligonucleotide
agcugccacaguaggucug

SEQ ID NO: 2988316 - RNA, 19 nt, Artificial Sequence
  Description of Artificial Sequence: Synthetic oligonucleotide
gcucagacuggaacuugag

SEQ ID NO: 2988317 - RNA, 19 nt, Artificial Sequence
  Description of Artificial Sequence: Synthetic oligonucleotide
ggcaagcccagcaagauuu

SEQ ID NO: 2988318 - RNA, 19 nt, Artificial Sequence
  Description of Artificial Sequence: Synthetic oligonucleotide
gacacauggccucgagcau

SEQ ID NO: 2988319 - RNA, 19 nt, Artificial Sequence
  Description of Artificial Sequence: Synthetic oligonucleotide
cguggguugcucagacugg

SEQ ID NO: 2988320 - RNA, 19 nt, Artificial Sequence
  Description of Artificial Sequence: Synthetic oligonucleotide
ggcaggcauaagcaaagcu

SEQ ID NO: 2988321 - RNA, 19 nt, Artificial Sequence
  Description of Artificial Sequence: Synthetic oligonucleotide
ggcugaggugggaaaggcc

SEQ ID NO: 2988322 - RNA, 19 nt, Artificial Sequence
  Description of Artificial Sequence: Synthetic oligonucleotide
ggauguuggcacgcuuggc

SEQ ID NO: 2988323 - RNA, 19 nt, Artificial Sequence
  Description of Artificial Sequence: Synthetic oligonucleotide
guuggcacgcuuggcagcu

SEQ ID NO: 2988324 - RNA, 19 nt, Artificial Sequence
  Description of Artificial Sequence: Synthetic oligonucleotide
ccgcucauuugaaagguaa

SEQ ID NO: 2988325 - RNA, 19 nt, Artificial Sequence
  Description of Artificial Sequence: Synthetic oligonucleotide
gaggugggaaaggccgcuc

SEQ ID NO: 2988326 - RNA, 19 nt, Artificial Sequence
  Description of Artificial Sequence: Synthetic oligonucleotide
guugcucagacuggaacuu

SEQ ID NO: 2988327 - RNA, 19 nt, Artificial Sequence
  Description of Artificial Sequence: Synthetic oligonucleotide
cucgagcauccugauuuca

SEQ ID NO: 2988328 - RNA, 19 nt, Artificial Sequence
  Description of Artificial Sequence: Synthetic oligonucleotide
uggccucgagcauccugau

SEQ ID NO: 2988329 - RNA, 19 nt, Artificial Sequence
  Description of Artificial Sequence: Synthetic oligonucleotide
gcacuccagggagacacug

SEQ ID NO: 2988330 - RNA, 19 nt, Artificial Sequence
  Description of Artificial Sequence: Synthetic oligonucleotide
cgaccacuagaguguagag

SEQ ID NO: 2988331 - RNA, 19 nt, Artificial Sequence
  Description of Artificial Sequence: Synthetic oligonucleotide
ggcacgcuuggcagcuugg

SEQ ID NO: 2988332 - RNA, 19 nt, Artificial Sequence
  Description of Artificial Sequence: Synthetic oligonucleotide
ccacaguaggucuggcuga

SEQ ID NO: 2988333 - RNA, 19 nt, Artificial Sequence
  Description of Artificial Sequence: Synthetic oligonucleotide
cgaagggcagaugugcgac

SEQ ID NO: 2988334 - RNA, 19 nt, Artificial Sequence
  Description of Artificial Sequence: Synthetic oligonucleotide
cagcuuggcguagcaucug

SEQ ID NO: 2988335 - RNA, 19 nt, Artificial Sequence
  Description of Artificial Sequence: Synthetic oligonucleotide
gggcugacacauggccucg

SEQ ID NO: 2988336 - RNA, 19 nt, Artificial Sequence
  Description of Artificial Sequence: Synthetic oligonucleotide
gcuccaggugucagacagg

SEQ ID NO: 2988337 - RNA, 19 nt, Artificial Sequence
  Description of Artificial Sequence: Synthetic oligonucleotide
uggcagcuuggcguagcau

SEQ ID NO: 2988338 - RNA, 19 nt, Artificial Sequence
  Description of Artificial Sequence: Synthetic oligonucleotide
gugggcugacacauggccu

SEQ ID NO: 2988339 - RNA, 19 nt, Artificial Sequence
  Description of Artificial Sequence: Synthetic oligonucleotide
cugccacaguaggucuggc

SEQ ID NO: 2988340 - RNA, 19 nt, Artificial Sequence
  Description of Artificial Sequence: Synthetic oligonucleotide
gugucaucgaagggcagau

SEQ ID NO: 2988341 - RNA, 19 nt, Artificial Sequence
  Description of Artificial Sequence: Synthetic oligonucleotide
cauccugauuucaguucgu

SEQ ID NO: 2988342 - RNA, 19 nt, Artificial Sequence
  Description of Artificial Sequence: Synthetic oligonucleotide
ccucgagcauccugauuuc

SEQ ID NO: 2988343 - RNA, 19 nt, Artificial Sequence
  Description of Artificial Sequence: Synthetic oligonucleotide
ggguccuugaggacaucca

SEQ ID NO: 2988344 - RNA, 19 nt, Artificial Sequence
  Description of Artificial Sequence: Synthetic oligonucleotide
gcaucuggaagaucagguu

SEQ ID NO: 2988345 - RNA, 19 nt, Artificial Sequence
  Description of Artificial Sequence: Synthetic oligonucleotide
ggagacacugagguuaguu

SEQ ID NO: 2988346 - RNA, 19 nt, Artificial Sequence
  Description of Artificial Sequence: Synthetic oligonucleotide
cuugcacuccagggagaca

SEQ ID NO: 2988347 - RNA, 19 nt, Artificial Sequence
  Description of Artificial Sequence: Synthetic oligonucleotide
gcagcuuggcguagcaucu

SEQ ID NO: 2988348 - RNA, 19 nt, Artificial Sequence
  Description of Artificial Sequence: Synthetic oligonucleotide
agggguccuugaggacauc

SEQ ID NO: 2988349 - RNA, 19 nt, Artificial Sequence
  Description of Artificial Sequence: Synthetic oligonucleotide
caagcccagcaagauuucu

SEQ ID NO: 2988350 - RNA, 19 nt, Artificial Sequence
  Description of Artificial Sequence: Synthetic oligonucleotide
ugaggacauccaggauguu

SEQ ID NO: 2988351 - RNA, 19 nt, Artificial Sequence
  Description of Artificial Sequence: Synthetic oligonucleotide
ggccgcucauuugaaaggu

SEQ ID NO: 2988352 - RNA, 19 nt, Artificial Sequence
  Description of Artificial Sequence: Synthetic oligonucleotide
ggucuggcugaggugggaa

SEQ ID NO: 2988353 - RNA, 19 nt, Artificial Sequence
  Description of Artificial Sequence: Synthetic oligonucleotide
ggcagaugugcgaccacua

SEQ ID NO: 2988354 - RNA, 19 nt, Artificial Sequence
  Description of Artificial Sequence: Synthetic oligonucleotide
gcuuggcguagcaucugga

SEQ ID NO: 2988355 - RNA, 19 nt, Artificial Sequence
  Description of Artificial Sequence: Synthetic oligonucleotide
cccaugcuccaggugucag

SEQ ID NO: 2988356 - RNA, 19 nt, Artificial Sequence
  Description of Artificial Sequence: Synthetic oligonucleotide
gcaagcccagcaagauuuc

SEQ ID NO: 2988357 - RNA, 19 nt, Artificial Sequence
  Description of Artificial Sequence: Synthetic oligonucleotide
ggugggaaaggccgcucau

SEQ ID NO: 2988358 - RNA, 19 nt, Artificial Sequence
  Description of Artificial Sequence: Synthetic oligonucleotide
ggaagggguuguagggcaa

SEQ ID NO: 2988359 - RNA, 19 nt, Artificial Sequence
  Description of Artificial Sequence: Synthetic oligonucleotide
gcuuggcagcuuggcguag

SEQ ID NO: 2988360 - RNA, 19 nt, Artificial Sequence
  Description of Artificial Sequence: Synthetic oligonucleotide
cagacaggaagggguugua

SEQ ID NO: 2988361 - RNA, 19 nt, Artificial Sequence
  Description of Artificial Sequence: Synthetic oligonucleotide
gggcagaugugcgaccacu

SEQ ID NO: 2988362 - RNA, 19 nt, Artificial Sequence
  Description of Artificial Sequence: Synthetic oligonucleotide
gugcgaccacuagagugua

SEQ ID NO: 2988363 - RNA, 19 nt, Artificial Sequence
  Description of Artificial Sequence: Synthetic oligonucleotide
gugggaaaggccgcucauu

SEQ ID NO: 2988364 - RNA, 19 nt, Artificial Sequence
  Description of Artificial Sequence: Synthetic oligonucleotide
acauggccucgagcauccu

SEQ ID NO: 2988365 - RNA, 19 nt, Artificial Sequence
  Description of Artificial Sequence: Synthetic oligonucleotide
cgagcauccugauuucagu

SEQ ID NO: 2988366 - RNA, 19 nt, Artificial Sequence
  Description of Artificial Sequence: Synthetic oligonucleotide
uuggcacgcuuggcagcuu

SEQ ID NO: 2988367 - RNA, 19 nt, Artificial Sequence
  Description of Artificial Sequence: Synthetic oligonucleotide
cgcccaugcuccagguguc

SEQ ID NO: 2988368 - RNA, 19 nt, Artificial Sequence
  Description of Artificial Sequence: Synthetic oligonucleotide
ggcugacacauggccucga

SEQ ID NO: 2988369 - RNA, 19 nt, Artificial Sequence
  Description of Artificial Sequence: Synthetic oligonucleotide
gggcaagcccagcaagauu

SEQ ID NO: 2988370 - RNA, 19 nt, Artificial Sequence
  Description of Artificial Sequence: Synthetic oligonucleotide
gccgcucauuugaaaggua

SEQ ID NO: 2988371 - RNA, 19 nt, Artificial Sequence
  Description of Artificial Sequence: Synthetic oligonucleotide
gcguagcaucuggaagauc

SEQ ID NO: 2988372 - RNA, 19 nt, Artificial Sequence
  Description of Artificial Sequence: Synthetic oligonucleotide
cgcuuggcagcuuggcgua

SEQ ID NO: 2988373 - RNA, 19 nt, Artificial Sequence
  Description of Artificial Sequence: Synthetic oligonucleotide
ccuugaggacauccaggau

SEQ ID NO: 2988374 - RNA, 19 nt, Artificial Sequence
  Description of Artificial Sequence: Synthetic oligonucleotide
gaccuccuucugggucucu

SEQ ID NO: 2988375 - RNA, 19 nt, Artificial Sequence
  Description of Artificial Sequence: Synthetic oligonucleotide
gggcuacuacgcacaggcu

SEQ ID NO: 2988376 - RNA, 19 nt, Artificial Sequence
  Description of Artificial Sequence: Synthetic oligonucleotide
ccagggagacacugagguu

SEQ ID NO: 2988377 - RNA, 19 nt, Artificial Sequence
  Description of Artificial Sequence: Synthetic oligonucleotide
ggccucgagcauccugauu

SEQ ID NO: 2988378 - RNA, 19 nt, Artificial Sequence
  Description of Artificial Sequence: Synthetic oligonucleotide
ccaggauguuggcacgcuu

SEQ ID NO: 2988379 - RNA, 19 nt, Artificial Sequence
  Description of Artificial Sequence: Synthetic oligonucleotide
gggagacacugagguuagu

SEQ ID NO: 2988380 - RNA, 19 nt, Artificial Sequence
  Description of Artificial Sequence: Synthetic oligonucleotide
uggaaauacuuccagaggg

SEQ ID NO: 2988381 - RNA, 19 nt, Artificial Sequence
  Description of Artificial Sequence: Synthetic oligonucleotide
uucguauccaagcugaacg

SEQ ID NO: 2988382 - RNA, 19 nt, Artificial Sequence
  Description of Artificial Sequence: Synthetic oligonucleotide
aacagggagugauagaugg

SEQ ID NO: 2988383 - RNA, 19 nt, Artificial Sequence
  Description of Artificial Sequence: Synthetic oligonucleotide
acucacuggacauauaccc

SEQ ID NO: 2988384 - RNA, 19 nt, Artificial Sequence
  Description of Artificial Sequence: Synthetic oligonucleotide
uuuggaaauacuuccagag

SEQ ID NO: 2988385 - RNA, 19 nt, Artificial Sequence
  Description of Artificial Sequence: Synthetic oligonucleotide
aaggucaugggucuucacc

SEQ ID NO: 2988386 - RNA, 19 nt, Artificial Sequence
  Description of Artificial Sequence: Synthetic oligonucleotide
auugggauccagaagaucc

SEQ ID NO: 2988387 - RNA, 19 nt, Artificial Sequence
  Description of Artificial Sequence: Synthetic oligonucleotide
acaauugggauccagaaga

SEQ ID NO: 2988388 - RNA, 19 nt, Artificial Sequence
  Description of Artificial Sequence: Synthetic oligonucleotide
auggacaucacauaaucuc

SEQ ID NO: 2988389 - RNA, 19 nt, Artificial Sequence
  Description of Artificial Sequence: Synthetic oligonucleotide
aaugauguaguuguguuug

SEQ ID NO: 2988390 - RNA, 19 nt, Artificial Sequence
  Description of Artificial Sequence: Synthetic oligonucleotide
caagguuugcuaaacaggg

SEQ ID NO: 2988391 - RNA, 19 nt, Artificial Sequence
  Description of Artificial Sequence: Synthetic oligonucleotide
uaacuuuggaaauacuucc

SEQ ID NO: 2988392 - RNA, 19 nt, Artificial Sequence
  Description of Artificial Sequence: Synthetic oligonucleotide
uggacaucacauaaucucg

SEQ ID NO: 2988393 - RNA, 19 nt, Artificial Sequence
  Description of Artificial Sequence: Synthetic oligonucleotide
cauaaucucguacaauugg

SEQ ID NO: 2988394 - RNA, 19 nt, Artificial Sequence
  Description of Artificial Sequence: Synthetic oligonucleotide
uuugggagaaaggucaugg

SEQ ID NO: 2988395 - RNA, 19 nt, Artificial Sequence
  Description of Artificial Sequence: Synthetic oligonucleotide
acaaugaucacagcauugc

SEQ ID NO: 2988396 - RNA, 19 nt, Artificial Sequence
  Description of Artificial Sequence: Synthetic oligonucleotide
ugauagaugggaaaauccu

SEQ ID NO: 2988397 - RNA, 19 nt, Artificial Sequence
  Description of Artificial Sequence: Synthetic oligonucleotide
uuggaaauacuuccagagg

SEQ ID NO: 2988398 - RNA, 19 nt, Artificial Sequence
  Description of Artificial Sequence: Synthetic oligonucleotide
aagcugaacgccuaccauc

SEQ ID NO: 2988399 - RNA, 19 nt, Artificial Sequence
  Description of Artificial Sequence: Synthetic oligonucleotide
aaauacuuccagagggucc

SEQ ID NO: 2988400 - RNA, 19 nt, Artificial Sequence
  Description of Artificial Sequence: Synthetic oligonucleotide
acgccuaccaucuugacug

SEQ ID NO: 2988401 - RNA, 19 nt, Artificial Sequence
  Description of Artificial Sequence: Synthetic oligonucleotide
ugggaaguaacuuuggaaa

SEQ ID NO: 2988402 - RNA, 19 nt, Artificial Sequence
  Description of Artificial Sequence: Synthetic oligonucleotide
uggacauauacccauggac

SEQ ID NO: 2988403 - RNA, 19 nt, Artificial Sequence
  Description of Artificial Sequence: Synthetic oligonucleotide
guagcaaaguugaugaagg

SEQ ID NO: 2988404 - RNA, 19 nt, Artificial Sequence
  Description of Artificial Sequence: Synthetic oligonucleotide
uccaagguuugcuaaacag

SEQ ID NO: 2988405 - RNA, 19 nt, Artificial Sequence
  Description of Artificial Sequence: Synthetic oligonucleotide
uccuggaaaagccaguggc

SEQ ID NO: 2988406 - RNA, 19 nt, Artificial Sequence
  Description of Artificial Sequence: Synthetic oligonucleotide
uaggcaagccagauuaagg

SEQ ID NO: 2988407 - RNA, 19 nt, Artificial Sequence
  Description of Artificial Sequence: Synthetic oligonucleotide
auugccugagccuuucugg

SEQ ID NO: 2988408 - RNA, 19 nt, Artificial Sequence
  Description of Artificial Sequence: Synthetic oligonucleotide
agguuugcuaaacagggag

SEQ ID NO: 2988409 - RNA, 19 nt, Artificial Sequence
  Description of Artificial Sequence: Synthetic oligonucleotide
ucucguacaauugggaucc

SEQ ID NO: 2988410 - RNA, 19 nt, Artificial Sequence
  Description of Artificial Sequence: Synthetic oligonucleotide
uccaguuucguauccaagc

SEQ ID NO: 2988411 - RNA, 19 nt, Artificial Sequence
  Description of Artificial Sequence: Synthetic oligonucleotide
acaucacauaaucucguac

SEQ ID NO: 2988412 - RNA, 19 nt, Artificial Sequence
  Description of Artificial Sequence: Synthetic oligonucleotide
aaaauccuggaaaagccag

SEQ ID NO: 2988413 - RNA, 19 nt, Artificial Sequence
  Description of Artificial Sequence: Synthetic oligonucleotide
ucuucaccagcuuuacugg

SEQ ID NO: 2988414 - RNA, 19 nt, Artificial Sequence
  Description of Artificial Sequence: Synthetic oligonucleotide
gagacaaugauguaguugu

SEQ ID NO: 2988415 - RNA, 19 nt, Artificial Sequence
  Description of Artificial Sequence: Synthetic oligonucleotide
gucuucaccagcuuuacug

SEQ ID NO: 2988416 - RNA, 19 nt, Artificial Sequence
  Description of Artificial Sequence: Synthetic oligonucleotide
auguaguuguguuugggag

SEQ ID NO: 2988417 - RNA, 19 nt, Artificial Sequence
  Description of Artificial Sequence: Synthetic oligonucleotide
uuacugggaaguaacuuug

SEQ ID NO: 2988418 - RNA, 19 nt, Artificial Sequence
  Description of Artificial Sequence: Synthetic oligonucleotide
ucacucacuggacauauac

SEQ ID NO: 2988419 - RNA, 19 nt, Artificial Sequence
  Description of Artificial Sequence: Synthetic oligonucleotide
uacaauugggauccagaag

SEQ ID NO: 2988420 - RNA, 19 nt, Artificial Sequence
  Description of Artificial Sequence: Synthetic oligonucleotide
ugagcgagaauaccauggg

SEQ ID NO: 2988421 - RNA, 19 nt, Artificial Sequence
  Description of Artificial Sequence: Synthetic oligonucleotide
auagaugggaaaauccugg

SEQ ID NO: 2988422 - RNA, 19 nt, Artificial Sequence
  Description of Artificial Sequence: Synthetic oligonucleotide
ugaugaaggcaccaugagc

SEQ ID NO: 2988423 - RNA, 19 nt, Artificial Sequence
  Description of Artificial Sequence: Synthetic oligonucleotide
aucucguacaauugggauc

SEQ ID NO: 2988424 - RNA, 19 nt, Artificial Sequence
  Description of Artificial Sequence: Synthetic oligonucleotide
gaugggaaaauccuggaaa

SEQ ID NO: 2988425 - RNA, 19 nt, Artificial Sequence
  Description of Artificial Sequence: Synthetic oligonucleotide
aguagcaaaguugaugaag

SEQ ID NO: 2988426 - RNA, 19 nt, Artificial Sequence
  Description of Artificial Sequence: Synthetic oligonucleotide
uuuacugggaaguaacuuu

SEQ ID NO: 2988427 - RNA, 19 nt, Artificial Sequence
  Description of Artificial Sequence: Synthetic oligonucleotide
uucaguagcaaaguugaug

SEQ ID NO: 2988428 - RNA, 19 nt, Artificial Sequence
  Description of Artificial Sequence: Synthetic oligonucleotide
uaaacagggagugauagau

SEQ ID NO: 2988429 - RNA, 19 nt, Artificial Sequence
  Description of Artificial Sequence: Synthetic oligonucleotide
aaucucguacaauugggau

SEQ ID NO: 2988430 - RNA, 19 nt, Artificial Sequence
  Description of Artificial Sequence: Synthetic oligonucleotide
aauacuuccagagggucca

SEQ ID NO: 2988431 - RNA, 19 nt, Artificial Sequence
  Description of Artificial Sequence: Synthetic oligonucleotide
agugauagaugggaaaauc

SEQ ID NO: 2988432 - RNA, 19 nt, Artificial Sequence
  Description of Artificial Sequence: Synthetic oligonucleotide
aaagccaguggcuucagua

SEQ ID NO: 2988433 - RNA, 19 nt, Artificial Sequence
  Description of Artificial Sequence: Synthetic oligonucleotide
aagccaguggcuucaguag

SEQ ID NO: 2988434 - RNA, 19 nt, Artificial Sequence
  Description of Artificial Sequence: Synthetic oligonucleotide
aaugaucacagcauugccu

SEQ ID NO: 2988435 - RNA, 19 nt, Artificial Sequence
  Description of Artificial Sequence: Synthetic oligonucleotide
auaaucucguacaauuggg

SEQ ID NO: 2988436 - RNA, 19 nt, Artificial Sequence
  Description of Artificial Sequence: Synthetic oligonucleotide
uaaucucguacaauuggga

SEQ ID NO: 2988437 - RNA, 19 nt, Artificial Sequence
  Description of Artificial Sequence: Synthetic oligonucleotide
uugaugaaggcaccaugag

SEQ ID NO: 2988438 - RNA, 19 nt, Artificial Sequence
  Description of Artificial Sequence: Synthetic oligonucleotide
gauagaugggaaaauccug

SEQ ID NO: 2988439 - RNA, 19 nt, Artificial Sequence
  Description of Artificial Sequence: Synthetic oligonucleotide
uucugggucagcuuguacu

SEQ ID NO: 2988440 - RNA, 19 nt, Artificial Sequence
  Description of Artificial Sequence: Synthetic oligonucleotide
acuggacauauacccaugg

SEQ ID NO: 2988441 - RNA, 19 nt, Artificial Sequence
  Description of Artificial Sequence: Synthetic oligonucleotide
uguguuugggagaaagguc

SEQ ID NO: 2988442 - RNA, 19 nt, Artificial Sequence
  Description of Artificial Sequence: Synthetic oligonucleotide
ugggagaaaggucaugggu

SEQ ID NO: 2988443 - RNA, 19 nt, Artificial Sequence
  Description of Artificial Sequence: Synthetic oligonucleotide
uuguguuugggagaaaggu

SEQ ID NO: 2988444 - RNA, 19 nt, Artificial Sequence
  Description of Artificial Sequence: Synthetic oligonucleotide
aauccuggaaaagccagug

SEQ ID NO: 2988445 - RNA, 19 nt, Artificial Sequence
  Description of Artificial Sequence: Synthetic oligonucleotide
guaacuuuggaaauacuuc

SEQ ID NO: 2988446 - RNA, 19 nt, Artificial Sequence
  Description of Artificial Sequence: Synthetic oligonucleotide
gauguaguuguguuuggga

SEQ ID NO: 2988447 - RNA, 19 nt, Artificial Sequence
  Description of Artificial Sequence: Synthetic oligonucleotide
aauugggauccagaagauc

SEQ ID NO: 2988448 - RNA, 19 nt, Artificial Sequence
  Description of Artificial Sequence: Synthetic oligonucleotide
augagcgagaauaccaugg

SEQ ID NO: 2988449 - RNA, 19 nt, Artificial Sequence
  Description of Artificial Sequence: Synthetic oligonucleotide
aguugaugaaggcaccaug

SEQ ID NO: 2988450 - RNA, 19 nt, Artificial Sequence
  Description of Artificial Sequence: Synthetic oligonucleotide
ugaacgccuaccaucuuga

SEQ ID NO: 2988451 - RNA, 19 nt, Artificial Sequence
  Description of Artificial Sequence: Synthetic oligonucleotide
aacgccuaccaucuugacu

SEQ ID NO: 2988452 - RNA, 19 nt, Artificial Sequence
  Description of Artificial Sequence: Synthetic oligonucleotide
caucacauaaucucguaca

SEQ ID NO: 2988453 - RNA, 19 nt, Artificial Sequence
  Description of Artificial Sequence: Synthetic oligonucleotide
agcuuuacugggaaguaac

SEQ ID NO: 2988454 - RNA, 19 nt, Artificial Sequence
  Description of Artificial Sequence: Synthetic oligonucleotide
ugauguaguuguguuuggg

SEQ ID NO: 2988455 - RNA, 19 nt, Artificial Sequence
  Description of Artificial Sequence: Synthetic oligonucleotide
agccaguggcuucaguagc

SEQ ID NO: 2988456 - RNA, 19 nt, Artificial Sequence
  Description of Artificial Sequence: Synthetic oligonucleotide
gugauagaugggaaaaucc

SEQ ID NO: 2988457 - RNA, 19 nt, Artificial Sequence
  Description of Artificial Sequence: Synthetic oligonucleotide
agcuccacccaccacaaug

SEQ ID NO: 2988458 - RNA, 19 nt, Artificial Sequence
  Description of Artificial Sequence: Synthetic oligonucleotide
cagauuaaggggagcacag

SEQ ID NO: 2988459 - RNA, 19 nt, Artificial Sequence
  Description of Artificial Sequence: Synthetic oligonucleotide
uugccugagccuuucuggg

SEQ ID NO: 2988460 - RNA, 19 nt, Artificial Sequence
  Description of Artificial Sequence: Synthetic oligonucleotide
cagcuuguacuucagggcc

SEQ ID NO: 2988461 - RNA, 19 nt, Artificial Sequence
  Description of Artificial Sequence: Synthetic oligonucleotide
uacugggaaguaacuuugg

SEQ ID NO: 2988462 - RNA, 19 nt, Artificial Sequence
  Description of Artificial Sequence: Synthetic oligonucleotide
accaucuugacugugcgug

SEQ ID NO: 2988463 - RNA, 19 nt, Artificial Sequence
  Description of Artificial Sequence: Synthetic oligonucleotide
acaaugauguaguuguguu

SEQ ID NO: 2988464 - RNA, 19 nt, Artificial Sequence
  Description of Artificial Sequence: Synthetic oligonucleotide
agaggguccaguuucguau

SEQ ID NO: 2988465 - RNA, 19 nt, Artificial Sequence
  Description of Artificial Sequence: Synthetic oligonucleotide
uuccagaggguccaguuuc

SEQ ID NO: 2988466 - RNA, 19 nt, Artificial Sequence
  Description of Artificial Sequence: Synthetic oligonucleotide
aaaggucaugggucuucac

SEQ ID NO: 2988467 - RNA, 19 nt, Artificial Sequence
  Description of Artificial Sequence: Synthetic oligonucleotide
gagcgagaauaccaugggg

SEQ ID NO: 2988468 - RNA, 19 nt, Artificial Sequence
  Description of Artificial Sequence: Synthetic oligonucleotide
uauacccauggacaucaca

SEQ ID NO: 2988469 - RNA, 19 nt, Artificial Sequence
  Description of Artificial Sequence: Synthetic oligonucleotide
gauccagaagaucccuucc

SEQ ID NO: 2988470 - RNA, 19 nt, Artificial Sequence
  Description of Artificial Sequence: Synthetic oligonucleotide
aguggcuucaguagcaaag

SEQ ID NO: 2988471 - RNA, 19 nt, Artificial Sequence
  Description of Artificial Sequence: Synthetic oligonucleotide
aaaguugaugaaggcacca

SEQ ID NO: 2988472 - RNA, 19 nt, Artificial Sequence
  Description of Artificial Sequence: Synthetic oligonucleotide
uugggagaaaggucauggg

SEQ ID NO: 2988473 - RNA, 19 nt, Artificial Sequence
  Description of Artificial Sequence: Synthetic oligonucleotide
uguuccagucauaggcaag

SEQ ID NO: 2988474 - RNA, 19 nt, Artificial Sequence
  Description of Artificial Sequence: Synthetic oligonucleotide
aucacagcauugccugagc

SEQ ID NO: 2988475 - RNA, 19 nt, Artificial Sequence
  Description of Artificial Sequence: Synthetic oligonucleotide
caaaguugaugaaggcacc

SEQ ID NO: 2988476 - RNA, 19 nt, Artificial Sequence
  Description of Artificial Sequence: Synthetic oligonucleotide
guuugcuaaacagggagug

SEQ ID NO: 2988477 - RNA, 19 nt, Artificial Sequence
  Description of Artificial Sequence: Synthetic oligonucleotide
ggaaaauccuggaaaagcc

SEQ ID NO: 2988478 - RNA, 19 nt, Artificial Sequence
  Description of Artificial Sequence: Synthetic oligonucleotide
uguacuucagggccaguuc

SEQ ID NO: 2988479 - RNA, 19 nt, Artificial Sequence
  Description of Artificial Sequence: Synthetic oligonucleotide
ucguauccaagcugaacgc

SEQ ID NO: 2988480 - RNA, 19 nt, Artificial Sequence
  Description of Artificial Sequence: Synthetic oligonucleotide
cuaccaucuugacugugcg

SEQ ID NO: 2988481 - RNA, 19 nt, Artificial Sequence
  Description of Artificial Sequence: Synthetic oligonucleotide
augggaaaauccuggaaaa

SEQ ID NO: 2988482 - RNA, 19 nt, Artificial Sequence
  Description of Artificial Sequence: Synthetic oligonucleotide
uugggauccagaagauccc

SEQ ID NO: 2988483 - RNA, 19 nt, Artificial Sequence
  Description of Artificial Sequence: Synthetic oligonucleotide
caaugaucacagcauugcc

SEQ ID NO: 2988484 - RNA, 19 nt, Artificial Sequence
  Description of Artificial Sequence: Synthetic oligonucleotide
aguuucguauccaagcuga

SEQ ID NO: 2988485 - RNA, 19 nt, Artificial Sequence
  Description of Artificial Sequence: Synthetic oligonucleotide
cacaaugaucacagcauug

SEQ ID NO: 2988486 - RNA, 19 nt, Artificial Sequence
  Description of Artificial Sequence: Synthetic oligonucleotide
uucagggccaguucacuca

SEQ ID NO: 2988487 - RNA, 19 nt, Artificial Sequence
  Description of Artificial Sequence: Synthetic oligonucleotide
gcguguuccagucauaggc

SEQ ID NO: 2988488 - RNA, 19 nt, Artificial Sequence
  Description of Artificial Sequence: Synthetic oligonucleotide
ccaagguuugcuaaacagg

SEQ ID NO: 2988489 - RNA, 19 nt, Artificial Sequence
  Description of Artificial Sequence: Synthetic oligonucleotide
ucacuggacauauacccau

SEQ ID NO: 2988490 - RNA, 19 nt, Artificial Sequence
  Description of Artificial Sequence: Synthetic oligonucleotide
aacuuuggaaauacuucca

SEQ ID NO: 2988491 - RNA, 19 nt, Artificial Sequence
  Description of Artificial Sequence: Synthetic oligonucleotide
aucacauaaucucguacaa

SEQ ID NO: 2988492 - RNA, 19 nt, Artificial Sequence
  Description of Artificial Sequence: Synthetic oligonucleotide
uccagucauaggcaagcca

SEQ ID NO: 2988493 - RNA, 19 nt, Artificial Sequence
  Description of Artificial Sequence: Synthetic oligonucleotide
uccagaggguccaguuucg

SEQ ID NO: 2988494 - RNA, 19 nt, Artificial Sequence
  Description of Artificial Sequence: Synthetic oligonucleotide
gaaaauccuggaaaagcca

SEQ ID NO: 2988495 - RNA, 19 nt, Artificial Sequence
  Description of Artificial Sequence: Synthetic oligonucleotide
ccagucauaggcaagccag

SEQ ID NO: 2988496 - RNA, 19 nt, Artificial Sequence
  Description of Artificial Sequence: Synthetic oligonucleotide
cuucaccagcuuuacuggg

SEQ ID NO: 2988497 - RNA, 19 nt, Artificial Sequence
  Description of Artificial Sequence: Synthetic oligonucleotide
gaaauacuuccagaggguc

SEQ ID NO: 2988498 - RNA, 19 nt, Artificial Sequence
  Description of Artificial Sequence: Synthetic oligonucleotide
auaggcaagccagauuaag

SEQ ID NO: 2988499 - RNA, 19 nt, Artificial Sequence
  Description of Artificial Sequence: Synthetic oligonucleotide
uagaugggaaaauccugga

SEQ ID NO: 2988500 - RNA, 19 nt, Artificial Sequence
  Description of Artificial Sequence: Synthetic oligonucleotide
guguuugggagaaagguca

SEQ ID NO: 2988501 - RNA, 19 nt, Artificial Sequence
  Description of Artificial Sequence: Synthetic oligonucleotide
gaucacagcauugccugag

SEQ ID NO: 2988502 - RNA, 19 nt, Artificial Sequence
  Description of Artificial Sequence: Synthetic oligonucleotide
guuguguuugggagaaagg

SEQ ID NO: 2988503 - RNA, 19 nt, Artificial Sequence
  Description of Artificial Sequence: Synthetic oligonucleotide
uagcaaaguugaugaaggc

SEQ ID NO: 2988504 - RNA, 19 nt, Artificial Sequence
  Description of Artificial Sequence: Synthetic oligonucleotide
ugggaaaauccuggaaaag

SEQ ID NO: 2988505 - RNA, 19 nt, Artificial Sequence
  Description of Artificial Sequence: Synthetic oligonucleotide
cacucacuggacauauacc

SEQ ID NO: 2988506 - RNA, 19 nt, Artificial Sequence
  Description of Artificial Sequence: Synthetic oligonucleotide
uccagaagaucccuuccaa

SEQ ID NO: 2988507 - RNA, 19 nt, Artificial Sequence
  Description of Artificial Sequence: Synthetic oligonucleotide
cauauacccauggacauca

SEQ ID NO: 2988508 - RNA, 19 nt, Artificial Sequence
  Description of Artificial Sequence: Synthetic oligonucleotide
gggaaaauccuggaaaagc

SEQ ID NO: 2988509 - RNA, 19 nt, Artificial Sequence
  Description of Artificial Sequence: Synthetic oligonucleotide
aggguccaguuucguaucc

SEQ ID NO: 2988510 - RNA, 19 nt, Artificial Sequence
  Description of Artificial Sequence: Synthetic oligonucleotide
guugaugaaggcaccauga

SEQ ID NO: 2988511 - RNA, 19 nt, Artificial Sequence
  Description of Artificial Sequence: Synthetic oligonucleotide
acugggaaguaacuuugga

SEQ ID NO: 2988512 - RNA, 19 nt, Artificial Sequence
  Description of Artificial Sequence: Synthetic oligonucleotide
auacccauggacaucacau

SEQ ID NO: 2988513 - RNA, 19 nt, Artificial Sequence
  Description of Artificial Sequence: Synthetic oligonucleotide
uuccaagguuugcuaaaca

SEQ ID NO: 2988514 - RNA, 19 nt, Artificial Sequence
  Description of Artificial Sequence: Synthetic oligonucleotide
guacaauugggauccagaa

SEQ ID NO: 2988515 - RNA, 19 nt, Artificial Sequence
  Description of Artificial Sequence: Synthetic oligonucleotide
guuccagucauaggcaagc

SEQ ID NO: 2988516 - RNA, 19 nt, Artificial Sequence
  Description of Artificial Sequence: Synthetic oligonucleotide
cuuuggaaauacuuccaga

SEQ ID NO: 2988517 - RNA, 19 nt, Artificial Sequence
  Description of Artificial Sequence: Synthetic oligonucleotide
ggcaagccagauuaagggg

SEQ ID NO: 2988518 - RNA, 19 nt, Artificial Sequence
  Description of Artificial Sequence: Synthetic oligonucleotide
ucuugacugugcguguucc

SEQ ID NO: 2988519 - RNA, 19 nt, Artificial Sequence
  Description of Artificial Sequence: Synthetic oligonucleotide
acauaaucucguacaauug

SEQ ID NO: 2988520 - RNA, 19 nt, Artificial Sequence
  Description of Artificial Sequence: Synthetic oligonucleotide
gcuaaacagggagugauag

SEQ ID NO: 2988521 - RNA, 19 nt, Artificial Sequence
  Description of Artificial Sequence: Synthetic oligonucleotide
uugcuaaacagggagugau

SEQ ID NO: 2988522 - RNA, 19 nt, Artificial Sequence
  Description of Artificial Sequence: Synthetic oligonucleotide
cugaacgccuaccaucuug

SEQ ID NO: 2988523 - RNA, 19 nt, Artificial Sequence
  Description of Artificial Sequence: Synthetic oligonucleotide
aagccagauuaaggggagc

SEQ ID NO: 2988524 - RNA, 19 nt, Artificial Sequence
  Description of Artificial Sequence: Synthetic oligonucleotide
uuugcuaaacagggaguga

SEQ ID NO: 2988525 - RNA, 19 nt, Artificial Sequence
  Description of Artificial Sequence: Synthetic oligonucleotide
cccaccacaaugaucacag

SEQ ID NO: 2988526 - RNA, 19 nt, Artificial Sequence
  Description of Artificial Sequence: Synthetic oligonucleotide
ugcguguuccagucauagg

SEQ ID NO: 2988527 - RNA, 19 nt, Artificial Sequence
  Description of Artificial Sequence: Synthetic oligonucleotide
acauauacccauggacauc

SEQ ID NO: 2988528 - RNA, 19 nt, Artificial Sequence
  Description of Artificial Sequence: Synthetic oligonucleotide
caccacaaugaucacagca

SEQ ID NO: 2988529 - RNA, 19 nt, Artificial Sequence
  Description of Artificial Sequence: Synthetic oligonucleotide
accaugagcgagaauacca

SEQ ID NO: 2988530 - RNA, 19 nt, Artificial Sequence
  Description of Artificial Sequence: Synthetic oligonucleotide
ugaaggcaccaugagcgag

SEQ ID NO: 2988531 - RNA, 19 nt, Artificial Sequence
  Description of Artificial Sequence: Synthetic oligonucleotide
aucuugacugugcguguuc

SEQ ID NO: 2988532 - RNA, 19 nt, Artificial Sequence
  Description of Artificial Sequence: Synthetic oligonucleotide
ucaccagcuuuacugggaa

SEQ ID NO: 2988533 - RNA, 19 nt, Artificial Sequence
  Description of Artificial Sequence: Synthetic oligonucleotide
acccauggacaucacauaa

SEQ ID NO: 2988534 - RNA, 19 nt, Artificial Sequence
  Description of Artificial Sequence: Synthetic oligonucleotide
accagcuuuacugggaagu

SEQ ID NO: 2988535 - RNA, 19 nt, Artificial Sequence
  Description of Artificial Sequence: Synthetic oligonucleotide
uuucguauccaagcugaac

SEQ ID NO: 2988536 - RNA, 19 nt, Artificial Sequence
  Description of Artificial Sequence: Synthetic oligonucleotide
auccagaagaucccuucca

SEQ ID NO: 2988537 - RNA, 19 nt, Artificial Sequence
  Description of Artificial Sequence: Synthetic oligonucleotide
agggccaguucacucacug

SEQ ID NO: 2988538 - RNA, 19 nt, Artificial Sequence
  Description of Artificial Sequence: Synthetic oligonucleotide
aaacagggagugauagaug

SEQ ID NO: 2988539 - RNA, 19 nt, Artificial Sequence
  Description of Artificial Sequence: Synthetic oligonucleotide
aaauccuggaaaagccagu

SEQ ID NO: 2988540 - RNA, 19 nt, Artificial Sequence
  Description of Artificial Sequence: Synthetic oligonucleotide
caugagcgagaauaccaug

SEQ ID NO: 2988541 - RNA, 19 nt, Artificial Sequence
  Description of Artificial Sequence: Synthetic oligonucleotide
agaugggaaaauccuggaa

SEQ ID NO: 2988542 - RNA, 19 nt, Artificial Sequence
  Description of Artificial Sequence: Synthetic oligonucleotide
ucugggucagcuuguacuu

SEQ ID NO: 2988543 - RNA, 19 nt, Artificial Sequence
  Description of Artificial Sequence: Synthetic oligonucleotide
ccacccaccacaaugauca

SEQ ID NO: 2988544 - RNA, 19 nt, Artificial Sequence
  Description of Artificial Sequence: Synthetic oligonucleotide
ggacauauacccauggaca

SEQ ID NO: 2988545 - RNA, 19 nt, Artificial Sequence
  Description of Artificial Sequence: Synthetic oligonucleotide
guacuucagggccaguuca

SEQ ID NO: 2988546 - RNA, 19 nt, Artificial Sequence
  Description of Artificial Sequence: Synthetic oligonucleotide
aaaagccaguggcuucagu

SEQ ID NO: 2988547 - RNA, 19 nt, Artificial Sequence
  Description of Artificial Sequence: Synthetic oligonucleotide
gacauauacccauggacau

SEQ ID NO: 2988548 - RNA, 19 nt, Artificial Sequence
  Description of Artificial Sequence: Synthetic oligonucleotide
uggaaaagccaguggcuuc

SEQ ID NO: 2988549 - RNA, 19 nt, Artificial Sequence
  Description of Artificial Sequence: Synthetic oligonucleotide
gacugugcguguuccaguc

SEQ ID NO: 2988550 - RNA, 19 nt, Artificial Sequence
  Description of Artificial Sequence: Synthetic oligonucleotide
auccaagcugaacgccuac

SEQ ID NO: 2988551 - RNA, 19 nt, Artificial Sequence
  Description of Artificial Sequence: Synthetic oligonucleotide
uacuucagggccaguucac

SEQ ID NO: 2988552 - RNA, 19 nt, Artificial Sequence
  Description of Artificial Sequence: Synthetic oligonucleotide
cauugccugagccuuucug

SEQ ID NO: 2988553 - RNA, 19 nt, Artificial Sequence
  Description of Artificial Sequence: Synthetic oligonucleotide
cugggaaguaacuuuggaa

SEQ ID NO: 2988554 - RNA, 19 nt, Artificial Sequence
  Description of Artificial Sequence: Synthetic oligonucleotide
cacauaaucucguacaauu

SEQ ID NO: 2988555 - RNA, 19 nt, Artificial Sequence
  Description of Artificial Sequence: Synthetic oligonucleotide
ggagacaaugauguaguug

SEQ ID NO: 2988556 - RNA, 19 nt, Artificial Sequence
  Description of Artificial Sequence: Synthetic oligonucleotide
caguuucguauccaagcug

SEQ ID NO: 2988557 - RNA, 19 nt, Artificial Sequence
  Description of Artificial Sequence: Synthetic oligonucleotide
gcuucaguagcaaaguuga

SEQ ID NO: 2988558 - RNA, 19 nt, Artificial Sequence
  Description of Artificial Sequence: Synthetic oligonucleotide
uauccaagcugaacgccua

SEQ ID NO: 2988559 - RNA, 19 nt, Artificial Sequence
  Description of Artificial Sequence: Synthetic oligonucleotide
uguuugggagaaaggucau

SEQ ID NO: 2988560 - RNA, 19 nt, Artificial Sequence
  Description of Artificial Sequence: Synthetic oligonucleotide
cuuccaagguuugcuaaac

SEQ ID NO: 2988561 - RNA, 19 nt, Artificial Sequence
  Description of Artificial Sequence: Synthetic oligonucleotide
aaguugaugaaggcaccau

SEQ ID NO: 2988562 - RNA, 19 nt, Artificial Sequence
  Description of Artificial Sequence: Synthetic oligonucleotide
uuucugggucagcuuguac

SEQ ID NO: 2988563 - RNA, 19 nt, Artificial Sequence
  Description of Artificial Sequence: Synthetic oligonucleotide
ggcaccaugagcgagaaua

SEQ ID NO: 2988564 - RNA, 19 nt, Artificial Sequence
  Description of Artificial Sequence: Synthetic oligonucleotide
aagguuugcuaaacaggga

SEQ ID NO: 2988565 - RNA, 19 nt, Artificial Sequence
  Description of Artificial Sequence: Synthetic oligonucleotide
uccacccaccacaaugauc

SEQ ID NO: 2988566 - RNA, 19 nt, Artificial Sequence
  Description of Artificial Sequence: Synthetic oligonucleotide
ugcuaaacagggagugaua

SEQ ID NO: 2988567 - RNA, 19 nt, Artificial Sequence
  Description of Artificial Sequence: Synthetic oligonucleotide
ggcuucaguagcaaaguug

SEQ ID NO: 2988568 - RNA, 19 nt, Artificial Sequence
  Description of Artificial Sequence: Synthetic oligonucleotide
ucacauaaucucguacaau

SEQ ID NO: 2988569 - RNA, 19 nt, Artificial Sequence
  Description of Artificial Sequence: Synthetic oligonucleotide
cuucagggccaguucacuc

SEQ ID NO: 2988570 - RNA, 19 nt, Artificial Sequence
  Description of Artificial Sequence: Synthetic oligonucleotide
ccuaccaucuugacugugc

SEQ ID NO: 2988571 - RNA, 19 nt, Artificial Sequence
  Description of Artificial Sequence: Synthetic oligonucleotide
ucguacaauugggauccag

SEQ ID NO: 2988572 - RNA, 19 nt, Artificial Sequence
  Description of Artificial Sequence: Synthetic oligonucleotide
ugacugugcguguuccagu

SEQ ID NO: 2988573 - RNA, 19 nt, Artificial Sequence
  Description of Artificial Sequence: Synthetic oligonucleotide
gucaugggucuucaccagc

SEQ ID NO: 2988574 - RNA, 19 nt, Artificial Sequence
  Description of Artificial Sequence: Synthetic oligonucleotide
cucacuggacauauaccca

SEQ ID NO: 2988575 - RNA, 19 nt, Artificial Sequence
  Description of Artificial Sequence: Synthetic oligonucleotide
agcugaacgccuaccaucu

SEQ ID NO: 2988576 - RNA, 19 nt, Artificial Sequence
  Description of Artificial Sequence: Synthetic oligonucleotide
agccagauuaaggggagca

SEQ ID NO: 2988577 - RNA, 19 nt, Artificial Sequence
  Description of Artificial Sequence: Synthetic oligonucleotide
gugcguguuccagucauag

SEQ ID NO: 2988578 - RNA, 19 nt, Artificial Sequence
  Description of Artificial Sequence: Synthetic oligonucleotide
acagcauugccugagccuu

SEQ ID NO: 2988579 - RNA, 19 nt, Artificial Sequence
  Description of Artificial Sequence: Synthetic oligonucleotide
guaguuguguuugggagaa

SEQ ID NO: 2988580 - RNA, 19 nt, Artificial Sequence
  Description of Artificial Sequence: Synthetic oligonucleotide
cuaaacagggagugauaga

SEQ ID NO: 2988581 - RNA, 19 nt, Artificial Sequence
  Description of Artificial Sequence: Synthetic oligonucleotide
ugaucacagcauugccuga

SEQ ID NO: 2988582 - RNA, 19 nt, Artificial Sequence
  Description of Artificial Sequence: Synthetic oligonucleotide
acuuccagaggguccaguu

SEQ ID NO: 2988583 - RNA, 19 nt, Artificial Sequence
  Description of Artificial Sequence: Synthetic oligonucleotide
gacaaugauguaguugugu

SEQ ID NO: 2988584 - RNA, 19 nt, Artificial Sequence
  Description of Artificial Sequence: Synthetic oligonucleotide
uccaagcugaacgccuacc

SEQ ID NO: 2988585 - RNA, 19 nt, Artificial Sequence
  Description of Artificial Sequence: Synthetic oligonucleotide
aagaucccuuccaagguuu

SEQ ID NO: 2988586 - RNA, 19 nt, Artificial Sequence
  Description of Artificial Sequence: Synthetic oligonucleotide
uuguacuucagggccaguu

SEQ ID NO: 2988587 - RNA, 19 nt, Artificial Sequence
  Description of Artificial Sequence: Synthetic oligonucleotide
gggagaaaggucauggguc

SEQ ID NO: 2988588 - RNA, 19 nt, Artificial Sequence
  Description of Artificial Sequence: Synthetic oligonucleotide
gacaucacauaaucucgua

SEQ ID NO: 2988589 - RNA, 19 nt, Artificial Sequence
  Description of Artificial Sequence: Synthetic oligonucleotide
augaaggcaccaugagcga

SEQ ID NO: 2988590 - RNA, 19 nt, Artificial Sequence
  Description of Artificial Sequence: Synthetic oligonucleotide
ggccaguucacucacugga

SEQ ID NO: 2988591 - RNA, 19 nt, Artificial Sequence
  Description of Artificial Sequence: Synthetic oligonucleotide
uacccauggacaucacaua

SEQ ID NO: 2988592 - RNA, 19 nt, Artificial Sequence
  Description of Artificial Sequence: Synthetic oligonucleotide
gaaggcaccaugagcgaga

SEQ ID NO: 2988593 - RNA, 19 nt, Artificial Sequence
  Description of Artificial Sequence: Synthetic oligonucleotide
aucccuuccaagguuugcu

SEQ ID NO: 2988594 - RNA, 19 nt, Artificial Sequence
  Description of Artificial Sequence: Synthetic oligonucleotide
cacuggacauauacccaug

SEQ ID NO: 2988595 - RNA, 19 nt, Artificial Sequence
  Description of Artificial Sequence: Synthetic oligonucleotide
gaaaggucaugggucuuca

SEQ ID NO: 2988596 - RNA, 19 nt, Artificial Sequence
  Description of Artificial Sequence: Synthetic oligonucleotide
acagggagugauagauggg

SEQ ID NO: 2988597 - RNA, 19 nt, Artificial Sequence
  Description of Artificial Sequence: Synthetic oligonucleotide
agcauugccugagccuuuc

SEQ ID NO: 2988598 - RNA, 19 nt, Artificial Sequence
  Description of Artificial Sequence: Synthetic oligonucleotide
gaggguccaguuucguauc

SEQ ID NO: 2988599 - RNA, 19 nt, Artificial Sequence
  Description of Artificial Sequence: Synthetic oligonucleotide
cagggagugauagauggga

SEQ ID NO: 2988600 - RNA, 19 nt, Artificial Sequence
  Description of Artificial Sequence: Synthetic oligonucleotide
uaccaucuugacugugcgu

SEQ ID NO: 2988601 - RNA, 19 nt, Artificial Sequence
  Description of Artificial Sequence: Synthetic oligonucleotide
uuccagucauaggcaagcc

SEQ ID NO: 2988602 - RNA, 19 nt, Artificial Sequence
  Description of Artificial Sequence: Synthetic oligonucleotide
ggucagcuuguacuucagg

SEQ ID NO: 2988603 - RNA, 19 nt, Artificial Sequence
  Description of Artificial Sequence: Synthetic oligonucleotide
augggucuucaccagcuuu

SEQ ID NO: 2988604 - RNA, 19 nt, Artificial Sequence
  Description of Artificial Sequence: Synthetic oligonucleotide
ugggauccagaagaucccu

SEQ ID NO: 2988605 - RNA, 19 nt, Artificial Sequence
  Description of Artificial Sequence: Synthetic oligonucleotide
agucauaggcaagccagau

SEQ ID NO: 2988606 - RNA, 19 nt, Artificial Sequence
  Description of Artificial Sequence: Synthetic oligonucleotide
caccaugagcgagaauacc

SEQ ID NO: 2988607 - RNA, 19 nt, Artificial Sequence
  Description of Artificial Sequence: Synthetic oligonucleotide
ggagugauagaugggaaaa

SEQ ID NO: 2988608 - RNA, 19 nt, Artificial Sequence
  Description of Artificial Sequence: Synthetic oligonucleotide
guccaguuucguauccaag

SEQ ID NO: 2988609 - RNA, 19 nt, Artificial Sequence
  Description of Artificial Sequence: Synthetic oligonucleotide
gaaaagccaguggcuucag

SEQ ID NO: 2988610 - RNA, 19 nt, Artificial Sequence
  Description of Artificial Sequence: Synthetic oligonucleotide
guuugggagaaaggucaug

SEQ ID NO: 2988611 - RNA, 19 nt, Artificial Sequence
  Description of Artificial Sequence: Synthetic oligonucleotide
ugccugagccuuucugggu

SEQ ID NO: 2988612 - RNA, 19 nt, Artificial Sequence
  Description of Artificial Sequence: Synthetic oligonucleotide
ggucaugggucuucaccag

SEQ ID NO: 2988613 - RNA, 19 nt, Artificial Sequence
  Description of Artificial Sequence: Synthetic oligonucleotide
cuggacauauacccaugga

SEQ ID NO: 2988614 - RNA, 19 nt, Artificial Sequence
  Description of Artificial Sequence: Synthetic oligonucleotide
cauggacaucacauaaucu

SEQ ID NO: 2988615 - RNA, 19 nt, Artificial Sequence
  Description of Artificial Sequence: Synthetic oligonucleotide
ucccuuccaagguuugcua

SEQ ID NO: 2988616 - RNA, 19 nt, Artificial Sequence
  Description of Artificial Sequence: Synthetic oligonucleotide
gaagaucccuuccaagguu

SEQ ID NO: 2988617 - RNA, 19 nt, Artificial Sequence
  Description of Artificial Sequence: Synthetic oligonucleotide
guguuccagucauaggcaa

SEQ ID NO: 2988618 - RNA, 19 nt, Artificial Sequence
  Description of Artificial Sequence: Synthetic oligonucleotide
acuucagggccaguucacu

SEQ ID NO: 2988619 - RNA, 19 nt, Artificial Sequence
  Description of Artificial Sequence: Synthetic oligonucleotide
gaacgccuaccaucuugac

SEQ ID NO: 2988620 - RNA, 19 nt, Artificial Sequence
  Description of Artificial Sequence: Synthetic oligonucleotide
aaggcaccaugagcgagaa

SEQ ID NO: 2988621 - RNA, 19 nt, Artificial Sequence
  Description of Artificial Sequence: Synthetic oligonucleotide
ggaaaagccaguggcuuca

SEQ ID NO: 2988622 - RNA, 19 nt, Artificial Sequence
  Description of Artificial Sequence: Synthetic oligonucleotide
agacaaugauguaguugug

SEQ ID NO: 2988623 - RNA, 19 nt, Artificial Sequence
  Description of Artificial Sequence: Synthetic oligonucleotide
ugugcguguuccagucaua

SEQ ID NO: 2988624 - RNA, 19 nt, Artificial Sequence
  Description of Artificial Sequence: Synthetic oligonucleotide
gaagcuccacccaccacaa

SEQ ID NO: 2988625 - RNA, 19 nt, Artificial Sequence
  Description of Artificial Sequence: Synthetic oligonucleotide
caccagcuuuacugggaag

SEQ ID NO: 2988626 - RNA, 19 nt, Artificial Sequence
  Description of Artificial Sequence: Synthetic oligonucleotide
uucacucacuggacauaua

SEQ ID NO: 2988627 - RNA, 19 nt, Artificial Sequence
  Description of Artificial Sequence: Synthetic oligonucleotide
auauacccauggacaucac

SEQ ID NO: 2988628 - RNA, 19 nt, Artificial Sequence
  Description of Artificial Sequence: Synthetic oligonucleotide
cagucauaggcaagccaga

SEQ ID NO: 2988629 - RNA, 19 nt, Artificial Sequence
  Description of Artificial Sequence: Synthetic oligonucleotide
gggagugauagaugggaaa

SEQ ID NO: 2988630 - RNA, 19 nt, Artificial Sequence
  Description of Artificial Sequence: Synthetic oligonucleotide
ggaaguaacuuuggaaaua

SEQ ID NO: 2988631 - RNA, 19 nt, Artificial Sequence
  Description of Artificial Sequence: Synthetic oligonucleotide
guauccaagcugaacgccu

SEQ ID NO: 2988632 - RNA, 19 nt, Artificial Sequence
  Description of Artificial Sequence: Synthetic oligonucleotide
agcuuguacuucagggcca

SEQ ID NO: 2988633 - RNA, 19 nt, Artificial Sequence
  Description of Artificial Sequence: Synthetic oligonucleotide
gggccaguucacucacugg

SEQ ID NO: 2988634 - RNA, 19 nt, Artificial Sequence
  Description of Artificial Sequence: Synthetic oligonucleotide
aguucacucacuggacaua

SEQ ID NO: 2988635 - RNA, 19 nt, Artificial Sequence
  Description of Artificial Sequence: Synthetic oligonucleotide
ugagccuuucugggucagc

SEQ ID NO: 2988636 - RNA, 19 nt, Artificial Sequence
  Description of Artificial Sequence: Synthetic oligonucleotide
uacuuccagaggguccagu

SEQ ID NO: 2988637 - RNA, 19 nt, Artificial Sequence
  Description of Artificial Sequence: Synthetic oligonucleotide
cauaggcaagccagauuaa

SEQ ID NO: 2988638 - RNA, 19 nt, Artificial Sequence
  Description of Artificial Sequence: Synthetic oligonucleotide
cacagcauugccugagccu

SEQ ID NO: 2988639 - RNA, 19 nt, Artificial Sequence
  Description of Artificial Sequence: Synthetic oligonucleotide
gagccuuucugggucagcu

SEQ ID NO: 2988640 - RNA, 19 nt, Artificial Sequence
  Description of Artificial Sequence: Synthetic oligonucleotide
cguacaauugggauccaga

SEQ ID NO: 2988641 - RNA, 19 nt, Artificial Sequence
  Description of Artificial Sequence: Synthetic oligonucleotide
ggggugggagacaaugaug

SEQ ID NO: 2988642 - RNA, 19 nt, Artificial Sequence
  Description of Artificial Sequence: Synthetic oligonucleotide
gcuuguacuucagggccag

SEQ ID NO: 2988643 - RNA, 19 nt, Artificial Sequence
  Description of Artificial Sequence: Synthetic oligonucleotide
agggagugauagaugggaa

SEQ ID NO: 2988644 - RNA, 19 nt, Artificial Sequence
  Description of Artificial Sequence: Synthetic oligonucleotide
gggaaguaacuuuggaaau

SEQ ID NO: 2988645 - RNA, 19 nt, Artificial Sequence
  Description of Artificial Sequence: Synthetic oligonucleotide
caaugauguaguuguguuu

SEQ ID NO: 2988646 - RNA, 19 nt, Artificial Sequence
  Description of Artificial Sequence: Synthetic oligonucleotide
cuuuacugggaaguaacuu

SEQ ID NO: 2988647 - RNA, 19 nt, Artificial Sequence
  Description of Artificial Sequence: Synthetic oligonucleotide
gccugagccuuucuggguc

SEQ ID NO: 2988648 - RNA, 19 nt, Artificial Sequence
  Description of Artificial Sequence: Synthetic oligonucleotide
gagugauagaugggaaaau

SEQ ID NO: 2988649 - RNA, 19 nt, Artificial Sequence
  Description of Artificial Sequence: Synthetic oligonucleotide
ccagauuaaggggagcaca

SEQ ID NO: 2988650 - RNA, 19 nt, Artificial Sequence
  Description of Artificial Sequence: Synthetic oligonucleotide
ggaaauacuuccagagggu

SEQ ID NO: 2988651 - RNA, 19 nt, Artificial Sequence
  Description of Artificial Sequence: Synthetic oligonucleotide
ccaagcugaacgccuacca

SEQ ID NO: 2988652 - RNA, 19 nt, Artificial Sequence
  Description of Artificial Sequence: Synthetic oligonucleotide
auacuuccagaggguccag

SEQ ID NO: 2988653 - RNA, 19 nt, Artificial Sequence
  Description of Artificial Sequence: Synthetic oligonucleotide
caguagcaaaguugaugaa

SEQ ID NO: 2988654 - RNA, 19 nt, Artificial Sequence
  Description of Artificial Sequence: Synthetic oligonucleotide
cguauccaagcugaacgcc

SEQ ID NO: 2988655 - RNA, 19 nt, Artificial Sequence
  Description of Artificial Sequence: Synthetic oligonucleotide
agccuuucugggucagcuu

SEQ ID NO: 2988656 - RNA, 19 nt, Artificial Sequence
  Description of Artificial Sequence: Synthetic oligonucleotide
aagcuccacccaccacaau

SEQ ID NO: 2988657 - RNA, 19 nt, Artificial Sequence
  Description of Artificial Sequence: Synthetic oligonucleotide
caguucacucacuggacau

SEQ ID NO: 2988658 - RNA, 19 nt, Artificial Sequence
  Description of Artificial Sequence: Synthetic oligonucleotide
ccaguucacucacuggaca

SEQ ID NO: 2988659 - RNA, 19 nt, Artificial Sequence
  Description of Artificial Sequence: Synthetic oligonucleotide
gcuccacccaccacaauga

SEQ ID NO: 2988660 - RNA, 19 nt, Artificial Sequence
  Description of Artificial Sequence: Synthetic oligonucleotide
cugagccuuucugggucag

SEQ ID NO: 2988661 - RNA, 19 nt, Artificial Sequence
  Description of Artificial Sequence: Synthetic oligonucleotide
caauugggauccagaagau

SEQ ID NO: 2988662 - RNA, 19 nt, Artificial Sequence
  Description of Artificial Sequence: Synthetic oligonucleotide
cagaggguccaguuucgua

SEQ ID NO: 2988663 - RNA, 19 nt, Artificial Sequence
  Description of Artificial Sequence: Synthetic oligonucleotide
gcaccaugagcgagaauac

SEQ ID NO: 2988664 - RNA, 19 nt, Artificial Sequence
  Description of Artificial Sequence: Synthetic oligonucleotide
guuucguauccaagcugaa

SEQ ID NO: 2988665 - RNA, 19 nt, Artificial Sequence
  Description of Artificial Sequence: Synthetic oligonucleotide
cagcuuuacugggaaguaa

SEQ ID NO: 2988666 - RNA, 19 nt, Artificial Sequence
  Description of Artificial Sequence: Synthetic oligonucleotide
caagcugaacgccuaccau

SEQ ID NO: 2988667 - RNA, 19 nt, Artificial Sequence
  Description of Artificial Sequence: Synthetic oligonucleotide
gucauaggcaagccagauu

SEQ ID NO: 2988668 - RNA, 19 nt, Artificial Sequence
  Description of Artificial Sequence: Synthetic oligonucleotide
cugugcguguuccagucau

SEQ ID NO: 2988669 - RNA, 19 nt, Artificial Sequence
  Description of Artificial Sequence: Synthetic oligonucleotide
gccagauuaaggggagcac

SEQ ID NO: 2988670 - RNA, 19 nt, Artificial Sequence
  Description of Artificial Sequence: Synthetic oligonucleotide
gccaguucacucacuggac

SEQ ID NO: 2988671 - RNA, 19 nt, Artificial Sequence
  Description of Artificial Sequence: Synthetic oligonucleotide
gguuugcuaaacagggagu

SEQ ID NO: 2988672 - RNA, 19 nt, Artificial Sequence
  Description of Artificial Sequence: Synthetic oligonucleotide
cguguuccagucauaggca

SEQ ID NO: 2988673 - RNA, 19 nt, Artificial Sequence
  Description of Artificial Sequence: Synthetic oligonucleotide
caguggcuucaguagcaaa

SEQ ID NO: 2988674 - RNA, 19 nt, Artificial Sequence
  Description of Artificial Sequence: Synthetic oligonucleotide
cacccaccacaaugaucac

SEQ ID NO: 2988675 - RNA, 19 nt, Artificial Sequence
  Description of Artificial Sequence: Synthetic oligonucleotide
ggacaucacauaaucucgu

SEQ ID NO: 2988676 - RNA, 19 nt, Artificial Sequence
  Description of Artificial Sequence: Synthetic oligonucleotide
ccuuccaagguuugcuaaa

SEQ ID NO: 2988677 - RNA, 19 nt, Artificial Sequence
  Description of Artificial Sequence: Synthetic oligonucleotide
ccaguuucguauccaagcu

SEQ ID NO: 2988678 - RNA, 19 nt, Artificial Sequence
  Description of Artificial Sequence: Synthetic oligonucleotide
gggucagcuuguacuucag

SEQ ID NO: 2988679 - RNA, 19 nt, Artificial Sequence
  Description of Artificial Sequence: Synthetic oligonucleotide
ccuggaaaagccaguggcu

SEQ ID NO: 2988680 - RNA, 19 nt, Artificial Sequence
  Description of Artificial Sequence: Synthetic oligonucleotide
uaguuguguuugggagaaa

SEQ ID NO: 2988681 - RNA, 19 nt, Artificial Sequence
  Description of Artificial Sequence: Synthetic oligonucleotide
cuucaguagcaaaguugau

SEQ ID NO: 2988682 - RNA, 19 nt, Artificial Sequence
  Description of Artificial Sequence: Synthetic oligonucleotide
gccaguggcuucaguagca

SEQ ID NO: 2988683 - RNA, 19 nt, Artificial Sequence
  Description of Artificial Sequence: Synthetic oligonucleotide
cuuccagaggguccaguuu

SEQ ID NO: 2988684 - RNA, 19 nt, Artificial Sequence
  Description of Artificial Sequence: Synthetic oligonucleotide
cuuucugggucagcuugua

SEQ ID NO: 2988685 - RNA, 19 nt, Artificial Sequence
  Description of Artificial Sequence: Synthetic oligonucleotide
ccaccacaaugaucacagc

SEQ ID NO: 2988686 - RNA, 19 nt, Artificial Sequence
  Description of Artificial Sequence: Synthetic oligonucleotide
gcuuuacugggaaguaacu

SEQ ID NO: 2988687 - RNA, 19 nt, Artificial Sequence
  Description of Artificial Sequence: Synthetic oligonucleotide
cccuuccaagguuugcuaa

SEQ ID NO: 2988688 - RNA, 19 nt, Artificial Sequence
  Description of Artificial Sequence: Synthetic oligonucleotide
ccaugagcgagaauaccau

SEQ ID NO: 2988689 - RNA, 19 nt, Artificial Sequence
  Description of Artificial Sequence: Synthetic oligonucleotide
ggguccaguuucguaucca

SEQ ID NO: 2988690 - RNA, 19 nt, Artificial Sequence
  Description of Artificial Sequence: Synthetic oligonucleotide
ccugagccuuucuggguca

SEQ ID NO: 2988691 - RNA, 19 nt, Artificial Sequence
  Description of Artificial Sequence: Synthetic oligonucleotide
aggcaccaugagcgagaau

SEQ ID NO: 2988692 - RNA, 19 nt, Artificial Sequence
  Description of Artificial Sequence: Synthetic oligonucleotide
caucuugacugugcguguu

SEQ ID NO: 2988693 - RNA, 19 nt, Artificial Sequence
  Description of Artificial Sequence: Synthetic oligonucleotide
ccacaaugaucacagcauu

SEQ ID NO: 2988694 - RNA, 19 nt, Artificial Sequence
  Description of Artificial Sequence: Synthetic oligonucleotide
caugggucuucaccagcuu

SEQ ID NO: 2988695 - RNA, 19 nt, Artificial Sequence
  Description of Artificial Sequence: Synthetic oligonucleotide
cccauggacaucacauaau

SEQ ID NO: 2988696 - RNA, 19 nt, Artificial Sequence
  Description of Artificial Sequence: Synthetic oligonucleotide
ccuuucugggucagcuugu

SEQ ID NO: 2988697 - RNA, 19 nt, Artificial Sequence
  Description of Artificial Sequence: Synthetic oligonucleotide
ccagcuuuacugggaagua

SEQ ID NO: 2988698 - RNA, 19 nt, Artificial Sequence
  Description of Artificial Sequence: Synthetic oligonucleotide
cucguacaauugggaucca

SEQ ID NO: 2988699 - RNA, 19 nt, Artificial Sequence
  Description of Artificial Sequence: Synthetic oligonucleotide
ccaucuugacugugcgugu

SEQ ID NO: 2988700 - RNA, 19 nt, Artificial Sequence
  Description of Artificial Sequence: Synthetic oligonucleotide
ccaguggcuucaguagcaa

SEQ ID NO: 2988701 - RNA, 19 nt, Artificial Sequence
  Description of Artificial Sequence: Synthetic oligonucleotide
cagggccaguucacucacu

SEQ ID NO: 2988702 - RNA, 19 nt, Artificial Sequence
  Description of Artificial Sequence: Synthetic oligonucleotide
cuuguacuucagggccagu

SEQ ID NO: 2988703 - RNA, 19 nt, Artificial Sequence
  Description of Artificial Sequence: Synthetic oligonucleotide
cagcauugccugagccuuu

SEQ ID NO: 2988704 - RNA, 19 nt, Artificial Sequence
  Description of Artificial Sequence: Synthetic oligonucleotide
gcauugccugagccuuucu

SEQ ID NO: 2988705 - RNA, 19 nt, Artificial Sequence
  Description of Artificial Sequence: Synthetic oligonucleotide
gggauccagaagaucccuu

SEQ ID NO: 2988706 - RNA, 19 nt, Artificial Sequence
  Description of Artificial Sequence: Synthetic oligonucleotide
gcugaacgccuaccaucuu

SEQ ID NO: 2988707 - RNA, 19 nt, Artificial Sequence
  Description of Artificial Sequence: Synthetic oligonucleotide
ccagaggguccaguuucgu

SEQ ID NO: 2988708 - RNA, 19 nt, Artificial Sequence
  Description of Artificial Sequence: Synthetic oligonucleotide
uguguauagaauuucaucg

SEQ ID NO: 2988709 - RNA, 19 nt, Artificial Sequence
  Description of Artificial Sequence: Synthetic oligonucleotide
uacaaucucaauaccaucg

SEQ ID NO: 2988710 - RNA, 19 nt, Artificial Sequence
  Description of Artificial Sequence: Synthetic oligonucleotide
uguaauuuaaacaacguuu

SEQ ID NO: 2988711 - RNA, 19 nt, Artificial Sequence
  Description of Artificial Sequence: Synthetic oligonucleotide
agagcaagcguacaaaggc

SEQ ID NO: 2988712 - RNA, 19 nt, Artificial Sequence
  Description of Artificial Sequence: Synthetic oligonucleotide
aaugcuugaauuuggaaga

SEQ ID NO: 2988713 - RNA, 19 nt, Artificial Sequence
  Description of Artificial Sequence: Synthetic oligonucleotide
guuaucaagcaacagaucc

SEQ ID NO: 2988714 - RNA, 19 nt, Artificial Sequence
  Description of Artificial Sequence: Synthetic oligonucleotide
uuaaacaacguuuuguaga

SEQ ID NO: 2988715 - RNA, 19 nt, Artificial Sequence
  Description of Artificial Sequence: Synthetic oligonucleotide
cuuagcaugacaucaaggc

SEQ ID NO: 2988716 - RNA, 19 nt, Artificial Sequence
  Description of Artificial Sequence: Synthetic oligonucleotide
uguauagaauuucaucggg

SEQ ID NO: 2988717 - RNA, 19 nt, Artificial Sequence
  Description of Artificial Sequence: Synthetic oligonucleotide
gaauaugaaaagcaguuug

SEQ ID NO: 2988718 - RNA, 19 nt, Artificial Sequence
  Description of Artificial Sequence: Synthetic oligonucleotide
uagaacaucaccuugccca

SEQ ID NO: 2988719 - RNA, 19 nt, Artificial Sequence
  Description of Artificial Sequence: Synthetic oligonucleotide
aaaaguaugcaucaguauu

SEQ ID NO: 2988720 - RNA, 19 nt, Artificial Sequence
  Description of Artificial Sequence: Synthetic oligonucleotide
aaggcaguggaguacaauc

SEQ ID NO: 2988721 - RNA, 19 nt, Artificial Sequence
  Description of Artificial Sequence: Synthetic oligonucleotide
ucugguaguugcuaaaagg

SEQ ID NO: 2988722 - RNA, 19 nt, Artificial Sequence
  Description of Artificial Sequence: Synthetic oligonucleotide
uuuggaagaaccugcagag

SEQ ID NO: 2988723 - RNA, 19 nt, Artificial Sequence
  Description of Artificial Sequence: Synthetic oligonucleotide
ugcaucaguauucugguag

SEQ ID NO: 2988724 - RNA, 19 nt, Artificial Sequence
  Description of Artificial Sequence: Synthetic oligonucleotide
aauuuaaacaacguuuugu

SEQ ID NO: 2988725 - RNA, 19 nt, Artificial Sequence
  Description of Artificial Sequence: Synthetic oligonucleotide
uaaacaacguuuuguagag

SEQ ID NO: 2988726 - RNA, 19 nt, Artificial Sequence
  Description of Artificial Sequence: Synthetic oligonucleotide
uuaucaagcaacagauccg

SEQ ID NO: 2988727 - RNA, 19 nt, Artificial Sequence
  Description of Artificial Sequence: Synthetic oligonucleotide
aauuucaucgggucgauau

SEQ ID NO: 2988728 - RNA, 19 nt, Artificial Sequence
  Description of Artificial Sequence: Synthetic oligonucleotide
uagcaugacaucaaggcag

SEQ ID NO: 2988729 - RNA, 19 nt, Artificial Sequence
  Description of Artificial Sequence: Synthetic oligonucleotide
caaugcuugaauuuggaag

SEQ ID NO: 2988730 - RNA, 19 nt, Artificial Sequence
  Description of Artificial Sequence: Synthetic oligonucleotide
aaaguaugcaucaguauuc

SEQ ID NO: 2988731 - RNA, 19 nt, Artificial Sequence
  Description of Artificial Sequence: Synthetic oligonucleotide
uuuguagagauguguauag

SEQ ID NO: 2988732 - RNA, 19 nt, Artificial Sequence
  Description of Artificial Sequence: Synthetic oligonucleotide
uggaguacaaucucaauac

SEQ ID NO: 2988733 - RNA, 19 nt, Artificial Sequence
  Description of Artificial Sequence: Synthetic oligonucleotide
uuuaaacaacguuuuguag

SEQ ID NO: 2988734 - RNA, 19 nt, Artificial Sequence
  Description of Artificial Sequence: Synthetic oligonucleotide
auguguauagaauuucauc

SEQ ID NO: 2988735 - RNA, 19 nt, Artificial Sequence
  Description of Artificial Sequence: Synthetic oligonucleotide
auagaauuucaucgggucg

SEQ ID NO: 2988736 - RNA, 19 nt, Artificial Sequence
  Description of Artificial Sequence: Synthetic oligonucleotide
ucaguauucugguaguugc

SEQ ID NO: 2988737 - RNA, 19 nt, Artificial Sequence
  Description of Artificial Sequence: Synthetic oligonucleotide
uauuuagaacaucaccuug

SEQ ID NO: 2988738 - RNA, 19 nt, Artificial Sequence
  Description of Artificial Sequence: Synthetic oligonucleotide
aacaacguuuuguagagau

SEQ ID NO: 2988739 - RNA, 19 nt, Artificial Sequence
  Description of Artificial Sequence: Synthetic oligonucleotide
aagcaguuugaacacagug

SEQ ID NO: 2988740 - RNA, 19 nt, Artificial Sequence
  Description of Artificial Sequence: Synthetic oligonucleotide
accugcauguaauuuaaac

SEQ ID NO: 2988741 - RNA, 19 nt, Artificial Sequence
  Description of Artificial Sequence: Synthetic oligonucleotide
cugguaguugcuaaaaggc

SEQ ID NO: 2988742 - RNA, 19 nt, Artificial Sequence
  Description of Artificial Sequence: Synthetic oligonucleotide
aucucaauaccaucguugg

SEQ ID NO: 2988743 - RNA, 19 nt, Artificial Sequence
  Description of Artificial Sequence: Synthetic oligonucleotide
guaugcaucaguauucugg

SEQ ID NO: 2988744 - RNA, 19 nt, Artificial Sequence
  Description of Artificial Sequence: Synthetic oligonucleotide
uggaagaaccugcagagca

SEQ ID NO: 2988745 - RNA, 19 nt, Artificial Sequence
  Description of Artificial Sequence: Synthetic oligonucleotide
guugcuaaaaggccaaugc

SEQ ID NO: 2988746 - RNA, 19 nt, Artificial Sequence
  Description of Artificial Sequence: Synthetic oligonucleotide
aauaccaucguugguagca

SEQ ID NO: 2988747 - RNA, 19 nt, Artificial Sequence
  Description of Artificial Sequence: Synthetic oligonucleotide
aaagaauaugaaaagcagu

SEQ ID NO: 2988748 - RNA, 19 nt, Artificial Sequence
  Description of Artificial Sequence: Synthetic oligonucleotide
aguuugaacacagugaaga

SEQ ID NO: 2988749 - RNA, 19 nt, Artificial Sequence
  Description of Artificial Sequence: Synthetic oligonucleotide
aaucucaauaccaucguug

SEQ ID NO: 2988750 - RNA, 19 nt, Artificial Sequence
  Description of Artificial Sequence: Synthetic oligonucleotide
auuuggaagaaccugcaga

SEQ ID NO: 2988751 - RNA, 19 nt, Artificial Sequence
  Description of Artificial Sequence: Synthetic oligonucleotide
uuuagaacaucaccuugcc

SEQ ID NO: 2988752 - RNA, 19 nt, Artificial Sequence
  Description of Artificial Sequence: Synthetic oligonucleotide
ucguuaucaagcaacagau

SEQ ID NO: 2988753 - RNA, 19 nt, Artificial Sequence
  Description of Artificial Sequence: Synthetic oligonucleotide
gauauuuagaacaucaccu

SEQ ID NO: 2988754 - RNA, 19 nt, Artificial Sequence
  Description of Artificial Sequence: Synthetic oligonucleotide
uugaacacagugaagacuu

SEQ ID NO: 2988755 - RNA, 19 nt, Artificial Sequence
  Description of Artificial Sequence: Synthetic oligonucleotide
ucugggaaaaguaugcauc

SEQ ID NO: 2988756 - RNA, 19 nt, Artificial Sequence
  Description of Artificial Sequence: Synthetic oligonucleotide
aaaggcgcuugaugaaggc

SEQ ID NO: 2988757 - RNA, 19 nt, Artificial Sequence
  Description of Artificial Sequence: Synthetic oligonucleotide
aacagauccguucugggaa

SEQ ID NO: 2988758 - RNA, 19 nt, Artificial Sequence
  Description of Artificial Sequence: Synthetic oligonucleotide
guguauagaauuucaucgg

SEQ ID NO: 2988759 - RNA, 19 nt, Artificial Sequence
  Description of Artificial Sequence: Synthetic oligonucleotide
aaaacucuggcuccuccag

SEQ ID NO: 2988760 - RNA, 19 nt, Artificial Sequence
  Description of Artificial Sequence: Synthetic oligonucleotide
ugaaaagcaguuugaacac

SEQ ID NO: 2988761 - RNA, 19 nt, Artificial Sequence
  Description of Artificial Sequence: Synthetic oligonucleotide
uugcccagaaagaauauga

SEQ ID NO: 2988762 - RNA, 19 nt, Artificial Sequence
  Description of Artificial Sequence: Synthetic oligonucleotide
uuagcaugacaucaaggca

SEQ ID NO: 2988763 - RNA, 19 nt, Artificial Sequence
  Description of Artificial Sequence: Synthetic oligonucleotide
aauuuggaagaaccugcag

SEQ ID NO: 2988764 - RNA, 19 nt, Artificial Sequence
  Description of Artificial Sequence: Synthetic oligonucleotide
aagaauaugaaaagcaguu

SEQ ID NO: 2988765 - RNA, 19 nt, Artificial Sequence
  Description of Artificial Sequence: Synthetic oligonucleotide
uaugaaaagcaguuugaac

SEQ ID NO: 2988766 - RNA, 19 nt, Artificial Sequence
  Description of Artificial Sequence: Synthetic oligonucleotide
uguagagauguguauagaa

SEQ ID NO: 2988767 - RNA, 19 nt, Artificial Sequence
  Description of Artificial Sequence: Synthetic oligonucleotide
aaaagcaguuugaacacag

SEQ ID NO: 2988768 - RNA, 19 nt, Artificial Sequence
  Description of Artificial Sequence: Synthetic oligonucleotide
uaauuuaaacaacguuuug

SEQ ID NO: 2988769 - RNA, 19 nt, Artificial Sequence
  Description of Artificial Sequence: Synthetic oligonucleotide
aauaugaaaagcaguuuga

SEQ ID NO: 2988770 - RNA, 19 nt, Artificial Sequence
  Description of Artificial Sequence: Synthetic oligonucleotide
ugaugaaggcaagagcucg

SEQ ID NO: 2988771 - RNA, 19 nt, Artificial Sequence
  Description of Artificial Sequence: Synthetic oligonucleotide
aaacucuggcuccuccagc

SEQ ID NO: 2988772 - RNA, 19 nt, Artificial Sequence
  Description of Artificial Sequence: Synthetic oligonucleotide
ucgcugaugagaaaccugc

SEQ ID NO: 2988773 - RNA, 19 nt, Artificial Sequence
  Description of Artificial Sequence: Synthetic oligonucleotide
ucaauaccaucguugguag

SEQ ID NO: 2988774 - RNA, 19 nt, Artificial Sequence
  Description of Artificial Sequence: Synthetic oligonucleotide
uugaauuuggaagaaccug

SEQ ID NO: 2988775 - RNA, 19 nt, Artificial Sequence
  Description of Artificial Sequence: Synthetic oligonucleotide
uaugcaucaguauucuggu

SEQ ID NO: 2988776 - RNA, 19 nt, Artificial Sequence
  Description of Artificial Sequence: Synthetic oligonucleotide
ugguaguugcuaaaaggcc

SEQ ID NO: 2988777 - RNA, 19 nt, Artificial Sequence
  Description of Artificial Sequence: Synthetic oligonucleotide
cugagacucguuaucaagc

SEQ ID NO: 2988778 - RNA, 19 nt, Artificial Sequence
  Description of Artificial Sequence: Synthetic oligonucleotide
augacaucaaggcagugga

SEQ ID NO: 2988779 - RNA, 19 nt, Artificial Sequence
  Description of Artificial Sequence: Synthetic oligonucleotide
uagagauguguauagaauu

SEQ ID NO: 2988780 - RNA, 19 nt, Artificial Sequence
  Description of Artificial Sequence: Synthetic oligonucleotide
cagaaagaauaugaaaagc

SEQ ID NO: 2988781 - RNA, 19 nt, Artificial Sequence
  Description of Artificial Sequence: Synthetic oligonucleotide
ugcauguaauuuaaacaac

SEQ ID NO: 2988782 - RNA, 19 nt, Artificial Sequence
  Description of Artificial Sequence: Synthetic oligonucleotide
ucaagcaacagauccguuc

SEQ ID NO: 2988783 - RNA, 19 nt, Artificial Sequence
  Description of Artificial Sequence: Synthetic oligonucleotide
agacucguuaucaagcaac

SEQ ID NO: 2988784 - RNA, 19 nt, Artificial Sequence
  Description of Artificial Sequence: Synthetic oligonucleotide
ugcuaaaaggccaaugcuu

SEQ ID NO: 2988785 - RNA, 19 nt, Artificial Sequence
  Description of Artificial Sequence: Synthetic oligonucleotide
cuugaugaaggcaagagcu

SEQ ID NO: 2988786 - RNA, 19 nt, Artificial Sequence
  Description of Artificial Sequence: Synthetic oligonucleotide
uugcuaaaaggccaaugcu

SEQ ID NO: 2988787 - RNA, 19 nt, Artificial Sequence
  Description of Artificial Sequence: Synthetic oligonucleotide
uuugaacacagugaagacu

SEQ ID NO: 2988788 - RNA, 19 nt, Artificial Sequence
  Description of Artificial Sequence: Synthetic oligonucleotide
uucugguaguugcuaaaag

SEQ ID NO: 2988789 - RNA, 19 nt, Artificial Sequence
  Description of Artificial Sequence: Synthetic oligonucleotide
uagaauuucaucgggucga

SEQ ID NO: 2988790 - RNA, 19 nt, Artificial Sequence
  Description of Artificial Sequence: Synthetic oligonucleotide
ucgauauuuagaacaucac

SEQ ID NO: 2988791 - RNA, 19 nt, Artificial Sequence
  Description of Artificial Sequence: Synthetic oligonucleotide
agcucaggcaggaacaccc

SEQ ID NO: 2988792 - RNA, 19 nt, Artificial Sequence
  Description of Artificial Sequence: Synthetic oligonucleotide
auguaauuuaaacaacguu

SEQ ID NO: 2988793 - RNA, 19 nt, Artificial Sequence
  Description of Artificial Sequence: Synthetic oligonucleotide
caugacaucaaggcagugg

SEQ ID NO: 2988794 - RNA, 19 nt, Artificial Sequence
  Description of Artificial Sequence: Synthetic oligonucleotide
ucugcgcuugcuuagcaug

SEQ ID NO: 2988795 - RNA, 19 nt, Artificial Sequence
  Description of Artificial Sequence: Synthetic oligonucleotide
ugagacucguuaucaagca

SEQ ID NO: 2988796 - RNA, 19 nt, Artificial Sequence
  Description of Artificial Sequence: Synthetic oligonucleotide
gaaggcaagagcucgcuga

SEQ ID NO: 2988797 - RNA, 19 nt, Artificial Sequence
  Description of Artificial Sequence: Synthetic oligonucleotide
gcauguaauuuaaacaacg

SEQ ID NO: 2988798 - RNA, 19 nt, Artificial Sequence
  Description of Artificial Sequence: Synthetic oligonucleotide
agaaccugcagagcaagcg

SEQ ID NO: 2988799 - RNA, 19 nt, Artificial Sequence
  Description of Artificial Sequence: Synthetic oligonucleotide
aacucuggcuccuccagcu

SEQ ID NO: 2988800 - RNA, 19 nt, Artificial Sequence
  Description of Artificial Sequence: Synthetic oligonucleotide
uuagaacaucaccuugccc

SEQ ID NO: 2988801 - RNA, 19 nt, Artificial Sequence
  Description of Artificial Sequence: Synthetic oligonucleotide
auauuuagaacaucaccuu

SEQ ID NO: 2988802 - RNA, 19 nt, Artificial Sequence
  Description of Artificial Sequence: Synthetic oligonucleotide
cacagugaagacuuucuug

SEQ ID NO: 2988803 - RNA, 19 nt, Artificial Sequence
  Description of Artificial Sequence: Synthetic oligonucleotide
aucgggucgauauuuagaa

SEQ ID NO: 2988804 - RNA, 19 nt, Artificial Sequence
  Description of Artificial Sequence: Synthetic oligonucleotide
ugcuuagcaugacaucaag

SEQ ID NO: 2988805 - RNA, 19 nt, Artificial Sequence
  Description of Artificial Sequence: Synthetic oligonucleotide
uuuuguagagauguguaua

SEQ ID NO: 2988806 - RNA, 19 nt, Artificial Sequence
  Description of Artificial Sequence: Synthetic oligonucleotide
aaggccaaugcuugaauuu

SEQ ID NO: 2988807 - RNA, 19 nt, Artificial Sequence
  Description of Artificial Sequence: Synthetic oligonucleotide
agcaagcguacaaaggcgc

SEQ ID NO: 2988808 - RNA, 19 nt, Artificial Sequence
  Description of Artificial Sequence: Synthetic oligonucleotide
aaaggccaaugcuugaauu

SEQ ID NO: 2988809 - RNA, 19 nt, Artificial Sequence
  Description of Artificial Sequence: Synthetic oligonucleotide
cagagcaagcguacaaagg

SEQ ID NO: 2988810 - RNA, 19 nt, Artificial Sequence
  Description of Artificial Sequence: Synthetic oligonucleotide
gucgauauuuagaacauca

SEQ ID NO: 2988811 - RNA, 19 nt, Artificial Sequence
  Description of Artificial Sequence: Synthetic oligonucleotide
uaucaagcaacagauccgu

SEQ ID NO: 2988812 - RNA, 19 nt, Artificial Sequence
  Description of Artificial Sequence: Synthetic oligonucleotide
aaaaggccaaugcuugaau

SEQ ID NO: 2988813 - RNA, 19 nt, Artificial Sequence
  Description of Artificial Sequence: Synthetic oligonucleotide
uccagcucaggcaggaaca

SEQ ID NO: 2988814 - RNA, 19 nt, Artificial Sequence
  Description of Artificial Sequence: Synthetic oligonucleotide
agaacaucaccuugcccag

SEQ ID NO: 2988815 - RNA, 19 nt, Artificial Sequence
  Description of Artificial Sequence: Synthetic oligonucleotide
cucguuaucaagcaacaga

SEQ ID NO: 2988816 - RNA, 19 nt, Artificial Sequence
  Description of Artificial Sequence: Synthetic oligonucleotide
aacacagugaagacuuucu

SEQ ID NO: 2988817 - RNA, 19 nt, Artificial Sequence
  Description of Artificial Sequence: Synthetic oligonucleotide
caaaggcgcuugaugaagg

SEQ ID NO: 2988818 - RNA, 19 nt, Artificial Sequence
  Description of Artificial Sequence: Synthetic oligonucleotide
aacaucaccuugcccagaa

SEQ ID NO: 2988819 - RNA, 19 nt, Artificial Sequence
  Description of Artificial Sequence: Synthetic oligonucleotide
cuugcuuagcaugacauca

SEQ ID NO: 2988820 - RNA, 19 nt, Artificial Sequence
  Description of Artificial Sequence: Synthetic oligonucleotide
ugaugagaaaccugcuuuc

SEQ ID NO: 2988821 - RNA, 19 nt, Artificial Sequence
  Description of Artificial Sequence: Synthetic oligonucleotide
ccagaaagaauaugaaaag

SEQ ID NO: 2988822 - RNA, 19 nt, Artificial Sequence
  Description of Artificial Sequence: Synthetic oligonucleotide
acaaucucaauaccaucgu

SEQ ID NO: 2988823 - RNA, 19 nt, Artificial Sequence
  Description of Artificial Sequence: Synthetic oligonucleotide
gaguacaaucucaauacca

SEQ ID NO: 2988824 - RNA, 19 nt, Artificial Sequence
  Description of Artificial Sequence: Synthetic oligonucleotide
aaguaugcaucaguauucu

SEQ ID NO: 2988825 - RNA, 19 nt, Artificial Sequence
  Description of Artificial Sequence: Synthetic oligonucleotide
ucaucgggucgauauuuag

SEQ ID NO: 2988826 - RNA, 19 nt, Artificial Sequence
  Description of Artificial Sequence: Synthetic oligonucleotide
gagcaagcguacaaaggcg

SEQ ID NO: 2988827 - RNA, 19 nt, Artificial Sequence
  Description of Artificial Sequence: Synthetic oligonucleotide
gaagaaccugcagagcaag

SEQ ID NO: 2988828 - RNA, 19 nt, Artificial Sequence
  Description of Artificial Sequence: Synthetic oligonucleotide
aguacaaucucaauaccau

SEQ ID NO: 2988829 - RNA, 19 nt, Artificial Sequence
  Description of Artificial Sequence: Synthetic oligonucleotide
guuugaacacagugaagac

SEQ ID NO: 2988830 - RNA, 19 nt, Artificial Sequence
  Description of Artificial Sequence: Synthetic oligonucleotide
guugguagcaccugcaugu

SEQ ID NO: 2988831 - RNA, 19 nt, Artificial Sequence
  Description of Artificial Sequence: Synthetic oligonucleotide
uugaugaaggcaagagcuc

SEQ ID NO: 2988832 - RNA, 19 nt, Artificial Sequence
  Description of Artificial Sequence: Synthetic oligonucleotide
agcaacagauccguucugg

SEQ ID NO: 2988833 - RNA, 19 nt, Artificial Sequence
  Description of Artificial Sequence: Synthetic oligonucleotide
augagaaaccugcuuucug

SEQ ID NO: 2988834 - RNA, 19 nt, Artificial Sequence
  Description of Artificial Sequence: Synthetic oligonucleotide
uucugggaaaaguaugcau

SEQ ID NO: 2988835 - RNA, 19 nt, Artificial Sequence
  Description of Artificial Sequence: Synthetic oligonucleotide
aggaacaccccacugcccu

SEQ ID NO: 2988836 - RNA, 19 nt, Artificial Sequence
  Description of Artificial Sequence: Synthetic oligonucleotide
uccguucugggaaaaguau

SEQ ID NO: 2988837 - RNA, 19 nt, Artificial Sequence
  Description of Artificial Sequence: Synthetic oligonucleotide
uauucugguaguugcuaaa

SEQ ID NO: 2988838 - RNA, 19 nt, Artificial Sequence
  Description of Artificial Sequence: Synthetic oligonucleotide
acaaaggcgcuugaugaag

SEQ ID NO: 2988839 - RNA, 19 nt, Artificial Sequence
  Description of Artificial Sequence: Synthetic oligonucleotide
aagcguacaaaggcgcuug

SEQ ID NO: 2988840 - RNA, 19 nt, Artificial Sequence
  Description of Artificial Sequence: Synthetic oligonucleotide
aucaguauucugguaguug

SEQ ID NO: 2988841 - RNA, 19 nt, Artificial Sequence
  Description of Artificial Sequence: Synthetic oligonucleotide
guggaguacaaucucaaua

SEQ ID NO: 2988842 - RNA, 19 nt, Artificial Sequence
  Description of Artificial Sequence: Synthetic oligonucleotide
auaugaaaagcaguuugaa

SEQ ID NO: 2988843 - RNA, 19 nt, Artificial Sequence
  Description of Artificial Sequence: Synthetic oligonucleotide
ugcccagaaagaauaugaa

SEQ ID NO: 2988844 - RNA, 19 nt, Artificial Sequence
  Description of Artificial Sequence: Synthetic oligonucleotide
uaaaaggccaaugcuugaa

SEQ ID NO: 2988845 - RNA, 19 nt, Artificial Sequence
  Description of Artificial Sequence: Synthetic oligonucleotide
cgauauuuagaacaucacc

SEQ ID NO: 2988846 - RNA, 19 nt, Artificial Sequence
  Description of Artificial Sequence: Synthetic oligonucleotide
ugacaucaaggcaguggag

SEQ ID NO: 2988847 - RNA, 19 nt, Artificial Sequence
  Description of Artificial Sequence: Synthetic oligonucleotide
cccagaaagaauaugaaaa

SEQ ID NO: 2988848 - RNA, 19 nt, Artificial Sequence
  Description of Artificial Sequence: Synthetic oligonucleotide
gagauguguauagaauuuc

SEQ ID NO: 2988849 - RNA, 19 nt, Artificial Sequence
  Description of Artificial Sequence: Synthetic oligonucleotide
agauguguauagaauuuca

SEQ ID NO: 2988850 - RNA, 19 nt, Artificial Sequence
  Description of Artificial Sequence: Synthetic oligonucleotide
caccccacugcccugagac

SEQ ID NO: 2988851 - RNA, 19 nt, Artificial Sequence
  Description of Artificial Sequence: Synthetic oligonucleotide
agcaccugcauguaauuua

SEQ ID NO: 2988852 - RNA, 19 nt, Artificial Sequence
  Description of Artificial Sequence: Synthetic oligonucleotide
gcuaaaaggccaaugcuug

SEQ ID NO: 2988853 - RNA, 19 nt, Artificial Sequence
  Description of Artificial Sequence: Synthetic oligonucleotide
ugaaggcaagagcucgcug

SEQ ID NO: 2988854 - RNA, 19 nt, Artificial Sequence
  Description of Artificial Sequence: Synthetic oligonucleotide
aguugcuaaaaggccaaug

SEQ ID NO: 2988855 - RNA, 19 nt, Artificial Sequence
  Description of Artificial Sequence: Synthetic oligonucleotide
uacaaaggcgcuugaugaa

SEQ ID NO: 2988856 - RNA, 19 nt, Artificial Sequence
  Description of Artificial Sequence: Synthetic oligonucleotide
ucucaauaccaucguuggu

SEQ ID NO: 2988857 - RNA, 19 nt, Artificial Sequence
  Description of Artificial Sequence: Synthetic oligonucleotide
aagagcucgcugaugagaa

SEQ ID NO: 2988858 - RNA, 19 nt, Artificial Sequence
  Description of Artificial Sequence: Synthetic oligonucleotide
ucaccuugcccagaaagaa

SEQ ID NO: 2988859 - RNA, 19 nt, Artificial Sequence
  Description of Artificial Sequence: Synthetic oligonucleotide
guacaaucucaauaccauc

SEQ ID NO: 2988860 - RNA, 19 nt, Artificial Sequence
  Description of Artificial Sequence: Synthetic oligonucleotide
gaauuuggaagaaccugca

SEQ ID NO: 2988861 - RNA, 19 nt, Artificial Sequence
  Description of Artificial Sequence: Synthetic oligonucleotide
aguaugcaucaguauucug

SEQ ID NO: 2988862 - RNA, 19 nt, Artificial Sequence
  Description of Artificial Sequence: Synthetic oligonucleotide
aagcaacagauccguucug

SEQ ID NO: 2988863 - RNA, 19 nt, Artificial Sequence
  Description of Artificial Sequence: Synthetic oligonucleotide
acguuuuguagagaugugu

SEQ ID NO: 2988864 - RNA, 19 nt, Artificial Sequence
  Description of Artificial Sequence: Synthetic oligonucleotide
uugcuuagcaugacaucaa

SEQ ID NO: 2988865 - RNA, 19 nt, Artificial Sequence
  Description of Artificial Sequence: Synthetic oligonucleotide
gaugaaggcaagagcucgc

SEQ ID NO: 2988866 - RNA, 19 nt, Artificial Sequence
  Description of Artificial Sequence: Synthetic oligonucleotide
gaaaccugcuuucugcgcu

SEQ ID NO: 2988867 - RNA, 19 nt, Artificial Sequence
  Description of Artificial Sequence: Synthetic oligonucleotide
gaaaaguaugcaucaguau

SEQ ID NO: 2988868 - RNA, 19 nt, Artificial Sequence
  Description of Artificial Sequence: Synthetic oligonucleotide
gcuugaugaaggcaagagc

SEQ ID NO: 2988869 - RNA, 19 nt, Artificial Sequence
  Description of Artificial Sequence: Synthetic oligonucleotide
uuucaucgggucgauauuu

SEQ ID NO: 2988870 - RNA, 19 nt, Artificial Sequence
  Description of Artificial Sequence: Synthetic oligonucleotide
ugggaaaaguaugcaucag

SEQ ID NO: 2988871 - RNA, 19 nt, Artificial Sequence
  Description of Artificial Sequence: Synthetic oligonucleotide
ucuggcuccuccagcucag

SEQ ID NO: 2988872 - RNA, 19 nt, Artificial Sequence
  Description of Artificial Sequence: Synthetic oligonucleotide
auaccaucguugguagcac

SEQ ID NO: 2988873 - RNA, 19 nt, Artificial Sequence
  Description of Artificial Sequence: Synthetic oligonucleotide
cucaauaccaucguuggua

SEQ ID NO: 2988874 - RNA, 19 nt, Artificial Sequence
  Description of Artificial Sequence: Synthetic oligonucleotide
caucguugguagcaccugc

SEQ ID NO: 2988875 - RNA, 19 nt, Artificial Sequence
  Description of Artificial Sequence: Synthetic oligonucleotide
cucgcugaugagaaaccug

SEQ ID NO: 2988876 - RNA, 19 nt, Artificial Sequence
  Description of Artificial Sequence: Synthetic oligonucleotide
uuucugcgcuugcuuagca

SEQ ID NO: 2988877 - RNA, 19 nt, Artificial Sequence
  Description of Artificial Sequence: Synthetic oligonucleotide
cauguaauuuaaacaacgu

SEQ ID NO: 2988878 - RNA, 19 nt, Artificial Sequence
  Description of Artificial Sequence: Synthetic oligonucleotide
gagcucgcugaugagaaac

SEQ ID NO: 2988879 - RNA, 19 nt, Artificial Sequence
  Description of Artificial Sequence: Synthetic oligonucleotide
agaauaugaaaagcaguuu

SEQ ID NO: 2988880 - RNA, 19 nt, Artificial Sequence
  Description of Artificial Sequence: Synthetic oligonucleotide
aacguuuuguagagaugug

SEQ ID NO: 2988881 - RNA, 19 nt, Artificial Sequence
  Description of Artificial Sequence: Synthetic oligonucleotide
cuugaauuuggaagaaccu

SEQ ID NO: 2988882 - RNA, 19 nt, Artificial Sequence
  Description of Artificial Sequence: Synthetic oligonucleotide
aggccaaugcuugaauuug

SEQ ID NO: 2988883 - RNA, 19 nt, Artificial Sequence
  Description of Artificial Sequence: Synthetic oligonucleotide
caguuugaacacagugaag

SEQ ID NO: 2988884 - RNA, 19 nt, Artificial Sequence
  Description of Artificial Sequence: Synthetic oligonucleotide
gguaguugcuaaaaggcca

SEQ ID NO: 2988885 - RNA, 19 nt, Artificial Sequence
  Description of Artificial Sequence: Synthetic oligonucleotide
guaauuuaaacaacguuuu

SEQ ID NO: 2988886 - RNA, 19 nt, Artificial Sequence
  Description of Artificial Sequence: Synthetic oligonucleotide
uuguagagauguguauaga

SEQ ID NO: 2988887 - RNA, 19 nt, Artificial Sequence
  Description of Artificial Sequence: Synthetic oligonucleotide
gcagagcaagcguacaaag

SEQ ID NO: 2988888 - RNA, 19 nt, Artificial Sequence
  Description of Artificial Sequence: Synthetic oligonucleotide
ggaguacaaucucaauacc

SEQ ID NO: 2988889 - RNA, 19 nt, Artificial Sequence
  Description of Artificial Sequence: Synthetic oligonucleotide
aaagcaguuugaacacagu

SEQ ID NO: 2988890 - RNA, 19 nt, Artificial Sequence
  Description of Artificial Sequence: Synthetic oligonucleotide
agagauguguauagaauuu

SEQ ID NO: 2988891 - RNA, 19 nt, Artificial Sequence
  Description of Artificial Sequence: Synthetic oligonucleotide
aucaaggcaguggaguaca

SEQ ID NO: 2988892 - RNA, 19 nt, Artificial Sequence
  Description of Artificial Sequence: Synthetic oligonucleotide
ugcuuucugcgcuugcuua

SEQ ID NO: 2988893 - RNA, 19 nt, Artificial Sequence
  Description of Artificial Sequence: Synthetic oligonucleotide
gaaaagcaguuugaacaca

SEQ ID NO: 2988894 - RNA, 19 nt, Artificial Sequence
  Description of Artificial Sequence: Synthetic oligonucleotide
aaggcgcuugaugaaggca

SEQ ID NO: 2988895 - RNA, 19 nt, Artificial Sequence
  Description of Artificial Sequence: Synthetic oligonucleotide
gcaacagauccguucuggg

SEQ ID NO: 2988896 - RNA, 19 nt, Artificial Sequence
  Description of Artificial Sequence: Synthetic oligonucleotide
cuugcccagaaagaauaug

SEQ ID NO: 2988897 - RNA, 19 nt, Artificial Sequence
  Description of Artificial Sequence: Synthetic oligonucleotide
ugcagagcaagcguacaaa

SEQ ID NO: 2988898 - RNA, 19 nt, Artificial Sequence
  Description of Artificial Sequence: Synthetic oligonucleotide
gacaucaaggcaguggagu

SEQ ID NO: 2988899 - RNA, 19 nt, Artificial Sequence
  Description of Artificial Sequence: Synthetic oligonucleotide
gcaggaacaccccacugcc

SEQ ID NO: 2988900 - RNA, 19 nt, Artificial Sequence
  Description of Artificial Sequence: Synthetic oligonucleotide
aguggaguacaaucucaau

SEQ ID NO: 2988901 - RNA, 19 nt, Artificial Sequence
  Description of Artificial Sequence: Synthetic oligonucleotide
caacguuuuguagagaugu

SEQ ID NO: 2988902 - RNA, 19 nt, Artificial Sequence
  Description of Artificial Sequence: Synthetic oligonucleotide
uuggaagaaccugcagagc

SEQ ID NO: 2988903 - RNA, 19 nt, Artificial Sequence
  Description of Artificial Sequence: Synthetic oligonucleotide
ggcaggaacaccccacugc

SEQ ID NO: 2988904 - RNA, 19 nt, Artificial Sequence
  Description of Artificial Sequence: Synthetic oligonucleotide
cguucugggaaaaguaugc

SEQ ID NO: 2988905 - RNA, 19 nt, Artificial Sequence
  Description of Artificial Sequence: Synthetic oligonucleotide
guauucugguaguugcuaa

SEQ ID NO: 2988906 - RNA, 19 nt, Artificial Sequence
  Description of Artificial Sequence: Synthetic oligonucleotide
gacucguuaucaagcaaca

SEQ ID NO: 2988907 - RNA, 19 nt, Artificial Sequence
  Description of Artificial Sequence: Synthetic oligonucleotide
uucaucgggucgauauuua

SEQ ID NO: 2988908 - RNA, 19 nt, Artificial Sequence
  Description of Artificial Sequence: Synthetic oligonucleotide
acugcccugagacucguua

SEQ ID NO: 2988909 - RNA, 19 nt, Artificial Sequence
  Description of Artificial Sequence: Synthetic oligonucleotide
uaccaucguugguagcacc

SEQ ID NO: 2988910 - RNA, 19 nt, Artificial Sequence
  Description of Artificial Sequence: Synthetic oligonucleotide
cuaaaaggccaaugcuuga

SEQ ID NO: 2988911 - RNA, 19 nt, Artificial Sequence
  Description of Artificial Sequence: Synthetic oligonucleotide
auuucaucgggucgauauu

SEQ ID NO: 2988912 - RNA, 19 nt, Artificial Sequence
  Description of Artificial Sequence: Synthetic oligonucleotide
gcuuagcaugacaucaagg

SEQ ID NO: 2988913 - RNA, 19 nt, Artificial Sequence
  Description of Artificial Sequence: Synthetic oligonucleotide
caucgggucgauauuuaga

SEQ ID NO: 2988914 - RNA, 19 nt, Artificial Sequence
  Description of Artificial Sequence: Synthetic oligonucleotide
ugcuugaauuuggaagaac

SEQ ID NO: 2988915 - RNA, 19 nt, Artificial Sequence
  Description of Artificial Sequence: Synthetic oligonucleotide
aguauucugguaguugcua

SEQ ID NO: 2988916 - RNA, 19 nt, Artificial Sequence
  Description of Artificial Sequence: Synthetic oligonucleotide
ugcccugagacucguuauc

SEQ ID NO: 2988917 - RNA, 19 nt, Artificial Sequence
  Description of Artificial Sequence: Synthetic oligonucleotide
acucguuaucaagcaacag

SEQ ID NO: 2988918 - RNA, 19 nt, Artificial Sequence
  Description of Artificial Sequence: Synthetic oligonucleotide
ggaaaaguaugcaucagua

SEQ ID NO: 2988919 - RNA, 19 nt, Artificial Sequence
  Description of Artificial Sequence: Synthetic oligonucleotide
acacagugaagacuuucuu

SEQ ID NO: 2988920 - RNA, 19 nt, Artificial Sequence
  Description of Artificial Sequence: Synthetic oligonucleotide
accugcuuucugcgcuugc

SEQ ID NO: 2988921 - RNA, 19 nt, Artificial Sequence
  Description of Artificial Sequence: Synthetic oligonucleotide
aaaccugcuuucugcgcuu

SEQ ID NO: 2988922 - RNA, 19 nt, Artificial Sequence
  Description of Artificial Sequence: Synthetic oligonucleotide
aaacaacguuuuguagaga

SEQ ID NO: 2988923 - RNA, 19 nt, Artificial Sequence
  Description of Artificial Sequence: Synthetic oligonucleotide
auucugguaguugcuaaaa

SEQ ID NO: 2988924 - RNA, 19 nt, Artificial Sequence
  Description of Artificial Sequence: Synthetic oligonucleotide
ucgggucgauauuuagaac

SEQ ID NO: 2988925 - RNA, 19 nt, Artificial Sequence
  Description of Artificial Sequence: Synthetic oligonucleotide
caacagauccguucuggga

SEQ ID NO: 2988926 - RNA, 19 nt, Artificial Sequence
  Description of Artificial Sequence: Synthetic oligonucleotide
caauaccaucguugguagc

SEQ ID NO: 2988927 - RNA, 19 nt, Artificial Sequence
  Description of Artificial Sequence: Synthetic oligonucleotide
caagcaacagauccguucu

SEQ ID NO: 2988928 - RNA, 19 nt, Artificial Sequence
  Description of Artificial Sequence: Synthetic oligonucleotide
cuuucugcgcuugcuuagc

SEQ ID NO: 2988929 - RNA, 19 nt, Artificial Sequence
  Description of Artificial Sequence: Synthetic oligonucleotide
ucguugguagcaccugcau

SEQ ID NO: 2988930 - RNA, 19 nt, Artificial Sequence
  Description of Artificial Sequence: Synthetic oligonucleotide
acaacguuuuguagagaug

SEQ ID NO: 2988931 - RNA, 19 nt, Artificial Sequence
  Description of Artificial Sequence: Synthetic oligonucleotide
guuuuguagagauguguau

SEQ ID NO: 2988932 - RNA, 19 nt, Artificial Sequence
  Description of Artificial Sequence: Synthetic oligonucleotide
gaaccugcagagcaagcgu

SEQ ID NO: 2988933 - RNA, 19 nt, Artificial Sequence
  Description of Artificial Sequence: Synthetic oligonucleotide
caucaaggcaguggaguac

SEQ ID NO: 2988934 - RNA, 19 nt, Artificial Sequence
  Description of Artificial Sequence: Synthetic oligonucleotide
accugcagagcaagcguac

SEQ ID NO: 2988935 - RNA, 19 nt, Artificial Sequence
  Description of Artificial Sequence: Synthetic oligonucleotide
acagauccguucugggaaa

SEQ ID NO: 2988936 - RNA, 19 nt, Artificial Sequence
  Description of Artificial Sequence: Synthetic oligonucleotide
gauguguauagaauuucau

SEQ ID NO: 2988937 - RNA, 19 nt, Artificial Sequence
  Description of Artificial Sequence: Synthetic oligonucleotide
gcuuucugcgcuugcuuag

SEQ ID NO: 2988938 - RNA, 19 nt, Artificial Sequence
  Description of Artificial Sequence: Synthetic oligonucleotide
aacaccccacugcccugag

SEQ ID NO: 2988939 - RNA, 19 nt, Artificial Sequence
  Description of Artificial Sequence: Synthetic oligonucleotide
gagacucguuaucaagcaa

SEQ ID NO: 2988940 - RNA, 19 nt, Artificial Sequence
  Description of Artificial Sequence: Synthetic oligonucleotide
ugguagcaccugcauguaa

SEQ ID NO: 2988941 - RNA, 19 nt, Artificial Sequence
  Description of Artificial Sequence: Synthetic oligonucleotide
accuugcccagaaagaaua

SEQ ID NO: 2988942 - RNA, 19 nt, Artificial Sequence
  Description of Artificial Sequence: Synthetic oligonucleotide
cugaugagaaaccugcuuu

SEQ ID NO: 2988943 - RNA, 19 nt, Artificial Sequence
  Description of Artificial Sequence: Synthetic oligonucleotide
guaguugcuaaaaggccaa

SEQ ID NO: 2988944 - RNA, 19 nt, Artificial Sequence
  Description of Artificial Sequence: Synthetic oligonucleotide
guauagaauuucaucgggu

SEQ ID NO: 2988945 - RNA, 19 nt, Artificial Sequence
  Description of Artificial Sequence: Synthetic oligonucleotide
uucugcgcuugcuuagcau

SEQ ID NO: 2988946 - RNA, 19 nt, Artificial Sequence
  Description of Artificial Sequence: Synthetic oligonucleotide
caggaacaccccacugccc

SEQ ID NO: 2988947 - RNA, 19 nt, Artificial Sequence
  Description of Artificial Sequence: Synthetic oligonucleotide
augaaggcaagagcucgcu

SEQ ID NO: 2988948 - RNA, 19 nt, Artificial Sequence
  Description of Artificial Sequence: Synthetic oligonucleotide
guagagauguguauagaau

SEQ ID NO: 2988949 - RNA, 19 nt, Artificial Sequence
  Description of Artificial Sequence: Synthetic oligonucleotide
ugaacacagugaagacuuu

SEQ ID NO: 2988950 - RNA, 19 nt, Artificial Sequence
  Description of Artificial Sequence: Synthetic oligonucleotide
aaccugcagagcaagcgua

SEQ ID NO: 2988951 - RNA, 19 nt, Artificial Sequence
  Description of Artificial Sequence: Synthetic oligonucleotide
aggcaggaacaccccacug

SEQ ID NO: 2988952 - RNA, 19 nt, Artificial Sequence
  Description of Artificial Sequence: Synthetic oligonucleotide
caagagcucgcugaugaga

SEQ ID NO: 2988953 - RNA, 19 nt, Artificial Sequence
  Description of Artificial Sequence: Synthetic oligonucleotide
guucugggaaaaguaugca

SEQ ID NO: 2988954 - RNA, 19 nt, Artificial Sequence
  Description of Artificial Sequence: Synthetic oligonucleotide
accaucguugguagcaccu

SEQ ID NO: 2988955 - RNA, 19 nt, Artificial Sequence
  Description of Artificial Sequence: Synthetic oligonucleotide
agauccguucugggaaaag

SEQ ID NO: 2988956 - RNA, 19 nt, Artificial Sequence
  Description of Artificial Sequence: Synthetic oligonucleotide
agcaugacaucaaggcagu

SEQ ID NO: 2988957 - RNA, 19 nt, Artificial Sequence
  Description of Artificial Sequence: Synthetic oligonucleotide
gauccguucugggaaaagu

SEQ ID NO: 2988958 - RNA, 19 nt, Artificial Sequence
  Description of Artificial Sequence: Synthetic oligonucleotide
caguggaguacaaucucaa

SEQ ID NO: 2988959 - RNA, 19 nt, Artificial Sequence
  Description of Artificial Sequence: Synthetic oligonucleotide
ucaaggcaguggaguacaa

SEQ ID NO: 2988960 - RNA, 19 nt, Artificial Sequence
  Description of Artificial Sequence: Synthetic oligonucleotide
aggcgcuugaugaaggcaa

SEQ ID NO: 2988961 - RNA, 19 nt, Artificial Sequence
  Description of Artificial Sequence: Synthetic oligonucleotide
ggccaaugcuugaauuugg

SEQ ID NO: 2988962 - RNA, 19 nt, Artificial Sequence
  Description of Artificial Sequence: Synthetic oligonucleotide
cgggucgauauuuagaaca

SEQ ID NO: 2988963 - RNA, 19 nt, Artificial Sequence
  Description of Artificial Sequence: Synthetic oligonucleotide
ggcaguggaguacaaucuc

SEQ ID NO: 2988964 - RNA, 19 nt, Artificial Sequence
  Description of Artificial Sequence: Synthetic oligonucleotide
uccuccagcucaggcagga

SEQ ID NO: 2988965 - RNA, 19 nt, Artificial Sequence
  Description of Artificial Sequence: Synthetic oligonucleotide
gggaaaaguaugcaucagu

SEQ ID NO: 2988966 - RNA, 19 nt, Artificial Sequence
  Description of Artificial Sequence: Synthetic oligonucleotide
ccguucugggaaaaguaug

SEQ ID NO: 2988967 - RNA, 19 nt, Artificial Sequence
  Description of Artificial Sequence: Synthetic oligonucleotide
aaccugcuuucugcgcuug

SEQ ID NO: 2988968 - RNA, 19 nt, Artificial Sequence
  Description of Artificial Sequence: Synthetic oligonucleotide
aucguugguagcaccugca

SEQ ID NO: 2988969 - RNA, 19 nt, Artificial Sequence
  Description of Artificial Sequence: Synthetic oligonucleotide
gcccagaaagaauaugaaa

SEQ ID NO: 2988970 - RNA, 19 nt, Artificial Sequence
  Description of Artificial Sequence: Synthetic oligonucleotide
cugcgcuugcuuagcauga

SEQ ID NO: 2988971 - RNA, 19 nt, Artificial Sequence
  Description of Artificial Sequence: Synthetic oligonucleotide
auccguucugggaaaagua

SEQ ID NO: 2988972 - RNA, 19 nt, Artificial Sequence
  Description of Artificial Sequence: Synthetic oligonucleotide
agcguacaaaggcgcuuga

SEQ ID NO: 2988973 - RNA, 19 nt, Artificial Sequence
  Description of Artificial Sequence: Synthetic oligonucleotide
uagcaccugcauguaauuu

SEQ ID NO: 2988974 - RNA, 19 nt, Artificial Sequence
  Description of Artificial Sequence: Synthetic oligonucleotide
augcuugaauuuggaagaa

SEQ ID NO: 2988975 - RNA, 19 nt, Artificial Sequence
  Description of Artificial Sequence: Synthetic oligonucleotide
gcuugcuuagcaugacauc

SEQ ID NO: 2988976 - RNA, 19 nt, Artificial Sequence
  Description of Artificial Sequence: Synthetic oligonucleotide
ugcgcuugcuuagcaugac

SEQ ID NO: 2988977 - RNA, 19 nt, Artificial Sequence
  Description of Artificial Sequence: Synthetic oligonucleotide
gaacaccccacugcccuga

SEQ ID NO: 2988978 - RNA, 19 nt, Artificial Sequence
  Description of Artificial Sequence: Synthetic oligonucleotide
agagcucgcugaugagaaa

SEQ ID NO: 2988979 - RNA, 19 nt, Artificial Sequence
  Description of Artificial Sequence: Synthetic oligonucleotide
cugcagagcaagcguacaa

SEQ ID NO: 2988980 - RNA, 19 nt, Artificial Sequence
  Description of Artificial Sequence: Synthetic oligonucleotide
gcaguggaguacaaucuca

SEQ ID NO: 2988981 - RNA, 19 nt, Artificial Sequence
  Description of Artificial Sequence: Synthetic oligonucleotide
cagcucaggcaggaacacc

SEQ ID NO: 2988982 - RNA, 19 nt, Artificial Sequence
  Description of Artificial Sequence: Synthetic oligonucleotide
uaguugcuaaaaggccaau

SEQ ID NO: 2988983 - RNA, 19 nt, Artificial Sequence
  Description of Artificial Sequence: Synthetic oligonucleotide
uugguagcaccugcaugua

SEQ ID NO: 2988984 - RNA, 19 nt, Artificial Sequence
  Description of Artificial Sequence: Synthetic oligonucleotide
caguauucugguaguugcu

SEQ ID NO: 2988985 - RNA, 19 nt, Artificial Sequence
  Description of Artificial Sequence: Synthetic oligonucleotide
cgcuugaugaaggcaagag

SEQ ID NO: 2988986 - RNA, 19 nt, Artificial Sequence
  Description of Artificial Sequence: Synthetic oligonucleotide
accccacugcccugagacu

SEQ ID NO: 2988987 - RNA, 19 nt, Artificial Sequence
  Description of Artificial Sequence: Synthetic oligonucleotide
ggaacaccccacugcccug

SEQ ID NO: 2988988 - RNA, 19 nt, Artificial Sequence
  Description of Artificial Sequence: Synthetic oligonucleotide
gaacaucaccuugcccaga

SEQ ID NO: 2988989 - RNA, 19 nt, Artificial Sequence
  Description of Artificial Sequence: Synthetic oligonucleotide
ggucgauauuuagaacauc

SEQ ID NO: 2988990 - RNA, 19 nt, Artificial Sequence
  Description of Artificial Sequence: Synthetic oligonucleotide
cccacugcccugagacucg

SEQ ID NO: 2988991 - RNA, 19 nt, Artificial Sequence
  Description of Artificial Sequence: Synthetic oligonucleotide
aggcaagagcucgcugaug

SEQ ID NO: 2988992 - RNA, 19 nt, Artificial Sequence
  Description of Artificial Sequence: Synthetic oligonucleotide
cguuaucaagcaacagauc

SEQ ID NO: 2988993 - RNA, 19 nt, Artificial Sequence
  Description of Artificial Sequence: Synthetic oligonucleotide
ccaaugcuugaauuuggaa

SEQ ID NO: 2988994 - RNA, 19 nt, Artificial Sequence
  Description of Artificial Sequence: Synthetic oligonucleotide
gcaucaguauucugguagu

SEQ ID NO: 2988995 - RNA, 19 nt, Artificial Sequence
  Description of Artificial Sequence: Synthetic oligonucleotide
cguugguagcaccugcaug

SEQ ID NO: 2988996 - RNA, 19 nt, Artificial Sequence
  Description of Artificial Sequence: Synthetic oligonucleotide
ggaagaaccugcagagcaa

SEQ ID NO: 2988997 - RNA, 19 nt, Artificial Sequence
  Description of Artificial Sequence: Synthetic oligonucleotide
gguagcaccugcauguaau

SEQ ID NO: 2988998 - RNA, 19 nt, Artificial Sequence
  Description of Artificial Sequence: Synthetic oligonucleotide
gaauuucaucgggucgaua

SEQ ID NO: 2988999 - RNA, 19 nt, Artificial Sequence
  Description of Artificial Sequence: Synthetic oligonucleotide
gccaaugcuugaauuugga

SEQ ID NO: 2989000 - RNA, 19 nt, Artificial Sequence
  Description of Artificial Sequence: Synthetic oligonucleotide
guagcaccugcauguaauu

SEQ ID NO: 2989001 - RNA, 19 nt, Artificial Sequence
  Description of Artificial Sequence: Synthetic oligonucleotide
caaucucaauaccaucguu

SEQ ID NO: 2989002 - RNA, 19 nt, Artificial Sequence
  Description of Artificial Sequence: Synthetic oligonucleotide
gcaccugcauguaauuuaa

SEQ ID NO: 2989003 - RNA, 19 nt, Artificial Sequence
  Description of Artificial Sequence: Synthetic oligonucleotide
gcugaugagaaaccugcuu

SEQ ID NO: 2989004 - RNA, 19 nt, Artificial Sequence
  Description of Artificial Sequence: Synthetic oligonucleotide
cuggcuccuccagcucagg

SEQ ID NO: 2989005 - RNA, 19 nt, Artificial Sequence
  Description of Artificial Sequence: Synthetic oligonucleotide
gcccugagacucguuauca

SEQ ID NO: 2989006 - RNA, 19 nt, Artificial Sequence
  Description of Artificial Sequence: Synthetic oligonucleotide
aucaagcaacagauccguu

SEQ ID NO: 2989007 - RNA, 19 nt, Artificial Sequence
  Description of Artificial Sequence: Synthetic oligonucleotide
caccugcauguaauuuaaa

SEQ ID NO: 2989008 - RNA, 19 nt, Artificial Sequence
  Description of Artificial Sequence: Synthetic oligonucleotide
ccccacugcccugagacuc

SEQ ID NO: 2989009 - RNA, 19 nt, Artificial Sequence
  Description of Artificial Sequence: Synthetic oligonucleotide
caccuugcccagaaagaau

SEQ ID NO: 2989010 - RNA, 19 nt, Artificial Sequence
  Description of Artificial Sequence: Synthetic oligonucleotide
gcgcuugcuuagcaugaca

SEQ ID NO: 2989011 - RNA, 19 nt, Artificial Sequence
  Description of Artificial Sequence: Synthetic oligonucleotide
ccaucguugguagcaccug

SEQ ID NO: 2989012 - RNA, 19 nt, Artificial Sequence
  Description of Artificial Sequence: Synthetic oligonucleotide
cugcccugagacucguuau

SEQ ID NO: 2989013 - RNA, 19 nt, Artificial Sequence
  Description of Artificial Sequence: Synthetic oligonucleotide
gggucgauauuuagaacau

SEQ ID NO: 2989014 - RNA, 19 nt, Artificial Sequence
  Description of Artificial Sequence: Synthetic oligonucleotide
gcaugacaucaaggcagug

SEQ ID NO: 2989015 - RNA, 19 nt, Artificial Sequence
  Description of Artificial Sequence: Synthetic oligonucleotide
cagauccguucugggaaaa

SEQ ID NO: 2989016 - RNA, 19 nt, Artificial Sequence
  Description of Artificial Sequence: Synthetic oligonucleotide
cugcuuucugcgcuugcuu

SEQ ID NO: 2989017 - RNA, 19 nt, Artificial Sequence
  Description of Artificial Sequence: Synthetic oligonucleotide
caagcguacaaaggcgcuu

SEQ ID NO: 2989018 - RNA, 19 nt, Artificial Sequence
  Description of Artificial Sequence: Synthetic oligonucleotide
caaggcaguggaguacaau

SEQ ID NO: 2989019 - RNA, 19 nt, Artificial Sequence
  Description of Artificial Sequence: Synthetic oligonucleotide
caucaguauucugguaguu

SEQ ID NO: 2989020 - RNA, 19 nt, Artificial Sequence
  Description of Artificial Sequence: Synthetic oligonucleotide
gcucgcugaugagaaaccu

SEQ ID NO: 2989021 - RNA, 19 nt, Artificial Sequence
  Description of Artificial Sequence: Synthetic oligonucleotide
gcaagcguacaaaggcgcu

SEQ ID NO: 2989022 - RNA, 19 nt, Artificial Sequence
  Description of Artificial Sequence: Synthetic oligonucleotide
gcgcuugaugaaggcaaga

SEQ ID NO: 2989023 - RNA, 19 nt, Artificial Sequence
  Description of Artificial Sequence: Synthetic oligonucleotide
cccugagacucguuaucaa

SEQ ID NO: 2989024 - RNA, 19 nt, Artificial Sequence
  Description of Artificial Sequence: Synthetic oligonucleotide
ccugcagagcaagcguaca

SEQ ID NO: 2989025 - RNA, 19 nt, Artificial Sequence
  Description of Artificial Sequence: Synthetic oligonucleotide
cgcuugcuuagcaugacau

SEQ ID NO: 2989026 - RNA, 19 nt, Artificial Sequence
  Description of Artificial Sequence: Synthetic oligonucleotide
ccuugcccagaaagaauau

SEQ ID NO: 2989027 - RNA, 19 nt, Artificial Sequence
  Description of Artificial Sequence: Synthetic oligonucleotide
gcguacaaaggcgcuugau

SEQ ID NO: 2989028 - RNA, 19 nt, Artificial Sequence
  Description of Artificial Sequence: Synthetic oligonucleotide
cgcugaugagaaaccugcu

SEQ ID NO: 2989029 - RNA, 19 nt, Artificial Sequence
  Description of Artificial Sequence: Synthetic oligonucleotide
cacugcccugagacucguu

SEQ ID NO: 2989030 - RNA, 19 nt, Artificial Sequence
  Description of Artificial Sequence: Synthetic oligonucleotide
aauucaacauauuuuauug

SEQ ID NO: 2989031 - RNA, 19 nt, Artificial Sequence
  Description of Artificial Sequence: Synthetic oligonucleotide
auguaauuaacuuuaauca

SEQ ID NO: 2989032 - RNA, 19 nt, Artificial Sequence
  Description of Artificial Sequence: Synthetic oligonucleotide
uuuguuacauaccagagau

SEQ ID NO: 2989033 - RNA, 19 nt, Artificial Sequence
  Description of Artificial Sequence: Synthetic oligonucleotide
uguaauuaacuuuaaucag

SEQ ID NO: 2989034 - RNA, 19 nt, Artificial Sequence
  Description of Artificial Sequence: Synthetic oligonucleotide
uuaaauucaacauauuuua

SEQ ID NO: 2989035 - RNA, 19 nt, Artificial Sequence
  Description of Artificial Sequence: Synthetic oligonucleotide
uuaacuuuaaucagcuuug

SEQ ID NO: 2989036 - RNA, 19 nt, Artificial Sequence
  Description of Artificial Sequence: Synthetic oligonucleotide
uuuuaaauucaacauauuu

SEQ ID NO: 2989037 - RNA, 19 nt, Artificial Sequence
  Description of Artificial Sequence: Synthetic oligonucleotide
uucaacauauuuuauugug

SEQ ID NO: 2989038 - RNA, 19 nt, Artificial Sequence
  Description of Artificial Sequence: Synthetic oligonucleotide
acauauuuuauuguguuuc

SEQ ID NO: 2989039 - RNA, 19 nt, Artificial Sequence
  Description of Artificial Sequence: Synthetic oligonucleotide
aaaucaucuagucauuuau

SEQ ID NO: 2989040 - RNA, 19 nt, Artificial Sequence
  Description of Artificial Sequence: Synthetic oligonucleotide
uauuuuauuguguuucuac

SEQ ID NO: 2989041 - RNA, 19 nt, Artificial Sequence
  Description of Artificial Sequence: Synthetic oligonucleotide
uuacauaccagagauauaa

SEQ ID NO: 2989042 - RNA, 19 nt, Artificial Sequence
  Description of Artificial Sequence: Synthetic oligonucleotide
uuuauuguguuucuacuuc

SEQ ID NO: 2989043 - RNA, 19 nt, Artificial Sequence
  Description of Artificial Sequence: Synthetic oligonucleotide
agauauaaugaacacauua

SEQ ID NO: 2989044 - RNA, 19 nt, Artificial Sequence
  Description of Artificial Sequence: Synthetic oligonucleotide
acuuuaaucagcuuuguua

SEQ ID NO: 2989045 - RNA, 19 nt, Artificial Sequence
  Description of Artificial Sequence: Synthetic oligonucleotide
uuuuguuacauaccagaga

SEQ ID NO: 2989046 - RNA, 19 nt, Artificial Sequence
  Description of Artificial Sequence: Synthetic oligonucleotide
uguuacauaccagagauau

SEQ ID NO: 2989047 - RNA, 19 nt, Artificial Sequence
  Description of Artificial Sequence: Synthetic oligonucleotide
ucuacuucuggacuccucc

SEQ ID NO: 2989048 - RNA, 19 nt, Artificial Sequence
  Description of Artificial Sequence: Synthetic oligonucleotide
ucaacauauuuuauugugu

SEQ ID NO: 2989049 - RNA, 19 nt, Artificial Sequence
  Description of Artificial Sequence: Synthetic oligonucleotide
agagauauaaugaacacau

SEQ ID NO: 2989050 - RNA, 19 nt, Artificial Sequence
  Description of Artificial Sequence: Synthetic oligonucleotide
uuaaucagcuuuguuaucu

SEQ ID NO: 2989051 - RNA, 19 nt, Artificial Sequence
  Description of Artificial Sequence: Synthetic oligonucleotide
auauaaugaacacauuaaa

SEQ ID NO: 2989052 - RNA, 19 nt, Artificial Sequence
  Description of Artificial Sequence: Synthetic oligonucleotide
auuuuauuguguuucuacu

SEQ ID NO: 2989053 - RNA, 19 nt, Artificial Sequence
  Description of Artificial Sequence: Synthetic oligonucleotide
acauaccagagauauaaug

SEQ ID NO: 2989054 - RNA, 19 nt, Artificial Sequence
  Description of Artificial Sequence: Synthetic oligonucleotide
cauaccagagauauaauga

SEQ ID NO: 2989055 - RNA, 19 nt, Artificial Sequence
  Description of Artificial Sequence: Synthetic oligonucleotide
uguguuucuacuucuggac

SEQ ID NO: 2989056 - RNA, 19 nt, Artificial Sequence
  Description of Artificial Sequence: Synthetic oligonucleotide
gauauaaugaacacauuaa

SEQ ID NO: 2989057 - RNA, 19 nt, Artificial Sequence
  Description of Artificial Sequence: Synthetic oligonucleotide
uuuuauuguguuucuacuu

SEQ ID NO: 2989058 - RNA, 19 nt, Artificial Sequence
  Description of Artificial Sequence: Synthetic oligonucleotide
uuguguuucuacuucugga

SEQ ID NO: 2989059 - RNA, 19 nt, Artificial Sequence
  Description of Artificial Sequence: Synthetic oligonucleotide
uuauuguguuucuacuucu

SEQ ID NO: 2989060 - RNA, 19 nt, Artificial Sequence
  Description of Artificial Sequence: Synthetic oligonucleotide
uaaauucaacauauuuuau

SEQ ID NO: 2989061 - RNA, 19 nt, Artificial Sequence
  Description of Artificial Sequence: Synthetic oligonucleotide
aacauauuuuauuguguuu

SEQ ID NO: 2989062 - RNA, 19 nt, Artificial Sequence
  Description of Artificial Sequence: Synthetic oligonucleotide
auucaacauauuuuauugu

SEQ ID NO: 2989063 - RNA, 19 nt, Artificial Sequence
  Description of Artificial Sequence: Synthetic oligonucleotide
auaccagagauauaaugaa

SEQ ID NO: 2989064 - RNA, 19 nt, Artificial Sequence
  Description of Artificial Sequence: Synthetic oligonucleotide
aucaucuagucauuuauuu

SEQ ID NO: 2989065 - RNA, 19 nt, Artificial Sequence
  Description of Artificial Sequence: Synthetic oligonucleotide
uguuucuacuucuggacuc

SEQ ID NO: 2989066 - RNA, 19 nt, Artificial Sequence
  Description of Artificial Sequence: Synthetic oligonucleotide
accagagauauaaugaaca

SEQ ID NO: 2989067 - RNA, 19 nt, Artificial Sequence
  Description of Artificial Sequence: Synthetic oligonucleotide
uaccagagauauaaugaac

SEQ ID NO: 2989068 - RNA, 19 nt, Artificial Sequence
  Description of Artificial Sequence: Synthetic oligonucleotide
ucaucuagucauuuauuuu

SEQ ID NO: 2989069 - RNA, 19 nt, Artificial Sequence
  Description of Artificial Sequence: Synthetic oligonucleotide
aacuuuaaucagcuuuguu

SEQ ID NO: 2989070 - RNA, 19 nt, Artificial Sequence
  Description of Artificial Sequence: Synthetic oligonucleotide
cuuuaaucagcuuuguuau

SEQ ID NO: 2989071 - RNA, 19 nt, Artificial Sequence
  Description of Artificial Sequence: Synthetic oligonucleotide
aauuaacuuuaaucagcuu

SEQ ID NO: 2989072 - RNA, 19 nt, Artificial Sequence
  Description of Artificial Sequence: Synthetic oligonucleotide
uuuaaucagcuuuguuauc

SEQ ID NO: 2989073 - RNA, 19 nt, Artificial Sequence
  Description of Artificial Sequence: Synthetic oligonucleotide
gaaaucaucuagucauuua

SEQ ID NO: 2989074 - RNA, 19 nt, Artificial Sequence
  Description of Artificial Sequence: Synthetic oligonucleotide
aaucaucuagucauuuauu

SEQ ID NO: 2989075 - RNA, 19 nt, Artificial Sequence
  Description of Artificial Sequence: Synthetic oligonucleotide
guuucuacuucuggacucc

SEQ ID NO: 2989076 - RNA, 19 nt, Artificial Sequence
  Description of Artificial Sequence: Synthetic oligonucleotide
uacauaccagagauauaau

SEQ ID NO: 2989077 - RNA, 19 nt, Artificial Sequence
  Description of Artificial Sequence: Synthetic oligonucleotide
uaacuuuaaucagcuuugu

SEQ ID NO: 2989078 - RNA, 19 nt, Artificial Sequence
  Description of Artificial Sequence: Synthetic oligonucleotide
cagagauauaaugaacaca

SEQ ID NO: 2989079 - RNA, 19 nt, Artificial Sequence
  Description of Artificial Sequence: Synthetic oligonucleotide
uacuucuggacuccuccau

SEQ ID NO: 2989080 - RNA, 19 nt, Artificial Sequence
  Description of Artificial Sequence: Synthetic oligonucleotide
ccagagauauaaugaacac

SEQ ID NO: 2989081 - RNA, 19 nt, Artificial Sequence
  Description of Artificial Sequence: Synthetic oligonucleotide
agaaaucaucuagucauuu

SEQ ID NO: 2989082 - RNA, 19 nt, Artificial Sequence
  Description of Artificial Sequence: Synthetic oligonucleotide
uaaucagcuuuguuaucuu

SEQ ID NO: 2989083 - RNA, 19 nt, Artificial Sequence
  Description of Artificial Sequence: Synthetic oligonucleotide
uuguuacauaccagagaua

SEQ ID NO: 2989084 - RNA, 19 nt, Artificial Sequence
  Description of Artificial Sequence: Synthetic oligonucleotide
uucuacuucuggacuccuc

SEQ ID NO: 2989085 - RNA, 19 nt, Artificial Sequence
  Description of Artificial Sequence: Synthetic oligonucleotide
auauuuuauuguguuucua

SEQ ID NO: 2989086 - RNA, 19 nt, Artificial Sequence
  Description of Artificial Sequence: Synthetic oligonucleotide
caacauauuuuauuguguu

SEQ ID NO: 2989087 - RNA, 19 nt, Artificial Sequence
  Description of Artificial Sequence: Synthetic oligonucleotide
guguuucuacuucuggacu

SEQ ID NO: 2989088 - RNA, 19 nt, Artificial Sequence
  Description of Artificial Sequence: Synthetic oligonucleotide
uuucuacuucuggacuccu

SEQ ID NO: 2989089 - RNA, 19 nt, Artificial Sequence
  Description of Artificial Sequence: Synthetic oligonucleotide
guuacauaccagagauaua

SEQ ID NO: 2989090 - RNA, 19 nt, Artificial Sequence
  Description of Artificial Sequence: Synthetic oligonucleotide
gagauauaaugaacacauu

SEQ ID NO: 2989091 - RNA, 19 nt, Artificial Sequence
  Description of Artificial Sequence: Synthetic oligonucleotide
gaauaaauuaguuacaacg

SEQ ID NO: 2989092 - RNA, 19 nt, Artificial Sequence
  Description of Artificial Sequence: Synthetic oligonucleotide
acuugaauaaauuaguuac

SEQ ID NO: 2989093 - RNA, 19 nt, Artificial Sequence
  Description of Artificial Sequence: Synthetic oligonucleotide
uaaucugugaagaaaaucc

SEQ ID NO: 2989094 - RNA, 19 nt, Artificial Sequence
  Description of Artificial Sequence: Synthetic oligonucleotide
uaaauuaguuacaacgucg

SEQ ID NO: 2989095 - RNA, 19 nt, Artificial Sequence
  Description of Artificial Sequence: Synthetic oligonucleotide
aaacauauauucccaacgg

SEQ ID NO: 2989096 - RNA, 19 nt, Artificial Sequence
  Description of Artificial Sequence: Synthetic oligonucleotide
aagaagaaauaccaguuuc

SEQ ID NO: 2989097 - RNA, 19 nt, Artificial Sequence
  Description of Artificial Sequence: Synthetic oligonucleotide
gaaacauauauucccaacg

SEQ ID NO: 2989098 - RNA, 19 nt, Artificial Sequence
  Description of Artificial Sequence: Synthetic oligonucleotide
aaaauaaaagaaguaaucu

SEQ ID NO: 2989099 - RNA, 19 nt, Artificial Sequence
  Description of Artificial Sequence: Synthetic oligonucleotide
acuguggaaacauauauuc

SEQ ID NO: 2989100 - RNA, 19 nt, Artificial Sequence
  Description of Artificial Sequence: Synthetic oligonucleotide
uuuacagaaagguaaagga

SEQ ID NO: 2989101 - RNA, 19 nt, Artificial Sequence
  Description of Artificial Sequence: Synthetic oligonucleotide
aaagaaguaaucugugaag

SEQ ID NO: 2989102 - RNA, 19 nt, Artificial Sequence
  Description of Artificial Sequence: Synthetic oligonucleotide
uacagaaagguaaaggaag

SEQ ID NO: 2989103 - RNA, 19 nt, Artificial Sequence
  Description of Artificial Sequence: Synthetic oligonucleotide
uguggaaacauauauuccc

SEQ ID NO: 2989104 - RNA, 19 nt, Artificial Sequence
  Description of Artificial Sequence: Synthetic oligonucleotide
ucacacuugaauaaauuag

SEQ ID NO: 2989105 - RNA, 19 nt, Artificial Sequence
  Description of Artificial Sequence: Synthetic oligonucleotide
uucucuuugguaaaagucc

SEQ ID NO: 2989106 - RNA, 19 nt, Artificial Sequence
  Description of Artificial Sequence: Synthetic oligonucleotide
uuaguuacaacgucgauaa

SEQ ID NO: 2989107 - RNA, 19 nt, Artificial Sequence
  Description of Artificial Sequence: Synthetic oligonucleotide
auaaauuaguuacaacguc

SEQ ID NO: 2989108 - RNA, 19 nt, Artificial Sequence
  Description of Artificial Sequence: Synthetic oligonucleotide
aauaaauuaguuacaacgu

SEQ ID NO: 2989109 - RNA, 19 nt, Artificial Sequence
  Description of Artificial Sequence: Synthetic oligonucleotide
aaaccugaagaauuccuuc

SEQ ID NO: 2989110 - RNA, 19 nt, Artificial Sequence
  Description of Artificial Sequence: Synthetic oligonucleotide
uuaacuauauuucugcaua

SEQ ID NO: 2989111 - RNA, 19 nt, Artificial Sequence
  Description of Artificial Sequence: Synthetic oligonucleotide
ucugugaagaaaaucccag

SEQ ID NO: 2989112 - RNA, 19 nt, Artificial Sequence
  Description of Artificial Sequence: Synthetic oligonucleotide
ugugaagaaaaucccagca

SEQ ID NO: 2989113 - RNA, 19 nt, Artificial Sequence
  Description of Artificial Sequence: Synthetic oligonucleotide
aaucugugaagaaaauccc

SEQ ID NO: 2989114 - RNA, 19 nt, Artificial Sequence
  Description of Artificial Sequence: Synthetic oligonucleotide
ucuguuaacuauauuucug

SEQ ID NO: 2989115 - RNA, 19 nt, Artificial Sequence
  Description of Artificial Sequence: Synthetic oligonucleotide
uggaaggcaaaccugaaga

SEQ ID NO: 2989116 - RNA, 19 nt, Artificial Sequence
  Description of Artificial Sequence: Synthetic oligonucleotide
aguccgcuaaaucuggugc

SEQ ID NO: 2989117 - RNA, 19 nt, Artificial Sequence
  Description of Artificial Sequence: Synthetic oligonucleotide
aaaugguaggcgcugucgg

SEQ ID NO: 2989118 - RNA, 19 nt, Artificial Sequence
  Description of Artificial Sequence: Synthetic oligonucleotide
uuucuguuaacuauauuuc

SEQ ID NO: 2989119 - RNA, 19 nt, Artificial Sequence
  Description of Artificial Sequence: Synthetic oligonucleotide
uugguaaaaguccucacac

SEQ ID NO: 2989120 - RNA, 19 nt, Artificial Sequence
  Description of Artificial Sequence: Synthetic oligonucleotide
ugaagaaaaucccagcaaa

SEQ ID NO: 2989121 - RNA, 19 nt, Artificial Sequence
  Description of Artificial Sequence: Synthetic oligonucleotide
aauaccaguuucuguuaac

SEQ ID NO: 2989122 - RNA, 19 nt, Artificial Sequence
  Description of Artificial Sequence: Synthetic oligonucleotide
uuugguaaaaguccucaca

SEQ ID NO: 2989123 - RNA, 19 nt, Artificial Sequence
  Description of Artificial Sequence: Synthetic oligonucleotide
uaaaggaaguugcaagaag

SEQ ID NO: 2989124 - RNA, 19 nt, Artificial Sequence
  Description of Artificial Sequence: Synthetic oligonucleotide
agaaauaccaguuucuguu

SEQ ID NO: 2989125 - RNA, 19 nt, Artificial Sequence
  Description of Artificial Sequence: Synthetic oligonucleotide
uaaaaguccucacacuuga

SEQ ID NO: 2989126 - RNA, 19 nt, Artificial Sequence
  Description of Artificial Sequence: Synthetic oligonucleotide
uuucucuuugguaaaaguc

SEQ ID NO: 2989127 - RNA, 19 nt, Artificial Sequence
  Description of Artificial Sequence: Synthetic oligonucleotide
gaaagguaaaggaaguugc

SEQ ID NO: 2989128 - RNA, 19 nt, Artificial Sequence
  Description of Artificial Sequence: Synthetic oligonucleotide
cuguuaacuauauuucugc

SEQ ID NO: 2989129 - RNA, 19 nt, Artificial Sequence
  Description of Artificial Sequence: Synthetic oligonucleotide
gguucuuucucuuugacug

SEQ ID NO: 2989130 - RNA, 19 nt, Artificial Sequence
  Description of Artificial Sequence: Synthetic oligonucleotide
aguugcaagaagaaauacc

SEQ ID NO: 2989131 - RNA, 19 nt, Artificial Sequence
  Description of Artificial Sequence: Synthetic oligonucleotide
cuuuacagaaagguaaagg

SEQ ID NO: 2989132 - RNA, 19 nt, Artificial Sequence
  Description of Artificial Sequence: Synthetic oligonucleotide
aagaaguaaucugugaaga

SEQ ID NO: 2989133 - RNA, 19 nt, Artificial Sequence
  Description of Artificial Sequence: Synthetic oligonucleotide
aacauauauucccaacggu

SEQ ID NO: 2989134 - RNA, 19 nt, Artificial Sequence
  Description of Artificial Sequence: Synthetic oligonucleotide
uauauuucugcauacugua

SEQ ID NO: 2989135 - RNA, 19 nt, Artificial Sequence
  Description of Artificial Sequence: Synthetic oligonucleotide
augagagcuuuacagaaag

SEQ ID NO: 2989136 - RNA, 19 nt, Artificial Sequence
  Description of Artificial Sequence: Synthetic oligonucleotide
aaaggaaguugcaagaaga

SEQ ID NO: 2989137 - RNA, 19 nt, Artificial Sequence
  Description of Artificial Sequence: Synthetic oligonucleotide
uuacagaaagguaaaggaa

SEQ ID NO: 2989138 - RNA, 19 nt, Artificial Sequence
  Description of Artificial Sequence: Synthetic oligonucleotide
uuugacuguggaaacauau

SEQ ID NO: 2989139 - RNA, 19 nt, Artificial Sequence
  Description of Artificial Sequence: Synthetic oligonucleotide
agguaaaggaaguugcaag

SEQ ID NO: 2989140 - RNA, 19 nt, Artificial Sequence
  Description of Artificial Sequence: Synthetic oligonucleotide
aaguugcaagaagaaauac

SEQ ID NO: 2989141 - RNA, 19 nt, Artificial Sequence
  Description of Artificial Sequence: Synthetic oligonucleotide
cugggagucuucuucaugg

SEQ ID NO: 2989142 - RNA, 19 nt, Artificial Sequence
  Description of Artificial Sequence: Synthetic oligonucleotide
acucggaaaugguaggcgc

SEQ ID NO: 2989143 - RNA, 19 nt, Artificial Sequence
  Description of Artificial Sequence: Synthetic oligonucleotide
aaucuggugcagcuacucg

SEQ ID NO: 2989144 - RNA, 19 nt, Artificial Sequence
  Description of Artificial Sequence: Synthetic oligonucleotide
ugacuguggaaacauauau

SEQ ID NO: 2989145 - RNA, 19 nt, Artificial Sequence
  Description of Artificial Sequence: Synthetic oligonucleotide
guugcaagaagaaauacca

SEQ ID NO: 2989146 - RNA, 19 nt, Artificial Sequence
  Description of Artificial Sequence: Synthetic oligonucleotide
uucucuuugacuguggaaa

SEQ ID NO: 2989147 - RNA, 19 nt, Artificial Sequence
  Description of Artificial Sequence: Synthetic oligonucleotide
cauacuguauuucucuuug

SEQ ID NO: 2989148 - RNA, 19 nt, Artificial Sequence
  Description of Artificial Sequence: Synthetic oligonucleotide
uugaauaaauuaguuacaa

SEQ ID NO: 2989149 - RNA, 19 nt, Artificial Sequence
  Description of Artificial Sequence: Synthetic oligonucleotide
gaagaauuccuucagcaaa

SEQ ID NO: 2989150 - RNA, 19 nt, Artificial Sequence
  Description of Artificial Sequence: Synthetic oligonucleotide
ugaauaaauuaguuacaac

SEQ ID NO: 2989151 - RNA, 19 nt, Artificial Sequence
  Description of Artificial Sequence: Synthetic oligonucleotide
aaauuaguuacaacgucga

SEQ ID NO: 2989152 - RNA, 19 nt, Artificial Sequence
  Description of Artificial Sequence: Synthetic oligonucleotide
ugaauuugcacuggaagac

SEQ ID NO: 2989153 - RNA, 19 nt, Artificial Sequence
  Description of Artificial Sequence: Synthetic oligonucleotide
aaaguccucacacuugaau

SEQ ID NO: 2989154 - RNA, 19 nt, Artificial Sequence
  Description of Artificial Sequence: Synthetic oligonucleotide
agaaagguaaaggaaguug

SEQ ID NO: 2989155 - RNA, 19 nt, Artificial Sequence
  Description of Artificial Sequence: Synthetic oligonucleotide
auaugagagcuuuacagaa

SEQ ID NO: 2989156 - RNA, 19 nt, Artificial Sequence
  Description of Artificial Sequence: Synthetic oligonucleotide
uucuguuaacuauauuucu

SEQ ID NO: 2989157 - RNA, 19 nt, Artificial Sequence
  Description of Artificial Sequence: Synthetic oligonucleotide
cuaaaucuggugcagcuac

SEQ ID NO: 2989158 - RNA, 19 nt, Artificial Sequence
  Description of Artificial Sequence: Synthetic oligonucleotide
ggugaauuugcacuggaag

SEQ ID NO: 2989159 - RNA, 19 nt, Artificial Sequence
  Description of Artificial Sequence: Synthetic oligonucleotide
uguuaacuauauuucugca

SEQ ID NO: 2989160 - RNA, 19 nt, Artificial Sequence
  Description of Artificial Sequence: Synthetic oligonucleotide
ucucuuugguaaaaguccu

SEQ ID NO: 2989161 - RNA, 19 nt, Artificial Sequence
  Description of Artificial Sequence: Synthetic oligonucleotide
uacuguauuucucuuuggu

SEQ ID NO: 2989162 - RNA, 19 nt, Artificial Sequence
  Description of Artificial Sequence: Synthetic oligonucleotide
uauuucugcauacuguauu

SEQ ID NO: 2989163 - RNA, 19 nt, Artificial Sequence
  Description of Artificial Sequence: Synthetic oligonucleotide
aucuggugcagcuacucgg

SEQ ID NO: 2989164 - RNA, 19 nt, Artificial Sequence
  Description of Artificial Sequence: Synthetic oligonucleotide
gaagaaauaccaguuucug

SEQ ID NO: 2989165 - RNA, 19 nt, Artificial Sequence
  Description of Artificial Sequence: Synthetic oligonucleotide
aaguccucacacuugaaua

SEQ ID NO: 2989166 - RNA, 19 nt, Artificial Sequence
  Description of Artificial Sequence: Synthetic oligonucleotide
uucccaacggugaauuugc

SEQ ID NO: 2989167 - RNA, 19 nt, Artificial Sequence
  Description of Artificial Sequence: Synthetic oligonucleotide
acauauauucccaacggug

SEQ ID NO: 2989168 - RNA, 19 nt, Artificial Sequence
  Description of Artificial Sequence: Synthetic oligonucleotide
aaaucuggugcagcuacuc

SEQ ID NO: 2989169 - RNA, 19 nt, Artificial Sequence
  Description of Artificial Sequence: Synthetic oligonucleotide
aaguaaucugugaagaaaa

SEQ ID NO: 2989170 - RNA, 19 nt, Artificial Sequence
  Description of Artificial Sequence: Synthetic oligonucleotide
guuucuguuaacuauauuu

SEQ ID NO: 2989171 - RNA, 19 nt, Artificial Sequence
  Description of Artificial Sequence: Synthetic oligonucleotide
ugugcugauaccccugugu

SEQ ID NO: 2989172 - RNA, 19 nt, Artificial Sequence
  Description of Artificial Sequence: Synthetic oligonucleotide
uugcaagaagaaauaccag

SEQ ID NO: 2989173 - RNA, 19 nt, Artificial Sequence
  Description of Artificial Sequence: Synthetic oligonucleotide
ucuuugguaaaaguccuca

SEQ ID NO: 2989174 - RNA, 19 nt, Artificial Sequence
  Description of Artificial Sequence: Synthetic oligonucleotide
aagacuaucagcggcucug

SEQ ID NO: 2989175 - RNA, 19 nt, Artificial Sequence
  Description of Artificial Sequence: Synthetic oligonucleotide
ugcagcuacucggaaaugg

SEQ ID NO: 2989176 - RNA, 19 nt, Artificial Sequence
  Description of Artificial Sequence: Synthetic oligonucleotide
gaaaugguaggcgcugucg

SEQ ID NO: 2989177 - RNA, 19 nt, Artificial Sequence
  Description of Artificial Sequence: Synthetic oligonucleotide
auaaaagaaguaaucugug

SEQ ID NO: 2989178 - RNA, 19 nt, Artificial Sequence
  Description of Artificial Sequence: Synthetic oligonucleotide
aguuacaacgucgauaaaa

SEQ ID NO: 2989179 - RNA, 19 nt, Artificial Sequence
  Description of Artificial Sequence: Synthetic oligonucleotide
cauauauucccaacgguga

SEQ ID NO: 2989180 - RNA, 19 nt, Artificial Sequence
  Description of Artificial Sequence: Synthetic oligonucleotide
ugagagcuuuacagaaagg

SEQ ID NO: 2989181 - RNA, 19 nt, Artificial Sequence
  Description of Artificial Sequence: Synthetic oligonucleotide
ugaagaauuccuucagcaa

SEQ ID NO: 2989182 - RNA, 19 nt, Artificial Sequence
  Description of Artificial Sequence: Synthetic oligonucleotide
gugaauuugcacuggaaga

SEQ ID NO: 2989183 - RNA, 19 nt, Artificial Sequence
  Description of Artificial Sequence: Synthetic oligonucleotide
uucugcauacuguauuucu

SEQ ID NO: 2989184 - RNA, 19 nt, Artificial Sequence
  Description of Artificial Sequence: Synthetic oligonucleotide
cuguauuucucuuugguaa

SEQ ID NO: 2989185 - RNA, 19 nt, Artificial Sequence
  Description of Artificial Sequence: Synthetic oligonucleotide
cuguggaaacauauauucc

SEQ ID NO: 2989186 - RNA, 19 nt, Artificial Sequence
  Description of Artificial Sequence: Synthetic oligonucleotide
aaugugcugauaccccugu

SEQ ID NO: 2989187 - RNA, 19 nt, Artificial Sequence
  Description of Artificial Sequence: Synthetic oligonucleotide
uaacuauauuucugcauac

SEQ ID NO: 2989188 - RNA, 19 nt, Artificial Sequence
  Description of Artificial Sequence: Synthetic oligonucleotide
accaguuucuguuaacuau

SEQ ID NO: 2989189 - RNA, 19 nt, Artificial Sequence
  Description of Artificial Sequence: Synthetic oligonucleotide
aacggggccacggggagcc

SEQ ID NO: 2989190 - RNA, 19 nt, Artificial Sequence
  Description of Artificial Sequence: Synthetic oligonucleotide
cuugaauaaauuaguuaca

SEQ ID NO: 2989191 - RNA, 19 nt, Artificial Sequence
  Description of Artificial Sequence: Synthetic oligonucleotide
cugaagaauuccuucagca

SEQ ID NO: 2989192 - RNA, 19 nt, Artificial Sequence
  Description of Artificial Sequence: Synthetic oligonucleotide
ucugcauacuguauuucuc

SEQ ID NO: 2989193 - RNA, 19 nt, Artificial Sequence
  Description of Artificial Sequence: Synthetic oligonucleotide
aaaaggauccguggagcag

SEQ ID NO: 2989194 - RNA, 19 nt, Artificial Sequence
  Description of Artificial Sequence: Synthetic oligonucleotide
uauuucucuuugguaaaag

SEQ ID NO: 2989195 - RNA, 19 nt, Artificial Sequence
  Description of Artificial Sequence: Synthetic oligonucleotide
uguauuucucuuugguaaa

SEQ ID NO: 2989196 - RNA, 19 nt, Artificial Sequence
  Description of Artificial Sequence: Synthetic oligonucleotide
aaaggauccguggagcagu

SEQ ID NO: 2989197 - RNA, 19 nt, Artificial Sequence
  Description of Artificial Sequence: Synthetic oligonucleotide
uggaagacuaucagcggcu

SEQ ID NO: 2989198 - RNA, 19 nt, Artificial Sequence
  Description of Artificial Sequence: Synthetic oligonucleotide
auuaguuacaacgucgaua

SEQ ID NO: 2989199 - RNA, 19 nt, Artificial Sequence
  Description of Artificial Sequence: Synthetic oligonucleotide
aauuaguuacaacgucgau

SEQ ID NO: 2989200 - RNA, 19 nt, Artificial Sequence
  Description of Artificial Sequence: Synthetic oligonucleotide
aacuauauuucugcauacu

SEQ ID NO: 2989201 - RNA, 19 nt, Artificial Sequence
  Description of Artificial Sequence: Synthetic oligonucleotide
aaggcaaaccugaagaauu

SEQ ID NO: 2989202 - RNA, 19 nt, Artificial Sequence
  Description of Artificial Sequence: Synthetic oligonucleotide
cugugaagaaaaucccagc

SEQ ID NO: 2989203 - RNA, 19 nt, Artificial Sequence
  Description of Artificial Sequence: Synthetic oligonucleotide
auacuguauuucucuuugg

SEQ ID NO: 2989204 - RNA, 19 nt, Artificial Sequence
  Description of Artificial Sequence: Synthetic oligonucleotide
gaaguaaucugugaagaaa

SEQ ID NO: 2989205 - RNA, 19 nt, Artificial Sequence
  Description of Artificial Sequence: Synthetic oligonucleotide
uugcacuggaagacuauca

SEQ ID NO: 2989206 - RNA, 19 nt, Artificial Sequence
  Description of Artificial Sequence: Synthetic oligonucleotide
uaugagagcuuuacagaaa

SEQ ID NO: 2989207 - RNA, 19 nt, Artificial Sequence
  Description of Artificial Sequence: Synthetic oligonucleotide
gagcuuuacagaaagguaa

SEQ ID NO: 2989208 - RNA, 19 nt, Artificial Sequence
  Description of Artificial Sequence: Synthetic oligonucleotide
uacucggaaaugguaggcg

SEQ ID NO: 2989209 - RNA, 19 nt, Artificial Sequence
  Description of Artificial Sequence: Synthetic oligonucleotide
aaagguaaaggaaguugca

SEQ ID NO: 2989210 - RNA, 19 nt, Artificial Sequence
  Description of Artificial Sequence: Synthetic oligonucleotide
aaugguaggcgcugucgga

SEQ ID NO: 2989211 - RNA, 19 nt, Artificial Sequence
  Description of Artificial Sequence: Synthetic oligonucleotide
cuuggguucuuucucuuug

SEQ ID NO: 2989212 - RNA, 19 nt, Artificial Sequence
  Description of Artificial Sequence: Synthetic oligonucleotide
agaagaaauaccaguuucu

SEQ ID NO: 2989213 - RNA, 19 nt, Artificial Sequence
  Description of Artificial Sequence: Synthetic oligonucleotide
aagguaaaggaaguugcaa

SEQ ID NO: 2989214 - RNA, 19 nt, Artificial Sequence
  Description of Artificial Sequence: Synthetic oligonucleotide
ucuggugcagcuacucgga

SEQ ID NO: 2989215 - RNA, 19 nt, Artificial Sequence
  Description of Artificial Sequence: Synthetic oligonucleotide
auaccccugugucaucugg

SEQ ID NO: 2989216 - RNA, 19 nt, Artificial Sequence
  Description of Artificial Sequence: Synthetic oligonucleotide
agcuacucggaaaugguag

SEQ ID NO: 2989217 - RNA, 19 nt, Artificial Sequence
  Description of Artificial Sequence: Synthetic oligonucleotide
agaaguaaucugugaagaa

SEQ ID NO: 2989218 - RNA, 19 nt, Artificial Sequence
  Description of Artificial Sequence: Synthetic oligonucleotide
auucccaacggugaauuug

SEQ ID NO: 2989219 - RNA, 19 nt, Artificial Sequence
  Description of Artificial Sequence: Synthetic oligonucleotide
aagaauuccuucagcaaaa

SEQ ID NO: 2989220 - RNA, 19 nt, Artificial Sequence
  Description of Artificial Sequence: Synthetic oligonucleotide
aacggugaauuugcacugg

SEQ ID NO: 2989221 - RNA, 19 nt, Artificial Sequence
  Description of Artificial Sequence: Synthetic oligonucleotide
ucucuuugacuguggaaac

SEQ ID NO: 2989222 - RNA, 19 nt, Artificial Sequence
  Description of Artificial Sequence: Synthetic oligonucleotide
ugguaaaaguccucacacu

SEQ ID NO: 2989223 - RNA, 19 nt, Artificial Sequence
  Description of Artificial Sequence: Synthetic oligonucleotide
gguaaaggaaguugcaaga

SEQ ID NO: 2989224 - RNA, 19 nt, Artificial Sequence
  Description of Artificial Sequence: Synthetic oligonucleotide
guaaucugugaagaaaauc

SEQ ID NO: 2989225 - RNA, 19 nt, Artificial Sequence
  Description of Artificial Sequence: Synthetic oligonucleotide
ucuuugacuguggaaacau

SEQ ID NO: 2989226 - RNA, 19 nt, Artificial Sequence
  Description of Artificial Sequence: Synthetic oligonucleotide
uaccccugugucaucuggg

SEQ ID NO: 2989227 - RNA, 19 nt, Artificial Sequence
  Description of Artificial Sequence: Synthetic oligonucleotide
cuuugguaaaaguccucac

SEQ ID NO: 2989228 - RNA, 19 nt, Artificial Sequence
  Description of Artificial Sequence: Synthetic oligonucleotide
uugacuguggaaacauaua

SEQ ID NO: 2989229 - RNA, 19 nt, Artificial Sequence
  Description of Artificial Sequence: Synthetic oligonucleotide
uggaaacauauauucccaa

SEQ ID NO: 2989230 - RNA, 19 nt, Artificial Sequence
  Description of Artificial Sequence: Synthetic oligonucleotide
ggauccguggagcaguccg

SEQ ID NO: 2989231 - RNA, 19 nt, Artificial Sequence
  Description of Artificial Sequence: Synthetic oligonucleotide
guaaaaguccucacacuug

SEQ ID NO: 2989232 - RNA, 19 nt, Artificial Sequence
  Description of Artificial Sequence: Synthetic oligonucleotide
uaggcgcugucggagaacg

SEQ ID NO: 2989233 - RNA, 19 nt, Artificial Sequence
  Description of Artificial Sequence: Synthetic oligonucleotide
auaccaguuucuguuaacu

SEQ ID NO: 2989234 - RNA, 19 nt, Artificial Sequence
  Description of Artificial Sequence: Synthetic oligonucleotide
auauauucccaacggugaa

SEQ ID NO: 2989235 - RNA, 19 nt, Artificial Sequence
  Description of Artificial Sequence: Synthetic oligonucleotide
ggaaacauauauucccaac

SEQ ID NO: 2989236 - RNA, 19 nt, Artificial Sequence
  Description of Artificial Sequence: Synthetic oligonucleotide
caacggugaauuugcacug

SEQ ID NO: 2989237 - RNA, 19 nt, Artificial Sequence
  Description of Artificial Sequence: Synthetic oligonucleotide
cuccaaaugugcugauacc

SEQ ID NO: 2989238 - RNA, 19 nt, Artificial Sequence
  Description of Artificial Sequence: Synthetic oligonucleotide
gagagcuuuacagaaaggu

SEQ ID NO: 2989239 - RNA, 19 nt, Artificial Sequence
  Description of Artificial Sequence: Synthetic oligonucleotide
uuucucuuugacuguggaa

SEQ ID NO: 2989240 - RNA, 19 nt, Artificial Sequence
  Description of Artificial Sequence: Synthetic oligonucleotide
auggucuuggguucuuucu

SEQ ID NO: 2989241 - RNA, 19 nt, Artificial Sequence
  Description of Artificial Sequence: Synthetic oligonucleotide
cuauauuucugcauacugu

SEQ ID NO: 2989242 - RNA, 19 nt, Artificial Sequence
  Description of Artificial Sequence: Synthetic oligonucleotide
uggucuuggguucuuucuc

SEQ ID NO: 2989243 - RNA, 19 nt, Artificial Sequence
  Description of Artificial Sequence: Synthetic oligonucleotide
uucuuucucuuugacugug

SEQ ID NO: 2989244 - RNA, 19 nt, Artificial Sequence
  Description of Artificial Sequence: Synthetic oligonucleotide
aaaugugcugauaccccug

SEQ ID NO: 2989245 - RNA, 19 nt, Artificial Sequence
  Description of Artificial Sequence: Synthetic oligonucleotide
acagaaagguaaaggaagu

SEQ ID NO: 2989246 - RNA, 19 nt, Artificial Sequence
  Description of Artificial Sequence: Synthetic oligonucleotide
acggggagccuccaaaugu

SEQ ID NO: 2989247 - RNA, 19 nt, Artificial Sequence
  Description of Artificial Sequence: Synthetic oligonucleotide
aaggaaguugcaagaagaa

SEQ ID NO: 2989248 - RNA, 19 nt, Artificial Sequence
  Description of Artificial Sequence: Synthetic oligonucleotide
uaaaucuggugcagcuacu

SEQ ID NO: 2989249 - RNA, 19 nt, Artificial Sequence
  Description of Artificial Sequence: Synthetic oligonucleotide
gaagaaaaucccagcaaaa

SEQ ID NO: 2989250 - RNA, 19 nt, Artificial Sequence
  Description of Artificial Sequence: Synthetic oligonucleotide
cacuugaauaaauuaguua

SEQ ID NO: 2989251 - RNA, 19 nt, Artificial Sequence
  Description of Artificial Sequence: Synthetic oligonucleotide
gaaauaccaguuucuguua

SEQ ID NO: 2989252 - RNA, 19 nt, Artificial Sequence
  Description of Artificial Sequence: Synthetic oligonucleotide
gaaguugcaagaagaaaua

SEQ ID NO: 2989253 - RNA, 19 nt, Artificial Sequence
  Description of Artificial Sequence: Synthetic oligonucleotide
aauuugcacuggaagacua

SEQ ID NO: 2989254 - RNA, 19 nt, Artificial Sequence
  Description of Artificial Sequence: Synthetic oligonucleotide
ugcugauaccccuguguca

SEQ ID NO: 2989255 - RNA, 19 nt, Artificial Sequence
  Description of Artificial Sequence: Synthetic oligonucleotide
gugaagaaaaucccagcaa

SEQ ID NO: 2989256 - RNA, 19 nt, Artificial Sequence
  Description of Artificial Sequence: Synthetic oligonucleotide
cacacuugaauaaauuagu

SEQ ID NO: 2989257 - RNA, 19 nt, Artificial Sequence
  Description of Artificial Sequence: Synthetic oligonucleotide
uuugcacuggaagacuauc

SEQ ID NO: 2989258 - RNA, 19 nt, Artificial Sequence
  Description of Artificial Sequence: Synthetic oligonucleotide
uuggguucuuucucuuuga

SEQ ID NO: 2989259 - RNA, 19 nt, Artificial Sequence
  Description of Artificial Sequence: Synthetic oligonucleotide
gcuacucggaaaugguagg

SEQ ID NO: 2989260 - RNA, 19 nt, Artificial Sequence
  Description of Artificial Sequence: Synthetic oligonucleotide
gagcaguccgcuaaaucug

SEQ ID NO: 2989261 - RNA, 19 nt, Artificial Sequence
  Description of Artificial Sequence: Synthetic oligonucleotide
uggguucuuucucuuugac

SEQ ID NO: 2989262 - RNA, 19 nt, Artificial Sequence
  Description of Artificial Sequence: Synthetic oligonucleotide
uccucacacuugaauaaau

SEQ ID NO: 2989263 - RNA, 19 nt, Artificial Sequence
  Description of Artificial Sequence: Synthetic oligonucleotide
uggagcaguccgcuaaauc

SEQ ID NO: 2989264 - RNA, 19 nt, Artificial Sequence
  Description of Artificial Sequence: Synthetic oligonucleotide
guuaacuauauuucugcau

SEQ ID NO: 2989265 - RNA, 19 nt, Artificial Sequence
  Description of Artificial Sequence: Synthetic oligonucleotide
uccgcuaaaucuggugcag

SEQ ID NO: 2989266 - RNA, 19 nt, Artificial Sequence
  Description of Artificial Sequence: Synthetic oligonucleotide
ugauaccccugugucaucu

SEQ ID NO: 2989267 - RNA, 19 nt, Artificial Sequence
  Description of Artificial Sequence: Synthetic oligonucleotide
aucugugaagaaaauccca

SEQ ID NO: 2989268 - RNA, 19 nt, Artificial Sequence
  Description of Artificial Sequence: Synthetic oligonucleotide
uauauucccaacggugaau

SEQ ID NO: 2989269 - RNA, 19 nt, Artificial Sequence
  Description of Artificial Sequence: Synthetic oligonucleotide
ucggagaacggggccacgg

SEQ ID NO: 2989270 - RNA, 19 nt, Artificial Sequence
  Description of Artificial Sequence: Synthetic oligonucleotide
ccuccaaaugugcugauac

SEQ ID NO: 2989271 - RNA, 19 nt, Artificial Sequence
  Description of Artificial Sequence: Synthetic oligonucleotide
cuacucggaaaugguaggc

SEQ ID NO: 2989272 - RNA, 19 nt, Artificial Sequence
  Description of Artificial Sequence: Synthetic oligonucleotide
ccaaaugugcugauacccc

SEQ ID NO: 2989273 - RNA, 19 nt, Artificial Sequence
  Description of Artificial Sequence: Synthetic oligonucleotide
uaccaguuucuguuaacua

SEQ ID NO: 2989274 - RNA, 19 nt, Artificial Sequence
  Description of Artificial Sequence: Synthetic oligonucleotide
aggcaaaccugaagaauuc

SEQ ID NO: 2989275 - RNA, 19 nt, Artificial Sequence
  Description of Artificial Sequence: Synthetic oligonucleotide
ucggaaaugguaggcgcug

SEQ ID NO: 2989276 - RNA, 19 nt, Artificial Sequence
  Description of Artificial Sequence: Synthetic oligonucleotide
agaacggggccacggggag

SEQ ID NO: 2989277 - RNA, 19 nt, Artificial Sequence
  Description of Artificial Sequence: Synthetic oligonucleotide
ugugucaucugggagucuu

SEQ ID NO: 2989278 - RNA, 19 nt, Artificial Sequence
  Description of Artificial Sequence: Synthetic oligonucleotide
ugucaucugggagucuucu

SEQ ID NO: 2989279 - RNA, 19 nt, Artificial Sequence
  Description of Artificial Sequence: Synthetic oligonucleotide
ugcauacuguauuucucuu

SEQ ID NO: 2989280 - RNA, 19 nt, Artificial Sequence
  Description of Artificial Sequence: Synthetic oligonucleotide
guggaaacauauauuccca

SEQ ID NO: 2989281 - RNA, 19 nt, Artificial Sequence
  Description of Artificial Sequence: Synthetic oligonucleotide
ggagcaguccgcuaaaucu

SEQ ID NO: 2989282 - RNA, 19 nt, Artificial Sequence
  Description of Artificial Sequence: Synthetic oligonucleotide
agcaguccgcuaaaucugg

SEQ ID NO: 2989283 - RNA, 19 nt, Artificial Sequence
  Description of Artificial Sequence: Synthetic oligonucleotide
augguaggcgcugucggag

SEQ ID NO: 2989284 - RNA, 19 nt, Artificial Sequence
  Description of Artificial Sequence: Synthetic oligonucleotide
auauucccaacggugaauu

SEQ ID NO: 2989285 - RNA, 19 nt, Artificial Sequence
  Description of Artificial Sequence: Synthetic oligonucleotide
cauggucuuggguucuuuc

SEQ ID NO: 2989286 - RNA, 19 nt, Artificial Sequence
  Description of Artificial Sequence: Synthetic oligonucleotide
guaaaggaaguugcaagaa

SEQ ID NO: 2989287 - RNA, 19 nt, Artificial Sequence
  Description of Artificial Sequence: Synthetic oligonucleotide
agagcuuuacagaaaggua

SEQ ID NO: 2989288 - RNA, 19 nt, Artificial Sequence
  Description of Artificial Sequence: Synthetic oligonucleotide
ggaaguugcaagaagaaau

SEQ ID NO: 2989289 - RNA, 19 nt, Artificial Sequence
  Description of Artificial Sequence: Synthetic oligonucleotide
aggaaguugcaagaagaaa

SEQ ID NO: 2989290 - RNA, 19 nt, Artificial Sequence
  Description of Artificial Sequence: Synthetic oligonucleotide
ggagaacggggccacgggg

SEQ ID NO: 2989291 - RNA, 19 nt, Artificial Sequence
  Description of Artificial Sequence: Synthetic oligonucleotide
caguccgcuaaaucuggug

SEQ ID NO: 2989292 - RNA, 19 nt, Artificial Sequence
  Description of Artificial Sequence: Synthetic oligonucleotide
ggagccuccaaaugugcug

SEQ ID NO: 2989293 - RNA, 19 nt, Artificial Sequence
  Description of Artificial Sequence: Synthetic oligonucleotide
aguaaucugugaagaaaau

SEQ ID NO: 2989294 - RNA, 19 nt, Artificial Sequence
  Description of Artificial Sequence: Synthetic oligonucleotide
acacuugaauaaauuaguu

SEQ ID NO: 2989295 - RNA, 19 nt, Artificial Sequence
  Description of Artificial Sequence: Synthetic oligonucleotide
cucuuugguaaaaguccuc

SEQ ID NO: 2989296 - RNA, 19 nt, Artificial Sequence
  Description of Artificial Sequence: Synthetic oligonucleotide
uggugcagcuacucggaaa

SEQ ID NO: 2989297 - RNA, 19 nt, Artificial Sequence
  Description of Artificial Sequence: Synthetic oligonucleotide
gauaccccugugucaucug

SEQ ID NO: 2989298 - RNA, 19 nt, Artificial Sequence
  Description of Artificial Sequence: Synthetic oligonucleotide
acggugaauuugcacugga

SEQ ID NO: 2989299 - RNA, 19 nt, Artificial Sequence
  Description of Artificial Sequence: Synthetic oligonucleotide
caucugggagucuucuuca

SEQ ID NO: 2989300 - RNA, 19 nt, Artificial Sequence
  Description of Artificial Sequence: Synthetic oligonucleotide
gcacuggaagacuaucagc

SEQ ID NO: 2989301 - RNA, 19 nt, Artificial Sequence
  Description of Artificial Sequence: Synthetic oligonucleotide
aaggauccguggagcaguc

SEQ ID NO: 2989302 - RNA, 19 nt, Artificial Sequence
  Description of Artificial Sequence: Synthetic oligonucleotide
aguuucuguuaacuauauu

SEQ ID NO: 2989303 - RNA, 19 nt, Artificial Sequence
  Description of Artificial Sequence: Synthetic oligonucleotide
gguaaaaguccucacacuu

SEQ ID NO: 2989304 - RNA, 19 nt, Artificial Sequence
  Description of Artificial Sequence: Synthetic oligonucleotide
ccugaagaauuccuucagc

SEQ ID NO: 2989305 - RNA, 19 nt, Artificial Sequence
  Description of Artificial Sequence: Synthetic oligonucleotide
ugggagucuucuucauggu

SEQ ID NO: 2989306 - RNA, 19 nt, Artificial Sequence
  Description of Artificial Sequence: Synthetic oligonucleotide
agcuuuacagaaagguaaa

SEQ ID NO: 2989307 - RNA, 19 nt, Artificial Sequence
  Description of Artificial Sequence: Synthetic oligonucleotide
gagccuccaaaugugcuga

SEQ ID NO: 2989308 - RNA, 19 nt, Artificial Sequence
  Description of Artificial Sequence: Synthetic oligonucleotide
ucuuggguucuuucucuuu

SEQ ID NO: 2989309 - RNA, 19 nt, Artificial Sequence
  Description of Artificial Sequence: Synthetic oligonucleotide
guccgcuaaaucuggugca

SEQ ID NO: 2989310 - RNA, 19 nt, Artificial Sequence
  Description of Artificial Sequence: Synthetic oligonucleotide
cugcauacuguauuucucu

SEQ ID NO: 2989311 - RNA, 19 nt, Artificial Sequence
  Description of Artificial Sequence: Synthetic oligonucleotide
gauccguggagcaguccgc

SEQ ID NO: 2989312 - RNA, 19 nt, Artificial Sequence
  Description of Artificial Sequence: Synthetic oligonucleotide
ggcgcugucggagaacggg

SEQ ID NO: 2989313 - RNA, 19 nt, Artificial Sequence
  Description of Artificial Sequence: Synthetic oligonucleotide
auauuucugcauacuguau

SEQ ID NO: 2989314 - RNA, 19 nt, Artificial Sequence
  Description of Artificial Sequence: Synthetic oligonucleotide
accccugugucaucuggga

SEQ ID NO: 2989315 - RNA, 19 nt, Artificial Sequence
  Description of Artificial Sequence: Synthetic oligonucleotide
gaauuugcacuggaagacu

SEQ ID NO: 2989316 - RNA, 19 nt, Artificial Sequence
  Description of Artificial Sequence: Synthetic oligonucleotide
gcuuuacagaaagguaaag

SEQ ID NO: 2989317 - RNA, 19 nt, Artificial Sequence
  Description of Artificial Sequence: Synthetic oligonucleotide
ugguaggcgcugucggaga

SEQ ID NO: 2989318 - RNA, 19 nt, Artificial Sequence
  Description of Artificial Sequence: Synthetic oligonucleotide
caaaugugcugauaccccu

SEQ ID NO: 2989319 - RNA, 19 nt, Artificial Sequence
  Description of Artificial Sequence: Synthetic oligonucleotide
gaaggcaaaccugaagaau

SEQ ID NO: 2989320 - RNA, 19 nt, Artificial Sequence
  Description of Artificial Sequence: Synthetic oligonucleotide
ucccaacggugaauuugca

SEQ ID NO: 2989321 - RNA, 19 nt, Artificial Sequence
  Description of Artificial Sequence: Synthetic oligonucleotide
gagaacggggccacgggga

SEQ ID NO: 2989322 - RNA, 19 nt, Artificial Sequence
  Description of Artificial Sequence: Synthetic oligonucleotide
uauucccaacggugaauuu

SEQ ID NO: 2989323 - RNA, 19 nt, Artificial Sequence
  Description of Artificial Sequence: Synthetic oligonucleotide
ggaaggcaaaccugaagaa

SEQ ID NO: 2989324 - RNA, 19 nt, Artificial Sequence
  Description of Artificial Sequence: Synthetic oligonucleotide
ccaacggugaauuugcacu

SEQ ID NO: 2989325 - RNA, 19 nt, Artificial Sequence
  Description of Artificial Sequence: Synthetic oligonucleotide
augugcugauaccccugug

SEQ ID NO: 2989326 - RNA, 19 nt, Artificial Sequence
  Description of Artificial Sequence: Synthetic oligonucleotide
ggcaaaccugaagaauucc

SEQ ID NO: 2989327 - RNA, 19 nt, Artificial Sequence
  Description of Artificial Sequence: Synthetic oligonucleotide
cacggggagccuccaaaug

SEQ ID NO: 2989328 - RNA, 19 nt, Artificial Sequence
  Description of Artificial Sequence: Synthetic oligonucleotide
guauuucucuuugguaaaa

SEQ ID NO: 2989329 - RNA, 19 nt, Artificial Sequence
  Description of Artificial Sequence: Synthetic oligonucleotide
ggagucuucuucauggucu

SEQ ID NO: 2989330 - RNA, 19 nt, Artificial Sequence
  Description of Artificial Sequence: Synthetic oligonucleotide
caaaccugaagaauuccuu

SEQ ID NO: 2989331 - RNA, 19 nt, Artificial Sequence
  Description of Artificial Sequence: Synthetic oligonucleotide
aggauccguggagcagucc

SEQ ID NO: 2989332 - RNA, 19 nt, Artificial Sequence
  Description of Artificial Sequence: Synthetic oligonucleotide
ugucggagaacggggccac

SEQ ID NO: 2989333 - RNA, 19 nt, Artificial Sequence
  Description of Artificial Sequence: Synthetic oligonucleotide
caagaagaaauaccaguuu

SEQ ID NO: 2989334 - RNA, 19 nt, Artificial Sequence
  Description of Artificial Sequence: Synthetic oligonucleotide
uaguuacaacgucgauaaa

SEQ ID NO: 2989335 - RNA, 19 nt, Artificial Sequence
  Description of Artificial Sequence: Synthetic oligonucleotide
auuugcacuggaagacuau

SEQ ID NO: 2989336 - RNA, 19 nt, Artificial Sequence
  Description of Artificial Sequence: Synthetic oligonucleotide
gaagacuaucagcggcucu

SEQ ID NO: 2989337 - RNA, 19 nt, Artificial Sequence
  Description of Artificial Sequence: Synthetic oligonucleotide
cucuuugacuguggaaaca

SEQ ID NO: 2989338 - RNA, 19 nt, Artificial Sequence
  Description of Artificial Sequence: Synthetic oligonucleotide
ggugcagcuacucggaaau

SEQ ID NO: 2989339 - RNA, 19 nt, Artificial Sequence
  Description of Artificial Sequence: Synthetic oligonucleotide
gggagucuucuucaugguc

SEQ ID NO: 2989340 - RNA, 19 nt, Artificial Sequence
  Description of Artificial Sequence: Synthetic oligonucleotide
cuuugacuguggaaacaua

SEQ ID NO: 2989341 - RNA, 19 nt, Artificial Sequence
  Description of Artificial Sequence: Synthetic oligonucleotide
gcugucggagaacggggcc

SEQ ID NO: 2989342 - RNA, 19 nt, Artificial Sequence
  Description of Artificial Sequence: Synthetic oligonucleotide
gacuguggaaacauauauu

SEQ ID NO: 2989343 - RNA, 19 nt, Artificial Sequence
  Description of Artificial Sequence: Synthetic oligonucleotide
ggaaaugguaggcgcuguc

SEQ ID NO: 2989344 - RNA, 19 nt, Artificial Sequence
  Description of Artificial Sequence: Synthetic oligonucleotide
cccaacggugaauuugcac

SEQ ID NO: 2989345 - RNA, 19 nt, Artificial Sequence
  Description of Artificial Sequence: Synthetic oligonucleotide
ccaguuucuguuaacuaua

SEQ ID NO: 2989346 - RNA, 19 nt, Artificial Sequence
  Description of Artificial Sequence: Synthetic oligonucleotide
cucggaaaugguaggcgcu

SEQ ID NO: 2989347 - RNA, 19 nt, Artificial Sequence
  Description of Artificial Sequence: Synthetic oligonucleotide
auccguggagcaguccgcu

SEQ ID NO: 2989348 - RNA, 19 nt, Artificial Sequence
  Description of Artificial Sequence: Synthetic oligonucleotide
gcaagaagaaauaccaguu

SEQ ID NO: 2989349 - RNA, 19 nt, Artificial Sequence
  Description of Artificial Sequence: Synthetic oligonucleotide
cagcuacucggaaauggua

SEQ ID NO: 2989350 - RNA, 19 nt, Artificial Sequence
  Description of Artificial Sequence: Synthetic oligonucleotide
guccucacacuugaauaaa

SEQ ID NO: 2989351 - RNA, 19 nt, Artificial Sequence
  Description of Artificial Sequence: Synthetic oligonucleotide
caguuucuguuaacuauau

SEQ ID NO: 2989352 - RNA, 19 nt, Artificial Sequence
  Description of Artificial Sequence: Synthetic oligonucleotide
gaacggggccacggggagc

SEQ ID NO: 2989353 - RNA, 19 nt, Artificial Sequence
  Description of Artificial Sequence: Synthetic oligonucleotide
ucauggucuuggguucuuu

SEQ ID NO: 2989354 - RNA, 19 nt, Artificial Sequence
  Description of Artificial Sequence: Synthetic oligonucleotide
cugucggagaacggggcca

SEQ ID NO: 2989355 - RNA, 19 nt, Artificial Sequence
  Description of Artificial Sequence: Synthetic oligonucleotide
gcgcugucggagaacgggg

SEQ ID NO: 2989356 - RNA, 19 nt, Artificial Sequence
  Description of Artificial Sequence: Synthetic oligonucleotide
ccugugucaucugggaguc

SEQ ID NO: 2989357 - RNA, 19 nt, Artificial Sequence
  Description of Artificial Sequence: Synthetic oligonucleotide
gcaaaccugaagaauuccu

SEQ ID NO: 2989358 - RNA, 19 nt, Artificial Sequence
  Description of Artificial Sequence: Synthetic oligonucleotide
ggaagacuaucagcggcuc

SEQ ID NO: 2989359 - RNA, 19 nt, Artificial Sequence
  Description of Artificial Sequence: Synthetic oligonucleotide
uccguggagcaguccgcua

SEQ ID NO: 2989360 - RNA, 19 nt, Artificial Sequence
  Description of Artificial Sequence: Synthetic oligonucleotide
guaggcgcugucggagaac

SEQ ID NO: 2989361 - RNA, 19 nt, Artificial Sequence
  Description of Artificial Sequence: Synthetic oligonucleotide
gcugauaccccugugucau

SEQ ID NO: 2989362 - RNA, 19 nt, Artificial Sequence
  Description of Artificial Sequence: Synthetic oligonucleotide
gugcagcuacucggaaaug

SEQ ID NO: 2989363 - RNA, 19 nt, Artificial Sequence
  Description of Artificial Sequence: Synthetic oligonucleotide
agccuccaaaugugcugau

SEQ ID NO: 2989364 - RNA, 19 nt, Artificial Sequence
  Description of Artificial Sequence: Synthetic oligonucleotide
gugucaucugggagucuuc

SEQ ID NO: 2989365 - RNA, 19 nt, Artificial Sequence
  Description of Artificial Sequence: Synthetic oligonucleotide
gucggagaacggggccacg

SEQ ID NO: 2989366 - RNA, 19 nt, Artificial Sequence
  Description of Artificial Sequence: Synthetic oligonucleotide
ccccugugucaucugggag

SEQ ID NO: 2989367 - RNA, 19 nt, Artificial Sequence
  Description of Artificial Sequence: Synthetic oligonucleotide
gguaggcgcugucggagaa

SEQ ID NO: 2989368 - RNA, 19 nt, Artificial Sequence
  Description of Artificial Sequence: Synthetic oligonucleotide
gcauacuguauuucucuuu

SEQ ID NO: 2989369 - RNA, 19 nt, Artificial Sequence
  Description of Artificial Sequence: Synthetic oligonucleotide
gcuaaaucuggugcagcua

SEQ ID NO: 2989370 - RNA, 19 nt, Artificial Sequence
  Description of Artificial Sequence: Synthetic oligonucleotide
cggggagccuccaaaugug

SEQ ID NO: 2989371 - RNA, 19 nt, Artificial Sequence
  Description of Artificial Sequence: Synthetic oligonucleotide
cccugugucaucugggagu

SEQ ID NO: 2989372 - RNA, 19 nt, Artificial Sequence
  Description of Artificial Sequence: Synthetic oligonucleotide
cagaaagguaaaggaaguu

SEQ ID NO: 2989373 - RNA, 19 nt, Artificial Sequence
  Description of Artificial Sequence: Synthetic oligonucleotide
gccacggggagccuccaaa

SEQ ID NO: 2989374 - RNA, 19 nt, Artificial Sequence
  Description of Artificial Sequence: Synthetic oligonucleotide
cgcugucggagaacggggc

SEQ ID NO: 2989375 - RNA, 19 nt, Artificial Sequence
  Description of Artificial Sequence: Synthetic oligonucleotide
cuggugcagcuacucggaa

SEQ ID NO: 2989376 - RNA, 19 nt, Artificial Sequence
  Description of Artificial Sequence: Synthetic oligonucleotide
ccgcuaaaucuggugcagc

SEQ ID NO: 2989377 - RNA, 19 nt, Artificial Sequence
  Description of Artificial Sequence: Synthetic oligonucleotide
aggcgcugucggagaacgg

SEQ ID NO: 2989378 - RNA, 19 nt, Artificial Sequence
  Description of Artificial Sequence: Synthetic oligonucleotide
cggagaacggggccacggg

SEQ ID NO: 2989379 - RNA, 19 nt, Artificial Sequence
  Description of Artificial Sequence: Synthetic oligonucleotide
gcagcuacucggaaauggu

SEQ ID NO: 2989380 - RNA, 19 nt, Artificial Sequence
  Description of Artificial Sequence: Synthetic oligonucleotide
gucaucugggagucuucuu

SEQ ID NO: 2989381 - RNA, 19 nt, Artificial Sequence
  Description of Artificial Sequence: Synthetic oligonucleotide
ccucacacuugaauaaauu

SEQ ID NO: 2989382 - RNA, 19 nt, Artificial Sequence
  Description of Artificial Sequence: Synthetic oligonucleotide
ccguggagcaguccgcuaa

SEQ ID NO: 2989383 - RNA, 19 nt, Artificial Sequence
  Description of Artificial Sequence: Synthetic oligonucleotide
cgcuaaaucuggugcagcu

SEQ ID NO: 2989384 - RNA, 19 nt, Artificial Sequence
  Description of Artificial Sequence: Synthetic oligonucleotide
gggagccuccaaaugugcu

SEQ ID NO: 2989385 - RNA, 19 nt, Artificial Sequence
  Description of Artificial Sequence: Synthetic oligonucleotide
cggugaauuugcacuggaa

SEQ ID NO: 2989386 - RNA, 19 nt, Artificial Sequence
  Description of Artificial Sequence: Synthetic oligonucleotide
guggagcaguccgcuaaau

SEQ ID NO: 2989387 - RNA, 19 nt, Artificial Sequence
  Description of Artificial Sequence: Synthetic oligonucleotide
gccuccaaaugugcugaua

SEQ ID NO: 2989388 - RNA, 19 nt, Artificial Sequence
  Description of Artificial Sequence: Synthetic oligonucleotide
cguggagcaguccgcuaaa

SEQ ID NO: 2989389 - RNA, 19 nt, Artificial Sequence
  Description of Artificial Sequence: Synthetic oligonucleotide
gcaguccgcuaaaucuggu

SEQ ID NO: 2989390 - RNA, 19 nt, Artificial Sequence
  Description of Artificial Sequence: Synthetic oligonucleotide
ccacggggagccuccaaau

SEQ ID NO: 2989391 - RNA, 19 nt, Artificial Sequence
  Description of Artificial Sequence: Synthetic oligonucleotide
ggccacggggagccuccaa

SEQ ID NO: 2989392 - RNA, 19 nt, Artificial Sequence
  Description of Artificial Sequence: Synthetic oligonucleotide
cugugucaucugggagucu

SEQ ID NO: 2989393 - RNA, 19 nt, Artificial Sequence
  Description of Artificial Sequence: Synthetic oligonucleotide
acggggccacggggagccu

SEQ ID NO: 2989394 - RNA, 19 nt, Artificial Sequence
  Description of Artificial Sequence: Synthetic oligonucleotide
cggaaaugguaggcgcugu

SEQ ID NO: 2989395 - RNA, 19 nt, Artificial Sequence
  Description of Artificial Sequence: Synthetic oligonucleotide
gggccacggggagccucca

SEQ ID NO: 2989396 - RNA, 19 nt, Artificial Sequence
  Description of Artificial Sequence: Synthetic oligonucleotide
cggggccacggggagccuc

SEQ ID NO: 2989397 - RNA, 19 nt, Artificial Sequence
  Description of Artificial Sequence: Synthetic oligonucleotide
uugauguccagcaagggca

SEQ ID NO: 2989398 - RNA, 19 nt, Artificial Sequence
  Description of Artificial Sequence: Synthetic oligonucleotide
uuacucaugacaucaguag

SEQ ID NO: 2989399 - RNA, 19 nt, Artificial Sequence
  Description of Artificial Sequence: Synthetic oligonucleotide
ugaugaggaagaaaggccc

SEQ ID NO: 2989400 - RNA, 19 nt, Artificial Sequence
  Description of Artificial Sequence: Synthetic oligonucleotide
ugucguguuacucaugaca

SEQ ID NO: 2989401 - RNA, 19 nt, Artificial Sequence
  Description of Artificial Sequence: Synthetic oligonucleotide
ugcauguacaucaccacag

SEQ ID NO: 2989402 - RNA, 19 nt, Artificial Sequence
  Description of Artificial Sequence: Synthetic oligonucleotide
ugaguggucugcaugagca

SEQ ID NO: 2989403 - RNA, 19 nt, Artificial Sequence
  Description of Artificial Sequence: Synthetic oligonucleotide
uguacaucaccacagccac

SEQ ID NO: 2989404 - RNA, 19 nt, Artificial Sequence
  Description of Artificial Sequence: Synthetic oligonucleotide
auacauggggagcaggugg

SEQ ID NO: 2989405 - RNA, 19 nt, Artificial Sequence
  Description of Artificial Sequence: Synthetic oligonucleotide
uucugcauguacaucacca

SEQ ID NO: 2989406 - RNA, 19 nt, Artificial Sequence
  Description of Artificial Sequence: Synthetic oligonucleotide
aacacauagcccaccaugg

SEQ ID NO: 2989407 - RNA, 19 nt, Artificial Sequence
  Description of Artificial Sequence: Synthetic oligonucleotide
uacucaugacaucaguagc

SEQ ID NO: 2989408 - RNA, 19 nt, Artificial Sequence
  Description of Artificial Sequence: Synthetic oligonucleotide
gucguagcuauacaugggg

SEQ ID NO: 2989409 - RNA, 19 nt, Artificial Sequence
  Description of Artificial Sequence: Synthetic oligonucleotide
gaaaggccccaacacauag

SEQ ID NO: 2989410 - RNA, 19 nt, Artificial Sequence
  Description of Artificial Sequence: Synthetic oligonucleotide
cuugauguccagcaagggc

SEQ ID NO: 2989411 - RNA, 19 nt, Artificial Sequence
  Description of Artificial Sequence: Synthetic oligonucleotide
cauggagucacuguuggcc

SEQ ID NO: 2989412 - RNA, 19 nt, Artificial Sequence
  Description of Artificial Sequence: Synthetic oligonucleotide
agccucauggagcucuucc

SEQ ID NO: 2989413 - RNA, 19 nt, Artificial Sequence
  Description of Artificial Sequence: Synthetic oligonucleotide
accauggagucacuguugg

SEQ ID NO: 2989414 - RNA, 19 nt, Artificial Sequence
  Description of Artificial Sequence: Synthetic oligonucleotide
aagggcacccucuugugcu

SEQ ID NO: 2989415 - RNA, 19 nt, Artificial Sequence
  Description of Artificial Sequence: Synthetic oligonucleotide
acugucguguuacucauga

SEQ ID NO: 2989416 - RNA, 19 nt, Artificial Sequence
  Description of Artificial Sequence: Synthetic oligonucleotide
ucaguagccagauggcuga

SEQ ID NO: 2989417 - RNA, 19 nt, Artificial Sequence
  Description of Artificial Sequence: Synthetic oligonucleotide
gaagaaaggccccaacaca

SEQ ID NO: 2989418 - RNA, 19 nt, Artificial Sequence
  Description of Artificial Sequence: Synthetic oligonucleotide
uacaucaccacagccacca

SEQ ID NO: 2989419 - RNA, 19 nt, Artificial Sequence
  Description of Artificial Sequence: Synthetic oligonucleotide
ucugcaugagcagcggugg

SEQ ID NO: 2989420 - RNA, 19 nt, Artificial Sequence
  Description of Artificial Sequence: Synthetic oligonucleotide
caacacauagcccaccaug

SEQ ID NO: 2989421 - RNA, 19 nt, Artificial Sequence
  Description of Artificial Sequence: Synthetic oligonucleotide
aguggucugcaugagcagc

SEQ ID NO: 2989422 - RNA, 19 nt, Artificial Sequence
  Description of Artificial Sequence: Synthetic oligonucleotide
cauguacaucaccacagcc

SEQ ID NO: 2989423 - RNA, 19 nt, Artificial Sequence
  Description of Artificial Sequence: Synthetic oligonucleotide
ucauggagcucuuccgcgg

SEQ ID NO: 2989424 - RNA, 19 nt, Artificial Sequence
  Description of Artificial Sequence: Synthetic oligonucleotide
aggaagaaaggccccaaca

SEQ ID NO: 2989425 - RNA, 19 nt, Artificial Sequence
  Description of Artificial Sequence: Synthetic oligonucleotide
aagaaaggccccaacacau

SEQ ID NO: 2989426 - RNA, 19 nt, Artificial Sequence
  Description of Artificial Sequence: Synthetic oligonucleotide
aaaggccccaacacauagc

SEQ ID NO: 2989427 - RNA, 19 nt, Artificial Sequence
  Description of Artificial Sequence: Synthetic oligonucleotide
gggucguagcuauacaugg

SEQ ID NO: 2989428 - RNA, 19 nt, Artificial Sequence
  Description of Artificial Sequence: Synthetic oligonucleotide
guagccagauggcugagug

SEQ ID NO: 2989429 - RNA, 19 nt, Artificial Sequence
  Description of Artificial Sequence: Synthetic oligonucleotide
acaucaguagccagauggc

SEQ ID NO: 2989430 - RNA, 19 nt, Artificial Sequence
  Description of Artificial Sequence: Synthetic oligonucleotide
ucugcauguacaucaccac

SEQ ID NO: 2989431 - RNA, 19 nt, Artificial Sequence
  Description of Artificial Sequence: Synthetic oligonucleotide
cucauggagcucuuccgcg

SEQ ID NO: 2989432 - RNA, 19 nt, Artificial Sequence
  Description of Artificial Sequence: Synthetic oligonucleotide
cagacagcaacucuugcuc

SEQ ID NO: 2989433 - RNA, 19 nt, Artificial Sequence
  Description of Artificial Sequence: Synthetic oligonucleotide
gacagcaacucuugcucag

SEQ ID NO: 2989434 - RNA, 19 nt, Artificial Sequence
  Description of Artificial Sequence: Synthetic oligonucleotide
cacauagcccaccauggag

SEQ ID NO: 2989435 - RNA, 19 nt, Artificial Sequence
  Description of Artificial Sequence: Synthetic oligonucleotide
cuugcucagccucauggag

SEQ ID NO: 2989436 - RNA, 19 nt, Artificial Sequence
  Description of Artificial Sequence: Synthetic oligonucleotide
gucuugauguccagcaagg

SEQ ID NO: 2989437 - RNA, 19 nt, Artificial Sequence
  Description of Artificial Sequence: Synthetic oligonucleotide
guagcuauacauggggagc

SEQ ID NO: 2989438 - RNA, 19 nt, Artificial Sequence
  Description of Artificial Sequence: Synthetic oligonucleotide
agcaagggcacccucuugu

SEQ ID NO: 2989439 - RNA, 19 nt, Artificial Sequence
  Description of Artificial Sequence: Synthetic oligonucleotide
ucuugauguccagcaaggg

SEQ ID NO: 2989440 - RNA, 19 nt, Artificial Sequence
  Description of Artificial Sequence: Synthetic oligonucleotide
ucguagcuauacaugggga

SEQ ID NO: 2989441 - RNA, 19 nt, Artificial Sequence
  Description of Artificial Sequence: Synthetic oligonucleotide
ggaagaaaggccccaacac

SEQ ID NO: 2989442 - RNA, 19 nt, Artificial Sequence
  Description of Artificial Sequence: Synthetic oligonucleotide
caugacaucaguagccaga

SEQ ID NO: 2989443 - RNA, 19 nt, Artificial Sequence
  Description of Artificial Sequence: Synthetic oligonucleotide
cucuugugcugguagcugc

SEQ ID NO: 2989444 - RNA, 19 nt, Artificial Sequence
  Description of Artificial Sequence: Synthetic oligonucleotide
gaugaggaagaaaggcccc

SEQ ID NO: 2989445 - RNA, 19 nt, Artificial Sequence
  Description of Artificial Sequence: Synthetic oligonucleotide
ucuugcucagccucaugga

SEQ ID NO: 2989446 - RNA, 19 nt, Artificial Sequence
  Description of Artificial Sequence: Synthetic oligonucleotide
auguacaucaccacagcca

SEQ ID NO: 2989447 - RNA, 19 nt, Artificial Sequence
  Description of Artificial Sequence: Synthetic oligonucleotide
uauacauggggagcaggug

SEQ ID NO: 2989448 - RNA, 19 nt, Artificial Sequence
  Description of Artificial Sequence: Synthetic oligonucleotide
acccucuugugcugguagc

SEQ ID NO: 2989449 - RNA, 19 nt, Artificial Sequence
  Description of Artificial Sequence: Synthetic oligonucleotide
ugugcugguagcugcucug

SEQ ID NO: 2989450 - RNA, 19 nt, Artificial Sequence
  Description of Artificial Sequence: Synthetic oligonucleotide
uacauggggagcagguggu

SEQ ID NO: 2989451 - RNA, 19 nt, Artificial Sequence
  Description of Artificial Sequence: Synthetic oligonucleotide
cugguagcugcucugccag

SEQ ID NO: 2989452 - RNA, 19 nt, Artificial Sequence
  Description of Artificial Sequence: Synthetic oligonucleotide
uagcuauacauggggagca

SEQ ID NO: 2989453 - RNA, 19 nt, Artificial Sequence
  Description of Artificial Sequence: Synthetic oligonucleotide
caucaccacagccaccacc

SEQ ID NO: 2989454 - RNA, 19 nt, Artificial Sequence
  Description of Artificial Sequence: Synthetic oligonucleotide
auggagucacuguuggccu

SEQ ID NO: 2989455 - RNA, 19 nt, Artificial Sequence
  Description of Artificial Sequence: Synthetic oligonucleotide
uagccagauggcugagugg

SEQ ID NO: 2989456 - RNA, 19 nt, Artificial Sequence
  Description of Artificial Sequence: Synthetic oligonucleotide
cuuggggucgcccacguca

SEQ ID NO: 2989457 - RNA, 19 nt, Artificial Sequence
  Description of Artificial Sequence: Synthetic oligonucleotide
uccagcaagggcacccucu

SEQ ID NO: 2989458 - RNA, 19 nt, Artificial Sequence
  Description of Artificial Sequence: Synthetic oligonucleotide
uggcugaguggucugcaug

SEQ ID NO: 2989459 - RNA, 19 nt, Artificial Sequence
  Description of Artificial Sequence: Synthetic oligonucleotide
aucaguagccagauggcug

SEQ ID NO: 2989460 - RNA, 19 nt, Artificial Sequence
  Description of Artificial Sequence: Synthetic oligonucleotide
ucuugugcugguagcugcu

SEQ ID NO: 2989461 - RNA, 19 nt, Artificial Sequence
  Description of Artificial Sequence: Synthetic oligonucleotide
agccagauggcugaguggu

SEQ ID NO: 2989462 - RNA, 19 nt, Artificial Sequence
  Description of Artificial Sequence: Synthetic oligonucleotide
agcaggugguggcgcagcc

SEQ ID NO: 2989463 - RNA, 19 nt, Artificial Sequence
  Description of Artificial Sequence: Synthetic oligonucleotide
uugggcacugucguguuac

SEQ ID NO: 2989464 - RNA, 19 nt, Artificial Sequence
  Description of Artificial Sequence: Synthetic oligonucleotide
ugcucugccagccgcgaac

SEQ ID NO: 2989465 - RNA, 19 nt, Artificial Sequence
  Description of Artificial Sequence: Synthetic oligonucleotide
agacagcaacucuugcuca

SEQ ID NO: 2989466 - RNA, 19 nt, Artificial Sequence
  Description of Artificial Sequence: Synthetic oligonucleotide
acauagcccaccauggagu

SEQ ID NO: 2989467 - RNA, 19 nt, Artificial Sequence
  Description of Artificial Sequence: Synthetic oligonucleotide
uuggggucgcccacgucag

SEQ ID NO: 2989468 - RNA, 19 nt, Artificial Sequence
  Description of Artificial Sequence: Synthetic oligonucleotide
ugcaugagcagcgguggcc

SEQ ID NO: 2989469 - RNA, 19 nt, Artificial Sequence
  Description of Artificial Sequence: Synthetic oligonucleotide
uugugcugguagcugcucu

SEQ ID NO: 2989470 - RNA, 19 nt, Artificial Sequence
  Description of Artificial Sequence: Synthetic oligonucleotide
agauggcugaguggucugc

SEQ ID NO: 2989471 - RNA, 19 nt, Artificial Sequence
  Description of Artificial Sequence: Synthetic oligonucleotide
ucuuccgcggggucguagc

SEQ ID NO: 2989472 - RNA, 19 nt, Artificial Sequence
  Description of Artificial Sequence: Synthetic oligonucleotide
cauggagcucuuccgcggg

SEQ ID NO: 2989473 - RNA, 19 nt, Artificial Sequence
  Description of Artificial Sequence: Synthetic oligonucleotide
cuucugcauguacaucacc

SEQ ID NO: 2989474 - RNA, 19 nt, Artificial Sequence
  Description of Artificial Sequence: Synthetic oligonucleotide
uagcccaccauggagucac

SEQ ID NO: 2989475 - RNA, 19 nt, Artificial Sequence
  Description of Artificial Sequence: Synthetic oligonucleotide
guggucugcaugagcagcg

SEQ ID NO: 2989476 - RNA, 19 nt, Artificial Sequence
  Description of Artificial Sequence: Synthetic oligonucleotide
gaguggucugcaugagcag

SEQ ID NO: 2989477 - RNA, 19 nt, Artificial Sequence
  Description of Artificial Sequence: Synthetic oligonucleotide
aaccaccuuggggucgccc

SEQ ID NO: 2989478 - RNA, 19 nt, Artificial Sequence
  Description of Artificial Sequence: Synthetic oligonucleotide
gaggaagaaaggccccaac

SEQ ID NO: 2989479 - RNA, 19 nt, Artificial Sequence
  Description of Artificial Sequence: Synthetic oligonucleotide
cugaguggucugcaugagc

SEQ ID NO: 2989480 - RNA, 19 nt, Artificial Sequence
  Description of Artificial Sequence: Synthetic oligonucleotide
ucgcccacgucagacagca

SEQ ID NO: 2989481 - RNA, 19 nt, Artificial Sequence
  Description of Artificial Sequence: Synthetic oligonucleotide
cauagcccaccauggaguc

SEQ ID NO: 2989482 - RNA, 19 nt, Artificial Sequence
  Description of Artificial Sequence: Synthetic oligonucleotide
ggccccaacacauagccca

SEQ ID NO: 2989483 - RNA, 19 nt, Artificial Sequence
  Description of Artificial Sequence: Synthetic oligonucleotide
guuacucaugacaucagua

SEQ ID NO: 2989484 - RNA, 19 nt, Artificial Sequence
  Description of Artificial Sequence: Synthetic oligonucleotide
cagcaacucuugcucagcc

SEQ ID NO: 2989485 - RNA, 19 nt, Artificial Sequence
  Description of Artificial Sequence: Synthetic oligonucleotide
ugcugguagcugcucugcc

SEQ ID NO: 2989486 - RNA, 19 nt, Artificial Sequence
  Description of Artificial Sequence: Synthetic oligonucleotide
acacauagcccaccaugga

SEQ ID NO: 2989487 - RNA, 19 nt, Artificial Sequence
  Description of Artificial Sequence: Synthetic oligonucleotide
caagggcacccucuugugc

SEQ ID NO: 2989488 - RNA, 19 nt, Artificial Sequence
  Description of Artificial Sequence: Synthetic oligonucleotide
cugccagccgcgaaccacc

SEQ ID NO: 2989489 - RNA, 19 nt, Artificial Sequence
  Description of Artificial Sequence: Synthetic oligonucleotide
accccgaccagggugauga

SEQ ID NO: 2989490 - RNA, 19 nt, Artificial Sequence
  Description of Artificial Sequence: Synthetic oligonucleotide
guagcugcucugccagccg

SEQ ID NO: 2989491 - RNA, 19 nt, Artificial Sequence
  Description of Artificial Sequence: Synthetic oligonucleotide
gucagacagcaacucuugc

SEQ ID NO: 2989492 - RNA, 19 nt, Artificial Sequence
  Description of Artificial Sequence: Synthetic oligonucleotide
augacaucaguagccagau

SEQ ID NO: 2989493 - RNA, 19 nt, Artificial Sequence
  Description of Artificial Sequence: Synthetic oligonucleotide
ggcacugucguguuacuca

SEQ ID NO: 2989494 - RNA, 19 nt, Artificial Sequence
  Description of Artificial Sequence: Synthetic oligonucleotide
caccauggagucacuguug

SEQ ID NO: 2989495 - RNA, 19 nt, Artificial Sequence
  Description of Artificial Sequence: Synthetic oligonucleotide
gcaacucuugcucagccuc

SEQ ID NO: 2989496 - RNA, 19 nt, Artificial Sequence
  Description of Artificial Sequence: Synthetic oligonucleotide
accaccuuggggucgccca

SEQ ID NO: 2989497 - RNA, 19 nt, Artificial Sequence
  Description of Artificial Sequence: Synthetic oligonucleotide
accaccaccccgaccaggg

SEQ ID NO: 2989498 - RNA, 19 nt, Artificial Sequence
  Description of Artificial Sequence: Synthetic oligonucleotide
cugcauguacaucaccaca

SEQ ID NO: 2989499 - RNA, 19 nt, Artificial Sequence
  Description of Artificial Sequence: Synthetic oligonucleotide
ugguggcgcagccugucca

SEQ ID NO: 2989500 - RNA, 19 nt, Artificial Sequence
  Description of Artificial Sequence: Synthetic oligonucleotide
cacccucuugugcugguag

SEQ ID NO: 2989501 - RNA, 19 nt, Artificial Sequence
  Description of Artificial Sequence: Synthetic oligonucleotide
accagggugaugaggaaga

SEQ ID NO: 2989502 - RNA, 19 nt, Artificial Sequence
  Description of Artificial Sequence: Synthetic oligonucleotide
uggagucacuguuggccug

SEQ ID NO: 2989503 - RNA, 19 nt, Artificial Sequence
  Description of Artificial Sequence: Synthetic oligonucleotide
gagcucuuccgcggggucg

SEQ ID NO: 2989504 - RNA, 19 nt, Artificial Sequence
  Description of Artificial Sequence: Synthetic oligonucleotide
acagcagccccgcggguug

SEQ ID NO: 2989505 - RNA, 19 nt, Artificial Sequence
  Description of Artificial Sequence: Synthetic oligonucleotide
ucugccagccgcgaaccac

SEQ ID NO: 2989506 - RNA, 19 nt, Artificial Sequence
  Description of Artificial Sequence: Synthetic oligonucleotide
cuauacauggggagcaggu

SEQ ID NO: 2989507 - RNA, 19 nt, Artificial Sequence
  Description of Artificial Sequence: Synthetic oligonucleotide
ucguguuacucaugacauc

SEQ ID NO: 2989508 - RNA, 19 nt, Artificial Sequence
  Description of Artificial Sequence: Synthetic oligonucleotide
auggagcucuuccgcgggg

SEQ ID NO: 2989509 - RNA, 19 nt, Artificial Sequence
  Description of Artificial Sequence: Synthetic oligonucleotide
gccucauggagcucuuccg

SEQ ID NO: 2989510 - RNA, 19 nt, Artificial Sequence
  Description of Artificial Sequence: Synthetic oligonucleotide
uggucugcaugagcagcgg

SEQ ID NO: 2989511 - RNA, 19 nt, Artificial Sequence
  Description of Artificial Sequence: Synthetic oligonucleotide
cguagcuauacauggggag

SEQ ID NO: 2989512 - RNA, 19 nt, Artificial Sequence
  Description of Artificial Sequence: Synthetic oligonucleotide
gcagcgguggccucgggag

SEQ ID NO: 2989513 - RNA, 19 nt, Artificial Sequence
  Description of Artificial Sequence: Synthetic oligonucleotide
ugagcagcgguggccucgg

SEQ ID NO: 2989514 - RNA, 19 nt, Artificial Sequence
  Description of Artificial Sequence: Synthetic oligonucleotide
cagccuguccacccgcugc

SEQ ID NO: 2989515 - RNA, 19 nt, Artificial Sequence
  Description of Artificial Sequence: Synthetic oligonucleotide
ggggcauugggcacugucg

SEQ ID NO: 2989516 - RNA, 19 nt, Artificial Sequence
  Description of Artificial Sequence: Synthetic oligonucleotide
ugaggaagaaaggccccaa

SEQ ID NO: 2989517 - RNA, 19 nt, Artificial Sequence
  Description of Artificial Sequence: Synthetic oligonucleotide
augaggaagaaaggcccca

SEQ ID NO: 2989518 - RNA, 19 nt, Artificial Sequence
  Description of Artificial Sequence: Synthetic oligonucleotide
cucaugacaucaguagcca

SEQ ID NO: 2989519 - RNA, 19 nt, Artificial Sequence
  Description of Artificial Sequence: Synthetic oligonucleotide
gcauguacaucaccacagc

SEQ ID NO: 2989520 - RNA, 19 nt, Artificial Sequence
  Description of Artificial Sequence: Synthetic oligonucleotide
acagccaccaccaccccga

SEQ ID NO: 2989521 - RNA, 19 nt, Artificial Sequence
  Description of Artificial Sequence: Synthetic oligonucleotide
gccgcgaaccaccuugggg

SEQ ID NO: 2989522 - RNA, 19 nt, Artificial Sequence
  Description of Artificial Sequence: Synthetic oligonucleotide
guguuacucaugacaucag

SEQ ID NO: 2989523 - RNA, 19 nt, Artificial Sequence
  Description of Artificial Sequence: Synthetic oligonucleotide
ggucguagcuauacauggg

SEQ ID NO: 2989524 - RNA, 19 nt, Artificial Sequence
  Description of Artificial Sequence: Synthetic oligonucleotide
ggucgcccacgucagacag

SEQ ID NO: 2989525 - RNA, 19 nt, Artificial Sequence
  Description of Artificial Sequence: Synthetic oligonucleotide
agcgguggccucgggaggg

SEQ ID NO: 2989526 - RNA, 19 nt, Artificial Sequence
  Description of Artificial Sequence: Synthetic oligonucleotide
uccccugggcucccucccg

SEQ ID NO: 2989527 - RNA, 19 nt, Artificial Sequence
  Description of Artificial Sequence: Synthetic oligonucleotide
uccacccgcugcuucuucu

SEQ ID NO: 2989528 - RNA, 19 nt, Artificial Sequence
  Description of Artificial Sequence: Synthetic oligonucleotide
uccgcggggucguagcuau

SEQ ID NO: 2989529 - RNA, 19 nt, Artificial Sequence
  Description of Artificial Sequence: Synthetic oligonucleotide
gcuauacauggggagcagg

SEQ ID NO: 2989530 - RNA, 19 nt, Artificial Sequence
  Description of Artificial Sequence: Synthetic oligonucleotide
agcuauacauggggagcag

SEQ ID NO: 2989531 - RNA, 19 nt, Artificial Sequence
  Description of Artificial Sequence: Synthetic oligonucleotide
ggcugaguggucugcauga

SEQ ID NO: 2989532 - RNA, 19 nt, Artificial Sequence
  Description of Artificial Sequence: Synthetic oligonucleotide
gcccacgucagacagcaac

SEQ ID NO: 2989533 - RNA, 19 nt, Artificial Sequence
  Description of Artificial Sequence: Synthetic oligonucleotide
agccaccaccaccccgacc

SEQ ID NO: 2989534 - RNA, 19 nt, Artificial Sequence
  Description of Artificial Sequence: Synthetic oligonucleotide
caccaccccgaccagggug

SEQ ID NO: 2989535 - RNA, 19 nt, Artificial Sequence
  Description of Artificial Sequence: Synthetic oligonucleotide
uggcgcagccuguccaccc

SEQ ID NO: 2989536 - RNA, 19 nt, Artificial Sequence
  Description of Artificial Sequence: Synthetic oligonucleotide
cagauggcugaguggucug

SEQ ID NO: 2989537 - RNA, 19 nt, Artificial Sequence
  Description of Artificial Sequence: Synthetic oligonucleotide
agcagcgguggccucggga

SEQ ID NO: 2989538 - RNA, 19 nt, Artificial Sequence
  Description of Artificial Sequence: Synthetic oligonucleotide
gguagcugcucugccagcc

SEQ ID NO: 2989539 - RNA, 19 nt, Artificial Sequence
  Description of Artificial Sequence: Synthetic oligonucleotide
aacucuugcucagccucau

SEQ ID NO: 2989540 - RNA, 19 nt, Artificial Sequence
  Description of Artificial Sequence: Synthetic oligonucleotide
agccuguccacccgcugcu

SEQ ID NO: 2989541 - RNA, 19 nt, Artificial Sequence
  Description of Artificial Sequence: Synthetic oligonucleotide
gauggcugaguggucugca

SEQ ID NO: 2989542 - RNA, 19 nt, Artificial Sequence
  Description of Artificial Sequence: Synthetic oligonucleotide
ccagccgcgaaccaccuug

SEQ ID NO: 2989543 - RNA, 19 nt, Artificial Sequence
  Description of Artificial Sequence: Synthetic oligonucleotide
gucguguuacucaugacau

SEQ ID NO: 2989544 - RNA, 19 nt, Artificial Sequence
  Description of Artificial Sequence: Synthetic oligonucleotide
acgucagacagcaacucuu

SEQ ID NO: 2989545 - RNA, 19 nt, Artificial Sequence
  Description of Artificial Sequence: Synthetic oligonucleotide
ggagucacuguuggccugg

SEQ ID NO: 2989546 - RNA, 19 nt, Artificial Sequence
  Description of Artificial Sequence: Synthetic oligonucleotide
cugucguguuacucaugac

SEQ ID NO: 2989547 - RNA, 19 nt, Artificial Sequence
  Description of Artificial Sequence: Synthetic oligonucleotide
cagccgcgaaccaccuugg

SEQ ID NO: 2989548 - RNA, 19 nt, Artificial Sequence
  Description of Artificial Sequence: Synthetic oligonucleotide
ugguagcugcucugccagc

SEQ ID NO: 2989549 - RNA, 19 nt, Artificial Sequence
  Description of Artificial Sequence: Synthetic oligonucleotide
ggggucguagcuauacaug

SEQ ID NO: 2989550 - RNA, 19 nt, Artificial Sequence
  Description of Artificial Sequence: Synthetic oligonucleotide
gagggcgccuccccugggc

SEQ ID NO: 2989551 - RNA, 19 nt, Artificial Sequence
  Description of Artificial Sequence: Synthetic oligonucleotide
caacucuugcucagccuca

SEQ ID NO: 2989552 - RNA, 19 nt, Artificial Sequence
  Description of Artificial Sequence: Synthetic oligonucleotide
gauguccagcaagggcacc

SEQ ID NO: 2989553 - RNA, 19 nt, Artificial Sequence
  Description of Artificial Sequence: Synthetic oligonucleotide
aggccccaacacauagccc

SEQ ID NO: 2989554 - RNA, 19 nt, Artificial Sequence
  Description of Artificial Sequence: Synthetic oligonucleotide
cugcaugagcagcgguggc

SEQ ID NO: 2989555 - RNA, 19 nt, Artificial Sequence
  Description of Artificial Sequence: Synthetic oligonucleotide
agccgcgaaccaccuuggg

SEQ ID NO: 2989556 - RNA, 19 nt, Artificial Sequence
  Description of Artificial Sequence: Synthetic oligonucleotide
uguccagcaagggcacccu

SEQ ID NO: 2989557 - RNA, 19 nt, Artificial Sequence
  Description of Artificial Sequence: Synthetic oligonucleotide
cacccgcugcuucuucugc

SEQ ID NO: 2989558 - RNA, 19 nt, Artificial Sequence
  Description of Artificial Sequence: Synthetic oligonucleotide
agggcacccucuugugcug

SEQ ID NO: 2989559 - RNA, 19 nt, Artificial Sequence
  Description of Artificial Sequence: Synthetic oligonucleotide
auggcugaguggucugcau

SEQ ID NO: 2989560 - RNA, 19 nt, Artificial Sequence
  Description of Artificial Sequence: Synthetic oligonucleotide
cguguuacucaugacauca

SEQ ID NO: 2989561 - RNA, 19 nt, Artificial Sequence
  Description of Artificial Sequence: Synthetic oligonucleotide
ucgggagggcgccuccccu

SEQ ID NO: 2989562 - RNA, 19 nt, Artificial Sequence
  Description of Artificial Sequence: Synthetic oligonucleotide
uggagcucuuccgcggggu

SEQ ID NO: 2989563 - RNA, 19 nt, Artificial Sequence
  Description of Artificial Sequence: Synthetic oligonucleotide
ccgaccagggugaugagga

SEQ ID NO: 2989564 - RNA, 19 nt, Artificial Sequence
  Description of Artificial Sequence: Synthetic oligonucleotide
ucaccacagccaccaccac

SEQ ID NO: 2989565 - RNA, 19 nt, Artificial Sequence
  Description of Artificial Sequence: Synthetic oligonucleotide
gagucacuguuggccuggg

SEQ ID NO: 2989566 - RNA, 19 nt, Artificial Sequence
  Description of Artificial Sequence: Synthetic oligonucleotide
cacugucguguuacucaug

SEQ ID NO: 2989567 - RNA, 19 nt, Artificial Sequence
  Description of Artificial Sequence: Synthetic oligonucleotide
gugcugguagcugcucugc

SEQ ID NO: 2989568 - RNA, 19 nt, Artificial Sequence
  Description of Artificial Sequence: Synthetic oligonucleotide
cucccucccgccgugcggc

SEQ ID NO: 2989569 - RNA, 19 nt, Artificial Sequence
  Description of Artificial Sequence: Synthetic oligonucleotide
accaccccgaccaggguga

SEQ ID NO: 2989570 - RNA, 19 nt, Artificial Sequence
  Description of Artificial Sequence: Synthetic oligonucleotide
guacaucaccacagccacc

SEQ ID NO: 2989571 - RNA, 19 nt, Artificial Sequence
  Description of Artificial Sequence: Synthetic oligonucleotide
gcugguagcugcucugcca

SEQ ID NO: 2989572 - RNA, 19 nt, Artificial Sequence
  Description of Artificial Sequence: Synthetic oligonucleotide
gagcaggugguggcgcagc

SEQ ID NO: 2989573 - RNA, 19 nt, Artificial Sequence
  Description of Artificial Sequence: Synthetic oligonucleotide
cucgggagggcgccucccc

SEQ ID NO: 2989574 - RNA, 19 nt, Artificial Sequence
  Description of Artificial Sequence: Synthetic oligonucleotide
ugggcacugucguguuacu

SEQ ID NO: 2989575 - RNA, 19 nt, Artificial Sequence
  Description of Artificial Sequence: Synthetic oligonucleotide
ggcauugggcacugucgug

SEQ ID NO: 2989576 - RNA, 19 nt, Artificial Sequence
  Description of Artificial Sequence: Synthetic oligonucleotide
gugguggcgcagccugucc

SEQ ID NO: 2989577 - RNA, 19 nt, Artificial Sequence
  Description of Artificial Sequence: Synthetic oligonucleotide
gcaagggcacccucuugug

SEQ ID NO: 2989578 - RNA, 19 nt, Artificial Sequence
  Description of Artificial Sequence: Synthetic oligonucleotide
cagcgguggccucgggagg

SEQ ID NO: 2989579 - RNA, 19 nt, Artificial Sequence
  Description of Artificial Sequence: Synthetic oligonucleotide
accuuggggucgcccacgu

SEQ ID NO: 2989580 - RNA, 19 nt, Artificial Sequence
  Description of Artificial Sequence: Synthetic oligonucleotide
agggcgccuccccugggcu

SEQ ID NO: 2989581 - RNA, 19 nt, Artificial Sequence
  Description of Artificial Sequence: Synthetic oligonucleotide
ugccagccgcgaaccaccu

SEQ ID NO: 2989582 - RNA, 19 nt, Artificial Sequence
  Description of Artificial Sequence: Synthetic oligonucleotide
cccgacagcagccccgcgg

SEQ ID NO: 2989583 - RNA, 19 nt, Artificial Sequence
  Description of Artificial Sequence: Synthetic oligonucleotide
ggcgcagccuguccacccg

SEQ ID NO: 2989584 - RNA, 19 nt, Artificial Sequence
  Description of Artificial Sequence: Synthetic oligonucleotide
ucagccucauggagcucuu

SEQ ID NO: 2989585 - RNA, 19 nt, Artificial Sequence
  Description of Artificial Sequence: Synthetic oligonucleotide
agcucuuccgcggggucgu

SEQ ID NO: 2989586 - RNA, 19 nt, Artificial Sequence
  Description of Artificial Sequence: Synthetic oligonucleotide
acauggggagcagguggug

SEQ ID NO: 2989587 - RNA, 19 nt, Artificial Sequence
  Description of Artificial Sequence: Synthetic oligonucleotide
auugggcacugucguguua

SEQ ID NO: 2989588 - RNA, 19 nt, Artificial Sequence
  Description of Artificial Sequence: Synthetic oligonucleotide
caccuuggggucgcccacg

SEQ ID NO: 2989589 - RNA, 19 nt, Artificial Sequence
  Description of Artificial Sequence: Synthetic oligonucleotide
cgucagacagcaacucuug

SEQ ID NO: 2989590 - RNA, 19 nt, Artificial Sequence
  Description of Artificial Sequence: Synthetic oligonucleotide
auagcccaccauggaguca

SEQ ID NO: 2989591 - RNA, 19 nt, Artificial Sequence
  Description of Artificial Sequence: Synthetic oligonucleotide
agaaaggccccaacacaua

SEQ ID NO: 2989592 - RNA, 19 nt, Artificial Sequence
  Description of Artificial Sequence: Synthetic oligonucleotide
gcuucuucugcauguacau

SEQ ID NO: 2989593 - RNA, 19 nt, Artificial Sequence
  Description of Artificial Sequence: Synthetic oligonucleotide
gggagggcgccuccccugg

SEQ ID NO: 2989594 - RNA, 19 nt, Artificial Sequence
  Description of Artificial Sequence: Synthetic oligonucleotide
cagcaagggcacccucuug

SEQ ID NO: 2989595 - RNA, 19 nt, Artificial Sequence
  Description of Artificial Sequence: Synthetic oligonucleotide
gguggcgcagccuguccac

SEQ ID NO: 2989596 - RNA, 19 nt, Artificial Sequence
  Description of Artificial Sequence: Synthetic oligonucleotide
caucaguagccagauggcu

SEQ ID NO: 2989597 - RNA, 19 nt, Artificial Sequence
  Description of Artificial Sequence: Synthetic oligonucleotide
caugagcagcgguggccuc

SEQ ID NO: 2989598 - RNA, 19 nt, Artificial Sequence
  Description of Artificial Sequence: Synthetic oligonucleotide
ccauggagucacuguuggc

SEQ ID NO: 2989599 - RNA, 19 nt, Artificial Sequence
  Description of Artificial Sequence: Synthetic oligonucleotide
gugcggccccgacagcagc

SEQ ID NO: 2989600 - RNA, 19 nt, Artificial Sequence
  Description of Artificial Sequence: Synthetic oligonucleotide
cacgucagacagcaacucu

SEQ ID NO: 2989601 - RNA, 19 nt, Artificial Sequence
  Description of Artificial Sequence: Synthetic oligonucleotide
cucuuccgcggggucguag

SEQ ID NO: 2989602 - RNA, 19 nt, Artificial Sequence
  Description of Artificial Sequence: Synthetic oligonucleotide
uggggucgcccacgucaga

SEQ ID NO: 2989603 - RNA, 19 nt, Artificial Sequence
  Description of Artificial Sequence: Synthetic oligonucleotide
guggccucgggagggcgcc

SEQ ID NO: 2989604 - RNA, 19 nt, Artificial Sequence
  Description of Artificial Sequence: Synthetic oligonucleotide
cagggugaugaggaagaaa

SEQ ID NO: 2989605 - RNA, 19 nt, Artificial Sequence
  Description of Artificial Sequence: Synthetic oligonucleotide
gggcauugggcacugucgu

SEQ ID NO: 2989606 - RNA, 19 nt, Artificial Sequence
  Description of Artificial Sequence: Synthetic oligonucleotide
ccgcgaaccaccuuggggu

SEQ ID NO: 2989607 - RNA, 19 nt, Artificial Sequence
  Description of Artificial Sequence: Synthetic oligonucleotide
gcucugccagccgcgaacc

SEQ ID NO: 2989608 - RNA, 19 nt, Artificial Sequence
  Description of Artificial Sequence: Synthetic oligonucleotide
ggggucgcccacgucagac

SEQ ID NO: 2989609 - RNA, 19 nt, Artificial Sequence
  Description of Artificial Sequence: Synthetic oligonucleotide
ggcucccucccgccgugcg

SEQ ID NO: 2989610 - RNA, 19 nt, Artificial Sequence
  Description of Artificial Sequence: Synthetic oligonucleotide
uuccgcggggucguagcua

SEQ ID NO: 2989611 - RNA, 19 nt, Artificial Sequence
  Description of Artificial Sequence: Synthetic oligonucleotide
guccagcaagggcacccuc

SEQ ID NO: 2989612 - RNA, 19 nt, Artificial Sequence
  Description of Artificial Sequence: Synthetic oligonucleotide
gcucccucccgccgugcgg

SEQ ID NO: 2989613 - RNA, 19 nt, Artificial Sequence
  Description of Artificial Sequence: Synthetic oligonucleotide
cccaacacauagcccacca

SEQ ID NO: 2989614 - RNA, 19 nt, Artificial Sequence
  Description of Artificial Sequence: Synthetic oligonucleotide
gcauugggcacugucgugu

SEQ ID NO: 2989615 - RNA, 19 nt, Artificial Sequence
  Description of Artificial Sequence: Synthetic oligonucleotide
gagcagcgguggccucggg

SEQ ID NO: 2989616 - RNA, 19 nt, Artificial Sequence
  Description of Artificial Sequence: Synthetic oligonucleotide
cccgaccagggugaugagg

SEQ ID NO: 2989617 - RNA, 19 nt, Artificial Sequence
  Description of Artificial Sequence: Synthetic oligonucleotide
gucgcccacgucagacagc

SEQ ID NO: 2989618 - RNA, 19 nt, Artificial Sequence
  Description of Artificial Sequence: Synthetic oligonucleotide
uguccacccgcugcuucuu

SEQ ID NO: 2989619 - RNA, 19 nt, Artificial Sequence
  Description of Artificial Sequence: Synthetic oligonucleotide
ccucuugugcugguagcug

SEQ ID NO: 2989620 - RNA, 19 nt, Artificial Sequence
  Description of Artificial Sequence: Synthetic oligonucleotide
ggccccgacagcagccccg

SEQ ID NO: 2989621 - RNA, 19 nt, Artificial Sequence
  Description of Artificial Sequence: Synthetic oligonucleotide
ggagcucuuccgcgggguc

SEQ ID NO: 2989622 - RNA, 19 nt, Artificial Sequence
  Description of Artificial Sequence: Synthetic oligonucleotide
ccugggcucccucccgccg

SEQ ID NO: 2989623 - RNA, 19 nt, Artificial Sequence
  Description of Artificial Sequence: Synthetic oligonucleotide
gggcacccucuugugcugg

SEQ ID NO: 2989624 - RNA, 19 nt, Artificial Sequence
  Description of Artificial Sequence: Synthetic oligonucleotide
gcagccuguccacccgcug

SEQ ID NO: 2989625 - RNA, 19 nt, Artificial Sequence
  Description of Artificial Sequence: Synthetic oligonucleotide
ucccucccgccgugcggcc

SEQ ID NO: 2989626 - RNA, 19 nt, Artificial Sequence
  Description of Artificial Sequence: Synthetic oligonucleotide
ccacccgcugcuucuucug

SEQ ID NO: 2989627 - RNA, 19 nt, Artificial Sequence
  Description of Artificial Sequence: Synthetic oligonucleotide
ggcgccuccccugggcucc

SEQ ID NO: 2989628 - RNA, 19 nt, Artificial Sequence
  Description of Artificial Sequence: Synthetic oligonucleotide
guccacccgcugcuucuuc

SEQ ID NO: 2989629 - RNA, 19 nt, Artificial Sequence
  Description of Artificial Sequence: Synthetic oligonucleotide
gaaccaccuuggggucgcc

SEQ ID NO: 2989630 - RNA, 19 nt, Artificial Sequence
  Description of Artificial Sequence: Synthetic oligonucleotide
ggagggcgccuccccuggg

SEQ ID NO: 2989631 - RNA, 19 nt, Artificial Sequence
  Description of Artificial Sequence: Synthetic oligonucleotide
ccacgucagacagcaacuc

SEQ ID NO: 2989632 - RNA, 19 nt, Artificial Sequence
  Description of Artificial Sequence: Synthetic oligonucleotide
cgccgugcggccccgacag

SEQ ID NO: 2989633 - RNA, 19 nt, Artificial Sequence
  Description of Artificial Sequence: Synthetic oligonucleotide
gggucgcccacgucagaca

SEQ ID NO: 2989634 - RNA, 19 nt, Artificial Sequence
  Description of Artificial Sequence: Synthetic oligonucleotide
ggugguggcgcagccuguc

SEQ ID NO: 2989635 - RNA, 19 nt, Artificial Sequence
  Description of Artificial Sequence: Synthetic oligonucleotide
gguggccucgggagggcgc

SEQ ID NO: 2989636 - RNA, 19 nt, Artificial Sequence
  Description of Artificial Sequence: Synthetic oligonucleotide
cagccaccaccaccccgac

SEQ ID NO: 2989637 - RNA, 19 nt, Artificial Sequence
  Description of Artificial Sequence: Synthetic oligonucleotide
gcacugucguguuacucau

SEQ ID NO: 2989638 - RNA, 19 nt, Artificial Sequence
  Description of Artificial Sequence: Synthetic oligonucleotide
gacagcagccccgcggguu

SEQ ID NO: 2989639 - RNA, 19 nt, Artificial Sequence
  Description of Artificial Sequence: Synthetic oligonucleotide
gggcacugucguguuacuc

SEQ ID NO: 2989640 - RNA, 19 nt, Artificial Sequence
  Description of Artificial Sequence: Synthetic oligonucleotide
cagcagccccgcggguugg

SEQ ID NO: 2989641 - RNA, 19 nt, Artificial Sequence
  Description of Artificial Sequence: Synthetic oligonucleotide
gcaugagcagcgguggccu

SEQ ID NO: 2989642 - RNA, 19 nt, Artificial Sequence
  Description of Artificial Sequence: Synthetic oligonucleotide
cgaaccaccuuggggucgc

SEQ ID NO: 2989643 - RNA, 19 nt, Artificial Sequence
  Description of Artificial Sequence: Synthetic oligonucleotide
cucugccagccgcgaacca

SEQ ID NO: 2989644 - RNA, 19 nt, Artificial Sequence
  Description of Artificial Sequence: Synthetic oligonucleotide
gcgcagccuguccacccgc

SEQ ID NO: 2989645 - RNA, 19 nt, Artificial Sequence
  Description of Artificial Sequence: Synthetic oligonucleotide
gcggggucguagcuauaca

SEQ ID NO: 2989646 - RNA, 19 nt, Artificial Sequence
  Description of Artificial Sequence: Synthetic oligonucleotide
cauugggcacugucguguu

SEQ ID NO: 2989647 - RNA, 19 nt, Artificial Sequence
  Description of Artificial Sequence: Synthetic oligonucleotide
gcccaccauggagucacug

SEQ ID NO: 2989648 - RNA, 19 nt, Artificial Sequence
  Description of Artificial Sequence: Synthetic oligonucleotide
ccagauggcugaguggucu

SEQ ID NO: 2989649 - RNA, 19 nt, Artificial Sequence
  Description of Artificial Sequence: Synthetic oligonucleotide
cuuccgcggggucguagcu

SEQ ID NO: 2989650 - RNA, 19 nt, Artificial Sequence
  Description of Artificial Sequence: Synthetic oligonucleotide
cagccucauggagcucuuc

SEQ ID NO: 2989651 - RNA, 19 nt, Artificial Sequence
  Description of Artificial Sequence: Synthetic oligonucleotide
ccccaacacauagcccacc

SEQ ID NO: 2989652 - RNA, 19 nt, Artificial Sequence
  Description of Artificial Sequence: Synthetic oligonucleotide
cgcggggucguagcuauac

SEQ ID NO: 2989653 - RNA, 19 nt, Artificial Sequence
  Description of Artificial Sequence: Synthetic oligonucleotide
gccccaacacauagcccac

SEQ ID NO: 2989654 - RNA, 19 nt, Artificial Sequence
  Description of Artificial Sequence: Synthetic oligonucleotide
ccgcugcuucuucugcaug

SEQ ID NO: 2989655 - RNA, 19 nt, Artificial Sequence
  Description of Artificial Sequence: Synthetic oligonucleotide
ccucccgccgugcggcccc

SEQ ID NO: 2989656 - RNA, 19 nt, Artificial Sequence
  Description of Artificial Sequence: Synthetic oligonucleotide
cgugcggccccgacagcag

SEQ ID NO: 2989657 - RNA, 19 nt, Artificial Sequence
  Description of Artificial Sequence: Synthetic oligonucleotide
cccugggcucccucccgcc

SEQ ID NO: 2989658 - RNA, 19 nt, Artificial Sequence
  Description of Artificial Sequence: Synthetic oligonucleotide
ccaccauggagucacuguu

SEQ ID NO: 2989659 - RNA, 19 nt, Artificial Sequence
  Description of Artificial Sequence: Synthetic oligonucleotide
ccccugggcucccucccgc

SEQ ID NO: 2989660 - RNA, 19 nt, Artificial Sequence
  Description of Artificial Sequence: Synthetic oligonucleotide
cugcucugccagccgcgaa

SEQ ID NO: 2989661 - RNA, 19 nt, Artificial Sequence
  Description of Artificial Sequence: Synthetic oligonucleotide
cugggcucccucccgccgu

SEQ ID NO: 2989662 - RNA, 19 nt, Artificial Sequence
  Description of Artificial Sequence: Synthetic oligonucleotide
caccccgaccagggugaug

SEQ ID NO: 2989663 - RNA, 19 nt, Artificial Sequence
  Description of Artificial Sequence: Synthetic oligonucleotide
gccucgggagggcgccucc

SEQ ID NO: 2989664 - RNA, 19 nt, Artificial Sequence
  Description of Artificial Sequence: Synthetic oligonucleotide
gcugcucugccagccgcga

SEQ ID NO: 2989665 - RNA, 19 nt, Artificial Sequence
  Description of Artificial Sequence: Synthetic oligonucleotide
gccccgacagcagccccgc

SEQ ID NO: 2989666 - RNA, 19 nt, Artificial Sequence
  Description of Artificial Sequence: Synthetic oligonucleotide
gccagauggcugagugguc

SEQ ID NO: 2989667 - RNA, 19 nt, Artificial Sequence
  Description of Artificial Sequence: Synthetic oligonucleotide
gggcgccuccccugggcuc

SEQ ID NO: 2989668 - RNA, 19 nt, Artificial Sequence
  Description of Artificial Sequence: Synthetic oligonucleotide
ccgugcggccccgacagca

SEQ ID NO: 2989669 - RNA, 19 nt, Artificial Sequence
  Description of Artificial Sequence: Synthetic oligonucleotide
cucccgccgugcggccccg

SEQ ID NO: 2989670 - RNA, 19 nt, Artificial Sequence
  Description of Artificial Sequence: Synthetic oligonucleotide
ccucgggagggcgccuccc

SEQ ID NO: 2989671 - RNA, 19 nt, Artificial Sequence
  Description of Artificial Sequence: Synthetic oligonucleotide
agcccaccauggagucacu

SEQ ID NO: 2989672 - RNA, 19 nt, Artificial Sequence
  Description of Artificial Sequence: Synthetic oligonucleotide
cggggucguagcuauacau

SEQ ID NO: 2989673 - RNA, 19 nt, Artificial Sequence
  Description of Artificial Sequence: Synthetic oligonucleotide
ccuuggggucgcccacguc

SEQ ID NO: 2989674 - RNA, 19 nt, Artificial Sequence
  Description of Artificial Sequence: Synthetic oligonucleotide
ggcacccucuugugcuggu

SEQ ID NO: 2989675 - RNA, 19 nt, Artificial Sequence
  Description of Artificial Sequence: Synthetic oligonucleotide
cccucuugugcugguagcu

SEQ ID NO: 2989676 - RNA, 19 nt, Artificial Sequence
  Description of Artificial Sequence: Synthetic oligonucleotide
ccccgaccagggugaugag

SEQ ID NO: 2989677 - RNA, 19 nt, Artificial Sequence
  Description of Artificial Sequence: Synthetic oligonucleotide
ccaacacauagcccaccau

SEQ ID NO: 2989678 - RNA, 19 nt, Artificial Sequence
  Description of Artificial Sequence: Synthetic oligonucleotide
gccgugcggccccgacagc

SEQ ID NO: 2989679 - RNA, 19 nt, Artificial Sequence
  Description of Artificial Sequence: Synthetic oligonucleotide
gcgguggccucgggagggc

SEQ ID NO: 2989680 - RNA, 19 nt, Artificial Sequence
  Description of Artificial Sequence: Synthetic oligonucleotide
gccuccccugggcucccuc

SEQ ID NO: 2989681 - RNA, 19 nt, Artificial Sequence
  Description of Artificial Sequence: Synthetic oligonucleotide
ggccucgggagggcgccuc

SEQ ID NO: 2989682 - RNA, 19 nt, Artificial Sequence
  Description of Artificial Sequence: Synthetic oligonucleotide
gcaggugguggcgcagccu

SEQ ID NO: 2989683 - RNA, 19 nt, Artificial Sequence
  Description of Artificial Sequence: Synthetic oligonucleotide
ccccgacagcagccccgcg

SEQ ID NO: 2989684 - RNA, 19 nt, Artificial Sequence
  Description of Artificial Sequence: Synthetic oligonucleotide
cccgccgugcggccccgac

SEQ ID NO: 2989685 - RNA, 19 nt, Artificial Sequence
  Description of Artificial Sequence: Synthetic oligonucleotide
ucccgccgugcggccccga

SEQ ID NO: 2989686 - RNA, 19 nt, Artificial Sequence
  Description of Artificial Sequence: Synthetic oligonucleotide
cgguggccucgggagggcg

SEQ ID NO: 2989687 - RNA, 19 nt, Artificial Sequence
  Description of Artificial Sequence: Synthetic oligonucleotide
gggcucccucccgccgugc

SEQ ID NO: 2989688 - RNA, 19 nt, Artificial Sequence
  Description of Artificial Sequence: Synthetic oligonucleotide
gcacccucuugugcuggua

SEQ ID NO: 2989689 - RNA, 19 nt, Artificial Sequence
  Description of Artificial Sequence: Synthetic oligonucleotide
cggccccgacagcagcccc

SEQ ID NO: 2989690 - RNA, 19 nt, Artificial Sequence
  Description of Artificial Sequence: Synthetic oligonucleotide
cgaccagggugaugaggaa

SEQ ID NO: 2989691 - RNA, 19 nt, Artificial Sequence
  Description of Artificial Sequence: Synthetic oligonucleotide
cccucccgccgugcggccc

SEQ ID NO: 2989692 - RNA, 19 nt, Artificial Sequence
  Description of Artificial Sequence: Synthetic oligonucleotide
gcucagccucauggagcuc

SEQ ID NO: 2989693 - RNA, 19 nt, Artificial Sequence
  Description of Artificial Sequence: Synthetic oligonucleotide
ccgccgugcggccccgaca

SEQ ID NO: 2989694 - RNA, 19 nt, Artificial Sequence
  Description of Artificial Sequence: Synthetic oligonucleotide
gcgccuccccugggcuccc

SEQ ID NO: 2989695 - RNA, 19 nt, Artificial Sequence
  Description of Artificial Sequence: Synthetic oligonucleotide
cgcagccuguccacccgcu

SEQ ID NO: 2989696 - RNA, 19 nt, Artificial Sequence
  Description of Artificial Sequence: Synthetic oligonucleotide
ccaccaccccgaccagggu

SEQ ID NO: 2989697 - RNA, 19 nt, Artificial Sequence
  Description of Artificial Sequence: Synthetic oligonucleotide
gccagccgcgaaccaccuu

SEQ ID NO: 2989698 - RNA, 19 nt, Artificial Sequence
  Description of Artificial Sequence: Synthetic oligonucleotide
gcucuuccgcggggucgua

SEQ ID NO: 2989699 - RNA, 19 nt, Artificial Sequence
  Description of Artificial Sequence: Synthetic oligonucleotide
ccgcggggucguagcuaua

SEQ ID NO: 2989700 - RNA, 19 nt, Artificial Sequence
  Description of Artificial Sequence: Synthetic oligonucleotide
cgcccacgucagacagcaa

SEQ ID NO: 2989701 - RNA, 19 nt, Artificial Sequence
  Description of Artificial Sequence: Synthetic oligonucleotide
ccaccccgaccagggugau

SEQ ID NO: 2989702 - RNA, 19 nt, Artificial Sequence
  Description of Artificial Sequence: Synthetic oligonucleotide
ucuguaauaaacuucaccc

SEQ ID NO: 2989703 - RNA, 19 nt, Artificial Sequence
  Description of Artificial Sequence: Synthetic oligonucleotide
aaccacagcacuuuagccc

SEQ ID NO: 2989704 - RNA, 19 nt, Artificial Sequence
  Description of Artificial Sequence: Synthetic oligonucleotide
uuuaaucucuguaauaaac

SEQ ID NO: 2989705 - RNA, 19 nt, Artificial Sequence
  Description of Artificial Sequence: Synthetic oligonucleotide
aauaacgguaagcucggac

SEQ ID NO: 2989706 - RNA, 19 nt, Artificial Sequence
  Description of Artificial Sequence: Synthetic oligonucleotide
aaaccacagcacuuuagcc

SEQ ID NO: 2989707 - RNA, 19 nt, Artificial Sequence
  Description of Artificial Sequence: Synthetic oligonucleotide
gucaaaauggcauaggcug

SEQ ID NO: 2989708 - RNA, 19 nt, Artificial Sequence
  Description of Artificial Sequence: Synthetic oligonucleotide
auaacgguaagcucggacg

SEQ ID NO: 2989709 - RNA, 19 nt, Artificial Sequence
  Description of Artificial Sequence: Synthetic oligonucleotide
agcacuuuagcccagcagg

SEQ ID NO: 2989710 - RNA, 19 nt, Artificial Sequence
  Description of Artificial Sequence: Synthetic oligonucleotide
aaacuucacccucacauuc

SEQ ID NO: 2989711 - RNA, 19 nt, Artificial Sequence
  Description of Artificial Sequence: Synthetic oligonucleotide
aauggcauaggcugguggg

SEQ ID NO: 2989712 - RNA, 19 nt, Artificial Sequence
  Description of Artificial Sequence: Synthetic oligonucleotide
auaaacuucacccucacau

SEQ ID NO: 2989713 - RNA, 19 nt, Artificial Sequence
  Description of Artificial Sequence: Synthetic oligonucleotide
uuaaucucuguaauaaacu

SEQ ID NO: 2989714 - RNA, 19 nt, Artificial Sequence
  Description of Artificial Sequence: Synthetic oligonucleotide
aacgauuccuacucagucg

SEQ ID NO: 2989715 - RNA, 19 nt, Artificial Sequence
  Description of Artificial Sequence: Synthetic oligonucleotide
ggaaauaacgguaagcucg

SEQ ID NO: 2989716 - RNA, 19 nt, Artificial Sequence
  Description of Artificial Sequence: Synthetic oligonucleotide
uguaauaaacuucacccuc

SEQ ID NO: 2989717 - RNA, 19 nt, Artificial Sequence
  Description of Artificial Sequence: Synthetic oligonucleotide
auucccauuuaucugacag

SEQ ID NO: 2989718 - RNA, 19 nt, Artificial Sequence
  Description of Artificial Sequence: Synthetic oligonucleotide
uuuccauugcucuacagga

SEQ ID NO: 2989719 - RNA, 19 nt, Artificial Sequence
  Description of Artificial Sequence: Synthetic oligonucleotide
uauuuaaucucuguaauaa

SEQ ID NO: 2989720 - RNA, 19 nt, Artificial Sequence
  Description of Artificial Sequence: Synthetic oligonucleotide
ucaaaauggcauaggcugg

SEQ ID NO: 2989721 - RNA, 19 nt, Artificial Sequence
  Description of Artificial Sequence: Synthetic oligonucleotide
ucuacaggacuccugaugu

SEQ ID NO: 2989722 - RNA, 19 nt, Artificial Sequence
  Description of Artificial Sequence: Synthetic oligonucleotide
augucuucuguucuucugc

SEQ ID NO: 2989723 - RNA, 19 nt, Artificial Sequence
  Description of Artificial Sequence: Synthetic oligonucleotide
ugcgcagcuggaaauaacg

SEQ ID NO: 2989724 - RNA, 19 nt, Artificial Sequence
  Description of Artificial Sequence: Synthetic oligonucleotide
uuaucugacagccuccaca

SEQ ID NO: 2989725 - RNA, 19 nt, Artificial Sequence
  Description of Artificial Sequence: Synthetic oligonucleotide
aaauggcauaggcuggugg

SEQ ID NO: 2989726 - RNA, 19 nt, Artificial Sequence
  Description of Artificial Sequence: Synthetic oligonucleotide
gaaaccacagcacuuuagc

SEQ ID NO: 2989727 - RNA, 19 nt, Artificial Sequence
  Description of Artificial Sequence: Synthetic oligonucleotide
uugaaagccaucgaggccc

SEQ ID NO: 2989728 - RNA, 19 nt, Artificial Sequence
  Description of Artificial Sequence: Synthetic oligonucleotide
ucagcuagcugcuuggcag

SEQ ID NO: 2989729 - RNA, 19 nt, Artificial Sequence
  Description of Artificial Sequence: Synthetic oligonucleotide
aaugucagcuagcugcuug

SEQ ID NO: 2989730 - RNA, 19 nt, Artificial Sequence
  Description of Artificial Sequence: Synthetic oligonucleotide
cuuuccauugcucuacagg

SEQ ID NO: 2989731 - RNA, 19 nt, Artificial Sequence
  Description of Artificial Sequence: Synthetic oligonucleotide
guuugaaagccaucgaggc

SEQ ID NO: 2989732 - RNA, 19 nt, Artificial Sequence
  Description of Artificial Sequence: Synthetic oligonucleotide
ucuucuguucuucugcagc

SEQ ID NO: 2989733 - RNA, 19 nt, Artificial Sequence
  Description of Artificial Sequence: Synthetic oligonucleotide
uccuggauguugcagcucg

SEQ ID NO: 2989734 - RNA, 19 nt, Artificial Sequence
  Description of Artificial Sequence: Synthetic oligonucleotide
ucugacagccuccacaaac

SEQ ID NO: 2989735 - RNA, 19 nt, Artificial Sequence
  Description of Artificial Sequence: Synthetic oligonucleotide
ugucaaaauggcauaggcu

SEQ ID NO: 2989736 - RNA, 19 nt, Artificial Sequence
  Description of Artificial Sequence: Synthetic oligonucleotide
aaggaugaugugcagggga

SEQ ID NO: 2989737 - RNA, 19 nt, Artificial Sequence
  Description of Artificial Sequence: Synthetic oligonucleotide
uucuucugcagccuggcgc

SEQ ID NO: 2989738 - RNA, 19 nt, Artificial Sequence
  Description of Artificial Sequence: Synthetic oligonucleotide
cucuguaauaaacuucacc

SEQ ID NO: 2989739 - RNA, 19 nt, Artificial Sequence
  Description of Artificial Sequence: Synthetic oligonucleotide
agguuugaaagccaucgag

SEQ ID NO: 2989740 - RNA, 19 nt, Artificial Sequence
  Description of Artificial Sequence: Synthetic oligonucleotide
gaaauaacgguaagcucgg

SEQ ID NO: 2989741 - RNA, 19 nt, Artificial Sequence
  Description of Artificial Sequence: Synthetic oligonucleotide
uguagccaaugucagcuag

SEQ ID NO: 2989742 - RNA, 19 nt, Artificial Sequence
  Description of Artificial Sequence: Synthetic oligonucleotide
gccaaugucagcuagcugc

SEQ ID NO: 2989743 - RNA, 19 nt, Artificial Sequence
  Description of Artificial Sequence: Synthetic oligonucleotide
gugaggagcaucauggagg

SEQ ID NO: 2989744 - RNA, 19 nt, Artificial Sequence
  Description of Artificial Sequence: Synthetic oligonucleotide
cuugccaaggaugaugugc

SEQ ID NO: 2989745 - RNA, 19 nt, Artificial Sequence
  Description of Artificial Sequence: Synthetic oligonucleotide
ccacaaacugucaaaaugg

SEQ ID NO: 2989746 - RNA, 19 nt, Artificial Sequence
  Description of Artificial Sequence: Synthetic oligonucleotide
acuucacccucacauuccc

SEQ ID NO: 2989747 - RNA, 19 nt, Artificial Sequence
  Description of Artificial Sequence: Synthetic oligonucleotide
cugucaaaauggcauaggc

SEQ ID NO: 2989748 - RNA, 19 nt, Artificial Sequence
  Description of Artificial Sequence: Synthetic oligonucleotide
agcccagcagguuugaaag

SEQ ID NO: 2989749 - RNA, 19 nt, Artificial Sequence
  Description of Artificial Sequence: Synthetic oligonucleotide
uaacgguaagcucggacgc

SEQ ID NO: 2989750 - RNA, 19 nt, Artificial Sequence
  Description of Artificial Sequence: Synthetic oligonucleotide
aggucuuguagccaauguc

SEQ ID NO: 2989751 - RNA, 19 nt, Artificial Sequence
  Description of Artificial Sequence: Synthetic oligonucleotide
aacuucacccucacauucc

SEQ ID NO: 2989752 - RNA, 19 nt, Artificial Sequence
  Description of Artificial Sequence: Synthetic oligonucleotide
uugccaaggaugaugugca

SEQ ID NO: 2989753 - RNA, 19 nt, Artificial Sequence
  Description of Artificial Sequence: Synthetic oligonucleotide
uccauugcucuacaggacu

SEQ ID NO: 2989754 - RNA, 19 nt, Artificial Sequence
  Description of Artificial Sequence: Synthetic oligonucleotide
aagcucggacgcuacagag

SEQ ID NO: 2989755 - RNA, 19 nt, Artificial Sequence
  Description of Artificial Sequence: Synthetic oligonucleotide
ugcucuacaggacuccuga

SEQ ID NO: 2989756 - RNA, 19 nt, Artificial Sequence
  Description of Artificial Sequence: Synthetic oligonucleotide
aacugucaaaauggcauag

SEQ ID NO: 2989757 - RNA, 19 nt, Artificial Sequence
  Description of Artificial Sequence: Synthetic oligonucleotide
aggagcaucauggaggcag

SEQ ID NO: 2989758 - RNA, 19 nt, Artificial Sequence
  Description of Artificial Sequence: Synthetic oligonucleotide
aauaaacuucacccucaca

SEQ ID NO: 2989759 - RNA, 19 nt, Artificial Sequence
  Description of Artificial Sequence: Synthetic oligonucleotide
gaacgauuccuacucaguc

SEQ ID NO: 2989760 - RNA, 19 nt, Artificial Sequence
  Description of Artificial Sequence: Synthetic oligonucleotide
cacaaacugucaaaauggc

SEQ ID NO: 2989761 - RNA, 19 nt, Artificial Sequence
  Description of Artificial Sequence: Synthetic oligonucleotide
gauguugcagcucggccgc

SEQ ID NO: 2989762 - RNA, 19 nt, Artificial Sequence
  Description of Artificial Sequence: Synthetic oligonucleotide
uuguccuggauguugcagc

SEQ ID NO: 2989763 - RNA, 19 nt, Artificial Sequence
  Description of Artificial Sequence: Synthetic oligonucleotide
cagagaaggucuuguagcc

SEQ ID NO: 2989764 - RNA, 19 nt, Artificial Sequence
  Description of Artificial Sequence: Synthetic oligonucleotide
gucagaacgauuccuacuc

SEQ ID NO: 2989765 - RNA, 19 nt, Artificial Sequence
  Description of Artificial Sequence: Synthetic oligonucleotide
gacgcuacagagguaaccc

SEQ ID NO: 2989766 - RNA, 19 nt, Artificial Sequence
  Description of Artificial Sequence: Synthetic oligonucleotide
agucuuuccauugcucuac

SEQ ID NO: 2989767 - RNA, 19 nt, Artificial Sequence
  Description of Artificial Sequence: Synthetic oligonucleotide
uaucugacagccuccacaa

SEQ ID NO: 2989768 - RNA, 19 nt, Artificial Sequence
  Description of Artificial Sequence: Synthetic oligonucleotide
cuagcugcuuggcaguugg

SEQ ID NO: 2989769 - RNA, 19 nt, Artificial Sequence
  Description of Artificial Sequence: Synthetic oligonucleotide
aaggucuuguagccaaugu

SEQ ID NO: 2989770 - RNA, 19 nt, Artificial Sequence
  Description of Artificial Sequence: Synthetic oligonucleotide
cuaguccuugccaaggaug

SEQ ID NO: 2989771 - RNA, 19 nt, Artificial Sequence
  Description of Artificial Sequence: Synthetic oligonucleotide
cauuuaucugacagccucc

SEQ ID NO: 2989772 - RNA, 19 nt, Artificial Sequence
  Description of Artificial Sequence: Synthetic oligonucleotide
ggauguugcagcucggccg

SEQ ID NO: 2989773 - RNA, 19 nt, Artificial Sequence
  Description of Artificial Sequence: Synthetic oligonucleotide
aaacugucaaaauggcaua

SEQ ID NO: 2989774 - RNA, 19 nt, Artificial Sequence
  Description of Artificial Sequence: Synthetic oligonucleotide
acagccuccacaaacuguc

SEQ ID NO: 2989775 - RNA, 19 nt, Artificial Sequence
  Description of Artificial Sequence: Synthetic oligonucleotide
uccuugccaaggaugaugu

SEQ ID NO: 2989776 - RNA, 19 nt, Artificial Sequence
  Description of Artificial Sequence: Synthetic oligonucleotide
accacagcacuuuagccca

SEQ ID NO: 2989777 - RNA, 19 nt, Artificial Sequence
  Description of Artificial Sequence: Synthetic oligonucleotide
gguuugaaagccaucgagg

SEQ ID NO: 2989778 - RNA, 19 nt, Artificial Sequence
  Description of Artificial Sequence: Synthetic oligonucleotide
aaagccaucgaggcccuag

SEQ ID NO: 2989779 - RNA, 19 nt, Artificial Sequence
  Description of Artificial Sequence: Synthetic oligonucleotide
auuuaaucucuguaauaaa

SEQ ID NO: 2989780 - RNA, 19 nt, Artificial Sequence
  Description of Artificial Sequence: Synthetic oligonucleotide
caaacugucaaaauggcau

SEQ ID NO: 2989781 - RNA, 19 nt, Artificial Sequence
  Description of Artificial Sequence: Synthetic oligonucleotide
uucccauuuaucugacagc

SEQ ID NO: 2989782 - RNA, 19 nt, Artificial Sequence
  Description of Artificial Sequence: Synthetic oligonucleotide
augucagcuagcugcuugg

SEQ ID NO: 2989783 - RNA, 19 nt, Artificial Sequence
  Description of Artificial Sequence: Synthetic oligonucleotide
uggauguugcagcucggcc

SEQ ID NO: 2989784 - RNA, 19 nt, Artificial Sequence
  Description of Artificial Sequence: Synthetic oligonucleotide
uggaaauaacgguaagcuc

SEQ ID NO: 2989785 - RNA, 19 nt, Artificial Sequence
  Description of Artificial Sequence: Synthetic oligonucleotide
gcagguuugaaagccaucg

SEQ ID NO: 2989786 - RNA, 19 nt, Artificial Sequence
  Description of Artificial Sequence: Synthetic oligonucleotide
ucuuguagccaaugucagc

SEQ ID NO: 2989787 - RNA, 19 nt, Artificial Sequence
  Description of Artificial Sequence: Synthetic oligonucleotide
gcagagaaggucuuguagc

SEQ ID NO: 2989788 - RNA, 19 nt, Artificial Sequence
  Description of Artificial Sequence: Synthetic oligonucleotide
gauuccuacucagucggcc

SEQ ID NO: 2989789 - RNA, 19 nt, Artificial Sequence
  Description of Artificial Sequence: Synthetic oligonucleotide
cucacauucccauuuaucu

SEQ ID NO: 2989790 - RNA, 19 nt, Artificial Sequence
  Description of Artificial Sequence: Synthetic oligonucleotide
ccaaggaugaugugcaggg

SEQ ID NO: 2989791 - RNA, 19 nt, Artificial Sequence
  Description of Artificial Sequence: Synthetic oligonucleotide
acgcuacagagguaacccc

SEQ ID NO: 2989792 - RNA, 19 nt, Artificial Sequence
  Description of Artificial Sequence: Synthetic oligonucleotide
ugcaggggaagucuuucca

SEQ ID NO: 2989793 - RNA, 19 nt, Artificial Sequence
  Description of Artificial Sequence: Synthetic oligonucleotide
cagaacgauuccuacucag

SEQ ID NO: 2989794 - RNA, 19 nt, Artificial Sequence
  Description of Artificial Sequence: Synthetic oligonucleotide
gaagucuuuccauugcucu

SEQ ID NO: 2989795 - RNA, 19 nt, Artificial Sequence
  Description of Artificial Sequence: Synthetic oligonucleotide
ugucuucuguucuucugca

SEQ ID NO: 2989796 - RNA, 19 nt, Artificial Sequence
  Description of Artificial Sequence: Synthetic oligonucleotide
acugucaaaauggcauagg

SEQ ID NO: 2989797 - RNA, 19 nt, Artificial Sequence
  Description of Artificial Sequence: Synthetic oligonucleotide
uaagcucggacgcuacaga

SEQ ID NO: 2989798 - RNA, 19 nt, Artificial Sequence
  Description of Artificial Sequence: Synthetic oligonucleotide
ucagaacgauuccuacuca

SEQ ID NO: 2989799 - RNA, 19 nt, Artificial Sequence
  Description of Artificial Sequence: Synthetic oligonucleotide
uccugaugucuucuguucu

SEQ ID NO: 2989800 - RNA, 19 nt, Artificial Sequence
  Description of Artificial Sequence: Synthetic oligonucleotide
ugucuuguccuggauguug

SEQ ID NO: 2989801 - RNA, 19 nt, Artificial Sequence
  Description of Artificial Sequence: Synthetic oligonucleotide
uucacccucacauucccau

SEQ ID NO: 2989802 - RNA, 19 nt, Artificial Sequence
  Description of Artificial Sequence: Synthetic oligonucleotide
uaaacuucacccucacauu

SEQ ID NO: 2989803 - RNA, 19 nt, Artificial Sequence
  Description of Artificial Sequence: Synthetic oligonucleotide
ugggaccacagaaaccaca

SEQ ID NO: 2989804 - RNA, 19 nt, Artificial Sequence
  Description of Artificial Sequence: Synthetic oligonucleotide
uacaggacuccugaugucu

SEQ ID NO: 2989805 - RNA, 19 nt, Artificial Sequence
  Description of Artificial Sequence: Synthetic oligonucleotide
cucuacaggacuccugaug

SEQ ID NO: 2989806 - RNA, 19 nt, Artificial Sequence
  Description of Artificial Sequence: Synthetic oligonucleotide
ugacagccuccacaaacug

SEQ ID NO: 2989807 - RNA, 19 nt, Artificial Sequence
  Description of Artificial Sequence: Synthetic oligonucleotide
gagaaggucuuguagccaa

SEQ ID NO: 2989808 - RNA, 19 nt, Artificial Sequence
  Description of Artificial Sequence: Synthetic oligonucleotide
aagucuuuccauugcucua

SEQ ID NO: 2989809 - RNA, 19 nt, Artificial Sequence
  Description of Artificial Sequence: Synthetic oligonucleotide
cuggugggaccacagaaac

SEQ ID NO: 2989810 - RNA, 19 nt, Artificial Sequence
  Description of Artificial Sequence: Synthetic oligonucleotide
cuuuagcccagcagguuug

SEQ ID NO: 2989811 - RNA, 19 nt, Artificial Sequence
  Description of Artificial Sequence: Synthetic oligonucleotide
guaauaaacuucacccuca

SEQ ID NO: 2989812 - RNA, 19 nt, Artificial Sequence
  Description of Artificial Sequence: Synthetic oligonucleotide
uuccauugcucuacaggac

SEQ ID NO: 2989813 - RNA, 19 nt, Artificial Sequence
  Description of Artificial Sequence: Synthetic oligonucleotide
acuuuagcccagcagguuu

SEQ ID NO: 2989814 - RNA, 19 nt, Artificial Sequence
  Description of Artificial Sequence: Synthetic oligonucleotide
auuccuacucagucggcca

SEQ ID NO: 2989815 - RNA, 19 nt, Artificial Sequence
  Description of Artificial Sequence: Synthetic oligonucleotide
uuggcaguuggcaugucuu

SEQ ID NO: 2989816 - RNA, 19 nt, Artificial Sequence
  Description of Artificial Sequence: Synthetic oligonucleotide
ggcagagaaggucuuguag

SEQ ID NO: 2989817 - RNA, 19 nt, Artificial Sequence
  Description of Artificial Sequence: Synthetic oligonucleotide
uuggcaugucuuguccugg

SEQ ID NO: 2989818 - RNA, 19 nt, Artificial Sequence
  Description of Artificial Sequence: Synthetic oligonucleotide
guaagcucggacgcuacag

SEQ ID NO: 2989819 - RNA, 19 nt, Artificial Sequence
  Description of Artificial Sequence: Synthetic oligonucleotide
ucggacgcuacagagguaa

SEQ ID NO: 2989820 - RNA, 19 nt, Artificial Sequence
  Description of Artificial Sequence: Synthetic oligonucleotide
uguccuggauguugcagcu

SEQ ID NO: 2989821 - RNA, 19 nt, Artificial Sequence
  Description of Artificial Sequence: Synthetic oligonucleotide
uuuaucugacagccuccac

SEQ ID NO: 2989822 - RNA, 19 nt, Artificial Sequence
  Description of Artificial Sequence: Synthetic oligonucleotide
uaggcuggugggaccacag

SEQ ID NO: 2989823 - RNA, 19 nt, Artificial Sequence
  Description of Artificial Sequence: Synthetic oligonucleotide
agcuggaaauaacgguaag

SEQ ID NO: 2989824 - RNA, 19 nt, Artificial Sequence
  Description of Artificial Sequence: Synthetic oligonucleotide
ugaugucuucuguucuucu

SEQ ID NO: 2989825 - RNA, 19 nt, Artificial Sequence
  Description of Artificial Sequence: Synthetic oligonucleotide
auuuaucugacagccucca

SEQ ID NO: 2989826 - RNA, 19 nt, Artificial Sequence
  Description of Artificial Sequence: Synthetic oligonucleotide
cacagugaggagcaucaug

SEQ ID NO: 2989827 - RNA, 19 nt, Artificial Sequence
  Description of Artificial Sequence: Synthetic oligonucleotide
caguuggcaugucuugucc

SEQ ID NO: 2989828 - RNA, 19 nt, Artificial Sequence
  Description of Artificial Sequence: Synthetic oligonucleotide
aaaauggcauaggcuggug

SEQ ID NO: 2989829 - RNA, 19 nt, Artificial Sequence
  Description of Artificial Sequence: Synthetic oligonucleotide
agaaaccacagcacuuuag

SEQ ID NO: 2989830 - RNA, 19 nt, Artificial Sequence
  Description of Artificial Sequence: Synthetic oligonucleotide
ucucuguaauaaacuucac

SEQ ID NO: 2989831 - RNA, 19 nt, Artificial Sequence
  Description of Artificial Sequence: Synthetic oligonucleotide
ggugggaccacagaaacca

SEQ ID NO: 2989832 - RNA, 19 nt, Artificial Sequence
  Description of Artificial Sequence: Synthetic oligonucleotide
acaaacugucaaaauggca

SEQ ID NO: 2989833 - RNA, 19 nt, Artificial Sequence
  Description of Artificial Sequence: Synthetic oligonucleotide
uggugggaccacagaaacc

SEQ ID NO: 2989834 - RNA, 19 nt, Artificial Sequence
  Description of Artificial Sequence: Synthetic oligonucleotide
ccauuuaucugacagccuc

SEQ ID NO: 2989835 - RNA, 19 nt, Artificial Sequence
  Description of Artificial Sequence: Synthetic oligonucleotide
gucuuguagccaaugucag

SEQ ID NO: 2989836 - RNA, 19 nt, Artificial Sequence
  Description of Artificial Sequence: Synthetic oligonucleotide
uagccaaugucagcuagcu

SEQ ID NO: 2989837 - RNA, 19 nt, Artificial Sequence
  Description of Artificial Sequence: Synthetic oligonucleotide
augaugugcaggggaaguc

SEQ ID NO: 2989838 - RNA, 19 nt, Artificial Sequence
  Description of Artificial Sequence: Synthetic oligonucleotide
ggucuuguagccaauguca

SEQ ID NO: 2989839 - RNA, 19 nt, Artificial Sequence
  Description of Artificial Sequence: Synthetic oligonucleotide
gaaggucuuguagccaaug

SEQ ID NO: 2989840 - RNA, 19 nt, Artificial Sequence
  Description of Artificial Sequence: Synthetic oligonucleotide
cuuguagccaaugucagcu

SEQ ID NO: 2989841 - RNA, 19 nt, Artificial Sequence
  Description of Artificial Sequence: Synthetic oligonucleotide
uuccuacucagucggccac

SEQ ID NO: 2989842 - RNA, 19 nt, Artificial Sequence
  Description of Artificial Sequence: Synthetic oligonucleotide
uggcaguuggcaugucuug

SEQ ID NO: 2989843 - RNA, 19 nt, Artificial Sequence
  Description of Artificial Sequence: Synthetic oligonucleotide
uagcccagcagguuugaaa

SEQ ID NO: 2989844 - RNA, 19 nt, Artificial Sequence
  Description of Artificial Sequence: Synthetic oligonucleotide
cuuguccuggauguugcag

SEQ ID NO: 2989845 - RNA, 19 nt, Artificial Sequence
  Description of Artificial Sequence: Synthetic oligonucleotide
caugucuuguccuggaugu

SEQ ID NO: 2989846 - RNA, 19 nt, Artificial Sequence
  Description of Artificial Sequence: Synthetic oligonucleotide
cauggaggcagagaagguc

SEQ ID NO: 2989847 - RNA, 19 nt, Artificial Sequence
  Description of Artificial Sequence: Synthetic oligonucleotide
aagccaucgaggcccuagu

SEQ ID NO: 2989848 - RNA, 19 nt, Artificial Sequence
  Description of Artificial Sequence: Synthetic oligonucleotide
auggaggcagagaaggucu

SEQ ID NO: 2989849 - RNA, 19 nt, Artificial Sequence
  Description of Artificial Sequence: Synthetic oligonucleotide
uugcucuacaggacuccug

SEQ ID NO: 2989850 - RNA, 19 nt, Artificial Sequence
  Description of Artificial Sequence: Synthetic oligonucleotide
acagaaaccacagcacuuu

SEQ ID NO: 2989851 - RNA, 19 nt, Artificial Sequence
  Description of Artificial Sequence: Synthetic oligonucleotide
agcucggccgcgucagaac

SEQ ID NO: 2989852 - RNA, 19 nt, Artificial Sequence
  Description of Artificial Sequence: Synthetic oligonucleotide
acauucccauuuaucugac

SEQ ID NO: 2989853 - RNA, 19 nt, Artificial Sequence
  Description of Artificial Sequence: Synthetic oligonucleotide
cauugcucuacaggacucc

SEQ ID NO: 2989854 - RNA, 19 nt, Artificial Sequence
  Description of Artificial Sequence: Synthetic oligonucleotide
cugcuuggcaguuggcaug

SEQ ID NO: 2989855 - RNA, 19 nt, Artificial Sequence
  Description of Artificial Sequence: Synthetic oligonucleotide
gcuggaaauaacgguaagc

SEQ ID NO: 2989856 - RNA, 19 nt, Artificial Sequence
  Description of Artificial Sequence: Synthetic oligonucleotide
acuccugaugucuucuguu

SEQ ID NO: 2989857 - RNA, 19 nt, Artificial Sequence
  Description of Artificial Sequence: Synthetic oligonucleotide
ugugcaggggaagucuuuc

SEQ ID NO: 2989858 - RNA, 19 nt, Artificial Sequence
  Description of Artificial Sequence: Synthetic oligonucleotide
agaacgauuccuacucagu

SEQ ID NO: 2989859 - RNA, 19 nt, Artificial Sequence
  Description of Artificial Sequence: Synthetic oligonucleotide
gucuucuguucuucugcag

SEQ ID NO: 2989860 - RNA, 19 nt, Artificial Sequence
  Description of Artificial Sequence: Synthetic oligonucleotide
cagcacuuuagcccagcag

SEQ ID NO: 2989861 - RNA, 19 nt, Artificial Sequence
  Description of Artificial Sequence: Synthetic oligonucleotide
cuguaauaaacuucacccu

SEQ ID NO: 2989862 - RNA, 19 nt, Artificial Sequence
  Description of Artificial Sequence: Synthetic oligonucleotide
agccaucgaggcccuaguc

SEQ ID NO: 2989863 - RNA, 19 nt, Artificial Sequence
  Description of Artificial Sequence: Synthetic oligonucleotide
guccuugccaaggaugaug

SEQ ID NO: 2989864 - RNA, 19 nt, Artificial Sequence
  Description of Artificial Sequence: Synthetic oligonucleotide
gucuuguccuggauguugc

SEQ ID NO: 2989865 - RNA, 19 nt, Artificial Sequence
  Description of Artificial Sequence: Synthetic oligonucleotide
guagccaaugucagcuagc

SEQ ID NO: 2989866 - RNA, 19 nt, Artificial Sequence
  Description of Artificial Sequence: Synthetic oligonucleotide
ugaaagccaucgaggcccu

SEQ ID NO: 2989867 - RNA, 19 nt, Artificial Sequence
  Description of Artificial Sequence: Synthetic oligonucleotide
aacgguaagcucggacgcu

SEQ ID NO: 2989868 - RNA, 19 nt, Artificial Sequence
  Description of Artificial Sequence: Synthetic oligonucleotide
gcaugucuuguccuggaug

SEQ ID NO: 2989869 - RNA, 19 nt, Artificial Sequence
  Description of Artificial Sequence: Synthetic oligonucleotide
ucuuguccuggauguugca

SEQ ID NO: 2989870 - RNA, 19 nt, Artificial Sequence
  Description of Artificial Sequence: Synthetic oligonucleotide
caaggaugaugugcagggg

SEQ ID NO: 2989871 - RNA, 19 nt, Artificial Sequence
  Description of Artificial Sequence: Synthetic oligonucleotide
gccaucgaggcccuagucc

SEQ ID NO: 2989872 - RNA, 19 nt, Artificial Sequence
  Description of Artificial Sequence: Synthetic oligonucleotide
ugcagcucggccgcgucag

SEQ ID NO: 2989873 - RNA, 19 nt, Artificial Sequence
  Description of Artificial Sequence: Synthetic oligonucleotide
ugccaaggaugaugugcag

SEQ ID NO: 2989874 - RNA, 19 nt, Artificial Sequence
  Description of Artificial Sequence: Synthetic oligonucleotide
agcucggacgcuacagagg

SEQ ID NO: 2989875 - RNA, 19 nt, Artificial Sequence
  Description of Artificial Sequence: Synthetic oligonucleotide
acagcacuuuagcccagca

SEQ ID NO: 2989876 - RNA, 19 nt, Artificial Sequence
  Description of Artificial Sequence: Synthetic oligonucleotide
agcugcuuggcaguuggca

SEQ ID NO: 2989877 - RNA, 19 nt, Artificial Sequence
  Description of Artificial Sequence: Synthetic oligonucleotide
agagaaggucuuguagcca

SEQ ID NO: 2989878 - RNA, 19 nt, Artificial Sequence
  Description of Artificial Sequence: Synthetic oligonucleotide
ugcuuggcaguuggcaugu

SEQ ID NO: 2989879 - RNA, 19 nt, Artificial Sequence
  Description of Artificial Sequence: Synthetic oligonucleotide
auugcucuacaggacuccu

SEQ ID NO: 2989880 - RNA, 19 nt, Artificial Sequence
  Description of Artificial Sequence: Synthetic oligonucleotide
gaggcccuaguccuugcca

SEQ ID NO: 2989881 - RNA, 19 nt, Artificial Sequence
  Description of Artificial Sequence: Synthetic oligonucleotide
uggcaugucuuguccugga

SEQ ID NO: 2989882 - RNA, 19 nt, Artificial Sequence
  Description of Artificial Sequence: Synthetic oligonucleotide
cuggauguugcagcucggc

SEQ ID NO: 2989883 - RNA, 19 nt, Artificial Sequence
  Description of Artificial Sequence: Synthetic oligonucleotide
gaugaugugcaggggaagu

SEQ ID NO: 2989884 - RNA, 19 nt, Artificial Sequence
  Description of Artificial Sequence: Synthetic oligonucleotide
aaauaacgguaagcucgga

SEQ ID NO: 2989885 - RNA, 19 nt, Artificial Sequence
  Description of Artificial Sequence: Synthetic oligonucleotide
uggcauaggcuggugggac

SEQ ID NO: 2989886 - RNA, 19 nt, Artificial Sequence
  Description of Artificial Sequence: Synthetic oligonucleotide
agcagguuugaaagccauc

SEQ ID NO: 2989887 - RNA, 19 nt, Artificial Sequence
  Description of Artificial Sequence: Synthetic oligonucleotide
ggggaagucuuuccauugc

SEQ ID NO: 2989888 - RNA, 19 nt, Artificial Sequence
  Description of Artificial Sequence: Synthetic oligonucleotide
gccaaggaugaugugcagg

SEQ ID NO: 2989889 - RNA, 19 nt, Artificial Sequence
  Description of Artificial Sequence: Synthetic oligonucleotide
cugaugucuucuguucuuc

SEQ ID NO: 2989890 - RNA, 19 nt, Artificial Sequence
  Description of Artificial Sequence: Synthetic oligonucleotide
uuuagcccagcagguuuga

SEQ ID NO: 2989891 - RNA, 19 nt, Artificial Sequence
  Description of Artificial Sequence: Synthetic oligonucleotide
agcaucauggaggcagaga

SEQ ID NO: 2989892 - RNA, 19 nt, Artificial Sequence
  Description of Artificial Sequence: Synthetic oligonucleotide
ugucagcuagcugcuuggc

SEQ ID NO: 2989893 - RNA, 19 nt, Artificial Sequence
  Description of Artificial Sequence: Synthetic oligonucleotide
gugcaggggaagucuuucc

SEQ ID NO: 2989894 - RNA, 19 nt, Artificial Sequence
  Description of Artificial Sequence: Synthetic oligonucleotide
agccaaugucagcuagcug

SEQ ID NO: 2989895 - RNA, 19 nt, Artificial Sequence
  Description of Artificial Sequence: Synthetic oligonucleotide
uggcgccuggcacugcgca

SEQ ID NO: 2989896 - RNA, 19 nt, Artificial Sequence
  Description of Artificial Sequence: Synthetic oligonucleotide
gcucggccgcgucagaacg

SEQ ID NO: 2989897 - RNA, 19 nt, Artificial Sequence
  Description of Artificial Sequence: Synthetic oligonucleotide
agccuccacaaacugucaa

SEQ ID NO: 2989898 - RNA, 19 nt, Artificial Sequence
  Description of Artificial Sequence: Synthetic oligonucleotide
aggcccuaguccuugccaa

SEQ ID NO: 2989899 - RNA, 19 nt, Artificial Sequence
  Description of Artificial Sequence: Synthetic oligonucleotide
cuacaggacuccugauguc

SEQ ID NO: 2989900 - RNA, 19 nt, Artificial Sequence
  Description of Artificial Sequence: Synthetic oligonucleotide
guacacagugaggagcauc

SEQ ID NO: 2989901 - RNA, 19 nt, Artificial Sequence
  Description of Artificial Sequence: Synthetic oligonucleotide
cccagcagguuugaaagcc

SEQ ID NO: 2989902 - RNA, 19 nt, Artificial Sequence
  Description of Artificial Sequence: Synthetic oligonucleotide
aggacuccugaugucuucu

SEQ ID NO: 2989903 - RNA, 19 nt, Artificial Sequence
  Description of Artificial Sequence: Synthetic oligonucleotide
uugcagcucggccgcguca

SEQ ID NO: 2989904 - RNA, 19 nt, Artificial Sequence
  Description of Artificial Sequence: Synthetic oligonucleotide
uuguagccaaugucagcua

SEQ ID NO: 2989905 - RNA, 19 nt, Artificial Sequence
  Description of Artificial Sequence: Synthetic oligonucleotide
aggaugaugugcaggggaa

SEQ ID NO: 2989906 - RNA, 19 nt, Artificial Sequence
  Description of Artificial Sequence: Synthetic oligonucleotide
cugcgcagcuggaaauaac

SEQ ID NO: 2989907 - RNA, 19 nt, Artificial Sequence
  Description of Artificial Sequence: Synthetic oligonucleotide
ugcagccuggcgccuggca

SEQ ID NO: 2989908 - RNA, 19 nt, Artificial Sequence
  Description of Artificial Sequence: Synthetic oligonucleotide
auggcauaggcugguggga

SEQ ID NO: 2989909 - RNA, 19 nt, Artificial Sequence
  Description of Artificial Sequence: Synthetic oligonucleotide
cugacagccuccacaaacu

SEQ ID NO: 2989910 - RNA, 19 nt, Artificial Sequence
  Description of Artificial Sequence: Synthetic oligonucleotide
aucgaggcccuaguccuug

SEQ ID NO: 2989911 - RNA, 19 nt, Artificial Sequence
  Description of Artificial Sequence: Synthetic oligonucleotide
ccucacauucccauuuauc

SEQ ID NO: 2989912 - RNA, 19 nt, Artificial Sequence
  Description of Artificial Sequence: Synthetic oligonucleotide
gacuccugaugucuucugu

SEQ ID NO: 2989913 - RNA, 19 nt, Artificial Sequence
  Description of Artificial Sequence: Synthetic oligonucleotide
ggacgcuacagagguaacc

SEQ ID NO: 2989914 - RNA, 19 nt, Artificial Sequence
  Description of Artificial Sequence: Synthetic oligonucleotide
caggacuccugaugucuuc

SEQ ID NO: 2989915 - RNA, 19 nt, Artificial Sequence
  Description of Artificial Sequence: Synthetic oligonucleotide
cagguuugaaagccaucga

SEQ ID NO: 2989916 - RNA, 19 nt, Artificial Sequence
  Description of Artificial Sequence: Synthetic oligonucleotide
uagcugcuuggcaguuggc

SEQ ID NO: 2989917 - RNA, 19 nt, Artificial Sequence
  Description of Artificial Sequence: Synthetic oligonucleotide
cccguacacagugaggagc

SEQ ID NO: 2989918 - RNA, 19 nt, Artificial Sequence
  Description of Artificial Sequence: Synthetic oligonucleotide
ggaugaugugcaggggaag

SEQ ID NO: 2989919 - RNA, 19 nt, Artificial Sequence
  Description of Artificial Sequence: Synthetic oligonucleotide
ggaagucuuuccauugcuc

SEQ ID NO: 2989920 - RNA, 19 nt, Artificial Sequence
  Description of Artificial Sequence: Synthetic oligonucleotide
ucacccucacauucccauu

SEQ ID NO: 2989921 - RNA, 19 nt, Artificial Sequence
  Description of Artificial Sequence: Synthetic oligonucleotide
ggcauaggcuggugggacc

SEQ ID NO: 2989922 - RNA, 19 nt, Artificial Sequence
  Description of Artificial Sequence: Synthetic oligonucleotide
gcgcagcuggaaauaacgg

SEQ ID NO: 2989923 - RNA, 19 nt, Artificial Sequence
  Description of Artificial Sequence: Synthetic oligonucleotide
acugcgcagcuggaaauaa

SEQ ID NO: 2989924 - RNA, 19 nt, Artificial Sequence
  Description of Artificial Sequence: Synthetic oligonucleotide
ggaccacagaaaccacagc

SEQ ID NO: 2989925 - RNA, 19 nt, Artificial Sequence
  Description of Artificial Sequence: Synthetic oligonucleotide
gaggcagagaaggucuugu

SEQ ID NO: 2989926 - RNA, 19 nt, Artificial Sequence
  Description of Artificial Sequence: Synthetic oligonucleotide
gucuuuccauugcucuaca

SEQ ID NO: 2989927 - RNA, 19 nt, Artificial Sequence
  Description of Artificial Sequence: Synthetic oligonucleotide
gcaguuggcaugucuuguc

SEQ ID NO: 2989928 - RNA, 19 nt, Artificial Sequence
  Description of Artificial Sequence: Synthetic oligonucleotide
ggcuggugggaccacagaa

SEQ ID NO: 2989929 - RNA, 19 nt, Artificial Sequence
  Description of Artificial Sequence: Synthetic oligonucleotide
aggcagagaaggucuugua

SEQ ID NO: 2989930 - RNA, 19 nt, Artificial Sequence
  Description of Artificial Sequence: Synthetic oligonucleotide
auaggcuggugggaccaca

SEQ ID NO: 2989931 - RNA, 19 nt, Artificial Sequence
  Description of Artificial Sequence: Synthetic oligonucleotide
ucgaggcccuaguccuugc

SEQ ID NO: 2989932 - RNA, 19 nt, Artificial Sequence
  Description of Artificial Sequence: Synthetic oligonucleotide
gcgucagaacgauuccuac

SEQ ID NO: 2989933 - RNA, 19 nt, Artificial Sequence
  Description of Artificial Sequence: Synthetic oligonucleotide
cauucccauuuaucugaca

SEQ ID NO: 2989934 - RNA, 19 nt, Artificial Sequence
  Description of Artificial Sequence: Synthetic oligonucleotide
cuuggcaguuggcaugucu

SEQ ID NO: 2989935 - RNA, 19 nt, Artificial Sequence
  Description of Artificial Sequence: Synthetic oligonucleotide
gcucggacgcuacagaggu

SEQ ID NO: 2989936 - RNA, 19 nt, Artificial Sequence
  Description of Artificial Sequence: Synthetic oligonucleotide
ggccgcgucagaacgauuc

SEQ ID NO: 2989937 - RNA, 19 nt, Artificial Sequence
  Description of Artificial Sequence: Synthetic oligonucleotide
ccauugcucuacaggacuc

SEQ ID NO: 2989938 - RNA, 19 nt, Artificial Sequence
  Description of Artificial Sequence: Synthetic oligonucleotide
cuucacccucacauuccca

SEQ ID NO: 2989939 - RNA, 19 nt, Artificial Sequence
  Description of Artificial Sequence: Synthetic oligonucleotide
ggacuccugaugucuucug

SEQ ID NO: 2989940 - RNA, 19 nt, Artificial Sequence
  Description of Artificial Sequence: Synthetic oligonucleotide
acccucacauucccauuua

SEQ ID NO: 2989941 - RNA, 19 nt, Artificial Sequence
  Description of Artificial Sequence: Synthetic oligonucleotide
gcccuaguccuugccaagg

SEQ ID NO: 2989942 - RNA, 19 nt, Artificial Sequence
  Description of Artificial Sequence: Synthetic oligonucleotide
caaaauggcauaggcuggu

SEQ ID NO: 2989943 - RNA, 19 nt, Artificial Sequence
  Description of Artificial Sequence: Synthetic oligonucleotide
cacagaaaccacagcacuu

SEQ ID NO: 2989944 - RNA, 19 nt, Artificial Sequence
  Description of Artificial Sequence: Synthetic oligonucleotide
guugcagcucggccgcguc

SEQ ID NO: 2989945 - RNA, 19 nt, Artificial Sequence
  Description of Artificial Sequence: Synthetic oligonucleotide
uuagcccagcagguuugaa

SEQ ID NO: 2989946 - RNA, 19 nt, Artificial Sequence
  Description of Artificial Sequence: Synthetic oligonucleotide
ggcacugcgcagcuggaaa

SEQ ID NO: 2989947 - RNA, 19 nt, Artificial Sequence
  Description of Artificial Sequence: Synthetic oligonucleotide
ggcccuaguccuugccaag

SEQ ID NO: 2989948 - RNA, 19 nt, Artificial Sequence
  Description of Artificial Sequence: Synthetic oligonucleotide
aucugacagccuccacaaa

SEQ ID NO: 2989949 - RNA, 19 nt, Artificial Sequence
  Description of Artificial Sequence: Synthetic oligonucleotide
ccguacacagugaggagca

SEQ ID NO: 2989950 - RNA, 19 nt, Artificial Sequence
  Description of Artificial Sequence: Synthetic oligonucleotide
acgguaagcucggacgcua

SEQ ID NO: 2989951 - RNA, 19 nt, Artificial Sequence
  Description of Artificial Sequence: Synthetic oligonucleotide
cuggcgccuggcacugcgc

SEQ ID NO: 2989952 - RNA, 19 nt, Artificial Sequence
  Description of Artificial Sequence: Synthetic oligonucleotide
ucggccgcgucagaacgau

SEQ ID NO: 2989953 - RNA, 19 nt, Artificial Sequence
  Description of Artificial Sequence: Synthetic oligonucleotide
gggaagucuuuccauugcu

SEQ ID NO: 2989954 - RNA, 19 nt, Artificial Sequence
  Description of Artificial Sequence: Synthetic oligonucleotide
cagaaaccacagcacuuua

SEQ ID NO: 2989955 - RNA, 19 nt, Artificial Sequence
  Description of Artificial Sequence: Synthetic oligonucleotide
gccgcgucagaacgauucc

SEQ ID NO: 2989956 - RNA, 19 nt, Artificial Sequence
  Description of Artificial Sequence: Synthetic oligonucleotide
gccuccacaaacugucaaa

SEQ ID NO: 2989957 - RNA, 19 nt, Artificial Sequence
  Description of Artificial Sequence: Synthetic oligonucleotide
ccuggauguugcagcucgg

SEQ ID NO: 2989958 - RNA, 19 nt, Artificial Sequence
  Description of Artificial Sequence: Synthetic oligonucleotide
ggaggcagagaaggucuug

SEQ ID NO: 2989959 - RNA, 19 nt, Artificial Sequence
  Description of Artificial Sequence: Synthetic oligonucleotide
ccuggcgccuggcacugcg

SEQ ID NO: 2989960 - RNA, 19 nt, Artificial Sequence
  Description of Artificial Sequence: Synthetic oligonucleotide
agaaggucuuguagccaau

SEQ ID NO: 2989961 - RNA, 19 nt, Artificial Sequence
  Description of Artificial Sequence: Synthetic oligonucleotide
gcccagcagguuugaaagc

SEQ ID NO: 2989962 - RNA, 19 nt, Artificial Sequence
  Description of Artificial Sequence: Synthetic oligonucleotide
uggcacugcgcagcuggaa

SEQ ID NO: 2989963 - RNA, 19 nt, Artificial Sequence
  Description of Artificial Sequence: Synthetic oligonucleotide
auguugcagcucggccgcg

SEQ ID NO: 2989964 - RNA, 19 nt, Artificial Sequence
  Description of Artificial Sequence: Synthetic oligonucleotide
gaugugcaggggaagucuu

SEQ ID NO: 2989965 - RNA, 19 nt, Artificial Sequence
  Description of Artificial Sequence: Synthetic oligonucleotide
cauaggcuggugggaccac

SEQ ID NO: 2989966 - RNA, 19 nt, Artificial Sequence
  Description of Artificial Sequence: Synthetic oligonucleotide
aguccuugccaaggaugau

SEQ ID NO: 2989967 - RNA, 19 nt, Artificial Sequence
  Description of Artificial Sequence: Synthetic oligonucleotide
gcauaggcuggugggacca

SEQ ID NO: 2989968 - RNA, 19 nt, Artificial Sequence
  Description of Artificial Sequence: Synthetic oligonucleotide
gugggaccacagaaaccac

SEQ ID NO: 2989969 - RNA, 19 nt, Artificial Sequence
  Description of Artificial Sequence: Synthetic oligonucleotide
cagccuccacaaacuguca

SEQ ID NO: 2989970 - RNA, 19 nt, Artificial Sequence
  Description of Artificial Sequence: Synthetic oligonucleotide
ccaucgaggcccuaguccu

SEQ ID NO: 2989971 - RNA, 19 nt, Artificial Sequence
  Description of Artificial Sequence: Synthetic oligonucleotide
gcuggugggaccacagaaa

SEQ ID NO: 2989972 - RNA, 19 nt, Artificial Sequence
  Description of Artificial Sequence: Synthetic oligonucleotide
ggcgccuggcacugcgcag

SEQ ID NO: 2989973 - RNA, 19 nt, Artificial Sequence
  Description of Artificial Sequence: Synthetic oligonucleotide
acacagugaggagcaucau

SEQ ID NO: 2989974 - RNA, 19 nt, Artificial Sequence
  Description of Artificial Sequence: Synthetic oligonucleotide
agccuggcgccuggcacug

SEQ ID NO: 2989975 - RNA, 19 nt, Artificial Sequence
  Description of Artificial Sequence: Synthetic oligonucleotide
cucggccgcgucagaacga

SEQ ID NO: 2989976 - RNA, 19 nt, Artificial Sequence
  Description of Artificial Sequence: Synthetic oligonucleotide
cagcagguuugaaagccau

SEQ ID NO: 2989977 - RNA, 19 nt, Artificial Sequence
  Description of Artificial Sequence: Synthetic oligonucleotide
caggggaagucuuuccauu

SEQ ID NO: 2989978 - RNA, 19 nt, Artificial Sequence
  Description of Artificial Sequence: Synthetic oligonucleotide
ccacagaaaccacagcacu

SEQ ID NO: 2989979 - RNA, 19 nt, Artificial Sequence
  Description of Artificial Sequence: Synthetic oligonucleotide
ccuccacaaacugucaaaa

SEQ ID NO: 2989980 - RNA, 19 nt, Artificial Sequence
  Description of Artificial Sequence: Synthetic oligonucleotide
augugcaggggaagucuuu

SEQ ID NO: 2989981 - RNA, 19 nt, Artificial Sequence
  Description of Artificial Sequence: Synthetic oligonucleotide
ggagcaucauggaggcaga

SEQ ID NO: 2989982 - RNA, 19 nt, Artificial Sequence
  Description of Artificial Sequence: Synthetic oligonucleotide
augucuuguccuggauguu

SEQ ID NO: 2989983 - RNA, 19 nt, Artificial Sequence
  Description of Artificial Sequence: Synthetic oligonucleotide
cacccucacauucccauuu

SEQ ID NO: 2989984 - RNA, 19 nt, Artificial Sequence
  Description of Artificial Sequence: Synthetic oligonucleotide
ccccguacacagugaggag

SEQ ID NO: 2989985 - RNA, 19 nt, Artificial Sequence
  Description of Artificial Sequence: Synthetic oligonucleotide
cagcuagcugcuuggcagu

SEQ ID NO: 2989986 - RNA, 19 nt, Artificial Sequence
  Description of Artificial Sequence: Synthetic oligonucleotide
gcgccuggcacugcgcagc

SEQ ID NO: 2989987 - RNA, 19 nt, Artificial Sequence
  Description of Artificial Sequence: Synthetic oligonucleotide
ccaaugucagcuagcugcu

SEQ ID NO: 2989988 - RNA, 19 nt, Artificial Sequence
  Description of Artificial Sequence: Synthetic oligonucleotide
guccuggauguugcagcuc

SEQ ID NO: 2989989 - RNA, 19 nt, Artificial Sequence
  Description of Artificial Sequence: Synthetic oligonucleotide
ccuugccaaggaugaugug

SEQ ID NO: 2989990 - RNA, 19 nt, Artificial Sequence
  Description of Artificial Sequence: Synthetic oligonucleotide
gaggagcaucauggaggca

SEQ ID NO: 2989991 - RNA, 19 nt, Artificial Sequence
  Description of Artificial Sequence: Synthetic oligonucleotide
gcaggggaagucuuuccau

SEQ ID NO: 2989992 - RNA, 19 nt, Artificial Sequence
  Description of Artificial Sequence: Synthetic oligonucleotide
cgauuccuacucagucggc

SEQ ID NO: 2989993 - RNA, 19 nt, Artificial Sequence
  Description of Artificial Sequence: Synthetic oligonucleotide
ggcaguuggcaugucuugu

SEQ ID NO: 2989994 - RNA, 19 nt, Artificial Sequence
  Description of Artificial Sequence: Synthetic oligonucleotide
cacugcgcagcuggaaaua

SEQ ID NO: 2989995 - RNA, 19 nt, Artificial Sequence
  Description of Artificial Sequence: Synthetic oligonucleotide
gcacuuuagcccagcaggu

SEQ ID NO: 2989996 - RNA, 19 nt, Artificial Sequence
  Description of Artificial Sequence: Synthetic oligonucleotide
cgcagcuggaaauaacggu

SEQ ID NO: 2989997 - RNA, 19 nt, Artificial Sequence
  Description of Artificial Sequence: Synthetic oligonucleotide
cccuaguccuugccaagga

SEQ ID NO: 2989998 - RNA, 19 nt, Artificial Sequence
  Description of Artificial Sequence: Synthetic oligonucleotide
cgaggcccuaguccuugcc

SEQ ID NO: 2989999 - RNA, 19 nt, Artificial Sequence
  Description of Artificial Sequence: Synthetic oligonucleotide
cagcucggccgcgucagaa

SEQ ID NO: 2990000 - RNA, 19 nt, Artificial Sequence
  Description of Artificial Sequence: Synthetic oligonucleotide
gcacugcgcagcuggaaau

SEQ ID NO: 2990001 - RNA, 19 nt, Artificial Sequence
  Description of Artificial Sequence: Synthetic oligonucleotide
cgucagaacgauuccuacu

SEQ ID NO: 2990002 - RNA, 19 nt, Artificial Sequence
  Description of Artificial Sequence: Synthetic oligonucleotide
cucggacgcuacagaggua

SEQ ID NO: 2990003 - RNA, 19 nt, Artificial Sequence
  Description of Artificial Sequence: Synthetic oligonucleotide
cgguaagcucggacgcuac

SEQ ID NO: 2990004 - RNA, 19 nt, Artificial Sequence
  Description of Artificial Sequence: Synthetic oligonucleotide
ggcaugucuuguccuggau

SEQ ID NO: 2990005 - RNA, 19 nt, Artificial Sequence
  Description of Artificial Sequence: Synthetic oligonucleotide
cgcgucagaacgauuccua

SEQ ID NO: 2990006 - RNA, 19 nt, Artificial Sequence
  Description of Artificial Sequence: Synthetic oligonucleotide
cacuuuagcccagcagguu

SEQ ID NO: 2990007 - RNA, 19 nt, Artificial Sequence
  Description of Artificial Sequence: Synthetic oligonucleotide
ccugaugucuucuguucuu

SEQ ID NO: 2990008 - RNA, 19 nt, Artificial Sequence
  Description of Artificial Sequence: Synthetic oligonucleotide
cccauuuaucugacagccu

SEQ ID NO: 2990009 - RNA, 19 nt, Artificial Sequence
  Description of Artificial Sequence: Synthetic oligonucleotide
gaaagccaucgaggcccua

SEQ ID NO: 2990010 - RNA, 19 nt, Artificial Sequence
  Description of Artificial Sequence: Synthetic oligonucleotide
ccuaguccuugccaaggau

SEQ ID NO: 2990011 - RNA, 19 nt, Artificial Sequence
  Description of Artificial Sequence: Synthetic oligonucleotide
caucgaggcccuaguccuu

SEQ ID NO: 2990012 - RNA, 19 nt, Artificial Sequence
  Description of Artificial Sequence: Synthetic oligonucleotide
gcucuacaggacuccugau

SEQ ID NO: 2990013 - RNA, 19 nt, Artificial Sequence
  Description of Artificial Sequence: Synthetic oligonucleotide
cggacgcuacagagguaac

SEQ ID NO: 2990014 - RNA, 19 nt, Artificial Sequence
  Description of Artificial Sequence: Synthetic oligonucleotide
gcagcucggccgcgucaga

SEQ ID NO: 2990015 - RNA, 19 nt, Artificial Sequence
  Description of Artificial Sequence: Synthetic oligonucleotide
caaugucagcuagcugcuu

SEQ ID NO: 2990016 - RNA, 19 nt, Artificial Sequence
  Description of Artificial Sequence: Synthetic oligonucleotide
cccucacauucccauuuau

SEQ ID NO: 2990017 - RNA, 19 nt, Artificial Sequence
  Description of Artificial Sequence: Synthetic oligonucleotide
gccuggcacugcgcagcug

SEQ ID NO: 2990018 - RNA, 19 nt, Artificial Sequence
  Description of Artificial Sequence: Synthetic oligonucleotide
ccgcgucagaacgauuccu

SEQ ID NO: 2990019 - RNA, 19 nt, Artificial Sequence
  Description of Artificial Sequence: Synthetic oligonucleotide
gccuggcgccuggcacugc

SEQ ID NO: 2990020 - RNA, 19 nt, Artificial Sequence
  Description of Artificial Sequence: Synthetic oligonucleotide
cguacacagugaggagcau

SEQ ID NO: 2990021 - RNA, 19 nt, Artificial Sequence
  Description of Artificial Sequence: Synthetic oligonucleotide
cgccuggcacugcgcagcu

SEQ ID NO: 2990022 - RNA, 19 nt, Artificial Sequence
  Description of Artificial Sequence: Synthetic oligonucleotide
cggccgcgucagaacgauu

SEQ ID NO: 2990023 - RNA, 19 nt, Artificial Sequence
  Description of Artificial Sequence: Synthetic oligonucleotide
aaaacuauuaaccugccuc

SEQ ID NO: 2990024 - RNA, 19 nt, Artificial Sequence
  Description of Artificial Sequence: Synthetic oligonucleotide
aaagaaaguaucccugucc

SEQ ID NO: 2990025 - RNA, 19 nt, Artificial Sequence
  Description of Artificial Sequence: Synthetic oligonucleotide
aagaaaguaucccuguccc

SEQ ID NO: 2990026 - RNA, 19 nt, Artificial Sequence
  Description of Artificial Sequence: Synthetic oligonucleotide
aauuuaaaggcacacucuc

SEQ ID NO: 2990027 - RNA, 19 nt, Artificial Sequence
  Description of Artificial Sequence: Synthetic oligonucleotide
auaaguuugaguuucuuuc

SEQ ID NO: 2990028 - RNA, 19 nt, Artificial Sequence
  Description of Artificial Sequence: Synthetic oligonucleotide
uuagacuagaauaaguuug

SEQ ID NO: 2990029 - RNA, 19 nt, Artificial Sequence
  Description of Artificial Sequence: Synthetic oligonucleotide
acugaagcaaaccagugcc

SEQ ID NO: 2990030 - RNA, 19 nt, Artificial Sequence
  Description of Artificial Sequence: Synthetic oligonucleotide
aguauaaguccucagugcc

SEQ ID NO: 2990031 - RNA, 19 nt, Artificial Sequence
  Description of Artificial Sequence: Synthetic oligonucleotide
agcaacaaaacuauuaacc

SEQ ID NO: 2990032 - RNA, 19 nt, Artificial Sequence
  Description of Artificial Sequence: Synthetic oligonucleotide
acuagaauaaguuugaguu

SEQ ID NO: 2990033 - RNA, 19 nt, Artificial Sequence
  Description of Artificial Sequence: Synthetic oligonucleotide
aaaccagugccauugcuac

SEQ ID NO: 2990034 - RNA, 19 nt, Artificial Sequence
  Description of Artificial Sequence: Synthetic oligonucleotide
uuaguauaaguccucagug

SEQ ID NO: 2990035 - RNA, 19 nt, Artificial Sequence
  Description of Artificial Sequence: Synthetic oligonucleotide
aucccuguccccuagaagc

SEQ ID NO: 2990036 - RNA, 19 nt, Artificial Sequence
  Description of Artificial Sequence: Synthetic oligonucleotide
gaaauuuaaaggcacacuc

SEQ ID NO: 2990037 - RNA, 19 nt, Artificial Sequence
  Description of Artificial Sequence: Synthetic oligonucleotide
uuuaaaggcacacucuccc

SEQ ID NO: 2990038 - RNA, 19 nt, Artificial Sequence
  Description of Artificial Sequence: Synthetic oligonucleotide
uuuaguauaaguccucagu

SEQ ID NO: 2990039 - RNA, 19 nt, Artificial Sequence
  Description of Artificial Sequence: Synthetic oligonucleotide
uucugugacauacagggcc

SEQ ID NO: 2990040 - RNA, 19 nt, Artificial Sequence
  Description of Artificial Sequence: Synthetic oligonucleotide
aaaagaaaguaucccuguc

SEQ ID NO: 2990041 - RNA, 19 nt, Artificial Sequence
  Description of Artificial Sequence: Synthetic oligonucleotide
aggcacaugaaauuuaaag

SEQ ID NO: 2990042 - RNA, 19 nt, Artificial Sequence
  Description of Artificial Sequence: Synthetic oligonucleotide
aaacuauuaaccugccucu

SEQ ID NO: 2990043 - RNA, 19 nt, Artificial Sequence
  Description of Artificial Sequence: Synthetic oligonucleotide
cuuuccaaaagaaaguauc

SEQ ID NO: 2990044 - RNA, 19 nt, Artificial Sequence
  Description of Artificial Sequence: Synthetic oligonucleotide
aguacagguucucaggcac

SEQ ID NO: 2990045 - RNA, 19 nt, Artificial Sequence
  Description of Artificial Sequence: Synthetic oligonucleotide
uuccauagcaacaaaacua

SEQ ID NO: 2990046 - RNA, 19 nt, Artificial Sequence
  Description of Artificial Sequence: Synthetic oligonucleotide
ggcacaugaaauuuaaagg

SEQ ID NO: 2990047 - RNA, 19 nt, Artificial Sequence
  Description of Artificial Sequence: Synthetic oligonucleotide
uuuccauagcaacaaaacu

SEQ ID NO: 2990048 - RNA, 19 nt, Artificial Sequence
  Description of Artificial Sequence: Synthetic oligonucleotide
aaggcacacucucccaucc

SEQ ID NO: 2990049 - RNA, 19 nt, Artificial Sequence
  Description of Artificial Sequence: Synthetic oligonucleotide
agcaucuccaucuuuuguc

SEQ ID NO: 2990050 - RNA, 19 nt, Artificial Sequence
  Description of Artificial Sequence: Synthetic oligonucleotide
ucucccaucccuaagagua

SEQ ID NO: 2990051 - RNA, 19 nt, Artificial Sequence
  Description of Artificial Sequence: Synthetic oligonucleotide
auagcaacaaaacuauuaa

SEQ ID NO: 2990052 - RNA, 19 nt, Artificial Sequence
  Description of Artificial Sequence: Synthetic oligonucleotide
augaaauuuaaaggcacac

SEQ ID NO: 2990053 - RNA, 19 nt, Artificial Sequence
  Description of Artificial Sequence: Synthetic oligonucleotide
uagacuagaauaaguuuga

SEQ ID NO: 2990054 - RNA, 19 nt, Artificial Sequence
  Description of Artificial Sequence: Synthetic oligonucleotide
uccauagcaacaaaacuau

SEQ ID NO: 2990055 - RNA, 19 nt, Artificial Sequence
  Description of Artificial Sequence: Synthetic oligonucleotide
ucaguacagguucucaggc

SEQ ID NO: 2990056 - RNA, 19 nt, Artificial Sequence
  Description of Artificial Sequence: Synthetic oligonucleotide
uaguauaaguccucagugc

SEQ ID NO: 2990057 - RNA, 19 nt, Artificial Sequence
  Description of Artificial Sequence: Synthetic oligonucleotide
acaugaaauuuaaaggcac

SEQ ID NO: 2990058 - RNA, 19 nt, Artificial Sequence
  Description of Artificial Sequence: Synthetic oligonucleotide
uagaauaaguuugaguuuc

SEQ ID NO: 2990059 - RNA, 19 nt, Artificial Sequence
  Description of Artificial Sequence: Synthetic oligonucleotide
aagugaggcugucagcauc

SEQ ID NO: 2990060 - RNA, 19 nt, Artificial Sequence
  Description of Artificial Sequence: Synthetic oligonucleotide
uauuuggcaugucuguccc

SEQ ID NO: 2990061 - RNA, 19 nt, Artificial Sequence
  Description of Artificial Sequence: Synthetic oligonucleotide
uuuuaguauaaguccucag

SEQ ID NO: 2990062 - RNA, 19 nt, Artificial Sequence
  Description of Artificial Sequence: Synthetic oligonucleotide
aaguuugaguuucuuucug

SEQ ID NO: 2990063 - RNA, 19 nt, Artificial Sequence
  Description of Artificial Sequence: Synthetic oligonucleotide
aaauuuaaaggcacacucu

SEQ ID NO: 2990064 - RNA, 19 nt, Artificial Sequence
  Description of Artificial Sequence: Synthetic oligonucleotide
uccaucuuuugucaguaca

SEQ ID NO: 2990065 - RNA, 19 nt, Artificial Sequence
  Description of Artificial Sequence: Synthetic oligonucleotide
uuucacuuuccuuccaggc

SEQ ID NO: 2990066 - RNA, 19 nt, Artificial Sequence
  Description of Artificial Sequence: Synthetic oligonucleotide
cuuuugucaguacagguuc

SEQ ID NO: 2990067 - RNA, 19 nt, Artificial Sequence
  Description of Artificial Sequence: Synthetic oligonucleotide
aaaggcacacucucccauc

SEQ ID NO: 2990068 - RNA, 19 nt, Artificial Sequence
  Description of Artificial Sequence: Synthetic oligonucleotide
aagcaaaccagugccauug

SEQ ID NO: 2990069 - RNA, 19 nt, Artificial Sequence
  Description of Artificial Sequence: Synthetic oligonucleotide
agaaaguaucccugucccc

SEQ ID NO: 2990070 - RNA, 19 nt, Artificial Sequence
  Description of Artificial Sequence: Synthetic oligonucleotide
auuuaaaggcacacucucc

SEQ ID NO: 2990071 - RNA, 19 nt, Artificial Sequence
  Description of Artificial Sequence: Synthetic oligonucleotide
cuauuuggcaugucugucc

SEQ ID NO: 2990072 - RNA, 19 nt, Artificial Sequence
  Description of Artificial Sequence: Synthetic oligonucleotide
ugcagaacaaggcuaggcu

SEQ ID NO: 2990073 - RNA, 19 nt, Artificial Sequence
  Description of Artificial Sequence: Synthetic oligonucleotide
caucccuaagaguacagag

SEQ ID NO: 2990074 - RNA, 19 nt, Artificial Sequence
  Description of Artificial Sequence: Synthetic oligonucleotide
uaaguuugaguuucuuucu

SEQ ID NO: 2990075 - RNA, 19 nt, Artificial Sequence
  Description of Artificial Sequence: Synthetic oligonucleotide
cuugccugcucuaagugag

SEQ ID NO: 2990076 - RNA, 19 nt, Artificial Sequence
  Description of Artificial Sequence: Synthetic oligonucleotide
auugcuaccacuggccaac

SEQ ID NO: 2990077 - RNA, 19 nt, Artificial Sequence
  Description of Artificial Sequence: Synthetic oligonucleotide
uauaaguccucagugcccc

SEQ ID NO: 2990078 - RNA, 19 nt, Artificial Sequence
  Description of Artificial Sequence: Synthetic oligonucleotide
guuugaguuucuuucugag

SEQ ID NO: 2990079 - RNA, 19 nt, Artificial Sequence
  Description of Artificial Sequence: Synthetic oligonucleotide
ugucaguacagguucucag

SEQ ID NO: 2990080 - RNA, 19 nt, Artificial Sequence
  Description of Artificial Sequence: Synthetic oligonucleotide
ucuuuugucaguacagguu

SEQ ID NO: 2990081 - RNA, 19 nt, Artificial Sequence
  Description of Artificial Sequence: Synthetic oligonucleotide
ucugugacauacagggccc

SEQ ID NO: 2990082 - RNA, 19 nt, Artificial Sequence
  Description of Artificial Sequence: Synthetic oligonucleotide
uaaccugccucucacuccc

SEQ ID NO: 2990083 - RNA, 19 nt, Artificial Sequence
  Description of Artificial Sequence: Synthetic oligonucleotide
gucaguacagguucucagg

SEQ ID NO: 2990084 - RNA, 19 nt, Artificial Sequence
  Description of Artificial Sequence: Synthetic oligonucleotide
gacugaagcaaaccagugc

SEQ ID NO: 2990085 - RNA, 19 nt, Artificial Sequence
  Description of Artificial Sequence: Synthetic oligonucleotide
ugccccaaaguuuccauag

SEQ ID NO: 2990086 - RNA, 19 nt, Artificial Sequence
  Description of Artificial Sequence: Synthetic oligonucleotide
ugaaauuuaaaggcacacu

SEQ ID NO: 2990087 - RNA, 19 nt, Artificial Sequence
  Description of Artificial Sequence: Synthetic oligonucleotide
ucacuuuccuuccaggcuc

SEQ ID NO: 2990088 - RNA, 19 nt, Artificial Sequence
  Description of Artificial Sequence: Synthetic oligonucleotide
caaggcuaggcuaggagag

SEQ ID NO: 2990089 - RNA, 19 nt, Artificial Sequence
  Description of Artificial Sequence: Synthetic oligonucleotide
cagaacaaggcuaggcuag

SEQ ID NO: 2990090 - RNA, 19 nt, Artificial Sequence
  Description of Artificial Sequence: Synthetic oligonucleotide
cucuaagugaggcugucag

SEQ ID NO: 2990091 - RNA, 19 nt, Artificial Sequence
  Description of Artificial Sequence: Synthetic oligonucleotide
uggccaacuuuccaaaaga

SEQ ID NO: 2990092 - RNA, 19 nt, Artificial Sequence
  Description of Artificial Sequence: Synthetic oligonucleotide
guuuccauagcaacaaaac

SEQ ID NO: 2990093 - RNA, 19 nt, Artificial Sequence
  Description of Artificial Sequence: Synthetic oligonucleotide
cauagcaacaaaacuauua

SEQ ID NO: 2990094 - RNA, 19 nt, Artificial Sequence
  Description of Artificial Sequence: Synthetic oligonucleotide
ugacugaagcaaaccagug

SEQ ID NO: 2990095 - RNA, 19 nt, Artificial Sequence
  Description of Artificial Sequence: Synthetic oligonucleotide
acaaggcuaggcuaggaga

SEQ ID NO: 2990096 - RNA, 19 nt, Artificial Sequence
  Description of Artificial Sequence: Synthetic oligonucleotide
aucuuuugucaguacaggu

SEQ ID NO: 2990097 - RNA, 19 nt, Artificial Sequence
  Description of Artificial Sequence: Synthetic oligonucleotide
acauacagggcccugcaga

SEQ ID NO: 2990098 - RNA, 19 nt, Artificial Sequence
  Description of Artificial Sequence: Synthetic oligonucleotide
aacuuuccaaaagaaagua

SEQ ID NO: 2990099 - RNA, 19 nt, Artificial Sequence
  Description of Artificial Sequence: Synthetic oligonucleotide
agaagcacuugccugcucu

SEQ ID NO: 2990100 - RNA, 19 nt, Artificial Sequence
  Description of Artificial Sequence: Synthetic oligonucleotide
uagcaacaaaacuauuaac

SEQ ID NO: 2990101 - RNA, 19 nt, Artificial Sequence
  Description of Artificial Sequence: Synthetic oligonucleotide
aacuauuaaccugccucuc

SEQ ID NO: 2990102 - RNA, 19 nt, Artificial Sequence
  Description of Artificial Sequence: Synthetic oligonucleotide
cucagugccccaaaguuuc

SEQ ID NO: 2990103 - RNA, 19 nt, Artificial Sequence
  Description of Artificial Sequence: Synthetic oligonucleotide
aguuugaguuucuuucuga

SEQ ID NO: 2990104 - RNA, 19 nt, Artificial Sequence
  Description of Artificial Sequence: Synthetic oligonucleotide
cuauuaaccugccucucac

SEQ ID NO: 2990105 - RNA, 19 nt, Artificial Sequence
  Description of Artificial Sequence: Synthetic oligonucleotide
acuauuaaccugccucuca

SEQ ID NO: 2990106 - RNA, 19 nt, Artificial Sequence
  Description of Artificial Sequence: Synthetic oligonucleotide
ucuaagugaggcugucagc

SEQ ID NO: 2990107 - RNA, 19 nt, Artificial Sequence
  Description of Artificial Sequence: Synthetic oligonucleotide
agcugacugaagcaaacca

SEQ ID NO: 2990108 - RNA, 19 nt, Artificial Sequence
  Description of Artificial Sequence: Synthetic oligonucleotide
acaaaacuauuaaccugcc

SEQ ID NO: 2990109 - RNA, 19 nt, Artificial Sequence
  Description of Artificial Sequence: Synthetic oligonucleotide
aguuagacuagaauaaguu

SEQ ID NO: 2990110 - RNA, 19 nt, Artificial Sequence
  Description of Artificial Sequence: Synthetic oligonucleotide
uuaaaggcacacucuccca

SEQ ID NO: 2990111 - RNA, 19 nt, Artificial Sequence
  Description of Artificial Sequence: Synthetic oligonucleotide
aaggcuaggcuaggagagc

SEQ ID NO: 2990112 - RNA, 19 nt, Artificial Sequence
  Description of Artificial Sequence: Synthetic oligonucleotide
caucuuuugucaguacagg

SEQ ID NO: 2990113 - RNA, 19 nt, Artificial Sequence
  Description of Artificial Sequence: Synthetic oligonucleotide
uccucagugccccaaaguu

SEQ ID NO: 2990114 - RNA, 19 nt, Artificial Sequence
  Description of Artificial Sequence: Synthetic oligonucleotide
uaagaguacagagaucuuu

SEQ ID NO: 2990115 - RNA, 19 nt, Artificial Sequence
  Description of Artificial Sequence: Synthetic oligonucleotide
uaaaggcacacucucccau

SEQ ID NO: 2990116 - RNA, 19 nt, Artificial Sequence
  Description of Artificial Sequence: Synthetic oligonucleotide
uaucccuguccccuagaag

SEQ ID NO: 2990117 - RNA, 19 nt, Artificial Sequence
  Description of Artificial Sequence: Synthetic oligonucleotide
uuuugucaguacagguucu

SEQ ID NO: 2990118 - RNA, 19 nt, Artificial Sequence
  Description of Artificial Sequence: Synthetic oligonucleotide
agugccauugcuaccacug

SEQ ID NO: 2990119 - RNA, 19 nt, Artificial Sequence
  Description of Artificial Sequence: Synthetic oligonucleotide
cuaagugaggcugucagca

SEQ ID NO: 2990120 - RNA, 19 nt, Artificial Sequence
  Description of Artificial Sequence: Synthetic oligonucleotide
caugaaauuuaaaggcaca

SEQ ID NO: 2990121 - RNA, 19 nt, Artificial Sequence
  Description of Artificial Sequence: Synthetic oligonucleotide
agcaaaccagugccauugc

SEQ ID NO: 2990122 - RNA, 19 nt, Artificial Sequence
  Description of Artificial Sequence: Synthetic oligonucleotide
aaguaucccuguccccuag

SEQ ID NO: 2990123 - RNA, 19 nt, Artificial Sequence
  Description of Artificial Sequence: Synthetic oligonucleotide
ccaaaagaaaguaucccug

SEQ ID NO: 2990124 - RNA, 19 nt, Artificial Sequence
  Description of Artificial Sequence: Synthetic oligonucleotide
aagaguacagagaucuuuu

SEQ ID NO: 2990125 - RNA, 19 nt, Artificial Sequence
  Description of Artificial Sequence: Synthetic oligonucleotide
ugacauacagggcccugca

SEQ ID NO: 2990126 - RNA, 19 nt, Artificial Sequence
  Description of Artificial Sequence: Synthetic oligonucleotide
cuggccaacuuuccaaaag

SEQ ID NO: 2990127 - RNA, 19 nt, Artificial Sequence
  Description of Artificial Sequence: Synthetic oligonucleotide
agagcugacugaagcaaac

SEQ ID NO: 2990128 - RNA, 19 nt, Artificial Sequence
  Description of Artificial Sequence: Synthetic oligonucleotide
gacuagaauaaguuugagu

SEQ ID NO: 2990129 - RNA, 19 nt, Artificial Sequence
  Description of Artificial Sequence: Synthetic oligonucleotide
uucucaggcacaugaaauu

SEQ ID NO: 2990130 - RNA, 19 nt, Artificial Sequence
  Description of Artificial Sequence: Synthetic oligonucleotide
ucccaagucucuucuguga

SEQ ID NO: 2990131 - RNA, 19 nt, Artificial Sequence
  Description of Artificial Sequence: Synthetic oligonucleotide
cuaccacuggccaacuuuc

SEQ ID NO: 2990132 - RNA, 19 nt, Artificial Sequence
  Description of Artificial Sequence: Synthetic oligonucleotide
ugaggcugucagcaucucc

SEQ ID NO: 2990133 - RNA, 19 nt, Artificial Sequence
  Description of Artificial Sequence: Synthetic oligonucleotide
ccuagaagcacuugccugc

SEQ ID NO: 2990134 - RNA, 19 nt, Artificial Sequence
  Description of Artificial Sequence: Synthetic oligonucleotide
acuugccugcucuaaguga

SEQ ID NO: 2990135 - RNA, 19 nt, Artificial Sequence
  Description of Artificial Sequence: Synthetic oligonucleotide
acucucccaucccuaagag

SEQ ID NO: 2990136 - RNA, 19 nt, Artificial Sequence
  Description of Artificial Sequence: Synthetic oligonucleotide
uauuaaccugccucucacu

SEQ ID NO: 2990137 - RNA, 19 nt, Artificial Sequence
  Description of Artificial Sequence: Synthetic oligonucleotide
gaggcugucagcaucucca

SEQ ID NO: 2990138 - RNA, 19 nt, Artificial Sequence
  Description of Artificial Sequence: Synthetic oligonucleotide
agcacuugccugcucuaag

SEQ ID NO: 2990139 - RNA, 19 nt, Artificial Sequence
  Description of Artificial Sequence: Synthetic oligonucleotide
aggcuaggagagcugacug

SEQ ID NO: 2990140 - RNA, 19 nt, Artificial Sequence
  Description of Artificial Sequence: Synthetic oligonucleotide
ugaagcaaaccagugccau

SEQ ID NO: 2990141 - RNA, 19 nt, Artificial Sequence
  Description of Artificial Sequence: Synthetic oligonucleotide
acucccuuggccccacauc

SEQ ID NO: 2990142 - RNA, 19 nt, Artificial Sequence
  Description of Artificial Sequence: Synthetic oligonucleotide
gaaaguaucccuguccccu

SEQ ID NO: 2990143 - RNA, 19 nt, Artificial Sequence
  Description of Artificial Sequence: Synthetic oligonucleotide
guccccuagaagcacuugc

SEQ ID NO: 2990144 - RNA, 19 nt, Artificial Sequence
  Description of Artificial Sequence: Synthetic oligonucleotide
ccaucuuuugucaguacag

SEQ ID NO: 2990145 - RNA, 19 nt, Artificial Sequence
  Description of Artificial Sequence: Synthetic oligonucleotide
cagguucucaggcacauga

SEQ ID NO: 2990146 - RNA, 19 nt, Artificial Sequence
  Description of Artificial Sequence: Synthetic oligonucleotide
guauaaguccucagugccc

SEQ ID NO: 2990147 - RNA, 19 nt, Artificial Sequence
  Description of Artificial Sequence: Synthetic oligonucleotide
gcaacaaaacuauuaaccu

SEQ ID NO: 2990148 - RNA, 19 nt, Artificial Sequence
  Description of Artificial Sequence: Synthetic oligonucleotide
gacauacagggcccugcag

SEQ ID NO: 2990149 - RNA, 19 nt, Artificial Sequence
  Description of Artificial Sequence: Synthetic oligonucleotide
aaguuuccauagcaacaaa

SEQ ID NO: 2990150 - RNA, 19 nt, Artificial Sequence
  Description of Artificial Sequence: Synthetic oligonucleotide
aaaguaucccuguccccua

SEQ ID NO: 2990151 - RNA, 19 nt, Artificial Sequence
  Description of Artificial Sequence: Synthetic oligonucleotide
aguuuccauagcaacaaaa

SEQ ID NO: 2990152 - RNA, 19 nt, Artificial Sequence
  Description of Artificial Sequence: Synthetic oligonucleotide
cugccucucacucccuugg

SEQ ID NO: 2990153 - RNA, 19 nt, Artificial Sequence
  Description of Artificial Sequence: Synthetic oligonucleotide
uugccugcucuaagugagg

SEQ ID NO: 2990154 - RNA, 19 nt, Artificial Sequence
  Description of Artificial Sequence: Synthetic oligonucleotide
agaacaaggcuaggcuagg

SEQ ID NO: 2990155 - RNA, 19 nt, Artificial Sequence
  Description of Artificial Sequence: Synthetic oligonucleotide
agacuagaauaaguuugag

SEQ ID NO: 2990156 - RNA, 19 nt, Artificial Sequence
  Description of Artificial Sequence: Synthetic oligonucleotide
cugcagaacaaggcuaggc

SEQ ID NO: 2990157 - RNA, 19 nt, Artificial Sequence
  Description of Artificial Sequence: Synthetic oligonucleotide
ucucaggcacaugaaauuu

SEQ ID NO: 2990158 - RNA, 19 nt, Artificial Sequence
  Description of Artificial Sequence: Synthetic oligonucleotide
guuagacuagaauaaguuu

SEQ ID NO: 2990159 - RNA, 19 nt, Artificial Sequence
  Description of Artificial Sequence: Synthetic oligonucleotide
uaggcuaggagagcugacu

SEQ ID NO: 2990160 - RNA, 19 nt, Artificial Sequence
  Description of Artificial Sequence: Synthetic oligonucleotide
aggcacacucucccauccc

SEQ ID NO: 2990161 - RNA, 19 nt, Artificial Sequence
  Description of Artificial Sequence: Synthetic oligonucleotide
ucccuguccccuagaagca

SEQ ID NO: 2990162 - RNA, 19 nt, Artificial Sequence
  Description of Artificial Sequence: Synthetic oligonucleotide
uuccaggcucccaagucuc

SEQ ID NO: 2990163 - RNA, 19 nt, Artificial Sequence
  Description of Artificial Sequence: Synthetic oligonucleotide
uugucaguacagguucuca

SEQ ID NO: 2990164 - RNA, 19 nt, Artificial Sequence
  Description of Artificial Sequence: Synthetic oligonucleotide
caugucugucccuuaucuc

SEQ ID NO: 2990165 - RNA, 19 nt, Artificial Sequence
  Description of Artificial Sequence: Synthetic oligonucleotide
uuuggcaugucugucccuu

SEQ ID NO: 2990166 - RNA, 19 nt, Artificial Sequence
  Description of Artificial Sequence: Synthetic oligonucleotide
caacuuuccaaaagaaagu

SEQ ID NO: 2990167 - RNA, 19 nt, Artificial Sequence
  Description of Artificial Sequence: Synthetic oligonucleotide
gcugacugaagcaaaccag

SEQ ID NO: 2990168 - RNA, 19 nt, Artificial Sequence
  Description of Artificial Sequence: Synthetic oligonucleotide
aucccuaagaguacagaga

SEQ ID NO: 2990169 - RNA, 19 nt, Artificial Sequence
  Description of Artificial Sequence: Synthetic oligonucleotide
uaccacuggccaacuuucc

SEQ ID NO: 2990170 - RNA, 19 nt, Artificial Sequence
  Description of Artificial Sequence: Synthetic oligonucleotide
cuaggagagcugacugaag

SEQ ID NO: 2990171 - RNA, 19 nt, Artificial Sequence
  Description of Artificial Sequence: Synthetic oligonucleotide
accacuggccaacuuucca

SEQ ID NO: 2990172 - RNA, 19 nt, Artificial Sequence
  Description of Artificial Sequence: Synthetic oligonucleotide
caaaccagugccauugcua

SEQ ID NO: 2990173 - RNA, 19 nt, Artificial Sequence
  Description of Artificial Sequence: Synthetic oligonucleotide
gagcugacugaagcaaacc

SEQ ID NO: 2990174 - RNA, 19 nt, Artificial Sequence
  Description of Artificial Sequence: Synthetic oligonucleotide
cucucacucccuuggcccc

SEQ ID NO: 2990175 - RNA, 19 nt, Artificial Sequence
  Description of Artificial Sequence: Synthetic oligonucleotide
cacuugccugcucuaagug

SEQ ID NO: 2990176 - RNA, 19 nt, Artificial Sequence
  Description of Artificial Sequence: Synthetic oligonucleotide
ugccugcucuaagugaggc

SEQ ID NO: 2990177 - RNA, 19 nt, Artificial Sequence
  Description of Artificial Sequence: Synthetic oligonucleotide
acuuuccaaaagaaaguau

SEQ ID NO: 2990178 - RNA, 19 nt, Artificial Sequence
  Description of Artificial Sequence: Synthetic oligonucleotide
cucccaagucucuucugug

SEQ ID NO: 2990179 - RNA, 19 nt, Artificial Sequence
  Description of Artificial Sequence: Synthetic oligonucleotide
ucagugccccaaaguuucc

SEQ ID NO: 2990180 - RNA, 19 nt, Artificial Sequence
  Description of Artificial Sequence: Synthetic oligonucleotide
cugacugaagcaaaccagu

SEQ ID NO: 2990181 - RNA, 19 nt, Artificial Sequence
  Description of Artificial Sequence: Synthetic oligonucleotide
acacucucccaucccuaag

SEQ ID NO: 2990182 - RNA, 19 nt, Artificial Sequence
  Description of Artificial Sequence: Synthetic oligonucleotide
agugaggcugucagcaucu

SEQ ID NO: 2990183 - RNA, 19 nt, Artificial Sequence
  Description of Artificial Sequence: Synthetic oligonucleotide
cacuuuccuuccaggcucc

SEQ ID NO: 2990184 - RNA, 19 nt, Artificial Sequence
  Description of Artificial Sequence: Synthetic oligonucleotide
agugccccaaaguuuccau

SEQ ID NO: 2990185 - RNA, 19 nt, Artificial Sequence
  Description of Artificial Sequence: Synthetic oligonucleotide
uaagugaggcugucagcau

SEQ ID NO: 2990186 - RNA, 19 nt, Artificial Sequence
  Description of Artificial Sequence: Synthetic oligonucleotide
ugugacauacagggcccug

SEQ ID NO: 2990187 - RNA, 19 nt, Artificial Sequence
  Description of Artificial Sequence: Synthetic oligonucleotide
gugacauacagggcccugc

SEQ ID NO: 2990188 - RNA, 19 nt, Artificial Sequence
  Description of Artificial Sequence: Synthetic oligonucleotide
ccuaagaguacagagaucu

SEQ ID NO: 2990189 - RNA, 19 nt, Artificial Sequence
  Description of Artificial Sequence: Synthetic oligonucleotide
cauacagggcccugcagaa

SEQ ID NO: 2990190 - RNA, 19 nt, Artificial Sequence
  Description of Artificial Sequence: Synthetic oligonucleotide
uggcaugucugucccuuau

SEQ ID NO: 2990191 - RNA, 19 nt, Artificial Sequence
  Description of Artificial Sequence: Synthetic oligonucleotide
agaauaaguuugaguuucu

SEQ ID NO: 2990192 - RNA, 19 nt, Artificial Sequence
  Description of Artificial Sequence: Synthetic oligonucleotide
aaguccucagugccccaaa

SEQ ID NO: 2990193 - RNA, 19 nt, Artificial Sequence
  Description of Artificial Sequence: Synthetic oligonucleotide
cuaggcuaggagagcugac

SEQ ID NO: 2990194 - RNA, 19 nt, Artificial Sequence
  Description of Artificial Sequence: Synthetic oligonucleotide
uacagguucucaggcacau

SEQ ID NO: 2990195 - RNA, 19 nt, Artificial Sequence
  Description of Artificial Sequence: Synthetic oligonucleotide
agggcccugcagaacaagg

SEQ ID NO: 2990196 - RNA, 19 nt, Artificial Sequence
  Description of Artificial Sequence: Synthetic oligonucleotide
caguuagacuagaauaagu

SEQ ID NO: 2990197 - RNA, 19 nt, Artificial Sequence
  Description of Artificial Sequence: Synthetic oligonucleotide
auacagggcccugcagaac

SEQ ID NO: 2990198 - RNA, 19 nt, Artificial Sequence
  Description of Artificial Sequence: Synthetic oligonucleotide
cugaagcaaaccagugcca

SEQ ID NO: 2990199 - RNA, 19 nt, Artificial Sequence
  Description of Artificial Sequence: Synthetic oligonucleotide
cucccaucccuaagaguac

SEQ ID NO: 2990200 - RNA, 19 nt, Artificial Sequence
  Description of Artificial Sequence: Synthetic oligonucleotide
cacucucccaucccuaaga

SEQ ID NO: 2990201 - RNA, 19 nt, Artificial Sequence
  Description of Artificial Sequence: Synthetic oligonucleotide
cuagaauaaguuugaguuu

SEQ ID NO: 2990202 - RNA, 19 nt, Artificial Sequence
  Description of Artificial Sequence: Synthetic oligonucleotide
acuggccaacuuuccaaaa

SEQ ID NO: 2990203 - RNA, 19 nt, Artificial Sequence
  Description of Artificial Sequence: Synthetic oligonucleotide
ugccucucacucccuuggc

SEQ ID NO: 2990204 - RNA, 19 nt, Artificial Sequence
  Description of Artificial Sequence: Synthetic oligonucleotide
aguaucccuguccccuaga

SEQ ID NO: 2990205 - RNA, 19 nt, Artificial Sequence
  Description of Artificial Sequence: Synthetic oligonucleotide
aggcuaggcuaggagagcu

SEQ ID NO: 2990206 - RNA, 19 nt, Artificial Sequence
  Description of Artificial Sequence: Synthetic oligonucleotide
ugucagcaucuccaucuuu

SEQ ID NO: 2990207 - RNA, 19 nt, Artificial Sequence
  Description of Artificial Sequence: Synthetic oligonucleotide
ccaguuagacuagaauaag

SEQ ID NO: 2990208 - RNA, 19 nt, Artificial Sequence
  Description of Artificial Sequence: Synthetic oligonucleotide
auuuggcaugucugucccu

SEQ ID NO: 2990209 - RNA, 19 nt, Artificial Sequence
  Description of Artificial Sequence: Synthetic oligonucleotide
cccuagaagcacuugccug

SEQ ID NO: 2990210 - RNA, 19 nt, Artificial Sequence
  Description of Artificial Sequence: Synthetic oligonucleotide
gguucucaggcacaugaaa

SEQ ID NO: 2990211 - RNA, 19 nt, Artificial Sequence
  Description of Artificial Sequence: Synthetic oligonucleotide
uaaguccucagugccccaa

SEQ ID NO: 2990212 - RNA, 19 nt, Artificial Sequence
  Description of Artificial Sequence: Synthetic oligonucleotide
caguacagguucucaggca

SEQ ID NO: 2990213 - RNA, 19 nt, Artificial Sequence
  Description of Artificial Sequence: Synthetic oligonucleotide
aagcacuugccugcucuaa

SEQ ID NO: 2990214 - RNA, 19 nt, Artificial Sequence
  Description of Artificial Sequence: Synthetic oligonucleotide
uccaggcucccaagucucu

SEQ ID NO: 2990215 - RNA, 19 nt, Artificial Sequence
  Description of Artificial Sequence: Synthetic oligonucleotide
cuccaucuuuugucaguac

SEQ ID NO: 2990216 - RNA, 19 nt, Artificial Sequence
  Description of Artificial Sequence: Synthetic oligonucleotide
cccugcagaacaaggcuag

SEQ ID NO: 2990217 - RNA, 19 nt, Artificial Sequence
  Description of Artificial Sequence: Synthetic oligonucleotide
guucucaggcacaugaaau

SEQ ID NO: 2990218 - RNA, 19 nt, Artificial Sequence
  Description of Artificial Sequence: Synthetic oligonucleotide
guaucccuguccccuagaa

SEQ ID NO: 2990219 - RNA, 19 nt, Artificial Sequence
  Description of Artificial Sequence: Synthetic oligonucleotide
cucaggcacaugaaauuua

SEQ ID NO: 2990220 - RNA, 19 nt, Artificial Sequence
  Description of Artificial Sequence: Synthetic oligonucleotide
gagagcugacugaagcaaa

SEQ ID NO: 2990221 - RNA, 19 nt, Artificial Sequence
  Description of Artificial Sequence: Synthetic oligonucleotide
auaaguccucagugcccca

SEQ ID NO: 2990222 - RNA, 19 nt, Artificial Sequence
  Description of Artificial Sequence: Synthetic oligonucleotide
gaacaaggcuaggcuagga

SEQ ID NO: 2990223 - RNA, 19 nt, Artificial Sequence
  Description of Artificial Sequence: Synthetic oligonucleotide
ccccuauuuggcaugucug

SEQ ID NO: 2990224 - RNA, 19 nt, Artificial Sequence
  Description of Artificial Sequence: Synthetic oligonucleotide
gcagaacaaggcuaggcua

SEQ ID NO: 2990225 - RNA, 19 nt, Artificial Sequence
  Description of Artificial Sequence: Synthetic oligonucleotide
gaagcacuugccugcucua

SEQ ID NO: 2990226 - RNA, 19 nt, Artificial Sequence
  Description of Artificial Sequence: Synthetic oligonucleotide
cucccuuggccccacaucu

SEQ ID NO: 2990227 - RNA, 19 nt, Artificial Sequence
  Description of Artificial Sequence: Synthetic oligonucleotide
cuuccaggcucccaagucu

SEQ ID NO: 2990228 - RNA, 19 nt, Artificial Sequence
  Description of Artificial Sequence: Synthetic oligonucleotide
uagaagcacuugccugcuc

SEQ ID NO: 2990229 - RNA, 19 nt, Artificial Sequence
  Description of Artificial Sequence: Synthetic oligonucleotide
aagucucuucugugacaua

SEQ ID NO: 2990230 - RNA, 19 nt, Artificial Sequence
  Description of Artificial Sequence: Synthetic oligonucleotide
cccaagucucuucugugac

SEQ ID NO: 2990231 - RNA, 19 nt, Artificial Sequence
  Description of Artificial Sequence: Synthetic oligonucleotide
caaaacuauuaaccugccu

SEQ ID NO: 2990232 - RNA, 19 nt, Artificial Sequence
  Description of Artificial Sequence: Synthetic oligonucleotide
ccccacaucuuucacuuuc

SEQ ID NO: 2990233 - RNA, 19 nt, Artificial Sequence
  Description of Artificial Sequence: Synthetic oligonucleotide
gcaugucugucccuuaucu

SEQ ID NO: 2990234 - RNA, 19 nt, Artificial Sequence
  Description of Artificial Sequence: Synthetic oligonucleotide
ggagagcugacugaagcaa

SEQ ID NO: 2990235 - RNA, 19 nt, Artificial Sequence
  Description of Artificial Sequence: Synthetic oligonucleotide
cacuggccaacuuuccaaa

SEQ ID NO: 2990236 - RNA, 19 nt, Artificial Sequence
  Description of Artificial Sequence: Synthetic oligonucleotide
ucucacucccuuggcccca

SEQ ID NO: 2990237 - RNA, 19 nt, Artificial Sequence
  Description of Artificial Sequence: Synthetic oligonucleotide
uuggcaugucugucccuua

SEQ ID NO: 2990238 - RNA, 19 nt, Artificial Sequence
  Description of Artificial Sequence: Synthetic oligonucleotide
gaauaaguuugaguuucuu

SEQ ID NO: 2990239 - RNA, 19 nt, Artificial Sequence
  Description of Artificial Sequence: Synthetic oligonucleotide
gccucucacucccuuggcc

SEQ ID NO: 2990240 - RNA, 19 nt, Artificial Sequence
  Description of Artificial Sequence: Synthetic oligonucleotide
caagucucuucugugacau

SEQ ID NO: 2990241 - RNA, 19 nt, Artificial Sequence
  Description of Artificial Sequence: Synthetic oligonucleotide
ggcuaggagagcugacuga

SEQ ID NO: 2990242 - RNA, 19 nt, Artificial Sequence
  Description of Artificial Sequence: Synthetic oligonucleotide
cacacucucccaucccuaa

SEQ ID NO: 2990243 - RNA, 19 nt, Artificial Sequence
  Description of Artificial Sequence: Synthetic oligonucleotide
ccuauuuggcaugucuguc

SEQ ID NO: 2990244 - RNA, 19 nt, Artificial Sequence
  Description of Artificial Sequence: Synthetic oligonucleotide
gcuaggagagcugacugaa

SEQ ID NO: 2990245 - RNA, 19 nt, Artificial Sequence
  Description of Artificial Sequence: Synthetic oligonucleotide
gaagcaaaccagugccauu

SEQ ID NO: 2990246 - RNA, 19 nt, Artificial Sequence
  Description of Artificial Sequence: Synthetic oligonucleotide
gucagcaucuccaucuuuu

SEQ ID NO: 2990247 - RNA, 19 nt, Artificial Sequence
  Description of Artificial Sequence: Synthetic oligonucleotide
ccccaaaguuuccauagca

SEQ ID NO: 2990248 - RNA, 19 nt, Artificial Sequence
  Description of Artificial Sequence: Synthetic oligonucleotide
gccaacuuuccaaaagaaa

SEQ ID NO: 2990249 - RNA, 19 nt, Artificial Sequence
  Description of Artificial Sequence: Synthetic oligonucleotide
guacagguucucaggcaca

SEQ ID NO: 2990250 - RNA, 19 nt, Artificial Sequence
  Description of Artificial Sequence: Synthetic oligonucleotide
gcuaggcuaggagagcuga

SEQ ID NO: 2990251 - RNA, 19 nt, Artificial Sequence
  Description of Artificial Sequence: Synthetic oligonucleotide
gccccaaaguuuccauagc

SEQ ID NO: 2990252 - RNA, 19 nt, Artificial Sequence
  Description of Artificial Sequence: Synthetic oligonucleotide
cccaaaguuuccauagcaa

SEQ ID NO: 2990253 - RNA, 19 nt, Artificial Sequence
  Description of Artificial Sequence: Synthetic oligonucleotide
ugcuaccacuggccaacuu

SEQ ID NO: 2990254 - RNA, 19 nt, Artificial Sequence
  Description of Artificial Sequence: Synthetic oligonucleotide
gggcccugcagaacaaggc

SEQ ID NO: 2990255 - RNA, 19 nt, Artificial Sequence
  Description of Artificial Sequence: Synthetic oligonucleotide
ccuuccaggcucccaaguc

SEQ ID NO: 2990256 - RNA, 19 nt, Artificial Sequence
  Description of Artificial Sequence: Synthetic oligonucleotide
ucccuuggccccacaucuu

SEQ ID NO: 2990257 - RNA, 19 nt, Artificial Sequence
  Description of Artificial Sequence: Synthetic oligonucleotide
cacaucuuucacuuuccuu

SEQ ID NO: 2990258 - RNA, 19 nt, Artificial Sequence
  Description of Artificial Sequence: Synthetic oligonucleotide
ggcaugucugucccuuauc

SEQ ID NO: 2990259 - RNA, 19 nt, Artificial Sequence
  Description of Artificial Sequence: Synthetic oligonucleotide
guccucagugccccaaagu

SEQ ID NO: 2990260 - RNA, 19 nt, Artificial Sequence
  Description of Artificial Sequence: Synthetic oligonucleotide
cccaucccuaagaguacag

SEQ ID NO: 2990261 - RNA, 19 nt, Artificial Sequence
  Description of Artificial Sequence: Synthetic oligonucleotide
gugccccaaaguuuccaua

SEQ ID NO: 2990262 - RNA, 19 nt, Artificial Sequence
  Description of Artificial Sequence: Synthetic oligonucleotide
gcuaccacuggccaacuuu

SEQ ID NO: 2990263 - RNA, 19 nt, Artificial Sequence
  Description of Artificial Sequence: Synthetic oligonucleotide
cuuuccuuccaggcuccca

SEQ ID NO: 2990264 - RNA, 19 nt, Artificial Sequence
  Description of Artificial Sequence: Synthetic oligonucleotide
ggccaacuuuccaaaagaa

SEQ ID NO: 2990265 - RNA, 19 nt, Artificial Sequence
  Description of Artificial Sequence: Synthetic oligonucleotide
uugcuaccacuggccaacu

SEQ ID NO: 2990266 - RNA, 19 nt, Artificial Sequence
  Description of Artificial Sequence: Synthetic oligonucleotide
cagggcccugcagaacaag

SEQ ID NO: 2990267 - RNA, 19 nt, Artificial Sequence
  Description of Artificial Sequence: Synthetic oligonucleotide
gcucccaagucucuucugu

SEQ ID NO: 2990268 - RNA, 19 nt, Artificial Sequence
  Description of Artificial Sequence: Synthetic oligonucleotide
ggcccugcagaacaaggcu

SEQ ID NO: 2990269 - RNA, 19 nt, Artificial Sequence
  Description of Artificial Sequence: Synthetic oligonucleotide
accugccucucacucccuu

SEQ ID NO: 2990270 - RNA, 19 nt, Artificial Sequence
  Description of Artificial Sequence: Synthetic oligonucleotide
ccugccucucacucccuug

SEQ ID NO: 2990271 - RNA, 19 nt, Artificial Sequence
  Description of Artificial Sequence: Synthetic oligonucleotide
cccuaagaguacagagauc

SEQ ID NO: 2990272 - RNA, 19 nt, Artificial Sequence
  Description of Artificial Sequence: Synthetic oligonucleotide
cagcaucuccaucuuuugu

SEQ ID NO: 2990273 - RNA, 19 nt, Artificial Sequence
  Description of Artificial Sequence: Synthetic oligonucleotide
ccacuggccaacuuuccaa

SEQ ID NO: 2990274 - RNA, 19 nt, Artificial Sequence
  Description of Artificial Sequence: Synthetic oligonucleotide
cucucccaucccuaagagu

SEQ ID NO: 2990275 - RNA, 19 nt, Artificial Sequence
  Description of Artificial Sequence: Synthetic oligonucleotide
ucacucccuuggccccaca

SEQ ID NO: 2990276 - RNA, 19 nt, Artificial Sequence
  Description of Artificial Sequence: Synthetic oligonucleotide
cuaagaguacagagaucuu

SEQ ID NO: 2990277 - RNA, 19 nt, Artificial Sequence
  Description of Artificial Sequence: Synthetic oligonucleotide
ccugcagaacaaggcuagg

SEQ ID NO: 2990278 - RNA, 19 nt, Artificial Sequence
  Description of Artificial Sequence: Synthetic oligonucleotide
cagugccccaaaguuucca

SEQ ID NO: 2990279 - RNA, 19 nt, Artificial Sequence
  Description of Artificial Sequence: Synthetic oligonucleotide
ggccccacaucuuucacuu

SEQ ID NO: 2990280 - RNA, 19 nt, Artificial Sequence
  Description of Artificial Sequence: Synthetic oligonucleotide
gcaaaccagugccauugcu

SEQ ID NO: 2990281 - RNA, 19 nt, Artificial Sequence
  Description of Artificial Sequence: Synthetic oligonucleotide
cuagaagcacuugccugcu

SEQ ID NO: 2990282 - RNA, 19 nt, Artificial Sequence
  Description of Artificial Sequence: Synthetic oligonucleotide
ccuuggccccacaucuuuc

SEQ ID NO: 2990283 - RNA, 19 nt, Artificial Sequence
  Description of Artificial Sequence: Synthetic oligonucleotide
cugcucuaagugaggcugu

SEQ ID NO: 2990284 - RNA, 19 nt, Artificial Sequence
  Description of Artificial Sequence: Synthetic oligonucleotide
cccuauuuggcaugucugu

SEQ ID NO: 2990285 - RNA, 19 nt, Artificial Sequence
  Description of Artificial Sequence: Synthetic oligonucleotide
aaccugccucucacucccu

SEQ ID NO: 2990286 - RNA, 19 nt, Artificial Sequence
  Description of Artificial Sequence: Synthetic oligonucleotide
cucacucccuuggccccac

SEQ ID NO: 2990287 - RNA, 19 nt, Artificial Sequence
  Description of Artificial Sequence: Synthetic oligonucleotide
gcucuaagugaggcuguca

SEQ ID NO: 2990288 - RNA, 19 nt, Artificial Sequence
  Description of Artificial Sequence: Synthetic oligonucleotide
acagggcccugcagaacaa

SEQ ID NO: 2990289 - RNA, 19 nt, Artificial Sequence
  Description of Artificial Sequence: Synthetic oligonucleotide
ccaucccuaagaguacaga

SEQ ID NO: 2990290 - RNA, 19 nt, Artificial Sequence
  Description of Artificial Sequence: Synthetic oligonucleotide
gugaggcugucagcaucuc

SEQ ID NO: 2990291 - RNA, 19 nt, Artificial Sequence
  Description of Artificial Sequence: Synthetic oligonucleotide
cagugccauugcuaccacu

SEQ ID NO: 2990292 - RNA, 19 nt, Artificial Sequence
  Description of Artificial Sequence: Synthetic oligonucleotide
ccagugccauugcuaccac

SEQ ID NO: 2990293 - RNA, 19 nt, Artificial Sequence
  Description of Artificial Sequence: Synthetic oligonucleotide
gcccugcagaacaaggcua

SEQ ID NO: 2990294 - RNA, 19 nt, Artificial Sequence
  Description of Artificial Sequence: Synthetic oligonucleotide
cccuguccccuagaagcac

SEQ ID NO: 2990295 - RNA, 19 nt, Artificial Sequence
  Description of Artificial Sequence: Synthetic oligonucleotide
cuguccccuagaagcacuu

SEQ ID NO: 2990296 - RNA, 19 nt, Artificial Sequence
  Description of Artificial Sequence: Synthetic oligonucleotide
gccugcucuaagugaggcu

SEQ ID NO: 2990297 - RNA, 19 nt, Artificial Sequence
  Description of Artificial Sequence: Synthetic oligonucleotide
cugugacauacagggcccu

SEQ ID NO: 2990298 - RNA, 19 nt, Artificial Sequence
  Description of Artificial Sequence: Synthetic oligonucleotide
ccucagugccccaaaguuu

SEQ ID NO: 2990299 - RNA, 19 nt, Artificial Sequence
  Description of Artificial Sequence: Synthetic oligonucleotide
cacucccuuggccccacau

SEQ ID NO: 2990300 - RNA, 19 nt, Artificial Sequence
  Description of Artificial Sequence: Synthetic oligonucleotide
ccuguccccuagaagcacu

SEQ ID NO: 2990301 - RNA, 19 nt, Artificial Sequence
  Description of Artificial Sequence: Synthetic oligonucleotide
ccauagcaacaaaacuauu

SEQ ID NO: 2990302 - RNA, 19 nt, Artificial Sequence
  Description of Artificial Sequence: Synthetic oligonucleotide
cccuuggccccacaucuuu

SEQ ID NO: 2990303 - RNA, 19 nt, Artificial Sequence
  Description of Artificial Sequence: Synthetic oligonucleotide
gccccacaucuuucacuuu

SEQ ID NO: 2990304 - RNA, 19 nt, Artificial Sequence
  Description of Artificial Sequence: Synthetic oligonucleotide
agauacauaagucagugac

SEQ ID NO: 2990305 - RNA, 19 nt, Artificial Sequence
  Description of Artificial Sequence: Synthetic oligonucleotide
ucuauccccaaguagaugg

SEQ ID NO: 2990306 - RNA, 19 nt, Artificial Sequence
  Description of Artificial Sequence: Synthetic oligonucleotide
uggaagacuacccugagag

SEQ ID NO: 2990307 - RNA, 19 nt, Artificial Sequence
  Description of Artificial Sequence: Synthetic oligonucleotide
aagucagugacguauucgg

SEQ ID NO: 2990308 - RNA, 19 nt, Artificial Sequence
  Description of Artificial Sequence: Synthetic oligonucleotide
aagaggaaccagucuaucc

SEQ ID NO: 2990309 - RNA, 19 nt, Artificial Sequence
  Description of Artificial Sequence: Synthetic oligonucleotide
acacaaggaagacagagac

SEQ ID NO: 2990310 - RNA, 19 nt, Artificial Sequence
  Description of Artificial Sequence: Synthetic oligonucleotide
agaggaaccagucuauccc

SEQ ID NO: 2990311 - RNA, 19 nt, Artificial Sequence
  Description of Artificial Sequence: Synthetic oligonucleotide
uauugaugcagauacauaa

SEQ ID NO: 2990312 - RNA, 19 nt, Artificial Sequence
  Description of Artificial Sequence: Synthetic oligonucleotide
uagacaaugggcuuggcgc

SEQ ID NO: 2990313 - RNA, 19 nt, Artificial Sequence
  Description of Artificial Sequence: Synthetic oligonucleotide
aucuggaagacccagaaga

SEQ ID NO: 2990314 - RNA, 19 nt, Artificial Sequence
  Description of Artificial Sequence: Synthetic oligonucleotide
gaugcagauacauaaguca

SEQ ID NO: 2990315 - RNA, 19 nt, Artificial Sequence
  Description of Artificial Sequence: Synthetic oligonucleotide
gaggacacaaggaagacag

SEQ ID NO: 2990316 - RNA, 19 nt, Artificial Sequence
  Description of Artificial Sequence: Synthetic oligonucleotide
uggaagacccagaagagga

SEQ ID NO: 2990317 - RNA, 19 nt, Artificial Sequence
  Description of Artificial Sequence: Synthetic oligonucleotide
uuugcugcggccuugcccc

SEQ ID NO: 2990318 - RNA, 19 nt, Artificial Sequence
  Description of Artificial Sequence: Synthetic oligonucleotide
ugcaucuccauggugaccg

SEQ ID NO: 2990319 - RNA, 19 nt, Artificial Sequence
  Description of Artificial Sequence: Synthetic oligonucleotide
cugcuauugaugcagauac

SEQ ID NO: 2990320 - RNA, 19 nt, Artificial Sequence
  Description of Artificial Sequence: Synthetic oligonucleotide
agacuugucccucccagcc

SEQ ID NO: 2990321 - RNA, 19 nt, Artificial Sequence
  Description of Artificial Sequence: Synthetic oligonucleotide
gauacauaagucagugacg

SEQ ID NO: 2990322 - RNA, 19 nt, Artificial Sequence
  Description of Artificial Sequence: Synthetic oligonucleotide
uugaugcagauacauaagu

SEQ ID NO: 2990323 - RNA, 19 nt, Artificial Sequence
  Description of Artificial Sequence: Synthetic oligonucleotide
caggaaguagacaaugggc

SEQ ID NO: 2990324 - RNA, 19 nt, Artificial Sequence
  Description of Artificial Sequence: Synthetic oligonucleotide
ucacgaugcauucccagag

SEQ ID NO: 2990325 - RNA, 19 nt, Artificial Sequence
  Description of Artificial Sequence: Synthetic oligonucleotide
gaugcauucccagaggggc

SEQ ID NO: 2990326 - RNA, 19 nt, Artificial Sequence
  Description of Artificial Sequence: Synthetic oligonucleotide
gucagugacguauucgggg

SEQ ID NO: 2990327 - RNA, 19 nt, Artificial Sequence
  Description of Artificial Sequence: Synthetic oligonucleotide
ucuggaagacccagaagag

SEQ ID NO: 2990328 - RNA, 19 nt, Artificial Sequence
  Description of Artificial Sequence: Synthetic oligonucleotide
ugucucuggaagcuacugg

SEQ ID NO: 2990329 - RNA, 19 nt, Artificial Sequence
  Description of Artificial Sequence: Synthetic oligonucleotide
ugagacuugucccucccag

SEQ ID NO: 2990330 - RNA, 19 nt, Artificial Sequence
  Description of Artificial Sequence: Synthetic oligonucleotide
uuugcccuugggcagagug

SEQ ID NO: 2990331 - RNA, 19 nt, Artificial Sequence
  Description of Artificial Sequence: Synthetic oligonucleotide
aagacccagaagaggaacc

SEQ ID NO: 2990332 - RNA, 19 nt, Artificial Sequence
  Description of Artificial Sequence: Synthetic oligonucleotide
uaagucagugacguauucg

SEQ ID NO: 2990333 - RNA, 19 nt, Artificial Sequence
  Description of Artificial Sequence: Synthetic oligonucleotide
ugaugcagauacauaaguc

SEQ ID NO: 2990334 - RNA, 19 nt, Artificial Sequence
  Description of Artificial Sequence: Synthetic oligonucleotide
auacauaagucagugacgu

SEQ ID NO: 2990335 - RNA, 19 nt, Artificial Sequence
  Description of Artificial Sequence: Synthetic oligonucleotide
acuggccacucuuugcugc

SEQ ID NO: 2990336 - RNA, 19 nt, Artificial Sequence
  Description of Artificial Sequence: Synthetic oligonucleotide
gagagguucccacaggcgc

SEQ ID NO: 2990337 - RNA, 19 nt, Artificial Sequence
  Description of Artificial Sequence: Synthetic oligonucleotide
guagacaaugggcuuggcg

SEQ ID NO: 2990338 - RNA, 19 nt, Artificial Sequence
  Description of Artificial Sequence: Synthetic oligonucleotide
uccauggugaccguauuag

SEQ ID NO: 2990339 - RNA, 19 nt, Artificial Sequence
  Description of Artificial Sequence: Synthetic oligonucleotide
acgaugcauucccagaggg

SEQ ID NO: 2990340 - RNA, 19 nt, Artificial Sequence
  Description of Artificial Sequence: Synthetic oligonucleotide
ugagagguucccacaggcg

SEQ ID NO: 2990341 - RNA, 19 nt, Artificial Sequence
  Description of Artificial Sequence: Synthetic oligonucleotide
gauggaggacacaaggaag

SEQ ID NO: 2990342 - RNA, 19 nt, Artificial Sequence
  Description of Artificial Sequence: Synthetic oligonucleotide
ucccaggccacacaggggc

SEQ ID NO: 2990343 - RNA, 19 nt, Artificial Sequence
  Description of Artificial Sequence: Synthetic oligonucleotide
ugugcugguagcagugucc

SEQ ID NO: 2990344 - RNA, 19 nt, Artificial Sequence
  Description of Artificial Sequence: Synthetic oligonucleotide
accguauuaggugugcugg

SEQ ID NO: 2990345 - RNA, 19 nt, Artificial Sequence
  Description of Artificial Sequence: Synthetic oligonucleotide
uuggcgcugcuauugaugc

SEQ ID NO: 2990346 - RNA, 19 nt, Artificial Sequence
  Description of Artificial Sequence: Synthetic oligonucleotide
aaguagauggaggacacaa

SEQ ID NO: 2990347 - RNA, 19 nt, Artificial Sequence
  Description of Artificial Sequence: Synthetic oligonucleotide
auaagucagugacguauuc

SEQ ID NO: 2990348 - RNA, 19 nt, Artificial Sequence
  Description of Artificial Sequence: Synthetic oligonucleotide
auggugaccguauuaggug

SEQ ID NO: 2990349 - RNA, 19 nt, Artificial Sequence
  Description of Artificial Sequence: Synthetic oligonucleotide
uauuaggugugcugguagc

SEQ ID NO: 2990350 - RNA, 19 nt, Artificial Sequence
  Description of Artificial Sequence: Synthetic oligonucleotide
aaccagucuauccccaagu

SEQ ID NO: 2990351 - RNA, 19 nt, Artificial Sequence
  Description of Artificial Sequence: Synthetic oligonucleotide
acauaagucagugacguau

SEQ ID NO: 2990352 - RNA, 19 nt, Artificial Sequence
  Description of Artificial Sequence: Synthetic oligonucleotide
guauuaggugugcugguag

SEQ ID NO: 2990353 - RNA, 19 nt, Artificial Sequence
  Description of Artificial Sequence: Synthetic oligonucleotide
agauggaggacacaaggaa

SEQ ID NO: 2990354 - RNA, 19 nt, Artificial Sequence
  Description of Artificial Sequence: Synthetic oligonucleotide
ucagugacguauucgggga

SEQ ID NO: 2990355 - RNA, 19 nt, Artificial Sequence
  Description of Artificial Sequence: Synthetic oligonucleotide
gacguauucggggaagggg

SEQ ID NO: 2990356 - RNA, 19 nt, Artificial Sequence
  Description of Artificial Sequence: Synthetic oligonucleotide
agaggggcacugcaucucc

SEQ ID NO: 2990357 - RNA, 19 nt, Artificial Sequence
  Description of Artificial Sequence: Synthetic oligonucleotide
aggaaguagacaaugggcu

SEQ ID NO: 2990358 - RNA, 19 nt, Artificial Sequence
  Description of Artificial Sequence: Synthetic oligonucleotide
uguccccuggcucagcacc

SEQ ID NO: 2990359 - RNA, 19 nt, Artificial Sequence
  Description of Artificial Sequence: Synthetic oligonucleotide
aggcgcugagacuuguccc

SEQ ID NO: 2990360 - RNA, 19 nt, Artificial Sequence
  Description of Artificial Sequence: Synthetic oligonucleotide
cagucuauccccaaguaga

SEQ ID NO: 2990361 - RNA, 19 nt, Artificial Sequence
  Description of Artificial Sequence: Synthetic oligonucleotide
ucucacgaugcauucccag

SEQ ID NO: 2990362 - RNA, 19 nt, Artificial Sequence
  Description of Artificial Sequence: Synthetic oligonucleotide
uccccaaguagauggagga

SEQ ID NO: 2990363 - RNA, 19 nt, Artificial Sequence
  Description of Artificial Sequence: Synthetic oligonucleotide
augcagauacauaagucag

SEQ ID NO: 2990364 - RNA, 19 nt, Artificial Sequence
  Description of Artificial Sequence: Synthetic oligonucleotide
cugagagguucccacaggc

SEQ ID NO: 2990365 - RNA, 19 nt, Artificial Sequence
  Description of Artificial Sequence: Synthetic oligonucleotide
acuugucccucccagccag

SEQ ID NO: 2990366 - RNA, 19 nt, Artificial Sequence
  Description of Artificial Sequence: Synthetic oligonucleotide
aucccguagagcccgcugg

SEQ ID NO: 2990367 - RNA, 19 nt, Artificial Sequence
  Description of Artificial Sequence: Synthetic oligonucleotide
gaucuggaagacccagaag

SEQ ID NO: 2990368 - RNA, 19 nt, Artificial Sequence
  Description of Artificial Sequence: Synthetic oligonucleotide
ucagcaccaucccguagag

SEQ ID NO: 2990369 - RNA, 19 nt, Artificial Sequence
  Description of Artificial Sequence: Synthetic oligonucleotide
uuaggugugcugguagcag

SEQ ID NO: 2990370 - RNA, 19 nt, Artificial Sequence
  Description of Artificial Sequence: Synthetic oligonucleotide
agcugcccugcuuuugccc

SEQ ID NO: 2990371 - RNA, 19 nt, Artificial Sequence
  Description of Artificial Sequence: Synthetic oligonucleotide
cuuggcgcugcuauugaug

SEQ ID NO: 2990372 - RNA, 19 nt, Artificial Sequence
  Description of Artificial Sequence: Synthetic oligonucleotide
gaaccagucuauccccaag

SEQ ID NO: 2990373 - RNA, 19 nt, Artificial Sequence
  Description of Artificial Sequence: Synthetic oligonucleotide
cuuugcugcggccuugccc

SEQ ID NO: 2990374 - RNA, 19 nt, Artificial Sequence
  Description of Artificial Sequence: Synthetic oligonucleotide
gaagacuacccugagaggu

SEQ ID NO: 2990375 - RNA, 19 nt, Artificial Sequence
  Description of Artificial Sequence: Synthetic oligonucleotide
cacugcaucuccaugguga

SEQ ID NO: 2990376 - RNA, 19 nt, Artificial Sequence
  Description of Artificial Sequence: Synthetic oligonucleotide
uggugaccguauuaggugu

SEQ ID NO: 2990377 - RNA, 19 nt, Artificial Sequence
  Description of Artificial Sequence: Synthetic oligonucleotide
ggcagagugucucuggaag

SEQ ID NO: 2990378 - RNA, 19 nt, Artificial Sequence
  Description of Artificial Sequence: Synthetic oligonucleotide
gaccguauuaggugugcug

SEQ ID NO: 2990379 - RNA, 19 nt, Artificial Sequence
  Description of Artificial Sequence: Synthetic oligonucleotide
ggacacaaggaagacagag

SEQ ID NO: 2990380 - RNA, 19 nt, Artificial Sequence
  Description of Artificial Sequence: Synthetic oligonucleotide
agacacuggccucucacga

SEQ ID NO: 2990381 - RNA, 19 nt, Artificial Sequence
  Description of Artificial Sequence: Synthetic oligonucleotide
agacaaugggcuuggcgcu

SEQ ID NO: 2990382 - RNA, 19 nt, Artificial Sequence
  Description of Artificial Sequence: Synthetic oligonucleotide
uucccacaggcgcugagac

SEQ ID NO: 2990383 - RNA, 19 nt, Artificial Sequence
  Description of Artificial Sequence: Synthetic oligonucleotide
agcaguguccccuggcuca

SEQ ID NO: 2990384 - RNA, 19 nt, Artificial Sequence
  Description of Artificial Sequence: Synthetic oligonucleotide
uggcucagcaccaucccgu

SEQ ID NO: 2990385 - RNA, 19 nt, Artificial Sequence
  Description of Artificial Sequence: Synthetic oligonucleotide
cuggaagacccagaagagg

SEQ ID NO: 2990386 - RNA, 19 nt, Artificial Sequence
  Description of Artificial Sequence: Synthetic oligonucleotide
cagacacuggccucucacg

SEQ ID NO: 2990387 - RNA, 19 nt, Artificial Sequence
  Description of Artificial Sequence: Synthetic oligonucleotide
gaagacccagaagaggaac

SEQ ID NO: 2990388 - RNA, 19 nt, Artificial Sequence
  Description of Artificial Sequence: Synthetic oligonucleotide
ugacguauucggggaaggg

SEQ ID NO: 2990389 - RNA, 19 nt, Artificial Sequence
  Description of Artificial Sequence: Synthetic oligonucleotide
cugcuuuugcccuugggca

SEQ ID NO: 2990390 - RNA, 19 nt, Artificial Sequence
  Description of Artificial Sequence: Synthetic oligonucleotide
gcagauacauaagucagug

SEQ ID NO: 2990391 - RNA, 19 nt, Artificial Sequence
  Description of Artificial Sequence: Synthetic oligonucleotide
acuacccugagagguuccc

SEQ ID NO: 2990392 - RNA, 19 nt, Artificial Sequence
  Description of Artificial Sequence: Synthetic oligonucleotide
acacuggccucucacgaug

SEQ ID NO: 2990393 - RNA, 19 nt, Artificial Sequence
  Description of Artificial Sequence: Synthetic oligonucleotide
ugcuauugaugcagauaca

SEQ ID NO: 2990394 - RNA, 19 nt, Artificial Sequence
  Description of Artificial Sequence: Synthetic oligonucleotide
ccaggaaguagacaauggg

SEQ ID NO: 2990395 - RNA, 19 nt, Artificial Sequence
  Description of Artificial Sequence: Synthetic oligonucleotide
gagacuugucccucccagc

SEQ ID NO: 2990396 - RNA, 19 nt, Artificial Sequence
  Description of Artificial Sequence: Synthetic oligonucleotide
uacccugagagguucccac

SEQ ID NO: 2990397 - RNA, 19 nt, Artificial Sequence
  Description of Artificial Sequence: Synthetic oligonucleotide
uauccccaaguagauggag

SEQ ID NO: 2990398 - RNA, 19 nt, Artificial Sequence
  Description of Artificial Sequence: Synthetic oligonucleotide
uugccccagacacuggccu

SEQ ID NO: 2990399 - RNA, 19 nt, Artificial Sequence
  Description of Artificial Sequence: Synthetic oligonucleotide
gcugggaucuggaagaccc

SEQ ID NO: 2990400 - RNA, 19 nt, Artificial Sequence
  Description of Artificial Sequence: Synthetic oligonucleotide
cacgaugcauucccagagg

SEQ ID NO: 2990401 - RNA, 19 nt, Artificial Sequence
  Description of Artificial Sequence: Synthetic oligonucleotide
uucucccaggccacacagg

SEQ ID NO: 2990402 - RNA, 19 nt, Artificial Sequence
  Description of Artificial Sequence: Synthetic oligonucleotide
caggcgcugagacuugucc

SEQ ID NO: 2990403 - RNA, 19 nt, Artificial Sequence
  Description of Artificial Sequence: Synthetic oligonucleotide
ccugcuuuugcccuugggc

SEQ ID NO: 2990404 - RNA, 19 nt, Artificial Sequence
  Description of Artificial Sequence: Synthetic oligonucleotide
gacacaaggaagacagaga

SEQ ID NO: 2990405 - RNA, 19 nt, Artificial Sequence
  Description of Artificial Sequence: Synthetic oligonucleotide
ugggcagagugucucugga

SEQ ID NO: 2990406 - RNA, 19 nt, Artificial Sequence
  Description of Artificial Sequence: Synthetic oligonucleotide
uucccagaggggcacugca

SEQ ID NO: 2990407 - RNA, 19 nt, Artificial Sequence
  Description of Artificial Sequence: Synthetic oligonucleotide
auccccaaguagauggagg

SEQ ID NO: 2990408 - RNA, 19 nt, Artificial Sequence
  Description of Artificial Sequence: Synthetic oligonucleotide
aguagauggaggacacaag

SEQ ID NO: 2990409 - RNA, 19 nt, Artificial Sequence
  Description of Artificial Sequence: Synthetic oligonucleotide
agugacguauucggggaag

SEQ ID NO: 2990410 - RNA, 19 nt, Artificial Sequence
  Description of Artificial Sequence: Synthetic oligonucleotide
uaggugugcugguagcagu

SEQ ID NO: 2990411 - RNA, 19 nt, Artificial Sequence
  Description of Artificial Sequence: Synthetic oligonucleotide
agcuacuggccacucuuug

SEQ ID NO: 2990412 - RNA, 19 nt, Artificial Sequence
  Description of Artificial Sequence: Synthetic oligonucleotide
agacuacccugagagguuc

SEQ ID NO: 2990413 - RNA, 19 nt, Artificial Sequence
  Description of Artificial Sequence: Synthetic oligonucleotide
auuaggugugcugguagca

SEQ ID NO: 2990414 - RNA, 19 nt, Artificial Sequence
  Description of Artificial Sequence: Synthetic oligonucleotide
agccaggaaguagacaaug

SEQ ID NO: 2990415 - RNA, 19 nt, Artificial Sequence
  Description of Artificial Sequence: Synthetic oligonucleotide
agucagugacguauucggg

SEQ ID NO: 2990416 - RNA, 19 nt, Artificial Sequence
  Description of Artificial Sequence: Synthetic oligonucleotide
augggcuuggcgcugcuau

SEQ ID NO: 2990417 - RNA, 19 nt, Artificial Sequence
  Description of Artificial Sequence: Synthetic oligonucleotide
cuugccccagacacuggcc

SEQ ID NO: 2990418 - RNA, 19 nt, Artificial Sequence
  Description of Artificial Sequence: Synthetic oligonucleotide
cucagcaccaucccguaga

SEQ ID NO: 2990419 - RNA, 19 nt, Artificial Sequence
  Description of Artificial Sequence: Synthetic oligonucleotide
cuggcucagcaccaucccg

SEQ ID NO: 2990420 - RNA, 19 nt, Artificial Sequence
  Description of Artificial Sequence: Synthetic oligonucleotide
ggaagacuacccugagagg

SEQ ID NO: 2990421 - RNA, 19 nt, Artificial Sequence
  Description of Artificial Sequence: Synthetic oligonucleotide
uugcccuugggcagagugu

SEQ ID NO: 2990422 - RNA, 19 nt, Artificial Sequence
  Description of Artificial Sequence: Synthetic oligonucleotide
cauggugaccguauuaggu

SEQ ID NO: 2990423 - RNA, 19 nt, Artificial Sequence
  Description of Artificial Sequence: Synthetic oligonucleotide
auucccagaggggcacugc

SEQ ID NO: 2990424 - RNA, 19 nt, Artificial Sequence
  Description of Artificial Sequence: Synthetic oligonucleotide
cuggccacucuuugcugcg

SEQ ID NO: 2990425 - RNA, 19 nt, Artificial Sequence
  Description of Artificial Sequence: Synthetic oligonucleotide
acaggggcagcugcccugc

SEQ ID NO: 2990426 - RNA, 19 nt, Artificial Sequence
  Description of Artificial Sequence: Synthetic oligonucleotide
gugacguauucggggaagg

SEQ ID NO: 2990427 - RNA, 19 nt, Artificial Sequence
  Description of Artificial Sequence: Synthetic oligonucleotide
gagugucucuggaagcuac

SEQ ID NO: 2990428 - RNA, 19 nt, Artificial Sequence
  Description of Artificial Sequence: Synthetic oligonucleotide
ugguagcaguguccccugg

SEQ ID NO: 2990429 - RNA, 19 nt, Artificial Sequence
  Description of Artificial Sequence: Synthetic oligonucleotide
gaagcuacuggccacucuu

SEQ ID NO: 2990430 - RNA, 19 nt, Artificial Sequence
  Description of Artificial Sequence: Synthetic oligonucleotide
uggccucucacgaugcauu

SEQ ID NO: 2990431 - RNA, 19 nt, Artificial Sequence
  Description of Artificial Sequence: Synthetic oligonucleotide
cuauugaugcagauacaua

SEQ ID NO: 2990432 - RNA, 19 nt, Artificial Sequence
  Description of Artificial Sequence: Synthetic oligonucleotide
uacuggccacucuuugcug

SEQ ID NO: 2990433 - RNA, 19 nt, Artificial Sequence
  Description of Artificial Sequence: Synthetic oligonucleotide
gacccagaagaggaaccag

SEQ ID NO: 2990434 - RNA, 19 nt, Artificial Sequence
  Description of Artificial Sequence: Synthetic oligonucleotide
gaagaggaaccagucuauc

SEQ ID NO: 2990435 - RNA, 19 nt, Artificial Sequence
  Description of Artificial Sequence: Synthetic oligonucleotide
aguguccccuggcucagca

SEQ ID NO: 2990436 - RNA, 19 nt, Artificial Sequence
  Description of Artificial Sequence: Synthetic oligonucleotide
ggcgcugcuauugaugcag

SEQ ID NO: 2990437 - RNA, 19 nt, Artificial Sequence
  Description of Artificial Sequence: Synthetic oligonucleotide
caccaucccguagagcccg

SEQ ID NO: 2990438 - RNA, 19 nt, Artificial Sequence
  Description of Artificial Sequence: Synthetic oligonucleotide
ccucucacgaugcauuccc

SEQ ID NO: 2990439 - RNA, 19 nt, Artificial Sequence
  Description of Artificial Sequence: Synthetic oligonucleotide
uagcaguguccccuggcuc

SEQ ID NO: 2990440 - RNA, 19 nt, Artificial Sequence
  Description of Artificial Sequence: Synthetic oligonucleotide
agacccagaagaggaacca

SEQ ID NO: 2990441 - RNA, 19 nt, Artificial Sequence
  Description of Artificial Sequence: Synthetic oligonucleotide
uggaggacacaaggaagac

SEQ ID NO: 2990442 - RNA, 19 nt, Artificial Sequence
  Description of Artificial Sequence: Synthetic oligonucleotide
ccaaguagauggaggacac

SEQ ID NO: 2990443 - RNA, 19 nt, Artificial Sequence
  Description of Artificial Sequence: Synthetic oligonucleotide
agaagaggaaccagucuau

SEQ ID NO: 2990444 - RNA, 19 nt, Artificial Sequence
  Description of Artificial Sequence: Synthetic oligonucleotide
gcuacuggccacucuuugc

SEQ ID NO: 2990445 - RNA, 19 nt, Artificial Sequence
  Description of Artificial Sequence: Synthetic oligonucleotide
ugcccuugggcagaguguc

SEQ ID NO: 2990446 - RNA, 19 nt, Artificial Sequence
  Description of Artificial Sequence: Synthetic oligonucleotide
ugcauucccagaggggcac

SEQ ID NO: 2990447 - RNA, 19 nt, Artificial Sequence
  Description of Artificial Sequence: Synthetic oligonucleotide
ucccguagagcccgcugga

SEQ ID NO: 2990448 - RNA, 19 nt, Artificial Sequence
  Description of Artificial Sequence: Synthetic oligonucleotide
gcggccuugccccagacac

SEQ ID NO: 2990449 - RNA, 19 nt, Artificial Sequence
  Description of Artificial Sequence: Synthetic oligonucleotide
ccagucuauccccaaguag

SEQ ID NO: 2990450 - RNA, 19 nt, Artificial Sequence
  Description of Artificial Sequence: Synthetic oligonucleotide
cacuggccucucacgaugc

SEQ ID NO: 2990451 - RNA, 19 nt, Artificial Sequence
  Description of Artificial Sequence: Synthetic oligonucleotide
gcagagugucucuggaagc

SEQ ID NO: 2990452 - RNA, 19 nt, Artificial Sequence
  Description of Artificial Sequence: Synthetic oligonucleotide
gugcugguagcaguguccc

SEQ ID NO: 2990453 - RNA, 19 nt, Artificial Sequence
  Description of Artificial Sequence: Synthetic oligonucleotide
accagucuauccccaagua

SEQ ID NO: 2990454 - RNA, 19 nt, Artificial Sequence
  Description of Artificial Sequence: Synthetic oligonucleotide
ucuuugcugcggccuugcc

SEQ ID NO: 2990455 - RNA, 19 nt, Artificial Sequence
  Description of Artificial Sequence: Synthetic oligonucleotide
ggggcugggaucuggaaga

SEQ ID NO: 2990456 - RNA, 19 nt, Artificial Sequence
  Description of Artificial Sequence: Synthetic oligonucleotide
ucccucccagccaggaagu

SEQ ID NO: 2990457 - RNA, 19 nt, Artificial Sequence
  Description of Artificial Sequence: Synthetic oligonucleotide
ggaucuggaagacccagaa

SEQ ID NO: 2990458 - RNA, 19 nt, Artificial Sequence
  Description of Artificial Sequence: Synthetic oligonucleotide
uacauaagucagugacgua

SEQ ID NO: 2990459 - RNA, 19 nt, Artificial Sequence
  Description of Artificial Sequence: Synthetic oligonucleotide
cagauacauaagucaguga

SEQ ID NO: 2990460 - RNA, 19 nt, Artificial Sequence
  Description of Artificial Sequence: Synthetic oligonucleotide
aagacuacccugagagguu

SEQ ID NO: 2990461 - RNA, 19 nt, Artificial Sequence
  Description of Artificial Sequence: Synthetic oligonucleotide
gccaggaaguagacaaugg

SEQ ID NO: 2990462 - RNA, 19 nt, Artificial Sequence
  Description of Artificial Sequence: Synthetic oligonucleotide
acccagaagaggaaccagu

SEQ ID NO: 2990463 - RNA, 19 nt, Artificial Sequence
  Description of Artificial Sequence: Synthetic oligonucleotide
gacaaugggcuuggcgcug

SEQ ID NO: 2990464 - RNA, 19 nt, Artificial Sequence
  Description of Artificial Sequence: Synthetic oligonucleotide
gguagcaguguccccuggc

SEQ ID NO: 2990465 - RNA, 19 nt, Artificial Sequence
  Description of Artificial Sequence: Synthetic oligonucleotide
ugaccguauuaggugugcu

SEQ ID NO: 2990466 - RNA, 19 nt, Artificial Sequence
  Description of Artificial Sequence: Synthetic oligonucleotide
gugucucuggaagcuacug

SEQ ID NO: 2990467 - RNA, 19 nt, Artificial Sequence
  Description of Artificial Sequence: Synthetic oligonucleotide
gacuugucccucccagcca

SEQ ID NO: 2990468 - RNA, 19 nt, Artificial Sequence
  Description of Artificial Sequence: Synthetic oligonucleotide
ucuccauggugaccguauu

SEQ ID NO: 2990469 - RNA, 19 nt, Artificial Sequence
  Description of Artificial Sequence: Synthetic oligonucleotide
cuugggcagagugucucug

SEQ ID NO: 2990470 - RNA, 19 nt, Artificial Sequence
  Description of Artificial Sequence: Synthetic oligonucleotide
ccauggugaccguauuagg

SEQ ID NO: 2990471 - RNA, 19 nt, Artificial Sequence
  Description of Artificial Sequence: Synthetic oligonucleotide
agucuauccccaaguagau

SEQ ID NO: 2990472 - RNA, 19 nt, Artificial Sequence
  Description of Artificial Sequence: Synthetic oligonucleotide
cugguagcaguguccccug

SEQ ID NO: 2990473 - RNA, 19 nt, Artificial Sequence
  Description of Artificial Sequence: Synthetic oligonucleotide
agagguucccacaggcgcu

SEQ ID NO: 2990474 - RNA, 19 nt, Artificial Sequence
  Description of Artificial Sequence: Synthetic oligonucleotide
gugaccguauuaggugugc

SEQ ID NO: 2990475 - RNA, 19 nt, Artificial Sequence
  Description of Artificial Sequence: Synthetic oligonucleotide
cuugucccucccagccagg

SEQ ID NO: 2990476 - RNA, 19 nt, Artificial Sequence
  Description of Artificial Sequence: Synthetic oligonucleotide
acccugagagguucccaca

SEQ ID NO: 2990477 - RNA, 19 nt, Artificial Sequence
  Description of Artificial Sequence: Synthetic oligonucleotide
cacacaggggcagcugccc

SEQ ID NO: 2990478 - RNA, 19 nt, Artificial Sequence
  Description of Artificial Sequence: Synthetic oligonucleotide
gucuauccccaaguagaug

SEQ ID NO: 2990479 - RNA, 19 nt, Artificial Sequence
  Description of Artificial Sequence: Synthetic oligonucleotide
cuauccccaaguagaugga

SEQ ID NO: 2990480 - RNA, 19 nt, Artificial Sequence
  Description of Artificial Sequence: Synthetic oligonucleotide
ugcugguagcagugucccc

SEQ ID NO: 2990481 - RNA, 19 nt, Artificial Sequence
  Description of Artificial Sequence: Synthetic oligonucleotide
cacaggggcagcugcccug

SEQ ID NO: 2990482 - RNA, 19 nt, Artificial Sequence
  Description of Artificial Sequence: Synthetic oligonucleotide
gcagcugcccugcuuuugc

SEQ ID NO: 2990483 - RNA, 19 nt, Artificial Sequence
  Description of Artificial Sequence: Synthetic oligonucleotide
aucuccauggugaccguau

SEQ ID NO: 2990484 - RNA, 19 nt, Artificial Sequence
  Description of Artificial Sequence: Synthetic oligonucleotide
gugugcugguagcaguguc

SEQ ID NO: 2990485 - RNA, 19 nt, Artificial Sequence
  Description of Artificial Sequence: Synthetic oligonucleotide
gagguucccacaggcgcug

SEQ ID NO: 2990486 - RNA, 19 nt, Artificial Sequence
  Description of Artificial Sequence: Synthetic oligonucleotide
ugcggccuugccccagaca

SEQ ID NO: 2990487 - RNA, 19 nt, Artificial Sequence
  Description of Artificial Sequence: Synthetic oligonucleotide
caucccguagagcccgcug

SEQ ID NO: 2990488 - RNA, 19 nt, Artificial Sequence
  Description of Artificial Sequence: Synthetic oligonucleotide
cccagaagaggaaccaguc

SEQ ID NO: 2990489 - RNA, 19 nt, Artificial Sequence
  Description of Artificial Sequence: Synthetic oligonucleotide
gcuggaagacuacccugag

SEQ ID NO: 2990490 - RNA, 19 nt, Artificial Sequence
  Description of Artificial Sequence: Synthetic oligonucleotide
guagcaguguccccuggcu

SEQ ID NO: 2990491 - RNA, 19 nt, Artificial Sequence
  Description of Artificial Sequence: Synthetic oligonucleotide
ugucccucccagccaggaa

SEQ ID NO: 2990492 - RNA, 19 nt, Artificial Sequence
  Description of Artificial Sequence: Synthetic oligonucleotide
guagagcccgcuggaagac

SEQ ID NO: 2990493 - RNA, 19 nt, Artificial Sequence
  Description of Artificial Sequence: Synthetic oligonucleotide
ucccacaggcgcugagacu

SEQ ID NO: 2990494 - RNA, 19 nt, Artificial Sequence
  Description of Artificial Sequence: Synthetic oligonucleotide
cucuuugcugcggccuugc

SEQ ID NO: 2990495 - RNA, 19 nt, Artificial Sequence
  Description of Artificial Sequence: Synthetic oligonucleotide
cccuggcucagcaccaucc

SEQ ID NO: 2990496 - RNA, 19 nt, Artificial Sequence
  Description of Artificial Sequence: Synthetic oligonucleotide
uugucccucccagccagga

SEQ ID NO: 2990497 - RNA, 19 nt, Artificial Sequence
  Description of Artificial Sequence: Synthetic oligonucleotide
cuggaagacuacccugaga

SEQ ID NO: 2990498 - RNA, 19 nt, Artificial Sequence
  Description of Artificial Sequence: Synthetic oligonucleotide
gacuacccugagagguucc

SEQ ID NO: 2990499 - RNA, 19 nt, Artificial Sequence
  Description of Artificial Sequence: Synthetic oligonucleotide
gccacacaggggcagcugc

SEQ ID NO: 2990500 - RNA, 19 nt, Artificial Sequence
  Description of Artificial Sequence: Synthetic oligonucleotide
gcugagacuugucccuccc

SEQ ID NO: 2990501 - RNA, 19 nt, Artificial Sequence
  Description of Artificial Sequence: Synthetic oligonucleotide
aggggcacugcaucuccau

SEQ ID NO: 2990502 - RNA, 19 nt, Artificial Sequence
  Description of Artificial Sequence: Synthetic oligonucleotide
gcuauugaugcagauacau

SEQ ID NO: 2990503 - RNA, 19 nt, Artificial Sequence
  Description of Artificial Sequence: Synthetic oligonucleotide
cagcugcccugcuuuugcc

SEQ ID NO: 2990504 - RNA, 19 nt, Artificial Sequence
  Description of Artificial Sequence: Synthetic oligonucleotide
ccagacacuggccucucac

SEQ ID NO: 2990505 - RNA, 19 nt, Artificial Sequence
  Description of Artificial Sequence: Synthetic oligonucleotide
ccugagagguucccacagg

SEQ ID NO: 2990506 - RNA, 19 nt, Artificial Sequence
  Description of Artificial Sequence: Synthetic oligonucleotide
acuggccucucacgaugca

SEQ ID NO: 2990507 - RNA, 19 nt, Artificial Sequence
  Description of Artificial Sequence: Synthetic oligonucleotide
agugucucuggaagcuacu

SEQ ID NO: 2990508 - RNA, 19 nt, Artificial Sequence
  Description of Artificial Sequence: Synthetic oligonucleotide
aggaaccagucuaucccca

SEQ ID NO: 2990509 - RNA, 19 nt, Artificial Sequence
  Description of Artificial Sequence: Synthetic oligonucleotide
uggcgcugcuauugaugca

SEQ ID NO: 2990510 - RNA, 19 nt, Artificial Sequence
  Description of Artificial Sequence: Synthetic oligonucleotide
cauaagucagugacguauu

SEQ ID NO: 2990511 - RNA, 19 nt, Artificial Sequence
  Description of Artificial Sequence: Synthetic oligonucleotide
cauucccagaggggcacug

SEQ ID NO: 2990512 - RNA, 19 nt, Artificial Sequence
  Description of Artificial Sequence: Synthetic oligonucleotide
cuuuugcccuugggcagag

SEQ ID NO: 2990513 - RNA, 19 nt, Artificial Sequence
  Description of Artificial Sequence: Synthetic oligonucleotide
ggccuugccccagacacug

SEQ ID NO: 2990514 - RNA, 19 nt, Artificial Sequence
  Description of Artificial Sequence: Synthetic oligonucleotide
ugccccagacacuggccuc

SEQ ID NO: 2990515 - RNA, 19 nt, Artificial Sequence
  Description of Artificial Sequence: Synthetic oligonucleotide
cgaugcauucccagagggg

SEQ ID NO: 2990516 - RNA, 19 nt, Artificial Sequence
  Description of Artificial Sequence: Synthetic oligonucleotide
cccugagagguucccacag

SEQ ID NO: 2990517 - RNA, 19 nt, Artificial Sequence
  Description of Artificial Sequence: Synthetic oligonucleotide
augcauucccagaggggca

SEQ ID NO: 2990518 - RNA, 19 nt, Artificial Sequence
  Description of Artificial Sequence: Synthetic oligonucleotide
cccaaguagauggaggaca

SEQ ID NO: 2990519 - RNA, 19 nt, Artificial Sequence
  Description of Artificial Sequence: Synthetic oligonucleotide
cucuucucccaggccacac

SEQ ID NO: 2990520 - RNA, 19 nt, Artificial Sequence
  Description of Artificial Sequence: Synthetic oligonucleotide
aagcuacuggccacucuuu

SEQ ID NO: 2990521 - RNA, 19 nt, Artificial Sequence
  Description of Artificial Sequence: Synthetic oligonucleotide
cugcaucuccauggugacc

SEQ ID NO: 2990522 - RNA, 19 nt, Artificial Sequence
  Description of Artificial Sequence: Synthetic oligonucleotide
ggaggacacaaggaagaca

SEQ ID NO: 2990523 - RNA, 19 nt, Artificial Sequence
  Description of Artificial Sequence: Synthetic oligonucleotide
acaggcgcugagacuuguc

SEQ ID NO: 2990524 - RNA, 19 nt, Artificial Sequence
  Description of Artificial Sequence: Synthetic oligonucleotide
guucccacaggcgcugaga

SEQ ID NO: 2990525 - RNA, 19 nt, Artificial Sequence
  Description of Artificial Sequence: Synthetic oligonucleotide
cucucacgaugcauuccca

SEQ ID NO: 2990526 - RNA, 19 nt, Artificial Sequence
  Description of Artificial Sequence: Synthetic oligonucleotide
ugcccugcuuuugcccuug

SEQ ID NO: 2990527 - RNA, 19 nt, Artificial Sequence
  Description of Artificial Sequence: Synthetic oligonucleotide
uagagcccgcuggaagacu

SEQ ID NO: 2990528 - RNA, 19 nt, Artificial Sequence
  Description of Artificial Sequence: Synthetic oligonucleotide
ccguagagcccgcuggaag

SEQ ID NO: 2990529 - RNA, 19 nt, Artificial Sequence
  Description of Artificial Sequence: Synthetic oligonucleotide
ggugaccguauuaggugug

SEQ ID NO: 2990530 - RNA, 19 nt, Artificial Sequence
  Description of Artificial Sequence: Synthetic oligonucleotide
agagugucucuggaagcua

SEQ ID NO: 2990531 - RNA, 19 nt, Artificial Sequence
  Description of Artificial Sequence: Synthetic oligonucleotide
uggaagcuacuggccacuc

SEQ ID NO: 2990532 - RNA, 19 nt, Artificial Sequence
  Description of Artificial Sequence: Synthetic oligonucleotide
gacacuggccucucacgau

SEQ ID NO: 2990533 - RNA, 19 nt, Artificial Sequence
  Description of Artificial Sequence: Synthetic oligonucleotide
ccuggcucagcaccauccc

SEQ ID NO: 2990534 - RNA, 19 nt, Artificial Sequence
  Description of Artificial Sequence: Synthetic oligonucleotide
cugggaucuggaagaccca

SEQ ID NO: 2990535 - RNA, 19 nt, Artificial Sequence
  Description of Artificial Sequence: Synthetic oligonucleotide
ggggcacugcaucuccaug

SEQ ID NO: 2990536 - RNA, 19 nt, Artificial Sequence
  Description of Artificial Sequence: Synthetic oligonucleotide
gggcuuggcgcugcuauug

SEQ ID NO: 2990537 - RNA, 19 nt, Artificial Sequence
  Description of Artificial Sequence: Synthetic oligonucleotide
cuccauggugaccguauua

SEQ ID NO: 2990538 - RNA, 19 nt, Artificial Sequence
  Description of Artificial Sequence: Synthetic oligonucleotide
cugagacuugucccuccca

SEQ ID NO: 2990539 - RNA, 19 nt, Artificial Sequence
  Description of Artificial Sequence: Synthetic oligonucleotide
ggccacucuuugcugcggc

SEQ ID NO: 2990540 - RNA, 19 nt, Artificial Sequence
  Description of Artificial Sequence: Synthetic oligonucleotide
ugggcuuggcgcugcuauu

SEQ ID NO: 2990541 - RNA, 19 nt, Artificial Sequence
  Description of Artificial Sequence: Synthetic oligonucleotide
gguucccacaggcgcugag

SEQ ID NO: 2990542 - RNA, 19 nt, Artificial Sequence
  Description of Artificial Sequence: Synthetic oligonucleotide
ggaaguagacaaugggcuu

SEQ ID NO: 2990543 - RNA, 19 nt, Artificial Sequence
  Description of Artificial Sequence: Synthetic oligonucleotide
agagcccgcuggaagacua

SEQ ID NO: 2990544 - RNA, 19 nt, Artificial Sequence
  Description of Artificial Sequence: Synthetic oligonucleotide
cagagugucucuggaagcu

SEQ ID NO: 2990545 - RNA, 19 nt, Artificial Sequence
  Description of Artificial Sequence: Synthetic oligonucleotide
gccacucuuugcugcggcc

SEQ ID NO: 2990546 - RNA, 19 nt, Artificial Sequence
  Description of Artificial Sequence: Synthetic oligonucleotide
cccagaggggcacugcauc

SEQ ID NO: 2990547 - RNA, 19 nt, Artificial Sequence
  Description of Artificial Sequence: Synthetic oligonucleotide
caaguagauggaggacaca

SEQ ID NO: 2990548 - RNA, 19 nt, Artificial Sequence
  Description of Artificial Sequence: Synthetic oligonucleotide
ggaaccagucuauccccaa

SEQ ID NO: 2990549 - RNA, 19 nt, Artificial Sequence
  Description of Artificial Sequence: Synthetic oligonucleotide
aggacacaaggaagacaga

SEQ ID NO: 2990550 - RNA, 19 nt, Artificial Sequence
  Description of Artificial Sequence: Synthetic oligonucleotide
accaucccguagagcccgc

SEQ ID NO: 2990551 - RNA, 19 nt, Artificial Sequence
  Description of Artificial Sequence: Synthetic oligonucleotide
ggccucucacgaugcauuc

SEQ ID NO: 2990552 - RNA, 19 nt, Artificial Sequence
  Description of Artificial Sequence: Synthetic oligonucleotide
gcucagcaccaucccguag

SEQ ID NO: 2990553 - RNA, 19 nt, Artificial Sequence
  Description of Artificial Sequence: Synthetic oligonucleotide
ggcgcugagacuugucccu

SEQ ID NO: 2990554 - RNA, 19 nt, Artificial Sequence
  Description of Artificial Sequence: Synthetic oligonucleotide
guguccccuggcucagcac

SEQ ID NO: 2990555 - RNA, 19 nt, Artificial Sequence
  Description of Artificial Sequence: Synthetic oligonucleotide
cguagagcccgcuggaaga

SEQ ID NO: 2990556 - RNA, 19 nt, Artificial Sequence
  Description of Artificial Sequence: Synthetic oligonucleotide
ugcugcggccuugccccag

SEQ ID NO: 2990557 - RNA, 19 nt, Artificial Sequence
  Description of Artificial Sequence: Synthetic oligonucleotide
cuacccugagagguuccca

SEQ ID NO: 2990558 - RNA, 19 nt, Artificial Sequence
  Description of Artificial Sequence: Synthetic oligonucleotide
cagcaccaucccguagagc

SEQ ID NO: 2990559 - RNA, 19 nt, Artificial Sequence
  Description of Artificial Sequence: Synthetic oligonucleotide
ccucccagccaggaaguag

SEQ ID NO: 2990560 - RNA, 19 nt, Artificial Sequence
  Description of Artificial Sequence: Synthetic oligonucleotide
cagugacguauucggggaa

SEQ ID NO: 2990561 - RNA, 19 nt, Artificial Sequence
  Description of Artificial Sequence: Synthetic oligonucleotide
gaggggcacugcaucucca

SEQ ID NO: 2990562 - RNA, 19 nt, Artificial Sequence
  Description of Artificial Sequence: Synthetic oligonucleotide
aggggcagcugcccugcuu

SEQ ID NO: 2990563 - RNA, 19 nt, Artificial Sequence
  Description of Artificial Sequence: Synthetic oligonucleotide
gagcccgcuggaagacuac

SEQ ID NO: 2990564 - RNA, 19 nt, Artificial Sequence
  Description of Artificial Sequence: Synthetic oligonucleotide
uugcugcggccuugcccca

SEQ ID NO: 2990565 - RNA, 19 nt, Artificial Sequence
  Description of Artificial Sequence: Synthetic oligonucleotide
ggaagacccagaagaggaa

SEQ ID NO: 2990566 - RNA, 19 nt, Artificial Sequence
  Description of Artificial Sequence: Synthetic oligonucleotide
uuuugcccuugggcagagu

SEQ ID NO: 2990567 - RNA, 19 nt, Artificial Sequence
  Description of Artificial Sequence: Synthetic oligonucleotide
cccugcuuuugcccuuggg

SEQ ID NO: 2990568 - RNA, 19 nt, Artificial Sequence
  Description of Artificial Sequence: Synthetic oligonucleotide
aggccacacaggggcagcu

SEQ ID NO: 2990569 - RNA, 19 nt, Artificial Sequence
  Description of Artificial Sequence: Synthetic oligonucleotide
gcaccaucccguagagccc

SEQ ID NO: 2990570 - RNA, 19 nt, Artificial Sequence
  Description of Artificial Sequence: Synthetic oligonucleotide
gccucucacgaugcauucc

SEQ ID NO: 2990571 - RNA, 19 nt, Artificial Sequence
  Description of Artificial Sequence: Synthetic oligonucleotide
gcuuuugcccuugggcaga

SEQ ID NO: 2990572 - RNA, 19 nt, Artificial Sequence
  Description of Artificial Sequence: Synthetic oligonucleotide
gcugcccugcuuuugcccu

SEQ ID NO: 2990573 - RNA, 19 nt, Artificial Sequence
  Description of Artificial Sequence: Synthetic oligonucleotide
ggcugggaucuggaagacc

SEQ ID NO: 2990574 - RNA, 19 nt, Artificial Sequence
  Description of Artificial Sequence: Synthetic oligonucleotide
cgcuggaagacuacccuga

SEQ ID NO: 2990575 - RNA, 19 nt, Artificial Sequence
  Description of Artificial Sequence: Synthetic oligonucleotide
gcccgcuggaagacuaccc

SEQ ID NO: 2990576 - RNA, 19 nt, Artificial Sequence
  Description of Artificial Sequence: Synthetic oligonucleotide
gcaguguccccuggcucag

SEQ ID NO: 2990577 - RNA, 19 nt, Artificial Sequence
  Description of Artificial Sequence: Synthetic oligonucleotide
gggcagagugucucuggaa

SEQ ID NO: 2990578 - RNA, 19 nt, Artificial Sequence
  Description of Artificial Sequence: Synthetic oligonucleotide
guccccuggcucagcacca

SEQ ID NO: 2990579 - RNA, 19 nt, Artificial Sequence
  Description of Artificial Sequence: Synthetic oligonucleotide
cuggaagcuacuggccacu

SEQ ID NO: 2990580 - RNA, 19 nt, Artificial Sequence
  Description of Artificial Sequence: Synthetic oligonucleotide
cugcggccuugccccagac

SEQ ID NO: 2990581 - RNA, 19 nt, Artificial Sequence
  Description of Artificial Sequence: Synthetic oligonucleotide
ccccaaguagauggaggac

SEQ ID NO: 2990582 - RNA, 19 nt, Artificial Sequence
  Description of Artificial Sequence: Synthetic oligonucleotide
cgcugagacuugucccucc

SEQ ID NO: 2990583 - RNA, 19 nt, Artificial Sequence
  Description of Artificial Sequence: Synthetic oligonucleotide
caguguccccuggcucagc

SEQ ID NO: 2990584 - RNA, 19 nt, Artificial Sequence
  Description of Artificial Sequence: Synthetic oligonucleotide
caucuccauggugaccgua

SEQ ID NO: 2990585 - RNA, 19 nt, Artificial Sequence
  Description of Artificial Sequence: Synthetic oligonucleotide
ggcucagcaccaucccgua

SEQ ID NO: 2990586 - RNA, 19 nt, Artificial Sequence
  Description of Artificial Sequence: Synthetic oligonucleotide
cagccaggaaguagacaau

SEQ ID NO: 2990587 - RNA, 19 nt, Artificial Sequence
  Description of Artificial Sequence: Synthetic oligonucleotide
ggccacacaggggcagcug

SEQ ID NO: 2990588 - RNA, 19 nt, Artificial Sequence
  Description of Artificial Sequence: Synthetic oligonucleotide
gcccugcuuuugcccuugg

SEQ ID NO: 2990589 - RNA, 19 nt, Artificial Sequence
  Description of Artificial Sequence: Synthetic oligonucleotide
ccacaggcgcugagacuug

SEQ ID NO: 2990590 - RNA, 19 nt, Artificial Sequence
  Description of Artificial Sequence: Synthetic oligonucleotide
cacucuuugcugcggccuu

SEQ ID NO: 2990591 - RNA, 19 nt, Artificial Sequence
  Description of Artificial Sequence: Synthetic oligonucleotide
gggcugggaucuggaagac

SEQ ID NO: 2990592 - RNA, 19 nt, Artificial Sequence
  Description of Artificial Sequence: Synthetic oligonucleotide
ccagaggggcacugcaucu

SEQ ID NO: 2990593 - RNA, 19 nt, Artificial Sequence
  Description of Artificial Sequence: Synthetic oligonucleotide
cccacaggcgcugagacuu

SEQ ID NO: 2990594 - RNA, 19 nt, Artificial Sequence
  Description of Artificial Sequence: Synthetic oligonucleotide
cuggccucucacgaugcau

SEQ ID NO: 2990595 - RNA, 19 nt, Artificial Sequence
  Description of Artificial Sequence: Synthetic oligonucleotide
ggugugcugguagcagugu

SEQ ID NO: 2990596 - RNA, 19 nt, Artificial Sequence
  Description of Artificial Sequence: Synthetic oligonucleotide
gccuugccccagacacugg

SEQ ID NO: 2990597 - RNA, 19 nt, Artificial Sequence
  Description of Artificial Sequence: Synthetic oligonucleotide
gcugcggccuugccccaga

SEQ ID NO: 2990598 - RNA, 19 nt, Artificial Sequence
  Description of Artificial Sequence: Synthetic oligonucleotide
cguauuaggugugcuggua

SEQ ID NO: 2990599 - RNA, 19 nt, Artificial Sequence
  Description of Artificial Sequence: Synthetic oligonucleotide
gcgcugagacuugucccuc

SEQ ID NO: 2990600 - RNA, 19 nt, Artificial Sequence
  Description of Artificial Sequence: Synthetic oligonucleotide
gcuuggcgcugcuauugau

SEQ ID NO: 2990601 - RNA, 19 nt, Artificial Sequence
  Description of Artificial Sequence: Synthetic oligonucleotide
ccguauuaggugugcuggu

SEQ ID NO: 2990602 - RNA, 19 nt, Artificial Sequence
  Description of Artificial Sequence: Synthetic oligonucleotide
cacaggcgcugagacuugu

SEQ ID NO: 2990603 - RNA, 19 nt, Artificial Sequence
  Description of Artificial Sequence: Synthetic oligonucleotide
gcgcugcuauugaugcaga

SEQ ID NO: 2990604 - RNA, 19 nt, Artificial Sequence
  Description of Artificial Sequence: Synthetic oligonucleotide
cccaggccacacaggggca

SEQ ID NO: 2990605 - RNA, 19 nt, Artificial Sequence
  Description of Artificial Sequence: Synthetic oligonucleotide
ccccuggcucagcaccauc

SEQ ID NO: 2990606 - RNA, 19 nt, Artificial Sequence
  Description of Artificial Sequence: Synthetic oligonucleotide
gccccagacacuggccucu

SEQ ID NO: 2990607 - RNA, 19 nt, Artificial Sequence
  Description of Artificial Sequence: Synthetic oligonucleotide
gcaucuccauggugaccgu

SEQ ID NO: 2990608 - RNA, 19 nt, Artificial Sequence
  Description of Artificial Sequence: Synthetic oligonucleotide
cugcccugcuuuugcccuu

SEQ ID NO: 2990609 - RNA, 19 nt, Artificial Sequence
  Description of Artificial Sequence: Synthetic oligonucleotide
cccagacacuggccucuca

SEQ ID NO: 2990610 - RNA, 19 nt, Artificial Sequence
  Description of Artificial Sequence: Synthetic oligonucleotide
cccguagagcccgcuggaa

SEQ ID NO: 2990611 - RNA, 19 nt, Artificial Sequence
  Description of Artificial Sequence: Synthetic oligonucleotide
gcauucccagaggggcacu

SEQ ID NO: 2990612 - RNA, 19 nt, Artificial Sequence
  Description of Artificial Sequence: Synthetic oligonucleotide
gggcagcugcccugcuuuu

SEQ ID NO: 2990613 - RNA, 19 nt, Artificial Sequence
  Description of Artificial Sequence: Synthetic oligonucleotide
caggggcagcugcccugcu

SEQ ID NO: 2990614 - RNA, 19 nt, Artificial Sequence
  Description of Artificial Sequence: Synthetic oligonucleotide
gcccuugggcagagugucu

SEQ ID NO: 2990615 - RNA, 19 nt, Artificial Sequence
  Description of Artificial Sequence: Synthetic oligonucleotide
cggccuugccccagacacu

SEQ ID NO: 2990616 - RNA, 19 nt, Artificial Sequence
  Description of Artificial Sequence: Synthetic oligonucleotide
cccucccagccaggaagua

SEQ ID NO: 2990617 - RNA, 19 nt, Artificial Sequence
  Description of Artificial Sequence: Synthetic oligonucleotide
ccaucccguagagcccgcu

SEQ ID NO: 2990618 - RNA, 19 nt, Artificial Sequence
  Description of Artificial Sequence: Synthetic oligonucleotide
aauauucagagcuuuaggc

SEQ ID NO: 2990619 - RNA, 19 nt, Artificial Sequence
  Description of Artificial Sequence: Synthetic oligonucleotide
uaauuaaucaugaugacag

SEQ ID NO: 2990620 - RNA, 19 nt, Artificial Sequence
  Description of Artificial Sequence: Synthetic oligonucleotide
aauaaaaguuaauuaauca

SEQ ID NO: 2990621 - RNA, 19 nt, Artificial Sequence
  Description of Artificial Sequence: Synthetic oligonucleotide
acaacuacaauauucagag

SEQ ID NO: 2990622 - RNA, 19 nt, Artificial Sequence
  Description of Artificial Sequence: Synthetic oligonucleotide
aacuacaauauucagagcu

SEQ ID NO: 2990623 - RNA, 19 nt, Artificial Sequence
  Description of Artificial Sequence: Synthetic oligonucleotide
uaaaaguuaauuaaucaug

SEQ ID NO: 2990624 - RNA, 19 nt, Artificial Sequence
  Description of Artificial Sequence: Synthetic oligonucleotide
agcgaaaacagcuagacuc

SEQ ID NO: 2990625 - RNA, 19 nt, Artificial Sequence
  Description of Artificial Sequence: Synthetic oligonucleotide
gauacauucacucuuacca

SEQ ID NO: 2990626 - RNA, 19 nt, Artificial Sequence
  Description of Artificial Sequence: Synthetic oligonucleotide
guuauugugguucauaaag

SEQ ID NO: 2990627 - RNA, 19 nt, Artificial Sequence
  Description of Artificial Sequence: Synthetic oligonucleotide
auucacaugggauacauuc

SEQ ID NO: 2990628 - RNA, 19 nt, Artificial Sequence
  Description of Artificial Sequence: Synthetic oligonucleotide
aaaacagcuagacucacug

SEQ ID NO: 2990629 - RNA, 19 nt, Artificial Sequence
  Description of Artificial Sequence: Synthetic oligonucleotide
aaucugacauuucacacag

SEQ ID NO: 2990630 - RNA, 19 nt, Artificial Sequence
  Description of Artificial Sequence: Synthetic oligonucleotide
gacaaugaaagccugacug

SEQ ID NO: 2990631 - RNA, 19 nt, Artificial Sequence
  Description of Artificial Sequence: Synthetic oligonucleotide
agaauccagauucacaugg

SEQ ID NO: 2990632 - RNA, 19 nt, Artificial Sequence
  Description of Artificial Sequence: Synthetic oligonucleotide
aguuaauuaaucaugauga

SEQ ID NO: 2990633 - RNA, 19 nt, Artificial Sequence
  Description of Artificial Sequence: Synthetic oligonucleotide
uuuucagaguuacaguagg

SEQ ID NO: 2990634 - RNA, 19 nt, Artificial Sequence
  Description of Artificial Sequence: Synthetic oligonucleotide
aauuaaucaugaugacagc

SEQ ID NO: 2990635 - RNA, 19 nt, Artificial Sequence
  Description of Artificial Sequence: Synthetic oligonucleotide
augacuuugucuuuaggac

SEQ ID NO: 2990636 - RNA, 19 nt, Artificial Sequence
  Description of Artificial Sequence: Synthetic oligonucleotide
ucugacauuucacacagug

SEQ ID NO: 2990637 - RNA, 19 nt, Artificial Sequence
  Description of Artificial Sequence: Synthetic oligonucleotide
aaaauaaaauaaaauaaaa

SEQ ID NO: 2990638 - RNA, 19 nt, Artificial Sequence
  Description of Artificial Sequence: Synthetic oligonucleotide
uuaaucaugaugacagcag

SEQ ID NO: 2990639 - RNA, 19 nt, Artificial Sequence
  Description of Artificial Sequence: Synthetic oligonucleotide
acucuuaccaugguuaucc

SEQ ID NO: 2990640 - RNA, 19 nt, Artificial Sequence
  Description of Artificial Sequence: Synthetic oligonucleotide
ucacacaguguauucaucg

SEQ ID NO: 2990641 - RNA, 19 nt, Artificial Sequence
  Description of Artificial Sequence: Synthetic oligonucleotide
ugguucauaaagaauccag

SEQ ID NO: 2990642 - RNA, 19 nt, Artificial Sequence
  Description of Artificial Sequence: Synthetic oligonucleotide
gaugacuuugucuuuagga

SEQ ID NO: 2990643 - RNA, 19 nt, Artificial Sequence
  Description of Artificial Sequence: Synthetic oligonucleotide
gaugacagcagcuaugaca

SEQ ID NO: 2990644 - RNA, 19 nt, Artificial Sequence
  Description of Artificial Sequence: Synthetic oligonucleotide
uuaauuaaucaugaugaca

SEQ ID NO: 2990645 - RNA, 19 nt, Artificial Sequence
  Description of Artificial Sequence: Synthetic oligonucleotide
agucuggaagcauucagac

SEQ ID NO: 2990646 - RNA, 19 nt, Artificial Sequence
  Description of Artificial Sequence: Synthetic oligonucleotide
uaaagaauccagauucaca

SEQ ID NO: 2990647 - RNA, 19 nt, Artificial Sequence
  Description of Artificial Sequence: Synthetic oligonucleotide
acaugggauacauucacuc

SEQ ID NO: 2990648 - RNA, 19 nt, Artificial Sequence
  Description of Artificial Sequence: Synthetic oligonucleotide
caggcagagacaaugaaag

SEQ ID NO: 2990649 - RNA, 19 nt, Artificial Sequence
  Description of Artificial Sequence: Synthetic oligonucleotide
aaugaaagccugacugucc

SEQ ID NO: 2990650 - RNA, 19 nt, Artificial Sequence
  Description of Artificial Sequence: Synthetic oligonucleotide
uaaucaugaugacagcagc

SEQ ID NO: 2990651 - RNA, 19 nt, Artificial Sequence
  Description of Artificial Sequence: Synthetic oligonucleotide
acgaucagaagucuggaag

SEQ ID NO: 2990652 - RNA, 19 nt, Artificial Sequence
  Description of Artificial Sequence: Synthetic oligonucleotide
uuauugugguucauaaaga

SEQ ID NO: 2990653 - RNA, 19 nt, Artificial Sequence
  Description of Artificial Sequence: Synthetic oligonucleotide
agaguuacaguagguaccc

SEQ ID NO: 2990654 - RNA, 19 nt, Artificial Sequence
  Description of Artificial Sequence: Synthetic oligonucleotide
ucagaguuacaguagguac

SEQ ID NO: 2990655 - RNA, 19 nt, Artificial Sequence
  Description of Artificial Sequence: Synthetic oligonucleotide
auauucagagcuuuaggca

SEQ ID NO: 2990656 - RNA, 19 nt, Artificial Sequence
  Description of Artificial Sequence: Synthetic oligonucleotide
ugaaucugacauuucacac

SEQ ID NO: 2990657 - RNA, 19 nt, Artificial Sequence
  Description of Artificial Sequence: Synthetic oligonucleotide
agcuaugacaacuacaaua

SEQ ID NO: 2990658 - RNA, 19 nt, Artificial Sequence
  Description of Artificial Sequence: Synthetic oligonucleotide
uucuuggucaucccgacac

SEQ ID NO: 2990659 - RNA, 19 nt, Artificial Sequence
  Description of Artificial Sequence: Synthetic oligonucleotide
cacaguguauucaucgugg

SEQ ID NO: 2990660 - RNA, 19 nt, Artificial Sequence
  Description of Artificial Sequence: Synthetic oligonucleotide
uucacucuuaccaugguua

SEQ ID NO: 2990661 - RNA, 19 nt, Artificial Sequence
  Description of Artificial Sequence: Synthetic oligonucleotide
uacacuggcacucacgauc

SEQ ID NO: 2990662 - RNA, 19 nt, Artificial Sequence
  Description of Artificial Sequence: Synthetic oligonucleotide
auaaagaauccagauucac

SEQ ID NO: 2990663 - RNA, 19 nt, Artificial Sequence
  Description of Artificial Sequence: Synthetic oligonucleotide
augaaaggcaccucuccac

SEQ ID NO: 2990664 - RNA, 19 nt, Artificial Sequence
  Description of Artificial Sequence: Synthetic oligonucleotide
aguuuucagaguuacagua

SEQ ID NO: 2990665 - RNA, 19 nt, Artificial Sequence
  Description of Artificial Sequence: Synthetic oligonucleotide
caauauucagagcuuuagg

SEQ ID NO: 2990666 - RNA, 19 nt, Artificial Sequence
  Description of Artificial Sequence: Synthetic oligonucleotide
uauugugguucauaaagaa

SEQ ID NO: 2990667 - RNA, 19 nt, Artificial Sequence
  Description of Artificial Sequence: Synthetic oligonucleotide
cucacgaucagaagucugg

SEQ ID NO: 2990668 - RNA, 19 nt, Artificial Sequence
  Description of Artificial Sequence: Synthetic oligonucleotide
ugaugaugaugacagcagc

SEQ ID NO: 2990669 - RNA, 19 nt, Artificial Sequence
  Description of Artificial Sequence: Synthetic oligonucleotide
aacagcuagacucacuguu

SEQ ID NO: 2990670 - RNA, 19 nt, Artificial Sequence
  Description of Artificial Sequence: Synthetic oligonucleotide
ucugaaucugacauuucac

SEQ ID NO: 2990671 - RNA, 19 nt, Artificial Sequence
  Description of Artificial Sequence: Synthetic oligonucleotide
gaagucuggaagcauucag

SEQ ID NO: 2990672 - RNA, 19 nt, Artificial Sequence
  Description of Artificial Sequence: Synthetic oligonucleotide
uucauaaagaauccagauu

SEQ ID NO: 2990673 - RNA, 19 nt, Artificial Sequence
  Description of Artificial Sequence: Synthetic oligonucleotide
ugacuuugucuuuaggaca

SEQ ID NO: 2990674 - RNA, 19 nt, Artificial Sequence
  Description of Artificial Sequence: Synthetic oligonucleotide
aauccagauucacauggga

SEQ ID NO: 2990675 - RNA, 19 nt, Artificial Sequence
  Description of Artificial Sequence: Synthetic oligonucleotide
acaguguauucaucguggc

SEQ ID NO: 2990676 - RNA, 19 nt, Artificial Sequence
  Description of Artificial Sequence: Synthetic oligonucleotide
auuaaucaugaugacagca

SEQ ID NO: 2990677 - RNA, 19 nt, Artificial Sequence
  Description of Artificial Sequence: Synthetic oligonucleotide
cagaguuacaguagguacc

SEQ ID NO: 2990678 - RNA, 19 nt, Artificial Sequence
  Description of Artificial Sequence: Synthetic oligonucleotide
cugagagcagcgaaaacag

SEQ ID NO: 2990679 - RNA, 19 nt, Artificial Sequence
  Description of Artificial Sequence: Synthetic oligonucleotide
acagcugcugcaugaaagg

SEQ ID NO: 2990680 - RNA, 19 nt, Artificial Sequence
  Description of Artificial Sequence: Synthetic oligonucleotide
uuugucuuuaggacagcug

SEQ ID NO: 2990681 - RNA, 19 nt, Artificial Sequence
  Description of Artificial Sequence: Synthetic oligonucleotide
aguuacaguagguacccug

SEQ ID NO: 2990682 - RNA, 19 nt, Artificial Sequence
  Description of Artificial Sequence: Synthetic oligonucleotide
gaaucugacauuucacaca

SEQ ID NO: 2990683 - RNA, 19 nt, Artificial Sequence
  Description of Artificial Sequence: Synthetic oligonucleotide
gucaucccgacacugagag

SEQ ID NO: 2990684 - RNA, 19 nt, Artificial Sequence
  Description of Artificial Sequence: Synthetic oligonucleotide
acaauauucagagcuuuag

SEQ ID NO: 2990685 - RNA, 19 nt, Artificial Sequence
  Description of Artificial Sequence: Synthetic oligonucleotide
acugagagcagcgaaaaca

SEQ ID NO: 2990686 - RNA, 19 nt, Artificial Sequence
  Description of Artificial Sequence: Synthetic oligonucleotide
gacuuugucuuuaggacag

SEQ ID NO: 2990687 - RNA, 19 nt, Artificial Sequence
  Description of Artificial Sequence: Synthetic oligonucleotide
gaagcauucagacaccucu

SEQ ID NO: 2990688 - RNA, 19 nt, Artificial Sequence
  Description of Artificial Sequence: Synthetic oligonucleotide
aagaauccagauucacaug

SEQ ID NO: 2990689 - RNA, 19 nt, Artificial Sequence
  Description of Artificial Sequence: Synthetic oligonucleotide
uauucaucguggcauugca

SEQ ID NO: 2990690 - RNA, 19 nt, Artificial Sequence
  Description of Artificial Sequence: Synthetic oligonucleotide
uucacaugggauacauuca

SEQ ID NO: 2990691 - RNA, 19 nt, Artificial Sequence
  Description of Artificial Sequence: Synthetic oligonucleotide
uucagacaccucuucuugg

SEQ ID NO: 2990692 - RNA, 19 nt, Artificial Sequence
  Description of Artificial Sequence: Synthetic oligonucleotide
guuaauuaaucaugaugac

SEQ ID NO: 2990693 - RNA, 19 nt, Artificial Sequence
  Description of Artificial Sequence: Synthetic oligonucleotide
auucagacaccucuucuug

SEQ ID NO: 2990694 - RNA, 19 nt, Artificial Sequence
  Description of Artificial Sequence: Synthetic oligonucleotide
ucuuuaggacagcugcugc

SEQ ID NO: 2990695 - RNA, 19 nt, Artificial Sequence
  Description of Artificial Sequence: Synthetic oligonucleotide
aguguauucaucguggcau

SEQ ID NO: 2990696 - RNA, 19 nt, Artificial Sequence
  Description of Artificial Sequence: Synthetic oligonucleotide
ugacaacuacaauauucag

SEQ ID NO: 2990697 - RNA, 19 nt, Artificial Sequence
  Description of Artificial Sequence: Synthetic oligonucleotide
cucacuguuauugugguuc

SEQ ID NO: 2990698 - RNA, 19 nt, Artificial Sequence
  Description of Artificial Sequence: Synthetic oligonucleotide
augacagcagcaaugauga

SEQ ID NO: 2990699 - RNA, 19 nt, Artificial Sequence
  Description of Artificial Sequence: Synthetic oligonucleotide
ugaaaggcaccucuccaca

SEQ ID NO: 2990700 - RNA, 19 nt, Artificial Sequence
  Description of Artificial Sequence: Synthetic oligonucleotide
acagcagcaaugaugauga

SEQ ID NO: 2990701 - RNA, 19 nt, Artificial Sequence
  Description of Artificial Sequence: Synthetic oligonucleotide
acacaguuuucagaguuac

SEQ ID NO: 2990702 - RNA, 19 nt, Artificial Sequence
  Description of Artificial Sequence: Synthetic oligonucleotide
uccagauucacaugggaua

SEQ ID NO: 2990703 - RNA, 19 nt, Artificial Sequence
  Description of Artificial Sequence: Synthetic oligonucleotide
aaagccugacuguccugac

SEQ ID NO: 2990704 - RNA, 19 nt, Artificial Sequence
  Description of Artificial Sequence: Synthetic oligonucleotide
acaaugaaagccugacugu

SEQ ID NO: 2990705 - RNA, 19 nt, Artificial Sequence
  Description of Artificial Sequence: Synthetic oligonucleotide
gacaacuacaauauucaga

SEQ ID NO: 2990706 - RNA, 19 nt, Artificial Sequence
  Description of Artificial Sequence: Synthetic oligonucleotide
gacagcugcugcaugaaag

SEQ ID NO: 2990707 - RNA, 19 nt, Artificial Sequence
  Description of Artificial Sequence: Synthetic oligonucleotide
cagagcuuuaggcaggcag

SEQ ID NO: 2990708 - RNA, 19 nt, Artificial Sequence
  Description of Artificial Sequence: Synthetic oligonucleotide
aucguggcauugcauugcc

SEQ ID NO: 2990709 - RNA, 19 nt, Artificial Sequence
  Description of Artificial Sequence: Synthetic oligonucleotide
uagacucacuguuauugug

SEQ ID NO: 2990710 - RNA, 19 nt, Artificial Sequence
  Description of Artificial Sequence: Synthetic oligonucleotide
auugcauugccugaugacu

SEQ ID NO: 2990711 - RNA, 19 nt, Artificial Sequence
  Description of Artificial Sequence: Synthetic oligonucleotide
uuucacacaguguauucau

SEQ ID NO: 2990712 - RNA, 19 nt, Artificial Sequence
  Description of Artificial Sequence: Synthetic oligonucleotide
aggcagagacaaugaaagc

SEQ ID NO: 2990713 - RNA, 19 nt, Artificial Sequence
  Description of Artificial Sequence: Synthetic oligonucleotide
agacucacuguuauugugg

SEQ ID NO: 2990714 - RNA, 19 nt, Artificial Sequence
  Description of Artificial Sequence: Synthetic oligonucleotide
aaaggcaccucuccacaca

SEQ ID NO: 2990715 - RNA, 19 nt, Artificial Sequence
  Description of Artificial Sequence: Synthetic oligonucleotide
acacaguguauucaucgug

SEQ ID NO: 2990716 - RNA, 19 nt, Artificial Sequence
  Description of Artificial Sequence: Synthetic oligonucleotide
auugccugaugacuuuguc

SEQ ID NO: 2990717 - RNA, 19 nt, Artificial Sequence
  Description of Artificial Sequence: Synthetic oligonucleotide
agcauucagacaccucuuc

SEQ ID NO: 2990718 - RNA, 19 nt, Artificial Sequence
  Description of Artificial Sequence: Synthetic oligonucleotide
aaucaugaugacagcagca

SEQ ID NO: 2990719 - RNA, 19 nt, Artificial Sequence
  Description of Artificial Sequence: Synthetic oligonucleotide
uaggcaggcagagacaaug

SEQ ID NO: 2990720 - RNA, 19 nt, Artificial Sequence
  Description of Artificial Sequence: Synthetic oligonucleotide
guagguacccugcuuacac

SEQ ID NO: 2990721 - RNA, 19 nt, Artificial Sequence
  Description of Artificial Sequence: Synthetic oligonucleotide
uucaucguggcauugcauu

SEQ ID NO: 2990722 - RNA, 19 nt, Artificial Sequence
  Description of Artificial Sequence: Synthetic oligonucleotide
uuuaggcaggcagagacaa

SEQ ID NO: 2990723 - RNA, 19 nt, Artificial Sequence
  Description of Artificial Sequence: Synthetic oligonucleotide
acauucacucuuaccaugg

SEQ ID NO: 2990724 - RNA, 19 nt, Artificial Sequence
  Description of Artificial Sequence: Synthetic oligonucleotide
uuucagaguuacaguaggu

SEQ ID NO: 2990725 - RNA, 19 nt, Artificial Sequence
  Description of Artificial Sequence: Synthetic oligonucleotide
uggucaucccgacacugag

SEQ ID NO: 2990726 - RNA, 19 nt, Artificial Sequence
  Description of Artificial Sequence: Synthetic oligonucleotide
cugaaucugacauuucaca

SEQ ID NO: 2990727 - RNA, 19 nt, Artificial Sequence
  Description of Artificial Sequence: Synthetic oligonucleotide
ucagaagucuggaagcauu

SEQ ID NO: 2990728 - RNA, 19 nt, Artificial Sequence
  Description of Artificial Sequence: Synthetic oligonucleotide
ucaucguggcauugcauug

SEQ ID NO: 2990729 - RNA, 19 nt, Artificial Sequence
  Description of Artificial Sequence: Synthetic oligonucleotide
augaaagccugacuguccu

SEQ ID NO: 2990730 - RNA, 19 nt, Artificial Sequence
  Description of Artificial Sequence: Synthetic oligonucleotide
uugccugaugacuuugucu

SEQ ID NO: 2990731 - RNA, 19 nt, Artificial Sequence
  Description of Artificial Sequence: Synthetic oligonucleotide
guuacaguagguacccugc

SEQ ID NO: 2990732 - RNA, 19 nt, Artificial Sequence
  Description of Artificial Sequence: Synthetic oligonucleotide
aaacagcuagacucacugu

SEQ ID NO: 2990733 - RNA, 19 nt, Artificial Sequence
  Description of Artificial Sequence: Synthetic oligonucleotide
ucuccacacaguuuucaga

SEQ ID NO: 2990734 - RNA, 19 nt, Artificial Sequence
  Description of Artificial Sequence: Synthetic oligonucleotide
cuuacacuggcacucacga

SEQ ID NO: 2990735 - RNA, 19 nt, Artificial Sequence
  Description of Artificial Sequence: Synthetic oligonucleotide
gagcagcgaaaacagcuag

SEQ ID NO: 2990736 - RNA, 19 nt, Artificial Sequence
  Description of Artificial Sequence: Synthetic oligonucleotide
augacagcagcuaugacaa

SEQ ID NO: 2990737 - RNA, 19 nt, Artificial Sequence
  Description of Artificial Sequence: Synthetic oligonucleotide
ucagacaccucuucuuggu

SEQ ID NO: 2990738 - RNA, 19 nt, Artificial Sequence
  Description of Artificial Sequence: Synthetic oligonucleotide
gaauccagauucacauggg

SEQ ID NO: 2990739 - RNA, 19 nt, Artificial Sequence
  Description of Artificial Sequence: Synthetic oligonucleotide
uguuauugugguucauaaa

SEQ ID NO: 2990740 - RNA, 19 nt, Artificial Sequence
  Description of Artificial Sequence: Synthetic oligonucleotide
ugucuuuaggacagcugcu

SEQ ID NO: 2990741 - RNA, 19 nt, Artificial Sequence
  Description of Artificial Sequence: Synthetic oligonucleotide
acccugcuuacacuggcac

SEQ ID NO: 2990742 - RNA, 19 nt, Artificial Sequence
  Description of Artificial Sequence: Synthetic oligonucleotide
aagucuggaagcauucaga

SEQ ID NO: 2990743 - RNA, 19 nt, Artificial Sequence
  Description of Artificial Sequence: Synthetic oligonucleotide
cauuucacacaguguauuc

SEQ ID NO: 2990744 - RNA, 19 nt, Artificial Sequence
  Description of Artificial Sequence: Synthetic oligonucleotide
augggauacauucacucuu

SEQ ID NO: 2990745 - RNA, 19 nt, Artificial Sequence
  Description of Artificial Sequence: Synthetic oligonucleotide
agguacccugcuuacacug

SEQ ID NO: 2990746 - RNA, 19 nt, Artificial Sequence
  Description of Artificial Sequence: Synthetic oligonucleotide
gcuuuaggcaggcagagac

SEQ ID NO: 2990747 - RNA, 19 nt, Artificial Sequence
  Description of Artificial Sequence: Synthetic oligonucleotide
acaguagguacccugcuua

SEQ ID NO: 2990748 - RNA, 19 nt, Artificial Sequence
  Description of Artificial Sequence: Synthetic oligonucleotide
cauugcauugccugaugac

SEQ ID NO: 2990749 - RNA, 19 nt, Artificial Sequence
  Description of Artificial Sequence: Synthetic oligonucleotide
gcuagacucacuguuauug

SEQ ID NO: 2990750 - RNA, 19 nt, Artificial Sequence
  Description of Artificial Sequence: Synthetic oligonucleotide
uucagaguuacaguaggua

SEQ ID NO: 2990751 - RNA, 19 nt, Artificial Sequence
  Description of Artificial Sequence: Synthetic oligonucleotide
uacaauauucagagcuuua

SEQ ID NO: 2990752 - RNA, 19 nt, Artificial Sequence
  Description of Artificial Sequence: Synthetic oligonucleotide
auuucacacaguguauuca

SEQ ID NO: 2990753 - RNA, 19 nt, Artificial Sequence
  Description of Artificial Sequence: Synthetic oligonucleotide
caucccgacacugagagca

SEQ ID NO: 2990754 - RNA, 19 nt, Artificial Sequence
  Description of Artificial Sequence: Synthetic oligonucleotide
ugagagcagcgaaaacagc

SEQ ID NO: 2990755 - RNA, 19 nt, Artificial Sequence
  Description of Artificial Sequence: Synthetic oligonucleotide
uuacaguagguacccugcu

SEQ ID NO: 2990756 - RNA, 19 nt, Artificial Sequence
  Description of Artificial Sequence: Synthetic oligonucleotide
cucugaaucugacauuuca

SEQ ID NO: 2990757 - RNA, 19 nt, Artificial Sequence
  Description of Artificial Sequence: Synthetic oligonucleotide
cauaaagaauccagauuca

SEQ ID NO: 2990758 - RNA, 19 nt, Artificial Sequence
  Description of Artificial Sequence: Synthetic oligonucleotide
uguccugacucugaaucug

SEQ ID NO: 2990759 - RNA, 19 nt, Artificial Sequence
  Description of Artificial Sequence: Synthetic oligonucleotide
uugcauugccugaugacuu

SEQ ID NO: 2990760 - RNA, 19 nt, Artificial Sequence
  Description of Artificial Sequence: Synthetic oligonucleotide
ucuucuuggucaucccgac

SEQ ID NO: 2990761 - RNA, 19 nt, Artificial Sequence
  Description of Artificial Sequence: Synthetic oligonucleotide
agacaaugaaagccugacu

SEQ ID NO: 2990762 - RNA, 19 nt, Artificial Sequence
  Description of Artificial Sequence: Synthetic oligonucleotide
uuaggacagcugcugcaug

SEQ ID NO: 2990763 - RNA, 19 nt, Artificial Sequence
  Description of Artificial Sequence: Synthetic oligonucleotide
ugcugcaugaaaggcaccu

SEQ ID NO: 2990764 - RNA, 19 nt, Artificial Sequence
  Description of Artificial Sequence: Synthetic oligonucleotide
uuggucaucccgacacuga

SEQ ID NO: 2990765 - RNA, 19 nt, Artificial Sequence
  Description of Artificial Sequence: Synthetic oligonucleotide
guucauaaagaauccagau

SEQ ID NO: 2990766 - RNA, 19 nt, Artificial Sequence
  Description of Artificial Sequence: Synthetic oligonucleotide
ugcaugaaaggcaccucuc

SEQ ID NO: 2990767 - RNA, 19 nt, Artificial Sequence
  Description of Artificial Sequence: Synthetic oligonucleotide
ugggauacauucacucuua

SEQ ID NO: 2990768 - RNA, 19 nt, Artificial Sequence
  Description of Artificial Sequence: Synthetic oligonucleotide
cuguuauugugguucauaa

SEQ ID NO: 2990769 - RNA, 19 nt, Artificial Sequence
  Description of Artificial Sequence: Synthetic oligonucleotide
gaaagccugacuguccuga

SEQ ID NO: 2990770 - RNA, 19 nt, Artificial Sequence
  Description of Artificial Sequence: Synthetic oligonucleotide
uuuaggacagcugcugcau

SEQ ID NO: 2990771 - RNA, 19 nt, Artificial Sequence
  Description of Artificial Sequence: Synthetic oligonucleotide
cucuccacacaguuuucag

SEQ ID NO: 2990772 - RNA, 19 nt, Artificial Sequence
  Description of Artificial Sequence: Synthetic oligonucleotide
gaaaggcaccucuccacac

SEQ ID NO: 2990773 - RNA, 19 nt, Artificial Sequence
  Description of Artificial Sequence: Synthetic oligonucleotide
auucagagcuuuaggcagg

SEQ ID NO: 2990774 - RNA, 19 nt, Artificial Sequence
  Description of Artificial Sequence: Synthetic oligonucleotide
caaugaaagccugacuguc

SEQ ID NO: 2990775 - RNA, 19 nt, Artificial Sequence
  Description of Artificial Sequence: Synthetic oligonucleotide
uucacacaguguauucauc

SEQ ID NO: 2990776 - RNA, 19 nt, Artificial Sequence
  Description of Artificial Sequence: Synthetic oligonucleotide
uguauucaucguggcauug

SEQ ID NO: 2990777 - RNA, 19 nt, Artificial Sequence
  Description of Artificial Sequence: Synthetic oligonucleotide
ggauacauucacucuuacc

SEQ ID NO: 2990778 - RNA, 19 nt, Artificial Sequence
  Description of Artificial Sequence: Synthetic oligonucleotide
cagaagucuggaagcauuc

SEQ ID NO: 2990779 - RNA, 19 nt, Artificial Sequence
  Description of Artificial Sequence: Synthetic oligonucleotide
cugaugacuuugucuuuag

SEQ ID NO: 2990780 - RNA, 19 nt, Artificial Sequence
  Description of Artificial Sequence: Synthetic oligonucleotide
aagccugacuguccugacu

SEQ ID NO: 2990781 - RNA, 19 nt, Artificial Sequence
  Description of Artificial Sequence: Synthetic oligonucleotide
gagcuuuaggcaggcagag

SEQ ID NO: 2990782 - RNA, 19 nt, Artificial Sequence
  Description of Artificial Sequence: Synthetic oligonucleotide
gagagcagcgaaaacagcu

SEQ ID NO: 2990783 - RNA, 19 nt, Artificial Sequence
  Description of Artificial Sequence: Synthetic oligonucleotide
cagagacaaugaaagccug

SEQ ID NO: 2990784 - RNA, 19 nt, Artificial Sequence
  Description of Artificial Sequence: Synthetic oligonucleotide
ucacucuuaccaugguuau

SEQ ID NO: 2990785 - RNA, 19 nt, Artificial Sequence
  Description of Artificial Sequence: Synthetic oligonucleotide
guauucaucguggcauugc

SEQ ID NO: 2990786 - RNA, 19 nt, Artificial Sequence
  Description of Artificial Sequence: Synthetic oligonucleotide
auucacucuuaccaugguu

SEQ ID NO: 2990787 - RNA, 19 nt, Artificial Sequence
  Description of Artificial Sequence: Synthetic oligonucleotide
gaucagaagucuggaagca

SEQ ID NO: 2990788 - RNA, 19 nt, Artificial Sequence
  Description of Artificial Sequence: Synthetic oligonucleotide
caacuacaauauucagagc

SEQ ID NO: 2990789 - RNA, 19 nt, Artificial Sequence
  Description of Artificial Sequence: Synthetic oligonucleotide
cuuuaggacagcugcugca

SEQ ID NO: 2990790 - RNA, 19 nt, Artificial Sequence
  Description of Artificial Sequence: Synthetic oligonucleotide
gucuuuaggacagcugcug

SEQ ID NO: 2990791 - RNA, 19 nt, Artificial Sequence
  Description of Artificial Sequence: Synthetic oligonucleotide
agauucacaugggauacau

SEQ ID NO: 2990792 - RNA, 19 nt, Artificial Sequence
  Description of Artificial Sequence: Synthetic oligonucleotide
caugaaaggcaccucucca

SEQ ID NO: 2990793 - RNA, 19 nt, Artificial Sequence
  Description of Artificial Sequence: Synthetic oligonucleotide
cugacucugaaucugacau

SEQ ID NO: 2990794 - RNA, 19 nt, Artificial Sequence
  Description of Artificial Sequence: Synthetic oligonucleotide
auugugguucauaaagaau

SEQ ID NO: 2990795 - RNA, 19 nt, Artificial Sequence
  Description of Artificial Sequence: Synthetic oligonucleotide
agagcuuuaggcaggcaga

SEQ ID NO: 2990796 - RNA, 19 nt, Artificial Sequence
  Description of Artificial Sequence: Synthetic oligonucleotide
guacccugcuuacacuggc

SEQ ID NO: 2990797 - RNA, 19 nt, Artificial Sequence
  Description of Artificial Sequence: Synthetic oligonucleotide
uacaguagguacccugcuu

SEQ ID NO: 2990798 - RNA, 19 nt, Artificial Sequence
  Description of Artificial Sequence: Synthetic oligonucleotide
ucacgaucagaagucugga

SEQ ID NO: 2990799 - RNA, 19 nt, Artificial Sequence
  Description of Artificial Sequence: Synthetic oligonucleotide
cucuucuuggucaucccga

SEQ ID NO: 2990800 - RNA, 19 nt, Artificial Sequence
  Description of Artificial Sequence: Synthetic oligonucleotide
ucuuggucaucccgacacu

SEQ ID NO: 2990801 - RNA, 19 nt, Artificial Sequence
  Description of Artificial Sequence: Synthetic oligonucleotide
caccucuucuuggucaucc

SEQ ID NO: 2990802 - RNA, 19 nt, Artificial Sequence
  Description of Artificial Sequence: Synthetic oligonucleotide
ugaaagccugacuguccug

SEQ ID NO: 2990803 - RNA, 19 nt, Artificial Sequence
  Description of Artificial Sequence: Synthetic oligonucleotide
gguucauaaagaauccaga

SEQ ID NO: 2990804 - RNA, 19 nt, Artificial Sequence
  Description of Artificial Sequence: Synthetic oligonucleotide
uucagagcuuuaggcaggc

SEQ ID NO: 2990805 - RNA, 19 nt, Artificial Sequence
  Description of Artificial Sequence: Synthetic oligonucleotide
ugacuguccugacucugaa

SEQ ID NO: 2990806 - RNA, 19 nt, Artificial Sequence
  Description of Artificial Sequence: Synthetic oligonucleotide
acuuugucuuuaggacagc

SEQ ID NO: 2990807 - RNA, 19 nt, Artificial Sequence
  Description of Artificial Sequence: Synthetic oligonucleotide
gcaugaaaggcaccucucc

SEQ ID NO: 2990808 - RNA, 19 nt, Artificial Sequence
  Description of Artificial Sequence: Synthetic oligonucleotide
uccugacucugaaucugac

SEQ ID NO: 2990809 - RNA, 19 nt, Artificial Sequence
  Description of Artificial Sequence: Synthetic oligonucleotide
gcagcuaugacaacuacaa

SEQ ID NO: 2990810 - RNA, 19 nt, Artificial Sequence
  Description of Artificial Sequence: Synthetic oligonucleotide
cuuggucaucccgacacug

SEQ ID NO: 2990811 - RNA, 19 nt, Artificial Sequence
  Description of Artificial Sequence: Synthetic oligonucleotide
acauuucacacaguguauu

SEQ ID NO: 2990812 - RNA, 19 nt, Artificial Sequence
  Description of Artificial Sequence: Synthetic oligonucleotide
caucguggcauugcauugc

SEQ ID NO: 2990813 - RNA, 19 nt, Artificial Sequence
  Description of Artificial Sequence: Synthetic oligonucleotide
cuggcacucacgaucagaa

SEQ ID NO: 2990814 - RNA, 19 nt, Artificial Sequence
  Description of Artificial Sequence: Synthetic oligonucleotide
uggaagcauucagacaccu

SEQ ID NO: 2990815 - RNA, 19 nt, Artificial Sequence
  Description of Artificial Sequence: Synthetic oligonucleotide
acuacaauauucagagcuu

SEQ ID NO: 2990816 - RNA, 19 nt, Artificial Sequence
  Description of Artificial Sequence: Synthetic oligonucleotide
cgaucagaagucuggaagc

SEQ ID NO: 2990817 - RNA, 19 nt, Artificial Sequence
  Description of Artificial Sequence: Synthetic oligonucleotide
acuguuauugugguucaua

SEQ ID NO: 2990818 - RNA, 19 nt, Artificial Sequence
  Description of Artificial Sequence: Synthetic oligonucleotide
uacccugcuuacacuggca

SEQ ID NO: 2990819 - RNA, 19 nt, Artificial Sequence
  Description of Artificial Sequence: Synthetic oligonucleotide
agcagcuaugacaacuaca

SEQ ID NO: 2990820 - RNA, 19 nt, Artificial Sequence
  Description of Artificial Sequence: Synthetic oligonucleotide
uccacacaguuuucagagu

SEQ ID NO: 2990821 - RNA, 19 nt, Artificial Sequence
  Description of Artificial Sequence: Synthetic oligonucleotide
uagguacccugcuuacacu

SEQ ID NO: 2990822 - RNA, 19 nt, Artificial Sequence
  Description of Artificial Sequence: Synthetic oligonucleotide
uggcacucacgaucagaag

SEQ ID NO: 2990823 - RNA, 19 nt, Artificial Sequence
  Description of Artificial Sequence: Synthetic oligonucleotide
caguagguacccugcuuac

SEQ ID NO: 2990824 - RNA, 19 nt, Artificial Sequence
  Description of Artificial Sequence: Synthetic oligonucleotide
cuuuaggcaggcagagaca

SEQ ID NO: 2990825 - RNA, 19 nt, Artificial Sequence
  Description of Artificial Sequence: Synthetic oligonucleotide
agaagucuggaagcauuca

SEQ ID NO: 2990826 - RNA, 19 nt, Artificial Sequence
  Description of Artificial Sequence: Synthetic oligonucleotide
agagacaaugaaagccuga

SEQ ID NO: 2990827 - RNA, 19 nt, Artificial Sequence
  Description of Artificial Sequence: Synthetic oligonucleotide
auccagauucacaugggau

SEQ ID NO: 2990828 - RNA, 19 nt, Artificial Sequence
  Description of Artificial Sequence: Synthetic oligonucleotide
gacucacuguuauuguggu

SEQ ID NO: 2990829 - RNA, 19 nt, Artificial Sequence
  Description of Artificial Sequence: Synthetic oligonucleotide
ugcuuacacuggcacucac

SEQ ID NO: 2990830 - RNA, 19 nt, Artificial Sequence
  Description of Artificial Sequence: Synthetic oligonucleotide
gcagcgaaaacagcuagac

SEQ ID NO: 2990831 - RNA, 19 nt, Artificial Sequence
  Description of Artificial Sequence: Synthetic oligonucleotide
ugacucugaaucugacauu

SEQ ID NO: 2990832 - RNA, 19 nt, Artificial Sequence
  Description of Artificial Sequence: Synthetic oligonucleotide
ggcacucacgaucagaagu

SEQ ID NO: 2990833 - RNA, 19 nt, Artificial Sequence
  Description of Artificial Sequence: Synthetic oligonucleotide
gucuggaagcauucagaca

SEQ ID NO: 2990834 - RNA, 19 nt, Artificial Sequence
  Description of Artificial Sequence: Synthetic oligonucleotide
acacugagagcagcgaaaa

SEQ ID NO: 2990835 - RNA, 19 nt, Artificial Sequence
  Description of Artificial Sequence: Synthetic oligonucleotide
gacucugaaucugacauuu

SEQ ID NO: 2990836 - RNA, 19 nt, Artificial Sequence
  Description of Artificial Sequence: Synthetic oligonucleotide
ugcauugccugaugacuuu

SEQ ID NO: 2990837 - RNA, 19 nt, Artificial Sequence
  Description of Artificial Sequence: Synthetic oligonucleotide
guggcauugcauugccuga

SEQ ID NO: 2990838 - RNA, 19 nt, Artificial Sequence
  Description of Artificial Sequence: Synthetic oligonucleotide
uuacacuggcacucacgau

SEQ ID NO: 2990839 - RNA, 19 nt, Artificial Sequence
  Description of Artificial Sequence: Synthetic oligonucleotide
acacuggcacucacgauca

SEQ ID NO: 2990840 - RNA, 19 nt, Artificial Sequence
  Description of Artificial Sequence: Synthetic oligonucleotide
aguagguacccugcuuaca

SEQ ID NO: 2990841 - RNA, 19 nt, Artificial Sequence
  Description of Artificial Sequence: Synthetic oligonucleotide
acuggcacucacgaucaga

SEQ ID NO: 2990842 - RNA, 19 nt, Artificial Sequence
  Description of Artificial Sequence: Synthetic oligonucleotide
gcuaugacaacuacaauau

SEQ ID NO: 2990843 - RNA, 19 nt, Artificial Sequence
  Description of Artificial Sequence: Synthetic oligonucleotide
gcuuacacuggcacucacg

SEQ ID NO: 2990844 - RNA, 19 nt, Artificial Sequence
  Description of Artificial Sequence: Synthetic oligonucleotide
cguggcauugcauugccug

SEQ ID NO: 2990845 - RNA, 19 nt, Artificial Sequence
  Description of Artificial Sequence: Synthetic oligonucleotide
caugggauacauucacucu

SEQ ID NO: 2990846 - RNA, 19 nt, Artificial Sequence
  Description of Artificial Sequence: Synthetic oligonucleotide
ccagauucacaugggauac

SEQ ID NO: 2990847 - RNA, 19 nt, Artificial Sequence
  Description of Artificial Sequence: Synthetic oligonucleotide
ucaucccgacacugagagc

SEQ ID NO: 2990848 - RNA, 19 nt, Artificial Sequence
  Description of Artificial Sequence: Synthetic oligonucleotide
acucacgaucagaagucug

SEQ ID NO: 2990849 - RNA, 19 nt, Artificial Sequence
  Description of Artificial Sequence: Synthetic oligonucleotide
cugacuguccugacucuga

SEQ ID NO: 2990850 - RNA, 19 nt, Artificial Sequence
  Description of Artificial Sequence: Synthetic oligonucleotide
caguguauucaucguggca

SEQ ID NO: 2990851 - RNA, 19 nt, Artificial Sequence
  Description of Artificial Sequence: Synthetic oligonucleotide
gugguucauaaagaaucca

SEQ ID NO: 2990852 - RNA, 19 nt, Artificial Sequence
  Description of Artificial Sequence: Synthetic oligonucleotide
aagcauucagacaccucuu

SEQ ID NO: 2990853 - RNA, 19 nt, Artificial Sequence
  Description of Artificial Sequence: Synthetic oligonucleotide
acucugaaucugacauuuc

SEQ ID NO: 2990854 - RNA, 19 nt, Artificial Sequence
  Description of Artificial Sequence: Synthetic oligonucleotide
uuaggcaggcagagacaau

SEQ ID NO: 2990855 - RNA, 19 nt, Artificial Sequence
  Description of Artificial Sequence: Synthetic oligonucleotide
cuagacucacuguuauugu

SEQ ID NO: 2990856 - RNA, 19 nt, Artificial Sequence
  Description of Artificial Sequence: Synthetic oligonucleotide
aucagaagucuggaagcau

SEQ ID NO: 2990857 - RNA, 19 nt, Artificial Sequence
  Description of Artificial Sequence: Synthetic oligonucleotide
gguacccugcuuacacugg

SEQ ID NO: 2990858 - RNA, 19 nt, Artificial Sequence
  Description of Artificial Sequence: Synthetic oligonucleotide
cagcagcuaugacaacuac

SEQ ID NO: 2990859 - RNA, 19 nt, Artificial Sequence
  Description of Artificial Sequence: Synthetic oligonucleotide
agagcagcgaaaacagcua

SEQ ID NO: 2990860 - RNA, 19 nt, Artificial Sequence
  Description of Artificial Sequence: Synthetic oligonucleotide
cugacauuucacacagugu

SEQ ID NO: 2990861 - RNA, 19 nt, Artificial Sequence
  Description of Artificial Sequence: Synthetic oligonucleotide
ccugcuuacacuggcacuc

SEQ ID NO: 2990862 - RNA, 19 nt, Artificial Sequence
  Description of Artificial Sequence: Synthetic oligonucleotide
uggcauugcauugccugau

SEQ ID NO: 2990863 - RNA, 19 nt, Artificial Sequence
  Description of Artificial Sequence: Synthetic oligonucleotide
acagcuagacucacuguua

SEQ ID NO: 2990864 - RNA, 19 nt, Artificial Sequence
  Description of Artificial Sequence: Synthetic oligonucleotide
ucguggcauugcauugccu

SEQ ID NO: 2990865 - RNA, 19 nt, Artificial Sequence
  Description of Artificial Sequence: Synthetic oligonucleotide
acagcagcuaugacaacua

SEQ ID NO: 2990866 - RNA, 19 nt, Artificial Sequence
  Description of Artificial Sequence: Synthetic oligonucleotide
cacaguuuucagaguuaca

SEQ ID NO: 2990867 - RNA, 19 nt, Artificial Sequence
  Description of Artificial Sequence: Synthetic oligonucleotide
caguuuucagaguuacagu

SEQ ID NO: 2990868 - RNA, 19 nt, Artificial Sequence
  Description of Artificial Sequence: Synthetic oligonucleotide
cccgacacugagagcagcg

SEQ ID NO: 2990869 - RNA, 19 nt, Artificial Sequence
  Description of Artificial Sequence: Synthetic oligonucleotide
gaaaacagcuagacucacu

SEQ ID NO: 2990870 - RNA, 19 nt, Artificial Sequence
  Description of Artificial Sequence: Synthetic oligonucleotide
agcagcgaaaacagcuaga

SEQ ID NO: 2990871 - RNA, 19 nt, Artificial Sequence
  Description of Artificial Sequence: Synthetic oligonucleotide
gcauugcauugccugauga

SEQ ID NO: 2990872 - RNA, 19 nt, Artificial Sequence
  Description of Artificial Sequence: Synthetic oligonucleotide
cugcaugaaaggcaccucu

SEQ ID NO: 2990873 - RNA, 19 nt, Artificial Sequence
  Description of Artificial Sequence: Synthetic oligonucleotide
agcuagacucacuguuauu

SEQ ID NO: 2990874 - RNA, 19 nt, Artificial Sequence
  Description of Artificial Sequence: Synthetic oligonucleotide
ggcauugcauugccugaug

SEQ ID NO: 2990875 - RNA, 19 nt, Artificial Sequence
  Description of Artificial Sequence: Synthetic oligonucleotide
cacacaguuuucagaguua

SEQ ID NO: 2990876 - RNA, 19 nt, Artificial Sequence
  Description of Artificial Sequence: Synthetic oligonucleotide
gggauacauucacucuuac

SEQ ID NO: 2990877 - RNA, 19 nt, Artificial Sequence
  Description of Artificial Sequence: Synthetic oligonucleotide
ucccgacacugagagcagc

SEQ ID NO: 2990878 - RNA, 19 nt, Artificial Sequence
  Description of Artificial Sequence: Synthetic oligonucleotide
gcagagacaaugaaagccu

SEQ ID NO: 2990879 - RNA, 19 nt, Artificial Sequence
  Description of Artificial Sequence: Synthetic oligonucleotide
gcacucacgaucagaaguc

SEQ ID NO: 2990880 - RNA, 19 nt, Artificial Sequence
  Description of Artificial Sequence: Synthetic oligonucleotide
acucacuguuauugugguu

SEQ ID NO: 2990881 - RNA, 19 nt, Artificial Sequence
  Description of Artificial Sequence: Synthetic oligonucleotide
gcgaaaacagcuagacuca

SEQ ID NO: 2990882 - RNA, 19 nt, Artificial Sequence
  Description of Artificial Sequence: Synthetic oligonucleotide
cacgaucagaagucuggaa

SEQ ID NO: 2990883 - RNA, 19 nt, Artificial Sequence
  Description of Artificial Sequence: Synthetic oligonucleotide
auucaucguggcauugcau

SEQ ID NO: 2990884 - RNA, 19 nt, Artificial Sequence
  Description of Artificial Sequence: Synthetic oligonucleotide
ugacagcagcuaugacaac

SEQ ID NO: 2990885 - RNA, 19 nt, Artificial Sequence
  Description of Artificial Sequence: Synthetic oligonucleotide
cacacaguguauucaucgu

SEQ ID NO: 2990886 - RNA, 19 nt, Artificial Sequence
  Description of Artificial Sequence: Synthetic oligonucleotide
cuucuuggucaucccgaca

SEQ ID NO: 2990887 - RNA, 19 nt, Artificial Sequence
  Description of Artificial Sequence: Synthetic oligonucleotide
gacaccucuucuuggucau

SEQ ID NO: 2990888 - RNA, 19 nt, Artificial Sequence
  Description of Artificial Sequence: Synthetic oligonucleotide
cacucuuaccaugguuauc

SEQ ID NO: 2990889 - RNA, 19 nt, Artificial Sequence
  Description of Artificial Sequence: Synthetic oligonucleotide
cuuugucuuuaggacagcu

SEQ ID NO: 2990890 - RNA, 19 nt, Artificial Sequence
  Description of Artificial Sequence: Synthetic oligonucleotide
caccucuccacacaguuuu

SEQ ID NO: 2990891 - RNA, 19 nt, Artificial Sequence
  Description of Artificial Sequence: Synthetic oligonucleotide
ucagagcuuuaggcaggca

SEQ ID NO: 2990892 - RNA, 19 nt, Artificial Sequence
  Description of Artificial Sequence: Synthetic oligonucleotide
agcuuuaggcaggcagaga

SEQ ID NO: 2990893 - RNA, 19 nt, Artificial Sequence
  Description of Artificial Sequence: Synthetic oligonucleotide
aggcaggcagagacaauga

SEQ ID NO: 2990894 - RNA, 19 nt, Artificial Sequence
  Description of Artificial Sequence: Synthetic oligonucleotide
gcaggcagagacaaugaaa

SEQ ID NO: 2990895 - RNA, 19 nt, Artificial Sequence
  Description of Artificial Sequence: Synthetic oligonucleotide
guccugacucugaaucuga

SEQ ID NO: 2990896 - RNA, 19 nt, Artificial Sequence
  Description of Artificial Sequence: Synthetic oligonucleotide
acaccucuucuuggucauc

SEQ ID NO: 2990897 - RNA, 19 nt, Artificial Sequence
  Description of Artificial Sequence: Synthetic oligonucleotide
cuacaauauucagagcuuu

SEQ ID NO: 2990898 - RNA, 19 nt, Artificial Sequence
  Description of Artificial Sequence: Synthetic oligonucleotide
cauugccugaugacuuugu

SEQ ID NO: 2990899 - RNA, 19 nt, Artificial Sequence
  Description of Artificial Sequence: Synthetic oligonucleotide
gcauucagacaccucuucu

SEQ ID NO: 2990900 - RNA, 19 nt, Artificial Sequence
  Description of Artificial Sequence: Synthetic oligonucleotide
ccugacucugaaucugaca

SEQ ID NO: 2990901 - RNA, 19 nt, Artificial Sequence
  Description of Artificial Sequence: Synthetic oligonucleotide
gcauugccugaugacuuug

SEQ ID NO: 2990902 - RNA, 19 nt, Artificial Sequence
  Description of Artificial Sequence: Synthetic oligonucleotide
aucccgacacugagagcag

SEQ ID NO: 2990903 - RNA, 19 nt, Artificial Sequence
  Description of Artificial Sequence: Synthetic oligonucleotide
cagauucacaugggauaca

SEQ ID NO: 2990904 - RNA, 19 nt, Artificial Sequence
  Description of Artificial Sequence: Synthetic oligonucleotide
ggaagcauucagacaccuc

SEQ ID NO: 2990905 - RNA, 19 nt, Artificial Sequence
  Description of Artificial Sequence: Synthetic oligonucleotide
guguauucaucguggcauu

SEQ ID NO: 2990906 - RNA, 19 nt, Artificial Sequence
  Description of Artificial Sequence: Synthetic oligonucleotide
gacuguccugacucugaau

SEQ ID NO: 2990907 - RNA, 19 nt, Artificial Sequence
  Description of Artificial Sequence: Synthetic oligonucleotide
cagcuagacucacuguuau

SEQ ID NO: 2990908 - RNA, 19 nt, Artificial Sequence
  Description of Artificial Sequence: Synthetic oligonucleotide
cacuggcacucacgaucag

SEQ ID NO: 2990909 - RNA, 19 nt, Artificial Sequence
  Description of Artificial Sequence: Synthetic oligonucleotide
cauucacucuuaccauggu

SEQ ID NO: 2990910 - RNA, 19 nt, Artificial Sequence
  Description of Artificial Sequence: Synthetic oligonucleotide
cagcgaaaacagcuagacu

SEQ ID NO: 2990911 - RNA, 19 nt, Artificial Sequence
  Description of Artificial Sequence: Synthetic oligonucleotide
ggcaccucuccacacaguu

SEQ ID NO: 2990912 - RNA, 19 nt, Artificial Sequence
  Description of Artificial Sequence: Synthetic oligonucleotide
aucugacauuucacacagu

SEQ ID NO: 2990913 - RNA, 19 nt, Artificial Sequence
  Description of Artificial Sequence: Synthetic oligonucleotide
cugcuuacacuggcacuca

SEQ ID NO: 2990914 - RNA, 19 nt, Artificial Sequence
  Description of Artificial Sequence: Synthetic oligonucleotide
ggucaucccgacacugaga

SEQ ID NO: 2990915 - RNA, 19 nt, Artificial Sequence
  Description of Artificial Sequence: Synthetic oligonucleotide
gauucacaugggauacauu

SEQ ID NO: 2990916 - RNA, 19 nt, Artificial Sequence
  Description of Artificial Sequence: Synthetic oligonucleotide
gcugcaugaaaggcaccuc

SEQ ID NO: 2990917 - RNA, 19 nt, Artificial Sequence
  Description of Artificial Sequence: Synthetic oligonucleotide
cgaaaacagcuagacucac

SEQ ID NO: 2990918 - RNA, 19 nt, Artificial Sequence
  Description of Artificial Sequence: Synthetic oligonucleotide
ggacagcugcugcaugaaa

SEQ ID NO: 2990919 - RNA, 19 nt, Artificial Sequence
  Description of Artificial Sequence: Synthetic oligonucleotide
ccugaugacuuugucuuua

SEQ ID NO: 2990920 - RNA, 19 nt, Artificial Sequence
  Description of Artificial Sequence: Synthetic oligonucleotide
ccacacaguuuucagaguu

SEQ ID NO: 2990921 - RNA, 19 nt, Artificial Sequence
  Description of Artificial Sequence: Synthetic oligonucleotide
gaguuacaguagguacccu

SEQ ID NO: 2990922 - RNA, 19 nt, Artificial Sequence
  Description of Artificial Sequence: Synthetic oligonucleotide
cacucacgaucagaagucu

SEQ ID NO: 2990923 - RNA, 19 nt, Artificial Sequence
  Description of Artificial Sequence: Synthetic oligonucleotide
aggcaccucuccacacagu

SEQ ID NO: 2990924 - RNA, 19 nt, Artificial Sequence
  Description of Artificial Sequence: Synthetic oligonucleotide
cagcuaugacaacuacaau

SEQ ID NO: 2990925 - RNA, 19 nt, Artificial Sequence
  Description of Artificial Sequence: Synthetic oligonucleotide
ccucuccacacaguuuuca

SEQ ID NO: 2990926 - RNA, 19 nt, Artificial Sequence
  Description of Artificial Sequence: Synthetic oligonucleotide
ccgacacugagagcagcga

SEQ ID NO: 2990927 - RNA, 19 nt, Artificial Sequence
  Description of Artificial Sequence: Synthetic oligonucleotide
cccugcuuacacuggcacu

SEQ ID NO: 2990928 - RNA, 19 nt, Artificial Sequence
  Description of Artificial Sequence: Synthetic oligonucleotide
cacuguuauugugguucau

SEQ ID NO: 2990929 - RNA, 19 nt, Artificial Sequence
  Description of Artificial Sequence: Synthetic oligonucleotide
gccugaugacuuugucuuu

SEQ ID NO: 2990930 - RNA, 19 nt, Artificial Sequence
  Description of Artificial Sequence: Synthetic oligonucleotide
aaagucauaccguaacagc

SEQ ID NO: 2990931 - RNA, 19 nt, Artificial Sequence
  Description of Artificial Sequence: Synthetic oligonucleotide
aaucugggaacguaggacg

SEQ ID NO: 2990932 - RNA, 19 nt, Artificial Sequence
  Description of Artificial Sequence: Synthetic oligonucleotide
gauaacuugguguagaauc

SEQ ID NO: 2990933 - RNA, 19 nt, Artificial Sequence
  Description of Artificial Sequence: Synthetic oligonucleotide
gauauucaaacacaaaguc

SEQ ID NO: 2990934 - RNA, 19 nt, Artificial Sequence
  Description of Artificial Sequence: Synthetic oligonucleotide
aagucauaccguaacagcc

SEQ ID NO: 2990935 - RNA, 19 nt, Artificial Sequence
  Description of Artificial Sequence: Synthetic oligonucleotide
uaccguaacagccacagag

SEQ ID NO: 2990936 - RNA, 19 nt, Artificial Sequence
  Description of Artificial Sequence: Synthetic oligonucleotide
aaugaaauuggccacccgu

SEQ ID NO: 2990937 - RNA, 19 nt, Artificial Sequence
  Description of Artificial Sequence: Synthetic oligonucleotide
caaacacaaagucauaccg

SEQ ID NO: 2990938 - RNA, 19 nt, Artificial Sequence
  Description of Artificial Sequence: Synthetic oligonucleotide
uuuucuugcaguucguucc

SEQ ID NO: 2990939 - RNA, 19 nt, Artificial Sequence
  Description of Artificial Sequence: Synthetic oligonucleotide
uugaggaaaugucaugugg

SEQ ID NO: 2990940 - RNA, 19 nt, Artificial Sequence
  Description of Artificial Sequence: Synthetic oligonucleotide
uccaaugaagaucauguug

SEQ ID NO: 2990941 - RNA, 19 nt, Artificial Sequence
  Description of Artificial Sequence: Synthetic oligonucleotide
aaugaagaucauguugggc

SEQ ID NO: 2990942 - RNA, 19 nt, Artificial Sequence
  Description of Artificial Sequence: Synthetic oligonucleotide
cuagcaaugaaauuggcca

SEQ ID NO: 2990943 - RNA, 19 nt, Artificial Sequence
  Description of Artificial Sequence: Synthetic oligonucleotide
uggacuuuguccaagcaug

SEQ ID NO: 2990944 - RNA, 19 nt, Artificial Sequence
  Description of Artificial Sequence: Synthetic oligonucleotide
gggauauucaaacacaaag

SEQ ID NO: 2990945 - RNA, 19 nt, Artificial Sequence
  Description of Artificial Sequence: Synthetic oligonucleotide
gaggcuagcaaugaaauug

SEQ ID NO: 2990946 - RNA, 19 nt, Artificial Sequence
  Description of Artificial Sequence: Synthetic oligonucleotide
ucaaacacaaagucauacc

SEQ ID NO: 2990947 - RNA, 19 nt, Artificial Sequence
  Description of Artificial Sequence: Synthetic oligonucleotide
ccaaugaagaucauguugg

SEQ ID NO: 2990948 - RNA, 19 nt, Artificial Sequence
  Description of Artificial Sequence: Synthetic oligonucleotide
ugaggaaaugucauguggu

SEQ ID NO: 2990949 - RNA, 19 nt, Artificial Sequence
  Description of Artificial Sequence: Synthetic oligonucleotide
aacacaaagucauaccgua

SEQ ID NO: 2990950 - RNA, 19 nt, Artificial Sequence
  Description of Artificial Sequence: Synthetic oligonucleotide
uggucugauaacuuggugu

SEQ ID NO: 2990951 - RNA, 19 nt, Artificial Sequence
  Description of Artificial Sequence: Synthetic oligonucleotide
aaauuggccacccguugag

SEQ ID NO: 2990952 - RNA, 19 nt, Artificial Sequence
  Description of Artificial Sequence: Synthetic oligonucleotide
uagaaucugggaacguagg

SEQ ID NO: 2990953 - RNA, 19 nt, Artificial Sequence
  Description of Artificial Sequence: Synthetic oligonucleotide
uugguguagaaucugggaa

SEQ ID NO: 2990954 - RNA, 19 nt, Artificial Sequence
  Description of Artificial Sequence: Synthetic oligonucleotide
uguugggcaugacuggccg

SEQ ID NO: 2990955 - RNA, 19 nt, Artificial Sequence
  Description of Artificial Sequence: Synthetic oligonucleotide
aggaucacaccgcacgggc

SEQ ID NO: 2990956 - RNA, 19 nt, Artificial Sequence
  Description of Artificial Sequence: Synthetic oligonucleotide
ugaaauuggccacccguug

SEQ ID NO: 2990957 - RNA, 19 nt, Artificial Sequence
  Description of Artificial Sequence: Synthetic oligonucleotide
aucauguugggcaugacug

SEQ ID NO: 2990958 - RNA, 19 nt, Artificial Sequence
  Description of Artificial Sequence: Synthetic oligonucleotide
ucauguugggcaugacugg

SEQ ID NO: 2990959 - RNA, 19 nt, Artificial Sequence
  Description of Artificial Sequence: Synthetic oligonucleotide
agcaaugaaauuggccacc

SEQ ID NO: 2990960 - RNA, 19 nt, Artificial Sequence
  Description of Artificial Sequence: Synthetic oligonucleotide
cacaaagucauaccguaac

SEQ ID NO: 2990961 - RNA, 19 nt, Artificial Sequence
  Description of Artificial Sequence: Synthetic oligonucleotide
auauucaaacacaaaguca

SEQ ID NO: 2990962 - RNA, 19 nt, Artificial Sequence
  Description of Artificial Sequence: Synthetic oligonucleotide
uaguucuccaagaggcuag

SEQ ID NO: 2990963 - RNA, 19 nt, Artificial Sequence
  Description of Artificial Sequence: Synthetic oligonucleotide
uucguuccuccaaugaaga

SEQ ID NO: 2990964 - RNA, 19 nt, Artificial Sequence
  Description of Artificial Sequence: Synthetic oligonucleotide
ugguguagaaucugggaac

SEQ ID NO: 2990965 - RNA, 19 nt, Artificial Sequence
  Description of Artificial Sequence: Synthetic oligonucleotide
ucugauaacuugguguaga

SEQ ID NO: 2990966 - RNA, 19 nt, Artificial Sequence
  Description of Artificial Sequence: Synthetic oligonucleotide
cauaccguaacagccacag

SEQ ID NO: 2990967 - RNA, 19 nt, Artificial Sequence
  Description of Artificial Sequence: Synthetic oligonucleotide
caaagucauaccguaacag

SEQ ID NO: 2990968 - RNA, 19 nt, Artificial Sequence
  Description of Artificial Sequence: Synthetic oligonucleotide
ucuccaagaggcuagcaau

SEQ ID NO: 2990969 - RNA, 19 nt, Artificial Sequence
  Description of Artificial Sequence: Synthetic oligonucleotide
cauguggucugauaacuug

SEQ ID NO: 2990970 - RNA, 19 nt, Artificial Sequence
  Description of Artificial Sequence: Synthetic oligonucleotide
aaacacaaagucauaccgu

SEQ ID NO: 2990971 - RNA, 19 nt, Artificial Sequence
  Description of Artificial Sequence: Synthetic oligonucleotide
augucauguggucugauaa

SEQ ID NO: 2990972 - RNA, 19 nt, Artificial Sequence
  Description of Artificial Sequence: Synthetic oligonucleotide
gaucacaccgcacgggcag

SEQ ID NO: 2990973 - RNA, 19 nt, Artificial Sequence
  Description of Artificial Sequence: Synthetic oligonucleotide
uuggacuuuguccaagcau

SEQ ID NO: 2990974 - RNA, 19 nt, Artificial Sequence
  Description of Artificial Sequence: Synthetic oligonucleotide
acaaagucauaccguaaca

SEQ ID NO: 2990975 - RNA, 19 nt, Artificial Sequence
  Description of Artificial Sequence: Synthetic oligonucleotide
caaugaagaucauguuggg

SEQ ID NO: 2990976 - RNA, 19 nt, Artificial Sequence
  Description of Artificial Sequence: Synthetic oligonucleotide
ggaaaugucauguggucug

SEQ ID NO: 2990977 - RNA, 19 nt, Artificial Sequence
  Description of Artificial Sequence: Synthetic oligonucleotide
guagaaucugggaacguag

SEQ ID NO: 2990978 - RNA, 19 nt, Artificial Sequence
  Description of Artificial Sequence: Synthetic oligonucleotide
gaaucugggaacguaggac

SEQ ID NO: 2990979 - RNA, 19 nt, Artificial Sequence
  Description of Artificial Sequence: Synthetic oligonucleotide
aaugucauguggucugaua

SEQ ID NO: 2990980 - RNA, 19 nt, Artificial Sequence
  Description of Artificial Sequence: Synthetic oligonucleotide
ucuugcaguucguuccucc

SEQ ID NO: 2990981 - RNA, 19 nt, Artificial Sequence
  Description of Artificial Sequence: Synthetic oligonucleotide
aagaggcuagcaaugaaau

SEQ ID NO: 2990982 - RNA, 19 nt, Artificial Sequence
  Description of Artificial Sequence: Synthetic oligonucleotide
agaaucugggaacguagga

SEQ ID NO: 2990983 - RNA, 19 nt, Artificial Sequence
  Description of Artificial Sequence: Synthetic oligonucleotide
uagcaaugaaauuggccac

SEQ ID NO: 2990984 - RNA, 19 nt, Artificial Sequence
  Description of Artificial Sequence: Synthetic oligonucleotide
guucguuccuccaaugaag

SEQ ID NO: 2990985 - RNA, 19 nt, Artificial Sequence
  Description of Artificial Sequence: Synthetic oligonucleotide
ugucauguggucugauaac

SEQ ID NO: 2990986 - RNA, 19 nt, Artificial Sequence
  Description of Artificial Sequence: Synthetic oligonucleotide
gaggaaaugucaugugguc

SEQ ID NO: 2990987 - RNA, 19 nt, Artificial Sequence
  Description of Artificial Sequence: Synthetic oligonucleotide
gaaauuggccacccguuga

SEQ ID NO: 2990988 - RNA, 19 nt, Artificial Sequence
  Description of Artificial Sequence: Synthetic oligonucleotide
aagaucauguugggcauga

SEQ ID NO: 2990989 - RNA, 19 nt, Artificial Sequence
  Description of Artificial Sequence: Synthetic oligonucleotide
ugaagaucauguugggcau

SEQ ID NO: 2990990 - RNA, 19 nt, Artificial Sequence
  Description of Artificial Sequence: Synthetic oligonucleotide
auaacuugguguagaaucu

SEQ ID NO: 2990991 - RNA, 19 nt, Artificial Sequence
  Description of Artificial Sequence: Synthetic oligonucleotide
aguucguuccuccaaugaa

SEQ ID NO: 2990992 - RNA, 19 nt, Artificial Sequence
  Description of Artificial Sequence: Synthetic oligonucleotide
guugaggaaaugucaugug

SEQ ID NO: 2990993 - RNA, 19 nt, Artificial Sequence
  Description of Artificial Sequence: Synthetic oligonucleotide
uuucuugcaguucguuccu

SEQ ID NO: 2990994 - RNA, 19 nt, Artificial Sequence
  Description of Artificial Sequence: Synthetic oligonucleotide
auguggucugauaacuugg

SEQ ID NO: 2990995 - RNA, 19 nt, Artificial Sequence
  Description of Artificial Sequence: Synthetic oligonucleotide
aauuggccacccguugagg

SEQ ID NO: 2990996 - RNA, 19 nt, Artificial Sequence
  Description of Artificial Sequence: Synthetic oligonucleotide
auuggccacccguugagga

SEQ ID NO: 2990997 - RNA, 19 nt, Artificial Sequence
  Description of Artificial Sequence: Synthetic oligonucleotide
uggccggggauauucaaac

SEQ ID NO: 2990998 - RNA, 19 nt, Artificial Sequence
  Description of Artificial Sequence: Synthetic oligonucleotide
uguagaaucugggaacgua

SEQ ID NO: 2990999 - RNA, 19 nt, Artificial Sequence
  Description of Artificial Sequence: Synthetic oligonucleotide
cuugguguagaaucuggga

SEQ ID NO: 2991000 - RNA, 19 nt, Artificial Sequence
  Description of Artificial Sequence: Synthetic oligonucleotide
gguguagaaucugggaacg

SEQ ID NO: 2991001 - RNA, 19 nt, Artificial Sequence
  Description of Artificial Sequence: Synthetic oligonucleotide
ucugggaacguaggacgcg

SEQ ID NO: 2991002 - RNA, 19 nt, Artificial Sequence
  Description of Artificial Sequence: Synthetic oligonucleotide
guaacagccacagagaguu

SEQ ID NO: 2991003 - RNA, 19 nt, Artificial Sequence
  Description of Artificial Sequence: Synthetic oligonucleotide
uaacuugguguagaaucug

SEQ ID NO: 2991004 - RNA, 19 nt, Artificial Sequence
  Description of Artificial Sequence: Synthetic oligonucleotide
acaccgcacgggcaguggc

SEQ ID NO: 2991005 - RNA, 19 nt, Artificial Sequence
  Description of Artificial Sequence: Synthetic oligonucleotide
ugcaguucguuccuccaau

SEQ ID NO: 2991006 - RNA, 19 nt, Artificial Sequence
  Description of Artificial Sequence: Synthetic oligonucleotide
cuccaagaggcuagcaaug

SEQ ID NO: 2991007 - RNA, 19 nt, Artificial Sequence
  Description of Artificial Sequence: Synthetic oligonucleotide
aucugggaacguaggacgc

SEQ ID NO: 2991008 - RNA, 19 nt, Artificial Sequence
  Description of Artificial Sequence: Synthetic oligonucleotide
uccuccaaugaagaucaug

SEQ ID NO: 2991009 - RNA, 19 nt, Artificial Sequence
  Description of Artificial Sequence: Synthetic oligonucleotide
aggaaaugucauguggucu

SEQ ID NO: 2991010 - RNA, 19 nt, Artificial Sequence
  Description of Artificial Sequence: Synthetic oligonucleotide
aguucuccaagaggcuagc

SEQ ID NO: 2991011 - RNA, 19 nt, Artificial Sequence
  Description of Artificial Sequence: Synthetic oligonucleotide
caagaggcuagcaaugaaa

SEQ ID NO: 2991012 - RNA, 19 nt, Artificial Sequence
  Description of Artificial Sequence: Synthetic oligonucleotide
cauguugggcaugacuggc

SEQ ID NO: 2991013 - RNA, 19 nt, Artificial Sequence
  Description of Artificial Sequence: Synthetic oligonucleotide
uccaagaggcuagcaauga

SEQ ID NO: 2991014 - RNA, 19 nt, Artificial Sequence
  Description of Artificial Sequence: Synthetic oligonucleotide
gaucauguugggcaugacu

SEQ ID NO: 2991015 - RNA, 19 nt, Artificial Sequence
  Description of Artificial Sequence: Synthetic oligonucleotide
caaugaaauuggccacccg

SEQ ID NO: 2991016 - RNA, 19 nt, Artificial Sequence
  Description of Artificial Sequence: Synthetic oligonucleotide
ucauguggucugauaacuu

SEQ ID NO: 2991017 - RNA, 19 nt, Artificial Sequence
  Description of Artificial Sequence: Synthetic oligonucleotide
agucauaccguaacagcca

SEQ ID NO: 2991018 - RNA, 19 nt, Artificial Sequence
  Description of Artificial Sequence: Synthetic oligonucleotide
ugggaacguaggacgcggg

SEQ ID NO: 2991019 - RNA, 19 nt, Artificial Sequence
  Description of Artificial Sequence: Synthetic oligonucleotide
gcuagcaaugaaauuggcc

SEQ ID NO: 2991020 - RNA, 19 nt, Artificial Sequence
  Description of Artificial Sequence: Synthetic oligonucleotide
ggggcuuggacuuugucca

SEQ ID NO: 2991021 - RNA, 19 nt, Artificial Sequence
  Description of Artificial Sequence: Synthetic oligonucleotide
gucauaccguaacagccac

SEQ ID NO: 2991022 - RNA, 19 nt, Artificial Sequence
  Description of Artificial Sequence: Synthetic oligonucleotide
cacccguugaggaaauguc

SEQ ID NO: 2991023 - RNA, 19 nt, Artificial Sequence
  Description of Artificial Sequence: Synthetic oligonucleotide
ugauaacuugguguagaau

SEQ ID NO: 2991024 - RNA, 19 nt, Artificial Sequence
  Description of Artificial Sequence: Synthetic oligonucleotide
uugcaguucguuccuccaa

SEQ ID NO: 2991025 - RNA, 19 nt, Artificial Sequence
  Description of Artificial Sequence: Synthetic oligonucleotide
guggucugauaacuuggug

SEQ ID NO: 2991026 - RNA, 19 nt, Artificial Sequence
  Description of Artificial Sequence: Synthetic oligonucleotide
gaagaucauguugggcaug

SEQ ID NO: 2991027 - RNA, 19 nt, Artificial Sequence
  Description of Artificial Sequence: Synthetic oligonucleotide
uaggacgcggggcuuggac

SEQ ID NO: 2991028 - RNA, 19 nt, Artificial Sequence
  Description of Artificial Sequence: Synthetic oligonucleotide
cugggaacguaggacgcgg

SEQ ID NO: 2991029 - RNA, 19 nt, Artificial Sequence
  Description of Artificial Sequence: Synthetic oligonucleotide
ugacuggccggggauauuc

SEQ ID NO: 2991030 - RNA, 19 nt, Artificial Sequence
  Description of Artificial Sequence: Synthetic oligonucleotide
guugggcaugacuggccgg

SEQ ID NO: 2991031 - RNA, 19 nt, Artificial Sequence
  Description of Artificial Sequence: Synthetic oligonucleotide
agccacagagaguucuggu

SEQ ID NO: 2991032 - RNA, 19 nt, Artificial Sequence
  Description of Artificial Sequence: Synthetic oligonucleotide
ggauauucaaacacaaagu

SEQ ID NO: 2991033 - RNA, 19 nt, Artificial Sequence
  Description of Artificial Sequence: Synthetic oligonucleotide
gacuuuguccaagcaugug

SEQ ID NO: 2991034 - RNA, 19 nt, Artificial Sequence
  Description of Artificial Sequence: Synthetic oligonucleotide
agaggcuagcaaugaaauu

SEQ ID NO: 2991035 - RNA, 19 nt, Artificial Sequence
  Description of Artificial Sequence: Synthetic oligonucleotide
gccacagagaguucuggug

SEQ ID NO: 2991036 - RNA, 19 nt, Artificial Sequence
  Description of Artificial Sequence: Synthetic oligonucleotide
gccggggauauucaaacac

SEQ ID NO: 2991037 - RNA, 19 nt, Artificial Sequence
  Description of Artificial Sequence: Synthetic oligonucleotide
aggacgcggggcuuggacu

SEQ ID NO: 2991038 - RNA, 19 nt, Artificial Sequence
  Description of Artificial Sequence: Synthetic oligonucleotide
gaacguaggacgcggggcu

SEQ ID NO: 2991039 - RNA, 19 nt, Artificial Sequence
  Description of Artificial Sequence: Synthetic oligonucleotide
gaaaugucauguggucuga

SEQ ID NO: 2991040 - RNA, 19 nt, Artificial Sequence
  Description of Artificial Sequence: Synthetic oligonucleotide
aaaugucauguggucugau

SEQ ID NO: 2991041 - RNA, 19 nt, Artificial Sequence
  Description of Artificial Sequence: Synthetic oligonucleotide
uuggccacccguugaggaa

SEQ ID NO: 2991042 - RNA, 19 nt, Artificial Sequence
  Description of Artificial Sequence: Synthetic oligonucleotide
cuugcaguucguuccucca

SEQ ID NO: 2991043 - RNA, 19 nt, Artificial Sequence
  Description of Artificial Sequence: Synthetic oligonucleotide
accguaacagccacagaga

SEQ ID NO: 2991044 - RNA, 19 nt, Artificial Sequence
  Description of Artificial Sequence: Synthetic oligonucleotide
gucugauaacuugguguag

SEQ ID NO: 2991045 - RNA, 19 nt, Artificial Sequence
  Description of Artificial Sequence: Synthetic oligonucleotide
gggaacguaggacgcgggg

SEQ ID NO: 2991046 - RNA, 19 nt, Artificial Sequence
  Description of Artificial Sequence: Synthetic oligonucleotide
cugauaacuugguguagaa

SEQ ID NO: 2991047 - RNA, 19 nt, Artificial Sequence
  Description of Artificial Sequence: Synthetic oligonucleotide
augaaauuggccacccguu

SEQ ID NO: 2991048 - RNA, 19 nt, Artificial Sequence
  Description of Artificial Sequence: Synthetic oligonucleotide
acccguugaggaaauguca

SEQ ID NO: 2991049 - RNA, 19 nt, Artificial Sequence
  Description of Artificial Sequence: Synthetic oligonucleotide
ccuccaaugaagaucaugu

SEQ ID NO: 2991050 - RNA, 19 nt, Artificial Sequence
  Description of Artificial Sequence: Synthetic oligonucleotide
ccguaacagccacagagag

SEQ ID NO: 2991051 - RNA, 19 nt, Artificial Sequence
  Description of Artificial Sequence: Synthetic oligonucleotide
cuuggacuuuguccaagca

SEQ ID NO: 2991052 - RNA, 19 nt, Artificial Sequence
  Description of Artificial Sequence: Synthetic oligonucleotide
acgggcaguggcugggucu

SEQ ID NO: 2991053 - RNA, 19 nt, Artificial Sequence
  Description of Artificial Sequence: Synthetic oligonucleotide
gcuuggacuuuguccaagc

SEQ ID NO: 2991054 - RNA, 19 nt, Artificial Sequence
  Description of Artificial Sequence: Synthetic oligonucleotide
ggaacguaggacgcggggc

SEQ ID NO: 2991055 - RNA, 19 nt, Artificial Sequence
  Description of Artificial Sequence: Synthetic oligonucleotide
gucauguggucugauaacu

SEQ ID NO: 2991056 - RNA, 19 nt, Artificial Sequence
  Description of Artificial Sequence: Synthetic oligonucleotide
gcaaugaaauuggccaccc

SEQ ID NO: 2991057 - RNA, 19 nt, Artificial Sequence
  Description of Artificial Sequence: Synthetic oligonucleotide
caguucguuccuccaauga

SEQ ID NO: 2991058 - RNA, 19 nt, Artificial Sequence
  Description of Artificial Sequence: Synthetic oligonucleotide
ucguuccuccaaugaagau

SEQ ID NO: 2991059 - RNA, 19 nt, Artificial Sequence
  Description of Artificial Sequence: Synthetic oligonucleotide
guaguucuccaagaggcua

SEQ ID NO: 2991060 - RNA, 19 nt, Artificial Sequence
  Description of Artificial Sequence: Synthetic oligonucleotide
auaccguaacagccacaga

SEQ ID NO: 2991061 - RNA, 19 nt, Artificial Sequence
  Description of Artificial Sequence: Synthetic oligonucleotide
acuggccggggauauucaa

SEQ ID NO: 2991062 - RNA, 19 nt, Artificial Sequence
  Description of Artificial Sequence: Synthetic oligonucleotide
cggggcuuggacuuugucc

SEQ ID NO: 2991063 - RNA, 19 nt, Artificial Sequence
  Description of Artificial Sequence: Synthetic oligonucleotide
uggccacccguugaggaaa

SEQ ID NO: 2991064 - RNA, 19 nt, Artificial Sequence
  Description of Artificial Sequence: Synthetic oligonucleotide
acagccacagagaguucug

SEQ ID NO: 2991065 - RNA, 19 nt, Artificial Sequence
  Description of Artificial Sequence: Synthetic oligonucleotide
ugggcaugacuggccgggg

SEQ ID NO: 2991066 - RNA, 19 nt, Artificial Sequence
  Description of Artificial Sequence: Synthetic oligonucleotide
acacaaagucauaccguaa

SEQ ID NO: 2991067 - RNA, 19 nt, Artificial Sequence
  Description of Artificial Sequence: Synthetic oligonucleotide
uaacagccacagagaguuc

SEQ ID NO: 2991068 - RNA, 19 nt, Artificial Sequence
  Description of Artificial Sequence: Synthetic oligonucleotide
ucacaccgcacgggcagug

SEQ ID NO: 2991069 - RNA, 19 nt, Artificial Sequence
  Description of Artificial Sequence: Synthetic oligonucleotide
gcaguucguuccuccaaug

SEQ ID NO: 2991070 - RNA, 19 nt, Artificial Sequence
  Description of Artificial Sequence: Synthetic oligonucleotide
acagagaguucugguguaa

SEQ ID NO: 2991071 - RNA, 19 nt, Artificial Sequence
  Description of Artificial Sequence: Synthetic oligonucleotide
cguuccuccaaugaagauc

SEQ ID NO: 2991072 - RNA, 19 nt, Artificial Sequence
  Description of Artificial Sequence: Synthetic oligonucleotide
cacagagaguucuggugua

SEQ ID NO: 2991073 - RNA, 19 nt, Artificial Sequence
  Description of Artificial Sequence: Synthetic oligonucleotide
cuggccggggauauucaaa

SEQ ID NO: 2991074 - RNA, 19 nt, Artificial Sequence
  Description of Artificial Sequence: Synthetic oligonucleotide
ccguugaggaaaugucaug

SEQ ID NO: 2991075 - RNA, 19 nt, Artificial Sequence
  Description of Artificial Sequence: Synthetic oligonucleotide
aacguaggacgcggggcuu

SEQ ID NO: 2991076 - RNA, 19 nt, Artificial Sequence
  Description of Artificial Sequence: Synthetic oligonucleotide
ggcuuggacuuuguccaag

SEQ ID NO: 2991077 - RNA, 19 nt, Artificial Sequence
  Description of Artificial Sequence: Synthetic oligonucleotide
cacaccgcacgggcagugg

SEQ ID NO: 2991078 - RNA, 19 nt, Artificial Sequence
  Description of Artificial Sequence: Synthetic oligonucleotide
ccggggauauucaaacaca

SEQ ID NO: 2991079 - RNA, 19 nt, Artificial Sequence
  Description of Artificial Sequence: Synthetic oligonucleotide
acguaggacgcggggcuug

SEQ ID NO: 2991080 - RNA, 19 nt, Artificial Sequence
  Description of Artificial Sequence: Synthetic oligonucleotide
gacuggccggggauauuca

SEQ ID NO: 2991081 - RNA, 19 nt, Artificial Sequence
  Description of Artificial Sequence: Synthetic oligonucleotide
aucacaccgcacgggcagu

SEQ ID NO: 2991082 - RNA, 19 nt, Artificial Sequence
  Description of Artificial Sequence: Synthetic oligonucleotide
uuccuccaaugaagaucau

SEQ ID NO: 2991083 - RNA, 19 nt, Artificial Sequence
  Description of Artificial Sequence: Synthetic oligonucleotide
ggggauauucaaacacaaa

SEQ ID NO: 2991084 - RNA, 19 nt, Artificial Sequence
  Description of Artificial Sequence: Synthetic oligonucleotide
ccacagagaguucuggugu

SEQ ID NO: 2991085 - RNA, 19 nt, Artificial Sequence
  Description of Artificial Sequence: Synthetic oligonucleotide
cuccaaugaagaucauguu

SEQ ID NO: 2991086 - RNA, 19 nt, Artificial Sequence
  Description of Artificial Sequence: Synthetic oligonucleotide
ggccggggauauucaaaca

SEQ ID NO: 2991087 - RNA, 19 nt, Artificial Sequence
  Description of Artificial Sequence: Synthetic oligonucleotide
cggggauauucaaacacaa

SEQ ID NO: 2991088 - RNA, 19 nt, Artificial Sequence
  Description of Artificial Sequence: Synthetic oligonucleotide
ggaucacaccgcacgggca

SEQ ID NO: 2991089 - RNA, 19 nt, Artificial Sequence
  Description of Artificial Sequence: Synthetic oligonucleotide
cguugaggaaaugucaugu

SEQ ID NO: 2991090 - RNA, 19 nt, Artificial Sequence
  Description of Artificial Sequence: Synthetic oligonucleotide
acgcggggcuuggacuuug

SEQ ID NO: 2991091 - RNA, 19 nt, Artificial Sequence
  Description of Artificial Sequence: Synthetic oligonucleotide
guguagaaucugggaacgu

SEQ ID NO: 2991092 - RNA, 19 nt, Artificial Sequence
  Description of Artificial Sequence: Synthetic oligonucleotide
gggcaugacuggccgggga

SEQ ID NO: 2991093 - RNA, 19 nt, Artificial Sequence
  Description of Artificial Sequence: Synthetic oligonucleotide
caugacuggccggggauau

SEQ ID NO: 2991094 - RNA, 19 nt, Artificial Sequence
  Description of Artificial Sequence: Synthetic oligonucleotide
ggcaugacuggccggggau

SEQ ID NO: 2991095 - RNA, 19 nt, Artificial Sequence
  Description of Artificial Sequence: Synthetic oligonucleotide
cccguugaggaaaugucau

SEQ ID NO: 2991096 - RNA, 19 nt, Artificial Sequence
  Description of Artificial Sequence: Synthetic oligonucleotide
caccgcacgggcaguggcu

SEQ ID NO: 2991097 - RNA, 19 nt, Artificial Sequence
  Description of Artificial Sequence: Synthetic oligonucleotide
augacuggccggggauauu

SEQ ID NO: 2991098 - RNA, 19 nt, Artificial Sequence
  Description of Artificial Sequence: Synthetic oligonucleotide
ggacgcggggcuuggacuu

SEQ ID NO: 2991099 - RNA, 19 nt, Artificial Sequence
  Description of Artificial Sequence: Synthetic oligonucleotide
guaggacgcggggcuugga

SEQ ID NO: 2991100 - RNA, 19 nt, Artificial Sequence
  Description of Artificial Sequence: Synthetic oligonucleotide
gcggggcuuggacuuuguc

SEQ ID NO: 2991101 - RNA, 19 nt, Artificial Sequence
  Description of Artificial Sequence: Synthetic oligonucleotide
cguaggacgcggggcuugg

SEQ ID NO: 2991102 - RNA, 19 nt, Artificial Sequence
  Description of Artificial Sequence: Synthetic oligonucleotide
cguaacagccacagagagu

SEQ ID NO: 2991103 - RNA, 19 nt, Artificial Sequence
  Description of Artificial Sequence: Synthetic oligonucleotide
ccacccguugaggaaaugu

SEQ ID NO: 2991104 - RNA, 19 nt, Artificial Sequence
  Description of Artificial Sequence: Synthetic oligonucleotide
gcaugacuggccggggaua

SEQ ID NO: 2991105 - RNA, 19 nt, Artificial Sequence
  Description of Artificial Sequence: Synthetic oligonucleotide
cgggcaguggcugggucug

SEQ ID NO: 2991106 - RNA, 19 nt, Artificial Sequence
  Description of Artificial Sequence: Synthetic oligonucleotide
gccacccguugaggaaaug

SEQ ID NO: 2991107 - RNA, 19 nt, Artificial Sequence
  Description of Artificial Sequence: Synthetic oligonucleotide
gacgcggggcuuggacuuu

SEQ ID NO: 2991108 - RNA, 19 nt, Artificial Sequence
  Description of Artificial Sequence: Synthetic oligonucleotide
ggccacccguugaggaaau

SEQ ID NO: 2991109 - RNA, 19 nt, Artificial Sequence
  Description of Artificial Sequence: Synthetic oligonucleotide
gcacgggcaguggcugggu

SEQ ID NO: 2991110 - RNA, 19 nt, Artificial Sequence
  Description of Artificial Sequence: Synthetic oligonucleotide
gggcaguggcugggucugu

SEQ ID NO: 2991111 - RNA, 19 nt, Artificial Sequence
  Description of Artificial Sequence: Synthetic oligonucleotide
cgcggggcuuggacuuugu

SEQ ID NO: 2991112 - RNA, 19 nt, Artificial Sequence
  Description of Artificial Sequence: Synthetic oligonucleotide
cuuaggaguacauagauag

SEQ ID NO: 2991113 - RNA, 19 nt, Artificial Sequence
  Description of Artificial Sequence: Synthetic oligonucleotide
ucuaauagcaggaagggca

SEQ ID NO: 2991114 - RNA, 19 nt, Artificial Sequence
  Description of Artificial Sequence: Synthetic oligonucleotide
aagugugugaucucuagac

SEQ ID NO: 2991115 - RNA, 19 nt, Artificial Sequence
  Description of Artificial Sequence: Synthetic oligonucleotide
aaggcugcuauguaacucc

SEQ ID NO: 2991116 - RNA, 19 nt, Artificial Sequence
  Description of Artificial Sequence: Synthetic oligonucleotide
uugucuaauagcaggaagg

SEQ ID NO: 2991117 - RNA, 19 nt, Artificial Sequence
  Description of Artificial Sequence: Synthetic oligonucleotide
uucuguagcacaaagugug

SEQ ID NO: 2991118 - RNA, 19 nt, Artificial Sequence
  Description of Artificial Sequence: Synthetic oligonucleotide
agugauggcaaauucaugu

SEQ ID NO: 2991119 - RNA, 19 nt, Artificial Sequence
  Description of Artificial Sequence: Synthetic oligonucleotide
uaggaguacauagauagcg

SEQ ID NO: 2991120 - RNA, 19 nt, Artificial Sequence
  Description of Artificial Sequence: Synthetic oligonucleotide
ucuggcuugucuaauagca

SEQ ID NO: 2991121 - RNA, 19 nt, Artificial Sequence
  Description of Artificial Sequence: Synthetic oligonucleotide
uuagcuacuaccugcuugc

SEQ ID NO: 2991122 - RNA, 19 nt, Artificial Sequence
  Description of Artificial Sequence: Synthetic oligonucleotide
augguaguagcugagcugc

SEQ ID NO: 2991123 - RNA, 19 nt, Artificial Sequence
  Description of Artificial Sequence: Synthetic oligonucleotide
auguaacuccuccucagcc

SEQ ID NO: 2991124 - RNA, 19 nt, Artificial Sequence
  Description of Artificial Sequence: Synthetic oligonucleotide
agugugugaucucuagacc

SEQ ID NO: 2991125 - RNA, 19 nt, Artificial Sequence
  Description of Artificial Sequence: Synthetic oligonucleotide
auagauagcguuguggaag

SEQ ID NO: 2991126 - RNA, 19 nt, Artificial Sequence
  Description of Artificial Sequence: Synthetic oligonucleotide
uacauagauagcguugugg

SEQ ID NO: 2991127 - RNA, 19 nt, Artificial Sequence
  Description of Artificial Sequence: Synthetic oligonucleotide
aucucuagaccaccaacgc

SEQ ID NO: 2991128 - RNA, 19 nt, Artificial Sequence
  Description of Artificial Sequence: Synthetic oligonucleotide
ugucuaauagcaggaaggg

SEQ ID NO: 2991129 - RNA, 19 nt, Artificial Sequence
  Description of Artificial Sequence: Synthetic oligonucleotide
gaucucuagaccaccaacg

SEQ ID NO: 2991130 - RNA, 19 nt, Artificial Sequence
  Description of Artificial Sequence: Synthetic oligonucleotide
acaaagggugcucucgggc

SEQ ID NO: 2991131 - RNA, 19 nt, Artificial Sequence
  Description of Artificial Sequence: Synthetic oligonucleotide
uggcuugucuaauagcagg

SEQ ID NO: 2991132 - RNA, 19 nt, Artificial Sequence
  Description of Artificial Sequence: Synthetic oligonucleotide
uugaccuuagcuacuaccu

SEQ ID NO: 2991133 - RNA, 19 nt, Artificial Sequence
  Description of Artificial Sequence: Synthetic oligonucleotide
acauagauagcguugugga

SEQ ID NO: 2991134 - RNA, 19 nt, Artificial Sequence
  Description of Artificial Sequence: Synthetic oligonucleotide
agcguuguggaaguggugc

SEQ ID NO: 2991135 - RNA, 19 nt, Artificial Sequence
  Description of Artificial Sequence: Synthetic oligonucleotide
ugcacugugacgguguggg

SEQ ID NO: 2991136 - RNA, 19 nt, Artificial Sequence
  Description of Artificial Sequence: Synthetic oligonucleotide
aacaugguaguagcugagc

SEQ ID NO: 2991137 - RNA, 19 nt, Artificial Sequence
  Description of Artificial Sequence: Synthetic oligonucleotide
ugccgagugccacaaaggg

SEQ ID NO: 2991138 - RNA, 19 nt, Artificial Sequence
  Description of Artificial Sequence: Synthetic oligonucleotide
agcaguugaccacaucugg

SEQ ID NO: 2991139 - RNA, 19 nt, Artificial Sequence
  Description of Artificial Sequence: Synthetic oligonucleotide
uguggaaguggugcgagcg

SEQ ID NO: 2991140 - RNA, 19 nt, Artificial Sequence
  Description of Artificial Sequence: Synthetic oligonucleotide
uguagcacaaaguguguga

SEQ ID NO: 2991141 - RNA, 19 nt, Artificial Sequence
  Description of Artificial Sequence: Synthetic oligonucleotide
gauagcguuguggaagugg

SEQ ID NO: 2991142 - RNA, 19 nt, Artificial Sequence
  Description of Artificial Sequence: Synthetic oligonucleotide
aaauucauguccagcaaca

SEQ ID NO: 2991143 - RNA, 19 nt, Artificial Sequence
  Description of Artificial Sequence: Synthetic oligonucleotide
aaagugugugaucucuaga

SEQ ID NO: 2991144 - RNA, 19 nt, Artificial Sequence
  Description of Artificial Sequence: Synthetic oligonucleotide
gaccuuagcuacuaccugc

SEQ ID NO: 2991145 - RNA, 19 nt, Artificial Sequence
  Description of Artificial Sequence: Synthetic oligonucleotide
cuugucuaauagcaggaag

SEQ ID NO: 2991146 - RNA, 19 nt, Artificial Sequence
  Description of Artificial Sequence: Synthetic oligonucleotide
agcacaaagugugugaucu

SEQ ID NO: 2991147 - RNA, 19 nt, Artificial Sequence
  Description of Artificial Sequence: Synthetic oligonucleotide
uauguaacuccuccucagc

SEQ ID NO: 2991148 - RNA, 19 nt, Artificial Sequence
  Description of Artificial Sequence: Synthetic oligonucleotide
gaagcaguugaccacaucu

SEQ ID NO: 2991149 - RNA, 19 nt, Artificial Sequence
  Description of Artificial Sequence: Synthetic oligonucleotide
guugaccuuagcuacuacc

SEQ ID NO: 2991150 - RNA, 19 nt, Artificial Sequence
  Description of Artificial Sequence: Synthetic oligonucleotide
ugaucucuagaccaccaac

SEQ ID NO: 2991151 - RNA, 19 nt, Artificial Sequence
  Description of Artificial Sequence: Synthetic oligonucleotide
aucuggcuugucuaauagc

SEQ ID NO: 2991152 - RNA, 19 nt, Artificial Sequence
  Description of Artificial Sequence: Synthetic oligonucleotide
auguccagcaacaugguag

SEQ ID NO: 2991153 - RNA, 19 nt, Artificial Sequence
  Description of Artificial Sequence: Synthetic oligonucleotide
cuuagcuacuaccugcuug

SEQ ID NO: 2991154 - RNA, 19 nt, Artificial Sequence
  Description of Artificial Sequence: Synthetic oligonucleotide
ucucggaagcaguugacca

SEQ ID NO: 2991155 - RNA, 19 nt, Artificial Sequence
  Description of Artificial Sequence: Synthetic oligonucleotide
ucucuagaccaccaacgcc

SEQ ID NO: 2991156 - RNA, 19 nt, Artificial Sequence
  Description of Artificial Sequence: Synthetic oligonucleotide
gccacuuaggaguacauag

SEQ ID NO: 2991157 - RNA, 19 nt, Artificial Sequence
  Description of Artificial Sequence: Synthetic oligonucleotide
cuauguaacuccuccucag

SEQ ID NO: 2991158 - RNA, 19 nt, Artificial Sequence
  Description of Artificial Sequence: Synthetic oligonucleotide
uccagcaacaugguaguag

SEQ ID NO: 2991159 - RNA, 19 nt, Artificial Sequence
  Description of Artificial Sequence: Synthetic oligonucleotide
uuaggaguacauagauagc

SEQ ID NO: 2991160 - RNA, 19 nt, Artificial Sequence
  Description of Artificial Sequence: Synthetic oligonucleotide
ucagucagagugcugccug

SEQ ID NO: 2991161 - RNA, 19 nt, Artificial Sequence
  Description of Artificial Sequence: Synthetic oligonucleotide
caaauucauguccagcaac

SEQ ID NO: 2991162 - RNA, 19 nt, Artificial Sequence
  Description of Artificial Sequence: Synthetic oligonucleotide
cucuagaccaccaacgcca

SEQ ID NO: 2991163 - RNA, 19 nt, Artificial Sequence
  Description of Artificial Sequence: Synthetic oligonucleotide
ucgaaggcugcuauguaac

SEQ ID NO: 2991164 - RNA, 19 nt, Artificial Sequence
  Description of Artificial Sequence: Synthetic oligonucleotide
aguacauagauagcguugu

SEQ ID NO: 2991165 - RNA, 19 nt, Artificial Sequence
  Description of Artificial Sequence: Synthetic oligonucleotide
ugcuauguaacuccuccuc

SEQ ID NO: 2991166 - RNA, 19 nt, Artificial Sequence
  Description of Artificial Sequence: Synthetic oligonucleotide
agcaggaagggcacgaugg

SEQ ID NO: 2991167 - RNA, 19 nt, Artificial Sequence
  Description of Artificial Sequence: Synthetic oligonucleotide
caaagugugugaucucuag

SEQ ID NO: 2991168 - RNA, 19 nt, Artificial Sequence
  Description of Artificial Sequence: Synthetic oligonucleotide
cuaauagcaggaagggcac

SEQ ID NO: 2991169 - RNA, 19 nt, Artificial Sequence
  Description of Artificial Sequence: Synthetic oligonucleotide
aauagcaggaagggcacga

SEQ ID NO: 2991170 - RNA, 19 nt, Artificial Sequence
  Description of Artificial Sequence: Synthetic oligonucleotide
uguaacuccuccucagccu

SEQ ID NO: 2991171 - RNA, 19 nt, Artificial Sequence
  Description of Artificial Sequence: Synthetic oligonucleotide
acuaccugcuugcagccag

SEQ ID NO: 2991172 - RNA, 19 nt, Artificial Sequence
  Description of Artificial Sequence: Synthetic oligonucleotide
ugugaucucuagaccacca

SEQ ID NO: 2991173 - RNA, 19 nt, Artificial Sequence
  Description of Artificial Sequence: Synthetic oligonucleotide
aaaagccuccccugccauc

SEQ ID NO: 2991174 - RNA, 19 nt, Artificial Sequence
  Description of Artificial Sequence: Synthetic oligonucleotide
ugugugaucucuagaccac

SEQ ID NO: 2991175 - RNA, 19 nt, Artificial Sequence
  Description of Artificial Sequence: Synthetic oligonucleotide
gcuacuaccugcuugcagc

SEQ ID NO: 2991176 - RNA, 19 nt, Artificial Sequence
  Description of Artificial Sequence: Synthetic oligonucleotide
caaagggugcucucgggcc

SEQ ID NO: 2991177 - RNA, 19 nt, Artificial Sequence
  Description of Artificial Sequence: Synthetic oligonucleotide
ugaccuuagcuacuaccug

SEQ ID NO: 2991178 - RNA, 19 nt, Artificial Sequence
  Description of Artificial Sequence: Synthetic oligonucleotide
gaguacauagauagcguug

SEQ ID NO: 2991179 - RNA, 19 nt, Artificial Sequence
  Description of Artificial Sequence: Synthetic oligonucleotide
ugggacaccucagucagag

SEQ ID NO: 2991180 - RNA, 19 nt, Artificial Sequence
  Description of Artificial Sequence: Synthetic oligonucleotide
ggacaccucagucagagug

SEQ ID NO: 2991181 - RNA, 19 nt, Artificial Sequence
  Description of Artificial Sequence: Synthetic oligonucleotide
gugugugaucucuagacca

SEQ ID NO: 2991182 - RNA, 19 nt, Artificial Sequence
  Description of Artificial Sequence: Synthetic oligonucleotide
aguagcugagcugcucugc

SEQ ID NO: 2991183 - RNA, 19 nt, Artificial Sequence
  Description of Artificial Sequence: Synthetic oligonucleotide
uguccagcaacaugguagu

SEQ ID NO: 2991184 - RNA, 19 nt, Artificial Sequence
  Description of Artificial Sequence: Synthetic oligonucleotide
uacgugacgcguucuguag

SEQ ID NO: 2991185 - RNA, 19 nt, Artificial Sequence
  Description of Artificial Sequence: Synthetic oligonucleotide
uccucucggaagcaguuga

SEQ ID NO: 2991186 - RNA, 19 nt, Artificial Sequence
  Description of Artificial Sequence: Synthetic oligonucleotide
caugguaguagcugagcug

SEQ ID NO: 2991187 - RNA, 19 nt, Artificial Sequence
  Description of Artificial Sequence: Synthetic oligonucleotide
gauggcaaauucaugucca

SEQ ID NO: 2991188 - RNA, 19 nt, Artificial Sequence
  Description of Artificial Sequence: Synthetic oligonucleotide
ucagagugcugccugcacu

SEQ ID NO: 2991189 - RNA, 19 nt, Artificial Sequence
  Description of Artificial Sequence: Synthetic oligonucleotide
uagauagcguuguggaagu

SEQ ID NO: 2991190 - RNA, 19 nt, Artificial Sequence
  Description of Artificial Sequence: Synthetic oligonucleotide
acgugacgcguucuguagc

SEQ ID NO: 2991191 - RNA, 19 nt, Artificial Sequence
  Description of Artificial Sequence: Synthetic oligonucleotide
aaagccuccccugccaucu

SEQ ID NO: 2991192 - RNA, 19 nt, Artificial Sequence
  Description of Artificial Sequence: Synthetic oligonucleotide
gcugcuauguaacuccucc

SEQ ID NO: 2991193 - RNA, 19 nt, Artificial Sequence
  Description of Artificial Sequence: Synthetic oligonucleotide
agccagugauggcaaauuc

SEQ ID NO: 2991194 - RNA, 19 nt, Artificial Sequence
  Description of Artificial Sequence: Synthetic oligonucleotide
aaagggugcucucgggcca

SEQ ID NO: 2991195 - RNA, 19 nt, Artificial Sequence
  Description of Artificial Sequence: Synthetic oligonucleotide
ggcaaauucauguccagca

SEQ ID NO: 2991196 - RNA, 19 nt, Artificial Sequence
  Description of Artificial Sequence: Synthetic oligonucleotide
guaacuccuccucagccug

SEQ ID NO: 2991197 - RNA, 19 nt, Artificial Sequence
  Description of Artificial Sequence: Synthetic oligonucleotide
caucuggcuugucuaauag

SEQ ID NO: 2991198 - RNA, 19 nt, Artificial Sequence
  Description of Artificial Sequence: Synthetic oligonucleotide
guugaccacaucuggcuug

SEQ ID NO: 2991199 - RNA, 19 nt, Artificial Sequence
  Description of Artificial Sequence: Synthetic oligonucleotide
gcugccugcacugugacgg

SEQ ID NO: 2991200 - RNA, 19 nt, Artificial Sequence
  Description of Artificial Sequence: Synthetic oligonucleotide
ucuguagcacaaagugugu

SEQ ID NO: 2991201 - RNA, 19 nt, Artificial Sequence
  Description of Artificial Sequence: Synthetic oligonucleotide
agcugagcugcucugccag

SEQ ID NO: 2991202 - RNA, 19 nt, Artificial Sequence
  Description of Artificial Sequence: Synthetic oligonucleotide
aguggugcgagcgcugugg

SEQ ID NO: 2991203 - RNA, 19 nt, Artificial Sequence
  Description of Artificial Sequence: Synthetic oligonucleotide
aagggcacgauggcugccg

SEQ ID NO: 2991204 - RNA, 19 nt, Artificial Sequence
  Description of Artificial Sequence: Synthetic oligonucleotide
aagcaguugaccacaucug

SEQ ID NO: 2991205 - RNA, 19 nt, Artificial Sequence
  Description of Artificial Sequence: Synthetic oligonucleotide
cagaugcucugccagcucc

SEQ ID NO: 2991206 - RNA, 19 nt, Artificial Sequence
  Description of Artificial Sequence: Synthetic oligonucleotide
ucagccugggacaccucag

SEQ ID NO: 2991207 - RNA, 19 nt, Artificial Sequence
  Description of Artificial Sequence: Synthetic oligonucleotide
auggcaaauucauguccag

SEQ ID NO: 2991208 - RNA, 19 nt, Artificial Sequence
  Description of Artificial Sequence: Synthetic oligonucleotide
cuacuaccugcuugcagcc

SEQ ID NO: 2991209 - RNA, 19 nt, Artificial Sequence
  Description of Artificial Sequence: Synthetic oligonucleotide
acauacgugacgcguucug

SEQ ID NO: 2991210 - RNA, 19 nt, Artificial Sequence
  Description of Artificial Sequence: Synthetic oligonucleotide
cuggcuugucuaauagcag

SEQ ID NO: 2991211 - RNA, 19 nt, Artificial Sequence
  Description of Artificial Sequence: Synthetic oligonucleotide
caacaugguaguagcugag

SEQ ID NO: 2991212 - RNA, 19 nt, Artificial Sequence
  Description of Artificial Sequence: Synthetic oligonucleotide
cugccgagugccacaaagg

SEQ ID NO: 2991213 - RNA, 19 nt, Artificial Sequence
  Description of Artificial Sequence: Synthetic oligonucleotide
agcuacuaccugcuugcag

SEQ ID NO: 2991214 - RNA, 19 nt, Artificial Sequence
  Description of Artificial Sequence: Synthetic oligonucleotide
aauucauguccagcaacau

SEQ ID NO: 2991215 - RNA, 19 nt, Artificial Sequence
  Description of Artificial Sequence: Synthetic oligonucleotide
cguucuguagcacaaagug

SEQ ID NO: 2991216 - RNA, 19 nt, Artificial Sequence
  Description of Artificial Sequence: Synthetic oligonucleotide
uccuccucagccugggaca

SEQ ID NO: 2991217 - RNA, 19 nt, Artificial Sequence
  Description of Artificial Sequence: Synthetic oligonucleotide
ccgagugccacaaagggug

SEQ ID NO: 2991218 - RNA, 19 nt, Artificial Sequence
  Description of Artificial Sequence: Synthetic oligonucleotide
cuugcagccagugauggca

SEQ ID NO: 2991219 - RNA, 19 nt, Artificial Sequence
  Description of Artificial Sequence: Synthetic oligonucleotide
aacgccacuuaggaguaca

SEQ ID NO: 2991220 - RNA, 19 nt, Artificial Sequence
  Description of Artificial Sequence: Synthetic oligonucleotide
uaauagcaggaagggcacg

SEQ ID NO: 2991221 - RNA, 19 nt, Artificial Sequence
  Description of Artificial Sequence: Synthetic oligonucleotide
gacaccucagucagagugc

SEQ ID NO: 2991222 - RNA, 19 nt, Artificial Sequence
  Description of Artificial Sequence: Synthetic oligonucleotide
ugacgcguucuguagcaca

SEQ ID NO: 2991223 - RNA, 19 nt, Artificial Sequence
  Description of Artificial Sequence: Synthetic oligonucleotide
uagcaggaagggcacgaug

SEQ ID NO: 2991224 - RNA, 19 nt, Artificial Sequence
  Description of Artificial Sequence: Synthetic oligonucleotide
ucggaagcaguugaccaca

SEQ ID NO: 2991225 - RNA, 19 nt, Artificial Sequence
  Description of Artificial Sequence: Synthetic oligonucleotide
guagcugagcugcucugcc

SEQ ID NO: 2991226 - RNA, 19 nt, Artificial Sequence
  Description of Artificial Sequence: Synthetic oligonucleotide
uggcaaauucauguccagc

SEQ ID NO: 2991227 - RNA, 19 nt, Artificial Sequence
  Description of Artificial Sequence: Synthetic oligonucleotide
cucggaagcaguugaccac

SEQ ID NO: 2991228 - RNA, 19 nt, Artificial Sequence
  Description of Artificial Sequence: Synthetic oligonucleotide
cacaaagggugcucucggg

SEQ ID NO: 2991229 - RNA, 19 nt, Artificial Sequence
  Description of Artificial Sequence: Synthetic oligonucleotide
accacaucuggcuugucua

SEQ ID NO: 2991230 - RNA, 19 nt, Artificial Sequence
  Description of Artificial Sequence: Synthetic oligonucleotide
ucuagaccaccaacgccac

SEQ ID NO: 2991231 - RNA, 19 nt, Artificial Sequence
  Description of Artificial Sequence: Synthetic oligonucleotide
cagagugcugccugcacug

SEQ ID NO: 2991232 - RNA, 19 nt, Artificial Sequence
  Description of Artificial Sequence: Synthetic oligonucleotide
accaccaacgccacuuagg

SEQ ID NO: 2991233 - RNA, 19 nt, Artificial Sequence
  Description of Artificial Sequence: Synthetic oligonucleotide
gugauggcaaauucauguc

SEQ ID NO: 2991234 - RNA, 19 nt, Artificial Sequence
  Description of Artificial Sequence: Synthetic oligonucleotide
agugccacaaagggugcuc

SEQ ID NO: 2991235 - RNA, 19 nt, Artificial Sequence
  Description of Artificial Sequence: Synthetic oligonucleotide
gaaggcugcuauguaacuc

SEQ ID NO: 2991236 - RNA, 19 nt, Artificial Sequence
  Description of Artificial Sequence: Synthetic oligonucleotide
uagaccaccaacgccacuu

SEQ ID NO: 2991237 - RNA, 19 nt, Artificial Sequence
  Description of Artificial Sequence: Synthetic oligonucleotide
auagcguuguggaaguggu

SEQ ID NO: 2991238 - RNA, 19 nt, Artificial Sequence
  Description of Artificial Sequence: Synthetic oligonucleotide
agccugggacaccucaguc

SEQ ID NO: 2991239 - RNA, 19 nt, Artificial Sequence
  Description of Artificial Sequence: Synthetic oligonucleotide
gugcucucgggccaggagc

SEQ ID NO: 2991240 - RNA, 19 nt, Artificial Sequence
  Description of Artificial Sequence: Synthetic oligonucleotide
guuguggaaguggugcgag

SEQ ID NO: 2991241 - RNA, 19 nt, Artificial Sequence
  Description of Artificial Sequence: Synthetic oligonucleotide
cugccagaugcucugccag

SEQ ID NO: 2991242 - RNA, 19 nt, Artificial Sequence
  Description of Artificial Sequence: Synthetic oligonucleotide
aggaagggcacgauggcug

SEQ ID NO: 2991243 - RNA, 19 nt, Artificial Sequence
  Description of Artificial Sequence: Synthetic oligonucleotide
gucuaauagcaggaagggc

SEQ ID NO: 2991244 - RNA, 19 nt, Artificial Sequence
  Description of Artificial Sequence: Synthetic oligonucleotide
agccuccccugccaucucc

SEQ ID NO: 2991245 - RNA, 19 nt, Artificial Sequence
  Description of Artificial Sequence: Synthetic oligonucleotide
gcugccgagugccacaaag

SEQ ID NO: 2991246 - RNA, 19 nt, Artificial Sequence
  Description of Artificial Sequence: Synthetic oligonucleotide
ggggcaacauacgugacgc

SEQ ID NO: 2991247 - RNA, 19 nt, Artificial Sequence
  Description of Artificial Sequence: Synthetic oligonucleotide
cucucggaagcaguugacc

SEQ ID NO: 2991248 - RNA, 19 nt, Artificial Sequence
  Description of Artificial Sequence: Synthetic oligonucleotide
uggaaguggugcgagcgcu

SEQ ID NO: 2991249 - RNA, 19 nt, Artificial Sequence
  Description of Artificial Sequence: Synthetic oligonucleotide
cuccuccucagccugggac

SEQ ID NO: 2991250 - RNA, 19 nt, Artificial Sequence
  Description of Artificial Sequence: Synthetic oligonucleotide
aacauacgugacgcguucu

SEQ ID NO: 2991251 - RNA, 19 nt, Artificial Sequence
  Description of Artificial Sequence: Synthetic oligonucleotide
ugccagaugcucugccagc

SEQ ID NO: 2991252 - RNA, 19 nt, Artificial Sequence
  Description of Artificial Sequence: Synthetic oligonucleotide
cagugauggcaaauucaug

SEQ ID NO: 2991253 - RNA, 19 nt, Artificial Sequence
  Description of Artificial Sequence: Synthetic oligonucleotide
aggaguacauagauagcgu

SEQ ID NO: 2991254 - RNA, 19 nt, Artificial Sequence
  Description of Artificial Sequence: Synthetic oligonucleotide
auacgugacgcguucugua

SEQ ID NO: 2991255 - RNA, 19 nt, Artificial Sequence
  Description of Artificial Sequence: Synthetic oligonucleotide
caacauacgugacgcguuc

SEQ ID NO: 2991256 - RNA, 19 nt, Artificial Sequence
  Description of Artificial Sequence: Synthetic oligonucleotide
gaccaccaacgccacuuag

SEQ ID NO: 2991257 - RNA, 19 nt, Artificial Sequence
  Description of Artificial Sequence: Synthetic oligonucleotide
guacauagauagcguugug

SEQ ID NO: 2991258 - RNA, 19 nt, Artificial Sequence
  Description of Artificial Sequence: Synthetic oligonucleotide
aguugaccacaucuggcuu

SEQ ID NO: 2991259 - RNA, 19 nt, Artificial Sequence
  Description of Artificial Sequence: Synthetic oligonucleotide
cuguagcacaaagugugug

SEQ ID NO: 2991260 - RNA, 19 nt, Artificial Sequence
  Description of Artificial Sequence: Synthetic oligonucleotide
ucuccucucggaagcaguu

SEQ ID NO: 2991261 - RNA, 19 nt, Artificial Sequence
  Description of Artificial Sequence: Synthetic oligonucleotide
cucgaaggcugcuauguaa

SEQ ID NO: 2991262 - RNA, 19 nt, Artificial Sequence
  Description of Artificial Sequence: Synthetic oligonucleotide
ugcugccugcacugugacg

SEQ ID NO: 2991263 - RNA, 19 nt, Artificial Sequence
  Description of Artificial Sequence: Synthetic oligonucleotide
acaucuggcuugucuaaua

SEQ ID NO: 2991264 - RNA, 19 nt, Artificial Sequence
  Description of Artificial Sequence: Synthetic oligonucleotide
ccugggacaccucagucag

SEQ ID NO: 2991265 - RNA, 19 nt, Artificial Sequence
  Description of Artificial Sequence: Synthetic oligonucleotide
uagcacaaagugugugauc

SEQ ID NO: 2991266 - RNA, 19 nt, Artificial Sequence
  Description of Artificial Sequence: Synthetic oligonucleotide
cauagauagcguuguggaa

SEQ ID NO: 2991267 - RNA, 19 nt, Artificial Sequence
  Description of Artificial Sequence: Synthetic oligonucleotide
uagcguuguggaaguggug

SEQ ID NO: 2991268 - RNA, 19 nt, Artificial Sequence
  Description of Artificial Sequence: Synthetic oligonucleotide
uccucagccugggacaccu

SEQ ID NO: 2991269 - RNA, 19 nt, Artificial Sequence
  Description of Artificial Sequence: Synthetic oligonucleotide
ucucgaaggcugcuaugua

SEQ ID NO: 2991270 - RNA, 19 nt, Artificial Sequence
  Description of Artificial Sequence: Synthetic oligonucleotide
aaguggugcgagcgcugug

SEQ ID NO: 2991271 - RNA, 19 nt, Artificial Sequence
  Description of Artificial Sequence: Synthetic oligonucleotide
agcucucgaaggcugcuau

SEQ ID NO: 2991272 - RNA, 19 nt, Artificial Sequence
  Description of Artificial Sequence: Synthetic oligonucleotide
gcuauguaacuccuccuca

SEQ ID NO: 2991273 - RNA, 19 nt, Artificial Sequence
  Description of Artificial Sequence: Synthetic oligonucleotide
ggugcgagcgcuguggcug

SEQ ID NO: 2991274 - RNA, 19 nt, Artificial Sequence
  Description of Artificial Sequence: Synthetic oligonucleotide
uccccugccaucuccucuc

SEQ ID NO: 2991275 - RNA, 19 nt, Artificial Sequence
  Description of Artificial Sequence: Synthetic oligonucleotide
aggagcucucgaaggcugc

SEQ ID NO: 2991276 - RNA, 19 nt, Artificial Sequence
  Description of Artificial Sequence: Synthetic oligonucleotide
guggaaguggugcgagcgc

SEQ ID NO: 2991277 - RNA, 19 nt, Artificial Sequence
  Description of Artificial Sequence: Synthetic oligonucleotide
guaguagcugagcugcucu

SEQ ID NO: 2991278 - RNA, 19 nt, Artificial Sequence
  Description of Artificial Sequence: Synthetic oligonucleotide
cucugccagaugcucugcc

SEQ ID NO: 2991279 - RNA, 19 nt, Artificial Sequence
  Description of Artificial Sequence: Synthetic oligonucleotide
cacgauggcugccgagugc

SEQ ID NO: 2991280 - RNA, 19 nt, Artificial Sequence
  Description of Artificial Sequence: Synthetic oligonucleotide
gaccacaucuggcuugucu

SEQ ID NO: 2991281 - RNA, 19 nt, Artificial Sequence
  Description of Artificial Sequence: Synthetic oligonucleotide
gauggcugccgagugccac

SEQ ID NO: 2991282 - RNA, 19 nt, Artificial Sequence
  Description of Artificial Sequence: Synthetic oligonucleotide
gugugaucucuagaccacc

SEQ ID NO: 2991283 - RNA, 19 nt, Artificial Sequence
  Description of Artificial Sequence: Synthetic oligonucleotide
accuuagcuacuaccugcu

SEQ ID NO: 2991284 - RNA, 19 nt, Artificial Sequence
  Description of Artificial Sequence: Synthetic oligonucleotide
acuuaggaguacauagaua

SEQ ID NO: 2991285 - RNA, 19 nt, Artificial Sequence
  Description of Artificial Sequence: Synthetic oligonucleotide
gcguuguggaaguggugcg

SEQ ID NO: 2991286 - RNA, 19 nt, Artificial Sequence
  Description of Artificial Sequence: Synthetic oligonucleotide
caguugaccacaucuggcu

SEQ ID NO: 2991287 - RNA, 19 nt, Artificial Sequence
  Description of Artificial Sequence: Synthetic oligonucleotide
acaccucagucagagugcu

SEQ ID NO: 2991288 - RNA, 19 nt, Artificial Sequence
  Description of Artificial Sequence: Synthetic oligonucleotide
auggcugccgagugccaca

SEQ ID NO: 2991289 - RNA, 19 nt, Artificial Sequence
  Description of Artificial Sequence: Synthetic oligonucleotide
aagccuccccugccaucuc

SEQ ID NO: 2991290 - RNA, 19 nt, Artificial Sequence
  Description of Artificial Sequence: Synthetic oligonucleotide
gaugcucugccagcuccug

SEQ ID NO: 2991291 - RNA, 19 nt, Artificial Sequence
  Description of Artificial Sequence: Synthetic oligonucleotide
gcaguugaccacaucuggc

SEQ ID NO: 2991292 - RNA, 19 nt, Artificial Sequence
  Description of Artificial Sequence: Synthetic oligonucleotide
ggaagggcacgauggcugc

SEQ ID NO: 2991293 - RNA, 19 nt, Artificial Sequence
  Description of Artificial Sequence: Synthetic oligonucleotide
cacuuaggaguacauagau

SEQ ID NO: 2991294 - RNA, 19 nt, Artificial Sequence
  Description of Artificial Sequence: Synthetic oligonucleotide
guucuguagcacaaagugu

SEQ ID NO: 2991295 - RNA, 19 nt, Artificial Sequence
  Description of Artificial Sequence: Synthetic oligonucleotide
cucagccugggacaccuca

SEQ ID NO: 2991296 - RNA, 19 nt, Artificial Sequence
  Description of Artificial Sequence: Synthetic oligonucleotide
gacgcguucuguagcacaa

SEQ ID NO: 2991297 - RNA, 19 nt, Artificial Sequence
  Description of Artificial Sequence: Synthetic oligonucleotide
gugaucucuagaccaccaa

SEQ ID NO: 2991298 - RNA, 19 nt, Artificial Sequence
  Description of Artificial Sequence: Synthetic oligonucleotide
cacaaagugugugaucucu

SEQ ID NO: 2991299 - RNA, 19 nt, Artificial Sequence
  Description of Artificial Sequence: Synthetic oligonucleotide
gccaggagcucucgaaggc

SEQ ID NO: 2991300 - RNA, 19 nt, Artificial Sequence
  Description of Artificial Sequence: Synthetic oligonucleotide
gggccaggagcucucgaag

SEQ ID NO: 2991301 - RNA, 19 nt, Artificial Sequence
  Description of Artificial Sequence: Synthetic oligonucleotide
uaccugcuugcagccagug

SEQ ID NO: 2991302 - RNA, 19 nt, Artificial Sequence
  Description of Artificial Sequence: Synthetic oligonucleotide
ugccacaaagggugcucuc

SEQ ID NO: 2991303 - RNA, 19 nt, Artificial Sequence
  Description of Artificial Sequence: Synthetic oligonucleotide
guggugcgagcgcuguggc

SEQ ID NO: 2991304 - RNA, 19 nt, Artificial Sequence
  Description of Artificial Sequence: Synthetic oligonucleotide
aucuccucucggaagcagu

SEQ ID NO: 2991305 - RNA, 19 nt, Artificial Sequence
  Description of Artificial Sequence: Synthetic oligonucleotide
uacuaccugcuugcagcca

SEQ ID NO: 2991306 - RNA, 19 nt, Artificial Sequence
  Description of Artificial Sequence: Synthetic oligonucleotide
acaaagugugugaucucua

SEQ ID NO: 2991307 - RNA, 19 nt, Artificial Sequence
  Description of Artificial Sequence: Synthetic oligonucleotide
gaagggcacgauggcugcc

SEQ ID NO: 2991308 - RNA, 19 nt, Artificial Sequence
  Description of Artificial Sequence: Synthetic oligonucleotide
ucucgggccaggagcucuc

SEQ ID NO: 2991309 - RNA, 19 nt, Artificial Sequence
  Description of Artificial Sequence: Synthetic oligonucleotide
ggcuugucuaauagcagga

SEQ ID NO: 2991310 - RNA, 19 nt, Artificial Sequence
  Description of Artificial Sequence: Synthetic oligonucleotide
gccagugauggcaaauuca

SEQ ID NO: 2991311 - RNA, 19 nt, Artificial Sequence
  Description of Artificial Sequence: Synthetic oligonucleotide
guagcacaaagugugugau

SEQ ID NO: 2991312 - RNA, 19 nt, Artificial Sequence
  Description of Artificial Sequence: Synthetic oligonucleotide
cugcacugugacggugugg

SEQ ID NO: 2991313 - RNA, 19 nt, Artificial Sequence
  Description of Artificial Sequence: Synthetic oligonucleotide
uggugcgagcgcuguggcu

SEQ ID NO: 2991314 - RNA, 19 nt, Artificial Sequence
  Description of Artificial Sequence: Synthetic oligonucleotide
ccaccaacgccacuuagga

SEQ ID NO: 2991315 - RNA, 19 nt, Artificial Sequence
  Description of Artificial Sequence: Synthetic oligonucleotide
auagcaggaagggcacgau

SEQ ID NO: 2991316 - RNA, 19 nt, Artificial Sequence
  Description of Artificial Sequence: Synthetic oligonucleotide
ccacuuaggaguacauaga

SEQ ID NO: 2991317 - RNA, 19 nt, Artificial Sequence
  Description of Artificial Sequence: Synthetic oligonucleotide
ucgggccaggagcucucga

SEQ ID NO: 2991318 - RNA, 19 nt, Artificial Sequence
  Description of Artificial Sequence: Synthetic oligonucleotide
uagcuacuaccugcuugca

SEQ ID NO: 2991319 - RNA, 19 nt, Artificial Sequence
  Description of Artificial Sequence: Synthetic oligonucleotide
cucucgaaggcugcuaugu

SEQ ID NO: 2991320 - RNA, 19 nt, Artificial Sequence
  Description of Artificial Sequence: Synthetic oligonucleotide
agaccaccaacgccacuua

SEQ ID NO: 2991321 - RNA, 19 nt, Artificial Sequence
  Description of Artificial Sequence: Synthetic oligonucleotide
ugccugcacugugacggug

SEQ ID NO: 2991322 - RNA, 19 nt, Artificial Sequence
  Description of Artificial Sequence: Synthetic oligonucleotide
ggaguacauagauagcguu

SEQ ID NO: 2991323 - RNA, 19 nt, Artificial Sequence
  Description of Artificial Sequence: Synthetic oligonucleotide
agauagcguuguggaagug

SEQ ID NO: 2991324 - RNA, 19 nt, Artificial Sequence
  Description of Artificial Sequence: Synthetic oligonucleotide
agaugcucugccagcuccu

SEQ ID NO: 2991325 - RNA, 19 nt, Artificial Sequence
  Description of Artificial Sequence: Synthetic oligonucleotide
ugcagccagugauggcaaa

SEQ ID NO: 2991326 - RNA, 19 nt, Artificial Sequence
  Description of Artificial Sequence: Synthetic oligonucleotide
cuccucucggaagcaguug

SEQ ID NO: 2991327 - RNA, 19 nt, Artificial Sequence
  Description of Artificial Sequence: Synthetic oligonucleotide
gggcaacauacgugacgcg

SEQ ID NO: 2991328 - RNA, 19 nt, Artificial Sequence
  Description of Artificial Sequence: Synthetic oligonucleotide
agcuccugcucagggaaaa

SEQ ID NO: 2991329 - RNA, 19 nt, Artificial Sequence
  Description of Artificial Sequence: Synthetic oligonucleotide
gguaguagcugagcugcuc

SEQ ID NO: 2991330 - RNA, 19 nt, Artificial Sequence
  Description of Artificial Sequence: Synthetic oligonucleotide
gugcgagcgcuguggcugc

SEQ ID NO: 2991331 - RNA, 19 nt, Artificial Sequence
  Description of Artificial Sequence: Synthetic oligonucleotide
gguugaccuuagcuacuac

SEQ ID NO: 2991332 - RNA, 19 nt, Artificial Sequence
  Description of Artificial Sequence: Synthetic oligonucleotide
gcacgauggcugccgagug

SEQ ID NO: 2991333 - RNA, 19 nt, Artificial Sequence
  Description of Artificial Sequence: Synthetic oligonucleotide
cgcguucuguagcacaaag

SEQ ID NO: 2991334 - RNA, 19 nt, Artificial Sequence
  Description of Artificial Sequence: Synthetic oligonucleotide
ggcaacauacgugacgcgu

SEQ ID NO: 2991335 - RNA, 19 nt, Artificial Sequence
  Description of Artificial Sequence: Synthetic oligonucleotide
agagugcugccugcacugu

SEQ ID NO: 2991336 - RNA, 19 nt, Artificial Sequence
  Description of Artificial Sequence: Synthetic oligonucleotide
gaaguggugcgagcgcugu

SEQ ID NO: 2991337 - RNA, 19 nt, Artificial Sequence
  Description of Artificial Sequence: Synthetic oligonucleotide
agggcacgauggcugccga

SEQ ID NO: 2991338 - RNA, 19 nt, Artificial Sequence
  Description of Artificial Sequence: Synthetic oligonucleotide
ccucagucagagugcugcc

SEQ ID NO: 2991339 - RNA, 19 nt, Artificial Sequence
  Description of Artificial Sequence: Synthetic oligonucleotide
ccagugauggcaaauucau

SEQ ID NO: 2991340 - RNA, 19 nt, Artificial Sequence
  Description of Artificial Sequence: Synthetic oligonucleotide
ccugccaucuccucucgga

SEQ ID NO: 2991341 - RNA, 19 nt, Artificial Sequence
  Description of Artificial Sequence: Synthetic oligonucleotide
ggaagcaguugaccacauc

SEQ ID NO: 2991342 - RNA, 19 nt, Artificial Sequence
  Description of Artificial Sequence: Synthetic oligonucleotide
cugcuauguaacuccuccu

SEQ ID NO: 2991343 - RNA, 19 nt, Artificial Sequence
  Description of Artificial Sequence: Synthetic oligonucleotide
aggcugcuauguaacuccu

SEQ ID NO: 2991344 - RNA, 19 nt, Artificial Sequence
  Description of Artificial Sequence: Synthetic oligonucleotide
ccugcuugcagccagugau

SEQ ID NO: 2991345 - RNA, 19 nt, Artificial Sequence
  Description of Artificial Sequence: Synthetic oligonucleotide
caccucagucagagugcug

SEQ ID NO: 2991346 - RNA, 19 nt, Artificial Sequence
  Description of Artificial Sequence: Synthetic oligonucleotide
uggcugccgagugccacaa

SEQ ID NO: 2991347 - RNA, 19 nt, Artificial Sequence
  Description of Artificial Sequence: Synthetic oligonucleotide
agcugcucugccagaugcu

SEQ ID NO: 2991348 - RNA, 19 nt, Artificial Sequence
  Description of Artificial Sequence: Synthetic oligonucleotide
ggaaguggugcgagcgcug

SEQ ID NO: 2991349 - RNA, 19 nt, Artificial Sequence
  Description of Artificial Sequence: Synthetic oligonucleotide
cauacgugacgcguucugu

SEQ ID NO: 2991350 - RNA, 19 nt, Artificial Sequence
  Description of Artificial Sequence: Synthetic oligonucleotide
gcacaaagugugugaucuc

SEQ ID NO: 2991351 - RNA, 19 nt, Artificial Sequence
  Description of Artificial Sequence: Synthetic oligonucleotide
ccucucggaagcaguugac

SEQ ID NO: 2991352 - RNA, 19 nt, Artificial Sequence
  Description of Artificial Sequence: Synthetic oligonucleotide
cucgggccaggagcucucg

SEQ ID NO: 2991353 - RNA, 19 nt, Artificial Sequence
  Description of Artificial Sequence: Synthetic oligonucleotide
gugacgcguucuguagcac

SEQ ID NO: 2991354 - RNA, 19 nt, Artificial Sequence
  Description of Artificial Sequence: Synthetic oligonucleotide
gcuugucuaauagcaggaa

SEQ ID NO: 2991355 - RNA, 19 nt, Artificial Sequence
  Description of Artificial Sequence: Synthetic oligonucleotide
cugcucugccagaugcucu

SEQ ID NO: 2991356 - RNA, 19 nt, Artificial Sequence
  Description of Artificial Sequence: Synthetic oligonucleotide
gggcacgauggcugccgag

SEQ ID NO: 2991357 - RNA, 19 nt, Artificial Sequence
  Description of Artificial Sequence: Synthetic oligonucleotide
cgagugccacaaagggugc

SEQ ID NO: 2991358 - RNA, 19 nt, Artificial Sequence
  Description of Artificial Sequence: Synthetic oligonucleotide
cuccucagccugggacacc

SEQ ID NO: 2991359 - RNA, 19 nt, Artificial Sequence
  Description of Artificial Sequence: Synthetic oligonucleotide
cgugacgcguucuguagca

SEQ ID NO: 2991360 - RNA, 19 nt, Artificial Sequence
  Description of Artificial Sequence: Synthetic oligonucleotide
gagcucucgaaggcugcua

SEQ ID NO: 2991361 - RNA, 19 nt, Artificial Sequence
  Description of Artificial Sequence: Synthetic oligonucleotide
cucagucagagugcugccu

SEQ ID NO: 2991362 - RNA, 19 nt, Artificial Sequence
  Description of Artificial Sequence: Synthetic oligonucleotide
acgccacuuaggaguacau

SEQ ID NO: 2991363 - RNA, 19 nt, Artificial Sequence
  Description of Artificial Sequence: Synthetic oligonucleotide
caacgccacuuaggaguac

SEQ ID NO: 2991364 - RNA, 19 nt, Artificial Sequence
  Description of Artificial Sequence: Synthetic oligonucleotide
caggaagggcacgauggcu

SEQ ID NO: 2991365 - RNA, 19 nt, Artificial Sequence
  Description of Artificial Sequence: Synthetic oligonucleotide
gagugccacaaagggugcu

SEQ ID NO: 2991366 - RNA, 19 nt, Artificial Sequence
  Description of Artificial Sequence: Synthetic oligonucleotide
cugggacaccucagucaga

SEQ ID NO: 2991367 - RNA, 19 nt, Artificial Sequence
  Description of Artificial Sequence: Synthetic oligonucleotide
ggcacgauggcugccgagu

SEQ ID NO: 2991368 - RNA, 19 nt, Artificial Sequence
  Description of Artificial Sequence: Synthetic oligonucleotide
gugccacaaagggugcucu

SEQ ID NO: 2991369 - RNA, 19 nt, Artificial Sequence
  Description of Artificial Sequence: Synthetic oligonucleotide
acgcguucuguagcacaaa

SEQ ID NO: 2991370 - RNA, 19 nt, Artificial Sequence
  Description of Artificial Sequence: Synthetic oligonucleotide
ccacaucuggcuugucuaa

SEQ ID NO: 2991371 - RNA, 19 nt, Artificial Sequence
  Description of Artificial Sequence: Synthetic oligonucleotide
cuccccugccaucuccucu

SEQ ID NO: 2991372 - RNA, 19 nt, Artificial Sequence
  Description of Artificial Sequence: Synthetic oligonucleotide
cuaccugcuugcagccagu

SEQ ID NO: 2991373 - RNA, 19 nt, Artificial Sequence
  Description of Artificial Sequence: Synthetic oligonucleotide
ccaacgccacuuaggagua

SEQ ID NO: 2991374 - RNA, 19 nt, Artificial Sequence
  Description of Artificial Sequence: Synthetic oligonucleotide
ugcgagcgcuguggcugca

SEQ ID NO: 2991375 - RNA, 19 nt, Artificial Sequence
  Description of Artificial Sequence: Synthetic oligonucleotide
ccuccucagccugggacac

SEQ ID NO: 2991376 - RNA, 19 nt, Artificial Sequence
  Description of Artificial Sequence: Synthetic oligonucleotide
cagccugggacaccucagu

SEQ ID NO: 2991377 - RNA, 19 nt, Artificial Sequence
  Description of Artificial Sequence: Synthetic oligonucleotide
ggcugcuauguaacuccuc

SEQ ID NO: 2991378 - RNA, 19 nt, Artificial Sequence
  Description of Artificial Sequence: Synthetic oligonucleotide
cagcuccugcucagggaaa

SEQ ID NO: 2991379 - RNA, 19 nt, Artificial Sequence
  Description of Artificial Sequence: Synthetic oligonucleotide
ugaccacaucuggcuuguc

SEQ ID NO: 2991380 - RNA, 19 nt, Artificial Sequence
  Description of Artificial Sequence: Synthetic oligonucleotide
gcguucuguagcacaaagu

SEQ ID NO: 2991381 - RNA, 19 nt, Artificial Sequence
  Description of Artificial Sequence: Synthetic oligonucleotide
gcucugccagaugcucugc

SEQ ID NO: 2991382 - RNA, 19 nt, Artificial Sequence
  Description of Artificial Sequence: Synthetic oligonucleotide
cacaucuggcuugucuaau

SEQ ID NO: 2991383 - RNA, 19 nt, Artificial Sequence
  Description of Artificial Sequence: Synthetic oligonucleotide
cugagcugcucugccagau

SEQ ID NO: 2991384 - RNA, 19 nt, Artificial Sequence
  Description of Artificial Sequence: Synthetic oligonucleotide
cccugccaucuccucucgg

SEQ ID NO: 2991385 - RNA, 19 nt, Artificial Sequence
  Description of Artificial Sequence: Synthetic oligonucleotide
gcaacauacgugacgcguu

SEQ ID NO: 2991386 - RNA, 19 nt, Artificial Sequence
  Description of Artificial Sequence: Synthetic oligonucleotide
cuagaccaccaacgccacu

SEQ ID NO: 2991387 - RNA, 19 nt, Artificial Sequence
  Description of Artificial Sequence: Synthetic oligonucleotide
gccagaugcucugccagcu

SEQ ID NO: 2991388 - RNA, 19 nt, Artificial Sequence
  Description of Artificial Sequence: Synthetic oligonucleotide
gccgagugccacaaagggu

SEQ ID NO: 2991389 - RNA, 19 nt, Artificial Sequence
  Description of Artificial Sequence: Synthetic oligonucleotide
cagccagugauggcaaauu

SEQ ID NO: 2991390 - RNA, 19 nt, Artificial Sequence
  Description of Artificial Sequence: Synthetic oligonucleotide
guccagcaacaugguagua

SEQ ID NO: 2991391 - RNA, 19 nt, Artificial Sequence
  Description of Artificial Sequence: Synthetic oligonucleotide
gcagccagugauggcaaau

SEQ ID NO: 2991392 - RNA, 19 nt, Artificial Sequence
  Description of Artificial Sequence: Synthetic oligonucleotide
ggagcucucgaaggcugcu

SEQ ID NO: 2991393 - RNA, 19 nt, Artificial Sequence
  Description of Artificial Sequence: Synthetic oligonucleotide
ccuccccugccaucuccuc

SEQ ID NO: 2991394 - RNA, 19 nt, Artificial Sequence
  Description of Artificial Sequence: Synthetic oligonucleotide
cguuguggaaguggugcga

SEQ ID NO: 2991395 - RNA, 19 nt, Artificial Sequence
  Description of Artificial Sequence: Synthetic oligonucleotide
cugccugcacugugacggu

SEQ ID NO: 2991396 - RNA, 19 nt, Artificial Sequence
  Description of Artificial Sequence: Synthetic oligonucleotide
cgaaggcugcuauguaacu

SEQ ID NO: 2991397 - RNA, 19 nt, Artificial Sequence
  Description of Artificial Sequence: Synthetic oligonucleotide
gggacaccucagucagagu

SEQ ID NO: 2991398 - RNA, 19 nt, Artificial Sequence
  Description of Artificial Sequence: Synthetic oligonucleotide
cgggccaggagcucucgaa

SEQ ID NO: 2991399 - RNA, 19 nt, Artificial Sequence
  Description of Artificial Sequence: Synthetic oligonucleotide
ccaggagcucucgaaggcu

SEQ ID NO: 2991400 - RNA, 19 nt, Artificial Sequence
  Description of Artificial Sequence: Synthetic oligonucleotide
gggugcucucgggccagga

SEQ ID NO: 2991401 - RNA, 19 nt, Artificial Sequence
  Description of Artificial Sequence: Synthetic oligonucleotide
gcucucgggccaggagcuc

SEQ ID NO: 2991402 - RNA, 19 nt, Artificial Sequence
  Description of Artificial Sequence: Synthetic oligonucleotide
ggcugccgagugccacaaa

SEQ ID NO: 2991403 - RNA, 19 nt, Artificial Sequence
  Description of Artificial Sequence: Synthetic oligonucleotide
gccuccccugccaucuccu

SEQ ID NO: 2991404 - RNA, 19 nt, Artificial Sequence
  Description of Artificial Sequence: Synthetic oligonucleotide
cgccacuuaggaguacaua

SEQ ID NO: 2991405 - RNA, 19 nt, Artificial Sequence
  Description of Artificial Sequence: Synthetic oligonucleotide
cgauggcugccgagugcca

SEQ ID NO: 2991406 - RNA, 19 nt, Artificial Sequence
  Description of Artificial Sequence: Synthetic oligonucleotide
ccuuagcuacuaccugcuu

SEQ ID NO: 2991407 - RNA, 19 nt, Artificial Sequence
  Description of Artificial Sequence: Synthetic oligonucleotide
cggaagcaguugaccacau

SEQ ID NO: 2991408 - RNA, 19 nt, Artificial Sequence
  Description of Artificial Sequence: Synthetic oligonucleotide
aauaacuguaguuuucugg

SEQ ID NO: 2991409 - RNA, 19 nt, Artificial Sequence
  Description of Artificial Sequence: Synthetic oligonucleotide
auaacuguaguuuucuggg

SEQ ID NO: 2991410 - RNA, 19 nt, Artificial Sequence
  Description of Artificial Sequence: Synthetic oligonucleotide
uucuuuagcacuccucugg

SEQ ID NO: 2991411 - RNA, 19 nt, Artificial Sequence
  Description of Artificial Sequence: Synthetic oligonucleotide
uauuucacucugcugacag

SEQ ID NO: 2991412 - RNA, 19 nt, Artificial Sequence
  Description of Artificial Sequence: Synthetic oligonucleotide
ugcagauuauucuuuagca

SEQ ID NO: 2991413 - RNA, 19 nt, Artificial Sequence
  Description of Artificial Sequence: Synthetic oligonucleotide
aaaguggccagugccaccc

SEQ ID NO: 2991414 - RNA, 19 nt, Artificial Sequence
  Description of Artificial Sequence: Synthetic oligonucleotide
uuucacucugcugacaggg

SEQ ID NO: 2991415 - RNA, 19 nt, Artificial Sequence
  Description of Artificial Sequence: Synthetic oligonucleotide
uggacuuuauuucacucug

SEQ ID NO: 2991416 - RNA, 19 nt, Artificial Sequence
  Description of Artificial Sequence: Synthetic oligonucleotide
uguguuagagaccccuggg

SEQ ID NO: 2991417 - RNA, 19 nt, Artificial Sequence
  Description of Artificial Sequence: Synthetic oligonucleotide
uuuagcacuccucuggggu

SEQ ID NO: 2991418 - RNA, 19 nt, Artificial Sequence
  Description of Artificial Sequence: Synthetic oligonucleotide
uuuacaggcacagugggga

SEQ ID NO: 2991419 - RNA, 19 nt, Artificial Sequence
  Description of Artificial Sequence: Synthetic oligonucleotide
ucuuuagcacuccucuggg

SEQ ID NO: 2991420 - RNA, 19 nt, Artificial Sequence
  Description of Artificial Sequence: Synthetic oligonucleotide
uggaggaccaacuuuggug

SEQ ID NO: 2991421 - RNA, 19 nt, Artificial Sequence
  Description of Artificial Sequence: Synthetic oligonucleotide
uuguguuagagaccccugg

SEQ ID NO: 2991422 - RNA, 19 nt, Artificial Sequence
  Description of Artificial Sequence: Synthetic oligonucleotide
uuuuacaggcacagugggg

SEQ ID NO: 2991423 - RNA, 19 nt, Artificial Sequence
  Description of Artificial Sequence: Synthetic oligonucleotide
aaucccgcugcacucauga

SEQ ID NO: 2991424 - RNA, 19 nt, Artificial Sequence
  Description of Artificial Sequence: Synthetic oligonucleotide
ugcggcuuguguuagagac

SEQ ID NO: 2991425 - RNA, 19 nt, Artificial Sequence
  Description of Artificial Sequence: Synthetic oligonucleotide
uccuguugcuuccuugugg

SEQ ID NO: 2991426 - RNA, 19 nt, Artificial Sequence
  Description of Artificial Sequence: Synthetic oligonucleotide
acacaggcaaucccgcugc

SEQ ID NO: 2991427 - RNA, 19 nt, Artificial Sequence
  Description of Artificial Sequence: Synthetic oligonucleotide
agucgcugcaggcuggacc

SEQ ID NO: 2991428 - RNA, 19 nt, Artificial Sequence
  Description of Artificial Sequence: Synthetic oligonucleotide
ucccgcugcacucaugagg

SEQ ID NO: 2991429 - RNA, 19 nt, Artificial Sequence
  Description of Artificial Sequence: Synthetic oligonucleotide
augaggaucccggugauuc

SEQ ID NO: 2991430 - RNA, 19 nt, Artificial Sequence
  Description of Artificial Sequence: Synthetic oligonucleotide
uuuauuucacucugcugac

SEQ ID NO: 2991431 - RNA, 19 nt, Artificial Sequence
  Description of Artificial Sequence: Synthetic oligonucleotide
uaacuguaguuuucugggg

SEQ ID NO: 2991432 - RNA, 19 nt, Artificial Sequence
  Description of Artificial Sequence: Synthetic oligonucleotide
accaacuuccaauaacugu

SEQ ID NO: 2991433 - RNA, 19 nt, Artificial Sequence
  Description of Artificial Sequence: Synthetic oligonucleotide
uguuagagaccccugggau

SEQ ID NO: 2991434 - RNA, 19 nt, Artificial Sequence
  Description of Artificial Sequence: Synthetic oligonucleotide
cugcagauuauucuuuagc

SEQ ID NO: 2991435 - RNA, 19 nt, Artificial Sequence
  Description of Artificial Sequence: Synthetic oligonucleotide
agauuauucuuuagcacuc

SEQ ID NO: 2991436 - RNA, 19 nt, Artificial Sequence
  Description of Artificial Sequence: Synthetic oligonucleotide
uggaccgauucaaaguggc

SEQ ID NO: 2991437 - RNA, 19 nt, Artificial Sequence
  Description of Artificial Sequence: Synthetic oligonucleotide
uuauucuuuagcacuccuc

SEQ ID NO: 2991438 - RNA, 19 nt, Artificial Sequence
  Description of Artificial Sequence: Synthetic oligonucleotide
gaggcaaucagcacccggg

SEQ ID NO: 2991439 - RNA, 19 nt, Artificial Sequence
  Description of Artificial Sequence: Synthetic oligonucleotide
ucugcagauuauucuuuag

SEQ ID NO: 2991440 - RNA, 19 nt, Artificial Sequence
  Description of Artificial Sequence: Synthetic oligonucleotide
gauggacuuuauuucacuc

SEQ ID NO: 2991441 - RNA, 19 nt, Artificial Sequence
  Description of Artificial Sequence: Synthetic oligonucleotide
ugggauggacuuuauuuca

SEQ ID NO: 2991442 - RNA, 19 nt, Artificial Sequence
  Description of Artificial Sequence: Synthetic oligonucleotide
auggacuuuauuucacucu

SEQ ID NO: 2991443 - RNA, 19 nt, Artificial Sequence
  Description of Artificial Sequence: Synthetic oligonucleotide
uuugguggccgagugaggc

SEQ ID NO: 2991444 - RNA, 19 nt, Artificial Sequence
  Description of Artificial Sequence: Synthetic oligonucleotide
gucgcugcaggcuggaccg

SEQ ID NO: 2991445 - RNA, 19 nt, Artificial Sequence
  Description of Artificial Sequence: Synthetic oligonucleotide
uccaauaacuguaguuuuc

SEQ ID NO: 2991446 - RNA, 19 nt, Artificial Sequence
  Description of Artificial Sequence: Synthetic oligonucleotide
acuuuauuucacucugcug

SEQ ID NO: 2991447 - RNA, 19 nt, Artificial Sequence
  Description of Artificial Sequence: Synthetic oligonucleotide
acuuugguggccgagugag

SEQ ID NO: 2991448 - RNA, 19 nt, Artificial Sequence
  Description of Artificial Sequence: Synthetic oligonucleotide
acuuccaauaacuguaguu

SEQ ID NO: 2991449 - RNA, 19 nt, Artificial Sequence
  Description of Artificial Sequence: Synthetic oligonucleotide
accgauucaaaguggccag

SEQ ID NO: 2991450 - RNA, 19 nt, Artificial Sequence
  Description of Artificial Sequence: Synthetic oligonucleotide
auuauucuuuagcacuccu

SEQ ID NO: 2991451 - RNA, 19 nt, Artificial Sequence
  Description of Artificial Sequence: Synthetic oligonucleotide
cugggauggacuuuauuuc

SEQ ID NO: 2991452 - RNA, 19 nt, Artificial Sequence
  Description of Artificial Sequence: Synthetic oligonucleotide
guuagagaccccugggaug

SEQ ID NO: 2991453 - RNA, 19 nt, Artificial Sequence
  Description of Artificial Sequence: Synthetic oligonucleotide
uucacucugcugacagggg

SEQ ID NO: 2991454 - RNA, 19 nt, Artificial Sequence
  Description of Artificial Sequence: Synthetic oligonucleotide
uguugcuuccuugugggcu

SEQ ID NO: 2991455 - RNA, 19 nt, Artificial Sequence
  Description of Artificial Sequence: Synthetic oligonucleotide
gauuauucuuuagcacucc

SEQ ID NO: 2991456 - RNA, 19 nt, Artificial Sequence
  Description of Artificial Sequence: Synthetic oligonucleotide
caacuuccaauaacuguag

SEQ ID NO: 2991457 - RNA, 19 nt, Artificial Sequence
  Description of Artificial Sequence: Synthetic oligonucleotide
aacuuccaauaacuguagu

SEQ ID NO: 2991458 - RNA, 19 nt, Artificial Sequence
  Description of Artificial Sequence: Synthetic oligonucleotide
auggccagucgcugcaggc

SEQ ID NO: 2991459 - RNA, 19 nt, Artificial Sequence
  Description of Artificial Sequence: Synthetic oligonucleotide
ugauuccugccaaggcagg

SEQ ID NO: 2991460 - RNA, 19 nt, Artificial Sequence
  Description of Artificial Sequence: Synthetic oligonucleotide
cagauuauucuuuagcacu

SEQ ID NO: 2991461 - RNA, 19 nt, Artificial Sequence
  Description of Artificial Sequence: Synthetic oligonucleotide
ucuccuguugcuuccuugu

SEQ ID NO: 2991462 - RNA, 19 nt, Artificial Sequence
  Description of Artificial Sequence: Synthetic oligonucleotide
gagugaggcacacaggcaa

SEQ ID NO: 2991463 - RNA, 19 nt, Artificial Sequence
  Description of Artificial Sequence: Synthetic oligonucleotide
uuccaauaacuguaguuuu

SEQ ID NO: 2991464 - RNA, 19 nt, Artificial Sequence
  Description of Artificial Sequence: Synthetic oligonucleotide
cuuuagcacuccucugggg

SEQ ID NO: 2991465 - RNA, 19 nt, Artificial Sequence
  Description of Artificial Sequence: Synthetic oligonucleotide
cugggcaauggccagucgc

SEQ ID NO: 2991466 - RNA, 19 nt, Artificial Sequence
  Description of Artificial Sequence: Synthetic oligonucleotide
gaccgauucaaaguggcca

SEQ ID NO: 2991467 - RNA, 19 nt, Artificial Sequence
  Description of Artificial Sequence: Synthetic oligonucleotide
gugauuccugccaaggcag

SEQ ID NO: 2991468 - RNA, 19 nt, Artificial Sequence
  Description of Artificial Sequence: Synthetic oligonucleotide
acucaugaggaucccggug

SEQ ID NO: 2991469 - RNA, 19 nt, Artificial Sequence
  Description of Artificial Sequence: Synthetic oligonucleotide
acuccucugggguuuaccu

SEQ ID NO: 2991470 - RNA, 19 nt, Artificial Sequence
  Description of Artificial Sequence: Synthetic oligonucleotide
aacuuugguggccgaguga

SEQ ID NO: 2991471 - RNA, 19 nt, Artificial Sequence
  Description of Artificial Sequence: Synthetic oligonucleotide
aggaccaacuuugguggcc

SEQ ID NO: 2991472 - RNA, 19 nt, Artificial Sequence
  Description of Artificial Sequence: Synthetic oligonucleotide
caauaacuguaguuuucug

SEQ ID NO: 2991473 - RNA, 19 nt, Artificial Sequence
  Description of Artificial Sequence: Synthetic oligonucleotide
cuggaccgauucaaagugg

SEQ ID NO: 2991474 - RNA, 19 nt, Artificial Sequence
  Description of Artificial Sequence: Synthetic oligonucleotide
gacuuuauuucacucugcu

SEQ ID NO: 2991475 - RNA, 19 nt, Artificial Sequence
  Description of Artificial Sequence: Synthetic oligonucleotide
gcuggaccgauucaaagug

SEQ ID NO: 2991476 - RNA, 19 nt, Artificial Sequence
  Description of Artificial Sequence: Synthetic oligonucleotide
gauuccugccaaggcaggg

SEQ ID NO: 2991477 - RNA, 19 nt, Artificial Sequence
  Description of Artificial Sequence: Synthetic oligonucleotide
agugccacccuuccagucu

SEQ ID NO: 2991478 - RNA, 19 nt, Artificial Sequence
  Description of Artificial Sequence: Synthetic oligonucleotide
gaggcacacaggcaauccc

SEQ ID NO: 2991479 - RNA, 19 nt, Artificial Sequence
  Description of Artificial Sequence: Synthetic oligonucleotide
cucaugaggaucccgguga

SEQ ID NO: 2991480 - RNA, 19 nt, Artificial Sequence
  Description of Artificial Sequence: Synthetic oligonucleotide
cuuguguuagagaccccug

SEQ ID NO: 2991481 - RNA, 19 nt, Artificial Sequence
  Description of Artificial Sequence: Synthetic oligonucleotide
gcagauuauucuuuagcac

SEQ ID NO: 2991482 - RNA, 19 nt, Artificial Sequence
  Description of Artificial Sequence: Synthetic oligonucleotide
aggcuggaccgauucaaag

SEQ ID NO: 2991483 - RNA, 19 nt, Artificial Sequence
  Description of Artificial Sequence: Synthetic oligonucleotide
uuuugguggucuugcggcu

SEQ ID NO: 2991484 - RNA, 19 nt, Artificial Sequence
  Description of Artificial Sequence: Synthetic oligonucleotide
ccuguugcuuccuuguggg

SEQ ID NO: 2991485 - RNA, 19 nt, Artificial Sequence
  Description of Artificial Sequence: Synthetic oligonucleotide
uccucugggguuuaccuuu

SEQ ID NO: 2991486 - RNA, 19 nt, Artificial Sequence
  Description of Artificial Sequence: Synthetic oligonucleotide
uucugcagauuauucuuua

SEQ ID NO: 2991487 - RNA, 19 nt, Artificial Sequence
  Description of Artificial Sequence: Synthetic oligonucleotide
uggucuugcggcuuguguu

SEQ ID NO: 2991488 - RNA, 19 nt, Artificial Sequence
  Description of Artificial Sequence: Synthetic oligonucleotide
ugaggcacacaggcaaucc

SEQ ID NO: 2991489 - RNA, 19 nt, Artificial Sequence
  Description of Artificial Sequence: Synthetic oligonucleotide
aggcaaucccgcugcacuc

SEQ ID NO: 2991490 - RNA, 19 nt, Artificial Sequence
  Description of Artificial Sequence: Synthetic oligonucleotide
ugcacucaugaggaucccg

SEQ ID NO: 2991491 - RNA, 19 nt, Artificial Sequence
  Description of Artificial Sequence: Synthetic oligonucleotide
aggcacacaggcaaucccg

SEQ ID NO: 2991492 - RNA, 19 nt, Artificial Sequence
  Description of Artificial Sequence: Synthetic oligonucleotide
cuugcggcuuguguuagag

SEQ ID NO: 2991493 - RNA, 19 nt, Artificial Sequence
  Description of Artificial Sequence: Synthetic oligonucleotide
uccagucuccuguugcuuc

SEQ ID NO: 2991494 - RNA, 19 nt, Artificial Sequence
  Description of Artificial Sequence: Synthetic oligonucleotide
caccaacuuccaauaacug

SEQ ID NO: 2991495 - RNA, 19 nt, Artificial Sequence
  Description of Artificial Sequence: Synthetic oligonucleotide
ugaggaucccggugauucc

SEQ ID NO: 2991496 - RNA, 19 nt, Artificial Sequence
  Description of Artificial Sequence: Synthetic oligonucleotide
aaggcaggguugacagggc

SEQ ID NO: 2991497 - RNA, 19 nt, Artificial Sequence
  Description of Artificial Sequence: Synthetic oligonucleotide
uuuaccuuucuuggccugu

SEQ ID NO: 2991498 - RNA, 19 nt, Artificial Sequence
  Description of Artificial Sequence: Synthetic oligonucleotide
uuauuucacucugcugaca

SEQ ID NO: 2991499 - RNA, 19 nt, Artificial Sequence
  Description of Artificial Sequence: Synthetic oligonucleotide
ccgagugaggcacacaggc

SEQ ID NO: 2991500 - RNA, 19 nt, Artificial Sequence
  Description of Artificial Sequence: Synthetic oligonucleotide
guuuaccuuucuuggccug

SEQ ID NO: 2991501 - RNA, 19 nt, Artificial Sequence
  Description of Artificial Sequence: Synthetic oligonucleotide
uugguggucuugcggcuug

SEQ ID NO: 2991502 - RNA, 19 nt, Artificial Sequence
  Description of Artificial Sequence: Synthetic oligonucleotide
ggccgagugaggcacacag

SEQ ID NO: 2991503 - RNA, 19 nt, Artificial Sequence
  Description of Artificial Sequence: Synthetic oligonucleotide
gaucccggugauuccugcc

SEQ ID NO: 2991504 - RNA, 19 nt, Artificial Sequence
  Description of Artificial Sequence: Synthetic oligonucleotide
caacuuugguggccgagug

SEQ ID NO: 2991505 - RNA, 19 nt, Artificial Sequence
  Description of Artificial Sequence: Synthetic oligonucleotide
aucccggugauuccugcca

SEQ ID NO: 2991506 - RNA, 19 nt, Artificial Sequence
  Description of Artificial Sequence: Synthetic oligonucleotide
guguuagagaccccuggga

SEQ ID NO: 2991507 - RNA, 19 nt, Artificial Sequence
  Description of Artificial Sequence: Synthetic oligonucleotide
aggguugacagggcuggac

SEQ ID NO: 2991508 - RNA, 19 nt, Artificial Sequence
  Description of Artificial Sequence: Synthetic oligonucleotide
gguugacagggcuggaccc

SEQ ID NO: 2991509 - RNA, 19 nt, Artificial Sequence
  Description of Artificial Sequence: Synthetic oligonucleotide
cuuugguggccgagugagg

SEQ ID NO: 2991510 - RNA, 19 nt, Artificial Sequence
  Description of Artificial Sequence: Synthetic oligonucleotide
ccaacuuccaauaacugua

SEQ ID NO: 2991511 - RNA, 19 nt, Artificial Sequence
  Description of Artificial Sequence: Synthetic oligonucleotide
ucugggguuuaccuuucuu

SEQ ID NO: 2991512 - RNA, 19 nt, Artificial Sequence
  Description of Artificial Sequence: Synthetic oligonucleotide
uuacaggcacaguggggac

SEQ ID NO: 2991513 - RNA, 19 nt, Artificial Sequence
  Description of Artificial Sequence: Synthetic oligonucleotide
gacagggcuggacccauuc

SEQ ID NO: 2991514 - RNA, 19 nt, Artificial Sequence
  Description of Artificial Sequence: Synthetic oligonucleotide
uuagcacuccucugggguu

SEQ ID NO: 2991515 - RNA, 19 nt, Artificial Sequence
  Description of Artificial Sequence: Synthetic oligonucleotide
caaucagcacccgggacug

SEQ ID NO: 2991516 - RNA, 19 nt, Artificial Sequence
  Description of Artificial Sequence: Synthetic oligonucleotide
uggccagugccacccuucc

SEQ ID NO: 2991517 - RNA, 19 nt, Artificial Sequence
  Description of Artificial Sequence: Synthetic oligonucleotide
gcugcacucaugaggaucc

SEQ ID NO: 2991518 - RNA, 19 nt, Artificial Sequence
  Description of Artificial Sequence: Synthetic oligonucleotide
gaggaccaacuuugguggc

SEQ ID NO: 2991519 - RNA, 19 nt, Artificial Sequence
  Description of Artificial Sequence: Synthetic oligonucleotide
ggguugacagggcuggacc

SEQ ID NO: 2991520 - RNA, 19 nt, Artificial Sequence
  Description of Artificial Sequence: Synthetic oligonucleotide
gcacucaugaggaucccgg

SEQ ID NO: 2991521 - RNA, 19 nt, Artificial Sequence
  Description of Artificial Sequence: Synthetic oligonucleotide
gucuccuguugcuuccuug

SEQ ID NO: 2991522 - RNA, 19 nt, Artificial Sequence
  Description of Artificial Sequence: Synthetic oligonucleotide
cuuccaauaacuguaguuu

SEQ ID NO: 2991523 - RNA, 19 nt, Artificial Sequence
  Description of Artificial Sequence: Synthetic oligonucleotide
ucagcacccgggacugggc

SEQ ID NO: 2991524 - RNA, 19 nt, Artificial Sequence
  Description of Artificial Sequence: Synthetic oligonucleotide
ugcaggcuggaccgauuca

SEQ ID NO: 2991525 - RNA, 19 nt, Artificial Sequence
  Description of Artificial Sequence: Synthetic oligonucleotide
gaccuucugcagauuauuc

SEQ ID NO: 2991526 - RNA, 19 nt, Artificial Sequence
  Description of Artificial Sequence: Synthetic oligonucleotide
uccugccaaggcaggguug

SEQ ID NO: 2991527 - RNA, 19 nt, Artificial Sequence
  Description of Artificial Sequence: Synthetic oligonucleotide
ggguggaggaccaacuuug

SEQ ID NO: 2991528 - RNA, 19 nt, Artificial Sequence
  Description of Artificial Sequence: Synthetic oligonucleotide
aggcaaucagcacccggga

SEQ ID NO: 2991529 - RNA, 19 nt, Artificial Sequence
  Description of Artificial Sequence: Synthetic oligonucleotide
ggaccaacuuugguggccg

SEQ ID NO: 2991530 - RNA, 19 nt, Artificial Sequence
  Description of Artificial Sequence: Synthetic oligonucleotide
gcaggguugacagggcugg

SEQ ID NO: 2991531 - RNA, 19 nt, Artificial Sequence
  Description of Artificial Sequence: Synthetic oligonucleotide
agagaccccugggauggac

SEQ ID NO: 2991532 - RNA, 19 nt, Artificial Sequence
  Description of Artificial Sequence: Synthetic oligonucleotide
uuccugccaaggcaggguu

SEQ ID NO: 2991533 - RNA, 19 nt, Artificial Sequence
  Description of Artificial Sequence: Synthetic oligonucleotide
ugccaaggcaggguugaca

SEQ ID NO: 2991534 - RNA, 19 nt, Artificial Sequence
  Description of Artificial Sequence: Synthetic oligonucleotide
ugguggccgagugaggcac

SEQ ID NO: 2991535 - RNA, 19 nt, Artificial Sequence
  Description of Artificial Sequence: Synthetic oligonucleotide
accaacuuugguggccgag

SEQ ID NO: 2991536 - RNA, 19 nt, Artificial Sequence
  Description of Artificial Sequence: Synthetic oligonucleotide
aggcaggguugacagggcu

SEQ ID NO: 2991537 - RNA, 19 nt, Artificial Sequence
  Description of Artificial Sequence: Synthetic oligonucleotide
acagggcuggacccauuca

SEQ ID NO: 2991538 - RNA, 19 nt, Artificial Sequence
  Description of Artificial Sequence: Synthetic oligonucleotide
cuguugcuuccuugugggc

SEQ ID NO: 2991539 - RNA, 19 nt, Artificial Sequence
  Description of Artificial Sequence: Synthetic oligonucleotide
aaucagcacccgggacugg

SEQ ID NO: 2991540 - RNA, 19 nt, Artificial Sequence
  Description of Artificial Sequence: Synthetic oligonucleotide
cugcaggcuggaccgauuc

SEQ ID NO: 2991541 - RNA, 19 nt, Artificial Sequence
  Description of Artificial Sequence: Synthetic oligonucleotide
agggcuggacccauucaag

SEQ ID NO: 2991542 - RNA, 19 nt, Artificial Sequence
  Description of Artificial Sequence: Synthetic oligonucleotide
ugccggaccuucugcagau

SEQ ID NO: 2991543 - RNA, 19 nt, Artificial Sequence
  Description of Artificial Sequence: Synthetic oligonucleotide
cccgaggcaaucagcaccc

SEQ ID NO: 2991544 - RNA, 19 nt, Artificial Sequence
  Description of Artificial Sequence: Synthetic oligonucleotide
uugcggcuuguguuagaga

SEQ ID NO: 2991545 - RNA, 19 nt, Artificial Sequence
  Description of Artificial Sequence: Synthetic oligonucleotide
ucccggugauuccugccaa

SEQ ID NO: 2991546 - RNA, 19 nt, Artificial Sequence
  Description of Artificial Sequence: Synthetic oligonucleotide
ucuugcggcuuguguuaga

SEQ ID NO: 2991547 - RNA, 19 nt, Artificial Sequence
  Description of Artificial Sequence: Synthetic oligonucleotide
ccccgaggcaaucagcacc

SEQ ID NO: 2991548 - RNA, 19 nt, Artificial Sequence
  Description of Artificial Sequence: Synthetic oligonucleotide
cuccuguugcuuccuugug

SEQ ID NO: 2991549 - RNA, 19 nt, Artificial Sequence
  Description of Artificial Sequence: Synthetic oligonucleotide
agaccccugggauggacuu

SEQ ID NO: 2991550 - RNA, 19 nt, Artificial Sequence
  Description of Artificial Sequence: Synthetic oligonucleotide
gguggaggaccaacuuugg

SEQ ID NO: 2991551 - RNA, 19 nt, Artificial Sequence
  Description of Artificial Sequence: Synthetic oligonucleotide
ggugccggaccuucugcag

SEQ ID NO: 2991552 - RNA, 19 nt, Artificial Sequence
  Description of Artificial Sequence: Synthetic oligonucleotide
ggacuuuauuucacucugc

SEQ ID NO: 2991553 - RNA, 19 nt, Artificial Sequence
  Description of Artificial Sequence: Synthetic oligonucleotide
uggccagucgcugcaggcu

SEQ ID NO: 2991554 - RNA, 19 nt, Artificial Sequence
  Description of Artificial Sequence: Synthetic oligonucleotide
uuugguggucuugcggcuu

SEQ ID NO: 2991555 - RNA, 19 nt, Artificial Sequence
  Description of Artificial Sequence: Synthetic oligonucleotide
gggacugggcaauggccag

SEQ ID NO: 2991556 - RNA, 19 nt, Artificial Sequence
  Description of Artificial Sequence: Synthetic oligonucleotide
aucccgcugcacucaugag

SEQ ID NO: 2991557 - RNA, 19 nt, Artificial Sequence
  Description of Artificial Sequence: Synthetic oligonucleotide
guugacagggcuggaccca

SEQ ID NO: 2991558 - RNA, 19 nt, Artificial Sequence
  Description of Artificial Sequence: Synthetic oligonucleotide
cagggcuggacccauucaa

SEQ ID NO: 2991559 - RNA, 19 nt, Artificial Sequence
  Description of Artificial Sequence: Synthetic oligonucleotide
gucuugcggcuuguguuag

SEQ ID NO: 2991560 - RNA, 19 nt, Artificial Sequence
  Description of Artificial Sequence: Synthetic oligonucleotide
cacuccucugggguuuacc

SEQ ID NO: 2991561 - RNA, 19 nt, Artificial Sequence
  Description of Artificial Sequence: Synthetic oligonucleotide
uaccuuucuuggccuguuu

SEQ ID NO: 2991562 - RNA, 19 nt, Artificial Sequence
  Description of Artificial Sequence: Synthetic oligonucleotide
uuaccuuucuuggccuguu

SEQ ID NO: 2991563 - RNA, 19 nt, Artificial Sequence
  Description of Artificial Sequence: Synthetic oligonucleotide
ccagucuccuguugcuucc

SEQ ID NO: 2991564 - RNA, 19 nt, Artificial Sequence
  Description of Artificial Sequence: Synthetic oligonucleotide
aaguggccagugccacccu

SEQ ID NO: 2991565 - RNA, 19 nt, Artificial Sequence
  Description of Artificial Sequence: Synthetic oligonucleotide
cagugccacccuuccaguc

SEQ ID NO: 2991566 - RNA, 19 nt, Artificial Sequence
  Description of Artificial Sequence: Synthetic oligonucleotide
cccgcugcacucaugagga

SEQ ID NO: 2991567 - RNA, 19 nt, Artificial Sequence
  Description of Artificial Sequence: Synthetic oligonucleotide
gggauggacuuuauuucac

SEQ ID NO: 2991568 - RNA, 19 nt, Artificial Sequence
  Description of Artificial Sequence: Synthetic oligonucleotide
ggcaaucagcacccgggac

SEQ ID NO: 2991569 - RNA, 19 nt, Artificial Sequence
  Description of Artificial Sequence: Synthetic oligonucleotide
ccgggacugggcaauggcc

SEQ ID NO: 2991570 - RNA, 19 nt, Artificial Sequence
  Description of Artificial Sequence: Synthetic oligonucleotide
cggcuuguguuagagaccc

SEQ ID NO: 2991571 - RNA, 19 nt, Artificial Sequence
  Description of Artificial Sequence: Synthetic oligonucleotide
gugccggaccuucugcaga

SEQ ID NO: 2991572 - RNA, 19 nt, Artificial Sequence
  Description of Artificial Sequence: Synthetic oligonucleotide
gcaauggccagucgcugca

SEQ ID NO: 2991573 - RNA, 19 nt, Artificial Sequence
  Description of Artificial Sequence: Synthetic oligonucleotide
ugccacccuuccagucucc

SEQ ID NO: 2991574 - RNA, 19 nt, Artificial Sequence
  Description of Artificial Sequence: Synthetic oligonucleotide
ggaucccggugauuccugc

SEQ ID NO: 2991575 - RNA, 19 nt, Artificial Sequence
  Description of Artificial Sequence: Synthetic oligonucleotide
gugccacccuuccagucuc

SEQ ID NO: 2991576 - RNA, 19 nt, Artificial Sequence
  Description of Artificial Sequence: Synthetic oligonucleotide
gguuuaccuuucuuggccu

SEQ ID NO: 2991577 - RNA, 19 nt, Artificial Sequence
  Description of Artificial Sequence: Synthetic oligonucleotide
ccugggauggacuuuauuu

SEQ ID NO: 2991578 - RNA, 19 nt, Artificial Sequence
  Description of Artificial Sequence: Synthetic oligonucleotide
ggauggacuuuauuucacu

SEQ ID NO: 2991579 - RNA, 19 nt, Artificial Sequence
  Description of Artificial Sequence: Synthetic oligonucleotide
ggcuggaccgauucaaagu

SEQ ID NO: 2991580 - RNA, 19 nt, Artificial Sequence
  Description of Artificial Sequence: Synthetic oligonucleotide
ggccagucgcugcaggcug

SEQ ID NO: 2991581 - RNA, 19 nt, Artificial Sequence
  Description of Artificial Sequence: Synthetic oligonucleotide
ggaccgauucaaaguggcc

SEQ ID NO: 2991582 - RNA, 19 nt, Artificial Sequence
  Description of Artificial Sequence: Synthetic oligonucleotide
uuccagucuccuguugcuu

SEQ ID NO: 2991583 - RNA, 19 nt, Artificial Sequence
  Description of Artificial Sequence: Synthetic oligonucleotide
cuuccagucuccuguugcu

SEQ ID NO: 2991584 - RNA, 19 nt, Artificial Sequence
  Description of Artificial Sequence: Synthetic oligonucleotide
agugaggcacacaggcaau

SEQ ID NO: 2991585 - RNA, 19 nt, Artificial Sequence
  Description of Artificial Sequence: Synthetic oligonucleotide
gugaggcacacaggcaauc

SEQ ID NO: 2991586 - RNA, 19 nt, Artificial Sequence
  Description of Artificial Sequence: Synthetic oligonucleotide
ggucuugcggcuuguguua

SEQ ID NO: 2991587 - RNA, 19 nt, Artificial Sequence
  Description of Artificial Sequence: Synthetic oligonucleotide
agcacccgggacugggcaa

SEQ ID NO: 2991588 - RNA, 19 nt, Artificial Sequence
  Description of Artificial Sequence: Synthetic oligonucleotide
caaucccgcugcacucaug

SEQ ID NO: 2991589 - RNA, 19 nt, Artificial Sequence
  Description of Artificial Sequence: Synthetic oligonucleotide
ccggugauuccugccaagg

SEQ ID NO: 2991590 - RNA, 19 nt, Artificial Sequence
  Description of Artificial Sequence: Synthetic oligonucleotide
uagcacuccucugggguuu

SEQ ID NO: 2991591 - RNA, 19 nt, Artificial Sequence
  Description of Artificial Sequence: Synthetic oligonucleotide
gaggaucccggugauuccu

SEQ ID NO: 2991592 - RNA, 19 nt, Artificial Sequence
  Description of Artificial Sequence: Synthetic oligonucleotide
caauggccagucgcugcag

SEQ ID NO: 2991593 - RNA, 19 nt, Artificial Sequence
  Description of Artificial Sequence: Synthetic oligonucleotide
guggucuugcggcuugugu

SEQ ID NO: 2991594 - RNA, 19 nt, Artificial Sequence
  Description of Artificial Sequence: Synthetic oligonucleotide
ggcaggguugacagggcug

SEQ ID NO: 2991595 - RNA, 19 nt, Artificial Sequence
  Description of Artificial Sequence: Synthetic oligonucleotide
acccgggacugggcaaugg

SEQ ID NO: 2991596 - RNA, 19 nt, Artificial Sequence
  Description of Artificial Sequence: Synthetic oligonucleotide
aggaucccggugauuccug

SEQ ID NO: 2991597 - RNA, 19 nt, Artificial Sequence
  Description of Artificial Sequence: Synthetic oligonucleotide
gaccaacuuugguggccga

SEQ ID NO: 2991598 - RNA, 19 nt, Artificial Sequence
  Description of Artificial Sequence: Synthetic oligonucleotide
guggaggaccaacuuuggu

SEQ ID NO: 2991599 - RNA, 19 nt, Artificial Sequence
  Description of Artificial Sequence: Synthetic oligonucleotide
gcuuguguuagagaccccu

SEQ ID NO: 2991600 - RNA, 19 nt, Artificial Sequence
  Description of Artificial Sequence: Synthetic oligonucleotide
ggggugccggaccuucugc

SEQ ID NO: 2991601 - RNA, 19 nt, Artificial Sequence
  Description of Artificial Sequence: Synthetic oligonucleotide
accccugggauggacuuua

SEQ ID NO: 2991602 - RNA, 19 nt, Artificial Sequence
  Description of Artificial Sequence: Synthetic oligonucleotide
caggcuggaccgauucaaa

SEQ ID NO: 2991603 - RNA, 19 nt, Artificial Sequence
  Description of Artificial Sequence: Synthetic oligonucleotide
cgaggcaaucagcacccgg

SEQ ID NO: 2991604 - RNA, 19 nt, Artificial Sequence
  Description of Artificial Sequence: Synthetic oligonucleotide
cugcacucaugaggauccc

SEQ ID NO: 2991605 - RNA, 19 nt, Artificial Sequence
  Description of Artificial Sequence: Synthetic oligonucleotide
gcuggacccauucaaguuu

SEQ ID NO: 2991606 - RNA, 19 nt, Artificial Sequence
  Description of Artificial Sequence: Synthetic oligonucleotide
ccaauaacuguaguuuucu

SEQ ID NO: 2991607 - RNA, 19 nt, Artificial Sequence
  Description of Artificial Sequence: Synthetic oligonucleotide
gccgagugaggcacacagg

SEQ ID NO: 2991608 - RNA, 19 nt, Artificial Sequence
  Description of Artificial Sequence: Synthetic oligonucleotide
gcggcuuguguuagagacc

SEQ ID NO: 2991609 - RNA, 19 nt, Artificial Sequence
  Description of Artificial Sequence: Synthetic oligonucleotide
ugacagggcuggacccauu

SEQ ID NO: 2991610 - RNA, 19 nt, Artificial Sequence
  Description of Artificial Sequence: Synthetic oligonucleotide
cagcacccgggacugggca

SEQ ID NO: 2991611 - RNA, 19 nt, Artificial Sequence
  Description of Artificial Sequence: Synthetic oligonucleotide
cccgggacugggcaauggc

SEQ ID NO: 2991612 - RNA, 19 nt, Artificial Sequence
  Description of Artificial Sequence: Synthetic oligonucleotide
gggugccggaccuucugca

SEQ ID NO: 2991613 - RNA, 19 nt, Artificial Sequence
  Description of Artificial Sequence: Synthetic oligonucleotide
cggugauuccugccaaggc

SEQ ID NO: 2991614 - RNA, 19 nt, Artificial Sequence
  Description of Artificial Sequence: Synthetic oligonucleotide
cacucaugaggaucccggu

SEQ ID NO: 2991615 - RNA, 19 nt, Artificial Sequence
  Description of Artificial Sequence: Synthetic oligonucleotide
gcaggcuggaccgauucaa

SEQ ID NO: 2991616 - RNA, 19 nt, Artificial Sequence
  Description of Artificial Sequence: Synthetic oligonucleotide
cuggacccauucaaguuuu

SEQ ID NO: 2991617 - RNA, 19 nt, Artificial Sequence
  Description of Artificial Sequence: Synthetic oligonucleotide
gagaccccugggauggacu

SEQ ID NO: 2991618 - RNA, 19 nt, Artificial Sequence
  Description of Artificial Sequence: Synthetic oligonucleotide
guggccgagugaggcacac

SEQ ID NO: 2991619 - RNA, 19 nt, Artificial Sequence
  Description of Artificial Sequence: Synthetic oligonucleotide
ugguggucuugcggcuugu

SEQ ID NO: 2991620 - RNA, 19 nt, Artificial Sequence
  Description of Artificial Sequence: Synthetic oligonucleotide
gggcuggacccauucaagu

SEQ ID NO: 2991621 - RNA, 19 nt, Artificial Sequence
  Description of Artificial Sequence: Synthetic oligonucleotide
ggcaaucccgcugcacuca

SEQ ID NO: 2991622 - RNA, 19 nt, Artificial Sequence
  Description of Artificial Sequence: Synthetic oligonucleotide
uagagaccccugggaugga

SEQ ID NO: 2991623 - RNA, 19 nt, Artificial Sequence
  Description of Artificial Sequence: Synthetic oligonucleotide
uggccgagugaggcacaca

SEQ ID NO: 2991624 - RNA, 19 nt, Artificial Sequence
  Description of Artificial Sequence: Synthetic oligonucleotide
gccagucgcugcaggcugg

SEQ ID NO: 2991625 - RNA, 19 nt, Artificial Sequence
  Description of Artificial Sequence: Synthetic oligonucleotide
cccggugauuccugccaag

SEQ ID NO: 2991626 - RNA, 19 nt, Artificial Sequence
  Description of Artificial Sequence: Synthetic oligonucleotide
ggguggguggaggaccaac

SEQ ID NO: 2991627 - RNA, 19 nt, Artificial Sequence
  Description of Artificial Sequence: Synthetic oligonucleotide
guggguggaggaccaacuu

SEQ ID NO: 2991628 - RNA, 19 nt, Artificial Sequence
  Description of Artificial Sequence: Synthetic oligonucleotide
gguggucuugcggcuugug

SEQ ID NO: 2991629 - RNA, 19 nt, Artificial Sequence
  Description of Artificial Sequence: Synthetic oligonucleotide
cgggacugggcaauggcca

SEQ ID NO: 2991630 - RNA, 19 nt, Artificial Sequence
  Description of Artificial Sequence: Synthetic oligonucleotide
ccacccuuccagucuccug

SEQ ID NO: 2991631 - RNA, 19 nt, Artificial Sequence
  Description of Artificial Sequence: Synthetic oligonucleotide
ggcuggacccauucaaguu

SEQ ID NO: 2991632 - RNA, 19 nt, Artificial Sequence
  Description of Artificial Sequence: Synthetic oligonucleotide
ccugccaaggcaggguuga

SEQ ID NO: 2991633 - RNA, 19 nt, Artificial Sequence
  Description of Artificial Sequence: Synthetic oligonucleotide
cugccaaggcaggguugac

SEQ ID NO: 2991634 - RNA, 19 nt, Artificial Sequence
  Description of Artificial Sequence: Synthetic oligonucleotide
cacaggcaaucccgcugca

SEQ ID NO: 2991635 - RNA, 19 nt, Artificial Sequence
  Description of Artificial Sequence: Synthetic oligonucleotide
ccucugggguuuaccuuuc

SEQ ID NO: 2991636 - RNA, 19 nt, Artificial Sequence
  Description of Artificial Sequence: Synthetic oligonucleotide
cuccucugggguuuaccuu

SEQ ID NO: 2991637 - RNA, 19 nt, Artificial Sequence
  Description of Artificial Sequence: Synthetic oligonucleotide
cgcugcacucaugaggauc

SEQ ID NO: 2991638 - RNA, 19 nt, Artificial Sequence
  Description of Artificial Sequence: Synthetic oligonucleotide
ucgcugcaggcuggaccga

SEQ ID NO: 2991639 - RNA, 19 nt, Artificial Sequence
  Description of Artificial Sequence: Synthetic oligonucleotide
cgagugaggcacacaggca

SEQ ID NO: 2991640 - RNA, 19 nt, Artificial Sequence
  Description of Artificial Sequence: Synthetic oligonucleotide
ggaccuucugcagauuauu

SEQ ID NO: 2991641 - RNA, 19 nt, Artificial Sequence
  Description of Artificial Sequence: Synthetic oligonucleotide
cagucgcugcaggcuggac

SEQ ID NO: 2991642 - RNA, 19 nt, Artificial Sequence
  Description of Artificial Sequence: Synthetic oligonucleotide
ggcuuguguuagagacccc

SEQ ID NO: 2991643 - RNA, 19 nt, Artificial Sequence
  Description of Artificial Sequence: Synthetic oligonucleotide
agcacuccucugggguuua

SEQ ID NO: 2991644 - RNA, 19 nt, Artificial Sequence
  Description of Artificial Sequence: Synthetic oligonucleotide
ccggaccuucugcagauua

SEQ ID NO: 2991645 - RNA, 19 nt, Artificial Sequence
  Description of Artificial Sequence: Synthetic oligonucleotide
cacccgggacugggcaaug

SEQ ID NO: 2991646 - RNA, 19 nt, Artificial Sequence
  Description of Artificial Sequence: Synthetic oligonucleotide
ggccagugccacccuucca

SEQ ID NO: 2991647 - RNA, 19 nt, Artificial Sequence
  Description of Artificial Sequence: Synthetic oligonucleotide
caggcacaguggggacccc

SEQ ID NO: 2991648 - RNA, 19 nt, Artificial Sequence
  Description of Artificial Sequence: Synthetic oligonucleotide
cucugggguuuaccuuucu

SEQ ID NO: 2991649 - RNA, 19 nt, Artificial Sequence
  Description of Artificial Sequence: Synthetic oligonucleotide
ccaacuuugguggccgagu

SEQ ID NO: 2991650 - RNA, 19 nt, Artificial Sequence
  Description of Artificial Sequence: Synthetic oligonucleotide
ccgaggcaaucagcacccg

SEQ ID NO: 2991651 - RNA, 19 nt, Artificial Sequence
  Description of Artificial Sequence: Synthetic oligonucleotide
gguggccgagugaggcaca

SEQ ID NO: 2991652 - RNA, 19 nt, Artificial Sequence
  Description of Artificial Sequence: Synthetic oligonucleotide
gcaaucccgcugcacucau

SEQ ID NO: 2991653 - RNA, 19 nt, Artificial Sequence
  Description of Artificial Sequence: Synthetic oligonucleotide
gaccccugggauggacuuu

SEQ ID NO: 2991654 - RNA, 19 nt, Artificial Sequence
  Description of Artificial Sequence: Synthetic oligonucleotide
cagucuccuguugcuuccu

SEQ ID NO: 2991655 - RNA, 19 nt, Artificial Sequence
  Description of Artificial Sequence: Synthetic oligonucleotide
caugaggaucccggugauu

SEQ ID NO: 2991656 - RNA, 19 nt, Artificial Sequence
  Description of Artificial Sequence: Synthetic oligonucleotide
ggacugggcaauggccagu

SEQ ID NO: 2991657 - RNA, 19 nt, Artificial Sequence
  Description of Artificial Sequence: Synthetic oligonucleotide
ccagugccacccuuccagu

SEQ ID NO: 2991658 - RNA, 19 nt, Artificial Sequence
  Description of Artificial Sequence: Synthetic oligonucleotide
gcacuccucugggguuuac

SEQ ID NO: 2991659 - RNA, 19 nt, Artificial Sequence
  Description of Artificial Sequence: Synthetic oligonucleotide
ccagucgcugcaggcugga

SEQ ID NO: 2991660 - RNA, 19 nt, Artificial Sequence
  Description of Artificial Sequence: Synthetic oligonucleotide
ccgauucaaaguggccagu

SEQ ID NO: 2991661 - RNA, 19 nt, Artificial Sequence
  Description of Artificial Sequence: Synthetic oligonucleotide
gcacccgggacugggcaau

SEQ ID NO: 2991662 - RNA, 19 nt, Artificial Sequence
  Description of Artificial Sequence: Synthetic oligonucleotide
cggaccuucugcagauuau

SEQ ID NO: 2991663 - RNA, 19 nt, Artificial Sequence
  Description of Artificial Sequence: Synthetic oligonucleotide
gggguggguggaggaccaa

SEQ ID NO: 2991664 - RNA, 19 nt, Artificial Sequence
  Description of Artificial Sequence: Synthetic oligonucleotide
cccugggauggacuuuauu

SEQ ID NO: 2991665 - RNA, 19 nt, Artificial Sequence
  Description of Artificial Sequence: Synthetic oligonucleotide
gcugcaggcuggaccgauu

SEQ ID NO: 2991666 - RNA, 19 nt, Artificial Sequence
  Description of Artificial Sequence: Synthetic oligonucleotide
ccgcugcacucaugaggau

SEQ ID NO: 2991667 - RNA, 19 nt, Artificial Sequence
  Description of Artificial Sequence: Synthetic oligonucleotide
ccccugggauggacuuuau

SEQ ID NO: 2991668 - RNA, 19 nt, Artificial Sequence
  Description of Artificial Sequence: Synthetic oligonucleotide
gccggaccuucugcagauu

SEQ ID NO: 2991669 - RNA, 19 nt, Artificial Sequence
  Description of Artificial Sequence: Synthetic oligonucleotide
aaaaguuaauaauugaagc

SEQ ID NO: 2991670 - RNA, 19 nt, Artificial Sequence
  Description of Artificial Sequence: Synthetic oligonucleotide
aaaguuaauaauugaagcc

SEQ ID NO: 2991671 - RNA, 19 nt, Artificial Sequence
  Description of Artificial Sequence: Synthetic oligonucleotide
aauaauugaagccagaaaa

SEQ ID NO: 2991672 - RNA, 19 nt, Artificial Sequence
  Description of Artificial Sequence: Synthetic oligonucleotide
uuugucaacagaaaguggc

SEQ ID NO: 2991673 - RNA, 19 nt, Artificial Sequence
  Description of Artificial Sequence: Synthetic oligonucleotide
uggacuacaacauacaugu

SEQ ID NO: 2991674 - RNA, 19 nt, Artificial Sequence
  Description of Artificial Sequence: Synthetic oligonucleotide
aauugaagccagaaaaggc

SEQ ID NO: 2991675 - RNA, 19 nt, Artificial Sequence
  Description of Artificial Sequence: Synthetic oligonucleotide
gaaaaggcagcguugagcc

SEQ ID NO: 2991676 - RNA, 19 nt, Artificial Sequence
  Description of Artificial Sequence: Synthetic oligonucleotide
ucaucaaagucuaugugcc

SEQ ID NO: 2991677 - RNA, 19 nt, Artificial Sequence
  Description of Artificial Sequence: Synthetic oligonucleotide
uuguccaacagcaaguuug

SEQ ID NO: 2991678 - RNA, 19 nt, Artificial Sequence
  Description of Artificial Sequence: Synthetic oligonucleotide
aaguuaauaauugaagcca

SEQ ID NO: 2991679 - RNA, 19 nt, Artificial Sequence
  Description of Artificial Sequence: Synthetic oligonucleotide
acaacauacauguacauau

SEQ ID NO: 2991680 - RNA, 19 nt, Artificial Sequence
  Description of Artificial Sequence: Synthetic oligonucleotide
uaauugaagccagaaaagg

SEQ ID NO: 2991681 - RNA, 19 nt, Artificial Sequence
  Description of Artificial Sequence: Synthetic oligonucleotide
caaacugcaucucaaagcc

SEQ ID NO: 2991682 - RNA, 19 nt, Artificial Sequence
  Description of Artificial Sequence: Synthetic oligonucleotide
cagaaaguggcccaggugg

SEQ ID NO: 2991683 - RNA, 19 nt, Artificial Sequence
  Description of Artificial Sequence: Synthetic oligonucleotide
gacuacaacauacauguac

SEQ ID NO: 2991684 - RNA, 19 nt, Artificial Sequence
  Description of Artificial Sequence: Synthetic oligonucleotide
ucuaguauagccuggacua

SEQ ID NO: 2991685 - RNA, 19 nt, Artificial Sequence
  Description of Artificial Sequence: Synthetic oligonucleotide
uucagcuuguccaacagca

SEQ ID NO: 2991686 - RNA, 19 nt, Artificial Sequence
  Description of Artificial Sequence: Synthetic oligonucleotide
acaacagccaacuugcucu

SEQ ID NO: 2991687 - RNA, 19 nt, Artificial Sequence
  Description of Artificial Sequence: Synthetic oligonucleotide
aagucaucaaagucuaugu

SEQ ID NO: 2991688 - RNA, 19 nt, Artificial Sequence
  Description of Artificial Sequence: Synthetic oligonucleotide
uauagccuggacuacaaca

SEQ ID NO: 2991689 - RNA, 19 nt, Artificial Sequence
  Description of Artificial Sequence: Synthetic oligonucleotide
uaugugcccagcaacauga

SEQ ID NO: 2991690 - RNA, 19 nt, Artificial Sequence
  Description of Artificial Sequence: Synthetic oligonucleotide
agaaaaggcagcguugagc

SEQ ID NO: 2991691 - RNA, 19 nt, Artificial Sequence
  Description of Artificial Sequence: Synthetic oligonucleotide
aggacaacagccaacuugc

SEQ ID NO: 2991692 - RNA, 19 nt, Artificial Sequence
  Description of Artificial Sequence: Synthetic oligonucleotide
agcaacaugagccagggau

SEQ ID NO: 2991693 - RNA, 19 nt, Artificial Sequence
  Description of Artificial Sequence: Synthetic oligonucleotide
agggaugacagguugauga

SEQ ID NO: 2991694 - RNA, 19 nt, Artificial Sequence
  Description of Artificial Sequence: Synthetic oligonucleotide
caaguuugucaacagaaag

SEQ ID NO: 2991695 - RNA, 19 nt, Artificial Sequence
  Description of Artificial Sequence: Synthetic oligonucleotide
cucaaagccauccucagug

SEQ ID NO: 2991696 - RNA, 19 nt, Artificial Sequence
  Description of Artificial Sequence: Synthetic oligonucleotide
gaggacaacagccaacuug

SEQ ID NO: 2991697 - RNA, 19 nt, Artificial Sequence
  Description of Artificial Sequence: Synthetic oligonucleotide
ugaugaugcgcgaaggggc

SEQ ID NO: 2991698 - RNA, 19 nt, Artificial Sequence
  Description of Artificial Sequence: Synthetic oligonucleotide
aguuugucaacagaaagug

SEQ ID NO: 2991699 - RNA, 19 nt, Artificial Sequence
  Description of Artificial Sequence: Synthetic oligonucleotide
uccaacagcaaguuuguca

SEQ ID NO: 2991700 - RNA, 19 nt, Artificial Sequence
  Description of Artificial Sequence: Synthetic oligonucleotide
uucuaguauagccuggacu

SEQ ID NO: 2991701 - RNA, 19 nt, Artificial Sequence
  Description of Artificial Sequence: Synthetic oligonucleotide
uugaagccagaaaaggcag

SEQ ID NO: 2991702 - RNA, 19 nt, Artificial Sequence
  Description of Artificial Sequence: Synthetic oligonucleotide
aagccauccucaguggucc

SEQ ID NO: 2991703 - RNA, 19 nt, Artificial Sequence
  Description of Artificial Sequence: Synthetic oligonucleotide
gacagguugaugaugcgcg

SEQ ID NO: 2991704 - RNA, 19 nt, Artificial Sequence
  Description of Artificial Sequence: Synthetic oligonucleotide
uaauaauugaagccagaaa

SEQ ID NO: 2991705 - RNA, 19 nt, Artificial Sequence
  Description of Artificial Sequence: Synthetic oligonucleotide
uucuucgucucccaguuca

SEQ ID NO: 2991706 - RNA, 19 nt, Artificial Sequence
  Description of Artificial Sequence: Synthetic oligonucleotide
uuggugaagaggacaacag

SEQ ID NO: 2991707 - RNA, 19 nt, Artificial Sequence
  Description of Artificial Sequence: Synthetic oligonucleotide
uuaauaauugaagccagaa

SEQ ID NO: 2991708 - RNA, 19 nt, Artificial Sequence
  Description of Artificial Sequence: Synthetic oligonucleotide
uuggugucauacuucuucg

SEQ ID NO: 2991709 - RNA, 19 nt, Artificial Sequence
  Description of Artificial Sequence: Synthetic oligonucleotide
uccucagugguccagugug

SEQ ID NO: 2991710 - RNA, 19 nt, Artificial Sequence
  Description of Artificial Sequence: Synthetic oligonucleotide
uugaugaugcgcgaagggg

SEQ ID NO: 2991711 - RNA, 19 nt, Artificial Sequence
  Description of Artificial Sequence: Synthetic oligonucleotide
auaauugaagccagaaaag

SEQ ID NO: 2991712 - RNA, 19 nt, Artificial Sequence
  Description of Artificial Sequence: Synthetic oligonucleotide
agcguugagccuugcagcc

SEQ ID NO: 2991713 - RNA, 19 nt, Artificial Sequence
  Description of Artificial Sequence: Synthetic oligonucleotide
guugacaccaaacugcauc

SEQ ID NO: 2991714 - RNA, 19 nt, Artificial Sequence
  Description of Artificial Sequence: Synthetic oligonucleotide
aaguuugucaacagaaagu

SEQ ID NO: 2991715 - RNA, 19 nt, Artificial Sequence
  Description of Artificial Sequence: Synthetic oligonucleotide
gaagccagaaaaggcagcg

SEQ ID NO: 2991716 - RNA, 19 nt, Artificial Sequence
  Description of Artificial Sequence: Synthetic oligonucleotide
cauguacauauacacacac

SEQ ID NO: 2991717 - RNA, 19 nt, Artificial Sequence
  Description of Artificial Sequence: Synthetic oligonucleotide
cuuggugucauacuucuuc

SEQ ID NO: 2991718 - RNA, 19 nt, Artificial Sequence
  Description of Artificial Sequence: Synthetic oligonucleotide
aacagcaaguuugucaaca

SEQ ID NO: 2991719 - RNA, 19 nt, Artificial Sequence
  Description of Artificial Sequence: Synthetic oligonucleotide
uugucaacagaaaguggcc

SEQ ID NO: 2991720 - RNA, 19 nt, Artificial Sequence
  Description of Artificial Sequence: Synthetic oligonucleotide
accaaacugcaucucaaag

SEQ ID NO: 2991721 - RNA, 19 nt, Artificial Sequence
  Description of Artificial Sequence: Synthetic oligonucleotide
aaagucuaugugcccagca

SEQ ID NO: 2991722 - RNA, 19 nt, Artificial Sequence
  Description of Artificial Sequence: Synthetic oligonucleotide
aacuugcucuggcaguagg

SEQ ID NO: 2991723 - RNA, 19 nt, Artificial Sequence
  Description of Artificial Sequence: Synthetic oligonucleotide
acagccaacuugcucuggc

SEQ ID NO: 2991724 - RNA, 19 nt, Artificial Sequence
  Description of Artificial Sequence: Synthetic oligonucleotide
uucaagucaucaaagucua

SEQ ID NO: 2991725 - RNA, 19 nt, Artificial Sequence
  Description of Artificial Sequence: Synthetic oligonucleotide
auugaagccagaaaaggca

SEQ ID NO: 2991726 - RNA, 19 nt, Artificial Sequence
  Description of Artificial Sequence: Synthetic oligonucleotide
aguuaauaauugaagccag

SEQ ID NO: 2991727 - RNA, 19 nt, Artificial Sequence
  Description of Artificial Sequence: Synthetic oligonucleotide
aacagaaaguggcccaggu

SEQ ID NO: 2991728 - RNA, 19 nt, Artificial Sequence
  Description of Artificial Sequence: Synthetic oligonucleotide
guugaugaugcgcgaaggg

SEQ ID NO: 2991729 - RNA, 19 nt, Artificial Sequence
  Description of Artificial Sequence: Synthetic oligonucleotide
uugacaccaaacugcaucu

SEQ ID NO: 2991730 - RNA, 19 nt, Artificial Sequence
  Description of Artificial Sequence: Synthetic oligonucleotide
ugugggcaccucaucacgg

SEQ ID NO: 2991731 - RNA, 19 nt, Artificial Sequence
  Description of Artificial Sequence: Synthetic oligonucleotide
agugugggcaccucaucac

SEQ ID NO: 2991732 - RNA, 19 nt, Artificial Sequence
  Description of Artificial Sequence: Synthetic oligonucleotide
gaggccuucagcuugucca

SEQ ID NO: 2991733 - RNA, 19 nt, Artificial Sequence
  Description of Artificial Sequence: Synthetic oligonucleotide
acuacaacauacauguaca

SEQ ID NO: 2991734 - RNA, 19 nt, Artificial Sequence
  Description of Artificial Sequence: Synthetic oligonucleotide
uggugaagaggacaacagc

SEQ ID NO: 2991735 - RNA, 19 nt, Artificial Sequence
  Description of Artificial Sequence: Synthetic oligonucleotide
ucaaagccauccucagugg

SEQ ID NO: 2991736 - RNA, 19 nt, Artificial Sequence
  Description of Artificial Sequence: Synthetic oligonucleotide
aaagccauccucagugguc

SEQ ID NO: 2991737 - RNA, 19 nt, Artificial Sequence
  Description of Artificial Sequence: Synthetic oligonucleotide
gugguugacaccaaacugc

SEQ ID NO: 2991738 - RNA, 19 nt, Artificial Sequence
  Description of Artificial Sequence: Synthetic oligonucleotide
cuggacuacaacauacaug

SEQ ID NO: 2991739 - RNA, 19 nt, Artificial Sequence
  Description of Artificial Sequence: Synthetic oligonucleotide
ucaaagucuaugugcccag

SEQ ID NO: 2991740 - RNA, 19 nt, Artificial Sequence
  Description of Artificial Sequence: Synthetic oligonucleotide
caagucaucaaagucuaug

SEQ ID NO: 2991741 - RNA, 19 nt, Artificial Sequence
  Description of Artificial Sequence: Synthetic oligonucleotide
ugguugacaccaaacugca

SEQ ID NO: 2991742 - RNA, 19 nt, Artificial Sequence
  Description of Artificial Sequence: Synthetic oligonucleotide
ggugaagaggacaacagcc

SEQ ID NO: 2991743 - RNA, 19 nt, Artificial Sequence
  Description of Artificial Sequence: Synthetic oligonucleotide
ugagccagggaugacaggu

SEQ ID NO: 2991744 - RNA, 19 nt, Artificial Sequence
  Description of Artificial Sequence: Synthetic oligonucleotide
ugucaacagaaaguggccc

SEQ ID NO: 2991745 - RNA, 19 nt, Artificial Sequence
  Description of Artificial Sequence: Synthetic oligonucleotide
gaugaugcgcgaaggggcg

SEQ ID NO: 2991746 - RNA, 19 nt, Artificial Sequence
  Description of Artificial Sequence: Synthetic oligonucleotide
ugagccuugcagccggcgg

SEQ ID NO: 2991747 - RNA, 19 nt, Artificial Sequence
  Description of Artificial Sequence: Synthetic oligonucleotide
gugcccagcaacaugagcc

SEQ ID NO: 2991748 - RNA, 19 nt, Artificial Sequence
  Description of Artificial Sequence: Synthetic oligonucleotide
acagcaaguuugucaacag

SEQ ID NO: 2991749 - RNA, 19 nt, Artificial Sequence
  Description of Artificial Sequence: Synthetic oligonucleotide
aucacggcugcauuguuga

SEQ ID NO: 2991750 - RNA, 19 nt, Artificial Sequence
  Description of Artificial Sequence: Synthetic oligonucleotide
uguccaacagcaaguuugu

SEQ ID NO: 2991751 - RNA, 19 nt, Artificial Sequence
  Description of Artificial Sequence: Synthetic oligonucleotide
ugucauacuucuucgucuc

SEQ ID NO: 2991752 - RNA, 19 nt, Artificial Sequence
  Description of Artificial Sequence: Synthetic oligonucleotide
uugcucuggcaguaggccg

SEQ ID NO: 2991753 - RNA, 19 nt, Artificial Sequence
  Description of Artificial Sequence: Synthetic oligonucleotide
aggugguugacaccaaacu

SEQ ID NO: 2991754 - RNA, 19 nt, Artificial Sequence
  Description of Artificial Sequence: Synthetic oligonucleotide
uccuuggugaagaggacaa

SEQ ID NO: 2991755 - RNA, 19 nt, Artificial Sequence
  Description of Artificial Sequence: Synthetic oligonucleotide
ccaaacugcaucucaaagc

SEQ ID NO: 2991756 - RNA, 19 nt, Artificial Sequence
  Description of Artificial Sequence: Synthetic oligonucleotide
ucaacagaaaguggcccag

SEQ ID NO: 2991757 - RNA, 19 nt, Artificial Sequence
  Description of Artificial Sequence: Synthetic oligonucleotide
aucaaagucuaugugccca

SEQ ID NO: 2991758 - RNA, 19 nt, Artificial Sequence
  Description of Artificial Sequence: Synthetic oligonucleotide
uacacacacaccucuguaa

SEQ ID NO: 2991759 - RNA, 19 nt, Artificial Sequence
  Description of Artificial Sequence: Synthetic oligonucleotide
agcaaguuugucaacagaa

SEQ ID NO: 2991760 - RNA, 19 nt, Artificial Sequence
  Description of Artificial Sequence: Synthetic oligonucleotide
gacaccaaacugcaucuca

SEQ ID NO: 2991761 - RNA, 19 nt, Artificial Sequence
  Description of Artificial Sequence: Synthetic oligonucleotide
uucgucucccaguucaagu

SEQ ID NO: 2991762 - RNA, 19 nt, Artificial Sequence
  Description of Artificial Sequence: Synthetic oligonucleotide
guuugucaacagaaagugg

SEQ ID NO: 2991763 - RNA, 19 nt, Artificial Sequence
  Description of Artificial Sequence: Synthetic oligonucleotide
ugcucuggcaguaggccgc

SEQ ID NO: 2991764 - RNA, 19 nt, Artificial Sequence
  Description of Artificial Sequence: Synthetic oligonucleotide
acggcugcauuguugacca

SEQ ID NO: 2991765 - RNA, 19 nt, Artificial Sequence
  Description of Artificial Sequence: Synthetic oligonucleotide
ugacagguugaugaugcgc

SEQ ID NO: 2991766 - RNA, 19 nt, Artificial Sequence
  Description of Artificial Sequence: Synthetic oligonucleotide
ggugguugacaccaaacug

SEQ ID NO: 2991767 - RNA, 19 nt, Artificial Sequence
  Description of Artificial Sequence: Synthetic oligonucleotide
agguugaugaugcgcgaag

SEQ ID NO: 2991768 - RNA, 19 nt, Artificial Sequence
  Description of Artificial Sequence: Synthetic oligonucleotide
gacaacagccaacuugcuc

SEQ ID NO: 2991769 - RNA, 19 nt, Artificial Sequence
  Description of Artificial Sequence: Synthetic oligonucleotide
aaaggcagcguugagccuu

SEQ ID NO: 2991770 - RNA, 19 nt, Artificial Sequence
  Description of Artificial Sequence: Synthetic oligonucleotide
ugugcccagcaacaugagc

SEQ ID NO: 2991771 - RNA, 19 nt, Artificial Sequence
  Description of Artificial Sequence: Synthetic oligonucleotide
agccaacuugcucuggcag

SEQ ID NO: 2991772 - RNA, 19 nt, Artificial Sequence
  Description of Artificial Sequence: Synthetic oligonucleotide
acauauacacacacaccuc

SEQ ID NO: 2991773 - RNA, 19 nt, Artificial Sequence
  Description of Artificial Sequence: Synthetic oligonucleotide
acagaaaguggcccaggug

SEQ ID NO: 2991774 - RNA, 19 nt, Artificial Sequence
  Description of Artificial Sequence: Synthetic oligonucleotide
cagcguugagccuugcagc

SEQ ID NO: 2991775 - RNA, 19 nt, Artificial Sequence
  Description of Artificial Sequence: Synthetic oligonucleotide
cagcuuguccaacagcaag

SEQ ID NO: 2991776 - RNA, 19 nt, Artificial Sequence
  Description of Artificial Sequence: Synthetic oligonucleotide
acuugcucuggcaguaggc

SEQ ID NO: 2991777 - RNA, 19 nt, Artificial Sequence
  Description of Artificial Sequence: Synthetic oligonucleotide
cuugcucuggcaguaggcc

SEQ ID NO: 2991778 - RNA, 19 nt, Artificial Sequence
  Description of Artificial Sequence: Synthetic oligonucleotide
uacuucuucgucucccagu

SEQ ID NO: 2991779 - RNA, 19 nt, Artificial Sequence
  Description of Artificial Sequence: Synthetic oligonucleotide
ugcgcgaaggggcggaggc

SEQ ID NO: 2991780 - RNA, 19 nt, Artificial Sequence
  Description of Artificial Sequence: Synthetic oligonucleotide
caucaaagucuaugugccc

SEQ ID NO: 2991781 - RNA, 19 nt, Artificial Sequence
  Description of Artificial Sequence: Synthetic oligonucleotide
acacacacaccucuguaaa

SEQ ID NO: 2991782 - RNA, 19 nt, Artificial Sequence
  Description of Artificial Sequence: Synthetic oligonucleotide
uacaacauacauguacaua

SEQ ID NO: 2991783 - RNA, 19 nt, Artificial Sequence
  Description of Artificial Sequence: Synthetic oligonucleotide
acuucuucgucucccaguu

SEQ ID NO: 2991784 - RNA, 19 nt, Artificial Sequence
  Description of Artificial Sequence: Synthetic oligonucleotide
cuucagcuuguccaacagc

SEQ ID NO: 2991785 - RNA, 19 nt, Artificial Sequence
  Description of Artificial Sequence: Synthetic oligonucleotide
gcagcguugagccuugcag

SEQ ID NO: 2991786 - RNA, 19 nt, Artificial Sequence
  Description of Artificial Sequence: Synthetic oligonucleotide
ucgucucccaguucaaguc

SEQ ID NO: 2991787 - RNA, 19 nt, Artificial Sequence
  Description of Artificial Sequence: Synthetic oligonucleotide
auacuucuucgucucccag

SEQ ID NO: 2991788 - RNA, 19 nt, Artificial Sequence
  Description of Artificial Sequence: Synthetic oligonucleotide
uaguauagccuggacuaca

SEQ ID NO: 2991789 - RNA, 19 nt, Artificial Sequence
  Description of Artificial Sequence: Synthetic oligonucleotide
augacagguugaugaugcg

SEQ ID NO: 2991790 - RNA, 19 nt, Artificial Sequence
  Description of Artificial Sequence: Synthetic oligonucleotide
aaaaggcagcguugagccu

SEQ ID NO: 2991791 - RNA, 19 nt, Artificial Sequence
  Description of Artificial Sequence: Synthetic oligonucleotide
gugugggcaccucaucacg

SEQ ID NO: 2991792 - RNA, 19 nt, Artificial Sequence
  Description of Artificial Sequence: Synthetic oligonucleotide
gucaacagaaaguggccca

SEQ ID NO: 2991793 - RNA, 19 nt, Artificial Sequence
  Description of Artificial Sequence: Synthetic oligonucleotide
cuuggugaagaggacaaca

SEQ ID NO: 2991794 - RNA, 19 nt, Artificial Sequence
  Description of Artificial Sequence: Synthetic oligonucleotide
gaguucuaguauagccugg

SEQ ID NO: 2991795 - RNA, 19 nt, Artificial Sequence
  Description of Artificial Sequence: Synthetic oligonucleotide
gaagaggacaacagccaac

SEQ ID NO: 2991796 - RNA, 19 nt, Artificial Sequence
  Description of Artificial Sequence: Synthetic oligonucleotide
ccaguucaagucaucaaag

SEQ ID NO: 2991797 - RNA, 19 nt, Artificial Sequence
  Description of Artificial Sequence: Synthetic oligonucleotide
aacaugagccagggaugac

SEQ ID NO: 2991798 - RNA, 19 nt, Artificial Sequence
  Description of Artificial Sequence: Synthetic oligonucleotide
cauauacacacacaccucu

SEQ ID NO: 2991799 - RNA, 19 nt, Artificial Sequence
  Description of Artificial Sequence: Synthetic oligonucleotide
cuaugugcccagcaacaug

SEQ ID NO: 2991800 - RNA, 19 nt, Artificial Sequence
  Description of Artificial Sequence: Synthetic oligonucleotide
caggugguugacaccaaac

SEQ ID NO: 2991801 - RNA, 19 nt, Artificial Sequence
  Description of Artificial Sequence: Synthetic oligonucleotide
agccagaaaaggcagcguu

SEQ ID NO: 2991802 - RNA, 19 nt, Artificial Sequence
  Description of Artificial Sequence: Synthetic oligonucleotide
aggggcggaggccuucagc

SEQ ID NO: 2991803 - RNA, 19 nt, Artificial Sequence
  Description of Artificial Sequence: Synthetic oligonucleotide
caucacggcugcauuguug

SEQ ID NO: 2991804 - RNA, 19 nt, Artificial Sequence
  Description of Artificial Sequence: Synthetic oligonucleotide
auagccuggacuacaacau

SEQ ID NO: 2991805 - RNA, 19 nt, Artificial Sequence
  Description of Artificial Sequence: Synthetic oligonucleotide
aguaggccgccuugguguc

SEQ ID NO: 2991806 - RNA, 19 nt, Artificial Sequence
  Description of Artificial Sequence: Synthetic oligonucleotide
ugcccagcaacaugagcca

SEQ ID NO: 2991807 - RNA, 19 nt, Artificial Sequence
  Description of Artificial Sequence: Synthetic oligonucleotide
agccagggaugacagguug

SEQ ID NO: 2991808 - RNA, 19 nt, Artificial Sequence
  Description of Artificial Sequence: Synthetic oligonucleotide
ucagugguccagugugggc

SEQ ID NO: 2991809 - RNA, 19 nt, Artificial Sequence
  Description of Artificial Sequence: Synthetic oligonucleotide
acaugagccagggaugaca

SEQ ID NO: 2991810 - RNA, 19 nt, Artificial Sequence
  Description of Artificial Sequence: Synthetic oligonucleotide
uggcccaggugguugacac

SEQ ID NO: 2991811 - RNA, 19 nt, Artificial Sequence
  Description of Artificial Sequence: Synthetic oligonucleotide
gagccuugcagccggcggc

SEQ ID NO: 2991812 - RNA, 19 nt, Artificial Sequence
  Description of Artificial Sequence: Synthetic oligonucleotide
guuaauaauugaagccaga

SEQ ID NO: 2991813 - RNA, 19 nt, Artificial Sequence
  Description of Artificial Sequence: Synthetic oligonucleotide
ggugucauacuucuucguc

SEQ ID NO: 2991814 - RNA, 19 nt, Artificial Sequence
  Description of Artificial Sequence: Synthetic oligonucleotide
cacggcugcauuguugacc

SEQ ID NO: 2991815 - RNA, 19 nt, Artificial Sequence
  Description of Artificial Sequence: Synthetic oligonucleotide
auacacacacaccucugua

SEQ ID NO: 2991816 - RNA, 19 nt, Artificial Sequence
  Description of Artificial Sequence: Synthetic oligonucleotide
auauacacacacaccucug

SEQ ID NO: 2991817 - RNA, 19 nt, Artificial Sequence
  Description of Artificial Sequence: Synthetic oligonucleotide
cucagugguccaguguggg

SEQ ID NO: 2991818 - RNA, 19 nt, Artificial Sequence
  Description of Artificial Sequence: Synthetic oligonucleotide
uccagugugggcaccucau

SEQ ID NO: 2991819 - RNA, 19 nt, Artificial Sequence
  Description of Artificial Sequence: Synthetic oligonucleotide
gguugaugaugcgcgaagg

SEQ ID NO: 2991820 - RNA, 19 nt, Artificial Sequence
  Description of Artificial Sequence: Synthetic oligonucleotide
aacagccaacuugcucugg

SEQ ID NO: 2991821 - RNA, 19 nt, Artificial Sequence
  Description of Artificial Sequence: Synthetic oligonucleotide
uggugucauacuucuucgu

SEQ ID NO: 2991822 - RNA, 19 nt, Artificial Sequence
  Description of Artificial Sequence: Synthetic oligonucleotide
aaguggcccaggugguuga

SEQ ID NO: 2991823 - RNA, 19 nt, Artificial Sequence
  Description of Artificial Sequence: Synthetic oligonucleotide
gugaagaggacaacagcca

SEQ ID NO: 2991824 - RNA, 19 nt, Artificial Sequence
  Description of Artificial Sequence: Synthetic oligonucleotide
agcuuguccaacagcaagu

SEQ ID NO: 2991825 - RNA, 19 nt, Artificial Sequence
  Description of Artificial Sequence: Synthetic oligonucleotide
ucuaugugcccagcaacau

SEQ ID NO: 2991826 - RNA, 19 nt, Artificial Sequence
  Description of Artificial Sequence: Synthetic oligonucleotide
gugucauacuucuucgucu

SEQ ID NO: 2991827 - RNA, 19 nt, Artificial Sequence
  Description of Artificial Sequence: Synthetic oligonucleotide
guucuaguauagccuggac

SEQ ID NO: 2991828 - RNA, 19 nt, Artificial Sequence
  Description of Artificial Sequence: Synthetic oligonucleotide
cauacuucuucgucuccca

SEQ ID NO: 2991829 - RNA, 19 nt, Artificial Sequence
  Description of Artificial Sequence: Synthetic oligonucleotide
acagguugaugaugcgcga

SEQ ID NO: 2991830 - RNA, 19 nt, Artificial Sequence
  Description of Artificial Sequence: Synthetic oligonucleotide
cuaguauagccuggacuac

SEQ ID NO: 2991831 - RNA, 19 nt, Artificial Sequence
  Description of Artificial Sequence: Synthetic oligonucleotide
ggcggcgucagcuccuugg

SEQ ID NO: 2991832 - RNA, 19 nt, Artificial Sequence
  Description of Artificial Sequence: Synthetic oligonucleotide
ugggcaccucaucacggcu

SEQ ID NO: 2991833 - RNA, 19 nt, Artificial Sequence
  Description of Artificial Sequence: Synthetic oligonucleotide
gucuaugugcccagcaaca

SEQ ID NO: 2991834 - RNA, 19 nt, Artificial Sequence
  Description of Artificial Sequence: Synthetic oligonucleotide
ccaacagcaaguuugucaa

SEQ ID NO: 2991835 - RNA, 19 nt, Artificial Sequence
  Description of Artificial Sequence: Synthetic oligonucleotide
agccggcggcgucagcucc

SEQ ID NO: 2991836 - RNA, 19 nt, Artificial Sequence
  Description of Artificial Sequence: Synthetic oligonucleotide
cagaaaaggcagcguugag

SEQ ID NO: 2991837 - RNA, 19 nt, Artificial Sequence
  Description of Artificial Sequence: Synthetic oligonucleotide
uugagccuugcagccggcg

SEQ ID NO: 2991838 - RNA, 19 nt, Artificial Sequence
  Description of Artificial Sequence: Synthetic oligonucleotide
ucaagucaucaaagucuau

SEQ ID NO: 2991839 - RNA, 19 nt, Artificial Sequence
  Description of Artificial Sequence: Synthetic oligonucleotide
ucuucgucucccaguucaa

SEQ ID NO: 2991840 - RNA, 19 nt, Artificial Sequence
  Description of Artificial Sequence: Synthetic oligonucleotide
caacagaaaguggcccagg

SEQ ID NO: 2991841 - RNA, 19 nt, Artificial Sequence
  Description of Artificial Sequence: Synthetic oligonucleotide
ggcgucagcuccuugguga

SEQ ID NO: 2991842 - RNA, 19 nt, Artificial Sequence
  Description of Artificial Sequence: Synthetic oligonucleotide
caacagccaacuugcucug

SEQ ID NO: 2991843 - RNA, 19 nt, Artificial Sequence
  Description of Artificial Sequence: Synthetic oligonucleotide
aagccagaaaaggcagcgu

SEQ ID NO: 2991844 - RNA, 19 nt, Artificial Sequence
  Description of Artificial Sequence: Synthetic oligonucleotide
cagugugggcaccucauca

SEQ ID NO: 2991845 - RNA, 19 nt, Artificial Sequence
  Description of Artificial Sequence: Synthetic oligonucleotide
guauagccuggacuacaac

SEQ ID NO: 2991846 - RNA, 19 nt, Artificial Sequence
  Description of Artificial Sequence: Synthetic oligonucleotide
auccucagugguccagugu

SEQ ID NO: 2991847 - RNA, 19 nt, Artificial Sequence
  Description of Artificial Sequence: Synthetic oligonucleotide
caaagucuaugugcccagc

SEQ ID NO: 2991848 - RNA, 19 nt, Artificial Sequence
  Description of Artificial Sequence: Synthetic oligonucleotide
aguauagccuggacuacaa

SEQ ID NO: 2991849 - RNA, 19 nt, Artificial Sequence
  Description of Artificial Sequence: Synthetic oligonucleotide
gugggcaccucaucacggc

SEQ ID NO: 2991850 - RNA, 19 nt, Artificial Sequence
  Description of Artificial Sequence: Synthetic oligonucleotide
cauccucagugguccagug

SEQ ID NO: 2991851 - RNA, 19 nt, Artificial Sequence
  Description of Artificial Sequence: Synthetic oligonucleotide
gcaacaugagccagggaug

SEQ ID NO: 2991852 - RNA, 19 nt, Artificial Sequence
  Description of Artificial Sequence: Synthetic oligonucleotide
cuggcaguaggccgccuug

SEQ ID NO: 2991853 - RNA, 19 nt, Artificial Sequence
  Description of Artificial Sequence: Synthetic oligonucleotide
agaaaguggcccagguggu

SEQ ID NO: 2991854 - RNA, 19 nt, Artificial Sequence
  Description of Artificial Sequence: Synthetic oligonucleotide
cuucgucucccaguucaag

SEQ ID NO: 2991855 - RNA, 19 nt, Artificial Sequence
  Description of Artificial Sequence: Synthetic oligonucleotide
caacaugagccagggauga

SEQ ID NO: 2991856 - RNA, 19 nt, Artificial Sequence
  Description of Artificial Sequence: Synthetic oligonucleotide
caacagcaaguuugucaac

SEQ ID NO: 2991857 - RNA, 19 nt, Artificial Sequence
  Description of Artificial Sequence: Synthetic oligonucleotide
caguaggccgccuuggugu

SEQ ID NO: 2991858 - RNA, 19 nt, Artificial Sequence
  Description of Artificial Sequence: Synthetic oligonucleotide
ucucccaguucaagucauc

SEQ ID NO: 2991859 - RNA, 19 nt, Artificial Sequence
  Description of Artificial Sequence: Synthetic oligonucleotide
cagugguccagugugggca

SEQ ID NO: 2991860 - RNA, 19 nt, Artificial Sequence
  Description of Artificial Sequence: Synthetic oligonucleotide
ggcggaggccuucagcuug

SEQ ID NO: 2991861 - RNA, 19 nt, Artificial Sequence
  Description of Artificial Sequence: Synthetic oligonucleotide
aaggggcggaggccuucag

SEQ ID NO: 2991862 - RNA, 19 nt, Artificial Sequence
  Description of Artificial Sequence: Synthetic oligonucleotide
ugaugcgcgaaggggcgga

SEQ ID NO: 2991863 - RNA, 19 nt, Artificial Sequence
  Description of Artificial Sequence: Synthetic oligonucleotide
ggaugacagguugaugaug

SEQ ID NO: 2991864 - RNA, 19 nt, Artificial Sequence
  Description of Artificial Sequence: Synthetic oligonucleotide
cagcaaguuugucaacaga

SEQ ID NO: 2991865 - RNA, 19 nt, Artificial Sequence
  Description of Artificial Sequence: Synthetic oligonucleotide
aggccuucagcuuguccaa

SEQ ID NO: 2991866 - RNA, 19 nt, Artificial Sequence
  Description of Artificial Sequence: Synthetic oligonucleotide
ccagcaacaugagccaggg

SEQ ID NO: 2991867 - RNA, 19 nt, Artificial Sequence
  Description of Artificial Sequence: Synthetic oligonucleotide
cccagcaacaugagccagg

SEQ ID NO: 2991868 - RNA, 19 nt, Artificial Sequence
  Description of Artificial Sequence: Synthetic oligonucleotide
ucaucacggcugcauuguu

SEQ ID NO: 2991869 - RNA, 19 nt, Artificial Sequence
  Description of Artificial Sequence: Synthetic oligonucleotide
ggcaccucaucacggcugc

SEQ ID NO: 2991870 - RNA, 19 nt, Artificial Sequence
  Description of Artificial Sequence: Synthetic oligonucleotide
agccuugcagccggcggcg

SEQ ID NO: 2991871 - RNA, 19 nt, Artificial Sequence
  Description of Artificial Sequence: Synthetic oligonucleotide
accucaucacggcugcauu

SEQ ID NO: 2991872 - RNA, 19 nt, Artificial Sequence
  Description of Artificial Sequence: Synthetic oligonucleotide
augaugcgcgaaggggcgg

SEQ ID NO: 2991873 - RNA, 19 nt, Artificial Sequence
  Description of Artificial Sequence: Synthetic oligonucleotide
aaggcagcguugagccuug

SEQ ID NO: 2991874 - RNA, 19 nt, Artificial Sequence
  Description of Artificial Sequence: Synthetic oligonucleotide
cuccuuggugaagaggaca

SEQ ID NO: 2991875 - RNA, 19 nt, Artificial Sequence
  Description of Artificial Sequence: Synthetic oligonucleotide
ugacaccaaacugcaucuc

SEQ ID NO: 2991876 - RNA, 19 nt, Artificial Sequence
  Description of Artificial Sequence: Synthetic oligonucleotide
gcaguaggccgccuuggug

SEQ ID NO: 2991877 - RNA, 19 nt, Artificial Sequence
  Description of Artificial Sequence: Synthetic oligonucleotide
gccagaaaaggcagcguug

SEQ ID NO: 2991878 - RNA, 19 nt, Artificial Sequence
  Description of Artificial Sequence: Synthetic oligonucleotide
ccucaucacggcugcauug

SEQ ID NO: 2991879 - RNA, 19 nt, Artificial Sequence
  Description of Artificial Sequence: Synthetic oligonucleotide
cccaguucaagucaucaaa

SEQ ID NO: 2991880 - RNA, 19 nt, Artificial Sequence
  Description of Artificial Sequence: Synthetic oligonucleotide
cacacacaccucuguaaaa

SEQ ID NO: 2991881 - RNA, 19 nt, Artificial Sequence
  Description of Artificial Sequence: Synthetic oligonucleotide
cuacaacauacauguacau

SEQ ID NO: 2991882 - RNA, 19 nt, Artificial Sequence
  Description of Artificial Sequence: Synthetic oligonucleotide
cguugagccuugcagccgg

SEQ ID NO: 2991883 - RNA, 19 nt, Artificial Sequence
  Description of Artificial Sequence: Synthetic oligonucleotide
ccucagugguccagugugg

SEQ ID NO: 2991884 - RNA, 19 nt, Artificial Sequence
  Description of Artificial Sequence: Synthetic oligonucleotide
caacuugcucuggcaguag

SEQ ID NO: 2991885 - RNA, 19 nt, Artificial Sequence
  Description of Artificial Sequence: Synthetic oligonucleotide
ugguccagugugggcaccu

SEQ ID NO: 2991886 - RNA, 19 nt, Artificial Sequence
  Description of Artificial Sequence: Synthetic oligonucleotide
gaugcgcgaaggggcggag

SEQ ID NO: 2991887 - RNA, 19 nt, Artificial Sequence
  Description of Artificial Sequence: Synthetic oligonucleotide
guccagugugggcaccuca

SEQ ID NO: 2991888 - RNA, 19 nt, Artificial Sequence
  Description of Artificial Sequence: Synthetic oligonucleotide
ggaggccuucagcuugucc

SEQ ID NO: 2991889 - RNA, 19 nt, Artificial Sequence
  Description of Artificial Sequence: Synthetic oligonucleotide
cagccaacuugcucuggca

SEQ ID NO: 2991890 - RNA, 19 nt, Artificial Sequence
  Description of Artificial Sequence: Synthetic oligonucleotide
ggcugcauuguugaccaga

SEQ ID NO: 2991891 - RNA, 19 nt, Artificial Sequence
  Description of Artificial Sequence: Synthetic oligonucleotide
cagggaugacagguugaug

SEQ ID NO: 2991892 - RNA, 19 nt, Artificial Sequence
  Description of Artificial Sequence: Synthetic oligonucleotide
caaagccauccucaguggu

SEQ ID NO: 2991893 - RNA, 19 nt, Artificial Sequence
  Description of Artificial Sequence: Synthetic oligonucleotide
augcgcgaaggggcggagg

SEQ ID NO: 2991894 - RNA, 19 nt, Artificial Sequence
  Description of Artificial Sequence: Synthetic oligonucleotide
cuugcagccggcggcguca

SEQ ID NO: 2991895 - RNA, 19 nt, Artificial Sequence
  Description of Artificial Sequence: Synthetic oligonucleotide
ccagaaaaggcagcguuga

SEQ ID NO: 2991896 - RNA, 19 nt, Artificial Sequence
  Description of Artificial Sequence: Synthetic oligonucleotide
augugcccagcaacaugag

SEQ ID NO: 2991897 - RNA, 19 nt, Artificial Sequence
  Description of Artificial Sequence: Synthetic oligonucleotide
gcccaggugguugacacca

SEQ ID NO: 2991898 - RNA, 19 nt, Artificial Sequence
  Description of Artificial Sequence: Synthetic oligonucleotide
gccuuggugucauacuucu

SEQ ID NO: 2991899 - RNA, 19 nt, Artificial Sequence
  Description of Artificial Sequence: Synthetic oligonucleotide
gaaggggcggaggccuuca

SEQ ID NO: 2991900 - RNA, 19 nt, Artificial Sequence
  Description of Artificial Sequence: Synthetic oligonucleotide
cucaucacggcugcauugu

SEQ ID NO: 2991901 - RNA, 19 nt, Artificial Sequence
  Description of Artificial Sequence: Synthetic oligonucleotide
agccauccucaguggucca

SEQ ID NO: 2991902 - RNA, 19 nt, Artificial Sequence
  Description of Artificial Sequence: Synthetic oligonucleotide
gggcaccucaucacggcug

SEQ ID NO: 2991903 - RNA, 19 nt, Artificial Sequence
  Description of Artificial Sequence: Synthetic oligonucleotide
uugcagccggcggcgucag

SEQ ID NO: 2991904 - RNA, 19 nt, Artificial Sequence
  Description of Artificial Sequence: Synthetic oligonucleotide
cagguugaugaugcgcgaa

SEQ ID NO: 2991905 - RNA, 19 nt, Artificial Sequence
  Description of Artificial Sequence: Synthetic oligonucleotide
gcguugagccuugcagccg

SEQ ID NO: 2991906 - RNA, 19 nt, Artificial Sequence
  Description of Artificial Sequence: Synthetic oligonucleotide
guugagccuugcagccggc

SEQ ID NO: 2991907 - RNA, 19 nt, Artificial Sequence
  Description of Artificial Sequence: Synthetic oligonucleotide
guccaacagcaaguuuguc

SEQ ID NO: 2991908 - RNA, 19 nt, Artificial Sequence
  Description of Artificial Sequence: Synthetic oligonucleotide
ggcccaggugguugacacc

SEQ ID NO: 2991909 - RNA, 19 nt, Artificial Sequence
  Description of Artificial Sequence: Synthetic oligonucleotide
gccaacuugcucuggcagu

SEQ ID NO: 2991910 - RNA, 19 nt, Artificial Sequence
  Description of Artificial Sequence: Synthetic oligonucleotide
gccauccucagugguccag

SEQ ID NO: 2991911 - RNA, 19 nt, Artificial Sequence
  Description of Artificial Sequence: Synthetic oligonucleotide
gggaugacagguugaugau

SEQ ID NO: 2991912 - RNA, 19 nt, Artificial Sequence
  Description of Artificial Sequence: Synthetic oligonucleotide
cagccggcggcgucagcuc

SEQ ID NO: 2991913 - RNA, 19 nt, Artificial Sequence
  Description of Artificial Sequence: Synthetic oligonucleotide
ggcagcguugagccuugca

SEQ ID NO: 2991914 - RNA, 19 nt, Artificial Sequence
  Description of Artificial Sequence: Synthetic oligonucleotide
cuuguccaacagcaaguuu

SEQ ID NO: 2991915 - RNA, 19 nt, Artificial Sequence
  Description of Artificial Sequence: Synthetic oligonucleotide
aggcagcguugagccuugc

SEQ ID NO: 2991916 - RNA, 19 nt, Artificial Sequence
  Description of Artificial Sequence: Synthetic oligonucleotide
gaaaguggcccaggugguu

SEQ ID NO: 2991917 - RNA, 19 nt, Artificial Sequence
  Description of Artificial Sequence: Synthetic oligonucleotide
ugcagccggcggcgucagc

SEQ ID NO: 2991918 - RNA, 19 nt, Artificial Sequence
  Description of Artificial Sequence: Synthetic oligonucleotide
ccagugugggcaccucauc

SEQ ID NO: 2991919 - RNA, 19 nt, Artificial Sequence
  Description of Artificial Sequence: Synthetic oligonucleotide
ggccgccuuggugucauac

SEQ ID NO: 2991920 - RNA, 19 nt, Artificial Sequence
  Description of Artificial Sequence: Synthetic oligonucleotide
ccuuggugaagaggacaac

SEQ ID NO: 2991921 - RNA, 19 nt, Artificial Sequence
  Description of Artificial Sequence: Synthetic oligonucleotide
guggcccaggugguugaca

SEQ ID NO: 2991922 - RNA, 19 nt, Artificial Sequence
  Description of Artificial Sequence: Synthetic oligonucleotide
cgccuuggugucauacuuc

SEQ ID NO: 2991923 - RNA, 19 nt, Artificial Sequence
  Description of Artificial Sequence: Synthetic oligonucleotide
gucucccaguucaagucau

SEQ ID NO: 2991924 - RNA, 19 nt, Artificial Sequence
  Description of Artificial Sequence: Synthetic oligonucleotide
gccagggaugacagguuga

SEQ ID NO: 2991925 - RNA, 19 nt, Artificial Sequence
  Description of Artificial Sequence: Synthetic oligonucleotide
cgucucccaguucaaguca

SEQ ID NO: 2991926 - RNA, 19 nt, Artificial Sequence
  Description of Artificial Sequence: Synthetic oligonucleotide
ccaacuugcucuggcagua

SEQ ID NO: 2991927 - RNA, 19 nt, Artificial Sequence
  Description of Artificial Sequence: Synthetic oligonucleotide
gcgucagcuccuuggugaa

SEQ ID NO: 2991928 - RNA, 19 nt, Artificial Sequence
  Description of Artificial Sequence: Synthetic oligonucleotide
guaggccgccuugguguca

SEQ ID NO: 2991929 - RNA, 19 nt, Artificial Sequence
  Description of Artificial Sequence: Synthetic oligonucleotide
gcucuggcaguaggccgcc

SEQ ID NO: 2991930 - RNA, 19 nt, Artificial Sequence
  Description of Artificial Sequence: Synthetic oligonucleotide
ggcaguaggccgccuuggu

SEQ ID NO: 2991931 - RNA, 19 nt, Artificial Sequence
  Description of Artificial Sequence: Synthetic oligonucleotide
ccaggugguugacaccaaa

SEQ ID NO: 2991932 - RNA, 19 nt, Artificial Sequence
  Description of Artificial Sequence: Synthetic oligonucleotide
gcuuguccaacagcaaguu

SEQ ID NO: 2991933 - RNA, 19 nt, Artificial Sequence
  Description of Artificial Sequence: Synthetic oligonucleotide
gagccagggaugacagguu

SEQ ID NO: 2991934 - RNA, 19 nt, Artificial Sequence
  Description of Artificial Sequence: Synthetic oligonucleotide
gcagccggcggcgucagcu

SEQ ID NO: 2991935 - RNA, 19 nt, Artificial Sequence
  Description of Artificial Sequence: Synthetic oligonucleotide
gccgccuuggugucauacu

SEQ ID NO: 2991936 - RNA, 19 nt, Artificial Sequence
  Description of Artificial Sequence: Synthetic oligonucleotide
gcgcgaaggggcggaggcc

SEQ ID NO: 2991937 - RNA, 19 nt, Artificial Sequence
  Description of Artificial Sequence: Synthetic oligonucleotide
gguccagugugggcaccuc

SEQ ID NO: 2991938 - RNA, 19 nt, Artificial Sequence
  Description of Artificial Sequence: Synthetic oligonucleotide
ggacuacaacauacaugua

SEQ ID NO: 2991939 - RNA, 19 nt, Artificial Sequence
  Description of Artificial Sequence: Synthetic oligonucleotide
gcggcgucagcuccuuggu

SEQ ID NO: 2991940 - RNA, 19 nt, Artificial Sequence
  Description of Artificial Sequence: Synthetic oligonucleotide
ggacaacagccaacuugcu

SEQ ID NO: 2991941 - RNA, 19 nt, Artificial Sequence
  Description of Artificial Sequence: Synthetic oligonucleotide
gguugacaccaaacugcau

SEQ ID NO: 2991942 - RNA, 19 nt, Artificial Sequence
  Description of Artificial Sequence: Synthetic oligonucleotide
ccgccuuggugucauacuu

SEQ ID NO: 2991943 - RNA, 19 nt, Artificial Sequence
  Description of Artificial Sequence: Synthetic oligonucleotide
cggcgucagcuccuuggug

SEQ ID NO: 2991944 - RNA, 19 nt, Artificial Sequence
  Description of Artificial Sequence: Synthetic oligonucleotide
ccauccucagugguccagu

SEQ ID NO: 2991945 - RNA, 19 nt, Artificial Sequence
  Description of Artificial Sequence: Synthetic oligonucleotide
aggccgccuuggugucaua

SEQ ID NO: 2991946 - RNA, 19 nt, Artificial Sequence
  Description of Artificial Sequence: Synthetic oligonucleotide
cccaggugguugacaccaa

SEQ ID NO: 2991947 - RNA, 19 nt, Artificial Sequence
  Description of Artificial Sequence: Synthetic oligonucleotide
cgaaggggcggaggccuuc

SEQ ID NO: 2991948 - RNA, 19 nt, Artificial Sequence
  Description of Artificial Sequence: Synthetic oligonucleotide
gcaccucaucacggcugca

SEQ ID NO: 2991949 - RNA, 19 nt, Artificial Sequence
  Description of Artificial Sequence: Synthetic oligonucleotide
gggcggaggccuucagcuu

SEQ ID NO: 2991950 - RNA, 19 nt, Artificial Sequence
  Description of Artificial Sequence: Synthetic oligonucleotide
gcggaggccuucagcuugu

SEQ ID NO: 2991951 - RNA, 19 nt, Artificial Sequence
  Description of Artificial Sequence: Synthetic oligonucleotide
cgcgaaggggcggaggccu

SEQ ID NO: 2991952 - RNA, 19 nt, Artificial Sequence
  Description of Artificial Sequence: Synthetic oligonucleotide
gccggcggcgucagcuccu

SEQ ID NO: 2991953 - RNA, 19 nt, Artificial Sequence
  Description of Artificial Sequence: Synthetic oligonucleotide
cggaggccuucagcuuguc

SEQ ID NO: 2991954 - RNA, 19 nt, Artificial Sequence
  Description of Artificial Sequence: Synthetic oligonucleotide
gccuugcagccggcggcgu

SEQ ID NO: 2991955 - RNA, 19 nt, Artificial Sequence
  Description of Artificial Sequence: Synthetic oligonucleotide
cggcggcgucagcuccuug

SEQ ID NO: 2991956 - RNA, 19 nt, Artificial Sequence
  Description of Artificial Sequence: Synthetic oligonucleotide
gcgaaggggcggaggccuu

SEQ ID NO: 2991957 - RNA, 19 nt, Artificial Sequence
  Description of Artificial Sequence: Synthetic oligonucleotide
ccggcggcgucagcuccuu

SEQ ID NO: 2991958 - RNA, 19 nt, Artificial Sequence
  Description of Artificial Sequence: Synthetic oligonucleotide
aaagauacaaaauaguaga

SEQ ID NO: 2991959 - RNA, 19 nt, Artificial Sequence
  Description of Artificial Sequence: Synthetic oligonucleotide
cauauuuuaauuaaagacc

SEQ ID NO: 2991960 - RNA, 19 nt, Artificial Sequence
  Description of Artificial Sequence: Synthetic oligonucleotide
uuaauuaaagaccaauuag

SEQ ID NO: 2991961 - RNA, 19 nt, Artificial Sequence
  Description of Artificial Sequence: Synthetic oligonucleotide
aguuauuuuacuuauagga

SEQ ID NO: 2991962 - RNA, 19 nt, Artificial Sequence
  Description of Artificial Sequence: Synthetic oligonucleotide
uaauagagaaaacagacca

SEQ ID NO: 2991963 - RNA, 19 nt, Artificial Sequence
  Description of Artificial Sequence: Synthetic oligonucleotide
uaaagauacaaaauaguag

SEQ ID NO: 2991964 - RNA, 19 nt, Artificial Sequence
  Description of Artificial Sequence: Synthetic oligonucleotide
acuuauaggagcuuuaaag

SEQ ID NO: 2991965 - RNA, 19 nt, Artificial Sequence
  Description of Artificial Sequence: Synthetic oligonucleotide
uuaaagaccaauuaguuau

SEQ ID NO: 2991966 - RNA, 19 nt, Artificial Sequence
  Description of Artificial Sequence: Synthetic oligonucleotide
agagaugacaguuaguauc

SEQ ID NO: 2991967 - RNA, 19 nt, Artificial Sequence
  Description of Artificial Sequence: Synthetic oligonucleotide
uaauuaaagaccaauuagu

SEQ ID NO: 2991968 - RNA, 19 nt, Artificial Sequence
  Description of Artificial Sequence: Synthetic oligonucleotide
uuauuuuacuuauaggagc

SEQ ID NO: 2991969 - RNA, 19 nt, Artificial Sequence
  Description of Artificial Sequence: Synthetic oligonucleotide
uuaaagauacaaaauagua

SEQ ID NO: 2991970 - RNA, 19 nt, Artificial Sequence
  Description of Artificial Sequence: Synthetic oligonucleotide
aacuauucacaugaugucc

SEQ ID NO: 2991971 - RNA, 19 nt, Artificial Sequence
  Description of Artificial Sequence: Synthetic oligonucleotide
uuuaauuaaagaccaauua

SEQ ID NO: 2991972 - RNA, 19 nt, Artificial Sequence
  Description of Artificial Sequence: Synthetic oligonucleotide
aaguuaaagauacaaaaua

SEQ ID NO: 2991973 - RNA, 19 nt, Artificial Sequence
  Description of Artificial Sequence: Synthetic oligonucleotide
uacaaaauaguagaguucc

SEQ ID NO: 2991974 - RNA, 19 nt, Artificial Sequence
  Description of Artificial Sequence: Synthetic oligonucleotide
aaugucuuccuuaauagag

SEQ ID NO: 2991975 - RNA, 19 nt, Artificial Sequence
  Description of Artificial Sequence: Synthetic oligonucleotide
aauuaguuauuuuacuuau

SEQ ID NO: 2991976 - RNA, 19 nt, Artificial Sequence
  Description of Artificial Sequence: Synthetic oligonucleotide
uuaauagagaaaacagacc

SEQ ID NO: 2991977 - RNA, 19 nt, Artificial Sequence
  Description of Artificial Sequence: Synthetic oligonucleotide
aaaugcauauuuuaauuaa

SEQ ID NO: 2991978 - RNA, 19 nt, Artificial Sequence
  Description of Artificial Sequence: Synthetic oligonucleotide
aaaauaguagaguuccagu

SEQ ID NO: 2991979 - RNA, 19 nt, Artificial Sequence
  Description of Artificial Sequence: Synthetic oligonucleotide
uauuuuacuuauaggagcu

SEQ ID NO: 2991980 - RNA, 19 nt, Artificial Sequence
  Description of Artificial Sequence: Synthetic oligonucleotide
guggagacuacacaaaccg

SEQ ID NO: 2991981 - RNA, 19 nt, Artificial Sequence
  Description of Artificial Sequence: Synthetic oligonucleotide
aguuaaagauacaaaauag

SEQ ID NO: 2991982 - RNA, 19 nt, Artificial Sequence
  Description of Artificial Sequence: Synthetic oligonucleotide
gcauauuuuaauuaaagac

SEQ ID NO: 2991983 - RNA, 19 nt, Artificial Sequence
  Description of Artificial Sequence: Synthetic oligonucleotide
acaaugucuuccuuaauag

SEQ ID NO: 2991984 - RNA, 19 nt, Artificial Sequence
  Description of Artificial Sequence: Synthetic oligonucleotide
aguuaguaucaccugugcc

SEQ ID NO: 2991985 - RNA, 19 nt, Artificial Sequence
  Description of Artificial Sequence: Synthetic oligonucleotide
aaauaguagaguuccaguu

SEQ ID NO: 2991986 - RNA, 19 nt, Artificial Sequence
  Description of Artificial Sequence: Synthetic oligonucleotide
gucacaacuauucacauga

SEQ ID NO: 2991987 - RNA, 19 nt, Artificial Sequence
  Description of Artificial Sequence: Synthetic oligonucleotide
ugcauauuuuaauuaaaga

SEQ ID NO: 2991988 - RNA, 19 nt, Artificial Sequence
  Description of Artificial Sequence: Synthetic oligonucleotide
caugauguccugcugaugc

SEQ ID NO: 2991989 - RNA, 19 nt, Artificial Sequence
  Description of Artificial Sequence: Synthetic oligonucleotide
auuaccaguguucagggca

SEQ ID NO: 2991990 - RNA, 19 nt, Artificial Sequence
  Description of Artificial Sequence: Synthetic oligonucleotide
guuauuuuacuuauaggag

SEQ ID NO: 2991991 - RNA, 19 nt, Artificial Sequence
  Description of Artificial Sequence: Synthetic oligonucleotide
caaggagagaccuuggccc

SEQ ID NO: 2991992 - RNA, 19 nt, Artificial Sequence
  Description of Artificial Sequence: Synthetic oligonucleotide
acaacuauucacaugaugu

SEQ ID NO: 2991993 - RNA, 19 nt, Artificial Sequence
  Description of Artificial Sequence: Synthetic oligonucleotide
ggcaacagcaccuaugugg

SEQ ID NO: 2991994 - RNA, 19 nt, Artificial Sequence
  Description of Artificial Sequence: Synthetic oligonucleotide
uacacaaaccgcuucacac

SEQ ID NO: 2991995 - RNA, 19 nt, Artificial Sequence
  Description of Artificial Sequence: Synthetic oligonucleotide
uuccaguuugguaagguca

SEQ ID NO: 2991996 - RNA, 19 nt, Artificial Sequence
  Description of Artificial Sequence: Synthetic oligonucleotide
aauaguagaguuccaguuu

SEQ ID NO: 2991997 - RNA, 19 nt, Artificial Sequence
  Description of Artificial Sequence: Synthetic oligonucleotide
auaguagaguuccaguuug

SEQ ID NO: 2991998 - RNA, 19 nt, Artificial Sequence
  Description of Artificial Sequence: Synthetic oligonucleotide
gaaaacagaccagagauga

SEQ ID NO: 2991999 - RNA, 19 nt, Artificial Sequence
  Description of Artificial Sequence: Synthetic oligonucleotide
ugugccagggcacaaggag

SEQ ID NO: 2992000 - RNA, 19 nt, Artificial Sequence
  Description of Artificial Sequence: Synthetic oligonucleotide
guuaguaucaccugugcca

SEQ ID NO: 2992001 - RNA, 19 nt, Artificial Sequence
  Description of Artificial Sequence: Synthetic oligonucleotide
cucacacgcacauacaggc

SEQ ID NO: 2992002 - RNA, 19 nt, Artificial Sequence
  Description of Artificial Sequence: Synthetic oligonucleotide
cuuacagccauggagacac

SEQ ID NO: 2992003 - RNA, 19 nt, Artificial Sequence
  Description of Artificial Sequence: Synthetic oligonucleotide
uuccuuaauagagaaaaca

SEQ ID NO: 2992004 - RNA, 19 nt, Artificial Sequence
  Description of Artificial Sequence: Synthetic oligonucleotide
gagaccuuggcccagggug

SEQ ID NO: 2992005 - RNA, 19 nt, Artificial Sequence
  Description of Artificial Sequence: Synthetic oligonucleotide
uauaggagcuuuaaaguua

SEQ ID NO: 2992006 - RNA, 19 nt, Artificial Sequence
  Description of Artificial Sequence: Synthetic oligonucleotide
auguggagacuacacaaac

SEQ ID NO: 2992007 - RNA, 19 nt, Artificial Sequence
  Description of Artificial Sequence: Synthetic oligonucleotide
aaacagaccagagaugaca

SEQ ID NO: 2992008 - RNA, 19 nt, Artificial Sequence
  Description of Artificial Sequence: Synthetic oligonucleotide
aauagagaaaacagaccag

SEQ ID NO: 2992009 - RNA, 19 nt, Artificial Sequence
  Description of Artificial Sequence: Synthetic oligonucleotide
gauacaaaauaguagaguu

SEQ ID NO: 2992010 - RNA, 19 nt, Artificial Sequence
  Description of Artificial Sequence: Synthetic oligonucleotide
gagcaaggcagccagugcg

SEQ ID NO: 2992011 - RNA, 19 nt, Artificial Sequence
  Description of Artificial Sequence: Synthetic oligonucleotide
ucucacacgcacauacagg

SEQ ID NO: 2992012 - RNA, 19 nt, Artificial Sequence
  Description of Artificial Sequence: Synthetic oligonucleotide
aagauacaaaauaguagag

SEQ ID NO: 2992013 - RNA, 19 nt, Artificial Sequence
  Description of Artificial Sequence: Synthetic oligonucleotide
gagaaaacagaccagagau

SEQ ID NO: 2992014 - RNA, 19 nt, Artificial Sequence
  Description of Artificial Sequence: Synthetic oligonucleotide
acacaaaccgcuucacacg

SEQ ID NO: 2992015 - RNA, 19 nt, Artificial Sequence
  Description of Artificial Sequence: Synthetic oligonucleotide
uucacacggucuuacagcc

SEQ ID NO: 2992016 - RNA, 19 nt, Artificial Sequence
  Description of Artificial Sequence: Synthetic oligonucleotide
uaaggucacaacuauucac

SEQ ID NO: 2992017 - RNA, 19 nt, Artificial Sequence
  Description of Artificial Sequence: Synthetic oligonucleotide
agaccaauuaguuauuuua

SEQ ID NO: 2992018 - RNA, 19 nt, Artificial Sequence
  Description of Artificial Sequence: Synthetic oligonucleotide
uguggagacuacacaaacc

SEQ ID NO: 2992019 - RNA, 19 nt, Artificial Sequence
  Description of Artificial Sequence: Synthetic oligonucleotide
uuauaggagcuuuaaaguu

SEQ ID NO: 2992020 - RNA, 19 nt, Artificial Sequence
  Description of Artificial Sequence: Synthetic oligonucleotide
gaugacaguuaguaucacc

SEQ ID NO: 2992021 - RNA, 19 nt, Artificial Sequence
  Description of Artificial Sequence: Synthetic oligonucleotide
agagaaaacagaccagaga

SEQ ID NO: 2992022 - RNA, 19 nt, Artificial Sequence
  Description of Artificial Sequence: Synthetic oligonucleotide
auuaaagaccaauuaguua

SEQ ID NO: 2992023 - RNA, 19 nt, Artificial Sequence
  Description of Artificial Sequence: Synthetic oligonucleotide
auuuuaauuaaagaccaau

SEQ ID NO: 2992024 - RNA, 19 nt, Artificial Sequence
  Description of Artificial Sequence: Synthetic oligonucleotide
ucacaugauguccugcuga

SEQ ID NO: 2992025 - RNA, 19 nt, Artificial Sequence
  Description of Artificial Sequence: Synthetic oligonucleotide
ugaggacacucucacacgc

SEQ ID NO: 2992026 - RNA, 19 nt, Artificial Sequence
  Description of Artificial Sequence: Synthetic oligonucleotide
uuaguaucaccugugccag

SEQ ID NO: 2992027 - RNA, 19 nt, Artificial Sequence
  Description of Artificial Sequence: Synthetic oligonucleotide
caaaauaguagaguuccag

SEQ ID NO: 2992028 - RNA, 19 nt, Artificial Sequence
  Description of Artificial Sequence: Synthetic oligonucleotide
ggagcuuuaaaguuaaaga

SEQ ID NO: 2992029 - RNA, 19 nt, Artificial Sequence
  Description of Artificial Sequence: Synthetic oligonucleotide
aaggucacaacuauucaca

SEQ ID NO: 2992030 - RNA, 19 nt, Artificial Sequence
  Description of Artificial Sequence: Synthetic oligonucleotide
cuucacacggucuuacagc

SEQ ID NO: 2992031 - RNA, 19 nt, Artificial Sequence
  Description of Artificial Sequence: Synthetic oligonucleotide
auagagaaaacagaccaga

SEQ ID NO: 2992032 - RNA, 19 nt, Artificial Sequence
  Description of Artificial Sequence: Synthetic oligonucleotide
cuuucugccaagcacagca

SEQ ID NO: 2992033 - RNA, 19 nt, Artificial Sequence
  Description of Artificial Sequence: Synthetic oligonucleotide
aggagcuuuaaaguuaaag

SEQ ID NO: 2992034 - RNA, 19 nt, Artificial Sequence
  Description of Artificial Sequence: Synthetic oligonucleotide
augcauauuuuaauuaaag

SEQ ID NO: 2992035 - RNA, 19 nt, Artificial Sequence
  Description of Artificial Sequence: Synthetic oligonucleotide
auacaaaauaguagaguuc

SEQ ID NO: 2992036 - RNA, 19 nt, Artificial Sequence
  Description of Artificial Sequence: Synthetic oligonucleotide
accaauuaguuauuuuacu

SEQ ID NO: 2992037 - RNA, 19 nt, Artificial Sequence
  Description of Artificial Sequence: Synthetic oligonucleotide
augacaguuaguaucaccu

SEQ ID NO: 2992038 - RNA, 19 nt, Artificial Sequence
  Description of Artificial Sequence: Synthetic oligonucleotide
aacagaccagagaugacag

SEQ ID NO: 2992039 - RNA, 19 nt, Artificial Sequence
  Description of Artificial Sequence: Synthetic oligonucleotide
gcuuuaaaguuaaagauac

SEQ ID NO: 2992040 - RNA, 19 nt, Artificial Sequence
  Description of Artificial Sequence: Synthetic oligonucleotide
agauacaaaauaguagagu

SEQ ID NO: 2992041 - RNA, 19 nt, Artificial Sequence
  Description of Artificial Sequence: Synthetic oligonucleotide
acagcaccuauguggagac

SEQ ID NO: 2992042 - RNA, 19 nt, Artificial Sequence
  Description of Artificial Sequence: Synthetic oligonucleotide
agccagugcguuuuggccg

SEQ ID NO: 2992043 - RNA, 19 nt, Artificial Sequence
  Description of Artificial Sequence: Synthetic oligonucleotide
gaccagagaugacaguuag

SEQ ID NO: 2992044 - RNA, 19 nt, Artificial Sequence
  Description of Artificial Sequence: Synthetic oligonucleotide
uuuacuuauaggagcuuua

SEQ ID NO: 2992045 - RNA, 19 nt, Artificial Sequence
  Description of Artificial Sequence: Synthetic oligonucleotide
aggacacucucacacgcac

SEQ ID NO: 2992046 - RNA, 19 nt, Artificial Sequence
  Description of Artificial Sequence: Synthetic oligonucleotide
cacaaaccgcuucacacgg

SEQ ID NO: 2992047 - RNA, 19 nt, Artificial Sequence
  Description of Artificial Sequence: Synthetic oligonucleotide
auucacaugauguccugcu

SEQ ID NO: 2992048 - RNA, 19 nt, Artificial Sequence
  Description of Artificial Sequence: Synthetic oligonucleotide
aaugcauauuuuaauuaaa

SEQ ID NO: 2992049 - RNA, 19 nt, Artificial Sequence
  Description of Artificial Sequence: Synthetic oligonucleotide
uccaguuugguaaggucac

SEQ ID NO: 2992050 - RNA, 19 nt, Artificial Sequence
  Description of Artificial Sequence: Synthetic oligonucleotide
acgccuuucugccaagcac

SEQ ID NO: 2992051 - RNA, 19 nt, Artificial Sequence
  Description of Artificial Sequence: Synthetic oligonucleotide
augauguccugcugaugcc

SEQ ID NO: 2992052 - RNA, 19 nt, Artificial Sequence
  Description of Artificial Sequence: Synthetic oligonucleotide
uauuuuaauuaaagaccaa

SEQ ID NO: 2992053 - RNA, 19 nt, Artificial Sequence
  Description of Artificial Sequence: Synthetic oligonucleotide
uauguggagacuacacaaa

SEQ ID NO: 2992054 - RNA, 19 nt, Artificial Sequence
  Description of Artificial Sequence: Synthetic oligonucleotide
gaccaauuaguuauuuuac

SEQ ID NO: 2992055 - RNA, 19 nt, Artificial Sequence
  Description of Artificial Sequence: Synthetic oligonucleotide
ugccagggcacaaggagag

SEQ ID NO: 2992056 - RNA, 19 nt, Artificial Sequence
  Description of Artificial Sequence: Synthetic oligonucleotide
aguguucagggcaaggcgg

SEQ ID NO: 2992057 - RNA, 19 nt, Artificial Sequence
  Description of Artificial Sequence: Synthetic oligonucleotide
cugaugccgagcaaggcag

SEQ ID NO: 2992058 - RNA, 19 nt, Artificial Sequence
  Description of Artificial Sequence: Synthetic oligonucleotide
uaguagaguuccaguuugg

SEQ ID NO: 2992059 - RNA, 19 nt, Artificial Sequence
  Description of Artificial Sequence: Synthetic oligonucleotide
cuuauaggagcuuuaaagu

SEQ ID NO: 2992060 - RNA, 19 nt, Artificial Sequence
  Description of Artificial Sequence: Synthetic oligonucleotide
ugcguuuuggccgugcuga

SEQ ID NO: 2992061 - RNA, 19 nt, Artificial Sequence
  Description of Artificial Sequence: Synthetic oligonucleotide
aaaacagaccagagaugac

SEQ ID NO: 2992062 - RNA, 19 nt, Artificial Sequence
  Description of Artificial Sequence: Synthetic oligonucleotide
uugguaaggucacaacuau

SEQ ID NO: 2992063 - RNA, 19 nt, Artificial Sequence
  Description of Artificial Sequence: Synthetic oligonucleotide
cacucucacacgcacauac

SEQ ID NO: 2992064 - RNA, 19 nt, Artificial Sequence
  Description of Artificial Sequence: Synthetic oligonucleotide
acauacaggcgcucuggcg

SEQ ID NO: 2992065 - RNA, 19 nt, Artificial Sequence
  Description of Artificial Sequence: Synthetic oligonucleotide
agacuacacaaaccgcuuc

SEQ ID NO: 2992066 - RNA, 19 nt, Artificial Sequence
  Description of Artificial Sequence: Synthetic oligonucleotide
cucucacacgcacauacag

SEQ ID NO: 2992067 - RNA, 19 nt, Artificial Sequence
  Description of Artificial Sequence: Synthetic oligonucleotide
ucugccaagcacagcaccu

SEQ ID NO: 2992068 - RNA, 19 nt, Artificial Sequence
  Description of Artificial Sequence: Synthetic oligonucleotide
ugauguccugcugaugccg

SEQ ID NO: 2992069 - RNA, 19 nt, Artificial Sequence
  Description of Artificial Sequence: Synthetic oligonucleotide
gacacaaugucuuccuuaa

SEQ ID NO: 2992070 - RNA, 19 nt, Artificial Sequence
  Description of Artificial Sequence: Synthetic oligonucleotide
ucacacgcacauacaggcg

SEQ ID NO: 2992071 - RNA, 19 nt, Artificial Sequence
  Description of Artificial Sequence: Synthetic oligonucleotide
uucugccaagcacagcacc

SEQ ID NO: 2992072 - RNA, 19 nt, Artificial Sequence
  Description of Artificial Sequence: Synthetic oligonucleotide
cuauguggagacuacacaa

SEQ ID NO: 2992073 - RNA, 19 nt, Artificial Sequence
  Description of Artificial Sequence: Synthetic oligonucleotide
caacuauucacaugauguc

SEQ ID NO: 2992074 - RNA, 19 nt, Artificial Sequence
  Description of Artificial Sequence: Synthetic oligonucleotide
gagaugacaguuaguauca

SEQ ID NO: 2992075 - RNA, 19 nt, Artificial Sequence
  Description of Artificial Sequence: Synthetic oligonucleotide
agaguuccaguuugguaag

SEQ ID NO: 2992076 - RNA, 19 nt, Artificial Sequence
  Description of Artificial Sequence: Synthetic oligonucleotide
uggagacuacacaaaccgc

SEQ ID NO: 2992077 - RNA, 19 nt, Artificial Sequence
  Description of Artificial Sequence: Synthetic oligonucleotide
ugacaguuaguaucaccug

SEQ ID NO: 2992078 - RNA, 19 nt, Artificial Sequence
  Description of Artificial Sequence: Synthetic oligonucleotide
gggauuaccaguguucagg

SEQ ID NO: 2992079 - RNA, 19 nt, Artificial Sequence
  Description of Artificial Sequence: Synthetic oligonucleotide
aaggagagaccuuggccca

SEQ ID NO: 2992080 - RNA, 19 nt, Artificial Sequence
  Description of Artificial Sequence: Synthetic oligonucleotide
uuuuacuuauaggagcuuu

SEQ ID NO: 2992081 - RNA, 19 nt, Artificial Sequence
  Description of Artificial Sequence: Synthetic oligonucleotide
uucacaugauguccugcug

SEQ ID NO: 2992082 - RNA, 19 nt, Artificial Sequence
  Description of Artificial Sequence: Synthetic oligonucleotide
caguguucagggcaaggcg

SEQ ID NO: 2992083 - RNA, 19 nt, Artificial Sequence
  Description of Artificial Sequence: Synthetic oligonucleotide
ggauuaccaguguucaggg

SEQ ID NO: 2992084 - RNA, 19 nt, Artificial Sequence
  Description of Artificial Sequence: Synthetic oligonucleotide
uacuuauaggagcuuuaaa

SEQ ID NO: 2992085 - RNA, 19 nt, Artificial Sequence
  Description of Artificial Sequence: Synthetic oligonucleotide
ugccaagcacagcaccugg

SEQ ID NO: 2992086 - RNA, 19 nt, Artificial Sequence
  Description of Artificial Sequence: Synthetic oligonucleotide
cacaacuauucacaugaug

SEQ ID NO: 2992087 - RNA, 19 nt, Artificial Sequence
  Description of Artificial Sequence: Synthetic oligonucleotide
ugccgagcaaggcagccag

SEQ ID NO: 2992088 - RNA, 19 nt, Artificial Sequence
  Description of Artificial Sequence: Synthetic oligonucleotide
gacuacacaaaccgcuuca

SEQ ID NO: 2992089 - RNA, 19 nt, Artificial Sequence
  Description of Artificial Sequence: Synthetic oligonucleotide
guuuuggccgugcugagga

SEQ ID NO: 2992090 - RNA, 19 nt, Artificial Sequence
  Description of Artificial Sequence: Synthetic oligonucleotide
aagcacagcaccugggauu

SEQ ID NO: 2992091 - RNA, 19 nt, Artificial Sequence
  Description of Artificial Sequence: Synthetic oligonucleotide
auggagacacaaugucuuc

SEQ ID NO: 2992092 - RNA, 19 nt, Artificial Sequence
  Description of Artificial Sequence: Synthetic oligonucleotide
cagccauggagacacaaug

SEQ ID NO: 2992093 - RNA, 19 nt, Artificial Sequence
  Description of Artificial Sequence: Synthetic oligonucleotide
cuuccuuaauagagaaaac

SEQ ID NO: 2992094 - RNA, 19 nt, Artificial Sequence
  Description of Artificial Sequence: Synthetic oligonucleotide
accuauguggagacuacac

SEQ ID NO: 2992095 - RNA, 19 nt, Artificial Sequence
  Description of Artificial Sequence: Synthetic oligonucleotide
guuaaagauacaaaauagu

SEQ ID NO: 2992096 - RNA, 19 nt, Artificial Sequence
  Description of Artificial Sequence: Synthetic oligonucleotide
gguaaggucacaacuauuc

SEQ ID NO: 2992097 - RNA, 19 nt, Artificial Sequence
  Description of Artificial Sequence: Synthetic oligonucleotide
acuauucacaugauguccu

SEQ ID NO: 2992098 - RNA, 19 nt, Artificial Sequence
  Description of Artificial Sequence: Synthetic oligonucleotide
agcaccugggauuaccagu

SEQ ID NO: 2992099 - RNA, 19 nt, Artificial Sequence
  Description of Artificial Sequence: Synthetic oligonucleotide
uggagacacaaugucuucc

SEQ ID NO: 2992100 - RNA, 19 nt, Artificial Sequence
  Description of Artificial Sequence: Synthetic oligonucleotide
acuacacaaaccgcuucac

SEQ ID NO: 2992101 - RNA, 19 nt, Artificial Sequence
  Description of Artificial Sequence: Synthetic oligonucleotide
gcugaggacacucucacac

SEQ ID NO: 2992102 - RNA, 19 nt, Artificial Sequence
  Description of Artificial Sequence: Synthetic oligonucleotide
uuacuuauaggagcuuuaa

SEQ ID NO: 2992103 - RNA, 19 nt, Artificial Sequence
  Description of Artificial Sequence: Synthetic oligonucleotide
cauacaggcgcucuggcga

SEQ ID NO: 2992104 - RNA, 19 nt, Artificial Sequence
  Description of Artificial Sequence: Synthetic oligonucleotide
uauucacaugauguccugc

SEQ ID NO: 2992105 - RNA, 19 nt, Artificial Sequence
  Description of Artificial Sequence: Synthetic oligonucleotide
cugaggacacucucacacg

SEQ ID NO: 2992106 - RNA, 19 nt, Artificial Sequence
  Description of Artificial Sequence: Synthetic oligonucleotide
uuaccaguguucagggcaa

SEQ ID NO: 2992107 - RNA, 19 nt, Artificial Sequence
  Description of Artificial Sequence: Synthetic oligonucleotide
gauuaccaguguucagggc

SEQ ID NO: 2992108 - RNA, 19 nt, Artificial Sequence
  Description of Artificial Sequence: Synthetic oligonucleotide
uggcgagacgccuuucugc

SEQ ID NO: 2992109 - RNA, 19 nt, Artificial Sequence
  Description of Artificial Sequence: Synthetic oligonucleotide
caguuaguaucaccugugc

SEQ ID NO: 2992110 - RNA, 19 nt, Artificial Sequence
  Description of Artificial Sequence: Synthetic oligonucleotide
gacaguuaguaucaccugu

SEQ ID NO: 2992111 - RNA, 19 nt, Artificial Sequence
  Description of Artificial Sequence: Synthetic oligonucleotide
guaaggucacaacuauuca

SEQ ID NO: 2992112 - RNA, 19 nt, Artificial Sequence
  Description of Artificial Sequence: Synthetic oligonucleotide
aaagaccaauuaguuauuu

SEQ ID NO: 2992113 - RNA, 19 nt, Artificial Sequence
  Description of Artificial Sequence: Synthetic oligonucleotide
agacacaaugucuuccuua

SEQ ID NO: 2992114 - RNA, 19 nt, Artificial Sequence
  Description of Artificial Sequence: Synthetic oligonucleotide
aggcgcucuggcgagacgc

SEQ ID NO: 2992115 - RNA, 19 nt, Artificial Sequence
  Description of Artificial Sequence: Synthetic oligonucleotide
uaaagaccaauuaguuauu

SEQ ID NO: 2992116 - RNA, 19 nt, Artificial Sequence
  Description of Artificial Sequence: Synthetic oligonucleotide
cacaaugucuuccuuaaua

SEQ ID NO: 2992117 - RNA, 19 nt, Artificial Sequence
  Description of Artificial Sequence: Synthetic oligonucleotide
acaguuaguaucaccugug

SEQ ID NO: 2992118 - RNA, 19 nt, Artificial Sequence
  Description of Artificial Sequence: Synthetic oligonucleotide
ucuggcgagacgccuuucu

SEQ ID NO: 2992119 - RNA, 19 nt, Artificial Sequence
  Description of Artificial Sequence: Synthetic oligonucleotide
agaaaacagaccagagaug

SEQ ID NO: 2992120 - RNA, 19 nt, Artificial Sequence
  Description of Artificial Sequence: Synthetic oligonucleotide
cagccagugcguuuuggcc

SEQ ID NO: 2992121 - RNA, 19 nt, Artificial Sequence
  Description of Artificial Sequence: Synthetic oligonucleotide
cuauucacaugauguccug

SEQ ID NO: 2992122 - RNA, 19 nt, Artificial Sequence
  Description of Artificial Sequence: Synthetic oligonucleotide
cugcugaugccgagcaagg

SEQ ID NO: 2992123 - RNA, 19 nt, Artificial Sequence
  Description of Artificial Sequence: Synthetic oligonucleotide
ugggauuaccaguguucag

SEQ ID NO: 2992124 - RNA, 19 nt, Artificial Sequence
  Description of Artificial Sequence: Synthetic oligonucleotide
cacggucuuacagccaugg

SEQ ID NO: 2992125 - RNA, 19 nt, Artificial Sequence
  Description of Artificial Sequence: Synthetic oligonucleotide
aaccgcuucacacggucuu

SEQ ID NO: 2992126 - RNA, 19 nt, Artificial Sequence
  Description of Artificial Sequence: Synthetic oligonucleotide
gcuucacacggucuuacag

SEQ ID NO: 2992127 - RNA, 19 nt, Artificial Sequence
  Description of Artificial Sequence: Synthetic oligonucleotide
caaaccgcuucacacgguc

SEQ ID NO: 2992128 - RNA, 19 nt, Artificial Sequence
  Description of Artificial Sequence: Synthetic oligonucleotide
uuucugccaagcacagcac

SEQ ID NO: 2992129 - RNA, 19 nt, Artificial Sequence
  Description of Artificial Sequence: Synthetic oligonucleotide
uucagggcaaggcggugcu

SEQ ID NO: 2992130 - RNA, 19 nt, Artificial Sequence
  Description of Artificial Sequence: Synthetic oligonucleotide
aguagaguuccaguuuggu

SEQ ID NO: 2992131 - RNA, 19 nt, Artificial Sequence
  Description of Artificial Sequence: Synthetic oligonucleotide
ggucuuacagccauggaga

SEQ ID NO: 2992132 - RNA, 19 nt, Artificial Sequence
  Description of Artificial Sequence: Synthetic oligonucleotide
caaugucuuccuuaauaga

SEQ ID NO: 2992133 - RNA, 19 nt, Artificial Sequence
  Description of Artificial Sequence: Synthetic oligonucleotide
uuggccgugcugaggacac

SEQ ID NO: 2992134 - RNA, 19 nt, Artificial Sequence
  Description of Artificial Sequence: Synthetic oligonucleotide
guuccaguuugguaagguc

SEQ ID NO: 2992135 - RNA, 19 nt, Artificial Sequence
  Description of Artificial Sequence: Synthetic oligonucleotide
auacaggcgcucuggcgag

SEQ ID NO: 2992136 - RNA, 19 nt, Artificial Sequence
  Description of Artificial Sequence: Synthetic oligonucleotide
uuuggccgugcugaggaca

SEQ ID NO: 2992137 - RNA, 19 nt, Artificial Sequence
  Description of Artificial Sequence: Synthetic oligonucleotide
auaggagcuuuaaaguuaa

SEQ ID NO: 2992138 - RNA, 19 nt, Artificial Sequence
  Description of Artificial Sequence: Synthetic oligonucleotide
aucaccugugccagggcac

SEQ ID NO: 2992139 - RNA, 19 nt, Artificial Sequence
  Description of Artificial Sequence: Synthetic oligonucleotide
augucuuccuuaauagaga

SEQ ID NO: 2992140 - RNA, 19 nt, Artificial Sequence
  Description of Artificial Sequence: Synthetic oligonucleotide
ggcacaaggagagaccuug

SEQ ID NO: 2992141 - RNA, 19 nt, Artificial Sequence
  Description of Artificial Sequence: Synthetic oligonucleotide
cagggcacaaggagagacc

SEQ ID NO: 2992142 - RNA, 19 nt, Artificial Sequence
  Description of Artificial Sequence: Synthetic oligonucleotide
ucuuacagccauggagaca

SEQ ID NO: 2992143 - RNA, 19 nt, Artificial Sequence
  Description of Artificial Sequence: Synthetic oligonucleotide
agaugacaguuaguaucac

SEQ ID NO: 2992144 - RNA, 19 nt, Artificial Sequence
  Description of Artificial Sequence: Synthetic oligonucleotide
uaguaucaccugugccagg

SEQ ID NO: 2992145 - RNA, 19 nt, Artificial Sequence
  Description of Artificial Sequence: Synthetic oligonucleotide
aggucacaacuauucacau

SEQ ID NO: 2992146 - RNA, 19 nt, Artificial Sequence
  Description of Artificial Sequence: Synthetic oligonucleotide
gucuuacagccauggagac

SEQ ID NO: 2992147 - RNA, 19 nt, Artificial Sequence
  Description of Artificial Sequence: Synthetic oligonucleotide
aaggcagccagugcguuuu

SEQ ID NO: 2992148 - RNA, 19 nt, Artificial Sequence
  Description of Artificial Sequence: Synthetic oligonucleotide
cacauacaggcgcucuggc

SEQ ID NO: 2992149 - RNA, 19 nt, Artificial Sequence
  Description of Artificial Sequence: Synthetic oligonucleotide
agggcaaggcggugcuggc

SEQ ID NO: 2992150 - RNA, 19 nt, Artificial Sequence
  Description of Artificial Sequence: Synthetic oligonucleotide
gaugccgagcaaggcagcc

SEQ ID NO: 2992151 - RNA, 19 nt, Artificial Sequence
  Description of Artificial Sequence: Synthetic oligonucleotide
cagggcaaggcggugcugg

SEQ ID NO: 2992152 - RNA, 19 nt, Artificial Sequence
  Description of Artificial Sequence: Synthetic oligonucleotide
agggcacaaggagagaccu

SEQ ID NO: 2992153 - RNA, 19 nt, Artificial Sequence
  Description of Artificial Sequence: Synthetic oligonucleotide
ggcgagacgccuuucugcc

SEQ ID NO: 2992154 - RNA, 19 nt, Artificial Sequence
  Description of Artificial Sequence: Synthetic oligonucleotide
gagagaccuuggcccaggg

SEQ ID NO: 2992155 - RNA, 19 nt, Artificial Sequence
  Description of Artificial Sequence: Synthetic oligonucleotide
aaggcggugcuggcaacag

SEQ ID NO: 2992156 - RNA, 19 nt, Artificial Sequence
  Description of Artificial Sequence: Synthetic oligonucleotide
ugguaaggucacaacuauu

SEQ ID NO: 2992157 - RNA, 19 nt, Artificial Sequence
  Description of Artificial Sequence: Synthetic oligonucleotide
ggucacaacuauucacaug

SEQ ID NO: 2992158 - RNA, 19 nt, Artificial Sequence
  Description of Artificial Sequence: Synthetic oligonucleotide
uuggcccagggugaggucu

SEQ ID NO: 2992159 - RNA, 19 nt, Artificial Sequence
  Description of Artificial Sequence: Synthetic oligonucleotide
agugcguuuuggccgugcu

SEQ ID NO: 2992160 - RNA, 19 nt, Artificial Sequence
  Description of Artificial Sequence: Synthetic oligonucleotide
agcaccuauguggagacua

SEQ ID NO: 2992161 - RNA, 19 nt, Artificial Sequence
  Description of Artificial Sequence: Synthetic oligonucleotide
ucacaacuauucacaugau

SEQ ID NO: 2992162 - RNA, 19 nt, Artificial Sequence
  Description of Artificial Sequence: Synthetic oligonucleotide
gacacucucacacgcacau

SEQ ID NO: 2992163 - RNA, 19 nt, Artificial Sequence
  Description of Artificial Sequence: Synthetic oligonucleotide
accaguguucagggcaagg

SEQ ID NO: 2992164 - RNA, 19 nt, Artificial Sequence
  Description of Artificial Sequence: Synthetic oligonucleotide
uggcaacagcaccuaugug

SEQ ID NO: 2992165 - RNA, 19 nt, Artificial Sequence
  Description of Artificial Sequence: Synthetic oligonucleotide
uguccugcugaugccgagc

SEQ ID NO: 2992166 - RNA, 19 nt, Artificial Sequence
  Description of Artificial Sequence: Synthetic oligonucleotide
aggcggugcuggcaacagc

SEQ ID NO: 2992167 - RNA, 19 nt, Artificial Sequence
  Description of Artificial Sequence: Synthetic oligonucleotide
gaguuccaguuugguaagg

SEQ ID NO: 2992168 - RNA, 19 nt, Artificial Sequence
  Description of Artificial Sequence: Synthetic oligonucleotide
acagaccagagaugacagu

SEQ ID NO: 2992169 - RNA, 19 nt, Artificial Sequence
  Description of Artificial Sequence: Synthetic oligonucleotide
cacagcaccugggauuacc

SEQ ID NO: 2992170 - RNA, 19 nt, Artificial Sequence
  Description of Artificial Sequence: Synthetic oligonucleotide
cauggagacacaaugucuu

SEQ ID NO: 2992171 - RNA, 19 nt, Artificial Sequence
  Description of Artificial Sequence: Synthetic oligonucleotide
agacgccuuucugccaagc

SEQ ID NO: 2992172 - RNA, 19 nt, Artificial Sequence
  Description of Artificial Sequence: Synthetic oligonucleotide
ucacacggucuuacagcca

SEQ ID NO: 2992173 - RNA, 19 nt, Artificial Sequence
  Description of Artificial Sequence: Synthetic oligonucleotide
auuaguuauuuuacuuaua

SEQ ID NO: 2992174 - RNA, 19 nt, Artificial Sequence
  Description of Artificial Sequence: Synthetic oligonucleotide
gacgccuuucugccaagca

SEQ ID NO: 2992175 - RNA, 19 nt, Artificial Sequence
  Description of Artificial Sequence: Synthetic oligonucleotide
acaaaauaguagaguucca

SEQ ID NO: 2992176 - RNA, 19 nt, Artificial Sequence
  Description of Artificial Sequence: Synthetic oligonucleotide
cugggauuaccaguguuca

SEQ ID NO: 2992177 - RNA, 19 nt, Artificial Sequence
  Description of Artificial Sequence: Synthetic oligonucleotide
cuacacaaaccgcuucaca

SEQ ID NO: 2992178 - RNA, 19 nt, Artificial Sequence
  Description of Artificial Sequence: Synthetic oligonucleotide
gcugaugccgagcaaggca

SEQ ID NO: 2992179 - RNA, 19 nt, Artificial Sequence
  Description of Artificial Sequence: Synthetic oligonucleotide
gccauggagacacaauguc

SEQ ID NO: 2992180 - RNA, 19 nt, Artificial Sequence
  Description of Artificial Sequence: Synthetic oligonucleotide
ccugggauuaccaguguuc

SEQ ID NO: 2992181 - RNA, 19 nt, Artificial Sequence
  Description of Artificial Sequence: Synthetic oligonucleotide
cggucuuacagccauggag

SEQ ID NO: 2992182 - RNA, 19 nt, Artificial Sequence
  Description of Artificial Sequence: Synthetic oligonucleotide
uacagccauggagacacaa

SEQ ID NO: 2992183 - RNA, 19 nt, Artificial Sequence
  Description of Artificial Sequence: Synthetic oligonucleotide
aaaccgcuucacacggucu

SEQ ID NO: 2992184 - RNA, 19 nt, Artificial Sequence
  Description of Artificial Sequence: Synthetic oligonucleotide
guucagggcaaggcggugc

SEQ ID NO: 2992185 - RNA, 19 nt, Artificial Sequence
  Description of Artificial Sequence: Synthetic oligonucleotide
agccauggagacacaaugu

SEQ ID NO: 2992186 - RNA, 19 nt, Artificial Sequence
  Description of Artificial Sequence: Synthetic oligonucleotide
ugcugaggacacucucaca

SEQ ID NO: 2992187 - RNA, 19 nt, Artificial Sequence
  Description of Artificial Sequence: Synthetic oligonucleotide
ugcugaugccgagcaaggc

SEQ ID NO: 2992188 - RNA, 19 nt, Artificial Sequence
  Description of Artificial Sequence: Synthetic oligonucleotide
cuggcaacagcaccuaugu

SEQ ID NO: 2992189 - RNA, 19 nt, Artificial Sequence
  Description of Artificial Sequence: Synthetic oligonucleotide
cagcaccugggauuaccag

SEQ ID NO: 2992190 - RNA, 19 nt, Artificial Sequence
  Description of Artificial Sequence: Synthetic oligonucleotide
ucaccugugccagggcaca

SEQ ID NO: 2992191 - RNA, 19 nt, Artificial Sequence
  Description of Artificial Sequence: Synthetic oligonucleotide
agagaccuuggcccagggu

SEQ ID NO: 2992192 - RNA, 19 nt, Artificial Sequence
  Description of Artificial Sequence: Synthetic oligonucleotide
acaggcgcucuggcgagac

SEQ ID NO: 2992193 - RNA, 19 nt, Artificial Sequence
  Description of Artificial Sequence: Synthetic oligonucleotide
gcacauacaggcgcucugg

SEQ ID NO: 2992194 - RNA, 19 nt, Artificial Sequence
  Description of Artificial Sequence: Synthetic oligonucleotide
cuggcgagacgccuuucug

SEQ ID NO: 2992195 - RNA, 19 nt, Artificial Sequence
  Description of Artificial Sequence: Synthetic oligonucleotide
gcagccagugcguuuuggc

SEQ ID NO: 2992196 - RNA, 19 nt, Artificial Sequence
  Description of Artificial Sequence: Synthetic oligonucleotide
uuuuggccgugcugaggac

SEQ ID NO: 2992197 - RNA, 19 nt, Artificial Sequence
  Description of Artificial Sequence: Synthetic oligonucleotide
ccugcugaugccgagcaag

SEQ ID NO: 2992198 - RNA, 19 nt, Artificial Sequence
  Description of Artificial Sequence: Synthetic oligonucleotide
ggagacuacacaaaccgcu

SEQ ID NO: 2992199 - RNA, 19 nt, Artificial Sequence
  Description of Artificial Sequence: Synthetic oligonucleotide
agcacagcaccugggauua

SEQ ID NO: 2992200 - RNA, 19 nt, Artificial Sequence
  Description of Artificial Sequence: Synthetic oligonucleotide
gauguccugcugaugccga

SEQ ID NO: 2992201 - RNA, 19 nt, Artificial Sequence
  Description of Artificial Sequence: Synthetic oligonucleotide
accugggauuaccaguguu

SEQ ID NO: 2992202 - RNA, 19 nt, Artificial Sequence
  Description of Artificial Sequence: Synthetic oligonucleotide
auuuuacuuauaggagcuu

SEQ ID NO: 2992203 - RNA, 19 nt, Artificial Sequence
  Description of Artificial Sequence: Synthetic oligonucleotide
uguucagggcaaggcggug

SEQ ID NO: 2992204 - RNA, 19 nt, Artificial Sequence
  Description of Artificial Sequence: Synthetic oligonucleotide
guccugcugaugccgagca

SEQ ID NO: 2992205 - RNA, 19 nt, Artificial Sequence
  Description of Artificial Sequence: Synthetic oligonucleotide
caacagcaccuauguggag

SEQ ID NO: 2992206 - RNA, 19 nt, Artificial Sequence
  Description of Artificial Sequence: Synthetic oligonucleotide
gugcguuuuggccgugcug

SEQ ID NO: 2992207 - RNA, 19 nt, Artificial Sequence
  Description of Artificial Sequence: Synthetic oligonucleotide
acagcaccugggauuacca

SEQ ID NO: 2992208 - RNA, 19 nt, Artificial Sequence
  Description of Artificial Sequence: Synthetic oligonucleotide
ccagagaugacaguuagua

SEQ ID NO: 2992209 - RNA, 19 nt, Artificial Sequence
  Description of Artificial Sequence: Synthetic oligonucleotide
gagacgccuuucugccaag

SEQ ID NO: 2992210 - RNA, 19 nt, Artificial Sequence
  Description of Artificial Sequence: Synthetic oligonucleotide
acaugauguccugcugaug

SEQ ID NO: 2992211 - RNA, 19 nt, Artificial Sequence
  Description of Artificial Sequence: Synthetic oligonucleotide
acacaaugucuuccuuaau

SEQ ID NO: 2992212 - RNA, 19 nt, Artificial Sequence
  Description of Artificial Sequence: Synthetic oligonucleotide
ccugugccagggcacaagg

SEQ ID NO: 2992213 - RNA, 19 nt, Artificial Sequence
  Description of Artificial Sequence: Synthetic oligonucleotide
agaccuuggcccaggguga

SEQ ID NO: 2992214 - RNA, 19 nt, Artificial Sequence
  Description of Artificial Sequence: Synthetic oligonucleotide
gcuggcaacagcaccuaug

SEQ ID NO: 2992215 - RNA, 19 nt, Artificial Sequence
  Description of Artificial Sequence: Synthetic oligonucleotide
uaggagcuuuaaaguuaaa

SEQ ID NO: 2992216 - RNA, 19 nt, Artificial Sequence
  Description of Artificial Sequence: Synthetic oligonucleotide
ccuauguggagacuacaca

SEQ ID NO: 2992217 - RNA, 19 nt, Artificial Sequence
  Description of Artificial Sequence: Synthetic oligonucleotide
cugccaagcacagcaccug

SEQ ID NO: 2992218 - RNA, 19 nt, Artificial Sequence
  Description of Artificial Sequence: Synthetic oligonucleotide
acggucuuacagccaugga

SEQ ID NO: 2992219 - RNA, 19 nt, Artificial Sequence
  Description of Artificial Sequence: Synthetic oligonucleotide
ggagacacaaugucuuccu

SEQ ID NO: 2992220 - RNA, 19 nt, Artificial Sequence
  Description of Artificial Sequence: Synthetic oligonucleotide
uuacagccauggagacaca

SEQ ID NO: 2992221 - RNA, 19 nt, Artificial Sequence
  Description of Artificial Sequence: Synthetic oligonucleotide
uaccaguguucagggcaag

SEQ ID NO: 2992222 - RNA, 19 nt, Artificial Sequence
  Description of Artificial Sequence: Synthetic oligonucleotide
acagccauggagacacaau

SEQ ID NO: 2992223 - RNA, 19 nt, Artificial Sequence
  Description of Artificial Sequence: Synthetic oligonucleotide
gaggacacucucacacgca

SEQ ID NO: 2992224 - RNA, 19 nt, Artificial Sequence
  Description of Artificial Sequence: Synthetic oligonucleotide
gaccuuggcccagggugag

SEQ ID NO: 2992225 - RNA, 19 nt, Artificial Sequence
  Description of Artificial Sequence: Synthetic oligonucleotide
accugugccagggcacaag

SEQ ID NO: 2992226 - RNA, 19 nt, Artificial Sequence
  Description of Artificial Sequence: Synthetic oligonucleotide
ggcggugcuggcaacagca

SEQ ID NO: 2992227 - RNA, 19 nt, Artificial Sequence
  Description of Artificial Sequence: Synthetic oligonucleotide
ccaauuaguuauuuuacuu

SEQ ID NO: 2992228 - RNA, 19 nt, Artificial Sequence
  Description of Artificial Sequence: Synthetic oligonucleotide
ugcuggcaacagcaccuau

SEQ ID NO: 2992229 - RNA, 19 nt, Artificial Sequence
  Description of Artificial Sequence: Synthetic oligonucleotide
agaccagagaugacaguua

SEQ ID NO: 2992230 - RNA, 19 nt, Artificial Sequence
  Description of Artificial Sequence: Synthetic oligonucleotide
aggagagaccuuggcccag

SEQ ID NO: 2992231 - RNA, 19 nt, Artificial Sequence
  Description of Artificial Sequence: Synthetic oligonucleotide
gugccagggcacaaggaga

SEQ ID NO: 2992232 - RNA, 19 nt, Artificial Sequence
  Description of Artificial Sequence: Synthetic oligonucleotide
acacgcacauacaggcgcu

SEQ ID NO: 2992233 - RNA, 19 nt, Artificial Sequence
  Description of Artificial Sequence: Synthetic oligonucleotide
ccagggcacaaggagagac

SEQ ID NO: 2992234 - RNA, 19 nt, Artificial Sequence
  Description of Artificial Sequence: Synthetic oligonucleotide
uccugcugaugccgagcaa

SEQ ID NO: 2992235 - RNA, 19 nt, Artificial Sequence
  Description of Artificial Sequence: Synthetic oligonucleotide
accagagaugacaguuagu

SEQ ID NO: 2992236 - RNA, 19 nt, Artificial Sequence
  Description of Artificial Sequence: Synthetic oligonucleotide
ggagagaccuuggcccagg

SEQ ID NO: 2992237 - RNA, 19 nt, Artificial Sequence
  Description of Artificial Sequence: Synthetic oligonucleotide
cacacggucuuacagccau

SEQ ID NO: 2992238 - RNA, 19 nt, Artificial Sequence
  Description of Artificial Sequence: Synthetic oligonucleotide
acgcacauacaggcgcucu

SEQ ID NO: 2992239 - RNA, 19 nt, Artificial Sequence
  Description of Artificial Sequence: Synthetic oligonucleotide
cagaccagagaugacaguu

SEQ ID NO: 2992240 - RNA, 19 nt, Artificial Sequence
  Description of Artificial Sequence: Synthetic oligonucleotide
gcacaaggagagaccuugg

SEQ ID NO: 2992241 - RNA, 19 nt, Artificial Sequence
  Description of Artificial Sequence: Synthetic oligonucleotide
gagacuacacaaaccgcuu

SEQ ID NO: 2992242 - RNA, 19 nt, Artificial Sequence
  Description of Artificial Sequence: Synthetic oligonucleotide
cagagaugacaguuaguau

SEQ ID NO: 2992243 - RNA, 19 nt, Artificial Sequence
  Description of Artificial Sequence: Synthetic oligonucleotide
gccaagcacagcaccuggg

SEQ ID NO: 2992244 - RNA, 19 nt, Artificial Sequence
  Description of Artificial Sequence: Synthetic oligonucleotide
ggcaaggcggugcuggcaa

SEQ ID NO: 2992245 - RNA, 19 nt, Artificial Sequence
  Description of Artificial Sequence: Synthetic oligonucleotide
ggugcuggcaacagcaccu

SEQ ID NO: 2992246 - RNA, 19 nt, Artificial Sequence
  Description of Artificial Sequence: Synthetic oligonucleotide
cacaugauguccugcugau

SEQ ID NO: 2992247 - RNA, 19 nt, Artificial Sequence
  Description of Artificial Sequence: Synthetic oligonucleotide
augccgagcaaggcagcca

SEQ ID NO: 2992248 - RNA, 19 nt, Artificial Sequence
  Description of Artificial Sequence: Synthetic oligonucleotide
cuuggcccagggugagguc

SEQ ID NO: 2992249 - RNA, 19 nt, Artificial Sequence
  Description of Artificial Sequence: Synthetic oligonucleotide
gucuuccuuaauagagaaa

SEQ ID NO: 2992250 - RNA, 19 nt, Artificial Sequence
  Description of Artificial Sequence: Synthetic oligonucleotide
gccuuucugccaagcacag

SEQ ID NO: 2992251 - RNA, 19 nt, Artificial Sequence
  Description of Artificial Sequence: Synthetic oligonucleotide
gagacacaaugucuuccuu

SEQ ID NO: 2992252 - RNA, 19 nt, Artificial Sequence
  Description of Artificial Sequence: Synthetic oligonucleotide
caccuauguggagacuaca

SEQ ID NO: 2992253 - RNA, 19 nt, Artificial Sequence
  Description of Artificial Sequence: Synthetic oligonucleotide
acaaaccgcuucacacggu

SEQ ID NO: 2992254 - RNA, 19 nt, Artificial Sequence
  Description of Artificial Sequence: Synthetic oligonucleotide
uggcccagggugaggucuu

SEQ ID NO: 2992255 - RNA, 19 nt, Artificial Sequence
  Description of Artificial Sequence: Synthetic oligonucleotide
ggcagccagugcguuuugg

SEQ ID NO: 2992256 - RNA, 19 nt, Artificial Sequence
  Description of Artificial Sequence: Synthetic oligonucleotide
cagugcguuuuggccgugc

SEQ ID NO: 2992257 - RNA, 19 nt, Artificial Sequence
  Description of Artificial Sequence: Synthetic oligonucleotide
accuuggcccagggugagg

SEQ ID NO: 2992258 - RNA, 19 nt, Artificial Sequence
  Description of Artificial Sequence: Synthetic oligonucleotide
caggcgcucuggcgagacg

SEQ ID NO: 2992259 - RNA, 19 nt, Artificial Sequence
  Description of Artificial Sequence: Synthetic oligonucleotide
ccauggagacacaaugucu

SEQ ID NO: 2992260 - RNA, 19 nt, Artificial Sequence
  Description of Artificial Sequence: Synthetic oligonucleotide
caaggcggugcuggcaaca

SEQ ID NO: 2992261 - RNA, 19 nt, Artificial Sequence
  Description of Artificial Sequence: Synthetic oligonucleotide
caagcacagcaccugggau

SEQ ID NO: 2992262 - RNA, 19 nt, Artificial Sequence
  Description of Artificial Sequence: Synthetic oligonucleotide
ccgagcaaggcagccagug

SEQ ID NO: 2992263 - RNA, 19 nt, Artificial Sequence
  Description of Artificial Sequence: Synthetic oligonucleotide
gcguuuuggccgugcugag

SEQ ID NO: 2992264 - RNA, 19 nt, Artificial Sequence
  Description of Artificial Sequence: Synthetic oligonucleotide
gcaccuauguggagacuac

SEQ ID NO: 2992265 - RNA, 19 nt, Artificial Sequence
  Description of Artificial Sequence: Synthetic oligonucleotide
aggcagccagugcguuuug

SEQ ID NO: 2992266 - RNA, 19 nt, Artificial Sequence
  Description of Artificial Sequence: Synthetic oligonucleotide
uacaggcgcucuggcgaga

SEQ ID NO: 2992267 - RNA, 19 nt, Artificial Sequence
  Description of Artificial Sequence: Synthetic oligonucleotide
cacgcacauacaggcgcuc

SEQ ID NO: 2992268 - RNA, 19 nt, Artificial Sequence
  Description of Artificial Sequence: Synthetic oligonucleotide
cgagcaaggcagccagugc

SEQ ID NO: 2992269 - RNA, 19 nt, Artificial Sequence
  Description of Artificial Sequence: Synthetic oligonucleotide
acacggucuuacagccaug

SEQ ID NO: 2992270 - RNA, 19 nt, Artificial Sequence
  Description of Artificial Sequence: Synthetic oligonucleotide
guguucagggcaaggcggu

SEQ ID NO: 2992271 - RNA, 19 nt, Artificial Sequence
  Description of Artificial Sequence: Synthetic oligonucleotide
cggugcuggcaacagcacc

SEQ ID NO: 2992272 - RNA, 19 nt, Artificial Sequence
  Description of Artificial Sequence: Synthetic oligonucleotide
accgcuucacacggucuua

SEQ ID NO: 2992273 - RNA, 19 nt, Artificial Sequence
  Description of Artificial Sequence: Synthetic oligonucleotide
ggacacucucacacgcaca

SEQ ID NO: 2992274 - RNA, 19 nt, Artificial Sequence
  Description of Artificial Sequence: Synthetic oligonucleotide
ggccgugcugaggacacuc

SEQ ID NO: 2992275 - RNA, 19 nt, Artificial Sequence
  Description of Artificial Sequence: Synthetic oligonucleotide
cguuuuggccgugcugagg

SEQ ID NO: 2992276 - RNA, 19 nt, Artificial Sequence
  Description of Artificial Sequence: Synthetic oligonucleotide
acacucucacacgcacaua

SEQ ID NO: 2992277 - RNA, 19 nt, Artificial Sequence
  Description of Artificial Sequence: Synthetic oligonucleotide
cgcacauacaggcgcucug

SEQ ID NO: 2992278 - RNA, 19 nt, Artificial Sequence
  Description of Artificial Sequence: Synthetic oligonucleotide
ccuuucugccaagcacagc

SEQ ID NO: 2992279 - RNA, 19 nt, Artificial Sequence
  Description of Artificial Sequence: Synthetic oligonucleotide
ccgugcugaggacacucuc

SEQ ID NO: 2992280 - RNA, 19 nt, Artificial Sequence
  Description of Artificial Sequence: Synthetic oligonucleotide
gcaaggcggugcuggcaac

SEQ ID NO: 2992281 - RNA, 19 nt, Artificial Sequence
  Description of Artificial Sequence: Synthetic oligonucleotide
ggcgcucuggcgagacgcc

SEQ ID NO: 2992282 - RNA, 19 nt, Artificial Sequence
  Description of Artificial Sequence: Synthetic oligonucleotide
gccagugcguuuuggccgu

SEQ ID NO: 2992283 - RNA, 19 nt, Artificial Sequence
  Description of Artificial Sequence: Synthetic oligonucleotide
uggccgugcugaggacacu

SEQ ID NO: 2992284 - RNA, 19 nt, Artificial Sequence
  Description of Artificial Sequence: Synthetic oligonucleotide
cucuggcgagacgccuuuc

SEQ ID NO: 2992285 - RNA, 19 nt, Artificial Sequence
  Description of Artificial Sequence: Synthetic oligonucleotide
ccgcuucacacggucuuac

SEQ ID NO: 2992286 - RNA, 19 nt, Artificial Sequence
  Description of Artificial Sequence: Synthetic oligonucleotide
gcgagacgccuuucugcca

SEQ ID NO: 2992287 - RNA, 19 nt, Artificial Sequence
  Description of Artificial Sequence: Synthetic oligonucleotide
cgagacgccuuucugccaa

SEQ ID NO: 2992288 - RNA, 19 nt, Artificial Sequence
  Description of Artificial Sequence: Synthetic oligonucleotide
caaggcagccagugcguuu

SEQ ID NO: 2992289 - RNA, 19 nt, Artificial Sequence
  Description of Artificial Sequence: Synthetic oligonucleotide
gcggugcuggcaacagcac

SEQ ID NO: 2992290 - RNA, 19 nt, Artificial Sequence
  Description of Artificial Sequence: Synthetic oligonucleotide
gggcaaggcggugcuggca

SEQ ID NO: 2992291 - RNA, 19 nt, Artificial Sequence
  Description of Artificial Sequence: Synthetic oligonucleotide
cgcuucacacggucuuaca

SEQ ID NO: 2992292 - RNA, 19 nt, Artificial Sequence
  Description of Artificial Sequence: Synthetic oligonucleotide
caccugugccagggcacaa

SEQ ID NO: 2992293 - RNA, 19 nt, Artificial Sequence
  Description of Artificial Sequence: Synthetic oligonucleotide
gccagggcacaaggagaga

SEQ ID NO: 2992294 - RNA, 19 nt, Artificial Sequence
  Description of Artificial Sequence: Synthetic oligonucleotide
gcucuggcgagacgccuuu

SEQ ID NO: 2992295 - RNA, 19 nt, Artificial Sequence
  Description of Artificial Sequence: Synthetic oligonucleotide
gcacagcaccugggauuac

SEQ ID NO: 2992296 - RNA, 19 nt, Artificial Sequence
  Description of Artificial Sequence: Synthetic oligonucleotide
gccgugcugaggacacucu

SEQ ID NO: 2992297 - RNA, 19 nt, Artificial Sequence
  Description of Artificial Sequence: Synthetic oligonucleotide
ggcccagggugaggucuuc

SEQ ID NO: 2992298 - RNA, 19 nt, Artificial Sequence
  Description of Artificial Sequence: Synthetic oligonucleotide
cagcaccuauguggagacu

SEQ ID NO: 2992299 - RNA, 19 nt, Artificial Sequence
  Description of Artificial Sequence: Synthetic oligonucleotide
gcaaggcagccagugcguu

SEQ ID NO: 2992300 - RNA, 19 nt, Artificial Sequence
  Description of Artificial Sequence: Synthetic oligonucleotide
ccagugcguuuuggccgug

SEQ ID NO: 2992301 - RNA, 19 nt, Artificial Sequence
  Description of Artificial Sequence: Synthetic oligonucleotide
gggcacaaggagagaccuu

SEQ ID NO: 2992302 - RNA, 19 nt, Artificial Sequence
  Description of Artificial Sequence: Synthetic oligonucleotide
gccgagcaaggcagccagu

SEQ ID NO: 2992303 - RNA, 19 nt, Artificial Sequence
  Description of Artificial Sequence: Synthetic oligonucleotide
cgcucuggcgagacgccuu

SEQ ID NO: 2992304 - RNA, 19 nt, Artificial Sequence
  Description of Artificial Sequence: Synthetic oligonucleotide
aauugaaugauccuguccc

SEQ ID NO: 2992305 - RNA, 19 nt, Artificial Sequence
  Description of Artificial Sequence: Synthetic oligonucleotide
ugagagaaaauccugaucc

SEQ ID NO: 2992306 - RNA, 19 nt, Artificial Sequence
  Description of Artificial Sequence: Synthetic oligonucleotide
aaauccugaucccagauag

SEQ ID NO: 2992307 - RNA, 19 nt, Artificial Sequence
  Description of Artificial Sequence: Synthetic oligonucleotide
uaauggugaagacugaacg

SEQ ID NO: 2992308 - RNA, 19 nt, Artificial Sequence
  Description of Artificial Sequence: Synthetic oligonucleotide
aaaugugugaggauuagcg

SEQ ID NO: 2992309 - RNA, 19 nt, Artificial Sequence
  Description of Artificial Sequence: Synthetic oligonucleotide
cucauaauggugaagacug

SEQ ID NO: 2992310 - RNA, 19 nt, Artificial Sequence
  Description of Artificial Sequence: Synthetic oligonucleotide
ugugguuucauaccgaggu

SEQ ID NO: 2992311 - RNA, 19 nt, Artificial Sequence
  Description of Artificial Sequence: Synthetic oligonucleotide
ugcaauagcacaaccaucu

SEQ ID NO: 2992312 - RNA, 19 nt, Artificial Sequence
  Description of Artificial Sequence: Synthetic oligonucleotide
gagaguuuugacuauacac

SEQ ID NO: 2992313 - RNA, 19 nt, Artificial Sequence
  Description of Artificial Sequence: Synthetic oligonucleotide
aacgaagcaguguucuccc

SEQ ID NO: 2992314 - RNA, 19 nt, Artificial Sequence
  Description of Artificial Sequence: Synthetic oligonucleotide
gaggaguuggaauugaaug

SEQ ID NO: 2992315 - RNA, 19 nt, Artificial Sequence
  Description of Artificial Sequence: Synthetic oligonucleotide
aguuggaauugaaugaucc

SEQ ID NO: 2992316 - RNA, 19 nt, Artificial Sequence
  Description of Artificial Sequence: Synthetic oligonucleotide
acuauacacuucuucuucc

SEQ ID NO: 2992317 - RNA, 19 nt, Artificial Sequence
  Description of Artificial Sequence: Synthetic oligonucleotide
aauagcacaaccaucuugu

SEQ ID NO: 2992318 - RNA, 19 nt, Artificial Sequence
  Description of Artificial Sequence: Synthetic oligonucleotide
cucccaaacaccuuugugg

SEQ ID NO: 2992319 - RNA, 19 nt, Artificial Sequence
  Description of Artificial Sequence: Synthetic oligonucleotide
uguuuggauuccuaguggg

SEQ ID NO: 2992320 - RNA, 19 nt, Artificial Sequence
  Description of Artificial Sequence: Synthetic oligonucleotide
uugacuauacacuucuucu

SEQ ID NO: 2992321 - RNA, 19 nt, Artificial Sequence
  Description of Artificial Sequence: Synthetic oligonucleotide
ucuuguguaguucuccuug

SEQ ID NO: 2992322 - RNA, 19 nt, Artificial Sequence
  Description of Artificial Sequence: Synthetic oligonucleotide
aauggugaagacugaacga

SEQ ID NO: 2992323 - RNA, 19 nt, Artificial Sequence
  Description of Artificial Sequence: Synthetic oligonucleotide
uaggcugucacagaacugg

SEQ ID NO: 2992324 - RNA, 19 nt, Artificial Sequence
  Description of Artificial Sequence: Synthetic oligonucleotide
uuugacuauacacuucuuc

SEQ ID NO: 2992325 - RNA, 19 nt, Artificial Sequence
  Description of Artificial Sequence: Synthetic oligonucleotide
uguucuccuccauugaucc

SEQ ID NO: 2992326 - RNA, 19 nt, Artificial Sequence
  Description of Artificial Sequence: Synthetic oligonucleotide
gauaggagaguuuugacua

SEQ ID NO: 2992327 - RNA, 19 nt, Artificial Sequence
  Description of Artificial Sequence: Synthetic oligonucleotide
ugucgucucauaaugguga

SEQ ID NO: 2992328 - RNA, 19 nt, Artificial Sequence
  Description of Artificial Sequence: Synthetic oligonucleotide
acuguuuggauuccuagug

SEQ ID NO: 2992329 - RNA, 19 nt, Artificial Sequence
  Description of Artificial Sequence: Synthetic oligonucleotide
auacacuucuucuuccaac

SEQ ID NO: 2992330 - RNA, 19 nt, Artificial Sequence
  Description of Artificial Sequence: Synthetic oligonucleotide
uuugugguuucauaccgag

SEQ ID NO: 2992331 - RNA, 19 nt, Artificial Sequence
  Description of Artificial Sequence: Synthetic oligonucleotide
auugcaauagcacaaccau

SEQ ID NO: 2992332 - RNA, 19 nt, Artificial Sequence
  Description of Artificial Sequence: Synthetic oligonucleotide
aaugugugaggauuagcgu

SEQ ID NO: 2992333 - RNA, 19 nt, Artificial Sequence
  Description of Artificial Sequence: Synthetic oligonucleotide
accuuugugguuucauacc

SEQ ID NO: 2992334 - RNA, 19 nt, Artificial Sequence
  Description of Artificial Sequence: Synthetic oligonucleotide
aagaggcugagagaaaauc

SEQ ID NO: 2992335 - RNA, 19 nt, Artificial Sequence
  Description of Artificial Sequence: Synthetic oligonucleotide
uccaacauggacagaaacu

SEQ ID NO: 2992336 - RNA, 19 nt, Artificial Sequence
  Description of Artificial Sequence: Synthetic oligonucleotide
ugugugaggauuagcgugc

SEQ ID NO: 2992337 - RNA, 19 nt, Artificial Sequence
  Description of Artificial Sequence: Synthetic oligonucleotide
gaauugaaugauccugucc

SEQ ID NO: 2992338 - RNA, 19 nt, Artificial Sequence
  Description of Artificial Sequence: Synthetic oligonucleotide
agauaggagaguuuugacu

SEQ ID NO: 2992339 - RNA, 19 nt, Artificial Sequence
  Description of Artificial Sequence: Synthetic oligonucleotide
aacauggacagaaacuuug

SEQ ID NO: 2992340 - RNA, 19 nt, Artificial Sequence
  Description of Artificial Sequence: Synthetic oligonucleotide
acauugcaauagcacaacc

SEQ ID NO: 2992341 - RNA, 19 nt, Artificial Sequence
  Description of Artificial Sequence: Synthetic oligonucleotide
agaggcugagagaaaaucc

SEQ ID NO: 2992342 - RNA, 19 nt, Artificial Sequence
  Description of Artificial Sequence: Synthetic oligonucleotide
uggaauugaaugauccugu

SEQ ID NO: 2992343 - RNA, 19 nt, Artificial Sequence
  Description of Artificial Sequence: Synthetic oligonucleotide
uuugggaaaugugugagga

SEQ ID NO: 2992344 - RNA, 19 nt, Artificial Sequence
  Description of Artificial Sequence: Synthetic oligonucleotide
auuccuagugggcugguuc

SEQ ID NO: 2992345 - RNA, 19 nt, Artificial Sequence
  Description of Artificial Sequence: Synthetic oligonucleotide
guaacaggaggacugauca

SEQ ID NO: 2992346 - RNA, 19 nt, Artificial Sequence
  Description of Artificial Sequence: Synthetic oligonucleotide
ugaagacugaacgaagcag

SEQ ID NO: 2992347 - RNA, 19 nt, Artificial Sequence
  Description of Artificial Sequence: Synthetic oligonucleotide
acagaacugggguacauug

SEQ ID NO: 2992348 - RNA, 19 nt, Artificial Sequence
  Description of Artificial Sequence: Synthetic oligonucleotide
augugugaggauuagcgug

SEQ ID NO: 2992349 - RNA, 19 nt, Artificial Sequence
  Description of Artificial Sequence: Synthetic oligonucleotide
aacuuugggaaauguguga

SEQ ID NO: 2992350 - RNA, 19 nt, Artificial Sequence
  Description of Artificial Sequence: Synthetic oligonucleotide
uucauaccgagguaggcug

SEQ ID NO: 2992351 - RNA, 19 nt, Artificial Sequence
  Description of Artificial Sequence: Synthetic oligonucleotide
gaguugucgucucauaaug

SEQ ID NO: 2992352 - RNA, 19 nt, Artificial Sequence
  Description of Artificial Sequence: Synthetic oligonucleotide
agcacaaccaucuugugua

SEQ ID NO: 2992353 - RNA, 19 nt, Artificial Sequence
  Description of Artificial Sequence: Synthetic oligonucleotide
agaguuuugacuauacacu

SEQ ID NO: 2992354 - RNA, 19 nt, Artificial Sequence
  Description of Artificial Sequence: Synthetic oligonucleotide
uccugucccaguaacagga

SEQ ID NO: 2992355 - RNA, 19 nt, Artificial Sequence
  Description of Artificial Sequence: Synthetic oligonucleotide
aggaguuggaauugaauga

SEQ ID NO: 2992356 - RNA, 19 nt, Artificial Sequence
  Description of Artificial Sequence: Synthetic oligonucleotide
aaccaucuuguguaguucu

SEQ ID NO: 2992357 - RNA, 19 nt, Artificial Sequence
  Description of Artificial Sequence: Synthetic oligonucleotide
ugucccaguaacaggagga

SEQ ID NO: 2992358 - RNA, 19 nt, Artificial Sequence
  Description of Artificial Sequence: Synthetic oligonucleotide
gacuuguucuccuccauug

SEQ ID NO: 2992359 - RNA, 19 nt, Artificial Sequence
  Description of Artificial Sequence: Synthetic oligonucleotide
augauccugucccaguaac

SEQ ID NO: 2992360 - RNA, 19 nt, Artificial Sequence
  Description of Artificial Sequence: Synthetic oligonucleotide
cuucuuccaacauggacag

SEQ ID NO: 2992361 - RNA, 19 nt, Artificial Sequence
  Description of Artificial Sequence: Synthetic oligonucleotide
aacaggaggacugaucacu

SEQ ID NO: 2992362 - RNA, 19 nt, Artificial Sequence
  Description of Artificial Sequence: Synthetic oligonucleotide
ucacuguuuggauuccuag

SEQ ID NO: 2992363 - RNA, 19 nt, Artificial Sequence
  Description of Artificial Sequence: Synthetic oligonucleotide
auaauggugaagacugaac

SEQ ID NO: 2992364 - RNA, 19 nt, Artificial Sequence
  Description of Artificial Sequence: Synthetic oligonucleotide
gacuauacacuucuucuuc

SEQ ID NO: 2992365 - RNA, 19 nt, Artificial Sequence
  Description of Artificial Sequence: Synthetic oligonucleotide
agaacugggguacauugca

SEQ ID NO: 2992366 - RNA, 19 nt, Artificial Sequence
  Description of Artificial Sequence: Synthetic oligonucleotide
ugguuucauaccgagguag

SEQ ID NO: 2992367 - RNA, 19 nt, Artificial Sequence
  Description of Artificial Sequence: Synthetic oligonucleotide
aagcaguguucucccaaac

SEQ ID NO: 2992368 - RNA, 19 nt, Artificial Sequence
  Description of Artificial Sequence: Synthetic oligonucleotide
gauccugucccaguaacag

SEQ ID NO: 2992369 - RNA, 19 nt, Artificial Sequence
  Description of Artificial Sequence: Synthetic oligonucleotide
uuuggauuccuagugggcu

SEQ ID NO: 2992370 - RNA, 19 nt, Artificial Sequence
  Description of Artificial Sequence: Synthetic oligonucleotide
ucucauaauggugaagacu

SEQ ID NO: 2992371 - RNA, 19 nt, Artificial Sequence
  Description of Artificial Sequence: Synthetic oligonucleotide
gaaacuuugggaaaugugu

SEQ ID NO: 2992372 - RNA, 19 nt, Artificial Sequence
  Description of Artificial Sequence: Synthetic oligonucleotide
gagaaaauccugaucccag

SEQ ID NO: 2992373 - RNA, 19 nt, Artificial Sequence
  Description of Artificial Sequence: Synthetic oligonucleotide
ucaugggaagaggaguugg

SEQ ID NO: 2992374 - RNA, 19 nt, Artificial Sequence
  Description of Artificial Sequence: Synthetic oligonucleotide
gaacgaagcaguguucucc

SEQ ID NO: 2992375 - RNA, 19 nt, Artificial Sequence
  Description of Artificial Sequence: Synthetic oligonucleotide
gagagaaaauccugauccc

SEQ ID NO: 2992376 - RNA, 19 nt, Artificial Sequence
  Description of Artificial Sequence: Synthetic oligonucleotide
uugucgucucauaauggug

SEQ ID NO: 2992377 - RNA, 19 nt, Artificial Sequence
  Description of Artificial Sequence: Synthetic oligonucleotide
uguguaguucuccuuguau

SEQ ID NO: 2992378 - RNA, 19 nt, Artificial Sequence
  Description of Artificial Sequence: Synthetic oligonucleotide
gguacauugcaauagcaca

SEQ ID NO: 2992379 - RNA, 19 nt, Artificial Sequence
  Description of Artificial Sequence: Synthetic oligonucleotide
uggugaagacugaacgaag

SEQ ID NO: 2992380 - RNA, 19 nt, Artificial Sequence
  Description of Artificial Sequence: Synthetic oligonucleotide
ucccaaacaccuuuguggu

SEQ ID NO: 2992381 - RNA, 19 nt, Artificial Sequence
  Description of Artificial Sequence: Synthetic oligonucleotide
aaaauccugaucccagaua

SEQ ID NO: 2992382 - RNA, 19 nt, Artificial Sequence
  Description of Artificial Sequence: Synthetic oligonucleotide
uuagcgugcgcuucucaag

SEQ ID NO: 2992383 - RNA, 19 nt, Artificial Sequence
  Description of Artificial Sequence: Synthetic oligonucleotide
uugugguuucauaccgagg

SEQ ID NO: 2992384 - RNA, 19 nt, Artificial Sequence
  Description of Artificial Sequence: Synthetic oligonucleotide
ugggguacauugcaauagc

SEQ ID NO: 2992385 - RNA, 19 nt, Artificial Sequence
  Description of Artificial Sequence: Synthetic oligonucleotide
ucucccaaacaccuuugug

SEQ ID NO: 2992386 - RNA, 19 nt, Artificial Sequence
  Description of Artificial Sequence: Synthetic oligonucleotide
cuuugggaaaugugugagg

SEQ ID NO: 2992387 - RNA, 19 nt, Artificial Sequence
  Description of Artificial Sequence: Synthetic oligonucleotide
acuuugggaaaugugugag

SEQ ID NO: 2992388 - RNA, 19 nt, Artificial Sequence
  Description of Artificial Sequence: Synthetic oligonucleotide
caauagcacaaccaucuug

SEQ ID NO: 2992389 - RNA, 19 nt, Artificial Sequence
  Description of Artificial Sequence: Synthetic oligonucleotide
aacugggguacauugcaau

SEQ ID NO: 2992390 - RNA, 19 nt, Artificial Sequence
  Description of Artificial Sequence: Synthetic oligonucleotide
uccucucaugggaagagga

SEQ ID NO: 2992391 - RNA, 19 nt, Artificial Sequence
  Description of Artificial Sequence: Synthetic oligonucleotide
uguucucccaaacaccuuu

SEQ ID NO: 2992392 - RNA, 19 nt, Artificial Sequence
  Description of Artificial Sequence: Synthetic oligonucleotide
uuucauaccgagguaggcu

SEQ ID NO: 2992393 - RNA, 19 nt, Artificial Sequence
  Description of Artificial Sequence: Synthetic oligonucleotide
cuguuuggauuccuagugg

SEQ ID NO: 2992394 - RNA, 19 nt, Artificial Sequence
  Description of Artificial Sequence: Synthetic oligonucleotide
caccuuugugguuucauac

SEQ ID NO: 2992395 - RNA, 19 nt, Artificial Sequence
  Description of Artificial Sequence: Synthetic oligonucleotide
uagcacaaccaucuugugu

SEQ ID NO: 2992396 - RNA, 19 nt, Artificial Sequence
  Description of Artificial Sequence: Synthetic oligonucleotide
uuccugucuggcuugcucc

SEQ ID NO: 2992397 - RNA, 19 nt, Artificial Sequence
  Description of Artificial Sequence: Synthetic oligonucleotide
gaggacugaucacuguuug

SEQ ID NO: 2992398 - RNA, 19 nt, Artificial Sequence
  Description of Artificial Sequence: Synthetic oligonucleotide
uaguucuccuuguauccag

SEQ ID NO: 2992399 - RNA, 19 nt, Artificial Sequence
  Description of Artificial Sequence: Synthetic oligonucleotide
cauugcaauagcacaacca

SEQ ID NO: 2992400 - RNA, 19 nt, Artificial Sequence
  Description of Artificial Sequence: Synthetic oligonucleotide
uauacacuucuucuuccaa

SEQ ID NO: 2992401 - RNA, 19 nt, Artificial Sequence
  Description of Artificial Sequence: Synthetic oligonucleotide
guuuugacuauacacuucu

SEQ ID NO: 2992402 - RNA, 19 nt, Artificial Sequence
  Description of Artificial Sequence: Synthetic oligonucleotide
aaugauccugucccaguaa

SEQ ID NO: 2992403 - RNA, 19 nt, Artificial Sequence
  Description of Artificial Sequence: Synthetic oligonucleotide
aguaacaggaggacugauc

SEQ ID NO: 2992404 - RNA, 19 nt, Artificial Sequence
  Description of Artificial Sequence: Synthetic oligonucleotide
uccuccauugauccucuca

SEQ ID NO: 2992405 - RNA, 19 nt, Artificial Sequence
  Description of Artificial Sequence: Synthetic oligonucleotide
uccugaucccagauaggag

SEQ ID NO: 2992406 - RNA, 19 nt, Artificial Sequence
  Description of Artificial Sequence: Synthetic oligonucleotide
agaaaauccugaucccaga

SEQ ID NO: 2992407 - RNA, 19 nt, Artificial Sequence
  Description of Artificial Sequence: Synthetic oligonucleotide
uugaaugauccugucccag

SEQ ID NO: 2992408 - RNA, 19 nt, Artificial Sequence
  Description of Artificial Sequence: Synthetic oligonucleotide
agaaacuuugggaaaugug

SEQ ID NO: 2992409 - RNA, 19 nt, Artificial Sequence
  Description of Artificial Sequence: Synthetic oligonucleotide
ugucacagaacugggguac

SEQ ID NO: 2992410 - RNA, 19 nt, Artificial Sequence
  Description of Artificial Sequence: Synthetic oligonucleotide
uugauccucucaugggaag

SEQ ID NO: 2992411 - RNA, 19 nt, Artificial Sequence
  Description of Artificial Sequence: Synthetic oligonucleotide
caguguucucccaaacacc

SEQ ID NO: 2992412 - RNA, 19 nt, Artificial Sequence
  Description of Artificial Sequence: Synthetic oligonucleotide
aggacugaucacuguuugg

SEQ ID NO: 2992413 - RNA, 19 nt, Artificial Sequence
  Description of Artificial Sequence: Synthetic oligonucleotide
ugaaugauccugucccagu

SEQ ID NO: 2992414 - RNA, 19 nt, Artificial Sequence
  Description of Artificial Sequence: Synthetic oligonucleotide
uuguucuccuccauugauc

SEQ ID NO: 2992415 - RNA, 19 nt, Artificial Sequence
  Description of Artificial Sequence: Synthetic oligonucleotide
guguaguucuccuuguauc

SEQ ID NO: 2992416 - RNA, 19 nt, Artificial Sequence
  Description of Artificial Sequence: Synthetic oligonucleotide
aguuuugacuauacacuuc

SEQ ID NO: 2992417 - RNA, 19 nt, Artificial Sequence
  Description of Artificial Sequence: Synthetic oligonucleotide
uucucaagaggcaguuugu

SEQ ID NO: 2992418 - RNA, 19 nt, Artificial Sequence
  Description of Artificial Sequence: Synthetic oligonucleotide
gaaaugugugaggauuagc

SEQ ID NO: 2992419 - RNA, 19 nt, Artificial Sequence
  Description of Artificial Sequence: Synthetic oligonucleotide
agagaaaauccugauccca

SEQ ID NO: 2992420 - RNA, 19 nt, Artificial Sequence
  Description of Artificial Sequence: Synthetic oligonucleotide
aagacugaacgaagcagug

SEQ ID NO: 2992421 - RNA, 19 nt, Artificial Sequence
  Description of Artificial Sequence: Synthetic oligonucleotide
uugcaauagcacaaccauc

SEQ ID NO: 2992422 - RNA, 19 nt, Artificial Sequence
  Description of Artificial Sequence: Synthetic oligonucleotide
ucauaauggugaagacuga

SEQ ID NO: 2992423 - RNA, 19 nt, Artificial Sequence
  Description of Artificial Sequence: Synthetic oligonucleotide
uuggauuccuagugggcug

SEQ ID NO: 2992424 - RNA, 19 nt, Artificial Sequence
  Description of Artificial Sequence: Synthetic oligonucleotide
cugaucccagauaggagag

SEQ ID NO: 2992425 - RNA, 19 nt, Artificial Sequence
  Description of Artificial Sequence: Synthetic oligonucleotide
auugaaugauccuguccca

SEQ ID NO: 2992426 - RNA, 19 nt, Artificial Sequence
  Description of Artificial Sequence: Synthetic oligonucleotide
ugacuauacacuucuucuu

SEQ ID NO: 2992427 - RNA, 19 nt, Artificial Sequence
  Description of Artificial Sequence: Synthetic oligonucleotide
ugcgcuucucaagaggcag

SEQ ID NO: 2992428 - RNA, 19 nt, Artificial Sequence
  Description of Artificial Sequence: Synthetic oligonucleotide
uagcgugcgcuucucaaga

SEQ ID NO: 2992429 - RNA, 19 nt, Artificial Sequence
  Description of Artificial Sequence: Synthetic oligonucleotide
aguugucgucucauaaugg

SEQ ID NO: 2992430 - RNA, 19 nt, Artificial Sequence
  Description of Artificial Sequence: Synthetic oligonucleotide
ugauccugucccaguaaca

SEQ ID NO: 2992431 - RNA, 19 nt, Artificial Sequence
  Description of Artificial Sequence: Synthetic oligonucleotide
uuuccugucuggcuugcuc

SEQ ID NO: 2992432 - RNA, 19 nt, Artificial Sequence
  Description of Artificial Sequence: Synthetic oligonucleotide
ugggaaaugugugaggauu

SEQ ID NO: 2992433 - RNA, 19 nt, Artificial Sequence
  Description of Artificial Sequence: Synthetic oligonucleotide
cauugauccucucauggga

SEQ ID NO: 2992434 - RNA, 19 nt, Artificial Sequence
  Description of Artificial Sequence: Synthetic oligonucleotide
ccuuugugguuucauaccg

SEQ ID NO: 2992435 - RNA, 19 nt, Artificial Sequence
  Description of Artificial Sequence: Synthetic oligonucleotide
acaaccaucuuguguaguu

SEQ ID NO: 2992436 - RNA, 19 nt, Artificial Sequence
  Description of Artificial Sequence: Synthetic oligonucleotide
agcaguguucucccaaaca

SEQ ID NO: 2992437 - RNA, 19 nt, Artificial Sequence
  Description of Artificial Sequence: Synthetic oligonucleotide
auccugucccaguaacagg

SEQ ID NO: 2992438 - RNA, 19 nt, Artificial Sequence
  Description of Artificial Sequence: Synthetic oligonucleotide
aauccugaucccagauagg

SEQ ID NO: 2992439 - RNA, 19 nt, Artificial Sequence
  Description of Artificial Sequence: Synthetic oligonucleotide
cugagagaaaauccugauc

SEQ ID NO: 2992440 - RNA, 19 nt, Artificial Sequence
  Description of Artificial Sequence: Synthetic oligonucleotide
uacauugcaauagcacaac

SEQ ID NO: 2992441 - RNA, 19 nt, Artificial Sequence
  Description of Artificial Sequence: Synthetic oligonucleotide
auuagcgugcgcuucucaa

SEQ ID NO: 2992442 - RNA, 19 nt, Artificial Sequence
  Description of Artificial Sequence: Synthetic oligonucleotide
cacuucuucuuccaacaug

SEQ ID NO: 2992443 - RNA, 19 nt, Artificial Sequence
  Description of Artificial Sequence: Synthetic oligonucleotide
aggaguugucgucucauaa

SEQ ID NO: 2992444 - RNA, 19 nt, Artificial Sequence
  Description of Artificial Sequence: Synthetic oligonucleotide
acugaucacuguuuggauu

SEQ ID NO: 2992445 - RNA, 19 nt, Artificial Sequence
  Description of Artificial Sequence: Synthetic oligonucleotide
uuccuagugggcugguucu

SEQ ID NO: 2992446 - RNA, 19 nt, Artificial Sequence
  Description of Artificial Sequence: Synthetic oligonucleotide
cugggguacauugcaauag

SEQ ID NO: 2992447 - RNA, 19 nt, Artificial Sequence
  Description of Artificial Sequence: Synthetic oligonucleotide
gcaguguucucccaaacac

SEQ ID NO: 2992448 - RNA, 19 nt, Artificial Sequence
  Description of Artificial Sequence: Synthetic oligonucleotide
cagaacugggguacauugc

SEQ ID NO: 2992449 - RNA, 19 nt, Artificial Sequence
  Description of Artificial Sequence: Synthetic oligonucleotide
cagauaggagaguuuugac

SEQ ID NO: 2992450 - RNA, 19 nt, Artificial Sequence
  Description of Artificial Sequence: Synthetic oligonucleotide
auccugaucccagauagga

SEQ ID NO: 2992451 - RNA, 19 nt, Artificial Sequence
  Description of Artificial Sequence: Synthetic oligonucleotide
aggagaguuuugacuauac

SEQ ID NO: 2992452 - RNA, 19 nt, Artificial Sequence
  Description of Artificial Sequence: Synthetic oligonucleotide
gauccucucaugggaagag

SEQ ID NO: 2992453 - RNA, 19 nt, Artificial Sequence
  Description of Artificial Sequence: Synthetic oligonucleotide
uggauuccuagugggcugg

SEQ ID NO: 2992454 - RNA, 19 nt, Artificial Sequence
  Description of Artificial Sequence: Synthetic oligonucleotide
auggugaagacugaacgaa

SEQ ID NO: 2992455 - RNA, 19 nt, Artificial Sequence
  Description of Artificial Sequence: Synthetic oligonucleotide
gugaagacugaacgaagca

SEQ ID NO: 2992456 - RNA, 19 nt, Artificial Sequence
  Description of Artificial Sequence: Synthetic oligonucleotide
ugguucuggaagaggcuga

SEQ ID NO: 2992457 - RNA, 19 nt, Artificial Sequence
  Description of Artificial Sequence: Synthetic oligonucleotide
cugucccaguaacaggagg

SEQ ID NO: 2992458 - RNA, 19 nt, Artificial Sequence
  Description of Artificial Sequence: Synthetic oligonucleotide
gaagacugaacgaagcagu

SEQ ID NO: 2992459 - RNA, 19 nt, Artificial Sequence
  Description of Artificial Sequence: Synthetic oligonucleotide
gagguaggcugucacagaa

SEQ ID NO: 2992460 - RNA, 19 nt, Artificial Sequence
  Description of Artificial Sequence: Synthetic oligonucleotide
uucucccaaacaccuuugu

SEQ ID NO: 2992461 - RNA, 19 nt, Artificial Sequence
  Description of Artificial Sequence: Synthetic oligonucleotide
guuucauaccgagguaggc

SEQ ID NO: 2992462 - RNA, 19 nt, Artificial Sequence
  Description of Artificial Sequence: Synthetic oligonucleotide
ggugaagacugaacgaagc

SEQ ID NO: 2992463 - RNA, 19 nt, Artificial Sequence
  Description of Artificial Sequence: Synthetic oligonucleotide
cuauacacuucuucuucca

SEQ ID NO: 2992464 - RNA, 19 nt, Artificial Sequence
  Description of Artificial Sequence: Synthetic oligonucleotide
gaaugauccugucccagua

SEQ ID NO: 2992465 - RNA, 19 nt, Artificial Sequence
  Description of Artificial Sequence: Synthetic oligonucleotide
ugauccucucaugggaaga

SEQ ID NO: 2992466 - RNA, 19 nt, Artificial Sequence
  Description of Artificial Sequence: Synthetic oligonucleotide
auagcacaaccaucuugug

SEQ ID NO: 2992467 - RNA, 19 nt, Artificial Sequence
  Description of Artificial Sequence: Synthetic oligonucleotide
aggauuagcgugcgcuucu

SEQ ID NO: 2992468 - RNA, 19 nt, Artificial Sequence
  Description of Artificial Sequence: Synthetic oligonucleotide
guuuggauuccuagugggc

SEQ ID NO: 2992469 - RNA, 19 nt, Artificial Sequence
  Description of Artificial Sequence: Synthetic oligonucleotide
gaguuuugacuauacacuu

SEQ ID NO: 2992470 - RNA, 19 nt, Artificial Sequence
  Description of Artificial Sequence: Synthetic oligonucleotide
uaacaggaggacugaucac

SEQ ID NO: 2992471 - RNA, 19 nt, Artificial Sequence
  Description of Artificial Sequence: Synthetic oligonucleotide
guacauugcaauagcacaa

SEQ ID NO: 2992472 - RNA, 19 nt, Artificial Sequence
  Description of Artificial Sequence: Synthetic oligonucleotide
ucccagauaggagaguuuu

SEQ ID NO: 2992473 - RNA, 19 nt, Artificial Sequence
  Description of Artificial Sequence: Synthetic oligonucleotide
guugucgucucauaauggu

SEQ ID NO: 2992474 - RNA, 19 nt, Artificial Sequence
  Description of Artificial Sequence: Synthetic oligonucleotide
gucucauaauggugaagac

SEQ ID NO: 2992475 - RNA, 19 nt, Artificial Sequence
  Description of Artificial Sequence: Synthetic oligonucleotide
auaggagaguuuugacuau

SEQ ID NO: 2992476 - RNA, 19 nt, Artificial Sequence
  Description of Artificial Sequence: Synthetic oligonucleotide
aggaggacugaucacuguu

SEQ ID NO: 2992477 - RNA, 19 nt, Artificial Sequence
  Description of Artificial Sequence: Synthetic oligonucleotide
acugaacgaagcaguguuc

SEQ ID NO: 2992478 - RNA, 19 nt, Artificial Sequence
  Description of Artificial Sequence: Synthetic oligonucleotide
cugguucuggaagaggcug

SEQ ID NO: 2992479 - RNA, 19 nt, Artificial Sequence
  Description of Artificial Sequence: Synthetic oligonucleotide
gacugaacgaagcaguguu

SEQ ID NO: 2992480 - RNA, 19 nt, Artificial Sequence
  Description of Artificial Sequence: Synthetic oligonucleotide
gaagcaguguucucccaaa

SEQ ID NO: 2992481 - RNA, 19 nt, Artificial Sequence
  Description of Artificial Sequence: Synthetic oligonucleotide
ucucaagaggcaguuuguc

SEQ ID NO: 2992482 - RNA, 19 nt, Artificial Sequence
  Description of Artificial Sequence: Synthetic oligonucleotide
ucauaccgagguaggcugu

SEQ ID NO: 2992483 - RNA, 19 nt, Artificial Sequence
  Description of Artificial Sequence: Synthetic oligonucleotide
acagaaacuuugggaaaug

SEQ ID NO: 2992484 - RNA, 19 nt, Artificial Sequence
  Description of Artificial Sequence: Synthetic oligonucleotide
ucuccuccauugauccucu

SEQ ID NO: 2992485 - RNA, 19 nt, Artificial Sequence
  Description of Artificial Sequence: Synthetic oligonucleotide
gguuucauaccgagguagg

SEQ ID NO: 2992486 - RNA, 19 nt, Artificial Sequence
  Description of Artificial Sequence: Synthetic oligonucleotide
uaccgagguaggcugucac

SEQ ID NO: 2992487 - RNA, 19 nt, Artificial Sequence
  Description of Artificial Sequence: Synthetic oligonucleotide
uuuugacuauacacuucuu

SEQ ID NO: 2992488 - RNA, 19 nt, Artificial Sequence
  Description of Artificial Sequence: Synthetic oligonucleotide
gaaaauccugaucccagau

SEQ ID NO: 2992489 - RNA, 19 nt, Artificial Sequence
  Description of Artificial Sequence: Synthetic oligonucleotide
ccauugauccucucauggg

SEQ ID NO: 2992490 - RNA, 19 nt, Artificial Sequence
  Description of Artificial Sequence: Synthetic oligonucleotide
ugaggauuagcgugcgcuu

SEQ ID NO: 2992491 - RNA, 19 nt, Artificial Sequence
  Description of Artificial Sequence: Synthetic oligonucleotide
ugcuccaggaguugucguc

SEQ ID NO: 2992492 - RNA, 19 nt, Artificial Sequence
  Description of Artificial Sequence: Synthetic oligonucleotide
acugggguacauugcaaua

SEQ ID NO: 2992493 - RNA, 19 nt, Artificial Sequence
  Description of Artificial Sequence: Synthetic oligonucleotide
uuguguaguucuccuugua

SEQ ID NO: 2992494 - RNA, 19 nt, Artificial Sequence
  Description of Artificial Sequence: Synthetic oligonucleotide
ugaucacuguuuggauucc

SEQ ID NO: 2992495 - RNA, 19 nt, Artificial Sequence
  Description of Artificial Sequence: Synthetic oligonucleotide
gaagaggaguuggaauuga

SEQ ID NO: 2992496 - RNA, 19 nt, Artificial Sequence
  Description of Artificial Sequence: Synthetic oligonucleotide
cuuugugguuucauaccga

SEQ ID NO: 2992497 - RNA, 19 nt, Artificial Sequence
  Description of Artificial Sequence: Synthetic oligonucleotide
uugggaaaugugugaggau

SEQ ID NO: 2992498 - RNA, 19 nt, Artificial Sequence
  Description of Artificial Sequence: Synthetic oligonucleotide
gaggcugagagaaaauccu

SEQ ID NO: 2992499 - RNA, 19 nt, Artificial Sequence
  Description of Artificial Sequence: Synthetic oligonucleotide
cuccauugauccucucaug

SEQ ID NO: 2992500 - RNA, 19 nt, Artificial Sequence
  Description of Artificial Sequence: Synthetic oligonucleotide
acaccuuugugguuucaua

SEQ ID NO: 2992501 - RNA, 19 nt, Artificial Sequence
  Description of Artificial Sequence: Synthetic oligonucleotide
ccugaucccagauaggaga

SEQ ID NO: 2992502 - RNA, 19 nt, Artificial Sequence
  Description of Artificial Sequence: Synthetic oligonucleotide
uccugucuggcuugcucca

SEQ ID NO: 2992503 - RNA, 19 nt, Artificial Sequence
  Description of Artificial Sequence: Synthetic oligonucleotide
ucgucucauaauggugaag

SEQ ID NO: 2992504 - RNA, 19 nt, Artificial Sequence
  Description of Artificial Sequence: Synthetic oligonucleotide
cauaauggugaagacugaa

SEQ ID NO: 2992505 - RNA, 19 nt, Artificial Sequence
  Description of Artificial Sequence: Synthetic oligonucleotide
auugauccucucaugggaa

SEQ ID NO: 2992506 - RNA, 19 nt, Artificial Sequence
  Description of Artificial Sequence: Synthetic oligonucleotide
agaggaguuggaauugaau

SEQ ID NO: 2992507 - RNA, 19 nt, Artificial Sequence
  Description of Artificial Sequence: Synthetic oligonucleotide
gauuagcgugcgcuucuca

SEQ ID NO: 2992508 - RNA, 19 nt, Artificial Sequence
  Description of Artificial Sequence: Synthetic oligonucleotide
ggaaaugugugaggauuag

SEQ ID NO: 2992509 - RNA, 19 nt, Artificial Sequence
  Description of Artificial Sequence: Synthetic oligonucleotide
gaguuggaauugaaugauc

SEQ ID NO: 2992510 - RNA, 19 nt, Artificial Sequence
  Description of Artificial Sequence: Synthetic oligonucleotide
auccucucaugggaagagg

SEQ ID NO: 2992511 - RNA, 19 nt, Artificial Sequence
  Description of Artificial Sequence: Synthetic oligonucleotide
agacugaacgaagcagugu

SEQ ID NO: 2992512 - RNA, 19 nt, Artificial Sequence
  Description of Artificial Sequence: Synthetic oligonucleotide
ggaagaggaguuggaauug

SEQ ID NO: 2992513 - RNA, 19 nt, Artificial Sequence
  Description of Artificial Sequence: Synthetic oligonucleotide
accaucuuguguaguucuc

SEQ ID NO: 2992514 - RNA, 19 nt, Artificial Sequence
  Description of Artificial Sequence: Synthetic oligonucleotide
ggaauugaaugauccuguc

SEQ ID NO: 2992515 - RNA, 19 nt, Artificial Sequence
  Description of Artificial Sequence: Synthetic oligonucleotide
acaggaggacugaucacug

SEQ ID NO: 2992516 - RNA, 19 nt, Artificial Sequence
  Description of Artificial Sequence: Synthetic oligonucleotide
ggguacauugcaauagcac

SEQ ID NO: 2992517 - RNA, 19 nt, Artificial Sequence
  Description of Artificial Sequence: Synthetic oligonucleotide
agcgugcgcuucucaagag

SEQ ID NO: 2992518 - RNA, 19 nt, Artificial Sequence
  Description of Artificial Sequence: Synthetic oligonucleotide
aagaggaguuggaauugaa

SEQ ID NO: 2992519 - RNA, 19 nt, Artificial Sequence
  Description of Artificial Sequence: Synthetic oligonucleotide
ugggcugguucuggaagag

SEQ ID NO: 2992520 - RNA, 19 nt, Artificial Sequence
  Description of Artificial Sequence: Synthetic oligonucleotide
ucccaguaacaggaggacu

SEQ ID NO: 2992521 - RNA, 19 nt, Artificial Sequence
  Description of Artificial Sequence: Synthetic oligonucleotide
gaggauuagcgugcgcuuc

SEQ ID NO: 2992522 - RNA, 19 nt, Artificial Sequence
  Description of Artificial Sequence: Synthetic oligonucleotide
uggaagaggcugagagaaa

SEQ ID NO: 2992523 - RNA, 19 nt, Artificial Sequence
  Description of Artificial Sequence: Synthetic oligonucleotide
gacagaaacuuugggaaau

SEQ ID NO: 2992524 - RNA, 19 nt, Artificial Sequence
  Description of Artificial Sequence: Synthetic oligonucleotide
acacuucuucuuccaacau

SEQ ID NO: 2992525 - RNA, 19 nt, Artificial Sequence
  Description of Artificial Sequence: Synthetic oligonucleotide
agguaggcugucacagaac

SEQ ID NO: 2992526 - RNA, 19 nt, Artificial Sequence
  Description of Artificial Sequence: Synthetic oligonucleotide
gguaggcugucacagaacu

SEQ ID NO: 2992527 - RNA, 19 nt, Artificial Sequence
  Description of Artificial Sequence: Synthetic oligonucleotide
aggcugagagaaaauccug

SEQ ID NO: 2992528 - RNA, 19 nt, Artificial Sequence
  Description of Artificial Sequence: Synthetic oligonucleotide
ggagaguuuugacuauaca

SEQ ID NO: 2992529 - RNA, 19 nt, Artificial Sequence
  Description of Artificial Sequence: Synthetic oligonucleotide
aucuuguguaguucuccuu

SEQ ID NO: 2992530 - RNA, 19 nt, Artificial Sequence
  Description of Artificial Sequence: Synthetic oligonucleotide
caaacaccuuugugguuuc

SEQ ID NO: 2992531 - RNA, 19 nt, Artificial Sequence
  Description of Artificial Sequence: Synthetic oligonucleotide
caaccaucuuguguaguuc

SEQ ID NO: 2992532 - RNA, 19 nt, Artificial Sequence
  Description of Artificial Sequence: Synthetic oligonucleotide
uaggagaguuuugacuaua

SEQ ID NO: 2992533 - RNA, 19 nt, Artificial Sequence
  Description of Artificial Sequence: Synthetic oligonucleotide
gugaggauuagcgugcgcu

SEQ ID NO: 2992534 - RNA, 19 nt, Artificial Sequence
  Description of Artificial Sequence: Synthetic oligonucleotide
uugcuccaggaguugucgu

SEQ ID NO: 2992535 - RNA, 19 nt, Artificial Sequence
  Description of Artificial Sequence: Synthetic oligonucleotide
guaguucuccuuguaucca

SEQ ID NO: 2992536 - RNA, 19 nt, Artificial Sequence
  Description of Artificial Sequence: Synthetic oligonucleotide
cgugcgcuucucaagaggc

SEQ ID NO: 2992537 - RNA, 19 nt, Artificial Sequence
  Description of Artificial Sequence: Synthetic oligonucleotide
cucaagaggcaguuugucu

SEQ ID NO: 2992538 - RNA, 19 nt, Artificial Sequence
  Description of Artificial Sequence: Synthetic oligonucleotide
ggaagaggcugagagaaaa

SEQ ID NO: 2992539 - RNA, 19 nt, Artificial Sequence
  Description of Artificial Sequence: Synthetic oligonucleotide
gugugaggauuagcgugcg

SEQ ID NO: 2992540 - RNA, 19 nt, Artificial Sequence
  Description of Artificial Sequence: Synthetic oligonucleotide
aggacuuguucuccuccau

SEQ ID NO: 2992541 - RNA, 19 nt, Artificial Sequence
  Description of Artificial Sequence: Synthetic oligonucleotide
guucucccaaacaccuuug

SEQ ID NO: 2992542 - RNA, 19 nt, Artificial Sequence
  Description of Artificial Sequence: Synthetic oligonucleotide
uagugggcugguucuggaa

SEQ ID NO: 2992543 - RNA, 19 nt, Artificial Sequence
  Description of Artificial Sequence: Synthetic oligonucleotide
gugggcugguucuggaaga

SEQ ID NO: 2992544 - RNA, 19 nt, Artificial Sequence
  Description of Artificial Sequence: Synthetic oligonucleotide
aggcugucacagaacuggg

SEQ ID NO: 2992545 - RNA, 19 nt, Artificial Sequence
  Description of Artificial Sequence: Synthetic oligonucleotide
agccaggacuuguucuccu

SEQ ID NO: 2992546 - RNA, 19 nt, Artificial Sequence
  Description of Artificial Sequence: Synthetic oligonucleotide
ugaucccagauaggagagu

SEQ ID NO: 2992547 - RNA, 19 nt, Artificial Sequence
  Description of Artificial Sequence: Synthetic oligonucleotide
gucuggcuugcuccaggag

SEQ ID NO: 2992548 - RNA, 19 nt, Artificial Sequence
  Description of Artificial Sequence: Synthetic oligonucleotide
guaggcugucacagaacug

SEQ ID NO: 2992549 - RNA, 19 nt, Artificial Sequence
  Description of Artificial Sequence: Synthetic oligonucleotide
gcugucacagaacuggggu

SEQ ID NO: 2992550 - RNA, 19 nt, Artificial Sequence
  Description of Artificial Sequence: Synthetic oligonucleotide
aaacaccuuugugguuuca

SEQ ID NO: 2992551 - RNA, 19 nt, Artificial Sequence
  Description of Artificial Sequence: Synthetic oligonucleotide
ccucucaugggaagaggag

SEQ ID NO: 2992552 - RNA, 19 nt, Artificial Sequence
  Description of Artificial Sequence: Synthetic oligonucleotide
ccaucuuguguaguucucc

SEQ ID NO: 2992553 - RNA, 19 nt, Artificial Sequence
  Description of Artificial Sequence: Synthetic oligonucleotide
gcgugcgcuucucaagagg

SEQ ID NO: 2992554 - RNA, 19 nt, Artificial Sequence
  Description of Artificial Sequence: Synthetic oligonucleotide
ccaggacuuguucuccucc

SEQ ID NO: 2992555 - RNA, 19 nt, Artificial Sequence
  Description of Artificial Sequence: Synthetic oligonucleotide
ggcugagagaaaauccuga

SEQ ID NO: 2992556 - RNA, 19 nt, Artificial Sequence
  Description of Artificial Sequence: Synthetic oligonucleotide
caucuuguguaguucuccu

SEQ ID NO: 2992557 - RNA, 19 nt, Artificial Sequence
  Description of Artificial Sequence: Synthetic oligonucleotide
uccuagugggcugguucug

SEQ ID NO: 2992558 - RNA, 19 nt, Artificial Sequence
  Description of Artificial Sequence: Synthetic oligonucleotide
ggacagaaacuuugggaaa

SEQ ID NO: 2992559 - RNA, 19 nt, Artificial Sequence
  Description of Artificial Sequence: Synthetic oligonucleotide
cuuccaacauggacagaaa

SEQ ID NO: 2992560 - RNA, 19 nt, Artificial Sequence
  Description of Artificial Sequence: Synthetic oligonucleotide
cacuguuuggauuccuagu

SEQ ID NO: 2992561 - RNA, 19 nt, Artificial Sequence
  Description of Artificial Sequence: Synthetic oligonucleotide
gaucccagauaggagaguu

SEQ ID NO: 2992562 - RNA, 19 nt, Artificial Sequence
  Description of Artificial Sequence: Synthetic oligonucleotide
cuuguguaguucuccuugu

SEQ ID NO: 2992563 - RNA, 19 nt, Artificial Sequence
  Description of Artificial Sequence: Synthetic oligonucleotide
ucacagaacugggguacau

SEQ ID NO: 2992564 - RNA, 19 nt, Artificial Sequence
  Description of Artificial Sequence: Synthetic oligonucleotide
ccagauaggagaguuuuga

SEQ ID NO: 2992565 - RNA, 19 nt, Artificial Sequence
  Description of Artificial Sequence: Synthetic oligonucleotide
aagaggcaguuugucuuuu

SEQ ID NO: 2992566 - RNA, 19 nt, Artificial Sequence
  Description of Artificial Sequence: Synthetic oligonucleotide
gucgucucauaauggugaa

SEQ ID NO: 2992567 - RNA, 19 nt, Artificial Sequence
  Description of Artificial Sequence: Synthetic oligonucleotide
gggaagaggaguuggaauu

SEQ ID NO: 2992568 - RNA, 19 nt, Artificial Sequence
  Description of Artificial Sequence: Synthetic oligonucleotide
ggcugucacagaacugggg

SEQ ID NO: 2992569 - RNA, 19 nt, Artificial Sequence
  Description of Artificial Sequence: Synthetic oligonucleotide
acgaagcaguguucuccca

SEQ ID NO: 2992570 - RNA, 19 nt, Artificial Sequence
  Description of Artificial Sequence: Synthetic oligonucleotide
cuagugggcugguucugga

SEQ ID NO: 2992571 - RNA, 19 nt, Artificial Sequence
  Description of Artificial Sequence: Synthetic oligonucleotide
cagccaggacuuguucucc

SEQ ID NO: 2992572 - RNA, 19 nt, Artificial Sequence
  Description of Artificial Sequence: Synthetic oligonucleotide
cuucuucuuccaacaugga

SEQ ID NO: 2992573 - RNA, 19 nt, Artificial Sequence
  Description of Artificial Sequence: Synthetic oligonucleotide
gcacaaccaucuuguguag

SEQ ID NO: 2992574 - RNA, 19 nt, Artificial Sequence
  Description of Artificial Sequence: Synthetic oligonucleotide
gaacugggguacauugcaa

SEQ ID NO: 2992575 - RNA, 19 nt, Artificial Sequence
  Description of Artificial Sequence: Synthetic oligonucleotide
cauaccgagguaggcuguc

SEQ ID NO: 2992576 - RNA, 19 nt, Artificial Sequence
  Description of Artificial Sequence: Synthetic oligonucleotide
cuuguucuccuccauugau

SEQ ID NO: 2992577 - RNA, 19 nt, Artificial Sequence
  Description of Artificial Sequence: Synthetic oligonucleotide
cgucucauaauggugaaga

SEQ ID NO: 2992578 - RNA, 19 nt, Artificial Sequence
  Description of Artificial Sequence: Synthetic oligonucleotide
uuuuccugucuggcuugcu

SEQ ID NO: 2992579 - RNA, 19 nt, Artificial Sequence
  Description of Artificial Sequence: Synthetic oligonucleotide
aucacuguuuggauuccua

SEQ ID NO: 2992580 - RNA, 19 nt, Artificial Sequence
  Description of Artificial Sequence: Synthetic oligonucleotide
cucucaugggaagaggagu

SEQ ID NO: 2992581 - RNA, 19 nt, Artificial Sequence
  Description of Artificial Sequence: Synthetic oligonucleotide
auaccgagguaggcuguca

SEQ ID NO: 2992582 - RNA, 19 nt, Artificial Sequence
  Description of Artificial Sequence: Synthetic oligonucleotide
gugguuucauaccgaggua

SEQ ID NO: 2992583 - RNA, 19 nt, Artificial Sequence
  Description of Artificial Sequence: Synthetic oligonucleotide
cuccaggaguugucgucuc

SEQ ID NO: 2992584 - RNA, 19 nt, Artificial Sequence
  Description of Artificial Sequence: Synthetic oligonucleotide
ggaguugucgucucauaau

SEQ ID NO: 2992585 - RNA, 19 nt, Artificial Sequence
  Description of Artificial Sequence: Synthetic oligonucleotide
ggaguuggaauugaaugau

SEQ ID NO: 2992586 - RNA, 19 nt, Artificial Sequence
  Description of Artificial Sequence: Synthetic oligonucleotide
uggcuugcuccaggaguug

SEQ ID NO: 2992587 - RNA, 19 nt, Artificial Sequence
  Description of Artificial Sequence: Synthetic oligonucleotide
ccuagugggcugguucugg

SEQ ID NO: 2992588 - RNA, 19 nt, Artificial Sequence
  Description of Artificial Sequence: Synthetic oligonucleotide
cccagauaggagaguuuug

SEQ ID NO: 2992589 - RNA, 19 nt, Artificial Sequence
  Description of Artificial Sequence: Synthetic oligonucleotide
gggguacauugcaauagca

SEQ ID NO: 2992590 - RNA, 19 nt, Artificial Sequence
  Description of Artificial Sequence: Synthetic oligonucleotide
gcugagagaaaauccugau

SEQ ID NO: 2992591 - RNA, 19 nt, Artificial Sequence
  Description of Artificial Sequence: Synthetic oligonucleotide
cagaaacuuugggaaaugu

SEQ ID NO: 2992592 - RNA, 19 nt, Artificial Sequence
  Description of Artificial Sequence: Synthetic oligonucleotide
gaagaggcugagagaaaau

SEQ ID NO: 2992593 - RNA, 19 nt, Artificial Sequence
  Description of Artificial Sequence: Synthetic oligonucleotide
ccugucccaguaacaggag

SEQ ID NO: 2992594 - RNA, 19 nt, Artificial Sequence
  Description of Artificial Sequence: Synthetic oligonucleotide
gggaaaugugugaggauua

SEQ ID NO: 2992595 - RNA, 19 nt, Artificial Sequence
  Description of Artificial Sequence: Synthetic oligonucleotide
cuggcuugcuccaggaguu

SEQ ID NO: 2992596 - RNA, 19 nt, Artificial Sequence
  Description of Artificial Sequence: Synthetic oligonucleotide
gucacagaacugggguaca

SEQ ID NO: 2992597 - RNA, 19 nt, Artificial Sequence
  Description of Artificial Sequence: Synthetic oligonucleotide
gaucacuguuuggauuccu

SEQ ID NO: 2992598 - RNA, 19 nt, Artificial Sequence
  Description of Artificial Sequence: Synthetic oligonucleotide
gggcugguucuggaagagg

SEQ ID NO: 2992599 - RNA, 19 nt, Artificial Sequence
  Description of Artificial Sequence: Synthetic oligonucleotide
ccaacauggacagaaacuu

SEQ ID NO: 2992600 - RNA, 19 nt, Artificial Sequence
  Description of Artificial Sequence: Synthetic oligonucleotide
caagaggcaguuugucuuu

SEQ ID NO: 2992601 - RNA, 19 nt, Artificial Sequence
  Description of Artificial Sequence: Synthetic oligonucleotide
caggaguugucgucucaua

SEQ ID NO: 2992602 - RNA, 19 nt, Artificial Sequence
  Description of Artificial Sequence: Synthetic oligonucleotide
gugcgcuucucaagaggca

SEQ ID NO: 2992603 - RNA, 19 nt, Artificial Sequence
  Description of Artificial Sequence: Synthetic oligonucleotide
guucuccuccauugauccu

SEQ ID NO: 2992604 - RNA, 19 nt, Artificial Sequence
  Description of Artificial Sequence: Synthetic oligonucleotide
gccaggacuuguucuccuc

SEQ ID NO: 2992605 - RNA, 19 nt, Artificial Sequence
  Description of Artificial Sequence: Synthetic oligonucleotide
ccuccauugauccucucau

SEQ ID NO: 2992606 - RNA, 19 nt, Artificial Sequence
  Description of Artificial Sequence: Synthetic oligonucleotide
caggaggacugaucacugu

SEQ ID NO: 2992607 - RNA, 19 nt, Artificial Sequence
  Description of Artificial Sequence: Synthetic oligonucleotide
ccaaacaccuuugugguuu

SEQ ID NO: 2992608 - RNA, 19 nt, Artificial Sequence
  Description of Artificial Sequence: Synthetic oligonucleotide
ggauuagcgugcgcuucuc

SEQ ID NO: 2992609 - RNA, 19 nt, Artificial Sequence
  Description of Artificial Sequence: Synthetic oligonucleotide
cuccuccauugauccucuc

SEQ ID NO: 2992610 - RNA, 19 nt, Artificial Sequence
  Description of Artificial Sequence: Synthetic oligonucleotide
ggacuuguucuccuccauu

SEQ ID NO: 2992611 - RNA, 19 nt, Artificial Sequence
  Description of Artificial Sequence: Synthetic oligonucleotide
cacaaccaucuuguguagu

SEQ ID NO: 2992612 - RNA, 19 nt, Artificial Sequence
  Description of Artificial Sequence: Synthetic oligonucleotide
gcuccaggaguugucgucu

SEQ ID NO: 2992613 - RNA, 19 nt, Artificial Sequence
  Description of Artificial Sequence: Synthetic oligonucleotide
gauuccuagugggcugguu

SEQ ID NO: 2992614 - RNA, 19 nt, Artificial Sequence
  Description of Artificial Sequence: Synthetic oligonucleotide
cgaagcaguguucucccaa

SEQ ID NO: 2992615 - RNA, 19 nt, Artificial Sequence
  Description of Artificial Sequence: Synthetic oligonucleotide
ggaggacugaucacuguuu

SEQ ID NO: 2992616 - RNA, 19 nt, Artificial Sequence
  Description of Artificial Sequence: Synthetic oligonucleotide
gcugguucuggaagaggcu

SEQ ID NO: 2992617 - RNA, 19 nt, Artificial Sequence
  Description of Artificial Sequence: Synthetic oligonucleotide
cacagaacugggguacauu

SEQ ID NO: 2992618 - RNA, 19 nt, Artificial Sequence
  Description of Artificial Sequence: Synthetic oligonucleotide
caguaacaggaggacugau

SEQ ID NO: 2992619 - RNA, 19 nt, Artificial Sequence
  Description of Artificial Sequence: Synthetic oligonucleotide
cgagguaggcugucacaga

SEQ ID NO: 2992620 - RNA, 19 nt, Artificial Sequence
  Description of Artificial Sequence: Synthetic oligonucleotide
ggcuugcuccaggaguugu

SEQ ID NO: 2992621 - RNA, 19 nt, Artificial Sequence
  Description of Artificial Sequence: Synthetic oligonucleotide
guguucucccaaacaccuu

SEQ ID NO: 2992622 - RNA, 19 nt, Artificial Sequence
  Description of Artificial Sequence: Synthetic oligonucleotide
ccaggaguugucgucucau

SEQ ID NO: 2992623 - RNA, 19 nt, Artificial Sequence
  Description of Artificial Sequence: Synthetic oligonucleotide
gcgcuucucaagaggcagu

SEQ ID NO: 2992624 - RNA, 19 nt, Artificial Sequence
  Description of Artificial Sequence: Synthetic oligonucleotide
ggauuccuagugggcuggu

SEQ ID NO: 2992625 - RNA, 19 nt, Artificial Sequence
  Description of Artificial Sequence: Synthetic oligonucleotide
gcuucucaagaggcaguuu

SEQ ID NO: 2992626 - RNA, 19 nt, Artificial Sequence
  Description of Artificial Sequence: Synthetic oligonucleotide
cccaaacaccuuugugguu

SEQ ID NO: 2992627 - RNA, 19 nt, Artificial Sequence
  Description of Artificial Sequence: Synthetic oligonucleotide
cgcuucucaagaggcaguu

SEQ ID NO: 2992628 - RNA, 19 nt, Artificial Sequence
  Description of Artificial Sequence: Synthetic oligonucleotide
aauugcaguguacagaguc

SEQ ID NO: 2992629 - RNA, 19 nt, Artificial Sequence
  Description of Artificial Sequence: Synthetic oligonucleotide
uuguauauagaauaaacug

SEQ ID NO: 2992630 - RNA, 19 nt, Artificial Sequence
  Description of Artificial Sequence: Synthetic oligonucleotide
uguauauagaauaaacugu

SEQ ID NO: 2992631 - RNA, 19 nt, Artificial Sequence
  Description of Artificial Sequence: Synthetic oligonucleotide
uuaauugcaguguacagag

SEQ ID NO: 2992632 - RNA, 19 nt, Artificial Sequence
  Description of Artificial Sequence: Synthetic oligonucleotide
uuuguauauagaauaaacu

SEQ ID NO: 2992633 - RNA, 19 nt, Artificial Sequence
  Description of Artificial Sequence: Synthetic oligonucleotide
aauaaacugucguggacgg

SEQ ID NO: 2992634 - RNA, 19 nt, Artificial Sequence
  Description of Artificial Sequence: Synthetic oligonucleotide
uauauagaauaaacugucg

SEQ ID NO: 2992635 - RNA, 19 nt, Artificial Sequence
  Description of Artificial Sequence: Synthetic oligonucleotide
uauagaauaaacugucgug

SEQ ID NO: 2992636 - RNA, 19 nt, Artificial Sequence
  Description of Artificial Sequence: Synthetic oligonucleotide
auagaauaaacugucgugg

SEQ ID NO: 2992637 - RNA, 19 nt, Artificial Sequence
  Description of Artificial Sequence: Synthetic oligonucleotide
gaauaaacugucguggacg

SEQ ID NO: 2992638 - RNA, 19 nt, Artificial Sequence
  Description of Artificial Sequence: Synthetic oligonucleotide
auauagaauaaacugucgu

SEQ ID NO: 2992639 - RNA, 19 nt, Artificial Sequence
  Description of Artificial Sequence: Synthetic oligonucleotide
uaaacugucguggacggcg

SEQ ID NO: 2992640 - RNA, 19 nt, Artificial Sequence
  Description of Artificial Sequence: Synthetic oligonucleotide
uauuuaauugcaguguaca

SEQ ID NO: 2992641 - RNA, 19 nt, Artificial Sequence
  Description of Artificial Sequence: Synthetic oligonucleotide
uuuaauugcaguguacaga

SEQ ID NO: 2992642 - RNA, 19 nt, Artificial Sequence
  Description of Artificial Sequence: Synthetic oligonucleotide
agaauaaacugucguggac

SEQ ID NO: 2992643 - RNA, 19 nt, Artificial Sequence
  Description of Artificial Sequence: Synthetic oligonucleotide
uugguuuccagcaggaaac

SEQ ID NO: 2992644 - RNA, 19 nt, Artificial Sequence
  Description of Artificial Sequence: Synthetic oligonucleotide
auuuaauugcaguguacag

SEQ ID NO: 2992645 - RNA, 19 nt, Artificial Sequence
  Description of Artificial Sequence: Synthetic oligonucleotide
uuugguuuccagcaggaaa

SEQ ID NO: 2992646 - RNA, 19 nt, Artificial Sequence
  Description of Artificial Sequence: Synthetic oligonucleotide
aguugcuccuccucggggc

SEQ ID NO: 2992647 - RNA, 19 nt, Artificial Sequence
  Description of Artificial Sequence: Synthetic oligonucleotide
guauauagaauaaacuguc

SEQ ID NO: 2992648 - RNA, 19 nt, Artificial Sequence
  Description of Artificial Sequence: Synthetic oligonucleotide
uagaauaaacugucgugga

SEQ ID NO: 2992649 - RNA, 19 nt, Artificial Sequence
  Description of Artificial Sequence: Synthetic oligonucleotide
uccagcaggaaacgcacgc

SEQ ID NO: 2992650 - RNA, 19 nt, Artificial Sequence
  Description of Artificial Sequence: Synthetic oligonucleotide
ugguccuucaacuuuccgu

SEQ ID NO: 2992651 - RNA, 19 nt, Artificial Sequence
  Description of Artificial Sequence: Synthetic oligonucleotide
cuauuuaauugcaguguac

SEQ ID NO: 2992652 - RNA, 19 nt, Artificial Sequence
  Description of Artificial Sequence: Synthetic oligonucleotide
aguggccggagccuggcgc

SEQ ID NO: 2992653 - RNA, 19 nt, Artificial Sequence
  Description of Artificial Sequence: Synthetic oligonucleotide
uacagagucguguuuguau

SEQ ID NO: 2992654 - RNA, 19 nt, Artificial Sequence
  Description of Artificial Sequence: Synthetic oligonucleotide
ucguguuuguauauagaau

SEQ ID NO: 2992655 - RNA, 19 nt, Artificial Sequence
  Description of Artificial Sequence: Synthetic oligonucleotide
uguuuguauauagaauaaa

SEQ ID NO: 2992656 - RNA, 19 nt, Artificial Sequence
  Description of Artificial Sequence: Synthetic oligonucleotide
uacgcacccgccuccagcg

SEQ ID NO: 2992657 - RNA, 19 nt, Artificial Sequence
  Description of Artificial Sequence: Synthetic oligonucleotide
cucugcugcacgcaguugc

SEQ ID NO: 2992658 - RNA, 19 nt, Artificial Sequence
  Description of Artificial Sequence: Synthetic oligonucleotide
auugcaguguacagagucg

SEQ ID NO: 2992659 - RNA, 19 nt, Artificial Sequence
  Description of Artificial Sequence: Synthetic oligonucleotide
gucguguuuguauauagaa

SEQ ID NO: 2992660 - RNA, 19 nt, Artificial Sequence
  Description of Artificial Sequence: Synthetic oligonucleotide
ucucgcucucguucuaccg

SEQ ID NO: 2992661 - RNA, 19 nt, Artificial Sequence
  Description of Artificial Sequence: Synthetic oligonucleotide
ucuaccgcccuacgcaccc

SEQ ID NO: 2992662 - RNA, 19 nt, Artificial Sequence
  Description of Artificial Sequence: Synthetic oligonucleotide
ucaaugcgcagcuccagcu

SEQ ID NO: 2992663 - RNA, 19 nt, Artificial Sequence
  Description of Artificial Sequence: Synthetic oligonucleotide
ugugugguccuucaacuuu

SEQ ID NO: 2992664 - RNA, 19 nt, Artificial Sequence
  Description of Artificial Sequence: Synthetic oligonucleotide
aaacugucguggacggcgc

SEQ ID NO: 2992665 - RNA, 19 nt, Artificial Sequence
  Description of Artificial Sequence: Synthetic oligonucleotide
ucguggacggcgcagcugu

SEQ ID NO: 2992666 - RNA, 19 nt, Artificial Sequence
  Description of Artificial Sequence: Synthetic oligonucleotide
uuggagcagagccacgggu

SEQ ID NO: 2992667 - RNA, 19 nt, Artificial Sequence
  Description of Artificial Sequence: Synthetic oligonucleotide
acgcaguugcuccuccucg

SEQ ID NO: 2992668 - RNA, 19 nt, Artificial Sequence
  Description of Artificial Sequence: Synthetic oligonucleotide
uguacagagucguguuugu

SEQ ID NO: 2992669 - RNA, 19 nt, Artificial Sequence
  Description of Artificial Sequence: Synthetic oligonucleotide
uggcgcaguccccuagucg

SEQ ID NO: 2992670 - RNA, 19 nt, Artificial Sequence
  Description of Artificial Sequence: Synthetic oligonucleotide
ucguucuaccgcccuacgc

SEQ ID NO: 2992671 - RNA, 19 nt, Artificial Sequence
  Description of Artificial Sequence: Synthetic oligonucleotide
uuccagcaggaaacgcacg

SEQ ID NO: 2992672 - RNA, 19 nt, Artificial Sequence
  Description of Artificial Sequence: Synthetic oligonucleotide
agcaggaaacgcacgcgcc

SEQ ID NO: 2992673 - RNA, 19 nt, Artificial Sequence
  Description of Artificial Sequence: Synthetic oligonucleotide
acagagucguguuuguaua

SEQ ID NO: 2992674 - RNA, 19 nt, Artificial Sequence
  Description of Artificial Sequence: Synthetic oligonucleotide
aaacgcacgcgccgcucuc

SEQ ID NO: 2992675 - RNA, 19 nt, Artificial Sequence
  Description of Artificial Sequence: Synthetic oligonucleotide
guguacagagucguguuug

SEQ ID NO: 2992676 - RNA, 19 nt, Artificial Sequence
  Description of Artificial Sequence: Synthetic oligonucleotide
ugugguccuucaacuuucc

SEQ ID NO: 2992677 - RNA, 19 nt, Artificial Sequence
  Description of Artificial Sequence: Synthetic oligonucleotide
ugguuuccagcaggaaacg

SEQ ID NO: 2992678 - RNA, 19 nt, Artificial Sequence
  Description of Artificial Sequence: Synthetic oligonucleotide
auaaacugucguggacggc

SEQ ID NO: 2992679 - RNA, 19 nt, Artificial Sequence
  Description of Artificial Sequence: Synthetic oligonucleotide
cucaaugcgcagcuccagc

SEQ ID NO: 2992680 - RNA, 19 nt, Artificial Sequence
  Description of Artificial Sequence: Synthetic oligonucleotide
ugcaucaggcgcaguggcc

SEQ ID NO: 2992681 - RNA, 19 nt, Artificial Sequence
  Description of Artificial Sequence: Synthetic oligonucleotide
cucgcucucguucuaccgc

SEQ ID NO: 2992682 - RNA, 19 nt, Artificial Sequence
  Description of Artificial Sequence: Synthetic oligonucleotide
ucgcucucguucuaccgcc

SEQ ID NO: 2992683 - RNA, 19 nt, Artificial Sequence
  Description of Artificial Sequence: Synthetic oligonucleotide
uccccacuggccucuuugg

SEQ ID NO: 2992684 - RNA, 19 nt, Artificial Sequence
  Description of Artificial Sequence: Synthetic oligonucleotide
uugcaguguacagagucgu

SEQ ID NO: 2992685 - RNA, 19 nt, Artificial Sequence
  Description of Artificial Sequence: Synthetic oligonucleotide
cagcaggaaacgcacgcgc

SEQ ID NO: 2992686 - RNA, 19 nt, Artificial Sequence
  Description of Artificial Sequence: Synthetic oligonucleotide
ugcagugcgcagccgcucc

SEQ ID NO: 2992687 - RNA, 19 nt, Artificial Sequence
  Description of Artificial Sequence: Synthetic oligonucleotide
ugcaguguacagagucgug

SEQ ID NO: 2992688 - RNA, 19 nt, Artificial Sequence
  Description of Artificial Sequence: Synthetic oligonucleotide
guuggagcagagccacggg

SEQ ID NO: 2992689 - RNA, 19 nt, Artificial Sequence
  Description of Artificial Sequence: Synthetic oligonucleotide
ucggcuugcggcccaggcc

SEQ ID NO: 2992690 - RNA, 19 nt, Artificial Sequence
  Description of Artificial Sequence: Synthetic oligonucleotide
ucgggcacgcagcuccccg

SEQ ID NO: 2992691 - RNA, 19 nt, Artificial Sequence
  Description of Artificial Sequence: Synthetic oligonucleotide
ggcccguuggagcagagcc

SEQ ID NO: 2992692 - RNA, 19 nt, Artificial Sequence
  Description of Artificial Sequence: Synthetic oligonucleotide
uggacggcgcagcugugug

SEQ ID NO: 2992693 - RNA, 19 nt, Artificial Sequence
  Description of Artificial Sequence: Synthetic oligonucleotide
uaauugcaguguacagagu

SEQ ID NO: 2992694 - RNA, 19 nt, Artificial Sequence
  Description of Artificial Sequence: Synthetic oligonucleotide
ugcgcagccgcucccgcgc

SEQ ID NO: 2992695 - RNA, 19 nt, Artificial Sequence
  Description of Artificial Sequence: Synthetic oligonucleotide
ucccgcgccgccucaaugc

SEQ ID NO: 2992696 - RNA, 19 nt, Artificial Sequence
  Description of Artificial Sequence: Synthetic oligonucleotide
uccagcucccgcagcucgg

SEQ ID NO: 2992697 - RNA, 19 nt, Artificial Sequence
  Description of Artificial Sequence: Synthetic oligonucleotide
cugcaucaggcgcaguggc

SEQ ID NO: 2992698 - RNA, 19 nt, Artificial Sequence
  Description of Artificial Sequence: Synthetic oligonucleotide
ugcacccucugcugcacgc

SEQ ID NO: 2992699 - RNA, 19 nt, Artificial Sequence
  Description of Artificial Sequence: Synthetic oligonucleotide
agagccacggguccccacu

SEQ ID NO: 2992700 - RNA, 19 nt, Artificial Sequence
  Description of Artificial Sequence: Synthetic oligonucleotide
uucuaccgcccuacgcacc

SEQ ID NO: 2992701 - RNA, 19 nt, Artificial Sequence
  Description of Artificial Sequence: Synthetic oligonucleotide
agcagagccacgggucccc

SEQ ID NO: 2992702 - RNA, 19 nt, Artificial Sequence
  Description of Artificial Sequence: Synthetic oligonucleotide
cagugcagugcgcagccgc

SEQ ID NO: 2992703 - RNA, 19 nt, Artificial Sequence
  Description of Artificial Sequence: Synthetic oligonucleotide
gcaggaaacgcacgcgccg

SEQ ID NO: 2992704 - RNA, 19 nt, Artificial Sequence
  Description of Artificial Sequence: Synthetic oligonucleotide
ucucguucuaccgcccuac

SEQ ID NO: 2992705 - RNA, 19 nt, Artificial Sequence
  Description of Artificial Sequence: Synthetic oligonucleotide
guucuaccgcccuacgcac

SEQ ID NO: 2992706 - RNA, 19 nt, Artificial Sequence
  Description of Artificial Sequence: Synthetic oligonucleotide
gccucuuugguuuccagca

SEQ ID NO: 2992707 - RNA, 19 nt, Artificial Sequence
  Description of Artificial Sequence: Synthetic oligonucleotide
aguguacagagucguguuu

SEQ ID NO: 2992708 - RNA, 19 nt, Artificial Sequence
  Description of Artificial Sequence: Synthetic oligonucleotide
cuacgcacccgccuccagc

SEQ ID NO: 2992709 - RNA, 19 nt, Artificial Sequence
  Description of Artificial Sequence: Synthetic oligonucleotide
guguuuguauauagaauaa

SEQ ID NO: 2992710 - RNA, 19 nt, Artificial Sequence
  Description of Artificial Sequence: Synthetic oligonucleotide
aacgcacgcgccgcucucg

SEQ ID NO: 2992711 - RNA, 19 nt, Artificial Sequence
  Description of Artificial Sequence: Synthetic oligonucleotide
cguguuuguauauagaaua

SEQ ID NO: 2992712 - RNA, 19 nt, Artificial Sequence
  Description of Artificial Sequence: Synthetic oligonucleotide
gcuauuuaauugcagugua

SEQ ID NO: 2992713 - RNA, 19 nt, Artificial Sequence
  Description of Artificial Sequence: Synthetic oligonucleotide
uccuccucggggccgcugc

SEQ ID NO: 2992714 - RNA, 19 nt, Artificial Sequence
  Description of Artificial Sequence: Synthetic oligonucleotide
gugguccuucaacuuuccg

SEQ ID NO: 2992715 - RNA, 19 nt, Artificial Sequence
  Description of Artificial Sequence: Synthetic oligonucleotide
caguugcuccuccucgggg

SEQ ID NO: 2992716 - RNA, 19 nt, Artificial Sequence
  Description of Artificial Sequence: Synthetic oligonucleotide
cucucgcucucguucuacc

SEQ ID NO: 2992717 - RNA, 19 nt, Artificial Sequence
  Description of Artificial Sequence: Synthetic oligonucleotide
ugcggcccaggcccguugg

SEQ ID NO: 2992718 - RNA, 19 nt, Artificial Sequence
  Description of Artificial Sequence: Synthetic oligonucleotide
acuggccucuuugguuucc

SEQ ID NO: 2992719 - RNA, 19 nt, Artificial Sequence
  Description of Artificial Sequence: Synthetic oligonucleotide
gcaucaggcgcaguggccg

SEQ ID NO: 2992720 - RNA, 19 nt, Artificial Sequence
  Description of Artificial Sequence: Synthetic oligonucleotide
guugcuccuccucggggcc

SEQ ID NO: 2992721 - RNA, 19 nt, Artificial Sequence
  Description of Artificial Sequence: Synthetic oligonucleotide
agcgcccugcacccucugc

SEQ ID NO: 2992722 - RNA, 19 nt, Artificial Sequence
  Description of Artificial Sequence: Synthetic oligonucleotide
agucguguuuguauauaga

SEQ ID NO: 2992723 - RNA, 19 nt, Artificial Sequence
  Description of Artificial Sequence: Synthetic oligonucleotide
aacugucguggacggcgca

SEQ ID NO: 2992724 - RNA, 19 nt, Artificial Sequence
  Description of Artificial Sequence: Synthetic oligonucleotide
caucaggcgcaguggccgg

SEQ ID NO: 2992725 - RNA, 19 nt, Artificial Sequence
  Description of Artificial Sequence: Synthetic oligonucleotide
acugucguggacggcgcag

SEQ ID NO: 2992726 - RNA, 19 nt, Artificial Sequence
  Description of Artificial Sequence: Synthetic oligonucleotide
acgcacgcgccgcucucgc

SEQ ID NO: 2992727 - RNA, 19 nt, Artificial Sequence
  Description of Artificial Sequence: Synthetic oligonucleotide
caaugcgcagcuccagcuc

SEQ ID NO: 2992728 - RNA, 19 nt, Artificial Sequence
  Description of Artificial Sequence: Synthetic oligonucleotide
cucguucuaccgcccuacg

SEQ ID NO: 2992729 - RNA, 19 nt, Artificial Sequence
  Description of Artificial Sequence: Synthetic oligonucleotide
caggaaacgcacgcgccgc

SEQ ID NO: 2992730 - RNA, 19 nt, Artificial Sequence
  Description of Artificial Sequence: Synthetic oligonucleotide
ugucguggacggcgcagcu

SEQ ID NO: 2992731 - RNA, 19 nt, Artificial Sequence
  Description of Artificial Sequence: Synthetic oligonucleotide
ggccucuuugguuuccagc

SEQ ID NO: 2992732 - RNA, 19 nt, Artificial Sequence
  Description of Artificial Sequence: Synthetic oligonucleotide
uggccucuuugguuuccag

SEQ ID NO: 2992733 - RNA, 19 nt, Artificial Sequence
  Description of Artificial Sequence: Synthetic oligonucleotide
cucggcuugcggcccaggc

SEQ ID NO: 2992734 - RNA, 19 nt, Artificial Sequence
  Description of Artificial Sequence: Synthetic oligonucleotide
ccuucaacuuuccgugggg

SEQ ID NO: 2992735 - RNA, 19 nt, Artificial Sequence
  Description of Artificial Sequence: Synthetic oligonucleotide
uaccgcccuacgcacccgc

SEQ ID NO: 2992736 - RNA, 19 nt, Artificial Sequence
  Description of Artificial Sequence: Synthetic oligonucleotide
gugugguccuucaacuuuc

SEQ ID NO: 2992737 - RNA, 19 nt, Artificial Sequence
  Description of Artificial Sequence: Synthetic oligonucleotide
agccacggguccccacugg

SEQ ID NO: 2992738 - RNA, 19 nt, Artificial Sequence
  Description of Artificial Sequence: Synthetic oligonucleotide
gcaguugcuccuccucggg

SEQ ID NO: 2992739 - RNA, 19 nt, Artificial Sequence
  Description of Artificial Sequence: Synthetic oligonucleotide
aguccccuagucgggcacg

SEQ ID NO: 2992740 - RNA, 19 nt, Artificial Sequence
  Description of Artificial Sequence: Synthetic oligonucleotide
agagucguguuuguauaua

SEQ ID NO: 2992741 - RNA, 19 nt, Artificial Sequence
  Description of Artificial Sequence: Synthetic oligonucleotide
ugcucccucggugugcagu

SEQ ID NO: 2992742 - RNA, 19 nt, Artificial Sequence
  Description of Artificial Sequence: Synthetic oligonucleotide
gccugcaucaggcgcagug

SEQ ID NO: 2992743 - RNA, 19 nt, Artificial Sequence
  Description of Artificial Sequence: Synthetic oligonucleotide
uccagcgcccugcacccuc

SEQ ID NO: 2992744 - RNA, 19 nt, Artificial Sequence
  Description of Artificial Sequence: Synthetic oligonucleotide
aggaaacgcacgcgccgcu

SEQ ID NO: 2992745 - RNA, 19 nt, Artificial Sequence
  Description of Artificial Sequence: Synthetic oligonucleotide
gagccacggguccccacug

SEQ ID NO: 2992746 - RNA, 19 nt, Artificial Sequence
  Description of Artificial Sequence: Synthetic oligonucleotide
ugcgcagcuccagcucccg

SEQ ID NO: 2992747 - RNA, 19 nt, Artificial Sequence
  Description of Artificial Sequence: Synthetic oligonucleotide
ucaggcgcaguggccggag

SEQ ID NO: 2992748 - RNA, 19 nt, Artificial Sequence
  Description of Artificial Sequence: Synthetic oligonucleotide
cacccucugcugcacgcag

SEQ ID NO: 2992749 - RNA, 19 nt, Artificial Sequence
  Description of Artificial Sequence: Synthetic oligonucleotide
acggguccccacuggccuc

SEQ ID NO: 2992750 - RNA, 19 nt, Artificial Sequence
  Description of Artificial Sequence: Synthetic oligonucleotide
aggcccguuggagcagagc

SEQ ID NO: 2992751 - RNA, 19 nt, Artificial Sequence
  Description of Artificial Sequence: Synthetic oligonucleotide
cugucguggacggcgcagc

SEQ ID NO: 2992752 - RNA, 19 nt, Artificial Sequence
  Description of Artificial Sequence: Synthetic oligonucleotide
augcgcagcuccagcuccc

SEQ ID NO: 2992753 - RNA, 19 nt, Artificial Sequence
  Description of Artificial Sequence: Synthetic oligonucleotide
acgcacccgccuccagcgc

SEQ ID NO: 2992754 - RNA, 19 nt, Artificial Sequence
  Description of Artificial Sequence: Synthetic oligonucleotide
cacgcagcuccccgcgccg

SEQ ID NO: 2992755 - RNA, 19 nt, Artificial Sequence
  Description of Artificial Sequence: Synthetic oligonucleotide
gaaacgcacgcgccgcucu

SEQ ID NO: 2992756 - RNA, 19 nt, Artificial Sequence
  Description of Artificial Sequence: Synthetic oligonucleotide
gcugugugguccuucaacu

SEQ ID NO: 2992757 - RNA, 19 nt, Artificial Sequence
  Description of Artificial Sequence: Synthetic oligonucleotide
gguuuccagcaggaaacgc

SEQ ID NO: 2992758 - RNA, 19 nt, Artificial Sequence
  Description of Artificial Sequence: Synthetic oligonucleotide
gugcgcagccgcucccgcg

SEQ ID NO: 2992759 - RNA, 19 nt, Artificial Sequence
  Description of Artificial Sequence: Synthetic oligonucleotide
ccugcaucaggcgcagugg

SEQ ID NO: 2992760 - RNA, 19 nt, Artificial Sequence
  Description of Artificial Sequence: Synthetic oligonucleotide
agugcagugcgcagccgcu

SEQ ID NO: 2992761 - RNA, 19 nt, Artificial Sequence
  Description of Artificial Sequence: Synthetic oligonucleotide
agucgggcacgcagcuccc

SEQ ID NO: 2992762 - RNA, 19 nt, Artificial Sequence
  Description of Artificial Sequence: Synthetic oligonucleotide
gcagcagugcagugcgcag

SEQ ID NO: 2992763 - RNA, 19 nt, Artificial Sequence
  Description of Artificial Sequence: Synthetic oligonucleotide
uugcggcccaggcccguug

SEQ ID NO: 2992764 - RNA, 19 nt, Artificial Sequence
  Description of Artificial Sequence: Synthetic oligonucleotide
cugcacccucugcugcacg

SEQ ID NO: 2992765 - RNA, 19 nt, Artificial Sequence
  Description of Artificial Sequence: Synthetic oligonucleotide
ggacggcgcagcugugugg

SEQ ID NO: 2992766 - RNA, 19 nt, Artificial Sequence
  Description of Artificial Sequence: Synthetic oligonucleotide
caguccccuagucgggcac

SEQ ID NO: 2992767 - RNA, 19 nt, Artificial Sequence
  Description of Artificial Sequence: Synthetic oligonucleotide
cguucuaccgcccuacgca

SEQ ID NO: 2992768 - RNA, 19 nt, Artificial Sequence
  Description of Artificial Sequence: Synthetic oligonucleotide
gccgcucucgcucucguuc

SEQ ID NO: 2992769 - RNA, 19 nt, Artificial Sequence
  Description of Artificial Sequence: Synthetic oligonucleotide
cguuggagcagagccacgg

SEQ ID NO: 2992770 - RNA, 19 nt, Artificial Sequence
  Description of Artificial Sequence: Synthetic oligonucleotide
ccuccagcgcccugcaccc

SEQ ID NO: 2992771 - RNA, 19 nt, Artificial Sequence
  Description of Artificial Sequence: Synthetic oligonucleotide
ccagcaggaaacgcacgcg

SEQ ID NO: 2992772 - RNA, 19 nt, Artificial Sequence
  Description of Artificial Sequence: Synthetic oligonucleotide
cccuagucgggcacgcagc

SEQ ID NO: 2992773 - RNA, 19 nt, Artificial Sequence
  Description of Artificial Sequence: Synthetic oligonucleotide
ggcccaggcccguuggagc

SEQ ID NO: 2992774 - RNA, 19 nt, Artificial Sequence
  Description of Artificial Sequence: Synthetic oligonucleotide
guggccggagccuggcgca

SEQ ID NO: 2992775 - RNA, 19 nt, Artificial Sequence
  Description of Artificial Sequence: Synthetic oligonucleotide
cagugcgcagccgcucccg

SEQ ID NO: 2992776 - RNA, 19 nt, Artificial Sequence
  Description of Artificial Sequence: Synthetic oligonucleotide
cuggcgcaguccccuaguc

SEQ ID NO: 2992777 - RNA, 19 nt, Artificial Sequence
  Description of Artificial Sequence: Synthetic oligonucleotide
ucccgcagcucggcuugcg

SEQ ID NO: 2992778 - RNA, 19 nt, Artificial Sequence
  Description of Artificial Sequence: Synthetic oligonucleotide
gcagcugugugguccuuca

SEQ ID NO: 2992779 - RNA, 19 nt, Artificial Sequence
  Description of Artificial Sequence: Synthetic oligonucleotide
gacggcgcagcuguguggu

SEQ ID NO: 2992780 - RNA, 19 nt, Artificial Sequence
  Description of Artificial Sequence: Synthetic oligonucleotide
accgcccuacgcacccgcc

SEQ ID NO: 2992781 - RNA, 19 nt, Artificial Sequence
  Description of Artificial Sequence: Synthetic oligonucleotide
cgccucaaugcgcagcucc

SEQ ID NO: 2992782 - RNA, 19 nt, Artificial Sequence
  Description of Artificial Sequence: Synthetic oligonucleotide
cggcuugcggcccaggccc

SEQ ID NO: 2992783 - RNA, 19 nt, Artificial Sequence
  Description of Artificial Sequence: Synthetic oligonucleotide
acgcagcuccccgcgccgc

SEQ ID NO: 2992784 - RNA, 19 nt, Artificial Sequence
  Description of Artificial Sequence: Synthetic oligonucleotide
ccccuagucgggcacgcag

SEQ ID NO: 2992785 - RNA, 19 nt, Artificial Sequence
  Description of Artificial Sequence: Synthetic oligonucleotide
gucguggacggcgcagcug

SEQ ID NO: 2992786 - RNA, 19 nt, Artificial Sequence
  Description of Artificial Sequence: Synthetic oligonucleotide
caguggccggagccuggcg

SEQ ID NO: 2992787 - RNA, 19 nt, Artificial Sequence
  Description of Artificial Sequence: Synthetic oligonucleotide
cgcaguugcuccuccucgg

SEQ ID NO: 2992788 - RNA, 19 nt, Artificial Sequence
  Description of Artificial Sequence: Synthetic oligonucleotide
gggcgccugcaucaggcgc

SEQ ID NO: 2992789 - RNA, 19 nt, Artificial Sequence
  Description of Artificial Sequence: Synthetic oligonucleotide
cuuugguuuccagcaggaa

SEQ ID NO: 2992790 - RNA, 19 nt, Artificial Sequence
  Description of Artificial Sequence: Synthetic oligonucleotide
cucccgcgccgccucaaug

SEQ ID NO: 2992791 - RNA, 19 nt, Artificial Sequence
  Description of Artificial Sequence: Synthetic oligonucleotide
acggcgcagcugugugguc

SEQ ID NO: 2992792 - RNA, 19 nt, Artificial Sequence
  Description of Artificial Sequence: Synthetic oligonucleotide
cacuggccucuuugguuuc

SEQ ID NO: 2992793 - RNA, 19 nt, Artificial Sequence
  Description of Artificial Sequence: Synthetic oligonucleotide
gcaguguacagagucgugu

SEQ ID NO: 2992794 - RNA, 19 nt, Artificial Sequence
  Description of Artificial Sequence: Synthetic oligonucleotide
gccacggguccccacuggc

SEQ ID NO: 2992795 - RNA, 19 nt, Artificial Sequence
  Description of Artificial Sequence: Synthetic oligonucleotide
ggggcgccugcaucaggcg

SEQ ID NO: 2992796 - RNA, 19 nt, Artificial Sequence
  Description of Artificial Sequence: Synthetic oligonucleotide
cccguuggagcagagccac

SEQ ID NO: 2992797 - RNA, 19 nt, Artificial Sequence
  Description of Artificial Sequence: Synthetic oligonucleotide
caguguacagagucguguu

SEQ ID NO: 2992798 - RNA, 19 nt, Artificial Sequence
  Description of Artificial Sequence: Synthetic oligonucleotide
ccgcagcucggcuugcggc

SEQ ID NO: 2992799 - RNA, 19 nt, Artificial Sequence
  Description of Artificial Sequence: Synthetic oligonucleotide
cuagucgggcacgcagcuc

SEQ ID NO: 2992800 - RNA, 19 nt, Artificial Sequence
  Description of Artificial Sequence: Synthetic oligonucleotide
ccacggguccccacuggcc

SEQ ID NO: 2992801 - RNA, 19 nt, Artificial Sequence
  Description of Artificial Sequence: Synthetic oligonucleotide
guacagagucguguuugua

SEQ ID NO: 2992802 - RNA, 19 nt, Artificial Sequence
  Description of Artificial Sequence: Synthetic oligonucleotide
cagagucguguuuguauau

SEQ ID NO: 2992803 - RNA, 19 nt, Artificial Sequence
  Description of Artificial Sequence: Synthetic oligonucleotide
cagagccacggguccccac

SEQ ID NO: 2992804 - RNA, 19 nt, Artificial Sequence
  Description of Artificial Sequence: Synthetic oligonucleotide
cuaccgcccuacgcacccg

SEQ ID NO: 2992805 - RNA, 19 nt, Artificial Sequence
  Description of Artificial Sequence: Synthetic oligonucleotide
guccccuagucgggcacgc

SEQ ID NO: 2992806 - RNA, 19 nt, Artificial Sequence
  Description of Artificial Sequence: Synthetic oligonucleotide
cacggguccccacuggccu

SEQ ID NO: 2992807 - RNA, 19 nt, Artificial Sequence
  Description of Artificial Sequence: Synthetic oligonucleotide
uggccggagccuggcgcag

SEQ ID NO: 2992808 - RNA, 19 nt, Artificial Sequence
  Description of Artificial Sequence: Synthetic oligonucleotide
gcacgcgccgcucucgcuc

SEQ ID NO: 2992809 - RNA, 19 nt, Artificial Sequence
  Description of Artificial Sequence: Synthetic oligonucleotide
caggcccguuggagcagag

SEQ ID NO: 2992810 - RNA, 19 nt, Artificial Sequence
  Description of Artificial Sequence: Synthetic oligonucleotide
aucaggcgcaguggccgga

SEQ ID NO: 2992811 - RNA, 19 nt, Artificial Sequence
  Description of Artificial Sequence: Synthetic oligonucleotide
uccccuagucgggcacgca

SEQ ID NO: 2992812 - RNA, 19 nt, Artificial Sequence
  Description of Artificial Sequence: Synthetic oligonucleotide
ccucaaugcgcagcuccag

SEQ ID NO: 2992813 - RNA, 19 nt, Artificial Sequence
  Description of Artificial Sequence: Synthetic oligonucleotide
cugcacgcaguugcuccuc

SEQ ID NO: 2992814 - RNA, 19 nt, Artificial Sequence
  Description of Artificial Sequence: Synthetic oligonucleotide
cucucguucuaccgcccua

SEQ ID NO: 2992815 - RNA, 19 nt, Artificial Sequence
  Description of Artificial Sequence: Synthetic oligonucleotide
cccgcgccgccucaaugcg

SEQ ID NO: 2992816 - RNA, 19 nt, Artificial Sequence
  Description of Artificial Sequence: Synthetic oligonucleotide
gcagugcgcagccgcuccc

SEQ ID NO: 2992817 - RNA, 19 nt, Artificial Sequence
  Description of Artificial Sequence: Synthetic oligonucleotide
cggagccuggcgcaguccc

SEQ ID NO: 2992818 - RNA, 19 nt, Artificial Sequence
  Description of Artificial Sequence: Synthetic oligonucleotide
cugugugguccuucaacuu

SEQ ID NO: 2992819 - RNA, 19 nt, Artificial Sequence
  Description of Artificial Sequence: Synthetic oligonucleotide
gagccuggcgcaguccccu

SEQ ID NO: 2992820 - RNA, 19 nt, Artificial Sequence
  Description of Artificial Sequence: Synthetic oligonucleotide
cccgcagcucggcuugcgg

SEQ ID NO: 2992821 - RNA, 19 nt, Artificial Sequence
  Description of Artificial Sequence: Synthetic oligonucleotide
acccucugcugcacgcagu

SEQ ID NO: 2992822 - RNA, 19 nt, Artificial Sequence
  Description of Artificial Sequence: Synthetic oligonucleotide
ggaaacgcacgcgccgcuc

SEQ ID NO: 2992823 - RNA, 19 nt, Artificial Sequence
  Description of Artificial Sequence: Synthetic oligonucleotide
gccuggcgcaguccccuag

SEQ ID NO: 2992824 - RNA, 19 nt, Artificial Sequence
  Description of Artificial Sequence: Synthetic oligonucleotide
gcccuacgcacccgccucc

SEQ ID NO: 2992825 - RNA, 19 nt, Artificial Sequence
  Description of Artificial Sequence: Synthetic oligonucleotide
gucgggcacgcagcucccc

SEQ ID NO: 2992826 - RNA, 19 nt, Artificial Sequence
  Description of Artificial Sequence: Synthetic oligonucleotide
gcaguccccuagucgggca

SEQ ID NO: 2992827 - RNA, 19 nt, Artificial Sequence
  Description of Artificial Sequence: Synthetic oligonucleotide
gugcagugcgcagccgcuc

SEQ ID NO: 2992828 - RNA, 19 nt, Artificial Sequence
  Description of Artificial Sequence: Synthetic oligonucleotide
ggagccuggcgcagucccc

SEQ ID NO: 2992829 - RNA, 19 nt, Artificial Sequence
  Description of Artificial Sequence: Synthetic oligonucleotide
gccucaaugcgcagcucca

SEQ ID NO: 2992830 - RNA, 19 nt, Artificial Sequence
  Description of Artificial Sequence: Synthetic oligonucleotide
gcagugcagugcgcagccg

SEQ ID NO: 2992831 - RNA, 19 nt, Artificial Sequence
  Description of Artificial Sequence: Synthetic oligonucleotide
gcgcaguccccuagucggg

SEQ ID NO: 2992832 - RNA, 19 nt, Artificial Sequence
  Description of Artificial Sequence: Synthetic oligonucleotide
gcagcucggcuugcggccc

SEQ ID NO: 2992833 - RNA, 19 nt, Artificial Sequence
  Description of Artificial Sequence: Synthetic oligonucleotide
gcucucgcucucguucuac

SEQ ID NO: 2992834 - RNA, 19 nt, Artificial Sequence
  Description of Artificial Sequence: Synthetic oligonucleotide
ccguuggagcagagccacg

SEQ ID NO: 2992835 - RNA, 19 nt, Artificial Sequence
  Description of Artificial Sequence: Synthetic oligonucleotide
acgcgccgcucucgcucuc

SEQ ID NO: 2992836 - RNA, 19 nt, Artificial Sequence
  Description of Artificial Sequence: Synthetic oligonucleotide
gccgccucaaugcgcagcu

SEQ ID NO: 2992837 - RNA, 19 nt, Artificial Sequence
  Description of Artificial Sequence: Synthetic oligonucleotide
cgcuauuuaauugcagugu

SEQ ID NO: 2992838 - RNA, 19 nt, Artificial Sequence
  Description of Artificial Sequence: Synthetic oligonucleotide
cugcucccucggugugcag

SEQ ID NO: 2992839 - RNA, 19 nt, Artificial Sequence
  Description of Artificial Sequence: Synthetic oligonucleotide
cgcacccgccuccagcgcc

SEQ ID NO: 2992840 - RNA, 19 nt, Artificial Sequence
  Description of Artificial Sequence: Synthetic oligonucleotide
gccgcugcucccucggugu

SEQ ID NO: 2992841 - RNA, 19 nt, Artificial Sequence
  Description of Artificial Sequence: Synthetic oligonucleotide
gcugcacgcaguugcuccu

SEQ ID NO: 2992842 - RNA, 19 nt, Artificial Sequence
  Description of Artificial Sequence: Synthetic oligonucleotide
guggacggcgcagcugugu

SEQ ID NO: 2992843 - RNA, 19 nt, Artificial Sequence
  Description of Artificial Sequence: Synthetic oligonucleotide
ggcuugcggcccaggcccg

SEQ ID NO: 2992844 - RNA, 19 nt, Artificial Sequence
  Description of Artificial Sequence: Synthetic oligonucleotide
cagcugugugguccuucaa

SEQ ID NO: 2992845 - RNA, 19 nt, Artificial Sequence
  Description of Artificial Sequence: Synthetic oligonucleotide
ccuacgcacccgccuccag

SEQ ID NO: 2992846 - RNA, 19 nt, Artificial Sequence
  Description of Artificial Sequence: Synthetic oligonucleotide
cggcgcagcuguguggucc

SEQ ID NO: 2992847 - RNA, 19 nt, Artificial Sequence
  Description of Artificial Sequence: Synthetic oligonucleotide
agccuggcgcaguccccua

SEQ ID NO: 2992848 - RNA, 19 nt, Artificial Sequence
  Description of Artificial Sequence: Synthetic oligonucleotide
gcccguuggagcagagcca

SEQ ID NO: 2992849 - RNA, 19 nt, Artificial Sequence
  Description of Artificial Sequence: Synthetic oligonucleotide
gcgcccugcacccucugcu

SEQ ID NO: 2992850 - RNA, 19 nt, Artificial Sequence
  Description of Artificial Sequence: Synthetic oligonucleotide
ccacuggccucuuugguuu

SEQ ID NO: 2992851 - RNA, 19 nt, Artificial Sequence
  Description of Artificial Sequence: Synthetic oligonucleotide
gcacccgccuccagcgccc

SEQ ID NO: 2992852 - RNA, 19 nt, Artificial Sequence
  Description of Artificial Sequence: Synthetic oligonucleotide
cagccgcucccgcgccgcc

SEQ ID NO: 2992853 - RNA, 19 nt, Artificial Sequence
  Description of Artificial Sequence: Synthetic oligonucleotide
cuccccgcgccgcagcagu

SEQ ID NO: 2992854 - RNA, 19 nt, Artificial Sequence
  Description of Artificial Sequence: Synthetic oligonucleotide
cagcgcccugcacccucug

SEQ ID NO: 2992855 - RNA, 19 nt, Artificial Sequence
  Description of Artificial Sequence: Synthetic oligonucleotide
cgcucucguucuaccgccc

SEQ ID NO: 2992856 - RNA, 19 nt, Artificial Sequence
  Description of Artificial Sequence: Synthetic oligonucleotide
cuccuccucggggccgcug

SEQ ID NO: 2992857 - RNA, 19 nt, Artificial Sequence
  Description of Artificial Sequence: Synthetic oligonucleotide
gcagccgcucccgcgccgc

SEQ ID NO: 2992858 - RNA, 19 nt, Artificial Sequence
  Description of Artificial Sequence: Synthetic oligonucleotide
ggcgcagcugugugguccu

SEQ ID NO: 2992859 - RNA, 19 nt, Artificial Sequence
  Description of Artificial Sequence: Synthetic oligonucleotide
gccggagccuggcgcaguc

SEQ ID NO: 2992860 - RNA, 19 nt, Artificial Sequence
  Description of Artificial Sequence: Synthetic oligonucleotide
gcgcaguggccggagccug

SEQ ID NO: 2992861 - RNA, 19 nt, Artificial Sequence
  Description of Artificial Sequence: Synthetic oligonucleotide
cgcgccgccucaaugcgca

SEQ ID NO: 2992862 - RNA, 19 nt, Artificial Sequence
  Description of Artificial Sequence: Synthetic oligonucleotide
cacgcgccgcucucgcucu

SEQ ID NO: 2992863 - RNA, 19 nt, Artificial Sequence
  Description of Artificial Sequence: Synthetic oligonucleotide
gcucucguucuaccgcccu

SEQ ID NO: 2992864 - RNA, 19 nt, Artificial Sequence
  Description of Artificial Sequence: Synthetic oligonucleotide
acccgccuccagcgcccug

SEQ ID NO: 2992865 - RNA, 19 nt, Artificial Sequence
  Description of Artificial Sequence: Synthetic oligonucleotide
ccgcgccgccucaaugcgc

SEQ ID NO: 2992866 - RNA, 19 nt, Artificial Sequence
  Description of Artificial Sequence: Synthetic oligonucleotide
cgcaguccccuagucgggc

SEQ ID NO: 2992867 - RNA, 19 nt, Artificial Sequence
  Description of Artificial Sequence: Synthetic oligonucleotide
ccuagucgggcacgcagcu

SEQ ID NO: 2992868 - RNA, 19 nt, Artificial Sequence
  Description of Artificial Sequence: Synthetic oligonucleotide
gcacccucugcugcacgca

SEQ ID NO: 2992869 - RNA, 19 nt, Artificial Sequence
  Description of Artificial Sequence: Synthetic oligonucleotide
ccucggggccgcugcuccc

SEQ ID NO: 2992870 - RNA, 19 nt, Artificial Sequence
  Description of Artificial Sequence: Synthetic oligonucleotide
cgggcacgcagcuccccgc

SEQ ID NO: 2992871 - RNA, 19 nt, Artificial Sequence
  Description of Artificial Sequence: Synthetic oligonucleotide
cccucggugugcagugcca

SEQ ID NO: 2992872 - RNA, 19 nt, Artificial Sequence
  Description of Artificial Sequence: Synthetic oligonucleotide
cgcagcagugcagugcgca

SEQ ID NO: 2992873 - RNA, 19 nt, Artificial Sequence
  Description of Artificial Sequence: Synthetic oligonucleotide
cagcucggcuugcggccca

SEQ ID NO: 2992874 - RNA, 19 nt, Artificial Sequence
  Description of Artificial Sequence: Synthetic oligonucleotide
cgcccuacgcacccgccuc

SEQ ID NO: 2992875 - RNA, 19 nt, Artificial Sequence
  Description of Artificial Sequence: Synthetic oligonucleotide
ccucugcugcacgcaguug

SEQ ID NO: 2992876 - RNA, 19 nt, Artificial Sequence
  Description of Artificial Sequence: Synthetic oligonucleotide
cccacuggccucuuugguu

SEQ ID NO: 2992877 - RNA, 19 nt, Artificial Sequence
  Description of Artificial Sequence: Synthetic oligonucleotide
gcucggcuugcggcccagg

SEQ ID NO: 2992878 - RNA, 19 nt, Artificial Sequence
  Description of Artificial Sequence: Synthetic oligonucleotide
gcgccgcagcagugcagug

SEQ ID NO: 2992879 - RNA, 19 nt, Artificial Sequence
  Description of Artificial Sequence: Synthetic oligonucleotide
ggcgcaguggccggagccu

SEQ ID NO: 2992880 - RNA, 19 nt, Artificial Sequence
  Description of Artificial Sequence: Synthetic oligonucleotide
gccgcucccgcgccgccuc

SEQ ID NO: 2992881 - RNA, 19 nt, Artificial Sequence
  Description of Artificial Sequence: Synthetic oligonucleotide
ccgcagcagugcagugcgc

SEQ ID NO: 2992882 - RNA, 19 nt, Artificial Sequence
  Description of Artificial Sequence: Synthetic oligonucleotide
ccgcugcucccucggugug

SEQ ID NO: 2992883 - RNA, 19 nt, Artificial Sequence
  Description of Artificial Sequence: Synthetic oligonucleotide
ccccgcgccgcagcagugc

SEQ ID NO: 2992884 - RNA, 19 nt, Artificial Sequence
  Description of Artificial Sequence: Synthetic oligonucleotide
ccgcgccgcagcagugcag

SEQ ID NO: 2992885 - RNA, 19 nt, Artificial Sequence
  Description of Artificial Sequence: Synthetic oligonucleotide
cgccgccucaaugcgcagc

SEQ ID NO: 2992886 - RNA, 19 nt, Artificial Sequence
  Description of Artificial Sequence: Synthetic oligonucleotide
cggcccaggcccguuggag

SEQ ID NO: 2992887 - RNA, 19 nt, Artificial Sequence
  Description of Artificial Sequence: Synthetic oligonucleotide
ccggagccuggcgcagucc

SEQ ID NO: 2992888 - RNA, 19 nt, Artificial Sequence
  Description of Artificial Sequence: Synthetic oligonucleotide
gcgccgccucaaugcgcag

SEQ ID NO: 2992889 - RNA, 19 nt, Artificial Sequence
  Description of Artificial Sequence: Synthetic oligonucleotide
cgcugcucccucggugugc

SEQ ID NO: 2992890 - RNA, 19 nt, Artificial Sequence
  Description of Artificial Sequence: Synthetic oligonucleotide
gcggcccaggcccguugga

SEQ ID NO: 2992891 - RNA, 19 nt, Artificial Sequence
  Description of Artificial Sequence: Synthetic oligonucleotide
gcagagccacgggucccca

SEQ ID NO: 2992892 - RNA, 19 nt, Artificial Sequence
  Description of Artificial Sequence: Synthetic oligonucleotide
cguggacggcgcagcugug

SEQ ID NO: 2992893 - RNA, 19 nt, Artificial Sequence
  Description of Artificial Sequence: Synthetic oligonucleotide
cccgcgccgcagcagugca

SEQ ID NO: 2992894 - RNA, 19 nt, Artificial Sequence
  Description of Artificial Sequence: Synthetic oligonucleotide
cggggccgcugcucccucg

SEQ ID NO: 2992895 - RNA, 19 nt, Artificial Sequence
  Description of Artificial Sequence: Synthetic oligonucleotide
cgcagccgcucccgcgccg

SEQ ID NO: 2992896 - RNA, 19 nt, Artificial Sequence
  Description of Artificial Sequence: Synthetic oligonucleotide
ccuggcgcaguccccuagu

SEQ ID NO: 2992897 - RNA, 19 nt, Artificial Sequence
  Description of Artificial Sequence: Synthetic oligonucleotide
cgcgccgcucucgcucucg

SEQ ID NO: 2992898 - RNA, 19 nt, Artificial Sequence
  Description of Artificial Sequence: Synthetic oligonucleotide
ccaggcccguuggagcaga

SEQ ID NO: 2992899 - RNA, 19 nt, Artificial Sequence
  Description of Artificial Sequence: Synthetic oligonucleotide
cccucugcugcacgcaguu

SEQ ID NO: 2992900 - RNA, 19 nt, Artificial Sequence
  Description of Artificial Sequence: Synthetic oligonucleotide
ccccacuggccucuuuggu

SEQ ID NO: 2992901 - RNA, 19 nt, Artificial Sequence
  Description of Artificial Sequence: Synthetic oligonucleotide
cccuacgcacccgccucca

SEQ ID NO: 2992902 - RNA, 19 nt, Artificial Sequence
  Description of Artificial Sequence: Synthetic oligonucleotide
cuugcggcccaggcccguu

SEQ ID NO: 2992903 - RNA, 19 nt, Artificial Sequence
  Description of Artificial Sequence: Synthetic oligonucleotide
ccagcgcccugcacccucu

SEQ ID NO: 2992904 - RNA, 19 nt, Artificial Sequence
  Description of Artificial Sequence: Synthetic oligonucleotide
ccgccucaaugcgcagcuc

SEQ ID NO: 2992905 - RNA, 19 nt, Artificial Sequence
  Description of Artificial Sequence: Synthetic oligonucleotide
ccgcccuacgcacccgccu

SEQ ID NO: 2992906 - RNA, 19 nt, Artificial Sequence
  Description of Artificial Sequence: Synthetic oligonucleotide
gcgccgcucucgcucucgu

SEQ ID NO: 2992907 - RNA, 19 nt, Artificial Sequence
  Description of Artificial Sequence: Synthetic oligonucleotide
ccgccuccagcgcccugca

SEQ ID NO: 2992908 - RNA, 19 nt, Artificial Sequence
  Description of Artificial Sequence: Synthetic oligonucleotide
gcucccgcgccgccucaau

SEQ ID NO: 2992909 - RNA, 19 nt, Artificial Sequence
  Description of Artificial Sequence: Synthetic oligonucleotide
cuccagcgcccugcacccu

SEQ ID NO: 2992910 - RNA, 19 nt, Artificial Sequence
  Description of Artificial Sequence: Synthetic oligonucleotide
cgcgccgcagcagugcagu

SEQ ID NO: 2992911 - RNA, 19 nt, Artificial Sequence
  Description of Artificial Sequence: Synthetic oligonucleotide
gguccccacuggccucuuu

SEQ ID NO: 2992912 - RNA, 19 nt, Artificial Sequence
  Description of Artificial Sequence: Synthetic oligonucleotide
gcuugcggcccaggcccgu

SEQ ID NO: 2992913 - RNA, 19 nt, Artificial Sequence
  Description of Artificial Sequence: Synthetic oligonucleotide
ggccggagccuggcgcagu

SEQ ID NO: 2992914 - RNA, 19 nt, Artificial Sequence
  Description of Artificial Sequence: Synthetic oligonucleotide
ccuccucggggccgcugcu

SEQ ID NO: 2992915 - RNA, 19 nt, Artificial Sequence
  Description of Artificial Sequence: Synthetic oligonucleotide
cacccgccuccagcgcccu

SEQ ID NO: 2992916 - RNA, 19 nt, Artificial Sequence
  Description of Artificial Sequence: Synthetic oligonucleotide
ccgcucccgcgccgccuca

SEQ ID NO: 2992917 - RNA, 19 nt, Artificial Sequence
  Description of Artificial Sequence: Synthetic oligonucleotide
cggguccccacuggccucu

SEQ ID NO: 2992918 - RNA, 19 nt, Artificial Sequence
  Description of Artificial Sequence: Synthetic oligonucleotide
cgcacgcgccgcucucgcu

SEQ ID NO: 2992919 - RNA, 19 nt, Artificial Sequence
  Description of Artificial Sequence: Synthetic oligonucleotide
gcuccuccucggggccgcu

SEQ ID NO: 2992920 - RNA, 19 nt, Artificial Sequence
  Description of Artificial Sequence: Synthetic oligonucleotide
cgcucccgcgccgccucaa

SEQ ID NO: 2992921 - RNA, 19 nt, Artificial Sequence
  Description of Artificial Sequence: Synthetic oligonucleotide
ggguccccacuggccucuu

SEQ ID NO: 2992922 - RNA, 19 nt, Artificial Sequence
  Description of Artificial Sequence: Synthetic oligonucleotide
cgccgcucucgcucucguu

SEQ ID NO: 2992923 - RNA, 19 nt, Artificial Sequence
  Description of Artificial Sequence: Synthetic oligonucleotide
cgccugcaucaggcgcagu

SEQ ID NO: 2992924 - RNA, 19 nt, Artificial Sequence
  Description of Artificial Sequence: Synthetic oligonucleotide
aaaagcaucacuuggaaac

SEQ ID NO: 2992925 - RNA, 19 nt, Artificial Sequence
  Description of Artificial Sequence: Synthetic oligonucleotide
aauaaucaaauagagauac

SEQ ID NO: 2992926 - RNA, 19 nt, Artificial Sequence
  Description of Artificial Sequence: Synthetic oligonucleotide
aaucaacagauuuaggcac

SEQ ID NO: 2992927 - RNA, 19 nt, Artificial Sequence
  Description of Artificial Sequence: Synthetic oligonucleotide
ugaugcauaaauuugaaga

SEQ ID NO: 2992928 - RNA, 19 nt, Artificial Sequence
  Description of Artificial Sequence: Synthetic oligonucleotide
auaaauuugaagaugcacc

SEQ ID NO: 2992929 - RNA, 19 nt, Artificial Sequence
  Description of Artificial Sequence: Synthetic oligonucleotide
cauuguaauaaucaaauag

SEQ ID NO: 2992930 - RNA, 19 nt, Artificial Sequence
  Description of Artificial Sequence: Synthetic oligonucleotide
uucacuaaauuuuaucugg

SEQ ID NO: 2992931 - RNA, 19 nt, Artificial Sequence
  Description of Artificial Sequence: Synthetic oligonucleotide
aaacaaaagcaucacuugg

SEQ ID NO: 2992932 - RNA, 19 nt, Artificial Sequence
  Description of Artificial Sequence: Synthetic oligonucleotide
ucugguucaaacaaaagca

SEQ ID NO: 2992933 - RNA, 19 nt, Artificial Sequence
  Description of Artificial Sequence: Synthetic oligonucleotide
uuuaguuugaugcauaaau

SEQ ID NO: 2992934 - RNA, 19 nt, Artificial Sequence
  Description of Artificial Sequence: Synthetic oligonucleotide
uuuaaggcagcauugaaug

SEQ ID NO: 2992935 - RNA, 19 nt, Artificial Sequence
  Description of Artificial Sequence: Synthetic oligonucleotide
acuaaauuuuaucugguuc

SEQ ID NO: 2992936 - RNA, 19 nt, Artificial Sequence
  Description of Artificial Sequence: Synthetic oligonucleotide
augaaaguaaaauggacuc

SEQ ID NO: 2992937 - RNA, 19 nt, Artificial Sequence
  Description of Artificial Sequence: Synthetic oligonucleotide
uuguaauaaucaaauagag

SEQ ID NO: 2992938 - RNA, 19 nt, Artificial Sequence
  Description of Artificial Sequence: Synthetic oligonucleotide
acugaugaaaguaaaaugg

SEQ ID NO: 2992939 - RNA, 19 nt, Artificial Sequence
  Description of Artificial Sequence: Synthetic oligonucleotide
uuugacaacaguccuuucg

SEQ ID NO: 2992940 - RNA, 19 nt, Artificial Sequence
  Description of Artificial Sequence: Synthetic oligonucleotide
auagagauacgucaucacc

SEQ ID NO: 2992941 - RNA, 19 nt, Artificial Sequence
  Description of Artificial Sequence: Synthetic oligonucleotide
aauuggggaagguccaucc

SEQ ID NO: 2992942 - RNA, 19 nt, Artificial Sequence
  Description of Artificial Sequence: Synthetic oligonucleotide
augguagagcucuagaagc

SEQ ID NO: 2992943 - RNA, 19 nt, Artificial Sequence
  Description of Artificial Sequence: Synthetic oligonucleotide
guaauaaucaaauagagau

SEQ ID NO: 2992944 - RNA, 19 nt, Artificial Sequence
  Description of Artificial Sequence: Synthetic oligonucleotide
aauagagauacgucaucac

SEQ ID NO: 2992945 - RNA, 19 nt, Artificial Sequence
  Description of Artificial Sequence: Synthetic oligonucleotide
aauuugaagaugcaccacu

SEQ ID NO: 2992946 - RNA, 19 nt, Artificial Sequence
  Description of Artificial Sequence: Synthetic oligonucleotide
aucaaauagagauacguca

SEQ ID NO: 2992947 - RNA, 19 nt, Artificial Sequence
  Description of Artificial Sequence: Synthetic oligonucleotide
uguaauaaucaaauagaga

SEQ ID NO: 2992948 - RNA, 19 nt, Artificial Sequence
  Description of Artificial Sequence: Synthetic oligonucleotide
gaaaguaaaauggacucgg

SEQ ID NO: 2992949 - RNA, 19 nt, Artificial Sequence
  Description of Artificial Sequence: Synthetic oligonucleotide
caggucuuuaguuugaugc

SEQ ID NO: 2992950 - RNA, 19 nt, Artificial Sequence
  Description of Artificial Sequence: Synthetic oligonucleotide
guaaaauggacucggacag

SEQ ID NO: 2992951 - RNA, 19 nt, Artificial Sequence
  Description of Artificial Sequence: Synthetic oligonucleotide
uugacaacaguccuuucgg

SEQ ID NO: 2992952 - RNA, 19 nt, Artificial Sequence
  Description of Artificial Sequence: Synthetic oligonucleotide
ucaaacaaaagcaucacuu

SEQ ID NO: 2992953 - RNA, 19 nt, Artificial Sequence
  Description of Artificial Sequence: Synthetic oligonucleotide
uggaaacagacuaucauug

SEQ ID NO: 2992954 - RNA, 19 nt, Artificial Sequence
  Description of Artificial Sequence: Synthetic oligonucleotide
aggcacucaaguuuaaggc

SEQ ID NO: 2992955 - RNA, 19 nt, Artificial Sequence
  Description of Artificial Sequence: Synthetic oligonucleotide
uaaauuugaagaugcacca

SEQ ID NO: 2992956 - RNA, 19 nt, Artificial Sequence
  Description of Artificial Sequence: Synthetic oligonucleotide
uagagauacgucaucaccc

SEQ ID NO: 2992957 - RNA, 19 nt, Artificial Sequence
  Description of Artificial Sequence: Synthetic oligonucleotide
ugacuuuugacaacagucc

SEQ ID NO: 2992958 - RNA, 19 nt, Artificial Sequence
  Description of Artificial Sequence: Synthetic oligonucleotide
uuaaaagacaauuggggaa

SEQ ID NO: 2992959 - RNA, 19 nt, Artificial Sequence
  Description of Artificial Sequence: Synthetic oligonucleotide
agcucuagaagccaccuac

SEQ ID NO: 2992960 - RNA, 19 nt, Artificial Sequence
  Description of Artificial Sequence: Synthetic oligonucleotide
uuucacuaaauuuuaucug

SEQ ID NO: 2992961 - RNA, 19 nt, Artificial Sequence
  Description of Artificial Sequence: Synthetic oligonucleotide
uaaucaaauagagauacgu

SEQ ID NO: 2992962 - RNA, 19 nt, Artificial Sequence
  Description of Artificial Sequence: Synthetic oligonucleotide
uacugaugaaaguaaaaug

SEQ ID NO: 2992963 - RNA, 19 nt, Artificial Sequence
  Description of Artificial Sequence: Synthetic oligonucleotide
aaucaaauagagauacguc

SEQ ID NO: 2992964 - RNA, 19 nt, Artificial Sequence
  Description of Artificial Sequence: Synthetic oligonucleotide
aauggacucggacaggucu

SEQ ID NO: 2992965 - RNA, 19 nt, Artificial Sequence
  Description of Artificial Sequence: Synthetic oligonucleotide
cacauaaagcccuuugugg

SEQ ID NO: 2992966 - RNA, 19 nt, Artificial Sequence
  Description of Artificial Sequence: Synthetic oligonucleotide
auuguaauaaucaaauaga

SEQ ID NO: 2992967 - RNA, 19 nt, Artificial Sequence
  Description of Artificial Sequence: Synthetic oligonucleotide
uaaaagacaauuggggaag

SEQ ID NO: 2992968 - RNA, 19 nt, Artificial Sequence
  Description of Artificial Sequence: Synthetic oligonucleotide
agagauacgucaucacccc

SEQ ID NO: 2992969 - RNA, 19 nt, Artificial Sequence
  Description of Artificial Sequence: Synthetic oligonucleotide
uaggcacucaaguuuaagg

SEQ ID NO: 2992970 - RNA, 19 nt, Artificial Sequence
  Description of Artificial Sequence: Synthetic oligonucleotide
cuagaagccaccuaccgag

SEQ ID NO: 2992971 - RNA, 19 nt, Artificial Sequence
  Description of Artificial Sequence: Synthetic oligonucleotide
auugaauggaagcagcuga

SEQ ID NO: 2992972 - RNA, 19 nt, Artificial Sequence
  Description of Artificial Sequence: Synthetic oligonucleotide
agacaauuggggaaggucc

SEQ ID NO: 2992973 - RNA, 19 nt, Artificial Sequence
  Description of Artificial Sequence: Synthetic oligonucleotide
cugacuuuugacaacaguc

SEQ ID NO: 2992974 - RNA, 19 nt, Artificial Sequence
  Description of Artificial Sequence: Synthetic oligonucleotide
cuaaauuuuaucugguuca

SEQ ID NO: 2992975 - RNA, 19 nt, Artificial Sequence
  Description of Artificial Sequence: Synthetic oligonucleotide
uaucauuguaauaaucaaa

SEQ ID NO: 2992976 - RNA, 19 nt, Artificial Sequence
  Description of Artificial Sequence: Synthetic oligonucleotide
ucaaguuuaaggcagcauu

SEQ ID NO: 2992977 - RNA, 19 nt, Artificial Sequence
  Description of Artificial Sequence: Synthetic oligonucleotide
aaauagagauacgucauca

SEQ ID NO: 2992978 - RNA, 19 nt, Artificial Sequence
  Description of Artificial Sequence: Synthetic oligonucleotide
gcaaucaacagauuuaggc

SEQ ID NO: 2992979 - RNA, 19 nt, Artificial Sequence
  Description of Artificial Sequence: Synthetic oligonucleotide
ugaaaguaaaauggacucg

SEQ ID NO: 2992980 - RNA, 19 nt, Artificial Sequence
  Description of Artificial Sequence: Synthetic oligonucleotide
aagacaauuggggaagguc

SEQ ID NO: 2992981 - RNA, 19 nt, Artificial Sequence
  Description of Artificial Sequence: Synthetic oligonucleotide
uugaagaugcaccacugca

SEQ ID NO: 2992982 - RNA, 19 nt, Artificial Sequence
  Description of Artificial Sequence: Synthetic oligonucleotide
acuaucauuguaauaauca

SEQ ID NO: 2992983 - RNA, 19 nt, Artificial Sequence
  Description of Artificial Sequence: Synthetic oligonucleotide
ucaaauagagauacgucau

SEQ ID NO: 2992984 - RNA, 19 nt, Artificial Sequence
  Description of Artificial Sequence: Synthetic oligonucleotide
acaaaguuucacuaaauuu

SEQ ID NO: 2992985 - RNA, 19 nt, Artificial Sequence
  Description of Artificial Sequence: Synthetic oligonucleotide
augaguauacugaugaaag

SEQ ID NO: 2992986 - RNA, 19 nt, Artificial Sequence
  Description of Artificial Sequence: Synthetic oligonucleotide
aaauuugaagaugcaccac

SEQ ID NO: 2992987 - RNA, 19 nt, Artificial Sequence
  Description of Artificial Sequence: Synthetic oligonucleotide
uuaucugguucaaacaaaa

SEQ ID NO: 2992988 - RNA, 19 nt, Artificial Sequence
  Description of Artificial Sequence: Synthetic oligonucleotide
auuuuaucugguucaaaca

SEQ ID NO: 2992989 - RNA, 19 nt, Artificial Sequence
  Description of Artificial Sequence: Synthetic oligonucleotide
acugagcuggcacauaaag

SEQ ID NO: 2992990 - RNA, 19 nt, Artificial Sequence
  Description of Artificial Sequence: Synthetic oligonucleotide
caaacaaaagcaucacuug

SEQ ID NO: 2992991 - RNA, 19 nt, Artificial Sequence
  Description of Artificial Sequence: Synthetic oligonucleotide
aacagauuuaggcacucaa

SEQ ID NO: 2992992 - RNA, 19 nt, Artificial Sequence
  Description of Artificial Sequence: Synthetic oligonucleotide
gaugcaccacugcacaugg

SEQ ID NO: 2992993 - RNA, 19 nt, Artificial Sequence
  Description of Artificial Sequence: Synthetic oligonucleotide
aguguuggcaaucaacaga

SEQ ID NO: 2992994 - RNA, 19 nt, Artificial Sequence
  Description of Artificial Sequence: Synthetic oligonucleotide
uaauaaucaaauagagaua

SEQ ID NO: 2992995 - RNA, 19 nt, Artificial Sequence
  Description of Artificial Sequence: Synthetic oligonucleotide
caugguagagcucuagaag

SEQ ID NO: 2992996 - RNA, 19 nt, Artificial Sequence
  Description of Artificial Sequence: Synthetic oligonucleotide
cauaaauuugaagaugcac

SEQ ID NO: 2992997 - RNA, 19 nt, Artificial Sequence
  Description of Artificial Sequence: Synthetic oligonucleotide
uuaguuugaugcauaaauu

SEQ ID NO: 2992998 - RNA, 19 nt, Artificial Sequence
  Description of Artificial Sequence: Synthetic oligonucleotide
uaguuugaugcauaaauuu

SEQ ID NO: 2992999 - RNA, 19 nt, Artificial Sequence
  Description of Artificial Sequence: Synthetic oligonucleotide
uuaaggcagcauugaaugg

SEQ ID NO: 2993000 - RNA, 19 nt, Artificial Sequence
  Description of Artificial Sequence: Synthetic oligonucleotide
uacgucaucaccccguuaa

SEQ ID NO: 2993001 - RNA, 19 nt, Artificial Sequence
  Description of Artificial Sequence: Synthetic oligonucleotide
ugaagaugcaccacugcac

SEQ ID NO: 2993002 - RNA, 19 nt, Artificial Sequence
  Description of Artificial Sequence: Synthetic oligonucleotide
aucauuguaauaaucaaau

SEQ ID NO: 2993003 - RNA, 19 nt, Artificial Sequence
  Description of Artificial Sequence: Synthetic oligonucleotide
uuugaagaugcaccacugc

SEQ ID NO: 2993004 - RNA, 19 nt, Artificial Sequence
  Description of Artificial Sequence: Synthetic oligonucleotide
ugugggauacugaaguggu

SEQ ID NO: 2993005 - RNA, 19 nt, Artificial Sequence
  Description of Artificial Sequence: Synthetic oligonucleotide
aggaggagcacugagcugg

SEQ ID NO: 2993006 - RNA, 19 nt, Artificial Sequence
  Description of Artificial Sequence: Synthetic oligonucleotide
uugaugcauaaauuugaag

SEQ ID NO: 2993007 - RNA, 19 nt, Artificial Sequence
  Description of Artificial Sequence: Synthetic oligonucleotide
ugggauacugaagugguag

SEQ ID NO: 2993008 - RNA, 19 nt, Artificial Sequence
  Description of Artificial Sequence: Synthetic oligonucleotide
uuuaucugguucaaacaaa

SEQ ID NO: 2993009 - RNA, 19 nt, Artificial Sequence
  Description of Artificial Sequence: Synthetic oligonucleotide
caaguuuaaggcagcauug

SEQ ID NO: 2993010 - RNA, 19 nt, Artificial Sequence
  Description of Artificial Sequence: Synthetic oligonucleotide
uucaaacaaaagcaucacu

SEQ ID NO: 2993011 - RNA, 19 nt, Artificial Sequence
  Description of Artificial Sequence: Synthetic oligonucleotide
guuucacuaaauuuuaucu

SEQ ID NO: 2993012 - RNA, 19 nt, Artificial Sequence
  Description of Artificial Sequence: Synthetic oligonucleotide
uugugggauacugaagugg

SEQ ID NO: 2993013 - RNA, 19 nt, Artificial Sequence
  Description of Artificial Sequence: Synthetic oligonucleotide
gaggcuacaucgcagcugc

SEQ ID NO: 2993014 - RNA, 19 nt, Artificial Sequence
  Description of Artificial Sequence: Synthetic oligonucleotide
gucaucaccccguuaaaag

SEQ ID NO: 2993015 - RNA, 19 nt, Artificial Sequence
  Description of Artificial Sequence: Synthetic oligonucleotide
uacaaaguuucacuaaauu

SEQ ID NO: 2993016 - RNA, 19 nt, Artificial Sequence
  Description of Artificial Sequence: Synthetic oligonucleotide
aaaauggacucggacaggu

SEQ ID NO: 2993017 - RNA, 19 nt, Artificial Sequence
  Description of Artificial Sequence: Synthetic oligonucleotide
caaucaacagauuuaggca

SEQ ID NO: 2993018 - RNA, 19 nt, Artificial Sequence
  Description of Artificial Sequence: Synthetic oligonucleotide
agaggaggagcacugagcu

SEQ ID NO: 2993019 - RNA, 19 nt, Artificial Sequence
  Description of Artificial Sequence: Synthetic oligonucleotide
aagcagcugacuuuugaca

SEQ ID NO: 2993020 - RNA, 19 nt, Artificial Sequence
  Description of Artificial Sequence: Synthetic oligonucleotide
aacaaaagcaucacuugga

SEQ ID NO: 2993021 - RNA, 19 nt, Artificial Sequence
  Description of Artificial Sequence: Synthetic oligonucleotide
ucuagaagccaccuaccga

SEQ ID NO: 2993022 - RNA, 19 nt, Artificial Sequence
  Description of Artificial Sequence: Synthetic oligonucleotide
cguuaaaagacaauugggg

SEQ ID NO: 2993023 - RNA, 19 nt, Artificial Sequence
  Description of Artificial Sequence: Synthetic oligonucleotide
aaacagacuaucauuguaa

SEQ ID NO: 2993024 - RNA, 19 nt, Artificial Sequence
  Description of Artificial Sequence: Synthetic oligonucleotide
aauggaagcagcugacuuu

SEQ ID NO: 2993025 - RNA, 19 nt, Artificial Sequence
  Description of Artificial Sequence: Synthetic oligonucleotide
uaucugguucaaacaaaag

SEQ ID NO: 2993026 - RNA, 19 nt, Artificial Sequence
  Description of Artificial Sequence: Synthetic oligonucleotide
aacagacuaucauuguaau

SEQ ID NO: 2993027 - RNA, 19 nt, Artificial Sequence
  Description of Artificial Sequence: Synthetic oligonucleotide
acuucucaugaguauacug

SEQ ID NO: 2993028 - RNA, 19 nt, Artificial Sequence
  Description of Artificial Sequence: Synthetic oligonucleotide
cagacuaucauuguaauaa

SEQ ID NO: 2993029 - RNA, 19 nt, Artificial Sequence
  Description of Artificial Sequence: Synthetic oligonucleotide
gacaacaguccuuucggug

SEQ ID NO: 2993030 - RNA, 19 nt, Artificial Sequence
  Description of Artificial Sequence: Synthetic oligonucleotide
agaagccaccuaccgaggc

SEQ ID NO: 2993031 - RNA, 19 nt, Artificial Sequence
  Description of Artificial Sequence: Synthetic oligonucleotide
accuaccgaggcuacaucg

SEQ ID NO: 2993032 - RNA, 19 nt, Artificial Sequence
  Description of Artificial Sequence: Synthetic oligonucleotide
uggcaaucaacagauuuag

SEQ ID NO: 2993033 - RNA, 19 nt, Artificial Sequence
  Description of Artificial Sequence: Synthetic oligonucleotide
ucaucaccccguuaaaaga

SEQ ID NO: 2993034 - RNA, 19 nt, Artificial Sequence
  Description of Artificial Sequence: Synthetic oligonucleotide
ucacuaaauuuuaucuggu

SEQ ID NO: 2993035 - RNA, 19 nt, Artificial Sequence
  Description of Artificial Sequence: Synthetic oligonucleotide
agcauugaauggaagcagc

SEQ ID NO: 2993036 - RNA, 19 nt, Artificial Sequence
  Description of Artificial Sequence: Synthetic oligonucleotide
gaugaaaguaaaauggacu

SEQ ID NO: 2993037 - RNA, 19 nt, Artificial Sequence
  Description of Artificial Sequence: Synthetic oligonucleotide
uuggaaacagacuaucauu

SEQ ID NO: 2993038 - RNA, 19 nt, Artificial Sequence
  Description of Artificial Sequence: Synthetic oligonucleotide
aaaagacaauuggggaagg

SEQ ID NO: 2993039 - RNA, 19 nt, Artificial Sequence
  Description of Artificial Sequence: Synthetic oligonucleotide
uaaggcagcauugaaugga

SEQ ID NO: 2993040 - RNA, 19 nt, Artificial Sequence
  Description of Artificial Sequence: Synthetic oligonucleotide
uuggcaaucaacagauuua

SEQ ID NO: 2993041 - RNA, 19 nt, Artificial Sequence
  Description of Artificial Sequence: Synthetic oligonucleotide
auacugaugaaaguaaaau

SEQ ID NO: 2993042 - RNA, 19 nt, Artificial Sequence
  Description of Artificial Sequence: Synthetic oligonucleotide
accgaggcuacaucgcagc

SEQ ID NO: 2993043 - RNA, 19 nt, Artificial Sequence
  Description of Artificial Sequence: Synthetic oligonucleotide
ugaguauacugaugaaagu

SEQ ID NO: 2993044 - RNA, 19 nt, Artificial Sequence
  Description of Artificial Sequence: Synthetic oligonucleotide
ugguucaaacaaaagcauc

SEQ ID NO: 2993045 - RNA, 19 nt, Artificial Sequence
  Description of Artificial Sequence: Synthetic oligonucleotide
aggagcacugagcuggcac

SEQ ID NO: 2993046 - RNA, 19 nt, Artificial Sequence
  Description of Artificial Sequence: Synthetic oligonucleotide
ugguagagcucuagaagcc

SEQ ID NO: 2993047 - RNA, 19 nt, Artificial Sequence
  Description of Artificial Sequence: Synthetic oligonucleotide
gaagcagcugacuuuugac

SEQ ID NO: 2993048 - RNA, 19 nt, Artificial Sequence
  Description of Artificial Sequence: Synthetic oligonucleotide
gaagaugcaccacugcaca

SEQ ID NO: 2993049 - RNA, 19 nt, Artificial Sequence
  Description of Artificial Sequence: Synthetic oligonucleotide
aaagcccuuugugggauac

SEQ ID NO: 2993050 - RNA, 19 nt, Artificial Sequence
  Description of Artificial Sequence: Synthetic oligonucleotide
uagaggaggagcacugagc

SEQ ID NO: 2993051 - RNA, 19 nt, Artificial Sequence
  Description of Artificial Sequence: Synthetic oligonucleotide
gaugcauaaauuugaagau

SEQ ID NO: 2993052 - RNA, 19 nt, Artificial Sequence
  Description of Artificial Sequence: Synthetic oligonucleotide
aaaguuucacuaaauuuua

SEQ ID NO: 2993053 - RNA, 19 nt, Artificial Sequence
  Description of Artificial Sequence: Synthetic oligonucleotide
ucucaugaguauacugaug

SEQ ID NO: 2993054 - RNA, 19 nt, Artificial Sequence
  Description of Artificial Sequence: Synthetic oligonucleotide
ucuuuaguuugaugcauaa

SEQ ID NO: 2993055 - RNA, 19 nt, Artificial Sequence
  Description of Artificial Sequence: Synthetic oligonucleotide
cucuagaagccaccuaccg

SEQ ID NO: 2993056 - RNA, 19 nt, Artificial Sequence
  Description of Artificial Sequence: Synthetic oligonucleotide
uuugugggauacugaagug

SEQ ID NO: 2993057 - RNA, 19 nt, Artificial Sequence
  Description of Artificial Sequence: Synthetic oligonucleotide
uugaauggaagcagcugac

SEQ ID NO: 2993058 - RNA, 19 nt, Artificial Sequence
  Description of Artificial Sequence: Synthetic oligonucleotide
ugaagugguaguguuggca

SEQ ID NO: 2993059 - RNA, 19 nt, Artificial Sequence
  Description of Artificial Sequence: Synthetic oligonucleotide
uaguguuggcaaucaacag

SEQ ID NO: 2993060 - RNA, 19 nt, Artificial Sequence
  Description of Artificial Sequence: Synthetic oligonucleotide
agaauuagaggaggagcac

SEQ ID NO: 2993061 - RNA, 19 nt, Artificial Sequence
  Description of Artificial Sequence: Synthetic oligonucleotide
cagaauuagaggaggagca

SEQ ID NO: 2993062 - RNA, 19 nt, Artificial Sequence
  Description of Artificial Sequence: Synthetic oligonucleotide
caaaguuucacuaaauuuu

SEQ ID NO: 2993063 - RNA, 19 nt, Artificial Sequence
  Description of Artificial Sequence: Synthetic oligonucleotide
cugagcuggcacauaaagc

SEQ ID NO: 2993064 - RNA, 19 nt, Artificial Sequence
  Description of Artificial Sequence: Synthetic oligonucleotide
aaagcaucacuuggaaaca

SEQ ID NO: 2993065 - RNA, 19 nt, Artificial Sequence
  Description of Artificial Sequence: Synthetic oligonucleotide
guuugaugcauaaauuuga

SEQ ID NO: 2993066 - RNA, 19 nt, Artificial Sequence
  Description of Artificial Sequence: Synthetic oligonucleotide
cccguuaaaagacaauugg

SEQ ID NO: 2993067 - RNA, 19 nt, Artificial Sequence
  Description of Artificial Sequence: Synthetic oligonucleotide
guaguguuggcaaucaaca

SEQ ID NO: 2993068 - RNA, 19 nt, Artificial Sequence
  Description of Artificial Sequence: Synthetic oligonucleotide
caucaccccguuaaaagac

SEQ ID NO: 2993069 - RNA, 19 nt, Artificial Sequence
  Description of Artificial Sequence: Synthetic oligonucleotide
acaaaagcaucacuuggaa

SEQ ID NO: 2993070 - RNA, 19 nt, Artificial Sequence
  Description of Artificial Sequence: Synthetic oligonucleotide
cugaugaaaguaaaaugga

SEQ ID NO: 2993071 - RNA, 19 nt, Artificial Sequence
  Description of Artificial Sequence: Synthetic oligonucleotide
uucucaugaguauacugau

SEQ ID NO: 2993072 - RNA, 19 nt, Artificial Sequence
  Description of Artificial Sequence: Synthetic oligonucleotide
gaaacagacuaucauugua

SEQ ID NO: 2993073 - RNA, 19 nt, Artificial Sequence
  Description of Artificial Sequence: Synthetic oligonucleotide
aaguuuaaggcagcauuga

SEQ ID NO: 2993074 - RNA, 19 nt, Artificial Sequence
  Description of Artificial Sequence: Synthetic oligonucleotide
gaagugguaguguuggcaa

SEQ ID NO: 2993075 - RNA, 19 nt, Artificial Sequence
  Description of Artificial Sequence: Synthetic oligonucleotide
acaugguagagcucuagaa

SEQ ID NO: 2993076 - RNA, 19 nt, Artificial Sequence
  Description of Artificial Sequence: Synthetic oligonucleotide
gaguauacugaugaaagua

SEQ ID NO: 2993077 - RNA, 19 nt, Artificial Sequence
  Description of Artificial Sequence: Synthetic oligonucleotide
caacuucucaugaguauac

SEQ ID NO: 2993078 - RNA, 19 nt, Artificial Sequence
  Description of Artificial Sequence: Synthetic oligonucleotide
gauuuaggcacucaaguuu

SEQ ID NO: 2993079 - RNA, 19 nt, Artificial Sequence
  Description of Artificial Sequence: Synthetic oligonucleotide
uacugaagugguaguguug

SEQ ID NO: 2993080 - RNA, 19 nt, Artificial Sequence
  Description of Artificial Sequence: Synthetic oligonucleotide
agauuuaggcacucaaguu

SEQ ID NO: 2993081 - RNA, 19 nt, Artificial Sequence
  Description of Artificial Sequence: Synthetic oligonucleotide
uggcacauaaagcccuuug

SEQ ID NO: 2993082 - RNA, 19 nt, Artificial Sequence
  Description of Artificial Sequence: Synthetic oligonucleotide
ugcaccacugcacauggua

SEQ ID NO: 2993083 - RNA, 19 nt, Artificial Sequence
  Description of Artificial Sequence: Synthetic oligonucleotide
cuaucauuguaauaaucaa

SEQ ID NO: 2993084 - RNA, 19 nt, Artificial Sequence
  Description of Artificial Sequence: Synthetic oligonucleotide
agcagcugacuuuugacaa

SEQ ID NO: 2993085 - RNA, 19 nt, Artificial Sequence
  Description of Artificial Sequence: Synthetic oligonucleotide
aguauacugaugaaaguaa

SEQ ID NO: 2993086 - RNA, 19 nt, Artificial Sequence
  Description of Artificial Sequence: Synthetic oligonucleotide
uaaaauggacucggacagg

SEQ ID NO: 2993087 - RNA, 19 nt, Artificial Sequence
  Description of Artificial Sequence: Synthetic oligonucleotide
auaaucaaauagagauacg

SEQ ID NO: 2993088 - RNA, 19 nt, Artificial Sequence
  Description of Artificial Sequence: Synthetic oligonucleotide
ccguuaaaagacaauuggg

SEQ ID NO: 2993089 - RNA, 19 nt, Artificial Sequence
  Description of Artificial Sequence: Synthetic oligonucleotide
uaaauuuuaucugguucaa

SEQ ID NO: 2993090 - RNA, 19 nt, Artificial Sequence
  Description of Artificial Sequence: Synthetic oligonucleotide
agugguaguguuggcaauc

SEQ ID NO: 2993091 - RNA, 19 nt, Artificial Sequence
  Description of Artificial Sequence: Synthetic oligonucleotide
aggucuuuaguuugaugca

SEQ ID NO: 2993092 - RNA, 19 nt, Artificial Sequence
  Description of Artificial Sequence: Synthetic oligonucleotide
uacaucgcagcugcggcgg

SEQ ID NO: 2993093 - RNA, 19 nt, Artificial Sequence
  Description of Artificial Sequence: Synthetic oligonucleotide
gagauacgucaucaccccg

SEQ ID NO: 2993094 - RNA, 19 nt, Artificial Sequence
  Description of Artificial Sequence: Synthetic oligonucleotide
ggcagcauugaauggaagc

SEQ ID NO: 2993095 - RNA, 19 nt, Artificial Sequence
  Description of Artificial Sequence: Synthetic oligonucleotide
uuggggaagguccauccaa

SEQ ID NO: 2993096 - RNA, 19 nt, Artificial Sequence
  Description of Artificial Sequence: Synthetic oligonucleotide
acagauuuaggcacucaag

SEQ ID NO: 2993097 - RNA, 19 nt, Artificial Sequence
  Description of Artificial Sequence: Synthetic oligonucleotide
ggugccgcagaauuagagg

SEQ ID NO: 2993098 - RNA, 19 nt, Artificial Sequence
  Description of Artificial Sequence: Synthetic oligonucleotide
gguucaaacaaaagcauca

SEQ ID NO: 2993099 - RNA, 19 nt, Artificial Sequence
  Description of Artificial Sequence: Synthetic oligonucleotide
cuuugugggauacugaagu

SEQ ID NO: 2993100 - RNA, 19 nt, Artificial Sequence
  Description of Artificial Sequence: Synthetic oligonucleotide
caaauagagauacgucauc

SEQ ID NO: 2993101 - RNA, 19 nt, Artificial Sequence
  Description of Artificial Sequence: Synthetic oligonucleotide
ugccgcagaauuagaggag

SEQ ID NO: 2993102 - RNA, 19 nt, Artificial Sequence
  Description of Artificial Sequence: Synthetic oligonucleotide
uagaagccaccuaccgagg

SEQ ID NO: 2993103 - RNA, 19 nt, Artificial Sequence
  Description of Artificial Sequence: Synthetic oligonucleotide
uagagcucuagaagccacc

SEQ ID NO: 2993104 - RNA, 19 nt, Artificial Sequence
  Description of Artificial Sequence: Synthetic oligonucleotide
aagcaucacuuggaaacag

SEQ ID NO: 2993105 - RNA, 19 nt, Artificial Sequence
  Description of Artificial Sequence: Synthetic oligonucleotide
aguuuaaggcagcauugaa

SEQ ID NO: 2993106 - RNA, 19 nt, Artificial Sequence
  Description of Artificial Sequence: Synthetic oligonucleotide
agguccauccaacuucuca

SEQ ID NO: 2993107 - RNA, 19 nt, Artificial Sequence
  Description of Artificial Sequence: Synthetic oligonucleotide
uuaggcacucaaguuuaag

SEQ ID NO: 2993108 - RNA, 19 nt, Artificial Sequence
  Description of Artificial Sequence: Synthetic oligonucleotide
gacucggacaggucuuuag

SEQ ID NO: 2993109 - RNA, 19 nt, Artificial Sequence
  Description of Artificial Sequence: Synthetic oligonucleotide
auuugaagaugcaccacug

SEQ ID NO: 2993110 - RNA, 19 nt, Artificial Sequence
  Description of Artificial Sequence: Synthetic oligonucleotide
uccaacuucucaugaguau

SEQ ID NO: 2993111 - RNA, 19 nt, Artificial Sequence
  Description of Artificial Sequence: Synthetic oligonucleotide
gugccgcagaauuagagga

SEQ ID NO: 2993112 - RNA, 19 nt, Artificial Sequence
  Description of Artificial Sequence: Synthetic oligonucleotide
cuacaucgcagcugcggcg

SEQ ID NO: 2993113 - RNA, 19 nt, Artificial Sequence
  Description of Artificial Sequence: Synthetic oligonucleotide
aaagacaauuggggaaggu

SEQ ID NO: 2993114 - RNA, 19 nt, Artificial Sequence
  Description of Artificial Sequence: Synthetic oligonucleotide
ucacuuggaaacagacuau

SEQ ID NO: 2993115 - RNA, 19 nt, Artificial Sequence
  Description of Artificial Sequence: Synthetic oligonucleotide
gcacauaaagcccuuugug

SEQ ID NO: 2993116 - RNA, 19 nt, Artificial Sequence
  Description of Artificial Sequence: Synthetic oligonucleotide
cauugaauggaagcagcug

SEQ ID NO: 2993117 - RNA, 19 nt, Artificial Sequence
  Description of Artificial Sequence: Synthetic oligonucleotide
auacugaagugguaguguu

SEQ ID NO: 2993118 - RNA, 19 nt, Artificial Sequence
  Description of Artificial Sequence: Synthetic oligonucleotide
uggggaagguccauccaac

SEQ ID NO: 2993119 - RNA, 19 nt, Artificial Sequence
  Description of Artificial Sequence: Synthetic oligonucleotide
uaccgaggcuacaucgcag

SEQ ID NO: 2993120 - RNA, 19 nt, Artificial Sequence
  Description of Artificial Sequence: Synthetic oligonucleotide
gcagaauuagaggaggagc

SEQ ID NO: 2993121 - RNA, 19 nt, Artificial Sequence
  Description of Artificial Sequence: Synthetic oligonucleotide
agacuaucauuguaauaau

SEQ ID NO: 2993122 - RNA, 19 nt, Artificial Sequence
  Description of Artificial Sequence: Synthetic oligonucleotide
acucggacaggucuuuagu

SEQ ID NO: 2993123 - RNA, 19 nt, Artificial Sequence
  Description of Artificial Sequence: Synthetic oligonucleotide
acaggucuuuaguuugaug

SEQ ID NO: 2993124 - RNA, 19 nt, Artificial Sequence
  Description of Artificial Sequence: Synthetic oligonucleotide
ucggacaggucuuuaguuu

SEQ ID NO: 2993125 - RNA, 19 nt, Artificial Sequence
  Description of Artificial Sequence: Synthetic oligonucleotide
gacuuuugacaacaguccu

SEQ ID NO: 2993126 - RNA, 19 nt, Artificial Sequence
  Description of Artificial Sequence: Synthetic oligonucleotide
aaauggacucggacagguc

SEQ ID NO: 2993127 - RNA, 19 nt, Artificial Sequence
  Description of Artificial Sequence: Synthetic oligonucleotide
aacuucucaugaguauacu

SEQ ID NO: 2993128 - RNA, 19 nt, Artificial Sequence
  Description of Artificial Sequence: Synthetic oligonucleotide
caugaguauacugaugaaa

SEQ ID NO: 2993129 - RNA, 19 nt, Artificial Sequence
  Description of Artificial Sequence: Synthetic oligonucleotide
cacucaaguuuaaggcagc

SEQ ID NO: 2993130 - RNA, 19 nt, Artificial Sequence
  Description of Artificial Sequence: Synthetic oligonucleotide
ugaauggaagcagcugacu

SEQ ID NO: 2993131 - RNA, 19 nt, Artificial Sequence
  Description of Artificial Sequence: Synthetic oligonucleotide
ugacaacaguccuuucggu

SEQ ID NO: 2993132 - RNA, 19 nt, Artificial Sequence
  Description of Artificial Sequence: Synthetic oligonucleotide
agaugcaccacugcacaug

SEQ ID NO: 2993133 - RNA, 19 nt, Artificial Sequence
  Description of Artificial Sequence: Synthetic oligonucleotide
cagauuuaggcacucaagu

SEQ ID NO: 2993134 - RNA, 19 nt, Artificial Sequence
  Description of Artificial Sequence: Synthetic oligonucleotide
ucaccccguuaaaagacaa

SEQ ID NO: 2993135 - RNA, 19 nt, Artificial Sequence
  Description of Artificial Sequence: Synthetic oligonucleotide
aagaugcaccacugcacau

SEQ ID NO: 2993136 - RNA, 19 nt, Artificial Sequence
  Description of Artificial Sequence: Synthetic oligonucleotide
cagcauugaauggaagcag

SEQ ID NO: 2993137 - RNA, 19 nt, Artificial Sequence
  Description of Artificial Sequence: Synthetic oligonucleotide
guuggcaaucaacagauuu

SEQ ID NO: 2993138 - RNA, 19 nt, Artificial Sequence
  Description of Artificial Sequence: Synthetic oligonucleotide
auuuaggcacucaaguuua

SEQ ID NO: 2993139 - RNA, 19 nt, Artificial Sequence
  Description of Artificial Sequence: Synthetic oligonucleotide
aagugguaguguuggcaau

SEQ ID NO: 2993140 - RNA, 19 nt, Artificial Sequence
  Description of Artificial Sequence: Synthetic oligonucleotide
gauacugaagugguagugu

SEQ ID NO: 2993141 - RNA, 19 nt, Artificial Sequence
  Description of Artificial Sequence: Synthetic oligonucleotide
acagacuaucauuguaaua

SEQ ID NO: 2993142 - RNA, 19 nt, Artificial Sequence
  Description of Artificial Sequence: Synthetic oligonucleotide
uuuaggcacucaaguuuaa

SEQ ID NO: 2993143 - RNA, 19 nt, Artificial Sequence
  Description of Artificial Sequence: Synthetic oligonucleotide
gcacucaaguuuaaggcag

SEQ ID NO: 2993144 - RNA, 19 nt, Artificial Sequence
  Description of Artificial Sequence: Synthetic oligonucleotide
aucgcagcugcggcggugc

SEQ ID NO: 2993145 - RNA, 19 nt, Artificial Sequence
  Description of Artificial Sequence: Synthetic oligonucleotide
gacaauuggggaaggucca

SEQ ID NO: 2993146 - RNA, 19 nt, Artificial Sequence
  Description of Artificial Sequence: Synthetic oligonucleotide
auuggggaagguccaucca

SEQ ID NO: 2993147 - RNA, 19 nt, Artificial Sequence
  Description of Artificial Sequence: Synthetic oligonucleotide
acuuggaaacagacuauca

SEQ ID NO: 2993148 - RNA, 19 nt, Artificial Sequence
  Description of Artificial Sequence: Synthetic oligonucleotide
agauacgucaucaccccgu

SEQ ID NO: 2993149 - RNA, 19 nt, Artificial Sequence
  Description of Artificial Sequence: Synthetic oligonucleotide
ggcacucaaguuuaaggca

SEQ ID NO: 2993150 - RNA, 19 nt, Artificial Sequence
  Description of Artificial Sequence: Synthetic oligonucleotide
agcccuuugugggauacug

SEQ ID NO: 2993151 - RNA, 19 nt, Artificial Sequence
  Description of Artificial Sequence: Synthetic oligonucleotide
guccauccaacuucucaug

SEQ ID NO: 2993152 - RNA, 19 nt, Artificial Sequence
  Description of Artificial Sequence: Synthetic oligonucleotide
accccguuaaaagacaauu

SEQ ID NO: 2993153 - RNA, 19 nt, Artificial Sequence
  Description of Artificial Sequence: Synthetic oligonucleotide
cacuuggaaacagacuauc

SEQ ID NO: 2993154 - RNA, 19 nt, Artificial Sequence
  Description of Artificial Sequence: Synthetic oligonucleotide
ucaacagauuuaggcacuc

SEQ ID NO: 2993155 - RNA, 19 nt, Artificial Sequence
  Description of Artificial Sequence: Synthetic oligonucleotide
guauacugaugaaaguaaa

SEQ ID NO: 2993156 - RNA, 19 nt, Artificial Sequence
  Description of Artificial Sequence: Synthetic oligonucleotide
gaauuagaggaggagcacu

SEQ ID NO: 2993157 - RNA, 19 nt, Artificial Sequence
  Description of Artificial Sequence: Synthetic oligonucleotide
gaauggaagcagcugacuu

SEQ ID NO: 2993158 - RNA, 19 nt, Artificial Sequence
  Description of Artificial Sequence: Synthetic oligonucleotide
aaggcagcauugaauggaa

SEQ ID NO: 2993159 - RNA, 19 nt, Artificial Sequence
  Description of Artificial Sequence: Synthetic oligonucleotide
gcuacaucgcagcugcggc

SEQ ID NO: 2993160 - RNA, 19 nt, Artificial Sequence
  Description of Artificial Sequence: Synthetic oligonucleotide
agagcucuagaagccaccu

SEQ ID NO: 2993161 - RNA, 19 nt, Artificial Sequence
  Description of Artificial Sequence: Synthetic oligonucleotide
aucaacagauuuaggcacu

SEQ ID NO: 2993162 - RNA, 19 nt, Artificial Sequence
  Description of Artificial Sequence: Synthetic oligonucleotide
cuuggaaacagacuaucau

SEQ ID NO: 2993163 - RNA, 19 nt, Artificial Sequence
  Description of Artificial Sequence: Synthetic oligonucleotide
auaaagcccuuugugggau

SEQ ID NO: 2993164 - RNA, 19 nt, Artificial Sequence
  Description of Artificial Sequence: Synthetic oligonucleotide
gaggaggagcacugagcug

SEQ ID NO: 2993165 - RNA, 19 nt, Artificial Sequence
  Description of Artificial Sequence: Synthetic oligonucleotide
uuuugacaacaguccuuuc

SEQ ID NO: 2993166 - RNA, 19 nt, Artificial Sequence
  Description of Artificial Sequence: Synthetic oligonucleotide
auggaagcagcugacuuuu

SEQ ID NO: 2993167 - RNA, 19 nt, Artificial Sequence
  Description of Artificial Sequence: Synthetic oligonucleotide
auuagaggaggagcacuga

SEQ ID NO: 2993168 - RNA, 19 nt, Artificial Sequence
  Description of Artificial Sequence: Synthetic oligonucleotide
guagagcucuagaagccac

SEQ ID NO: 2993169 - RNA, 19 nt, Artificial Sequence
  Description of Artificial Sequence: Synthetic oligonucleotide
cacugcacaugguagagcu

SEQ ID NO: 2993170 - RNA, 19 nt, Artificial Sequence
  Description of Artificial Sequence: Synthetic oligonucleotide
gcagcauugaauggaagca

SEQ ID NO: 2993171 - RNA, 19 nt, Artificial Sequence
  Description of Artificial Sequence: Synthetic oligonucleotide
acucaaguuuaaggcagca

SEQ ID NO: 2993172 - RNA, 19 nt, Artificial Sequence
  Description of Artificial Sequence: Synthetic oligonucleotide
ggcuacaucgcagcugcgg

SEQ ID NO: 2993173 - RNA, 19 nt, Artificial Sequence
  Description of Artificial Sequence: Synthetic oligonucleotide
aagccaccuaccgaggcua

SEQ ID NO: 2993174 - RNA, 19 nt, Artificial Sequence
  Description of Artificial Sequence: Synthetic oligonucleotide
gccgcagaauuagaggagg

SEQ ID NO: 2993175 - RNA, 19 nt, Artificial Sequence
  Description of Artificial Sequence: Synthetic oligonucleotide
agcuggcacauaaagcccu

SEQ ID NO: 2993176 - RNA, 19 nt, Artificial Sequence
  Description of Artificial Sequence: Synthetic oligonucleotide
ggaagcagcugacuuuuga

SEQ ID NO: 2993177 - RNA, 19 nt, Artificial Sequence
  Description of Artificial Sequence: Synthetic oligonucleotide
ugguaguguuggcaaucaa

SEQ ID NO: 2993178 - RNA, 19 nt, Artificial Sequence
  Description of Artificial Sequence: Synthetic oligonucleotide
gcaucacuuggaaacagac

SEQ ID NO: 2993179 - RNA, 19 nt, Artificial Sequence
  Description of Artificial Sequence: Synthetic oligonucleotide
cacaugguagagcucuaga

SEQ ID NO: 2993180 - RNA, 19 nt, Artificial Sequence
  Description of Artificial Sequence: Synthetic oligonucleotide
acuuuugacaacaguccuu

SEQ ID NO: 2993181 - RNA, 19 nt, Artificial Sequence
  Description of Artificial Sequence: Synthetic oligonucleotide
cauccaacuucucaugagu

SEQ ID NO: 2993182 - RNA, 19 nt, Artificial Sequence
  Description of Artificial Sequence: Synthetic oligonucleotide
uggaagcagcugacuuuug

SEQ ID NO: 2993183 - RNA, 19 nt, Artificial Sequence
  Description of Artificial Sequence: Synthetic oligonucleotide
guguuggcaaucaacagau

SEQ ID NO: 2993184 - RNA, 19 nt, Artificial Sequence
  Description of Artificial Sequence: Synthetic oligonucleotide
agcaucacuuggaaacaga

SEQ ID NO: 2993185 - RNA, 19 nt, Artificial Sequence
  Description of Artificial Sequence: Synthetic oligonucleotide
ccccguuaaaagacaauug

SEQ ID NO: 2993186 - RNA, 19 nt, Artificial Sequence
  Description of Artificial Sequence: Synthetic oligonucleotide
cuaccgaggcuacaucgca

SEQ ID NO: 2993187 - RNA, 19 nt, Artificial Sequence
  Description of Artificial Sequence: Synthetic oligonucleotide
ggcaaucaacagauuuagg

SEQ ID NO: 2993188 - RNA, 19 nt, Artificial Sequence
  Description of Artificial Sequence: Synthetic oligonucleotide
ccuuugugggauacugaag

SEQ ID NO: 2993189 - RNA, 19 nt, Artificial Sequence
  Description of Artificial Sequence: Synthetic oligonucleotide
ccuaccgaggcuacaucgc

SEQ ID NO: 2993190 - RNA, 19 nt, Artificial Sequence
  Description of Artificial Sequence: Synthetic oligonucleotide
cugguucaaacaaaagcau

SEQ ID NO: 2993191 - RNA, 19 nt, Artificial Sequence
  Description of Artificial Sequence: Synthetic oligonucleotide
gaagguccauccaacuucu

SEQ ID NO: 2993192 - RNA, 19 nt, Artificial Sequence
  Description of Artificial Sequence: Synthetic oligonucleotide
gaagccaccuaccgaggcu

SEQ ID NO: 2993193 - RNA, 19 nt, Artificial Sequence
  Description of Artificial Sequence: Synthetic oligonucleotide
aucaccccguuaaaagaca

SEQ ID NO: 2993194 - RNA, 19 nt, Artificial Sequence
  Description of Artificial Sequence: Synthetic oligonucleotide
caccacugcacaugguaga

SEQ ID NO: 2993195 - RNA, 19 nt, Artificial Sequence
  Description of Artificial Sequence: Synthetic oligonucleotide
ggcggugccgcagaauuag

SEQ ID NO: 2993196 - RNA, 19 nt, Artificial Sequence
  Description of Artificial Sequence: Synthetic oligonucleotide
caauuggggaagguccauc

SEQ ID NO: 2993197 - RNA, 19 nt, Artificial Sequence
  Description of Artificial Sequence: Synthetic oligonucleotide
caucacuuggaaacagacu

SEQ ID NO: 2993198 - RNA, 19 nt, Artificial Sequence
  Description of Artificial Sequence: Synthetic oligonucleotide
cagcugacuuuugacaaca

SEQ ID NO: 2993199 - RNA, 19 nt, Artificial Sequence
  Description of Artificial Sequence: Synthetic oligonucleotide
uguuggcaaucaacagauu

SEQ ID NO: 2993200 - RNA, 19 nt, Artificial Sequence
  Description of Artificial Sequence: Synthetic oligonucleotide
auccaacuucucaugagua

SEQ ID NO: 2993201 - RNA, 19 nt, Artificial Sequence
  Description of Artificial Sequence: Synthetic oligonucleotide
acugcacaugguagagcuc

SEQ ID NO: 2993202 - RNA, 19 nt, Artificial Sequence
  Description of Artificial Sequence: Synthetic oligonucleotide
cuuuaguuugaugcauaaa

SEQ ID NO: 2993203 - RNA, 19 nt, Artificial Sequence
  Description of Artificial Sequence: Synthetic oligonucleotide
cuuuugacaacaguccuuu

SEQ ID NO: 2993204 - RNA, 19 nt, Artificial Sequence
  Description of Artificial Sequence: Synthetic oligonucleotide
aagguccauccaacuucuc

SEQ ID NO: 2993205 - RNA, 19 nt, Artificial Sequence
  Description of Artificial Sequence: Synthetic oligonucleotide
gugguaguguuggcaauca

SEQ ID NO: 2993206 - RNA, 19 nt, Artificial Sequence
  Description of Artificial Sequence: Synthetic oligonucleotide
gcaccacugcacaugguag

SEQ ID NO: 2993207 - RNA, 19 nt, Artificial Sequence
  Description of Artificial Sequence: Synthetic oligonucleotide
cugcacaugguagagcucu

SEQ ID NO: 2993208 - RNA, 19 nt, Artificial Sequence
  Description of Artificial Sequence: Synthetic oligonucleotide
ugcacaugguagagcucua

SEQ ID NO: 2993209 - RNA, 19 nt, Artificial Sequence
  Description of Artificial Sequence: Synthetic oligonucleotide
uaaagcccuuugugggaua

SEQ ID NO: 2993210 - RNA, 19 nt, Artificial Sequence
  Description of Artificial Sequence: Synthetic oligonucleotide
gcagcugacuuuugacaac

SEQ ID NO: 2993211 - RNA, 19 nt, Artificial Sequence
  Description of Artificial Sequence: Synthetic oligonucleotide
ggaaacagacuaucauugu

SEQ ID NO: 2993212 - RNA, 19 nt, Artificial Sequence
  Description of Artificial Sequence: Synthetic oligonucleotide
gguagagcucuagaagcca

SEQ ID NO: 2993213 - RNA, 19 nt, Artificial Sequence
  Description of Artificial Sequence: Synthetic oligonucleotide
ggcacauaaagcccuuugu

SEQ ID NO: 2993214 - RNA, 19 nt, Artificial Sequence
  Description of Artificial Sequence: Synthetic oligonucleotide
gucuuuaguuugaugcaua

SEQ ID NO: 2993215 - RNA, 19 nt, Artificial Sequence
  Description of Artificial Sequence: Synthetic oligonucleotide
acaauuggggaagguccau

SEQ ID NO: 2993216 - RNA, 19 nt, Artificial Sequence
  Description of Artificial Sequence: Synthetic oligonucleotide
agcugacuuuugacaacag

SEQ ID NO: 2993217 - RNA, 19 nt, Artificial Sequence
  Description of Artificial Sequence: Synthetic oligonucleotide
acgucaucaccccguuaaa

SEQ ID NO: 2993218 - RNA, 19 nt, Artificial Sequence
  Description of Artificial Sequence: Synthetic oligonucleotide
gauacgucaucaccccguu

SEQ ID NO: 2993219 - RNA, 19 nt, Artificial Sequence
  Description of Artificial Sequence: Synthetic oligonucleotide
gcauaaauuugaagaugca

SEQ ID NO: 2993220 - RNA, 19 nt, Artificial Sequence
  Description of Artificial Sequence: Synthetic oligonucleotide
cacuaaauuuuaucugguu

SEQ ID NO: 2993221 - RNA, 19 nt, Artificial Sequence
  Description of Artificial Sequence: Synthetic oligonucleotide
gcucuagaagccaccuacc

SEQ ID NO: 2993222 - RNA, 19 nt, Artificial Sequence
  Description of Artificial Sequence: Synthetic oligonucleotide
aggcagcauugaauggaag

SEQ ID NO: 2993223 - RNA, 19 nt, Artificial Sequence
  Description of Artificial Sequence: Synthetic oligonucleotide
gcacugagcuggcacauaa

SEQ ID NO: 2993224 - RNA, 19 nt, Artificial Sequence
  Description of Artificial Sequence: Synthetic oligonucleotide
cccuuugugggauacugaa

SEQ ID NO: 2993225 - RNA, 19 nt, Artificial Sequence
  Description of Artificial Sequence: Synthetic oligonucleotide
caccuaccgaggcuacauc

SEQ ID NO: 2993226 - RNA, 19 nt, Artificial Sequence
  Description of Artificial Sequence: Synthetic oligonucleotide
auacgucaucaccccguua

SEQ ID NO: 2993227 - RNA, 19 nt, Artificial Sequence
  Description of Artificial Sequence: Synthetic oligonucleotide
gcugacuuuugacaacagu

SEQ ID NO: 2993228 - RNA, 19 nt, Artificial Sequence
  Description of Artificial Sequence: Synthetic oligonucleotide
gcacaugguagagcucuag

SEQ ID NO: 2993229 - RNA, 19 nt, Artificial Sequence
  Description of Artificial Sequence: Synthetic oligonucleotide
gcagcugcggcggugccgc

SEQ ID NO: 2993230 - RNA, 19 nt, Artificial Sequence
  Description of Artificial Sequence: Synthetic oligonucleotide
caacagauuuaggcacuca

SEQ ID NO: 2993231 - RNA, 19 nt, Artificial Sequence
  Description of Artificial Sequence: Synthetic oligonucleotide
agccaccuaccgaggcuac

SEQ ID NO: 2993232 - RNA, 19 nt, Artificial Sequence
  Description of Artificial Sequence: Synthetic oligonucleotide
cucggacaggucuuuaguu

SEQ ID NO: 2993233 - RNA, 19 nt, Artificial Sequence
  Description of Artificial Sequence: Synthetic oligonucleotide
auggacucggacaggucuu

SEQ ID NO: 2993234 - RNA, 19 nt, Artificial Sequence
  Description of Artificial Sequence: Synthetic oligonucleotide
uggacucggacaggucuuu

SEQ ID NO: 2993235 - RNA, 19 nt, Artificial Sequence
  Description of Artificial Sequence: Synthetic oligonucleotide
cgcagaauuagaggaggag

SEQ ID NO: 2993236 - RNA, 19 nt, Artificial Sequence
  Description of Artificial Sequence: Synthetic oligonucleotide
acaucgcagcugcggcggu

SEQ ID NO: 2993237 - RNA, 19 nt, Artificial Sequence
  Description of Artificial Sequence: Synthetic oligonucleotide
cggugccgcagaauuagag

SEQ ID NO: 2993238 - RNA, 19 nt, Artificial Sequence
  Description of Artificial Sequence: Synthetic oligonucleotide
gggauacugaagugguagu

SEQ ID NO: 2993239 - RNA, 19 nt, Artificial Sequence
  Description of Artificial Sequence: Synthetic oligonucleotide
cacugagcuggcacauaaa

SEQ ID NO: 2993240 - RNA, 19 nt, Artificial Sequence
  Description of Artificial Sequence: Synthetic oligonucleotide
ggucuuuaguuugaugcau

SEQ ID NO: 2993241 - RNA, 19 nt, Artificial Sequence
  Description of Artificial Sequence: Synthetic oligonucleotide
ccaacuucucaugaguaua

SEQ ID NO: 2993242 - RNA, 19 nt, Artificial Sequence
  Description of Artificial Sequence: Synthetic oligonucleotide
agcugcggcggugccgcag

SEQ ID NO: 2993243 - RNA, 19 nt, Artificial Sequence
  Description of Artificial Sequence: Synthetic oligonucleotide
caucgcagcugcggcggug

SEQ ID NO: 2993244 - RNA, 19 nt, Artificial Sequence
  Description of Artificial Sequence: Synthetic oligonucleotide
gcauugaauggaagcagcu

SEQ ID NO: 2993245 - RNA, 19 nt, Artificial Sequence
  Description of Artificial Sequence: Synthetic oligonucleotide
cucaaguuuaaggcagcau

SEQ ID NO: 2993246 - RNA, 19 nt, Artificial Sequence
  Description of Artificial Sequence: Synthetic oligonucleotide
ccacugcacaugguagagc

SEQ ID NO: 2993247 - RNA, 19 nt, Artificial Sequence
  Description of Artificial Sequence: Synthetic oligonucleotide
gaggagcacugagcuggca

SEQ ID NO: 2993248 - RNA, 19 nt, Artificial Sequence
  Description of Artificial Sequence: Synthetic oligonucleotide
ggggaagguccauccaacu

SEQ ID NO: 2993249 - RNA, 19 nt, Artificial Sequence
  Description of Artificial Sequence: Synthetic oligonucleotide
aggcuacaucgcagcugcg

SEQ ID NO: 2993250 - RNA, 19 nt, Artificial Sequence
  Description of Artificial Sequence: Synthetic oligonucleotide
gugggauacugaaguggua

SEQ ID NO: 2993251 - RNA, 19 nt, Artificial Sequence
  Description of Artificial Sequence: Synthetic oligonucleotide
ggaggagcacugagcuggc

SEQ ID NO: 2993252 - RNA, 19 nt, Artificial Sequence
  Description of Artificial Sequence: Synthetic oligonucleotide
agcacugagcuggcacaua

SEQ ID NO: 2993253 - RNA, 19 nt, Artificial Sequence
  Description of Artificial Sequence: Synthetic oligonucleotide
gagcacugagcuggcacau

SEQ ID NO: 2993254 - RNA, 19 nt, Artificial Sequence
  Description of Artificial Sequence: Synthetic oligonucleotide
ugcggcggugccgcagaau

SEQ ID NO: 2993255 - RNA, 19 nt, Artificial Sequence
  Description of Artificial Sequence: Synthetic oligonucleotide
ccgcagaauuagaggagga

SEQ ID NO: 2993256 - RNA, 19 nt, Artificial Sequence
  Description of Artificial Sequence: Synthetic oligonucleotide
cgaggcuacaucgcagcug

SEQ ID NO: 2993257 - RNA, 19 nt, Artificial Sequence
  Description of Artificial Sequence: Synthetic oligonucleotide
gcugcggcggugccgcaga

SEQ ID NO: 2993258 - RNA, 19 nt, Artificial Sequence
  Description of Artificial Sequence: Synthetic oligonucleotide
caccccguuaaaagacaau

SEQ ID NO: 2993259 - RNA, 19 nt, Artificial Sequence
  Description of Artificial Sequence: Synthetic oligonucleotide
augcaccacugcacauggu

SEQ ID NO: 2993260 - RNA, 19 nt, Artificial Sequence
  Description of Artificial Sequence: Synthetic oligonucleotide
gcccuuugugggauacuga

SEQ ID NO: 2993261 - RNA, 19 nt, Artificial Sequence
  Description of Artificial Sequence: Synthetic oligonucleotide
gcggcggugccgcagaauu

SEQ ID NO: 2993262 - RNA, 19 nt, Artificial Sequence
  Description of Artificial Sequence: Synthetic oligonucleotide
cgucaucaccccguuaaaa

SEQ ID NO: 2993263 - RNA, 19 nt, Artificial Sequence
  Description of Artificial Sequence: Synthetic oligonucleotide
gccaccuaccgaggcuaca

SEQ ID NO: 2993264 - RNA, 19 nt, Artificial Sequence
  Description of Artificial Sequence: Synthetic oligonucleotide
ggacucggacaggucuuua

SEQ ID NO: 2993265 - RNA, 19 nt, Artificial Sequence
  Description of Artificial Sequence: Synthetic oligonucleotide
cuggcacauaaagcccuuu

SEQ ID NO: 2993266 - RNA, 19 nt, Artificial Sequence
  Description of Artificial Sequence: Synthetic oligonucleotide
gcggugccgcagaauuaga

SEQ ID NO: 2993267 - RNA, 19 nt, Artificial Sequence
  Description of Artificial Sequence: Synthetic oligonucleotide
ccaccuaccgaggcuacau

SEQ ID NO: 2993268 - RNA, 19 nt, Artificial Sequence
  Description of Artificial Sequence: Synthetic oligonucleotide
cugcggcggugccgcagaa

SEQ ID NO: 2993269 - RNA, 19 nt, Artificial Sequence
  Description of Artificial Sequence: Synthetic oligonucleotide
ccgaggcuacaucgcagcu

SEQ ID NO: 2993270 - RNA, 19 nt, Artificial Sequence
  Description of Artificial Sequence: Synthetic oligonucleotide
gcuggcacauaaagcccuu

SEQ ID NO: 2993271 - RNA, 19 nt, Artificial Sequence
  Description of Artificial Sequence: Synthetic oligonucleotide
cagcugcggcggugccgca

SEQ ID NO: 2993272 - RNA, 19 nt, Artificial Sequence
  Description of Artificial Sequence: Synthetic oligonucleotide
cggcggugccgcagaauua

SEQ ID NO: 2993273 - RNA, 19 nt, Artificial Sequence
  Description of Artificial Sequence: Synthetic oligonucleotide
uucaccuucuggcucucgg

SEQ ID NO: 2993274 - RNA, 19 nt, Artificial Sequence
  Description of Artificial Sequence: Synthetic oligonucleotide
uggcucucggucuucuugg

SEQ ID NO: 2993275 - RNA, 19 nt, Artificial Sequence
  Description of Artificial Sequence: Synthetic oligonucleotide
acaugcucgaccgcgcgcc

SEQ ID NO: 2993276 - RNA, 19 nt, Artificial Sequence
  Description of Artificial Sequence: Synthetic oligonucleotide
gaucucggccgucagguac

SEQ ID NO: 2993277 - RNA, 19 nt, Artificial Sequence
  Description of Artificial Sequence: Synthetic oligonucleotide
guugaguuccucgucguug

SEQ ID NO: 2993278 - RNA, 19 nt, Artificial Sequence
  Description of Artificial Sequence: Synthetic oligonucleotide
aguuccucgucguugcgga

SEQ ID NO: 2993279 - RNA, 19 nt, Artificial Sequence
  Description of Artificial Sequence: Synthetic oligonucleotide
ugcgcgauggucacccggc

SEQ ID NO: 2993280 - RNA, 19 nt, Artificial Sequence
  Description of Artificial Sequence: Synthetic oligonucleotide
ugcucuucaccuucuggcu

SEQ ID NO: 2993281 - RNA, 19 nt, Artificial Sequence
  Description of Artificial Sequence: Synthetic oligonucleotide
uuggcgcgcaccuugccgc

SEQ ID NO: 2993282 - RNA, 19 nt, Artificial Sequence
  Description of Artificial Sequence: Synthetic oligonucleotide
cuuggcgcgcaccuugccg

SEQ ID NO: 2993283 - RNA, 19 nt, Artificial Sequence
  Description of Artificial Sequence: Synthetic oligonucleotide
ucucggucuucuugggcag

SEQ ID NO: 2993284 - RNA, 19 nt, Artificial Sequence
  Description of Artificial Sequence: Synthetic oligonucleotide
ugaguuccucgucguugcg

SEQ ID NO: 2993285 - RNA, 19 nt, Artificial Sequence
  Description of Artificial Sequence: Synthetic oligonucleotide
uuguugaguuccucgucgu

SEQ ID NO: 2993286 - RNA, 19 nt, Artificial Sequence
  Description of Artificial Sequence: Synthetic oligonucleotide
acccacggggaacugcagg

SEQ ID NO: 2993287 - RNA, 19 nt, Artificial Sequence
  Description of Artificial Sequence: Synthetic oligonucleotide
aacugcaggcccgcgcgcg

SEQ ID NO: 2993288 - RNA, 19 nt, Artificial Sequence
  Description of Artificial Sequence: Synthetic oligonucleotide
cucucggucuucuugggca

SEQ ID NO: 2993289 - RNA, 19 nt, Artificial Sequence
  Description of Artificial Sequence: Synthetic oligonucleotide
gaguuccucgucguugcgg

SEQ ID NO: 2993290 - RNA, 19 nt, Artificial Sequence
  Description of Artificial Sequence: Synthetic oligonucleotide
aggaucucggccgucaggu

SEQ ID NO: 2993291 - RNA, 19 nt, Artificial Sequence
  Description of Artificial Sequence: Synthetic oligonucleotide
caccuugccgcccugcuug

SEQ ID NO: 2993292 - RNA, 19 nt, Artificial Sequence
  Description of Artificial Sequence: Synthetic oligonucleotide
ugcucgaccgcgcgccccg

SEQ ID NO: 2993293 - RNA, 19 nt, Artificial Sequence
  Description of Artificial Sequence: Synthetic oligonucleotide
cuggcucucggucuucuug

SEQ ID NO: 2993294 - RNA, 19 nt, Artificial Sequence
  Description of Artificial Sequence: Synthetic oligonucleotide
agcgcgacuucgccuuggc

SEQ ID NO: 2993295 - RNA, 19 nt, Artificial Sequence
  Description of Artificial Sequence: Synthetic oligonucleotide
ucaccuucuggcucucggu

SEQ ID NO: 2993296 - RNA, 19 nt, Artificial Sequence
  Description of Artificial Sequence: Synthetic oligonucleotide
ucgcgcgccgcguugcccg

SEQ ID NO: 2993297 - RNA, 19 nt, Artificial Sequence
  Description of Artificial Sequence: Synthetic oligonucleotide
gacaugcucgaccgcgcgc

SEQ ID NO: 2993298 - RNA, 19 nt, Artificial Sequence
  Description of Artificial Sequence: Synthetic oligonucleotide
accuucuggcucucggucu

SEQ ID NO: 2993299 - RNA, 19 nt, Artificial Sequence
  Description of Artificial Sequence: Synthetic oligonucleotide
agguacaccggcgcgcccg

SEQ ID NO: 2993300 - RNA, 19 nt, Artificial Sequence
  Description of Artificial Sequence: Synthetic oligonucleotide
cacggggaacugcaggccc

SEQ ID NO: 2993301 - RNA, 19 nt, Artificial Sequence
  Description of Artificial Sequence: Synthetic oligonucleotide
uugccucgccccgacaugc

SEQ ID NO: 2993302 - RNA, 19 nt, Artificial Sequence
  Description of Artificial Sequence: Synthetic oligonucleotide
gcgacuucgccuuggcgcg

SEQ ID NO: 2993303 - RNA, 19 nt, Artificial Sequence
  Description of Artificial Sequence: Synthetic oligonucleotide
acaccggcgcgcccgcgcc

SEQ ID NO: 2993304 - RNA, 19 nt, Artificial Sequence
  Description of Artificial Sequence: Synthetic oligonucleotide
uguugaguuccucgucguu

SEQ ID NO: 2993305 - RNA, 19 nt, Artificial Sequence
  Description of Artificial Sequence: Synthetic oligonucleotide
accuugccgcccugcuugc

SEQ ID NO: 2993306 - RNA, 19 nt, Artificial Sequence
  Description of Artificial Sequence: Synthetic oligonucleotide
uacaccggcgcgcccgcgc

SEQ ID NO: 2993307 - RNA, 19 nt, Artificial Sequence
  Description of Artificial Sequence: Synthetic oligonucleotide
gccccgacaugcucgaccg

SEQ ID NO: 2993308 - RNA, 19 nt, Artificial Sequence
  Description of Artificial Sequence: Synthetic oligonucleotide
cgcgacuucgccuuggcgc

SEQ ID NO: 2993309 - RNA, 19 nt, Artificial Sequence
  Description of Artificial Sequence: Synthetic oligonucleotide
acgagcgcgacuucgccuu

SEQ ID NO: 2993310 - RNA, 19 nt, Artificial Sequence
  Description of Artificial Sequence: Synthetic oligonucleotide
cugcgcgauggucacccgg

SEQ ID NO: 2993311 - RNA, 19 nt, Artificial Sequence
  Description of Artificial Sequence: Synthetic oligonucleotide
ugcacgcgacccacgggga

SEQ ID NO: 2993312 - RNA, 19 nt, Artificial Sequence
  Description of Artificial Sequence: Synthetic oligonucleotide
accgcgcgccccgagcucc

SEQ ID NO: 2993313 - RNA, 19 nt, Artificial Sequence
  Description of Artificial Sequence: Synthetic oligonucleotide
ucgaccgcgcgccccgagc

SEQ ID NO: 2993314 - RNA, 19 nt, Artificial Sequence
  Description of Artificial Sequence: Synthetic oligonucleotide
ggucacccggcccagcagc

SEQ ID NO: 2993315 - RNA, 19 nt, Artificial Sequence
  Description of Artificial Sequence: Synthetic oligonucleotide
cuugccucgccccgacaug

SEQ ID NO: 2993316 - RNA, 19 nt, Artificial Sequence
  Description of Artificial Sequence: Synthetic oligonucleotide
gaacugcaggcccgcgcgc

SEQ ID NO: 2993317 - RNA, 19 nt, Artificial Sequence
  Description of Artificial Sequence: Synthetic oligonucleotide
acggggaacugcaggcccg

SEQ ID NO: 2993318 - RNA, 19 nt, Artificial Sequence
  Description of Artificial Sequence: Synthetic oligonucleotide
aggcccgcgcgcgacgagc

SEQ ID NO: 2993319 - RNA, 19 nt, Artificial Sequence
  Description of Artificial Sequence: Synthetic oligonucleotide
augcucgaccgcgcgcccc

SEQ ID NO: 2993320 - RNA, 19 nt, Artificial Sequence
  Description of Artificial Sequence: Synthetic oligonucleotide
ugccgcccugcuugccucg

SEQ ID NO: 2993321 - RNA, 19 nt, Artificial Sequence
  Description of Artificial Sequence: Synthetic oligonucleotide
ccucgccccgacaugcucg

SEQ ID NO: 2993322 - RNA, 19 nt, Artificial Sequence
  Description of Artificial Sequence: Synthetic oligonucleotide
cucuucaccuucuggcucu

SEQ ID NO: 2993323 - RNA, 19 nt, Artificial Sequence
  Description of Artificial Sequence: Synthetic oligonucleotide
cccgacaugcucgaccgcg

SEQ ID NO: 2993324 - RNA, 19 nt, Artificial Sequence
  Description of Artificial Sequence: Synthetic oligonucleotide
cacccggcccagcagcuug

SEQ ID NO: 2993325 - RNA, 19 nt, Artificial Sequence
  Description of Artificial Sequence: Synthetic oligonucleotide
ggcucucggucuucuuggg

SEQ ID NO: 2993326 - RNA, 19 nt, Artificial Sequence
  Description of Artificial Sequence: Synthetic oligonucleotide
aucucggccgucagguacu

SEQ ID NO: 2993327 - RNA, 19 nt, Artificial Sequence
  Description of Artificial Sequence: Synthetic oligonucleotide
uugucgcgcgccgcguugc

SEQ ID NO: 2993328 - RNA, 19 nt, Artificial Sequence
  Description of Artificial Sequence: Synthetic oligonucleotide
gagcgcgacuucgccuugg

SEQ ID NO: 2993329 - RNA, 19 nt, Artificial Sequence
  Description of Artificial Sequence: Synthetic oligonucleotide
ugucgcgcgccgcguugcc

SEQ ID NO: 2993330 - RNA, 19 nt, Artificial Sequence
  Description of Artificial Sequence: Synthetic oligonucleotide
acuucgccuuggcgcgcac

SEQ ID NO: 2993331 - RNA, 19 nt, Artificial Sequence
  Description of Artificial Sequence: Synthetic oligonucleotide
gcgauggucacccggccca

SEQ ID NO: 2993332 - RNA, 19 nt, Artificial Sequence
  Description of Artificial Sequence: Synthetic oligonucleotide
gacgagcgcgacuucgccu

SEQ ID NO: 2993333 - RNA, 19 nt, Artificial Sequence
  Description of Artificial Sequence: Synthetic oligonucleotide
uugccgcccugcuugccuc

SEQ ID NO: 2993334 - RNA, 19 nt, Artificial Sequence
  Description of Artificial Sequence: Synthetic oligonucleotide
caugcucgaccgcgcgccc

SEQ ID NO: 2993335 - RNA, 19 nt, Artificial Sequence
  Description of Artificial Sequence: Synthetic oligonucleotide
acugcaggcccgcgcgcga

SEQ ID NO: 2993336 - RNA, 19 nt, Artificial Sequence
  Description of Artificial Sequence: Synthetic oligonucleotide
cacgcgacccacggggaac

SEQ ID NO: 2993337 - RNA, 19 nt, Artificial Sequence
  Description of Artificial Sequence: Synthetic oligonucleotide
gcucucggucuucuugggc

SEQ ID NO: 2993338 - RNA, 19 nt, Artificial Sequence
  Description of Artificial Sequence: Synthetic oligonucleotide
cucggucuucuugggcagc

SEQ ID NO: 2993339 - RNA, 19 nt, Artificial Sequence
  Description of Artificial Sequence: Synthetic oligonucleotide
ugcuugccucgccccgaca

SEQ ID NO: 2993340 - RNA, 19 nt, Artificial Sequence
  Description of Artificial Sequence: Synthetic oligonucleotide
cuucgccuuggcgcgcacc

SEQ ID NO: 2993341 - RNA, 19 nt, Artificial Sequence
  Description of Artificial Sequence: Synthetic oligonucleotide
ugccucgccccgacaugcu

SEQ ID NO: 2993342 - RNA, 19 nt, Artificial Sequence
  Description of Artificial Sequence: Synthetic oligonucleotide
gacccacggggaacugcag

SEQ ID NO: 2993343 - RNA, 19 nt, Artificial Sequence
  Description of Artificial Sequence: Synthetic oligonucleotide
acgccgcccugcgcgaugg

SEQ ID NO: 2993344 - RNA, 19 nt, Artificial Sequence
  Description of Artificial Sequence: Synthetic oligonucleotide
cugcuugccucgccccgac

SEQ ID NO: 2993345 - RNA, 19 nt, Artificial Sequence
  Description of Artificial Sequence: Synthetic oligonucleotide
cccugcgcgauggucaccc

SEQ ID NO: 2993346 - RNA, 19 nt, Artificial Sequence
  Description of Artificial Sequence: Synthetic oligonucleotide
ccgacaugcucgaccgcgc

SEQ ID NO: 2993347 - RNA, 19 nt, Artificial Sequence
  Description of Artificial Sequence: Synthetic oligonucleotide
gacuucgccuuggcgcgca

SEQ ID NO: 2993348 - RNA, 19 nt, Artificial Sequence
  Description of Artificial Sequence: Synthetic oligonucleotide
acgcgacccacggggaacu

SEQ ID NO: 2993349 - RNA, 19 nt, Artificial Sequence
  Description of Artificial Sequence: Synthetic oligonucleotide
gccagguacaccggcgcgc

SEQ ID NO: 2993350 - RNA, 19 nt, Artificial Sequence
  Description of Artificial Sequence: Synthetic oligonucleotide
cucgccccgacaugcucga

SEQ ID NO: 2993351 - RNA, 19 nt, Artificial Sequence
  Description of Artificial Sequence: Synthetic oligonucleotide
gccgccagguacaccggcg

SEQ ID NO: 2993352 - RNA, 19 nt, Artificial Sequence
  Description of Artificial Sequence: Synthetic oligonucleotide
ccagguacaccggcgcgcc

SEQ ID NO: 2993353 - RNA, 19 nt, Artificial Sequence
  Description of Artificial Sequence: Synthetic oligonucleotide
gcgcgacuucgccuuggcg

SEQ ID NO: 2993354 - RNA, 19 nt, Artificial Sequence
  Description of Artificial Sequence: Synthetic oligonucleotide
cuugccgcccugcuugccu

SEQ ID NO: 2993355 - RNA, 19 nt, Artificial Sequence
  Description of Artificial Sequence: Synthetic oligonucleotide
cagguacaccggcgcgccc

SEQ ID NO: 2993356 - RNA, 19 nt, Artificial Sequence
  Description of Artificial Sequence: Synthetic oligonucleotide
ccgccagguacaccggcgc

SEQ ID NO: 2993357 - RNA, 19 nt, Artificial Sequence
  Description of Artificial Sequence: Synthetic oligonucleotide
cucgaccgcgcgccccgag

SEQ ID NO: 2993358 - RNA, 19 nt, Artificial Sequence
  Description of Artificial Sequence: Synthetic oligonucleotide
cgacaugcucgaccgcgcg

SEQ ID NO: 2993359 - RNA, 19 nt, Artificial Sequence
  Description of Artificial Sequence: Synthetic oligonucleotide
ucucggccgucagguacuc

SEQ ID NO: 2993360 - RNA, 19 nt, Artificial Sequence
  Description of Artificial Sequence: Synthetic oligonucleotide
cggcccagcagcuuguuga

SEQ ID NO: 2993361 - RNA, 19 nt, Artificial Sequence
  Description of Artificial Sequence: Synthetic oligonucleotide
cccugcuugccucgccccg

SEQ ID NO: 2993362 - RNA, 19 nt, Artificial Sequence
  Description of Artificial Sequence: Synthetic oligonucleotide
ggccgccagguacaccggc

SEQ ID NO: 2993363 - RNA, 19 nt, Artificial Sequence
  Description of Artificial Sequence: Synthetic oligonucleotide
gcgacgagcgcgacuucgc

SEQ ID NO: 2993364 - RNA, 19 nt, Artificial Sequence
  Description of Artificial Sequence: Synthetic oligonucleotide
gaccgcgcgccccgagcuc

SEQ ID NO: 2993365 - RNA, 19 nt, Artificial Sequence
  Description of Artificial Sequence: Synthetic oligonucleotide
cggugcacgcgacccacgg

SEQ ID NO: 2993366 - RNA, 19 nt, Artificial Sequence
  Description of Artificial Sequence: Synthetic oligonucleotide
cgccccgacaugcucgacc

SEQ ID NO: 2993367 - RNA, 19 nt, Artificial Sequence
  Description of Artificial Sequence: Synthetic oligonucleotide
guacaccggcgcgcccgcg

SEQ ID NO: 2993368 - RNA, 19 nt, Artificial Sequence
  Description of Artificial Sequence: Synthetic oligonucleotide
gucgcgcgccgcguugccc

SEQ ID NO: 2993369 - RNA, 19 nt, Artificial Sequence
  Description of Artificial Sequence: Synthetic oligonucleotide
cgcgacgagcgcgacuucg

SEQ ID NO: 2993370 - RNA, 19 nt, Artificial Sequence
  Description of Artificial Sequence: Synthetic oligonucleotide
ggcccgcgcgcgacgagcg

SEQ ID NO: 2993371 - RNA, 19 nt, Artificial Sequence
  Description of Artificial Sequence: Synthetic oligonucleotide
gcuugccucgccccgacau

SEQ ID NO: 2993372 - RNA, 19 nt, Artificial Sequence
  Description of Artificial Sequence: Synthetic oligonucleotide
cugcaggcccgcgcgcgac

SEQ ID NO: 2993373 - RNA, 19 nt, Artificial Sequence
  Description of Artificial Sequence: Synthetic oligonucleotide
gcgcgauggucacccggcc

SEQ ID NO: 2993374 - RNA, 19 nt, Artificial Sequence
  Description of Artificial Sequence: Synthetic oligonucleotide
cgacgagcgcgacuucgcc

SEQ ID NO: 2993375 - RNA, 19 nt, Artificial Sequence
  Description of Artificial Sequence: Synthetic oligonucleotide
cgcgauggucacccggccc

SEQ ID NO: 2993376 - RNA, 19 nt, Artificial Sequence
  Description of Artificial Sequence: Synthetic oligonucleotide
gcgacccacggggaacugc

SEQ ID NO: 2993377 - RNA, 19 nt, Artificial Sequence
  Description of Artificial Sequence: Synthetic oligonucleotide
ccgcccugcgcgaugguca

SEQ ID NO: 2993378 - RNA, 19 nt, Artificial Sequence
  Description of Artificial Sequence: Synthetic oligonucleotide
cgacccacggggaacugca

SEQ ID NO: 2993379 - RNA, 19 nt, Artificial Sequence
  Description of Artificial Sequence: Synthetic oligonucleotide
cccgcgcgcgacgagcgcg

SEQ ID NO: 2993380 - RNA, 19 nt, Artificial Sequence
  Description of Artificial Sequence: Synthetic oligonucleotide
cgccagguacaccggcgcg

SEQ ID NO: 2993381 - RNA, 19 nt, Artificial Sequence
  Description of Artificial Sequence: Synthetic oligonucleotide
caggcccgcgcgcgacgag

SEQ ID NO: 2993382 - RNA, 19 nt, Artificial Sequence
  Description of Artificial Sequence: Synthetic oligonucleotide
accggcgcgcccgcgccca

SEQ ID NO: 2993383 - RNA, 19 nt, Artificial Sequence
  Description of Artificial Sequence: Synthetic oligonucleotide
caccggcgcgcccgcgccc

SEQ ID NO: 2993384 - RNA, 19 nt, Artificial Sequence
  Description of Artificial Sequence: Synthetic oligonucleotide
cgcccugcuugccucgccc

SEQ ID NO: 2993385 - RNA, 19 nt, Artificial Sequence
  Description of Artificial Sequence: Synthetic oligonucleotide
gccucgccccgacaugcuc

SEQ ID NO: 2993386 - RNA, 19 nt, Artificial Sequence
  Description of Artificial Sequence: Synthetic oligonucleotide
acccggcccagcagcuugu

SEQ ID NO: 2993387 - RNA, 19 nt, Artificial Sequence
  Description of Artificial Sequence: Synthetic oligonucleotide
ggaucucggccgucaggua

SEQ ID NO: 2993388 - RNA, 19 nt, Artificial Sequence
  Description of Artificial Sequence: Synthetic oligonucleotide
guuccucgucguugcggau

SEQ ID NO: 2993389 - RNA, 19 nt, Artificial Sequence
  Description of Artificial Sequence: Synthetic oligonucleotide
gcacgcgacccacggggaa

SEQ ID NO: 2993390 - RNA, 19 nt, Artificial Sequence
  Description of Artificial Sequence: Synthetic oligonucleotide
ccggcccagcagcuuguug

SEQ ID NO: 2993391 - RNA, 19 nt, Artificial Sequence
  Description of Artificial Sequence: Synthetic oligonucleotide
ucgccccgacaugcucgac

SEQ ID NO: 2993392 - RNA, 19 nt, Artificial Sequence
  Description of Artificial Sequence: Synthetic oligonucleotide
cccgcgcccacgcgcuccg

SEQ ID NO: 2993393 - RNA, 19 nt, Artificial Sequence
  Description of Artificial Sequence: Synthetic oligonucleotide
cgcgcccgcgcccacgcgc

SEQ ID NO: 2993394 - RNA, 19 nt, Artificial Sequence
  Description of Artificial Sequence: Synthetic oligonucleotide
ggcgcgcaccuugccgccc

SEQ ID NO: 2993395 - RNA, 19 nt, Artificial Sequence
  Description of Artificial Sequence: Synthetic oligonucleotide
ccuugccgcccugcuugcc

SEQ ID NO: 2993396 - RNA, 19 nt, Artificial Sequence
  Description of Artificial Sequence: Synthetic oligonucleotide
ccccgacaugcucgaccgc

SEQ ID NO: 2993397 - RNA, 19 nt, Artificial Sequence
  Description of Artificial Sequence: Synthetic oligonucleotide
ccugcuugccucgccccga

SEQ ID NO: 2993398 - RNA, 19 nt, Artificial Sequence
  Description of Artificial Sequence: Synthetic oligonucleotide
cggggaacugcaggcccgc

SEQ ID NO: 2993399 - RNA, 19 nt, Artificial Sequence
  Description of Artificial Sequence: Synthetic oligonucleotide
gcgcaccuugccgcccugc

SEQ ID NO: 2993400 - RNA, 19 nt, Artificial Sequence
  Description of Artificial Sequence: Synthetic oligonucleotide
cgauggucacccggcccag

SEQ ID NO: 2993401 - RNA, 19 nt, Artificial Sequence
  Description of Artificial Sequence: Synthetic oligonucleotide
gcccgcgcccacgcgcucc

SEQ ID NO: 2993402 - RNA, 19 nt, Artificial Sequence
  Description of Artificial Sequence: Synthetic oligonucleotide
gcaggcccgcgcgcgacga

SEQ ID NO: 2993403 - RNA, 19 nt, Artificial Sequence
  Description of Artificial Sequence: Synthetic oligonucleotide
ccgcccugcuugccucgcc

SEQ ID NO: 2993404 - RNA, 19 nt, Artificial Sequence
  Description of Artificial Sequence: Synthetic oligonucleotide
gccgcccugcuugccucgc

SEQ ID NO: 2993405 - RNA, 19 nt, Artificial Sequence
  Description of Artificial Sequence: Synthetic oligonucleotide
gcccgcgcgcgacgagcgc

SEQ ID NO: 2993406 - RNA, 19 nt, Artificial Sequence
  Description of Artificial Sequence: Synthetic oligonucleotide
ccuucuggcucucggucuu

SEQ ID NO: 2993407 - RNA, 19 nt, Artificial Sequence
  Description of Artificial Sequence: Synthetic oligonucleotide
cgacuucgccuuggcgcgc

SEQ ID NO: 2993408 - RNA, 19 nt, Artificial Sequence
  Description of Artificial Sequence: Synthetic oligonucleotide
ccgcgcgcgacgagcgcga

SEQ ID NO: 2993409 - RNA, 19 nt, Artificial Sequence
  Description of Artificial Sequence: Synthetic oligonucleotide
gcgcgcaccuugccgcccu

SEQ ID NO: 2993410 - RNA, 19 nt, Artificial Sequence
  Description of Artificial Sequence: Synthetic oligonucleotide
gcgcgacgagcgcgacuuc

SEQ ID NO: 2993411 - RNA, 19 nt, Artificial Sequence
  Description of Artificial Sequence: Synthetic oligonucleotide
cgcgcgccgcguugcccgc

SEQ ID NO: 2993412 - RNA, 19 nt, Artificial Sequence
  Description of Artificial Sequence: Synthetic oligonucleotide
cgcgcgacgagcgcgacuu

SEQ ID NO: 2993413 - RNA, 19 nt, Artificial Sequence
  Description of Artificial Sequence: Synthetic oligonucleotide
cgaccgcgcgccccgagcu

SEQ ID NO: 2993414 - RNA, 19 nt, Artificial Sequence
  Description of Artificial Sequence: Synthetic oligonucleotide
gcgcgcgacgagcgcgacu

SEQ ID NO: 2993415 - RNA, 19 nt, Artificial Sequence
  Description of Artificial Sequence: Synthetic oligonucleotide
gcucgaccgcgcgccccga

SEQ ID NO: 2993416 - RNA, 19 nt, Artificial Sequence
  Description of Artificial Sequence: Synthetic oligonucleotide
cgcgcaccuugccgcccug

SEQ ID NO: 2993417 - RNA, 19 nt, Artificial Sequence
  Description of Artificial Sequence: Synthetic oligonucleotide
cgcgacccacggggaacug

SEQ ID NO: 2993418 - RNA, 19 nt, Artificial Sequence
  Description of Artificial Sequence: Synthetic oligonucleotide
gcgcccgcgcccacgcgcu

SEQ ID NO: 2993419 - RNA, 19 nt, Artificial Sequence
  Description of Artificial Sequence: Synthetic oligonucleotide
ccgcgcgccccgagcucca

SEQ ID NO: 2993420 - RNA, 19 nt, Artificial Sequence
  Description of Artificial Sequence: Synthetic oligonucleotide
ccggcgcgcccgcgcccac

SEQ ID NO: 2993421 - RNA, 19 nt, Artificial Sequence
  Description of Artificial Sequence: Synthetic oligonucleotide
ccgcgcccacgcgcuccgc

SEQ ID NO: 2993422 - RNA, 19 nt, Artificial Sequence
  Description of Artificial Sequence: Synthetic oligonucleotide
cgcccgcgcccacgcgcuc

SEQ ID NO: 2993423 - RNA, 19 nt, Artificial Sequence
  Description of Artificial Sequence: Synthetic oligonucleotide
cccggcccagcagcuuguu

SEQ ID NO: 2993424 - RNA, 19 nt, Artificial Sequence
  Description of Artificial Sequence: Synthetic oligonucleotide
aagagaaaagggcagagag

SEQ ID NO: 2993425 - RNA, 19 nt, Artificial Sequence
  Description of Artificial Sequence: Synthetic oligonucleotide
uaaauuaacuguaaugagc

SEQ ID NO: 2993426 - RNA, 19 nt, Artificial Sequence
  Description of Artificial Sequence: Synthetic oligonucleotide
ucugguugcaggaacaagg

SEQ ID NO: 2993427 - RNA, 19 nt, Artificial Sequence
  Description of Artificial Sequence: Synthetic oligonucleotide
auugaggucagcuucuggc

SEQ ID NO: 2993428 - RNA, 19 nt, Artificial Sequence
  Description of Artificial Sequence: Synthetic oligonucleotide
uuaacuguaaugagcaacc

SEQ ID NO: 2993429 - RNA, 19 nt, Artificial Sequence
  Description of Artificial Sequence: Synthetic oligonucleotide
aaauuaacuguaaugagca

SEQ ID NO: 2993430 - RNA, 19 nt, Artificial Sequence
  Description of Artificial Sequence: Synthetic oligonucleotide
aggaagacaggacaggagc

SEQ ID NO: 2993431 - RNA, 19 nt, Artificial Sequence
  Description of Artificial Sequence: Synthetic oligonucleotide
cauaggauaggaaagucag

SEQ ID NO: 2993432 - RNA, 19 nt, Artificial Sequence
  Description of Artificial Sequence: Synthetic oligonucleotide
uuuguuucagaguauaaaa

SEQ ID NO: 2993433 - RNA, 19 nt, Artificial Sequence
  Description of Artificial Sequence: Synthetic oligonucleotide
auuaacuguaaugagcaac

SEQ ID NO: 2993434 - RNA, 19 nt, Artificial Sequence
  Description of Artificial Sequence: Synthetic oligonucleotide
gaaaagggcagagagagag

SEQ ID NO: 2993435 - RNA, 19 nt, Artificial Sequence
  Description of Artificial Sequence: Synthetic oligonucleotide
uaaugagcaaccuugaauu

SEQ ID NO: 2993436 - RNA, 19 nt, Artificial Sequence
  Description of Artificial Sequence: Synthetic oligonucleotide
agacacaacaaaguggccc

SEQ ID NO: 2993437 - RNA, 19 nt, Artificial Sequence
  Description of Artificial Sequence: Synthetic oligonucleotide
cuaaauuaacuguaaugag

SEQ ID NO: 2993438 - RNA, 19 nt, Artificial Sequence
  Description of Artificial Sequence: Synthetic oligonucleotide
gauaggaaagucaggaaag

SEQ ID NO: 2993439 - RNA, 19 nt, Artificial Sequence
  Description of Artificial Sequence: Synthetic oligonucleotide
uugaauugaggucagcuuc

SEQ ID NO: 2993440 - RNA, 19 nt, Artificial Sequence
  Description of Artificial Sequence: Synthetic oligonucleotide
gcuucuggcacacagaggg

SEQ ID NO: 2993441 - RNA, 19 nt, Artificial Sequence
  Description of Artificial Sequence: Synthetic oligonucleotide
ugagcaaccuugaauugag

SEQ ID NO: 2993442 - RNA, 19 nt, Artificial Sequence
  Description of Artificial Sequence: Synthetic oligonucleotide
aaagggcagagagagagag

SEQ ID NO: 2993443 - RNA, 19 nt, Artificial Sequence
  Description of Artificial Sequence: Synthetic oligonucleotide
acuguaaugagcaaccuug

SEQ ID NO: 2993444 - RNA, 19 nt, Artificial Sequence
  Description of Artificial Sequence: Synthetic oligonucleotide
agagagagaucucugguug

SEQ ID NO: 2993445 - RNA, 19 nt, Artificial Sequence
  Description of Artificial Sequence: Synthetic oligonucleotide
uaggauaggaaagucagga

SEQ ID NO: 2993446 - RNA, 19 nt, Artificial Sequence
  Description of Artificial Sequence: Synthetic oligonucleotide
agucaggaaagagaaaagg

SEQ ID NO: 2993447 - RNA, 19 nt, Artificial Sequence
  Description of Artificial Sequence: Synthetic oligonucleotide
aaugagcaaccuugaauug

SEQ ID NO: 2993448 - RNA, 19 nt, Artificial Sequence
  Description of Artificial Sequence: Synthetic oligonucleotide
gauaggagaugccagguca

SEQ ID NO: 2993449 - RNA, 19 nt, Artificial Sequence
  Description of Artificial Sequence: Synthetic oligonucleotide
caaaguggcccuuccaugg

SEQ ID NO: 2993450 - RNA, 19 nt, Artificial Sequence
  Description of Artificial Sequence: Synthetic oligonucleotide
acaacaaaguggcccuucc

SEQ ID NO: 2993451 - RNA, 19 nt, Artificial Sequence
  Description of Artificial Sequence: Synthetic oligonucleotide
gagagagagagaucucugg

SEQ ID NO: 2993452 - RNA, 19 nt, Artificial Sequence
  Description of Artificial Sequence: Synthetic oligonucleotide
gucaggaaagagaaaaggg

SEQ ID NO: 2993453 - RNA, 19 nt, Artificial Sequence
  Description of Artificial Sequence: Synthetic oligonucleotide
aaaaccaaaggaagacagg

SEQ ID NO: 2993454 - RNA, 19 nt, Artificial Sequence
  Description of Artificial Sequence: Synthetic oligonucleotide
aauugaggucagcuucugg

SEQ ID NO: 2993455 - RNA, 19 nt, Artificial Sequence
  Description of Artificial Sequence: Synthetic oligonucleotide
uuuuguuucagaguauaaa

SEQ ID NO: 2993456 - RNA, 19 nt, Artificial Sequence
  Description of Artificial Sequence: Synthetic oligonucleotide
ucaguggccuaaauuaacu

SEQ ID NO: 2993457 - RNA, 19 nt, Artificial Sequence
  Description of Artificial Sequence: Synthetic oligonucleotide
aggagcauaggauaggaaa

SEQ ID NO: 2993458 - RNA, 19 nt, Artificial Sequence
  Description of Artificial Sequence: Synthetic oligonucleotide
agagaucucugguugcagg

SEQ ID NO: 2993459 - RNA, 19 nt, Artificial Sequence
  Description of Artificial Sequence: Synthetic oligonucleotide
aguggccuaaauuaacugu

SEQ ID NO: 2993460 - RNA, 19 nt, Artificial Sequence
  Description of Artificial Sequence: Synthetic oligonucleotide
ugaauugaggucagcuucu

SEQ ID NO: 2993461 - RNA, 19 nt, Artificial Sequence
  Description of Artificial Sequence: Synthetic oligonucleotide
auucuaaaggcaggcagac

SEQ ID NO: 2993462 - RNA, 19 nt, Artificial Sequence
  Description of Artificial Sequence: Synthetic oligonucleotide
ugcaggaacaaggacuggg

SEQ ID NO: 2993463 - RNA, 19 nt, Artificial Sequence
  Description of Artificial Sequence: Synthetic oligonucleotide
aaaguggcccuuccauggg

SEQ ID NO: 2993464 - RNA, 19 nt, Artificial Sequence
  Description of Artificial Sequence: Synthetic oligonucleotide
agcaaccuugaauugaggu

SEQ ID NO: 2993465 - RNA, 19 nt, Artificial Sequence
  Description of Artificial Sequence: Synthetic oligonucleotide
aggacuggggauucuaaag

SEQ ID NO: 2993466 - RNA, 19 nt, Artificial Sequence
  Description of Artificial Sequence: Synthetic oligonucleotide
agggcagagagagagagag

SEQ ID NO: 2993467 - RNA, 19 nt, Artificial Sequence
  Description of Artificial Sequence: Synthetic oligonucleotide
aggucaguggccuaaauua

SEQ ID NO: 2993468 - RNA, 19 nt, Artificial Sequence
  Description of Artificial Sequence: Synthetic oligonucleotide
gacuggggauucuaaaggc

SEQ ID NO: 2993469 - RNA, 19 nt, Artificial Sequence
  Description of Artificial Sequence: Synthetic oligonucleotide
aaccaaaggaagacaggac

SEQ ID NO: 2993470 - RNA, 19 nt, Artificial Sequence
  Description of Artificial Sequence: Synthetic oligonucleotide
uggagggcauacaggauag

SEQ ID NO: 2993471 - RNA, 19 nt, Artificial Sequence
  Description of Artificial Sequence: Synthetic oligonucleotide
cuggggauucuaaaggcag

SEQ ID NO: 2993472 - RNA, 19 nt, Artificial Sequence
  Description of Artificial Sequence: Synthetic oligonucleotide
uacaggauaggagaugcca

SEQ ID NO: 2993473 - RNA, 19 nt, Artificial Sequence
  Description of Artificial Sequence: Synthetic oligonucleotide
agagagagagaucucuggu

SEQ ID NO: 2993474 - RNA, 19 nt, Artificial Sequence
  Description of Artificial Sequence: Synthetic oligonucleotide
uaggaaagucaggaaagag

SEQ ID NO: 2993475 - RNA, 19 nt, Artificial Sequence
  Description of Artificial Sequence: Synthetic oligonucleotide
aacuguaaugagcaaccuu

SEQ ID NO: 2993476 - RNA, 19 nt, Artificial Sequence
  Description of Artificial Sequence: Synthetic oligonucleotide
aauuaacuguaaugagcaa

SEQ ID NO: 2993477 - RNA, 19 nt, Artificial Sequence
  Description of Artificial Sequence: Synthetic oligonucleotide
caggauaggagaugccagg

SEQ ID NO: 2993478 - RNA, 19 nt, Artificial Sequence
  Description of Artificial Sequence: Synthetic oligonucleotide
guugcaggaacaaggacug

SEQ ID NO: 2993479 - RNA, 19 nt, Artificial Sequence
  Description of Artificial Sequence: Synthetic oligonucleotide
gccuaaauuaacuguaaug

SEQ ID NO: 2993480 - RNA, 19 nt, Artificial Sequence
  Description of Artificial Sequence: Synthetic oligonucleotide
gcagacacaacaaaguggc

SEQ ID NO: 2993481 - RNA, 19 nt, Artificial Sequence
  Description of Artificial Sequence: Synthetic oligonucleotide
aagucaggaaagagaaaag

SEQ ID NO: 2993482 - RNA, 19 nt, Artificial Sequence
  Description of Artificial Sequence: Synthetic oligonucleotide
uguaaugagcaaccuugaa

SEQ ID NO: 2993483 - RNA, 19 nt, Artificial Sequence
  Description of Artificial Sequence: Synthetic oligonucleotide
acaaaguggcccuuccaug

SEQ ID NO: 2993484 - RNA, 19 nt, Artificial Sequence
  Description of Artificial Sequence: Synthetic oligonucleotide
auggguggagggcauacag

SEQ ID NO: 2993485 - RNA, 19 nt, Artificial Sequence
  Description of Artificial Sequence: Synthetic oligonucleotide
ccuaaauuaacuguaauga

SEQ ID NO: 2993486 - RNA, 19 nt, Artificial Sequence
  Description of Artificial Sequence: Synthetic oligonucleotide
ggacuggggauucuaaagg

SEQ ID NO: 2993487 - RNA, 19 nt, Artificial Sequence
  Description of Artificial Sequence: Synthetic oligonucleotide
uggguggagggcauacagg

SEQ ID NO: 2993488 - RNA, 19 nt, Artificial Sequence
  Description of Artificial Sequence: Synthetic oligonucleotide
cacagaggggacuggaggc

SEQ ID NO: 2993489 - RNA, 19 nt, Artificial Sequence
  Description of Artificial Sequence: Synthetic oligonucleotide
gagaugccaggucaguggc

SEQ ID NO: 2993490 - RNA, 19 nt, Artificial Sequence
  Description of Artificial Sequence: Synthetic oligonucleotide
ggagaugccaggucagugg

SEQ ID NO: 2993491 - RNA, 19 nt, Artificial Sequence
  Description of Artificial Sequence: Synthetic oligonucleotide
gauucuaaaggcaggcaga

SEQ ID NO: 2993492 - RNA, 19 nt, Artificial Sequence
  Description of Artificial Sequence: Synthetic oligonucleotide
caaccuugaauugagguca

SEQ ID NO: 2993493 - RNA, 19 nt, Artificial Sequence
  Description of Artificial Sequence: Synthetic oligonucleotide
agcauaggauaggaaaguc

SEQ ID NO: 2993494 - RNA, 19 nt, Artificial Sequence
  Description of Artificial Sequence: Synthetic oligonucleotide
caaaggaagacaggacagg

SEQ ID NO: 2993495 - RNA, 19 nt, Artificial Sequence
  Description of Artificial Sequence: Synthetic oligonucleotide
aggacaggagcauaggaua

SEQ ID NO: 2993496 - RNA, 19 nt, Artificial Sequence
  Description of Artificial Sequence: Synthetic oligonucleotide
aaggacuggggauucuaaa

SEQ ID NO: 2993497 - RNA, 19 nt, Artificial Sequence
  Description of Artificial Sequence: Synthetic oligonucleotide
gagagagaucucugguugc

SEQ ID NO: 2993498 - RNA, 19 nt, Artificial Sequence
  Description of Artificial Sequence: Synthetic oligonucleotide
aggaacaaggacuggggau

SEQ ID NO: 2993499 - RNA, 19 nt, Artificial Sequence
  Description of Artificial Sequence: Synthetic oligonucleotide
gaucucugguugcaggaac

SEQ ID NO: 2993500 - RNA, 19 nt, Artificial Sequence
  Description of Artificial Sequence: Synthetic oligonucleotide
ggagcauaggauaggaaag

SEQ ID NO: 2993501 - RNA, 19 nt, Artificial Sequence
  Description of Artificial Sequence: Synthetic oligonucleotide
ggcagacacaacaaagugg

SEQ ID NO: 2993502 - RNA, 19 nt, Artificial Sequence
  Description of Artificial Sequence: Synthetic oligonucleotide
gacaggagcauaggauagg

SEQ ID NO: 2993503 - RNA, 19 nt, Artificial Sequence
  Description of Artificial Sequence: Synthetic oligonucleotide
acaggacaggagcauagga

SEQ ID NO: 2993504 - RNA, 19 nt, Artificial Sequence
  Description of Artificial Sequence: Synthetic oligonucleotide
ggaaagucaggaaagagaa

SEQ ID NO: 2993505 - RNA, 19 nt, Artificial Sequence
  Description of Artificial Sequence: Synthetic oligonucleotide
auaggauaggaaagucagg

SEQ ID NO: 2993506 - RNA, 19 nt, Artificial Sequence
  Description of Artificial Sequence: Synthetic oligonucleotide
gagaucucugguugcagga

SEQ ID NO: 2993507 - RNA, 19 nt, Artificial Sequence
  Description of Artificial Sequence: Synthetic oligonucleotide
uaaaggcaggcagacacaa

SEQ ID NO: 2993508 - RNA, 19 nt, Artificial Sequence
  Description of Artificial Sequence: Synthetic oligonucleotide
guaaugagcaaccuugaau

SEQ ID NO: 2993509 - RNA, 19 nt, Artificial Sequence
  Description of Artificial Sequence: Synthetic oligonucleotide
acaggauaggagaugccag

SEQ ID NO: 2993510 - RNA, 19 nt, Artificial Sequence
  Description of Artificial Sequence: Synthetic oligonucleotide
gacacaacaaaguggcccu

SEQ ID NO: 2993511 - RNA, 19 nt, Artificial Sequence
  Description of Artificial Sequence: Synthetic oligonucleotide
uggccuaaauuaacuguaa

SEQ ID NO: 2993512 - RNA, 19 nt, Artificial Sequence
  Description of Artificial Sequence: Synthetic oligonucleotide
uucuggcacacagagggga

SEQ ID NO: 2993513 - RNA, 19 nt, Artificial Sequence
  Description of Artificial Sequence: Synthetic oligonucleotide
auaggaaagucaggaaaga

SEQ ID NO: 2993514 - RNA, 19 nt, Artificial Sequence
  Description of Artificial Sequence: Synthetic oligonucleotide
agggcauacaggauaggag

SEQ ID NO: 2993515 - RNA, 19 nt, Artificial Sequence
  Description of Artificial Sequence: Synthetic oligonucleotide
augagcaaccuugaauuga

SEQ ID NO: 2993516 - RNA, 19 nt, Artificial Sequence
  Description of Artificial Sequence: Synthetic oligonucleotide
aaaggcaggcagacacaac

SEQ ID NO: 2993517 - RNA, 19 nt, Artificial Sequence
  Description of Artificial Sequence: Synthetic oligonucleotide
caguggccuaaauuaacug

SEQ ID NO: 2993518 - RNA, 19 nt, Artificial Sequence
  Description of Artificial Sequence: Synthetic oligonucleotide
ucuggcacacagaggggac

SEQ ID NO: 2993519 - RNA, 19 nt, Artificial Sequence
  Description of Artificial Sequence: Synthetic oligonucleotide
gggcauacaggauaggaga

SEQ ID NO: 2993520 - RNA, 19 nt, Artificial Sequence
  Description of Artificial Sequence: Synthetic oligonucleotide
ggggacuggaggcugagcc

SEQ ID NO: 2993521 - RNA, 19 nt, Artificial Sequence
  Description of Artificial Sequence: Synthetic oligonucleotide
aaguggcccuuccaugggu

SEQ ID NO: 2993522 - RNA, 19 nt, Artificial Sequence
  Description of Artificial Sequence: Synthetic oligonucleotide
auacaggauaggagaugcc

SEQ ID NO: 2993523 - RNA, 19 nt, Artificial Sequence
  Description of Artificial Sequence: Synthetic oligonucleotide
gagggcauacaggauagga

SEQ ID NO: 2993524 - RNA, 19 nt, Artificial Sequence
  Description of Artificial Sequence: Synthetic oligonucleotide
agagaaaagggcagagaga

SEQ ID NO: 2993525 - RNA, 19 nt, Artificial Sequence
  Description of Artificial Sequence: Synthetic oligonucleotide
gcaaccuugaauugagguc

SEQ ID NO: 2993526 - RNA, 19 nt, Artificial Sequence
  Description of Artificial Sequence: Synthetic oligonucleotide
cagagagagagagagaucu

SEQ ID NO: 2993527 - RNA, 19 nt, Artificial Sequence
  Description of Artificial Sequence: Synthetic oligonucleotide
cuucuggcacacagagggg

SEQ ID NO: 2993528 - RNA, 19 nt, Artificial Sequence
  Description of Artificial Sequence: Synthetic oligonucleotide
agagagagagagaucucug

SEQ ID NO: 2993529 - RNA, 19 nt, Artificial Sequence
  Description of Artificial Sequence: Synthetic oligonucleotide
acaggagcauaggauagga

SEQ ID NO: 2993530 - RNA, 19 nt, Artificial Sequence
  Description of Artificial Sequence: Synthetic oligonucleotide
auaggagaugccaggucag

SEQ ID NO: 2993531 - RNA, 19 nt, Artificial Sequence
  Description of Artificial Sequence: Synthetic oligonucleotide
cacacagaggggacuggag

SEQ ID NO: 2993532 - RNA, 19 nt, Artificial Sequence
  Description of Artificial Sequence: Synthetic oligonucleotide
uaacuguaaugagcaaccu

SEQ ID NO: 2993533 - RNA, 19 nt, Artificial Sequence
  Description of Artificial Sequence: Synthetic oligonucleotide
aaaagggcagagagagaga

SEQ ID NO: 2993534 - RNA, 19 nt, Artificial Sequence
  Description of Artificial Sequence: Synthetic oligonucleotide
cugguugcaggaacaagga

SEQ ID NO: 2993535 - RNA, 19 nt, Artificial Sequence
  Description of Artificial Sequence: Synthetic oligonucleotide
gagagaucucugguugcag

SEQ ID NO: 2993536 - RNA, 19 nt, Artificial Sequence
  Description of Artificial Sequence: Synthetic oligonucleotide
agagagaucucugguugca

SEQ ID NO: 2993537 - RNA, 19 nt, Artificial Sequence
  Description of Artificial Sequence: Synthetic oligonucleotide
aaccuugaauugaggucag

SEQ ID NO: 2993538 - RNA, 19 nt, Artificial Sequence
  Description of Artificial Sequence: Synthetic oligonucleotide
gagagagagagagaucucu

SEQ ID NO: 2993539 - RNA, 19 nt, Artificial Sequence
  Description of Artificial Sequence: Synthetic oligonucleotide
gaauugaggucagcuucug

SEQ ID NO: 2993540 - RNA, 19 nt, Artificial Sequence
  Description of Artificial Sequence: Synthetic oligonucleotide
guggagggcauacaggaua

SEQ ID NO: 2993541 - RNA, 19 nt, Artificial Sequence
  Description of Artificial Sequence: Synthetic oligonucleotide
cuguaaugagcaaccuuga

SEQ ID NO: 2993542 - RNA, 19 nt, Artificial Sequence
  Description of Artificial Sequence: Synthetic oligonucleotide
ggguggagggcauacagga

SEQ ID NO: 2993543 - RNA, 19 nt, Artificial Sequence
  Description of Artificial Sequence: Synthetic oligonucleotide
aggauaggagaugccaggu

SEQ ID NO: 2993544 - RNA, 19 nt, Artificial Sequence
  Description of Artificial Sequence: Synthetic oligonucleotide
cagacacaacaaaguggcc

SEQ ID NO: 2993545 - RNA, 19 nt, Artificial Sequence
  Description of Artificial Sequence: Synthetic oligonucleotide
acuggggauucuaaaggca

SEQ ID NO: 2993546 - RNA, 19 nt, Artificial Sequence
  Description of Artificial Sequence: Synthetic oligonucleotide
gucaguggccuaaauuaac

SEQ ID NO: 2993547 - RNA, 19 nt, Artificial Sequence
  Description of Artificial Sequence: Synthetic oligonucleotide
agagagagagagagaucuc

SEQ ID NO: 2993548 - RNA, 19 nt, Artificial Sequence
  Description of Artificial Sequence: Synthetic oligonucleotide
aagacaggacaggagcaua

SEQ ID NO: 2993549 - RNA, 19 nt, Artificial Sequence
  Description of Artificial Sequence: Synthetic oligonucleotide
gagcaaccuugaauugagg

SEQ ID NO: 2993550 - RNA, 19 nt, Artificial Sequence
  Description of Artificial Sequence: Synthetic oligonucleotide
aggagaugccaggucagug

SEQ ID NO: 2993551 - RNA, 19 nt, Artificial Sequence
  Description of Artificial Sequence: Synthetic oligonucleotide
agaugccaggucaguggcc

SEQ ID NO: 2993552 - RNA, 19 nt, Artificial Sequence
  Description of Artificial Sequence: Synthetic oligonucleotide
uucuaaaggcaggcagaca

SEQ ID NO: 2993553 - RNA, 19 nt, Artificial Sequence
  Description of Artificial Sequence: Synthetic oligonucleotide
uggcacacagaggggacug

SEQ ID NO: 2993554 - RNA, 19 nt, Artificial Sequence
  Description of Artificial Sequence: Synthetic oligonucleotide
guggcccuuccaugggugg

SEQ ID NO: 2993555 - RNA, 19 nt, Artificial Sequence
  Description of Artificial Sequence: Synthetic oligonucleotide
gguugcaggaacaaggacu

SEQ ID NO: 2993556 - RNA, 19 nt, Artificial Sequence
  Description of Artificial Sequence: Synthetic oligonucleotide
accuugaauugaggucagc

SEQ ID NO: 2993557 - RNA, 19 nt, Artificial Sequence
  Description of Artificial Sequence: Synthetic oligonucleotide
guggccuaaauuaacugua

SEQ ID NO: 2993558 - RNA, 19 nt, Artificial Sequence
  Description of Artificial Sequence: Synthetic oligonucleotide
gaacaaggacuggggauuc

SEQ ID NO: 2993559 - RNA, 19 nt, Artificial Sequence
  Description of Artificial Sequence: Synthetic oligonucleotide
gagagagagaucucugguu

SEQ ID NO: 2993560 - RNA, 19 nt, Artificial Sequence
  Description of Artificial Sequence: Synthetic oligonucleotide
ggaaagagaaaagggcaga

SEQ ID NO: 2993561 - RNA, 19 nt, Artificial Sequence
  Description of Artificial Sequence: Synthetic oligonucleotide
ucucugguugcaggaacaa

SEQ ID NO: 2993562 - RNA, 19 nt, Artificial Sequence
  Description of Artificial Sequence: Synthetic oligonucleotide
aacaaggacuggggauucu

SEQ ID NO: 2993563 - RNA, 19 nt, Artificial Sequence
  Description of Artificial Sequence: Synthetic oligonucleotide
cucugguugcaggaacaag

SEQ ID NO: 2993564 - RNA, 19 nt, Artificial Sequence
  Description of Artificial Sequence: Synthetic oligonucleotide
cuugaauugaggucagcuu

SEQ ID NO: 2993565 - RNA, 19 nt, Artificial Sequence
  Description of Artificial Sequence: Synthetic oligonucleotide
gagcauaggauaggaaagu

SEQ ID NO: 2993566 - RNA, 19 nt, Artificial Sequence
  Description of Artificial Sequence: Synthetic oligonucleotide
uugcaggaacaaggacugg

SEQ ID NO: 2993567 - RNA, 19 nt, Artificial Sequence
  Description of Artificial Sequence: Synthetic oligonucleotide
aucucugguugcaggaaca

SEQ ID NO: 2993568 - RNA, 19 nt, Artificial Sequence
  Description of Artificial Sequence: Synthetic oligonucleotide
caggaacaaggacugggga

SEQ ID NO: 2993569 - RNA, 19 nt, Artificial Sequence
  Description of Artificial Sequence: Synthetic oligonucleotide
acagaggggacuggaggcu

SEQ ID NO: 2993570 - RNA, 19 nt, Artificial Sequence
  Description of Artificial Sequence: Synthetic oligonucleotide
uaggagaugccaggucagu

SEQ ID NO: 2993571 - RNA, 19 nt, Artificial Sequence
  Description of Artificial Sequence: Synthetic oligonucleotide
gcauaggauaggaaaguca

SEQ ID NO: 2993572 - RNA, 19 nt, Artificial Sequence
  Description of Artificial Sequence: Synthetic oligonucleotide
agcuucuggcacacagagg

SEQ ID NO: 2993573 - RNA, 19 nt, Artificial Sequence
  Description of Artificial Sequence: Synthetic oligonucleotide
cacaacaaaguggcccuuc

SEQ ID NO: 2993574 - RNA, 19 nt, Artificial Sequence
  Description of Artificial Sequence: Synthetic oligonucleotide
aagggcagagagagagaga

SEQ ID NO: 2993575 - RNA, 19 nt, Artificial Sequence
  Description of Artificial Sequence: Synthetic oligonucleotide
agaucucugguugcaggaa

SEQ ID NO: 2993576 - RNA, 19 nt, Artificial Sequence
  Description of Artificial Sequence: Synthetic oligonucleotide
ggaagacaggacaggagca

SEQ ID NO: 2993577 - RNA, 19 nt, Artificial Sequence
  Description of Artificial Sequence: Synthetic oligonucleotide
aguggcccuuccaugggug

SEQ ID NO: 2993578 - RNA, 19 nt, Artificial Sequence
  Description of Artificial Sequence: Synthetic oligonucleotide
ggauaggagaugccagguc

SEQ ID NO: 2993579 - RNA, 19 nt, Artificial Sequence
  Description of Artificial Sequence: Synthetic oligonucleotide
aggggacuggaggcugagc

SEQ ID NO: 2993580 - RNA, 19 nt, Artificial Sequence
  Description of Artificial Sequence: Synthetic oligonucleotide
caaggacuggggauucuaa

SEQ ID NO: 2993581 - RNA, 19 nt, Artificial Sequence
  Description of Artificial Sequence: Synthetic oligonucleotide
caggacaggagcauaggau

SEQ ID NO: 2993582 - RNA, 19 nt, Artificial Sequence
  Description of Artificial Sequence: Synthetic oligonucleotide
agaaaagggcagagagaga

SEQ ID NO: 2993583 - RNA, 19 nt, Artificial Sequence
  Description of Artificial Sequence: Synthetic oligonucleotide
acaaggacuggggauucua

SEQ ID NO: 2993584 - RNA, 19 nt, Artificial Sequence
  Description of Artificial Sequence: Synthetic oligonucleotide
uuccauggguggagggcau

SEQ ID NO: 2993585 - RNA, 19 nt, Artificial Sequence
  Description of Artificial Sequence: Synthetic oligonucleotide
ggcagagagagagagagau

SEQ ID NO: 2993586 - RNA, 19 nt, Artificial Sequence
  Description of Artificial Sequence: Synthetic oligonucleotide
gaagacaggacaggagcau

SEQ ID NO: 2993587 - RNA, 19 nt, Artificial Sequence
  Description of Artificial Sequence: Synthetic oligonucleotide
ugccaggucaguggccuaa

SEQ ID NO: 2993588 - RNA, 19 nt, Artificial Sequence
  Description of Artificial Sequence: Synthetic oligonucleotide
gaggggacuggaggcugag

SEQ ID NO: 2993589 - RNA, 19 nt, Artificial Sequence
  Description of Artificial Sequence: Synthetic oligonucleotide
cagaggggacuggaggcug

SEQ ID NO: 2993590 - RNA, 19 nt, Artificial Sequence
  Description of Artificial Sequence: Synthetic oligonucleotide
uggcccuuccaugggugga

SEQ ID NO: 2993591 - RNA, 19 nt, Artificial Sequence
  Description of Artificial Sequence: Synthetic oligonucleotide
ggacuggaggcugagccuc

SEQ ID NO: 2993592 - RNA, 19 nt, Artificial Sequence
  Description of Artificial Sequence: Synthetic oligonucleotide
ggcaggcagacacaacaaa

SEQ ID NO: 2993593 - RNA, 19 nt, Artificial Sequence
  Description of Artificial Sequence: Synthetic oligonucleotide
caggagcauaggauaggaa

SEQ ID NO: 2993594 - RNA, 19 nt, Artificial Sequence
  Description of Artificial Sequence: Synthetic oligonucleotide
cuggaggcugagccucaac

SEQ ID NO: 2993595 - RNA, 19 nt, Artificial Sequence
  Description of Artificial Sequence: Synthetic oligonucleotide
ggucaguggccuaaauuaa

SEQ ID NO: 2993596 - RNA, 19 nt, Artificial Sequence
  Description of Artificial Sequence: Synthetic oligonucleotide
aggcaggcagacacaacaa

SEQ ID NO: 2993597 - RNA, 19 nt, Artificial Sequence
  Description of Artificial Sequence: Synthetic oligonucleotide
ggaacaaggacuggggauu

SEQ ID NO: 2993598 - RNA, 19 nt, Artificial Sequence
  Description of Artificial Sequence: Synthetic oligonucleotide
gggauucuaaaggcaggca

SEQ ID NO: 2993599 - RNA, 19 nt, Artificial Sequence
  Description of Artificial Sequence: Synthetic oligonucleotide
ggcacacagaggggacugg

SEQ ID NO: 2993600 - RNA, 19 nt, Artificial Sequence
  Description of Artificial Sequence: Synthetic oligonucleotide
agaggggacuggaggcuga

SEQ ID NO: 2993601 - RNA, 19 nt, Artificial Sequence
  Description of Artificial Sequence: Synthetic oligonucleotide
caggucaguggccuaaauu

SEQ ID NO: 2993602 - RNA, 19 nt, Artificial Sequence
  Description of Artificial Sequence: Synthetic oligonucleotide
ggcccuuccauggguggag

SEQ ID NO: 2993603 - RNA, 19 nt, Artificial Sequence
  Description of Artificial Sequence: Synthetic oligonucleotide
ccuugaauugaggucagcu

SEQ ID NO: 2993604 - RNA, 19 nt, Artificial Sequence
  Description of Artificial Sequence: Synthetic oligonucleotide
ggccuaaauuaacuguaau

SEQ ID NO: 2993605 - RNA, 19 nt, Artificial Sequence
  Description of Artificial Sequence: Synthetic oligonucleotide
cauggguggagggcauaca

SEQ ID NO: 2993606 - RNA, 19 nt, Artificial Sequence
  Description of Artificial Sequence: Synthetic oligonucleotide
uccauggguggagggcaua

SEQ ID NO: 2993607 - RNA, 19 nt, Artificial Sequence
  Description of Artificial Sequence: Synthetic oligonucleotide
acacaacaaaguggcccuu

SEQ ID NO: 2993608 - RNA, 19 nt, Artificial Sequence
  Description of Artificial Sequence: Synthetic oligonucleotide
gcagagagagagagagauc

SEQ ID NO: 2993609 - RNA, 19 nt, Artificial Sequence
  Description of Artificial Sequence: Synthetic oligonucleotide
ccauggguggagggcauac

SEQ ID NO: 2993610 - RNA, 19 nt, Artificial Sequence
  Description of Artificial Sequence: Synthetic oligonucleotide
acuggaggcugagccucaa

SEQ ID NO: 2993611 - RNA, 19 nt, Artificial Sequence
  Description of Artificial Sequence: Synthetic oligonucleotide
ggcauacaggauaggagau

SEQ ID NO: 2993612 - RNA, 19 nt, Artificial Sequence
  Description of Artificial Sequence: Synthetic oligonucleotide
gggacuggaggcugagccu

SEQ ID NO: 2993613 - RNA, 19 nt, Artificial Sequence
  Description of Artificial Sequence: Synthetic oligonucleotide
gcccuuccauggguggagg

SEQ ID NO: 2993614 - RNA, 19 nt, Artificial Sequence
  Description of Artificial Sequence: Synthetic oligonucleotide
augccaggucaguggccua

SEQ ID NO: 2993615 - RNA, 19 nt, Artificial Sequence
  Description of Artificial Sequence: Synthetic oligonucleotide
cuggcacacagaggggacu

SEQ ID NO: 2993616 - RNA, 19 nt, Artificial Sequence
  Description of Artificial Sequence: Synthetic oligonucleotide
gggcagagagagagagaga

SEQ ID NO: 2993617 - RNA, 19 nt, Artificial Sequence
  Description of Artificial Sequence: Synthetic oligonucleotide
gguggagggcauacaggau

SEQ ID NO: 2993618 - RNA, 19 nt, Artificial Sequence
  Description of Artificial Sequence: Synthetic oligonucleotide
gccaggucaguggccuaaa

SEQ ID NO: 2993619 - RNA, 19 nt, Artificial Sequence
  Description of Artificial Sequence: Synthetic oligonucleotide
ggucagcuucuggcacaca

SEQ ID NO: 2993620 - RNA, 19 nt, Artificial Sequence
  Description of Artificial Sequence: Synthetic oligonucleotide
ccaggucaguggccuaaau

SEQ ID NO: 2993621 - RNA, 19 nt, Artificial Sequence
  Description of Artificial Sequence: Synthetic oligonucleotide
ucuccagcgaguaggaugg

SEQ ID NO: 2993622 - RNA, 19 nt, Artificial Sequence
  Description of Artificial Sequence: Synthetic oligonucleotide
accacacuuauuuuggugg

SEQ ID NO: 2993623 - RNA, 19 nt, Artificial Sequence
  Description of Artificial Sequence: Synthetic oligonucleotide
uugaccacacuuauuuugg

SEQ ID NO: 2993624 - RNA, 19 nt, Artificial Sequence
  Description of Artificial Sequence: Synthetic oligonucleotide
uuugaccacacuuauuuug

SEQ ID NO: 2993625 - RNA, 19 nt, Artificial Sequence
  Description of Artificial Sequence: Synthetic oligonucleotide
ugcugagaugcuuuuagcg

SEQ ID NO: 2993626 - RNA, 19 nt, Artificial Sequence
  Description of Artificial Sequence: Synthetic oligonucleotide
auuuugguggcguccuucc

SEQ ID NO: 2993627 - RNA, 19 nt, Artificial Sequence
  Description of Artificial Sequence: Synthetic oligonucleotide
gaugcuuuuagcggguugg

SEQ ID NO: 2993628 - RNA, 19 nt, Artificial Sequence
  Description of Artificial Sequence: Synthetic oligonucleotide
cuuuuagcggguuggaggc

SEQ ID NO: 2993629 - RNA, 19 nt, Artificial Sequence
  Description of Artificial Sequence: Synthetic oligonucleotide
cugagaugcuuuuagcggg

SEQ ID NO: 2993630 - RNA, 19 nt, Artificial Sequence
  Description of Artificial Sequence: Synthetic oligonucleotide
gaucacgcgacacucguag

SEQ ID NO: 2993631 - RNA, 19 nt, Artificial Sequence
  Description of Artificial Sequence: Synthetic oligonucleotide
uggaucuccagcgaguagg

SEQ ID NO: 2993632 - RNA, 19 nt, Artificial Sequence
  Description of Artificial Sequence: Synthetic oligonucleotide
aggauggggagccacugcc

SEQ ID NO: 2993633 - RNA, 19 nt, Artificial Sequence
  Description of Artificial Sequence: Synthetic oligonucleotide
acuuauuuugguggcgucc

SEQ ID NO: 2993634 - RNA, 19 nt, Artificial Sequence
  Description of Artificial Sequence: Synthetic oligonucleotide
ucgucagugggcuucaccc

SEQ ID NO: 2993635 - RNA, 19 nt, Artificial Sequence
  Description of Artificial Sequence: Synthetic oligonucleotide
ugcuugucaguccaguccc

SEQ ID NO: 2993636 - RNA, 19 nt, Artificial Sequence
  Description of Artificial Sequence: Synthetic oligonucleotide
cuugccgucgcugaagucg

SEQ ID NO: 2993637 - RNA, 19 nt, Artificial Sequence
  Description of Artificial Sequence: Synthetic oligonucleotide
uugugggagauguugcugc

SEQ ID NO: 2993638 - RNA, 19 nt, Artificial Sequence
  Description of Artificial Sequence: Synthetic oligonucleotide
aucuccagcgaguaggaug

SEQ ID NO: 2993639 - RNA, 19 nt, Artificial Sequence
  Description of Artificial Sequence: Synthetic oligonucleotide
cugcccaccaccuuugacc

SEQ ID NO: 2993640 - RNA, 19 nt, Artificial Sequence
  Description of Artificial Sequence: Synthetic oligonucleotide
gcuuuuagcggguuggagg

SEQ ID NO: 2993641 - RNA, 19 nt, Artificial Sequence
  Description of Artificial Sequence: Synthetic oligonucleotide
gacagccgcagcuuguggg

SEQ ID NO: 2993642 - RNA, 19 nt, Artificial Sequence
  Description of Artificial Sequence: Synthetic oligonucleotide
ucaggcagcugcagcaccg

SEQ ID NO: 2993643 - RNA, 19 nt, Artificial Sequence
  Description of Artificial Sequence: Synthetic oligonucleotide
gcugagaugcuuuuagcgg

SEQ ID NO: 2993644 - RNA, 19 nt, Artificial Sequence
  Description of Artificial Sequence: Synthetic oligonucleotide
aagucgaucacgcgacacu

SEQ ID NO: 2993645 - RNA, 19 nt, Artificial Sequence
  Description of Artificial Sequence: Synthetic oligonucleotide
uccacauccucaccugucc

SEQ ID NO: 2993646 - RNA, 19 nt, Artificial Sequence
  Description of Artificial Sequence: Synthetic oligonucleotide
cugaagucgaucacgcgac

SEQ ID NO: 2993647 - RNA, 19 nt, Artificial Sequence
  Description of Artificial Sequence: Synthetic oligonucleotide
caccacuggaucuccagcg

SEQ ID NO: 2993648 - RNA, 19 nt, Artificial Sequence
  Description of Artificial Sequence: Synthetic oligonucleotide
ugucaguccagucccggug

SEQ ID NO: 2993649 - RNA, 19 nt, Artificial Sequence
  Description of Artificial Sequence: Synthetic oligonucleotide
gaccacacuuauuuuggug

SEQ ID NO: 2993650 - RNA, 19 nt, Artificial Sequence
  Description of Artificial Sequence: Synthetic oligonucleotide
ugggagauguugcugccca

SEQ ID NO: 2993651 - RNA, 19 nt, Artificial Sequence
  Description of Artificial Sequence: Synthetic oligonucleotide
ugcagcaccgaguucuccc

SEQ ID NO: 2993652 - RNA, 19 nt, Artificial Sequence
  Description of Artificial Sequence: Synthetic oligonucleotide
cugcuugucaguccagucc

SEQ ID NO: 2993653 - RNA, 19 nt, Artificial Sequence
  Description of Artificial Sequence: Synthetic oligonucleotide
ugcgcagguaccaccacug

SEQ ID NO: 2993654 - RNA, 19 nt, Artificial Sequence
  Description of Artificial Sequence: Synthetic oligonucleotide
ucgcugaagucgaucacgc

SEQ ID NO: 2993655 - RNA, 19 nt, Artificial Sequence
  Description of Artificial Sequence: Synthetic oligonucleotide
guaggccuugaccuugugg

SEQ ID NO: 2993656 - RNA, 19 nt, Artificial Sequence
  Description of Artificial Sequence: Synthetic oligonucleotide
aucaggcagcugcagcacc

SEQ ID NO: 2993657 - RNA, 19 nt, Artificial Sequence
  Description of Artificial Sequence: Synthetic oligonucleotide
accaccuuugaccacacuu

SEQ ID NO: 2993658 - RNA, 19 nt, Artificial Sequence
  Description of Artificial Sequence: Synthetic oligonucleotide
acucguaggugccuucguc

SEQ ID NO: 2993659 - RNA, 19 nt, Artificial Sequence
  Description of Artificial Sequence: Synthetic oligonucleotide
ucacgcgacacucguaggu

SEQ ID NO: 2993660 - RNA, 19 nt, Artificial Sequence
  Description of Artificial Sequence: Synthetic oligonucleotide
acgcgacacucguaggugc

SEQ ID NO: 2993661 - RNA, 19 nt, Artificial Sequence
  Description of Artificial Sequence: Synthetic oligonucleotide
agcuugugggagauguugc

SEQ ID NO: 2993662 - RNA, 19 nt, Artificial Sequence
  Description of Artificial Sequence: Synthetic oligonucleotide
ucguaggugccuucgucag

SEQ ID NO: 2993663 - RNA, 19 nt, Artificial Sequence
  Description of Artificial Sequence: Synthetic oligonucleotide
agucgaucacgcgacacuc

SEQ ID NO: 2993664 - RNA, 19 nt, Artificial Sequence
  Description of Artificial Sequence: Synthetic oligonucleotide
gucgcugaagucgaucacg

SEQ ID NO: 2993665 - RNA, 19 nt, Artificial Sequence
  Description of Artificial Sequence: Synthetic oligonucleotide
uuuagcggguuggaggccc

SEQ ID NO: 2993666 - RNA, 19 nt, Artificial Sequence
  Description of Artificial Sequence: Synthetic oligonucleotide
ucgaucacgcgacacucgu

SEQ ID NO: 2993667 - RNA, 19 nt, Artificial Sequence
  Description of Artificial Sequence: Synthetic oligonucleotide
gucaguccagucccggugg

SEQ ID NO: 2993668 - RNA, 19 nt, Artificial Sequence
  Description of Artificial Sequence: Synthetic oligonucleotide
ugagaugcuuuuagcgggu

SEQ ID NO: 2993669 - RNA, 19 nt, Artificial Sequence
  Description of Artificial Sequence: Synthetic oligonucleotide
ucagugggcuucacccgcg

SEQ ID NO: 2993670 - RNA, 19 nt, Artificial Sequence
  Description of Artificial Sequence: Synthetic oligonucleotide
agcgaguaggauggggagc

SEQ ID NO: 2993671 - RNA, 19 nt, Artificial Sequence
  Description of Artificial Sequence: Synthetic oligonucleotide
ugcccaccaccuuugacca

SEQ ID NO: 2993672 - RNA, 19 nt, Artificial Sequence
  Description of Artificial Sequence: Synthetic oligonucleotide
uugaccuuguggugccggg

SEQ ID NO: 2993673 - RNA, 19 nt, Artificial Sequence
  Description of Artificial Sequence: Synthetic oligonucleotide
ugggcuucacccgcgacag

SEQ ID NO: 2993674 - RNA, 19 nt, Artificial Sequence
  Description of Artificial Sequence: Synthetic oligonucleotide
caugucugcuugucagucc

SEQ ID NO: 2993675 - RNA, 19 nt, Artificial Sequence
  Description of Artificial Sequence: Synthetic oligonucleotide
ggcggcaucaggcagcugc

SEQ ID NO: 2993676 - RNA, 19 nt, Artificial Sequence
  Description of Artificial Sequence: Synthetic oligonucleotide
uuuugguggcguccuuccc

SEQ ID NO: 2993677 - RNA, 19 nt, Artificial Sequence
  Description of Artificial Sequence: Synthetic oligonucleotide
guaggugccuucgucagug

SEQ ID NO: 2993678 - RNA, 19 nt, Artificial Sequence
  Description of Artificial Sequence: Synthetic oligonucleotide
gaccuuguggugccgggcc

SEQ ID NO: 2993679 - RNA, 19 nt, Artificial Sequence
  Description of Artificial Sequence: Synthetic oligonucleotide
acauccucaccuguccgcg

SEQ ID NO: 2993680 - RNA, 19 nt, Artificial Sequence
  Description of Artificial Sequence: Synthetic oligonucleotide
agaugcuuuuagcggguug

SEQ ID NO: 2993681 - RNA, 19 nt, Artificial Sequence
  Description of Artificial Sequence: Synthetic oligonucleotide
ugcacccgcagguaggccu

SEQ ID NO: 2993682 - RNA, 19 nt, Artificial Sequence
  Description of Artificial Sequence: Synthetic oligonucleotide
aggagcaggccaucuccac

SEQ ID NO: 2993683 - RNA, 19 nt, Artificial Sequence
  Description of Artificial Sequence: Synthetic oligonucleotide
ucugcuugucaguccaguc

SEQ ID NO: 2993684 - RNA, 19 nt, Artificial Sequence
  Description of Artificial Sequence: Synthetic oligonucleotide
cacauccucaccuguccgc

SEQ ID NO: 2993685 - RNA, 19 nt, Artificial Sequence
  Description of Artificial Sequence: Synthetic oligonucleotide
accaccacuggaucuccag

SEQ ID NO: 2993686 - RNA, 19 nt, Artificial Sequence
  Description of Artificial Sequence: Synthetic oligonucleotide
aucuccacauccucaccug

SEQ ID NO: 2993687 - RNA, 19 nt, Artificial Sequence
  Description of Artificial Sequence: Synthetic oligonucleotide
uguggugccgggccuugcc

SEQ ID NO: 2993688 - RNA, 19 nt, Artificial Sequence
  Description of Artificial Sequence: Synthetic oligonucleotide
cugcugagaugcuuuuagc

SEQ ID NO: 2993689 - RNA, 19 nt, Artificial Sequence
  Description of Artificial Sequence: Synthetic oligonucleotide
uaggauggggagccacugc

SEQ ID NO: 2993690 - RNA, 19 nt, Artificial Sequence
  Description of Artificial Sequence: Synthetic oligonucleotide
gcugaagucgaucacgcga

SEQ ID NO: 2993691 - RNA, 19 nt, Artificial Sequence
  Description of Artificial Sequence: Synthetic oligonucleotide
acacuuauuuugguggcgu

SEQ ID NO: 2993692 - RNA, 19 nt, Artificial Sequence
  Description of Artificial Sequence: Synthetic oligonucleotide
uccagcgaguaggaugggg

SEQ ID NO: 2993693 - RNA, 19 nt, Artificial Sequence
  Description of Artificial Sequence: Synthetic oligonucleotide
ugcuuuuagcggguuggag

SEQ ID NO: 2993694 - RNA, 19 nt, Artificial Sequence
  Description of Artificial Sequence: Synthetic oligonucleotide
ucuccacauccucaccugu

SEQ ID NO: 2993695 - RNA, 19 nt, Artificial Sequence
  Description of Artificial Sequence: Synthetic oligonucleotide
agcaccgaguucuccccgg

SEQ ID NO: 2993696 - RNA, 19 nt, Artificial Sequence
  Description of Artificial Sequence: Synthetic oligonucleotide
cacacuuauuuugguggcg

SEQ ID NO: 2993697 - RNA, 19 nt, Artificial Sequence
  Description of Artificial Sequence: Synthetic oligonucleotide
accgaguucuccccgggcu

SEQ ID NO: 2993698 - RNA, 19 nt, Artificial Sequence
  Description of Artificial Sequence: Synthetic oligonucleotide
ggugucucugugaaaagug

SEQ ID NO: 2993699 - RNA, 19 nt, Artificial Sequence
  Description of Artificial Sequence: Synthetic oligonucleotide
ucauggggugucucuguga

SEQ ID NO: 2993700 - RNA, 19 nt, Artificial Sequence
  Description of Artificial Sequence: Synthetic oligonucleotide
cuugucaguccagucccgg

SEQ ID NO: 2993701 - RNA, 19 nt, Artificial Sequence
  Description of Artificial Sequence: Synthetic oligonucleotide
gugucucugugaaaagugc

SEQ ID NO: 2993702 - RNA, 19 nt, Artificial Sequence
  Description of Artificial Sequence: Synthetic oligonucleotide
aucacgcgacacucguagg

SEQ ID NO: 2993703 - RNA, 19 nt, Artificial Sequence
  Description of Artificial Sequence: Synthetic oligonucleotide
uugccgucgcugaagucga

SEQ ID NO: 2993704 - RNA, 19 nt, Artificial Sequence
  Description of Artificial Sequence: Synthetic oligonucleotide
ugucaugucaugggguguc

SEQ ID NO: 2993705 - RNA, 19 nt, Artificial Sequence
  Description of Artificial Sequence: Synthetic oligonucleotide
ugaccacacuuauuuuggu

SEQ ID NO: 2993706 - RNA, 19 nt, Artificial Sequence
  Description of Artificial Sequence: Synthetic oligonucleotide
gcugucaugucauggggug

SEQ ID NO: 2993707 - RNA, 19 nt, Artificial Sequence
  Description of Artificial Sequence: Synthetic oligonucleotide
ugaagucgaucacgcgaca

SEQ ID NO: 2993708 - RNA, 19 nt, Artificial Sequence
  Description of Artificial Sequence: Synthetic oligonucleotide
uguccgcgcugucauguca

SEQ ID NO: 2993709 - RNA, 19 nt, Artificial Sequence
  Description of Artificial Sequence: Synthetic oligonucleotide
ugucauggggugucucugu

SEQ ID NO: 2993710 - RNA, 19 nt, Artificial Sequence
  Description of Artificial Sequence: Synthetic oligonucleotide
gaagucgaucacgcgacac

SEQ ID NO: 2993711 - RNA, 19 nt, Artificial Sequence
  Description of Artificial Sequence: Synthetic oligonucleotide
agguaccaccacuggaucu

SEQ ID NO: 2993712 - RNA, 19 nt, Artificial Sequence
  Description of Artificial Sequence: Synthetic oligonucleotide
ccugcugagaugcuuuuag

SEQ ID NO: 2993713 - RNA, 19 nt, Artificial Sequence
  Description of Artificial Sequence: Synthetic oligonucleotide
cuugugggagauguugcug

SEQ ID NO: 2993714 - RNA, 19 nt, Artificial Sequence
  Description of Artificial Sequence: Synthetic oligonucleotide
cuugaccuuguggugccgg

SEQ ID NO: 2993715 - RNA, 19 nt, Artificial Sequence
  Description of Artificial Sequence: Synthetic oligonucleotide
agugggcuucacccgcgac

SEQ ID NO: 2993716 - RNA, 19 nt, Artificial Sequence
  Description of Artificial Sequence: Synthetic oligonucleotide
cucguaggugccuucguca

SEQ ID NO: 2993717 - RNA, 19 nt, Artificial Sequence
  Description of Artificial Sequence: Synthetic oligonucleotide
cagcgaguaggauggggag

SEQ ID NO: 2993718 - RNA, 19 nt, Artificial Sequence
  Description of Artificial Sequence: Synthetic oligonucleotide
cagcuugugggagauguug

SEQ ID NO: 2993719 - RNA, 19 nt, Artificial Sequence
  Description of Artificial Sequence: Synthetic oligonucleotide
acagccgcagcuuguggga

SEQ ID NO: 2993720 - RNA, 19 nt, Artificial Sequence
  Description of Artificial Sequence: Synthetic oligonucleotide
acacucguaggugccuucg

SEQ ID NO: 2993721 - RNA, 19 nt, Artificial Sequence
  Description of Artificial Sequence: Synthetic oligonucleotide
guuggaggcccaugucugc

SEQ ID NO: 2993722 - RNA, 19 nt, Artificial Sequence
  Description of Artificial Sequence: Synthetic oligonucleotide
ucaguccagucccgguggc

SEQ ID NO: 2993723 - RNA, 19 nt, Artificial Sequence
  Description of Artificial Sequence: Synthetic oligonucleotide
gaguccuccugcugagaug

SEQ ID NO: 2993724 - RNA, 19 nt, Artificial Sequence
  Description of Artificial Sequence: Synthetic oligonucleotide
gcccaugucugcuugucag

SEQ ID NO: 2993725 - RNA, 19 nt, Artificial Sequence
  Description of Artificial Sequence: Synthetic oligonucleotide
accacuggaucuccagcga

SEQ ID NO: 2993726 - RNA, 19 nt, Artificial Sequence
  Description of Artificial Sequence: Synthetic oligonucleotide
gucauggggugucucugug

SEQ ID NO: 2993727 - RNA, 19 nt, Artificial Sequence
  Description of Artificial Sequence: Synthetic oligonucleotide
uugucaguccagucccggu

SEQ ID NO: 2993728 - RNA, 19 nt, Artificial Sequence
  Description of Artificial Sequence: Synthetic oligonucleotide
aguccagucccgguggcug

SEQ ID NO: 2993729 - RNA, 19 nt, Artificial Sequence
  Description of Artificial Sequence: Synthetic oligonucleotide
cuucacccgcgacagccgc

SEQ ID NO: 2993730 - RNA, 19 nt, Artificial Sequence
  Description of Artificial Sequence: Synthetic oligonucleotide
aaggagcaggccaucucca

SEQ ID NO: 2993731 - RNA, 19 nt, Artificial Sequence
  Description of Artificial Sequence: Synthetic oligonucleotide
augucauggggugucucug

SEQ ID NO: 2993732 - RNA, 19 nt, Artificial Sequence
  Description of Artificial Sequence: Synthetic oligonucleotide
uuuuagcggguuggaggcc

SEQ ID NO: 2993733 - RNA, 19 nt, Artificial Sequence
  Description of Artificial Sequence: Synthetic oligonucleotide
guaggauggggagccacug

SEQ ID NO: 2993734 - RNA, 19 nt, Artificial Sequence
  Description of Artificial Sequence: Synthetic oligonucleotide
cauggggugucucugugaa

SEQ ID NO: 2993735 - RNA, 19 nt, Artificial Sequence
  Description of Artificial Sequence: Synthetic oligonucleotide
auccucaccuguccgcgcu

SEQ ID NO: 2993736 - RNA, 19 nt, Artificial Sequence
  Description of Artificial Sequence: Synthetic oligonucleotide
uaggugccuucgucagugg

SEQ ID NO: 2993737 - RNA, 19 nt, Artificial Sequence
  Description of Artificial Sequence: Synthetic oligonucleotide
cacuuauuuugguggcguc

SEQ ID NO: 2993738 - RNA, 19 nt, Artificial Sequence
  Description of Artificial Sequence: Synthetic oligonucleotide
ucaccuguccgcgcuguca

SEQ ID NO: 2993739 - RNA, 19 nt, Artificial Sequence
  Description of Artificial Sequence: Synthetic oligonucleotide
cuccacauccucaccuguc

SEQ ID NO: 2993740 - RNA, 19 nt, Artificial Sequence
  Description of Artificial Sequence: Synthetic oligonucleotide
ucacccgcgacagccgcag

SEQ ID NO: 2993741 - RNA, 19 nt, Artificial Sequence
  Description of Artificial Sequence: Synthetic oligonucleotide
guggugccgggccuugccg

SEQ ID NO: 2993742 - RNA, 19 nt, Artificial Sequence
  Description of Artificial Sequence: Synthetic oligonucleotide
gucgaucacgcgacacucg

SEQ ID NO: 2993743 - RNA, 19 nt, Artificial Sequence
  Description of Artificial Sequence: Synthetic oligonucleotide
cuuccccgaguccuccugc

SEQ ID NO: 2993744 - RNA, 19 nt, Artificial Sequence
  Description of Artificial Sequence: Synthetic oligonucleotide
ccacacuuauuuugguggc

SEQ ID NO: 2993745 - RNA, 19 nt, Artificial Sequence
  Description of Artificial Sequence: Synthetic oligonucleotide
ggcuucacccgcgacagcc

SEQ ID NO: 2993746 - RNA, 19 nt, Artificial Sequence
  Description of Artificial Sequence: Synthetic oligonucleotide
ugaccuuguggugccgggc

SEQ ID NO: 2993747 - RNA, 19 nt, Artificial Sequence
  Description of Artificial Sequence: Synthetic oligonucleotide
gugggcuucacccgcgaca

SEQ ID NO: 2993748 - RNA, 19 nt, Artificial Sequence
  Description of Artificial Sequence: Synthetic oligonucleotide
uuauuuugguggcguccuu

SEQ ID NO: 2993749 - RNA, 19 nt, Artificial Sequence
  Description of Artificial Sequence: Synthetic oligonucleotide
gaguaggauggggagccac

SEQ ID NO: 2993750 - RNA, 19 nt, Artificial Sequence
  Description of Artificial Sequence: Synthetic oligonucleotide
uuggaggcccaugucugcu

SEQ ID NO: 2993751 - RNA, 19 nt, Artificial Sequence
  Description of Artificial Sequence: Synthetic oligonucleotide
aguaggauggggagccacu

SEQ ID NO: 2993752 - RNA, 19 nt, Artificial Sequence
  Description of Artificial Sequence: Synthetic oligonucleotide
uggcugcgcagguaccacc

SEQ ID NO: 2993753 - RNA, 19 nt, Artificial Sequence
  Description of Artificial Sequence: Synthetic oligonucleotide
gcgaguaggauggggagcc

SEQ ID NO: 2993754 - RNA, 19 nt, Artificial Sequence
  Description of Artificial Sequence: Synthetic oligonucleotide
cugccucggaaggagcagg

SEQ ID NO: 2993755 - RNA, 19 nt, Artificial Sequence
  Description of Artificial Sequence: Synthetic oligonucleotide
uuagcggguuggaggccca

SEQ ID NO: 2993756 - RNA, 19 nt, Artificial Sequence
  Description of Artificial Sequence: Synthetic oligonucleotide
ggagauguugcugcccacc

SEQ ID NO: 2993757 - RNA, 19 nt, Artificial Sequence
  Description of Artificial Sequence: Synthetic oligonucleotide
acugccucggaaggagcag

SEQ ID NO: 2993758 - RNA, 19 nt, Artificial Sequence
  Description of Artificial Sequence: Synthetic oligonucleotide
gguuggaggcccaugucug

SEQ ID NO: 2993759 - RNA, 19 nt, Artificial Sequence
  Description of Artificial Sequence: Synthetic oligonucleotide
cagguaccaccacuggauc

SEQ ID NO: 2993760 - RNA, 19 nt, Artificial Sequence
  Description of Artificial Sequence: Synthetic oligonucleotide
cuuauuuugguggcguccu

SEQ ID NO: 2993761 - RNA, 19 nt, Artificial Sequence
  Description of Artificial Sequence: Synthetic oligonucleotide
uucacccgcgacagccgca

SEQ ID NO: 2993762 - RNA, 19 nt, Artificial Sequence
  Description of Artificial Sequence: Synthetic oligonucleotide
uccagucccgguggcugcg

SEQ ID NO: 2993763 - RNA, 19 nt, Artificial Sequence
  Description of Artificial Sequence: Synthetic oligonucleotide
gcgcugucaugucaugggg

SEQ ID NO: 2993764 - RNA, 19 nt, Artificial Sequence
  Description of Artificial Sequence: Synthetic oligonucleotide
gacacucguaggugccuuc

SEQ ID NO: 2993765 - RNA, 19 nt, Artificial Sequence
  Description of Artificial Sequence: Synthetic oligonucleotide
cacgcgacacucguaggug

SEQ ID NO: 2993766 - RNA, 19 nt, Artificial Sequence
  Description of Artificial Sequence: Synthetic oligonucleotide
ggugccuucgucagugggc

SEQ ID NO: 2993767 - RNA, 19 nt, Artificial Sequence
  Description of Artificial Sequence: Synthetic oligonucleotide
cagguaggccuugaccuug

SEQ ID NO: 2993768 - RNA, 19 nt, Artificial Sequence
  Description of Artificial Sequence: Synthetic oligonucleotide
acccgcgacagccgcagcu

SEQ ID NO: 2993769 - RNA, 19 nt, Artificial Sequence
  Description of Artificial Sequence: Synthetic oligonucleotide
uccccgaguccuccugcug

SEQ ID NO: 2993770 - RNA, 19 nt, Artificial Sequence
  Description of Artificial Sequence: Synthetic oligonucleotide
acuggaucuccagcgagua

SEQ ID NO: 2993771 - RNA, 19 nt, Artificial Sequence
  Description of Artificial Sequence: Synthetic oligonucleotide
aggcccaugucugcuuguc

SEQ ID NO: 2993772 - RNA, 19 nt, Artificial Sequence
  Description of Artificial Sequence: Synthetic oligonucleotide
agucccgguggcugcgcag

SEQ ID NO: 2993773 - RNA, 19 nt, Artificial Sequence
  Description of Artificial Sequence: Synthetic oligonucleotide
gguaccaccacuggaucuc

SEQ ID NO: 2993774 - RNA, 19 nt, Artificial Sequence
  Description of Artificial Sequence: Synthetic oligonucleotide
cauccucaccuguccgcgc

SEQ ID NO: 2993775 - RNA, 19 nt, Artificial Sequence
  Description of Artificial Sequence: Synthetic oligonucleotide
uggugccgggccuugccgu

SEQ ID NO: 2993776 - RNA, 19 nt, Artificial Sequence
  Description of Artificial Sequence: Synthetic oligonucleotide
uuccccgaguccuccugcu

SEQ ID NO: 2993777 - RNA, 19 nt, Artificial Sequence
  Description of Artificial Sequence: Synthetic oligonucleotide
gagcaggccaucuccacau

SEQ ID NO: 2993778 - RNA, 19 nt, Artificial Sequence
  Description of Artificial Sequence: Synthetic oligonucleotide
cagcaccgaguucuccccg

SEQ ID NO: 2993779 - RNA, 19 nt, Artificial Sequence
  Description of Artificial Sequence: Synthetic oligonucleotide
uaccaccacuggaucucca

SEQ ID NO: 2993780 - RNA, 19 nt, Artificial Sequence
  Description of Artificial Sequence: Synthetic oligonucleotide
uccucaccuguccgcgcug

SEQ ID NO: 2993781 - RNA, 19 nt, Artificial Sequence
  Description of Artificial Sequence: Synthetic oligonucleotide
ucaugucauggggugucuc

SEQ ID NO: 2993782 - RNA, 19 nt, Artificial Sequence
  Description of Artificial Sequence: Synthetic oligonucleotide
gucccgguggcugcgcagg

SEQ ID NO: 2993783 - RNA, 19 nt, Artificial Sequence
  Description of Artificial Sequence: Synthetic oligonucleotide
caucaggcagcugcagcac

SEQ ID NO: 2993784 - RNA, 19 nt, Artificial Sequence
  Description of Artificial Sequence: Synthetic oligonucleotide
cacugccucggaaggagca

SEQ ID NO: 2993785 - RNA, 19 nt, Artificial Sequence
  Description of Artificial Sequence: Synthetic oligonucleotide
caugucauggggugucucu

SEQ ID NO: 2993786 - RNA, 19 nt, Artificial Sequence
  Description of Artificial Sequence: Synthetic oligonucleotide
uguugcugcccaccaccuu

SEQ ID NO: 2993787 - RNA, 19 nt, Artificial Sequence
  Description of Artificial Sequence: Synthetic oligonucleotide
uggcguccuuccccgaguc

SEQ ID NO: 2993788 - RNA, 19 nt, Artificial Sequence
  Description of Artificial Sequence: Synthetic oligonucleotide
gcagcaccgaguucucccc

SEQ ID NO: 2993789 - RNA, 19 nt, Artificial Sequence
  Description of Artificial Sequence: Synthetic oligonucleotide
guugcugcccaccaccuuu

SEQ ID NO: 2993790 - RNA, 19 nt, Artificial Sequence
  Description of Artificial Sequence: Synthetic oligonucleotide
accuuguggugccgggccu

SEQ ID NO: 2993791 - RNA, 19 nt, Artificial Sequence
  Description of Artificial Sequence: Synthetic oligonucleotide
uccgcgcugucaugucaug

SEQ ID NO: 2993792 - RNA, 19 nt, Artificial Sequence
  Description of Artificial Sequence: Synthetic oligonucleotide
ccuuugaccacacuuauuu

SEQ ID NO: 2993793 - RNA, 19 nt, Artificial Sequence
  Description of Artificial Sequence: Synthetic oligonucleotide
gguggcguccuuccccgag

SEQ ID NO: 2993794 - RNA, 19 nt, Artificial Sequence
  Description of Artificial Sequence: Synthetic oligonucleotide
ggaggcccaugucugcuug

SEQ ID NO: 2993795 - RNA, 19 nt, Artificial Sequence
  Description of Artificial Sequence: Synthetic oligonucleotide
guaccaccacuggaucucc

SEQ ID NO: 2993796 - RNA, 19 nt, Artificial Sequence
  Description of Artificial Sequence: Synthetic oligonucleotide
gugggagauguugcugccc

SEQ ID NO: 2993797 - RNA, 19 nt, Artificial Sequence
  Description of Artificial Sequence: Synthetic oligonucleotide
aguucuccccgggcugcac

SEQ ID NO: 2993798 - RNA, 19 nt, Artificial Sequence
  Description of Artificial Sequence: Synthetic oligonucleotide
cgcgcugucaugucauggg

SEQ ID NO: 2993799 - RNA, 19 nt, Artificial Sequence
  Description of Artificial Sequence: Synthetic oligonucleotide
ggaaggagcaggccaucuc

SEQ ID NO: 2993800 - RNA, 19 nt, Artificial Sequence
  Description of Artificial Sequence: Synthetic oligonucleotide
augcuuuuagcggguugga

SEQ ID NO: 2993801 - RNA, 19 nt, Artificial Sequence
  Description of Artificial Sequence: Synthetic oligonucleotide
caccgaguucuccccgggc

SEQ ID NO: 2993802 - RNA, 19 nt, Artificial Sequence
  Description of Artificial Sequence: Synthetic oligonucleotide
ggagcaggccaucuccaca

SEQ ID NO: 2993803 - RNA, 19 nt, Artificial Sequence
  Description of Artificial Sequence: Synthetic oligonucleotide
ccagcgaguaggaugggga

SEQ ID NO: 2993804 - RNA, 19 nt, Artificial Sequence
  Description of Artificial Sequence: Synthetic oligonucleotide
ugcugcccaccaccuuuga

SEQ ID NO: 2993805 - RNA, 19 nt, Artificial Sequence
  Description of Artificial Sequence: Synthetic oligonucleotide
ccacauccucaccuguccg

SEQ ID NO: 2993806 - RNA, 19 nt, Artificial Sequence
  Description of Artificial Sequence: Synthetic oligonucleotide
auguugcugcccaccaccu

SEQ ID NO: 2993807 - RNA, 19 nt, Artificial Sequence
  Description of Artificial Sequence: Synthetic oligonucleotide
gccuugaccuuguggugcc

SEQ ID NO: 2993808 - RNA, 19 nt, Artificial Sequence
  Description of Artificial Sequence: Synthetic oligonucleotide
agccgcagcuugugggaga

SEQ ID NO: 2993809 - RNA, 19 nt, Artificial Sequence
  Description of Artificial Sequence: Synthetic oligonucleotide
ccaccacuggaucuccagc

SEQ ID NO: 2993810 - RNA, 19 nt, Artificial Sequence
  Description of Artificial Sequence: Synthetic oligonucleotide
ccacuggaucuccagcgag

SEQ ID NO: 2993811 - RNA, 19 nt, Artificial Sequence
  Description of Artificial Sequence: Synthetic oligonucleotide
ucuccccgggcugcacccg

SEQ ID NO: 2993812 - RNA, 19 nt, Artificial Sequence
  Description of Artificial Sequence: Synthetic oligonucleotide
uccuccugcugagaugcuu

SEQ ID NO: 2993813 - RNA, 19 nt, Artificial Sequence
  Description of Artificial Sequence: Synthetic oligonucleotide
ccgcagguaggccuugacc

SEQ ID NO: 2993814 - RNA, 19 nt, Artificial Sequence
  Description of Artificial Sequence: Synthetic oligonucleotide
uggaggcccaugucugcuu

SEQ ID NO: 2993815 - RNA, 19 nt, Artificial Sequence
  Description of Artificial Sequence: Synthetic oligonucleotide
cuuguggugccgggccuug

SEQ ID NO: 2993816 - RNA, 19 nt, Artificial Sequence
  Description of Artificial Sequence: Synthetic oligonucleotide
uccuuccccgaguccuccu

SEQ ID NO: 2993817 - RNA, 19 nt, Artificial Sequence
  Description of Artificial Sequence: Synthetic oligonucleotide
ugccgggccuugccgucgc

SEQ ID NO: 2993818 - RNA, 19 nt, Artificial Sequence
  Description of Artificial Sequence: Synthetic oligonucleotide
ggguuggaggcccaugucu

SEQ ID NO: 2993819 - RNA, 19 nt, Artificial Sequence
  Description of Artificial Sequence: Synthetic oligonucleotide
uccugcugagaugcuuuua

SEQ ID NO: 2993820 - RNA, 19 nt, Artificial Sequence
  Description of Artificial Sequence: Synthetic oligonucleotide
auggggugucucugugaaa

SEQ ID NO: 2993821 - RNA, 19 nt, Artificial Sequence
  Description of Artificial Sequence: Synthetic oligonucleotide
gcaccgaguucuccccggg

SEQ ID NO: 2993822 - RNA, 19 nt, Artificial Sequence
  Description of Artificial Sequence: Synthetic oligonucleotide
ccaccuuugaccacacuua

SEQ ID NO: 2993823 - RNA, 19 nt, Artificial Sequence
  Description of Artificial Sequence: Synthetic oligonucleotide
gcgcagguaccaccacugg

SEQ ID NO: 2993824 - RNA, 19 nt, Artificial Sequence
  Description of Artificial Sequence: Synthetic oligonucleotide
accuguccgcgcugucaug

SEQ ID NO: 2993825 - RNA, 19 nt, Artificial Sequence
  Description of Artificial Sequence: Synthetic oligonucleotide
ccucggaaggagcaggcca

SEQ ID NO: 2993826 - RNA, 19 nt, Artificial Sequence
  Description of Artificial Sequence: Synthetic oligonucleotide
cuuugaccacacuuauuuu

SEQ ID NO: 2993827 - RNA, 19 nt, Artificial Sequence
  Description of Artificial Sequence: Synthetic oligonucleotide
caggccaucuccacauccu

SEQ ID NO: 2993828 - RNA, 19 nt, Artificial Sequence
  Description of Artificial Sequence: Synthetic oligonucleotide
cucggaaggagcaggccau

SEQ ID NO: 2993829 - RNA, 19 nt, Artificial Sequence
  Description of Artificial Sequence: Synthetic oligonucleotide
ucggaaggagcaggccauc

SEQ ID NO: 2993830 - RNA, 19 nt, Artificial Sequence
  Description of Artificial Sequence: Synthetic oligonucleotide
gcuucacccgcgacagccg

SEQ ID NO: 2993831 - RNA, 19 nt, Artificial Sequence
  Description of Artificial Sequence: Synthetic oligonucleotide
cacuggaucuccagcgagu

SEQ ID NO: 2993832 - RNA, 19 nt, Artificial Sequence
  Description of Artificial Sequence: Synthetic oligonucleotide
ucccgguggcugcgcaggu

SEQ ID NO: 2993833 - RNA, 19 nt, Artificial Sequence
  Description of Artificial Sequence: Synthetic oligonucleotide
gcuugucaguccagucccg

SEQ ID NO: 2993834 - RNA, 19 nt, Artificial Sequence
  Description of Artificial Sequence: Synthetic oligonucleotide
ccgucgcugaagucgauca

SEQ ID NO: 2993835 - RNA, 19 nt, Artificial Sequence
  Description of Artificial Sequence: Synthetic oligonucleotide
cuguccgcgcugucauguc

SEQ ID NO: 2993836 - RNA, 19 nt, Artificial Sequence
  Description of Artificial Sequence: Synthetic oligonucleotide
cuccccgggcugcacccgc

SEQ ID NO: 2993837 - RNA, 19 nt, Artificial Sequence
  Description of Artificial Sequence: Synthetic oligonucleotide
ccgguggcugcgcagguac

SEQ ID NO: 2993838 - RNA, 19 nt, Artificial Sequence
  Description of Artificial Sequence: Synthetic oligonucleotide
uccccgggcugcacccgca

SEQ ID NO: 2993839 - RNA, 19 nt, Artificial Sequence
  Description of Artificial Sequence: Synthetic oligonucleotide
uuguggugccgggccuugc

SEQ ID NO: 2993840 - RNA, 19 nt, Artificial Sequence
  Description of Artificial Sequence: Synthetic oligonucleotide
cagccgcagcuugugggag

SEQ ID NO: 2993841 - RNA, 19 nt, Artificial Sequence
  Description of Artificial Sequence: Synthetic oligonucleotide
gugccuucgucagugggcu

SEQ ID NO: 2993842 - RNA, 19 nt, Artificial Sequence
  Description of Artificial Sequence: Synthetic oligonucleotide
agcggguuggaggcccaug

SEQ ID NO: 2993843 - RNA, 19 nt, Artificial Sequence
  Description of Artificial Sequence: Synthetic oligonucleotide
accuuugaccacacuuauu

SEQ ID NO: 2993844 - RNA, 19 nt, Artificial Sequence
  Description of Artificial Sequence: Synthetic oligonucleotide
ggaucuccagcgaguagga

SEQ ID NO: 2993845 - RNA, 19 nt, Artificial Sequence
  Description of Artificial Sequence: Synthetic oligonucleotide
agccacugccucggaagga

SEQ ID NO: 2993846 - RNA, 19 nt, Artificial Sequence
  Description of Artificial Sequence: Synthetic oligonucleotide
guggcugcgcagguaccac

SEQ ID NO: 2993847 - RNA, 19 nt, Artificial Sequence
  Description of Artificial Sequence: Synthetic oligonucleotide
caccuuugaccacacuuau

SEQ ID NO: 2993848 - RNA, 19 nt, Artificial Sequence
  Description of Artificial Sequence: Synthetic oligonucleotide
gcugcacccgcagguaggc

SEQ ID NO: 2993849 - RNA, 19 nt, Artificial Sequence
  Description of Artificial Sequence: Synthetic oligonucleotide
gcugcccaccaccuuugac

SEQ ID NO: 2993850 - RNA, 19 nt, Artificial Sequence
  Description of Artificial Sequence: Synthetic oligonucleotide
gugccgggccuugccgucg

SEQ ID NO: 2993851 - RNA, 19 nt, Artificial Sequence
  Description of Artificial Sequence: Synthetic oligonucleotide
gcagguaccaccacuggau

SEQ ID NO: 2993852 - RNA, 19 nt, Artificial Sequence
  Description of Artificial Sequence: Synthetic oligonucleotide
gcuugugggagauguugcu

SEQ ID NO: 2993853 - RNA, 19 nt, Artificial Sequence
  Description of Artificial Sequence: Synthetic oligonucleotide
gguggcugcgcagguacca

SEQ ID NO: 2993854 - RNA, 19 nt, Artificial Sequence
  Description of Artificial Sequence: Synthetic oligonucleotide
agguaggccuugaccuugu

SEQ ID NO: 2993855 - RNA, 19 nt, Artificial Sequence
  Description of Artificial Sequence: Synthetic oligonucleotide
cccgaguccuccugcugag

SEQ ID NO: 2993856 - RNA, 19 nt, Artificial Sequence
  Description of Artificial Sequence: Synthetic oligonucleotide
gccuucgucagugggcuuc

SEQ ID NO: 2993857 - RNA, 19 nt, Artificial Sequence
  Description of Artificial Sequence: Synthetic oligonucleotide
cucaccuguccgcgcuguc

SEQ ID NO: 2993858 - RNA, 19 nt, Artificial Sequence
  Description of Artificial Sequence: Synthetic oligonucleotide
gucugcuugucaguccagu

SEQ ID NO: 2993859 - RNA, 19 nt, Artificial Sequence
  Description of Artificial Sequence: Synthetic oligonucleotide
cgcgacacucguaggugcc

SEQ ID NO: 2993860 - RNA, 19 nt, Artificial Sequence
  Description of Artificial Sequence: Synthetic oligonucleotide
ccgaguucuccccgggcug

SEQ ID NO: 2993861 - RNA, 19 nt, Artificial Sequence
  Description of Artificial Sequence: Synthetic oligonucleotide
ccacugccucggaaggagc

SEQ ID NO: 2993862 - RNA, 19 nt, Artificial Sequence
  Description of Artificial Sequence: Synthetic oligonucleotide
cgcugaagucgaucacgcg

SEQ ID NO: 2993863 - RNA, 19 nt, Artificial Sequence
  Description of Artificial Sequence: Synthetic oligonucleotide
ggcccaugucugcuuguca

SEQ ID NO: 2993864 - RNA, 19 nt, Artificial Sequence
  Description of Artificial Sequence: Synthetic oligonucleotide
ggcguccuuccccgagucc

SEQ ID NO: 2993865 - RNA, 19 nt, Artificial Sequence
  Description of Artificial Sequence: Synthetic oligonucleotide
ggcugcgcagguaccacca

SEQ ID NO: 2993866 - RNA, 19 nt, Artificial Sequence
  Description of Artificial Sequence: Synthetic oligonucleotide
cuccagcgaguaggauggg

SEQ ID NO: 2993867 - RNA, 19 nt, Artificial Sequence
  Description of Artificial Sequence: Synthetic oligonucleotide
gggugucucugugaaaagu

SEQ ID NO: 2993868 - RNA, 19 nt, Artificial Sequence
  Description of Artificial Sequence: Synthetic oligonucleotide
ccgcgcugucaugucaugg

SEQ ID NO: 2993869 - RNA, 19 nt, Artificial Sequence
  Description of Artificial Sequence: Synthetic oligonucleotide
cugcacccgcagguaggcc

SEQ ID NO: 2993870 - RNA, 19 nt, Artificial Sequence
  Description of Artificial Sequence: Synthetic oligonucleotide
gcgacagccgcagcuugug

SEQ ID NO: 2993871 - RNA, 19 nt, Artificial Sequence
  Description of Artificial Sequence: Synthetic oligonucleotide
gaguucuccccgggcugca

SEQ ID NO: 2993872 - RNA, 19 nt, Artificial Sequence
  Description of Artificial Sequence: Synthetic oligonucleotide
gaggcccaugucugcuugu

SEQ ID NO: 2993873 - RNA, 19 nt, Artificial Sequence
  Description of Artificial Sequence: Synthetic oligonucleotide
cccaccaccuuugaccaca

SEQ ID NO: 2993874 - RNA, 19 nt, Artificial Sequence
  Description of Artificial Sequence: Synthetic oligonucleotide
cugcgcagguaccaccacu

SEQ ID NO: 2993875 - RNA, 19 nt, Artificial Sequence
  Description of Artificial Sequence: Synthetic oligonucleotide
ccuuccccgaguccuccug

SEQ ID NO: 2993876 - RNA, 19 nt, Artificial Sequence
  Description of Artificial Sequence: Synthetic oligonucleotide
ggugccgggccuugccguc

SEQ ID NO: 2993877 - RNA, 19 nt, Artificial Sequence
  Description of Artificial Sequence: Synthetic oligonucleotide
guggcguccuuccccgagu

SEQ ID NO: 2993878 - RNA, 19 nt, Artificial Sequence
  Description of Artificial Sequence: Synthetic oligonucleotide
ugccgucgcugaagucgau

SEQ ID NO: 2993879 - RNA, 19 nt, Artificial Sequence
  Description of Artificial Sequence: Synthetic oligonucleotide
cuucgucagugggcuucac

SEQ ID NO: 2993880 - RNA, 19 nt, Artificial Sequence
  Description of Artificial Sequence: Synthetic oligonucleotide
gcggguuggaggcccaugu

SEQ ID NO: 2993881 - RNA, 19 nt, Artificial Sequence
  Description of Artificial Sequence: Synthetic oligonucleotide
gcugcgcagguaccaccac

SEQ ID NO: 2993882 - RNA, 19 nt, Artificial Sequence
  Description of Artificial Sequence: Synthetic oligonucleotide
ugccuucgucagugggcuu

SEQ ID NO: 2993883 - RNA, 19 nt, Artificial Sequence
  Description of Artificial Sequence: Synthetic oligonucleotide
cagugggcuucacccgcga

SEQ ID NO: 2993884 - RNA, 19 nt, Artificial Sequence
  Description of Artificial Sequence: Synthetic oligonucleotide
cagcugcagcaccgaguuc

SEQ ID NO: 2993885 - RNA, 19 nt, Artificial Sequence
  Description of Artificial Sequence: Synthetic oligonucleotide
ccccgaguccuccugcuga

SEQ ID NO: 2993886 - RNA, 19 nt, Artificial Sequence
  Description of Artificial Sequence: Synthetic oligonucleotide
gccucggaaggagcaggcc

SEQ ID NO: 2993887 - RNA, 19 nt, Artificial Sequence
  Description of Artificial Sequence: Synthetic oligonucleotide
cugucaugucauggggugu

SEQ ID NO: 2993888 - RNA, 19 nt, Artificial Sequence
  Description of Artificial Sequence: Synthetic oligonucleotide
gucaugucauggggugucu

SEQ ID NO: 2993889 - RNA, 19 nt, Artificial Sequence
  Description of Artificial Sequence: Synthetic oligonucleotide
caccuguccgcgcugucau

SEQ ID NO: 2993890 - RNA, 19 nt, Artificial Sequence
  Description of Artificial Sequence: Synthetic oligonucleotide
ccaccaccuuugaccacac

SEQ ID NO: 2993891 - RNA, 19 nt, Artificial Sequence
  Description of Artificial Sequence: Synthetic oligonucleotide
caggcagcugcagcaccga

SEQ ID NO: 2993892 - RNA, 19 nt, Artificial Sequence
  Description of Artificial Sequence: Synthetic oligonucleotide
gaucuccagcgaguaggau

SEQ ID NO: 2993893 - RNA, 19 nt, Artificial Sequence
  Description of Artificial Sequence: Synthetic oligonucleotide
cgaguucuccccgggcugc

SEQ ID NO: 2993894 - RNA, 19 nt, Artificial Sequence
  Description of Artificial Sequence: Synthetic oligonucleotide
cgacagccgcagcuugugg

SEQ ID NO: 2993895 - RNA, 19 nt, Artificial Sequence
  Description of Artificial Sequence: Synthetic oligonucleotide
gcguccuuccccgaguccu

SEQ ID NO: 2993896 - RNA, 19 nt, Artificial Sequence
  Description of Artificial Sequence: Synthetic oligonucleotide
cgucgcugaagucgaucac

SEQ ID NO: 2993897 - RNA, 19 nt, Artificial Sequence
  Description of Artificial Sequence: Synthetic oligonucleotide
gagaugcuuuuagcggguu

SEQ ID NO: 2993898 - RNA, 19 nt, Artificial Sequence
  Description of Artificial Sequence: Synthetic oligonucleotide
cagucccgguggcugcgca

SEQ ID NO: 2993899 - RNA, 19 nt, Artificial Sequence
  Description of Artificial Sequence: Synthetic oligonucleotide
cacucguaggugccuucgu

SEQ ID NO: 2993900 - RNA, 19 nt, Artificial Sequence
  Description of Artificial Sequence: Synthetic oligonucleotide
cacccgcgacagccgcagc

SEQ ID NO: 2993901 - RNA, 19 nt, Artificial Sequence
  Description of Artificial Sequence: Synthetic oligonucleotide
cgcagguaccaccacugga

SEQ ID NO: 2993902 - RNA, 19 nt, Artificial Sequence
  Description of Artificial Sequence: Synthetic oligonucleotide
uagcggguuggaggcccau

SEQ ID NO: 2993903 - RNA, 19 nt, Artificial Sequence
  Description of Artificial Sequence: Synthetic oligonucleotide
gccgucgcugaagucgauc

SEQ ID NO: 2993904 - RNA, 19 nt, Artificial Sequence
  Description of Artificial Sequence: Synthetic oligonucleotide
ccuugaccuuguggugccg

SEQ ID NO: 2993905 - RNA, 19 nt, Artificial Sequence
  Description of Artificial Sequence: Synthetic oligonucleotide
ggcagcugcagcaccgagu

SEQ ID NO: 2993906 - RNA, 19 nt, Artificial Sequence
  Description of Artificial Sequence: Synthetic oligonucleotide
acccgcagguaggccuuga

SEQ ID NO: 2993907 - RNA, 19 nt, Artificial Sequence
  Description of Artificial Sequence: Synthetic oligonucleotide
cccgcagguaggccuugac

SEQ ID NO: 2993908 - RNA, 19 nt, Artificial Sequence
  Description of Artificial Sequence: Synthetic oligonucleotide
gcggcaucaggcagcugca

SEQ ID NO: 2993909 - RNA, 19 nt, Artificial Sequence
  Description of Artificial Sequence: Synthetic oligonucleotide
gccuugccgucgcugaagu

SEQ ID NO: 2993910 - RNA, 19 nt, Artificial Sequence
  Description of Artificial Sequence: Synthetic oligonucleotide
guccgcgcugucaugucau

SEQ ID NO: 2993911 - RNA, 19 nt, Artificial Sequence
  Description of Artificial Sequence: Synthetic oligonucleotide
ccuugccgucgcugaaguc

SEQ ID NO: 2993912 - RNA, 19 nt, Artificial Sequence
  Description of Artificial Sequence: Synthetic oligonucleotide
ccgcgacagccgcagcuug

SEQ ID NO: 2993913 - RNA, 19 nt, Artificial Sequence
  Description of Artificial Sequence: Synthetic oligonucleotide
cuccugcugagaugcuuuu

SEQ ID NO: 2993914 - RNA, 19 nt, Artificial Sequence
  Description of Artificial Sequence: Synthetic oligonucleotide
ggauggggagccacugccu

SEQ ID NO: 2993915 - RNA, 19 nt, Artificial Sequence
  Description of Artificial Sequence: Synthetic oligonucleotide
cacccgcagguaggccuug

SEQ ID NO: 2993916 - RNA, 19 nt, Artificial Sequence
  Description of Artificial Sequence: Synthetic oligonucleotide
gcagguaggccuugaccuu

SEQ ID NO: 2993917 - RNA, 19 nt, Artificial Sequence
  Description of Artificial Sequence: Synthetic oligonucleotide
cgcagcuugugggagaugu

SEQ ID NO: 2993918 - RNA, 19 nt, Artificial Sequence
  Description of Artificial Sequence: Synthetic oligonucleotide
ccuccugcugagaugcuuu

SEQ ID NO: 2993919 - RNA, 19 nt, Artificial Sequence
  Description of Artificial Sequence: Synthetic oligonucleotide
cccaugucugcuugucagu

SEQ ID NO: 2993920 - RNA, 19 nt, Artificial Sequence
  Description of Artificial Sequence: Synthetic oligonucleotide
cguccuuccccgaguccuc

SEQ ID NO: 2993921 - RNA, 19 nt, Artificial Sequence
  Description of Artificial Sequence: Synthetic oligonucleotide
gcccaccaccuuugaccac

SEQ ID NO: 2993922 - RNA, 19 nt, Artificial Sequence
  Description of Artificial Sequence: Synthetic oligonucleotide
cggguuggaggcccauguc

SEQ ID NO: 2993923 - RNA, 19 nt, Artificial Sequence
  Description of Artificial Sequence: Synthetic oligonucleotide
gggccuugccgucgcugaa

SEQ ID NO: 2993924 - RNA, 19 nt, Artificial Sequence
  Description of Artificial Sequence: Synthetic oligonucleotide
cgguggcugcgcagguacc

SEQ ID NO: 2993925 - RNA, 19 nt, Artificial Sequence
  Description of Artificial Sequence: Synthetic oligonucleotide
cgggccuugccgucgcuga

SEQ ID NO: 2993926 - RNA, 19 nt, Artificial Sequence
  Description of Artificial Sequence: Synthetic oligonucleotide
cgcugucaugucauggggu

SEQ ID NO: 2993927 - RNA, 19 nt, Artificial Sequence
  Description of Artificial Sequence: Synthetic oligonucleotide
ccagucccgguggcugcgc

SEQ ID NO: 2993928 - RNA, 19 nt, Artificial Sequence
  Description of Artificial Sequence: Synthetic oligonucleotide
ccccgggcugcacccgcag

SEQ ID NO: 2993929 - RNA, 19 nt, Artificial Sequence
  Description of Artificial Sequence: Synthetic oligonucleotide
caguccagucccgguggcu

SEQ ID NO: 2993930 - RNA, 19 nt, Artificial Sequence
  Description of Artificial Sequence: Synthetic oligonucleotide
ccgggccuugccgucgcug

SEQ ID NO: 2993931 - RNA, 19 nt, Artificial Sequence
  Description of Artificial Sequence: Synthetic oligonucleotide
ccgggcugcacccgcaggu

SEQ ID NO: 2993932 - RNA, 19 nt, Artificial Sequence
  Description of Artificial Sequence: Synthetic oligonucleotide
caccaccuuugaccacacu

SEQ ID NO: 2993933 - RNA, 19 nt, Artificial Sequence
  Description of Artificial Sequence: Synthetic oligonucleotide
cgaguccuccugcugagau

SEQ ID NO: 2993934 - RNA, 19 nt, Artificial Sequence
  Description of Artificial Sequence: Synthetic oligonucleotide
ggggagccacugccucgga

SEQ ID NO: 2993935 - RNA, 19 nt, Artificial Sequence
  Description of Artificial Sequence: Synthetic oligonucleotide
gcgacacucguaggugccu

SEQ ID NO: 2993936 - RNA, 19 nt, Artificial Sequence
  Description of Artificial Sequence: Synthetic oligonucleotide
ggggcggcaucaggcagcu

SEQ ID NO: 2993937 - RNA, 19 nt, Artificial Sequence
  Description of Artificial Sequence: Synthetic oligonucleotide
cggcaucaggcagcugcag

SEQ ID NO: 2993938 - RNA, 19 nt, Artificial Sequence
  Description of Artificial Sequence: Synthetic oligonucleotide
gccgcagcuugugggagau

SEQ ID NO: 2993939 - RNA, 19 nt, Artificial Sequence
  Description of Artificial Sequence: Synthetic oligonucleotide
cgaucacgcgacacucgua

SEQ ID NO: 2993940 - RNA, 19 nt, Artificial Sequence
  Description of Artificial Sequence: Synthetic oligonucleotide
ccgaguccuccugcugaga

SEQ ID NO: 2993941 - RNA, 19 nt, Artificial Sequence
  Description of Artificial Sequence: Synthetic oligonucleotide
cguaggugccuucgucagu

SEQ ID NO: 2993942 - RNA, 19 nt, Artificial Sequence
  Description of Artificial Sequence: Synthetic oligonucleotide
gcagcuugugggagauguu

SEQ ID NO: 2993943 - RNA, 19 nt, Artificial Sequence
  Description of Artificial Sequence: Synthetic oligonucleotide
gcacccgcagguaggccuu

SEQ ID NO: 2993944 - RNA, 19 nt, Artificial Sequence
  Description of Artificial Sequence: Synthetic oligonucleotide
ccgcagcuugugggagaug

SEQ ID NO: 2993945 - RNA, 19 nt, Artificial Sequence
  Description of Artificial Sequence: Synthetic oligonucleotide
cgaguaggauggggagcca

SEQ ID NO: 2993946 - RNA, 19 nt, Artificial Sequence
  Description of Artificial Sequence: Synthetic oligonucleotide
cgcgacagccgcagcuugu

SEQ ID NO: 2993947 - RNA, 19 nt, Artificial Sequence
  Description of Artificial Sequence: Synthetic oligonucleotide
ccucaccuguccgcgcugu

SEQ ID NO: 2993948 - RNA, 19 nt, Artificial Sequence
  Description of Artificial Sequence: Synthetic oligonucleotide
cggaaggagcaggccaucu

SEQ ID NO: 2993949 - RNA, 19 nt, Artificial Sequence
  Description of Artificial Sequence: Synthetic oligonucleotide
gggcggcaucaggcagcug

SEQ ID NO: 2993950 - RNA, 19 nt, Artificial Sequence
  Description of Artificial Sequence: Synthetic oligonucleotide
cccgguggcugcgcaggua

SEQ ID NO: 2993951 - RNA, 19 nt, Artificial Sequence
  Description of Artificial Sequence: Synthetic oligonucleotide
cccgcgacagccgcagcuu

SEQ ID NO: 2993952 - RNA, 19 nt, Artificial Sequence
  Description of Artificial Sequence: Synthetic oligonucleotide
cgggcugcacccgcaggua

SEQ ID NO: 2993953 - RNA, 19 nt, Artificial Sequence
  Description of Artificial Sequence: Synthetic oligonucleotide
cgacacucguaggugccuu

SEQ ID NO: 2993954 - RNA, 19 nt, Artificial Sequence
  Description of Artificial Sequence: Synthetic oligonucleotide
uauaaaauggcccaggacc

SEQ ID NO: 2993955 - RNA, 19 nt, Artificial Sequence
  Description of Artificial Sequence: Synthetic oligonucleotide
auaaguuccaaguuucucc

SEQ ID NO: 2993956 - RNA, 19 nt, Artificial Sequence
  Description of Artificial Sequence: Synthetic oligonucleotide
aagguuugcucuaaaaucc

SEQ ID NO: 2993957 - RNA, 19 nt, Artificial Sequence
  Description of Artificial Sequence: Synthetic oligonucleotide
auuuucaaaacuuucccuc

SEQ ID NO: 2993958 - RNA, 19 nt, Artificial Sequence
  Description of Artificial Sequence: Synthetic oligonucleotide
ugaauagugagcuggauca

SEQ ID NO: 2993959 - RNA, 19 nt, Artificial Sequence
  Description of Artificial Sequence: Synthetic oligonucleotide
uuugcucuaaaauccaggg

SEQ ID NO: 2993960 - RNA, 19 nt, Artificial Sequence
  Description of Artificial Sequence: Synthetic oligonucleotide
aaaucuugggucaacuacc

SEQ ID NO: 2993961 - RNA, 19 nt, Artificial Sequence
  Description of Artificial Sequence: Synthetic oligonucleotide
ugcucuaaaauccagggcu

SEQ ID NO: 2993962 - RNA, 19 nt, Artificial Sequence
  Description of Artificial Sequence: Synthetic oligonucleotide
agguggagaauccaaaagc

SEQ ID NO: 2993963 - RNA, 19 nt, Artificial Sequence
  Description of Artificial Sequence: Synthetic oligonucleotide
acaggcuugauauaaaaug

SEQ ID NO: 2993964 - RNA, 19 nt, Artificial Sequence
  Description of Artificial Sequence: Synthetic oligonucleotide
aagaaaguccagaugaagg

SEQ ID NO: 2993965 - RNA, 19 nt, Artificial Sequence
  Description of Artificial Sequence: Synthetic oligonucleotide
aauuuucaaaacuuucccu

SEQ ID NO: 2993966 - RNA, 19 nt, Artificial Sequence
  Description of Artificial Sequence: Synthetic oligonucleotide
uggagaauccaaaagccag

SEQ ID NO: 2993967 - RNA, 19 nt, Artificial Sequence
  Description of Artificial Sequence: Synthetic oligonucleotide
agagcagugguaaacaggc

SEQ ID NO: 2993968 - RNA, 19 nt, Artificial Sequence
  Description of Artificial Sequence: Synthetic oligonucleotide
guuucuacuuguaagagcc

SEQ ID NO: 2993969 - RNA, 19 nt, Artificial Sequence
  Description of Artificial Sequence: Synthetic oligonucleotide
gaagguuugcucuaaaauc

SEQ ID NO: 2993970 - RNA, 19 nt, Artificial Sequence
  Description of Artificial Sequence: Synthetic oligonucleotide
uuagcaauuuucaaaacuu

SEQ ID NO: 2993971 - RNA, 19 nt, Artificial Sequence
  Description of Artificial Sequence: Synthetic oligonucleotide
caauuuucaaaacuuuccc

SEQ ID NO: 2993972 - RNA, 19 nt, Artificial Sequence
  Description of Artificial Sequence: Synthetic oligonucleotide
caggcuugauauaaaaugg

SEQ ID NO: 2993973 - RNA, 19 nt, Artificial Sequence
  Description of Artificial Sequence: Synthetic oligonucleotide
ucaacuaccagagcagugg

SEQ ID NO: 2993974 - RNA, 19 nt, Artificial Sequence
  Description of Artificial Sequence: Synthetic oligonucleotide
ugguaaacaggcuugauau

SEQ ID NO: 2993975 - RNA, 19 nt, Artificial Sequence
  Description of Artificial Sequence: Synthetic oligonucleotide
auauaaaauggcccaggac

SEQ ID NO: 2993976 - RNA, 19 nt, Artificial Sequence
  Description of Artificial Sequence: Synthetic oligonucleotide
auaaagggguugcaguagc

SEQ ID NO: 2993977 - RNA, 19 nt, Artificial Sequence
  Description of Artificial Sequence: Synthetic oligonucleotide
cagguucucaucauaaagg

SEQ ID NO: 2993978 - RNA, 19 nt, Artificial Sequence
  Description of Artificial Sequence: Synthetic oligonucleotide
agguucucaucauaaaggg

SEQ ID NO: 2993979 - RNA, 19 nt, Artificial Sequence
  Description of Artificial Sequence: Synthetic oligonucleotide
uuuucaaaacuuucccucc

SEQ ID NO: 2993980 - RNA, 19 nt, Artificial Sequence
  Description of Artificial Sequence: Synthetic oligonucleotide
ugggucaacuaccagagca

SEQ ID NO: 2993981 - RNA, 19 nt, Artificial Sequence
  Description of Artificial Sequence: Synthetic oligonucleotide
gauguuucuacuuguaaga

SEQ ID NO: 2993982 - RNA, 19 nt, Artificial Sequence
  Description of Artificial Sequence: Synthetic oligonucleotide
aaagccaggccucacucag

SEQ ID NO: 2993983 - RNA, 19 nt, Artificial Sequence
  Description of Artificial Sequence: Synthetic oligonucleotide
aaagaaaguccagaugaag

SEQ ID NO: 2993984 - RNA, 19 nt, Artificial Sequence
  Description of Artificial Sequence: Synthetic oligonucleotide
aucaaaaggucucucuuag

SEQ ID NO: 2993985 - RNA, 19 nt, Artificial Sequence
  Description of Artificial Sequence: Synthetic oligonucleotide
ugaagguuugcucuaaaau

SEQ ID NO: 2993986 - RNA, 19 nt, Artificial Sequence
  Description of Artificial Sequence: Synthetic oligonucleotide
cuugauauaaaauggccca

SEQ ID NO: 2993987 - RNA, 19 nt, Artificial Sequence
  Description of Artificial Sequence: Synthetic oligonucleotide
uaauagcagguucucauca

SEQ ID NO: 2993988 - RNA, 19 nt, Artificial Sequence
  Description of Artificial Sequence: Synthetic oligonucleotide
aaaucaaaaggucucucuu

SEQ ID NO: 2993989 - RNA, 19 nt, Artificial Sequence
  Description of Artificial Sequence: Synthetic oligonucleotide
ucuugggucaacuaccaga

SEQ ID NO: 2993990 - RNA, 19 nt, Artificial Sequence
  Description of Artificial Sequence: Synthetic oligonucleotide
aaaggucucucuuaguuuu

SEQ ID NO: 2993991 - RNA, 19 nt, Artificial Sequence
  Description of Artificial Sequence: Synthetic oligonucleotide
ucuaauagcagguucucau

SEQ ID NO: 2993992 - RNA, 19 nt, Artificial Sequence
  Description of Artificial Sequence: Synthetic oligonucleotide
aggaccauaaguuccaagu

SEQ ID NO: 2993993 - RNA, 19 nt, Artificial Sequence
  Description of Artificial Sequence: Synthetic oligonucleotide
cuugggucaacuaccagag

SEQ ID NO: 2993994 - RNA, 19 nt, Artificial Sequence
  Description of Artificial Sequence: Synthetic oligonucleotide
ugauauaaaauggcccagg

SEQ ID NO: 2993995 - RNA, 19 nt, Artificial Sequence
  Description of Artificial Sequence: Synthetic oligonucleotide
agaaaguccagaugaaggu

SEQ ID NO: 2993996 - RNA, 19 nt, Artificial Sequence
  Description of Artificial Sequence: Synthetic oligonucleotide
aguuccaaguuucuccagg

SEQ ID NO: 2993997 - RNA, 19 nt, Artificial Sequence
  Description of Artificial Sequence: Synthetic oligonucleotide
caaaucuugggucaacuac

SEQ ID NO: 2993998 - RNA, 19 nt, Artificial Sequence
  Description of Artificial Sequence: Synthetic oligonucleotide
cuuuggaugggugaguggg

SEQ ID NO: 2993999 - RNA, 19 nt, Artificial Sequence
  Description of Artificial Sequence: Synthetic oligonucleotide
uguuucuacuuguaagagc

SEQ ID NO: 2994000 - RNA, 19 nt, Artificial Sequence
  Description of Artificial Sequence: Synthetic oligonucleotide
uuucaaaacuuucccuccc

SEQ ID NO: 2994001 - RNA, 19 nt, Artificial Sequence
  Description of Artificial Sequence: Synthetic oligonucleotide
agcuuagcaauuuucaaaa

SEQ ID NO: 2994002 - RNA, 19 nt, Artificial Sequence
  Description of Artificial Sequence: Synthetic oligonucleotide
uugaauagugagcuggauc

SEQ ID NO: 2994003 - RNA, 19 nt, Artificial Sequence
  Description of Artificial Sequence: Synthetic oligonucleotide
uaaguuccaaguuucucca

SEQ ID NO: 2994004 - RNA, 19 nt, Artificial Sequence
  Description of Artificial Sequence: Synthetic oligonucleotide
aucauaaagggguugcagu

SEQ ID NO: 2994005 - RNA, 19 nt, Artificial Sequence
  Description of Artificial Sequence: Synthetic oligonucleotide
uccaaguuucuccaggccu

SEQ ID NO: 2994006 - RNA, 19 nt, Artificial Sequence
  Description of Artificial Sequence: Synthetic oligonucleotide
gaauccaaaagccaggccu

SEQ ID NO: 2994007 - RNA, 19 nt, Artificial Sequence
  Description of Artificial Sequence: Synthetic oligonucleotide
aaucaaaaggucucucuua

SEQ ID NO: 2994008 - RNA, 19 nt, Artificial Sequence
  Description of Artificial Sequence: Synthetic oligonucleotide
uuguaagagccccaguaga

SEQ ID NO: 2994009 - RNA, 19 nt, Artificial Sequence
  Description of Artificial Sequence: Synthetic oligonucleotide
aauccaaaagccaggccuc

SEQ ID NO: 2994010 - RNA, 19 nt, Artificial Sequence
  Description of Artificial Sequence: Synthetic oligonucleotide
aaacaggcuugauauaaaa

SEQ ID NO: 2994011 - RNA, 19 nt, Artificial Sequence
  Description of Artificial Sequence: Synthetic oligonucleotide
agaauccaaaagccaggcc

SEQ ID NO: 2994012 - RNA, 19 nt, Artificial Sequence
  Description of Artificial Sequence: Synthetic oligonucleotide
uccucuaauagcagguucu

SEQ ID NO: 2994013 - RNA, 19 nt, Artificial Sequence
  Description of Artificial Sequence: Synthetic oligonucleotide
gauauaaaauggcccagga

SEQ ID NO: 2994014 - RNA, 19 nt, Artificial Sequence
  Description of Artificial Sequence: Synthetic oligonucleotide
agcaauuuucaaaacuuuc

SEQ ID NO: 2994015 - RNA, 19 nt, Artificial Sequence
  Description of Artificial Sequence: Synthetic oligonucleotide
gagguggagaauccaaaag

SEQ ID NO: 2994016 - RNA, 19 nt, Artificial Sequence
  Description of Artificial Sequence: Synthetic oligonucleotide
uuucccucccauugaauag

SEQ ID NO: 2994017 - RNA, 19 nt, Artificial Sequence
  Description of Artificial Sequence: Synthetic oligonucleotide
ggauguuucuacuuguaag

SEQ ID NO: 2994018 - RNA, 19 nt, Artificial Sequence
  Description of Artificial Sequence: Synthetic oligonucleotide
aaaaggucucucuuaguuu

SEQ ID NO: 2994019 - RNA, 19 nt, Artificial Sequence
  Description of Artificial Sequence: Synthetic oligonucleotide
cuuguaagagccccaguag

SEQ ID NO: 2994020 - RNA, 19 nt, Artificial Sequence
  Description of Artificial Sequence: Synthetic oligonucleotide
uagcuuagcaauuuucaaa

SEQ ID NO: 2994021 - RNA, 19 nt, Artificial Sequence
  Description of Artificial Sequence: Synthetic oligonucleotide
ucccauugaauagugagcu

SEQ ID NO: 2994022 - RNA, 19 nt, Artificial Sequence
  Description of Artificial Sequence: Synthetic oligonucleotide
accauaaguuccaaguuuc

SEQ ID NO: 2994023 - RNA, 19 nt, Artificial Sequence
  Description of Artificial Sequence: Synthetic oligonucleotide
uaagagccccaguagacca

SEQ ID NO: 2994024 - RNA, 19 nt, Artificial Sequence
  Description of Artificial Sequence: Synthetic oligonucleotide
cuuccucaaaucuuggguc

SEQ ID NO: 2994025 - RNA, 19 nt, Artificial Sequence
  Description of Artificial Sequence: Synthetic oligonucleotide
uucuacuuguaagagcccc

SEQ ID NO: 2994026 - RNA, 19 nt, Artificial Sequence
  Description of Artificial Sequence: Synthetic oligonucleotide
aggcuugauauaaaauggc

SEQ ID NO: 2994027 - RNA, 19 nt, Artificial Sequence
  Description of Artificial Sequence: Synthetic oligonucleotide
acuuguaagagccccagua

SEQ ID NO: 2994028 - RNA, 19 nt, Artificial Sequence
  Description of Artificial Sequence: Synthetic oligonucleotide
uugauauaaaauggcccag

SEQ ID NO: 2994029 - RNA, 19 nt, Artificial Sequence
  Description of Artificial Sequence: Synthetic oligonucleotide
guuugcucuaaaauccagg

SEQ ID NO: 2994030 - RNA, 19 nt, Artificial Sequence
  Description of Artificial Sequence: Synthetic oligonucleotide
ucauaaagggguugcagua

SEQ ID NO: 2994031 - RNA, 19 nt, Artificial Sequence
  Description of Artificial Sequence: Synthetic oligonucleotide
uucaaaacuuucccuccca

SEQ ID NO: 2994032 - RNA, 19 nt, Artificial Sequence
  Description of Artificial Sequence: Synthetic oligonucleotide
uugcucuaaaauccagggc

SEQ ID NO: 2994033 - RNA, 19 nt, Artificial Sequence
  Description of Artificial Sequence: Synthetic oligonucleotide
aaacuuucccucccauuga

SEQ ID NO: 2994034 - RNA, 19 nt, Artificial Sequence
  Description of Artificial Sequence: Synthetic oligonucleotide
cagagcagugguaaacagg

SEQ ID NO: 2994035 - RNA, 19 nt, Artificial Sequence
  Description of Artificial Sequence: Synthetic oligonucleotide
ucuacuuguaagagcccca

SEQ ID NO: 2994036 - RNA, 19 nt, Artificial Sequence
  Description of Artificial Sequence: Synthetic oligonucleotide
agcuggaucaauguguucu

SEQ ID NO: 2994037 - RNA, 19 nt, Artificial Sequence
  Description of Artificial Sequence: Synthetic oligonucleotide
aauagcagguucucaucau

SEQ ID NO: 2994038 - RNA, 19 nt, Artificial Sequence
  Description of Artificial Sequence: Synthetic oligonucleotide
agugagcuggaucaaugug

SEQ ID NO: 2994039 - RNA, 19 nt, Artificial Sequence
  Description of Artificial Sequence: Synthetic oligonucleotide
cucccauugaauagugagc

SEQ ID NO: 2994040 - RNA, 19 nt, Artificial Sequence
  Description of Artificial Sequence: Synthetic oligonucleotide
aguagcuuagcaauuuuca

SEQ ID NO: 2994041 - RNA, 19 nt, Artificial Sequence
  Description of Artificial Sequence: Synthetic oligonucleotide
ucuaaaauccagggcuucc

SEQ ID NO: 2994042 - RNA, 19 nt, Artificial Sequence
  Description of Artificial Sequence: Synthetic oligonucleotide
uuccucaaaucuuggguca

SEQ ID NO: 2994043 - RNA, 19 nt, Artificial Sequence
  Description of Artificial Sequence: Synthetic oligonucleotide
cucaucauaaagggguugc

SEQ ID NO: 2994044 - RNA, 19 nt, Artificial Sequence
  Description of Artificial Sequence: Synthetic oligonucleotide
gagaauccaaaagccaggc

SEQ ID NO: 2994045 - RNA, 19 nt, Artificial Sequence
  Description of Artificial Sequence: Synthetic oligonucleotide
auaaaauggcccaggacca

SEQ ID NO: 2994046 - RNA, 19 nt, Artificial Sequence
  Description of Artificial Sequence: Synthetic oligonucleotide
uaaacaggcuugauauaaa

SEQ ID NO: 2994047 - RNA, 19 nt, Artificial Sequence
  Description of Artificial Sequence: Synthetic oligonucleotide
guuccaaguuucuccaggc

SEQ ID NO: 2994048 - RNA, 19 nt, Artificial Sequence
  Description of Artificial Sequence: Synthetic oligonucleotide
guaaacaggcuugauauaa

SEQ ID NO: 2994049 - RNA, 19 nt, Artificial Sequence
  Description of Artificial Sequence: Synthetic oligonucleotide
ugagguggagaauccaaaa

SEQ ID NO: 2994050 - RNA, 19 nt, Artificial Sequence
  Description of Artificial Sequence: Synthetic oligonucleotide
cuaauagcagguucucauc

SEQ ID NO: 2994051 - RNA, 19 nt, Artificial Sequence
  Description of Artificial Sequence: Synthetic oligonucleotide
aagggguugcaguagcuua

SEQ ID NO: 2994052 - RNA, 19 nt, Artificial Sequence
  Description of Artificial Sequence: Synthetic oligonucleotide
uccagaugaagguuugcuc

SEQ ID NO: 2994053 - RNA, 19 nt, Artificial Sequence
  Description of Artificial Sequence: Synthetic oligonucleotide
auguuucuacuuguaagag

SEQ ID NO: 2994054 - RNA, 19 nt, Artificial Sequence
  Description of Artificial Sequence: Synthetic oligonucleotide
uuccaaguuucuccaggcc

SEQ ID NO: 2994055 - RNA, 19 nt, Artificial Sequence
  Description of Artificial Sequence: Synthetic oligonucleotide
gcagguucucaucauaaag

SEQ ID NO: 2994056 - RNA, 19 nt, Artificial Sequence
  Description of Artificial Sequence: Synthetic oligonucleotide
ggaucaauguguucugcag

SEQ ID NO: 2994057 - RNA, 19 nt, Artificial Sequence
  Description of Artificial Sequence: Synthetic oligonucleotide
uuucuacuuguaagagccc

SEQ ID NO: 2994058 - RNA, 19 nt, Artificial Sequence
  Description of Artificial Sequence: Synthetic oligonucleotide
uagcagguucucaucauaa

SEQ ID NO: 2994059 - RNA, 19 nt, Artificial Sequence
  Description of Artificial Sequence: Synthetic oligonucleotide
uagcaauuuucaaaacuuu

SEQ ID NO: 2994060 - RNA, 19 nt, Artificial Sequence
  Description of Artificial Sequence: Synthetic oligonucleotide
cuuagcaauuuucaaaacu

SEQ ID NO: 2994061 - RNA, 19 nt, Artificial Sequence
  Description of Artificial Sequence: Synthetic oligonucleotide
gcuugauauaaaauggccc

SEQ ID NO: 2994062 - RNA, 19 nt, Artificial Sequence
  Description of Artificial Sequence: Synthetic oligonucleotide
agcagugguaaacaggcuu

SEQ ID NO: 2994063 - RNA, 19 nt, Artificial Sequence
  Description of Artificial Sequence: Synthetic oligonucleotide
uaaaauccagggcuuccuc

SEQ ID NO: 2994064 - RNA, 19 nt, Artificial Sequence
  Description of Artificial Sequence: Synthetic oligonucleotide
agccaggccucacucaggg

SEQ ID NO: 2994065 - RNA, 19 nt, Artificial Sequence
  Description of Artificial Sequence: Synthetic oligonucleotide
aacuuucccucccauugaa

SEQ ID NO: 2994066 - RNA, 19 nt, Artificial Sequence
  Description of Artificial Sequence: Synthetic oligonucleotide
gguggagaauccaaaagcc

SEQ ID NO: 2994067 - RNA, 19 nt, Artificial Sequence
  Description of Artificial Sequence: Synthetic oligonucleotide
guugcaguagcuuagcaau

SEQ ID NO: 2994068 - RNA, 19 nt, Artificial Sequence
  Description of Artificial Sequence: Synthetic oligonucleotide
ugagcuggaucaauguguu

SEQ ID NO: 2994069 - RNA, 19 nt, Artificial Sequence
  Description of Artificial Sequence: Synthetic oligonucleotide
ucccuccuccuuuggaugg

SEQ ID NO: 2994070 - RNA, 19 nt, Artificial Sequence
  Description of Artificial Sequence: Synthetic oligonucleotide
ccauugaauagugagcugg

SEQ ID NO: 2994071 - RNA, 19 nt, Artificial Sequence
  Description of Artificial Sequence: Synthetic oligonucleotide
acuaccagagcagugguaa

SEQ ID NO: 2994072 - RNA, 19 nt, Artificial Sequence
  Description of Artificial Sequence: Synthetic oligonucleotide
uggcccaggaccauaaguu

SEQ ID NO: 2994073 - RNA, 19 nt, Artificial Sequence
  Description of Artificial Sequence: Synthetic oligonucleotide
caucauaaagggguugcag

SEQ ID NO: 2994074 - RNA, 19 nt, Artificial Sequence
  Description of Artificial Sequence: Synthetic oligonucleotide
aauagugagcuggaucaau

SEQ ID NO: 2994075 - RNA, 19 nt, Artificial Sequence
  Description of Artificial Sequence: Synthetic oligonucleotide
ucaaaacuuucccucccau

SEQ ID NO: 2994076 - RNA, 19 nt, Artificial Sequence
  Description of Artificial Sequence: Synthetic oligonucleotide
aaucuugggucaacuacca

SEQ ID NO: 2994077 - RNA, 19 nt, Artificial Sequence
  Description of Artificial Sequence: Synthetic oligonucleotide
cauaaagggguugcaguag

SEQ ID NO: 2994078 - RNA, 19 nt, Artificial Sequence
  Description of Artificial Sequence: Synthetic oligonucleotide
uagugagcuggaucaaugu

SEQ ID NO: 2994079 - RNA, 19 nt, Artificial Sequence
  Description of Artificial Sequence: Synthetic oligonucleotide
ucaaaucuugggucaacua

SEQ ID NO: 2994080 - RNA, 19 nt, Artificial Sequence
  Description of Artificial Sequence: Synthetic oligonucleotide
cacgcucuccucuaauagc

SEQ ID NO: 2994081 - RNA, 19 nt, Artificial Sequence
  Description of Artificial Sequence: Synthetic oligonucleotide
aacaggcuugauauaaaau

SEQ ID NO: 2994082 - RNA, 19 nt, Artificial Sequence
  Description of Artificial Sequence: Synthetic oligonucleotide
uccuccuuuggauggguga

SEQ ID NO: 2994083 - RNA, 19 nt, Artificial Sequence
  Description of Artificial Sequence: Synthetic oligonucleotide
uaaagggguugcaguagcu

SEQ ID NO: 2994084 - RNA, 19 nt, Artificial Sequence
  Description of Artificial Sequence: Synthetic oligonucleotide
aauggcccaggaccauaag

SEQ ID NO: 2994085 - RNA, 19 nt, Artificial Sequence
  Description of Artificial Sequence: Synthetic oligonucleotide
ccucccauugaauagugag

SEQ ID NO: 2994086 - RNA, 19 nt, Artificial Sequence
  Description of Artificial Sequence: Synthetic oligonucleotide
auagugagcuggaucaaug

SEQ ID NO: 2994087 - RNA, 19 nt, Artificial Sequence
  Description of Artificial Sequence: Synthetic oligonucleotide
ucaaaaggucucucuuagu

SEQ ID NO: 2994088 - RNA, 19 nt, Artificial Sequence
  Description of Artificial Sequence: Synthetic oligonucleotide
caguagcuuagcaauuuuc

SEQ ID NO: 2994089 - RNA, 19 nt, Artificial Sequence
  Description of Artificial Sequence: Synthetic oligonucleotide
caaaagccaggccucacuc

SEQ ID NO: 2994090 - RNA, 19 nt, Artificial Sequence
  Description of Artificial Sequence: Synthetic oligonucleotide
cuggggauguuucuacuug

SEQ ID NO: 2994091 - RNA, 19 nt, Artificial Sequence
  Description of Artificial Sequence: Synthetic oligonucleotide
augaagguuugcucuaaaa

SEQ ID NO: 2994092 - RNA, 19 nt, Artificial Sequence
  Description of Artificial Sequence: Synthetic oligonucleotide
uuuggaugggugagugggu

SEQ ID NO: 2994093 - RNA, 19 nt, Artificial Sequence
  Description of Artificial Sequence: Synthetic oligonucleotide
cauaaguuccaaguuucuc

SEQ ID NO: 2994094 - RNA, 19 nt, Artificial Sequence
  Description of Artificial Sequence: Synthetic oligonucleotide
uggggauguuucuacuugu

SEQ ID NO: 2994095 - RNA, 19 nt, Artificial Sequence
  Description of Artificial Sequence: Synthetic oligonucleotide
guagcuuagcaauuuucaa

SEQ ID NO: 2994096 - RNA, 19 nt, Artificial Sequence
  Description of Artificial Sequence: Synthetic oligonucleotide
ggcuugauauaaaauggcc

SEQ ID NO: 2994097 - RNA, 19 nt, Artificial Sequence
  Description of Artificial Sequence: Synthetic oligonucleotide
uccuuuggaugggugagug

SEQ ID NO: 2994098 - RNA, 19 nt, Artificial Sequence
  Description of Artificial Sequence: Synthetic oligonucleotide
guaagagccccaguagacc

SEQ ID NO: 2994099 - RNA, 19 nt, Artificial Sequence
  Description of Artificial Sequence: Synthetic oligonucleotide
ucucaucauaaagggguug

SEQ ID NO: 2994100 - RNA, 19 nt, Artificial Sequence
  Description of Artificial Sequence: Synthetic oligonucleotide
auggcccaggaccauaagu

SEQ ID NO: 2994101 - RNA, 19 nt, Artificial Sequence
  Description of Artificial Sequence: Synthetic oligonucleotide
ggagaauccaaaagccagg

SEQ ID NO: 2994102 - RNA, 19 nt, Artificial Sequence
  Description of Artificial Sequence: Synthetic oligonucleotide
uucccuccuccuuuggaug

SEQ ID NO: 2994103 - RNA, 19 nt, Artificial Sequence
  Description of Artificial Sequence: Synthetic oligonucleotide
guuucuccaggccugggga

SEQ ID NO: 2994104 - RNA, 19 nt, Artificial Sequence
  Description of Artificial Sequence: Synthetic oligonucleotide
uucucaucauaaagggguu

SEQ ID NO: 2994105 - RNA, 19 nt, Artificial Sequence
  Description of Artificial Sequence: Synthetic oligonucleotide
aguccagaugaagguuugc

SEQ ID NO: 2994106 - RNA, 19 nt, Artificial Sequence
  Description of Artificial Sequence: Synthetic oligonucleotide
cuacuuguaagagccccag

SEQ ID NO: 2994107 - RNA, 19 nt, Artificial Sequence
  Description of Artificial Sequence: Synthetic oligonucleotide
aguagaccacgcucuccuc

SEQ ID NO: 2994108 - RNA, 19 nt, Artificial Sequence
  Description of Artificial Sequence: Synthetic oligonucleotide
agggcuuccucaaaucuug

SEQ ID NO: 2994109 - RNA, 19 nt, Artificial Sequence
  Description of Artificial Sequence: Synthetic oligonucleotide
cuuucccucccauugaaua

SEQ ID NO: 2994110 - RNA, 19 nt, Artificial Sequence
  Description of Artificial Sequence: Synthetic oligonucleotide
uaccagagcagugguaaac

SEQ ID NO: 2994111 - RNA, 19 nt, Artificial Sequence
  Description of Artificial Sequence: Synthetic oligonucleotide
cauugaauagugagcugga

SEQ ID NO: 2994112 - RNA, 19 nt, Artificial Sequence
  Description of Artificial Sequence: Synthetic oligonucleotide
gguucucaucauaaagggg

SEQ ID NO: 2994113 - RNA, 19 nt, Artificial Sequence
  Description of Artificial Sequence: Synthetic oligonucleotide
aaguccagaugaagguuug

SEQ ID NO: 2994114 - RNA, 19 nt, Artificial Sequence
  Description of Artificial Sequence: Synthetic oligonucleotide
aagagccccaguagaccac

SEQ ID NO: 2994115 - RNA, 19 nt, Artificial Sequence
  Description of Artificial Sequence: Synthetic oligonucleotide
auagcagguucucaucaua

SEQ ID NO: 2994116 - RNA, 19 nt, Artificial Sequence
  Description of Artificial Sequence: Synthetic oligonucleotide
ucccucccauugaauagug

SEQ ID NO: 2994117 - RNA, 19 nt, Artificial Sequence
  Description of Artificial Sequence: Synthetic oligonucleotide
aaagggguugcaguagcuu

SEQ ID NO: 2994118 - RNA, 19 nt, Artificial Sequence
  Description of Artificial Sequence: Synthetic oligonucleotide
cuccucuaauagcagguuc

SEQ ID NO: 2994119 - RNA, 19 nt, Artificial Sequence
  Description of Artificial Sequence: Synthetic oligonucleotide
gcucuccucuaauagcagg

SEQ ID NO: 2994120 - RNA, 19 nt, Artificial Sequence
  Description of Artificial Sequence: Synthetic oligonucleotide
gugguaaacaggcuugaua

SEQ ID NO: 2994121 - RNA, 19 nt, Artificial Sequence
  Description of Artificial Sequence: Synthetic oligonucleotide
caggccucacucagggagg

SEQ ID NO: 2994122 - RNA, 19 nt, Artificial Sequence
  Description of Artificial Sequence: Synthetic oligonucleotide
aauguguucugcagcuaaa

SEQ ID NO: 2994123 - RNA, 19 nt, Artificial Sequence
  Description of Artificial Sequence: Synthetic oligonucleotide
uucccucccauugaauagu

SEQ ID NO: 2994124 - RNA, 19 nt, Artificial Sequence
  Description of Artificial Sequence: Synthetic oligonucleotide
uacuuguaagagccccagu

SEQ ID NO: 2994125 - RNA, 19 nt, Artificial Sequence
  Description of Artificial Sequence: Synthetic oligonucleotide
accagagcagugguaaaca

SEQ ID NO: 2994126 - RNA, 19 nt, Artificial Sequence
  Description of Artificial Sequence: Synthetic oligonucleotide
gaccauaaguuccaaguuu

SEQ ID NO: 2994127 - RNA, 19 nt, Artificial Sequence
  Description of Artificial Sequence: Synthetic oligonucleotide
aucuugggucaacuaccag

SEQ ID NO: 2994128 - RNA, 19 nt, Artificial Sequence
  Description of Artificial Sequence: Synthetic oligonucleotide
ugcaguagcuuagcaauuu

SEQ ID NO: 2994129 - RNA, 19 nt, Artificial Sequence
  Description of Artificial Sequence: Synthetic oligonucleotide
agagccccaguagaccacg

SEQ ID NO: 2994130 - RNA, 19 nt, Artificial Sequence
  Description of Artificial Sequence: Synthetic oligonucleotide
ccaggccucacucagggag

SEQ ID NO: 2994131 - RNA, 19 nt, Artificial Sequence
  Description of Artificial Sequence: Synthetic oligonucleotide
caggaccauaaguuccaag

SEQ ID NO: 2994132 - RNA, 19 nt, Artificial Sequence
  Description of Artificial Sequence: Synthetic oligonucleotide
aaaauggcccaggaccaua

SEQ ID NO: 2994133 - RNA, 19 nt, Artificial Sequence
  Description of Artificial Sequence: Synthetic oligonucleotide
uugggucaacuaccagagc

SEQ ID NO: 2994134 - RNA, 19 nt, Artificial Sequence
  Description of Artificial Sequence: Synthetic oligonucleotide
caauguguucugcagcuaa

SEQ ID NO: 2994135 - RNA, 19 nt, Artificial Sequence
  Description of Artificial Sequence: Synthetic oligonucleotide
ggcuuccucaaaucuuggg

SEQ ID NO: 2994136 - RNA, 19 nt, Artificial Sequence
  Description of Artificial Sequence: Synthetic oligonucleotide
uccagggcuuccucaaauc

SEQ ID NO: 2994137 - RNA, 19 nt, Artificial Sequence
  Description of Artificial Sequence: Synthetic oligonucleotide
caaaaggucucucuuaguu

SEQ ID NO: 2994138 - RNA, 19 nt, Artificial Sequence
  Description of Artificial Sequence: Synthetic oligonucleotide
aaauggcccaggaccauaa

SEQ ID NO: 2994139 - RNA, 19 nt, Artificial Sequence
  Description of Artificial Sequence: Synthetic oligonucleotide
acgcucuccucuaauagca

SEQ ID NO: 2994140 - RNA, 19 nt, Artificial Sequence
  Description of Artificial Sequence: Synthetic oligonucleotide
agcagguucucaucauaaa

SEQ ID NO: 2994141 - RNA, 19 nt, Artificial Sequence
  Description of Artificial Sequence: Synthetic oligonucleotide
caaguuucuccaggccugg

SEQ ID NO: 2994142 - RNA, 19 nt, Artificial Sequence
  Description of Artificial Sequence: Synthetic oligonucleotide
guggagaauccaaaagcca

SEQ ID NO: 2994143 - RNA, 19 nt, Artificial Sequence
  Description of Artificial Sequence: Synthetic oligonucleotide
gaugaagguuugcucuaaa

SEQ ID NO: 2994144 - RNA, 19 nt, Artificial Sequence
  Description of Artificial Sequence: Synthetic oligonucleotide
uugcaguagcuuagcaauu

SEQ ID NO: 2994145 - RNA, 19 nt, Artificial Sequence
  Description of Artificial Sequence: Synthetic oligonucleotide
agggguugcaguagcuuag

SEQ ID NO: 2994146 - RNA, 19 nt, Artificial Sequence
  Description of Artificial Sequence: Synthetic oligonucleotide
gguugcaguagcuuagcaa

SEQ ID NO: 2994147 - RNA, 19 nt, Artificial Sequence
  Description of Artificial Sequence: Synthetic oligonucleotide
cuggaucaauguguucugc

SEQ ID NO: 2994148 - RNA, 19 nt, Artificial Sequence
  Description of Artificial Sequence: Synthetic oligonucleotide
ccaaguuucuccaggccug

SEQ ID NO: 2994149 - RNA, 19 nt, Artificial Sequence
  Description of Artificial Sequence: Synthetic oligonucleotide
gucaacuaccagagcagug

SEQ ID NO: 2994150 - RNA, 19 nt, Artificial Sequence
  Description of Artificial Sequence: Synthetic oligonucleotide
auugaauagugagcuggau

SEQ ID NO: 2994151 - RNA, 19 nt, Artificial Sequence
  Description of Artificial Sequence: Synthetic oligonucleotide
aggccucacucagggaggc

SEQ ID NO: 2994152 - RNA, 19 nt, Artificial Sequence
  Description of Artificial Sequence: Synthetic oligonucleotide
uucuccaggccuggggaug

SEQ ID NO: 2994153 - RNA, 19 nt, Artificial Sequence
  Description of Artificial Sequence: Synthetic oligonucleotide
uagaccacgcucuccucua

SEQ ID NO: 2994154 - RNA, 19 nt, Artificial Sequence
  Description of Artificial Sequence: Synthetic oligonucleotide
gcacacggggcugaggugg

SEQ ID NO: 2994155 - RNA, 19 nt, Artificial Sequence
  Description of Artificial Sequence: Synthetic oligonucleotide
gcagugguaaacaggcuug

SEQ ID NO: 2994156 - RNA, 19 nt, Artificial Sequence
  Description of Artificial Sequence: Synthetic oligonucleotide
gguuugcucuaaaauccag

SEQ ID NO: 2994157 - RNA, 19 nt, Artificial Sequence
  Description of Artificial Sequence: Synthetic oligonucleotide
cucuaaaauccagggcuuc

SEQ ID NO: 2994158 - RNA, 19 nt, Artificial Sequence
  Description of Artificial Sequence: Synthetic oligonucleotide
gugagcuggaucaaugugu

SEQ ID NO: 2994159 - RNA, 19 nt, Artificial Sequence
  Description of Artificial Sequence: Synthetic oligonucleotide
cugagguggagaauccaaa

SEQ ID NO: 2994160 - RNA, 19 nt, Artificial Sequence
  Description of Artificial Sequence: Synthetic oligonucleotide
agguuugcucuaaaaucca

SEQ ID NO: 2994161 - RNA, 19 nt, Artificial Sequence
  Description of Artificial Sequence: Synthetic oligonucleotide
gggucaacuaccagagcag

SEQ ID NO: 2994162 - RNA, 19 nt, Artificial Sequence
  Description of Artificial Sequence: Synthetic oligonucleotide
aagccaggccucacucagg

SEQ ID NO: 2994163 - RNA, 19 nt, Artificial Sequence
  Description of Artificial Sequence: Synthetic oligonucleotide
auguguucugcagcuaaaa

SEQ ID NO: 2994164 - RNA, 19 nt, Artificial Sequence
  Description of Artificial Sequence: Synthetic oligonucleotide
gcuggaucaauguguucug

SEQ ID NO: 2994165 - RNA, 19 nt, Artificial Sequence
  Description of Artificial Sequence: Synthetic oligonucleotide
gcuuagcaauuuucaaaac

SEQ ID NO: 2994166 - RNA, 19 nt, Artificial Sequence
  Description of Artificial Sequence: Synthetic oligonucleotide
agugccuucccuccuccuu

SEQ ID NO: 2994167 - RNA, 19 nt, Artificial Sequence
  Description of Artificial Sequence: Synthetic oligonucleotide
accacgcucuccucuaaua

SEQ ID NO: 2994168 - RNA, 19 nt, Artificial Sequence
  Description of Artificial Sequence: Synthetic oligonucleotide
ucacucagggaggccggag

SEQ ID NO: 2994169 - RNA, 19 nt, Artificial Sequence
  Description of Artificial Sequence: Synthetic oligonucleotide
ugccuucccuccuccuuug

SEQ ID NO: 2994170 - RNA, 19 nt, Artificial Sequence
  Description of Artificial Sequence: Synthetic oligonucleotide
gccucacucagggaggccg

SEQ ID NO: 2994171 - RNA, 19 nt, Artificial Sequence
  Description of Artificial Sequence: Synthetic oligonucleotide
gcuuccucaaaucuugggu

SEQ ID NO: 2994172 - RNA, 19 nt, Artificial Sequence
  Description of Artificial Sequence: Synthetic oligonucleotide
uccucaaaucuugggucaa

SEQ ID NO: 2994173 - RNA, 19 nt, Artificial Sequence
  Description of Artificial Sequence: Synthetic oligonucleotide
cucuccucuaauagcaggu

SEQ ID NO: 2994174 - RNA, 19 nt, Artificial Sequence
  Description of Artificial Sequence: Synthetic oligonucleotide
ucuccucuaauagcagguu

SEQ ID NO: 2994175 - RNA, 19 nt, Artificial Sequence
  Description of Artificial Sequence: Synthetic oligonucleotide
agaugaagguuugcucuaa

SEQ ID NO: 2994176 - RNA, 19 nt, Artificial Sequence
  Description of Artificial Sequence: Synthetic oligonucleotide
ccagagcagugguaaacag

SEQ ID NO: 2994177 - RNA, 19 nt, Artificial Sequence
  Description of Artificial Sequence: Synthetic oligonucleotide
uccaaaagccaggccucac

SEQ ID NO: 2994178 - RNA, 19 nt, Artificial Sequence
  Description of Artificial Sequence: Synthetic oligonucleotide
ccacgcucuccucuaauag

SEQ ID NO: 2994179 - RNA, 19 nt, Artificial Sequence
  Description of Artificial Sequence: Synthetic oligonucleotide
guagaccacgcucuccucu

SEQ ID NO: 2994180 - RNA, 19 nt, Artificial Sequence
  Description of Artificial Sequence: Synthetic oligonucleotide
cucagggaggccggagugc

SEQ ID NO: 2994181 - RNA, 19 nt, Artificial Sequence
  Description of Artificial Sequence: Synthetic oligonucleotide
ucaauguguucugcagcua

SEQ ID NO: 2994182 - RNA, 19 nt, Artificial Sequence
  Description of Artificial Sequence: Synthetic oligonucleotide
gaauagugagcuggaucaa

SEQ ID NO: 2994183 - RNA, 19 nt, Artificial Sequence
  Description of Artificial Sequence: Synthetic oligonucleotide
gggauguuucuacuuguaa

SEQ ID NO: 2994184 - RNA, 19 nt, Artificial Sequence
  Description of Artificial Sequence: Synthetic oligonucleotide
agccccaguagaccacgcu

SEQ ID NO: 2994185 - RNA, 19 nt, Artificial Sequence
  Description of Artificial Sequence: Synthetic oligonucleotide
acggggcugagguggagaa

SEQ ID NO: 2994186 - RNA, 19 nt, Artificial Sequence
  Description of Artificial Sequence: Synthetic oligonucleotide
ccagaugaagguuugcucu

SEQ ID NO: 2994187 - RNA, 19 nt, Artificial Sequence
  Description of Artificial Sequence: Synthetic oligonucleotide
cucuaauagcagguucuca

SEQ ID NO: 2994188 - RNA, 19 nt, Artificial Sequence
  Description of Artificial Sequence: Synthetic oligonucleotide
cagaugaagguuugcucua

SEQ ID NO: 2994189 - RNA, 19 nt, Artificial Sequence
  Description of Artificial Sequence: Synthetic oligonucleotide
uggaugggugaguggguuu

SEQ ID NO: 2994190 - RNA, 19 nt, Artificial Sequence
  Description of Artificial Sequence: Synthetic oligonucleotide
agugguaaacaggcuugau

SEQ ID NO: 2994191 - RNA, 19 nt, Artificial Sequence
  Description of Artificial Sequence: Synthetic oligonucleotide
auccaaaagccaggccuca

SEQ ID NO: 2994192 - RNA, 19 nt, Artificial Sequence
  Description of Artificial Sequence: Synthetic oligonucleotide
cuccuccuuuggaugggug

SEQ ID NO: 2994193 - RNA, 19 nt, Artificial Sequence
  Description of Artificial Sequence: Synthetic oligonucleotide
aacuaccagagcaguggua

SEQ ID NO: 2994194 - RNA, 19 nt, Artificial Sequence
  Description of Artificial Sequence: Synthetic oligonucleotide
caguagaccacgcucuccu

SEQ ID NO: 2994195 - RNA, 19 nt, Artificial Sequence
  Description of Artificial Sequence: Synthetic oligonucleotide
gaggccggagugccuuccc

SEQ ID NO: 2994196 - RNA, 19 nt, Artificial Sequence
  Description of Artificial Sequence: Synthetic oligonucleotide
gcccaggaccauaaguucc

SEQ ID NO: 2994197 - RNA, 19 nt, Artificial Sequence
  Description of Artificial Sequence: Synthetic oligonucleotide
gagcuggaucaauguguuc

SEQ ID NO: 2994198 - RNA, 19 nt, Artificial Sequence
  Description of Artificial Sequence: Synthetic oligonucleotide
ccuuuggaugggugagugg

SEQ ID NO: 2994199 - RNA, 19 nt, Artificial Sequence
  Description of Artificial Sequence: Synthetic oligonucleotide
cuaaaauccagggcuuccu

SEQ ID NO: 2994200 - RNA, 19 nt, Artificial Sequence
  Description of Artificial Sequence: Synthetic oligonucleotide
ggcccaggaccauaaguuc

SEQ ID NO: 2994201 - RNA, 19 nt, Artificial Sequence
  Description of Artificial Sequence: Synthetic oligonucleotide
ggagugccuucccuccucc

SEQ ID NO: 2994202 - RNA, 19 nt, Artificial Sequence
  Description of Artificial Sequence: Synthetic oligonucleotide
guccagaugaagguuugcu

SEQ ID NO: 2994203 - RNA, 19 nt, Artificial Sequence
  Description of Artificial Sequence: Synthetic oligonucleotide
gguaaacaggcuugauaua

SEQ ID NO: 2994204 - RNA, 19 nt, Artificial Sequence
  Description of Artificial Sequence: Synthetic oligonucleotide
ccuccuuuggaugggugag

SEQ ID NO: 2994205 - RNA, 19 nt, Artificial Sequence
  Description of Artificial Sequence: Synthetic oligonucleotide
cucaaaucuugggucaacu

SEQ ID NO: 2994206 - RNA, 19 nt, Artificial Sequence
  Description of Artificial Sequence: Synthetic oligonucleotide
gccggagugccuucccucc

SEQ ID NO: 2994207 - RNA, 19 nt, Artificial Sequence
  Description of Artificial Sequence: Synthetic oligonucleotide
gccccaguagaccacgcuc

SEQ ID NO: 2994208 - RNA, 19 nt, Artificial Sequence
  Description of Artificial Sequence: Synthetic oligonucleotide
ggccuggggauguuucuac

SEQ ID NO: 2994209 - RNA, 19 nt, Artificial Sequence
  Description of Artificial Sequence: Synthetic oligonucleotide
aggccggagugccuucccu

SEQ ID NO: 2994210 - RNA, 19 nt, Artificial Sequence
  Description of Artificial Sequence: Synthetic oligonucleotide
caaaacuuucccucccauu

SEQ ID NO: 2994211 - RNA, 19 nt, Artificial Sequence
  Description of Artificial Sequence: Synthetic oligonucleotide
ccucacucagggaggccgg

SEQ ID NO: 2994212 - RNA, 19 nt, Artificial Sequence
  Description of Artificial Sequence: Synthetic oligonucleotide
cuaccagagcagugguaaa

SEQ ID NO: 2994213 - RNA, 19 nt, Artificial Sequence
  Description of Artificial Sequence: Synthetic oligonucleotide
agaccacgcucuccucuaa

SEQ ID NO: 2994214 - RNA, 19 nt, Artificial Sequence
  Description of Artificial Sequence: Synthetic oligonucleotide
cccauugaauagugagcug

SEQ ID NO: 2994215 - RNA, 19 nt, Artificial Sequence
  Description of Artificial Sequence: Synthetic oligonucleotide
acuuucccucccauugaau

SEQ ID NO: 2994216 - RNA, 19 nt, Artificial Sequence
  Description of Artificial Sequence: Synthetic oligonucleotide
cagugguaaacaggcuuga

SEQ ID NO: 2994217 - RNA, 19 nt, Artificial Sequence
  Description of Artificial Sequence: Synthetic oligonucleotide
caacuaccagagcaguggu

SEQ ID NO: 2994218 - RNA, 19 nt, Artificial Sequence
  Description of Artificial Sequence: Synthetic oligonucleotide
ggaccauaaguuccaaguu

SEQ ID NO: 2994219 - RNA, 19 nt, Artificial Sequence
  Description of Artificial Sequence: Synthetic oligonucleotide
gggcuuccucaaaucuugg

SEQ ID NO: 2994220 - RNA, 19 nt, Artificial Sequence
  Description of Artificial Sequence: Synthetic oligonucleotide
cccaggaccauaaguucca

SEQ ID NO: 2994221 - RNA, 19 nt, Artificial Sequence
  Description of Artificial Sequence: Synthetic oligonucleotide
agggaggccggagugccuu

SEQ ID NO: 2994222 - RNA, 19 nt, Artificial Sequence
  Description of Artificial Sequence: Synthetic oligonucleotide
ccaguagaccacgcucucc

SEQ ID NO: 2994223 - RNA, 19 nt, Artificial Sequence
  Description of Artificial Sequence: Synthetic oligonucleotide
gagccccaguagaccacgc

SEQ ID NO: 2994224 - RNA, 19 nt, Artificial Sequence
  Description of Artificial Sequence: Synthetic oligonucleotide
ccucuaauagcagguucuc

SEQ ID NO: 2994225 - RNA, 19 nt, Artificial Sequence
  Description of Artificial Sequence: Synthetic oligonucleotide
ccaggccuggggauguuuc

SEQ ID NO: 2994226 - RNA, 19 nt, Artificial Sequence
  Description of Artificial Sequence: Synthetic oligonucleotide
cagggcuuccucaaaucuu

SEQ ID NO: 2994227 - RNA, 19 nt, Artificial Sequence
  Description of Artificial Sequence: Synthetic oligonucleotide
aggccuggggauguuucua

SEQ ID NO: 2994228 - RNA, 19 nt, Artificial Sequence
  Description of Artificial Sequence: Synthetic oligonucleotide
uccaggccuggggauguuu

SEQ ID NO: 2994229 - RNA, 19 nt, Artificial Sequence
  Description of Artificial Sequence: Synthetic oligonucleotide
ggccggagugccuucccuc

SEQ ID NO: 2994230 - RNA, 19 nt, Artificial Sequence
  Description of Artificial Sequence: Synthetic oligonucleotide
cacacggggcugaggugga

SEQ ID NO: 2994231 - RNA, 19 nt, Artificial Sequence
  Description of Artificial Sequence: Synthetic oligonucleotide
gccuucccuccuccuuugg

SEQ ID NO: 2994232 - RNA, 19 nt, Artificial Sequence
  Description of Artificial Sequence: Synthetic oligonucleotide
cacucagggaggccggagu

SEQ ID NO: 2994233 - RNA, 19 nt, Artificial Sequence
  Description of Artificial Sequence: Synthetic oligonucleotide
ggucaacuaccagagcagu

SEQ ID NO: 2994234 - RNA, 19 nt, Artificial Sequence
  Description of Artificial Sequence: Synthetic oligonucleotide
ccucaaaucuugggucaac

SEQ ID NO: 2994235 - RNA, 19 nt, Artificial Sequence
  Description of Artificial Sequence: Synthetic oligonucleotide
gaccacgcucuccucuaau

SEQ ID NO: 2994236 - RNA, 19 nt, Artificial Sequence
  Description of Artificial Sequence: Synthetic oligonucleotide
acacggggcugagguggag

SEQ ID NO: 2994237 - RNA, 19 nt, Artificial Sequence
  Description of Artificial Sequence: Synthetic oligonucleotide
gugccuucccuccuccuuu

SEQ ID NO: 2994238 - RNA, 19 nt, Artificial Sequence
  Description of Artificial Sequence: Synthetic oligonucleotide
cacggggcugagguggaga

SEQ ID NO: 2994239 - RNA, 19 nt, Artificial Sequence
  Description of Artificial Sequence: Synthetic oligonucleotide
ggaggccggagugccuucc

SEQ ID NO: 2994240 - RNA, 19 nt, Artificial Sequence
  Description of Artificial Sequence: Synthetic oligonucleotide
cgcucuccucuaauagcag

SEQ ID NO: 2994241 - RNA, 19 nt, Artificial Sequence
  Description of Artificial Sequence: Synthetic oligonucleotide
cccaguagaccacgcucuc

SEQ ID NO: 2994242 - RNA, 19 nt, Artificial Sequence
  Description of Artificial Sequence: Synthetic oligonucleotide
gagugccuucccuccuccu

SEQ ID NO: 2994243 - RNA, 19 nt, Artificial Sequence
  Description of Artificial Sequence: Synthetic oligonucleotide
ccauaaguuccaaguuucu

SEQ ID NO: 2994244 - RNA, 19 nt, Artificial Sequence
  Description of Artificial Sequence: Synthetic oligonucleotide
ggggauguuucuacuugua

SEQ ID NO: 2994245 - RNA, 19 nt, Artificial Sequence
  Description of Artificial Sequence: Synthetic oligonucleotide
caggccuggggauguuucu

SEQ ID NO: 2994246 - RNA, 19 nt, Artificial Sequence
  Description of Artificial Sequence: Synthetic oligonucleotide
cucacucagggaggccgga

SEQ ID NO: 2994247 - RNA, 19 nt, Artificial Sequence
  Description of Artificial Sequence: Synthetic oligonucleotide
ccuucccuccuccuuugga

SEQ ID NO: 2994248 - RNA, 19 nt, Artificial Sequence
  Description of Artificial Sequence: Synthetic oligonucleotide
gcaguagcuuagcaauuuu

SEQ ID NO: 2994249 - RNA, 19 nt, Artificial Sequence
  Description of Artificial Sequence: Synthetic oligonucleotide
ccccaguagaccacgcucu

SEQ ID NO: 2994250 - RNA, 19 nt, Artificial Sequence
  Description of Artificial Sequence: Synthetic oligonucleotide
cccuccuccuuuggauggg

SEQ ID NO: 2994251 - RNA, 19 nt, Artificial Sequence
  Description of Artificial Sequence: Synthetic oligonucleotide
ggaugggugaguggguuuu

SEQ ID NO: 2994252 - RNA, 19 nt, Artificial Sequence
  Description of Artificial Sequence: Synthetic oligonucleotide
gcucuaaaauccagggcuu

SEQ ID NO: 2994253 - RNA, 19 nt, Artificial Sequence
  Description of Artificial Sequence: Synthetic oligonucleotide
cuccuuuggaugggugagu

SEQ ID NO: 2994254 - RNA, 19 nt, Artificial Sequence
  Description of Artificial Sequence: Synthetic oligonucleotide
cccucccauugaauaguga

SEQ ID NO: 2994255 - RNA, 19 nt, Artificial Sequence
  Description of Artificial Sequence: Synthetic oligonucleotide
gccuggggauguuucuacu

SEQ ID NO: 2994256 - RNA, 19 nt, Artificial Sequence
  Description of Artificial Sequence: Synthetic oligonucleotide
ggccucacucagggaggcc

SEQ ID NO: 2994257 - RNA, 19 nt, Artificial Sequence
  Description of Artificial Sequence: Synthetic oligonucleotide
ccuggggauguuucuacuu

SEQ ID NO: 2994258 - RNA, 19 nt, Artificial Sequence
  Description of Artificial Sequence: Synthetic oligonucleotide
gccaggccucacucaggga

SEQ ID NO: 2994259 - RNA, 19 nt, Artificial Sequence
  Description of Artificial Sequence: Synthetic oligonucleotide
cggagugccuucccuccuc

SEQ ID NO: 2994260 - RNA, 19 nt, Artificial Sequence
  Description of Artificial Sequence: Synthetic oligonucleotide
cagggaggccggagugccu

SEQ ID NO: 2994261 - RNA, 19 nt, Artificial Sequence
  Description of Artificial Sequence: Synthetic oligonucleotide
ccggagugccuucccuccu

SEQ ID NO: 2994262 - RNA, 19 nt, Artificial Sequence
  Description of Artificial Sequence: Synthetic oligonucleotide
ccuccuccuuuggaugggu

SEQ ID NO: 2994263 - RNA, 19 nt, Artificial Sequence
  Description of Artificial Sequence: Synthetic oligonucleotide
cggggcugagguggagaau

SEQ ID NO: 2994264 - RNA, 19 nt, Artificial Sequence
  Description of Artificial Sequence: Synthetic oligonucleotide
acagaaaacaaacacaggc

SEQ ID NO: 2994265 - RNA, 19 nt, Artificial Sequence
  Description of Artificial Sequence: Synthetic oligonucleotide
aaaguuacugacucgcugc

SEQ ID NO: 2994266 - RNA, 19 nt, Artificial Sequence
  Description of Artificial Sequence: Synthetic oligonucleotide
gaaagcaagacacuguggg

SEQ ID NO: 2994267 - RNA, 19 nt, Artificial Sequence
  Description of Artificial Sequence: Synthetic oligonucleotide
uugacuaacgaacacagca

SEQ ID NO: 2994268 - RNA, 19 nt, Artificial Sequence
  Description of Artificial Sequence: Synthetic oligonucleotide
acacccaucauauucaaac

SEQ ID NO: 2994269 - RNA, 19 nt, Artificial Sequence
  Description of Artificial Sequence: Synthetic oligonucleotide
aaagcaagacacugugggc

SEQ ID NO: 2994270 - RNA, 19 nt, Artificial Sequence
  Description of Artificial Sequence: Synthetic oligonucleotide
ucuauagucuugacuaacg

SEQ ID NO: 2994271 - RNA, 19 nt, Artificial Sequence
  Description of Artificial Sequence: Synthetic oligonucleotide
ucuugacuaacgaacacag

SEQ ID NO: 2994272 - RNA, 19 nt, Artificial Sequence
  Description of Artificial Sequence: Synthetic oligonucleotide
acaaacacaggccagaagu

SEQ ID NO: 2994273 - RNA, 19 nt, Artificial Sequence
  Description of Artificial Sequence: Synthetic oligonucleotide
gaaguagaaagcaagacac

SEQ ID NO: 2994274 - RNA, 19 nt, Artificial Sequence
  Description of Artificial Sequence: Synthetic oligonucleotide
auagucuugacuaacgaac

SEQ ID NO: 2994275 - RNA, 19 nt, Artificial Sequence
  Description of Artificial Sequence: Synthetic oligonucleotide
uacaccaucucucuguugc

SEQ ID NO: 2994276 - RNA, 19 nt, Artificial Sequence
  Description of Artificial Sequence: Synthetic oligonucleotide
uuuagcuccacagaaaaca

SEQ ID NO: 2994277 - RNA, 19 nt, Artificial Sequence
  Description of Artificial Sequence: Synthetic oligonucleotide
cucaucauugcaaugauuc

SEQ ID NO: 2994278 - RNA, 19 nt, Artificial Sequence
  Description of Artificial Sequence: Synthetic oligonucleotide
ugacacagcauauacaccu

SEQ ID NO: 2994279 - RNA, 19 nt, Artificial Sequence
  Description of Artificial Sequence: Synthetic oligonucleotide
uauucaaacuggucuauag

SEQ ID NO: 2994280 - RNA, 19 nt, Artificial Sequence
  Description of Artificial Sequence: Synthetic oligonucleotide
agaaaacaaacacaggcca

SEQ ID NO: 2994281 - RNA, 19 nt, Artificial Sequence
  Description of Artificial Sequence: Synthetic oligonucleotide
acgaacacagcaaacacgc

SEQ ID NO: 2994282 - RNA, 19 nt, Artificial Sequence
  Description of Artificial Sequence: Synthetic oligonucleotide
ucauuuguagguaugcuuc

SEQ ID NO: 2994283 - RNA, 19 nt, Artificial Sequence
  Description of Artificial Sequence: Synthetic oligonucleotide
agaaguagaaagcaagaca

SEQ ID NO: 2994284 - RNA, 19 nt, Artificial Sequence
  Description of Artificial Sequence: Synthetic oligonucleotide
cuuaaaguuacugacucgc

SEQ ID NO: 2994285 - RNA, 19 nt, Artificial Sequence
  Description of Artificial Sequence: Synthetic oligonucleotide
uggucuauagucuugacua

SEQ ID NO: 2994286 - RNA, 19 nt, Artificial Sequence
  Description of Artificial Sequence: Synthetic oligonucleotide
aaguuacugacucgcugcc

SEQ ID NO: 2994287 - RNA, 19 nt, Artificial Sequence
  Description of Artificial Sequence: Synthetic oligonucleotide
uagaaagcaagacacugug

SEQ ID NO: 2994288 - RNA, 19 nt, Artificial Sequence
  Description of Artificial Sequence: Synthetic oligonucleotide
ucaaaggaagagcuggugc

SEQ ID NO: 2994289 - RNA, 19 nt, Artificial Sequence
  Description of Artificial Sequence: Synthetic oligonucleotide
ucuucuggacucaucauug

SEQ ID NO: 2994290 - RNA, 19 nt, Artificial Sequence
  Description of Artificial Sequence: Synthetic oligonucleotide
cagaaaacaaacacaggcc

SEQ ID NO: 2994291 - RNA, 19 nt, Artificial Sequence
  Description of Artificial Sequence: Synthetic oligonucleotide
auuuguaggccacuccucg

SEQ ID NO: 2994292 - RNA, 19 nt, Artificial Sequence
  Description of Artificial Sequence: Synthetic oligonucleotide
gaacacagcaaacacgccc

SEQ ID NO: 2994293 - RNA, 19 nt, Artificial Sequence
  Description of Artificial Sequence: Synthetic oligonucleotide
uucaaacuggucuauaguc

SEQ ID NO: 2994294 - RNA, 19 nt, Artificial Sequence
  Description of Artificial Sequence: Synthetic oligonucleotide
uaaaguuacugacucgcug

SEQ ID NO: 2994295 - RNA, 19 nt, Artificial Sequence
  Description of Artificial Sequence: Synthetic oligonucleotide
uuuauugcugugucucugg

SEQ ID NO: 2994296 - RNA, 19 nt, Artificial Sequence
  Description of Artificial Sequence: Synthetic oligonucleotide
cuagcuaggucuuuauugc

SEQ ID NO: 2994297 - RNA, 19 nt, Artificial Sequence
  Description of Artificial Sequence: Synthetic oligonucleotide
ucccgaacaauccuugggg

SEQ ID NO: 2994298 - RNA, 19 nt, Artificial Sequence
  Description of Artificial Sequence: Synthetic oligonucleotide
auauacaccuggcuuaaag

SEQ ID NO: 2994299 - RNA, 19 nt, Artificial Sequence
  Description of Artificial Sequence: Synthetic oligonucleotide
aaugauuccgucaaaggaa

SEQ ID NO: 2994300 - RNA, 19 nt, Artificial Sequence
  Description of Artificial Sequence: Synthetic oligonucleotide
ucaaacuggucuauagucu

SEQ ID NO: 2994301 - RNA, 19 nt, Artificial Sequence
  Description of Artificial Sequence: Synthetic oligonucleotide
auugcaaugauuccgucaa

SEQ ID NO: 2994302 - RNA, 19 nt, Artificial Sequence
  Description of Artificial Sequence: Synthetic oligonucleotide
cuggcuuaaaguuacugac

SEQ ID NO: 2994303 - RNA, 19 nt, Artificial Sequence
  Description of Artificial Sequence: Synthetic oligonucleotide
aacgaacacagcaaacacg

SEQ ID NO: 2994304 - RNA, 19 nt, Artificial Sequence
  Description of Artificial Sequence: Synthetic oligonucleotide
acaggccagaaguagaaag

SEQ ID NO: 2994305 - RNA, 19 nt, Artificial Sequence
  Description of Artificial Sequence: Synthetic oligonucleotide
uaugcuucgcaauugucac

SEQ ID NO: 2994306 - RNA, 19 nt, Artificial Sequence
  Description of Artificial Sequence: Synthetic oligonucleotide
aguagaaagcaagacacug

SEQ ID NO: 2994307 - RNA, 19 nt, Artificial Sequence
  Description of Artificial Sequence: Synthetic oligonucleotide
aaaacaaacacaggccaga

SEQ ID NO: 2994308 - RNA, 19 nt, Artificial Sequence
  Description of Artificial Sequence: Synthetic oligonucleotide
caucauugcaaugauuccg

SEQ ID NO: 2994309 - RNA, 19 nt, Artificial Sequence
  Description of Artificial Sequence: Synthetic oligonucleotide
ucauacaccaucucucugu

SEQ ID NO: 2994310 - RNA, 19 nt, Artificial Sequence
  Description of Artificial Sequence: Synthetic oligonucleotide
uaacgaacacagcaaacac

SEQ ID NO: 2994311 - RNA, 19 nt, Artificial Sequence
  Description of Artificial Sequence: Synthetic oligonucleotide
uauacaccuggcuuaaagu

SEQ ID NO: 2994312 - RNA, 19 nt, Artificial Sequence
  Description of Artificial Sequence: Synthetic oligonucleotide
agcuccacagaaaacaaac

SEQ ID NO: 2994313 - RNA, 19 nt, Artificial Sequence
  Description of Artificial Sequence: Synthetic oligonucleotide
ucuguugcccuucauuugu

SEQ ID NO: 2994314 - RNA, 19 nt, Artificial Sequence
  Description of Artificial Sequence: Synthetic oligonucleotide
uccucgacuuuucagcucc

SEQ ID NO: 2994315 - RNA, 19 nt, Artificial Sequence
  Description of Artificial Sequence: Synthetic oligonucleotide
ugacugacacagcauauac

SEQ ID NO: 2994316 - RNA, 19 nt, Artificial Sequence
  Description of Artificial Sequence: Synthetic oligonucleotide
auuccgucaaaggaagagc

SEQ ID NO: 2994317 - RNA, 19 nt, Artificial Sequence
  Description of Artificial Sequence: Synthetic oligonucleotide
uauagucuugacuaacgaa

SEQ ID NO: 2994318 - RNA, 19 nt, Artificial Sequence
  Description of Artificial Sequence: Synthetic oligonucleotide
ugucucuggauuuguaggc

SEQ ID NO: 2994319 - RNA, 19 nt, Artificial Sequence
  Description of Artificial Sequence: Synthetic oligonucleotide
uuuguagguaugcuucgca

SEQ ID NO: 2994320 - RNA, 19 nt, Artificial Sequence
  Description of Artificial Sequence: Synthetic oligonucleotide
gauuccgucaaaggaagag

SEQ ID NO: 2994321 - RNA, 19 nt, Artificial Sequence
  Description of Artificial Sequence: Synthetic oligonucleotide
aacaaacacaggccagaag

SEQ ID NO: 2994322 - RNA, 19 nt, Artificial Sequence
  Description of Artificial Sequence: Synthetic oligonucleotide
uagucuugacuaacgaaca

SEQ ID NO: 2994323 - RNA, 19 nt, Artificial Sequence
  Description of Artificial Sequence: Synthetic oligonucleotide
uuccgucaaaggaagagcu

SEQ ID NO: 2994324 - RNA, 19 nt, Artificial Sequence
  Description of Artificial Sequence: Synthetic oligonucleotide
ugcaaugauuccgucaaag

SEQ ID NO: 2994325 - RNA, 19 nt, Artificial Sequence
  Description of Artificial Sequence: Synthetic oligonucleotide
aagcaagacacugugggcu

SEQ ID NO: 2994326 - RNA, 19 nt, Artificial Sequence
  Description of Artificial Sequence: Synthetic oligonucleotide
cucgcugccacuuggagac

SEQ ID NO: 2994327 - RNA, 19 nt, Artificial Sequence
  Description of Artificial Sequence: Synthetic oligonucleotide
aggucuuuauugcuguguc

SEQ ID NO: 2994328 - RNA, 19 nt, Artificial Sequence
  Description of Artificial Sequence: Synthetic oligonucleotide
ucaucauugcaaugauucc

SEQ ID NO: 2994329 - RNA, 19 nt, Artificial Sequence
  Description of Artificial Sequence: Synthetic oligonucleotide
agucuugacuaacgaacac

SEQ ID NO: 2994330 - RNA, 19 nt, Artificial Sequence
  Description of Artificial Sequence: Synthetic oligonucleotide
cuucgcaauugucacaccc

SEQ ID NO: 2994331 - RNA, 19 nt, Artificial Sequence
  Description of Artificial Sequence: Synthetic oligonucleotide
ccacagaaaacaaacacag

SEQ ID NO: 2994332 - RNA, 19 nt, Artificial Sequence
  Description of Artificial Sequence: Synthetic oligonucleotide
gugggcugcaccuagcuag

SEQ ID NO: 2994333 - RNA, 19 nt, Artificial Sequence
  Description of Artificial Sequence: Synthetic oligonucleotide
agagcuggugcagucauac

SEQ ID NO: 2994334 - RNA, 19 nt, Artificial Sequence
  Description of Artificial Sequence: Synthetic oligonucleotide
cauuuguagguaugcuucg

SEQ ID NO: 2994335 - RNA, 19 nt, Artificial Sequence
  Description of Artificial Sequence: Synthetic oligonucleotide
ucuggacucaucauugcaa

SEQ ID NO: 2994336 - RNA, 19 nt, Artificial Sequence
  Description of Artificial Sequence: Synthetic oligonucleotide
uucagcucccgaacaaucc

SEQ ID NO: 2994337 - RNA, 19 nt, Artificial Sequence
  Description of Artificial Sequence: Synthetic oligonucleotide
auucaaacuggucuauagu

SEQ ID NO: 2994338 - RNA, 19 nt, Artificial Sequence
  Description of Artificial Sequence: Synthetic oligonucleotide
ugacuaacgaacacagcaa

SEQ ID NO: 2994339 - RNA, 19 nt, Artificial Sequence
  Description of Artificial Sequence: Synthetic oligonucleotide
acagcaaacacgcccgcag

SEQ ID NO: 2994340 - RNA, 19 nt, Artificial Sequence
  Description of Artificial Sequence: Synthetic oligonucleotide
cacuccucgacuuuucagc

SEQ ID NO: 2994341 - RNA, 19 nt, Artificial Sequence
  Description of Artificial Sequence: Synthetic oligonucleotide
auugcugugucucuggauu

SEQ ID NO: 2994342 - RNA, 19 nt, Artificial Sequence
  Description of Artificial Sequence: Synthetic oligonucleotide
uuaaaguuacugacucgcu

SEQ ID NO: 2994343 - RNA, 19 nt, Artificial Sequence
  Description of Artificial Sequence: Synthetic oligonucleotide
caaacacgcccgcagaugc

SEQ ID NO: 2994344 - RNA, 19 nt, Artificial Sequence
  Description of Artificial Sequence: Synthetic oligonucleotide
acccaucauauucaaacug

SEQ ID NO: 2994345 - RNA, 19 nt, Artificial Sequence
  Description of Artificial Sequence: Synthetic oligonucleotide
uugcccuucauuuguaggu

SEQ ID NO: 2994346 - RNA, 19 nt, Artificial Sequence
  Description of Artificial Sequence: Synthetic oligonucleotide
uucgcaauugucacaccca

SEQ ID NO: 2994347 - RNA, 19 nt, Artificial Sequence
  Description of Artificial Sequence: Synthetic oligonucleotide
uucauuuguagguaugcuu

SEQ ID NO: 2994348 - RNA, 19 nt, Artificial Sequence
  Description of Artificial Sequence: Synthetic oligonucleotide
aaaggaagagcuggugcag

SEQ ID NO: 2994349 - RNA, 19 nt, Artificial Sequence
  Description of Artificial Sequence: Synthetic oligonucleotide
caaugauuccgucaaagga

SEQ ID NO: 2994350 - RNA, 19 nt, Artificial Sequence
  Description of Artificial Sequence: Synthetic oligonucleotide
auuuguagguaugcuucgc

SEQ ID NO: 2994351 - RNA, 19 nt, Artificial Sequence
  Description of Artificial Sequence: Synthetic oligonucleotide
accagugacugacacagca

SEQ ID NO: 2994352 - RNA, 19 nt, Artificial Sequence
  Description of Artificial Sequence: Synthetic oligonucleotide
acacagcauauacaccugg

SEQ ID NO: 2994353 - RNA, 19 nt, Artificial Sequence
  Description of Artificial Sequence: Synthetic oligonucleotide
uuagcuccacagaaaacaa

SEQ ID NO: 2994354 - RNA, 19 nt, Artificial Sequence
  Description of Artificial Sequence: Synthetic oligonucleotide
cacagaaaacaaacacagg

SEQ ID NO: 2994355 - RNA, 19 nt, Artificial Sequence
  Description of Artificial Sequence: Synthetic oligonucleotide
uucuggacucaucauugca

SEQ ID NO: 2994356 - RNA, 19 nt, Artificial Sequence
  Description of Artificial Sequence: Synthetic oligonucleotide
ucucuguugcccuucauuu

SEQ ID NO: 2994357 - RNA, 19 nt, Artificial Sequence
  Description of Artificial Sequence: Synthetic oligonucleotide
caggccagaaguagaaagc

SEQ ID NO: 2994358 - RNA, 19 nt, Artificial Sequence
  Description of Artificial Sequence: Synthetic oligonucleotide
gcaauugucacacccauca

SEQ ID NO: 2994359 - RNA, 19 nt, Artificial Sequence
  Description of Artificial Sequence: Synthetic oligonucleotide
aauccuuggggcaggcgac

SEQ ID NO: 2994360 - RNA, 19 nt, Artificial Sequence
  Description of Artificial Sequence: Synthetic oligonucleotide
agucauacaccaucucucu

SEQ ID NO: 2994361 - RNA, 19 nt, Artificial Sequence
  Description of Artificial Sequence: Synthetic oligonucleotide
auacaccuggcuuaaaguu

SEQ ID NO: 2994362 - RNA, 19 nt, Artificial Sequence
  Description of Artificial Sequence: Synthetic oligonucleotide
cagucauacaccaucucuc

SEQ ID NO: 2994363 - RNA, 19 nt, Artificial Sequence
  Description of Artificial Sequence: Synthetic oligonucleotide
acuaacgaacacagcaaac

SEQ ID NO: 2994364 - RNA, 19 nt, Artificial Sequence
  Description of Artificial Sequence: Synthetic oligonucleotide
uggauuuguaggccacucc

SEQ ID NO: 2994365 - RNA, 19 nt, Artificial Sequence
  Description of Artificial Sequence: Synthetic oligonucleotide
agacccagcugucuucugg

SEQ ID NO: 2994366 - RNA, 19 nt, Artificial Sequence
  Description of Artificial Sequence: Synthetic oligonucleotide
aacacgcccgcagaugccg

SEQ ID NO: 2994367 - RNA, 19 nt, Artificial Sequence
  Description of Artificial Sequence: Synthetic oligonucleotide
cccaucauauucaaacugg

SEQ ID NO: 2994368 - RNA, 19 nt, Artificial Sequence
  Description of Artificial Sequence: Synthetic oligonucleotide
auugucacacccaucauau

SEQ ID NO: 2994369 - RNA, 19 nt, Artificial Sequence
  Description of Artificial Sequence: Synthetic oligonucleotide
cuaacgaacacagcaaaca

SEQ ID NO: 2994370 - RNA, 19 nt, Artificial Sequence
  Description of Artificial Sequence: Synthetic oligonucleotide
acaccuggcuuaaaguuac

SEQ ID NO: 2994371 - RNA, 19 nt, Artificial Sequence
  Description of Artificial Sequence: Synthetic oligonucleotide
gcaaugauuccgucaaagg

SEQ ID NO: 2994372 - RNA, 19 nt, Artificial Sequence
  Description of Artificial Sequence: Synthetic oligonucleotide
gacuuuucagcucccgaac

SEQ ID NO: 2994373 - RNA, 19 nt, Artificial Sequence
  Description of Artificial Sequence: Synthetic oligonucleotide
uacaccuggcuuaaaguua

SEQ ID NO: 2994374 - RNA, 19 nt, Artificial Sequence
  Description of Artificial Sequence: Synthetic oligonucleotide
uuucagcucccgaacaauc

SEQ ID NO: 2994375 - RNA, 19 nt, Artificial Sequence
  Description of Artificial Sequence: Synthetic oligonucleotide
ucagcucccgaacaauccu

SEQ ID NO: 2994376 - RNA, 19 nt, Artificial Sequence
  Description of Artificial Sequence: Synthetic oligonucleotide
uguagguaugcuucgcaau

SEQ ID NO: 2994377 - RNA, 19 nt, Artificial Sequence
  Description of Artificial Sequence: Synthetic oligonucleotide
ccuagcuaggucuuuauug

SEQ ID NO: 2994378 - RNA, 19 nt, Artificial Sequence
  Description of Artificial Sequence: Synthetic oligonucleotide
ugcuucgcaauugucacac

SEQ ID NO: 2994379 - RNA, 19 nt, Artificial Sequence
  Description of Artificial Sequence: Synthetic oligonucleotide
caucauauucaaacugguc

SEQ ID NO: 2994380 - RNA, 19 nt, Artificial Sequence
  Description of Artificial Sequence: Synthetic oligonucleotide
caaaggaagagcuggugca

SEQ ID NO: 2994381 - RNA, 19 nt, Artificial Sequence
  Description of Artificial Sequence: Synthetic oligonucleotide
uuauugcugugucucugga

SEQ ID NO: 2994382 - RNA, 19 nt, Artificial Sequence
  Description of Artificial Sequence: Synthetic oligonucleotide
ucuuuauugcugugucucu

SEQ ID NO: 2994383 - RNA, 19 nt, Artificial Sequence
  Description of Artificial Sequence: Synthetic oligonucleotide
gaugccgcagguccuucgg

SEQ ID NO: 2994384 - RNA, 19 nt, Artificial Sequence
  Description of Artificial Sequence: Synthetic oligonucleotide
acaccaucucucuguugcc

SEQ ID NO: 2994385 - RNA, 19 nt, Artificial Sequence
  Description of Artificial Sequence: Synthetic oligonucleotide
uguugcccuucauuuguag

SEQ ID NO: 2994386 - RNA, 19 nt, Artificial Sequence
  Description of Artificial Sequence: Synthetic oligonucleotide
cacagcauauacaccuggc

SEQ ID NO: 2994387 - RNA, 19 nt, Artificial Sequence
  Description of Artificial Sequence: Synthetic oligonucleotide
ucucuggauuuguaggcca

SEQ ID NO: 2994388 - RNA, 19 nt, Artificial Sequence
  Description of Artificial Sequence: Synthetic oligonucleotide
augauuccgucaaaggaag

SEQ ID NO: 2994389 - RNA, 19 nt, Artificial Sequence
  Description of Artificial Sequence: Synthetic oligonucleotide
cuugacuaacgaacacagc

SEQ ID NO: 2994390 - RNA, 19 nt, Artificial Sequence
  Description of Artificial Sequence: Synthetic oligonucleotide
aacaauccuuggggcaggc

SEQ ID NO: 2994391 - RNA, 19 nt, Artificial Sequence
  Description of Artificial Sequence: Synthetic oligonucleotide
uuguaggccacuccucgac

SEQ ID NO: 2994392 - RNA, 19 nt, Artificial Sequence
  Description of Artificial Sequence: Synthetic oligonucleotide
aacuggucuauagucuuga

SEQ ID NO: 2994393 - RNA, 19 nt, Artificial Sequence
  Description of Artificial Sequence: Synthetic oligonucleotide
cagaaguagaaagcaagac

SEQ ID NO: 2994394 - RNA, 19 nt, Artificial Sequence
  Description of Artificial Sequence: Synthetic oligonucleotide
gucuuuauugcugugucuc

SEQ ID NO: 2994395 - RNA, 19 nt, Artificial Sequence
  Description of Artificial Sequence: Synthetic oligonucleotide
guaugcuucgcaauuguca

SEQ ID NO: 2994396 - RNA, 19 nt, Artificial Sequence
  Description of Artificial Sequence: Synthetic oligonucleotide
cucccgaacaauccuuggg

SEQ ID NO: 2994397 - RNA, 19 nt, Artificial Sequence
  Description of Artificial Sequence: Synthetic oligonucleotide
uuguagguaugcuucgcaa

SEQ ID NO: 2994398 - RNA, 19 nt, Artificial Sequence
  Description of Artificial Sequence: Synthetic oligonucleotide
gacuaacgaacacagcaaa

SEQ ID NO: 2994399 - RNA, 19 nt, Artificial Sequence
  Description of Artificial Sequence: Synthetic oligonucleotide
ggugcagucauacaccauc

SEQ ID NO: 2994400 - RNA, 19 nt, Artificial Sequence
  Description of Artificial Sequence: Synthetic oligonucleotide
acuggucuauagucuugac

SEQ ID NO: 2994401 - RNA, 19 nt, Artificial Sequence
  Description of Artificial Sequence: Synthetic oligonucleotide
cugacacagcauauacacc

SEQ ID NO: 2994402 - RNA, 19 nt, Artificial Sequence
  Description of Artificial Sequence: Synthetic oligonucleotide
agaaagcaagacacugugg

SEQ ID NO: 2994403 - RNA, 19 nt, Artificial Sequence
  Description of Artificial Sequence: Synthetic oligonucleotide
uccgucaaaggaagagcug

SEQ ID NO: 2994404 - RNA, 19 nt, Artificial Sequence
  Description of Artificial Sequence: Synthetic oligonucleotide
cugucuucuggacucauca

SEQ ID NO: 2994405 - RNA, 19 nt, Artificial Sequence
  Description of Artificial Sequence: Synthetic oligonucleotide
ugggcugcaccuagcuagg

SEQ ID NO: 2994406 - RNA, 19 nt, Artificial Sequence
  Description of Artificial Sequence: Synthetic oligonucleotide
uuuguaggccacuccucga

SEQ ID NO: 2994407 - RNA, 19 nt, Artificial Sequence
  Description of Artificial Sequence: Synthetic oligonucleotide
aaguagaaagcaagacacu

SEQ ID NO: 2994408 - RNA, 19 nt, Artificial Sequence
  Description of Artificial Sequence: Synthetic oligonucleotide
gcuuaaaguuacugacucg

SEQ ID NO: 2994409 - RNA, 19 nt, Artificial Sequence
  Description of Artificial Sequence: Synthetic oligonucleotide
cauugcaaugauuccguca

SEQ ID NO: 2994410 - RNA, 19 nt, Artificial Sequence
  Description of Artificial Sequence: Synthetic oligonucleotide
acuccucgacuuuucagcu

SEQ ID NO: 2994411 - RNA, 19 nt, Artificial Sequence
  Description of Artificial Sequence: Synthetic oligonucleotide
aaacacgcccgcagaugcc

SEQ ID NO: 2994412 - RNA, 19 nt, Artificial Sequence
  Description of Artificial Sequence: Synthetic oligonucleotide
aucauugcaaugauuccgu

SEQ ID NO: 2994413 - RNA, 19 nt, Artificial Sequence
  Description of Artificial Sequence: Synthetic oligonucleotide
aaacaaacacaggccagaa

SEQ ID NO: 2994414 - RNA, 19 nt, Artificial Sequence
  Description of Artificial Sequence: Synthetic oligonucleotide
cuucuggacucaucauugc

SEQ ID NO: 2994415 - RNA, 19 nt, Artificial Sequence
  Description of Artificial Sequence: Synthetic oligonucleotide
cuuuauugcugugucucug

SEQ ID NO: 2994416 - RNA, 19 nt, Artificial Sequence
  Description of Artificial Sequence: Synthetic oligonucleotide
acacagcaaacacgcccgc

SEQ ID NO: 2994417 - RNA, 19 nt, Artificial Sequence
  Description of Artificial Sequence: Synthetic oligonucleotide
uaggucuuuauugcugugu

SEQ ID NO: 2994418 - RNA, 19 nt, Artificial Sequence
  Description of Artificial Sequence: Synthetic oligonucleotide
agcaagacacugugggcug

SEQ ID NO: 2994419 - RNA, 19 nt, Artificial Sequence
  Description of Artificial Sequence: Synthetic oligonucleotide
cuauagucuugacuaacga

SEQ ID NO: 2994420 - RNA, 19 nt, Artificial Sequence
  Description of Artificial Sequence: Synthetic oligonucleotide
ucgcaauugucacacccau

SEQ ID NO: 2994421 - RNA, 19 nt, Artificial Sequence
  Description of Artificial Sequence: Synthetic oligonucleotide
uggacucaucauugcaaug

SEQ ID NO: 2994422 - RNA, 19 nt, Artificial Sequence
  Description of Artificial Sequence: Synthetic oligonucleotide
uagguaugcuucgcaauug

SEQ ID NO: 2994423 - RNA, 19 nt, Artificial Sequence
  Description of Artificial Sequence: Synthetic oligonucleotide
cugacucgcugccacuugg

SEQ ID NO: 2994424 - RNA, 19 nt, Artificial Sequence
  Description of Artificial Sequence: Synthetic oligonucleotide
aaacuggucuauagucuug

SEQ ID NO: 2994425 - RNA, 19 nt, Artificial Sequence
  Description of Artificial Sequence: Synthetic oligonucleotide
gccagaaguagaaagcaag

SEQ ID NO: 2994426 - RNA, 19 nt, Artificial Sequence
  Description of Artificial Sequence: Synthetic oligonucleotide
agguaugcuucgcaauugu

SEQ ID NO: 2994427 - RNA, 19 nt, Artificial Sequence
  Description of Artificial Sequence: Synthetic oligonucleotide
uguaggccacuccucgacu

SEQ ID NO: 2994428 - RNA, 19 nt, Artificial Sequence
  Description of Artificial Sequence: Synthetic oligonucleotide
caauccuuggggcaggcga

SEQ ID NO: 2994429 - RNA, 19 nt, Artificial Sequence
  Description of Artificial Sequence: Synthetic oligonucleotide
gacacugugggcugcaccu

SEQ ID NO: 2994430 - RNA, 19 nt, Artificial Sequence
  Description of Artificial Sequence: Synthetic oligonucleotide
gacucgcugccacuuggag

SEQ ID NO: 2994431 - RNA, 19 nt, Artificial Sequence
  Description of Artificial Sequence: Synthetic oligonucleotide
acucgcugccacuuggaga

SEQ ID NO: 2994432 - RNA, 19 nt, Artificial Sequence
  Description of Artificial Sequence: Synthetic oligonucleotide
ugauuccgucaaaggaaga

SEQ ID NO: 2994433 - RNA, 19 nt, Artificial Sequence
  Description of Artificial Sequence: Synthetic oligonucleotide
uauugcugugucucuggau

SEQ ID NO: 2994434 - RNA, 19 nt, Artificial Sequence
  Description of Artificial Sequence: Synthetic oligonucleotide
cucuguugcccuucauuug

SEQ ID NO: 2994435 - RNA, 19 nt, Artificial Sequence
  Description of Artificial Sequence: Synthetic oligonucleotide
aggccagaaguagaaagca

SEQ ID NO: 2994436 - RNA, 19 nt, Artificial Sequence
  Description of Artificial Sequence: Synthetic oligonucleotide
gucuugacuaacgaacaca

SEQ ID NO: 2994437 - RNA, 19 nt, Artificial Sequence
  Description of Artificial Sequence: Synthetic oligonucleotide
agaugccgcagguccuucg

SEQ ID NO: 2994438 - RNA, 19 nt, Artificial Sequence
  Description of Artificial Sequence: Synthetic oligonucleotide
uuuucagcucccgaacaau

SEQ ID NO: 2994439 - RNA, 19 nt, Artificial Sequence
  Description of Artificial Sequence: Synthetic oligonucleotide
accaucucucuguugcccu

SEQ ID NO: 2994440 - RNA, 19 nt, Artificial Sequence
  Description of Artificial Sequence: Synthetic oligonucleotide
uagcuccacagaaaacaaa

SEQ ID NO: 2994441 - RNA, 19 nt, Artificial Sequence
  Description of Artificial Sequence: Synthetic oligonucleotide
augccgcagguccuucggc

SEQ ID NO: 2994442 - RNA, 19 nt, Artificial Sequence
  Description of Artificial Sequence: Synthetic oligonucleotide
caggcgaccagugacugac

SEQ ID NO: 2994443 - RNA, 19 nt, Artificial Sequence
  Description of Artificial Sequence: Synthetic oligonucleotide
gucauacaccaucucucug

SEQ ID NO: 2994444 - RNA, 19 nt, Artificial Sequence
  Description of Artificial Sequence: Synthetic oligonucleotide
gucuauagucuugacuaac

SEQ ID NO: 2994445 - RNA, 19 nt, Artificial Sequence
  Description of Artificial Sequence: Synthetic oligonucleotide
uuggagacccagcugucuu

SEQ ID NO: 2994446 - RNA, 19 nt, Artificial Sequence
  Description of Artificial Sequence: Synthetic oligonucleotide
gauuuguaggccacuccuc

SEQ ID NO: 2994447 - RNA, 19 nt, Artificial Sequence
  Description of Artificial Sequence: Synthetic oligonucleotide
agcuaggucuuuauugcug

SEQ ID NO: 2994448 - RNA, 19 nt, Artificial Sequence
  Description of Artificial Sequence: Synthetic oligonucleotide
aagacacugugggcugcac

SEQ ID NO: 2994449 - RNA, 19 nt, Artificial Sequence
  Description of Artificial Sequence: Synthetic oligonucleotide
gacacagcauauacaccug

SEQ ID NO: 2994450 - RNA, 19 nt, Artificial Sequence
  Description of Artificial Sequence: Synthetic oligonucleotide
ggacucaucauugcaauga

SEQ ID NO: 2994451 - RNA, 19 nt, Artificial Sequence
  Description of Artificial Sequence: Synthetic oligonucleotide
cucuggauuuguaggccac

SEQ ID NO: 2994452 - RNA, 19 nt, Artificial Sequence
  Description of Artificial Sequence: Synthetic oligonucleotide
gucacacccaucauauuca

SEQ ID NO: 2994453 - RNA, 19 nt, Artificial Sequence
  Description of Artificial Sequence: Synthetic oligonucleotide
ugcagucauacaccaucuc

SEQ ID NO: 2994454 - RNA, 19 nt, Artificial Sequence
  Description of Artificial Sequence: Synthetic oligonucleotide
ccgucaaaggaagagcugg

SEQ ID NO: 2994455 - RNA, 19 nt, Artificial Sequence
  Description of Artificial Sequence: Synthetic oligonucleotide
ugccacuuggagacccagc

SEQ ID NO: 2994456 - RNA, 19 nt, Artificial Sequence
  Description of Artificial Sequence: Synthetic oligonucleotide
agcaaacacgcccgcagau

SEQ ID NO: 2994457 - RNA, 19 nt, Artificial Sequence
  Description of Artificial Sequence: Synthetic oligonucleotide
ugccgcagguccuucggca

SEQ ID NO: 2994458 - RNA, 19 nt, Artificial Sequence
  Description of Artificial Sequence: Synthetic oligonucleotide
ucauugcaaugauuccguc

SEQ ID NO: 2994459 - RNA, 19 nt, Artificial Sequence
  Description of Artificial Sequence: Synthetic oligonucleotide
ucacacccaucauauucaa

SEQ ID NO: 2994460 - RNA, 19 nt, Artificial Sequence
  Description of Artificial Sequence: Synthetic oligonucleotide
ugacucgcugccacuugga

SEQ ID NO: 2994461 - RNA, 19 nt, Artificial Sequence
  Description of Artificial Sequence: Synthetic oligonucleotide
ugucuucuggacucaucau

SEQ ID NO: 2994462 - RNA, 19 nt, Artificial Sequence
  Description of Artificial Sequence: Synthetic oligonucleotide
acccagcugucuucuggac

SEQ ID NO: 2994463 - RNA, 19 nt, Artificial Sequence
  Description of Artificial Sequence: Synthetic oligonucleotide
accuggcuuaaaguuacug

SEQ ID NO: 2994464 - RNA, 19 nt, Artificial Sequence
  Description of Artificial Sequence: Synthetic oligonucleotide
ucuggauuuguaggccacu

SEQ ID NO: 2994465 - RNA, 19 nt, Artificial Sequence
  Description of Artificial Sequence: Synthetic oligonucleotide
gacccagcugucuucugga

SEQ ID NO: 2994466 - RNA, 19 nt, Artificial Sequence
  Description of Artificial Sequence: Synthetic oligonucleotide
uuacugacucgcugccacu

SEQ ID NO: 2994467 - RNA, 19 nt, Artificial Sequence
  Description of Artificial Sequence: Synthetic oligonucleotide
ugcugugucucuggauuug

SEQ ID NO: 2994468 - RNA, 19 nt, Artificial Sequence
  Description of Artificial Sequence: Synthetic oligonucleotide
auacaccaucucucuguug

SEQ ID NO: 2994469 - RNA, 19 nt, Artificial Sequence
  Description of Artificial Sequence: Synthetic oligonucleotide
cuggugcagucauacacca

SEQ ID NO: 2994470 - RNA, 19 nt, Artificial Sequence
  Description of Artificial Sequence: Synthetic oligonucleotide
ccuucauuuguagguaugc

SEQ ID NO: 2994471 - RNA, 19 nt, Artificial Sequence
  Description of Artificial Sequence: Synthetic oligonucleotide
cuuuucagcucccgaacaa

SEQ ID NO: 2994472 - RNA, 19 nt, Artificial Sequence
  Description of Artificial Sequence: Synthetic oligonucleotide
auccuuggggcaggcgacc

SEQ ID NO: 2994473 - RNA, 19 nt, Artificial Sequence
  Description of Artificial Sequence: Synthetic oligonucleotide
ccagcugucuucuggacuc

SEQ ID NO: 2994474 - RNA, 19 nt, Artificial Sequence
  Description of Artificial Sequence: Synthetic oligonucleotide
cacuuggagacccagcugu

SEQ ID NO: 2994475 - RNA, 19 nt, Artificial Sequence
  Description of Artificial Sequence: Synthetic oligonucleotide
cgaccagugacugacacag

SEQ ID NO: 2994476 - RNA, 19 nt, Artificial Sequence
  Description of Artificial Sequence: Synthetic oligonucleotide
cacugugggcugcaccuag

SEQ ID NO: 2994477 - RNA, 19 nt, Artificial Sequence
  Description of Artificial Sequence: Synthetic oligonucleotide
uggagacccagcugucuuc

SEQ ID NO: 2994478 - RNA, 19 nt, Artificial Sequence
  Description of Artificial Sequence: Synthetic oligonucleotide
ggauuuguaggccacuccu

SEQ ID NO: 2994479 - RNA, 19 nt, Artificial Sequence
  Description of Artificial Sequence: Synthetic oligonucleotide
caccaucucucuguugccc

SEQ ID NO: 2994480 - RNA, 19 nt, Artificial Sequence
  Description of Artificial Sequence: Synthetic oligonucleotide
ugugggcugcaccuagcua

SEQ ID NO: 2994481 - RNA, 19 nt, Artificial Sequence
  Description of Artificial Sequence: Synthetic oligonucleotide
acugugggcugcaccuagc

SEQ ID NO: 2994482 - RNA, 19 nt, Artificial Sequence
  Description of Artificial Sequence: Synthetic oligonucleotide
augcuucgcaauugucaca

SEQ ID NO: 2994483 - RNA, 19 nt, Artificial Sequence
  Description of Artificial Sequence: Synthetic oligonucleotide
cucgacuuuucagcucccg

SEQ ID NO: 2994484 - RNA, 19 nt, Artificial Sequence
  Description of Artificial Sequence: Synthetic oligonucleotide
cuggauuuguaggccacuc

SEQ ID NO: 2994485 - RNA, 19 nt, Artificial Sequence
  Description of Artificial Sequence: Synthetic oligonucleotide
caaacacaggccagaagua

SEQ ID NO: 2994486 - RNA, 19 nt, Artificial Sequence
  Description of Artificial Sequence: Synthetic oligonucleotide
agugacugacacagcauau

SEQ ID NO: 2994487 - RNA, 19 nt, Artificial Sequence
  Description of Artificial Sequence: Synthetic oligonucleotide
guagaaagcaagacacugu

SEQ ID NO: 2994488 - RNA, 19 nt, Artificial Sequence
  Description of Artificial Sequence: Synthetic oligonucleotide
uugcaaugauuccgucaaa

SEQ ID NO: 2994489 - RNA, 19 nt, Artificial Sequence
  Description of Artificial Sequence: Synthetic oligonucleotide
gcuggugcagucauacacc

SEQ ID NO: 2994490 - RNA, 19 nt, Artificial Sequence
  Description of Artificial Sequence: Synthetic oligonucleotide
guagguaugcuucgcaauu

SEQ ID NO: 2994491 - RNA, 19 nt, Artificial Sequence
  Description of Artificial Sequence: Synthetic oligonucleotide
ccuggcuuaaaguuacuga

SEQ ID NO: 2994492 - RNA, 19 nt, Artificial Sequence
  Description of Artificial Sequence: Synthetic oligonucleotide
cagugacugacacagcaua

SEQ ID NO: 2994493 - RNA, 19 nt, Artificial Sequence
  Description of Artificial Sequence: Synthetic oligonucleotide
acuuggagacccagcuguc

SEQ ID NO: 2994494 - RNA, 19 nt, Artificial Sequence
  Description of Artificial Sequence: Synthetic oligonucleotide
ccagaaguagaaagcaaga

SEQ ID NO: 2994495 - RNA, 19 nt, Artificial Sequence
  Description of Artificial Sequence: Synthetic oligonucleotide
gaagagcuggugcagucau

SEQ ID NO: 2994496 - RNA, 19 nt, Artificial Sequence
  Description of Artificial Sequence: Synthetic oligonucleotide
acaauccuuggggcaggcg

SEQ ID NO: 2994497 - RNA, 19 nt, Artificial Sequence
  Description of Artificial Sequence: Synthetic oligonucleotide
auauucaaacuggucuaua

SEQ ID NO: 2994498 - RNA, 19 nt, Artificial Sequence
  Description of Artificial Sequence: Synthetic oligonucleotide
uggggcaggcgaccaguga

SEQ ID NO: 2994499 - RNA, 19 nt, Artificial Sequence
  Description of Artificial Sequence: Synthetic oligonucleotide
ucggcaccgucuccagggc

SEQ ID NO: 2994500 - RNA, 19 nt, Artificial Sequence
  Description of Artificial Sequence: Synthetic oligonucleotide
cccgaacaauccuuggggc

SEQ ID NO: 2994501 - RNA, 19 nt, Artificial Sequence
  Description of Artificial Sequence: Synthetic oligonucleotide
cuucggcaccgucuccagg

SEQ ID NO: 2994502 - RNA, 19 nt, Artificial Sequence
  Description of Artificial Sequence: Synthetic oligonucleotide
cuggucuauagucuugacu

SEQ ID NO: 2994503 - RNA, 19 nt, Artificial Sequence
  Description of Artificial Sequence: Synthetic oligonucleotide
gcagucauacaccaucucu

SEQ ID NO: 2994504 - RNA, 19 nt, Artificial Sequence
  Description of Artificial Sequence: Synthetic oligonucleotide
ggggcaggcgaccagugac

SEQ ID NO: 2994505 - RNA, 19 nt, Artificial Sequence
  Description of Artificial Sequence: Synthetic oligonucleotide
ugcccuucauuuguaggua

SEQ ID NO: 2994506 - RNA, 19 nt, Artificial Sequence
  Description of Artificial Sequence: Synthetic oligonucleotide
ccgcagaugccgcaggucc

SEQ ID NO: 2994507 - RNA, 19 nt, Artificial Sequence
  Description of Artificial Sequence: Synthetic oligonucleotide
accuagcuaggucuuuauu

SEQ ID NO: 2994508 - RNA, 19 nt, Artificial Sequence
  Description of Artificial Sequence: Synthetic oligonucleotide
aguuacugacucgcugcca

SEQ ID NO: 2994509 - RNA, 19 nt, Artificial Sequence
  Description of Artificial Sequence: Synthetic oligonucleotide
gacucaucauugcaaugau

SEQ ID NO: 2994510 - RNA, 19 nt, Artificial Sequence
  Description of Artificial Sequence: Synthetic oligonucleotide
caaacuggucuauagucuu

SEQ ID NO: 2994511 - RNA, 19 nt, Artificial Sequence
  Description of Artificial Sequence: Synthetic oligonucleotide
gcugcaccuagcuaggucu

SEQ ID NO: 2994512 - RNA, 19 nt, Artificial Sequence
  Description of Artificial Sequence: Synthetic oligonucleotide
agcucccgaacaauccuug

SEQ ID NO: 2994513 - RNA, 19 nt, Artificial Sequence
  Description of Artificial Sequence: Synthetic oligonucleotide
agguccuucggcaccgucu

SEQ ID NO: 2994514 - RNA, 19 nt, Artificial Sequence
  Description of Artificial Sequence: Synthetic oligonucleotide
gucuucuggacucaucauu

SEQ ID NO: 2994515 - RNA, 19 nt, Artificial Sequence
  Description of Artificial Sequence: Synthetic oligonucleotide
gcucccgaacaauccuugg

SEQ ID NO: 2994516 - RNA, 19 nt, Artificial Sequence
  Description of Artificial Sequence: Synthetic oligonucleotide
uaggccacuccucgacuuu

SEQ ID NO: 2994517 - RNA, 19 nt, Artificial Sequence
  Description of Artificial Sequence: Synthetic oligonucleotide
cuccucgacuuuucagcuc

SEQ ID NO: 2994518 - RNA, 19 nt, Artificial Sequence
  Description of Artificial Sequence: Synthetic oligonucleotide
uggugcagucauacaccau

SEQ ID NO: 2994519 - RNA, 19 nt, Artificial Sequence
  Description of Artificial Sequence: Synthetic oligonucleotide
gguccuucggcaccgucuc

SEQ ID NO: 2994520 - RNA, 19 nt, Artificial Sequence
  Description of Artificial Sequence: Synthetic oligonucleotide
ggcgaccagugacugacac

SEQ ID NO: 2994521 - RNA, 19 nt, Artificial Sequence
  Description of Artificial Sequence: Synthetic oligonucleotide
gagacccagcugucuucug

SEQ ID NO: 2994522 - RNA, 19 nt, Artificial Sequence
  Description of Artificial Sequence: Synthetic oligonucleotide
cacccaucauauucaaacu

SEQ ID NO: 2994523 - RNA, 19 nt, Artificial Sequence
  Description of Artificial Sequence: Synthetic oligonucleotide
cgaacaauccuuggggcag

SEQ ID NO: 2994524 - RNA, 19 nt, Artificial Sequence
  Description of Artificial Sequence: Synthetic oligonucleotide
cagcauauacaccuggcuu

SEQ ID NO: 2994525 - RNA, 19 nt, Artificial Sequence
  Description of Artificial Sequence: Synthetic oligonucleotide
gugacugacacagcauaua

SEQ ID NO: 2994526 - RNA, 19 nt, Artificial Sequence
  Description of Artificial Sequence: Synthetic oligonucleotide
ggucuauagucuugacuaa

SEQ ID NO: 2994527 - RNA, 19 nt, Artificial Sequence
  Description of Artificial Sequence: Synthetic oligonucleotide
uugucacacccaucauauu

SEQ ID NO: 2994528 - RNA, 19 nt, Artificial Sequence
  Description of Artificial Sequence: Synthetic oligonucleotide
ccacuccucgacuuuucag

SEQ ID NO: 2994529 - RNA, 19 nt, Artificial Sequence
  Description of Artificial Sequence: Synthetic oligonucleotide
uccuuggggcaggcgacca

SEQ ID NO: 2994530 - RNA, 19 nt, Artificial Sequence
  Description of Artificial Sequence: Synthetic oligonucleotide
gcaaacacgcccgcagaug

SEQ ID NO: 2994531 - RNA, 19 nt, Artificial Sequence
  Description of Artificial Sequence: Synthetic oligonucleotide
cuucauuuguagguaugcu

SEQ ID NO: 2994532 - RNA, 19 nt, Artificial Sequence
  Description of Artificial Sequence: Synthetic oligonucleotide
cccuucauuuguagguaug

SEQ ID NO: 2994533 - RNA, 19 nt, Artificial Sequence
  Description of Artificial Sequence: Synthetic oligonucleotide
acacgcccgcagaugccgc

SEQ ID NO: 2994534 - RNA, 19 nt, Artificial Sequence
  Description of Artificial Sequence: Synthetic oligonucleotide
gagcuggugcagucauaca

SEQ ID NO: 2994535 - RNA, 19 nt, Artificial Sequence
  Description of Artificial Sequence: Synthetic oligonucleotide
acucaucauugcaaugauu

SEQ ID NO: 2994536 - RNA, 19 nt, Artificial Sequence
  Description of Artificial Sequence: Synthetic oligonucleotide
caucucucuguugcccuuc

SEQ ID NO: 2994537 - RNA, 19 nt, Artificial Sequence
  Description of Artificial Sequence: Synthetic oligonucleotide
cagcaaacacgcccgcaga

SEQ ID NO: 2994538 - RNA, 19 nt, Artificial Sequence
  Description of Artificial Sequence: Synthetic oligonucleotide
gguaugcuucgcaauuguc

SEQ ID NO: 2994539 - RNA, 19 nt, Artificial Sequence
  Description of Artificial Sequence: Synthetic oligonucleotide
cugccacuuggagacccag

SEQ ID NO: 2994540 - RNA, 19 nt, Artificial Sequence
  Description of Artificial Sequence: Synthetic oligonucleotide
gccacuuggagacccagcu

SEQ ID NO: 2994541 - RNA, 19 nt, Artificial Sequence
  Description of Artificial Sequence: Synthetic oligonucleotide
gcuccacagaaaacaaaca

SEQ ID NO: 2994542 - RNA, 19 nt, Artificial Sequence
  Description of Artificial Sequence: Synthetic oligonucleotide
gaccagugacugacacagc

SEQ ID NO: 2994543 - RNA, 19 nt, Artificial Sequence
  Description of Artificial Sequence: Synthetic oligonucleotide
cauauucaaacuggucuau

SEQ ID NO: 2994544 - RNA, 19 nt, Artificial Sequence
  Description of Artificial Sequence: Synthetic oligonucleotide
ggaagagcuggugcaguca

SEQ ID NO: 2994545 - RNA, 19 nt, Artificial Sequence
  Description of Artificial Sequence: Synthetic oligonucleotide
ccgaacaauccuuggggca

SEQ ID NO: 2994546 - RNA, 19 nt, Artificial Sequence
  Description of Artificial Sequence: Synthetic oligonucleotide
ggcugcaccuagcuagguc

SEQ ID NO: 2994547 - RNA, 19 nt, Artificial Sequence
  Description of Artificial Sequence: Synthetic oligonucleotide
ggucuuuauugcugugucu

SEQ ID NO: 2994548 - RNA, 19 nt, Artificial Sequence
  Description of Artificial Sequence: Synthetic oligonucleotide
aagagcuggugcagucaua

SEQ ID NO: 2994549 - RNA, 19 nt, Artificial Sequence
  Description of Artificial Sequence: Synthetic oligonucleotide
ugcaccuagcuaggucuuu

SEQ ID NO: 2994550 - RNA, 19 nt, Artificial Sequence
  Description of Artificial Sequence: Synthetic oligonucleotide
gugcagucauacaccaucu

SEQ ID NO: 2994551 - RNA, 19 nt, Artificial Sequence
  Description of Artificial Sequence: Synthetic oligonucleotide
gcauauacaccuggcuuaa

SEQ ID NO: 2994552 - RNA, 19 nt, Artificial Sequence
  Description of Artificial Sequence: Synthetic oligonucleotide
ccaucauauucaaacuggu

SEQ ID NO: 2994553 - RNA, 19 nt, Artificial Sequence
  Description of Artificial Sequence: Synthetic oligonucleotide
cauacaccaucucucuguu

SEQ ID NO: 2994554 - RNA, 19 nt, Artificial Sequence
  Description of Artificial Sequence: Synthetic oligonucleotide
guccuucggcaccgucucc

SEQ ID NO: 2994555 - RNA, 19 nt, Artificial Sequence
  Description of Artificial Sequence: Synthetic oligonucleotide
caagacacugugggcugca

SEQ ID NO: 2994556 - RNA, 19 nt, Artificial Sequence
  Description of Artificial Sequence: Synthetic oligonucleotide
ggcaggcgaccagugacug

SEQ ID NO: 2994557 - RNA, 19 nt, Artificial Sequence
  Description of Artificial Sequence: Synthetic oligonucleotide
cacagcaaacacgcccgca

SEQ ID NO: 2994558 - RNA, 19 nt, Artificial Sequence
  Description of Artificial Sequence: Synthetic oligonucleotide
guaggccacuccucgacuu

SEQ ID NO: 2994559 - RNA, 19 nt, Artificial Sequence
  Description of Artificial Sequence: Synthetic oligonucleotide
cgaacacagcaaacacgcc

SEQ ID NO: 2994560 - RNA, 19 nt, Artificial Sequence
  Description of Artificial Sequence: Synthetic oligonucleotide
ccacuuggagacccagcug

SEQ ID NO: 2994561 - RNA, 19 nt, Artificial Sequence
  Description of Artificial Sequence: Synthetic oligonucleotide
gcuucgcaauugucacacc

SEQ ID NO: 2994562 - RNA, 19 nt, Artificial Sequence
  Description of Artificial Sequence: Synthetic oligonucleotide
acgcccgcagaugccgcag

SEQ ID NO: 2994563 - RNA, 19 nt, Artificial Sequence
  Description of Artificial Sequence: Synthetic oligonucleotide
gcaagacacugugggcugc

SEQ ID NO: 2994564 - RNA, 19 nt, Artificial Sequence
  Description of Artificial Sequence: Synthetic oligonucleotide
gcgaccagugacugacaca

SEQ ID NO: 2994565 - RNA, 19 nt, Artificial Sequence
  Description of Artificial Sequence: Synthetic oligonucleotide
cuguugcccuucauuugua

SEQ ID NO: 2994566 - RNA, 19 nt, Artificial Sequence
  Description of Artificial Sequence: Synthetic oligonucleotide
cagguccuucggcaccguc

SEQ ID NO: 2994567 - RNA, 19 nt, Artificial Sequence
  Description of Artificial Sequence: Synthetic oligonucleotide
cuuggagacccagcugucu

SEQ ID NO: 2994568 - RNA, 19 nt, Artificial Sequence
  Description of Artificial Sequence: Synthetic oligonucleotide
gccgcagguccuucggcac

SEQ ID NO: 2994569 - RNA, 19 nt, Artificial Sequence
  Description of Artificial Sequence: Synthetic oligonucleotide
agcugucuucuggacucau

SEQ ID NO: 2994570 - RNA, 19 nt, Artificial Sequence
  Description of Artificial Sequence: Synthetic oligonucleotide
ggccagaaguagaaagcaa

SEQ ID NO: 2994571 - RNA, 19 nt, Artificial Sequence
  Description of Artificial Sequence: Synthetic oligonucleotide
gccacuccucgacuuuuca

SEQ ID NO: 2994572 - RNA, 19 nt, Artificial Sequence
  Description of Artificial Sequence: Synthetic oligonucleotide
cugugggcugcaccuagcu

SEQ ID NO: 2994573 - RNA, 19 nt, Artificial Sequence
  Description of Artificial Sequence: Synthetic oligonucleotide
aggccacuccucgacuuuu

SEQ ID NO: 2994574 - RNA, 19 nt, Artificial Sequence
  Description of Artificial Sequence: Synthetic oligonucleotide
cacaggccagaaguagaaa

SEQ ID NO: 2994575 - RNA, 19 nt, Artificial Sequence
  Description of Artificial Sequence: Synthetic oligonucleotide
acacugugggcugcaccua

SEQ ID NO: 2994576 - RNA, 19 nt, Artificial Sequence
  Description of Artificial Sequence: Synthetic oligonucleotide
ccucgacuuuucagcuccc

SEQ ID NO: 2994577 - RNA, 19 nt, Artificial Sequence
  Description of Artificial Sequence: Synthetic oligonucleotide
ucgcugccacuuggagacc

SEQ ID NO: 2994578 - RNA, 19 nt, Artificial Sequence
  Description of Artificial Sequence: Synthetic oligonucleotide
cauauacaccuggcuuaaa

SEQ ID NO: 2994579 - RNA, 19 nt, Artificial Sequence
  Description of Artificial Sequence: Synthetic oligonucleotide
cagaugccgcagguccuuc

SEQ ID NO: 2994580 - RNA, 19 nt, Artificial Sequence
  Description of Artificial Sequence: Synthetic oligonucleotide
cacgcccgcagaugccgca

SEQ ID NO: 2994581 - RNA, 19 nt, Artificial Sequence
  Description of Artificial Sequence: Synthetic oligonucleotide
ccgcagguccuucggcacc

SEQ ID NO: 2994582 - RNA, 19 nt, Artificial Sequence
  Description of Artificial Sequence: Synthetic oligonucleotide
cgcaauugucacacccauc

SEQ ID NO: 2994583 - RNA, 19 nt, Artificial Sequence
  Description of Artificial Sequence: Synthetic oligonucleotide
caccuagcuaggucuuuau

SEQ ID NO: 2994584 - RNA, 19 nt, Artificial Sequence
  Description of Artificial Sequence: Synthetic oligonucleotide
ggagacccagcugucuucu

SEQ ID NO: 2994585 - RNA, 19 nt, Artificial Sequence
  Description of Artificial Sequence: Synthetic oligonucleotide
cgcagguccuucggcaccg

SEQ ID NO: 2994586 - RNA, 19 nt, Artificial Sequence
  Description of Artificial Sequence: Synthetic oligonucleotide
gcaggcgaccagugacuga

SEQ ID NO: 2994587 - RNA, 19 nt, Artificial Sequence
  Description of Artificial Sequence: Synthetic oligonucleotide
cagcucccgaacaauccuu

SEQ ID NO: 2994588 - RNA, 19 nt, Artificial Sequence
  Description of Artificial Sequence: Synthetic oligonucleotide
aggcgaccagugacugaca

SEQ ID NO: 2994589 - RNA, 19 nt, Artificial Sequence
  Description of Artificial Sequence: Synthetic oligonucleotide
gcaccuagcuaggucuuua

SEQ ID NO: 2994590 - RNA, 19 nt, Artificial Sequence
  Description of Artificial Sequence: Synthetic oligonucleotide
gcccuucauuuguagguau

SEQ ID NO: 2994591 - RNA, 19 nt, Artificial Sequence
  Description of Artificial Sequence: Synthetic oligonucleotide
gcugugucucuggauuugu

SEQ ID NO: 2994592 - RNA, 19 nt, Artificial Sequence
  Description of Artificial Sequence: Synthetic oligonucleotide
cugcaccuagcuaggucuu

SEQ ID NO: 2994593 - RNA, 19 nt, Artificial Sequence
  Description of Artificial Sequence: Synthetic oligonucleotide
ccagugacugacacagcau

SEQ ID NO: 2994594 - RNA, 19 nt, Artificial Sequence
  Description of Artificial Sequence: Synthetic oligonucleotide
ggccacuccucgacuuuuc

SEQ ID NO: 2994595 - RNA, 19 nt, Artificial Sequence
  Description of Artificial Sequence: Synthetic oligonucleotide
cccagcugucuucuggacu

SEQ ID NO: 2994596 - RNA, 19 nt, Artificial Sequence
  Description of Artificial Sequence: Synthetic oligonucleotide
caccuggcuuaaaguuacu

SEQ ID NO: 2994597 - RNA, 19 nt, Artificial Sequence
  Description of Artificial Sequence: Synthetic oligonucleotide
gcugccacuuggagaccca

SEQ ID NO: 2994598 - RNA, 19 nt, Artificial Sequence
  Description of Artificial Sequence: Synthetic oligonucleotide
cgucaaaggaagagcuggu

SEQ ID NO: 2994599 - RNA, 19 nt, Artificial Sequence
  Description of Artificial Sequence: Synthetic oligonucleotide
cccgcagaugccgcagguc

SEQ ID NO: 2994600 - RNA, 19 nt, Artificial Sequence
  Description of Artificial Sequence: Synthetic oligonucleotide
gggcaggcgaccagugacu

SEQ ID NO: 2994601 - RNA, 19 nt, Artificial Sequence
  Description of Artificial Sequence: Synthetic oligonucleotide
gcagaugccgcagguccuu

SEQ ID NO: 2994602 - RNA, 19 nt, Artificial Sequence
  Description of Artificial Sequence: Synthetic oligonucleotide
cgcagaugccgcagguccu

SEQ ID NO: 2994603 - RNA, 19 nt, Artificial Sequence
  Description of Artificial Sequence: Synthetic oligonucleotide
gggcugcaccuagcuaggu

SEQ ID NO: 2994604 - RNA, 19 nt, Artificial Sequence
  Description of Artificial Sequence: Synthetic oligonucleotide
gcagguccuucggcaccgu

SEQ ID NO: 2994605 - RNA, 19 nt, Artificial Sequence
  Description of Artificial Sequence: Synthetic oligonucleotide
ugaguauuaaggcuggacc

SEQ ID NO: 2994606 - RNA, 19 nt, Artificial Sequence
  Description of Artificial Sequence: Synthetic oligonucleotide
gaguauuaaggcuggaccg

SEQ ID NO: 2994607 - RNA, 19 nt, Artificial Sequence
  Description of Artificial Sequence: Synthetic oligonucleotide
agucuguacauuuguaugg

SEQ ID NO: 2994608 - RNA, 19 nt, Artificial Sequence
  Description of Artificial Sequence: Synthetic oligonucleotide
uguaacugaagcuuucgcc

SEQ ID NO: 2994609 - RNA, 19 nt, Artificial Sequence
  Description of Artificial Sequence: Synthetic oligonucleotide
auuccuuacacgcguaggg

SEQ ID NO: 2994610 - RNA, 19 nt, Artificial Sequence
  Description of Artificial Sequence: Synthetic oligonucleotide
aucagguuggaguuguaac

SEQ ID NO: 2994611 - RNA, 19 nt, Artificial Sequence
  Description of Artificial Sequence: Synthetic oligonucleotide
ugucugaucagguuggagu

SEQ ID NO: 2994612 - RNA, 19 nt, Artificial Sequence
  Description of Artificial Sequence: Synthetic oligonucleotide
aucagguuugcacuccggc

SEQ ID NO: 2994613 - RNA, 19 nt, Artificial Sequence
  Description of Artificial Sequence: Synthetic oligonucleotide
ugaagcuuucgccacauuc

SEQ ID NO: 2994614 - RNA, 19 nt, Artificial Sequence
  Description of Artificial Sequence: Synthetic oligonucleotide
cuggugaguauuaaggcug

SEQ ID NO: 2994615 - RNA, 19 nt, Artificial Sequence
  Description of Artificial Sequence: Synthetic oligonucleotide
guaacugaagcuuucgcca

SEQ ID NO: 2994616 - RNA, 19 nt, Artificial Sequence
  Description of Artificial Sequence: Synthetic oligonucleotide
ucagguuggaguuguaacu

SEQ ID NO: 2994617 - RNA, 19 nt, Artificial Sequence
  Description of Artificial Sequence: Synthetic oligonucleotide
gaagcuuucgccacauucc

SEQ ID NO: 2994618 - RNA, 19 nt, Artificial Sequence
  Description of Artificial Sequence: Synthetic oligonucleotide
uggugucugaucagguugg

SEQ ID NO: 2994619 - RNA, 19 nt, Artificial Sequence
  Description of Artificial Sequence: Synthetic oligonucleotide
augagguuggggcuccugc

SEQ ID NO: 2994620 - RNA, 19 nt, Artificial Sequence
  Description of Artificial Sequence: Synthetic oligonucleotide
uucgccacauuccuuacac

SEQ ID NO: 2994621 - RNA, 19 nt, Artificial Sequence
  Description of Artificial Sequence: Synthetic oligonucleotide
aguauuaaggcuggaccgg

SEQ ID NO: 2994622 - RNA, 19 nt, Artificial Sequence
  Description of Artificial Sequence: Synthetic oligonucleotide
uuuguccgcagucuguaca

SEQ ID NO: 2994623 - RNA, 19 nt, Artificial Sequence
  Description of Artificial Sequence: Synthetic oligonucleotide
ugaugcgcgaugagguugg

SEQ ID NO: 2994624 - RNA, 19 nt, Artificial Sequence
  Description of Artificial Sequence: Synthetic oligonucleotide
uuguaacugaagcuuucgc

SEQ ID NO: 2994625 - RNA, 19 nt, Artificial Sequence
  Description of Artificial Sequence: Synthetic oligonucleotide
uggugaguauuaaggcugg

SEQ ID NO: 2994626 - RNA, 19 nt, Artificial Sequence
  Description of Artificial Sequence: Synthetic oligonucleotide
ugaucagguuugcacuccg

SEQ ID NO: 2994627 - RNA, 19 nt, Artificial Sequence
  Description of Artificial Sequence: Synthetic oligonucleotide
ugggugaucagguuugcac

SEQ ID NO: 2994628 - RNA, 19 nt, Artificial Sequence
  Description of Artificial Sequence: Synthetic oligonucleotide
auuaaggcuggaccgguug

SEQ ID NO: 2994629 - RNA, 19 nt, Artificial Sequence
  Description of Artificial Sequence: Synthetic oligonucleotide
cagucuguacauuuguaug

SEQ ID NO: 2994630 - RNA, 19 nt, Artificial Sequence
  Description of Artificial Sequence: Synthetic oligonucleotide
aagcuuucgccacauuccu

SEQ ID NO: 2994631 - RNA, 19 nt, Artificial Sequence
  Description of Artificial Sequence: Synthetic oligonucleotide
uuaaggcuggaccgguugc

SEQ ID NO: 2994632 - RNA, 19 nt, Artificial Sequence
  Description of Artificial Sequence: Synthetic oligonucleotide
guuguaacugaagcuuucg

SEQ ID NO: 2994633 - RNA, 19 nt, Artificial Sequence
  Description of Artificial Sequence: Synthetic oligonucleotide
cuggugucugaucagguug

SEQ ID NO: 2994634 - RNA, 19 nt, Artificial Sequence
  Description of Artificial Sequence: Synthetic oligonucleotide
uggugggugaucagguuug

SEQ ID NO: 2994635 - RNA, 19 nt, Artificial Sequence
  Description of Artificial Sequence: Synthetic oligonucleotide
ucagguuugcacuccggcu

SEQ ID NO: 2994636 - RNA, 19 nt, Artificial Sequence
  Description of Artificial Sequence: Synthetic oligonucleotide
augagcgcugagcucuggc

SEQ ID NO: 2994637 - RNA, 19 nt, Artificial Sequence
  Description of Artificial Sequence: Synthetic oligonucleotide
uaacugaagcuuucgccac

SEQ ID NO: 2994638 - RNA, 19 nt, Artificial Sequence
  Description of Artificial Sequence: Synthetic oligonucleotide
cuccggugggugaugagcg

SEQ ID NO: 2994639 - RNA, 19 nt, Artificial Sequence
  Description of Artificial Sequence: Synthetic oligonucleotide
uucccuggugaguauuaag

SEQ ID NO: 2994640 - RNA, 19 nt, Artificial Sequence
  Description of Artificial Sequence: Synthetic oligonucleotide
uggaccgguugccaaagcu

SEQ ID NO: 2994641 - RNA, 19 nt, Artificial Sequence
  Description of Artificial Sequence: Synthetic oligonucleotide
acauuccuuacacgcguag

SEQ ID NO: 2994642 - RNA, 19 nt, Artificial Sequence
  Description of Artificial Sequence: Synthetic oligonucleotide
uccgcagucuguacauuug

SEQ ID NO: 2994643 - RNA, 19 nt, Artificial Sequence
  Description of Artificial Sequence: Synthetic oligonucleotide
aguuguaacugaagcuuuc

SEQ ID NO: 2994644 - RNA, 19 nt, Artificial Sequence
  Description of Artificial Sequence: Synthetic oligonucleotide
uuggggcuccugcugaagc

SEQ ID NO: 2994645 - RNA, 19 nt, Artificial Sequence
  Description of Artificial Sequence: Synthetic oligonucleotide
ucuccggugggugaugagc

SEQ ID NO: 2994646 - RNA, 19 nt, Artificial Sequence
  Description of Artificial Sequence: Synthetic oligonucleotide
ucuuccaguguggauuccc

SEQ ID NO: 2994647 - RNA, 19 nt, Artificial Sequence
  Description of Artificial Sequence: Synthetic oligonucleotide
cauuccuuacacgcguagg

SEQ ID NO: 2994648 - RNA, 19 nt, Artificial Sequence
  Description of Artificial Sequence: Synthetic oligonucleotide
uccugcugaagcucuugcc

SEQ ID NO: 2994649 - RNA, 19 nt, Artificial Sequence
  Description of Artificial Sequence: Synthetic oligonucleotide
ugggugaugagcgcugagc

SEQ ID NO: 2994650 - RNA, 19 nt, Artificial Sequence
  Description of Artificial Sequence: Synthetic oligonucleotide
acacucggcacacuggaaa

SEQ ID NO: 2994651 - RNA, 19 nt, Artificial Sequence
  Description of Artificial Sequence: Synthetic oligonucleotide
uuucgccacauuccuuaca

SEQ ID NO: 2994652 - RNA, 19 nt, Artificial Sequence
  Description of Artificial Sequence: Synthetic oligonucleotide
uguguucuccgguggguga

SEQ ID NO: 2994653 - RNA, 19 nt, Artificial Sequence
  Description of Artificial Sequence: Synthetic oligonucleotide
ugagcgcugagcucuggcu

SEQ ID NO: 2994654 - RNA, 19 nt, Artificial Sequence
  Description of Artificial Sequence: Synthetic oligonucleotide
cacucggcacacuggaaag

SEQ ID NO: 2994655 - RNA, 19 nt, Artificial Sequence
  Description of Artificial Sequence: Synthetic oligonucleotide
ugagguuggggcuccugcu

SEQ ID NO: 2994656 - RNA, 19 nt, Artificial Sequence
  Description of Artificial Sequence: Synthetic oligonucleotide
gagcgcugagcucuggcug

SEQ ID NO: 2994657 - RNA, 19 nt, Artificial Sequence
  Description of Artificial Sequence: Synthetic oligonucleotide
cagguuggaguuguaacug

SEQ ID NO: 2994658 - RNA, 19 nt, Artificial Sequence
  Description of Artificial Sequence: Synthetic oligonucleotide
guguggauucccuggugag

SEQ ID NO: 2994659 - RNA, 19 nt, Artificial Sequence
  Description of Artificial Sequence: Synthetic oligonucleotide
ugccaaagcucuucccaca

SEQ ID NO: 2994660 - RNA, 19 nt, Artificial Sequence
  Description of Artificial Sequence: Synthetic oligonucleotide
  modified_base (4)..(4): a, c, u, g, unknown or other
uuunuccccguguguguuc

SEQ ID NO: 2994661 - RNA, 19 nt, Artificial Sequence
  Description of Artificial Sequence: Synthetic oligonucleotide
ucugaucagguuggaguug

SEQ ID NO: 2994662 - RNA, 19 nt, Artificial Sequence
  Description of Artificial Sequence: Synthetic oligonucleotide
gugaguauuaaggcuggac

SEQ ID NO: 2994663 - RNA, 19 nt, Artificial Sequence
  Description of Artificial Sequence: Synthetic oligonucleotide
gagguuggggcuccugcug

SEQ ID NO: 2994664 - RNA, 19 nt, Artificial Sequence
  Description of Artificial Sequence: Synthetic oligonucleotide
ucgccacauuccuuacacg

SEQ ID NO: 2994665 - RNA, 19 nt, Artificial Sequence
  Description of Artificial Sequence: Synthetic oligonucleotide
ugugcgcugaugcgcgaug

SEQ ID NO: 2994666 - RNA, 19 nt, Artificial Sequence
  Description of Artificial Sequence: Synthetic oligonucleotide
uccuuacacgcguaggguu

SEQ ID NO: 2994667 - RNA, 19 nt, Artificial Sequence
  Description of Artificial Sequence: Synthetic oligonucleotide
gaucagguuugcacuccgg

SEQ ID NO: 2994668 - RNA, 19 nt, Artificial Sequence
  Description of Artificial Sequence: Synthetic oligonucleotide
gcucuucccacacucgggg

SEQ ID NO: 2994669 - RNA, 19 nt, Artificial Sequence
  Description of Artificial Sequence: Synthetic oligonucleotide
agguuggaguuguaacuga

SEQ ID NO: 2994670 - RNA, 19 nt, Artificial Sequence
  Description of Artificial Sequence: Synthetic oligonucleotide
uuccuuacacgcguagggu

SEQ ID NO: 2994671 - RNA, 19 nt, Artificial Sequence
  Description of Artificial Sequence: Synthetic oligonucleotide
uuuuguccgcagucuguac

SEQ ID NO: 2994672 - RNA, 19 nt, Artificial Sequence
  Description of Artificial Sequence: Synthetic oligonucleotide
uaaggcuggaccgguugcc

SEQ ID NO: 2994673 - RNA, 19 nt, Artificial Sequence
  Description of Artificial Sequence: Synthetic oligonucleotide
uuguccgcagucuguacau

SEQ ID NO: 2994674 - RNA, 19 nt, Artificial Sequence
  Description of Artificial Sequence: Synthetic oligonucleotide
ugagcucuggcugaacuuu

SEQ ID NO: 2994675 - RNA, 19 nt, Artificial Sequence
  Description of Artificial Sequence: Synthetic oligonucleotide
  modified_base (3)..(3): a, c, u, g, unknown or other
uunuccccguguguguucu

SEQ ID NO: 2994676 - RNA, 19 nt, Artificial Sequence
  Description of Artificial Sequence: Synthetic oligonucleotide
uccccguguguguucuccg

SEQ ID NO: 2994677 - RNA, 19 nt, Artificial Sequence
  Description of Artificial Sequence: Synthetic oligonucleotide
  modified_base (5)..(5): a, c, u, g, unknown or other
uuuunuccccguguguguu

SEQ ID NO: 2994678 - RNA, 19 nt, Artificial Sequence
  Description of Artificial Sequence: Synthetic oligonucleotide
ucuguacauuuguaugguu

SEQ ID NO: 2994679 - RNA, 19 nt, Artificial Sequence
  Description of Artificial Sequence: Synthetic oligonucleotide
ugcgcugaugcgcgaugag

SEQ ID NO: 2994680 - RNA, 19 nt, Artificial Sequence
  Description of Artificial Sequence: Synthetic oligonucleotide
gugugugcgcugaugcgcg

SEQ ID NO: 2994681 - RNA, 19 nt, Artificial Sequence
  Description of Artificial Sequence: Synthetic oligonucleotide
cugaugcgcgaugagguug

SEQ ID NO: 2994682 - RNA, 19 nt, Artificial Sequence
  Description of Artificial Sequence: Synthetic oligonucleotide
acucggcacacuggaaagg

SEQ ID NO: 2994683 - RNA, 19 nt, Artificial Sequence
  Description of Artificial Sequence: Synthetic oligonucleotide
gaguagggcuuuucaccug

SEQ ID NO: 2994684 - RNA, 19 nt, Artificial Sequence
  Description of Artificial Sequence: Synthetic oligonucleotide
uguguguucuccggugggu

SEQ ID NO: 2994685 - RNA, 19 nt, Artificial Sequence
  Description of Artificial Sequence: Synthetic oligonucleotide
agcgcugagcucuggcuga

SEQ ID NO: 2994686 - RNA, 19 nt, Artificial Sequence
  Description of Artificial Sequence: Synthetic oligonucleotide
uauuaaggcuggaccgguu

SEQ ID NO: 2994687 - RNA, 19 nt, Artificial Sequence
  Description of Artificial Sequence: Synthetic oligonucleotide
ucggcacacuggaaaggcu

SEQ ID NO: 2994688 - RNA, 19 nt, Artificial Sequence
  Description of Artificial Sequence: Synthetic oligonucleotide
cccuggugaguauuaaggc

SEQ ID NO: 2994689 - RNA, 19 nt, Artificial Sequence
  Description of Artificial Sequence: Synthetic oligonucleotide
cuuucgccacauuccuuac

SEQ ID NO: 2994690 - RNA, 19 nt, Artificial Sequence
  Description of Artificial Sequence: Synthetic oligonucleotide
gaucagguuggaguuguaa

SEQ ID NO: 2994691 - RNA, 19 nt, Artificial Sequence
  Description of Artificial Sequence: Synthetic oligonucleotide
ugaugagcgcugagcucug

SEQ ID NO: 2994692 - RNA, 19 nt, Artificial Sequence
  Description of Artificial Sequence: Synthetic oligonucleotide
agcucuucccacacucggg

SEQ ID NO: 2994693 - RNA, 19 nt, Artificial Sequence
  Description of Artificial Sequence: Synthetic oligonucleotide
ggugaucagguuugcacuc

SEQ ID NO: 2994694 - RNA, 19 nt, Artificial Sequence
  Description of Artificial Sequence: Synthetic oligonucleotide
cgccacauuccuuacacgc

SEQ ID NO: 2994695 - RNA, 19 nt, Artificial Sequence
  Description of Artificial Sequence: Synthetic oligonucleotide
agguuggggcuccugcuga

SEQ ID NO: 2994696 - RNA, 19 nt, Artificial Sequence
  Description of Artificial Sequence: Synthetic oligonucleotide
gugaugagcgcugagcucu

SEQ ID NO: 2994697 - RNA, 19 nt, Artificial Sequence
  Description of Artificial Sequence: Synthetic oligonucleotide
cucuucccacacucggggc

SEQ ID NO: 2994698 - RNA, 19 nt, Artificial Sequence
  Description of Artificial Sequence: Synthetic oligonucleotide
aaggcuggaccgguugcca

SEQ ID NO: 2994699 - RNA, 19 nt, Artificial Sequence
  Description of Artificial Sequence: Synthetic oligonucleotide
gugaucagguuugcacucc

SEQ ID NO: 2994700 - RNA, 19 nt, Artificial Sequence
  Description of Artificial Sequence: Synthetic oligonucleotide
cuguacauuuguaugguuu

SEQ ID NO: 2994701 - RNA, 19 nt, Artificial Sequence
  Description of Artificial Sequence: Synthetic oligonucleotide
gguugccaaagcucuuccc

SEQ ID NO: 2994702 - RNA, 19 nt, Artificial Sequence
  Description of Artificial Sequence: Synthetic oligonucleotide
uccggugggugaugagcgc

SEQ ID NO: 2994703 - RNA, 19 nt, Artificial Sequence
  Description of Artificial Sequence: Synthetic oligonucleotide
gaugagcgcugagcucugg

SEQ ID NO: 2994704 - RNA, 19 nt, Artificial Sequence
  Description of Artificial Sequence: Synthetic oligonucleotide
uucuccggugggugaugag

SEQ ID NO: 2994705 - RNA, 19 nt, Artificial Sequence
  Description of Artificial Sequence: Synthetic oligonucleotide
gcuuucgccacauuccuua

SEQ ID NO: 2994706 - RNA, 19 nt, Artificial Sequence
  Description of Artificial Sequence: Synthetic oligonucleotide
guguguucuccggugggug

SEQ ID NO: 2994707 - RNA, 19 nt, Artificial Sequence
  Description of Artificial Sequence: Synthetic oligonucleotide
guggauucccuggugagua

SEQ ID NO: 2994708 - RNA, 19 nt, Artificial Sequence
  Description of Artificial Sequence: Synthetic oligonucleotide
gucugaucagguuggaguu

SEQ ID NO: 2994709 - RNA, 19 nt, Artificial Sequence
  Description of Artificial Sequence: Synthetic oligonucleotide
gaccgguugccaaagcucu

SEQ ID NO: 2994710 - RNA, 19 nt, Artificial Sequence
  Description of Artificial Sequence: Synthetic oligonucleotide
ggaguuguaacugaagcuu

SEQ ID NO: 2994711 - RNA, 19 nt, Artificial Sequence
  Description of Artificial Sequence: Synthetic oligonucleotide
gcaggaguagggcuuuuca

SEQ ID NO: 2994712 - RNA, 19 nt, Artificial Sequence
  Description of Artificial Sequence: Synthetic oligonucleotide
ccugcugaagcucuugcca

SEQ ID NO: 2994713 - RNA, 19 nt, Artificial Sequence
  Description of Artificial Sequence: Synthetic oligonucleotide
uguucuccggugggugaug

SEQ ID NO: 2994714 - RNA, 19 nt, Artificial Sequence
  Description of Artificial Sequence: Synthetic oligonucleotide
gauucccuggugaguauua

SEQ ID NO: 2994715 - RNA, 19 nt, Artificial Sequence
  Description of Artificial Sequence: Synthetic oligonucleotide
gugggugaugagcgcugag

SEQ ID NO: 2994716 - RNA, 19 nt, Artificial Sequence
  Description of Artificial Sequence: Synthetic oligonucleotide
ggugaugagcgcugagcuc

SEQ ID NO: 2994717 - RNA, 19 nt, Artificial Sequence
  Description of Artificial Sequence: Synthetic oligonucleotide
uggauucccuggugaguau

SEQ ID NO: 2994718 - RNA, 19 nt, Artificial Sequence
  Description of Artificial Sequence: Synthetic oligonucleotide
ugugugcgcugaugcgcga

SEQ ID NO: 2994719 - RNA, 19 nt, Artificial Sequence
  Description of Artificial Sequence: Synthetic oligonucleotide
gggugaucagguuugcacu

SEQ ID NO: 2994720 - RNA, 19 nt, Artificial Sequence
  Description of Artificial Sequence: Synthetic oligonucleotide
gucuguacauuuguauggu

SEQ ID NO: 2994721 - RNA, 19 nt, Artificial Sequence
  Description of Artificial Sequence: Synthetic oligonucleotide
guuggggcuccugcugaag

SEQ ID NO: 2994722 - RNA, 19 nt, Artificial Sequence
  Description of Artificial Sequence: Synthetic oligonucleotide
ugaucagguuggaguugua

SEQ ID NO: 2994723 - RNA, 19 nt, Artificial Sequence
  Description of Artificial Sequence: Synthetic oligonucleotide
auucccuggugaguauuaa

SEQ ID NO: 2994724 - RNA, 19 nt, Artificial Sequence
  Description of Artificial Sequence: Synthetic oligonucleotide
gcagucuguacauuuguau

SEQ ID NO: 2994725 - RNA, 19 nt, Artificial Sequence
  Description of Artificial Sequence: Synthetic oligonucleotide
gcgcugaugcgcgaugagg

SEQ ID NO: 2994726 - RNA, 19 nt, Artificial Sequence
  Description of Artificial Sequence: Synthetic oligonucleotide
gggugaugagcgcugagcu

SEQ ID NO: 2994727 - RNA, 19 nt, Artificial Sequence
  Description of Artificial Sequence: Synthetic oligonucleotide
gaugcgcgaugagguuggg

SEQ ID NO: 2994728 - RNA, 19 nt, Artificial Sequence
  Description of Artificial Sequence: Synthetic oligonucleotide
cuggaccgguugccaaagc

SEQ ID NO: 2994729 - RNA, 19 nt, Artificial Sequence
  Description of Artificial Sequence: Synthetic oligonucleotide
cucuggugggugaucaggu

SEQ ID NO: 2994730 - RNA, 19 nt, Artificial Sequence
  Description of Artificial Sequence: Synthetic oligonucleotide
guauuaaggcuggaccggu

SEQ ID NO: 2994731 - RNA, 19 nt, Artificial Sequence
  Description of Artificial Sequence: Synthetic oligonucleotide
ggaccgguugccaaagcuc

SEQ ID NO: 2994732 - RNA, 19 nt, Artificial Sequence
  Description of Artificial Sequence: Synthetic oligonucleotide
gaguuguaacugaagcuuu

SEQ ID NO: 2994733 - RNA, 19 nt, Artificial Sequence
  Description of Artificial Sequence: Synthetic oligonucleotide
cacacucggggcaggagua

SEQ ID NO: 2994734 - RNA, 19 nt, Artificial Sequence
  Description of Artificial Sequence: Synthetic oligonucleotide
cuuccaguguggauucccu

SEQ ID NO: 2994735 - RNA, 19 nt, Artificial Sequence
  Description of Artificial Sequence: Synthetic oligonucleotide
uucccacacucggggcagg

SEQ ID NO: 2994736 - RNA, 19 nt, Artificial Sequence
  Description of Artificial Sequence: Synthetic oligonucleotide
guggauccucuggugggug

SEQ ID NO: 2994737 - RNA, 19 nt, Artificial Sequence
  Description of Artificial Sequence: Synthetic oligonucleotide
aggcuggaccgguugccaa

SEQ ID NO: 2994738 - RNA, 19 nt, Artificial Sequence
  Description of Artificial Sequence: Synthetic oligonucleotide
ccuggugaguauuaaggcu

SEQ ID NO: 2994739 - RNA, 19 nt, Artificial Sequence
  Description of Artificial Sequence: Synthetic oligonucleotide
cugaucagguuggaguugu

SEQ ID NO: 2994740 - RNA, 19 nt, Artificial Sequence
  Description of Artificial Sequence: Synthetic oligonucleotide
gauccucuggugggugauc

SEQ ID NO: 2994741 - RNA, 19 nt, Artificial Sequence
  Description of Artificial Sequence: Synthetic oligonucleotide
gguuggaguuguaacugaa

SEQ ID NO: 2994742 - RNA, 19 nt, Artificial Sequence
  Description of Artificial Sequence: Synthetic oligonucleotide
gcuggaccgguugccaaag

SEQ ID NO: 2994743 - RNA, 19 nt, Artificial Sequence
  Description of Artificial Sequence: Synthetic oligonucleotide
cacauuccuuacacgcgua

SEQ ID NO: 2994744 - RNA, 19 nt, Artificial Sequence
  Description of Artificial Sequence: Synthetic oligonucleotide
ucccacacucggggcagga

SEQ ID NO: 2994745 - RNA, 19 nt, Artificial Sequence
  Description of Artificial Sequence: Synthetic oligonucleotide
  modified_base (2)..(2): a, c, u, g, unknown or other
unuccccguguguguucuc

SEQ ID NO: 2994746 - RNA, 19 nt, Artificial Sequence
  Description of Artificial Sequence: Synthetic oligonucleotide
uguccgcagucuguacauu

SEQ ID NO: 2994747 - RNA, 19 nt, Artificial Sequence
  Description of Artificial Sequence: Synthetic oligonucleotide
ggugggugaucagguuugc

SEQ ID NO: 2994748 - RNA, 19 nt, Artificial Sequence
  Description of Artificial Sequence: Synthetic oligonucleotide
gugggugaucagguuugca

SEQ ID NO: 2994749 - RNA, 19 nt, Artificial Sequence
  Description of Artificial Sequence: Synthetic oligonucleotide
gugcgcugaugcgcgauga

SEQ ID NO: 2994750 - RNA, 19 nt, Artificial Sequence
  Description of Artificial Sequence: Synthetic oligonucleotide
cugagcucuggcugaacuu

SEQ ID NO: 2994751 - RNA, 19 nt, Artificial Sequence
  Description of Artificial Sequence: Synthetic oligonucleotide
agcuuucgccacauuccuu

SEQ ID NO: 2994752 - RNA, 19 nt, Artificial Sequence
  Description of Artificial Sequence: Synthetic oligonucleotide
ggcuggaccgguugccaaa

SEQ ID NO: 2994753 - RNA, 19 nt, Artificial Sequence
  Description of Artificial Sequence: Synthetic oligonucleotide
ggugaguauuaaggcugga

SEQ ID NO: 2994754 - RNA, 19 nt, Artificial Sequence
  Description of Artificial Sequence: Synthetic oligonucleotide
gcgaugagguuggggcucc

SEQ ID NO: 2994755 - RNA, 19 nt, Artificial Sequence
  Description of Artificial Sequence: Synthetic oligonucleotide
ggggcuccugcugaagcuc

SEQ ID NO: 2994756 - RNA, 19 nt, Artificial Sequence
  Description of Artificial Sequence: Synthetic oligonucleotide
ccgguugccaaagcucuuc

SEQ ID NO: 2994757 - RNA, 19 nt, Artificial Sequence
  Description of Artificial Sequence: Synthetic oligonucleotide
ggcaggaguagggcuuuuc

SEQ ID NO: 2994758 - RNA, 19 nt, Artificial Sequence
  Description of Artificial Sequence: Synthetic oligonucleotide
ggugggugaugagcgcuga

SEQ ID NO: 2994759 - RNA, 19 nt, Artificial Sequence
  Description of Artificial Sequence: Synthetic oligonucleotide
ggugucugaucagguugga

SEQ ID NO: 2994760 - RNA, 19 nt, Artificial Sequence
  Description of Artificial Sequence: Synthetic oligonucleotide
gguuggggcuccugcugaa

SEQ ID NO: 2994761 - RNA, 19 nt, Artificial Sequence
  Description of Artificial Sequence: Synthetic oligonucleotide
cgcugaugcgcgaugaggu

SEQ ID NO: 2994762 - RNA, 19 nt, Artificial Sequence
  Description of Artificial Sequence: Synthetic oligonucleotide
accgguugccaaagcucuu

SEQ ID NO: 2994763 - RNA, 19 nt, Artificial Sequence
  Description of Artificial Sequence: Synthetic oligonucleotide
cuuacacgcguaggguuuu

SEQ ID NO: 2994764 - RNA, 19 nt, Artificial Sequence
  Description of Artificial Sequence: Synthetic oligonucleotide
ccuuacacgcguaggguuu

SEQ ID NO: 2994765 - RNA, 19 nt, Artificial Sequence
  Description of Artificial Sequence: Synthetic oligonucleotide
gagcucuggcugaacuuuu

SEQ ID NO: 2994766 - RNA, 19 nt, Artificial Sequence
  Description of Artificial Sequence: Synthetic oligonucleotide
guguucuccggugggugau

SEQ ID NO: 2994767 - RNA, 19 nt, Artificial Sequence
  Description of Artificial Sequence: Synthetic oligonucleotide
ccacacucggggcaggagu

SEQ ID NO: 2994768 - RNA, 19 nt, Artificial Sequence
  Description of Artificial Sequence: Synthetic oligonucleotide
gcugaugcgcgaugagguu

SEQ ID NO: 2994769 - RNA, 19 nt, Artificial Sequence
  Description of Artificial Sequence: Synthetic oligonucleotide
cgcagucuguacauuugua

SEQ ID NO: 2994770 - RNA, 19 nt, Artificial Sequence
  Description of Artificial Sequence: Synthetic oligonucleotide
ggauucccuggugaguauu

SEQ ID NO: 2994771 - RNA, 19 nt, Artificial Sequence
  Description of Artificial Sequence: Synthetic oligonucleotide
ccgcagucuguacauuugu

SEQ ID NO: 2994772 - RNA, 19 nt, Artificial Sequence
  Description of Artificial Sequence: Synthetic oligonucleotide
gugugcgcugaugcgcgau

SEQ ID NO: 2994773 - RNA, 19 nt, Artificial Sequence
  Description of Artificial Sequence: Synthetic oligonucleotide
ggauccucuggugggugau

SEQ ID NO: 2994774 - RNA, 19 nt, Artificial Sequence
  Description of Artificial Sequence: Synthetic oligonucleotide
gggcuccugcugaagcucu

SEQ ID NO: 2994775 - RNA, 19 nt, Artificial Sequence
  Description of Artificial Sequence: Synthetic oligonucleotide
cugaagcuuucgccacauu

SEQ ID NO: 2994776 - RNA, 19 nt, Artificial Sequence
  Description of Artificial Sequence: Synthetic oligonucleotide
cggcacacuggaaaggcuu

SEQ ID NO: 2994777 - RNA, 19 nt, Artificial Sequence
  Description of Artificial Sequence: Synthetic oligonucleotide
ccggugggugaugagcgcu

SEQ ID NO: 2994778 - RNA, 19 nt, Artificial Sequence
  Description of Artificial Sequence: Synthetic oligonucleotide
ggggcaggaguagggcuuu

SEQ ID NO: 2994779 - RNA, 19 nt, Artificial Sequence
  Description of Artificial Sequence: Synthetic oligonucleotide
gcgcugagcucuggcugaa

SEQ ID NO: 2994780 - RNA, 19 nt, Artificial Sequence
  Description of Artificial Sequence: Synthetic oligonucleotide
cgcugagcucuggcugaac

SEQ ID NO: 2994781 - RNA, 19 nt, Artificial Sequence
  Description of Artificial Sequence: Synthetic oligonucleotide
ggcuccugcugaagcucuu

SEQ ID NO: 2994782 - RNA, 19 nt, Artificial Sequence
  Description of Artificial Sequence: Synthetic oligonucleotide
gggcaggaguagggcuuuu

SEQ ID NO: 2994783 - RNA, 19 nt, Artificial Sequence
  Description of Artificial Sequence: Synthetic oligonucleotide
  modified_base (1)..(1): a, c, u, g, unknown or other
nuccccguguguguucucc

SEQ ID NO: 2994784 - RNA, 19 nt, Artificial Sequence
  Description of Artificial Sequence: Synthetic oligonucleotide
uuaguuuuaacuuugaggg

SEQ ID NO: 2994785 - RNA, 19 nt, Artificial Sequence
  Description of Artificial Sequence: Synthetic oligonucleotide
aagacuauaacauuguaag

SEQ ID NO: 2994786 - RNA, 19 nt, Artificial Sequence
  Description of Artificial Sequence: Synthetic oligonucleotide
uuaaauauacuauauaugu

SEQ ID NO: 2994787 - RNA, 19 nt, Artificial Sequence
  Description of Artificial Sequence: Synthetic oligonucleotide
aguauuaucuacuuauugc

SEQ ID NO: 2994788 - RNA, 19 nt, Artificial Sequence
  Description of Artificial Sequence: Synthetic oligonucleotide
uauauguuaaggauaaggg

SEQ ID NO: 2994789 - RNA, 19 nt, Artificial Sequence
  Description of Artificial Sequence: Synthetic oligonucleotide
uaaauaaucaauuaucaca

SEQ ID NO: 2994790 - RNA, 19 nt, Artificial Sequence
  Description of Artificial Sequence: Synthetic oligonucleotide
auuaguuuuaacuuugagg

SEQ ID NO: 2994791 - RNA, 19 nt, Artificial Sequence
  Description of Artificial Sequence: Synthetic oligonucleotide
ucaauuaucacauuaguac

SEQ ID NO: 2994792 - RNA, 19 nt, Artificial Sequence
  Description of Artificial Sequence: Synthetic oligonucleotide
uauaguuuaacauuugggc

SEQ ID NO: 2994793 - RNA, 19 nt, Artificial Sequence
  Description of Artificial Sequence: Synthetic oligonucleotide
uauacuauauauguuaagg

SEQ ID NO: 2994794 - RNA, 19 nt, Artificial Sequence
  Description of Artificial Sequence: Synthetic oligonucleotide
aaaauguaacugcacacac

SEQ ID NO: 2994795 - RNA, 19 nt, Artificial Sequence
  Description of Artificial Sequence: Synthetic oligonucleotide
aaauauacuauauauguua

SEQ ID NO: 2994796 - RNA, 19 nt, Artificial Sequence
  Description of Artificial Sequence: Synthetic oligonucleotide
uguuucaaaaguuuaauga

SEQ ID NO: 2994797 - RNA, 19 nt, Artificial Sequence
  Description of Artificial Sequence: Synthetic oligonucleotide
uauguuaaggauaaggggu

SEQ ID NO: 2994798 - RNA, 19 nt, Artificial Sequence
  Description of Artificial Sequence: Synthetic oligonucleotide
aaauuugucucauuaagga

SEQ ID NO: 2994799 - RNA, 19 nt, Artificial Sequence
  Description of Artificial Sequence: Synthetic oligonucleotide
aaaaguuuaaugaauuuag

SEQ ID NO: 2994800 - RNA, 19 nt, Artificial Sequence
  Description of Artificial Sequence: Synthetic oligonucleotide
uauaaaauguaacugcaca

SEQ ID NO: 2994801 - RNA, 19 nt, Artificial Sequence
  Description of Artificial Sequence: Synthetic oligonucleotide
uaggauauuaguuuuaacu

SEQ ID NO: 2994802 - RNA, 19 nt, Artificial Sequence
  Description of Artificial Sequence: Synthetic oligonucleotide
uguaacugcacacacaaga

SEQ ID NO: 2994803 - RNA, 19 nt, Artificial Sequence
  Description of Artificial Sequence: Synthetic oligonucleotide
auaaaauguaacugcacac

SEQ ID NO: 2994804 - RNA, 19 nt, Artificial Sequence
  Description of Artificial Sequence: Synthetic oligonucleotide
aaguuuaaugaauuuagga

SEQ ID NO: 2994805 - RNA, 19 nt, Artificial Sequence
  Description of Artificial Sequence: Synthetic oligonucleotide
uaaucaauuaucacauuag

SEQ ID NO: 2994806 - RNA, 19 nt, Artificial Sequence
  Description of Artificial Sequence: Synthetic oligonucleotide
cauuaaauaaucaauuauc

SEQ ID NO: 2994807 - RNA, 19 nt, Artificial Sequence
  Description of Artificial Sequence: Synthetic oligonucleotide
auauguuaaggauaagggg

SEQ ID NO: 2994808 - RNA, 19 nt, Artificial Sequence
  Description of Artificial Sequence: Synthetic oligonucleotide
aauguaacugcacacacaa

SEQ ID NO: 2994809 - RNA, 19 nt, Artificial Sequence
  Description of Artificial Sequence: Synthetic oligonucleotide
aaaauuugucucauuaagg

SEQ ID NO: 2994810 - RNA, 19 nt, Artificial Sequence
  Description of Artificial Sequence: Synthetic oligonucleotide
auauauguuaaggauaagg

SEQ ID NO: 2994811 - RNA, 19 nt, Artificial Sequence
  Description of Artificial Sequence: Synthetic oligonucleotide
auuucagugguucaaaugu

SEQ ID NO: 2994812 - RNA, 19 nt, Artificial Sequence
  Description of Artificial Sequence: Synthetic oligonucleotide
aauuugguugaccauauaa

SEQ ID NO: 2994813 - RNA, 19 nt, Artificial Sequence
  Description of Artificial Sequence: Synthetic oligonucleotide
aguuuaaugaauuuaggau

SEQ ID NO: 2994814 - RNA, 19 nt, Artificial Sequence
  Description of Artificial Sequence: Synthetic oligonucleotide
cuauaguuuaacauuuggg

SEQ ID NO: 2994815 - RNA, 19 nt, Artificial Sequence
  Description of Artificial Sequence: Synthetic oligonucleotide
aaauaaucaauuaucacau

SEQ ID NO: 2994816 - RNA, 19 nt, Artificial Sequence
  Description of Artificial Sequence: Synthetic oligonucleotide
uaucacauuaguacaauac

SEQ ID NO: 2994817 - RNA, 19 nt, Artificial Sequence
  Description of Artificial Sequence: Synthetic oligonucleotide
uucaguauuaucuacuuau

SEQ ID NO: 2994818 - RNA, 19 nt, Artificial Sequence
  Description of Artificial Sequence: Synthetic oligonucleotide
uuuaaugaauuuaggauau

SEQ ID NO: 2994819 - RNA, 19 nt, Artificial Sequence
  Description of Artificial Sequence: Synthetic oligonucleotide
ucauuaaauaaucaauuau

SEQ ID NO: 2994820 - RNA, 19 nt, Artificial Sequence
  Description of Artificial Sequence: Synthetic oligonucleotide
aaugaauuuaggauauuag

SEQ ID NO: 2994821 - RNA, 19 nt, Artificial Sequence
  Description of Artificial Sequence: Synthetic oligonucleotide
ugaauuuaggauauuaguu

SEQ ID NO: 2994822 - RNA, 19 nt, Artificial Sequence
  Description of Artificial Sequence: Synthetic oligonucleotide
auuuguuucaguauuaucu

SEQ ID NO: 2994823 - RNA, 19 nt, Artificial Sequence
  Description of Artificial Sequence: Synthetic oligonucleotide
aggggugacauuuucuucc

SEQ ID NO: 2994824 - RNA, 19 nt, Artificial Sequence
  Description of Artificial Sequence: Synthetic oligonucleotide
uauaacauuguaagcuuag

SEQ ID NO: 2994825 - RNA, 19 nt, Artificial Sequence
  Description of Artificial Sequence: Synthetic oligonucleotide
aaucaauuaucacauuagu

SEQ ID NO: 2994826 - RNA, 19 nt, Artificial Sequence
  Description of Artificial Sequence: Synthetic oligonucleotide
aauuucagugguucaaaug

SEQ ID NO: 2994827 - RNA, 19 nt, Artificial Sequence
  Description of Artificial Sequence: Synthetic oligonucleotide
aacauuguaagcuuagauu

SEQ ID NO: 2994828 - RNA, 19 nt, Artificial Sequence
  Description of Artificial Sequence: Synthetic oligonucleotide
uuaaauaaucaauuaucac

SEQ ID NO: 2994829 - RNA, 19 nt, Artificial Sequence
  Description of Artificial Sequence: Synthetic oligonucleotide
auaguuuaacauuugggcu

SEQ ID NO: 2994830 - RNA, 19 nt, Artificial Sequence
  Description of Artificial Sequence: Synthetic oligonucleotide
uaguuuaacauuugggcug

SEQ ID NO: 2994831 - RNA, 19 nt, Artificial Sequence
  Description of Artificial Sequence: Synthetic oligonucleotide
aguacaauacaauuuuaca

SEQ ID NO: 2994832 - RNA, 19 nt, Artificial Sequence
  Description of Artificial Sequence: Synthetic oligonucleotide
auuaaauaaucaauuauca

SEQ ID NO: 2994833 - RNA, 19 nt, Artificial Sequence
  Description of Artificial Sequence: Synthetic oligonucleotide
aauuuaggauauuaguuuu

SEQ ID NO: 2994834 - RNA, 19 nt, Artificial Sequence
  Description of Artificial Sequence: Synthetic oligonucleotide
auuccuaccaaguauuucu

SEQ ID NO: 2994835 - RNA, 19 nt, Artificial Sequence
  Description of Artificial Sequence: Synthetic oligonucleotide
aaaguuuaaugaauuuagg

SEQ ID NO: 2994836 - RNA, 19 nt, Artificial Sequence
  Description of Artificial Sequence: Synthetic oligonucleotide
auuucuuaaggcuauaguu

SEQ ID NO: 2994837 - RNA, 19 nt, Artificial Sequence
  Description of Artificial Sequence: Synthetic oligonucleotide
acauuguaagcuuagauuu

SEQ ID NO: 2994838 - RNA, 19 nt, Artificial Sequence
  Description of Artificial Sequence: Synthetic oligonucleotide
augaauuuaggauauuagu

SEQ ID NO: 2994839 - RNA, 19 nt, Artificial Sequence
  Description of Artificial Sequence: Synthetic oligonucleotide
aaggcuauaguuuaacauu

SEQ ID NO: 2994840 - RNA, 19 nt, Artificial Sequence
  Description of Artificial Sequence: Synthetic oligonucleotide
uuagauuuguuucaguauu

SEQ ID NO: 2994841 - RNA, 19 nt, Artificial Sequence
  Description of Artificial Sequence: Synthetic oligonucleotide
agacuauaacauuguaagc

SEQ ID NO: 2994842 - RNA, 19 nt, Artificial Sequence
  Description of Artificial Sequence: Synthetic oligonucleotide
uauuaguuuuaacuuugag

SEQ ID NO: 2994843 - RNA, 19 nt, Artificial Sequence
  Description of Artificial Sequence: Synthetic oligonucleotide
ucaaaugugaacucuuuuc

SEQ ID NO: 2994844 - RNA, 19 nt, Artificial Sequence
  Description of Artificial Sequence: Synthetic oligonucleotide
aaaagagccaucuuuucuu

SEQ ID NO: 2994845 - RNA, 19 nt, Artificial Sequence
  Description of Artificial Sequence: Synthetic oligonucleotide
uacuauauauguuaaggau

SEQ ID NO: 2994846 - RNA, 19 nt, Artificial Sequence
  Description of Artificial Sequence: Synthetic oligonucleotide
uugaccauauaaaauguaa

SEQ ID NO: 2994847 - RNA, 19 nt, Artificial Sequence
  Description of Artificial Sequence: Synthetic oligonucleotide
uaguacaauacaauuuuac

SEQ ID NO: 2994848 - RNA, 19 nt, Artificial Sequence
  Description of Artificial Sequence: Synthetic oligonucleotide
uuucaaaaguuuaaugaau

SEQ ID NO: 2994849 - RNA, 19 nt, Artificial Sequence
  Description of Artificial Sequence: Synthetic oligonucleotide
uuugguugaccauauaaaa

SEQ ID NO: 2994850 - RNA, 19 nt, Artificial Sequence
  Description of Artificial Sequence: Synthetic oligonucleotide
ucacauuaguacaauacaa

SEQ ID NO: 2994851 - RNA, 19 nt, Artificial Sequence
  Description of Artificial Sequence: Synthetic oligonucleotide
auuaaggauauuccuacca

SEQ ID NO: 2994852 - RNA, 19 nt, Artificial Sequence
  Description of Artificial Sequence: Synthetic oligonucleotide
agugguucaaaugugaacu

SEQ ID NO: 2994853 - RNA, 19 nt, Artificial Sequence
  Description of Artificial Sequence: Synthetic oligonucleotide
auacuauauauguuaagga

SEQ ID NO: 2994854 - RNA, 19 nt, Artificial Sequence
  Description of Artificial Sequence: Synthetic oligonucleotide
uuucuuaaggcuauaguuu

SEQ ID NO: 2994855 - RNA, 19 nt, Artificial Sequence
  Description of Artificial Sequence: Synthetic oligonucleotide
uguuucaguauuaucuacu

SEQ ID NO: 2994856 - RNA, 19 nt, Artificial Sequence
  Description of Artificial Sequence: Synthetic oligonucleotide
aaaugugaacucuuuucca

SEQ ID NO: 2994857 - RNA, 19 nt, Artificial Sequence
  Description of Artificial Sequence: Synthetic oligonucleotide
uucaaaaguuuaaugaauu

SEQ ID NO: 2994858 - RNA, 19 nt, Artificial Sequence
  Description of Artificial Sequence: Synthetic oligonucleotide
ugaccauauaaaauguaac

SEQ ID NO: 2994859 - RNA, 19 nt, Artificial Sequence
  Description of Artificial Sequence: Synthetic oligonucleotide
guauuaucuacuuauugca

SEQ ID NO: 2994860 - RNA, 19 nt, Artificial Sequence
  Description of Artificial Sequence: Synthetic oligonucleotide
guuuaaugaauuuaggaua

SEQ ID NO: 2994861 - RNA, 19 nt, Artificial Sequence
  Description of Artificial Sequence: Synthetic oligonucleotide
uaaggauauuccuaccaag

SEQ ID NO: 2994862 - RNA, 19 nt, Artificial Sequence
  Description of Artificial Sequence: Synthetic oligonucleotide
uauuucuuaaggcuauagu

SEQ ID NO: 2994863 - RNA, 19 nt, Artificial Sequence
  Description of Artificial Sequence: Synthetic oligonucleotide
aauuugucucauuaaggau

SEQ ID NO: 2994864 - RNA, 19 nt, Artificial Sequence
  Description of Artificial Sequence: Synthetic oligonucleotide
guaagcuuagauuuguuuc

SEQ ID NO: 2994865 - RNA, 19 nt, Artificial Sequence
  Description of Artificial Sequence: Synthetic oligonucleotide
uaaaauguaacugcacaca

SEQ ID NO: 2994866 - RNA, 19 nt, Artificial Sequence
  Description of Artificial Sequence: Synthetic oligonucleotide
uucauuaaauaaucaauua

SEQ ID NO: 2994867 - RNA, 19 nt, Artificial Sequence
  Description of Artificial Sequence: Synthetic oligonucleotide
aucacauuaguacaauaca

SEQ ID NO: 2994868 - RNA, 19 nt, Artificial Sequence
  Description of Artificial Sequence: Synthetic oligonucleotide
accauauaaaauguaacug

SEQ ID NO: 2994869 - RNA, 19 nt, Artificial Sequence
  Description of Artificial Sequence: Synthetic oligonucleotide
uaaggcuauaguuuaacau

SEQ ID NO: 2994870 - RNA, 19 nt, Artificial Sequence
  Description of Artificial Sequence: Synthetic oligonucleotide
aggauauuaguuuuaacuu

SEQ ID NO: 2994871 - RNA, 19 nt, Artificial Sequence
  Description of Artificial Sequence: Synthetic oligonucleotide
ucucauuaaggauauuccu

SEQ ID NO: 2994872 - RNA, 19 nt, Artificial Sequence
  Description of Artificial Sequence: Synthetic oligonucleotide
ugaacucuuuuccauaaaa

SEQ ID NO: 2994873 - RNA, 19 nt, Artificial Sequence
  Description of Artificial Sequence: Synthetic oligonucleotide
cauauaaaauguaacugca

SEQ ID NO: 2994874 - RNA, 19 nt, Artificial Sequence
  Description of Artificial Sequence: Synthetic oligonucleotide
uuaaggauauuccuaccaa

SEQ ID NO: 2994875 - RNA, 19 nt, Artificial Sequence
  Description of Artificial Sequence: Synthetic oligonucleotide
ccauauaaaauguaacugc

SEQ ID NO: 2994876 - RNA, 19 nt, Artificial Sequence
  Description of Artificial Sequence: Synthetic oligonucleotide
uaaauauacuauauauguu

SEQ ID NO: 2994877 - RNA, 19 nt, Artificial Sequence
  Description of Artificial Sequence: Synthetic oligonucleotide
uaacauuguaagcuuagau

SEQ ID NO: 2994878 - RNA, 19 nt, Artificial Sequence
  Description of Artificial Sequence: Synthetic oligonucleotide
auauacuauauauguuaag

SEQ ID NO: 2994879 - RNA, 19 nt, Artificial Sequence
  Description of Artificial Sequence: Synthetic oligonucleotide
cuauauauguuaaggauaa

SEQ ID NO: 2994880 - RNA, 19 nt, Artificial Sequence
  Description of Artificial Sequence: Synthetic oligonucleotide
uuaucuacuuauugcaaaa

SEQ ID NO: 2994881 - RNA, 19 nt, Artificial Sequence
  Description of Artificial Sequence: Synthetic oligonucleotide
ugcaacaccuguuucaaaa

SEQ ID NO: 2994882 - RNA, 19 nt, Artificial Sequence
  Description of Artificial Sequence: Synthetic oligonucleotide
auuaucuacuuauugcaaa

SEQ ID NO: 2994883 - RNA, 19 nt, Artificial Sequence
  Description of Artificial Sequence: Synthetic oligonucleotide
auauaaaauguaacugcac

SEQ ID NO: 2994884 - RNA, 19 nt, Artificial Sequence
  Description of Artificial Sequence: Synthetic oligonucleotide
uauuaucuacuuauugcaa

SEQ ID NO: 2994885 - RNA, 19 nt, Artificial Sequence
  Description of Artificial Sequence: Synthetic oligonucleotide
aaggggugacauuuucuuc

SEQ ID NO: 2994886 - RNA, 19 nt, Artificial Sequence
  Description of Artificial Sequence: Synthetic oligonucleotide
ugucucauuaaggauauuc

SEQ ID NO: 2994887 - RNA, 19 nt, Artificial Sequence
  Description of Artificial Sequence: Synthetic oligonucleotide
acauuaguacaauacaauu

SEQ ID NO: 2994888 - RNA, 19 nt, Artificial Sequence
  Description of Artificial Sequence: Synthetic oligonucleotide
uuaaggcuauaguuuaaca

SEQ ID NO: 2994889 - RNA, 19 nt, Artificial Sequence
  Description of Artificial Sequence: Synthetic oligonucleotide
uuugucucauuaaggauau

SEQ ID NO: 2994890 - RNA, 19 nt, Artificial Sequence
  Description of Artificial Sequence: Synthetic oligonucleotide
uucagugguucaaauguga

SEQ ID NO: 2994891 - RNA, 19 nt, Artificial Sequence
  Description of Artificial Sequence: Synthetic oligonucleotide
uugguugaccauauaaaau

SEQ ID NO: 2994892 - RNA, 19 nt, Artificial Sequence
  Description of Artificial Sequence: Synthetic oligonucleotide
acaauacaauuuuacauuu

SEQ ID NO: 2994893 - RNA, 19 nt, Artificial Sequence
  Description of Artificial Sequence: Synthetic oligonucleotide
gacuauaacauuguaagcu

SEQ ID NO: 2994894 - RNA, 19 nt, Artificial Sequence
  Description of Artificial Sequence: Synthetic oligonucleotide
uuucagugguucaaaugug

SEQ ID NO: 2994895 - RNA, 19 nt, Artificial Sequence
  Description of Artificial Sequence: Synthetic oligonucleotide
caauuaucacauuaguaca

SEQ ID NO: 2994896 - RNA, 19 nt, Artificial Sequence
  Description of Artificial Sequence: Synthetic oligonucleotide
aaggauauuccuaccaagu

SEQ ID NO: 2994897 - RNA, 19 nt, Artificial Sequence
  Description of Artificial Sequence: Synthetic oligonucleotide
uucuuaaggcuauaguuua

SEQ ID NO: 2994898 - RNA, 19 nt, Artificial Sequence
  Description of Artificial Sequence: Synthetic oligonucleotide
gcuauaguuuaacauuugg

SEQ ID NO: 2994899 - RNA, 19 nt, Artificial Sequence
  Description of Artificial Sequence: Synthetic oligonucleotide
aauuaucacauuaguacaa

SEQ ID NO: 2994900 - RNA, 19 nt, Artificial Sequence
  Description of Artificial Sequence: Synthetic oligonucleotide
gaccauauaaaauguaacu

SEQ ID NO: 2994901 - RNA, 19 nt, Artificial Sequence
  Description of Artificial Sequence: Synthetic oligonucleotide
uuuaacauuugggcugggg

SEQ ID NO: 2994902 - RNA, 19 nt, Artificial Sequence
  Description of Artificial Sequence: Synthetic oligonucleotide
acuauaacauuguaagcuu

SEQ ID NO: 2994903 - RNA, 19 nt, Artificial Sequence
  Description of Artificial Sequence: Synthetic oligonucleotide
gaauuuaggauauuaguuu

SEQ ID NO: 2994904 - RNA, 19 nt, Artificial Sequence
  Description of Artificial Sequence: Synthetic oligonucleotide
ucaaaaguuuaaugaauuu

SEQ ID NO: 2994905 - RNA, 19 nt, Artificial Sequence
  Description of Artificial Sequence: Synthetic oligonucleotide
uuuaggauauuaguuuuaa

SEQ ID NO: 2994906 - RNA, 19 nt, Artificial Sequence
  Description of Artificial Sequence: Synthetic oligonucleotide
caguauuaucuacuuauug

SEQ ID NO: 2994907 - RNA, 19 nt, Artificial Sequence
  Description of Artificial Sequence: Synthetic oligonucleotide
aguuuaacauuugggcugg

SEQ ID NO: 2994908 - RNA, 19 nt, Artificial Sequence
  Description of Artificial Sequence: Synthetic oligonucleotide
uguaagcuuagauuuguuu

SEQ ID NO: 2994909 - RNA, 19 nt, Artificial Sequence
  Description of Artificial Sequence: Synthetic oligonucleotide
ugugaacucuuuuccauaa

SEQ ID NO: 2994910 - RNA, 19 nt, Artificial Sequence
  Description of Artificial Sequence: Synthetic oligonucleotide
uaacugcacacacaagacu

SEQ ID NO: 2994911 - RNA, 19 nt, Artificial Sequence
  Description of Artificial Sequence: Synthetic oligonucleotide
acacaagacuauaacauug

SEQ ID NO: 2994912 - RNA, 19 nt, Artificial Sequence
  Description of Artificial Sequence: Synthetic oligonucleotide
cugaugcaggcucaaaccc

SEQ ID NO: 2994913 - RNA, 19 nt, Artificial Sequence
  Description of Artificial Sequence: Synthetic oligonucleotide
gauuuguuucaguauuauc

SEQ ID NO: 2994914 - RNA, 19 nt, Artificial Sequence
  Description of Artificial Sequence: Synthetic oligonucleotide
guacaauacaauuuuacau

SEQ ID NO: 2994915 - RNA, 19 nt, Artificial Sequence
  Description of Artificial Sequence: Synthetic oligonucleotide
uuguuucaguauuaucuac

SEQ ID NO: 2994916 - RNA, 19 nt, Artificial Sequence
  Description of Artificial Sequence: Synthetic oligonucleotide
acuauauauguuaaggaua

SEQ ID NO: 2994917 - RNA, 19 nt, Artificial Sequence
  Description of Artificial Sequence: Synthetic oligonucleotide
uuaguacaauacaauuuua

SEQ ID NO: 2994918 - RNA, 19 nt, Artificial Sequence
  Description of Artificial Sequence: Synthetic oligonucleotide
aauaaucaauuaucacauu

SEQ ID NO: 2994919 - RNA, 19 nt, Artificial Sequence
  Description of Artificial Sequence: Synthetic oligonucleotide
aaaauuugguugaccauau

SEQ ID NO: 2994920 - RNA, 19 nt, Artificial Sequence
  Description of Artificial Sequence: Synthetic oligonucleotide
ucuuccuuugcaacaccug

SEQ ID NO: 2994921 - RNA, 19 nt, Artificial Sequence
  Description of Artificial Sequence: Synthetic oligonucleotide
cauuaaggauauuccuacc

SEQ ID NO: 2994922 - RNA, 19 nt, Artificial Sequence
  Description of Artificial Sequence: Synthetic oligonucleotide
uuaggauauuaguuuuaac

SEQ ID NO: 2994923 - RNA, 19 nt, Artificial Sequence
  Description of Artificial Sequence: Synthetic oligonucleotide
gauaaggggugacauuuuc

SEQ ID NO: 2994924 - RNA, 19 nt, Artificial Sequence
  Description of Artificial Sequence: Synthetic oligonucleotide
acacacaagacuauaacau

SEQ ID NO: 2994925 - RNA, 19 nt, Artificial Sequence
  Description of Artificial Sequence: Synthetic oligonucleotide
cauuguaagcuuagauuug

SEQ ID NO: 2994926 - RNA, 19 nt, Artificial Sequence
  Description of Artificial Sequence: Synthetic oligonucleotide
auuugucucauuaaggaua

SEQ ID NO: 2994927 - RNA, 19 nt, Artificial Sequence
  Description of Artificial Sequence: Synthetic oligonucleotide
uuaaggauaaggggugaca

SEQ ID NO: 2994928 - RNA, 19 nt, Artificial Sequence
  Description of Artificial Sequence: Synthetic oligonucleotide
aagcuuagauuuguuucag

SEQ ID NO: 2994929 - RNA, 19 nt, Artificial Sequence
  Description of Artificial Sequence: Synthetic oligonucleotide
auuguaagcuuagauuugu

SEQ ID NO: 2994930 - RNA, 19 nt, Artificial Sequence
  Description of Artificial Sequence: Synthetic oligonucleotide
aacugcacacacaagacua

SEQ ID NO: 2994931 - RNA, 19 nt, Artificial Sequence
  Description of Artificial Sequence: Synthetic oligonucleotide
caagacuauaacauuguaa

SEQ ID NO: 2994932 - RNA, 19 nt, Artificial Sequence
  Description of Artificial Sequence: Synthetic oligonucleotide
uucuuccuuugcaacaccu

SEQ ID NO: 2994933 - RNA, 19 nt, Artificial Sequence
  Description of Artificial Sequence: Synthetic oligonucleotide
ugaugcaggcucaaacccu

SEQ ID NO: 2994934 - RNA, 19 nt, Artificial Sequence
  Description of Artificial Sequence: Synthetic oligonucleotide
aaauguaacugcacacaca

SEQ ID NO: 2994935 - RNA, 19 nt, Artificial Sequence
  Description of Artificial Sequence: Synthetic oligonucleotide
cuuugcaacaccuguuuca

SEQ ID NO: 2994936 - RNA, 19 nt, Artificial Sequence
  Description of Artificial Sequence: Synthetic oligonucleotide
uaaggauaaggggugacau

SEQ ID NO: 2994937 - RNA, 19 nt, Artificial Sequence
  Description of Artificial Sequence: Synthetic oligonucleotide
cuuaaggcuauaguuuaac

SEQ ID NO: 2994938 - RNA, 19 nt, Artificial Sequence
  Description of Artificial Sequence: Synthetic oligonucleotide
guauuucuuaaggcuauag

SEQ ID NO: 2994939 - RNA, 19 nt, Artificial Sequence
  Description of Artificial Sequence: Synthetic oligonucleotide
aaagagccaucuuuucuuu

SEQ ID NO: 2994940 - RNA, 19 nt, Artificial Sequence
  Description of Artificial Sequence: Synthetic oligonucleotide
uagauuuguuucaguauua

SEQ ID NO: 2994941 - RNA, 19 nt, Artificial Sequence
  Description of Artificial Sequence: Synthetic oligonucleotide
ucaguauuaucuacuuauu

SEQ ID NO: 2994942 - RNA, 19 nt, Artificial Sequence
  Description of Artificial Sequence: Synthetic oligonucleotide
uuucaguauuaucuacuua

SEQ ID NO: 2994943 - RNA, 19 nt, Artificial Sequence
  Description of Artificial Sequence: Synthetic oligonucleotide
uuaucacauuaguacaaua

SEQ ID NO: 2994944 - RNA, 19 nt, Artificial Sequence
  Description of Artificial Sequence: Synthetic oligonucleotide
caaguauuucuuaaggcua

SEQ ID NO: 2994945 - RNA, 19 nt, Artificial Sequence
  Description of Artificial Sequence: Synthetic oligonucleotide
auuugguugaccauauaaa

SEQ ID NO: 2994946 - RNA, 19 nt, Artificial Sequence
  Description of Artificial Sequence: Synthetic oligonucleotide
aaguauuucuuaaggcuau

SEQ ID NO: 2994947 - RNA, 19 nt, Artificial Sequence
  Description of Artificial Sequence: Synthetic oligonucleotide
cucauuaaggauauuccua

SEQ ID NO: 2994948 - RNA, 19 nt, Artificial Sequence
  Description of Artificial Sequence: Synthetic oligonucleotide
uuucuuccuuugcaacacc

SEQ ID NO: 2994949 - RNA, 19 nt, Artificial Sequence
  Description of Artificial Sequence: Synthetic oligonucleotide
auguuaaggauaaggggug

SEQ ID NO: 2994950 - RNA, 19 nt, Artificial Sequence
  Description of Artificial Sequence: Synthetic oligonucleotide
ucuuaaggcuauaguuuaa

SEQ ID NO: 2994951 - RNA, 19 nt, Artificial Sequence
  Description of Artificial Sequence: Synthetic oligonucleotide
uauauauguuaaggauaag

SEQ ID NO: 2994952 - RNA, 19 nt, Artificial Sequence
  Description of Artificial Sequence: Synthetic oligonucleotide
caaaaguuuaaugaauuua

SEQ ID NO: 2994953 - RNA, 19 nt, Artificial Sequence
  Description of Artificial Sequence: Synthetic oligonucleotide
guaacugcacacacaagac

SEQ ID NO: 2994954 - RNA, 19 nt, Artificial Sequence
  Description of Artificial Sequence: Synthetic oligonucleotide
aggauaaggggugacauuu

SEQ ID NO: 2994955 - RNA, 19 nt, Artificial Sequence
  Description of Artificial Sequence: Synthetic oligonucleotide
aggcucaaacccuggaaug

SEQ ID NO: 2994956 - RNA, 19 nt, Artificial Sequence
  Description of Artificial Sequence: Synthetic oligonucleotide
gaugcaggcucaaacccug

SEQ ID NO: 2994957 - RNA, 19 nt, Artificial Sequence
  Description of Artificial Sequence: Synthetic oligonucleotide
uccuuugcaacaccuguuu

SEQ ID NO: 2994958 - RNA, 19 nt, Artificial Sequence
  Description of Artificial Sequence: Synthetic oligonucleotide
aucaauuaucacauuagua

SEQ ID NO: 2994959 - RNA, 19 nt, Artificial Sequence
  Description of Artificial Sequence: Synthetic oligonucleotide
gcugaugcaggcucaaacc

SEQ ID NO: 2994960 - RNA, 19 nt, Artificial Sequence
  Description of Artificial Sequence: Synthetic oligonucleotide
aacaccuguuucaaaaguu

SEQ ID NO: 2994961 - RNA, 19 nt, Artificial Sequence
  Description of Artificial Sequence: Synthetic oligonucleotide
cagugguucaaaugugaac

SEQ ID NO: 2994962 - RNA, 19 nt, Artificial Sequence
  Description of Artificial Sequence: Synthetic oligonucleotide
aggauauuccuaccaagua

SEQ ID NO: 2994963 - RNA, 19 nt, Artificial Sequence
  Description of Artificial Sequence: Synthetic oligonucleotide
aaggauaaggggugacauu

SEQ ID NO: 2994964 - RNA, 19 nt, Artificial Sequence
  Description of Artificial Sequence: Synthetic oligonucleotide
auuaucacauuaguacaau

SEQ ID NO: 2994965 - RNA, 19 nt, Artificial Sequence
  Description of Artificial Sequence: Synthetic oligonucleotide
auaacauuguaagcuuaga

SEQ ID NO: 2994966 - RNA, 19 nt, Artificial Sequence
  Description of Artificial Sequence: Synthetic oligonucleotide
uguuaaggauaagggguga

SEQ ID NO: 2994967 - RNA, 19 nt, Artificial Sequence
  Description of Artificial Sequence: Synthetic oligonucleotide
uauuccuaccaaguauuuc

SEQ ID NO: 2994968 - RNA, 19 nt, Artificial Sequence
  Description of Artificial Sequence: Synthetic oligonucleotide
acaagacuauaacauugua

SEQ ID NO: 2994969 - RNA, 19 nt, Artificial Sequence
  Description of Artificial Sequence: Synthetic oligonucleotide
gauauuccuaccaaguauu

SEQ ID NO: 2994970 - RNA, 19 nt, Artificial Sequence
  Description of Artificial Sequence: Synthetic oligonucleotide
aaauuugguugaccauaua

SEQ ID NO: 2994971 - RNA, 19 nt, Artificial Sequence
  Description of Artificial Sequence: Synthetic oligonucleotide
agauuuguuucaguauuau

SEQ ID NO: 2994972 - RNA, 19 nt, Artificial Sequence
  Description of Artificial Sequence: Synthetic oligonucleotide
uuccuuugcaacaccuguu

SEQ ID NO: 2994973 - RNA, 19 nt, Artificial Sequence
  Description of Artificial Sequence: Synthetic oligonucleotide
ugcaggcucaaacccugga

SEQ ID NO: 2994974 - RNA, 19 nt, Artificial Sequence
  Description of Artificial Sequence: Synthetic oligonucleotide
cuuagauuuguuucaguau

SEQ ID NO: 2994975 - RNA, 19 nt, Artificial Sequence
  Description of Artificial Sequence: Synthetic oligonucleotide
auaaggggugacauuuucu

SEQ ID NO: 2994976 - RNA, 19 nt, Artificial Sequence
  Description of Artificial Sequence: Synthetic oligonucleotide
gcuuagauuuguuucagua

SEQ ID NO: 2994977 - RNA, 19 nt, Artificial Sequence
  Description of Artificial Sequence: Synthetic oligonucleotide
auauuaguuuuaacuuuga

SEQ ID NO: 2994978 - RNA, 19 nt, Artificial Sequence
  Description of Artificial Sequence: Synthetic oligonucleotide
cuauaacauuguaagcuua

SEQ ID NO: 2994979 - RNA, 19 nt, Artificial Sequence
  Description of Artificial Sequence: Synthetic oligonucleotide
ggcucaaacccuggaaugg

SEQ ID NO: 2994980 - RNA, 19 nt, Artificial Sequence
  Description of Artificial Sequence: Synthetic oligonucleotide
agcuuagauuuguuucagu

SEQ ID NO: 2994981 - RNA, 19 nt, Artificial Sequence
  Description of Artificial Sequence: Synthetic oligonucleotide
uuccuaccaaguauuucuu

SEQ ID NO: 2994982 - RNA, 19 nt, Artificial Sequence
  Description of Artificial Sequence: Synthetic oligonucleotide
aagagccaucuuuucuuuu

SEQ ID NO: 2994983 - RNA, 19 nt, Artificial Sequence
  Description of Artificial Sequence: Synthetic oligonucleotide
cacauuaguacaauacaau

SEQ ID NO: 2994984 - RNA, 19 nt, Artificial Sequence
  Description of Artificial Sequence: Synthetic oligonucleotide
guuaaggauaaggggugac

SEQ ID NO: 2994985 - RNA, 19 nt, Artificial Sequence
  Description of Artificial Sequence: Synthetic oligonucleotide
gcacacacaagacuauaac

SEQ ID NO: 2994986 - RNA, 19 nt, Artificial Sequence
  Description of Artificial Sequence: Synthetic oligonucleotide
uuguaagcuuagauuuguu

SEQ ID NO: 2994987 - RNA, 19 nt, Artificial Sequence
  Description of Artificial Sequence: Synthetic oligonucleotide
aggcuauaguuuaacauuu

SEQ ID NO: 2994988 - RNA, 19 nt, Artificial Sequence
  Description of Artificial Sequence: Synthetic oligonucleotide
gugguucaaaugugaacuc

SEQ ID NO: 2994989 - RNA, 19 nt, Artificial Sequence
  Description of Artificial Sequence: Synthetic oligonucleotide
uccuaccaaguauuucuua

SEQ ID NO: 2994990 - RNA, 19 nt, Artificial Sequence
  Description of Artificial Sequence: Synthetic oligonucleotide
accuguuucaaaaguuuaa

SEQ ID NO: 2994991 - RNA, 19 nt, Artificial Sequence
  Description of Artificial Sequence: Synthetic oligonucleotide
ccaaguauuucuuaaggcu

SEQ ID NO: 2994992 - RNA, 19 nt, Artificial Sequence
  Description of Artificial Sequence: Synthetic oligonucleotide
auuuaggauauuaguuuua

SEQ ID NO: 2994993 - RNA, 19 nt, Artificial Sequence
  Description of Artificial Sequence: Synthetic oligonucleotide
guuucaguauuaucuacuu

SEQ ID NO: 2994994 - RNA, 19 nt, Artificial Sequence
  Description of Artificial Sequence: Synthetic oligonucleotide
cacaagacuauaacauugu

SEQ ID NO: 2994995 - RNA, 19 nt, Artificial Sequence
  Description of Artificial Sequence: Synthetic oligonucleotide
cuuccuuugcaacaccugu

SEQ ID NO: 2994996 - RNA, 19 nt, Artificial Sequence
  Description of Artificial Sequence: Synthetic oligonucleotide
acaccuguuucaaaaguuu

SEQ ID NO: 2994997 - RNA, 19 nt, Artificial Sequence
  Description of Artificial Sequence: Synthetic oligonucleotide
ggauauuaguuuuaacuuu

SEQ ID NO: 2994998 - RNA, 19 nt, Artificial Sequence
  Description of Artificial Sequence: Synthetic oligonucleotide
ggauauuccuaccaaguau

SEQ ID NO: 2994999 - RNA, 19 nt, Artificial Sequence
  Description of Artificial Sequence: Synthetic oligonucleotide
uuaaugaauuuaggauauu

SEQ ID NO: 2995000 - RNA, 19 nt, Artificial Sequence
  Description of Artificial Sequence: Synthetic oligonucleotide
gcucaaacccuggaauggg

SEQ ID NO: 2995001 - RNA, 19 nt, Artificial Sequence
  Description of Artificial Sequence: Synthetic oligonucleotide
guugaccauauaaaaugua

SEQ ID NO: 2995002 - RNA, 19 nt, Artificial Sequence
  Description of Artificial Sequence: Synthetic oligonucleotide
ccuaccaaguauuucuuaa

SEQ ID NO: 2995003 - RNA, 19 nt, Artificial Sequence
  Description of Artificial Sequence: Synthetic oligonucleotide
caccuguuucaaaaguuua

SEQ ID NO: 2995004 - RNA, 19 nt, Artificial Sequence
  Description of Artificial Sequence: Synthetic oligonucleotide
uugcaacaccuguuucaaa

SEQ ID NO: 2995005 - RNA, 19 nt, Artificial Sequence
  Description of Artificial Sequence: Synthetic oligonucleotide
auauuccuaccaaguauuu

SEQ ID NO: 2995006 - RNA, 19 nt, Artificial Sequence
  Description of Artificial Sequence: Synthetic oligonucleotide
aguauuucuuaaggcuaua

SEQ ID NO: 2995007 - RNA, 19 nt, Artificial Sequence
  Description of Artificial Sequence: Synthetic oligonucleotide
ggcuauaguuuaacauuug

SEQ ID NO: 2995008 - RNA, 19 nt, Artificial Sequence
  Description of Artificial Sequence: Synthetic oligonucleotide
guuuaacauuugggcuggg

SEQ ID NO: 2995009 - RNA, 19 nt, Artificial Sequence
  Description of Artificial Sequence: Synthetic oligonucleotide
cacacaagacuauaacauu

SEQ ID NO: 2995010 - RNA, 19 nt, Artificial Sequence
  Description of Artificial Sequence: Synthetic oligonucleotide
gugaacucuuuuccauaaa

SEQ ID NO: 2995011 - RNA, 19 nt, Artificial Sequence
  Description of Artificial Sequence: Synthetic oligonucleotide
gguugaccauauaaaaugu

SEQ ID NO: 2995012 - RNA, 19 nt, Artificial Sequence
  Description of Artificial Sequence: Synthetic oligonucleotide
caauacaauuuuacauuuu

SEQ ID NO: 2995013 - RNA, 19 nt, Artificial Sequence
  Description of Artificial Sequence: Synthetic oligonucleotide
caggcucaaacccuggaau

SEQ ID NO: 2995014 - RNA, 19 nt, Artificial Sequence
  Description of Artificial Sequence: Synthetic oligonucleotide
ccuuugcaacaccuguuuc

SEQ ID NO: 2995015 - RNA, 19 nt, Artificial Sequence
  Description of Artificial Sequence: Synthetic oligonucleotide
gcaggcucaaacccuggaa

SEQ ID NO: 2995016 - RNA, 19 nt, Artificial Sequence
  Description of Artificial Sequence: Synthetic oligonucleotide
gguucaaaugugaacucuu

SEQ ID NO: 2995017 - RNA, 19 nt, Artificial Sequence
  Description of Artificial Sequence: Synthetic oligonucleotide
cugcacacacaagacuaua

SEQ ID NO: 2995018 - RNA, 19 nt, Artificial Sequence
  Description of Artificial Sequence: Synthetic oligonucleotide
ggggugacauuuucuuccu

SEQ ID NO: 2995019 - RNA, 19 nt, Artificial Sequence
  Description of Artificial Sequence: Synthetic oligonucleotide
uugucucauuaaggauauu

SEQ ID NO: 2995020 - RNA, 19 nt, Artificial Sequence
  Description of Artificial Sequence: Synthetic oligonucleotide
ggauaaggggugacauuuu

SEQ ID NO: 2995021 - RNA, 19 nt, Artificial Sequence
  Description of Artificial Sequence: Synthetic oligonucleotide
uuuucauuaguuuaaaucc

SEQ ID NO: 2995022 - RNA, 19 nt, Artificial Sequence
  Description of Artificial Sequence: Synthetic oligonucleotide
uuaguuuaaauccuggaag

SEQ ID NO: 2995023 - RNA, 19 nt, Artificial Sequence
  Description of Artificial Sequence: Synthetic oligonucleotide
uucaauuuugagaagagcu

SEQ ID NO: 2995024 - RNA, 19 nt, Artificial Sequence
  Description of Artificial Sequence: Synthetic oligonucleotide
aacaccuucaauuuugaga

SEQ ID NO: 2995025 - RNA, 19 nt, Artificial Sequence
  Description of Artificial Sequence: Synthetic oligonucleotide
cuuuucauuaguuuaaauc

SEQ ID NO: 2995026 - RNA, 19 nt, Artificial Sequence
  Description of Artificial Sequence: Synthetic oligonucleotide
uccacuuuuauuuauuuac

SEQ ID NO: 2995027 - RNA, 19 nt, Artificial Sequence
  Description of Artificial Sequence: Synthetic oligonucleotide
uuuauuuacuuuucauuag

SEQ ID NO: 2995028 - RNA, 19 nt, Artificial Sequence
  Description of Artificial Sequence: Synthetic oligonucleotide
uacuaaguagcacaaauuc

SEQ ID NO: 2995029 - RNA, 19 nt, Artificial Sequence
  Description of Artificial Sequence: Synthetic oligonucleotide
uguccaauggcuuuugcag

SEQ ID NO: 2995030 - RNA, 19 nt, Artificial Sequence
  Description of Artificial Sequence: Synthetic oligonucleotide
ucaauuuugagaagagcug

SEQ ID NO: 2995031 - RNA, 19 nt, Artificial Sequence
  Description of Artificial Sequence: Synthetic oligonucleotide
ucauuaguuuaaauccugg

SEQ ID NO: 2995032 - RNA, 19 nt, Artificial Sequence
  Description of Artificial Sequence: Synthetic oligonucleotide
uuuugcuuuauacacguaa

SEQ ID NO: 2995033 - RNA, 19 nt, Artificial Sequence
  Description of Artificial Sequence: Synthetic oligonucleotide
uuugagaagagcugugugc

SEQ ID NO: 2995034 - RNA, 19 nt, Artificial Sequence
  Description of Artificial Sequence: Synthetic oligonucleotide
uacagcaucacacggauuc

SEQ ID NO: 2995035 - RNA, 19 nt, Artificial Sequence
  Description of Artificial Sequence: Synthetic oligonucleotide
uuauuuacuuuucauuagu

SEQ ID NO: 2995036 - RNA, 19 nt, Artificial Sequence
  Description of Artificial Sequence: Synthetic oligonucleotide
acaccuucaauuuugagaa

SEQ ID NO: 2995037 - RNA, 19 nt, Artificial Sequence
  Description of Artificial Sequence: Synthetic oligonucleotide
aaggguacagcaucacacg

SEQ ID NO: 2995038 - RNA, 19 nt, Artificial Sequence
  Description of Artificial Sequence: Synthetic oligonucleotide
cuuuuagaaguccuguucc

SEQ ID NO: 2995039 - RNA, 19 nt, Artificial Sequence
  Description of Artificial Sequence: Synthetic oligonucleotide
uauacacguaagcacaucu

SEQ ID NO: 2995040 - RNA, 19 nt, Artificial Sequence
  Description of Artificial Sequence: Synthetic oligonucleotide
acuaaguagcacaaauucc

SEQ ID NO: 2995041 - RNA, 19 nt, Artificial Sequence
  Description of Artificial Sequence: Synthetic oligonucleotide
uuucauuaguuuaaauccu

SEQ ID NO: 2995042 - RNA, 19 nt, Artificial Sequence
  Description of Artificial Sequence: Synthetic oligonucleotide
auguuugccuuuuagaagu

SEQ ID NO: 2995043 - RNA, 19 nt, Artificial Sequence
  Description of Artificial Sequence: Synthetic oligonucleotide
uucaucucgggcauaaaca

SEQ ID NO: 2995044 - RNA, 19 nt, Artificial Sequence
  Description of Artificial Sequence: Synthetic oligonucleotide
auuaguuuaaauccuggaa

SEQ ID NO: 2995045 - RNA, 19 nt, Artificial Sequence
  Description of Artificial Sequence: Synthetic oligonucleotide
uuuaaauccuggaagggua

SEQ ID NO: 2995046 - RNA, 19 nt, Artificial Sequence
  Description of Artificial Sequence: Synthetic oligonucleotide
aguagaauuccguuucauc

SEQ ID NO: 2995047 - RNA, 19 nt, Artificial Sequence
  Description of Artificial Sequence: Synthetic oligonucleotide
uucauuaguuuaaauccug

SEQ ID NO: 2995048 - RNA, 19 nt, Artificial Sequence
  Description of Artificial Sequence: Synthetic oligonucleotide
cuaaguagcacaaauucca

SEQ ID NO: 2995049 - RNA, 19 nt, Artificial Sequence
  Description of Artificial Sequence: Synthetic oligonucleotide
agaauuccguuucaucucg

SEQ ID NO: 2995050 - RNA, 19 nt, Artificial Sequence
  Description of Artificial Sequence: Synthetic oligonucleotide
ucggaauuuggcacgaacc

SEQ ID NO: 2995051 - RNA, 19 nt, Artificial Sequence
  Description of Artificial Sequence: Synthetic oligonucleotide
aauuuggcacgaaccaugc

SEQ ID NO: 2995052 - RNA, 19 nt, Artificial Sequence
  Description of Artificial Sequence: Synthetic oligonucleotide
aauuccguuucaucucggg

SEQ ID NO: 2995053 - RNA, 19 nt, Artificial Sequence
  Description of Artificial Sequence: Synthetic oligonucleotide
uuuugagaagagcugugug

SEQ ID NO: 2995054 - RNA, 19 nt, Artificial Sequence
  Description of Artificial Sequence: Synthetic oligonucleotide
guuuuguuugguuugcccc

SEQ ID NO: 2995055 - RNA, 19 nt, Artificial Sequence
  Description of Artificial Sequence: Synthetic oligonucleotide
cuuuauacacguaagcaca

SEQ ID NO: 2995056 - RNA, 19 nt, Artificial Sequence
  Description of Artificial Sequence: Synthetic oligonucleotide
aucacucugguuuuguuug

SEQ ID NO: 2995057 - RNA, 19 nt, Artificial Sequence
  Description of Artificial Sequence: Synthetic oligonucleotide
auuccguuucaucucgggc

SEQ ID NO: 2995058 - RNA, 19 nt, Artificial Sequence
  Description of Artificial Sequence: Synthetic oligonucleotide
ucugguuuuguuugguuug

SEQ ID NO: 2995059 - RNA, 19 nt, Artificial Sequence
  Description of Artificial Sequence: Synthetic oligonucleotide
aaguccuguucccagcagg

SEQ ID NO: 2995060 - RNA, 19 nt, Artificial Sequence
  Description of Artificial Sequence: Synthetic oligonucleotide
acauguuugccuuuuagaa

SEQ ID NO: 2995061 - RNA, 19 nt, Artificial Sequence
  Description of Artificial Sequence: Synthetic oligonucleotide
uuucaucucgggcauaaac

SEQ ID NO: 2995062 - RNA, 19 nt, Artificial Sequence
  Description of Artificial Sequence: Synthetic oligonucleotide
aauggcuuuugcaggaagg

SEQ ID NO: 2995063 - RNA, 19 nt, Artificial Sequence
  Description of Artificial Sequence: Synthetic oligonucleotide
uacacguaagcacaucucu

SEQ ID NO: 2995064 - RNA, 19 nt, Artificial Sequence
  Description of Artificial Sequence: Synthetic oligonucleotide
uugcuuuauacacguaagc

SEQ ID NO: 2995065 - RNA, 19 nt, Artificial Sequence
  Description of Artificial Sequence: Synthetic oligonucleotide
aauccuggaaggguacagc

SEQ ID NO: 2995066 - RNA, 19 nt, Artificial Sequence
  Description of Artificial Sequence: Synthetic oligonucleotide
ugcuuuauacacguaagca

SEQ ID NO: 2995067 - RNA, 19 nt, Artificial Sequence
  Description of Artificial Sequence: Synthetic oligonucleotide
uuagaaguccuguucccag

SEQ ID NO: 2995068 - RNA, 19 nt, Artificial Sequence
  Description of Artificial Sequence: Synthetic oligonucleotide
uuugccuuuuagaaguccu

SEQ ID NO: 2995069 - RNA, 19 nt, Artificial Sequence
  Description of Artificial Sequence: Synthetic oligonucleotide
cauguuugccuuuuagaag

SEQ ID NO: 2995070 - RNA, 19 nt, Artificial Sequence
  Description of Artificial Sequence: Synthetic oligonucleotide
uuccguuucaucucgggca

SEQ ID NO: 2995071 - RNA, 19 nt, Artificial Sequence
  Description of Artificial Sequence: Synthetic oligonucleotide
auaaacaccuucaauuuug

SEQ ID NO: 2995072 - RNA, 19 nt, Artificial Sequence
  Description of Artificial Sequence: Synthetic oligonucleotide
aguagcacaaauuccacuu

SEQ ID NO: 2995073 - RNA, 19 nt, Artificial Sequence
  Description of Artificial Sequence: Synthetic oligonucleotide
acguaagcacaucucuugc

SEQ ID NO: 2995074 - RNA, 19 nt, Artificial Sequence
  Description of Artificial Sequence: Synthetic oligonucleotide
ucugguuccggagaccucg

SEQ ID NO: 2995075 - RNA, 19 nt, Artificial Sequence
  Description of Artificial Sequence: Synthetic oligonucleotide
aucacacggauucuguguc

SEQ ID NO: 2995076 - RNA, 19 nt, Artificial Sequence
  Description of Artificial Sequence: Synthetic oligonucleotide
guaagcacaucucuugccc

SEQ ID NO: 2995077 - RNA, 19 nt, Artificial Sequence
  Description of Artificial Sequence: Synthetic oligonucleotide
aaaauggccuugcaccaca

SEQ ID NO: 2995078 - RNA, 19 nt, Artificial Sequence
  Description of Artificial Sequence: Synthetic oligonucleotide
gaaggguacagcaucacac

SEQ ID NO: 2995079 - RNA, 19 nt, Artificial Sequence
  Description of Artificial Sequence: Synthetic oligonucleotide
aauggccuugcaccacagc

SEQ ID NO: 2995080 - RNA, 19 nt, Artificial Sequence
  Description of Artificial Sequence: Synthetic oligonucleotide
ucaucucgggcauaaacac

SEQ ID NO: 2995081 - RNA, 19 nt, Artificial Sequence
  Description of Artificial Sequence: Synthetic oligonucleotide
aaauuccacuuuuauuuau

SEQ ID NO: 2995082 - RNA, 19 nt, Artificial Sequence
  Description of Artificial Sequence: Synthetic oligonucleotide
aaguagcacaaauuccacu

SEQ ID NO: 2995083 - RNA, 19 nt, Artificial Sequence
  Description of Artificial Sequence: Synthetic oligonucleotide
aguuuaaauccuggaaggg

SEQ ID NO: 2995084 - RNA, 19 nt, Artificial Sequence
  Description of Artificial Sequence: Synthetic oligonucleotide
gaauuuggcacgaaccaug

SEQ ID NO: 2995085 - RNA, 19 nt, Artificial Sequence
  Description of Artificial Sequence: Synthetic oligonucleotide
uuaaauccuggaaggguac

SEQ ID NO: 2995086 - RNA, 19 nt, Artificial Sequence
  Description of Artificial Sequence: Synthetic oligonucleotide
aaacaccuucaauuuugag

SEQ ID NO: 2995087 - RNA, 19 nt, Artificial Sequence
  Description of Artificial Sequence: Synthetic oligonucleotide
guagaauuccguuucaucu

SEQ ID NO: 2995088 - RNA, 19 nt, Artificial Sequence
  Description of Artificial Sequence: Synthetic oligonucleotide
ugcuucggaauuuggcacg

SEQ ID NO: 2995089 - RNA, 19 nt, Artificial Sequence
  Description of Artificial Sequence: Synthetic oligonucleotide
uugcccaaguagaauuccg

SEQ ID NO: 2995090 - RNA, 19 nt, Artificial Sequence
  Description of Artificial Sequence: Synthetic oligonucleotide
uauuuacuuuucauuaguu

SEQ ID NO: 2995091 - RNA, 19 nt, Artificial Sequence
  Description of Artificial Sequence: Synthetic oligonucleotide
ucgggcauaaacaccuuca

SEQ ID NO: 2995092 - RNA, 19 nt, Artificial Sequence
  Description of Artificial Sequence: Synthetic oligonucleotide
agacauguuugccuuuuag

SEQ ID NO: 2995093 - RNA, 19 nt, Artificial Sequence
  Description of Artificial Sequence: Synthetic oligonucleotide
uaaguagcacaaauuccac

SEQ ID NO: 2995094 - RNA, 19 nt, Artificial Sequence
  Description of Artificial Sequence: Synthetic oligonucleotide
guugcuucggaauuuggca

SEQ ID NO: 2995095 - RNA, 19 nt, Artificial Sequence
  Description of Artificial Sequence: Synthetic oligonucleotide
uuuccaugggcccugguua

SEQ ID NO: 2995096 - RNA, 19 nt, Artificial Sequence
  Description of Artificial Sequence: Synthetic oligonucleotide
uaaacaccuucaauuuuga

SEQ ID NO: 2995097 - RNA, 19 nt, Artificial Sequence
  Description of Artificial Sequence: Synthetic oligonucleotide
ggagaccucgcuuauagcc

SEQ ID NO: 2995098 - RNA, 19 nt, Artificial Sequence
  Description of Artificial Sequence: Synthetic oligonucleotide
gacauguuugccuuuuaga

SEQ ID NO: 2995099 - RNA, 19 nt, Artificial Sequence
  Description of Artificial Sequence: Synthetic oligonucleotide
uuuauacacguaagcacau

SEQ ID NO: 2995100 - RNA, 19 nt, Artificial Sequence
  Description of Artificial Sequence: Synthetic oligonucleotide
ugcaccacagccuuccaga

SEQ ID NO: 2995101 - RNA, 19 nt, Artificial Sequence
  Description of Artificial Sequence: Synthetic oligonucleotide
aauuuugagaagagcugug

SEQ ID NO: 2995102 - RNA, 19 nt, Artificial Sequence
  Description of Artificial Sequence: Synthetic oligonucleotide
aaauccuggaaggguacag

SEQ ID NO: 2995103 - RNA, 19 nt, Artificial Sequence
  Description of Artificial Sequence: Synthetic oligonucleotide
uugagaagagcugugugcu

SEQ ID NO: 2995104 - RNA, 19 nt, Artificial Sequence
  Description of Artificial Sequence: Synthetic oligonucleotide
aggguacagcaucacacgg

SEQ ID NO: 2995105 - RNA, 19 nt, Artificial Sequence
  Description of Artificial Sequence: Synthetic oligonucleotide
ucgcuuauagccagcaaaa

SEQ ID NO: 2995106 - RNA, 19 nt, Artificial Sequence
  Description of Artificial Sequence: Synthetic oligonucleotide
uagaauuccguuucaucuc

SEQ ID NO: 2995107 - RNA, 19 nt, Artificial Sequence
  Description of Artificial Sequence: Synthetic oligonucleotide
uucggaauuuggcacgaac

SEQ ID NO: 2995108 - RNA, 19 nt, Artificial Sequence
  Description of Artificial Sequence: Synthetic oligonucleotide
ugugugcucucucugguuc

SEQ ID NO: 2995109 - RNA, 19 nt, Artificial Sequence
  Description of Artificial Sequence: Synthetic oligonucleotide
aagagcugugugcucucuc

SEQ ID NO: 2995110 - RNA, 19 nt, Artificial Sequence
  Description of Artificial Sequence: Synthetic oligonucleotide
gcuuuauacacguaagcac

SEQ ID NO: 2995111 - RNA, 19 nt, Artificial Sequence
  Description of Artificial Sequence: Synthetic oligonucleotide
uccaauggcuuuugcagga

SEQ ID NO: 2995112 - RNA, 19 nt, Artificial Sequence
  Description of Artificial Sequence: Synthetic oligonucleotide
uuuagaaguccuguuccca

SEQ ID NO: 2995113 - RNA, 19 nt, Artificial Sequence
  Description of Artificial Sequence: Synthetic oligonucleotide
guccaauggcuuuugcagg

SEQ ID NO: 2995114 - RNA, 19 nt, Artificial Sequence
  Description of Artificial Sequence: Synthetic oligonucleotide
aaccaugccacuguuucca

SEQ ID NO: 2995115 - RNA, 19 nt, Artificial Sequence
  Description of Artificial Sequence: Synthetic oligonucleotide
cacguaagcacaucucuug

SEQ ID NO: 2995116 - RNA, 19 nt, Artificial Sequence
  Description of Artificial Sequence: Synthetic oligonucleotide
cuucaauuuugagaagagc

SEQ ID NO: 2995117 - RNA, 19 nt, Artificial Sequence
  Description of Artificial Sequence: Synthetic oligonucleotide
auuuggcacgaaccaugcc

SEQ ID NO: 2995118 - RNA, 19 nt, Artificial Sequence
  Description of Artificial Sequence: Synthetic oligonucleotide
uugcuucggaauuuggcac

SEQ ID NO: 2995119 - RNA, 19 nt, Artificial Sequence
  Description of Artificial Sequence: Synthetic oligonucleotide
uuggcacgaaccaugccac

SEQ ID NO: 2995120 - RNA, 19 nt, Artificial Sequence
  Description of Artificial Sequence: Synthetic oligonucleotide
uugccuuuuagaaguccug

SEQ ID NO: 2995121 - RNA, 19 nt, Artificial Sequence
  Description of Artificial Sequence: Synthetic oligonucleotide
accuucaauuuugagaaga

SEQ ID NO: 2995122 - RNA, 19 nt, Artificial Sequence
  Description of Artificial Sequence: Synthetic oligonucleotide
uaagcacaucucuugccca

SEQ ID NO: 2995123 - RNA, 19 nt, Artificial Sequence
  Description of Artificial Sequence: Synthetic oligonucleotide
cauuaguuuaaauccugga

SEQ ID NO: 2995124 - RNA, 19 nt, Artificial Sequence
  Description of Artificial Sequence: Synthetic oligonucleotide
ucuugcccaaguagaauuc

SEQ ID NO: 2995125 - RNA, 19 nt, Artificial Sequence
  Description of Artificial Sequence: Synthetic oligonucleotide
uugcaggaagguugcuucg

SEQ ID NO: 2995126 - RNA, 19 nt, Artificial Sequence
  Description of Artificial Sequence: Synthetic oligonucleotide
aguccuguucccagcaggc

SEQ ID NO: 2995127 - RNA, 19 nt, Artificial Sequence
  Description of Artificial Sequence: Synthetic oligonucleotide
ugcccaaguagaauuccgu

SEQ ID NO: 2995128 - RNA, 19 nt, Artificial Sequence
  Description of Artificial Sequence: Synthetic oligonucleotide
gauucuguguccaauggcu

SEQ ID NO: 2995129 - RNA, 19 nt, Artificial Sequence
  Description of Artificial Sequence: Synthetic oligonucleotide
agaccucgcuuauagccag

SEQ ID NO: 2995130 - RNA, 19 nt, Artificial Sequence
  Description of Artificial Sequence: Synthetic oligonucleotide
acggauucuguguccaaug

SEQ ID NO: 2995131 - RNA, 19 nt, Artificial Sequence
  Description of Artificial Sequence: Synthetic oligonucleotide
auuuugagaagagcugugu

SEQ ID NO: 2995132 - RNA, 19 nt, Artificial Sequence
  Description of Artificial Sequence: Synthetic oligonucleotide
auccuggaaggguacagca

SEQ ID NO: 2995133 - RNA, 19 nt, Artificial Sequence
  Description of Artificial Sequence: Synthetic oligonucleotide
auuccacuuuuauuuauuu

SEQ ID NO: 2995134 - RNA, 19 nt, Artificial Sequence
  Description of Artificial Sequence: Synthetic oligonucleotide
agaaguccuguucccagca

SEQ ID NO: 2995135 - RNA, 19 nt, Artificial Sequence
  Description of Artificial Sequence: Synthetic oligonucleotide
aucucgggcauaaacaccu

SEQ ID NO: 2995136 - RNA, 19 nt, Artificial Sequence
  Description of Artificial Sequence: Synthetic oligonucleotide
caucucuugcccaaguaga

SEQ ID NO: 2995137 - RNA, 19 nt, Artificial Sequence
  Description of Artificial Sequence: Synthetic oligonucleotide
gaaccaugccacuguuucc

SEQ ID NO: 2995138 - RNA, 19 nt, Artificial Sequence
  Description of Artificial Sequence: Synthetic oligonucleotide
aauuccacuuuuauuuauu

SEQ ID NO: 2995139 - RNA, 19 nt, Artificial Sequence
  Description of Artificial Sequence: Synthetic oligonucleotide
acuuuucauuaguuuaaau

SEQ ID NO: 2995140 - RNA, 19 nt, Artificial Sequence
  Description of Artificial Sequence: Synthetic oligonucleotide
ucucucugguuccggagac

SEQ ID NO: 2995141 - RNA, 19 nt, Artificial Sequence
  Description of Artificial Sequence: Synthetic oligonucleotide
aggaagguugcuucggaau

SEQ ID NO: 2995142 - RNA, 19 nt, Artificial Sequence
  Description of Artificial Sequence: Synthetic oligonucleotide
auacacguaagcacaucuc

SEQ ID NO: 2995143 - RNA, 19 nt, Artificial Sequence
  Description of Artificial Sequence: Synthetic oligonucleotide
gguuuuguuugguuugccc

SEQ ID NO: 2995144 - RNA, 19 nt, Artificial Sequence
  Description of Artificial Sequence: Synthetic oligonucleotide
ugcaggaagguugcuucgg

SEQ ID NO: 2995145 - RNA, 19 nt, Artificial Sequence
  Description of Artificial Sequence: Synthetic oligonucleotide
uagcacaaauuccacuuuu

SEQ ID NO: 2995146 - RNA, 19 nt, Artificial Sequence
  Description of Artificial Sequence: Synthetic oligonucleotide
aagguugcuucggaauuug

SEQ ID NO: 2995147 - RNA, 19 nt, Artificial Sequence
  Description of Artificial Sequence: Synthetic oligonucleotide
agaagagcugugugcucuc

SEQ ID NO: 2995148 - RNA, 19 nt, Artificial Sequence
  Description of Artificial Sequence: Synthetic oligonucleotide
aagcacaucucuugcccaa

SEQ ID NO: 2995149 - RNA, 19 nt, Artificial Sequence
  Description of Artificial Sequence: Synthetic oligonucleotide
ugccacuguuuccaugggc

SEQ ID NO: 2995150 - RNA, 19 nt, Artificial Sequence
  Description of Artificial Sequence: Synthetic oligonucleotide
ugccuuuuagaaguccugu

SEQ ID NO: 2995151 - RNA, 19 nt, Artificial Sequence
  Description of Artificial Sequence: Synthetic oligonucleotide
uguguccaauggcuuuugc

SEQ ID NO: 2995152 - RNA, 19 nt, Artificial Sequence
  Description of Artificial Sequence: Synthetic oligonucleotide
cucgcuuauagccagcaaa

SEQ ID NO: 2995153 - RNA, 19 nt, Artificial Sequence
  Description of Artificial Sequence: Synthetic oligonucleotide
ggcauaaacaccuucaauu

SEQ ID NO: 2995154 - RNA, 19 nt, Artificial Sequence
  Description of Artificial Sequence: Synthetic oligonucleotide
ggcuuuugcaggaagguug

SEQ ID NO: 2995155 - RNA, 19 nt, Artificial Sequence
  Description of Artificial Sequence: Synthetic oligonucleotide
uggccuugcaccacagccu

SEQ ID NO: 2995156 - RNA, 19 nt, Artificial Sequence
  Description of Artificial Sequence: Synthetic oligonucleotide
ucucugguuccggagaccu

SEQ ID NO: 2995157 - RNA, 19 nt, Artificial Sequence
  Description of Artificial Sequence: Synthetic oligonucleotide
cuugcccaaguagaauucc

SEQ ID NO: 2995158 - RNA, 19 nt, Artificial Sequence
  Description of Artificial Sequence: Synthetic oligonucleotide
ccaaguagaauuccguuuc

SEQ ID NO: 2995159 - RNA, 19 nt, Artificial Sequence
  Description of Artificial Sequence: Synthetic oligonucleotide
uuccagacauguuugccuu

SEQ ID NO: 2995160 - RNA, 19 nt, Artificial Sequence
  Description of Artificial Sequence: Synthetic oligonucleotide
augggcccugguuacuuuc

SEQ ID NO: 2995161 - RNA, 19 nt, Artificial Sequence
  Description of Artificial Sequence: Synthetic oligonucleotide
uccguuucaucucgggcau

SEQ ID NO: 2995162 - RNA, 19 nt, Artificial Sequence
  Description of Artificial Sequence: Synthetic oligonucleotide
gaaguccuguucccagcag

SEQ ID NO: 2995163 - RNA, 19 nt, Artificial Sequence
  Description of Artificial Sequence: Synthetic oligonucleotide
aaguagaauuccguuucau

SEQ ID NO: 2995164 - RNA, 19 nt, Artificial Sequence
  Description of Artificial Sequence: Synthetic oligonucleotide
ugugcucucucugguuccg

SEQ ID NO: 2995165 - RNA, 19 nt, Artificial Sequence
  Description of Artificial Sequence: Synthetic oligonucleotide
uacuuuucauuaguuuaaa

SEQ ID NO: 2995166 - RNA, 19 nt, Artificial Sequence
  Description of Artificial Sequence: Synthetic oligonucleotide
caauggcuuuugcaggaag

SEQ ID NO: 2995167 - RNA, 19 nt, Artificial Sequence
  Description of Artificial Sequence: Synthetic oligonucleotide
uaaauccuggaaggguaca

SEQ ID NO: 2995168 - RNA, 19 nt, Artificial Sequence
  Description of Artificial Sequence: Synthetic oligonucleotide
uuuugcaggaagguugcuu

SEQ ID NO: 2995169 - RNA, 19 nt, Artificial Sequence
  Description of Artificial Sequence: Synthetic oligonucleotide
ggauucuguguccaauggc

SEQ ID NO: 2995170 - RNA, 19 nt, Artificial Sequence
  Description of Artificial Sequence: Synthetic oligonucleotide
guguccaauggcuuuugca

SEQ ID NO: 2995171 - RNA, 19 nt, Artificial Sequence
  Description of Artificial Sequence: Synthetic oligonucleotide
ccuucaauuuugagaagag

SEQ ID NO: 2995172 - RNA, 19 nt, Artificial Sequence
  Description of Artificial Sequence: Synthetic oligonucleotide
gaauuccguuucaucucgg

SEQ ID NO: 2995173 - RNA, 19 nt, Artificial Sequence
  Description of Artificial Sequence: Synthetic oligonucleotide
ugggcccugguuacuuucc

SEQ ID NO: 2995174 - RNA, 19 nt, Artificial Sequence
  Description of Artificial Sequence: Synthetic oligonucleotide
ccuuuuagaaguccuguuc

SEQ ID NO: 2995175 - RNA, 19 nt, Artificial Sequence
  Description of Artificial Sequence: Synthetic oligonucleotide
uguuugccuuuuagaaguc

SEQ ID NO: 2995176 - RNA, 19 nt, Artificial Sequence
  Description of Artificial Sequence: Synthetic oligonucleotide
auggcuuuugcaggaaggu

SEQ ID NO: 2995177 - RNA, 19 nt, Artificial Sequence
  Description of Artificial Sequence: Synthetic oligonucleotide
cugguuuuguuugguuugc

SEQ ID NO: 2995178 - RNA, 19 nt, Artificial Sequence
  Description of Artificial Sequence: Synthetic oligonucleotide
guuugccuuuuagaagucc

SEQ ID NO: 2995179 - RNA, 19 nt, Artificial Sequence
  Description of Artificial Sequence: Synthetic oligonucleotide
guuuaaauccuggaagggu

SEQ ID NO: 2995180 - RNA, 19 nt, Artificial Sequence
  Description of Artificial Sequence: Synthetic oligonucleotide
uuccaugggcccugguuac

SEQ ID NO: 2995181 - RNA, 19 nt, Artificial Sequence
  Description of Artificial Sequence: Synthetic oligonucleotide
uuauacacguaagcacauc

SEQ ID NO: 2995182 - RNA, 19 nt, Artificial Sequence
  Description of Artificial Sequence: Synthetic oligonucleotide
gagaccucgcuuauagcca

SEQ ID NO: 2995183 - RNA, 19 nt, Artificial Sequence
  Description of Artificial Sequence: Synthetic oligonucleotide
gguugcuucggaauuuggc

SEQ ID NO: 2995184 - RNA, 19 nt, Artificial Sequence
  Description of Artificial Sequence: Synthetic oligonucleotide
caaauuccacuuuuauuua

SEQ ID NO: 2995185 - RNA, 19 nt, Artificial Sequence
  Description of Artificial Sequence: Synthetic oligonucleotide
aaauggccuugcaccacag

SEQ ID NO: 2995186 - RNA, 19 nt, Artificial Sequence
  Description of Artificial Sequence: Synthetic oligonucleotide
gccacuguuuccaugggcc

SEQ ID NO: 2995187 - RNA, 19 nt, Artificial Sequence
  Description of Artificial Sequence: Synthetic oligonucleotide
ugagaagagcugugugcuc

SEQ ID NO: 2995188 - RNA, 19 nt, Artificial Sequence
  Description of Artificial Sequence: Synthetic oligonucleotide
caauuuugagaagagcugu

SEQ ID NO: 2995189 - RNA, 19 nt, Artificial Sequence
  Description of Artificial Sequence: Synthetic oligonucleotide
ugguuuuguuugguuugcc

SEQ ID NO: 2995190 - RNA, 19 nt, Artificial Sequence
  Description of Artificial Sequence: Synthetic oligonucleotide
augccacuguuuccauggg

SEQ ID NO: 2995191 - RNA, 19 nt, Artificial Sequence
  Description of Artificial Sequence: Synthetic oligonucleotide
ugcucucucugguuccgga

SEQ ID NO: 2995192 - RNA, 19 nt, Artificial Sequence
  Description of Artificial Sequence: Synthetic oligonucleotide
cuuccagacauguuugccu

SEQ ID NO: 2995193 - RNA, 19 nt, Artificial Sequence
  Description of Artificial Sequence: Synthetic oligonucleotide
gaucacucugguuuuguuu

SEQ ID NO: 2995194 - RNA, 19 nt, Artificial Sequence
  Description of Artificial Sequence: Synthetic oligonucleotide
acuguuuccaugggcccug

SEQ ID NO: 2995195 - RNA, 19 nt, Artificial Sequence
  Description of Artificial Sequence: Synthetic oligonucleotide
ucuguguccaauggcuuuu

SEQ ID NO: 2995196 - RNA, 19 nt, Artificial Sequence
  Description of Artificial Sequence: Synthetic oligonucleotide
gugugcucucucugguucc

SEQ ID NO: 2995197 - RNA, 19 nt, Artificial Sequence
  Description of Artificial Sequence: Synthetic oligonucleotide
ucucuugcccaaguagaau

SEQ ID NO: 2995198 - RNA, 19 nt, Artificial Sequence
  Description of Artificial Sequence: Synthetic oligonucleotide
cuggaaggguacagcauca

SEQ ID NO: 2995199 - RNA, 19 nt, Artificial Sequence
  Description of Artificial Sequence: Synthetic oligonucleotide
guuccggagaccucgcuua

SEQ ID NO: 2995200 - RNA, 19 nt, Artificial Sequence
  Description of Artificial Sequence: Synthetic oligonucleotide
agccuuccagacauguuug

SEQ ID NO: 2995201 - RNA, 19 nt, Artificial Sequence
  Description of Artificial Sequence: Synthetic oligonucleotide
caaguagaauuccguuuca

SEQ ID NO: 2995202 - RNA, 19 nt, Artificial Sequence
  Description of Artificial Sequence: Synthetic oligonucleotide
cucgggcauaaacaccuuc

SEQ ID NO: 2995203 - RNA, 19 nt, Artificial Sequence
  Description of Artificial Sequence: Synthetic oligonucleotide
agaucacucugguuuuguu

SEQ ID NO: 2995204 - RNA, 19 nt, Artificial Sequence
  Description of Artificial Sequence: Synthetic oligonucleotide
caccuucaauuuugagaag

SEQ ID NO: 2995205 - RNA, 19 nt, Artificial Sequence
  Description of Artificial Sequence: Synthetic oligonucleotide
agcaucacacggauucugu

SEQ ID NO: 2995206 - RNA, 19 nt, Artificial Sequence
  Description of Artificial Sequence: Synthetic oligonucleotide
cgaaccaugccacuguuuc

SEQ ID NO: 2995207 - RNA, 19 nt, Artificial Sequence
  Description of Artificial Sequence: Synthetic oligonucleotide
caucacacggauucugugu

SEQ ID NO: 2995208 - RNA, 19 nt, Artificial Sequence
  Description of Artificial Sequence: Synthetic oligonucleotide
gcuuuugcaggaagguugc

SEQ ID NO: 2995209 - RNA, 19 nt, Artificial Sequence
  Description of Artificial Sequence: Synthetic oligonucleotide
acucugguuuuguuugguu

SEQ ID NO: 2995210 - RNA, 19 nt, Artificial Sequence
  Description of Artificial Sequence: Synthetic oligonucleotide
ccggagaccucgcuuauag

SEQ ID NO: 2995211 - RNA, 19 nt, Artificial Sequence
  Description of Artificial Sequence: Synthetic oligonucleotide
cacaaauuccacuuuuauu

SEQ ID NO: 2995212 - RNA, 19 nt, Artificial Sequence
  Description of Artificial Sequence: Synthetic oligonucleotide
uggaaggguacagcaucac

SEQ ID NO: 2995213 - RNA, 19 nt, Artificial Sequence
  Description of Artificial Sequence: Synthetic oligonucleotide
ggaaggguacagcaucaca

SEQ ID NO: 2995214 - RNA, 19 nt, Artificial Sequence
  Description of Artificial Sequence: Synthetic oligonucleotide
agcacaucucuugcccaag

SEQ ID NO: 2995215 - RNA, 19 nt, Artificial Sequence
  Description of Artificial Sequence: Synthetic oligonucleotide
gcaucacacggauucugug

SEQ ID NO: 2995216 - RNA, 19 nt, Artificial Sequence
  Description of Artificial Sequence: Synthetic oligonucleotide
cguaagcacaucucuugcc

SEQ ID NO: 2995217 - RNA, 19 nt, Artificial Sequence
  Description of Artificial Sequence: Synthetic oligonucleotide
aucucuugcccaaguagaa

SEQ ID NO: 2995218 - RNA, 19 nt, Artificial Sequence
  Description of Artificial Sequence: Synthetic oligonucleotide
acagcaucacacggauucu

SEQ ID NO: 2995219 - RNA, 19 nt, Artificial Sequence
  Description of Artificial Sequence: Synthetic oligonucleotide
agguugcuucggaauuugg

SEQ ID NO: 2995220 - RNA, 19 nt, Artificial Sequence
  Description of Artificial Sequence: Synthetic oligonucleotide
gcauaaacaccuucaauuu

SEQ ID NO: 2995221 - RNA, 19 nt, Artificial Sequence
  Description of Artificial Sequence: Synthetic oligonucleotide
agcacaaauuccacuuuua

SEQ ID NO: 2995222 - RNA, 19 nt, Artificial Sequence
  Description of Artificial Sequence: Synthetic oligonucleotide
cagcaucacacggauucug

SEQ ID NO: 2995223 - RNA, 19 nt, Artificial Sequence
  Description of Artificial Sequence: Synthetic oligonucleotide
gguguaacuguguuguuuu

SEQ ID NO: 2995224 - RNA, 19 nt, Artificial Sequence
  Description of Artificial Sequence: Synthetic oligonucleotide
cucuugcccaaguagaauu

SEQ ID NO: 2995225 - RNA, 19 nt, Artificial Sequence
  Description of Artificial Sequence: Synthetic oligonucleotide
uggcuuuugcaggaagguu

SEQ ID NO: 2995226 - RNA, 19 nt, Artificial Sequence
  Description of Artificial Sequence: Synthetic oligonucleotide
cugguuccggagaccucgc

SEQ ID NO: 2995227 - RNA, 19 nt, Artificial Sequence
  Description of Artificial Sequence: Synthetic oligonucleotide
cauaaacaccuucaauuuu

SEQ ID NO: 2995228 - RNA, 19 nt, Artificial Sequence
  Description of Artificial Sequence: Synthetic oligonucleotide
ccuugcaccacagccuucc

SEQ ID NO: 2995229 - RNA, 19 nt, Artificial Sequence
  Description of Artificial Sequence: Synthetic oligonucleotide
uguuuccaugggcccuggu

SEQ ID NO: 2995230 - RNA, 19 nt, Artificial Sequence
  Description of Artificial Sequence: Synthetic oligonucleotide
acacguaagcacaucucuu

SEQ ID NO: 2995231 - RNA, 19 nt, Artificial Sequence
  Description of Artificial Sequence: Synthetic oligonucleotide
accucgcuuauagccagca

SEQ ID NO: 2995232 - RNA, 19 nt, Artificial Sequence
  Description of Artificial Sequence: Synthetic oligonucleotide
ggcacgaaccaugccacug

SEQ ID NO: 2995233 - RNA, 19 nt, Artificial Sequence
  Description of Artificial Sequence: Synthetic oligonucleotide
ugguuccggagaccucgcu

SEQ ID NO: 2995234 - RNA, 19 nt, Artificial Sequence
  Description of Artificial Sequence: Synthetic oligonucleotide
gguacagcaucacacggau

SEQ ID NO: 2995235 - RNA, 19 nt, Artificial Sequence
  Description of Artificial Sequence: Synthetic oligonucleotide
uuccggagaccucgcuuau

SEQ ID NO: 2995236 - RNA, 19 nt, Artificial Sequence
  Description of Artificial Sequence: Synthetic oligonucleotide
auucuguguccaauggcuu

SEQ ID NO: 2995237 - RNA, 19 nt, Artificial Sequence
  Description of Artificial Sequence: Synthetic oligonucleotide
cggauucuguguccaaugg

SEQ ID NO: 2995238 - RNA, 19 nt, Artificial Sequence
  Description of Artificial Sequence: Synthetic oligonucleotide
uccagacauguuugccuuu

SEQ ID NO: 2995239 - RNA, 19 nt, Artificial Sequence
  Description of Artificial Sequence: Synthetic oligonucleotide
ccacuguuuccaugggccc

SEQ ID NO: 2995240 - RNA, 19 nt, Artificial Sequence
  Description of Artificial Sequence: Synthetic oligonucleotide
ccuuccagacauguuugcc

SEQ ID NO: 2995241 - RNA, 19 nt, Artificial Sequence
  Description of Artificial Sequence: Synthetic oligonucleotide
guuuccaugggcccugguu

SEQ ID NO: 2995242 - RNA, 19 nt, Artificial Sequence
  Description of Artificial Sequence: Synthetic oligonucleotide
uggcacgaaccaugccacu

SEQ ID NO: 2995243 - RNA, 19 nt, Artificial Sequence
  Description of Artificial Sequence: Synthetic oligonucleotide
cacacggauucugugucca

SEQ ID NO: 2995244 - RNA, 19 nt, Artificial Sequence
  Description of Artificial Sequence: Synthetic oligonucleotide
caggaagguugcuucggaa

SEQ ID NO: 2995245 - RNA, 19 nt, Artificial Sequence
  Description of Artificial Sequence: Synthetic oligonucleotide
ggcccugguuacuuucccc

SEQ ID NO: 2995246 - RNA, 19 nt, Artificial Sequence
  Description of Artificial Sequence: Synthetic oligonucleotide
guccuguucccagcaggcc

SEQ ID NO: 2995247 - RNA, 19 nt, Artificial Sequence
  Description of Artificial Sequence: Synthetic oligonucleotide
ucucgggcauaaacaccuu

SEQ ID NO: 2995248 - RNA, 19 nt, Artificial Sequence
  Description of Artificial Sequence: Synthetic oligonucleotide
cagccuuccagacauguuu

SEQ ID NO: 2995249 - RNA, 19 nt, Artificial Sequence
  Description of Artificial Sequence: Synthetic oligonucleotide
gccuuccagacauguuugc

SEQ ID NO: 2995250 - RNA, 19 nt, Artificial Sequence
  Description of Artificial Sequence: Synthetic oligonucleotide
guagcacaaauuccacuuu

SEQ ID NO: 2995251 - RNA, 19 nt, Artificial Sequence
  Description of Artificial Sequence: Synthetic oligonucleotide
acacggauucuguguccaa

SEQ ID NO: 2995252 - RNA, 19 nt, Artificial Sequence
  Description of Artificial Sequence: Synthetic oligonucleotide
cacaucucuugcccaagua

SEQ ID NO: 2995253 - RNA, 19 nt, Artificial Sequence
  Description of Artificial Sequence: Synthetic oligonucleotide
cggaauuuggcacgaacca

SEQ ID NO: 2995254 - RNA, 19 nt, Artificial Sequence
  Description of Artificial Sequence: Synthetic oligonucleotide
gaagguugcuucggaauuu

SEQ ID NO: 2995255 - RNA, 19 nt, Artificial Sequence
  Description of Artificial Sequence: Synthetic oligonucleotide
ggaagguugcuucggaauu

SEQ ID NO: 2995256 - RNA, 19 nt, Artificial Sequence
  Description of Artificial Sequence: Synthetic oligonucleotide
ccacuuuuauuuauuuacu

SEQ ID NO: 2995257 - RNA, 19 nt, Artificial Sequence
  Description of Artificial Sequence: Synthetic oligonucleotide
gcacaaauuccacuuuuau

SEQ ID NO: 2995258 - RNA, 19 nt, Artificial Sequence
  Description of Artificial Sequence: Synthetic oligonucleotide
uccaugggcccugguuacu

SEQ ID NO: 2995259 - RNA, 19 nt, Artificial Sequence
  Description of Artificial Sequence: Synthetic oligonucleotide
gaccucgcuuauagccagc

SEQ ID NO: 2995260 - RNA, 19 nt, Artificial Sequence
  Description of Artificial Sequence: Synthetic oligonucleotide
ggguacagcaucacacgga

SEQ ID NO: 2995261 - RNA, 19 nt, Artificial Sequence
  Description of Artificial Sequence: Synthetic oligonucleotide
cucugguuccggagaccuc

SEQ ID NO: 2995262 - RNA, 19 nt, Artificial Sequence
  Description of Artificial Sequence: Synthetic oligonucleotide
gcaccacagccuuccagac

SEQ ID NO: 2995263 - RNA, 19 nt, Artificial Sequence
  Description of Artificial Sequence: Synthetic oligonucleotide
caccacagccuuccagaca

SEQ ID NO: 2995264 - RNA, 19 nt, Artificial Sequence
  Description of Artificial Sequence: Synthetic oligonucleotide
cuguuuccaugggcccugg

SEQ ID NO: 2995265 - RNA, 19 nt, Artificial Sequence
  Description of Artificial Sequence: Synthetic oligonucleotide
gggcccugguuacuuuccc

SEQ ID NO: 2995266 - RNA, 19 nt, Artificial Sequence
  Description of Artificial Sequence: Synthetic oligonucleotide
cccggguguaacuguguug

SEQ ID NO: 2995267 - RNA, 19 nt, Artificial Sequence
  Description of Artificial Sequence: Synthetic oligonucleotide
cuugcaccacagccuucca

SEQ ID NO: 2995268 - RNA, 19 nt, Artificial Sequence
  Description of Artificial Sequence: Synthetic oligonucleotide
ggaauuuggcacgaaccau

SEQ ID NO: 2995269 - RNA, 19 nt, Artificial Sequence
  Description of Artificial Sequence: Synthetic oligonucleotide
acagccuuccagacauguu

SEQ ID NO: 2995270 - RNA, 19 nt, Artificial Sequence
  Description of Artificial Sequence: Synthetic oligonucleotide
ccccagaucacucugguuu

SEQ ID NO: 2995271 - RNA, 19 nt, Artificial Sequence
  Description of Artificial Sequence: Synthetic oligonucleotide
gggcauaaacaccuucaau

SEQ ID NO: 2995272 - RNA, 19 nt, Artificial Sequence
  Description of Artificial Sequence: Synthetic oligonucleotide
cacagccuuccagacaugu

SEQ ID NO: 2995273 - RNA, 19 nt, Artificial Sequence
  Description of Artificial Sequence: Synthetic oligonucleotide
uccggagaccucgcuuaua

SEQ ID NO: 2995274 - RNA, 19 nt, Artificial Sequence
  Description of Artificial Sequence: Synthetic oligonucleotide
acgaaccaugccacuguuu

SEQ ID NO: 2995275 - RNA, 19 nt, Artificial Sequence
  Description of Artificial Sequence: Synthetic oligonucleotide
gcugugugcucucucuggu

SEQ ID NO: 2995276 - RNA, 19 nt, Artificial Sequence
  Description of Artificial Sequence: Synthetic oligonucleotide
gcuucggaauuuggcacga

SEQ ID NO: 2995277 - RNA, 19 nt, Artificial Sequence
  Description of Artificial Sequence: Synthetic oligonucleotide
guuucaucucgggcauaaa

SEQ ID NO: 2995278 - RNA, 19 nt, Artificial Sequence
  Description of Artificial Sequence: Synthetic oligonucleotide
cagacauguuugccuuuua

SEQ ID NO: 2995279 - RNA, 19 nt, Artificial Sequence
  Description of Artificial Sequence: Synthetic oligonucleotide
gcacgaaccaugccacugu

SEQ ID NO: 2995280 - RNA, 19 nt, Artificial Sequence
  Description of Artificial Sequence: Synthetic oligonucleotide
ccggguguaacuguguugu

SEQ ID NO: 2995281 - RNA, 19 nt, Artificial Sequence
  Description of Artificial Sequence: Synthetic oligonucleotide
cacuguuuccaugggcccu

SEQ ID NO: 2995282 - RNA, 19 nt, Artificial Sequence
  Description of Artificial Sequence: Synthetic oligonucleotide
cagaucacucugguuuugu

SEQ ID NO: 2995283 - RNA, 19 nt, Artificial Sequence
  Description of Artificial Sequence: Synthetic oligonucleotide
cccaaguagaauuccguuu

SEQ ID NO: 2995284 - RNA, 19 nt, Artificial Sequence
  Description of Artificial Sequence: Synthetic oligonucleotide
gccuuuuagaaguccuguu

SEQ ID NO: 2995285 - RNA, 19 nt, Artificial Sequence
  Description of Artificial Sequence: Synthetic oligonucleotide
gguuccggagaccucgcuu

SEQ ID NO: 2995286 - RNA, 19 nt, Artificial Sequence
  Description of Artificial Sequence: Synthetic oligonucleotide
gcccaaguagaauuccguu

SEQ ID NO: 2995287 - RNA, 19 nt, Artificial Sequence
  Description of Artificial Sequence: Synthetic oligonucleotide
cacggauucuguguccaau

SEQ ID NO: 2995288 - RNA, 19 nt, Artificial Sequence
  Description of Artificial Sequence: Synthetic oligonucleotide
ggguguaacuguguuguuu

SEQ ID NO: 2995289 - RNA, 19 nt, Artificial Sequence
  Description of Artificial Sequence: Synthetic oligonucleotide
cggagaccucgcuuauagc

SEQ ID NO: 2995290 - RNA, 19 nt, Artificial Sequence
  Description of Artificial Sequence: Synthetic oligonucleotide
cacucugguuuuguuuggu

SEQ ID NO: 2995291 - RNA, 19 nt, Artificial Sequence
  Description of Artificial Sequence: Synthetic oligonucleotide
gcacaucucuugcccaagu

SEQ ID NO: 2995292 - RNA, 19 nt, Artificial Sequence
  Description of Artificial Sequence: Synthetic oligonucleotide
cuucggaauuuggcacgaa

SEQ ID NO: 2995293 - RNA, 19 nt, Artificial Sequence
  Description of Artificial Sequence: Synthetic oligonucleotide
ggccuugcaccacagccuu

SEQ ID NO: 2995294 - RNA, 19 nt, Artificial Sequence
  Description of Artificial Sequence: Synthetic oligonucleotide
cugugugcucucucugguu

SEQ ID NO: 2995295 - RNA, 19 nt, Artificial Sequence
  Description of Artificial Sequence: Synthetic oligonucleotide
cacgaaccaugccacuguu

SEQ ID NO: 2995296 - RNA, 19 nt, Artificial Sequence
  Description of Artificial Sequence: Synthetic oligonucleotide
cguuucaucucgggcauaa

SEQ ID NO: 2995297 - RNA, 19 nt, Artificial Sequence
  Description of Artificial Sequence: Synthetic oligonucleotide
cgggcauaaacaccuucaa

SEQ ID NO: 2995298 - RNA, 19 nt, Artificial Sequence
  Description of Artificial Sequence: Synthetic oligonucleotide
caugggcccugguuacuuu

SEQ ID NO: 2995299 - RNA, 19 nt, Artificial Sequence
  Description of Artificial Sequence: Synthetic oligonucleotide
guacagcaucacacggauu

SEQ ID NO: 2995300 - RNA, 19 nt, Artificial Sequence
  Description of Artificial Sequence: Synthetic oligonucleotide
ccaauggcuuuugcaggaa

SEQ ID NO: 2995301 - RNA, 19 nt, Artificial Sequence
  Description of Artificial Sequence: Synthetic oligonucleotide
ccucgcuuauagccagcaa

SEQ ID NO: 2995302 - RNA, 19 nt, Artificial Sequence
  Description of Artificial Sequence: Synthetic oligonucleotide
ccagacauguuugccuuuu

SEQ ID NO: 2995303 - RNA, 19 nt, Artificial Sequence
  Description of Artificial Sequence: Synthetic oligonucleotide
gccuugcaccacagccuuc

SEQ ID NO: 2995304 - RNA, 19 nt, Artificial Sequence
  Description of Artificial Sequence: Synthetic oligonucleotide
ccccggguguaacuguguu

SEQ ID NO: 2995305 - RNA, 19 nt, Artificial Sequence
  Description of Artificial Sequence: Synthetic oligonucleotide
ccaugggcccugguuacuu

SEQ ID NO: 2995306 - RNA, 19 nt, Artificial Sequence
  Description of Artificial Sequence: Synthetic oligonucleotide
ccguuucaucucgggcaua

SEQ ID NO: 2995307 - RNA, 19 nt, Artificial Sequence
  Description of Artificial Sequence: Synthetic oligonucleotide
cggguguaacuguguuguu

SEQ ID NO: 2995308 - RNA, 19 nt, Artificial Sequence
  Description of Artificial Sequence: Synthetic oligonucleotide
ugcaucuucagcaggagca

SEQ ID NO: 2995309 - RNA, 19 nt, Artificial Sequence
  Description of Artificial Sequence: Synthetic oligonucleotide
aggagcaccacgugguucc

SEQ ID NO: 2995310 - RNA, 19 nt, Artificial Sequence
  Description of Artificial Sequence: Synthetic oligonucleotide
acuguggccacgugcaggc

SEQ ID NO: 2995311 - RNA, 19 nt, Artificial Sequence
  Description of Artificial Sequence: Synthetic oligonucleotide
ucggggaugagcacggacc

SEQ ID NO: 2995312 - RNA, 19 nt, Artificial Sequence
  Description of Artificial Sequence: Synthetic oligonucleotide
uaggucucggggaugagca

SEQ ID NO: 2995313 - RNA, 19 nt, Artificial Sequence
  Description of Artificial Sequence: Synthetic oligonucleotide
cacagugccaguaggcgcg

SEQ ID NO: 2995314 - RNA, 19 nt, Artificial Sequence
  Description of Artificial Sequence: Synthetic oligonucleotide
caagucuacgcucagcuca

SEQ ID NO: 2995315 - RNA, 19 nt, Artificial Sequence
  Description of Artificial Sequence: Synthetic oligonucleotide
guugcggucggacuguggc

SEQ ID NO: 2995316 - RNA, 19 nt, Artificial Sequence
  Description of Artificial Sequence: Synthetic oligonucleotide
gucguuggggcacagugcc

SEQ ID NO: 2995317 - RNA, 19 nt, Artificial Sequence
  Description of Artificial Sequence: Synthetic oligonucleotide
ucuacgcucagcucacgca

SEQ ID NO: 2995318 - RNA, 19 nt, Artificial Sequence
  Description of Artificial Sequence: Synthetic oligonucleotide
ucggacuguggccacgugc

SEQ ID NO: 2995319 - RNA, 19 nt, Artificial Sequence
  Description of Artificial Sequence: Synthetic oligonucleotide
ugucguuggggcacagugc

SEQ ID NO: 2995320 - RNA, 19 nt, Artificial Sequence
  Description of Artificial Sequence: Synthetic oligonucleotide
cacgcagugcgcauggccc

SEQ ID NO: 2995321 - RNA, 19 nt, Artificial Sequence
  Description of Artificial Sequence: Synthetic oligonucleotide
aagucuacgcucagcucac

SEQ ID NO: 2995322 - RNA, 19 nt, Artificial Sequence
  Description of Artificial Sequence: Synthetic oligonucleotide
acgugguucccauaccgag

SEQ ID NO: 2995323 - RNA, 19 nt, Artificial Sequence
  Description of Artificial Sequence: Synthetic oligonucleotide
cuacgcucagcucacgcag

SEQ ID NO: 2995324 - RNA, 19 nt, Artificial Sequence
  Description of Artificial Sequence: Synthetic oligonucleotide
gugucguuggggcacagug

SEQ ID NO: 2995325 - RNA, 19 nt, Artificial Sequence
  Description of Artificial Sequence: Synthetic oligonucleotide
ucacgcagugcgcauggcc

SEQ ID NO: 2995326 - RNA, 19 nt, Artificial Sequence
  Description of Artificial Sequence: Synthetic oligonucleotide
gaggguugcggucggacug

SEQ ID NO: 2995327 - RNA, 19 nt, Artificial Sequence
  Description of Artificial Sequence: Synthetic oligonucleotide
uguggccacgugcaggcgc

SEQ ID NO: 2995328 - RNA, 19 nt, Artificial Sequence
  Description of Artificial Sequence: Synthetic oligonucleotide
auaccgaggguugcggucg

SEQ ID NO: 2995329 - RNA, 19 nt, Artificial Sequence
  Description of Artificial Sequence: Synthetic oligonucleotide
agcacggaccgcucugcgc

SEQ ID NO: 2995330 - RNA, 19 nt, Artificial Sequence
  Description of Artificial Sequence: Synthetic oligonucleotide
accacgugguucccauacc

SEQ ID NO: 2995331 - RNA, 19 nt, Artificial Sequence
  Description of Artificial Sequence: Synthetic oligonucleotide
caguaggcgcgauagcagc

SEQ ID NO: 2995332 - RNA, 19 nt, Artificial Sequence
  Description of Artificial Sequence: Synthetic oligonucleotide
ugcacgcaggcccugcagc

SEQ ID NO: 2995333 - RNA, 19 nt, Artificial Sequence
  Description of Artificial Sequence: Synthetic oligonucleotide
cugugggugucguuggggc

SEQ ID NO: 2995334 - RNA, 19 nt, Artificial Sequence
  Description of Artificial Sequence: Synthetic oligonucleotide
ucugcgcgcaagucuacgc

SEQ ID NO: 2995335 - RNA, 19 nt, Artificial Sequence
  Description of Artificial Sequence: Synthetic oligonucleotide
acgcagugcgcauggcccc

SEQ ID NO: 2995336 - RNA, 19 nt, Artificial Sequence
  Description of Artificial Sequence: Synthetic oligonucleotide
uggggcacagugccaguag

SEQ ID NO: 2995337 - RNA, 19 nt, Artificial Sequence
  Description of Artificial Sequence: Synthetic oligonucleotide
gagccugcaucuucagcag

SEQ ID NO: 2995338 - RNA, 19 nt, Artificial Sequence
  Description of Artificial Sequence: Synthetic oligonucleotide
uuggcaguuguuggccugg

SEQ ID NO: 2995339 - RNA, 19 nt, Artificial Sequence
  Description of Artificial Sequence: Synthetic oligonucleotide
gacuguggccacgugcagg

SEQ ID NO: 2995340 - RNA, 19 nt, Artificial Sequence
  Description of Artificial Sequence: Synthetic oligonucleotide
ucagcucacgcagugcgca

SEQ ID NO: 2995341 - RNA, 19 nt, Artificial Sequence
  Description of Artificial Sequence: Synthetic oligonucleotide
ugcagcgccuucagcagca

SEQ ID NO: 2995342 - RNA, 19 nt, Artificial Sequence
  Description of Artificial Sequence: Synthetic oligonucleotide
gcucagcucacgcagugcg

SEQ ID NO: 2995343 - RNA, 19 nt, Artificial Sequence
  Description of Artificial Sequence: Synthetic oligonucleotide
agcuccacggacacccugc

SEQ ID NO: 2995344 - RNA, 19 nt, Artificial Sequence
  Description of Artificial Sequence: Synthetic oligonucleotide
uaggcgcgauagcagcggg

SEQ ID NO: 2995345 - RNA, 19 nt, Artificial Sequence
  Description of Artificial Sequence: Synthetic oligonucleotide
cagcaggagcaccacgugg

SEQ ID NO: 2995346 - RNA, 19 nt, Artificial Sequence
  Description of Artificial Sequence: Synthetic oligonucleotide
uguccccuguccccugccg

SEQ ID NO: 2995347 - RNA, 19 nt, Artificial Sequence
  Description of Artificial Sequence: Synthetic oligonucleotide
cuucagcagcagcagcgcg

SEQ ID NO: 2995348 - RNA, 19 nt, Artificial Sequence
  Description of Artificial Sequence: Synthetic oligonucleotide
caccacgugguucccauac

SEQ ID NO: 2995349 - RNA, 19 nt, Artificial Sequence
  Description of Artificial Sequence: Synthetic oligonucleotide
cauaccgaggguugcgguc

SEQ ID NO: 2995350 - RNA, 19 nt, Artificial Sequence
  Description of Artificial Sequence: Synthetic oligonucleotide
gcacggaccgcucugcgcg

SEQ ID NO: 2995351 - RNA, 19 nt, Artificial Sequence
  Description of Artificial Sequence: Synthetic oligonucleotide
gugccaguaggcgcgauag

SEQ ID NO: 2995352 - RNA, 19 nt, Artificial Sequence
  Description of Artificial Sequence: Synthetic oligonucleotide
aguaggcgcgauagcagcg

SEQ ID NO: 2995353 - RNA, 19 nt, Artificial Sequence
  Description of Artificial Sequence: Synthetic oligonucleotide
augagcacggaccgcucug

SEQ ID NO: 2995354 - RNA, 19 nt, Artificial Sequence
  Description of Artificial Sequence: Synthetic oligonucleotide
ugugggugucguuggggca

SEQ ID NO: 2995355 - RNA, 19 nt, Artificial Sequence
  Description of Artificial Sequence: Synthetic oligonucleotide
ucccauaccgaggguugcg

SEQ ID NO: 2995356 - RNA, 19 nt, Artificial Sequence
  Description of Artificial Sequence: Synthetic oligonucleotide
gucuacgcucagcucacgc

SEQ ID NO: 2995357 - RNA, 19 nt, Artificial Sequence
  Description of Artificial Sequence: Synthetic oligonucleotide
ugcggucggacuguggcca

SEQ ID NO: 2995358 - RNA, 19 nt, Artificial Sequence
  Description of Artificial Sequence: Synthetic oligonucleotide
gcccacgccacucugcacg

SEQ ID NO: 2995359 - RNA, 19 nt, Artificial Sequence
  Description of Artificial Sequence: Synthetic oligonucleotide
guaggcgcgauagcagcgg

SEQ ID NO: 2995360 - RNA, 19 nt, Artificial Sequence
  Description of Artificial Sequence: Synthetic oligonucleotide
uguccccugccgcugcgcc

SEQ ID NO: 2995361 - RNA, 19 nt, Artificial Sequence
  Description of Artificial Sequence: Synthetic oligonucleotide
agcgccuucagcagcagca

SEQ ID NO: 2995362 - RNA, 19 nt, Artificial Sequence
  Description of Artificial Sequence: Synthetic oligonucleotide
guucccauaccgaggguug

SEQ ID NO: 2995363 - RNA, 19 nt, Artificial Sequence
  Description of Artificial Sequence: Synthetic oligonucleotide
uggccugguaggucucggg

SEQ ID NO: 2995364 - RNA, 19 nt, Artificial Sequence
  Description of Artificial Sequence: Synthetic oligonucleotide
ggcacagugccaguaggcg

SEQ ID NO: 2995365 - RNA, 19 nt, Artificial Sequence
  Description of Artificial Sequence: Synthetic oligonucleotide
aguuguuggccugguaggu

SEQ ID NO: 2995366 - RNA, 19 nt, Artificial Sequence
  Description of Artificial Sequence: Synthetic oligonucleotide
guaggucucggggaugagc

SEQ ID NO: 2995367 - RNA, 19 nt, Artificial Sequence
  Description of Artificial Sequence: Synthetic oligonucleotide
uugcggucggacuguggcc

SEQ ID NO: 2995368 - RNA, 19 nt, Artificial Sequence
  Description of Artificial Sequence: Synthetic oligonucleotide
ugcgcgcaagucuacgcuc

SEQ ID NO: 2995369 - RNA, 19 nt, Artificial Sequence
  Description of Artificial Sequence: Synthetic oligonucleotide
cucagcucacgcagugcgc

SEQ ID NO: 2995370 - RNA, 19 nt, Artificial Sequence
  Description of Artificial Sequence: Synthetic oligonucleotide
gagcacggaccgcucugcg

SEQ ID NO: 2995371 - RNA, 19 nt, Artificial Sequence
  Description of Artificial Sequence: Synthetic oligonucleotide
aggucucggggaugagcac

SEQ ID NO: 2995372 - RNA, 19 nt, Artificial Sequence
  Description of Artificial Sequence: Synthetic oligonucleotide
uacgcucagcucacgcagu

SEQ ID NO: 2995373 - RNA, 19 nt, Artificial Sequence
  Description of Artificial Sequence: Synthetic oligonucleotide
ucugcacgcaggcccugca

SEQ ID NO: 2995374 - RNA, 19 nt, Artificial Sequence
  Description of Artificial Sequence: Synthetic oligonucleotide
ugagcacggaccgcucugc

SEQ ID NO: 2995375 - RNA, 19 nt, Artificial Sequence
  Description of Artificial Sequence: Synthetic oligonucleotide
cacgccacucugcacgcag

SEQ ID NO: 2995376 - RNA, 19 nt, Artificial Sequence
  Description of Artificial Sequence: Synthetic oligonucleotide
gccuucagcagcagcagcg

SEQ ID NO: 2995377 - RNA, 19 nt, Artificial Sequence
  Description of Artificial Sequence: Synthetic oligonucleotide
ggucucggggaugagcacg

SEQ ID NO: 2995378 - RNA, 19 nt, Artificial Sequence
  Description of Artificial Sequence: Synthetic oligonucleotide
ggccugguaggucucgggg

SEQ ID NO: 2995379 - RNA, 19 nt, Artificial Sequence
  Description of Artificial Sequence: Synthetic oligonucleotide
gucucggggaugagcacgg

SEQ ID NO: 2995380 - RNA, 19 nt, Artificial Sequence
  Description of Artificial Sequence: Synthetic oligonucleotide
caucuucagcaggagcacc

SEQ ID NO: 2995381 - RNA, 19 nt, Artificial Sequence
  Description of Artificial Sequence: Synthetic oligonucleotide
ccacgugguucccauaccg

SEQ ID NO: 2995382 - RNA, 19 nt, Artificial Sequence
  Description of Artificial Sequence: Synthetic oligonucleotide
ccacucugcacgcaggccc

SEQ ID NO: 2995383 - RNA, 19 nt, Artificial Sequence
  Description of Artificial Sequence: Synthetic oligonucleotide
agcaccacgugguucccau

SEQ ID NO: 2995384 - RNA, 19 nt, Artificial Sequence
  Description of Artificial Sequence: Synthetic oligonucleotide
uuggccugguaggucucgg

SEQ ID NO: 2995385 - RNA, 19 nt, Artificial Sequence
  Description of Artificial Sequence: Synthetic oligonucleotide
uucccauaccgaggguugc

SEQ ID NO: 2995386 - RNA, 19 nt, Artificial Sequence
  Description of Artificial Sequence: Synthetic oligonucleotide
ugccaguaggcgcgauagc

SEQ ID NO: 2995387 - RNA, 19 nt, Artificial Sequence
  Description of Artificial Sequence: Synthetic oligonucleotide
uaccgaggguugcggucgg

SEQ ID NO: 2995388 - RNA, 19 nt, Artificial Sequence
  Description of Artificial Sequence: Synthetic oligonucleotide
acgcucagcucacgcagug

SEQ ID NO: 2995389 - RNA, 19 nt, Artificial Sequence
  Description of Artificial Sequence: Synthetic oligonucleotide
ggggcacagugccaguagg

SEQ ID NO: 2995390 - RNA, 19 nt, Artificial Sequence
  Description of Artificial Sequence: Synthetic oligonucleotide
cucggggaugagcacggac

SEQ ID NO: 2995391 - RNA, 19 nt, Artificial Sequence
  Description of Artificial Sequence: Synthetic oligonucleotide
gcacagugccaguaggcgc

SEQ ID NO: 2995392 - RNA, 19 nt, Artificial Sequence
  Description of Artificial Sequence: Synthetic oligonucleotide
cgugcaggcgccuuggcag

SEQ ID NO: 2995393 - RNA, 19 nt, Artificial Sequence
  Description of Artificial Sequence: Synthetic oligonucleotide
ggcagcugccugcagcucc

SEQ ID NO: 2995394 - RNA, 19 nt, Artificial Sequence
  Description of Artificial Sequence: Synthetic oligonucleotide
gcucacgcagugcgcaugg

SEQ ID NO: 2995395 - RNA, 19 nt, Artificial Sequence
  Description of Artificial Sequence: Synthetic oligonucleotide
guuggccugguaggucucg

SEQ ID NO: 2995396 - RNA, 19 nt, Artificial Sequence
  Description of Artificial Sequence: Synthetic oligonucleotide
ccaguaggcgcgauagcag

SEQ ID NO: 2995397 - RNA, 19 nt, Artificial Sequence
  Description of Artificial Sequence: Synthetic oligonucleotide
uguuggccugguaggucuc

SEQ ID NO: 2995398 - RNA, 19 nt, Artificial Sequence
  Description of Artificial Sequence: Synthetic oligonucleotide
gcacgcaggcccugcagcg

SEQ ID NO: 2995399 - RNA, 19 nt, Artificial Sequence
  Description of Artificial Sequence: Synthetic oligonucleotide
uccccuguccccugccgcu

SEQ ID NO: 2995400 - RNA, 19 nt, Artificial Sequence
  Description of Artificial Sequence: Synthetic oligonucleotide
cugcagcgccuucagcagc

SEQ ID NO: 2995401 - RNA, 19 nt, Artificial Sequence
  Description of Artificial Sequence: Synthetic oligonucleotide
ugccugcagcuccacggac

SEQ ID NO: 2995402 - RNA, 19 nt, Artificial Sequence
  Description of Artificial Sequence: Synthetic oligonucleotide
cucugcgcgcaagucuacg

SEQ ID NO: 2995403 - RNA, 19 nt, Artificial Sequence
  Description of Artificial Sequence: Synthetic oligonucleotide
ucguuggggcacagugcca

SEQ ID NO: 2995404 - RNA, 19 nt, Artificial Sequence
  Description of Artificial Sequence: Synthetic oligonucleotide
gaugagcacggaccgcucu

SEQ ID NO: 2995405 - RNA, 19 nt, Artificial Sequence
  Description of Artificial Sequence: Synthetic oligonucleotide
gugggugucguuggggcac

SEQ ID NO: 2995406 - RNA, 19 nt, Artificial Sequence
  Description of Artificial Sequence: Synthetic oligonucleotide
ggcgccuuggcaguuguug

SEQ ID NO: 2995407 - RNA, 19 nt, Artificial Sequence
  Description of Artificial Sequence: Synthetic oligonucleotide
agugccaguaggcgcgaua

SEQ ID NO: 2995408 - RNA, 19 nt, Artificial Sequence
  Description of Artificial Sequence: Synthetic oligonucleotide
uccccugccgcugcgcccc

SEQ ID NO: 2995409 - RNA, 19 nt, Artificial Sequence
  Description of Artificial Sequence: Synthetic oligonucleotide
ggggcugugggugucguug

SEQ ID NO: 2995410 - RNA, 19 nt, Artificial Sequence
  Description of Artificial Sequence: Synthetic oligonucleotide
accgcucugcgcgcaaguc

SEQ ID NO: 2995411 - RNA, 19 nt, Artificial Sequence
  Description of Artificial Sequence: Synthetic oligonucleotide
guuguuggccugguagguc

SEQ ID NO: 2995412 - RNA, 19 nt, Artificial Sequence
  Description of Artificial Sequence: Synthetic oligonucleotide
cacgugguucccauaccga

SEQ ID NO: 2995413 - RNA, 19 nt, Artificial Sequence
  Description of Artificial Sequence: Synthetic oligonucleotide
agcucugaggcagcugccu

SEQ ID NO: 2995414 - RNA, 19 nt, Artificial Sequence
  Description of Artificial Sequence: Synthetic oligonucleotide
cgugguucccauaccgagg

SEQ ID NO: 2995415 - RNA, 19 nt, Artificial Sequence
  Description of Artificial Sequence: Synthetic oligonucleotide
guccccuguccccugccgc

SEQ ID NO: 2995416 - RNA, 19 nt, Artificial Sequence
  Description of Artificial Sequence: Synthetic oligonucleotide
gccaguaggcgcgauagca

SEQ ID NO: 2995417 - RNA, 19 nt, Artificial Sequence
  Description of Artificial Sequence: Synthetic oligonucleotide
cugcacgcaggcccugcag

SEQ ID NO: 2995418 - RNA, 19 nt, Artificial Sequence
  Description of Artificial Sequence: Synthetic oligonucleotide
gcugugggugucguugggg

SEQ ID NO: 2995419 - RNA, 19 nt, Artificial Sequence
  Description of Artificial Sequence: Synthetic oligonucleotide
uucccgcccacgccacucu

SEQ ID NO: 2995420 - RNA, 19 nt, Artificial Sequence
  Description of Artificial Sequence: Synthetic oligonucleotide
ugcgccccgcccucccgcg

SEQ ID NO: 2995421 - RNA, 19 nt, Artificial Sequence
  Description of Artificial Sequence: Synthetic oligonucleotide
ugccgcugcgccccgcccu

SEQ ID NO: 2995422 - RNA, 19 nt, Artificial Sequence
  Description of Artificial Sequence: Synthetic oligonucleotide
gggcugugggugucguugg

SEQ ID NO: 2995423 - RNA, 19 nt, Artificial Sequence
  Description of Artificial Sequence: Synthetic oligonucleotide
agucuacgcucagcucacg

SEQ ID NO: 2995424 - RNA, 19 nt, Artificial Sequence
  Description of Artificial Sequence: Synthetic oligonucleotide
uggcaggcccgggaggccc

SEQ ID NO: 2995425 - RNA, 19 nt, Artificial Sequence
  Description of Artificial Sequence: Synthetic oligonucleotide
guggccacgugcaggcgcc

SEQ ID NO: 2995426 - RNA, 19 nt, Artificial Sequence
  Description of Artificial Sequence: Synthetic oligonucleotide
gaggccccgcagcucugag

SEQ ID NO: 2995427 - RNA, 19 nt, Artificial Sequence
  Description of Artificial Sequence: Synthetic oligonucleotide
agcucacgcagugcgcaug

SEQ ID NO: 2995428 - RNA, 19 nt, Artificial Sequence
  Description of Artificial Sequence: Synthetic oligonucleotide
agcagcgcgcgcaacgggu

SEQ ID NO: 2995429 - RNA, 19 nt, Artificial Sequence
  Description of Artificial Sequence: Synthetic oligonucleotide
uuggggcacagugccagua

SEQ ID NO: 2995430 - RNA, 19 nt, Artificial Sequence
  Description of Artificial Sequence: Synthetic oligonucleotide
gguggcaggcccgggaggc

SEQ ID NO: 2995431 - RNA, 19 nt, Artificial Sequence
  Description of Artificial Sequence: Synthetic oligonucleotide
ucccgcgcccuucccgccc

SEQ ID NO: 2995432 - RNA, 19 nt, Artificial Sequence
  Description of Artificial Sequence: Synthetic oligonucleotide
cagcagcgcgcgcaacggg

SEQ ID NO: 2995433 - RNA, 19 nt, Artificial Sequence
  Description of Artificial Sequence: Synthetic oligonucleotide
gcuccacggacacccugcg

SEQ ID NO: 2995434 - RNA, 19 nt, Artificial Sequence
  Description of Artificial Sequence: Synthetic oligonucleotide
guccccggggcugugggug

SEQ ID NO: 2995435 - RNA, 19 nt, Artificial Sequence
  Description of Artificial Sequence: Synthetic oligonucleotide
caggagcaccacgugguuc

SEQ ID NO: 2995436 - RNA, 19 nt, Artificial Sequence
  Description of Artificial Sequence: Synthetic oligonucleotide
ucccgcccacgccacucug

SEQ ID NO: 2995437 - RNA, 19 nt, Artificial Sequence
  Description of Artificial Sequence: Synthetic oligonucleotide
gccuuggcaguuguuggcc

SEQ ID NO: 2995438 - RNA, 19 nt, Artificial Sequence
  Description of Artificial Sequence: Synthetic oligonucleotide
gcagcagcgcgcgcaacgg

SEQ ID NO: 2995439 - RNA, 19 nt, Artificial Sequence
  Description of Artificial Sequence: Synthetic oligonucleotide
aggguugcggucggacugu

SEQ ID NO: 2995440 - RNA, 19 nt, Artificial Sequence
  Description of Artificial Sequence: Synthetic oligonucleotide
cggggaugagcacggaccg

SEQ ID NO: 2995441 - RNA, 19 nt, Artificial Sequence
  Description of Artificial Sequence: Synthetic oligonucleotide
ggcugugggugucguuggg

SEQ ID NO: 2995442 - RNA, 19 nt, Artificial Sequence
  Description of Artificial Sequence: Synthetic oligonucleotide
gcaagucuacgcucagcuc

SEQ ID NO: 2995443 - RNA, 19 nt, Artificial Sequence
  Description of Artificial Sequence: Synthetic oligonucleotide
cagcgcgcgcaacgggucc

SEQ ID NO: 2995444 - RNA, 19 nt, Artificial Sequence
  Description of Artificial Sequence: Synthetic oligonucleotide
cagcuccacggacacccug

SEQ ID NO: 2995445 - RNA, 19 nt, Artificial Sequence
  Description of Artificial Sequence: Synthetic oligonucleotide
gcaucuucagcaggagcac

SEQ ID NO: 2995446 - RNA, 19 nt, Artificial Sequence
  Description of Artificial Sequence: Synthetic oligonucleotide
acgccacucugcacgcagg

SEQ ID NO: 2995447 - RNA, 19 nt, Artificial Sequence
  Description of Artificial Sequence: Synthetic oligonucleotide
cacggaccgcucugcgcgc

SEQ ID NO: 2995448 - RNA, 19 nt, Artificial Sequence
  Description of Artificial Sequence: Synthetic oligonucleotide
cccucuguccccugucccc

SEQ ID NO: 2995449 - RNA, 19 nt, Artificial Sequence
  Description of Artificial Sequence: Synthetic oligonucleotide
gggcacagugccaguaggc

SEQ ID NO: 2995450 - RNA, 19 nt, Artificial Sequence
  Description of Artificial Sequence: Synthetic oligonucleotide
cuucccgcccacgccacuc

SEQ ID NO: 2995451 - RNA, 19 nt, Artificial Sequence
  Description of Artificial Sequence: Synthetic oligonucleotide
cacgcaggcccugcagcgc

SEQ ID NO: 2995452 - RNA, 19 nt, Artificial Sequence
  Description of Artificial Sequence: Synthetic oligonucleotide
cucugcacgcaggcccugc

SEQ ID NO: 2995453 - RNA, 19 nt, Artificial Sequence
  Description of Artificial Sequence: Synthetic oligonucleotide
cugccugcagcuccacgga

SEQ ID NO: 2995454 - RNA, 19 nt, Artificial Sequence
  Description of Artificial Sequence: Synthetic oligonucleotide
ugggugucguuggggcaca

SEQ ID NO: 2995455 - RNA, 19 nt, Artificial Sequence
  Description of Artificial Sequence: Synthetic oligonucleotide
gccugguaggucucgggga

SEQ ID NO: 2995456 - RNA, 19 nt, Artificial Sequence
  Description of Artificial Sequence: Synthetic oligonucleotide
ggacuguggccacgugcag

SEQ ID NO: 2995457 - RNA, 19 nt, Artificial Sequence
  Description of Artificial Sequence: Synthetic oligonucleotide
cacgugcaggcgccuuggc

SEQ ID NO: 2995458 - RNA, 19 nt, Artificial Sequence
  Description of Artificial Sequence: Synthetic oligonucleotide
cugguaggucucggggaug

SEQ ID NO: 2995459 - RNA, 19 nt, Artificial Sequence
  Description of Artificial Sequence: Synthetic oligonucleotide
ggguccccggggcuguggg

SEQ ID NO: 2995460 - RNA, 19 nt, Artificial Sequence
  Description of Artificial Sequence: Synthetic oligonucleotide
caacggguccccggggcug

SEQ ID NO: 2995461 - RNA, 19 nt, Artificial Sequence
  Description of Artificial Sequence: Synthetic oligonucleotide
cccauaccgaggguugcgg

SEQ ID NO: 2995462 - RNA, 19 nt, Artificial Sequence
  Description of Artificial Sequence: Synthetic oligonucleotide
uccccggggcugugggugu

SEQ ID NO: 2995463 - RNA, 19 nt, Artificial Sequence
  Description of Artificial Sequence: Synthetic oligonucleotide
cugaggcagcugccugcag

SEQ ID NO: 2995464 - RNA, 19 nt, Artificial Sequence
  Description of Artificial Sequence: Synthetic oligonucleotide
cugcgccccgcccucccgc

SEQ ID NO: 2995465 - RNA, 19 nt, Artificial Sequence
  Description of Artificial Sequence: Synthetic oligonucleotide
cguuggggcacagugccag

SEQ ID NO: 2995466 - RNA, 19 nt, Artificial Sequence
  Description of Artificial Sequence: Synthetic oligonucleotide
cucacgcagugcgcauggc

SEQ ID NO: 2995467 - RNA, 19 nt, Artificial Sequence
  Description of Artificial Sequence: Synthetic oligonucleotide
ccugcaucuucagcaggag

SEQ ID NO: 2995468 - RNA, 19 nt, Artificial Sequence
  Description of Artificial Sequence: Synthetic oligonucleotide
gucggacuguggccacgug

SEQ ID NO: 2995469 - RNA, 19 nt, Artificial Sequence
  Description of Artificial Sequence: Synthetic oligonucleotide
ccucccgcgcccuucccgc

SEQ ID NO: 2995470 - RNA, 19 nt, Artificial Sequence
  Description of Artificial Sequence: Synthetic oligonucleotide
aggcagcugccugcagcuc

SEQ ID NO: 2995471 - RNA, 19 nt, Artificial Sequence
  Description of Artificial Sequence: Synthetic oligonucleotide
ggcgcagcggguggcaggc

SEQ ID NO: 2995472 - RNA, 19 nt, Artificial Sequence
  Description of Artificial Sequence: Synthetic oligonucleotide
cggacuguggccacgugca

SEQ ID NO: 2995473 - RNA, 19 nt, Artificial Sequence
  Description of Artificial Sequence: Synthetic oligonucleotide
gccacgugcaggcgccuug

SEQ ID NO: 2995474 - RNA, 19 nt, Artificial Sequence
  Description of Artificial Sequence: Synthetic oligonucleotide
gguugcggucggacugugg

SEQ ID NO: 2995475 - RNA, 19 nt, Artificial Sequence
  Description of Artificial Sequence: Synthetic oligonucleotide
ucucggggaugagcacgga

SEQ ID NO: 2995476 - RNA, 19 nt, Artificial Sequence
  Description of Artificial Sequence: Synthetic oligonucleotide
gggaugagcacggaccgcu

SEQ ID NO: 2995477 - RNA, 19 nt, Artificial Sequence
  Description of Artificial Sequence: Synthetic oligonucleotide
cuguggccacgugcaggcg

SEQ ID NO: 2995478 - RNA, 19 nt, Artificial Sequence
  Description of Artificial Sequence: Synthetic oligonucleotide
acagugccaguaggcgcga

SEQ ID NO: 2995479 - RNA, 19 nt, Artificial Sequence
  Description of Artificial Sequence: Synthetic oligonucleotide
cugcgcgcaagucuacgcu

SEQ ID NO: 2995480 - RNA, 19 nt, Artificial Sequence
  Description of Artificial Sequence: Synthetic oligonucleotide
cucccgcgcccuucccgcc

SEQ ID NO: 2995481 - RNA, 19 nt, Artificial Sequence
  Description of Artificial Sequence: Synthetic oligonucleotide
cgcgcaacggguccccggg

SEQ ID NO: 2995482 - RNA, 19 nt, Artificial Sequence
  Description of Artificial Sequence: Synthetic oligonucleotide
cccacgccacucugcacgc

SEQ ID NO: 2995483 - RNA, 19 nt, Artificial Sequence
  Description of Artificial Sequence: Synthetic oligonucleotide
ccccgcagcucugaggcag

SEQ ID NO: 2995484 - RNA, 19 nt, Artificial Sequence
  Description of Artificial Sequence: Synthetic oligonucleotide
gcagcggguggcaggcccg

SEQ ID NO: 2995485 - RNA, 19 nt, Artificial Sequence
  Description of Artificial Sequence: Synthetic oligonucleotide
cagcggguggcaggcccgg

SEQ ID NO: 2995486 - RNA, 19 nt, Artificial Sequence
  Description of Artificial Sequence: Synthetic oligonucleotide
cacucugcacgcaggcccu

SEQ ID NO: 2995487 - RNA, 19 nt, Artificial Sequence
  Description of Artificial Sequence: Synthetic oligonucleotide
gaccgcucugcgcgcaagu

SEQ ID NO: 2995488 - RNA, 19 nt, Artificial Sequence
  Description of Artificial Sequence: Synthetic oligonucleotide
cuguccccugccgcugcgc

SEQ ID NO: 2995489 - RNA, 19 nt, Artificial Sequence
  Description of Artificial Sequence: Synthetic oligonucleotide
ccccucuguccccuguccc

SEQ ID NO: 2995490 - RNA, 19 nt, Artificial Sequence
  Description of Artificial Sequence: Synthetic oligonucleotide
gcgcgcaacggguccccgg

SEQ ID NO: 2995491 - RNA, 19 nt, Artificial Sequence
  Description of Artificial Sequence: Synthetic oligonucleotide
gcgccuucagcagcagcag

SEQ ID NO: 2995492 - RNA, 19 nt, Artificial Sequence
  Description of Artificial Sequence: Synthetic oligonucleotide
gagcaccacgugguuccca

SEQ ID NO: 2995493 - RNA, 19 nt, Artificial Sequence
  Description of Artificial Sequence: Synthetic oligonucleotide
aggcccgggaggccccgca

SEQ ID NO: 2995494 - RNA, 19 nt, Artificial Sequence
  Description of Artificial Sequence: Synthetic oligonucleotide
ccacgugcaggcgccuugg

SEQ ID NO: 2995495 - RNA, 19 nt, Artificial Sequence
  Description of Artificial Sequence: Synthetic oligonucleotide
gccacucugcacgcaggcc

SEQ ID NO: 2995496 - RNA, 19 nt, Artificial Sequence
  Description of Artificial Sequence: Synthetic oligonucleotide
gcgcccuucccgcccacgc

SEQ ID NO: 2995497 - RNA, 19 nt, Artificial Sequence
  Description of Artificial Sequence: Synthetic oligonucleotide
gguaggucucggggaugag

SEQ ID NO: 2995498 - RNA, 19 nt, Artificial Sequence
  Description of Artificial Sequence: Synthetic oligonucleotide
agcggguggcaggcccggg

SEQ ID NO: 2995499 - RNA, 19 nt, Artificial Sequence
  Description of Artificial Sequence: Synthetic oligonucleotide
ggggaugagcacggaccgc

SEQ ID NO: 2995500 - RNA, 19 nt, Artificial Sequence
  Description of Artificial Sequence: Synthetic oligonucleotide
gguucccauaccgaggguu

SEQ ID NO: 2995501 - RNA, 19 nt, Artificial Sequence
  Description of Artificial Sequence: Synthetic oligonucleotide
cgcaagucuacgcucagcu

SEQ ID NO: 2995502 - RNA, 19 nt, Artificial Sequence
  Description of Artificial Sequence: Synthetic oligonucleotide
guggcaggcccgggaggcc

SEQ ID NO: 2995503 - RNA, 19 nt, Artificial Sequence
  Description of Artificial Sequence: Synthetic oligonucleotide
gcgcaacggguccccgggg

SEQ ID NO: 2995504 - RNA, 19 nt, Artificial Sequence
  Description of Artificial Sequence: Synthetic oligonucleotide
cgcaacggguccccggggc

SEQ ID NO: 2995505 - RNA, 19 nt, Artificial Sequence
  Description of Artificial Sequence: Synthetic oligonucleotide
cccucccgcgcccuucccg

SEQ ID NO: 2995506 - RNA, 19 nt, Artificial Sequence
  Description of Artificial Sequence: Synthetic oligonucleotide
guuggggcacagugccagu

SEQ ID NO: 2995507 - RNA, 19 nt, Artificial Sequence
  Description of Artificial Sequence: Synthetic oligonucleotide
gcugcgccccgcccucccg

SEQ ID NO: 2995508 - RNA, 19 nt, Artificial Sequence
  Description of Artificial Sequence: Synthetic oligonucleotide
gugcaggcgccuuggcagu

SEQ ID NO: 2995509 - RNA, 19 nt, Artificial Sequence
  Description of Artificial Sequence: Synthetic oligonucleotide
gcgcaagucuacgcucagc

SEQ ID NO: 2995510 - RNA, 19 nt, Artificial Sequence
  Description of Artificial Sequence: Synthetic oligonucleotide
cccgcccacgccacucugc

SEQ ID NO: 2995511 - RNA, 19 nt, Artificial Sequence
  Description of Artificial Sequence: Synthetic oligonucleotide
ugcaggcgccuuggcaguu

SEQ ID NO: 2995512 - RNA, 19 nt, Artificial Sequence
  Description of Artificial Sequence: Synthetic oligonucleotide
cgccacucugcacgcaggc

SEQ ID NO: 2995513 - RNA, 19 nt, Artificial Sequence
  Description of Artificial Sequence: Synthetic oligonucleotide
cgcagcggguggcaggccc

SEQ ID NO: 2995514 - RNA, 19 nt, Artificial Sequence
  Description of Artificial Sequence: Synthetic oligonucleotide
acggaccgcucugcgcgca

SEQ ID NO: 2995515 - RNA, 19 nt, Artificial Sequence
  Description of Artificial Sequence: Synthetic oligonucleotide
cccgcagcucugaggcagc

SEQ ID NO: 2995516 - RNA, 19 nt, Artificial Sequence
  Description of Artificial Sequence: Synthetic oligonucleotide
gcgcgcaagucuacgcuca

SEQ ID NO: 2995517 - RNA, 19 nt, Artificial Sequence
  Description of Artificial Sequence: Synthetic oligonucleotide
ggaccgcucugcgcgcaag

SEQ ID NO: 2995518 - RNA, 19 nt, Artificial Sequence
  Description of Artificial Sequence: Synthetic oligonucleotide
gcccgggaggccccgcagc

SEQ ID NO: 2995519 - RNA, 19 nt, Artificial Sequence
  Description of Artificial Sequence: Synthetic oligonucleotide
ggaugagcacggaccgcuc

SEQ ID NO: 2995520 - RNA, 19 nt, Artificial Sequence
  Description of Artificial Sequence: Synthetic oligonucleotide
ggcccgggaggccccgcag

SEQ ID NO: 2995521 - RNA, 19 nt, Artificial Sequence
  Description of Artificial Sequence: Synthetic oligonucleotide
ccgaggguugcggucggac

SEQ ID NO: 2995522 - RNA, 19 nt, Artificial Sequence
  Description of Artificial Sequence: Synthetic oligonucleotide
gcagcagcagcgcgcgcaa

SEQ ID NO: 2995523 - RNA, 19 nt, Artificial Sequence
  Description of Artificial Sequence: Synthetic oligonucleotide
caggcccugcagcgccuuc

SEQ ID NO: 2995524 - RNA, 19 nt, Artificial Sequence
  Description of Artificial Sequence: Synthetic oligonucleotide
uggccacgugcaggcgccu

SEQ ID NO: 2995525 - RNA, 19 nt, Artificial Sequence
  Description of Artificial Sequence: Synthetic oligonucleotide
gcaggcgccuuggcaguug

SEQ ID NO: 2995526 - RNA, 19 nt, Artificial Sequence
  Description of Artificial Sequence: Synthetic oligonucleotide
gcggguggcaggcccggga

SEQ ID NO: 2995527 - RNA, 19 nt, Artificial Sequence
  Description of Artificial Sequence: Synthetic oligonucleotide
accgaggguugcggucgga

SEQ ID NO: 2995528 - RNA, 19 nt, Artificial Sequence
  Description of Artificial Sequence: Synthetic oligonucleotide
gcccugcagcgccuucagc

SEQ ID NO: 2995529 - RNA, 19 nt, Artificial Sequence
  Description of Artificial Sequence: Synthetic oligonucleotide
cccuguccccugccgcugc

SEQ ID NO: 2995530 - RNA, 19 nt, Artificial Sequence
  Description of Artificial Sequence: Synthetic oligonucleotide
cagcagcagcgcgcgcaac

SEQ ID NO: 2995531 - RNA, 19 nt, Artificial Sequence
  Description of Artificial Sequence: Synthetic oligonucleotide
ccugguaggucucggggau

SEQ ID NO: 2995532 - RNA, 19 nt, Artificial Sequence
  Description of Artificial Sequence: Synthetic oligonucleotide
gcagcgcgcgcaacggguc

SEQ ID NO: 2995533 - RNA, 19 nt, Artificial Sequence
  Description of Artificial Sequence: Synthetic oligonucleotide
gcaacggguccccggggcu

SEQ ID NO: 2995534 - RNA, 19 nt, Artificial Sequence
  Description of Artificial Sequence: Synthetic oligonucleotide
cgcucugcgcgcaagucua

SEQ ID NO: 2995535 - RNA, 19 nt, Artificial Sequence
  Description of Artificial Sequence: Synthetic oligonucleotide
caggcgccuuggcaguugu

SEQ ID NO: 2995536 - RNA, 19 nt, Artificial Sequence
  Description of Artificial Sequence: Synthetic oligonucleotide
cgcgcaagucuacgcucag

SEQ ID NO: 2995537 - RNA, 19 nt, Artificial Sequence
  Description of Artificial Sequence: Synthetic oligonucleotide
gcggucggacuguggccac

SEQ ID NO: 2995538 - RNA, 19 nt, Artificial Sequence
  Description of Artificial Sequence: Synthetic oligonucleotide
ggggcgcagcggguggcag

SEQ ID NO: 2995539 - RNA, 19 nt, Artificial Sequence
  Description of Artificial Sequence: Synthetic oligonucleotide
ggguugcggucggacugug

SEQ ID NO: 2995540 - RNA, 19 nt, Artificial Sequence
  Description of Artificial Sequence: Synthetic oligonucleotide
cagcugccugcagcuccac

SEQ ID NO: 2995541 - RNA, 19 nt, Artificial Sequence
  Description of Artificial Sequence: Synthetic oligonucleotide
gcucugcgcgcaagucuac

SEQ ID NO: 2995542 - RNA, 19 nt, Artificial Sequence
  Description of Artificial Sequence: Synthetic oligonucleotide
cuccacggacacccugcgu

SEQ ID NO: 2995543 - RNA, 19 nt, Artificial Sequence
  Description of Artificial Sequence: Synthetic oligonucleotide
ggucggacuguggccacgu

SEQ ID NO: 2995544 - RNA, 19 nt, Artificial Sequence
  Description of Artificial Sequence: Synthetic oligonucleotide
ggcaggcccgggaggcccc

SEQ ID NO: 2995545 - RNA, 19 nt, Artificial Sequence
  Description of Artificial Sequence: Synthetic oligonucleotide
ggaggccccgcagcucuga

SEQ ID NO: 2995546 - RNA, 19 nt, Artificial Sequence
  Description of Artificial Sequence: Synthetic oligonucleotide
cgcucagcucacgcagugc

SEQ ID NO: 2995547 - RNA, 19 nt, Artificial Sequence
  Description of Artificial Sequence: Synthetic oligonucleotide
cgcccuucccgcccacgcc

SEQ ID NO: 2995548 - RNA, 19 nt, Artificial Sequence
  Description of Artificial Sequence: Synthetic oligonucleotide
ccauaccgaggguugcggu

SEQ ID NO: 2995549 - RNA, 19 nt, Artificial Sequence
  Description of Artificial Sequence: Synthetic oligonucleotide
gggugucguuggggcacag

SEQ ID NO: 2995550 - RNA, 19 nt, Artificial Sequence
  Description of Artificial Sequence: Synthetic oligonucleotide
gccgcugcgccccgcccuc

SEQ ID NO: 2995551 - RNA, 19 nt, Artificial Sequence
  Description of Artificial Sequence: Synthetic oligonucleotide
caggcccgggaggccccgc

SEQ ID NO: 2995552 - RNA, 19 nt, Artificial Sequence
  Description of Artificial Sequence: Synthetic oligonucleotide
cagcucacgcagugcgcau

SEQ ID NO: 2995553 - RNA, 19 nt, Artificial Sequence
  Description of Artificial Sequence: Synthetic oligonucleotide
cccggggcugugggugucg

SEQ ID NO: 2995554 - RNA, 19 nt, Artificial Sequence
  Description of Artificial Sequence: Synthetic oligonucleotide
acggguccccggggcugug

SEQ ID NO: 2995555 - RNA, 19 nt, Artificial Sequence
  Description of Artificial Sequence: Synthetic oligonucleotide
ggugucguuggggcacagu

SEQ ID NO: 2995556 - RNA, 19 nt, Artificial Sequence
  Description of Artificial Sequence: Synthetic oligonucleotide
gcaggagcaccacgugguu

SEQ ID NO: 2995557 - RNA, 19 nt, Artificial Sequence
  Description of Artificial Sequence: Synthetic oligonucleotide
ccgcucugcgcgcaagucu

SEQ ID NO: 2995558 - RNA, 19 nt, Artificial Sequence
  Description of Artificial Sequence: Synthetic oligonucleotide
gcaccacgugguucccaua

SEQ ID NO: 2995559 - RNA, 19 nt, Artificial Sequence
  Description of Artificial Sequence: Synthetic oligonucleotide
cggucggacuguggccacg

SEQ ID NO: 2995560 - RNA, 19 nt, Artificial Sequence
  Description of Artificial Sequence: Synthetic oligonucleotide
cgaggguugcggucggacu

SEQ ID NO: 2995561 - RNA, 19 nt, Artificial Sequence
  Description of Artificial Sequence: Synthetic oligonucleotide
aggcgccuuggcaguuguu

SEQ ID NO: 2995562 - RNA, 19 nt, Artificial Sequence
  Description of Artificial Sequence: Synthetic oligonucleotide
gcccucccgcgcccuuccc

SEQ ID NO: 2995563 - RNA, 19 nt, Artificial Sequence
  Description of Artificial Sequence: Synthetic oligonucleotide
cgcccucccgcgcccuucc

SEQ ID NO: 2995564 - RNA, 19 nt, Artificial Sequence
  Description of Artificial Sequence: Synthetic oligonucleotide
gccccgcagcucugaggca

SEQ ID NO: 2995565 - RNA, 19 nt, Artificial Sequence
  Description of Artificial Sequence: Synthetic oligonucleotide
cgccccgcccucccgcgcc

SEQ ID NO: 2995566 - RNA, 19 nt, Artificial Sequence
  Description of Artificial Sequence: Synthetic oligonucleotide
gguccccggggcugugggu

SEQ ID NO: 2995567 - RNA, 19 nt, Artificial Sequence
  Description of Artificial Sequence: Synthetic oligonucleotide
ccucuguccccuguccccu

SEQ ID NO: 2995568 - RNA, 19 nt, Artificial Sequence
  Description of Artificial Sequence: Synthetic oligonucleotide
cgcccacgccacucugcac

SEQ ID NO: 2995569 - RNA, 19 nt, Artificial Sequence
  Description of Artificial Sequence: Synthetic oligonucleotide
gcgccccgcccucccgcgc

SEQ ID NO: 2995570 - RNA, 19 nt, Artificial Sequence
  Description of Artificial Sequence: Synthetic oligonucleotide
cccgggaggccccgcagcu

SEQ ID NO: 2995571 - RNA, 19 nt, Artificial Sequence
  Description of Artificial Sequence: Synthetic oligonucleotide
ccgggaggccccgcagcuc

SEQ ID NO: 2995572 - RNA, 19 nt, Artificial Sequence
  Description of Artificial Sequence: Synthetic oligonucleotide
cggguccccggggcugugg

SEQ ID NO: 2995573 - RNA, 19 nt, Artificial Sequence
  Description of Artificial Sequence: Synthetic oligonucleotide
gcgcagcggguggcaggcc

SEQ ID NO: 2995574 - RNA, 19 nt, Artificial Sequence
  Description of Artificial Sequence: Synthetic oligonucleotide
cccgcgcccuucccgccca

SEQ ID NO: 2995575 - RNA, 19 nt, Artificial Sequence
  Description of Artificial Sequence: Synthetic oligonucleotide
cgcgcccuucccgcccacg

SEQ ID NO: 2995576 - RNA, 19 nt, Artificial Sequence
  Description of Artificial Sequence: Synthetic oligonucleotide
cgcgcgcaacggguccccg

SEQ ID NO: 2995577 - RNA, 19 nt, Artificial Sequence
  Description of Artificial Sequence: Synthetic oligonucleotide
gcagcuccacggacacccu

SEQ ID NO: 2995578 - RNA, 19 nt, Artificial Sequence
  Description of Artificial Sequence: Synthetic oligonucleotide
ccccugccgcugcgccccg

SEQ ID NO: 2995579 - RNA, 19 nt, Artificial Sequence
  Description of Artificial Sequence: Synthetic oligonucleotide
ccgcccucccgcgcccuuc

SEQ ID NO: 2995580 - RNA, 19 nt, Artificial Sequence
  Description of Artificial Sequence: Synthetic oligonucleotide
ccacgccacucugcacgca

SEQ ID NO: 2995581 - RNA, 19 nt, Artificial Sequence
  Description of Artificial Sequence: Synthetic oligonucleotide
ccgcugcgccccgcccucc

SEQ ID NO: 2995582 - RNA, 19 nt, Artificial Sequence
  Description of Artificial Sequence: Synthetic oligonucleotide
cagugccaguaggcgcgau

SEQ ID NO: 2995583 - RNA, 19 nt, Artificial Sequence
  Description of Artificial Sequence: Synthetic oligonucleotide
ccccggggcuguggguguc

SEQ ID NO: 2995584 - RNA, 19 nt, Artificial Sequence
  Description of Artificial Sequence: Synthetic oligonucleotide
ggccacgugcaggcgccuu

SEQ ID NO: 2995585 - RNA, 19 nt, Artificial Sequence
  Description of Artificial Sequence: Synthetic oligonucleotide
ccgcgcccuucccgcccac

SEQ ID NO: 2995586 - RNA, 19 nt, Artificial Sequence
  Description of Artificial Sequence: Synthetic oligonucleotide
cggaccgcucugcgcgcaa

SEQ ID NO: 2995587 - RNA, 19 nt, Artificial Sequence
  Description of Artificial Sequence: Synthetic oligonucleotide
ccgcagcucugaggcagcu

SEQ ID NO: 2995588 - RNA, 19 nt, Artificial Sequence
  Description of Artificial Sequence: Synthetic oligonucleotide
cgcaggcccugcagcgccu

SEQ ID NO: 2995589 - RNA, 19 nt, Artificial Sequence
  Description of Artificial Sequence: Synthetic oligonucleotide
ccggggcugugggugucgu

SEQ ID NO: 2995590 - RNA, 19 nt, Artificial Sequence
  Description of Artificial Sequence: Synthetic oligonucleotide
cggggcugugggugucguu

SEQ ID NO: 2995591 - RNA, 19 nt, Artificial Sequence
  Description of Artificial Sequence: Synthetic oligonucleotide
cccgcccucccgcgcccuu

SEQ ID NO: 2995592 - RNA, 19 nt, Artificial Sequence
  Description of Artificial Sequence: Synthetic oligonucleotide
ccccgcccucccgcgcccu

SEQ ID NO: 2995593 - RNA, 19 nt, Artificial Sequence
  Description of Artificial Sequence: Synthetic oligonucleotide
aaagauuuggguuuccagc

SEQ ID NO: 2995594 - RNA, 19 nt, Artificial Sequence
  Description of Artificial Sequence: Synthetic oligonucleotide
gaaucuuagaaccucaugg

SEQ ID NO: 2995595 - RNA, 19 nt, Artificial Sequence
  Description of Artificial Sequence: Synthetic oligonucleotide
aagauuuggguuuccagcc

SEQ ID NO: 2995596 - RNA, 19 nt, Artificial Sequence
  Description of Artificial Sequence: Synthetic oligonucleotide
aacaaguacagcuuucugg

SEQ ID NO: 2995597 - RNA, 19 nt, Artificial Sequence
  Description of Artificial Sequence: Synthetic oligonucleotide
  modified_base (9)..(9): a, c, u, g, unknown or other
aauauagcncuuuugagau

SEQ ID NO: 2995598 - RNA, 19 nt, Artificial Sequence
  Description of Artificial Sequence: Synthetic oligonucleotide
ugucaguucauaaaugggg

SEQ ID NO: 2995599 - RNA, 19 nt, Artificial Sequence
  Description of Artificial Sequence: Synthetic oligonucleotide
gaugucaguucauaaaugg

SEQ ID NO: 2995600 - RNA, 19 nt, Artificial Sequence
  Description of Artificial Sequence: Synthetic oligonucleotide
aaccucauggauuuuauug

SEQ ID NO: 2995601 - RNA, 19 nt, Artificial Sequence
  Description of Artificial Sequence: Synthetic oligonucleotide
  modified_base (10)..(10): a, c, u, g, unknown or other
gaauauagcncuuuugaga

SEQ ID NO: 2995602 - RNA, 19 nt, Artificial Sequence
  Description of Artificial Sequence: Synthetic oligonucleotide
uugguagaaucuuagaacc

SEQ ID NO: 2995603 - RNA, 19 nt, Artificial Sequence
  Description of Artificial Sequence: Synthetic oligonucleotide
  modified_base (12)..(12): a, c, u, g, unknown or other
uggaauauagcncuuuuga

SEQ ID NO: 2995604 - RNA, 19 nt, Artificial Sequence
  Description of Artificial Sequence: Synthetic oligonucleotide
aaaagauuuggguuuccag

SEQ ID NO: 2995605 - RNA, 19 nt, Artificial Sequence
  Description of Artificial Sequence: Synthetic oligonucleotide
uuugguagaaucuuagaac

SEQ ID NO: 2995606 - RNA, 19 nt, Artificial Sequence
  Description of Artificial Sequence: Synthetic oligonucleotide
aaguacagcuuucugguag

SEQ ID NO: 2995607 - RNA, 19 nt, Artificial Sequence
  Description of Artificial Sequence: Synthetic oligonucleotide
gaaccagugaaauaagaug

SEQ ID NO: 2995608 - RNA, 19 nt, Artificial Sequence
  Description of Artificial Sequence: Synthetic oligonucleotide
gaaauaagaugucaguuca

SEQ ID NO: 2995609 - RNA, 19 nt, Artificial Sequence
  Description of Artificial Sequence: Synthetic oligonucleotide
  modified_base (7)..(7): a, c, u, g, unknown or other
uauagcncuuuugagauga

SEQ ID NO: 2995610 - RNA, 19 nt, Artificial Sequence
  Description of Artificial Sequence: Synthetic oligonucleotide
aagaugucaguucauaaau

SEQ ID NO: 2995611 - RNA, 19 nt, Artificial Sequence
  Description of Artificial Sequence: Synthetic oligonucleotide
aagcugaccaucucuuccc

SEQ ID NO: 2995612 - RNA, 19 nt, Artificial Sequence
  Description of Artificial Sequence: Synthetic oligonucleotide
  modified_base (17)..(17): a, c, u, g, unknown or other
ucaucuggaauauagcncu

SEQ ID NO: 2995613 - RNA, 19 nt, Artificial Sequence
  Description of Artificial Sequence: Synthetic oligonucleotide
aaucuuagaaccucaugga

SEQ ID NO: 2995614 - RNA, 19 nt, Artificial Sequence
  Description of Artificial Sequence: Synthetic oligonucleotide
ugaaauaagaugucaguuc

SEQ ID NO: 2995615 - RNA, 19 nt, Artificial Sequence
  Description of Artificial Sequence: Synthetic oligonucleotide
agucucaacaaguacagcu

SEQ ID NO: 2995616 - RNA, 19 nt, Artificial Sequence
  Description of Artificial Sequence: Synthetic oligonucleotide
gaugaagcaguccuugucc

SEQ ID NO: 2995617 - RNA, 19 nt, Artificial Sequence
  Description of Artificial Sequence: Synthetic oligonucleotide
ucagucucaacaaguacag

SEQ ID NO: 2995618 - RNA, 19 nt, Artificial Sequence
  Description of Artificial Sequence: Synthetic oligonucleotide
accucauggauuuuauugg

SEQ ID NO: 2995619 - RNA, 19 nt, Artificial Sequence
  Description of Artificial Sequence: Synthetic oligonucleotide
cuuucugguaguuaucccc

SEQ ID NO: 2995620 - RNA, 19 nt, Artificial Sequence
  Description of Artificial Sequence: Synthetic oligonucleotide
ugaguccacgucuagaagc

SEQ ID NO: 2995621 - RNA, 19 nt, Artificial Sequence
  Description of Artificial Sequence: Synthetic oligonucleotide
acaaguacagcuuucuggu

SEQ ID NO: 2995622 - RNA, 19 nt, Artificial Sequence
  Description of Artificial Sequence: Synthetic oligonucleotide
uggcuuugaauucagagau

SEQ ID NO: 2995623 - RNA, 19 nt, Artificial Sequence
  Description of Artificial Sequence: Synthetic oligonucleotide
gaaagucagccucaucugg

SEQ ID NO: 2995624 - RNA, 19 nt, Artificial Sequence
  Description of Artificial Sequence: Synthetic oligonucleotide
ucauggauuuuauuggcug

SEQ ID NO: 2995625 - RNA, 19 nt, Artificial Sequence
  Description of Artificial Sequence: Synthetic oligonucleotide
agaucuagcucuguagacc

SEQ ID NO: 2995626 - RNA, 19 nt, Artificial Sequence
  Description of Artificial Sequence: Synthetic oligonucleotide
  modified_base (4)..(4): a, c, u, g, unknown or other
agcncuuuugagaugaguc

SEQ ID NO: 2995627 - RNA, 19 nt, Artificial Sequence
  Description of Artificial Sequence: Synthetic oligonucleotide
agugaaauaagaugucagu

SEQ ID NO: 2995628 - RNA, 19 nt, Artificial Sequence
  Description of Artificial Sequence: Synthetic oligonucleotide
ugaaccagugaaauaagau

SEQ ID NO: 2995629 - RNA, 19 nt, Artificial Sequence
  Description of Artificial Sequence: Synthetic oligonucleotide
uucacaguagccaucccca

SEQ ID NO: 2995630 - RNA, 19 nt, Artificial Sequence
  Description of Artificial Sequence: Synthetic oligonucleotide
uuugagaugaguccacguc

SEQ ID NO: 2995631 - RNA, 19 nt, Artificial Sequence
  Description of Artificial Sequence: Synthetic oligonucleotide
uaagaugucaguucauaaa

SEQ ID NO: 2995632 - RNA, 19 nt, Artificial Sequence
  Description of Artificial Sequence: Synthetic oligonucleotide
agugccguagaugaugccc

SEQ ID NO: 2995633 - RNA, 19 nt, Artificial Sequence
  Description of Artificial Sequence: Synthetic oligonucleotide
uugagaugaguccacgucu

SEQ ID NO: 2995634 - RNA, 19 nt, Artificial Sequence
  Description of Artificial Sequence: Synthetic oligonucleotide
agcuuucugguaguuaucc

SEQ ID NO: 2995635 - RNA, 19 nt, Artificial Sequence
  Description of Artificial Sequence: Synthetic oligonucleotide
ugcuuugguagaaucuuag

SEQ ID NO: 2995636 - RNA, 19 nt, Artificial Sequence
  Description of Artificial Sequence: Synthetic oligonucleotide
gaagcugaccaucucuucc

SEQ ID NO: 2995637 - RNA, 19 nt, Artificial Sequence
  Description of Artificial Sequence: Synthetic oligonucleotide
gagaggaugcagcagauga

SEQ ID NO: 2995638 - RNA, 19 nt, Artificial Sequence
  Description of Artificial Sequence: Synthetic oligonucleotide
agaugaagcaguccuuguc

SEQ ID NO: 2995639 - RNA, 19 nt, Artificial Sequence
  Description of Artificial Sequence: Synthetic oligonucleotide
  modified_base (18)..(18): a, c, u, g, unknown or other
cucaucuggaauauagcnc

SEQ ID NO: 2995640 - RNA, 19 nt, Artificial Sequence
  Description of Artificial Sequence: Synthetic oligonucleotide
guaguuauccccuuggcaa

SEQ ID NO: 2995641 - RNA, 19 nt, Artificial Sequence
  Description of Artificial Sequence: Synthetic oligonucleotide
ucuuagaaccucauggauu

SEQ ID NO: 2995642 - RNA, 19 nt, Artificial Sequence
  Description of Artificial Sequence: Synthetic oligonucleotide
ucugaaccagugaaauaag

SEQ ID NO: 2995643 - RNA, 19 nt, Artificial Sequence
  Description of Artificial Sequence: Synthetic oligonucleotide
gaugcagcagaugaagcag

SEQ ID NO: 2995644 - RNA, 19 nt, Artificial Sequence
  Description of Artificial Sequence: Synthetic oligonucleotide
aauaagaugucaguucaua

SEQ ID NO: 2995645 - RNA, 19 nt, Artificial Sequence
  Description of Artificial Sequence: Synthetic oligonucleotide
ucugucuccuucacaguag

SEQ ID NO: 2995646 - RNA, 19 nt, Artificial Sequence
  Description of Artificial Sequence: Synthetic oligonucleotide
  modified_base (14)..(14): a, c, u, g, unknown or other
ucuggaauauagcncuuuu

SEQ ID NO: 2995647 - RNA, 19 nt, Artificial Sequence
  Description of Artificial Sequence: Synthetic oligonucleotide
  modified_base (11)..(11): a, c, u, g, unknown or other
ggaauauagcncuuuugag

SEQ ID NO: 2995648 - RNA, 19 nt, Artificial Sequence
  Description of Artificial Sequence: Synthetic oligonucleotide
acaguagccauccccaaca

SEQ ID NO: 2995649 - RNA, 19 nt, Artificial Sequence
  Description of Artificial Sequence: Synthetic oligonucleotide
gauuuggguuuccagccag

SEQ ID NO: 2995650 - RNA, 19 nt, Artificial Sequence
  Description of Artificial Sequence: Synthetic oligonucleotide
ucuccaugggagaggaugc

SEQ ID NO: 2995651 - RNA, 19 nt, Artificial Sequence
  Description of Artificial Sequence: Synthetic oligonucleotide
agaaucuuagaaccucaug

SEQ ID NO: 2995652 - RNA, 19 nt, Artificial Sequence
  Description of Artificial Sequence: Synthetic oligonucleotide
gaucuagcucuguagacca

SEQ ID NO: 2995653 - RNA, 19 nt, Artificial Sequence
  Description of Artificial Sequence: Synthetic oligonucleotide
ucagugccguagaugaugc

SEQ ID NO: 2995654 - RNA, 19 nt, Artificial Sequence
  Description of Artificial Sequence: Synthetic oligonucleotide
gguggcuuugaauucagag

SEQ ID NO: 2995655 - RNA, 19 nt, Artificial Sequence
  Description of Artificial Sequence: Synthetic oligonucleotide
auaagaugucaguucauaa

SEQ ID NO: 2995656 - RNA, 19 nt, Artificial Sequence
  Description of Artificial Sequence: Synthetic oligonucleotide
agaaagucagccucaucug

SEQ ID NO: 2995657 - RNA, 19 nt, Artificial Sequence
  Description of Artificial Sequence: Synthetic oligonucleotide
gaugaguccacgucuagaa

SEQ ID NO: 2995658 - RNA, 19 nt, Artificial Sequence
  Description of Artificial Sequence: Synthetic oligonucleotide
cuuugguagaaucuuagaa

SEQ ID NO: 2995659 - RNA, 19 nt, Artificial Sequence
  Description of Artificial Sequence: Synthetic oligonucleotide
ucucuucccagucagucuc

SEQ ID NO: 2995660 - RNA, 19 nt, Artificial Sequence
  Description of Artificial Sequence: Synthetic oligonucleotide
accaucucuucccagucag

SEQ ID NO: 2995661 - RNA, 19 nt, Artificial Sequence
  Description of Artificial Sequence: Synthetic oligonucleotide
gaggaugcagcagaugaag

SEQ ID NO: 2995662 - RNA, 19 nt, Artificial Sequence
  Description of Artificial Sequence: Synthetic oligonucleotide
uuuggguuuccagccaggg

SEQ ID NO: 2995663 - RNA, 19 nt, Artificial Sequence
  Description of Artificial Sequence: Synthetic oligonucleotide
uaguuauccccuuggcaag

SEQ ID NO: 2995664 - RNA, 19 nt, Artificial Sequence
  Description of Artificial Sequence: Synthetic oligonucleotide
accaggguggcuuugaauu

SEQ ID NO: 2995665 - RNA, 19 nt, Artificial Sequence
  Description of Artificial Sequence: Synthetic oligonucleotide
uuuugagaugaguccacgu

SEQ ID NO: 2995666 - RNA, 19 nt, Artificial Sequence
  Description of Artificial Sequence: Synthetic oligonucleotide
ucaacaaguacagcuuucu

SEQ ID NO: 2995667 - RNA, 19 nt, Artificial Sequence
  Description of Artificial Sequence: Synthetic oligonucleotide
cugguaguuauccccuugg

SEQ ID NO: 2995668 - RNA, 19 nt, Artificial Sequence
  Description of Artificial Sequence: Synthetic oligonucleotide
  modified_base (13)..(13): a, c, u, g, unknown or other
cuggaauauagcncuuuug

SEQ ID NO: 2995669 - RNA, 19 nt, Artificial Sequence
  Description of Artificial Sequence: Synthetic oligonucleotide
agaugaugcccgugucucc

SEQ ID NO: 2995670 - RNA, 19 nt, Artificial Sequence
  Description of Artificial Sequence: Synthetic oligonucleotide
ucugguaguuauccccuug

SEQ ID NO: 2995671 - RNA, 19 nt, Artificial Sequence
  Description of Artificial Sequence: Synthetic oligonucleotide
auccccaacagaaagucag

SEQ ID NO: 2995672 - RNA, 19 nt, Artificial Sequence
  Description of Artificial Sequence: Synthetic oligonucleotide
uuccuucccaucagugccg

SEQ ID NO: 2995673 - RNA, 19 nt, Artificial Sequence
  Description of Artificial Sequence: Synthetic oligonucleotide
gcuuugaauucagagaucc

SEQ ID NO: 2995674 - RNA, 19 nt, Artificial Sequence
  Description of Artificial Sequence: Synthetic oligonucleotide
agaagcugaccaucucuuc

SEQ ID NO: 2995675 - RNA, 19 nt, Artificial Sequence
  Description of Artificial Sequence: Synthetic oligonucleotide
augucaguucauaaauggg

SEQ ID NO: 2995676 - RNA, 19 nt, Artificial Sequence
  Description of Artificial Sequence: Synthetic oligonucleotide
uauccccuuggcaagccug

SEQ ID NO: 2995677 - RNA, 19 nt, Artificial Sequence
  Description of Artificial Sequence: Synthetic oligonucleotide
uuuccagccagggaagggc

SEQ ID NO: 2995678 - RNA, 19 nt, Artificial Sequence
  Description of Artificial Sequence: Synthetic oligonucleotide
ugguagaaucuuagaaccu

SEQ ID NO: 2995679 - RNA, 19 nt, Artificial Sequence
  Description of Artificial Sequence: Synthetic oligonucleotide
cagaaagucagccucaucu

SEQ ID NO: 2995680 - RNA, 19 nt, Artificial Sequence
  Description of Artificial Sequence: Synthetic oligonucleotide
gaagcaguccuuguccuug

SEQ ID NO: 2995681 - RNA, 19 nt, Artificial Sequence
  Description of Artificial Sequence: Synthetic oligonucleotide
aucuuagaaccucauggau

SEQ ID NO: 2995682 - RNA, 19 nt, Artificial Sequence
  Description of Artificial Sequence: Synthetic oligonucleotide
ucucaacaaguacagcuuu

SEQ ID NO: 2995683 - RNA, 19 nt, Artificial Sequence
  Description of Artificial Sequence: Synthetic oligonucleotide
aguuauccccuuggcaagc

SEQ ID NO: 2995684 - RNA, 19 nt, Artificial Sequence
  Description of Artificial Sequence: Synthetic oligonucleotide
aaagucagccucaucugga

SEQ ID NO: 2995685 - RNA, 19 nt, Artificial Sequence
  Description of Artificial Sequence: Synthetic oligonucleotide
cucugaaccagugaaauaa

SEQ ID NO: 2995686 - RNA, 19 nt, Artificial Sequence
  Description of Artificial Sequence: Synthetic oligonucleotide
ugguaguuauccccuuggc

SEQ ID NO: 2995687 - RNA, 19 nt, Artificial Sequence
  Description of Artificial Sequence: Synthetic oligonucleotide
cuucccaucagugccguag

SEQ ID NO: 2995688 - RNA, 19 nt, Artificial Sequence
  Description of Artificial Sequence: Synthetic oligonucleotide
uugugguccaugcuuuggu

SEQ ID NO: 2995689 - RNA, 19 nt, Artificial Sequence
  Description of Artificial Sequence: Synthetic oligonucleotide
guagccauccccaacagaa

SEQ ID NO: 2995690 - RNA, 19 nt, Artificial Sequence
  Description of Artificial Sequence: Synthetic oligonucleotide
cuuuugagaugaguccacg

SEQ ID NO: 2995691 - RNA, 19 nt, Artificial Sequence
  Description of Artificial Sequence: Synthetic oligonucleotide
agccucaucuggaauauag

SEQ ID NO: 2995692 - RNA, 19 nt, Artificial Sequence
  Description of Artificial Sequence: Synthetic oligonucleotide
ugagaugaguccacgucua

SEQ ID NO: 2995693 - RNA, 19 nt, Artificial Sequence
  Description of Artificial Sequence: Synthetic oligonucleotide
  modified_base (3)..(3): a, c, u, g, unknown or other
gcncuuuugagaugagucc

SEQ ID NO: 2995694 - RNA, 19 nt, Artificial Sequence
  Description of Artificial Sequence: Synthetic oligonucleotide
ucuccuucacaguagccau

SEQ ID NO: 2995695 - RNA, 19 nt, Artificial Sequence
  Description of Artificial Sequence: Synthetic oligonucleotide
gucuccaugggagaggaug

SEQ ID NO: 2995696 - RNA, 19 nt, Artificial Sequence
  Description of Artificial Sequence: Synthetic oligonucleotide
uagaagcugaccaucucuu

SEQ ID NO: 2995697 - RNA, 19 nt, Artificial Sequence
  Description of Artificial Sequence: Synthetic oligonucleotide
gugguccaugcuuugguag

SEQ ID NO: 2995698 - RNA, 19 nt, Artificial Sequence
  Description of Artificial Sequence: Synthetic oligonucleotide
uccaugcuuugguagaauc

SEQ ID NO: 2995699 - RNA, 19 nt, Artificial Sequence
  Description of Artificial Sequence: Synthetic oligonucleotide
aucagugccguagaugaug

SEQ ID NO: 2995700 - RNA, 19 nt, Artificial Sequence
  Description of Artificial Sequence: Synthetic oligonucleotide
cacgucuagaagcugacca

SEQ ID NO: 2995701 - RNA, 19 nt, Artificial Sequence
  Description of Artificial Sequence: Synthetic oligonucleotide
aguacagcuuucugguagu

SEQ ID NO: 2995702 - RNA, 19 nt, Artificial Sequence
  Description of Artificial Sequence: Synthetic oligonucleotide
uagaugaugcccgugucuc

SEQ ID NO: 2995703 - RNA, 19 nt, Artificial Sequence
  Description of Artificial Sequence: Synthetic oligonucleotide
uggauuuuauuggcugugc

SEQ ID NO: 2995704 - RNA, 19 nt, Artificial Sequence
  Description of Artificial Sequence: Synthetic oligonucleotide
ugguccaugcuuugguaga

SEQ ID NO: 2995705 - RNA, 19 nt, Artificial Sequence
  Description of Artificial Sequence: Synthetic oligonucleotide
uagaaucuuagaaccucau

SEQ ID NO: 2995706 - RNA, 19 nt, Artificial Sequence
  Description of Artificial Sequence: Synthetic oligonucleotide
ucuagaagcugaccaucuc

SEQ ID NO: 2995707 - RNA, 19 nt, Artificial Sequence
  Description of Artificial Sequence: Synthetic oligonucleotide
augaguccacgucuagaag

SEQ ID NO: 2995708 - RNA, 19 nt, Artificial Sequence
  Description of Artificial Sequence: Synthetic oligonucleotide
augaagcaguccuuguccu

SEQ ID NO: 2995709 - RNA, 19 nt, Artificial Sequence
  Description of Artificial Sequence: Synthetic oligonucleotide
aagucagccucaucuggaa

SEQ ID NO: 2995710 - RNA, 19 nt, Artificial Sequence
  Description of Artificial Sequence: Synthetic oligonucleotide
auggauuuuauuggcugug

SEQ ID NO: 2995711 - RNA, 19 nt, Artificial Sequence
  Description of Artificial Sequence: Synthetic oligonucleotide
agggaagggcacucugaac

SEQ ID NO: 2995712 - RNA, 19 nt, Artificial Sequence
  Description of Artificial Sequence: Synthetic oligonucleotide
ccaacagaaagucagccuc

SEQ ID NO: 2995713 - RNA, 19 nt, Artificial Sequence
  Description of Artificial Sequence: Synthetic oligonucleotide
uccccaacagaaagucagc

SEQ ID NO: 2995714 - RNA, 19 nt, Artificial Sequence
  Description of Artificial Sequence: Synthetic oligonucleotide
  modified_base (8)..(8): a, c, u, g, unknown or other
auauagcncuuuugagaug

SEQ ID NO: 2995715 - RNA, 19 nt, Artificial Sequence
  Description of Artificial Sequence: Synthetic oligonucleotide
agaugucaguucauaaaug

SEQ ID NO: 2995716 - RNA, 19 nt, Artificial Sequence
  Description of Artificial Sequence: Synthetic oligonucleotide
acagaaagucagccucauc

SEQ ID NO: 2995717 - RNA, 19 nt, Artificial Sequence
  Description of Artificial Sequence: Synthetic oligonucleotide
accagugaaauaagauguc

SEQ ID NO: 2995718 - RNA, 19 nt, Artificial Sequence
  Description of Artificial Sequence: Synthetic oligonucleotide
ugaccaucucuucccaguc

SEQ ID NO: 2995719 - RNA, 19 nt, Artificial Sequence
  Description of Artificial Sequence: Synthetic oligonucleotide
gagaugaguccacgucuag

SEQ ID NO: 2995720 - RNA, 19 nt, Artificial Sequence
  Description of Artificial Sequence: Synthetic oligonucleotide
uuggguuuccagccaggga

SEQ ID NO: 2995721 - RNA, 19 nt, Artificial Sequence
  Description of Artificial Sequence: Synthetic oligonucleotide
cuugugguccaugcuuugg

SEQ ID NO: 2995722 - RNA, 19 nt, Artificial Sequence
  Description of Artificial Sequence: Synthetic oligonucleotide
aucucuucccagucagucu

SEQ ID NO: 2995723 - RNA, 19 nt, Artificial Sequence
  Description of Artificial Sequence: Synthetic oligonucleotide
uccacgucuagaagcugac

SEQ ID NO: 2995724 - RNA, 19 nt, Artificial Sequence
  Description of Artificial Sequence: Synthetic oligonucleotide
cuuagaaccucauggauuu

SEQ ID NO: 2995725 - RNA, 19 nt, Artificial Sequence
  Description of Artificial Sequence: Synthetic oligonucleotide
aaauaagaugucaguucau

SEQ ID NO: 2995726 - RNA, 19 nt, Artificial Sequence
  Description of Artificial Sequence: Synthetic oligonucleotide
cugucuccuucacaguagc

SEQ ID NO: 2995727 - RNA, 19 nt, Artificial Sequence
  Description of Artificial Sequence: Synthetic oligonucleotide
gugccguagaugaugcccg

SEQ ID NO: 2995728 - RNA, 19 nt, Artificial Sequence
  Description of Artificial Sequence: Synthetic oligonucleotide
ugcagcagaugaagcaguc

SEQ ID NO: 2995729 - RNA, 19 nt, Artificial Sequence
  Description of Artificial Sequence: Synthetic oligonucleotide
uguccuugugguccaugcu

SEQ ID NO: 2995730 - RNA, 19 nt, Artificial Sequence
  Description of Artificial Sequence: Synthetic oligonucleotide
uuccagccagggaagggca

SEQ ID NO: 2995731 - RNA, 19 nt, Artificial Sequence
  Description of Artificial Sequence: Synthetic oligonucleotide
caacaaguacagcuuucug

SEQ ID NO: 2995732 - RNA, 19 nt, Artificial Sequence
  Description of Artificial Sequence: Synthetic oligonucleotide
cugaaccagugaaauaaga

SEQ ID NO: 2995733 - RNA, 19 nt, Artificial Sequence
  Description of Artificial Sequence: Synthetic oligonucleotide
uucccaucagugccguaga

SEQ ID NO: 2995734 - RNA, 19 nt, Artificial Sequence
  Description of Artificial Sequence: Synthetic oligonucleotide
uccaugggagaggaugcag

SEQ ID NO: 2995735 - RNA, 19 nt, Artificial Sequence
  Description of Artificial Sequence: Synthetic oligonucleotide
gguaguuauccccuuggca

SEQ ID NO: 2995736 - RNA, 19 nt, Artificial Sequence
  Description of Artificial Sequence: Synthetic oligonucleotide
guagaaucuuagaaccuca

SEQ ID NO: 2995737 - RNA, 19 nt, Artificial Sequence
  Description of Artificial Sequence: Synthetic oligonucleotide
  modified_base (2)..(2): a, c, u, g, unknown or other
cncuuuugagaugagucca

SEQ ID NO: 2995738 - RNA, 19 nt, Artificial Sequence
  Description of Artificial Sequence: Synthetic oligonucleotide
uccuugugguccaugcuuu

SEQ ID NO: 2995739 - RNA, 19 nt, Artificial Sequence
  Description of Artificial Sequence: Synthetic oligonucleotide
caucucuucccagucaguc

SEQ ID NO: 2995740 - RNA, 19 nt, Artificial Sequence
  Description of Artificial Sequence: Synthetic oligonucleotide
cuuggcaagccugauaaaa

SEQ ID NO: 2995741 - RNA, 19 nt, Artificial Sequence
  Description of Artificial Sequence: Synthetic oligonucleotide
gguagaaucuuagaaccuc

SEQ ID NO: 2995742 - RNA, 19 nt, Artificial Sequence
  Description of Artificial Sequence: Synthetic oligonucleotide
gucuccuucacaguagcca

SEQ ID NO: 2995743 - RNA, 19 nt, Artificial Sequence
  Description of Artificial Sequence: Synthetic oligonucleotide
gaugaugcccgugucucca

SEQ ID NO: 2995744 - RNA, 19 nt, Artificial Sequence
  Description of Artificial Sequence: Synthetic oligonucleotide
uagaaccucauggauuuua

SEQ ID NO: 2995745 - RNA, 19 nt, Artificial Sequence
  Description of Artificial Sequence: Synthetic oligonucleotide
ggaugcagcagaugaagca

SEQ ID NO: 2995746 - RNA, 19 nt, Artificial Sequence
  Description of Artificial Sequence: Synthetic oligonucleotide
ccaucagugccguagauga

SEQ ID NO: 2995747 - RNA, 19 nt, Artificial Sequence
  Description of Artificial Sequence: Synthetic oligonucleotide
aacagaaagucagccucau

SEQ ID NO: 2995748 - RNA, 19 nt, Artificial Sequence
  Description of Artificial Sequence: Synthetic oligonucleotide
ccucauggauuuuauuggc

SEQ ID NO: 2995749 - RNA, 19 nt, Artificial Sequence
  Description of Artificial Sequence: Synthetic oligonucleotide
caugggagaggaugcagca

SEQ ID NO: 2995750 - RNA, 19 nt, Artificial Sequence
  Description of Artificial Sequence: Synthetic oligonucleotide
aagcaguccuuguccuugu

SEQ ID NO: 2995751 - RNA, 19 nt, Artificial Sequence
  Description of Artificial Sequence: Synthetic oligonucleotide
acgucuagaagcugaccau

SEQ ID NO: 2995752 - RNA, 19 nt, Artificial Sequence
  Description of Artificial Sequence: Synthetic oligonucleotide
guuuccagccagggaaggg

SEQ ID NO: 2995753 - RNA, 19 nt, Artificial Sequence
  Description of Artificial Sequence: Synthetic oligonucleotide
ugugguccaugcuuuggua

SEQ ID NO: 2995754 - RNA, 19 nt, Artificial Sequence
  Description of Artificial Sequence: Synthetic oligonucleotide
aguagccauccccaacaga

SEQ ID NO: 2995755 - RNA, 19 nt, Artificial Sequence
  Description of Artificial Sequence: Synthetic oligonucleotide
ggcacucugaaccagugaa

SEQ ID NO: 2995756 - RNA, 19 nt, Artificial Sequence
  Description of Artificial Sequence: Synthetic oligonucleotide
uuauccccuuggcaagccu

SEQ ID NO: 2995757 - RNA, 19 nt, Artificial Sequence
  Description of Artificial Sequence: Synthetic oligonucleotide
  modified_base (19)..(19): a, c, u, g, unknown or other
ccucaucuggaauauagcn

SEQ ID NO: 2995758 - RNA, 19 nt, Artificial Sequence
  Description of Artificial Sequence: Synthetic oligonucleotide
gcaguccuuguccuugugg

SEQ ID NO: 2995759 - RNA, 19 nt, Artificial Sequence
  Description of Artificial Sequence: Synthetic oligonucleotide
augcccgugucuccauggg

SEQ ID NO: 2995760 - RNA, 19 nt, Artificial Sequence
  Description of Artificial Sequence: Synthetic oligonucleotide
caacagaaagucagccuca

SEQ ID NO: 2995761 - RNA, 19 nt, Artificial Sequence
  Description of Artificial Sequence: Synthetic oligonucleotide
  modified_base (5)..(5): a, c, u, g, unknown or other
uagcncuuuugagaugagu

SEQ ID NO: 2995762 - RNA, 19 nt, Artificial Sequence
  Description of Artificial Sequence: Synthetic oligonucleotide
gcuuccuucccaucagugc

SEQ ID NO: 2995763 - RNA, 19 nt, Artificial Sequence
  Description of Artificial Sequence: Synthetic oligonucleotide
gaagggcacucugaaccag

SEQ ID NO: 2995764 - RNA, 19 nt, Artificial Sequence
  Description of Artificial Sequence: Synthetic oligonucleotide
agaugaguccacgucuaga

SEQ ID NO: 2995765 - RNA, 19 nt, Artificial Sequence
  Description of Artificial Sequence: Synthetic oligonucleotide
ugaugcccgugucuccaug

SEQ ID NO: 2995766 - RNA, 19 nt, Artificial Sequence
  Description of Artificial Sequence: Synthetic oligonucleotide
cacaguagccauccccaac

SEQ ID NO: 2995767 - RNA, 19 nt, Artificial Sequence
  Description of Artificial Sequence: Synthetic oligonucleotide
ucagccucaucuggaauau

SEQ ID NO: 2995768 - RNA, 19 nt, Artificial Sequence
  Description of Artificial Sequence: Synthetic oligonucleotide
cuagaagcugaccaucucu

SEQ ID NO: 2995769 - RNA, 19 nt, Artificial Sequence
  Description of Artificial Sequence: Synthetic oligonucleotide
gucagccucaucuggaaua

SEQ ID NO: 2995770 - RNA, 19 nt, Artificial Sequence
  Description of Artificial Sequence: Synthetic oligonucleotide
auuuggguuuccagccagg

SEQ ID NO: 2995771 - RNA, 19 nt, Artificial Sequence
  Description of Artificial Sequence: Synthetic oligonucleotide
ggauuuuauuggcugugca

SEQ ID NO: 2995772 - RNA, 19 nt, Artificial Sequence
  Description of Artificial Sequence: Synthetic oligonucleotide
uccuuguccuuguggucca

SEQ ID NO: 2995773 - RNA, 19 nt, Artificial Sequence
  Description of Artificial Sequence: Synthetic oligonucleotide
ugcccgugucuccauggga

SEQ ID NO: 2995774 - RNA, 19 nt, Artificial Sequence
  Description of Artificial Sequence: Synthetic oligonucleotide
uagccauccccaacagaaa

SEQ ID NO: 2995775 - RNA, 19 nt, Artificial Sequence
  Description of Artificial Sequence: Synthetic oligonucleotide
acucugaaccagugaaaua

SEQ ID NO: 2995776 - RNA, 19 nt, Artificial Sequence
  Description of Artificial Sequence: Synthetic oligonucleotide
gugaaauaagaugucaguu

SEQ ID NO: 2995777 - RNA, 19 nt, Artificial Sequence
  Description of Artificial Sequence: Synthetic oligonucleotide
aagggcacucugaaccagu

SEQ ID NO: 2995778 - RNA, 19 nt, Artificial Sequence
  Description of Artificial Sequence: Synthetic oligonucleotide
ccaugggagaggaugcagc

SEQ ID NO: 2995779 - RNA, 19 nt, Artificial Sequence
  Description of Artificial Sequence: Synthetic oligonucleotide
ucacaguagccauccccaa

SEQ ID NO: 2995780 - RNA, 19 nt, Artificial Sequence
  Description of Artificial Sequence: Synthetic oligonucleotide
gaccaucucuucccaguca

SEQ ID NO: 2995781 - RNA, 19 nt, Artificial Sequence
  Description of Artificial Sequence: Synthetic oligonucleotide
cauggauuuuauuggcugu

SEQ ID NO: 2995782 - RNA, 19 nt, Artificial Sequence
  Description of Artificial Sequence: Synthetic oligonucleotide
guagaugaugcccgugucu

SEQ ID NO: 2995783 - RNA, 19 nt, Artificial Sequence
  Description of Artificial Sequence: Synthetic oligonucleotide
cagcagaugaagcaguccu

SEQ ID NO: 2995784 - RNA, 19 nt, Artificial Sequence
  Description of Artificial Sequence: Synthetic oligonucleotide
ugaagcaguccuuguccuu

SEQ ID NO: 2995785 - RNA, 19 nt, Artificial Sequence
  Description of Artificial Sequence: Synthetic oligonucleotide
agaaccucauggauuuuau

SEQ ID NO: 2995786 - RNA, 19 nt, Artificial Sequence
  Description of Artificial Sequence: Synthetic oligonucleotide
gcuuucugguaguuauccc

SEQ ID NO: 2995787 - RNA, 19 nt, Artificial Sequence
  Description of Artificial Sequence: Synthetic oligonucleotide
agcugaccaucucuuccca

SEQ ID NO: 2995788 - RNA, 19 nt, Artificial Sequence
  Description of Artificial Sequence: Synthetic oligonucleotide
caguagccauccccaacag

SEQ ID NO: 2995789 - RNA, 19 nt, Artificial Sequence
  Description of Artificial Sequence: Synthetic oligonucleotide
uacagcuuucugguaguua

SEQ ID NO: 2995790 - RNA, 19 nt, Artificial Sequence
  Description of Artificial Sequence: Synthetic oligonucleotide
guuauccccuuggcaagcc

SEQ ID NO: 2995791 - RNA, 19 nt, Artificial Sequence
  Description of Artificial Sequence: Synthetic oligonucleotide
cagucagucucaacaagua

SEQ ID NO: 2995792 - RNA, 19 nt, Artificial Sequence
  Description of Artificial Sequence: Synthetic oligonucleotide
cucauggauuuuauuggcu

SEQ ID NO: 2995793 - RNA, 19 nt, Artificial Sequence
  Description of Artificial Sequence: Synthetic oligonucleotide
guccacgucuagaagcuga

SEQ ID NO: 2995794 - RNA, 19 nt, Artificial Sequence
  Description of Artificial Sequence: Synthetic oligonucleotide
gcuuugguagaaucuuaga

SEQ ID NO: 2995795 - RNA, 19 nt, Artificial Sequence
  Description of Artificial Sequence: Synthetic oligonucleotide
ggaagggcacucugaacca

SEQ ID NO: 2995796 - RNA, 19 nt, Artificial Sequence
  Description of Artificial Sequence: Synthetic oligonucleotide
cuucccagucagucucaac

SEQ ID NO: 2995797 - RNA, 19 nt, Artificial Sequence
  Description of Artificial Sequence: Synthetic oligonucleotide
cagcuuucugguaguuauc

SEQ ID NO: 2995798 - RNA, 19 nt, Artificial Sequence
  Description of Artificial Sequence: Synthetic oligonucleotide
  modified_base (15)..(15): a, c, u, g, unknown or other
aucuggaauauagcncuuu

SEQ ID NO: 2995799 - RNA, 19 nt, Artificial Sequence
  Description of Artificial Sequence: Synthetic oligonucleotide
cagucucaacaaguacagc

SEQ ID NO: 2995800 - RNA, 19 nt, Artificial Sequence
  Description of Artificial Sequence: Synthetic oligonucleotide
cauccccaacagaaaguca

SEQ ID NO: 2995801 - RNA, 19 nt, Artificial Sequence
  Description of Artificial Sequence: Synthetic oligonucleotide
gaguccacgucuagaagcu

SEQ ID NO: 2995802 - RNA, 19 nt, Artificial Sequence
  Description of Artificial Sequence: Synthetic oligonucleotide
agcaguccuuguccuugug

SEQ ID NO: 2995803 - RNA, 19 nt, Artificial Sequence
  Description of Artificial Sequence: Synthetic oligonucleotide
cugaccaucucuucccagu

SEQ ID NO: 2995804 - RNA, 19 nt, Artificial Sequence
  Description of Artificial Sequence: Synthetic oligonucleotide
gguuuccagccagggaagg

SEQ ID NO: 2995805 - RNA, 19 nt, Artificial Sequence
  Description of Artificial Sequence: Synthetic oligonucleotide
ugccguagaugaugcccgu

SEQ ID NO: 2995806 - RNA, 19 nt, Artificial Sequence
  Description of Artificial Sequence: Synthetic oligonucleotide
ucccaucagugccguagau

SEQ ID NO: 2995807 - RNA, 19 nt, Artificial Sequence
  Description of Artificial Sequence: Synthetic oligonucleotide
  modified_base (6)..(6): a, c, u, g, unknown or other
auagcncuuuugagaugag

SEQ ID NO: 2995808 - RNA, 19 nt, Artificial Sequence
  Description of Artificial Sequence: Synthetic oligonucleotide
gcccgugucuccaugggag

SEQ ID NO: 2995809 - RNA, 19 nt, Artificial Sequence
  Description of Artificial Sequence: Synthetic oligonucleotide
cagggaagggcacucugaa

SEQ ID NO: 2995810 - RNA, 19 nt, Artificial Sequence
  Description of Artificial Sequence: Synthetic oligonucleotide
aggguggcuuugaauucag

SEQ ID NO: 2995811 - RNA, 19 nt, Artificial Sequence
  Description of Artificial Sequence: Synthetic oligonucleotide
cccuuggcaagccugauaa

SEQ ID NO: 2995812 - RNA, 19 nt, Artificial Sequence
  Description of Artificial Sequence: Synthetic oligonucleotide
ucuucccagucagucucaa

SEQ ID NO: 2995813 - RNA, 19 nt, Artificial Sequence
  Description of Artificial Sequence: Synthetic oligonucleotide
gcugaccaucucuucccag

SEQ ID NO: 2995814 - RNA, 19 nt, Artificial Sequence
  Description of Artificial Sequence: Synthetic oligonucleotide
caugcuuugguagaaucuu

SEQ ID NO: 2995815 - RNA, 19 nt, Artificial Sequence
  Description of Artificial Sequence: Synthetic oligonucleotide
cagugccguagaugaugcc

SEQ ID NO: 2995816 - RNA, 19 nt, Artificial Sequence
  Description of Artificial Sequence: Synthetic oligonucleotide
ccagugaaauaagauguca

SEQ ID NO: 2995817 - RNA, 19 nt, Artificial Sequence
  Description of Artificial Sequence: Synthetic oligonucleotide
guccuugugguccaugcuu

SEQ ID NO: 2995818 - RNA, 19 nt, Artificial Sequence
  Description of Artificial Sequence: Synthetic oligonucleotide
gccucaucuggaauauagc

SEQ ID NO: 2995819 - RNA, 19 nt, Artificial Sequence
  Description of Artificial Sequence: Synthetic oligonucleotide
ccccaacagaaagucagcc

SEQ ID NO: 2995820 - RNA, 19 nt, Artificial Sequence
  Description of Artificial Sequence: Synthetic oligonucleotide
cccagucagucucaacaag

SEQ ID NO: 2995821 - RNA, 19 nt, Artificial Sequence
  Description of Artificial Sequence: Synthetic oligonucleotide
caggguggcuuugaauuca

SEQ ID NO: 2995822 - RNA, 19 nt, Artificial Sequence
  Description of Artificial Sequence: Synthetic oligonucleotide
aguccacgucuagaagcug

SEQ ID NO: 2995823 - RNA, 19 nt, Artificial Sequence
  Description of Artificial Sequence: Synthetic oligonucleotide
gucuagaagcugaccaucu

SEQ ID NO: 2995824 - RNA, 19 nt, Artificial Sequence
  Description of Artificial Sequence: Synthetic oligonucleotide
aucuagcucuguagaccag

SEQ ID NO: 2995825 - RNA, 19 nt, Artificial Sequence
  Description of Artificial Sequence: Synthetic oligonucleotide
gcagcagaugaagcagucc

SEQ ID NO: 2995826 - RNA, 19 nt, Artificial Sequence
  Description of Artificial Sequence: Synthetic oligonucleotide
cacucugaaccagugaaau

SEQ ID NO: 2995827 - RNA, 19 nt, Artificial Sequence
  Description of Artificial Sequence: Synthetic oligonucleotide
augcuuugguagaaucuua

SEQ ID NO: 2995828 - RNA, 19 nt, Artificial Sequence
  Description of Artificial Sequence: Synthetic oligonucleotide
gaaccucauggauuuuauu

SEQ ID NO: 2995829 - RNA, 19 nt, Artificial Sequence
  Description of Artificial Sequence: Synthetic oligonucleotide
ggguuuccagccagggaag

SEQ ID NO: 2995830 - RNA, 19 nt, Artificial Sequence
  Description of Artificial Sequence: Synthetic oligonucleotide
caaguacagcuuucuggua

SEQ ID NO: 2995831 - RNA, 19 nt, Artificial Sequence
  Description of Artificial Sequence: Synthetic oligonucleotide
gucucaacaaguacagcuu

SEQ ID NO: 2995832 - RNA, 19 nt, Artificial Sequence
  Description of Artificial Sequence: Synthetic oligonucleotide
augaugcccgugucuccau

SEQ ID NO: 2995833 - RNA, 19 nt, Artificial Sequence
  Description of Artificial Sequence: Synthetic oligonucleotide
ccaggguggcuuugaauuc

SEQ ID NO: 2995834 - RNA, 19 nt, Artificial Sequence
  Description of Artificial Sequence: Synthetic oligonucleotide
gccagggaagggcacucug

SEQ ID NO: 2995835 - RNA, 19 nt, Artificial Sequence
  Description of Artificial Sequence: Synthetic oligonucleotide
cagaugaagcaguccuugu

SEQ ID NO: 2995836 - RNA, 19 nt, Artificial Sequence
  Description of Artificial Sequence: Synthetic oligonucleotide
ugucuccaugggagaggau

SEQ ID NO: 2995837 - RNA, 19 nt, Artificial Sequence
  Description of Artificial Sequence: Synthetic oligonucleotide
ccagucagucucaacaagu

SEQ ID NO: 2995838 - RNA, 19 nt, Artificial Sequence
  Description of Artificial Sequence: Synthetic oligonucleotide
gaccaggguggcuuugaau

SEQ ID NO: 2995839 - RNA, 19 nt, Artificial Sequence
  Description of Artificial Sequence: Synthetic oligonucleotide
ccuugugguccaugcuuug

SEQ ID NO: 2995840 - RNA, 19 nt, Artificial Sequence
  Description of Artificial Sequence: Synthetic oligonucleotide
ggcuuugaauucagagauc

SEQ ID NO: 2995841 - RNA, 19 nt, Artificial Sequence
  Description of Artificial Sequence: Synthetic oligonucleotide
  modified_base (16)..(16): a, c, u, g, unknown or other
caucuggaauauagcncuu

SEQ ID NO: 2995842 - RNA, 19 nt, Artificial Sequence
  Description of Artificial Sequence: Synthetic oligonucleotide
ccaugcuuugguagaaucu

SEQ ID NO: 2995843 - RNA, 19 nt, Artificial Sequence
  Description of Artificial Sequence: Synthetic oligonucleotide
ccagggaagggcacucuga

SEQ ID NO: 2995844 - RNA, 19 nt, Artificial Sequence
  Description of Artificial Sequence: Synthetic oligonucleotide
cagccagggaagggcacuc

SEQ ID NO: 2995845 - RNA, 19 nt, Artificial Sequence
  Description of Artificial Sequence: Synthetic oligonucleotide
cuccaugggagaggaugca

SEQ ID NO: 2995846 - RNA, 19 nt, Artificial Sequence
  Description of Artificial Sequence: Synthetic oligonucleotide
cguagaugaugcccguguc

SEQ ID NO: 2995847 - RNA, 19 nt, Artificial Sequence
  Description of Artificial Sequence: Synthetic oligonucleotide
cgugucuccaugggagagg

SEQ ID NO: 2995848 - RNA, 19 nt, Artificial Sequence
  Description of Artificial Sequence: Synthetic oligonucleotide
gggcacucugaaccaguga

SEQ ID NO: 2995849 - RNA, 19 nt, Artificial Sequence
  Description of Artificial Sequence: Synthetic oligonucleotide
agccagggaagggcacucu

SEQ ID NO: 2995850 - RNA, 19 nt, Artificial Sequence
  Description of Artificial Sequence: Synthetic oligonucleotide
cgucuagaagcugaccauc

SEQ ID NO: 2995851 - RNA, 19 nt, Artificial Sequence
  Description of Artificial Sequence: Synthetic oligonucleotide
gguccaugcuuugguagaa

SEQ ID NO: 2995852 - RNA, 19 nt, Artificial Sequence
  Description of Artificial Sequence: Synthetic oligonucleotide
ccgugucuccaugggagag

SEQ ID NO: 2995853 - RNA, 19 nt, Artificial Sequence
  Description of Artificial Sequence: Synthetic oligonucleotide
uccccuuggcaagccugau

SEQ ID NO: 2995854 - RNA, 19 nt, Artificial Sequence
  Description of Artificial Sequence: Synthetic oligonucleotide
ccacgucuagaagcugacc

SEQ ID NO: 2995855 - RNA, 19 nt, Artificial Sequence
  Description of Artificial Sequence: Synthetic oligonucleotide
cccaacagaaagucagccu

SEQ ID NO: 2995856 - RNA, 19 nt, Artificial Sequence
  Description of Artificial Sequence: Synthetic oligonucleotide
gcacucugaaccagugaaa

SEQ ID NO: 2995857 - RNA, 19 nt, Artificial Sequence
  Description of Artificial Sequence: Synthetic oligonucleotide
gccguagaugaugcccgug

SEQ ID NO: 2995858 - RNA, 19 nt, Artificial Sequence
  Description of Artificial Sequence: Synthetic oligonucleotide
ccguagaugaugcccgugu

SEQ ID NO: 2995859 - RNA, 19 nt, Artificial Sequence
  Description of Artificial Sequence: Synthetic oligonucleotide
caucagugccguagaugau

SEQ ID NO: 2995860 - RNA, 19 nt, Artificial Sequence
  Description of Artificial Sequence: Synthetic oligonucleotide
cccgugucuccaugggaga

SEQ ID NO: 2995861 - RNA, 19 nt, Artificial Sequence
  Description of Artificial Sequence: Synthetic oligonucleotide
guccaugcuuugguagaau

SEQ ID NO: 2995862 - RNA, 19 nt, Artificial Sequence
  Description of Artificial Sequence: Synthetic oligonucleotide
ggguggcuuugaauucaga

SEQ ID NO: 2995863 - RNA, 19 nt, Artificial Sequence
  Description of Artificial Sequence: Synthetic oligonucleotide
guacagcuuucugguaguu

SEQ ID NO: 2995864 - RNA, 19 nt, Artificial Sequence
  Description of Artificial Sequence: Synthetic oligonucleotide
ccuuggcaagccugauaaa

SEQ ID NO: 2995865 - RNA, 19 nt, Artificial Sequence
  Description of Artificial Sequence: Synthetic oligonucleotide
gggagaggaugcagcagau

SEQ ID NO: 2995866 - RNA, 19 nt, Artificial Sequence
  Description of Artificial Sequence: Synthetic oligonucleotide
cagccucaucuggaauaua

SEQ ID NO: 2995867 - RNA, 19 nt, Artificial Sequence
  Description of Artificial Sequence: Synthetic oligonucleotide
ccaucucuucccagucagu

SEQ ID NO: 2995868 - RNA, 19 nt, Artificial Sequence
  Description of Artificial Sequence: Synthetic oligonucleotide
ccccuuggcaagccugaua

SEQ ID NO: 2995869 - RNA, 19 nt, Artificial Sequence
  Description of Artificial Sequence: Synthetic oligonucleotide
ccuucccaucagugccgua

SEQ ID NO: 2995870 - RNA, 19 nt, Artificial Sequence
  Description of Artificial Sequence: Synthetic oligonucleotide
  modified_base (1)..(1): a, c, u, g, unknown or other
ncuuuugagaugaguccac

SEQ ID NO: 2995871 - RNA, 19 nt, Artificial Sequence
  Description of Artificial Sequence: Synthetic oligonucleotide
aauuaccuaacacugcacc

SEQ ID NO: 2995872 - RNA, 19 nt, Artificial Sequence
  Description of Artificial Sequence: Synthetic oligonucleotide
uuuuccauuaugcuuuacg

SEQ ID NO: 2995873 - RNA, 19 nt, Artificial Sequence
  Description of Artificial Sequence: Synthetic oligonucleotide
agaacaauuaccuaacacu

SEQ ID NO: 2995874 - RNA, 19 nt, Artificial Sequence
  Description of Artificial Sequence: Synthetic oligonucleotide
ucuggcaugagcaggaggg

SEQ ID NO: 2995875 - RNA, 19 nt, Artificial Sequence
  Description of Artificial Sequence: Synthetic oligonucleotide
uauuuuaggaacuggcugc

SEQ ID NO: 2995876 - RNA, 19 nt, Artificial Sequence
  Description of Artificial Sequence: Synthetic oligonucleotide
augauauuuacugagauga

SEQ ID NO: 2995877 - RNA, 19 nt, Artificial Sequence
  Description of Artificial Sequence: Synthetic oligonucleotide
acguguaugauauuuacug

SEQ ID NO: 2995878 - RNA, 19 nt, Artificial Sequence
  Description of Artificial Sequence: Synthetic oligonucleotide
ugaguuucuggcaugagca

SEQ ID NO: 2995879 - RNA, 19 nt, Artificial Sequence
  Description of Artificial Sequence: Synthetic oligonucleotide
agcuccaggagauuaaugg

SEQ ID NO: 2995880 - RNA, 19 nt, Artificial Sequence
  Description of Artificial Sequence: Synthetic oligonucleotide
uccauuaugcuuuacgugu

SEQ ID NO: 2995881 - RNA, 19 nt, Artificial Sequence
  Description of Artificial Sequence: Synthetic oligonucleotide
aagcaguagaacaauuacc

SEQ ID NO: 2995882 - RNA, 19 nt, Artificial Sequence
  Description of Artificial Sequence: Synthetic oligonucleotide
uaagcaguagaacaauuac

SEQ ID NO: 2995883 - RNA, 19 nt, Artificial Sequence
  Description of Artificial Sequence: Synthetic oligonucleotide
cuugcuuuuguuucagugg

SEQ ID NO: 2995884 - RNA, 19 nt, Artificial Sequence
  Description of Artificial Sequence: Synthetic oligonucleotide
acaggucuauuuuaggaac

SEQ ID NO: 2995885 - RNA, 19 nt, Artificial Sequence
  Description of Artificial Sequence: Synthetic oligonucleotide
ucacacaugaguuucuggc

SEQ ID NO: 2995886 - RNA, 19 nt, Artificial Sequence
  Description of Artificial Sequence: Synthetic oligonucleotide
aaagcaguucccuggacug

SEQ ID NO: 2995887 - RNA, 19 nt, Artificial Sequence
  Description of Artificial Sequence: Synthetic oligonucleotide
guuucuaagcaguagaaca

SEQ ID NO: 2995888 - RNA, 19 nt, Artificial Sequence
  Description of Artificial Sequence: Synthetic oligonucleotide
ucuauuuuaggaacuggcu

SEQ ID NO: 2995889 - RNA, 19 nt, Artificial Sequence
  Description of Artificial Sequence: Synthetic oligonucleotide
gaacaauuaccuaacacug

SEQ ID NO: 2995890 - RNA, 19 nt, Artificial Sequence
  Description of Artificial Sequence: Synthetic oligonucleotide
aacaauuaccuaacacugc

SEQ ID NO: 2995891 - RNA, 19 nt, Artificial Sequence
  Description of Artificial Sequence: Synthetic oligonucleotide
aaaagcaguucccuggacu

SEQ ID NO: 2995892 - RNA, 19 nt, Artificial Sequence
  Description of Artificial Sequence: Synthetic oligonucleotide
ugcuuuacguguaugauau

SEQ ID NO: 2995893 - RNA, 19 nt, Artificial Sequence
  Description of Artificial Sequence: Synthetic oligonucleotide
uguaugauauuuacugaga

SEQ ID NO: 2995894 - RNA, 19 nt, Artificial Sequence
  Description of Artificial Sequence: Synthetic oligonucleotide
uuuccauuaugcuuuacgu

SEQ ID NO: 2995895 - RNA, 19 nt, Artificial Sequence
  Description of Artificial Sequence: Synthetic oligonucleotide
uaugauauuuacugagaug

SEQ ID NO: 2995896 - RNA, 19 nt, Artificial Sequence
  Description of Artificial Sequence: Synthetic oligonucleotide
gaauucuugugcuacacca

SEQ ID NO: 2995897 - RNA, 19 nt, Artificial Sequence
  Description of Artificial Sequence: Synthetic oligonucleotide
gagguggaaauccacaggc

SEQ ID NO: 2995898 - RNA, 19 nt, Artificial Sequence
  Description of Artificial Sequence: Synthetic oligonucleotide
guguaugauauuuacugag

SEQ ID NO: 2995899 - RNA, 19 nt, Artificial Sequence
  Description of Artificial Sequence: Synthetic oligonucleotide
aaauccacaggcuugcuuu

SEQ ID NO: 2995900 - RNA, 19 nt, Artificial Sequence
  Description of Artificial Sequence: Synthetic oligonucleotide
uagaacaauuaccuaacac

SEQ ID NO: 2995901 - RNA, 19 nt, Artificial Sequence
  Description of Artificial Sequence: Synthetic oligonucleotide
gugaaaagcaguucccugg

SEQ ID NO: 2995902 - RNA, 19 nt, Artificial Sequence
  Description of Artificial Sequence: Synthetic oligonucleotide
uuuaggaacuggcugcuug

SEQ ID NO: 2995903 - RNA, 19 nt, Artificial Sequence
  Description of Artificial Sequence: Synthetic oligonucleotide
uuagugaaaagcaguuccc

SEQ ID NO: 2995904 - RNA, 19 nt, Artificial Sequence
  Description of Artificial Sequence: Synthetic oligonucleotide
aacacaggucuauuuuagg

SEQ ID NO: 2995905 - RNA, 19 nt, Artificial Sequence
  Description of Artificial Sequence: Synthetic oligonucleotide
guuucagugguuucuaagc

SEQ ID NO: 2995906 - RNA, 19 nt, Artificial Sequence
  Description of Artificial Sequence: Synthetic oligonucleotide
acaauuaccuaacacugca

SEQ ID NO: 2995907 - RNA, 19 nt, Artificial Sequence
  Description of Artificial Sequence: Synthetic oligonucleotide
aguagaacaauuaccuaac

SEQ ID NO: 2995908 - RNA, 19 nt, Artificial Sequence
  Description of Artificial Sequence: Synthetic oligonucleotide
uggauggugucacacauga

SEQ ID NO: 2995909 - RNA, 19 nt, Artificial Sequence
  Description of Artificial Sequence: Synthetic oligonucleotide
cuauuuuaggaacuggcug

SEQ ID NO: 2995910 - RNA, 19 nt, Artificial Sequence
  Description of Artificial Sequence: Synthetic oligonucleotide
uuaugcuuuacguguauga

SEQ ID NO: 2995911 - RNA, 19 nt, Artificial Sequence
  Description of Artificial Sequence: Synthetic oligonucleotide
acaggcuugcuuuuguuuc

SEQ ID NO: 2995912 - RNA, 19 nt, Artificial Sequence
  Description of Artificial Sequence: Synthetic oligonucleotide
auucuugugcuacaccagg

SEQ ID NO: 2995913 - RNA, 19 nt, Artificial Sequence
  Description of Artificial Sequence: Synthetic oligonucleotide
uuucuaagcaguagaacaa

SEQ ID NO: 2995914 - RNA, 19 nt, Artificial Sequence
  Description of Artificial Sequence: Synthetic oligonucleotide
agauuaaugggccguuuuc

SEQ ID NO: 2995915 - RNA, 19 nt, Artificial Sequence
  Description of Artificial Sequence: Synthetic oligonucleotide
ugcugcagugcaaacacag

SEQ ID NO: 2995916 - RNA, 19 nt, Artificial Sequence
  Description of Artificial Sequence: Synthetic oligonucleotide
uuucagugguuucuaagca

SEQ ID NO: 2995917 - RNA, 19 nt, Artificial Sequence
  Description of Artificial Sequence: Synthetic oligonucleotide
accacaguggauugacugc

SEQ ID NO: 2995918 - RNA, 19 nt, Artificial Sequence
  Description of Artificial Sequence: Synthetic oligonucleotide
uguuucagugguuucuaag

SEQ ID NO: 2995919 - RNA, 19 nt, Artificial Sequence
  Description of Artificial Sequence: Synthetic oligonucleotide
uugcuuuuguuucaguggu

SEQ ID NO: 2995920 - RNA, 19 nt, Artificial Sequence
  Description of Artificial Sequence: Synthetic oligonucleotide
uguuuagugaaaagcaguu

SEQ ID NO: 2995921 - RNA, 19 nt, Artificial Sequence
  Description of Artificial Sequence: Synthetic oligonucleotide
ggaacuggcugcuugacgg

SEQ ID NO: 2995922 - RNA, 19 nt, Artificial Sequence
  Description of Artificial Sequence: Synthetic oligonucleotide
uccaggagauuaaugggcc

SEQ ID NO: 2995923 - RNA, 19 nt, Artificial Sequence
  Description of Artificial Sequence: Synthetic oligonucleotide
uuacguguaugauauuuac

SEQ ID NO: 2995924 - RNA, 19 nt, Artificial Sequence
  Description of Artificial Sequence: Synthetic oligonucleotide
agcaguagaacaauuaccu

SEQ ID NO: 2995925 - RNA, 19 nt, Artificial Sequence
  Description of Artificial Sequence: Synthetic oligonucleotide
uucagugguuucuaagcag

SEQ ID NO: 2995926 - RNA, 19 nt, Artificial Sequence
  Description of Artificial Sequence: Synthetic oligonucleotide
ucagugguuucuaagcagu

SEQ ID NO: 2995927 - RNA, 19 nt, Artificial Sequence
  Description of Artificial Sequence: Synthetic oligonucleotide
gauuaaugggccguuuucc

SEQ ID NO: 2995928 - RNA, 19 nt, Artificial Sequence
  Description of Artificial Sequence: Synthetic oligonucleotide
uucuugugcuacaccaggg

SEQ ID NO: 2995929 - RNA, 19 nt, Artificial Sequence
  Description of Artificial Sequence: Synthetic oligonucleotide
uuccauuaugcuuuacgug

SEQ ID NO: 2995930 - RNA, 19 nt, Artificial Sequence
  Description of Artificial Sequence: Synthetic oligonucleotide
aaacacaggucuauuuuag

SEQ ID NO: 2995931 - RNA, 19 nt, Artificial Sequence
  Description of Artificial Sequence: Synthetic oligonucleotide
gauugacugccucugagca

SEQ ID NO: 2995932 - RNA, 19 nt, Artificial Sequence
  Description of Artificial Sequence: Synthetic oligonucleotide
gauggugucacacaugagu

SEQ ID NO: 2995933 - RNA, 19 nt, Artificial Sequence
  Description of Artificial Sequence: Synthetic oligonucleotide
ugaaaagcaguucccugga

SEQ ID NO: 2995934 - RNA, 19 nt, Artificial Sequence
  Description of Artificial Sequence: Synthetic oligonucleotide
cuccaggagauuaaugggc

SEQ ID NO: 2995935 - RNA, 19 nt, Artificial Sequence
  Description of Artificial Sequence: Synthetic oligonucleotide
uuuacguguaugauauuua

SEQ ID NO: 2995936 - RNA, 19 nt, Artificial Sequence
  Description of Artificial Sequence: Synthetic oligonucleotide
auuaccuaacacugcacca

SEQ ID NO: 2995937 - RNA, 19 nt, Artificial Sequence
  Description of Artificial Sequence: Synthetic oligonucleotide
acacaggucuauuuuagga

SEQ ID NO: 2995938 - RNA, 19 nt, Artificial Sequence
  Description of Artificial Sequence: Synthetic oligonucleotide
agugaaaagcaguucccug

SEQ ID NO: 2995939 - RNA, 19 nt, Artificial Sequence
  Description of Artificial Sequence: Synthetic oligonucleotide
uggauugacugccucugag

SEQ ID NO: 2995940 - RNA, 19 nt, Artificial Sequence
  Description of Artificial Sequence: Synthetic oligonucleotide
ucuguggccuuccugcugc

SEQ ID NO: 2995941 - RNA, 19 nt, Artificial Sequence
  Description of Artificial Sequence: Synthetic oligonucleotide
cacucuguggccuuccugc

SEQ ID NO: 2995942 - RNA, 19 nt, Artificial Sequence
  Description of Artificial Sequence: Synthetic oligonucleotide
uaacacugcaccaacucau

SEQ ID NO: 2995943 - RNA, 19 nt, Artificial Sequence
  Description of Artificial Sequence: Synthetic oligonucleotide
acugcaccaacucauuugu

SEQ ID NO: 2995944 - RNA, 19 nt, Artificial Sequence
  Description of Artificial Sequence: Synthetic oligonucleotide
uugacgguggguugggugc

SEQ ID NO: 2995945 - RNA, 19 nt, Artificial Sequence
  Description of Artificial Sequence: Synthetic oligonucleotide
aauucuugugcuacaccag

SEQ ID NO: 2995946 - RNA, 19 nt, Artificial Sequence
  Description of Artificial Sequence: Synthetic oligonucleotide
aggagguggaaauccacag

SEQ ID NO: 2995947 - RNA, 19 nt, Artificial Sequence
  Description of Artificial Sequence: Synthetic oligonucleotide
auuaaugggccguuuucca

SEQ ID NO: 2995948 - RNA, 19 nt, Artificial Sequence
  Description of Artificial Sequence: Synthetic oligonucleotide
gucuauuuuaggaacuggc

SEQ ID NO: 2995949 - RNA, 19 nt, Artificial Sequence
  Description of Artificial Sequence: Synthetic oligonucleotide
uacguguaugauauuuacu

SEQ ID NO: 2995950 - RNA, 19 nt, Artificial Sequence
  Description of Artificial Sequence: Synthetic oligonucleotide
caguagaacaauuaccuaa

SEQ ID NO: 2995951 - RNA, 19 nt, Artificial Sequence
  Description of Artificial Sequence: Synthetic oligonucleotide
ugcaccaacucauuuguua

SEQ ID NO: 2995952 - RNA, 19 nt, Artificial Sequence
  Description of Artificial Sequence: Synthetic oligonucleotide
aguuucuggcaugagcagg

SEQ ID NO: 2995953 - RNA, 19 nt, Artificial Sequence
  Description of Artificial Sequence: Synthetic oligonucleotide
uuaggaacuggcugcuuga

SEQ ID NO: 2995954 - RNA, 19 nt, Artificial Sequence
  Description of Artificial Sequence: Synthetic oligonucleotide
ugcgcugccagcuccagga

SEQ ID NO: 2995955 - RNA, 19 nt, Artificial Sequence
  Description of Artificial Sequence: Synthetic oligonucleotide
uacaccagggaaugggcug

SEQ ID NO: 2995956 - RNA, 19 nt, Artificial Sequence
  Description of Artificial Sequence: Synthetic oligonucleotide
caggagggaauucuugugc

SEQ ID NO: 2995957 - RNA, 19 nt, Artificial Sequence
  Description of Artificial Sequence: Synthetic oligonucleotide
uucuggcaugagcaggagg

SEQ ID NO: 2995958 - RNA, 19 nt, Artificial Sequence
  Description of Artificial Sequence: Synthetic oligonucleotide
ugcagugcaaacacagguc

SEQ ID NO: 2995959 - RNA, 19 nt, Artificial Sequence
  Description of Artificial Sequence: Synthetic oligonucleotide
ugguuucuaagcaguagaa

SEQ ID NO: 2995960 - RNA, 19 nt, Artificial Sequence
  Description of Artificial Sequence: Synthetic oligonucleotide
uugacugccucugagcacu

SEQ ID NO: 2995961 - RNA, 19 nt, Artificial Sequence
  Description of Artificial Sequence: Synthetic oligonucleotide
caccacaguggauugacug

SEQ ID NO: 2995962 - RNA, 19 nt, Artificial Sequence
  Description of Artificial Sequence: Synthetic oligonucleotide
gaaugggcuguuuagugaa

SEQ ID NO: 2995963 - RNA, 19 nt, Artificial Sequence
  Description of Artificial Sequence: Synthetic oligonucleotide
ucuaagcaguagaacaauu

SEQ ID NO: 2995964 - RNA, 19 nt, Artificial Sequence
  Description of Artificial Sequence: Synthetic oligonucleotide
uggaaauccacaggcuugc

SEQ ID NO: 2995965 - RNA, 19 nt, Artificial Sequence
  Description of Artificial Sequence: Synthetic oligonucleotide
aaaaggagguggaaaucca

SEQ ID NO: 2995966 - RNA, 19 nt, Artificial Sequence
  Description of Artificial Sequence: Synthetic oligonucleotide
agcaggagggaauucuugu

SEQ ID NO: 2995967 - RNA, 19 nt, Artificial Sequence
  Description of Artificial Sequence: Synthetic oligonucleotide
aagcaguucccuggacugc

SEQ ID NO: 2995968 - RNA, 19 nt, Artificial Sequence
  Description of Artificial Sequence: Synthetic oligonucleotide
gugguuucuaagcaguaga

SEQ ID NO: 2995969 - RNA, 19 nt, Artificial Sequence
  Description of Artificial Sequence: Synthetic oligonucleotide
uugugcuacaccagggaau

SEQ ID NO: 2995970 - RNA, 19 nt, Artificial Sequence
  Description of Artificial Sequence: Synthetic oligonucleotide
gucacacaugaguuucugg

SEQ ID NO: 2995971 - RNA, 19 nt, Artificial Sequence
  Description of Artificial Sequence: Synthetic oligonucleotide
acaguggauugacugccuc

SEQ ID NO: 2995972 - RNA, 19 nt, Artificial Sequence
  Description of Artificial Sequence: Synthetic oligonucleotide
aggaacuggcugcuugacg

SEQ ID NO: 2995973 - RNA, 19 nt, Artificial Sequence
  Description of Artificial Sequence: Synthetic oligonucleotide
ugggcuguuuagugaaaag

SEQ ID NO: 2995974 - RNA, 19 nt, Artificial Sequence
  Description of Artificial Sequence: Synthetic oligonucleotide
uaugcuuuacguguaugau

SEQ ID NO: 2995975 - RNA, 19 nt, Artificial Sequence
  Description of Artificial Sequence: Synthetic oligonucleotide
uuaccuaacacugcaccaa

SEQ ID NO: 2995976 - RNA, 19 nt, Artificial Sequence
  Description of Artificial Sequence: Synthetic oligonucleotide
agugguuucuaagcaguag

SEQ ID NO: 2995977 - RNA, 19 nt, Artificial Sequence
  Description of Artificial Sequence: Synthetic oligonucleotide
cacugcaccaacucauuug

SEQ ID NO: 2995978 - RNA, 19 nt, Artificial Sequence
  Description of Artificial Sequence: Synthetic oligonucleotide
acacaugaguuucuggcau

SEQ ID NO: 2995979 - RNA, 19 nt, Artificial Sequence
  Description of Artificial Sequence: Synthetic oligonucleotide
gaguuucuggcaugagcag

SEQ ID NO: 2995980 - RNA, 19 nt, Artificial Sequence
  Description of Artificial Sequence: Synthetic oligonucleotide
gagggaauucuugugcuac

SEQ ID NO: 2995981 - RNA, 19 nt, Artificial Sequence
  Description of Artificial Sequence: Synthetic oligonucleotide
cagggaaugggcuguuuag

SEQ ID NO: 2995982 - RNA, 19 nt, Artificial Sequence
  Description of Artificial Sequence: Synthetic oligonucleotide
aggagggaauucuugugcu

SEQ ID NO: 2995983 - RNA, 19 nt, Artificial Sequence
  Description of Artificial Sequence: Synthetic oligonucleotide
uagugaaaagcaguucccu

SEQ ID NO: 2995984 - RNA, 19 nt, Artificial Sequence
  Description of Artificial Sequence: Synthetic oligonucleotide
aguggauugacugccucug

SEQ ID NO: 2995985 - RNA, 19 nt, Artificial Sequence
  Description of Artificial Sequence: Synthetic oligonucleotide
uaccuaacacugcaccaac

SEQ ID NO: 2995986 - RNA, 19 nt, Artificial Sequence
  Description of Artificial Sequence: Synthetic oligonucleotide
aaggagguggaaauccaca

SEQ ID NO: 2995987 - RNA, 19 nt, Artificial Sequence
  Description of Artificial Sequence: Synthetic oligonucleotide
uuaaugggccguuuuccau

SEQ ID NO: 2995988 - RNA, 19 nt, Artificial Sequence
  Description of Artificial Sequence: Synthetic oligonucleotide
gaagaggccggcucccacc

SEQ ID NO: 2995989 - RNA, 19 nt, Artificial Sequence
  Description of Artificial Sequence: Synthetic oligonucleotide
cuaagcaguagaacaauua

SEQ ID NO: 2995990 - RNA, 19 nt, Artificial Sequence
  Description of Artificial Sequence: Synthetic oligonucleotide
cuugacgguggguugggug

SEQ ID NO: 2995991 - RNA, 19 nt, Artificial Sequence
  Description of Artificial Sequence: Synthetic oligonucleotide
ugcaaacacaggucuauuu

SEQ ID NO: 2995992 - RNA, 19 nt, Artificial Sequence
  Description of Artificial Sequence: Synthetic oligonucleotide
gcuugcuuuuguuucagug

SEQ ID NO: 2995993 - RNA, 19 nt, Artificial Sequence
  Description of Artificial Sequence: Synthetic oligonucleotide
caauuaccuaacacugcac

SEQ ID NO: 2995994 - RNA, 19 nt, Artificial Sequence
  Description of Artificial Sequence: Synthetic oligonucleotide
gcuccaggagauuaauggg

SEQ ID NO: 2995995 - RNA, 19 nt, Artificial Sequence
  Description of Artificial Sequence: Synthetic oligonucleotide
aaugggccguuuuccauua

SEQ ID NO: 2995996 - RNA, 19 nt, Artificial Sequence
  Description of Artificial Sequence: Synthetic oligonucleotide
auuaugcuuuacguguaug

SEQ ID NO: 2995997 - RNA, 19 nt, Artificial Sequence
  Description of Artificial Sequence: Synthetic oligonucleotide
aagaggccggcucccacca

SEQ ID NO: 2995998 - RNA, 19 nt, Artificial Sequence
  Description of Artificial Sequence: Synthetic oligonucleotide
cuaacacugcaccaacuca

SEQ ID NO: 2995999 - RNA, 19 nt, Artificial Sequence
  Description of Artificial Sequence: Synthetic oligonucleotide
ggagguggaaauccacagg

SEQ ID NO: 2996000 - RNA, 19 nt, Artificial Sequence
  Description of Artificial Sequence: Synthetic oligonucleotide
acugccucugagcacucug

SEQ ID NO: 2996001 - RNA, 19 nt, Artificial Sequence
  Description of Artificial Sequence: Synthetic oligonucleotide
uuuguuucagugguuucua

SEQ ID NO: 2996002 - RNA, 19 nt, Artificial Sequence
  Description of Artificial Sequence: Synthetic oligonucleotide
augcuuuacguguaugaua

SEQ ID NO: 2996003 - RNA, 19 nt, Artificial Sequence
  Description of Artificial Sequence: Synthetic oligonucleotide
guggaaauccacaggcuug

SEQ ID NO: 2996004 - RNA, 19 nt, Artificial Sequence
  Description of Artificial Sequence: Synthetic oligonucleotide
agcaguucccuggacugcg

SEQ ID NO: 2996005 - RNA, 19 nt, Artificial Sequence
  Description of Artificial Sequence: Synthetic oligonucleotide
uucuaagcaguagaacaau

SEQ ID NO: 2996006 - RNA, 19 nt, Artificial Sequence
  Description of Artificial Sequence: Synthetic oligonucleotide
ugucacacaugaguuucug

SEQ ID NO: 2996007 - RNA, 19 nt, Artificial Sequence
  Description of Artificial Sequence: Synthetic oligonucleotide
guaugauauuuacugagau

SEQ ID NO: 2996008 - RNA, 19 nt, Artificial Sequence
  Description of Artificial Sequence: Synthetic oligonucleotide
auuuuaggaacuggcugcu

SEQ ID NO: 2996009 - RNA, 19 nt, Artificial Sequence
  Description of Artificial Sequence: Synthetic oligonucleotide
agugcaaacacaggucuau

SEQ ID NO: 2996010 - RNA, 19 nt, Artificial Sequence
  Description of Artificial Sequence: Synthetic oligonucleotide
gcuguuuagugaaaagcag

SEQ ID NO: 2996011 - RNA, 19 nt, Artificial Sequence
  Description of Artificial Sequence: Synthetic oligonucleotide
cacaggucuauuuuaggaa

SEQ ID NO: 2996012 - RNA, 19 nt, Artificial Sequence
  Description of Artificial Sequence: Synthetic oligonucleotide
gaaaagcaguucccuggac

SEQ ID NO: 2996013 - RNA, 19 nt, Artificial Sequence
  Description of Artificial Sequence: Synthetic oligonucleotide
ugccucugagcacucugug

SEQ ID NO: 2996014 - RNA, 19 nt, Artificial Sequence
  Description of Artificial Sequence: Synthetic oligonucleotide
augagcaggagggaauucu

SEQ ID NO: 2996015 - RNA, 19 nt, Artificial Sequence
  Description of Artificial Sequence: Synthetic oligonucleotide
uggguugggugccacacuu

SEQ ID NO: 2996016 - RNA, 19 nt, Artificial Sequence
  Description of Artificial Sequence: Synthetic oligonucleotide
ggauugacugccucugagc

SEQ ID NO: 2996017 - RNA, 19 nt, Artificial Sequence
  Description of Artificial Sequence: Synthetic oligonucleotide
guagaacaauuaccuaaca

SEQ ID NO: 2996018 - RNA, 19 nt, Artificial Sequence
  Description of Artificial Sequence: Synthetic oligonucleotide
aggucuauuuuaggaacug

SEQ ID NO: 2996019 - RNA, 19 nt, Artificial Sequence
  Description of Artificial Sequence: Synthetic oligonucleotide
gguugggugccacacuucc

SEQ ID NO: 2996020 - RNA, 19 nt, Artificial Sequence
  Description of Artificial Sequence: Synthetic oligonucleotide
gggaaugggcuguuuagug

SEQ ID NO: 2996021 - RNA, 19 nt, Artificial Sequence
  Description of Artificial Sequence: Synthetic oligonucleotide
caaacacaggucuauuuua

SEQ ID NO: 2996022 - RNA, 19 nt, Artificial Sequence
  Description of Artificial Sequence: Synthetic oligonucleotide
guuuagugaaaagcaguuc

SEQ ID NO: 2996023 - RNA, 19 nt, Artificial Sequence
  Description of Artificial Sequence: Synthetic oligonucleotide
uggccuuccugcugcagug

SEQ ID NO: 2996024 - RNA, 19 nt, Artificial Sequence
  Description of Artificial Sequence: Synthetic oligonucleotide
ggaauucuugugcuacacc

SEQ ID NO: 2996025 - RNA, 19 nt, Artificial Sequence
  Description of Artificial Sequence: Synthetic oligonucleotide
cugggaagaggccggcucc

SEQ ID NO: 2996026 - RNA, 19 nt, Artificial Sequence
  Description of Artificial Sequence: Synthetic oligonucleotide
ugagcaggagggaauucuu

SEQ ID NO: 2996027 - RNA, 19 nt, Artificial Sequence
  Description of Artificial Sequence: Synthetic oligonucleotide
cuguuuagugaaaagcagu

SEQ ID NO: 2996028 - RNA, 19 nt, Artificial Sequence
  Description of Artificial Sequence: Synthetic oligonucleotide
cacacaugaguuucuggca

SEQ ID NO: 2996029 - RNA, 19 nt, Artificial Sequence
  Description of Artificial Sequence: Synthetic oligonucleotide
ggcuguuuagugaaaagca

SEQ ID NO: 2996030 - RNA, 19 nt, Artificial Sequence
  Description of Artificial Sequence: Synthetic oligonucleotide
ucugagcacucuguggccu

SEQ ID NO: 2996031 - RNA, 19 nt, Artificial Sequence
  Description of Artificial Sequence: Synthetic oligonucleotide
ggucuauuuuaggaacugg

SEQ ID NO: 2996032 - RNA, 19 nt, Artificial Sequence
  Description of Artificial Sequence: Synthetic oligonucleotide
uccugcugcagugcaaaca

SEQ ID NO: 2996033 - RNA, 19 nt, Artificial Sequence
  Description of Artificial Sequence: Synthetic oligonucleotide
gggcuguuuagugaaaagc

SEQ ID NO: 2996034 - RNA, 19 nt, Artificial Sequence
  Description of Artificial Sequence: Synthetic oligonucleotide
cacaugaguuucuggcaug

SEQ ID NO: 2996035 - RNA, 19 nt, Artificial Sequence
  Description of Artificial Sequence: Synthetic oligonucleotide
aacuggcugcuugacggug

SEQ ID NO: 2996036 - RNA, 19 nt, Artificial Sequence
  Description of Artificial Sequence: Synthetic oligonucleotide
guuucuggcaugagcagga

SEQ ID NO: 2996037 - RNA, 19 nt, Artificial Sequence
  Description of Artificial Sequence: Synthetic oligonucleotide
cucugagcacucuguggcc

SEQ ID NO: 2996038 - RNA, 19 nt, Artificial Sequence
  Description of Artificial Sequence: Synthetic oligonucleotide
aggcuggauggugucacac

SEQ ID NO: 2996039 - RNA, 19 nt, Artificial Sequence
  Description of Artificial Sequence: Synthetic oligonucleotide
agggaauucuugugcuaca

SEQ ID NO: 2996040 - RNA, 19 nt, Artificial Sequence
  Description of Artificial Sequence: Synthetic oligonucleotide
uuguuucagugguuucuaa

SEQ ID NO: 2996041 - RNA, 19 nt, Artificial Sequence
  Description of Artificial Sequence: Synthetic oligonucleotide
ccugcugcagugcaaacac

SEQ ID NO: 2996042 - RNA, 19 nt, Artificial Sequence
  Description of Artificial Sequence: Synthetic oligonucleotide
guucccuggacugcgcugc

SEQ ID NO: 2996043 - RNA, 19 nt, Artificial Sequence
  Description of Artificial Sequence: Synthetic oligonucleotide
ggugucacacaugaguuuc

SEQ ID NO: 2996044 - RNA, 19 nt, Artificial Sequence
  Description of Artificial Sequence: Synthetic oligonucleotide
ggaaugggcuguuuaguga

SEQ ID NO: 2996045 - RNA, 19 nt, Artificial Sequence
  Description of Artificial Sequence: Synthetic oligonucleotide
cuugugcuacaccagggaa

SEQ ID NO: 2996046 - RNA, 19 nt, Artificial Sequence
  Description of Artificial Sequence: Synthetic oligonucleotide
gagcaggagggaauucuug

SEQ ID NO: 2996047 - RNA, 19 nt, Artificial Sequence
  Description of Artificial Sequence: Synthetic oligonucleotide
auggugucacacaugaguu

SEQ ID NO: 2996048 - RNA, 19 nt, Artificial Sequence
  Description of Artificial Sequence: Synthetic oligonucleotide
cuggauggugucacacaug

SEQ ID NO: 2996049 - RNA, 19 nt, Artificial Sequence
  Description of Artificial Sequence: Synthetic oligonucleotide
ccuaacacugcaccaacuc

SEQ ID NO: 2996050 - RNA, 19 nt, Artificial Sequence
  Description of Artificial Sequence: Synthetic oligonucleotide
agggaaugggcuguuuagu

SEQ ID NO: 2996051 - RNA, 19 nt, Artificial Sequence
  Description of Artificial Sequence: Synthetic oligonucleotide
uuucuggcaugagcaggag

SEQ ID NO: 2996052 - RNA, 19 nt, Artificial Sequence
  Description of Artificial Sequence: Synthetic oligonucleotide
cugcuugacgguggguugg

SEQ ID NO: 2996053 - RNA, 19 nt, Artificial Sequence
  Description of Artificial Sequence: Synthetic oligonucleotide
ugcuugacgguggguuggg

SEQ ID NO: 2996054 - RNA, 19 nt, Artificial Sequence
  Description of Artificial Sequence: Synthetic oligonucleotide
uggugucacacaugaguuu

SEQ ID NO: 2996055 - RNA, 19 nt, Artificial Sequence
  Description of Artificial Sequence: Synthetic oligonucleotide
gcaggagggaauucuugug

SEQ ID NO: 2996056 - RNA, 19 nt, Artificial Sequence
  Description of Artificial Sequence: Synthetic oligonucleotide
cugcagugcaaacacaggu

SEQ ID NO: 2996057 - RNA, 19 nt, Artificial Sequence
  Description of Artificial Sequence: Synthetic oligonucleotide
cuuuacguguaugauauuu

SEQ ID NO: 2996058 - RNA, 19 nt, Artificial Sequence
  Description of Artificial Sequence: Synthetic oligonucleotide
acaggcagcccugggaaga

SEQ ID NO: 2996059 - RNA, 19 nt, Artificial Sequence
  Description of Artificial Sequence: Synthetic oligonucleotide
cagcuccaggagauuaaug

SEQ ID NO: 2996060 - RNA, 19 nt, Artificial Sequence
  Description of Artificial Sequence: Synthetic oligonucleotide
ugcuuuuguuucagugguu

SEQ ID NO: 2996061 - RNA, 19 nt, Artificial Sequence
  Description of Artificial Sequence: Synthetic oligonucleotide
aacacugcaccaacucauu

SEQ ID NO: 2996062 - RNA, 19 nt, Artificial Sequence
  Description of Artificial Sequence: Synthetic oligonucleotide
acucuguggccuuccugcu

SEQ ID NO: 2996063 - RNA, 19 nt, Artificial Sequence
  Description of Artificial Sequence: Synthetic oligonucleotide
gggccguuuuccauuaugc

SEQ ID NO: 2996064 - RNA, 19 nt, Artificial Sequence
  Description of Artificial Sequence: Synthetic oligonucleotide
acacugcaccaacucauuu

SEQ ID NO: 2996065 - RNA, 19 nt, Artificial Sequence
  Description of Artificial Sequence: Synthetic oligonucleotide
gagauuaaugggccguuuu

SEQ ID NO: 2996066 - RNA, 19 nt, Artificial Sequence
  Description of Artificial Sequence: Synthetic oligonucleotide
uaggaacuggcugcuugac

SEQ ID NO: 2996067 - RNA, 19 nt, Artificial Sequence
  Description of Artificial Sequence: Synthetic oligonucleotide
ccaggagauuaaugggccg

SEQ ID NO: 2996068 - RNA, 19 nt, Artificial Sequence
  Description of Artificial Sequence: Synthetic oligonucleotide
acaccagggaaugggcugu

SEQ ID NO: 2996069 - RNA, 19 nt, Artificial Sequence
  Description of Artificial Sequence: Synthetic oligonucleotide
gaggccggcucccaccaca

SEQ ID NO: 2996070 - RNA, 19 nt, Artificial Sequence
  Description of Artificial Sequence: Synthetic oligonucleotide
augggcuguuuagugaaaa

SEQ ID NO: 2996071 - RNA, 19 nt, Artificial Sequence
  Description of Artificial Sequence: Synthetic oligonucleotide
ugggaagaggccggcuccc

SEQ ID NO: 2996072 - RNA, 19 nt, Artificial Sequence
  Description of Artificial Sequence: Synthetic oligonucleotide
ugacgguggguugggugcc

SEQ ID NO: 2996073 - RNA, 19 nt, Artificial Sequence
  Description of Artificial Sequence: Synthetic oligonucleotide
caggcuugcuuuuguuuca

SEQ ID NO: 2996074 - RNA, 19 nt, Artificial Sequence
  Description of Artificial Sequence: Synthetic oligonucleotide
uggacugcgcugccagcuc

SEQ ID NO: 2996075 - RNA, 19 nt, Artificial Sequence
  Description of Artificial Sequence: Synthetic oligonucleotide
cucccaccacaguggauug

SEQ ID NO: 2996076 - RNA, 19 nt, Artificial Sequence
  Description of Artificial Sequence: Synthetic oligonucleotide
gcagugcaaacacaggucu

SEQ ID NO: 2996077 - RNA, 19 nt, Artificial Sequence
  Description of Artificial Sequence: Synthetic oligonucleotide
gaaauccacaggcuugcuu

SEQ ID NO: 2996078 - RNA, 19 nt, Artificial Sequence
  Description of Artificial Sequence: Synthetic oligonucleotide
ccacaguggauugacugcc

SEQ ID NO: 2996079 - RNA, 19 nt, Artificial Sequence
  Description of Artificial Sequence: Synthetic oligonucleotide
gcugcagugcaaacacagg

SEQ ID NO: 2996080 - RNA, 19 nt, Artificial Sequence
  Description of Artificial Sequence: Synthetic oligonucleotide
ugccagcuccaggagauua

SEQ ID NO: 2996081 - RNA, 19 nt, Artificial Sequence
  Description of Artificial Sequence: Synthetic oligonucleotide
gcuacaccagggaaugggc

SEQ ID NO: 2996082 - RNA, 19 nt, Artificial Sequence
  Description of Artificial Sequence: Synthetic oligonucleotide
guugggugccacacuuccc

SEQ ID NO: 2996083 - RNA, 19 nt, Artificial Sequence
  Description of Artificial Sequence: Synthetic oligonucleotide
gcugcuugacgguggguug

SEQ ID NO: 2996084 - RNA, 19 nt, Artificial Sequence
  Description of Artificial Sequence: Synthetic oligonucleotide
uguggccuuccugcugcag

SEQ ID NO: 2996085 - RNA, 19 nt, Artificial Sequence
  Description of Artificial Sequence: Synthetic oligonucleotide
gggaauucuugugcuacac

SEQ ID NO: 2996086 - RNA, 19 nt, Artificial Sequence
  Description of Artificial Sequence: Synthetic oligonucleotide
uucccuggacugcgcugcc

SEQ ID NO: 2996087 - RNA, 19 nt, Artificial Sequence
  Description of Artificial Sequence: Synthetic oligonucleotide
uuccugcugcagugcaaac

SEQ ID NO: 2996088 - RNA, 19 nt, Artificial Sequence
  Description of Artificial Sequence: Synthetic oligonucleotide
agguggaaauccacaggcu

SEQ ID NO: 2996089 - RNA, 19 nt, Artificial Sequence
  Description of Artificial Sequence: Synthetic oligonucleotide
caggucuauuuuaggaacu

SEQ ID NO: 2996090 - RNA, 19 nt, Artificial Sequence
  Description of Artificial Sequence: Synthetic oligonucleotide
agcacucuguggccuuccu

SEQ ID NO: 2996091 - RNA, 19 nt, Artificial Sequence
  Description of Artificial Sequence: Synthetic oligonucleotide
ccggcucccaccacagugg

SEQ ID NO: 2996092 - RNA, 19 nt, Artificial Sequence
  Description of Artificial Sequence: Synthetic oligonucleotide
gguggguugggugccacac

SEQ ID NO: 2996093 - RNA, 19 nt, Artificial Sequence
  Description of Artificial Sequence: Synthetic oligonucleotide
accuaacacugcaccaacu

SEQ ID NO: 2996094 - RNA, 19 nt, Artificial Sequence
  Description of Artificial Sequence: Synthetic oligonucleotide
agaggccggcucccaccac

SEQ ID NO: 2996095 - RNA, 19 nt, Artificial Sequence
  Description of Artificial Sequence: Synthetic oligonucleotide
cuuccugcugcagugcaaa

SEQ ID NO: 2996096 - RNA, 19 nt, Artificial Sequence
  Description of Artificial Sequence: Synthetic oligonucleotide
auccacaggcuugcuuuug

SEQ ID NO: 2996097 - RNA, 19 nt, Artificial Sequence
  Description of Artificial Sequence: Synthetic oligonucleotide
guggauugacugccucuga

SEQ ID NO: 2996098 - RNA, 19 nt, Artificial Sequence
  Description of Artificial Sequence: Synthetic oligonucleotide
uuuuaggaacuggcugcuu

SEQ ID NO: 2996099 - RNA, 19 nt, Artificial Sequence
  Description of Artificial Sequence: Synthetic oligonucleotide
gcaaacacaggucuauuuu

SEQ ID NO: 2996100 - RNA, 19 nt, Artificial Sequence
  Description of Artificial Sequence: Synthetic oligonucleotide
gguggaaauccacaggcuu

SEQ ID NO: 2996101 - RNA, 19 nt, Artificial Sequence
  Description of Artificial Sequence: Synthetic oligonucleotide
caugagcaggagggaauuc

SEQ ID NO: 2996102 - RNA, 19 nt, Artificial Sequence
  Description of Artificial Sequence: Synthetic oligonucleotide
cuacaccagggaaugggcu

SEQ ID NO: 2996103 - RNA, 19 nt, Artificial Sequence
  Description of Artificial Sequence: Synthetic oligonucleotide
aggagauuaaugggccguu

SEQ ID NO: 2996104 - RNA, 19 nt, Artificial Sequence
  Description of Artificial Sequence: Synthetic oligonucleotide
cguguaugauauuuacuga

SEQ ID NO: 2996105 - RNA, 19 nt, Artificial Sequence
  Description of Artificial Sequence: Synthetic oligonucleotide
ggcagcccugggaagaggc

SEQ ID NO: 2996106 - RNA, 19 nt, Artificial Sequence
  Description of Artificial Sequence: Synthetic oligonucleotide
cugcgcugccagcuccagg

SEQ ID NO: 2996107 - RNA, 19 nt, Artificial Sequence
  Description of Artificial Sequence: Synthetic oligonucleotide
gagcacucuguggccuucc

SEQ ID NO: 2996108 - RNA, 19 nt, Artificial Sequence
  Description of Artificial Sequence: Synthetic oligonucleotide
ugagcacucuguggccuuc

SEQ ID NO: 2996109 - RNA, 19 nt, Artificial Sequence
  Description of Artificial Sequence: Synthetic oligonucleotide
gcaguagaacaauuaccua

SEQ ID NO: 2996110 - RNA, 19 nt, Artificial Sequence
  Description of Artificial Sequence: Synthetic oligonucleotide
gaacuggcugcuugacggu

SEQ ID NO: 2996111 - RNA, 19 nt, Artificial Sequence
  Description of Artificial Sequence: Synthetic oligonucleotide
acgguggguugggugccac

SEQ ID NO: 2996112 - RNA, 19 nt, Artificial Sequence
  Description of Artificial Sequence: Synthetic oligonucleotide
ucccaccacaguggauuga

SEQ ID NO: 2996113 - RNA, 19 nt, Artificial Sequence
  Description of Artificial Sequence: Synthetic oligonucleotide
ccugggaagaggccggcuc

SEQ ID NO: 2996114 - RNA, 19 nt, Artificial Sequence
  Description of Artificial Sequence: Synthetic oligonucleotide
caggcagcccugggaagag

SEQ ID NO: 2996115 - RNA, 19 nt, Artificial Sequence
  Description of Artificial Sequence: Synthetic oligonucleotide
gccguuuuccauuaugcuu

SEQ ID NO: 2996116 - RNA, 19 nt, Artificial Sequence
  Description of Artificial Sequence: Synthetic oligonucleotide
caguggauugacugccucu

SEQ ID NO: 2996117 - RNA, 19 nt, Artificial Sequence
  Description of Artificial Sequence: Synthetic oligonucleotide
cagugguuucuaagcagua

SEQ ID NO: 2996118 - RNA, 19 nt, Artificial Sequence
  Description of Artificial Sequence: Synthetic oligonucleotide
ggaagaggccggcucccac

SEQ ID NO: 2996119 - RNA, 19 nt, Artificial Sequence
  Description of Artificial Sequence: Synthetic oligonucleotide
guggccuuccugcugcagu

SEQ ID NO: 2996120 - RNA, 19 nt, Artificial Sequence
  Description of Artificial Sequence: Synthetic oligonucleotide
ugacugccucugagcacuc

SEQ ID NO: 2996121 - RNA, 19 nt, Artificial Sequence
  Description of Artificial Sequence: Synthetic oligonucleotide
gcuggauggugucacacau

SEQ ID NO: 2996122 - RNA, 19 nt, Artificial Sequence
  Description of Artificial Sequence: Synthetic oligonucleotide
cauuaugcuuuacguguau

SEQ ID NO: 2996123 - RNA, 19 nt, Artificial Sequence
  Description of Artificial Sequence: Synthetic oligonucleotide
ccguuuuccauuaugcuuu

SEQ ID NO: 2996124 - RNA, 19 nt, Artificial Sequence
  Description of Artificial Sequence: Synthetic oligonucleotide
cagugcaaacacaggucua

SEQ ID NO: 2996125 - RNA, 19 nt, Artificial Sequence
  Description of Artificial Sequence: Synthetic oligonucleotide
caggagauuaaugggccgu

SEQ ID NO: 2996126 - RNA, 19 nt, Artificial Sequence
  Description of Artificial Sequence: Synthetic oligonucleotide
gcacucuguggccuuccug

SEQ ID NO: 2996127 - RNA, 19 nt, Artificial Sequence
  Description of Artificial Sequence: Synthetic oligonucleotide
acugcgcugccagcuccag

SEQ ID NO: 2996128 - RNA, 19 nt, Artificial Sequence
  Description of Artificial Sequence: Synthetic oligonucleotide
cccaccacaguggauugac

SEQ ID NO: 2996129 - RNA, 19 nt, Artificial Sequence
  Description of Artificial Sequence: Synthetic oligonucleotide
cugcugcagugcaaacaca

SEQ ID NO: 2996130 - RNA, 19 nt, Artificial Sequence
  Description of Artificial Sequence: Synthetic oligonucleotide
aggcagcccugggaagagg

SEQ ID NO: 2996131 - RNA, 19 nt, Artificial Sequence
  Description of Artificial Sequence: Synthetic oligonucleotide
cccuggacugcgcugccag

SEQ ID NO: 2996132 - RNA, 19 nt, Artificial Sequence
  Description of Artificial Sequence: Synthetic oligonucleotide
ggauggugucacacaugag

SEQ ID NO: 2996133 - RNA, 19 nt, Artificial Sequence
  Description of Artificial Sequence: Synthetic oligonucleotide
ggagggaauucuugugcua

SEQ ID NO: 2996134 - RNA, 19 nt, Artificial Sequence
  Description of Artificial Sequence: Synthetic oligonucleotide
ggccguuuuccauuaugcu

SEQ ID NO: 2996135 - RNA, 19 nt, Artificial Sequence
  Description of Artificial Sequence: Synthetic oligonucleotide
ccaggcuggauggugucac

SEQ ID NO: 2996136 - RNA, 19 nt, Artificial Sequence
  Description of Artificial Sequence: Synthetic oligonucleotide
aggccggcucccaccacag

SEQ ID NO: 2996137 - RNA, 19 nt, Artificial Sequence
  Description of Artificial Sequence: Synthetic oligonucleotide
gacugcgcugccagcucca

SEQ ID NO: 2996138 - RNA, 19 nt, Artificial Sequence
  Description of Artificial Sequence: Synthetic oligonucleotide
ucccuggacugcgcugcca

SEQ ID NO: 2996139 - RNA, 19 nt, Artificial Sequence
  Description of Artificial Sequence: Synthetic oligonucleotide
cuggcaugagcaggaggga

SEQ ID NO: 2996140 - RNA, 19 nt, Artificial Sequence
  Description of Artificial Sequence: Synthetic oligonucleotide
cugccucugagcacucugu

SEQ ID NO: 2996141 - RNA, 19 nt, Artificial Sequence
  Description of Artificial Sequence: Synthetic oligonucleotide
ccauuaugcuuuacgugua

SEQ ID NO: 2996142 - RNA, 19 nt, Artificial Sequence
  Description of Artificial Sequence: Synthetic oligonucleotide
caggcuggauggugucaca

SEQ ID NO: 2996143 - RNA, 19 nt, Artificial Sequence
  Description of Artificial Sequence: Synthetic oligonucleotide
cuggacugcgcugccagcu

SEQ ID NO: 2996144 - RNA, 19 nt, Artificial Sequence
  Description of Artificial Sequence: Synthetic oligonucleotide
augggccguuuuccauuau

SEQ ID NO: 2996145 - RNA, 19 nt, Artificial Sequence
  Description of Artificial Sequence: Synthetic oligonucleotide
ccuggacugcgcugccagc

SEQ ID NO: 2996146 - RNA, 19 nt, Artificial Sequence
  Description of Artificial Sequence: Synthetic oligonucleotide
gcucccaccacaguggauu

SEQ ID NO: 2996147 - RNA, 19 nt, Artificial Sequence
  Description of Artificial Sequence: Synthetic oligonucleotide
gacgguggguugggugcca

SEQ ID NO: 2996148 - RNA, 19 nt, Artificial Sequence
  Description of Artificial Sequence: Synthetic oligonucleotide
gugucacacaugaguuucu

SEQ ID NO: 2996149 - RNA, 19 nt, Artificial Sequence
  Description of Artificial Sequence: Synthetic oligonucleotide
uggcugcuugacggugggu

SEQ ID NO: 2996150 - RNA, 19 nt, Artificial Sequence
  Description of Artificial Sequence: Synthetic oligonucleotide
ccagggaaugggcuguuua

SEQ ID NO: 2996151 - RNA, 19 nt, Artificial Sequence
  Description of Artificial Sequence: Synthetic oligonucleotide
ggccuuccugcugcagugc

SEQ ID NO: 2996152 - RNA, 19 nt, Artificial Sequence
  Description of Artificial Sequence: Synthetic oligonucleotide
gcugccagcuccaggagau

SEQ ID NO: 2996153 - RNA, 19 nt, Artificial Sequence
  Description of Artificial Sequence: Synthetic oligonucleotide
caguucccuggacugcgcu

SEQ ID NO: 2996154 - RNA, 19 nt, Artificial Sequence
  Description of Artificial Sequence: Synthetic oligonucleotide
gcaguucccuggacugcgc

SEQ ID NO: 2996155 - RNA, 19 nt, Artificial Sequence
  Description of Artificial Sequence: Synthetic oligonucleotide
ggcaugagcaggagggaau

SEQ ID NO: 2996156 - RNA, 19 nt, Artificial Sequence
  Description of Artificial Sequence: Synthetic oligonucleotide
gcgcugccagcuccaggag

SEQ ID NO: 2996157 - RNA, 19 nt, Artificial Sequence
  Description of Artificial Sequence: Synthetic oligonucleotide
ggcugcuugacgguggguu

SEQ ID NO: 2996158 - RNA, 19 nt, Artificial Sequence
  Description of Artificial Sequence: Synthetic oligonucleotide
cuguggccuuccugcugca

SEQ ID NO: 2996159 - RNA, 19 nt, Artificial Sequence
  Description of Artificial Sequence: Synthetic oligonucleotide
ggguugggugccacacuuc

SEQ ID NO: 2996160 - RNA, 19 nt, Artificial Sequence
  Description of Artificial Sequence: Synthetic oligonucleotide
gugcaaacacaggucuauu

SEQ ID NO: 2996161 - RNA, 19 nt, Artificial Sequence
  Description of Artificial Sequence: Synthetic oligonucleotide
gacugccucugagcacucu

SEQ ID NO: 2996162 - RNA, 19 nt, Artificial Sequence
  Description of Artificial Sequence: Synthetic oligonucleotide
cugagcacucuguggccuu

SEQ ID NO: 2996163 - RNA, 19 nt, Artificial Sequence
  Description of Artificial Sequence: Synthetic oligonucleotide
ggcuugcuuuuguuucagu

SEQ ID NO: 2996164 - RNA, 19 nt, Artificial Sequence
  Description of Artificial Sequence: Synthetic oligonucleotide
ccccaggcuggaugguguc

SEQ ID NO: 2996165 - RNA, 19 nt, Artificial Sequence
  Description of Artificial Sequence: Synthetic oligonucleotide
ccuuccugcugcagugcaa

SEQ ID NO: 2996166 - RNA, 19 nt, Artificial Sequence
  Description of Artificial Sequence: Synthetic oligonucleotide
ggagauuaaugggccguuu

SEQ ID NO: 2996167 - RNA, 19 nt, Artificial Sequence
  Description of Artificial Sequence: Synthetic oligonucleotide
gggaagaggccggcuccca

SEQ ID NO: 2996168 - RNA, 19 nt, Artificial Sequence
  Description of Artificial Sequence: Synthetic oligonucleotide
gcaugagcaggagggaauu

SEQ ID NO: 2996169 - RNA, 19 nt, Artificial Sequence
  Description of Artificial Sequence: Synthetic oligonucleotide
cugcaccaacucauuuguu

SEQ ID NO: 2996170 - RNA, 19 nt, Artificial Sequence
  Description of Artificial Sequence: Synthetic oligonucleotide
cguuuuccauuaugcuuua

SEQ ID NO: 2996171 - RNA, 19 nt, Artificial Sequence
  Description of Artificial Sequence: Synthetic oligonucleotide
gcuuuacguguaugauauu

SEQ ID NO: 2996172 - RNA, 19 nt, Artificial Sequence
  Description of Artificial Sequence: Synthetic oligonucleotide
cccaggcuggaugguguca

SEQ ID NO: 2996173 - RNA, 19 nt, Artificial Sequence
  Description of Artificial Sequence: Synthetic oligonucleotide
ccacaggcuugcuuuuguu

SEQ ID NO: 2996174 - RNA, 19 nt, Artificial Sequence
  Description of Artificial Sequence: Synthetic oligonucleotide
cggcucccaccacagugga

SEQ ID NO: 2996175 - RNA, 19 nt, Artificial Sequence
  Description of Artificial Sequence: Synthetic oligonucleotide
gcuugacgguggguugggu

SEQ ID NO: 2996176 - RNA, 19 nt, Artificial Sequence
  Description of Artificial Sequence: Synthetic oligonucleotide
cgguggguugggugccaca

SEQ ID NO: 2996177 - RNA, 19 nt, Artificial Sequence
  Description of Artificial Sequence: Synthetic oligonucleotide
caccagggaaugggcuguu

SEQ ID NO: 2996178 - RNA, 19 nt, Artificial Sequence
  Description of Artificial Sequence: Synthetic oligonucleotide
ggccggcucccaccacagu

SEQ ID NO: 2996179 - RNA, 19 nt, Artificial Sequence
  Description of Artificial Sequence: Synthetic oligonucleotide
cugccagcuccaggagauu

SEQ ID NO: 2996180 - RNA, 19 nt, Artificial Sequence
  Description of Artificial Sequence: Synthetic oligonucleotide
ggcucccaccacaguggau

SEQ ID NO: 2996181 - RNA, 19 nt, Artificial Sequence
  Description of Artificial Sequence: Synthetic oligonucleotide
cccugggaagaggccggcu

SEQ ID NO: 2996182 - RNA, 19 nt, Artificial Sequence
  Description of Artificial Sequence: Synthetic oligonucleotide
aauuauuccauccaguucc

SEQ ID NO: 2996183 - RNA, 19 nt, Artificial Sequence
  Description of Artificial Sequence: Synthetic oligonucleotide
aaauauauucuauuuaggc

SEQ ID NO: 2996184 - RNA, 19 nt, Artificial Sequence
  Description of Artificial Sequence: Synthetic oligonucleotide
aaagucuucauugacaucc

SEQ ID NO: 2996185 - RNA, 19 nt, Artificial Sequence
  Description of Artificial Sequence: Synthetic oligonucleotide
aagauaaauuauuccaucc

SEQ ID NO: 2996186 - RNA, 19 nt, Artificial Sequence
  Description of Artificial Sequence: Synthetic oligonucleotide
uugaagauaaucaaaguug

SEQ ID NO: 2996187 - RNA, 19 nt, Artificial Sequence
  Description of Artificial Sequence: Synthetic oligonucleotide
aauauauucuauuuaggca

SEQ ID NO: 2996188 - RNA, 19 nt, Artificial Sequence
  Description of Artificial Sequence: Synthetic oligonucleotide
aaauauucaagaggaaugc

SEQ ID NO: 2996189 - RNA, 19 nt, Artificial Sequence
  Description of Artificial Sequence: Synthetic oligonucleotide
ugaagauaaucaaaguugg

SEQ ID NO: 2996190 - RNA, 19 nt, Artificial Sequence
  Description of Artificial Sequence: Synthetic oligonucleotide
aaaaguuaauuacagguca

SEQ ID NO: 2996191 - RNA, 19 nt, Artificial Sequence
  Description of Artificial Sequence: Synthetic oligonucleotide
guaaauauauucuauuuag

SEQ ID NO: 2996192 - RNA, 19 nt, Artificial Sequence
  Description of Artificial Sequence: Synthetic oligonucleotide
uuaauuacaggucagccug

SEQ ID NO: 2996193 - RNA, 19 nt, Artificial Sequence
  Description of Artificial Sequence: Synthetic oligonucleotide
ucucuaaauauucaagagg

SEQ ID NO: 2996194 - RNA, 19 nt, Artificial Sequence
  Description of Artificial Sequence: Synthetic oligonucleotide
uaaauauucaagaggaaug

SEQ ID NO: 2996195 - RNA, 19 nt, Artificial Sequence
  Description of Artificial Sequence: Synthetic oligonucleotide
gagaccuuggcuuaaaucc

SEQ ID NO: 2996196 - RNA, 19 nt, Artificial Sequence
  Description of Artificial Sequence: Synthetic oligonucleotide
uaaauauauucuauuuagg

SEQ ID NO: 2996197 - RNA, 19 nt, Artificial Sequence
  Description of Artificial Sequence: Synthetic oligonucleotide
ucaaaguugguuuucagug

SEQ ID NO: 2996198 - RNA, 19 nt, Artificial Sequence
  Description of Artificial Sequence: Synthetic oligonucleotide
gauaaauuauuccauccag

SEQ ID NO: 2996199 - RNA, 19 nt, Artificial Sequence
  Description of Artificial Sequence: Synthetic oligonucleotide
aaauuauuccauccaguuc

SEQ ID NO: 2996200 - RNA, 19 nt, Artificial Sequence
  Description of Artificial Sequence: Synthetic oligonucleotide
auuccauccaguuccaggc

SEQ ID NO: 2996201 - RNA, 19 nt, Artificial Sequence
  Description of Artificial Sequence: Synthetic oligonucleotide
ucgaagauaaauuauucca

SEQ ID NO: 2996202 - RNA, 19 nt, Artificial Sequence
  Description of Artificial Sequence: Synthetic oligonucleotide
uuuaaagucuucauugaca

SEQ ID NO: 2996203 - RNA, 19 nt, Artificial Sequence
  Description of Artificial Sequence: Synthetic oligonucleotide
uauucauccagucaugcca

SEQ ID NO: 2996204 - RNA, 19 nt, Artificial Sequence
  Description of Artificial Sequence: Synthetic oligonucleotide
auauauucuauuuaggcau

SEQ ID NO: 2996205 - RNA, 19 nt, Artificial Sequence
  Description of Artificial Sequence: Synthetic oligonucleotide
aaaguugguuuucaguguc

SEQ ID NO: 2996206 - RNA, 19 nt, Artificial Sequence
  Description of Artificial Sequence: Synthetic oligonucleotide
uuucucuaaauauucaaga

SEQ ID NO: 2996207 - RNA, 19 nt, Artificial Sequence
  Description of Artificial Sequence: Synthetic oligonucleotide
aauauucaagaggaaugcc

SEQ ID NO: 2996208 - RNA, 19 nt, Artificial Sequence
  Description of Artificial Sequence: Synthetic oligonucleotide
uacaugaugacuucuaggu

SEQ ID NO: 2996209 - RNA, 19 nt, Artificial Sequence
  Description of Artificial Sequence: Synthetic oligonucleotide
auuucucuggaguagcucg

SEQ ID NO: 2996210 - RNA, 19 nt, Artificial Sequence
  Description of Artificial Sequence: Synthetic oligonucleotide
uucaaccagacuuucaugc

SEQ ID NO: 2996211 - RNA, 19 nt, Artificial Sequence
  Description of Artificial Sequence: Synthetic oligonucleotide
uauuuaggcauuucucugg

SEQ ID NO: 2996212 - RNA, 19 nt, Artificial Sequence
  Description of Artificial Sequence: Synthetic oligonucleotide
ucuauuuaggcauuucucu

SEQ ID NO: 2996213 - RNA, 19 nt, Artificial Sequence
  Description of Artificial Sequence: Synthetic oligonucleotide
uucucuaaauauucaagag

SEQ ID NO: 2996214 - RNA, 19 nt, Artificial Sequence
  Description of Artificial Sequence: Synthetic oligonucleotide
cucuugaagauaaucaaag

SEQ ID NO: 2996215 - RNA, 19 nt, Artificial Sequence
  Description of Artificial Sequence: Synthetic oligonucleotide
aaucacaaaguacucaaaa

SEQ ID NO: 2996216 - RNA, 19 nt, Artificial Sequence
  Description of Artificial Sequence: Synthetic oligonucleotide
aagaggaaugccuuguucu

SEQ ID NO: 2996217 - RNA, 19 nt, Artificial Sequence
  Description of Artificial Sequence: Synthetic oligonucleotide
aguuaauuacaggucagcc

SEQ ID NO: 2996218 - RNA, 19 nt, Artificial Sequence
  Description of Artificial Sequence: Synthetic oligonucleotide
gucaucuagggcuauauag

SEQ ID NO: 2996219 - RNA, 19 nt, Artificial Sequence
  Description of Artificial Sequence: Synthetic oligonucleotide
cucuaaauauucaagagga

SEQ ID NO: 2996220 - RNA, 19 nt, Artificial Sequence
  Description of Artificial Sequence: Synthetic oligonucleotide
aaguuaauuacaggucagc

SEQ ID NO: 2996221 - RNA, 19 nt, Artificial Sequence
  Description of Artificial Sequence: Synthetic oligonucleotide
uucuuugaccuuuucaacc

SEQ ID NO: 2996222 - RNA, 19 nt, Artificial Sequence
  Description of Artificial Sequence: Synthetic oligonucleotide
uuacaggucagccuggucu

SEQ ID NO: 2996223 - RNA, 19 nt, Artificial Sequence
  Description of Artificial Sequence: Synthetic oligonucleotide
aaacuggcuauucauccag

SEQ ID NO: 2996224 - RNA, 19 nt, Artificial Sequence
  Description of Artificial Sequence: Synthetic oligonucleotide
uugacauccagugugagga

SEQ ID NO: 2996225 - RNA, 19 nt, Artificial Sequence
  Description of Artificial Sequence: Synthetic oligonucleotide
uauuccauccaguuccagg

SEQ ID NO: 2996226 - RNA, 19 nt, Artificial Sequence
  Description of Artificial Sequence: Synthetic oligonucleotide
uuucaguguccgaugaagg

SEQ ID NO: 2996227 - RNA, 19 nt, Artificial Sequence
  Description of Artificial Sequence: Synthetic oligonucleotide
uuuucaaccagacuuucau

SEQ ID NO: 2996228 - RNA, 19 nt, Artificial Sequence
  Description of Artificial Sequence: Synthetic oligonucleotide
aucccguacaaucacaaag

SEQ ID NO: 2996229 - RNA, 19 nt, Artificial Sequence
  Description of Artificial Sequence: Synthetic oligonucleotide
uggaguagcucgaagauaa

SEQ ID NO: 2996230 - RNA, 19 nt, Artificial Sequence
  Description of Artificial Sequence: Synthetic oligonucleotide
ucuacaugaugacuucuag

SEQ ID NO: 2996231 - RNA, 19 nt, Artificial Sequence
  Description of Artificial Sequence: Synthetic oligonucleotide
uguucuucaucucuucccc

SEQ ID NO: 2996232 - RNA, 19 nt, Artificial Sequence
  Description of Artificial Sequence: Synthetic oligonucleotide
uuaggcauuucucuggagu

SEQ ID NO: 2996233 - RNA, 19 nt, Artificial Sequence
  Description of Artificial Sequence: Synthetic oligonucleotide
caggcuuuggccaaacugg

SEQ ID NO: 2996234 - RNA, 19 nt, Artificial Sequence
  Description of Artificial Sequence: Synthetic oligonucleotide
cucgaagauaaauuauucc

SEQ ID NO: 2996235 - RNA, 19 nt, Artificial Sequence
  Description of Artificial Sequence: Synthetic oligonucleotide
agauaaauuauuccaucca

SEQ ID NO: 2996236 - RNA, 19 nt, Artificial Sequence
  Description of Artificial Sequence: Synthetic oligonucleotide
uaaauuauuccauccaguu

SEQ ID NO: 2996237 - RNA, 19 nt, Artificial Sequence
  Description of Artificial Sequence: Synthetic oligonucleotide
uuuauagugcaguuucucu

SEQ ID NO: 2996238 - RNA, 19 nt, Artificial Sequence
  Description of Artificial Sequence: Synthetic oligonucleotide
ucaugcuugucuuuaaagu

SEQ ID NO: 2996239 - RNA, 19 nt, Artificial Sequence
  Description of Artificial Sequence: Synthetic oligonucleotide
ucaucuagggcuauauagu

SEQ ID NO: 2996240 - RNA, 19 nt, Artificial Sequence
  Description of Artificial Sequence: Synthetic oligonucleotide
aagauaaucaaaguugguu

SEQ ID NO: 2996241 - RNA, 19 nt, Artificial Sequence
  Description of Artificial Sequence: Synthetic oligonucleotide
uuaaaucccguacaaucac

SEQ ID NO: 2996242 - RNA, 19 nt, Artificial Sequence
  Description of Artificial Sequence: Synthetic oligonucleotide
aaucaaaguugguuuucag

SEQ ID NO: 2996243 - RNA, 19 nt, Artificial Sequence
  Description of Artificial Sequence: Synthetic oligonucleotide
uuuucaguguccgaugaag

SEQ ID NO: 2996244 - RNA, 19 nt, Artificial Sequence
  Description of Artificial Sequence: Synthetic oligonucleotide
auucuauuuaggcauuucu

SEQ ID NO: 2996245 - RNA, 19 nt, Artificial Sequence
  Description of Artificial Sequence: Synthetic oligonucleotide
uucuauuuaggcauuucuc

SEQ ID NO: 2996246 - RNA, 19 nt, Artificial Sequence
  Description of Artificial Sequence: Synthetic oligonucleotide
ucuuugaccuuuucaacca

SEQ ID NO: 2996247 - RNA, 19 nt, Artificial Sequence
  Description of Artificial Sequence: Synthetic oligonucleotide
ugacuucuaggucaucuag

SEQ ID NO: 2996248 - RNA, 19 nt, Artificial Sequence
  Description of Artificial Sequence: Synthetic oligonucleotide
uuggcuuaaaucccguaca

SEQ ID NO: 2996249 - RNA, 19 nt, Artificial Sequence
  Description of Artificial Sequence: Synthetic oligonucleotide
caugaugacuucuagguca

SEQ ID NO: 2996250 - RNA, 19 nt, Artificial Sequence
  Description of Artificial Sequence: Synthetic oligonucleotide
cuacaugaugacuucuagg

SEQ ID NO: 2996251 - RNA, 19 nt, Artificial Sequence
  Description of Artificial Sequence: Synthetic oligonucleotide
uccagugugaggauaggca

SEQ ID NO: 2996252 - RNA, 19 nt, Artificial Sequence
  Description of Artificial Sequence: Synthetic oligonucleotide
aaaguuaauuacaggucag

SEQ ID NO: 2996253 - RNA, 19 nt, Artificial Sequence
  Description of Artificial Sequence: Synthetic oligonucleotide
acaaucacaaaguacucaa

SEQ ID NO: 2996254 - RNA, 19 nt, Artificial Sequence
  Description of Artificial Sequence: Synthetic oligonucleotide
auugacauccagugugagg

SEQ ID NO: 2996255 - RNA, 19 nt, Artificial Sequence
  Description of Artificial Sequence: Synthetic oligonucleotide
caugcuugucuuuaaaguc

SEQ ID NO: 2996256 - RNA, 19 nt, Artificial Sequence
  Description of Artificial Sequence: Synthetic oligonucleotide
uuguucuucaucucuuccc

SEQ ID NO: 2996257 - RNA, 19 nt, Artificial Sequence
  Description of Artificial Sequence: Synthetic oligonucleotide
agggcuauauagugagacc

SEQ ID NO: 2996258 - RNA, 19 nt, Artificial Sequence
  Description of Artificial Sequence: Synthetic oligonucleotide
cuauauagugagaccuugg

SEQ ID NO: 2996259 - RNA, 19 nt, Artificial Sequence
  Description of Artificial Sequence: Synthetic oligonucleotide
cuauuuaggcauuucucug

SEQ ID NO: 2996260 - RNA, 19 nt, Artificial Sequence
  Description of Artificial Sequence: Synthetic oligonucleotide
uuccccguaaauauauucu

SEQ ID NO: 2996261 - RNA, 19 nt, Artificial Sequence
  Description of Artificial Sequence: Synthetic oligonucleotide
guuucucuaaauauucaag

SEQ ID NO: 2996262 - RNA, 19 nt, Artificial Sequence
  Description of Artificial Sequence: Synthetic oligonucleotide
guguuuauagugcaguuuc

SEQ ID NO: 2996263 - RNA, 19 nt, Artificial Sequence
  Description of Artificial Sequence: Synthetic oligonucleotide
ucuugaagauaaucaaagu

SEQ ID NO: 2996264 - RNA, 19 nt, Artificial Sequence
  Description of Artificial Sequence: Synthetic oligonucleotide
uauucaagaggaaugccuu

SEQ ID NO: 2996265 - RNA, 19 nt, Artificial Sequence
  Description of Artificial Sequence: Synthetic oligonucleotide
uggcuauucauccagucau

SEQ ID NO: 2996266 - RNA, 19 nt, Artificial Sequence
  Description of Artificial Sequence: Synthetic oligonucleotide
aucaaaguugguuuucagu

SEQ ID NO: 2996267 - RNA, 19 nt, Artificial Sequence
  Description of Artificial Sequence: Synthetic oligonucleotide
uguccgaugaaggagccag

SEQ ID NO: 2996268 - RNA, 19 nt, Artificial Sequence
  Description of Artificial Sequence: Synthetic oligonucleotide
cuuaaaucccguacaauca

SEQ ID NO: 2996269 - RNA, 19 nt, Artificial Sequence
  Description of Artificial Sequence: Synthetic oligonucleotide
aguuucucuaaauauucaa

SEQ ID NO: 2996270 - RNA, 19 nt, Artificial Sequence
  Description of Artificial Sequence: Synthetic oligonucleotide
ucccguacaaucacaaagu

SEQ ID NO: 2996271 - RNA, 19 nt, Artificial Sequence
  Description of Artificial Sequence: Synthetic oligonucleotide
uauagugcaguuucucuaa

SEQ ID NO: 2996272 - RNA, 19 nt, Artificial Sequence
  Description of Artificial Sequence: Synthetic oligonucleotide
uuauagugcaguuucucua

SEQ ID NO: 2996273 - RNA, 19 nt, Artificial Sequence
  Description of Artificial Sequence: Synthetic oligonucleotide
uaauuacaggucagccugg

SEQ ID NO: 2996274 - RNA, 19 nt, Artificial Sequence
  Description of Artificial Sequence: Synthetic oligonucleotide
auauagugagaccuuggcu

SEQ ID NO: 2996275 - RNA, 19 nt, Artificial Sequence
  Description of Artificial Sequence: Synthetic oligonucleotide
ugcaguuucucuaaauauu

SEQ ID NO: 2996276 - RNA, 19 nt, Artificial Sequence
  Description of Artificial Sequence: Synthetic oligonucleotide
cuuggcuuaaaucccguac

SEQ ID NO: 2996277 - RNA, 19 nt, Artificial Sequence
  Description of Artificial Sequence: Synthetic oligonucleotide
auaaucaaaguugguuuuc

SEQ ID NO: 2996278 - RNA, 19 nt, Artificial Sequence
  Description of Artificial Sequence: Synthetic oligonucleotide
ugugaggauaggcaccucu

SEQ ID NO: 2996279 - RNA, 19 nt, Artificial Sequence
  Description of Artificial Sequence: Synthetic oligonucleotide
gauaggcaccucuugaaga

SEQ ID NO: 2996280 - RNA, 19 nt, Artificial Sequence
  Description of Artificial Sequence: Synthetic oligonucleotide
ucuaaauauucaagaggaa

SEQ ID NO: 2996281 - RNA, 19 nt, Artificial Sequence
  Description of Artificial Sequence: Synthetic oligonucleotide
uaaaucccguacaaucaca

SEQ ID NO: 2996282 - RNA, 19 nt, Artificial Sequence
  Description of Artificial Sequence: Synthetic oligonucleotide
caucuagggcuauauagug

SEQ ID NO: 2996283 - RNA, 19 nt, Artificial Sequence
  Description of Artificial Sequence: Synthetic oligonucleotide
uucaguguccgaugaagga

SEQ ID NO: 2996284 - RNA, 19 nt, Artificial Sequence
  Description of Artificial Sequence: Synthetic oligonucleotide
auauucaagaggaaugccu

SEQ ID NO: 2996285 - RNA, 19 nt, Artificial Sequence
  Description of Artificial Sequence: Synthetic oligonucleotide
uacaaucacaaaguacuca

SEQ ID NO: 2996286 - RNA, 19 nt, Artificial Sequence
  Description of Artificial Sequence: Synthetic oligonucleotide
ucuggaguagcucgaagau

SEQ ID NO: 2996287 - RNA, 19 nt, Artificial Sequence
  Description of Artificial Sequence: Synthetic oligonucleotide
gaccuuuucaaccagacuu

SEQ ID NO: 2996288 - RNA, 19 nt, Artificial Sequence
  Description of Artificial Sequence: Synthetic oligonucleotide
uuucaaccagacuuucaug

SEQ ID NO: 2996289 - RNA, 19 nt, Artificial Sequence
  Description of Artificial Sequence: Synthetic oligonucleotide
uuugaccuuuucaaccaga

SEQ ID NO: 2996290 - RNA, 19 nt, Artificial Sequence
  Description of Artificial Sequence: Synthetic oligonucleotide
aaguugguuuucagugucc

SEQ ID NO: 2996291 - RNA, 19 nt, Artificial Sequence
  Description of Artificial Sequence: Synthetic oligonucleotide
acuggcuauucauccaguc

SEQ ID NO: 2996292 - RNA, 19 nt, Artificial Sequence
  Description of Artificial Sequence: Synthetic oligonucleotide
ugaggauaggcaccucuug

SEQ ID NO: 2996293 - RNA, 19 nt, Artificial Sequence
  Description of Artificial Sequence: Synthetic oligonucleotide
gcuuaaaucccguacaauc

SEQ ID NO: 2996294 - RNA, 19 nt, Artificial Sequence
  Description of Artificial Sequence: Synthetic oligonucleotide
uagggcuauauagugagac

SEQ ID NO: 2996295 - RNA, 19 nt, Artificial Sequence
  Description of Artificial Sequence: Synthetic oligonucleotide
cuauucauccagucaugcc

SEQ ID NO: 2996296 - RNA, 19 nt, Artificial Sequence
  Description of Artificial Sequence: Synthetic oligonucleotide
uguuuauagugcaguuucu

SEQ ID NO: 2996297 - RNA, 19 nt, Artificial Sequence
  Description of Artificial Sequence: Synthetic oligonucleotide
agaccuuggcuuaaauccc

SEQ ID NO: 2996298 - RNA, 19 nt, Artificial Sequence
  Description of Artificial Sequence: Synthetic oligonucleotide
agugcaguuucucuaaaua

SEQ ID NO: 2996299 - RNA, 19 nt, Artificial Sequence
  Description of Artificial Sequence: Synthetic oligonucleotide
agcucucguguuuauagug

SEQ ID NO: 2996300 - RNA, 19 nt, Artificial Sequence
  Description of Artificial Sequence: Synthetic oligonucleotide
auaaauuauuccauccagu

SEQ ID NO: 2996301 - RNA, 19 nt, Artificial Sequence
  Description of Artificial Sequence: Synthetic oligonucleotide
aguugguuuucaguguccg

SEQ ID NO: 2996302 - RNA, 19 nt, Artificial Sequence
  Description of Artificial Sequence: Synthetic oligonucleotide
gaaggagccagcucucgug

SEQ ID NO: 2996303 - RNA, 19 nt, Artificial Sequence
  Description of Artificial Sequence: Synthetic oligonucleotide
ugagaccuuggcuuaaauc

SEQ ID NO: 2996304 - RNA, 19 nt, Artificial Sequence
  Description of Artificial Sequence: Synthetic oligonucleotide
auuuaggcauuucucugga

SEQ ID NO: 2996305 - RNA, 19 nt, Artificial Sequence
  Description of Artificial Sequence: Synthetic oligonucleotide
accucuugaagauaaucaa

SEQ ID NO: 2996306 - RNA, 19 nt, Artificial Sequence
  Description of Artificial Sequence: Synthetic oligonucleotide
cuuccccguaaauauauuc

SEQ ID NO: 2996307 - RNA, 19 nt, Artificial Sequence
  Description of Artificial Sequence: Synthetic oligonucleotide
uugucuuuaaagucuucau

SEQ ID NO: 2996308 - RNA, 19 nt, Artificial Sequence
  Description of Artificial Sequence: Synthetic oligonucleotide
guagcucgaagauaaauua

SEQ ID NO: 2996309 - RNA, 19 nt, Artificial Sequence
  Description of Artificial Sequence: Synthetic oligonucleotide
caguguccgaugaaggagc

SEQ ID NO: 2996310 - RNA, 19 nt, Artificial Sequence
  Description of Artificial Sequence: Synthetic oligonucleotide
uauauucuauuuaggcauu

SEQ ID NO: 2996311 - RNA, 19 nt, Artificial Sequence
  Description of Artificial Sequence: Synthetic oligonucleotide
ucucguguuuauagugcag

SEQ ID NO: 2996312 - RNA, 19 nt, Artificial Sequence
  Description of Artificial Sequence: Synthetic oligonucleotide
auucaagaggaaugccuug

SEQ ID NO: 2996313 - RNA, 19 nt, Artificial Sequence
  Description of Artificial Sequence: Synthetic oligonucleotide
ugccuuguucuucaucucu

SEQ ID NO: 2996314 - RNA, 19 nt, Artificial Sequence
  Description of Artificial Sequence: Synthetic oligonucleotide
uugguuuucaguguccgau

SEQ ID NO: 2996315 - RNA, 19 nt, Artificial Sequence
  Description of Artificial Sequence: Synthetic oligonucleotide
aaggagccagcucucgugu

SEQ ID NO: 2996316 - RNA, 19 nt, Artificial Sequence
  Description of Artificial Sequence: Synthetic oligonucleotide
caccucuugaagauaauca

SEQ ID NO: 2996317 - RNA, 19 nt, Artificial Sequence
  Description of Artificial Sequence: Synthetic oligonucleotide
ccaaacuggcuauucaucc

SEQ ID NO: 2996318 - RNA, 19 nt, Artificial Sequence
  Description of Artificial Sequence: Synthetic oligonucleotide
aaccagacuuucaugcuug

SEQ ID NO: 2996319 - RNA, 19 nt, Artificial Sequence
  Description of Artificial Sequence: Synthetic oligonucleotide
uucuucaucucuuccccgu

SEQ ID NO: 2996320 - RNA, 19 nt, Artificial Sequence
  Description of Artificial Sequence: Synthetic oligonucleotide
auaggcaccucuugaagau

SEQ ID NO: 2996321 - RNA, 19 nt, Artificial Sequence
  Description of Artificial Sequence: Synthetic oligonucleotide
auccagugugaggauaggc

SEQ ID NO: 2996322 - RNA, 19 nt, Artificial Sequence
  Description of Artificial Sequence: Synthetic oligonucleotide
aggaaugccuuguucuuca

SEQ ID NO: 2996323 - RNA, 19 nt, Artificial Sequence
  Description of Artificial Sequence: Synthetic oligonucleotide
uucaagaggaaugccuugu

SEQ ID NO: 2996324 - RNA, 19 nt, Artificial Sequence
  Description of Artificial Sequence: Synthetic oligonucleotide
guuaauuacaggucagccu

SEQ ID NO: 2996325 - RNA, 19 nt, Artificial Sequence
  Description of Artificial Sequence: Synthetic oligonucleotide
uuuaggcauuucucuggag

SEQ ID NO: 2996326 - RNA, 19 nt, Artificial Sequence
  Description of Artificial Sequence: Synthetic oligonucleotide
uuucucuggaguagcucga

SEQ ID NO: 2996327 - RNA, 19 nt, Artificial Sequence
  Description of Artificial Sequence: Synthetic oligonucleotide
uagcucgaagauaaauuau

SEQ ID NO: 2996328 - RNA, 19 nt, Artificial Sequence
  Description of Artificial Sequence: Synthetic oligonucleotide
gaggauaggcaccucuuga

SEQ ID NO: 2996329 - RNA, 19 nt, Artificial Sequence
  Description of Artificial Sequence: Synthetic oligonucleotide
cuugaagauaaucaaaguu

SEQ ID NO: 2996330 - RNA, 19 nt, Artificial Sequence
  Description of Artificial Sequence: Synthetic oligonucleotide
uaggcauuucucuggagua

SEQ ID NO: 2996331 - RNA, 19 nt, Artificial Sequence
  Description of Artificial Sequence: Synthetic oligonucleotide
ugguuuucaguguccgaug

SEQ ID NO: 2996332 - RNA, 19 nt, Artificial Sequence
  Description of Artificial Sequence: Synthetic oligonucleotide
ugaccuuuucaaccagacu

SEQ ID NO: 2996333 - RNA, 19 nt, Artificial Sequence
  Description of Artificial Sequence: Synthetic oligonucleotide
ucucuggaguagcucgaag

SEQ ID NO: 2996334 - RNA, 19 nt, Artificial Sequence
  Description of Artificial Sequence: Synthetic oligonucleotide
aaaucccguacaaucacaa

SEQ ID NO: 2996335 - RNA, 19 nt, Artificial Sequence
  Description of Artificial Sequence: Synthetic oligonucleotide
gaccuuggcuuaaaucccg

SEQ ID NO: 2996336 - RNA, 19 nt, Artificial Sequence
  Description of Artificial Sequence: Synthetic oligonucleotide
uggcuuaaaucccguacaa

SEQ ID NO: 2996337 - RNA, 19 nt, Artificial Sequence
  Description of Artificial Sequence: Synthetic oligonucleotide
auuacaggucagccugguc

SEQ ID NO: 2996338 - RNA, 19 nt, Artificial Sequence
  Description of Artificial Sequence: Synthetic oligonucleotide
cuugucuuuaaagucuuca

SEQ ID NO: 2996339 - RNA, 19 nt, Artificial Sequence
  Description of Artificial Sequence: Synthetic oligonucleotide
gauaaucaaaguugguuuu

SEQ ID NO: 2996340 - RNA, 19 nt, Artificial Sequence
  Description of Artificial Sequence: Synthetic oligonucleotide
aguagcucgaagauaaauu

SEQ ID NO: 2996341 - RNA, 19 nt, Artificial Sequence
  Description of Artificial Sequence: Synthetic oligonucleotide
cagugugaggauaggcacc

SEQ ID NO: 2996342 - RNA, 19 nt, Artificial Sequence
  Description of Artificial Sequence: Synthetic oligonucleotide
uccccguaaauauauucua

SEQ ID NO: 2996343 - RNA, 19 nt, Artificial Sequence
  Description of Artificial Sequence: Synthetic oligonucleotide
guuuauagugcaguuucuc

SEQ ID NO: 2996344 - RNA, 19 nt, Artificial Sequence
  Description of Artificial Sequence: Synthetic oligonucleotide
aaucccguacaaucacaaa

SEQ ID NO: 2996345 - RNA, 19 nt, Artificial Sequence
  Description of Artificial Sequence: Synthetic oligonucleotide
ugaaggagccagcucucgu

SEQ ID NO: 2996346 - RNA, 19 nt, Artificial Sequence
  Description of Artificial Sequence: Synthetic oligonucleotide
uggccaaacuggcuauuca

SEQ ID NO: 2996347 - RNA, 19 nt, Artificial Sequence
  Description of Artificial Sequence: Synthetic oligonucleotide
uucaucucuuccccguaaa

SEQ ID NO: 2996348 - RNA, 19 nt, Artificial Sequence
  Description of Artificial Sequence: Synthetic oligonucleotide
acauccagugugaggauag

SEQ ID NO: 2996349 - RNA, 19 nt, Artificial Sequence
  Description of Artificial Sequence: Synthetic oligonucleotide
caagaggaaugccuuguuc

SEQ ID NO: 2996350 - RNA, 19 nt, Artificial Sequence
  Description of Artificial Sequence: Synthetic oligonucleotide
cucuggaguagcucgaaga

SEQ ID NO: 2996351 - RNA, 19 nt, Artificial Sequence
  Description of Artificial Sequence: Synthetic oligonucleotide
agugugaggauaggcaccu

SEQ ID NO: 2996352 - RNA, 19 nt, Artificial Sequence
  Description of Artificial Sequence: Synthetic oligonucleotide
agucuucauugacauccag

SEQ ID NO: 2996353 - RNA, 19 nt, Artificial Sequence
  Description of Artificial Sequence: Synthetic oligonucleotide
cuuugaccuuuucaaccag

SEQ ID NO: 2996354 - RNA, 19 nt, Artificial Sequence
  Description of Artificial Sequence: Synthetic oligonucleotide
aggcuuuggccaaacuggc

SEQ ID NO: 2996355 - RNA, 19 nt, Artificial Sequence
  Description of Artificial Sequence: Synthetic oligonucleotide
gaugacuucuaggucaucu

SEQ ID NO: 2996356 - RNA, 19 nt, Artificial Sequence
  Description of Artificial Sequence: Synthetic oligonucleotide
aggauaggcaccucuugaa

SEQ ID NO: 2996357 - RNA, 19 nt, Artificial Sequence
  Description of Artificial Sequence: Synthetic oligonucleotide
ugcuugucuuuaaagucuu

SEQ ID NO: 2996358 - RNA, 19 nt, Artificial Sequence
  Description of Artificial Sequence: Synthetic oligonucleotide
auagugagaccuuggcuua

SEQ ID NO: 2996359 - RNA, 19 nt, Artificial Sequence
  Description of Artificial Sequence: Synthetic oligonucleotide
cagacuuucaugcuugucu

SEQ ID NO: 2996360 - RNA, 19 nt, Artificial Sequence
  Description of Artificial Sequence: Synthetic oligonucleotide
aguguccgaugaaggagcc

SEQ ID NO: 2996361 - RNA, 19 nt, Artificial Sequence
  Description of Artificial Sequence: Synthetic oligonucleotide
uaaagucuucauugacauc

SEQ ID NO: 2996362 - RNA, 19 nt, Artificial Sequence
  Description of Artificial Sequence: Synthetic oligonucleotide
ucaucucuuccccguaaau

SEQ ID NO: 2996363 - RNA, 19 nt, Artificial Sequence
  Description of Artificial Sequence: Synthetic oligonucleotide
gaaugccuuguucuucauc

SEQ ID NO: 2996364 - RNA, 19 nt, Artificial Sequence
  Description of Artificial Sequence: Synthetic oligonucleotide
uggucuacaugaugacuuc

SEQ ID NO: 2996365 - RNA, 19 nt, Artificial Sequence
  Description of Artificial Sequence: Synthetic oligonucleotide
ucaagaggaaugccuuguu

SEQ ID NO: 2996366 - RNA, 19 nt, Artificial Sequence
  Description of Artificial Sequence: Synthetic oligonucleotide
agaggaaugccuuguucuu

SEQ ID NO: 2996367 - RNA, 19 nt, Artificial Sequence
  Description of Artificial Sequence: Synthetic oligonucleotide
uccgaugaaggagccagcu

SEQ ID NO: 2996368 - RNA, 19 nt, Artificial Sequence
  Description of Artificial Sequence: Synthetic oligonucleotide
cuuuucaaccagacuuuca

SEQ ID NO: 2996369 - RNA, 19 nt, Artificial Sequence
  Description of Artificial Sequence: Synthetic oligonucleotide
uagugcaguuucucuaaau

SEQ ID NO: 2996370 - RNA, 19 nt, Artificial Sequence
  Description of Artificial Sequence: Synthetic oligonucleotide
caaacuggcuauucaucca

SEQ ID NO: 2996371 - RNA, 19 nt, Artificial Sequence
  Description of Artificial Sequence: Synthetic oligonucleotide
ucucuuccccguaaauaua

SEQ ID NO: 2996372 - RNA, 19 nt, Artificial Sequence
  Description of Artificial Sequence: Synthetic oligonucleotide
uacaggucagccuggucua

SEQ ID NO: 2996373 - RNA, 19 nt, Artificial Sequence
  Description of Artificial Sequence: Synthetic oligonucleotide
agcucgaagauaaauuauu

SEQ ID NO: 2996374 - RNA, 19 nt, Artificial Sequence
  Description of Artificial Sequence: Synthetic oligonucleotide
ucguguuuauagugcaguu

SEQ ID NO: 2996375 - RNA, 19 nt, Artificial Sequence
  Description of Artificial Sequence: Synthetic oligonucleotide
acuuucaugcuugucuuua

SEQ ID NO: 2996376 - RNA, 19 nt, Artificial Sequence
  Description of Artificial Sequence: Synthetic oligonucleotide
augaaggagccagcucucg

SEQ ID NO: 2996377 - RNA, 19 nt, Artificial Sequence
  Description of Artificial Sequence: Synthetic oligonucleotide
uccauccaguuccaggcuu

SEQ ID NO: 2996378 - RNA, 19 nt, Artificial Sequence
  Description of Artificial Sequence: Synthetic oligonucleotide
cucucguguuuauagugca

SEQ ID NO: 2996379 - RNA, 19 nt, Artificial Sequence
  Description of Artificial Sequence: Synthetic oligonucleotide
augacuucuaggucaucua

SEQ ID NO: 2996380 - RNA, 19 nt, Artificial Sequence
  Description of Artificial Sequence: Synthetic oligonucleotide
gcuauauagugagaccuug

SEQ ID NO: 2996381 - RNA, 19 nt, Artificial Sequence
  Description of Artificial Sequence: Synthetic oligonucleotide
cuggcuauucauccaguca

SEQ ID NO: 2996382 - RNA, 19 nt, Artificial Sequence
  Description of Artificial Sequence: Synthetic oligonucleotide
aggcauuucucuggaguag

SEQ ID NO: 2996383 - RNA, 19 nt, Artificial Sequence
  Description of Artificial Sequence: Synthetic oligonucleotide
aguuccaggcuuuggccaa

SEQ ID NO: 2996384 - RNA, 19 nt, Artificial Sequence
  Description of Artificial Sequence: Synthetic oligonucleotide
uuauuccauccaguuccag

SEQ ID NO: 2996385 - RNA, 19 nt, Artificial Sequence
  Description of Artificial Sequence: Synthetic oligonucleotide
ccagugugaggauaggcac

SEQ ID NO: 2996386 - RNA, 19 nt, Artificial Sequence
  Description of Artificial Sequence: Synthetic oligonucleotide
aagucuucauugacaucca

SEQ ID NO: 2996387 - RNA, 19 nt, Artificial Sequence
  Description of Artificial Sequence: Synthetic oligonucleotide
gguuuucaguguccgauga

SEQ ID NO: 2996388 - RNA, 19 nt, Artificial Sequence
  Description of Artificial Sequence: Synthetic oligonucleotide
ccaggcuuuggccaaacug

SEQ ID NO: 2996389 - RNA, 19 nt, Artificial Sequence
  Description of Artificial Sequence: Synthetic oligonucleotide
gcuauucauccagucaugc

SEQ ID NO: 2996390 - RNA, 19 nt, Artificial Sequence
  Description of Artificial Sequence: Synthetic oligonucleotide
gaggaaugccuuguucuuc

SEQ ID NO: 2996391 - RNA, 19 nt, Artificial Sequence
  Description of Artificial Sequence: Synthetic oligonucleotide
aucuagggcuauauaguga

SEQ ID NO: 2996392 - RNA, 19 nt, Artificial Sequence
  Description of Artificial Sequence: Synthetic oligonucleotide
guacaaucacaaaguacuc

SEQ ID NO: 2996393 - RNA, 19 nt, Artificial Sequence
  Description of Artificial Sequence: Synthetic oligonucleotide
auagugcaguuucucuaaa

SEQ ID NO: 2996394 - RNA, 19 nt, Artificial Sequence
  Description of Artificial Sequence: Synthetic oligonucleotide
gaugaaggagccagcucuc

SEQ ID NO: 2996395 - RNA, 19 nt, Artificial Sequence
  Description of Artificial Sequence: Synthetic oligonucleotide
cauuucucuggaguagcuc

SEQ ID NO: 2996396 - RNA, 19 nt, Artificial Sequence
  Description of Artificial Sequence: Synthetic oligonucleotide
ccguacaaucacaaaguac

SEQ ID NO: 2996397 - RNA, 19 nt, Artificial Sequence
  Description of Artificial Sequence: Synthetic oligonucleotide
cauugacauccagugugag

SEQ ID NO: 2996398 - RNA, 19 nt, Artificial Sequence
  Description of Artificial Sequence: Synthetic oligonucleotide
ccaguuccaggcuuuggcc

SEQ ID NO: 2996399 - RNA, 19 nt, Artificial Sequence
  Description of Artificial Sequence: Synthetic oligonucleotide
caguuccaggcuuuggcca

SEQ ID NO: 2996400 - RNA, 19 nt, Artificial Sequence
  Description of Artificial Sequence: Synthetic oligonucleotide
caaaguugguuuucagugu

SEQ ID NO: 2996401 - RNA, 19 nt, Artificial Sequence
  Description of Artificial Sequence: Synthetic oligonucleotide
uuggccaaacuggcuauuc

SEQ ID NO: 2996402 - RNA, 19 nt, Artificial Sequence
  Description of Artificial Sequence: Synthetic oligonucleotide
cuggucuacaugaugacuu

SEQ ID NO: 2996403 - RNA, 19 nt, Artificial Sequence
  Description of Artificial Sequence: Synthetic oligonucleotide
auuauuccauccaguucca

SEQ ID NO: 2996404 - RNA, 19 nt, Artificial Sequence
  Description of Artificial Sequence: Synthetic oligonucleotide
aacuggcuauucauccagu

SEQ ID NO: 2996405 - RNA, 19 nt, Artificial Sequence
  Description of Artificial Sequence: Synthetic oligonucleotide
ucuuccccguaaauauauu

SEQ ID NO: 2996406 - RNA, 19 nt, Artificial Sequence
  Description of Artificial Sequence: Synthetic oligonucleotide
gaagauaaucaaaguuggu

SEQ ID NO: 2996407 - RNA, 19 nt, Artificial Sequence
  Description of Artificial Sequence: Synthetic oligonucleotide
guugguuuucaguguccga

SEQ ID NO: 2996408 - RNA, 19 nt, Artificial Sequence
  Description of Artificial Sequence: Synthetic oligonucleotide
gcucgaagauaaauuauuc

SEQ ID NO: 2996409 - RNA, 19 nt, Artificial Sequence
  Description of Artificial Sequence: Synthetic oligonucleotide
caaucacaaaguacucaaa

SEQ ID NO: 2996410 - RNA, 19 nt, Artificial Sequence
  Description of Artificial Sequence: Synthetic oligonucleotide
auauucuauuuaggcauuu

SEQ ID NO: 2996411 - RNA, 19 nt, Artificial Sequence
  Description of Artificial Sequence: Synthetic oligonucleotide
ggcauuucucuggaguagc

SEQ ID NO: 2996412 - RNA, 19 nt, Artificial Sequence
  Description of Artificial Sequence: Synthetic oligonucleotide
gcucucguguuuauagugc

SEQ ID NO: 2996413 - RNA, 19 nt, Artificial Sequence
  Description of Artificial Sequence: Synthetic oligonucleotide
auccaguuccaggcuuugg

SEQ ID NO: 2996414 - RNA, 19 nt, Artificial Sequence
  Description of Artificial Sequence: Synthetic oligonucleotide
cauccagugugaggauagg

SEQ ID NO: 2996415 - RNA, 19 nt, Artificial Sequence
  Description of Artificial Sequence: Synthetic oligonucleotide
accagacuuucaugcuugu

SEQ ID NO: 2996416 - RNA, 19 nt, Artificial Sequence
  Description of Artificial Sequence: Synthetic oligonucleotide
aggucaucuagggcuauau

SEQ ID NO: 2996417 - RNA, 19 nt, Artificial Sequence
  Description of Artificial Sequence: Synthetic oligonucleotide
guuuucaguguccgaugaa

SEQ ID NO: 2996418 - RNA, 19 nt, Artificial Sequence
  Description of Artificial Sequence: Synthetic oligonucleotide
gcuuuggccaaacuggcua

SEQ ID NO: 2996419 - RNA, 19 nt, Artificial Sequence
  Description of Artificial Sequence: Synthetic oligonucleotide
acaggucagccuggucuac

SEQ ID NO: 2996420 - RNA, 19 nt, Artificial Sequence
  Description of Artificial Sequence: Synthetic oligonucleotide
ugacauccagugugaggau

SEQ ID NO: 2996421 - RNA, 19 nt, Artificial Sequence
  Description of Artificial Sequence: Synthetic oligonucleotide
caucucuuccccguaaaua

SEQ ID NO: 2996422 - RNA, 19 nt, Artificial Sequence
  Description of Artificial Sequence: Synthetic oligonucleotide
gaguagcucgaagauaaau

SEQ ID NO: 2996423 - RNA, 19 nt, Artificial Sequence
  Description of Artificial Sequence: Synthetic oligonucleotide
gucuucauugacauccagu

SEQ ID NO: 2996424 - RNA, 19 nt, Artificial Sequence
  Description of Artificial Sequence: Synthetic oligonucleotide
uucucuggaguagcucgaa

SEQ ID NO: 2996425 - RNA, 19 nt, Artificial Sequence
  Description of Artificial Sequence: Synthetic oligonucleotide
aggcaccucuugaagauaa

SEQ ID NO: 2996426 - RNA, 19 nt, Artificial Sequence
  Description of Artificial Sequence: Synthetic oligonucleotide
cucuuccccguaaauauau

SEQ ID NO: 2996427 - RNA, 19 nt, Artificial Sequence
  Description of Artificial Sequence: Synthetic oligonucleotide
gggcuauauagugagaccu

SEQ ID NO: 2996428 - RNA, 19 nt, Artificial Sequence
  Description of Artificial Sequence: Synthetic oligonucleotide
gucuacaugaugacuucua

SEQ ID NO: 2996429 - RNA, 19 nt, Artificial Sequence
  Description of Artificial Sequence: Synthetic oligonucleotide
gacauccagugugaggaua

SEQ ID NO: 2996430 - RNA, 19 nt, Artificial Sequence
  Description of Artificial Sequence: Synthetic oligonucleotide
ccucuugaagauaaucaaa

SEQ ID NO: 2996431 - RNA, 19 nt, Artificial Sequence
  Description of Artificial Sequence: Synthetic oligonucleotide
cucguguuuauagugcagu

SEQ ID NO: 2996432 - RNA, 19 nt, Artificial Sequence
  Description of Artificial Sequence: Synthetic oligonucleotide
cuucauugacauccagugu

SEQ ID NO: 2996433 - RNA, 19 nt, Artificial Sequence
  Description of Artificial Sequence: Synthetic oligonucleotide
cuucaucucuuccccguaa

SEQ ID NO: 2996434 - RNA, 19 nt, Artificial Sequence
  Description of Artificial Sequence: Synthetic oligonucleotide
cuagggcuauauagugaga

SEQ ID NO: 2996435 - RNA, 19 nt, Artificial Sequence
  Description of Artificial Sequence: Synthetic oligonucleotide
uuuggccaaacuggcuauu

SEQ ID NO: 2996436 - RNA, 19 nt, Artificial Sequence
  Description of Artificial Sequence: Synthetic oligonucleotide
ggcuauucauccagucaug

SEQ ID NO: 2996437 - RNA, 19 nt, Artificial Sequence
  Description of Artificial Sequence: Synthetic oligonucleotide
cauccaguuccaggcuuug

SEQ ID NO: 2996438 - RNA, 19 nt, Artificial Sequence
  Description of Artificial Sequence: Synthetic oligonucleotide
gcaccucuugaagauaauc

SEQ ID NO: 2996439 - RNA, 19 nt, Artificial Sequence
  Description of Artificial Sequence: Synthetic oligonucleotide
gccaaacuggcuauucauc

SEQ ID NO: 2996440 - RNA, 19 nt, Artificial Sequence
  Description of Artificial Sequence: Synthetic oligonucleotide
uaggcaccucuugaagaua

SEQ ID NO: 2996441 - RNA, 19 nt, Artificial Sequence
  Description of Artificial Sequence: Synthetic oligonucleotide
uuccaggcuuuggccaaac

SEQ ID NO: 2996442 - RNA, 19 nt, Artificial Sequence
  Description of Artificial Sequence: Synthetic oligonucleotide
cuuuggccaaacuggcuau

SEQ ID NO: 2996443 - RNA, 19 nt, Artificial Sequence
  Description of Artificial Sequence: Synthetic oligonucleotide
uaggucaucuagggcuaua

SEQ ID NO: 2996444 - RNA, 19 nt, Artificial Sequence
  Description of Artificial Sequence: Synthetic oligonucleotide
accuuggcuuaaaucccgu

SEQ ID NO: 2996445 - RNA, 19 nt, Artificial Sequence
  Description of Artificial Sequence: Synthetic oligonucleotide
gccuggucuacaugaugac

SEQ ID NO: 2996446 - RNA, 19 nt, Artificial Sequence
  Description of Artificial Sequence: Synthetic oligonucleotide
guccgaugaaggagccagc

SEQ ID NO: 2996447 - RNA, 19 nt, Artificial Sequence
  Description of Artificial Sequence: Synthetic oligonucleotide
cgaugaaggagccagcucu

SEQ ID NO: 2996448 - RNA, 19 nt, Artificial Sequence
  Description of Artificial Sequence: Synthetic oligonucleotide
cgaagauaaauuauuccau

SEQ ID NO: 2996449 - RNA, 19 nt, Artificial Sequence
  Description of Artificial Sequence: Synthetic oligonucleotide
gacuuucaugcuugucuuu

SEQ ID NO: 2996450 - RNA, 19 nt, Artificial Sequence
  Description of Artificial Sequence: Synthetic oligonucleotide
ccguaaauauauucuauuu

SEQ ID NO: 2996451 - RNA, 19 nt, Artificial Sequence
  Description of Artificial Sequence: Synthetic oligonucleotide
cuggaguagcucgaagaua

SEQ ID NO: 2996452 - RNA, 19 nt, Artificial Sequence
  Description of Artificial Sequence: Synthetic oligonucleotide
ccuuuucaaccagacuuuc

SEQ ID NO: 2996453 - RNA, 19 nt, Artificial Sequence
  Description of Artificial Sequence: Synthetic oligonucleotide
ggccaaacuggcuauucau

SEQ ID NO: 2996454 - RNA, 19 nt, Artificial Sequence
  Description of Artificial Sequence: Synthetic oligonucleotide
aggagccagcucucguguu

SEQ ID NO: 2996455 - RNA, 19 nt, Artificial Sequence
  Description of Artificial Sequence: Synthetic oligonucleotide
gagccagcucucguguuua

SEQ ID NO: 2996456 - RNA, 19 nt, Artificial Sequence
  Description of Artificial Sequence: Synthetic oligonucleotide
ggucaucuagggcuauaua

SEQ ID NO: 2996457 - RNA, 19 nt, Artificial Sequence
  Description of Artificial Sequence: Synthetic oligonucleotide
cagcucucguguuuauagu

SEQ ID NO: 2996458 - RNA, 19 nt, Artificial Sequence
  Description of Artificial Sequence: Synthetic oligonucleotide
agccagcucucguguuuau

SEQ ID NO: 2996459 - RNA, 19 nt, Artificial Sequence
  Description of Artificial Sequence: Synthetic oligonucleotide
ccgaugaaggagccagcuc

SEQ ID NO: 2996460 - RNA, 19 nt, Artificial Sequence
  Description of Artificial Sequence: Synthetic oligonucleotide
gugagaccuuggcuuaaau

SEQ ID NO: 2996461 - RNA, 19 nt, Artificial Sequence
  Description of Artificial Sequence: Synthetic oligonucleotide
cccguaaauauauucuauu

SEQ ID NO: 2996462 - RNA, 19 nt, Artificial Sequence
  Description of Artificial Sequence: Synthetic oligonucleotide
guguccgaugaaggagcca

SEQ ID NO: 2996463 - RNA, 19 nt, Artificial Sequence
  Description of Artificial Sequence: Synthetic oligonucleotide
gugaggauaggcaccucuu

SEQ ID NO: 2996464 - RNA, 19 nt, Artificial Sequence
  Description of Artificial Sequence: Synthetic oligonucleotide
ggucuacaugaugacuucu

SEQ ID NO: 2996465 - RNA, 19 nt, Artificial Sequence
  Description of Artificial Sequence: Synthetic oligonucleotide
cccguacaaucacaaagua

SEQ ID NO: 2996466 - RNA, 19 nt, Artificial Sequence
  Description of Artificial Sequence: Synthetic oligonucleotide
ccagacuuucaugcuuguc

SEQ ID NO: 2996467 - RNA, 19 nt, Artificial Sequence
  Description of Artificial Sequence: Synthetic oligonucleotide
gcuugucuuuaaagucuuc

SEQ ID NO: 2996468 - RNA, 19 nt, Artificial Sequence
  Description of Artificial Sequence: Synthetic oligonucleotide
guuccaggcuuuggccaaa

SEQ ID NO: 2996469 - RNA, 19 nt, Artificial Sequence
  Description of Artificial Sequence: Synthetic oligonucleotide
ccccguaaauauauucuau

SEQ ID NO: 2996470 - RNA, 19 nt, Artificial Sequence
  Description of Artificial Sequence: Synthetic oligonucleotide
ggagccagcucucguguuu

SEQ ID NO: 2996471 - RNA, 19 nt, Artificial Sequence
  Description of Artificial Sequence: Synthetic oligonucleotide
ggcuauauagugagaccuu

SEQ ID NO: 2996472 - RNA, 19 nt, Artificial Sequence
  Description of Artificial Sequence: Synthetic oligonucleotide
gcauuucucuggaguagcu

SEQ ID NO: 2996473 - RNA, 19 nt, Artificial Sequence
  Description of Artificial Sequence: Synthetic oligonucleotide
gugugaggauaggcaccuc

SEQ ID NO: 2996474 - RNA, 19 nt, Artificial Sequence
  Description of Artificial Sequence: Synthetic oligonucleotide
ggaguagcucgaagauaaa

SEQ ID NO: 2996475 - RNA, 19 nt, Artificial Sequence
  Description of Artificial Sequence: Synthetic oligonucleotide
ccuuggcuuaaaucccgua

SEQ ID NO: 2996476 - RNA, 19 nt, Artificial Sequence
  Description of Artificial Sequence: Synthetic oligonucleotide
ccuggucuacaugaugacu

SEQ ID NO: 2996477 - RNA, 19 nt, Artificial Sequence
  Description of Artificial Sequence: Synthetic oligonucleotide
ggcuuuggccaaacuggcu

SEQ ID NO: 2996478 - RNA, 19 nt, Artificial Sequence
  Description of Artificial Sequence: Synthetic oligonucleotide
gccuuguucuucaucucuu

SEQ ID NO: 2996479 - RNA, 19 nt, Artificial Sequence
  Description of Artificial Sequence: Synthetic oligonucleotide
cuaggucaucuagggcuau

SEQ ID NO: 2996480 - RNA, 19 nt, Artificial Sequence
  Description of Artificial Sequence: Synthetic oligonucleotide
gccagcucucguguuuaua

SEQ ID NO: 2996481 - RNA, 19 nt, Artificial Sequence
  Description of Artificial Sequence: Synthetic oligonucleotide
cguguuuauagugcaguuu

SEQ ID NO: 2996482 - RNA, 19 nt, Artificial Sequence
  Description of Artificial Sequence: Synthetic oligonucleotide
ccauccaguuccaggcuuu

SEQ ID NO: 2996483 - RNA, 19 nt, Artificial Sequence
  Description of Artificial Sequence: Synthetic oligonucleotide
ggcaccucuugaagauaau

SEQ ID NO: 2996484 - RNA, 19 nt, Artificial Sequence
  Description of Artificial Sequence: Synthetic oligonucleotide
ucuuuuaugagcauggagg

SEQ ID NO: 2996485 - RNA, 19 nt, Artificial Sequence
  Description of Artificial Sequence: Synthetic oligonucleotide
uuuguagagauucuucugg

SEQ ID NO: 2996486 - RNA, 19 nt, Artificial Sequence
  Description of Artificial Sequence: Synthetic oligonucleotide
uguucuucaauauuauggg

SEQ ID NO: 2996487 - RNA, 19 nt, Artificial Sequence
  Description of Artificial Sequence: Synthetic oligonucleotide
auugaucgcauucauaggg

SEQ ID NO: 2996488 - RNA, 19 nt, Artificial Sequence
  Description of Artificial Sequence: Synthetic oligonucleotide
aauauuaugggcuucccau

SEQ ID NO: 2996489 - RNA, 19 nt, Artificial Sequence
  Description of Artificial Sequence: Synthetic oligonucleotide
auugacuacauuuguaggg

SEQ ID NO: 2996490 - RNA, 19 nt, Artificial Sequence
  Description of Artificial Sequence: Synthetic oligonucleotide
uauaacuucuuuuaagccu

SEQ ID NO: 2996491 - RNA, 19 nt, Artificial Sequence
  Description of Artificial Sequence: Synthetic oligonucleotide
uucuaaaucguugacaaug

SEQ ID NO: 2996492 - RNA, 19 nt, Artificial Sequence
  Description of Artificial Sequence: Synthetic oligonucleotide
aagugaagcugauaugcac

SEQ ID NO: 2996493 - RNA, 19 nt, Artificial Sequence
  Description of Artificial Sequence: Synthetic oligonucleotide
auguucuucaauauuaugg

SEQ ID NO: 2996494 - RNA, 19 nt, Artificial Sequence
  Description of Artificial Sequence: Synthetic oligonucleotide
acauugacuacauuuguag

SEQ ID NO: 2996495 - RNA, 19 nt, Artificial Sequence
  Description of Artificial Sequence: Synthetic oligonucleotide
uucuucaauauuaugggcu

SEQ ID NO: 2996496 - RNA, 19 nt, Artificial Sequence
  Description of Artificial Sequence: Synthetic oligonucleotide
uuucuccauuacaagaugg

SEQ ID NO: 2996497 - RNA, 19 nt, Artificial Sequence
  Description of Artificial Sequence: Synthetic oligonucleotide
aaaucguugacaauguucu

SEQ ID NO: 2996498 - RNA, 19 nt, Artificial Sequence
  Description of Artificial Sequence: Synthetic oligonucleotide
auguguagccuauagcagc

SEQ ID NO: 2996499 - RNA, 19 nt, Artificial Sequence
  Description of Artificial Sequence: Synthetic oligonucleotide
ucuucuaaaucguugacaa

SEQ ID NO: 2996500 - RNA, 19 nt, Artificial Sequence
  Description of Artificial Sequence: Synthetic oligonucleotide
gauaugcacaucaucauag

SEQ ID NO: 2996501 - RNA, 19 nt, Artificial Sequence
  Description of Artificial Sequence: Synthetic oligonucleotide
uuuaugagcauggagguga

SEQ ID NO: 2996502 - RNA, 19 nt, Artificial Sequence
  Description of Artificial Sequence: Synthetic oligonucleotide
uauggguucuuuuaugagc

SEQ ID NO: 2996503 - RNA, 19 nt, Artificial Sequence
  Description of Artificial Sequence: Synthetic oligonucleotide
uaaaucguugacaauguuc

SEQ ID NO: 2996504 - RNA, 19 nt, Artificial Sequence
  Description of Artificial Sequence: Synthetic oligonucleotide
aauguucuucaauauuaug

SEQ ID NO: 2996505 - RNA, 19 nt, Artificial Sequence
  Description of Artificial Sequence: Synthetic oligonucleotide
gaagcugauaugcacauca

SEQ ID NO: 2996506 - RNA, 19 nt, Artificial Sequence
  Description of Artificial Sequence: Synthetic oligonucleotide
uccauuacaagauggcgcc

SEQ ID NO: 2996507 - RNA, 19 nt, Artificial Sequence
  Description of Artificial Sequence: Synthetic oligonucleotide
ucugugaaaaggcuuuacc

SEQ ID NO: 2996508 - RNA, 19 nt, Artificial Sequence
  Description of Artificial Sequence: Synthetic oligonucleotide
ugugucuucuaaaucguug

SEQ ID NO: 2996509 - RNA, 19 nt, Artificial Sequence
  Description of Artificial Sequence: Synthetic oligonucleotide
uucaguauaacuucuuuua

SEQ ID NO: 2996510 - RNA, 19 nt, Artificial Sequence
  Description of Artificial Sequence: Synthetic oligonucleotide
uucuuuuaugagcauggag

SEQ ID NO: 2996511 - RNA, 19 nt, Artificial Sequence
  Description of Artificial Sequence: Synthetic oligonucleotide
uugacaauguucuucaaua

SEQ ID NO: 2996512 - RNA, 19 nt, Artificial Sequence
  Description of Artificial Sequence: Synthetic oligonucleotide
uaagucuccagcaucacau

SEQ ID NO: 2996513 - RNA, 19 nt, Artificial Sequence
  Description of Artificial Sequence: Synthetic oligonucleotide
uucuuuuaagccuucugug

SEQ ID NO: 2996514 - RNA, 19 nt, Artificial Sequence
  Description of Artificial Sequence: Synthetic oligonucleotide
cauucuuugcaagugaagc

SEQ ID NO: 2996515 - RNA, 19 nt, Artificial Sequence
  Description of Artificial Sequence: Synthetic oligonucleotide
uugcaagugaagcugauau

SEQ ID NO: 2996516 - RNA, 19 nt, Artificial Sequence
  Description of Artificial Sequence: Synthetic oligonucleotide
gaaggauccagcaaagccc

SEQ ID NO: 2996517 - RNA, 19 nt, Artificial Sequence
  Description of Artificial Sequence: Synthetic oligonucleotide
uauagcagcaagguuacug

SEQ ID NO: 2996518 - RNA, 19 nt, Artificial Sequence
  Description of Artificial Sequence: Synthetic oligonucleotide
ucuaaaucguugacaaugu

SEQ ID NO: 2996519 - RNA, 19 nt, Artificial Sequence
  Description of Artificial Sequence: Synthetic oligonucleotide
guauaacuucuuuuaagcc

SEQ ID NO: 2996520 - RNA, 19 nt, Artificial Sequence
  Description of Artificial Sequence: Synthetic oligonucleotide
acuguaagucuccagcauc

SEQ ID NO: 2996521 - RNA, 19 nt, Artificial Sequence
  Description of Artificial Sequence: Synthetic oligonucleotide
agcaagguuacuguaaguc

SEQ ID NO: 2996522 - RNA, 19 nt, Artificial Sequence
  Description of Artificial Sequence: Synthetic oligonucleotide
uuguagagauucuucuggg

SEQ ID NO: 2996523 - RNA, 19 nt, Artificial Sequence
  Description of Artificial Sequence: Synthetic oligonucleotide
ucuuuuaagccuucugugu

SEQ ID NO: 2996524 - RNA, 19 nt, Artificial Sequence
  Description of Artificial Sequence: Synthetic oligonucleotide
cuccauuacaagauggcgc

SEQ ID NO: 2996525 - RNA, 19 nt, Artificial Sequence
  Description of Artificial Sequence: Synthetic oligonucleotide
aagguuacuguaagucucc

SEQ ID NO: 2996526 - RNA, 19 nt, Artificial Sequence
  Description of Artificial Sequence: Synthetic oligonucleotide
agcaaagcccauucuuugc

SEQ ID NO: 2996527 - RNA, 19 nt, Artificial Sequence
  Description of Artificial Sequence: Synthetic oligonucleotide
aguauggguucuuuuauga

SEQ ID NO: 2996528 - RNA, 19 nt, Artificial Sequence
  Description of Artificial Sequence: Synthetic oligonucleotide
aaagcccauucuuugcaag

SEQ ID NO: 2996529 - RNA, 19 nt, Artificial Sequence
  Description of Artificial Sequence: Synthetic oligonucleotide
cauugacuacauuuguagg

SEQ ID NO: 2996530 - RNA, 19 nt, Artificial Sequence
  Description of Artificial Sequence: Synthetic oligonucleotide
uagagauucuucugggaag

SEQ ID NO: 2996531 - RNA, 19 nt, Artificial Sequence
  Description of Artificial Sequence: Synthetic oligonucleotide
ucuccauuacaagauggcg

SEQ ID NO: 2996532 - RNA, 19 nt, Artificial Sequence
  Description of Artificial Sequence: Synthetic oligonucleotide
caguauaacuucuuuuaag

SEQ ID NO: 2996533 - RNA, 19 nt, Artificial Sequence
  Description of Artificial Sequence: Synthetic oligonucleotide
uuuucuccauuacaagaug

SEQ ID NO: 2996534 - RNA, 19 nt, Artificial Sequence
  Description of Artificial Sequence: Synthetic oligonucleotide
auuacaagauggcgccugc

SEQ ID NO: 2996535 - RNA, 19 nt, Artificial Sequence
  Description of Artificial Sequence: Synthetic oligonucleotide
uucucuucaguauaacuuc

SEQ ID NO: 2996536 - RNA, 19 nt, Artificial Sequence
  Description of Artificial Sequence: Synthetic oligonucleotide
uauuaugggcuucccaugu

SEQ ID NO: 2996537 - RNA, 19 nt, Artificial Sequence
  Description of Artificial Sequence: Synthetic oligonucleotide
uucuccauuacaagauggc

SEQ ID NO: 2996538 - RNA, 19 nt, Artificial Sequence
  Description of Artificial Sequence: Synthetic oligonucleotide
caagauggcgccugcaucc

SEQ ID NO: 2996539 - RNA, 19 nt, Artificial Sequence
  Description of Artificial Sequence: Synthetic oligonucleotide
auucuucugggaaggaucc

SEQ ID NO: 2996540 - RNA, 19 nt, Artificial Sequence
  Description of Artificial Sequence: Synthetic oligonucleotide
uaugcacaucaucauaggu

SEQ ID NO: 2996541 - RNA, 19 nt, Artificial Sequence
  Description of Artificial Sequence: Synthetic oligonucleotide
uucaauauuaugggcuucc

SEQ ID NO: 2996542 - RNA, 19 nt, Artificial Sequence
  Description of Artificial Sequence: Synthetic oligonucleotide
ccauugaucgcauucauag

SEQ ID NO: 2996543 - RNA, 19 nt, Artificial Sequence
  Description of Artificial Sequence: Synthetic oligonucleotide
uuacuguaagucuccagca

SEQ ID NO: 2996544 - RNA, 19 nt, Artificial Sequence
  Description of Artificial Sequence: Synthetic oligonucleotide
auaugcacaucaucauagg

SEQ ID NO: 2996545 - RNA, 19 nt, Artificial Sequence
  Description of Artificial Sequence: Synthetic oligonucleotide
uucuuugcaagugaagcug

SEQ ID NO: 2996546 - RNA, 19 nt, Artificial Sequence
  Description of Artificial Sequence: Synthetic oligonucleotide
ucaguauaacuucuuuuaa

SEQ ID NO: 2996547 - RNA, 19 nt, Artificial Sequence
  Description of Artificial Sequence: Synthetic oligonucleotide
ucguugacaauguucuuca

SEQ ID NO: 2996548 - RNA, 19 nt, Artificial Sequence
  Description of Artificial Sequence: Synthetic oligonucleotide
auucuuugcaagugaagcu

SEQ ID NO: 2996549 - RNA, 19 nt, Artificial Sequence
  Description of Artificial Sequence: Synthetic oligonucleotide
aucguugacaauguucuuc

SEQ ID NO: 2996550 - RNA, 19 nt, Artificial Sequence
  Description of Artificial Sequence: Synthetic oligonucleotide
uguguagccuauagcagca

SEQ ID NO: 2996551 - RNA, 19 nt, Artificial Sequence
  Description of Artificial Sequence: Synthetic oligonucleotide
uguagccuauagcagcaag

SEQ ID NO: 2996552 - RNA, 19 nt, Artificial Sequence
  Description of Artificial Sequence: Synthetic oligonucleotide
agagauucuucugggaagg

SEQ ID NO: 2996553 - RNA, 19 nt, Artificial Sequence
  Description of Artificial Sequence: Synthetic oligonucleotide
augcacaucaucauagguc

SEQ ID NO: 2996554 - RNA, 19 nt, Artificial Sequence
  Description of Artificial Sequence: Synthetic oligonucleotide
auagcagcaagguuacugu

SEQ ID NO: 2996555 - RNA, 19 nt, Artificial Sequence
  Description of Artificial Sequence: Synthetic oligonucleotide
caagguuacuguaagucuc

SEQ ID NO: 2996556 - RNA, 19 nt, Artificial Sequence
  Description of Artificial Sequence: Synthetic oligonucleotide
cuuuuaagccuucuguguc

SEQ ID NO: 2996557 - RNA, 19 nt, Artificial Sequence
  Description of Artificial Sequence: Synthetic oligonucleotide
cacaucuuuguagagauuc

SEQ ID NO: 2996558 - RNA, 19 nt, Artificial Sequence
  Description of Artificial Sequence: Synthetic oligonucleotide
cauguguagccuauagcag

SEQ ID NO: 2996559 - RNA, 19 nt, Artificial Sequence
  Description of Artificial Sequence: Synthetic oligonucleotide
agcugauaugcacaucauc

SEQ ID NO: 2996560 - RNA, 19 nt, Artificial Sequence
  Description of Artificial Sequence: Synthetic oligonucleotide
ggaaggauccagcaaagcc

SEQ ID NO: 2996561 - RNA, 19 nt, Artificial Sequence
  Description of Artificial Sequence: Synthetic oligonucleotide
ucugugucuucuaaaucgu

SEQ ID NO: 2996562 - RNA, 19 nt, Artificial Sequence
  Description of Artificial Sequence: Synthetic oligonucleotide
ucuuugcaagugaagcuga

SEQ ID NO: 2996563 - RNA, 19 nt, Artificial Sequence
  Description of Artificial Sequence: Synthetic oligonucleotide
ugauaugcacaucaucaua

SEQ ID NO: 2996564 - RNA, 19 nt, Artificial Sequence
  Description of Artificial Sequence: Synthetic oligonucleotide
auauuaugggcuucccaug

SEQ ID NO: 2996565 - RNA, 19 nt, Artificial Sequence
  Description of Artificial Sequence: Synthetic oligonucleotide
guucuucaauauuaugggc

SEQ ID NO: 2996566 - RNA, 19 nt, Artificial Sequence
  Description of Artificial Sequence: Synthetic oligonucleotide
acuucuuuuaagccuucug

SEQ ID NO: 2996567 - RNA, 19 nt, Artificial Sequence
  Description of Artificial Sequence: Synthetic oligonucleotide
uugacuacauuuguagggu

SEQ ID NO: 2996568 - RNA, 19 nt, Artificial Sequence
  Description of Artificial Sequence: Synthetic oligonucleotide
uuaugggcuucccaugugu

SEQ ID NO: 2996569 - RNA, 19 nt, Artificial Sequence
  Description of Artificial Sequence: Synthetic oligonucleotide
ucuucaauauuaugggcuu

SEQ ID NO: 2996570 - RNA, 19 nt, Artificial Sequence
  Description of Artificial Sequence: Synthetic oligonucleotide
cauugaucgcauucauagg

SEQ ID NO: 2996571 - RNA, 19 nt, Artificial Sequence
  Description of Artificial Sequence: Synthetic oligonucleotide
aagucuccagcaucacauc

SEQ ID NO: 2996572 - RNA, 19 nt, Artificial Sequence
  Description of Artificial Sequence: Synthetic oligonucleotide
aucgcauucauaggguuuc

SEQ ID NO: 2996573 - RNA, 19 nt, Artificial Sequence
  Description of Artificial Sequence: Synthetic oligonucleotide
uguagagauucuucuggga

SEQ ID NO: 2996574 - RNA, 19 nt, Artificial Sequence
  Description of Artificial Sequence: Synthetic oligonucleotide
acaauguucuucaauauua

SEQ ID NO: 2996575 - RNA, 19 nt, Artificial Sequence
  Description of Artificial Sequence: Synthetic oligonucleotide
ucucuucaguauaacuucu

SEQ ID NO: 2996576 - RNA, 19 nt, Artificial Sequence
  Description of Artificial Sequence: Synthetic oligonucleotide
ucuucugggaaggauccag

SEQ ID NO: 2996577 - RNA, 19 nt, Artificial Sequence
  Description of Artificial Sequence: Synthetic oligonucleotide
gauucuucugggaaggauc

SEQ ID NO: 2996578 - RNA, 19 nt, Artificial Sequence
  Description of Artificial Sequence: Synthetic oligonucleotide
ucccauguguagccuauag

SEQ ID NO: 2996579 - RNA, 19 nt, Artificial Sequence
  Description of Artificial Sequence: Synthetic oligonucleotide
ucuucaguauaacuucuuu

SEQ ID NO: 2996580 - RNA, 19 nt, Artificial Sequence
  Description of Artificial Sequence: Synthetic oligonucleotide
uugaucgcauucauagggu

SEQ ID NO: 2996581 - RNA, 19 nt, Artificial Sequence
  Description of Artificial Sequence: Synthetic oligonucleotide
guagccuauagcagcaagg

SEQ ID NO: 2996582 - RNA, 19 nt, Artificial Sequence
  Description of Artificial Sequence: Synthetic oligonucleotide
gcaagugaagcugauaugc

SEQ ID NO: 2996583 - RNA, 19 nt, Artificial Sequence
  Description of Artificial Sequence: Synthetic oligonucleotide
aagcccauucuuugcaagu

SEQ ID NO: 2996584 - RNA, 19 nt, Artificial Sequence
  Description of Artificial Sequence: Synthetic oligonucleotide
ugacuccucugugaaaagg

SEQ ID NO: 2996585 - RNA, 19 nt, Artificial Sequence
  Description of Artificial Sequence: Synthetic oligonucleotide
guauggguucuuuuaugag

SEQ ID NO: 2996586 - RNA, 19 nt, Artificial Sequence
  Description of Artificial Sequence: Synthetic oligonucleotide
gauccagcaaagcccauuc

SEQ ID NO: 2996587 - RNA, 19 nt, Artificial Sequence
  Description of Artificial Sequence: Synthetic oligonucleotide
ugucuucuaaaucguugac

SEQ ID NO: 2996588 - RNA, 19 nt, Artificial Sequence
  Description of Artificial Sequence: Synthetic oligonucleotide
ugggaaggauccagcaaag

SEQ ID NO: 2996589 - RNA, 19 nt, Artificial Sequence
  Description of Artificial Sequence: Synthetic oligonucleotide
ugagcauggaggugacucc

SEQ ID NO: 2996590 - RNA, 19 nt, Artificial Sequence
  Description of Artificial Sequence: Synthetic oligonucleotide
ugcaagugaagcugauaug

SEQ ID NO: 2996591 - RNA, 19 nt, Artificial Sequence
  Description of Artificial Sequence: Synthetic oligonucleotide
guagagauucuucugggaa

SEQ ID NO: 2996592 - RNA, 19 nt, Artificial Sequence
  Description of Artificial Sequence: Synthetic oligonucleotide
acaacagcuuauuacuuuu

SEQ ID NO: 2996593 - RNA, 19 nt, Artificial Sequence
  Description of Artificial Sequence: Synthetic oligonucleotide
ugacaauguucuucaauau

SEQ ID NO: 2996594 - RNA, 19 nt, Artificial Sequence
  Description of Artificial Sequence: Synthetic oligonucleotide
uccagcaaagcccauucuu

SEQ ID NO: 2996595 - RNA, 19 nt, Artificial Sequence
  Description of Artificial Sequence: Synthetic oligonucleotide
uccucugugaaaaggcuuu

SEQ ID NO: 2996596 - RNA, 19 nt, Artificial Sequence
  Description of Artificial Sequence: Synthetic oligonucleotide
gcugauaugcacaucauca

SEQ ID NO: 2996597 - RNA, 19 nt, Artificial Sequence
  Description of Artificial Sequence: Synthetic oligonucleotide
gugucuucuaaaucguuga

SEQ ID NO: 2996598 - RNA, 19 nt, Artificial Sequence
  Description of Artificial Sequence: Synthetic oligonucleotide
uuuuaugagcauggaggug

SEQ ID NO: 2996599 - RNA, 19 nt, Artificial Sequence
  Description of Artificial Sequence: Synthetic oligonucleotide
agugaagcugauaugcaca

SEQ ID NO: 2996600 - RNA, 19 nt, Artificial Sequence
  Description of Artificial Sequence: Synthetic oligonucleotide
uacaagauggcgccugcau

SEQ ID NO: 2996601 - RNA, 19 nt, Artificial Sequence
  Description of Artificial Sequence: Synthetic oligonucleotide
uagccuauagcagcaaggu

SEQ ID NO: 2996602 - RNA, 19 nt, Artificial Sequence
  Description of Artificial Sequence: Synthetic oligonucleotide
auaacuucuuuuaagccuu

SEQ ID NO: 2996603 - RNA, 19 nt, Artificial Sequence
  Description of Artificial Sequence: Synthetic oligonucleotide
ucugggaaggauccagcaa

SEQ ID NO: 2996604 - RNA, 19 nt, Artificial Sequence
  Description of Artificial Sequence: Synthetic oligonucleotide
auggaggugacuccucugu

SEQ ID NO: 2996605 - RNA, 19 nt, Artificial Sequence
  Description of Artificial Sequence: Synthetic oligonucleotide
ucaauauuaugggcuuccc

SEQ ID NO: 2996606 - RNA, 19 nt, Artificial Sequence
  Description of Artificial Sequence: Synthetic oligonucleotide
uacuguaagucuccagcau

SEQ ID NO: 2996607 - RNA, 19 nt, Artificial Sequence
  Description of Artificial Sequence: Synthetic oligonucleotide
ccauguguagccuauagca

SEQ ID NO: 2996608 - RNA, 19 nt, Artificial Sequence
  Description of Artificial Sequence: Synthetic oligonucleotide
cuucuuuuaagccuucugu

SEQ ID NO: 2996609 - RNA, 19 nt, Artificial Sequence
  Description of Artificial Sequence: Synthetic oligonucleotide
cuguaagucuccagcauca

SEQ ID NO: 2996610 - RNA, 19 nt, Artificial Sequence
  Description of Artificial Sequence: Synthetic oligonucleotide
augggcuucccauguguag

SEQ ID NO: 2996611 - RNA, 19 nt, Artificial Sequence
  Description of Artificial Sequence: Synthetic oligonucleotide
cuuuuaugagcauggaggu

SEQ ID NO: 2996612 - RNA, 19 nt, Artificial Sequence
  Description of Artificial Sequence: Synthetic oligonucleotide
ugggcuucccauguguagc

SEQ ID NO: 2996613 - RNA, 19 nt, Artificial Sequence
  Description of Artificial Sequence: Synthetic oligonucleotide
auuaugggcuucccaugug

SEQ ID NO: 2996614 - RNA, 19 nt, Artificial Sequence
  Description of Artificial Sequence: Synthetic oligonucleotide
cagcaaagcccauucuuug

SEQ ID NO: 2996615 - RNA, 19 nt, Artificial Sequence
  Description of Artificial Sequence: Synthetic oligonucleotide
cauuacaagauggcgccug

SEQ ID NO: 2996616 - RNA, 19 nt, Artificial Sequence
  Description of Artificial Sequence: Synthetic oligonucleotide
uuaugagcauggaggugac

SEQ ID NO: 2996617 - RNA, 19 nt, Artificial Sequence
  Description of Artificial Sequence: Synthetic oligonucleotide
cuucugugucuucuaaauc

SEQ ID NO: 2996618 - RNA, 19 nt, Artificial Sequence
  Description of Artificial Sequence: Synthetic oligonucleotide
uggaggugacuccucugug

SEQ ID NO: 2996619 - RNA, 19 nt, Artificial Sequence
  Description of Artificial Sequence: Synthetic oligonucleotide
uccauugaucgcauucaua

SEQ ID NO: 2996620 - RNA, 19 nt, Artificial Sequence
  Description of Artificial Sequence: Synthetic oligonucleotide
guuucucuucaguauaacu

SEQ ID NO: 2996621 - RNA, 19 nt, Artificial Sequence
  Description of Artificial Sequence: Synthetic oligonucleotide
gucuucuaaaucguugaca

SEQ ID NO: 2996622 - RNA, 19 nt, Artificial Sequence
  Description of Artificial Sequence: Synthetic oligonucleotide
ugaucgcauucauaggguu

SEQ ID NO: 2996623 - RNA, 19 nt, Artificial Sequence
  Description of Artificial Sequence: Synthetic oligonucleotide
caauauuaugggcuuccca

SEQ ID NO: 2996624 - RNA, 19 nt, Artificial Sequence
  Description of Artificial Sequence: Synthetic oligonucleotide
uaugggcuucccaugugua

SEQ ID NO: 2996625 - RNA, 19 nt, Artificial Sequence
  Description of Artificial Sequence: Synthetic oligonucleotide
guaagucuccagcaucaca

SEQ ID NO: 2996626 - RNA, 19 nt, Artificial Sequence
  Description of Artificial Sequence: Synthetic oligonucleotide
aaucguugacaauguucuu

SEQ ID NO: 2996627 - RNA, 19 nt, Artificial Sequence
  Description of Artificial Sequence: Synthetic oligonucleotide
caagugaagcugauaugca

SEQ ID NO: 2996628 - RNA, 19 nt, Artificial Sequence
  Description of Artificial Sequence: Synthetic oligonucleotide
gaggugacuccucugugaa

SEQ ID NO: 2996629 - RNA, 19 nt, Artificial Sequence
  Description of Artificial Sequence: Synthetic oligonucleotide
ccuauagcagcaagguuac

SEQ ID NO: 2996630 - RNA, 19 nt, Artificial Sequence
  Description of Artificial Sequence: Synthetic oligonucleotide
gguuacuguaagucuccag

SEQ ID NO: 2996631 - RNA, 19 nt, Artificial Sequence
  Description of Artificial Sequence: Synthetic oligonucleotide
uuugcaagugaagcugaua

SEQ ID NO: 2996632 - RNA, 19 nt, Artificial Sequence
  Description of Artificial Sequence: Synthetic oligonucleotide
caucacaucuuuguagaga

SEQ ID NO: 2996633 - RNA, 19 nt, Artificial Sequence
  Description of Artificial Sequence: Synthetic oligonucleotide
gcauccauugaucgcauuc

SEQ ID NO: 2996634 - RNA, 19 nt, Artificial Sequence
  Description of Artificial Sequence: Synthetic oligonucleotide
auccauugaucgcauucau

SEQ ID NO: 2996635 - RNA, 19 nt, Artificial Sequence
  Description of Artificial Sequence: Synthetic oligonucleotide
guugacaauguucuucaau

SEQ ID NO: 2996636 - RNA, 19 nt, Artificial Sequence
  Description of Artificial Sequence: Synthetic oligonucleotide
auggcgccugcauccauug

SEQ ID NO: 2996637 - RNA, 19 nt, Artificial Sequence
  Description of Artificial Sequence: Synthetic oligonucleotide
agcccauucuuugcaagug

SEQ ID NO: 2996638 - RNA, 19 nt, Artificial Sequence
  Description of Artificial Sequence: Synthetic oligonucleotide
uaacuucuuuuaagccuuc

SEQ ID NO: 2996639 - RNA, 19 nt, Artificial Sequence
  Description of Artificial Sequence: Synthetic oligonucleotide
cauccauugaucgcauuca

SEQ ID NO: 2996640 - RNA, 19 nt, Artificial Sequence
  Description of Artificial Sequence: Synthetic oligonucleotide
cauggaggugacuccucug

SEQ ID NO: 2996641 - RNA, 19 nt, Artificial Sequence
  Description of Artificial Sequence: Synthetic oligonucleotide
uguaagucuccagcaucac

SEQ ID NO: 2996642 - RNA, 19 nt, Artificial Sequence
  Description of Artificial Sequence: Synthetic oligonucleotide
cacauugacuacauuugua

SEQ ID NO: 2996643 - RNA, 19 nt, Artificial Sequence
  Description of Artificial Sequence: Synthetic oligonucleotide
gccuauagcagcaagguua

SEQ ID NO: 2996644 - RNA, 19 nt, Artificial Sequence
  Description of Artificial Sequence: Synthetic oligonucleotide
uuacaagauggcgccugca

SEQ ID NO: 2996645 - RNA, 19 nt, Artificial Sequence
  Description of Artificial Sequence: Synthetic oligonucleotide
gugacuccucugugaaaag

SEQ ID NO: 2996646 - RNA, 19 nt, Artificial Sequence
  Description of Artificial Sequence: Synthetic oligonucleotide
acaucuuuguagagauucu

SEQ ID NO: 2996647 - RNA, 19 nt, Artificial Sequence
  Description of Artificial Sequence: Synthetic oligonucleotide
cucugugaaaaggcuuuac

SEQ ID NO: 2996648 - RNA, 19 nt, Artificial Sequence
  Description of Artificial Sequence: Synthetic oligonucleotide
ggugacuccucugugaaaa

SEQ ID NO: 2996649 - RNA, 19 nt, Artificial Sequence
  Description of Artificial Sequence: Synthetic oligonucleotide
gcaaagcccauucuuugca

SEQ ID NO: 2996650 - RNA, 19 nt, Artificial Sequence
  Description of Artificial Sequence: Synthetic oligonucleotide
agcagcaagguuacuguaa

SEQ ID NO: 2996651 - RNA, 19 nt, Artificial Sequence
  Description of Artificial Sequence: Synthetic oligonucleotide
cuucaguauaacuucuuuu

SEQ ID NO: 2996652 - RNA, 19 nt, Artificial Sequence
  Description of Artificial Sequence: Synthetic oligonucleotide
ccauucuuugcaagugaag

SEQ ID NO: 2996653 - RNA, 19 nt, Artificial Sequence
  Description of Artificial Sequence: Synthetic oligonucleotide
aagauggcgccugcaucca

SEQ ID NO: 2996654 - RNA, 19 nt, Artificial Sequence
  Description of Artificial Sequence: Synthetic oligonucleotide
uagcagcaagguuacugua

SEQ ID NO: 2996655 - RNA, 19 nt, Artificial Sequence
  Description of Artificial Sequence: Synthetic oligonucleotide
ggguucuuuuaugagcaug

SEQ ID NO: 2996656 - RNA, 19 nt, Artificial Sequence
  Description of Artificial Sequence: Synthetic oligonucleotide
agccuauagcagcaagguu

SEQ ID NO: 2996657 - RNA, 19 nt, Artificial Sequence
  Description of Artificial Sequence: Synthetic oligonucleotide
ggaggugacuccucuguga

SEQ ID NO: 2996658 - RNA, 19 nt, Artificial Sequence
  Description of Artificial Sequence: Synthetic oligonucleotide
caauguucuucaauauuau

SEQ ID NO: 2996659 - RNA, 19 nt, Artificial Sequence
  Description of Artificial Sequence: Synthetic oligonucleotide
ucacaucuuuguagagauu

SEQ ID NO: 2996660 - RNA, 19 nt, Artificial Sequence
  Description of Artificial Sequence: Synthetic oligonucleotide
ugaagcugauaugcacauc

SEQ ID NO: 2996661 - RNA, 19 nt, Artificial Sequence
  Description of Artificial Sequence: Synthetic oligonucleotide
agccuucugugucuucuaa

SEQ ID NO: 2996662 - RNA, 19 nt, Artificial Sequence
  Description of Artificial Sequence: Synthetic oligonucleotide
cccauguguagccuauagc

SEQ ID NO: 2996663 - RNA, 19 nt, Artificial Sequence
  Description of Artificial Sequence: Synthetic oligonucleotide
gcaagguuacuguaagucu

SEQ ID NO: 2996664 - RNA, 19 nt, Artificial Sequence
  Description of Artificial Sequence: Synthetic oligonucleotide
caaagcccauucuuugcaa

SEQ ID NO: 2996665 - RNA, 19 nt, Artificial Sequence
  Description of Artificial Sequence: Synthetic oligonucleotide
cugauaugcacaucaucau

SEQ ID NO: 2996666 - RNA, 19 nt, Artificial Sequence
  Description of Artificial Sequence: Synthetic oligonucleotide
gugaagcugauaugcacau

SEQ ID NO: 2996667 - RNA, 19 nt, Artificial Sequence
  Description of Artificial Sequence: Synthetic oligonucleotide
agcauggaggugacuccuc

SEQ ID NO: 2996668 - RNA, 19 nt, Artificial Sequence
  Description of Artificial Sequence: Synthetic oligonucleotide
uggguucuuuuaugagcau

SEQ ID NO: 2996669 - RNA, 19 nt, Artificial Sequence
  Description of Artificial Sequence: Synthetic oligonucleotide
ccugcauccauugaucgca

SEQ ID NO: 2996670 - RNA, 19 nt, Artificial Sequence
  Description of Artificial Sequence: Synthetic oligonucleotide
uaugagcauggaggugacu

SEQ ID NO: 2996671 - RNA, 19 nt, Artificial Sequence
  Description of Artificial Sequence: Synthetic oligonucleotide
agguuacuguaagucucca

SEQ ID NO: 2996672 - RNA, 19 nt, Artificial Sequence
  Description of Artificial Sequence: Synthetic oligonucleotide
cacaacagcuuauuacuuu

SEQ ID NO: 2996673 - RNA, 19 nt, Artificial Sequence
  Description of Artificial Sequence: Synthetic oligonucleotide
gagauucuucugggaagga

SEQ ID NO: 2996674 - RNA, 19 nt, Artificial Sequence
  Description of Artificial Sequence: Synthetic oligonucleotide
gccugcauccauugaucgc

SEQ ID NO: 2996675 - RNA, 19 nt, Artificial Sequence
  Description of Artificial Sequence: Synthetic oligonucleotide
aggugacuccucugugaaa

SEQ ID NO: 2996676 - RNA, 19 nt, Artificial Sequence
  Description of Artificial Sequence: Synthetic oligonucleotide
ugcauccauugaucgcauu

SEQ ID NO: 2996677 - RNA, 19 nt, Artificial Sequence
  Description of Artificial Sequence: Synthetic oligonucleotide
gggaaggauccagcaaagc

SEQ ID NO: 2996678 - RNA, 19 nt, Artificial Sequence
  Description of Artificial Sequence: Synthetic oligonucleotide
cgccugcauccauugaucg

SEQ ID NO: 2996679 - RNA, 19 nt, Artificial Sequence
  Description of Artificial Sequence: Synthetic oligonucleotide
gaucgcauucauaggguuu

SEQ ID NO: 2996680 - RNA, 19 nt, Artificial Sequence
  Description of Artificial Sequence: Synthetic oligonucleotide
uggcgccugcauccauuga

SEQ ID NO: 2996681 - RNA, 19 nt, Artificial Sequence
  Description of Artificial Sequence: Synthetic oligonucleotide
gagcauggaggugacuccu

SEQ ID NO: 2996682 - RNA, 19 nt, Artificial Sequence
  Description of Artificial Sequence: Synthetic oligonucleotide
gcccauucuuugcaaguga

SEQ ID NO: 2996683 - RNA, 19 nt, Artificial Sequence
  Description of Artificial Sequence: Synthetic oligonucleotide
agauggcgccugcauccau

SEQ ID NO: 2996684 - RNA, 19 nt, Artificial Sequence
  Description of Artificial Sequence: Synthetic oligonucleotide
cuucuaaaucguugacaau

SEQ ID NO: 2996685 - RNA, 19 nt, Artificial Sequence
  Description of Artificial Sequence: Synthetic oligonucleotide
cccauucuuugcaagugaa

SEQ ID NO: 2996686 - RNA, 19 nt, Artificial Sequence
  Description of Artificial Sequence: Synthetic oligonucleotide
cuaaaucguugacaauguu

SEQ ID NO: 2996687 - RNA, 19 nt, Artificial Sequence
  Description of Artificial Sequence: Synthetic oligonucleotide
cuuugcaagugaagcugau

SEQ ID NO: 2996688 - RNA, 19 nt, Artificial Sequence
  Description of Artificial Sequence: Synthetic oligonucleotide
cuccucugugaaaaggcuu

SEQ ID NO: 2996689 - RNA, 19 nt, Artificial Sequence
  Description of Artificial Sequence: Synthetic oligonucleotide
caucuuuguagagauucuu

SEQ ID NO: 2996690 - RNA, 19 nt, Artificial Sequence
  Description of Artificial Sequence: Synthetic oligonucleotide
uucccauguguagccuaua

SEQ ID NO: 2996691 - RNA, 19 nt, Artificial Sequence
  Description of Artificial Sequence: Synthetic oligonucleotide
ggguuucucuucaguauaa

SEQ ID NO: 2996692 - RNA, 19 nt, Artificial Sequence
  Description of Artificial Sequence: Synthetic oligonucleotide
ggcgccugcauccauugau

SEQ ID NO: 2996693 - RNA, 19 nt, Artificial Sequence
  Description of Artificial Sequence: Synthetic oligonucleotide
cagcaagguuacuguaagu

SEQ ID NO: 2996694 - RNA, 19 nt, Artificial Sequence
  Description of Artificial Sequence: Synthetic oligonucleotide
gauggcgccugcauccauu

SEQ ID NO: 2996695 - RNA, 19 nt, Artificial Sequence
  Description of Artificial Sequence: Synthetic oligonucleotide
gcauggaggugacuccucu

SEQ ID NO: 2996696 - RNA, 19 nt, Artificial Sequence
  Description of Artificial Sequence: Synthetic oligonucleotide
cugugucuucuaaaucguu

SEQ ID NO: 2996697 - RNA, 19 nt, Artificial Sequence
  Description of Artificial Sequence: Synthetic oligonucleotide
gcgccugcauccauugauc

SEQ ID NO: 2996698 - RNA, 19 nt, Artificial Sequence
  Description of Artificial Sequence: Synthetic oligonucleotide
guguagccuauagcagcaa

SEQ ID NO: 2996699 - RNA, 19 nt, Artificial Sequence
  Description of Artificial Sequence: Synthetic oligonucleotide
cugcauccauugaucgcau

SEQ ID NO: 2996700 - RNA, 19 nt, Artificial Sequence
  Description of Artificial Sequence: Synthetic oligonucleotide
aggauccagcaaagcccau

SEQ ID NO: 2996701 - RNA, 19 nt, Artificial Sequence
  Description of Artificial Sequence: Synthetic oligonucleotide
ggauccagcaaagcccauu

SEQ ID NO: 2996702 - RNA, 19 nt, Artificial Sequence
  Description of Artificial Sequence: Synthetic oligonucleotide
cuauagcagcaagguuacu

SEQ ID NO: 2996703 - RNA, 19 nt, Artificial Sequence
  Description of Artificial Sequence: Synthetic oligonucleotide
cguugacaauguucuucaa

SEQ ID NO: 2996704 - RNA, 19 nt, Artificial Sequence
  Description of Artificial Sequence: Synthetic oligonucleotide
ggcuucccauguguagccu

SEQ ID NO: 2996705 - RNA, 19 nt, Artificial Sequence
  Description of Artificial Sequence: Synthetic oligonucleotide
ccauuacaagauggcgccu

SEQ ID NO: 2996706 - RNA, 19 nt, Artificial Sequence
  Description of Artificial Sequence: Synthetic oligonucleotide
aaaacggaaucacugaagg

SEQ ID NO: 2996707 - RNA, 19 nt, Artificial Sequence
  Description of Artificial Sequence: Synthetic oligonucleotide
aacggaaucacugaagggc

SEQ ID NO: 2996708 - RNA, 19 nt, Artificial Sequence
  Description of Artificial Sequence: Synthetic oligonucleotide
gaagacuagaccaagauag

SEQ ID NO: 2996709 - RNA, 19 nt, Artificial Sequence
  Description of Artificial Sequence: Synthetic oligonucleotide
uuugaaaacggaaucacug

SEQ ID NO: 2996710 - RNA, 19 nt, Artificial Sequence
  Description of Artificial Sequence: Synthetic oligonucleotide
ugaaaugucuuugaaaacg

SEQ ID NO: 2996711 - RNA, 19 nt, Artificial Sequence
  Description of Artificial Sequence: Synthetic oligonucleotide
aaacuuugcuaacaagagc

SEQ ID NO: 2996712 - RNA, 19 nt, Artificial Sequence
  Description of Artificial Sequence: Synthetic oligonucleotide
ucuuuaagcaagucuaagg

SEQ ID NO: 2996713 - RNA, 19 nt, Artificial Sequence
  Description of Artificial Sequence: Synthetic oligonucleotide
accaagauagucuagggag

SEQ ID NO: 2996714 - RNA, 19 nt, Artificial Sequence
  Description of Artificial Sequence: Synthetic oligonucleotide
agauagucuagggagaucc

SEQ ID NO: 2996715 - RNA, 19 nt, Artificial Sequence
  Description of Artificial Sequence: Synthetic oligonucleotide
gcaauaaucaaauucaaug

SEQ ID NO: 2996716 - RNA, 19 nt, Artificial Sequence
  Description of Artificial Sequence: Synthetic oligonucleotide
aauaaucaaauucaaugua

SEQ ID NO: 2996717 - RNA, 19 nt, Artificial Sequence
  Description of Artificial Sequence: Synthetic oligonucleotide
guucccaucauucuaaagc

SEQ ID NO: 2996718 - RNA, 19 nt, Artificial Sequence
  Description of Artificial Sequence: Synthetic oligonucleotide
aaaacuuugcuaacaagag

SEQ ID NO: 2996719 - RNA, 19 nt, Artificial Sequence
  Description of Artificial Sequence: Synthetic oligonucleotide
ucauucuaaagcuaagcug

SEQ ID NO: 2996720 - RNA, 19 nt, Artificial Sequence
  Description of Artificial Sequence: Synthetic oligonucleotide
uaagcaagucuaaggaagg

SEQ ID NO: 2996721 - RNA, 19 nt, Artificial Sequence
  Description of Artificial Sequence: Synthetic oligonucleotide
ugaagggcagcaauaauca

SEQ ID NO: 2996722 - RNA, 19 nt, Artificial Sequence
  Description of Artificial Sequence: Synthetic oligonucleotide
cauucuaaagcuaagcuga

SEQ ID NO: 2996723 - RNA, 19 nt, Artificial Sequence
  Description of Artificial Sequence: Synthetic oligonucleotide
ugugcucagagccaggacc

SEQ ID NO: 2996724 - RNA, 19 nt, Artificial Sequence
  Description of Artificial Sequence: Synthetic oligonucleotide
aacaagagccauaaacugg

SEQ ID NO: 2996725 - RNA, 19 nt, Artificial Sequence
  Description of Artificial Sequence: Synthetic oligonucleotide
ugaugaaauguucccauca

SEQ ID NO: 2996726 - RNA, 19 nt, Artificial Sequence
  Description of Artificial Sequence: Synthetic oligonucleotide
uaacaagagccauaaacug

SEQ ID NO: 2996727 - RNA, 19 nt, Artificial Sequence
  Description of Artificial Sequence: Synthetic oligonucleotide
uuugcucucaccauggaau

SEQ ID NO: 2996728 - RNA, 19 nt, Artificial Sequence
  Description of Artificial Sequence: Synthetic oligonucleotide
gaaaugucuuugaaaacgg

SEQ ID NO: 2996729 - RNA, 19 nt, Artificial Sequence
  Description of Artificial Sequence: Synthetic oligonucleotide
aagcuuccaccucaagugc

SEQ ID NO: 2996730 - RNA, 19 nt, Artificial Sequence
  Description of Artificial Sequence: Synthetic oligonucleotide
uaaggaaggaguccaagcu

SEQ ID NO: 2996731 - RNA, 19 nt, Artificial Sequence
  Description of Artificial Sequence: Synthetic oligonucleotide
aggaaaauugcugaaaugu

SEQ ID NO: 2996732 - RNA, 19 nt, Artificial Sequence
  Description of Artificial Sequence: Synthetic oligonucleotide
agguucucaagcuuccacc

SEQ ID NO: 2996733 - RNA, 19 nt, Artificial Sequence
  Description of Artificial Sequence: Synthetic oligonucleotide
aaacggaaucacugaaggg

SEQ ID NO: 2996734 - RNA, 19 nt, Artificial Sequence
  Description of Artificial Sequence: Synthetic oligonucleotide
aaucaaauucaauguaaaa

SEQ ID NO: 2996735 - RNA, 19 nt, Artificial Sequence
  Description of Artificial Sequence: Synthetic oligonucleotide
uaaucaaauucaauguaaa

SEQ ID NO: 2996736 - RNA, 19 nt, Artificial Sequence
  Description of Artificial Sequence: Synthetic oligonucleotide
caagcuuccaccucaagug

SEQ ID NO: 2996737 - RNA, 19 nt, Artificial Sequence
  Description of Artificial Sequence: Synthetic oligonucleotide
uggucuuuaagcaagucua

SEQ ID NO: 2996738 - RNA, 19 nt, Artificial Sequence
  Description of Artificial Sequence: Synthetic oligonucleotide
aucauucuaaagcuaagcu

SEQ ID NO: 2996739 - RNA, 19 nt, Artificial Sequence
  Description of Artificial Sequence: Synthetic oligonucleotide
uuuaccuccagguaccccu

SEQ ID NO: 2996740 - RNA, 19 nt, Artificial Sequence
  Description of Artificial Sequence: Synthetic oligonucleotide
uagaccaagauagucuagg

SEQ ID NO: 2996741 - RNA, 19 nt, Artificial Sequence
  Description of Artificial Sequence: Synthetic oligonucleotide
gcuaacaagagccauaaac

SEQ ID NO: 2996742 - RNA, 19 nt, Artificial Sequence
  Description of Artificial Sequence: Synthetic oligonucleotide
aauugcugaaaugucuuug

SEQ ID NO: 2996743 - RNA, 19 nt, Artificial Sequence
  Description of Artificial Sequence: Synthetic oligonucleotide
ucuagggagauccugcccu

SEQ ID NO: 2996744 - RNA, 19 nt, Artificial Sequence
  Description of Artificial Sequence: Synthetic oligonucleotide
cuuuaagcaagucuaagga

SEQ ID NO: 2996745 - RNA, 19 nt, Artificial Sequence
  Description of Artificial Sequence: Synthetic oligonucleotide
uauucugggauguugcuuc

SEQ ID NO: 2996746 - RNA, 19 nt, Artificial Sequence
  Description of Artificial Sequence: Synthetic oligonucleotide
caccauggaauucucaggg

SEQ ID NO: 2996747 - RNA, 19 nt, Artificial Sequence
  Description of Artificial Sequence: Synthetic oligonucleotide
aaagcuaagcugaagacua

SEQ ID NO: 2996748 - RNA, 19 nt, Artificial Sequence
  Description of Artificial Sequence: Synthetic oligonucleotide
aaacuggucuuuaagcaag

SEQ ID NO: 2996749 - RNA, 19 nt, Artificial Sequence
  Description of Artificial Sequence: Synthetic oligonucleotide
uugaaaacggaaucacuga

SEQ ID NO: 2996750 - RNA, 19 nt, Artificial Sequence
  Description of Artificial Sequence: Synthetic oligonucleotide
cuaagcugaagacuagacc

SEQ ID NO: 2996751 - RNA, 19 nt, Artificial Sequence
  Description of Artificial Sequence: Synthetic oligonucleotide
uuuaagcaagucuaaggaa

SEQ ID NO: 2996752 - RNA, 19 nt, Artificial Sequence
  Description of Artificial Sequence: Synthetic oligonucleotide
cuaaggaaggaguccaagc

SEQ ID NO: 2996753 - RNA, 19 nt, Artificial Sequence
  Description of Artificial Sequence: Synthetic oligonucleotide
aaggaguccaagcuauucu

SEQ ID NO: 2996754 - RNA, 19 nt, Artificial Sequence
  Description of Artificial Sequence: Synthetic oligonucleotide
aagagccauaaacuggucu

SEQ ID NO: 2996755 - RNA, 19 nt, Artificial Sequence
  Description of Artificial Sequence: Synthetic oligonucleotide
cucaccauggaauucucag

SEQ ID NO: 2996756 - RNA, 19 nt, Artificial Sequence
  Description of Artificial Sequence: Synthetic oligonucleotide
ugaaaacggaaucacugaa

SEQ ID NO: 2996757 - RNA, 19 nt, Artificial Sequence
  Description of Artificial Sequence: Synthetic oligonucleotide
uucccaucauucuaaagcu

SEQ ID NO: 2996758 - RNA, 19 nt, Artificial Sequence
  Description of Artificial Sequence: Synthetic oligonucleotide
cuaaagcuaagcugaagac

SEQ ID NO: 2996759 - RNA, 19 nt, Artificial Sequence
  Description of Artificial Sequence: Synthetic oligonucleotide
ugcagcauagcccugcggu

SEQ ID NO: 2996760 - RNA, 19 nt, Artificial Sequence
  Description of Artificial Sequence: Synthetic oligonucleotide
ucaccauggaauucucagg

SEQ ID NO: 2996761 - RNA, 19 nt, Artificial Sequence
  Description of Artificial Sequence: Synthetic oligonucleotide
uucucaagcuuccaccuca

SEQ ID NO: 2996762 - RNA, 19 nt, Artificial Sequence
  Description of Artificial Sequence: Synthetic oligonucleotide
augacaucgacugaggaca

SEQ ID NO: 2996763 - RNA, 19 nt, Artificial Sequence
  Description of Artificial Sequence: Synthetic oligonucleotide
aaauguucccaucauucua

SEQ ID NO: 2996764 - RNA, 19 nt, Artificial Sequence
  Description of Artificial Sequence: Synthetic oligonucleotide
uaaagcuaagcugaagacu

SEQ ID NO: 2996765 - RNA, 19 nt, Artificial Sequence
  Description of Artificial Sequence: Synthetic oligonucleotide
agucuagggagauccugcc

SEQ ID NO: 2996766 - RNA, 19 nt, Artificial Sequence
  Description of Artificial Sequence: Synthetic oligonucleotide
gaguccaagcuauucuggg

SEQ ID NO: 2996767 - RNA, 19 nt, Artificial Sequence
  Description of Artificial Sequence: Synthetic oligonucleotide
uaaacuggucuuuaagcaa

SEQ ID NO: 2996768 - RNA, 19 nt, Artificial Sequence
  Description of Artificial Sequence: Synthetic oligonucleotide
caucugaugaaauguuccc

SEQ ID NO: 2996769 - RNA, 19 nt, Artificial Sequence
  Description of Artificial Sequence: Synthetic oligonucleotide
aaugucuuugaaaacggaa

SEQ ID NO: 2996770 - RNA, 19 nt, Artificial Sequence
  Description of Artificial Sequence: Synthetic oligonucleotide
uagucuagggagauccugc

SEQ ID NO: 2996771 - RNA, 19 nt, Artificial Sequence
  Description of Artificial Sequence: Synthetic oligonucleotide
uguugcuucaagucccugc

SEQ ID NO: 2996772 - RNA, 19 nt, Artificial Sequence
  Description of Artificial Sequence: Synthetic oligonucleotide
gaaaacggaaucacugaag

SEQ ID NO: 2996773 - RNA, 19 nt, Artificial Sequence
  Description of Artificial Sequence: Synthetic oligonucleotide
ucugaugaaauguucccau

SEQ ID NO: 2996774 - RNA, 19 nt, Artificial Sequence
  Description of Artificial Sequence: Synthetic oligonucleotide
agaccaagauagucuaggg

SEQ ID NO: 2996775 - RNA, 19 nt, Artificial Sequence
  Description of Artificial Sequence: Synthetic oligonucleotide
uccccugagguucucaagc

SEQ ID NO: 2996776 - RNA, 19 nt, Artificial Sequence
  Description of Artificial Sequence: Synthetic oligonucleotide
auugcugaaaugucuuuga

SEQ ID NO: 2996777 - RNA, 19 nt, Artificial Sequence
  Description of Artificial Sequence: Synthetic oligonucleotide
aucgacugaggacacugac

SEQ ID NO: 2996778 - RNA, 19 nt, Artificial Sequence
  Description of Artificial Sequence: Synthetic oligonucleotide
gcugaaaugucuuugaaaa

SEQ ID NO: 2996779 - RNA, 19 nt, Artificial Sequence
  Description of Artificial Sequence: Synthetic oligonucleotide
cuaacaagagccauaaacu

SEQ ID NO: 2996780 - RNA, 19 nt, Artificial Sequence
  Description of Artificial Sequence: Synthetic oligonucleotide
caugacaucgacugaggac

SEQ ID NO: 2996781 - RNA, 19 nt, Artificial Sequence
  Description of Artificial Sequence: Synthetic oligonucleotide
cauggaauucucagggccc

SEQ ID NO: 2996782 - RNA, 19 nt, Artificial Sequence
  Description of Artificial Sequence: Synthetic oligonucleotide
gcugccaugacaucgacug

SEQ ID NO: 2996783 - RNA, 19 nt, Artificial Sequence
  Description of Artificial Sequence: Synthetic oligonucleotide
agcuauucugggauguugc

SEQ ID NO: 2996784 - RNA, 19 nt, Artificial Sequence
  Description of Artificial Sequence: Synthetic oligonucleotide
auaaucaaauucaauguaa

SEQ ID NO: 2996785 - RNA, 19 nt, Artificial Sequence
  Description of Artificial Sequence: Synthetic oligonucleotide
ugaagacuagaccaagaua

SEQ ID NO: 2996786 - RNA, 19 nt, Artificial Sequence
  Description of Artificial Sequence: Synthetic oligonucleotide
aaaauugcugaaaugucuu

SEQ ID NO: 2996787 - RNA, 19 nt, Artificial Sequence
  Description of Artificial Sequence: Synthetic oligonucleotide
ggcagcaauaaucaaauuc

SEQ ID NO: 2996788 - RNA, 19 nt, Artificial Sequence
  Description of Artificial Sequence: Synthetic oligonucleotide
uuugcuaacaagagccaua

SEQ ID NO: 2996789 - RNA, 19 nt, Artificial Sequence
  Description of Artificial Sequence: Synthetic oligonucleotide
accauggaauucucagggc

SEQ ID NO: 2996790 - RNA, 19 nt, Artificial Sequence
  Description of Artificial Sequence: Synthetic oligonucleotide
caauaaucaaauucaaugu

SEQ ID NO: 2996791 - RNA, 19 nt, Artificial Sequence
  Description of Artificial Sequence: Synthetic oligonucleotide
ucaagucccugcagcauag

SEQ ID NO: 2996792 - RNA, 19 nt, Artificial Sequence
  Description of Artificial Sequence: Synthetic oligonucleotide
ucgacugaggacacugacc

SEQ ID NO: 2996793 - RNA, 19 nt, Artificial Sequence
  Description of Artificial Sequence: Synthetic oligonucleotide
aauguucccaucauucuaa

SEQ ID NO: 2996794 - RNA, 19 nt, Artificial Sequence
  Description of Artificial Sequence: Synthetic oligonucleotide
ugcugcugccaugacaucg

SEQ ID NO: 2996795 - RNA, 19 nt, Artificial Sequence
  Description of Artificial Sequence: Synthetic oligonucleotide
ugggauguugcuucaaguc

SEQ ID NO: 2996796 - RNA, 19 nt, Artificial Sequence
  Description of Artificial Sequence: Synthetic oligonucleotide
acacugaccccuuuuccuc

SEQ ID NO: 2996797 - RNA, 19 nt, Artificial Sequence
  Description of Artificial Sequence: Synthetic oligonucleotide
agauccugcccuuuaccuc

SEQ ID NO: 2996798 - RNA, 19 nt, Artificial Sequence
  Description of Artificial Sequence: Synthetic oligonucleotide
agacuagaccaagauaguc

SEQ ID NO: 2996799 - RNA, 19 nt, Artificial Sequence
  Description of Artificial Sequence: Synthetic oligonucleotide
ugcugaaaugucuuugaaa

SEQ ID NO: 2996800 - RNA, 19 nt, Artificial Sequence
  Description of Artificial Sequence: Synthetic oligonucleotide
ucucagggcccucauuucc

SEQ ID NO: 2996801 - RNA, 19 nt, Artificial Sequence
  Description of Artificial Sequence: Synthetic oligonucleotide
aggaccaggaggaaaauug

SEQ ID NO: 2996802 - RNA, 19 nt, Artificial Sequence
  Description of Artificial Sequence: Synthetic oligonucleotide
ucuaaggaaggaguccaag

SEQ ID NO: 2996803 - RNA, 19 nt, Artificial Sequence
  Description of Artificial Sequence: Synthetic oligonucleotide
uuuuccuccaucugaugaa

SEQ ID NO: 2996804 - RNA, 19 nt, Artificial Sequence
  Description of Artificial Sequence: Synthetic oligonucleotide
uuuugcucucaccauggaa

SEQ ID NO: 2996805 - RNA, 19 nt, Artificial Sequence
  Description of Artificial Sequence: Synthetic oligonucleotide
agucccugcagcauagccc

SEQ ID NO: 2996806 - RNA, 19 nt, Artificial Sequence
  Description of Artificial Sequence: Synthetic oligonucleotide
uccuccaucugaugaaaug

SEQ ID NO: 2996807 - RNA, 19 nt, Artificial Sequence
  Description of Artificial Sequence: Synthetic oligonucleotide
aggaguccaagcuauucug

SEQ ID NO: 2996808 - RNA, 19 nt, Artificial Sequence
  Description of Artificial Sequence: Synthetic oligonucleotide
ugccaugacaucgacugag

SEQ ID NO: 2996809 - RNA, 19 nt, Artificial Sequence
  Description of Artificial Sequence: Synthetic oligonucleotide
caagucuaaggaaggaguc

SEQ ID NO: 2996810 - RNA, 19 nt, Artificial Sequence
  Description of Artificial Sequence: Synthetic oligonucleotide
acuagaccaagauagucua

SEQ ID NO: 2996811 - RNA, 19 nt, Artificial Sequence
  Description of Artificial Sequence: Synthetic oligonucleotide
aggacacugaccccuuuuc

SEQ ID NO: 2996812 - RNA, 19 nt, Artificial Sequence
  Description of Artificial Sequence: Synthetic oligonucleotide
agagccauaaacuggucuu

SEQ ID NO: 2996813 - RNA, 19 nt, Artificial Sequence
  Description of Artificial Sequence: Synthetic oligonucleotide
uccaucugaugaaauguuc

SEQ ID NO: 2996814 - RNA, 19 nt, Artificial Sequence
  Description of Artificial Sequence: Synthetic oligonucleotide
aaggaaggaguccaagcua

SEQ ID NO: 2996815 - RNA, 19 nt, Artificial Sequence
  Description of Artificial Sequence: Synthetic oligonucleotide
auucucagggcccucauuu

SEQ ID NO: 2996816 - RNA, 19 nt, Artificial Sequence
  Description of Artificial Sequence: Synthetic oligonucleotide
gaaaauugcugaaaugucu

SEQ ID NO: 2996817 - RNA, 19 nt, Artificial Sequence
  Description of Artificial Sequence: Synthetic oligonucleotide
aaauugcugaaaugucuuu

SEQ ID NO: 2996818 - RNA, 19 nt, Artificial Sequence
  Description of Artificial Sequence: Synthetic oligonucleotide
ucaagugcugcugccauga

SEQ ID NO: 2996819 - RNA, 19 nt, Artificial Sequence
  Description of Artificial Sequence: Synthetic oligonucleotide
acaagagccauaaacuggu

SEQ ID NO: 2996820 - RNA, 19 nt, Artificial Sequence
  Description of Artificial Sequence: Synthetic oligonucleotide
aaugugcucagagccagga

SEQ ID NO: 2996821 - RNA, 19 nt, Artificial Sequence
  Description of Artificial Sequence: Synthetic oligonucleotide
aagugcugcugccaugaca

SEQ ID NO: 2996822 - RNA, 19 nt, Artificial Sequence
  Description of Artificial Sequence: Synthetic oligonucleotide
gcagcaauaaucaaauuca

SEQ ID NO: 2996823 - RNA, 19 nt, Artificial Sequence
  Description of Artificial Sequence: Synthetic oligonucleotide
cuuuuccuccaucugauga

SEQ ID NO: 2996824 - RNA, 19 nt, Artificial Sequence
  Description of Artificial Sequence: Synthetic oligonucleotide
uguucccaucauucuaaag

SEQ ID NO: 2996825 - RNA, 19 nt, Artificial Sequence
  Description of Artificial Sequence: Synthetic oligonucleotide
aagcuauucugggauguug

SEQ ID NO: 2996826 - RNA, 19 nt, Artificial Sequence
  Description of Artificial Sequence: Synthetic oligonucleotide
agcaagucuaaggaaggag

SEQ ID NO: 2996827 - RNA, 19 nt, Artificial Sequence
  Description of Artificial Sequence: Synthetic oligonucleotide
aagggcagcaauaaucaaa

SEQ ID NO: 2996828 - RNA, 19 nt, Artificial Sequence
  Description of Artificial Sequence: Synthetic oligonucleotide
aucacugaagggcagcaau

SEQ ID NO: 2996829 - RNA, 19 nt, Artificial Sequence
  Description of Artificial Sequence: Synthetic oligonucleotide
agucuaaggaaggagucca

SEQ ID NO: 2996830 - RNA, 19 nt, Artificial Sequence
  Description of Artificial Sequence: Synthetic oligonucleotide
gggauguugcuucaagucc

SEQ ID NO: 2996831 - RNA, 19 nt, Artificial Sequence
  Description of Artificial Sequence: Synthetic oligonucleotide
aagauagucuagggagauc

SEQ ID NO: 2996832 - RNA, 19 nt, Artificial Sequence
  Description of Artificial Sequence: Synthetic oligonucleotide
guugcuucaagucccugca

SEQ ID NO: 2996833 - RNA, 19 nt, Artificial Sequence
  Description of Artificial Sequence: Synthetic oligonucleotide
ccaucugaugaaauguucc

SEQ ID NO: 2996834 - RNA, 19 nt, Artificial Sequence
  Description of Artificial Sequence: Synthetic oligonucleotide
gaccaagauagucuaggga

SEQ ID NO: 2996835 - RNA, 19 nt, Artificial Sequence
  Description of Artificial Sequence: Synthetic oligonucleotide
uucaagucccugcagcaua

SEQ ID NO: 2996836 - RNA, 19 nt, Artificial Sequence
  Description of Artificial Sequence: Synthetic oligonucleotide
uucuaaagcuaagcugaag

SEQ ID NO: 2996837 - RNA, 19 nt, Artificial Sequence
  Description of Artificial Sequence: Synthetic oligonucleotide
uugcuaacaagagccauaa

SEQ ID NO: 2996838 - RNA, 19 nt, Artificial Sequence
  Description of Artificial Sequence: Synthetic oligonucleotide
aaaugucuuugaaaacgga

SEQ ID NO: 2996839 - RNA, 19 nt, Artificial Sequence
  Description of Artificial Sequence: Synthetic oligonucleotide
agugcugcugccaugacau

SEQ ID NO: 2996840 - RNA, 19 nt, Artificial Sequence
  Description of Artificial Sequence: Synthetic oligonucleotide
acugaggacacugaccccu

SEQ ID NO: 2996841 - RNA, 19 nt, Artificial Sequence
  Description of Artificial Sequence: Synthetic oligonucleotide
acaucgacugaggacacug

SEQ ID NO: 2996842 - RNA, 19 nt, Artificial Sequence
  Description of Artificial Sequence: Synthetic oligonucleotide
gagguucucaagcuuccac

SEQ ID NO: 2996843 - RNA, 19 nt, Artificial Sequence
  Description of Artificial Sequence: Synthetic oligonucleotide
augucuuugaaaacggaau

SEQ ID NO: 2996844 - RNA, 19 nt, Artificial Sequence
  Description of Artificial Sequence: Synthetic oligonucleotide
aguccaagcuauucuggga

SEQ ID NO: 2996845 - RNA, 19 nt, Artificial Sequence
  Description of Artificial Sequence: Synthetic oligonucleotide
gucuuuaagcaagucuaag

SEQ ID NO: 2996846 - RNA, 19 nt, Artificial Sequence
  Description of Artificial Sequence: Synthetic oligonucleotide
auagucuagggagauccug

SEQ ID NO: 2996847 - RNA, 19 nt, Artificial Sequence
  Description of Artificial Sequence: Synthetic oligonucleotide
uugcugaaaugucuuugaa

SEQ ID NO: 2996848 - RNA, 19 nt, Artificial Sequence
  Description of Artificial Sequence: Synthetic oligonucleotide
uccaagcuauucugggaug

SEQ ID NO: 2996849 - RNA, 19 nt, Artificial Sequence
  Description of Artificial Sequence: Synthetic oligonucleotide
ucacugaagggcagcaaua

SEQ ID NO: 2996850 - RNA, 19 nt, Artificial Sequence
  Description of Artificial Sequence: Synthetic oligonucleotide
accaggaggaaaauugcug

SEQ ID NO: 2996851 - RNA, 19 nt, Artificial Sequence
  Description of Artificial Sequence: Synthetic oligonucleotide
cuagaccaagauagucuag

SEQ ID NO: 2996852 - RNA, 19 nt, Artificial Sequence
  Description of Artificial Sequence: Synthetic oligonucleotide
ucucaccauggaauucuca

SEQ ID NO: 2996853 - RNA, 19 nt, Artificial Sequence
  Description of Artificial Sequence: Synthetic oligonucleotide
aucugaugaaauguuccca

SEQ ID NO: 2996854 - RNA, 19 nt, Artificial Sequence
  Description of Artificial Sequence: Synthetic oligonucleotide
gaaggaguccaagcuauuc

SEQ ID NO: 2996855 - RNA, 19 nt, Artificial Sequence
  Description of Artificial Sequence: Synthetic oligonucleotide
aagacuagaccaagauagu

SEQ ID NO: 2996856 - RNA, 19 nt, Artificial Sequence
  Description of Artificial Sequence: Synthetic oligonucleotide
augugcucagagccaggac

SEQ ID NO: 2996857 - RNA, 19 nt, Artificial Sequence
  Description of Artificial Sequence: Synthetic oligonucleotide
cucagggcccucauuuccc

SEQ ID NO: 2996858 - RNA, 19 nt, Artificial Sequence
  Description of Artificial Sequence: Synthetic oligonucleotide
ccauggaauucucagggcc

SEQ ID NO: 2996859 - RNA, 19 nt, Artificial Sequence
  Description of Artificial Sequence: Synthetic oligonucleotide
aagcaagucuaaggaagga

SEQ ID NO: 2996860 - RNA, 19 nt, Artificial Sequence
  Description of Artificial Sequence: Synthetic oligonucleotide
gacuagaccaagauagucu

SEQ ID NO: 2996861 - RNA, 19 nt, Artificial Sequence
  Description of Artificial Sequence: Synthetic oligonucleotide
agggcagcaauaaucaaau

SEQ ID NO: 2996862 - RNA, 19 nt, Artificial Sequence
  Description of Artificial Sequence: Synthetic oligonucleotide
cugaugaaauguucccauc

SEQ ID NO: 2996863 - RNA, 19 nt, Artificial Sequence
  Description of Artificial Sequence: Synthetic oligonucleotide
ccauaaacuggucuuuaag

SEQ ID NO: 2996864 - RNA, 19 nt, Artificial Sequence
  Description of Artificial Sequence: Synthetic oligonucleotide
aaaugugcucagagccagg

SEQ ID NO: 2996865 - RNA, 19 nt, Artificial Sequence
  Description of Artificial Sequence: Synthetic oligonucleotide
aauucucagggcccucauu

SEQ ID NO: 2996866 - RNA, 19 nt, Artificial Sequence
  Description of Artificial Sequence: Synthetic oligonucleotide
gacacugaccccuuuuccu

SEQ ID NO: 2996867 - RNA, 19 nt, Artificial Sequence
  Description of Artificial Sequence: Synthetic oligonucleotide
agcaauaaucaaauucaau

SEQ ID NO: 2996868 - RNA, 19 nt, Artificial Sequence
  Description of Artificial Sequence: Synthetic oligonucleotide
cgacugaggacacugaccc

SEQ ID NO: 2996869 - RNA, 19 nt, Artificial Sequence
  Description of Artificial Sequence: Synthetic oligonucleotide
gaugaaauguucccaucau

SEQ ID NO: 2996870 - RNA, 19 nt, Artificial Sequence
  Description of Artificial Sequence: Synthetic oligonucleotide
agcauagcccugcgguguc

SEQ ID NO: 2996871 - RNA, 19 nt, Artificial Sequence
  Description of Artificial Sequence: Synthetic oligonucleotide
cacugaccccuuuuccucc

SEQ ID NO: 2996872 - RNA, 19 nt, Artificial Sequence
  Description of Artificial Sequence: Synthetic oligonucleotide
agcugaagacuagaccaag

SEQ ID NO: 2996873 - RNA, 19 nt, Artificial Sequence
  Description of Artificial Sequence: Synthetic oligonucleotide
acuggucuuuaagcaaguc

SEQ ID NO: 2996874 - RNA, 19 nt, Artificial Sequence
  Description of Artificial Sequence: Synthetic oligonucleotide
aagcuaagcugaagacuag

SEQ ID NO: 2996875 - RNA, 19 nt, Artificial Sequence
  Description of Artificial Sequence: Synthetic oligonucleotide
ucagggcccucauuucccc

SEQ ID NO: 2996876 - RNA, 19 nt, Artificial Sequence
  Description of Artificial Sequence: Synthetic oligonucleotide
gagauccugcccuuuaccu

SEQ ID NO: 2996877 - RNA, 19 nt, Artificial Sequence
  Description of Artificial Sequence: Synthetic oligonucleotide
gaaucacugaagggcagca

SEQ ID NO: 2996878 - RNA, 19 nt, Artificial Sequence
  Description of Artificial Sequence: Synthetic oligonucleotide
uuuccuccaucugaugaaa

SEQ ID NO: 2996879 - RNA, 19 nt, Artificial Sequence
  Description of Artificial Sequence: Synthetic oligonucleotide
ugacaucgacugaggacac

SEQ ID NO: 2996880 - RNA, 19 nt, Artificial Sequence
  Description of Artificial Sequence: Synthetic oligonucleotide
acggaaucacugaagggca

SEQ ID NO: 2996881 - RNA, 19 nt, Artificial Sequence
  Description of Artificial Sequence: Synthetic oligonucleotide
aggaaggaguccaagcuau

SEQ ID NO: 2996882 - RNA, 19 nt, Artificial Sequence
  Description of Artificial Sequence: Synthetic oligonucleotide
cuuugaaaacggaaucacu

SEQ ID NO: 2996883 - RNA, 19 nt, Artificial Sequence
  Description of Artificial Sequence: Synthetic oligonucleotide
ggaguccaagcuauucugg

SEQ ID NO: 2996884 - RNA, 19 nt, Artificial Sequence
  Description of Artificial Sequence: Synthetic oligonucleotide
aagcugaagacuagaccaa

SEQ ID NO: 2996885 - RNA, 19 nt, Artificial Sequence
  Description of Artificial Sequence: Synthetic oligonucleotide
ucccaucauucuaaagcua

SEQ ID NO: 2996886 - RNA, 19 nt, Artificial Sequence
  Description of Artificial Sequence: Synthetic oligonucleotide
gucuagggagauccugccc

SEQ ID NO: 2996887 - RNA, 19 nt, Artificial Sequence
  Description of Artificial Sequence: Synthetic oligonucleotide
ggagauccugcccuuuacc

SEQ ID NO: 2996888 - RNA, 19 nt, Artificial Sequence
  Description of Artificial Sequence: Synthetic oligonucleotide
ugcccuuuaccuccaggua

SEQ ID NO: 2996889 - RNA, 19 nt, Artificial Sequence
  Description of Artificial Sequence: Synthetic oligonucleotide
ucucaagcuuccaccucaa

SEQ ID NO: 2996890 - RNA, 19 nt, Artificial Sequence
  Description of Artificial Sequence: Synthetic oligonucleotide
ugcugccaugacaucgacu

SEQ ID NO: 2996891 - RNA, 19 nt, Artificial Sequence
  Description of Artificial Sequence: Synthetic oligonucleotide
aacuggucuuuaagcaagu

SEQ ID NO: 2996892 - RNA, 19 nt, Artificial Sequence
  Description of Artificial Sequence: Synthetic oligonucleotide
uugcucucaccauggaauu

SEQ ID NO: 2996893 - RNA, 19 nt, Artificial Sequence
  Description of Artificial Sequence: Synthetic oligonucleotide
gacugaggacacugacccc

SEQ ID NO: 2996894 - RNA, 19 nt, Artificial Sequence
  Description of Artificial Sequence: Synthetic oligonucleotide
agcuaagcugaagacuaga

SEQ ID NO: 2996895 - RNA, 19 nt, Artificial Sequence
  Description of Artificial Sequence: Synthetic oligonucleotide
aaucacugaagggcagcaa

SEQ ID NO: 2996896 - RNA, 19 nt, Artificial Sequence
  Description of Artificial Sequence: Synthetic oligonucleotide
ccugagguucucaagcuuc

SEQ ID NO: 2996897 - RNA, 19 nt, Artificial Sequence
  Description of Artificial Sequence: Synthetic oligonucleotide
agggcccucauuuccccug

SEQ ID NO: 2996898 - RNA, 19 nt, Artificial Sequence
  Description of Artificial Sequence: Synthetic oligonucleotide
cuggucuuuaagcaagucu

SEQ ID NO: 2996899 - RNA, 19 nt, Artificial Sequence
  Description of Artificial Sequence: Synthetic oligonucleotide
cagcaauaaucaaauucaa

SEQ ID NO: 2996900 - RNA, 19 nt, Artificial Sequence
  Description of Artificial Sequence: Synthetic oligonucleotide
gcccuuuaccuccagguac

SEQ ID NO: 2996901 - RNA, 19 nt, Artificial Sequence
  Description of Artificial Sequence: Synthetic oligonucleotide
auggaauucucagggcccu

SEQ ID NO: 2996902 - RNA, 19 nt, Artificial Sequence
  Description of Artificial Sequence: Synthetic oligonucleotide
ggacacugaccccuuuucc

SEQ ID NO: 2996903 - RNA, 19 nt, Artificial Sequence
  Description of Artificial Sequence: Synthetic oligonucleotide
accccuuuuccuccaucug

SEQ ID NO: 2996904 - RNA, 19 nt, Artificial Sequence
  Description of Artificial Sequence: Synthetic oligonucleotide
gaagggcagcaauaaucaa

SEQ ID NO: 2996905 - RNA, 19 nt, Artificial Sequence
  Description of Artificial Sequence: Synthetic oligonucleotide
cccuuuaccuccagguacc

SEQ ID NO: 2996906 - RNA, 19 nt, Artificial Sequence
  Description of Artificial Sequence: Synthetic oligonucleotide
cucaagugcugcugccaug

SEQ ID NO: 2996907 - RNA, 19 nt, Artificial Sequence
  Description of Artificial Sequence: Synthetic oligonucleotide
ccaggaggaaaauugcuga

SEQ ID NO: 2996908 - RNA, 19 nt, Artificial Sequence
  Description of Artificial Sequence: Synthetic oligonucleotide
cuuuaccuccagguacccc

SEQ ID NO: 2996909 - RNA, 19 nt, Artificial Sequence
  Description of Artificial Sequence: Synthetic oligonucleotide
caccucaagugcugcugcc

SEQ ID NO: 2996910 - RNA, 19 nt, Artificial Sequence
  Description of Artificial Sequence: Synthetic oligonucleotide
ugagguucucaagcuucca

SEQ ID NO: 2996911 - RNA, 19 nt, Artificial Sequence
  Description of Artificial Sequence: Synthetic oligonucleotide
ccaucauucuaaagcuaag

SEQ ID NO: 2996912 - RNA, 19 nt, Artificial Sequence
  Description of Artificial Sequence: Synthetic oligonucleotide
gaccccuuuuccuccaucu

SEQ ID NO: 2996913 - RNA, 19 nt, Artificial Sequence
  Description of Artificial Sequence: Synthetic oligonucleotide
gucccugcagcauagcccu

SEQ ID NO: 2996914 - RNA, 19 nt, Artificial Sequence
  Description of Artificial Sequence: Synthetic oligonucleotide
ggaggaaaauugcugaaau

SEQ ID NO: 2996915 - RNA, 19 nt, Artificial Sequence
  Description of Artificial Sequence: Synthetic oligonucleotide
ggaccaggaggaaaauugc

SEQ ID NO: 2996916 - RNA, 19 nt, Artificial Sequence
  Description of Artificial Sequence: Synthetic oligonucleotide
uuccaccucaagugcugcu

SEQ ID NO: 2996917 - RNA, 19 nt, Artificial Sequence
  Description of Artificial Sequence: Synthetic oligonucleotide
guucucaagcuuccaccuc

SEQ ID NO: 2996918 - RNA, 19 nt, Artificial Sequence
  Description of Artificial Sequence: Synthetic oligonucleotide
gcuaagcugaagacuagac

SEQ ID NO: 2996919 - RNA, 19 nt, Artificial Sequence
  Description of Artificial Sequence: Synthetic oligonucleotide
acugaccccuuuuccucca

SEQ ID NO: 2996920 - RNA, 19 nt, Artificial Sequence
  Description of Artificial Sequence: Synthetic oligonucleotide
cuuccaccucaagugcugc

SEQ ID NO: 2996921 - RNA, 19 nt, Artificial Sequence
  Description of Artificial Sequence: Synthetic oligonucleotide
ggaaucacugaagggcagc

SEQ ID NO: 2996922 - RNA, 19 nt, Artificial Sequence
  Description of Artificial Sequence: Synthetic oligonucleotide
guccaagcuauucugggau

SEQ ID NO: 2996923 - RNA, 19 nt, Artificial Sequence
  Description of Artificial Sequence: Synthetic oligonucleotide
cugaagacuagaccaagau

SEQ ID NO: 2996924 - RNA, 19 nt, Artificial Sequence
  Description of Artificial Sequence: Synthetic oligonucleotide
ugcuaacaagagccauaaa

SEQ ID NO: 2996925 - RNA, 19 nt, Artificial Sequence
  Description of Artificial Sequence: Synthetic oligonucleotide
caagagccauaaacugguc

SEQ ID NO: 2996926 - RNA, 19 nt, Artificial Sequence
  Description of Artificial Sequence: Synthetic oligonucleotide
auguucccaucauucuaaa

SEQ ID NO: 2996927 - RNA, 19 nt, Artificial Sequence
  Description of Artificial Sequence: Synthetic oligonucleotide
cucaagcuuccaccucaag

SEQ ID NO: 2996928 - RNA, 19 nt, Artificial Sequence
  Description of Artificial Sequence: Synthetic oligonucleotide
ugaccccuuuuccuccauc

SEQ ID NO: 2996929 - RNA, 19 nt, Artificial Sequence
  Description of Artificial Sequence: Synthetic oligonucleotide
cucucaccauggaauucuc

SEQ ID NO: 2996930 - RNA, 19 nt, Artificial Sequence
  Description of Artificial Sequence: Synthetic oligonucleotide
cccaucauucuaaagcuaa

SEQ ID NO: 2996931 - RNA, 19 nt, Artificial Sequence
  Description of Artificial Sequence: Synthetic oligonucleotide
auucuaaagcuaagcugaa

SEQ ID NO: 2996932 - RNA, 19 nt, Artificial Sequence
  Description of Artificial Sequence: Synthetic oligonucleotide
caggaggaaaauugcugaa

SEQ ID NO: 2996933 - RNA, 19 nt, Artificial Sequence
  Description of Artificial Sequence: Synthetic oligonucleotide
uagcccugcggugucauuu

SEQ ID NO: 2996934 - RNA, 19 nt, Artificial Sequence
  Description of Artificial Sequence: Synthetic oligonucleotide
uuaccuccagguaccccuu

SEQ ID NO: 2996935 - RNA, 19 nt, Artificial Sequence
  Description of Artificial Sequence: Synthetic oligonucleotide
cugcagcauagcccugcgg

SEQ ID NO: 2996936 - RNA, 19 nt, Artificial Sequence
  Description of Artificial Sequence: Synthetic oligonucleotide
cugcccuuuaccuccaggu

SEQ ID NO: 2996937 - RNA, 19 nt, Artificial Sequence
  Description of Artificial Sequence: Synthetic oligonucleotide
accucaagugcugcugcca

SEQ ID NO: 2996938 - RNA, 19 nt, Artificial Sequence
  Description of Artificial Sequence: Synthetic oligonucleotide
ugcucucaccauggaauuc

SEQ ID NO: 2996939 - RNA, 19 nt, Artificial Sequence
  Description of Artificial Sequence: Synthetic oligonucleotide
gguucucaagcuuccaccu

SEQ ID NO: 2996940 - RNA, 19 nt, Artificial Sequence
  Description of Artificial Sequence: Synthetic oligonucleotide
agcuuccaccucaagugcu

SEQ ID NO: 2996941 - RNA, 19 nt, Artificial Sequence
  Description of Artificial Sequence: Synthetic oligonucleotide
ccaagauagucuagggaga

SEQ ID NO: 2996942 - RNA, 19 nt, Artificial Sequence
  Description of Artificial Sequence: Synthetic oligonucleotide
agggagauccugcccuuua

SEQ ID NO: 2996943 - RNA, 19 nt, Artificial Sequence
  Description of Artificial Sequence: Synthetic oligonucleotide
gaccaggaggaaaauugcu

SEQ ID NO: 2996944 - RNA, 19 nt, Artificial Sequence
  Description of Artificial Sequence: Synthetic oligonucleotide
caucgacugaggacacuga

SEQ ID NO: 2996945 - RNA, 19 nt, Artificial Sequence
  Description of Artificial Sequence: Synthetic oligonucleotide
cacugaagggcagcaauaa

SEQ ID NO: 2996946 - RNA, 19 nt, Artificial Sequence
  Description of Artificial Sequence: Synthetic oligonucleotide
gccaugacaucgacugagg

SEQ ID NO: 2996947 - RNA, 19 nt, Artificial Sequence
  Description of Artificial Sequence: Synthetic oligonucleotide
gcaagucuaaggaaggagu

SEQ ID NO: 2996948 - RNA, 19 nt, Artificial Sequence
  Description of Artificial Sequence: Synthetic oligonucleotide
agccauaaacuggucuuua

SEQ ID NO: 2996949 - RNA, 19 nt, Artificial Sequence
  Description of Artificial Sequence: Synthetic oligonucleotide
ugaggacacugaccccuuu

SEQ ID NO: 2996950 - RNA, 19 nt, Artificial Sequence
  Description of Artificial Sequence: Synthetic oligonucleotide
gggagauccugcccuuuac

SEQ ID NO: 2996951 - RNA, 19 nt, Artificial Sequence
  Description of Artificial Sequence: Synthetic oligonucleotide
ccaccucaagugcugcugc

SEQ ID NO: 2996952 - RNA, 19 nt, Artificial Sequence
  Description of Artificial Sequence: Synthetic oligonucleotide
gauagucuagggagauccu

SEQ ID NO: 2996953 - RNA, 19 nt, Artificial Sequence
  Description of Artificial Sequence: Synthetic oligonucleotide
gcucagagccaggaccagg

SEQ ID NO: 2996954 - RNA, 19 nt, Artificial Sequence
  Description of Artificial Sequence: Synthetic oligonucleotide
ggaauucucagggcccuca

SEQ ID NO: 2996955 - RNA, 19 nt, Artificial Sequence
  Description of Artificial Sequence: Synthetic oligonucleotide
caagugcugcugccaugac

SEQ ID NO: 2996956 - RNA, 19 nt, Artificial Sequence
  Description of Artificial Sequence: Synthetic oligonucleotide
auguugcuucaagucccug

SEQ ID NO: 2996957 - RNA, 19 nt, Artificial Sequence
  Description of Artificial Sequence: Synthetic oligonucleotide
gcugaagacuagaccaaga

SEQ ID NO: 2996958 - RNA, 19 nt, Artificial Sequence
  Description of Artificial Sequence: Synthetic oligonucleotide
cugcugccaugacaucgac

SEQ ID NO: 2996959 - RNA, 19 nt, Artificial Sequence
  Description of Artificial Sequence: Synthetic oligonucleotide
gcuuccaccucaagugcug

SEQ ID NO: 2996960 - RNA, 19 nt, Artificial Sequence
  Description of Artificial Sequence: Synthetic oligonucleotide
caagucccugcagcauagc

SEQ ID NO: 2996961 - RNA, 19 nt, Artificial Sequence
  Description of Artificial Sequence: Synthetic oligonucleotide
gccauaaacuggucuuuaa

SEQ ID NO: 2996962 - RNA, 19 nt, Artificial Sequence
  Description of Artificial Sequence: Synthetic oligonucleotide
caagauagucuagggagau

SEQ ID NO: 2996963 - RNA, 19 nt, Artificial Sequence
  Description of Artificial Sequence: Synthetic oligonucleotide
ggucuuuaagcaagucuaa

SEQ ID NO: 2996964 - RNA, 19 nt, Artificial Sequence
  Description of Artificial Sequence: Synthetic oligonucleotide
ccugcccuuuaccuccagg

SEQ ID NO: 2996965 - RNA, 19 nt, Artificial Sequence
  Description of Artificial Sequence: Synthetic oligonucleotide
agcccugcggugucauuuu

SEQ ID NO: 2996966 - RNA, 19 nt, Artificial Sequence
  Description of Artificial Sequence: Synthetic oligonucleotide
gaauucucagggcccucau

SEQ ID NO: 2996967 - RNA, 19 nt, Artificial Sequence
  Description of Artificial Sequence: Synthetic oligonucleotide
cuuugcuaacaagagccau

SEQ ID NO: 2996968 - RNA, 19 nt, Artificial Sequence
  Description of Artificial Sequence: Synthetic oligonucleotide
cuccaucugaugaaauguu

SEQ ID NO: 2996969 - RNA, 19 nt, Artificial Sequence
  Description of Artificial Sequence: Synthetic oligonucleotide
uggaauucucagggcccuc

SEQ ID NO: 2996970 - RNA, 19 nt, Artificial Sequence
  Description of Artificial Sequence: Synthetic oligonucleotide
ccugcagcauagcccugcg

SEQ ID NO: 2996971 - RNA, 19 nt, Artificial Sequence
  Description of Artificial Sequence: Synthetic oligonucleotide
agccaggaccaggaggaaa

SEQ ID NO: 2996972 - RNA, 19 nt, Artificial Sequence
  Description of Artificial Sequence: Synthetic oligonucleotide
ccuuuuccuccaucugaug

SEQ ID NO: 2996973 - RNA, 19 nt, Artificial Sequence
  Description of Artificial Sequence: Synthetic oligonucleotide
gccaggaccaggaggaaaa

SEQ ID NO: 2996974 - RNA, 19 nt, Artificial Sequence
  Description of Artificial Sequence: Synthetic oligonucleotide
gcucucaccauggaauucu

SEQ ID NO: 2996975 - RNA, 19 nt, Artificial Sequence
  Description of Artificial Sequence: Synthetic oligonucleotide
cccucauuuccccugaggu

SEQ ID NO: 2996976 - RNA, 19 nt, Artificial Sequence
  Description of Artificial Sequence: Synthetic oligonucleotide
ccaugacaucgacugagga

SEQ ID NO: 2996977 - RNA, 19 nt, Artificial Sequence
  Description of Artificial Sequence: Synthetic oligonucleotide
gcugcugccaugacaucga

SEQ ID NO: 2996978 - RNA, 19 nt, Artificial Sequence
  Description of Artificial Sequence: Synthetic oligonucleotide
cugccaugacaucgacuga

SEQ ID NO: 2996979 - RNA, 19 nt, Artificial Sequence
  Description of Artificial Sequence: Synthetic oligonucleotide
uagggagauccugcccuuu

SEQ ID NO: 2996980 - RNA, 19 nt, Artificial Sequence
  Description of Artificial Sequence: Synthetic oligonucleotide
cuauucugggauguugcuu

SEQ ID NO: 2996981 - RNA, 19 nt, Artificial Sequence
  Description of Artificial Sequence: Synthetic oligonucleotide
cggaaucacugaagggcag

SEQ ID NO: 2996982 - RNA, 19 nt, Artificial Sequence
  Description of Artificial Sequence: Synthetic oligonucleotide
ccuccaucugaugaaaugu

SEQ ID NO: 2996983 - RNA, 19 nt, Artificial Sequence
  Description of Artificial Sequence: Synthetic oligonucleotide
ccuuuaccuccagguaccc

SEQ ID NO: 2996984 - RNA, 19 nt, Artificial Sequence
  Description of Artificial Sequence: Synthetic oligonucleotide
cagcauagcccugcggugu

SEQ ID NO: 2996985 - RNA, 19 nt, Artificial Sequence
  Description of Artificial Sequence: Synthetic oligonucleotide
gacaucgacugaggacacu

SEQ ID NO: 2996986 - RNA, 19 nt, Artificial Sequence
  Description of Artificial Sequence: Synthetic oligonucleotide
cuucaagucccugcagcau

SEQ ID NO: 2996987 - RNA, 19 nt, Artificial Sequence
  Description of Artificial Sequence: Synthetic oligonucleotide
cuagggagauccugcccuu

SEQ ID NO: 2996988 - RNA, 19 nt, Artificial Sequence
  Description of Artificial Sequence: Synthetic oligonucleotide
auccugcccuuuaccucca

SEQ ID NO: 2996989 - RNA, 19 nt, Artificial Sequence
  Description of Artificial Sequence: Synthetic oligonucleotide
ccaagcuauucugggaugu

SEQ ID NO: 2996990 - RNA, 19 nt, Artificial Sequence
  Description of Artificial Sequence: Synthetic oligonucleotide
gagccaggaccaggaggaa

SEQ ID NO: 2996991 - RNA, 19 nt, Artificial Sequence
  Description of Artificial Sequence: Synthetic oligonucleotide
cccuuuuccuccaucugau

SEQ ID NO: 2996992 - RNA, 19 nt, Artificial Sequence
  Description of Artificial Sequence: Synthetic oligonucleotide
caagcuauucugggauguu

SEQ ID NO: 2996993 - RNA, 19 nt, Artificial Sequence
  Description of Artificial Sequence: Synthetic oligonucleotide
caggaccaggaggaaaauu

SEQ ID NO: 2996994 - RNA, 19 nt, Artificial Sequence
  Description of Artificial Sequence: Synthetic oligonucleotide
cagggcccucauuuccccu

SEQ ID NO: 2996995 - RNA, 19 nt, Artificial Sequence
  Description of Artificial Sequence: Synthetic oligonucleotide
ccccugagguucucaagcu

SEQ ID NO: 2996996 - RNA, 19 nt, Artificial Sequence
  Description of Artificial Sequence: Synthetic oligonucleotide
ccucaagugcugcugccau

SEQ ID NO: 2996997 - RNA, 19 nt, Artificial Sequence
  Description of Artificial Sequence: Synthetic oligonucleotide
gcauagcccugcgguguca

SEQ ID NO: 2996998 - RNA, 19 nt, Artificial Sequence
  Description of Artificial Sequence: Synthetic oligonucleotide
gggcagcaauaaucaaauu

SEQ ID NO: 2996999 - RNA, 19 nt, Artificial Sequence
  Description of Artificial Sequence: Synthetic oligonucleotide
ggaaggaguccaagcuauu

SEQ ID NO: 2997000 - RNA, 19 nt, Artificial Sequence
  Description of Artificial Sequence: Synthetic oligonucleotide
cugaccccuuuuccuccau

SEQ ID NO: 2997001 - RNA, 19 nt, Artificial Sequence
  Description of Artificial Sequence: Synthetic oligonucleotide
cccugagguucucaagcuu

SEQ ID NO: 2997002 - RNA, 19 nt, Artificial Sequence
  Description of Artificial Sequence: Synthetic oligonucleotide
ccaggaccaggaggaaaau

SEQ ID NO: 2997003 - RNA, 19 nt, Artificial Sequence
  Description of Artificial Sequence: Synthetic oligonucleotide
guuuguaguaguuugaaug

SEQ ID NO: 2997004 - RNA, 19 nt, Artificial Sequence
  Description of Artificial Sequence: Synthetic oligonucleotide
uuuguaguaguuugaaugc

SEQ ID NO: 2997005 - RNA, 19 nt, Artificial Sequence
  Description of Artificial Sequence: Synthetic oligonucleotide
aaugcagucgugcuaagcu

SEQ ID NO: 2997006 - RNA, 19 nt, Artificial Sequence
  Description of Artificial Sequence: Synthetic oligonucleotide
uggaguuucuuccacacgc

SEQ ID NO: 2997007 - RNA, 19 nt, Artificial Sequence
  Description of Artificial Sequence: Synthetic oligonucleotide
uauucuuccacggacaggc

SEQ ID NO: 2997008 - RNA, 19 nt, Artificial Sequence
  Description of Artificial Sequence: Synthetic oligonucleotide
cauacaucuggucacaggc

SEQ ID NO: 2997009 - RNA, 19 nt, Artificial Sequence
  Description of Artificial Sequence: Synthetic oligonucleotide
aguaguuugaaugcagucg

SEQ ID NO: 2997010 - RNA, 19 nt, Artificial Sequence
  Description of Artificial Sequence: Synthetic oligonucleotide
uguaguaguuugaaugcag

SEQ ID NO: 2997011 - RNA, 19 nt, Artificial Sequence
  Description of Artificial Sequence: Synthetic oligonucleotide
aaaggccugugcuacccgc

SEQ ID NO: 2997012 - RNA, 19 nt, Artificial Sequence
  Description of Artificial Sequence: Synthetic oligonucleotide
ucuuccauggugucugugg

SEQ ID NO: 2997013 - RNA, 19 nt, Artificial Sequence
  Description of Artificial Sequence: Synthetic oligonucleotide
acggacaggccacugaagc

SEQ ID NO: 2997014 - RNA, 19 nt, Artificial Sequence
  Description of Artificial Sequence: Synthetic oligonucleotide
uuguguuuguaguaguuug

SEQ ID NO: 2997015 - RNA, 19 nt, Artificial Sequence
  Description of Artificial Sequence: Synthetic oligonucleotide
aguuugaaugcagucgugc

SEQ ID NO: 2997016 - RNA, 19 nt, Artificial Sequence
  Description of Artificial Sequence: Synthetic oligonucleotide
uguauucuuccacggacag

SEQ ID NO: 2997017 - RNA, 19 nt, Artificial Sequence
  Description of Artificial Sequence: Synthetic oligonucleotide
uccuggaacucuuccaugg

SEQ ID NO: 2997018 - RNA, 19 nt, Artificial Sequence
  Description of Artificial Sequence: Synthetic oligonucleotide
cucacagagcuuaaggaag

SEQ ID NO: 2997019 - RNA, 19 nt, Artificial Sequence
  Description of Artificial Sequence: Synthetic oligonucleotide
cuuguauucuuccacggac

SEQ ID NO: 2997020 - RNA, 19 nt, Artificial Sequence
  Description of Artificial Sequence: Synthetic oligonucleotide
cuuucauacaucuggucac

SEQ ID NO: 2997021 - RNA, 19 nt, Artificial Sequence
  Description of Artificial Sequence: Synthetic oligonucleotide
ucuguggacaggaucaccu

SEQ ID NO: 2997022 - RNA, 19 nt, Artificial Sequence
  Description of Artificial Sequence: Synthetic oligonucleotide
uuuggucucguccaccggc

SEQ ID NO: 2997023 - RNA, 19 nt, Artificial Sequence
  Description of Artificial Sequence: Synthetic oligonucleotide
ucgugcuaagcuuucauac

SEQ ID NO: 2997024 - RNA, 19 nt, Artificial Sequence
  Description of Artificial Sequence: Synthetic oligonucleotide
uuauccagcuccuggaacu

SEQ ID NO: 2997025 - RNA, 19 nt, Artificial Sequence
  Description of Artificial Sequence: Synthetic oligonucleotide
aagcuuuaugcuucuccuc

SEQ ID NO: 2997026 - RNA, 19 nt, Artificial Sequence
  Description of Artificial Sequence: Synthetic oligonucleotide
uguguuuguaguaguuuga

SEQ ID NO: 2997027 - RNA, 19 nt, Artificial Sequence
  Description of Artificial Sequence: Synthetic oligonucleotide
ugaagcuggugucucuggg

SEQ ID NO: 2997028 - RNA, 19 nt, Artificial Sequence
  Description of Artificial Sequence: Synthetic oligonucleotide
cuuccacacgcucuuaucc

SEQ ID NO: 2997029 - RNA, 19 nt, Artificial Sequence
  Description of Artificial Sequence: Synthetic oligonucleotide
cagguaagcgcccaagucc

SEQ ID NO: 2997030 - RNA, 19 nt, Artificial Sequence
  Description of Artificial Sequence: Synthetic oligonucleotide
uacaucuggucacaggccu

SEQ ID NO: 2997031 - RNA, 19 nt, Artificial Sequence
  Description of Artificial Sequence: Synthetic oligonucleotide
ucacagagcuuaaggaagc

SEQ ID NO: 2997032 - RNA, 19 nt, Artificial Sequence
  Description of Artificial Sequence: Synthetic oligonucleotide
ucagguucugccaccuggg

SEQ ID NO: 2997033 - RNA, 19 nt, Artificial Sequence
  Description of Artificial Sequence: Synthetic oligonucleotide
cagagcuuaaggaagcgac

SEQ ID NO: 2997034 - RNA, 19 nt, Artificial Sequence
  Description of Artificial Sequence: Synthetic oligonucleotide
agcuuuaugcuucuccucu

SEQ ID NO: 2997035 - RNA, 19 nt, Artificial Sequence
  Description of Artificial Sequence: Synthetic oligonucleotide
gagcuuaaggaagcgacgg

SEQ ID NO: 2997036 - RNA, 19 nt, Artificial Sequence
  Description of Artificial Sequence: Synthetic oligonucleotide
ugugcuacccgcuuccgca

SEQ ID NO: 2997037 - RNA, 19 nt, Artificial Sequence
  Description of Artificial Sequence: Synthetic oligonucleotide
gaagcuggugucucugggg

SEQ ID NO: 2997038 - RNA, 19 nt, Artificial Sequence
  Description of Artificial Sequence: Synthetic oligonucleotide
uuguauucuuccacggaca

SEQ ID NO: 2997039 - RNA, 19 nt, Artificial Sequence
  Description of Artificial Sequence: Synthetic oligonucleotide
cacgcucuuauccagcucc

SEQ ID NO: 2997040 - RNA, 19 nt, Artificial Sequence
  Description of Artificial Sequence: Synthetic oligonucleotide
uccucacagagcuuaagga

SEQ ID NO: 2997041 - RNA, 19 nt, Artificial Sequence
  Description of Artificial Sequence: Synthetic oligonucleotide
aaacuucuccuggaguuuc

SEQ ID NO: 2997042 - RNA, 19 nt, Artificial Sequence
  Description of Artificial Sequence: Synthetic oligonucleotide
uguggacaggaucaccuug

SEQ ID NO: 2997043 - RNA, 19 nt, Artificial Sequence
  Description of Artificial Sequence: Synthetic oligonucleotide
aaaaggccugugcuacccg

SEQ ID NO: 2997044 - RNA, 19 nt, Artificial Sequence
  Description of Artificial Sequence: Synthetic oligonucleotide
uuuaugcuucuccucuggc

SEQ ID NO: 2997045 - RNA, 19 nt, Artificial Sequence
  Description of Artificial Sequence: Synthetic oligonucleotide
cuuuaugcuucuccucugg

SEQ ID NO: 2997046 - RNA, 19 nt, Artificial Sequence
  Description of Artificial Sequence: Synthetic oligonucleotide
gaucaccuuguauucuucc

SEQ ID NO: 2997047 - RNA, 19 nt, Artificial Sequence
  Description of Artificial Sequence: Synthetic oligonucleotide
acaagacccgagcccaagc

SEQ ID NO: 2997048 - RNA, 19 nt, Artificial Sequence
  Description of Artificial Sequence: Synthetic oligonucleotide
cucagguucugccaccugg

SEQ ID NO: 2997049 - RNA, 19 nt, Artificial Sequence
  Description of Artificial Sequence: Synthetic oligonucleotide
accuuguauucuuccacgg

SEQ ID NO: 2997050 - RNA, 19 nt, Artificial Sequence
  Description of Artificial Sequence: Synthetic oligonucleotide
uuugaaugcagucgugcua

SEQ ID NO: 2997051 - RNA, 19 nt, Artificial Sequence
  Description of Artificial Sequence: Synthetic oligonucleotide
agguaagcgcccaaguccc

SEQ ID NO: 2997052 - RNA, 19 nt, Artificial Sequence
  Description of Artificial Sequence: Synthetic oligonucleotide
caccuuguauucuuccacg

SEQ ID NO: 2997053 - RNA, 19 nt, Artificial Sequence
  Description of Artificial Sequence: Synthetic oligonucleotide
cuccucacagagcuuaagg

SEQ ID NO: 2997054 - RNA, 19 nt, Artificial Sequence
  Description of Artificial Sequence: Synthetic oligonucleotide
uugaaugcagucgugcuaa

SEQ ID NO: 2997055 - RNA, 19 nt, Artificial Sequence
  Description of Artificial Sequence: Synthetic oligonucleotide
ucucccucccgaaaaggcc

SEQ ID NO: 2997056 - RNA, 19 nt, Artificial Sequence
  Description of Artificial Sequence: Synthetic oligonucleotide
ucuccucuggccucggugc

SEQ ID NO: 2997057 - RNA, 19 nt, Artificial Sequence
  Description of Artificial Sequence: Synthetic oligonucleotide
ugcaaacuucuccuggagu

SEQ ID NO: 2997058 - RNA, 19 nt, Artificial Sequence
  Description of Artificial Sequence: Synthetic oligonucleotide
agcuuucauacaucugguc

SEQ ID NO: 2997059 - RNA, 19 nt, Artificial Sequence
  Description of Artificial Sequence: Synthetic oligonucleotide
acgugggcgggacaagacc

SEQ ID NO: 2997060 - RNA, 19 nt, Artificial Sequence
  Description of Artificial Sequence: Synthetic oligonucleotide
ucccgaaaaggccugugcu

SEQ ID NO: 2997061 - RNA, 19 nt, Artificial Sequence
  Description of Artificial Sequence: Synthetic oligonucleotide
ucuuccacggacaggccac

SEQ ID NO: 2997062 - RNA, 19 nt, Artificial Sequence
  Description of Artificial Sequence: Synthetic oligonucleotide
gacaggaucaccuuguauu

SEQ ID NO: 2997063 - RNA, 19 nt, Artificial Sequence
  Description of Artificial Sequence: Synthetic oligonucleotide
auacaucuggucacaggcc

SEQ ID NO: 2997064 - RNA, 19 nt, Artificial Sequence
  Description of Artificial Sequence: Synthetic oligonucleotide
guacuuguguuuguaguag

SEQ ID NO: 2997065 - RNA, 19 nt, Artificial Sequence
  Description of Artificial Sequence: Synthetic oligonucleotide
gaaaaggccugugcuaccc

SEQ ID NO: 2997066 - RNA, 19 nt, Artificial Sequence
  Description of Artificial Sequence: Synthetic oligonucleotide
uccacacgcucuuauccag

SEQ ID NO: 2997067 - RNA, 19 nt, Artificial Sequence
  Description of Artificial Sequence: Synthetic oligonucleotide
uucuccucuggccucggug

SEQ ID NO: 2997068 - RNA, 19 nt, Artificial Sequence
  Description of Artificial Sequence: Synthetic oligonucleotide
uguuuguaguaguuugaau

SEQ ID NO: 2997069 - RNA, 19 nt, Artificial Sequence
  Description of Artificial Sequence: Synthetic oligonucleotide
uccauggugucuguggaca

SEQ ID NO: 2997070 - RNA, 19 nt, Artificial Sequence
  Description of Artificial Sequence: Synthetic oligonucleotide
uucucucccucccgaaaag

SEQ ID NO: 2997071 - RNA, 19 nt, Artificial Sequence
  Description of Artificial Sequence: Synthetic oligonucleotide
gcuuucauacaucugguca

SEQ ID NO: 2997072 - RNA, 19 nt, Artificial Sequence
  Description of Artificial Sequence: Synthetic oligonucleotide
agagcuuaaggaagcgacg

SEQ ID NO: 2997073 - RNA, 19 nt, Artificial Sequence
  Description of Artificial Sequence: Synthetic oligonucleotide
gacgguagcggagagcggc

SEQ ID NO: 2997074 - RNA, 19 nt, Artificial Sequence
  Description of Artificial Sequence: Synthetic oligonucleotide
uuccacacgcucuuaucca

SEQ ID NO: 2997075 - RNA, 19 nt, Artificial Sequence
  Description of Artificial Sequence: Synthetic oligonucleotide
ucuuauccagcuccuggaa

SEQ ID NO: 2997076 - RNA, 19 nt, Artificial Sequence
  Description of Artificial Sequence: Synthetic oligonucleotide
cuaagcuuucauacaucug

SEQ ID NO: 2997077 - RNA, 19 nt, Artificial Sequence
  Description of Artificial Sequence: Synthetic oligonucleotide
cuuauccagcuccuggaac

SEQ ID NO: 2997078 - RNA, 19 nt, Artificial Sequence
  Description of Artificial Sequence: Synthetic oligonucleotide
uuucauacaucuggucaca

SEQ ID NO: 2997079 - RNA, 19 nt, Artificial Sequence
  Description of Artificial Sequence: Synthetic oligonucleotide
cucucccucccgaaaaggc

SEQ ID NO: 2997080 - RNA, 19 nt, Artificial Sequence
  Description of Artificial Sequence: Synthetic oligonucleotide
uacuuguguuuguaguagu

SEQ ID NO: 2997081 - RNA, 19 nt, Artificial Sequence
  Description of Artificial Sequence: Synthetic oligonucleotide
gcucuuauccagcuccugg

SEQ ID NO: 2997082 - RNA, 19 nt, Artificial Sequence
  Description of Artificial Sequence: Synthetic oligonucleotide
uuggucucguccaccggcc

SEQ ID NO: 2997083 - RNA, 19 nt, Artificial Sequence
  Description of Artificial Sequence: Synthetic oligonucleotide
agcccaagcuuuaugcuuc

SEQ ID NO: 2997084 - RNA, 19 nt, Artificial Sequence
  Description of Artificial Sequence: Synthetic oligonucleotide
uggguguucucucccuccc

SEQ ID NO: 2997085 - RNA, 19 nt, Artificial Sequence
  Description of Artificial Sequence: Synthetic oligonucleotide
ugcuaagcuuucauacauc

SEQ ID NO: 2997086 - RNA, 19 nt, Artificial Sequence
  Description of Artificial Sequence: Synthetic oligonucleotide
aagcuuucauacaucuggu

SEQ ID NO: 2997087 - RNA, 19 nt, Artificial Sequence
  Description of Artificial Sequence: Synthetic oligonucleotide
ugcagucgugcuaagcuuu

SEQ ID NO: 2997088 - RNA, 19 nt, Artificial Sequence
  Description of Artificial Sequence: Synthetic oligonucleotide
ucucucccucccgaaaagg

SEQ ID NO: 2997089 - RNA, 19 nt, Artificial Sequence
  Description of Artificial Sequence: Synthetic oligonucleotide
agguucugccaccugggug

SEQ ID NO: 2997090 - RNA, 19 nt, Artificial Sequence
  Description of Artificial Sequence: Synthetic oligonucleotide
cuggaacucuuccauggug

SEQ ID NO: 2997091 - RNA, 19 nt, Artificial Sequence
  Description of Artificial Sequence: Synthetic oligonucleotide
uguucucucccucccgaaa

SEQ ID NO: 2997092 - RNA, 19 nt, Artificial Sequence
  Description of Artificial Sequence: Synthetic oligonucleotide
ccaagcuuuaugcuucucc

SEQ ID NO: 2997093 - RNA, 19 nt, Artificial Sequence
  Description of Artificial Sequence: Synthetic oligonucleotide
aguuucuuccacacgcucu

SEQ ID NO: 2997094 - RNA, 19 nt, Artificial Sequence
  Description of Artificial Sequence: Synthetic oligonucleotide
ucuuccacacgcucuuauc

SEQ ID NO: 2997095 - RNA, 19 nt, Artificial Sequence
  Description of Artificial Sequence: Synthetic oligonucleotide
cuggaguuucuuccacacg

SEQ ID NO: 2997096 - RNA, 19 nt, Artificial Sequence
  Description of Artificial Sequence: Synthetic oligonucleotide
gaaugcagucgugcuaagc

SEQ ID NO: 2997097 - RNA, 19 nt, Artificial Sequence
  Description of Artificial Sequence: Synthetic oligonucleotide
ucugccaccuggguguucu

SEQ ID NO: 2997098 - RNA, 19 nt, Artificial Sequence
  Description of Artificial Sequence: Synthetic oligonucleotide
uccuggaguuucuuccaca

SEQ ID NO: 2997099 - RNA, 19 nt, Artificial Sequence
  Description of Artificial Sequence: Synthetic oligonucleotide
gcgacgguagcggagagcg

SEQ ID NO: 2997100 - RNA, 19 nt, Artificial Sequence
  Description of Artificial Sequence: Synthetic oligonucleotide
gugcaaacuucuccuggag

SEQ ID NO: 2997101 - RNA, 19 nt, Artificial Sequence
  Description of Artificial Sequence: Synthetic oligonucleotide
gaguuucuuccacacgcuc

SEQ ID NO: 2997102 - RNA, 19 nt, Artificial Sequence
  Description of Artificial Sequence: Synthetic oligonucleotide
uccacggacaggccacuga

SEQ ID NO: 2997103 - RNA, 19 nt, Artificial Sequence
  Description of Artificial Sequence: Synthetic oligonucleotide
aagacccgagcccaagcuu

SEQ ID NO: 2997104 - RNA, 19 nt, Artificial Sequence
  Description of Artificial Sequence: Synthetic oligonucleotide
cuggguguucucucccucc

SEQ ID NO: 2997105 - RNA, 19 nt, Artificial Sequence
  Description of Artificial Sequence: Synthetic oligonucleotide
aggaucaccuuguauucuu

SEQ ID NO: 2997106 - RNA, 19 nt, Artificial Sequence
  Description of Artificial Sequence: Synthetic oligonucleotide
cucccgaaaaggccugugc

SEQ ID NO: 2997107 - RNA, 19 nt, Artificial Sequence
  Description of Artificial Sequence: Synthetic oligonucleotide
cucuuauccagcuccugga

SEQ ID NO: 2997108 - RNA, 19 nt, Artificial Sequence
  Description of Artificial Sequence: Synthetic oligonucleotide
guauucuuccacggacagg

SEQ ID NO: 2997109 - RNA, 19 nt, Artificial Sequence
  Description of Artificial Sequence: Synthetic oligonucleotide
ggucacaggccucagguuc

SEQ ID NO: 2997110 - RNA, 19 nt, Artificial Sequence
  Description of Artificial Sequence: Synthetic oligonucleotide
agcuuaaggaagcgacggu

SEQ ID NO: 2997111 - RNA, 19 nt, Artificial Sequence
  Description of Artificial Sequence: Synthetic oligonucleotide
ucggugcaaacuucuccug

SEQ ID NO: 2997112 - RNA, 19 nt, Artificial Sequence
  Description of Artificial Sequence: Synthetic oligonucleotide
acugaagcuggugucucug

SEQ ID NO: 2997113 - RNA, 19 nt, Artificial Sequence
  Description of Artificial Sequence: Synthetic oligonucleotide
ugcuacccgcuuccgcagg

SEQ ID NO: 2997114 - RNA, 19 nt, Artificial Sequence
  Description of Artificial Sequence: Synthetic oligonucleotide
agcuggugucucuggggcg

SEQ ID NO: 2997115 - RNA, 19 nt, Artificial Sequence
  Description of Artificial Sequence: Synthetic oligonucleotide
uaagcgcccaagucccggc

SEQ ID NO: 2997116 - RNA, 19 nt, Artificial Sequence
  Description of Artificial Sequence: Synthetic oligonucleotide
agucgugcuaagcuuucau

SEQ ID NO: 2997117 - RNA, 19 nt, Artificial Sequence
  Description of Artificial Sequence: Synthetic oligonucleotide
caagcuuuaugcuucuccu

SEQ ID NO: 2997118 - RNA, 19 nt, Artificial Sequence
  Description of Artificial Sequence: Synthetic oligonucleotide
ucuggggcgaggguacuug

SEQ ID NO: 2997119 - RNA, 19 nt, Artificial Sequence
  Description of Artificial Sequence: Synthetic oligonucleotide
ugaaugcagucgugcuaag

SEQ ID NO: 2997120 - RNA, 19 nt, Artificial Sequence
  Description of Artificial Sequence: Synthetic oligonucleotide
guuuggucucguccaccgg

SEQ ID NO: 2997121 - RNA, 19 nt, Artificial Sequence
  Description of Artificial Sequence: Synthetic oligonucleotide
gaagcgacgguagcggaga

SEQ ID NO: 2997122 - RNA, 19 nt, Artificial Sequence
  Description of Artificial Sequence: Synthetic oligonucleotide
guaagcgcccaagucccgg

SEQ ID NO: 2997123 - RNA, 19 nt, Artificial Sequence
  Description of Artificial Sequence: Synthetic oligonucleotide
guuugaaugcagucgugcu

SEQ ID NO: 2997124 - RNA, 19 nt, Artificial Sequence
  Description of Artificial Sequence: Synthetic oligonucleotide
uacgugggcgggacaagac

SEQ ID NO: 2997125 - RNA, 19 nt, Artificial Sequence
  Description of Artificial Sequence: Synthetic oligonucleotide
augcuucuccucuggccuc

SEQ ID NO: 2997126 - RNA, 19 nt, Artificial Sequence
  Description of Artificial Sequence: Synthetic oligonucleotide
cacagagcuuaaggaagcg

SEQ ID NO: 2997127 - RNA, 19 nt, Artificial Sequence
  Description of Artificial Sequence: Synthetic oligonucleotide
ugcuucuccucuggccucg

SEQ ID NO: 2997128 - RNA, 19 nt, Artificial Sequence
  Description of Artificial Sequence: Synthetic oligonucleotide
uuccauggugucuguggac

SEQ ID NO: 2997129 - RNA, 19 nt, Artificial Sequence
  Description of Artificial Sequence: Synthetic oligonucleotide
cauggugucuguggacagg

SEQ ID NO: 2997130 - RNA, 19 nt, Artificial Sequence
  Description of Artificial Sequence: Synthetic oligonucleotide
ccgagcccaagcuuuaugc

SEQ ID NO: 2997131 - RNA, 19 nt, Artificial Sequence
  Description of Artificial Sequence: Synthetic oligonucleotide
gacaagacccgagcccaag

SEQ ID NO: 2997132 - RNA, 19 nt, Artificial Sequence
  Description of Artificial Sequence: Synthetic oligonucleotide
acacgcucuuauccagcuc

SEQ ID NO: 2997133 - RNA, 19 nt, Artificial Sequence
  Description of Artificial Sequence: Synthetic oligonucleotide
aagcgacgguagcggagag

SEQ ID NO: 2997134 - RNA, 19 nt, Artificial Sequence
  Description of Artificial Sequence: Synthetic oligonucleotide
gguacuuguguuuguagua

SEQ ID NO: 2997135 - RNA, 19 nt, Artificial Sequence
  Description of Artificial Sequence: Synthetic oligonucleotide
auggugucuguggacagga

SEQ ID NO: 2997136 - RNA, 19 nt, Artificial Sequence
  Description of Artificial Sequence: Synthetic oligonucleotide
cuuccauggugucugugga

SEQ ID NO: 2997137 - RNA, 19 nt, Artificial Sequence
  Description of Artificial Sequence: Synthetic oligonucleotide
aagucccggccccguuugg

SEQ ID NO: 2997138 - RNA, 19 nt, Artificial Sequence
  Description of Artificial Sequence: Synthetic oligonucleotide
ggugucuguggacaggauc

SEQ ID NO: 2997139 - RNA, 19 nt, Artificial Sequence
  Description of Artificial Sequence: Synthetic oligonucleotide
acagagcuuaaggaagcga

SEQ ID NO: 2997140 - RNA, 19 nt, Artificial Sequence
  Description of Artificial Sequence: Synthetic oligonucleotide
gcuaagcuuucauacaucu

SEQ ID NO: 2997141 - RNA, 19 nt, Artificial Sequence
  Description of Artificial Sequence: Synthetic oligonucleotide
guucucucccucccgaaaa

SEQ ID NO: 2997142 - RNA, 19 nt, Artificial Sequence
  Description of Artificial Sequence: Synthetic oligonucleotide
ucagguacgugggcgggac

SEQ ID NO: 2997143 - RNA, 19 nt, Artificial Sequence
  Description of Artificial Sequence: Synthetic oligonucleotide
gcuuccgcagguaagcgcc

SEQ ID NO: 2997144 - RNA, 19 nt, Artificial Sequence
  Description of Artificial Sequence: Synthetic oligonucleotide
uggggcgaggguacuugug

SEQ ID NO: 2997145 - RNA, 19 nt, Artificial Sequence
  Description of Artificial Sequence: Synthetic oligonucleotide
ggugcaaacuucuccugga

SEQ ID NO: 2997146 - RNA, 19 nt, Artificial Sequence
  Description of Artificial Sequence: Synthetic oligonucleotide
ggacaggccacugaagcug

SEQ ID NO: 2997147 - RNA, 19 nt, Artificial Sequence
  Description of Artificial Sequence: Synthetic oligonucleotide
gguucugccaccugggugu

SEQ ID NO: 2997148 - RNA, 19 nt, Artificial Sequence
  Description of Artificial Sequence: Synthetic oligonucleotide
ucuggccucggugcaaacu

SEQ ID NO: 2997149 - RNA, 19 nt, Artificial Sequence
  Description of Artificial Sequence: Synthetic oligonucleotide
agcgacgguagcggagagc

SEQ ID NO: 2997150 - RNA, 19 nt, Artificial Sequence
  Description of Artificial Sequence: Synthetic oligonucleotide
cuccuggaacucuuccaug

SEQ ID NO: 2997151 - RNA, 19 nt, Artificial Sequence
  Description of Artificial Sequence: Synthetic oligonucleotide
augcagucgugcuaagcuu

SEQ ID NO: 2997152 - RNA, 19 nt, Artificial Sequence
  Description of Artificial Sequence: Synthetic oligonucleotide
ccuggaguuucuuccacac

SEQ ID NO: 2997153 - RNA, 19 nt, Artificial Sequence
  Description of Artificial Sequence: Synthetic oligonucleotide
cucggugcaaacuucuccu

SEQ ID NO: 2997154 - RNA, 19 nt, Artificial Sequence
  Description of Artificial Sequence: Synthetic oligonucleotide
gugcuaagcuuucauacau

SEQ ID NO: 2997155 - RNA, 19 nt, Artificial Sequence
  Description of Artificial Sequence: Synthetic oligonucleotide
guguuuguaguaguuugaa

SEQ ID NO: 2997156 - RNA, 19 nt, Artificial Sequence
  Description of Artificial Sequence: Synthetic oligonucleotide
uacccgcuuccgcagguaa

SEQ ID NO: 2997157 - RNA, 19 nt, Artificial Sequence
  Description of Artificial Sequence: Synthetic oligonucleotide
cacggacaggccacugaag

SEQ ID NO: 2997158 - RNA, 19 nt, Artificial Sequence
  Description of Artificial Sequence: Synthetic oligonucleotide
cugugcuacccgcuuccgc

SEQ ID NO: 2997159 - RNA, 19 nt, Artificial Sequence
  Description of Artificial Sequence: Synthetic oligonucleotide
ggugucucuggggcgaggg

SEQ ID NO: 2997160 - RNA, 19 nt, Artificial Sequence
  Description of Artificial Sequence: Synthetic oligonucleotide
caagucccggccccguuug

SEQ ID NO: 2997161 - RNA, 19 nt, Artificial Sequence
  Description of Artificial Sequence: Synthetic oligonucleotide
uggacaggaucaccuugua

SEQ ID NO: 2997162 - RNA, 19 nt, Artificial Sequence
  Description of Artificial Sequence: Synthetic oligonucleotide
aggaagcgacgguagcgga

SEQ ID NO: 2997163 - RNA, 19 nt, Artificial Sequence
  Description of Artificial Sequence: Synthetic oligonucleotide
ucccucccgaaaaggccug

SEQ ID NO: 2997164 - RNA, 19 nt, Artificial Sequence
  Description of Artificial Sequence: Synthetic oligonucleotide
ccucggugcaaacuucucc

SEQ ID NO: 2997165 - RNA, 19 nt, Artificial Sequence
  Description of Artificial Sequence: Synthetic oligonucleotide
guaguaguuugaaugcagu

SEQ ID NO: 2997166 - RNA, 19 nt, Artificial Sequence
  Description of Artificial Sequence: Synthetic oligonucleotide
acgguagcggagagcggcc

SEQ ID NO: 2997167 - RNA, 19 nt, Artificial Sequence
  Description of Artificial Sequence: Synthetic oligonucleotide
acuccucacagagcuuaag

SEQ ID NO: 2997168 - RNA, 19 nt, Artificial Sequence
  Description of Artificial Sequence: Synthetic oligonucleotide
gcuuuaugcuucuccucug

SEQ ID NO: 2997169 - RNA, 19 nt, Artificial Sequence
  Description of Artificial Sequence: Synthetic oligonucleotide
acuuguguuuguaguaguu

SEQ ID NO: 2997170 - RNA, 19 nt, Artificial Sequence
  Description of Artificial Sequence: Synthetic oligonucleotide
cuuccgcagguaagcgccc

SEQ ID NO: 2997171 - RNA, 19 nt, Artificial Sequence
  Description of Artificial Sequence: Synthetic oligonucleotide
cguuuggucucguccaccg

SEQ ID NO: 2997172 - RNA, 19 nt, Artificial Sequence
  Description of Artificial Sequence: Synthetic oligonucleotide
gucgugcuaagcuuucaua

SEQ ID NO: 2997173 - RNA, 19 nt, Artificial Sequence
  Description of Artificial Sequence: Synthetic oligonucleotide
caccuggguguucucuccc

SEQ ID NO: 2997174 - RNA, 19 nt, Artificial Sequence
  Description of Artificial Sequence: Synthetic oligonucleotide
gcagguaagcgcccaaguc

SEQ ID NO: 2997175 - RNA, 19 nt, Artificial Sequence
  Description of Artificial Sequence: Synthetic oligonucleotide
ccggccacuccucacagag

SEQ ID NO: 2997176 - RNA, 19 nt, Artificial Sequence
  Description of Artificial Sequence: Synthetic oligonucleotide
accuggguguucucucccu

SEQ ID NO: 2997177 - RNA, 19 nt, Artificial Sequence
  Description of Artificial Sequence: Synthetic oligonucleotide
ggcgggacaagacccgagc

SEQ ID NO: 2997178 - RNA, 19 nt, Artificial Sequence
  Description of Artificial Sequence: Synthetic oligonucleotide
uggucucguccaccggcca

SEQ ID NO: 2997179 - RNA, 19 nt, Artificial Sequence
  Description of Artificial Sequence: Synthetic oligonucleotide
uggccucggugcaaacuuc

SEQ ID NO: 2997180 - RNA, 19 nt, Artificial Sequence
  Description of Artificial Sequence: Synthetic oligonucleotide
uccaccggccacuccucac

SEQ ID NO: 2997181 - RNA, 19 nt, Artificial Sequence
  Description of Artificial Sequence: Synthetic oligonucleotide
guuucuuccacacgcucuu

SEQ ID NO: 2997182 - RNA, 19 nt, Artificial Sequence
  Description of Artificial Sequence: Synthetic oligonucleotide
gucuguggacaggaucacc

SEQ ID NO: 2997183 - RNA, 19 nt, Artificial Sequence
  Description of Artificial Sequence: Synthetic oligonucleotide
cgugggcgggacaagaccc

SEQ ID NO: 2997184 - RNA, 19 nt, Artificial Sequence
  Description of Artificial Sequence: Synthetic oligonucleotide
gguguucucucccucccga

SEQ ID NO: 2997185 - RNA, 19 nt, Artificial Sequence
  Description of Artificial Sequence: Synthetic oligonucleotide
ccgaaaaggccugugcuac

SEQ ID NO: 2997186 - RNA, 19 nt, Artificial Sequence
  Description of Artificial Sequence: Synthetic oligonucleotide
ccucacagagcuuaaggaa

SEQ ID NO: 2997187 - RNA, 19 nt, Artificial Sequence
  Description of Artificial Sequence: Synthetic oligonucleotide
agguacgugggcgggacaa

SEQ ID NO: 2997188 - RNA, 19 nt, Artificial Sequence
  Description of Artificial Sequence: Synthetic oligonucleotide
gcaaacuucuccuggaguu

SEQ ID NO: 2997189 - RNA, 19 nt, Artificial Sequence
  Description of Artificial Sequence: Synthetic oligonucleotide
gagcccaagcuuuaugcuu

SEQ ID NO: 2997190 - RNA, 19 nt, Artificial Sequence
  Description of Artificial Sequence: Synthetic oligonucleotide
gugggcgggacaagacccg

SEQ ID NO: 2997191 - RNA, 19 nt, Artificial Sequence
  Description of Artificial Sequence: Synthetic oligonucleotide
ggguacuuguguuuguagu

SEQ ID NO: 2997192 - RNA, 19 nt, Artificial Sequence
  Description of Artificial Sequence: Synthetic oligonucleotide
gggacaagacccgagccca

SEQ ID NO: 2997193 - RNA, 19 nt, Artificial Sequence
  Description of Artificial Sequence: Synthetic oligonucleotide
ggaagcgacgguagcggag

SEQ ID NO: 2997194 - RNA, 19 nt, Artificial Sequence
  Description of Artificial Sequence: Synthetic oligonucleotide
caggccucagguucugcca

SEQ ID NO: 2997195 - RNA, 19 nt, Artificial Sequence
  Description of Artificial Sequence: Synthetic oligonucleotide
uggucacaggccucagguu

SEQ ID NO: 2997196 - RNA, 19 nt, Artificial Sequence
  Description of Artificial Sequence: Synthetic oligonucleotide
ugccaccuggguguucucu

SEQ ID NO: 2997197 - RNA, 19 nt, Artificial Sequence
  Description of Artificial Sequence: Synthetic oligonucleotide
gucucuggggcgaggguac

SEQ ID NO: 2997198 - RNA, 19 nt, Artificial Sequence
  Description of Artificial Sequence: Synthetic oligonucleotide
ggguguucucucccucccg

SEQ ID NO: 2997199 - RNA, 19 nt, Artificial Sequence
  Description of Artificial Sequence: Synthetic oligonucleotide
agacccgagcccaagcuuu

SEQ ID NO: 2997200 - RNA, 19 nt, Artificial Sequence
  Description of Artificial Sequence: Synthetic oligonucleotide
gaggguacuuguguuugua

SEQ ID NO: 2997201 - RNA, 19 nt, Artificial Sequence
  Description of Artificial Sequence: Synthetic oligonucleotide
caucuggucacaggccuca

SEQ ID NO: 2997202 - RNA, 19 nt, Artificial Sequence
  Description of Artificial Sequence: Synthetic oligonucleotide
uccgcagguaagcgcccaa

SEQ ID NO: 2997203 - RNA, 19 nt, Artificial Sequence
  Description of Artificial Sequence: Synthetic oligonucleotide
gcgggacaagacccgagcc

SEQ ID NO: 2997204 - RNA, 19 nt, Artificial Sequence
  Description of Artificial Sequence: Synthetic oligonucleotide
gccugugcuacccgcuucc

SEQ ID NO: 2997205 - RNA, 19 nt, Artificial Sequence
  Description of Artificial Sequence: Synthetic oligonucleotide
caccggccacuccucacag

SEQ ID NO: 2997206 - RNA, 19 nt, Artificial Sequence
  Description of Artificial Sequence: Synthetic oligonucleotide
gcgaggguacuuguguuug

SEQ ID NO: 2997207 - RNA, 19 nt, Artificial Sequence
  Description of Artificial Sequence: Synthetic oligonucleotide
uggugucuguggacaggau

SEQ ID NO: 2997208 - RNA, 19 nt, Artificial Sequence
  Description of Artificial Sequence: Synthetic oligonucleotide
gcuuaaggaagcgacggua

SEQ ID NO: 2997209 - RNA, 19 nt, Artificial Sequence
  Description of Artificial Sequence: Synthetic oligonucleotide
cucccucccgaaaaggccu

SEQ ID NO: 2997210 - RNA, 19 nt, Artificial Sequence
  Description of Artificial Sequence: Synthetic oligonucleotide
uuccgcagguaagcgccca

SEQ ID NO: 2997211 - RNA, 19 nt, Artificial Sequence
  Description of Artificial Sequence: Synthetic oligonucleotide
uggugucucuggggcgagg

SEQ ID NO: 2997212 - RNA, 19 nt, Artificial Sequence
  Description of Artificial Sequence: Synthetic oligonucleotide
cggugcaaacuucuccugg

SEQ ID NO: 2997213 - RNA, 19 nt, Artificial Sequence
  Description of Artificial Sequence: Synthetic oligonucleotide
ggucagguacgugggcggg

SEQ ID NO: 2997214 - RNA, 19 nt, Artificial Sequence
  Description of Artificial Sequence: Synthetic oligonucleotide
caagacccgagcccaagcu

SEQ ID NO: 2997215 - RNA, 19 nt, Artificial Sequence
  Description of Artificial Sequence: Synthetic oligonucleotide
ugggcgggacaagacccga

SEQ ID NO: 2997216 - RNA, 19 nt, Artificial Sequence
  Description of Artificial Sequence: Synthetic oligonucleotide
cuuguguuuguaguaguuu

SEQ ID NO: 2997217 - RNA, 19 nt, Artificial Sequence
  Description of Artificial Sequence: Synthetic oligonucleotide
ccacacgcucuuauccagc

SEQ ID NO: 2997218 - RNA, 19 nt, Artificial Sequence
  Description of Artificial Sequence: Synthetic oligonucleotide
uuccacggacaggccacug

SEQ ID NO: 2997219 - RNA, 19 nt, Artificial Sequence
  Description of Artificial Sequence: Synthetic oligonucleotide
guggacaggaucaccuugu

SEQ ID NO: 2997220 - RNA, 19 nt, Artificial Sequence
  Description of Artificial Sequence: Synthetic oligonucleotide
cucuuccauggugucugug

SEQ ID NO: 2997221 - RNA, 19 nt, Artificial Sequence
  Description of Artificial Sequence: Synthetic oligonucleotide
ccauggugucuguggacag

SEQ ID NO: 2997222 - RNA, 19 nt, Artificial Sequence
  Description of Artificial Sequence: Synthetic oligonucleotide
cacacgcucuuauccagcu

SEQ ID NO: 2997223 - RNA, 19 nt, Artificial Sequence
  Description of Artificial Sequence: Synthetic oligonucleotide
cgggacaagacccgagccc

SEQ ID NO: 2997224 - RNA, 19 nt, Artificial Sequence
  Description of Artificial Sequence: Synthetic oligonucleotide
gguaagcgcccaagucccg

SEQ ID NO: 2997225 - RNA, 19 nt, Artificial Sequence
  Description of Artificial Sequence: Synthetic oligonucleotide
cgugcuaagcuuucauaca

SEQ ID NO: 2997226 - RNA, 19 nt, Artificial Sequence
  Description of Artificial Sequence: Synthetic oligonucleotide
cccgcuuccgcagguaagc

SEQ ID NO: 2997227 - RNA, 19 nt, Artificial Sequence
  Description of Artificial Sequence: Synthetic oligonucleotide
acccgcuuccgcagguaag

SEQ ID NO: 2997228 - RNA, 19 nt, Artificial Sequence
  Description of Artificial Sequence: Synthetic oligonucleotide
agucccggccccguuuggu

SEQ ID NO: 2997229 - RNA, 19 nt, Artificial Sequence
  Description of Artificial Sequence: Synthetic oligonucleotide
ggucucguccaccggccac

SEQ ID NO: 2997230 - RNA, 19 nt, Artificial Sequence
  Description of Artificial Sequence: Synthetic oligonucleotide
gucccggccccguuugguc

SEQ ID NO: 2997231 - RNA, 19 nt, Artificial Sequence
  Description of Artificial Sequence: Synthetic oligonucleotide
aggccugugcuacccgcuu

SEQ ID NO: 2997232 - RNA, 19 nt, Artificial Sequence
  Description of Artificial Sequence: Synthetic oligonucleotide
guguucucucccucccgaa

SEQ ID NO: 2997233 - RNA, 19 nt, Artificial Sequence
  Description of Artificial Sequence: Synthetic oligonucleotide
ggaucaccuuguauucuuc

SEQ ID NO: 2997234 - RNA, 19 nt, Artificial Sequence
  Description of Artificial Sequence: Synthetic oligonucleotide
gguacgugggcgggacaag

SEQ ID NO: 2997235 - RNA, 19 nt, Artificial Sequence
  Description of Artificial Sequence: Synthetic oligonucleotide
ucucuggggcgaggguacu

SEQ ID NO: 2997236 - RNA, 19 nt, Artificial Sequence
  Description of Artificial Sequence: Synthetic oligonucleotide
accggccacuccucacaga

SEQ ID NO: 2997237 - RNA, 19 nt, Artificial Sequence
  Description of Artificial Sequence: Synthetic oligonucleotide
gccaccuggguguucucuc

SEQ ID NO: 2997238 - RNA, 19 nt, Artificial Sequence
  Description of Artificial Sequence: Synthetic oligonucleotide
ggccucagguucugccacc

SEQ ID NO: 2997239 - RNA, 19 nt, Artificial Sequence
  Description of Artificial Sequence: Synthetic oligonucleotide
uccucuggccucggugcaa

SEQ ID NO: 2997240 - RNA, 19 nt, Artificial Sequence
  Description of Artificial Sequence: Synthetic oligonucleotide
acgcucuuauccagcuccu

SEQ ID NO: 2997241 - RNA, 19 nt, Artificial Sequence
  Description of Artificial Sequence: Synthetic oligonucleotide
cuggccucggugcaaacuu

SEQ ID NO: 2997242 - RNA, 19 nt, Artificial Sequence
  Description of Artificial Sequence: Synthetic oligonucleotide
gcuggugucucuggggcga

SEQ ID NO: 2997243 - RNA, 19 nt, Artificial Sequence
  Description of Artificial Sequence: Synthetic oligonucleotide
ggggcgaggguacuugugu

SEQ ID NO: 2997244 - RNA, 19 nt, Artificial Sequence
  Description of Artificial Sequence: Synthetic oligonucleotide
cucuggccucggugcaaac

SEQ ID NO: 2997245 - RNA, 19 nt, Artificial Sequence
  Description of Artificial Sequence: Synthetic oligonucleotide
gcuccuggaacucuuccau

SEQ ID NO: 2997246 - RNA, 19 nt, Artificial Sequence
  Description of Artificial Sequence: Synthetic oligonucleotide
cuggugucucuggggcgag

SEQ ID NO: 2997247 - RNA, 19 nt, Artificial Sequence
  Description of Artificial Sequence: Synthetic oligonucleotide
ccccguuuggucucgucca

SEQ ID NO: 2997248 - RNA, 19 nt, Artificial Sequence
  Description of Artificial Sequence: Synthetic oligonucleotide
gucagguacgugggcggga

SEQ ID NO: 2997249 - RNA, 19 nt, Artificial Sequence
  Description of Artificial Sequence: Synthetic oligonucleotide
cgcuuccgcagguaagcgc

SEQ ID NO: 2997250 - RNA, 19 nt, Artificial Sequence
  Description of Artificial Sequence: Synthetic oligonucleotide
cacuccucacagagcuuaa

SEQ ID NO: 2997251 - RNA, 19 nt, Artificial Sequence
  Description of Artificial Sequence: Synthetic oligonucleotide
guccaccggccacuccuca

SEQ ID NO: 2997252 - RNA, 19 nt, Artificial Sequence
  Description of Artificial Sequence: Synthetic oligonucleotide
ccuggguguucucucccuc

SEQ ID NO: 2997253 - RNA, 19 nt, Artificial Sequence
  Description of Artificial Sequence: Synthetic oligonucleotide
cacugaagcuggugucucu

SEQ ID NO: 2997254 - RNA, 19 nt, Artificial Sequence
  Description of Artificial Sequence: Synthetic oligonucleotide
cccgagcccaagcuuuaug

SEQ ID NO: 2997255 - RNA, 19 nt, Artificial Sequence
  Description of Artificial Sequence: Synthetic oligonucleotide
caaacuucuccuggaguuu

SEQ ID NO: 2997256 - RNA, 19 nt, Artificial Sequence
  Description of Artificial Sequence: Synthetic oligonucleotide
ggaguuucuuccacacgcu

SEQ ID NO: 2997257 - RNA, 19 nt, Artificial Sequence
  Description of Artificial Sequence: Synthetic oligonucleotide
cccgaaaaggccugugcua

SEQ ID NO: 2997258 - RNA, 19 nt, Artificial Sequence
  Description of Artificial Sequence: Synthetic oligonucleotide
cagucgugcuaagcuuuca

SEQ ID NO: 2997259 - RNA, 19 nt, Artificial Sequence
  Description of Artificial Sequence: Synthetic oligonucleotide
caggaucaccuuguauucu

SEQ ID NO: 2997260 - RNA, 19 nt, Artificial Sequence
  Description of Artificial Sequence: Synthetic oligonucleotide
ggacaggaucaccuuguau

SEQ ID NO: 2997261 - RNA, 19 nt, Artificial Sequence
  Description of Artificial Sequence: Synthetic oligonucleotide
ggccugugcuacccgcuuc

SEQ ID NO: 2997262 - RNA, 19 nt, Artificial Sequence
  Description of Artificial Sequence: Synthetic oligonucleotide
gcagucgugcuaagcuuuc

SEQ ID NO: 2997263 - RNA, 19 nt, Artificial Sequence
  Description of Artificial Sequence: Synthetic oligonucleotide
cccguuuggucucguccac

SEQ ID NO: 2997264 - RNA, 19 nt, Artificial Sequence
  Description of Artificial Sequence: Synthetic oligonucleotide
ccacggacaggccacugaa

SEQ ID NO: 2997265 - RNA, 19 nt, Artificial Sequence
  Description of Artificial Sequence: Synthetic oligonucleotide
gacccgagcccaagcuuua

SEQ ID NO: 2997266 - RNA, 19 nt, Artificial Sequence
  Description of Artificial Sequence: Synthetic oligonucleotide
ccugugcuacccgcuuccg

SEQ ID NO: 2997267 - RNA, 19 nt, Artificial Sequence
  Description of Artificial Sequence: Synthetic oligonucleotide
ccguuuggucucguccacc

SEQ ID NO: 2997268 - RNA, 19 nt, Artificial Sequence
  Description of Artificial Sequence: Synthetic oligonucleotide
ccacugaagcuggugucuc

SEQ ID NO: 2997269 - RNA, 19 nt, Artificial Sequence
  Description of Artificial Sequence: Synthetic oligonucleotide
cuguggacaggaucaccuu

SEQ ID NO: 2997270 - RNA, 19 nt, Artificial Sequence
  Description of Artificial Sequence: Synthetic oligonucleotide
uucugccaccuggguguuc

SEQ ID NO: 2997271 - RNA, 19 nt, Artificial Sequence
  Description of Artificial Sequence: Synthetic oligonucleotide
ccgcuuccgcagguaagcg

SEQ ID NO: 2997272 - RNA, 19 nt, Artificial Sequence
  Description of Artificial Sequence: Synthetic oligonucleotide
gggcgggacaagacccgag

SEQ ID NO: 2997273 - RNA, 19 nt, Artificial Sequence
  Description of Artificial Sequence: Synthetic oligonucleotide
gccacugaagcuggugucu

SEQ ID NO: 2997274 - RNA, 19 nt, Artificial Sequence
  Description of Artificial Sequence: Synthetic oligonucleotide
cagguucugccaccugggu

SEQ ID NO: 2997275 - RNA, 19 nt, Artificial Sequence
  Description of Artificial Sequence: Synthetic oligonucleotide
cugccaccuggguguucuc

SEQ ID NO: 2997276 - RNA, 19 nt, Artificial Sequence
  Description of Artificial Sequence: Synthetic oligonucleotide
gugucucuggggcgagggu

SEQ ID NO: 2997277 - RNA, 19 nt, Artificial Sequence
  Description of Artificial Sequence: Synthetic oligonucleotide
ccaccggccacuccucaca

SEQ ID NO: 2997278 - RNA, 19 nt, Artificial Sequence
  Description of Artificial Sequence: Synthetic oligonucleotide
acccgagcccaagcuuuau

SEQ ID NO: 2997279 - RNA, 19 nt, Artificial Sequence
  Description of Artificial Sequence: Synthetic oligonucleotide
cagguacgugggcgggaca

SEQ ID NO: 2997280 - RNA, 19 nt, Artificial Sequence
  Description of Artificial Sequence: Synthetic oligonucleotide
ggcgaggguacuuguguuu

SEQ ID NO: 2997281 - RNA, 19 nt, Artificial Sequence
  Description of Artificial Sequence: Synthetic oligonucleotide
ccgcagguaagcgcccaag

SEQ ID NO: 2997282 - RNA, 19 nt, Artificial Sequence
  Description of Artificial Sequence: Synthetic oligonucleotide
cuggggcgaggguacuugu

SEQ ID NO: 2997283 - RNA, 19 nt, Artificial Sequence
  Description of Artificial Sequence: Synthetic oligonucleotide
ccucccgaaaaggccugug

SEQ ID NO: 2997284 - RNA, 19 nt, Artificial Sequence
  Description of Artificial Sequence: Synthetic oligonucleotide
ccucagguucugccaccug

SEQ ID NO: 2997285 - RNA, 19 nt, Artificial Sequence
  Description of Artificial Sequence: Synthetic oligonucleotide
cgacgguagcggagagcgg

SEQ ID NO: 2997286 - RNA, 19 nt, Artificial Sequence
  Description of Artificial Sequence: Synthetic oligonucleotide
ggccucggugcaaacuucu

SEQ ID NO: 2997287 - RNA, 19 nt, Artificial Sequence
  Description of Artificial Sequence: Synthetic oligonucleotide
gccucggugcaaacuucuc

SEQ ID NO: 2997288 - RNA, 19 nt, Artificial Sequence
  Description of Artificial Sequence: Synthetic oligonucleotide
ccuggaacucuuccauggu

SEQ ID NO: 2997289 - RNA, 19 nt, Artificial Sequence
  Description of Artificial Sequence: Synthetic oligonucleotide
cuuccacggacaggccacu

SEQ ID NO: 2997290 - RNA, 19 nt, Artificial Sequence
  Description of Artificial Sequence: Synthetic oligonucleotide
cuacccgcuuccgcaggua

SEQ ID NO: 2997291 - RNA, 19 nt, Artificial Sequence
  Description of Artificial Sequence: Synthetic oligonucleotide
ggccccguuuggucucguc

SEQ ID NO: 2997292 - RNA, 19 nt, Artificial Sequence
  Description of Artificial Sequence: Synthetic oligonucleotide
gggcgaggguacuuguguu

SEQ ID NO: 2997293 - RNA, 19 nt, Artificial Sequence
  Description of Artificial Sequence: Synthetic oligonucleotide
cgagcccaagcuuuaugcu

SEQ ID NO: 2997294 - RNA, 19 nt, Artificial Sequence
  Description of Artificial Sequence: Synthetic oligonucleotide
ggacaagacccgagcccaa

SEQ ID NO: 2997295 - RNA, 19 nt, Artificial Sequence
  Description of Artificial Sequence: Synthetic oligonucleotide
gcccaagcuuuaugcuucu

SEQ ID NO: 2997296 - RNA, 19 nt, Artificial Sequence
  Description of Artificial Sequence: Synthetic oligonucleotide
cccggccccguuuggucuc

SEQ ID NO: 2997297 - RNA, 19 nt, Artificial Sequence
  Description of Artificial Sequence: Synthetic oligonucleotide
cccaagcuuuaugcuucuc

SEQ ID NO: 2997298 - RNA, 19 nt, Artificial Sequence
  Description of Artificial Sequence: Synthetic oligonucleotide
cguccaccggccacuccuc

SEQ ID NO: 2997299 - RNA, 19 nt, Artificial Sequence
  Description of Artificial Sequence: Synthetic oligonucleotide
cggacaggccacugaagcu

SEQ ID NO: 2997300 - RNA, 19 nt, Artificial Sequence
  Description of Artificial Sequence: Synthetic oligonucleotide
ccggccccguuuggucucg

SEQ ID NO: 2997301 - RNA, 19 nt, Artificial Sequence
  Description of Artificial Sequence: Synthetic oligonucleotide
cgcagguaagcgcccaagu

SEQ ID NO: 2997302 - RNA, 19 nt, Artificial Sequence
  Description of Artificial Sequence: Synthetic oligonucleotide
ccucuggccucggugcaaa

SEQ ID NO: 2997303 - RNA, 19 nt, Artificial Sequence
  Description of Artificial Sequence: Synthetic oligonucleotide
guucugccaccuggguguu

SEQ ID NO: 2997304 - RNA, 19 nt, Artificial Sequence
  Description of Artificial Sequence: Synthetic oligonucleotide
ccaagucccggccccguuu

SEQ ID NO: 2997305 - RNA, 19 nt, Artificial Sequence
  Description of Artificial Sequence: Synthetic oligonucleotide
cgaggguacuuguguuugu

SEQ ID NO: 2997306 - RNA, 19 nt, Artificial Sequence
  Description of Artificial Sequence: Synthetic oligonucleotide
cucuggggcgaggguacuu

SEQ ID NO: 2997307 - RNA, 19 nt, Artificial Sequence
  Description of Artificial Sequence: Synthetic oligonucleotide
cgguagcggagagcggcca

SEQ ID NO: 2997308 - RNA, 19 nt, Artificial Sequence
  Description of Artificial Sequence: Synthetic oligonucleotide
gcccaagucccggccccgu

SEQ ID NO: 2997309 - RNA, 19 nt, Artificial Sequence
  Description of Artificial Sequence: Synthetic oligonucleotide
cccaagucccggccccguu

SEQ ID NO: 2997310 - RNA, 19 nt, Artificial Sequence
  Description of Artificial Sequence: Synthetic oligonucleotide
cccucccgaaaaggccugu

SEQ ID NO: 2997311 - RNA, 19 nt, Artificial Sequence
  Description of Artificial Sequence: Synthetic oligonucleotide
cggccccguuuggucucgu

SEQ ID NO: 2997312 - RNA, 19 nt, Artificial Sequence
  Description of Artificial Sequence: Synthetic oligonucleotide
uuugaaaucugccugauuu

SEQ ID NO: 2997313 - RNA, 19 nt, Artificial Sequence
  Description of Artificial Sequence: Synthetic oligonucleotide
aguaaaaccucgccagggc

SEQ ID NO: 2997314 - RNA, 19 nt, Artificial Sequence
  Description of Artificial Sequence: Synthetic oligonucleotide
uucgcgauggucuucuccg

SEQ ID NO: 2997315 - RNA, 19 nt, Artificial Sequence
  Description of Artificial Sequence: Synthetic oligonucleotide
ugguacaagaagcugaguc

SEQ ID NO: 2997316 - RNA, 19 nt, Artificial Sequence
  Description of Artificial Sequence: Synthetic oligonucleotide
gaugcuuggggucauugag

SEQ ID NO: 2997317 - RNA, 19 nt, Artificial Sequence
  Description of Artificial Sequence: Synthetic oligonucleotide
ugccugauuuuccagcugg

SEQ ID NO: 2997318 - RNA, 19 nt, Artificial Sequence
  Description of Artificial Sequence: Synthetic oligonucleotide
aaaucugccugauuuucca

SEQ ID NO: 2997319 - RNA, 19 nt, Artificial Sequence
  Description of Artificial Sequence: Synthetic oligonucleotide
ugaugguuugaaaucugcc

SEQ ID NO: 2997320 - RNA, 19 nt, Artificial Sequence
  Description of Artificial Sequence: Synthetic oligonucleotide
aucugccugauuuuccagc

SEQ ID NO: 2997321 - RNA, 19 nt, Artificial Sequence
  Description of Artificial Sequence: Synthetic oligonucleotide
uggcaugucaggcaggucu

SEQ ID NO: 2997322 - RNA, 19 nt, Artificial Sequence
  Description of Artificial Sequence: Synthetic oligonucleotide
agcgaagacccuuuuggcg

SEQ ID NO: 2997323 - RNA, 19 nt, Artificial Sequence
  Description of Artificial Sequence: Synthetic oligonucleotide
aggagagaugagcagccgc

SEQ ID NO: 2997324 - RNA, 19 nt, Artificial Sequence
  Description of Artificial Sequence: Synthetic oligonucleotide
aagaagcugagucucugga

SEQ ID NO: 2997325 - RNA, 19 nt, Artificial Sequence
  Description of Artificial Sequence: Synthetic oligonucleotide
ugaggagagaugagcagcc

SEQ ID NO: 2997326 - RNA, 19 nt, Artificial Sequence
  Description of Artificial Sequence: Synthetic oligonucleotide
cuauguuuggcagagguuc

SEQ ID NO: 2997327 - RNA, 19 nt, Artificial Sequence
  Description of Artificial Sequence: Synthetic oligonucleotide
cagagcguccucuucaccg

SEQ ID NO: 2997328 - RNA, 19 nt, Artificial Sequence
  Description of Artificial Sequence: Synthetic oligonucleotide
gucauugaggaaccgcugg

SEQ ID NO: 2997329 - RNA, 19 nt, Artificial Sequence
  Description of Artificial Sequence: Synthetic oligonucleotide
ugugcagccugguacaaga

SEQ ID NO: 2997330 - RNA, 19 nt, Artificial Sequence
  Description of Artificial Sequence: Synthetic oligonucleotide
agagcagaugcuugggguc

SEQ ID NO: 2997331 - RNA, 19 nt, Artificial Sequence
  Description of Artificial Sequence: Synthetic oligonucleotide
cuuggggucauugaggaac

SEQ ID NO: 2997332 - RNA, 19 nt, Artificial Sequence
  Description of Artificial Sequence: Synthetic oligonucleotide
ugcgacaggacgcaaugug

SEQ ID NO: 2997333 - RNA, 19 nt, Artificial Sequence
  Description of Artificial Sequence: Synthetic oligonucleotide
aggucggucaccccagagc

SEQ ID NO: 2997334 - RNA, 19 nt, Artificial Sequence
  Description of Artificial Sequence: Synthetic oligonucleotide
ucugcgacaggacgcaaug

SEQ ID NO: 2997335 - RNA, 19 nt, Artificial Sequence
  Description of Artificial Sequence: Synthetic oligonucleotide
aaucugccugauuuuccag

SEQ ID NO: 2997336 - RNA, 19 nt, Artificial Sequence
  Description of Artificial Sequence: Synthetic oligonucleotide
ucauugaggaaccgcuggc

SEQ ID NO: 2997337 - RNA, 19 nt, Artificial Sequence
  Description of Artificial Sequence: Synthetic oligonucleotide
ggcaguaaaaccucgccag

SEQ ID NO: 2997338 - RNA, 19 nt, Artificial Sequence
  Description of Artificial Sequence: Synthetic oligonucleotide
uuuggcagagguucugaug

SEQ ID NO: 2997339 - RNA, 19 nt, Artificial Sequence
  Description of Artificial Sequence: Synthetic oligonucleotide
auggucuucuccguguggc

SEQ ID NO: 2997340 - RNA, 19 nt, Artificial Sequence
  Description of Artificial Sequence: Synthetic oligonucleotide
uaaaaccucgccagggccu

SEQ ID NO: 2997341 - RNA, 19 nt, Artificial Sequence
  Description of Artificial Sequence: Synthetic oligonucleotide
ucugaugguuugaaaucug

SEQ ID NO: 2997342 - RNA, 19 nt, Artificial Sequence
  Description of Artificial Sequence: Synthetic oligonucleotide
cugaugguuugaaaucugc

SEQ ID NO: 2997343 - RNA, 19 nt, Artificial Sequence
  Description of Artificial Sequence: Synthetic oligonucleotide
cuuuuggcgucucuggcgc

SEQ ID NO: 2997344 - RNA, 19 nt, Artificial Sequence
  Description of Artificial Sequence: Synthetic oligonucleotide
uggcaguaaaaccucgcca

SEQ ID NO: 2997345 - RNA, 19 nt, Artificial Sequence
  Description of Artificial Sequence: Synthetic oligonucleotide
ugauuuuccagcugggcuu

SEQ ID NO: 2997346 - RNA, 19 nt, Artificial Sequence
  Description of Artificial Sequence: Synthetic oligonucleotide
uucugaugguuugaaaucu

SEQ ID NO: 2997347 - RNA, 19 nt, Artificial Sequence
  Description of Artificial Sequence: Synthetic oligonucleotide
uguggcaguaaaaccucgc

SEQ ID NO: 2997348 - RNA, 19 nt, Artificial Sequence
  Description of Artificial Sequence: Synthetic oligonucleotide
uuuccagcugggcuucagg

SEQ ID NO: 2997349 - RNA, 19 nt, Artificial Sequence
  Description of Artificial Sequence: Synthetic oligonucleotide
guaaaaccucgccagggcc

SEQ ID NO: 2997350 - RNA, 19 nt, Artificial Sequence
  Description of Artificial Sequence: Synthetic oligonucleotide
guucugaugguuugaaauc

SEQ ID NO: 2997351 - RNA, 19 nt, Artificial Sequence
  Description of Artificial Sequence: Synthetic oligonucleotide
ugguuugaaaucugccuga

SEQ ID NO: 2997352 - RNA, 19 nt, Artificial Sequence
  Description of Artificial Sequence: Synthetic oligonucleotide
uccguguggcaguaaaacc

SEQ ID NO: 2997353 - RNA, 19 nt, Artificial Sequence
  Description of Artificial Sequence: Synthetic oligonucleotide
acaggacgcaaugugcagc

SEQ ID NO: 2997354 - RNA, 19 nt, Artificial Sequence
  Description of Artificial Sequence: Synthetic oligonucleotide
agagaugagcagccgcgac

SEQ ID NO: 2997355 - RNA, 19 nt, Artificial Sequence
  Description of Artificial Sequence: Synthetic oligonucleotide
uauguuuggcagagguucu

SEQ ID NO: 2997356 - RNA, 19 nt, Artificial Sequence
  Description of Artificial Sequence: Synthetic oligonucleotide
ucugccugauuuuccagcu

SEQ ID NO: 2997357 - RNA, 19 nt, Artificial Sequence
  Description of Artificial Sequence: Synthetic oligonucleotide
ugucaggcaggucugcacu

SEQ ID NO: 2997358 - RNA, 19 nt, Artificial Sequence
  Description of Artificial Sequence: Synthetic oligonucleotide
gaaaucugccugauuuucc

SEQ ID NO: 2997359 - RNA, 19 nt, Artificial Sequence
  Description of Artificial Sequence: Synthetic oligonucleotide
ugaaaucugccugauuuuc

SEQ ID NO: 2997360 - RNA, 19 nt, Artificial Sequence
  Description of Artificial Sequence: Synthetic oligonucleotide
ugguucuccggguucugcg

SEQ ID NO: 2997361 - RNA, 19 nt, Artificial Sequence
  Description of Artificial Sequence: Synthetic oligonucleotide
ugggcuauguuuggcagag

SEQ ID NO: 2997362 - RNA, 19 nt, Artificial Sequence
  Description of Artificial Sequence: Synthetic oligonucleotide
uugaggaaccgcuggcugc

SEQ ID NO: 2997363 - RNA, 19 nt, Artificial Sequence
  Description of Artificial Sequence: Synthetic oligonucleotide
caagaagcugagucucugg

SEQ ID NO: 2997364 - RNA, 19 nt, Artificial Sequence
  Description of Artificial Sequence: Synthetic oligonucleotide
ugaggaaccgcuggcugcg

SEQ ID NO: 2997365 - RNA, 19 nt, Artificial Sequence
  Description of Artificial Sequence: Synthetic oligonucleotide
ucaccgagggguccugccg

SEQ ID NO: 2997366 - RNA, 19 nt, Artificial Sequence
  Description of Artificial Sequence: Synthetic oligonucleotide
gauggucuucuccgugugg

SEQ ID NO: 2997367 - RNA, 19 nt, Artificial Sequence
  Description of Artificial Sequence: Synthetic oligonucleotide
acccuuuuggcgucucugg

SEQ ID NO: 2997368 - RNA, 19 nt, Artificial Sequence
  Description of Artificial Sequence: Synthetic oligonucleotide
aggucugcacuguccagcg

SEQ ID NO: 2997369 - RNA, 19 nt, Artificial Sequence
  Description of Artificial Sequence: Synthetic oligonucleotide
uuggggucauugaggaacc

SEQ ID NO: 2997370 - RNA, 19 nt, Artificial Sequence
  Description of Artificial Sequence: Synthetic oligonucleotide
agcugagucucuggaaggc

SEQ ID NO: 2997371 - RNA, 19 nt, Artificial Sequence
  Description of Artificial Sequence: Synthetic oligonucleotide
gagcagccgcgacagagcg

SEQ ID NO: 2997372 - RNA, 19 nt, Artificial Sequence
  Description of Artificial Sequence: Synthetic oligonucleotide
agaugagcagccgcgacag

SEQ ID NO: 2997373 - RNA, 19 nt, Artificial Sequence
  Description of Artificial Sequence: Synthetic oligonucleotide
uucaggucggucaccccag

SEQ ID NO: 2997374 - RNA, 19 nt, Artificial Sequence
  Description of Artificial Sequence: Synthetic oligonucleotide
ccagcgaagacccuuuugg

SEQ ID NO: 2997375 - RNA, 19 nt, Artificial Sequence
  Description of Artificial Sequence: Synthetic oligonucleotide
caguaaaaccucgccaggg

SEQ ID NO: 2997376 - RNA, 19 nt, Artificial Sequence
  Description of Artificial Sequence: Synthetic oligonucleotide
ugcacuguccagcgaagac

SEQ ID NO: 2997377 - RNA, 19 nt, Artificial Sequence
  Description of Artificial Sequence: Synthetic oligonucleotide
gcaaugugcagccugguac

SEQ ID NO: 2997378 - RNA, 19 nt, Artificial Sequence
  Description of Artificial Sequence: Synthetic oligonucleotide
ugagcagccgcgacagagc

SEQ ID NO: 2997379 - RNA, 19 nt, Artificial Sequence
  Description of Artificial Sequence: Synthetic oligonucleotide
guggcaguaaaaccucgcc

SEQ ID NO: 2997380 - RNA, 19 nt, Artificial Sequence
  Description of Artificial Sequence: Synthetic oligonucleotide
gacaggacgcaaugugcag

SEQ ID NO: 2997381 - RNA, 19 nt, Artificial Sequence
  Description of Artificial Sequence: Synthetic oligonucleotide
ucugcacuguccagcgaag

SEQ ID NO: 2997382 - RNA, 19 nt, Artificial Sequence
  Description of Artificial Sequence: Synthetic oligonucleotide
cugggugcaggugaggccg

SEQ ID NO: 2997383 - RNA, 19 nt, Artificial Sequence
  Description of Artificial Sequence: Synthetic oligonucleotide
caggacgcaaugugcagcc

SEQ ID NO: 2997384 - RNA, 19 nt, Artificial Sequence
  Description of Artificial Sequence: Synthetic oligonucleotide
acagagcguccucuucacc

SEQ ID NO: 2997385 - RNA, 19 nt, Artificial Sequence
  Description of Artificial Sequence: Synthetic oligonucleotide
uacaagaagcugagucucu

SEQ ID NO: 2997386 - RNA, 19 nt, Artificial Sequence
  Description of Artificial Sequence: Synthetic oligonucleotide
uuccagcugggcuucaggu

SEQ ID NO: 2997387 - RNA, 19 nt, Artificial Sequence
  Description of Artificial Sequence: Synthetic oligonucleotide
uccagcgaagacccuuuug

SEQ ID NO: 2997388 - RNA, 19 nt, Artificial Sequence
  Description of Artificial Sequence: Synthetic oligonucleotide
uugaaaucugccugauuuu

SEQ ID NO: 2997389 - RNA, 19 nt, Artificial Sequence
  Description of Artificial Sequence: Synthetic oligonucleotide
uucuccguguggcaguaaa

SEQ ID NO: 2997390 - RNA, 19 nt, Artificial Sequence
  Description of Artificial Sequence: Synthetic oligonucleotide
aaaaccucgccagggccug

SEQ ID NO: 2997391 - RNA, 19 nt, Artificial Sequence
  Description of Artificial Sequence: Synthetic oligonucleotide
guacaagaagcugagucuc

SEQ ID NO: 2997392 - RNA, 19 nt, Artificial Sequence
  Description of Artificial Sequence: Synthetic oligonucleotide
cuucgcgauggucuucucc

SEQ ID NO: 2997393 - RNA, 19 nt, Artificial Sequence
  Description of Artificial Sequence: Synthetic oligonucleotide
gagaugagcagccgcgaca

SEQ ID NO: 2997394 - RNA, 19 nt, Artificial Sequence
  Description of Artificial Sequence: Synthetic oligonucleotide
ugggcuucaggucggucac

SEQ ID NO: 2997395 - RNA, 19 nt, Artificial Sequence
  Description of Artificial Sequence: Synthetic oligonucleotide
cagcgaagacccuuuuggc

SEQ ID NO: 2997396 - RNA, 19 nt, Artificial Sequence
  Description of Artificial Sequence: Synthetic oligonucleotide
cagagguucugaugguuug

SEQ ID NO: 2997397 - RNA, 19 nt, Artificial Sequence
  Description of Artificial Sequence: Synthetic oligonucleotide
ugcgcuggcaugucaggca

SEQ ID NO: 2997398 - RNA, 19 nt, Artificial Sequence
  Description of Artificial Sequence: Synthetic oligonucleotide
agaugcuuggggucauuga

SEQ ID NO: 2997399 - RNA, 19 nt, Artificial Sequence
  Description of Artificial Sequence: Synthetic oligonucleotide
ccagcugggcuucaggucg

SEQ ID NO: 2997400 - RNA, 19 nt, Artificial Sequence
  Description of Artificial Sequence: Synthetic oligonucleotide
augcuuggggucauugagg

SEQ ID NO: 2997401 - RNA, 19 nt, Artificial Sequence
  Description of Artificial Sequence: Synthetic oligonucleotide
cuccguguggcaguaaaac

SEQ ID NO: 2997402 - RNA, 19 nt, Artificial Sequence
  Description of Artificial Sequence: Synthetic oligonucleotide
acaagaagcugagucucug

SEQ ID NO: 2997403 - RNA, 19 nt, Artificial Sequence
  Description of Artificial Sequence: Synthetic oligonucleotide
uguuuggcagagguucuga

SEQ ID NO: 2997404 - RNA, 19 nt, Artificial Sequence
  Description of Artificial Sequence: Synthetic oligonucleotide
cucccgguccuucacuggg

SEQ ID NO: 2997405 - RNA, 19 nt, Artificial Sequence
  Description of Artificial Sequence: Synthetic oligonucleotide
gacagagcguccucuucac

SEQ ID NO: 2997406 - RNA, 19 nt, Artificial Sequence
  Description of Artificial Sequence: Synthetic oligonucleotide
caaugugcagccugguaca

SEQ ID NO: 2997407 - RNA, 19 nt, Artificial Sequence
  Description of Artificial Sequence: Synthetic oligonucleotide
aggaccagccgcuucgcga

SEQ ID NO: 2997408 - RNA, 19 nt, Artificial Sequence
  Description of Artificial Sequence: Synthetic oligonucleotide
ucggucaccccagagcaga

SEQ ID NO: 2997409 - RNA, 19 nt, Artificial Sequence
  Description of Artificial Sequence: Synthetic oligonucleotide
gucucuggaaggccucccg

SEQ ID NO: 2997410 - RNA, 19 nt, Artificial Sequence
  Description of Artificial Sequence: Synthetic oligonucleotide
uucaccgagggguccugcc

SEQ ID NO: 2997411 - RNA, 19 nt, Artificial Sequence
  Description of Artificial Sequence: Synthetic oligonucleotide
cuggaaggccucccggucc

SEQ ID NO: 2997412 - RNA, 19 nt, Artificial Sequence
  Description of Artificial Sequence: Synthetic oligonucleotide
uggcgcugggugcagguga

SEQ ID NO: 2997413 - RNA, 19 nt, Artificial Sequence
  Description of Artificial Sequence: Synthetic oligonucleotide
ugagucucuggaaggccuc

SEQ ID NO: 2997414 - RNA, 19 nt, Artificial Sequence
  Description of Artificial Sequence: Synthetic oligonucleotide
gcaguaaaaccucgccagg

SEQ ID NO: 2997415 - RNA, 19 nt, Artificial Sequence
  Description of Artificial Sequence: Synthetic oligonucleotide
cuucaggucggucacccca

SEQ ID NO: 2997416 - RNA, 19 nt, Artificial Sequence
  Description of Artificial Sequence: Synthetic oligonucleotide
gguucugaugguuugaaau

SEQ ID NO: 2997417 - RNA, 19 nt, Artificial Sequence
  Description of Artificial Sequence: Synthetic oligonucleotide
gguacaagaagcugagucu

SEQ ID NO: 2997418 - RNA, 19 nt, Artificial Sequence
  Description of Artificial Sequence: Synthetic oligonucleotide
gggaugaggagagaugagc

SEQ ID NO: 2997419 - RNA, 19 nt, Artificial Sequence
  Description of Artificial Sequence: Synthetic oligonucleotide
agagcguccucuucaccga

SEQ ID NO: 2997420 - RNA, 19 nt, Artificial Sequence
  Description of Artificial Sequence: Synthetic oligonucleotide
ccuuuuggcgucucuggcg

SEQ ID NO: 2997421 - RNA, 19 nt, Artificial Sequence
  Description of Artificial Sequence: Synthetic oligonucleotide
caggucugcacuguccagc

SEQ ID NO: 2997422 - RNA, 19 nt, Artificial Sequence
  Description of Artificial Sequence: Synthetic oligonucleotide
ccugguacaagaagcugag

SEQ ID NO: 2997423 - RNA, 19 nt, Artificial Sequence
  Description of Artificial Sequence: Synthetic oligonucleotide
ucuccguguggcaguaaaa

SEQ ID NO: 2997424 - RNA, 19 nt, Artificial Sequence
  Description of Artificial Sequence: Synthetic oligonucleotide
gaggagagaugagcagccg

SEQ ID NO: 2997425 - RNA, 19 nt, Artificial Sequence
  Description of Artificial Sequence: Synthetic oligonucleotide
gaaccgcuggcugcgcugg

SEQ ID NO: 2997426 - RNA, 19 nt, Artificial Sequence
  Description of Artificial Sequence: Synthetic oligonucleotide
uggaaggccucccgguccu

SEQ ID NO: 2997427 - RNA, 19 nt, Artificial Sequence
  Description of Artificial Sequence: Synthetic oligonucleotide
gauuuuccagcugggcuuc

SEQ ID NO: 2997428 - RNA, 19 nt, Artificial Sequence
  Description of Artificial Sequence: Synthetic oligonucleotide
gacccuuuuggcgucucug

SEQ ID NO: 2997429 - RNA, 19 nt, Artificial Sequence
  Description of Artificial Sequence: Synthetic oligonucleotide
uucugcgacaggacgcaau

SEQ ID NO: 2997430 - RNA, 19 nt, Artificial Sequence
  Description of Artificial Sequence: Synthetic oligonucleotide
uccucuucaccgagggguc

SEQ ID NO: 2997431 - RNA, 19 nt, Artificial Sequence
  Description of Artificial Sequence: Synthetic oligonucleotide
ggucggucaccccagagca

SEQ ID NO: 2997432 - RNA, 19 nt, Artificial Sequence
  Description of Artificial Sequence: Synthetic oligonucleotide
aaggccucccgguccuuca

SEQ ID NO: 2997433 - RNA, 19 nt, Artificial Sequence
  Description of Artificial Sequence: Synthetic oligonucleotide
gucugcacuguccagcgaa

SEQ ID NO: 2997434 - RNA, 19 nt, Artificial Sequence
  Description of Artificial Sequence: Synthetic oligonucleotide
cugauuuuccagcugggcu

SEQ ID NO: 2997435 - RNA, 19 nt, Artificial Sequence
  Description of Artificial Sequence: Synthetic oligonucleotide
ucuccggguucugcgacag

SEQ ID NO: 2997436 - RNA, 19 nt, Artificial Sequence
  Description of Artificial Sequence: Synthetic oligonucleotide
uuuggcgucucuggcgcug

SEQ ID NO: 2997437 - RNA, 19 nt, Artificial Sequence
  Description of Artificial Sequence: Synthetic oligonucleotide
aggcaggucugcacugucc

SEQ ID NO: 2997438 - RNA, 19 nt, Artificial Sequence
  Description of Artificial Sequence: Synthetic oligonucleotide
uguccagcgaagacccuuu

SEQ ID NO: 2997439 - RNA, 19 nt, Artificial Sequence
  Description of Artificial Sequence: Synthetic oligonucleotide
aaccgcuggcugcgcuggc

SEQ ID NO: 2997440 - RNA, 19 nt, Artificial Sequence
  Description of Artificial Sequence: Synthetic oligonucleotide
uccuucacugggcccgcca

SEQ ID NO: 2997441 - RNA, 19 nt, Artificial Sequence
  Description of Artificial Sequence: Synthetic oligonucleotide
uggucuucuccguguggca

SEQ ID NO: 2997442 - RNA, 19 nt, Artificial Sequence
  Description of Artificial Sequence: Synthetic oligonucleotide
guguggcaguaaaaccucg

SEQ ID NO: 2997443 - RNA, 19 nt, Artificial Sequence
  Description of Artificial Sequence: Synthetic oligonucleotide
gucaggcaggucugcacug

SEQ ID NO: 2997444 - RNA, 19 nt, Artificial Sequence
  Description of Artificial Sequence: Synthetic oligonucleotide
ucuggcgcugggugcaggu

SEQ ID NO: 2997445 - RNA, 19 nt, Artificial Sequence
  Description of Artificial Sequence: Synthetic oligonucleotide
aaugugcagccugguacaa

SEQ ID NO: 2997446 - RNA, 19 nt, Artificial Sequence
  Description of Artificial Sequence: Synthetic oligonucleotide
aagacccuuuuggcgucuc

SEQ ID NO: 2997447 - RNA, 19 nt, Artificial Sequence
  Description of Artificial Sequence: Synthetic oligonucleotide
ugcaggugaggccggggau

SEQ ID NO: 2997448 - RNA, 19 nt, Artificial Sequence
  Description of Artificial Sequence: Synthetic oligonucleotide
ggacgcaaugugcagccug

SEQ ID NO: 2997449 - RNA, 19 nt, Artificial Sequence
  Description of Artificial Sequence: Synthetic oligonucleotide
gagcguccucuucaccgag

SEQ ID NO: 2997450 - RNA, 19 nt, Artificial Sequence
  Description of Artificial Sequence: Synthetic oligonucleotide
agagguucugaugguuuga

SEQ ID NO: 2997451 - RNA, 19 nt, Artificial Sequence
  Description of Artificial Sequence: Synthetic oligonucleotide
uucuccggguucugcgaca

SEQ ID NO: 2997452 - RNA, 19 nt, Artificial Sequence
  Description of Artificial Sequence: Synthetic oligonucleotide
ugggugcaggugaggccgg

SEQ ID NO: 2997453 - RNA, 19 nt, Artificial Sequence
  Description of Artificial Sequence: Synthetic oligonucleotide
ugccgcaggaccagccgcu

SEQ ID NO: 2997454 - RNA, 19 nt, Artificial Sequence
  Description of Artificial Sequence: Synthetic oligonucleotide
ucccgguccuucacugggc

SEQ ID NO: 2997455 - RNA, 19 nt, Artificial Sequence
  Description of Artificial Sequence: Synthetic oligonucleotide
gaggugggcuauguuuggc

SEQ ID NO: 2997456 - RNA, 19 nt, Artificial Sequence
  Description of Artificial Sequence: Synthetic oligonucleotide
gaggccggggaugaggaga

SEQ ID NO: 2997457 - RNA, 19 nt, Artificial Sequence
  Description of Artificial Sequence: Synthetic oligonucleotide
caccgagggguccugccgc

SEQ ID NO: 2997458 - RNA, 19 nt, Artificial Sequence
  Description of Artificial Sequence: Synthetic oligonucleotide
gagcagaugcuugggguca

SEQ ID NO: 2997459 - RNA, 19 nt, Artificial Sequence
  Description of Artificial Sequence: Synthetic oligonucleotide
ucaccccagagcagaugcu

SEQ ID NO: 2997460 - RNA, 19 nt, Artificial Sequence
  Description of Artificial Sequence: Synthetic oligonucleotide
agccgcuucgcgauggucu

SEQ ID NO: 2997461 - RNA, 19 nt, Artificial Sequence
  Description of Artificial Sequence: Synthetic oligonucleotide
gcguccucuucaccgaggg

SEQ ID NO: 2997462 - RNA, 19 nt, Artificial Sequence
  Description of Artificial Sequence: Synthetic oligonucleotide
guccucuucaccgaggggu

SEQ ID NO: 2997463 - RNA, 19 nt, Artificial Sequence
  Description of Artificial Sequence: Synthetic oligonucleotide
agguucugaugguuugaaa

SEQ ID NO: 2997464 - RNA, 19 nt, Artificial Sequence
  Description of Artificial Sequence: Synthetic oligonucleotide
gcacuguccagcgaagacc

SEQ ID NO: 2997465 - RNA, 19 nt, Artificial Sequence
  Description of Artificial Sequence: Synthetic oligonucleotide
auguuuggcagagguucug

SEQ ID NO: 2997466 - RNA, 19 nt, Artificial Sequence
  Description of Artificial Sequence: Synthetic oligonucleotide
cagaugcuuggggucauug

SEQ ID NO: 2997467 - RNA, 19 nt, Artificial Sequence
  Description of Artificial Sequence: Synthetic oligonucleotide
uuggcgucucuggcgcugg

SEQ ID NO: 2997468 - RNA, 19 nt, Artificial Sequence
  Description of Artificial Sequence: Synthetic oligonucleotide
ggcuauguuuggcagaggu

SEQ ID NO: 2997469 - RNA, 19 nt, Artificial Sequence
  Description of Artificial Sequence: Synthetic oligonucleotide
ucaggcaggucugcacugu

SEQ ID NO: 2997470 - RNA, 19 nt, Artificial Sequence
  Description of Artificial Sequence: Synthetic oligonucleotide
agccugguacaagaagcug

SEQ ID NO: 2997471 - RNA, 19 nt, Artificial Sequence
  Description of Artificial Sequence: Synthetic oligonucleotide
uggggucauugaggaaccg

SEQ ID NO: 2997472 - RNA, 19 nt, Artificial Sequence
  Description of Artificial Sequence: Synthetic oligonucleotide
cuucacugggcccgccaug

SEQ ID NO: 2997473 - RNA, 19 nt, Artificial Sequence
  Description of Artificial Sequence: Synthetic oligonucleotide
ucaggucggucaccccaga

SEQ ID NO: 2997474 - RNA, 19 nt, Artificial Sequence
  Description of Artificial Sequence: Synthetic oligonucleotide
aggccucccgguccuucac

SEQ ID NO: 2997475 - RNA, 19 nt, Artificial Sequence
  Description of Artificial Sequence: Synthetic oligonucleotide
ucacugggcccgccaugag

SEQ ID NO: 2997476 - RNA, 19 nt, Artificial Sequence
  Description of Artificial Sequence: Synthetic oligonucleotide
gagguucugaugguuugaa

SEQ ID NO: 2997477 - RNA, 19 nt, Artificial Sequence
  Description of Artificial Sequence: Synthetic oligonucleotide
uuuuggcgucucuggcgcu

SEQ ID NO: 2997478 - RNA, 19 nt, Artificial Sequence
  Description of Artificial Sequence: Synthetic oligonucleotide
ggucuucuccguguggcag

SEQ ID NO: 2997479 - RNA, 19 nt, Artificial Sequence
  Description of Artificial Sequence: Synthetic oligonucleotide
cagagcagaugcuuggggu

SEQ ID NO: 2997480 - RNA, 19 nt, Artificial Sequence
  Description of Artificial Sequence: Synthetic oligonucleotide
gagagaugagcagccgcga

SEQ ID NO: 2997481 - RNA, 19 nt, Artificial Sequence
  Description of Artificial Sequence: Synthetic oligonucleotide
cugcgcuggcaugucaggc

SEQ ID NO: 2997482 - RNA, 19 nt, Artificial Sequence
  Description of Artificial Sequence: Synthetic oligonucleotide
ggcaggucugcacugucca

SEQ ID NO: 2997483 - RNA, 19 nt, Artificial Sequence
  Description of Artificial Sequence: Synthetic oligonucleotide
augugcagccugguacaag

SEQ ID NO: 2997484 - RNA, 19 nt, Artificial Sequence
  Description of Artificial Sequence: Synthetic oligonucleotide
aaaccucgccagggccugg

SEQ ID NO: 2997485 - RNA, 19 nt, Artificial Sequence
  Description of Artificial Sequence: Synthetic oligonucleotide
caggucggucaccccagag

SEQ ID NO: 2997486 - RNA, 19 nt, Artificial Sequence
  Description of Artificial Sequence: Synthetic oligonucleotide
gagggguccugccgcagga

SEQ ID NO: 2997487 - RNA, 19 nt, Artificial Sequence
  Description of Artificial Sequence: Synthetic oligonucleotide
cugccugauuuuccagcug

SEQ ID NO: 2997488 - RNA, 19 nt, Artificial Sequence
  Description of Artificial Sequence: Synthetic oligonucleotide
cagcugggcuucaggucgg

SEQ ID NO: 2997489 - RNA, 19 nt, Artificial Sequence
  Description of Artificial Sequence: Synthetic oligonucleotide
cugagucucuggaaggccu

SEQ ID NO: 2997490 - RNA, 19 nt, Artificial Sequence
  Description of Artificial Sequence: Synthetic oligonucleotide
ucgcgauggucuucuccgu

SEQ ID NO: 2997491 - RNA, 19 nt, Artificial Sequence
  Description of Artificial Sequence: Synthetic oligonucleotide
caggaccagccgcuucgcg

SEQ ID NO: 2997492 - RNA, 19 nt, Artificial Sequence
  Description of Artificial Sequence: Synthetic oligonucleotide
agacccuuuuggcgucucu

SEQ ID NO: 2997493 - RNA, 19 nt, Artificial Sequence
  Description of Artificial Sequence: Synthetic oligonucleotide
gcgacaggacgcaaugugc

SEQ ID NO: 2997494 - RNA, 19 nt, Artificial Sequence
  Description of Artificial Sequence: Synthetic oligonucleotide
cugguucuccggguucugc

SEQ ID NO: 2997495 - RNA, 19 nt, Artificial Sequence
  Description of Artificial Sequence: Synthetic oligonucleotide
ggucauugaggaaccgcug

SEQ ID NO: 2997496 - RNA, 19 nt, Artificial Sequence
  Description of Artificial Sequence: Synthetic oligonucleotide
gugcaggugaggccgggga

SEQ ID NO: 2997497 - RNA, 19 nt, Artificial Sequence
  Description of Artificial Sequence: Synthetic oligonucleotide
agggccugguucuccgggu

SEQ ID NO: 2997498 - RNA, 19 nt, Artificial Sequence
  Description of Artificial Sequence: Synthetic oligonucleotide
gcgaagacccuuuuggcgu

SEQ ID NO: 2997499 - RNA, 19 nt, Artificial Sequence
  Description of Artificial Sequence: Synthetic oligonucleotide
aggaaccgcuggcugcgcu

SEQ ID NO: 2997500 - RNA, 19 nt, Artificial Sequence
  Description of Artificial Sequence: Synthetic oligonucleotide
gccugguacaagaagcuga

SEQ ID NO: 2997501 - RNA, 19 nt, Artificial Sequence
  Description of Artificial Sequence: Synthetic oligonucleotide
ccccagagcagaugcuugg

SEQ ID NO: 2997502 - RNA, 19 nt, Artificial Sequence
  Description of Artificial Sequence: Synthetic oligonucleotide
aggccggggaugaggagag

SEQ ID NO: 2997503 - RNA, 19 nt, Artificial Sequence
  Description of Artificial Sequence: Synthetic oligonucleotide
gcugcgcuggcaugucagg

SEQ ID NO: 2997504 - RNA, 19 nt, Artificial Sequence
  Description of Artificial Sequence: Synthetic oligonucleotide
ucuucaccgagggguccug

SEQ ID NO: 2997505 - RNA, 19 nt, Artificial Sequence
  Description of Artificial Sequence: Synthetic oligonucleotide
ggaaccgcuggcugcgcug

SEQ ID NO: 2997506 - RNA, 19 nt, Artificial Sequence
  Description of Artificial Sequence: Synthetic oligonucleotide
ucuucuccguguggcagua

SEQ ID NO: 2997507 - RNA, 19 nt, Artificial Sequence
  Description of Artificial Sequence: Synthetic oligonucleotide
agcguccucuucaccgagg

SEQ ID NO: 2997508 - RNA, 19 nt, Artificial Sequence
  Description of Artificial Sequence: Synthetic oligonucleotide
ggcuucaggucggucaccc

SEQ ID NO: 2997509 - RNA, 19 nt, Artificial Sequence
  Description of Artificial Sequence: Synthetic oligonucleotide
uggcugcgcuggcauguca

SEQ ID NO: 2997510 - RNA, 19 nt, Artificial Sequence
  Description of Artificial Sequence: Synthetic oligonucleotide
gcgucucuggcgcugggug

SEQ ID NO: 2997511 - RNA, 19 nt, Artificial Sequence
  Description of Artificial Sequence: Synthetic oligonucleotide
gcgcuggcaugucaggcag

SEQ ID NO: 2997512 - RNA, 19 nt, Artificial Sequence
  Description of Artificial Sequence: Synthetic oligonucleotide
uggcgucucuggcgcuggg

SEQ ID NO: 2997513 - RNA, 19 nt, Artificial Sequence
  Description of Artificial Sequence: Synthetic oligonucleotide
gggguccugccgcaggacc

SEQ ID NO: 2997514 - RNA, 19 nt, Artificial Sequence
  Description of Artificial Sequence: Synthetic oligonucleotide
aaccucgccagggccuggu

SEQ ID NO: 2997515 - RNA, 19 nt, Artificial Sequence
  Description of Artificial Sequence: Synthetic oligonucleotide
gguucuccggguucugcga

SEQ ID NO: 2997516 - RNA, 19 nt, Artificial Sequence
  Description of Artificial Sequence: Synthetic oligonucleotide
ggcaugucaggcaggucug

SEQ ID NO: 2997517 - RNA, 19 nt, Artificial Sequence
  Description of Artificial Sequence: Synthetic oligonucleotide
agggguccugccgcaggac

SEQ ID NO: 2997518 - RNA, 19 nt, Artificial Sequence
  Description of Artificial Sequence: Synthetic oligonucleotide
cguguggcaguaaaaccuc

SEQ ID NO: 2997519 - RNA, 19 nt, Artificial Sequence
  Description of Artificial Sequence: Synthetic oligonucleotide
gguucugcgacaggacgca

SEQ ID NO: 2997520 - RNA, 19 nt, Artificial Sequence
  Description of Artificial Sequence: Synthetic oligonucleotide
cuucaccgagggguccugc

SEQ ID NO: 2997521 - RNA, 19 nt, Artificial Sequence
  Description of Artificial Sequence: Synthetic oligonucleotide
ccguguggcaguaaaaccu

SEQ ID NO: 2997522 - RNA, 19 nt, Artificial Sequence
  Description of Artificial Sequence: Synthetic oligonucleotide
cucgccagggccugguucu

SEQ ID NO: 2997523 - RNA, 19 nt, Artificial Sequence
  Description of Artificial Sequence: Synthetic oligonucleotide
caggcaggucugcacuguc

SEQ ID NO: 2997524 - RNA, 19 nt, Artificial Sequence
  Description of Artificial Sequence: Synthetic oligonucleotide
gucucuggcgcugggugca

SEQ ID NO: 2997525 - RNA, 19 nt, Artificial Sequence
  Description of Artificial Sequence: Synthetic oligonucleotide
gccugauuuuccagcuggg

SEQ ID NO: 2997526 - RNA, 19 nt, Artificial Sequence
  Description of Artificial Sequence: Synthetic oligonucleotide
cagccugguacaagaagcu

SEQ ID NO: 2997527 - RNA, 19 nt, Artificial Sequence
  Description of Artificial Sequence: Synthetic oligonucleotide
accgagggguccugccgca

SEQ ID NO: 2997528 - RNA, 19 nt, Artificial Sequence
  Description of Artificial Sequence: Synthetic oligonucleotide
ggcugcgcuggcaugucag

SEQ ID NO: 2997529 - RNA, 19 nt, Artificial Sequence
  Description of Artificial Sequence: Synthetic oligonucleotide
gaaggccucccgguccuuc

SEQ ID NO: 2997530 - RNA, 19 nt, Artificial Sequence
  Description of Artificial Sequence: Synthetic oligonucleotide
gaugagcagccgcgacaga

SEQ ID NO: 2997531 - RNA, 19 nt, Artificial Sequence
  Description of Artificial Sequence: Synthetic oligonucleotide
guuuggcagagguucugau

SEQ ID NO: 2997532 - RNA, 19 nt, Artificial Sequence
  Description of Artificial Sequence: Synthetic oligonucleotide
ggggaugaggagagaugag

SEQ ID NO: 2997533 - RNA, 19 nt, Artificial Sequence
  Description of Artificial Sequence: Synthetic oligonucleotide
ucucuggcgcugggugcag

SEQ ID NO: 2997534 - RNA, 19 nt, Artificial Sequence
  Description of Artificial Sequence: Synthetic oligonucleotide
cauugaggaaccgcuggcu

SEQ ID NO: 2997535 - RNA, 19 nt, Artificial Sequence
  Description of Artificial Sequence: Synthetic oligonucleotide
gucggucaccccagagcag

SEQ ID NO: 2997536 - RNA, 19 nt, Artificial Sequence
  Description of Artificial Sequence: Synthetic oligonucleotide
gccucccgguccuucacug

SEQ ID NO: 2997537 - RNA, 19 nt, Artificial Sequence
  Description of Artificial Sequence: Synthetic oligonucleotide
gucuucuccguguggcagu

SEQ ID NO: 2997538 - RNA, 19 nt, Artificial Sequence
  Description of Artificial Sequence: Synthetic oligonucleotide
ccggggaugaggagagaug

SEQ ID NO: 2997539 - RNA, 19 nt, Artificial Sequence
  Description of Artificial Sequence: Synthetic oligonucleotide
ggugcaggugaggccgggg

SEQ ID NO: 2997540 - RNA, 19 nt, Artificial Sequence
  Description of Artificial Sequence: Synthetic oligonucleotide
guuugaaaucugccugauu

SEQ ID NO: 2997541 - RNA, 19 nt, Artificial Sequence
  Description of Artificial Sequence: Synthetic oligonucleotide
agccgcgacagagcguccu

SEQ ID NO: 2997542 - RNA, 19 nt, Artificial Sequence
  Description of Artificial Sequence: Synthetic oligonucleotide
cccagagcagaugcuuggg

SEQ ID NO: 2997543 - RNA, 19 nt, Artificial Sequence
  Description of Artificial Sequence: Synthetic oligonucleotide
cgguccuucacugggcccg

SEQ ID NO: 2997544 - RNA, 19 nt, Artificial Sequence
  Description of Artificial Sequence: Synthetic oligonucleotide
cuccggguucugcgacagg

SEQ ID NO: 2997545 - RNA, 19 nt, Artificial Sequence
  Description of Artificial Sequence: Synthetic oligonucleotide
cgacaggacgcaaugugca

SEQ ID NO: 2997546 - RNA, 19 nt, Artificial Sequence
  Description of Artificial Sequence: Synthetic oligonucleotide
cccgguccuucacugggcc

SEQ ID NO: 2997547 - RNA, 19 nt, Artificial Sequence
  Description of Artificial Sequence: Synthetic oligonucleotide
caggugaggccggggauga

SEQ ID NO: 2997548 - RNA, 19 nt, Artificial Sequence
  Description of Artificial Sequence: Synthetic oligonucleotide
gaggaaccgcuggcugcgc

SEQ ID NO: 2997549 - RNA, 19 nt, Artificial Sequence
  Description of Artificial Sequence: Synthetic oligonucleotide
acgcaaugugcagccuggu

SEQ ID NO: 2997550 - RNA, 19 nt, Artificial Sequence
  Description of Artificial Sequence: Synthetic oligonucleotide
cucuggcgcugggugcagg

SEQ ID NO: 2997551 - RNA, 19 nt, Artificial Sequence
  Description of Artificial Sequence: Synthetic oligonucleotide
gcuucaggucggucacccc

SEQ ID NO: 2997552 - RNA, 19 nt, Artificial Sequence
  Description of Artificial Sequence: Synthetic oligonucleotide
cugcacuguccagcgaaga

SEQ ID NO: 2997553 - RNA, 19 nt, Artificial Sequence
  Description of Artificial Sequence: Synthetic oligonucleotide
agcagaugcuuggggucau

SEQ ID NO: 2997554 - RNA, 19 nt, Artificial Sequence
  Description of Artificial Sequence: Synthetic oligonucleotide
accgcuggcugcgcuggca

SEQ ID NO: 2997555 - RNA, 19 nt, Artificial Sequence
  Description of Artificial Sequence: Synthetic oligonucleotide
aggacgcaaugugcagccu

SEQ ID NO: 2997556 - RNA, 19 nt, Artificial Sequence
  Description of Artificial Sequence: Synthetic oligonucleotide
cuggcgcugggugcaggug

SEQ ID NO: 2997557 - RNA, 19 nt, Artificial Sequence
  Description of Artificial Sequence: Synthetic oligonucleotide
ggcgcugggugcaggugag

SEQ ID NO: 2997558 - RNA, 19 nt, Artificial Sequence
  Description of Artificial Sequence: Synthetic oligonucleotide
gcgacagagcguccucuuc

SEQ ID NO: 2997559 - RNA, 19 nt, Artificial Sequence
  Description of Artificial Sequence: Synthetic oligonucleotide
cgacagagcguccucuuca

SEQ ID NO: 2997560 - RNA, 19 nt, Artificial Sequence
  Description of Artificial Sequence: Synthetic oligonucleotide
gcgauggucuucuccgugu

SEQ ID NO: 2997561 - RNA, 19 nt, Artificial Sequence
  Description of Artificial Sequence: Synthetic oligonucleotide
cggggaugaggagagauga

SEQ ID NO: 2997562 - RNA, 19 nt, Artificial Sequence
  Description of Artificial Sequence: Synthetic oligonucleotide
ggaccagccgcuucgcgau

SEQ ID NO: 2997563 - RNA, 19 nt, Artificial Sequence
  Description of Artificial Sequence: Synthetic oligonucleotide
gaagacccuuuuggcgucu

SEQ ID NO: 2997564 - RNA, 19 nt, Artificial Sequence
  Description of Artificial Sequence: Synthetic oligonucleotide
ggccugguucuccggguuc

SEQ ID NO: 2997565 - RNA, 19 nt, Artificial Sequence
  Description of Artificial Sequence: Synthetic oligonucleotide
cacugggcccgccaugagu

SEQ ID NO: 2997566 - RNA, 19 nt, Artificial Sequence
  Description of Artificial Sequence: Synthetic oligonucleotide
ccucgccagggccugguuc

SEQ ID NO: 2997567 - RNA, 19 nt, Artificial Sequence
  Description of Artificial Sequence: Synthetic oligonucleotide
acuguccagcgaagacccu

SEQ ID NO: 2997568 - RNA, 19 nt, Artificial Sequence
  Description of Artificial Sequence: Synthetic oligonucleotide
cgaagacccuuuuggcguc

SEQ ID NO: 2997569 - RNA, 19 nt, Artificial Sequence
  Description of Artificial Sequence: Synthetic oligonucleotide
ccgguccuucacugggccc

SEQ ID NO: 2997570 - RNA, 19 nt, Artificial Sequence
  Description of Artificial Sequence: Synthetic oligonucleotide
ggguccugccgcaggacca

SEQ ID NO: 2997571 - RNA, 19 nt, Artificial Sequence
  Description of Artificial Sequence: Synthetic oligonucleotide
cuggcugcgcuggcauguc

SEQ ID NO: 2997572 - RNA, 19 nt, Artificial Sequence
  Description of Artificial Sequence: Synthetic oligonucleotide
gggcuauguuuggcagagg

SEQ ID NO: 2997573 - RNA, 19 nt, Artificial Sequence
  Description of Artificial Sequence: Synthetic oligonucleotide
gguuugaaaucugccugau

SEQ ID NO: 2997574 - RNA, 19 nt, Artificial Sequence
  Description of Artificial Sequence: Synthetic oligonucleotide
cgagggguccugccgcagg

SEQ ID NO: 2997575 - RNA, 19 nt, Artificial Sequence
  Description of Artificial Sequence: Synthetic oligonucleotide
gcuggcaugucaggcaggu

SEQ ID NO: 2997576 - RNA, 19 nt, Artificial Sequence
  Description of Artificial Sequence: Synthetic oligonucleotide
gugcagccugguacaagaa

SEQ ID NO: 2997577 - RNA, 19 nt, Artificial Sequence
  Description of Artificial Sequence: Synthetic oligonucleotide
gguccuucacugggcccgc

SEQ ID NO: 2997578 - RNA, 19 nt, Artificial Sequence
  Description of Artificial Sequence: Synthetic oligonucleotide
cagccgcuucgcgaugguc

SEQ ID NO: 2997579 - RNA, 19 nt, Artificial Sequence
  Description of Artificial Sequence: Synthetic oligonucleotide
cgcgauggucuucuccgug

SEQ ID NO: 2997580 - RNA, 19 nt, Artificial Sequence
  Description of Artificial Sequence: Synthetic oligonucleotide
cucuucaccgagggguccu

SEQ ID NO: 2997581 - RNA, 19 nt, Artificial Sequence
  Description of Artificial Sequence: Synthetic oligonucleotide
guccugccgcaggaccagc

SEQ ID NO: 2997582 - RNA, 19 nt, Artificial Sequence
  Description of Artificial Sequence: Synthetic oligonucleotide
ggucugcacuguccagcga

SEQ ID NO: 2997583 - RNA, 19 nt, Artificial Sequence
  Description of Artificial Sequence: Synthetic oligonucleotide
gggugcaggugaggccggg

SEQ ID NO: 2997584 - RNA, 19 nt, Artificial Sequence
  Description of Artificial Sequence: Synthetic oligonucleotide
gcaggaccagccgcuucgc

SEQ ID NO: 2997585 - RNA, 19 nt, Artificial Sequence
  Description of Artificial Sequence: Synthetic oligonucleotide
gcuuggggucauugaggaa

SEQ ID NO: 2997586 - RNA, 19 nt, Artificial Sequence
  Description of Artificial Sequence: Synthetic oligonucleotide
cuguccagcgaagacccuu

SEQ ID NO: 2997587 - RNA, 19 nt, Artificial Sequence
  Description of Artificial Sequence: Synthetic oligonucleotide
ucgccagggccugguucuc

SEQ ID NO: 2997588 - RNA, 19 nt, Artificial Sequence
  Description of Artificial Sequence: Synthetic oligonucleotide
guucugcgacaggacgcaa

SEQ ID NO: 2997589 - RNA, 19 nt, Artificial Sequence
  Description of Artificial Sequence: Synthetic oligonucleotide
guccuucacugggcccgcc

SEQ ID NO: 2997590 - RNA, 19 nt, Artificial Sequence
  Description of Artificial Sequence: Synthetic oligonucleotide
accucgccagggccugguu

SEQ ID NO: 2997591 - RNA, 19 nt, Artificial Sequence
  Description of Artificial Sequence: Synthetic oligonucleotide
gcagagguucugaugguuu

SEQ ID NO: 2997592 - RNA, 19 nt, Artificial Sequence
  Description of Artificial Sequence: Synthetic oligonucleotide
gcuggcugcgcuggcaugu

SEQ ID NO: 2997593 - RNA, 19 nt, Artificial Sequence
  Description of Artificial Sequence: Synthetic oligonucleotide
gccgcgacagagcguccuc

SEQ ID NO: 2997594 - RNA, 19 nt, Artificial Sequence
  Description of Artificial Sequence: Synthetic oligonucleotide
cugguacaagaagcugagu

SEQ ID NO: 2997595 - RNA, 19 nt, Artificial Sequence
  Description of Artificial Sequence: Synthetic oligonucleotide
caccccagagcagaugcuu

SEQ ID NO: 2997596 - RNA, 19 nt, Artificial Sequence
  Description of Artificial Sequence: Synthetic oligonucleotide
gggcuucaggucggucacc

SEQ ID NO: 2997597 - RNA, 19 nt, Artificial Sequence
  Description of Artificial Sequence: Synthetic oligonucleotide
cugcgacaggacgcaaugu

SEQ ID NO: 2997598 - RNA, 19 nt, Artificial Sequence
  Description of Artificial Sequence: Synthetic oligonucleotide
ggcagagguucugaugguu

SEQ ID NO: 2997599 - RNA, 19 nt, Artificial Sequence
  Description of Artificial Sequence: Synthetic oligonucleotide
ccugguucuccggguucug

SEQ ID NO: 2997600 - RNA, 19 nt, Artificial Sequence
  Description of Artificial Sequence: Synthetic oligonucleotide
gcuucgcgauggucuucuc

SEQ ID NO: 2997601 - RNA, 19 nt, Artificial Sequence
  Description of Artificial Sequence: Synthetic oligonucleotide
gccggggaugaggagagau

SEQ ID NO: 2997602 - RNA, 19 nt, Artificial Sequence
  Description of Artificial Sequence: Synthetic oligonucleotide
gcugggcuucaggucgguc

SEQ ID NO: 2997603 - RNA, 19 nt, Artificial Sequence
  Description of Artificial Sequence: Synthetic oligonucleotide
gccugguucuccggguucu

SEQ ID NO: 2997604 - RNA, 19 nt, Artificial Sequence
  Description of Artificial Sequence: Synthetic oligonucleotide
ccgcaggaccagccgcuuc

SEQ ID NO: 2997605 - RNA, 19 nt, Artificial Sequence
  Description of Artificial Sequence: Synthetic oligonucleotide
ggccucccgguccuucacu

SEQ ID NO: 2997606 - RNA, 19 nt, Artificial Sequence
  Description of Artificial Sequence: Synthetic oligonucleotide
cgcaaugugcagccuggua

SEQ ID NO: 2997607 - RNA, 19 nt, Artificial Sequence
  Description of Artificial Sequence: Synthetic oligonucleotide
gccgcuucgcgauggucuu

SEQ ID NO: 2997608 - RNA, 19 nt, Artificial Sequence
  Description of Artificial Sequence: Synthetic oligonucleotide
ccgagggguccugccgcag

SEQ ID NO: 2997609 - RNA, 19 nt, Artificial Sequence
  Description of Artificial Sequence: Synthetic oligonucleotide
ccuucacugggcccgccau

SEQ ID NO: 2997610 - RNA, 19 nt, Artificial Sequence
  Description of Artificial Sequence: Synthetic oligonucleotide
cgcuggcugcgcuggcaug

SEQ ID NO: 2997611 - RNA, 19 nt, Artificial Sequence
  Description of Artificial Sequence: Synthetic oligonucleotide
ggcgucucuggcgcugggu

SEQ ID NO: 2997612 - RNA, 19 nt, Artificial Sequence
  Description of Artificial Sequence: Synthetic oligonucleotide
ccgcuucgcgauggucuuc

SEQ ID NO: 2997613 - RNA, 19 nt, Artificial Sequence
  Description of Artificial Sequence: Synthetic oligonucleotide
ggccggggaugaggagaga

SEQ ID NO: 2997614 - RNA, 19 nt, Artificial Sequence
  Description of Artificial Sequence: Synthetic oligonucleotide
ccgcgacagagcguccucu

SEQ ID NO: 2997615 - RNA, 19 nt, Artificial Sequence
  Description of Artificial Sequence: Synthetic oligonucleotide
ccgcuggcugcgcuggcau

SEQ ID NO: 2997616 - RNA, 19 nt, Artificial Sequence
  Description of Artificial Sequence: Synthetic oligonucleotide
gcagaugcuuggggucauu

SEQ ID NO: 2997617 - RNA, 19 nt, Artificial Sequence
  Description of Artificial Sequence: Synthetic oligonucleotide
cgcgacagagcguccucuu

SEQ ID NO: 2997618 - RNA, 19 nt, Artificial Sequence
  Description of Artificial Sequence: Synthetic oligonucleotide
gccgcaggaccagccgcuu

SEQ ID NO: 2997619 - RNA, 19 nt, Artificial Sequence
  Description of Artificial Sequence: Synthetic oligonucleotide
ggaaggccucccgguccuu

SEQ ID NO: 2997620 - RNA, 19 nt, Artificial Sequence
  Description of Artificial Sequence: Synthetic oligonucleotide
uuagucaugaacuuccugg

SEQ ID NO: 2997621 - RNA, 19 nt, Artificial Sequence
  Description of Artificial Sequence: Synthetic oligonucleotide
aaaaguggguucugaaucc

SEQ ID NO: 2997622 - RNA, 19 nt, Artificial Sequence
  Description of Artificial Sequence: Synthetic oligonucleotide
ucuagagaaucauagauca

SEQ ID NO: 2997623 - RNA, 19 nt, Artificial Sequence
  Description of Artificial Sequence: Synthetic oligonucleotide
ucugaauccgaacacaaag

SEQ ID NO: 2997624 - RNA, 19 nt, Artificial Sequence
  Description of Artificial Sequence: Synthetic oligonucleotide
uuuccucugaagcagacgg

SEQ ID NO: 2997625 - RNA, 19 nt, Artificial Sequence
  Description of Artificial Sequence: Synthetic oligonucleotide
aucuguuuuccucugaagc

SEQ ID NO: 2997626 - RNA, 19 nt, Artificial Sequence
  Description of Artificial Sequence: Synthetic oligonucleotide
aauccgaacacaaagauga

SEQ ID NO: 2997627 - RNA, 19 nt, Artificial Sequence
  Description of Artificial Sequence: Synthetic oligonucleotide
aaucuagagaaucauagau

SEQ ID NO: 2997628 - RNA, 19 nt, Artificial Sequence
  Description of Artificial Sequence: Synthetic oligonucleotide
uuugccgccaccaaaagug

SEQ ID NO: 2997629 - RNA, 19 nt, Artificial Sequence
  Description of Artificial Sequence: Synthetic oligonucleotide
uuguccagcaccaacauug

SEQ ID NO: 2997630 - RNA, 19 nt, Artificial Sequence
  Description of Artificial Sequence: Synthetic oligonucleotide
aaagaugacaucuggugug

SEQ ID NO: 2997631 - RNA, 19 nt, Artificial Sequence
  Description of Artificial Sequence: Synthetic oligonucleotide
auuuuggcuaacuuuuccc

SEQ ID NO: 2997632 - RNA, 19 nt, Artificial Sequence
  Description of Artificial Sequence: Synthetic oligonucleotide
aagccaguuguuuugccgc

SEQ ID NO: 2997633 - RNA, 19 nt, Artificial Sequence
  Description of Artificial Sequence: Synthetic oligonucleotide
uuucuucucauaaaggcca

SEQ ID NO: 2997634 - RNA, 19 nt, Artificial Sequence
  Description of Artificial Sequence: Synthetic oligonucleotide
uuuucuucucauaaaggcc

SEQ ID NO: 2997635 - RNA, 19 nt, Artificial Sequence
  Description of Artificial Sequence: Synthetic oligonucleotide
cuuugcauaaucuagagaa

SEQ ID NO: 2997636 - RNA, 19 nt, Artificial Sequence
  Description of Artificial Sequence: Synthetic oligonucleotide
ucauagaucaugccaaagc

SEQ ID NO: 2997637 - RNA, 19 nt, Artificial Sequence
  Description of Artificial Sequence: Synthetic oligonucleotide
uucaugauggcuacggugc

SEQ ID NO: 2997638 - RNA, 19 nt, Artificial Sequence
  Description of Artificial Sequence: Synthetic oligonucleotide
aaggacaucaaugaccauc

SEQ ID NO: 2997639 - RNA, 19 nt, Artificial Sequence
  Description of Artificial Sequence: Synthetic oligonucleotide
uacugugucauucaugaug

SEQ ID NO: 2997640 - RNA, 19 nt, Artificial Sequence
  Description of Artificial Sequence: Synthetic oligonucleotide
aaagccaguuguuuugccg

SEQ ID NO: 2997641 - RNA, 19 nt, Artificial Sequence
  Description of Artificial Sequence: Synthetic oligonucleotide
uagaucaugccaaagccag

SEQ ID NO: 2997642 - RNA, 19 nt, Artificial Sequence
  Description of Artificial Sequence: Synthetic oligonucleotide
agaaucauagaucaugcca

SEQ ID NO: 2997643 - RNA, 19 nt, Artificial Sequence
  Description of Artificial Sequence: Synthetic oligonucleotide
auaaucuagagaaucauag

SEQ ID NO: 2997644 - RNA, 19 nt, Artificial Sequence
  Description of Artificial Sequence: Synthetic oligonucleotide
uuuuggcuaacuuuucccg

SEQ ID NO: 2997645 - RNA, 19 nt, Artificial Sequence
  Description of Artificial Sequence: Synthetic oligonucleotide
ucucauaaaggccaugucu

SEQ ID NO: 2997646 - RNA, 19 nt, Artificial Sequence
  Description of Artificial Sequence: Synthetic oligonucleotide
ugugguuuuguacauuuug

SEQ ID NO: 2997647 - RNA, 19 nt, Artificial Sequence
  Description of Artificial Sequence: Synthetic oligonucleotide
acaaagaugacaucuggug

SEQ ID NO: 2997648 - RNA, 19 nt, Artificial Sequence
  Description of Artificial Sequence: Synthetic oligonucleotide
cauagaucaugccaaagcc

SEQ ID NO: 2997649 - RNA, 19 nt, Artificial Sequence
  Description of Artificial Sequence: Synthetic oligonucleotide
aacauuggccuuugcaguc

SEQ ID NO: 2997650 - RNA, 19 nt, Artificial Sequence
  Description of Artificial Sequence: Synthetic oligonucleotide
guuacugugucauucauga

SEQ ID NO: 2997651 - RNA, 19 nt, Artificial Sequence
  Description of Artificial Sequence: Synthetic oligonucleotide
ucuggugugguuuuguaca

SEQ ID NO: 2997652 - RNA, 19 nt, Artificial Sequence
  Description of Artificial Sequence: Synthetic oligonucleotide
agagaaucauagaucaugc

SEQ ID NO: 2997653 - RNA, 19 nt, Artificial Sequence
  Description of Artificial Sequence: Synthetic oligonucleotide
gaauuucugucuuugguac

SEQ ID NO: 2997654 - RNA, 19 nt, Artificial Sequence
  Description of Artificial Sequence: Synthetic oligonucleotide
uacauuuuggcuaacuuuu

SEQ ID NO: 2997655 - RNA, 19 nt, Artificial Sequence
  Description of Artificial Sequence: Synthetic oligonucleotide
ucuucauucuguucuugcg

SEQ ID NO: 2997656 - RNA, 19 nt, Artificial Sequence
  Description of Artificial Sequence: Synthetic oligonucleotide
aacuuccugguccggaucg

SEQ ID NO: 2997657 - RNA, 19 nt, Artificial Sequence
  Description of Artificial Sequence: Synthetic oligonucleotide
uagagaaucauagaucaug

SEQ ID NO: 2997658 - RNA, 19 nt, Artificial Sequence
  Description of Artificial Sequence: Synthetic oligonucleotide
ucauucaugauggcuacgg

SEQ ID NO: 2997659 - RNA, 19 nt, Artificial Sequence
  Description of Artificial Sequence: Synthetic oligonucleotide
uguucuugcguuccuuacg

SEQ ID NO: 2997660 - RNA, 19 nt, Artificial Sequence
  Description of Artificial Sequence: Synthetic oligonucleotide
ugcauaaucuagagaauca

SEQ ID NO: 2997661 - RNA, 19 nt, Artificial Sequence
  Description of Artificial Sequence: Synthetic oligonucleotide
ucuguuuuccucugaagca

SEQ ID NO: 2997662 - RNA, 19 nt, Artificial Sequence
  Description of Artificial Sequence: Synthetic oligonucleotide
acugugucauucaugaugg

SEQ ID NO: 2997663 - RNA, 19 nt, Artificial Sequence
  Description of Artificial Sequence: Synthetic oligonucleotide
augaccaucuguuuuccuc

SEQ ID NO: 2997664 - RNA, 19 nt, Artificial Sequence
  Description of Artificial Sequence: Synthetic oligonucleotide
uaacuuuucccgaauuucu

SEQ ID NO: 2997665 - RNA, 19 nt, Artificial Sequence
  Description of Artificial Sequence: Synthetic oligonucleotide
acacaaagaugacaucugg

SEQ ID NO: 2997666 - RNA, 19 nt, Artificial Sequence
  Description of Artificial Sequence: Synthetic oligonucleotide
cugucuuugguacuguugc

SEQ ID NO: 2997667 - RNA, 19 nt, Artificial Sequence
  Description of Artificial Sequence: Synthetic oligonucleotide
uucuuugcauaaucuagag

SEQ ID NO: 2997668 - RNA, 19 nt, Artificial Sequence
  Description of Artificial Sequence: Synthetic oligonucleotide
ugguuuuguacauuuuggc

SEQ ID NO: 2997669 - RNA, 19 nt, Artificial Sequence
  Description of Artificial Sequence: Synthetic oligonucleotide
ugaauccgaacacaaagau

SEQ ID NO: 2997670 - RNA, 19 nt, Artificial Sequence
  Description of Artificial Sequence: Synthetic oligonucleotide
uggguucugaauccgaaca

SEQ ID NO: 2997671 - RNA, 19 nt, Artificial Sequence
  Description of Artificial Sequence: Synthetic oligonucleotide
auucaugauggcuacggug

SEQ ID NO: 2997672 - RNA, 19 nt, Artificial Sequence
  Description of Artificial Sequence: Synthetic oligonucleotide
ucaugaacuuccugguccg

SEQ ID NO: 2997673 - RNA, 19 nt, Artificial Sequence
  Description of Artificial Sequence: Synthetic oligonucleotide
uuuuguacauuuuggcuaa

SEQ ID NO: 2997674 - RNA, 19 nt, Artificial Sequence
  Description of Artificial Sequence: Synthetic oligonucleotide
aaaggccaugucuugcaag

SEQ ID NO: 2997675 - RNA, 19 nt, Artificial Sequence
  Description of Artificial Sequence: Synthetic oligonucleotide
aaggccaugucuugcaagu

SEQ ID NO: 2997676 - RNA, 19 nt, Artificial Sequence
  Description of Artificial Sequence: Synthetic oligonucleotide
uaaucuagagaaucauaga

SEQ ID NO: 2997677 - RNA, 19 nt, Artificial Sequence
  Description of Artificial Sequence: Synthetic oligonucleotide
ucuugcguuccuuacguug

SEQ ID NO: 2997678 - RNA, 19 nt, Artificial Sequence
  Description of Artificial Sequence: Synthetic oligonucleotide
uacuguugccuucccaggg

SEQ ID NO: 2997679 - RNA, 19 nt, Artificial Sequence
  Description of Artificial Sequence: Synthetic oligonucleotide
uguuuugccgccaccaaaa

SEQ ID NO: 2997680 - RNA, 19 nt, Artificial Sequence
  Description of Artificial Sequence: Synthetic oligonucleotide
ucugucuuugguacuguug

SEQ ID NO: 2997681 - RNA, 19 nt, Artificial Sequence
  Description of Artificial Sequence: Synthetic oligonucleotide
uuccuuacguuguuuucgg

SEQ ID NO: 2997682 - RNA, 19 nt, Artificial Sequence
  Description of Artificial Sequence: Synthetic oligonucleotide
aagaugacaucuggugugg

SEQ ID NO: 2997683 - RNA, 19 nt, Artificial Sequence
  Description of Artificial Sequence: Synthetic oligonucleotide
aucuggugugguuuuguac

SEQ ID NO: 2997684 - RNA, 19 nt, Artificial Sequence
  Description of Artificial Sequence: Synthetic oligonucleotide
guuccuuacguuguuuucg

SEQ ID NO: 2997685 - RNA, 19 nt, Artificial Sequence
  Description of Artificial Sequence: Synthetic oligonucleotide
uguacauuuuggcuaacuu

SEQ ID NO: 2997686 - RNA, 19 nt, Artificial Sequence
  Description of Artificial Sequence: Synthetic oligonucleotide
gugaaggacaucaaugacc

SEQ ID NO: 2997687 - RNA, 19 nt, Artificial Sequence
  Description of Artificial Sequence: Synthetic oligonucleotide
ucuuugcauaaucuagaga

SEQ ID NO: 2997688 - RNA, 19 nt, Artificial Sequence
  Description of Artificial Sequence: Synthetic oligonucleotide
ucaugccaaagccaguugu

SEQ ID NO: 2997689 - RNA, 19 nt, Artificial Sequence
  Description of Artificial Sequence: Synthetic oligonucleotide
aaaguggguucugaauccg

SEQ ID NO: 2997690 - RNA, 19 nt, Artificial Sequence
  Description of Artificial Sequence: Synthetic oligonucleotide
aagucuguguuugggcucg

SEQ ID NO: 2997691 - RNA, 19 nt, Artificial Sequence
  Description of Artificial Sequence: Synthetic oligonucleotide
gugguuuuguacauuuugg

SEQ ID NO: 2997692 - RNA, 19 nt, Artificial Sequence
  Description of Artificial Sequence: Synthetic oligonucleotide
aauuucugucuuugguacu

SEQ ID NO: 2997693 - RNA, 19 nt, Artificial Sequence
  Description of Artificial Sequence: Synthetic oligonucleotide
gaaucauagaucaugccaa

SEQ ID NO: 2997694 - RNA, 19 nt, Artificial Sequence
  Description of Artificial Sequence: Synthetic oligonucleotide
ucuugcaagucuguguuug

SEQ ID NO: 2997695 - RNA, 19 nt, Artificial Sequence
  Description of Artificial Sequence: Synthetic oligonucleotide
ugucuugcaagucuguguu

SEQ ID NO: 2997696 - RNA, 19 nt, Artificial Sequence
  Description of Artificial Sequence: Synthetic oligonucleotide
uuuggcuaacuuuucccga

SEQ ID NO: 2997697 - RNA, 19 nt, Artificial Sequence
  Description of Artificial Sequence: Synthetic oligonucleotide
gguacuguugccuucccag

SEQ ID NO: 2997698 - RNA, 19 nt, Artificial Sequence
  Description of Artificial Sequence: Synthetic oligonucleotide
uugcauaaucuagagaauc

SEQ ID NO: 2997699 - RNA, 19 nt, Artificial Sequence
  Description of Artificial Sequence: Synthetic oligonucleotide
ugugucauucaugauggcu

SEQ ID NO: 2997700 - RNA, 19 nt, Artificial Sequence
  Description of Artificial Sequence: Synthetic oligonucleotide
ucauaaaggccaugucuug

SEQ ID NO: 2997701 - RNA, 19 nt, Artificial Sequence
  Description of Artificial Sequence: Synthetic oligonucleotide
ugaagcagacgguuaguca

SEQ ID NO: 2997702 - RNA, 19 nt, Artificial Sequence
  Description of Artificial Sequence: Synthetic oligonucleotide
gagaaucauagaucaugcc

SEQ ID NO: 2997703 - RNA, 19 nt, Artificial Sequence
  Description of Artificial Sequence: Synthetic oligonucleotide
auggcuacggugcccgagc

SEQ ID NO: 2997704 - RNA, 19 nt, Artificial Sequence
  Description of Artificial Sequence: Synthetic oligonucleotide
aaucauagaucaugccaaa

SEQ ID NO: 2997705 - RNA, 19 nt, Artificial Sequence
  Description of Artificial Sequence: Synthetic oligonucleotide
auaaaggccaugucuugca

SEQ ID NO: 2997706 - RNA, 19 nt, Artificial Sequence
  Description of Artificial Sequence: Synthetic oligonucleotide
ugaccaucuguuuuccucu

SEQ ID NO: 2997707 - RNA, 19 nt, Artificial Sequence
  Description of Artificial Sequence: Synthetic oligonucleotide
ugcaagucuguguuugggc

SEQ ID NO: 2997708 - RNA, 19 nt, Artificial Sequence
  Description of Artificial Sequence: Synthetic oligonucleotide
uguccagcaccaacauugg

SEQ ID NO: 2997709 - RNA, 19 nt, Artificial Sequence
  Description of Artificial Sequence: Synthetic oligonucleotide
uuugcauaaucuagagaau

SEQ ID NO: 2997710 - RNA, 19 nt, Artificial Sequence
  Description of Artificial Sequence: Synthetic oligonucleotide
cagacgguuagucaugaac

SEQ ID NO: 2997711 - RNA, 19 nt, Artificial Sequence
  Description of Artificial Sequence: Synthetic oligonucleotide
accaacauuggccuuugca

SEQ ID NO: 2997712 - RNA, 19 nt, Artificial Sequence
  Description of Artificial Sequence: Synthetic oligonucleotide
agucaugaacuuccugguc

SEQ ID NO: 2997713 - RNA, 19 nt, Artificial Sequence
  Description of Artificial Sequence: Synthetic oligonucleotide
gaacacaaagaugacaucu

SEQ ID NO: 2997714 - RNA, 19 nt, Artificial Sequence
  Description of Artificial Sequence: Synthetic oligonucleotide
uuuucccgaauuucugucu

SEQ ID NO: 2997715 - RNA, 19 nt, Artificial Sequence
  Description of Artificial Sequence: Synthetic oligonucleotide
uuuuccucugaagcagacg

SEQ ID NO: 2997716 - RNA, 19 nt, Artificial Sequence
  Description of Artificial Sequence: Synthetic oligonucleotide
ccaacauuggccuuugcag

SEQ ID NO: 2997717 - RNA, 19 nt, Artificial Sequence
  Description of Artificial Sequence: Synthetic oligonucleotide
acuuuucccgaauuucugu

SEQ ID NO: 2997718 - RNA, 19 nt, Artificial Sequence
  Description of Artificial Sequence: Synthetic oligonucleotide
gaauccgaacacaaagaug

SEQ ID NO: 2997719 - RNA, 19 nt, Artificial Sequence
  Description of Artificial Sequence: Synthetic oligonucleotide
agacgguuagucaugaacu

SEQ ID NO: 2997720 - RNA, 19 nt, Artificial Sequence
  Description of Artificial Sequence: Synthetic oligonucleotide
ugucauucaugauggcuac

SEQ ID NO: 2997721 - RNA, 19 nt, Artificial Sequence
  Description of Artificial Sequence: Synthetic oligonucleotide
uuuugccgccaccaaaagu

SEQ ID NO: 2997722 - RNA, 19 nt, Artificial Sequence
  Description of Artificial Sequence: Synthetic oligonucleotide
ucuguguuugggcucguuc

SEQ ID NO: 2997723 - RNA, 19 nt, Artificial Sequence
  Description of Artificial Sequence: Synthetic oligonucleotide
uguuuuccucugaagcaga

SEQ ID NO: 2997724 - RNA, 19 nt, Artificial Sequence
  Description of Artificial Sequence: Synthetic oligonucleotide
auuucugucuuugguacug

SEQ ID NO: 2997725 - RNA, 19 nt, Artificial Sequence
  Description of Artificial Sequence: Synthetic oligonucleotide
cauaaaggccaugucuugc

SEQ ID NO: 2997726 - RNA, 19 nt, Artificial Sequence
  Description of Artificial Sequence: Synthetic oligonucleotide
aacuuuucccgaauuucug

SEQ ID NO: 2997727 - RNA, 19 nt, Artificial Sequence
  Description of Artificial Sequence: Synthetic oligonucleotide
gaucguuacugugucauuc

SEQ ID NO: 2997728 - RNA, 19 nt, Artificial Sequence
  Description of Artificial Sequence: Synthetic oligonucleotide
cucugaagcagacgguuag

SEQ ID NO: 2997729 - RNA, 19 nt, Artificial Sequence
  Description of Artificial Sequence: Synthetic oligonucleotide
cuuuucccgaauuucuguc

SEQ ID NO: 2997730 - RNA, 19 nt, Artificial Sequence
  Description of Artificial Sequence: Synthetic oligonucleotide
augucuugcaagucugugu

SEQ ID NO: 2997731 - RNA, 19 nt, Artificial Sequence
  Description of Artificial Sequence: Synthetic oligonucleotide
uuuuguccagcaccaacau

SEQ ID NO: 2997732 - RNA, 19 nt, Artificial Sequence
  Description of Artificial Sequence: Synthetic oligonucleotide
agccaguuguuuugccgcc

SEQ ID NO: 2997733 - RNA, 19 nt, Artificial Sequence
  Description of Artificial Sequence: Synthetic oligonucleotide
uucauucuguucuugcguu

SEQ ID NO: 2997734 - RNA, 19 nt, Artificial Sequence
  Description of Artificial Sequence: Synthetic oligonucleotide
uuacguuguuuucgggaug

SEQ ID NO: 2997735 - RNA, 19 nt, Artificial Sequence
  Description of Artificial Sequence: Synthetic oligonucleotide
aguccccugaccuucuuca

SEQ ID NO: 2997736 - RNA, 19 nt, Artificial Sequence
  Description of Artificial Sequence: Synthetic oligonucleotide
ugccuucccagggugaagg

SEQ ID NO: 2997737 - RNA, 19 nt, Artificial Sequence
  Description of Artificial Sequence: Synthetic oligonucleotide
cuugcaagucuguguuugg

SEQ ID NO: 2997738 - RNA, 19 nt, Artificial Sequence
  Description of Artificial Sequence: Synthetic oligonucleotide
agggugaaggacaucaaug

SEQ ID NO: 2997739 - RNA, 19 nt, Artificial Sequence
  Description of Artificial Sequence: Synthetic oligonucleotide
aaugaccaucuguuuuccu

SEQ ID NO: 2997740 - RNA, 19 nt, Artificial Sequence
  Description of Artificial Sequence: Synthetic oligonucleotide
cuguuuuccucugaagcag

SEQ ID NO: 2997741 - RNA, 19 nt, Artificial Sequence
  Description of Artificial Sequence: Synthetic oligonucleotide
guacuguugccuucccagg

SEQ ID NO: 2997742 - RNA, 19 nt, Artificial Sequence
  Description of Artificial Sequence: Synthetic oligonucleotide
uugccgccaccaaaagugg

SEQ ID NO: 2997743 - RNA, 19 nt, Artificial Sequence
  Description of Artificial Sequence: Synthetic oligonucleotide
uccgaacacaaagaugaca

SEQ ID NO: 2997744 - RNA, 19 nt, Artificial Sequence
  Description of Artificial Sequence: Synthetic oligonucleotide
uugggcucguucuucuuug

SEQ ID NO: 2997745 - RNA, 19 nt, Artificial Sequence
  Description of Artificial Sequence: Synthetic oligonucleotide
guuagucaugaacuuccug

SEQ ID NO: 2997746 - RNA, 19 nt, Artificial Sequence
  Description of Artificial Sequence: Synthetic oligonucleotide
augauggcuacggugcccg

SEQ ID NO: 2997747 - RNA, 19 nt, Artificial Sequence
  Description of Artificial Sequence: Synthetic oligonucleotide
aucguuacugugucauuca

SEQ ID NO: 2997748 - RNA, 19 nt, Artificial Sequence
  Description of Artificial Sequence: Synthetic oligonucleotide
uuguuuugccgccaccaaa

SEQ ID NO: 2997749 - RNA, 19 nt, Artificial Sequence
  Description of Artificial Sequence: Synthetic oligonucleotide
aguuguuuugccgccacca

SEQ ID NO: 2997750 - RNA, 19 nt, Artificial Sequence
  Description of Artificial Sequence: Synthetic oligonucleotide
gaagcagacgguuagucau

SEQ ID NO: 2997751 - RNA, 19 nt, Artificial Sequence
  Description of Artificial Sequence: Synthetic oligonucleotide
cauucuguucuugcguucc

SEQ ID NO: 2997752 - RNA, 19 nt, Artificial Sequence
  Description of Artificial Sequence: Synthetic oligonucleotide
uuggcuaacuuuucccgaa

SEQ ID NO: 2997753 - RNA, 19 nt, Artificial Sequence
  Description of Artificial Sequence: Synthetic oligonucleotide
cugaauccgaacacaaaga

SEQ ID NO: 2997754 - RNA, 19 nt, Artificial Sequence
  Description of Artificial Sequence: Synthetic oligonucleotide
uucucauaaaggccauguc

SEQ ID NO: 2997755 - RNA, 19 nt, Artificial Sequence
  Description of Artificial Sequence: Synthetic oligonucleotide
aggacaucaaugaccaucu

SEQ ID NO: 2997756 - RNA, 19 nt, Artificial Sequence
  Description of Artificial Sequence: Synthetic oligonucleotide
caucuguuuuccucugaag

SEQ ID NO: 2997757 - RNA, 19 nt, Artificial Sequence
  Description of Artificial Sequence: Synthetic oligonucleotide
uucugaauccgaacacaaa

SEQ ID NO: 2997758 - RNA, 19 nt, Artificial Sequence
  Description of Artificial Sequence: Synthetic oligonucleotide
uacguuguuuucgggaugu

SEQ ID NO: 2997759 - RNA, 19 nt, Artificial Sequence
  Description of Artificial Sequence: Synthetic oligonucleotide
auagaucaugccaaagcca

SEQ ID NO: 2997760 - RNA, 19 nt, Artificial Sequence
  Description of Artificial Sequence: Synthetic oligonucleotide
uguuugggcucguucuucu

SEQ ID NO: 2997761 - RNA, 19 nt, Artificial Sequence
  Description of Artificial Sequence: Synthetic oligonucleotide
acgguuagucaugaacuuc

SEQ ID NO: 2997762 - RNA, 19 nt, Artificial Sequence
  Description of Artificial Sequence: Synthetic oligonucleotide
aucauagaucaugccaaag

SEQ ID NO: 2997763 - RNA, 19 nt, Artificial Sequence
  Description of Artificial Sequence: Synthetic oligonucleotide
uuucccgaauuucugucuu

SEQ ID NO: 2997764 - RNA, 19 nt, Artificial Sequence
  Description of Artificial Sequence: Synthetic oligonucleotide
uccuuacguuguuuucggg

SEQ ID NO: 2997765 - RNA, 19 nt, Artificial Sequence
  Description of Artificial Sequence: Synthetic oligonucleotide
uccggaucguuacuguguc

SEQ ID NO: 2997766 - RNA, 19 nt, Artificial Sequence
  Description of Artificial Sequence: Synthetic oligonucleotide
uuugggcucguucuucuuu

SEQ ID NO: 2997767 - RNA, 19 nt, Artificial Sequence
  Description of Artificial Sequence: Synthetic oligonucleotide
ucuguucuugcguuccuua

SEQ ID NO: 2997768 - RNA, 19 nt, Artificial Sequence
  Description of Artificial Sequence: Synthetic oligonucleotide
ucuuugguacuguugccuu

SEQ ID NO: 2997769 - RNA, 19 nt, Artificial Sequence
  Description of Artificial Sequence: Synthetic oligonucleotide
cauaaucuagagaaucaua

SEQ ID NO: 2997770 - RNA, 19 nt, Artificial Sequence
  Description of Artificial Sequence: Synthetic oligonucleotide
ugccgccaccaaaaguggg

SEQ ID NO: 2997771 - RNA, 19 nt, Artificial Sequence
  Description of Artificial Sequence: Synthetic oligonucleotide
uaaaggccaugucuugcaa

SEQ ID NO: 2997772 - RNA, 19 nt, Artificial Sequence
  Description of Artificial Sequence: Synthetic oligonucleotide
accaaaaguggguucugaa

SEQ ID NO: 2997773 - RNA, 19 nt, Artificial Sequence
  Description of Artificial Sequence: Synthetic oligonucleotide
ugaacuuccugguccggau

SEQ ID NO: 2997774 - RNA, 19 nt, Artificial Sequence
  Description of Artificial Sequence: Synthetic oligonucleotide
uuguacauuuuggcuaacu

SEQ ID NO: 2997775 - RNA, 19 nt, Artificial Sequence
  Description of Artificial Sequence: Synthetic oligonucleotide
ucccgaauuucugucuuug

SEQ ID NO: 2997776 - RNA, 19 nt, Artificial Sequence
  Description of Artificial Sequence: Synthetic oligonucleotide
gggugaaggacaucaauga

SEQ ID NO: 2997777 - RNA, 19 nt, Artificial Sequence
  Description of Artificial Sequence: Synthetic oligonucleotide
acuguugccuucccagggu

SEQ ID NO: 2997778 - RNA, 19 nt, Artificial Sequence
  Description of Artificial Sequence: Synthetic oligonucleotide
aucaugccaaagccaguug

SEQ ID NO: 2997779 - RNA, 19 nt, Artificial Sequence
  Description of Artificial Sequence: Synthetic oligonucleotide
uguguuugggcucguucuu

SEQ ID NO: 2997780 - RNA, 19 nt, Artificial Sequence
  Description of Artificial Sequence: Synthetic oligonucleotide
uguugccuucccaggguga

SEQ ID NO: 2997781 - RNA, 19 nt, Artificial Sequence
  Description of Artificial Sequence: Synthetic oligonucleotide
cuguucuugcguuccuuac

SEQ ID NO: 2997782 - RNA, 19 nt, Artificial Sequence
  Description of Artificial Sequence: Synthetic oligonucleotide
guuuugccgccaccaaaag

SEQ ID NO: 2997783 - RNA, 19 nt, Artificial Sequence
  Description of Artificial Sequence: Synthetic oligonucleotide
caagucuguguuugggcuc

SEQ ID NO: 2997784 - RNA, 19 nt, Artificial Sequence
  Description of Artificial Sequence: Synthetic oligonucleotide
uccugguccggaucguuac

SEQ ID NO: 2997785 - RNA, 19 nt, Artificial Sequence
  Description of Artificial Sequence: Synthetic oligonucleotide
ucauucuguucuugcguuc

SEQ ID NO: 2997786 - RNA, 19 nt, Artificial Sequence
  Description of Artificial Sequence: Synthetic oligonucleotide
ggugaaggacaucaaugac

SEQ ID NO: 2997787 - RNA, 19 nt, Artificial Sequence
  Description of Artificial Sequence: Synthetic oligonucleotide
caaagaugacaucuggugu

SEQ ID NO: 2997788 - RNA, 19 nt, Artificial Sequence
  Description of Artificial Sequence: Synthetic oligonucleotide
gguuuuguacauuuuggcu

SEQ ID NO: 2997789 - RNA, 19 nt, Artificial Sequence
  Description of Artificial Sequence: Synthetic oligonucleotide
ucguuacugugucauucau

SEQ ID NO: 2997790 - RNA, 19 nt, Artificial Sequence
  Description of Artificial Sequence: Synthetic oligonucleotide
caugucuugcaagucugug

SEQ ID NO: 2997791 - RNA, 19 nt, Artificial Sequence
  Description of Artificial Sequence: Synthetic oligonucleotide
uucuucucauaaaggccau

SEQ ID NO: 2997792 - RNA, 19 nt, Artificial Sequence
  Description of Artificial Sequence: Synthetic oligonucleotide
ugccaaagccaguuguuuu

SEQ ID NO: 2997793 - RNA, 19 nt, Artificial Sequence
  Description of Artificial Sequence: Synthetic oligonucleotide
guacauuuuggcuaacuuu

SEQ ID NO: 2997794 - RNA, 19 nt, Artificial Sequence
  Description of Artificial Sequence: Synthetic oligonucleotide
ugguacuguugccuuccca

SEQ ID NO: 2997795 - RNA, 19 nt, Artificial Sequence
  Description of Artificial Sequence: Synthetic oligonucleotide
uuugcaguccccugaccuu

SEQ ID NO: 2997796 - RNA, 19 nt, Artificial Sequence
  Description of Artificial Sequence: Synthetic oligonucleotide
uuguuuucgggaugucuuu

SEQ ID NO: 2997797 - RNA, 19 nt, Artificial Sequence
  Description of Artificial Sequence: Synthetic oligonucleotide
cuuugguacuguugccuuc

SEQ ID NO: 2997798 - RNA, 19 nt, Artificial Sequence
  Description of Artificial Sequence: Synthetic oligonucleotide
uuuguccagcaccaacauu

SEQ ID NO: 2997799 - RNA, 19 nt, Artificial Sequence
  Description of Artificial Sequence: Synthetic oligonucleotide
gugucauucaugauggcua

SEQ ID NO: 2997800 - RNA, 19 nt, Artificial Sequence
  Description of Artificial Sequence: Synthetic oligonucleotide
cucauaaaggccaugucuu

SEQ ID NO: 2997801 - RNA, 19 nt, Artificial Sequence
  Description of Artificial Sequence: Synthetic oligonucleotide
gccaaagccaguuguuuug

SEQ ID NO: 2997802 - RNA, 19 nt, Artificial Sequence
  Description of Artificial Sequence: Synthetic oligonucleotide
gauggcuacggugcccgag

SEQ ID NO: 2997803 - RNA, 19 nt, Artificial Sequence
  Description of Artificial Sequence: Synthetic oligonucleotide
aagcagacgguuagucaug

SEQ ID NO: 2997804 - RNA, 19 nt, Artificial Sequence
  Description of Artificial Sequence: Synthetic oligonucleotide
gaccaucuguuuuccucug

SEQ ID NO: 2997805 - RNA, 19 nt, Artificial Sequence
  Description of Artificial Sequence: Synthetic oligonucleotide
cugaagcagacgguuaguc

SEQ ID NO: 2997806 - RNA, 19 nt, Artificial Sequence
  Description of Artificial Sequence: Synthetic oligonucleotide
ucugaagcagacgguuagu

SEQ ID NO: 2997807 - RNA, 19 nt, Artificial Sequence
  Description of Artificial Sequence: Synthetic oligonucleotide
guucuugcguuccuuacgu

SEQ ID NO: 2997808 - RNA, 19 nt, Artificial Sequence
  Description of Artificial Sequence: Synthetic oligonucleotide
guggguucugaauccgaac

SEQ ID NO: 2997809 - RNA, 19 nt, Artificial Sequence
  Description of Artificial Sequence: Synthetic oligonucleotide
uccucugaagcagacgguu

SEQ ID NO: 2997810 - RNA, 19 nt, Artificial Sequence
  Description of Artificial Sequence: Synthetic oligonucleotide
cuuacguuguuuucgggau

SEQ ID NO: 2997811 - RNA, 19 nt, Artificial Sequence
  Description of Artificial Sequence: Synthetic oligonucleotide
uugguacuguugccuuccc

SEQ ID NO: 2997812 - RNA, 19 nt, Artificial Sequence
  Description of Artificial Sequence: Synthetic oligonucleotide
cuuugcaguccccugaccu

SEQ ID NO: 2997813 - RNA, 19 nt, Artificial Sequence
  Description of Artificial Sequence: Synthetic oligonucleotide
gaacuuccugguccggauc

SEQ ID NO: 2997814 - RNA, 19 nt, Artificial Sequence
  Description of Artificial Sequence: Synthetic oligonucleotide
guucugaauccgaacacaa

SEQ ID NO: 2997815 - RNA, 19 nt, Artificial Sequence
  Description of Artificial Sequence: Synthetic oligonucleotide
caugauggcuacggugccc

SEQ ID NO: 2997816 - RNA, 19 nt, Artificial Sequence
  Description of Artificial Sequence: Synthetic oligonucleotide
cuucauucuguucuugcgu

SEQ ID NO: 2997817 - RNA, 19 nt, Artificial Sequence
  Description of Artificial Sequence: Synthetic oligonucleotide
ugacaucuggugugguuuu

SEQ ID NO: 2997818 - RNA, 19 nt, Artificial Sequence
  Description of Artificial Sequence: Synthetic oligonucleotide
auccgaacacaaagaugac

SEQ ID NO: 2997819 - RNA, 19 nt, Artificial Sequence
  Description of Artificial Sequence: Synthetic oligonucleotide
gucauucaugauggcuacg

SEQ ID NO: 2997820 - RNA, 19 nt, Artificial Sequence
  Description of Artificial Sequence: Synthetic oligonucleotide
uggcuaacuuuucccgaau

SEQ ID NO: 2997821 - RNA, 19 nt, Artificial Sequence
  Description of Artificial Sequence: Synthetic oligonucleotide
caacauuggccuuugcagu

SEQ ID NO: 2997822 - RNA, 19 nt, Artificial Sequence
  Description of Artificial Sequence: Synthetic oligonucleotide
cuugcguuccuuacguugu

SEQ ID NO: 2997823 - RNA, 19 nt, Artificial Sequence
  Description of Artificial Sequence: Synthetic oligonucleotide
augaacuuccugguccgga

SEQ ID NO: 2997824 - RNA, 19 nt, Artificial Sequence
  Description of Artificial Sequence: Synthetic oligonucleotide
uguuuucgggaugucuuuu

SEQ ID NO: 2997825 - RNA, 19 nt, Artificial Sequence
  Description of Artificial Sequence: Synthetic oligonucleotide
aaguggguucugaauccga

SEQ ID NO: 2997826 - RNA, 19 nt, Artificial Sequence
  Description of Artificial Sequence: Synthetic oligonucleotide
cugaccuucuucauucugu

SEQ ID NO: 2997827 - RNA, 19 nt, Artificial Sequence
  Description of Artificial Sequence: Synthetic oligonucleotide
uuacugugucauucaugau

SEQ ID NO: 2997828 - RNA, 19 nt, Artificial Sequence
  Description of Artificial Sequence: Synthetic oligonucleotide
cacaaagaugacaucuggu

SEQ ID NO: 2997829 - RNA, 19 nt, Artificial Sequence
  Description of Artificial Sequence: Synthetic oligonucleotide
uuccugguccggaucguua

SEQ ID NO: 2997830 - RNA, 19 nt, Artificial Sequence
  Description of Artificial Sequence: Synthetic oligonucleotide
cuguguuugggcucguucu

SEQ ID NO: 2997831 - RNA, 19 nt, Artificial Sequence
  Description of Artificial Sequence: Synthetic oligonucleotide
ugggcucguucuucuuugc

SEQ ID NO: 2997832 - RNA, 19 nt, Artificial Sequence
  Description of Artificial Sequence: Synthetic oligonucleotide
ggguucugaauccgaacac

SEQ ID NO: 2997833 - RNA, 19 nt, Artificial Sequence
  Description of Artificial Sequence: Synthetic oligonucleotide
uugcaguccccugaccuuc

SEQ ID NO: 2997834 - RNA, 19 nt, Artificial Sequence
  Description of Artificial Sequence: Synthetic oligonucleotide
cuucucauaaaggccaugu

SEQ ID NO: 2997835 - RNA, 19 nt, Artificial Sequence
  Description of Artificial Sequence: Synthetic oligonucleotide
acaucuggugugguuuugu

SEQ ID NO: 2997836 - RNA, 19 nt, Artificial Sequence
  Description of Artificial Sequence: Synthetic oligonucleotide
guuguuuugccgccaccaa

SEQ ID NO: 2997837 - RNA, 19 nt, Artificial Sequence
  Description of Artificial Sequence: Synthetic oligonucleotide
cugguccggaucguuacug

SEQ ID NO: 2997838 - RNA, 19 nt, Artificial Sequence
  Description of Artificial Sequence: Synthetic oligonucleotide
uucugucuuugguacuguu

SEQ ID NO: 2997839 - RNA, 19 nt, Artificial Sequence
  Description of Artificial Sequence: Synthetic oligonucleotide
caugaacuuccugguccgg

SEQ ID NO: 2997840 - RNA, 19 nt, Artificial Sequence
  Description of Artificial Sequence: Synthetic oligonucleotide
auuggccuuugcagucccc

SEQ ID NO: 2997841 - RNA, 19 nt, Artificial Sequence
  Description of Artificial Sequence: Synthetic oligonucleotide
gguucugaauccgaacaca

SEQ ID NO: 2997842 - RNA, 19 nt, Artificial Sequence
  Description of Artificial Sequence: Synthetic oligonucleotide
gacaucuggugugguuuug

SEQ ID NO: 2997843 - RNA, 19 nt, Artificial Sequence
  Description of Artificial Sequence: Synthetic oligonucleotide
ccuuacguuguuuucggga

SEQ ID NO: 2997844 - RNA, 19 nt, Artificial Sequence
  Description of Artificial Sequence: Synthetic oligonucleotide
agcagacgguuagucauga

SEQ ID NO: 2997845 - RNA, 19 nt, Artificial Sequence
  Description of Artificial Sequence: Synthetic oligonucleotide
aguggguucugaauccgaa

SEQ ID NO: 2997846 - RNA, 19 nt, Artificial Sequence
  Description of Artificial Sequence: Synthetic oligonucleotide
agcaccaacauuggccuuu

SEQ ID NO: 2997847 - RNA, 19 nt, Artificial Sequence
  Description of Artificial Sequence: Synthetic oligonucleotide
gaucaugccaaagccaguu

SEQ ID NO: 2997848 - RNA, 19 nt, Artificial Sequence
  Description of Artificial Sequence: Synthetic oligonucleotide
cugugucauucaugauggc

SEQ ID NO: 2997849 - RNA, 19 nt, Artificial Sequence
  Description of Artificial Sequence: Synthetic oligonucleotide
guuguuuucgggaugucuu

SEQ ID NO: 2997850 - RNA, 19 nt, Artificial Sequence
  Description of Artificial Sequence: Synthetic oligonucleotide
cucguucuucuuugcauaa

SEQ ID NO: 2997851 - RNA, 19 nt, Artificial Sequence
  Description of Artificial Sequence: Synthetic oligonucleotide
guccagcaccaacauuggc

SEQ ID NO: 2997852 - RNA, 19 nt, Artificial Sequence
  Description of Artificial Sequence: Synthetic oligonucleotide
uuuguacauuuuggcuaac

SEQ ID NO: 2997853 - RNA, 19 nt, Artificial Sequence
  Description of Artificial Sequence: Synthetic oligonucleotide
ugcaguccccugaccuucu

SEQ ID NO: 2997854 - RNA, 19 nt, Artificial Sequence
  Description of Artificial Sequence: Synthetic oligonucleotide
gaugacaucuggugugguu

SEQ ID NO: 2997855 - RNA, 19 nt, Artificial Sequence
  Description of Artificial Sequence: Synthetic oligonucleotide
aggccaugucuugcaaguc

SEQ ID NO: 2997856 - RNA, 19 nt, Artificial Sequence
  Description of Artificial Sequence: Synthetic oligonucleotide
ccccugaccuucuucauuc

SEQ ID NO: 2997857 - RNA, 19 nt, Artificial Sequence
  Description of Artificial Sequence: Synthetic oligonucleotide
cccgaauuucugucuuugg

SEQ ID NO: 2997858 - RNA, 19 nt, Artificial Sequence
  Description of Artificial Sequence: Synthetic oligonucleotide
gacgguuagucaugaacuu

SEQ ID NO: 2997859 - RNA, 19 nt, Artificial Sequence
  Description of Artificial Sequence: Synthetic oligonucleotide
augccaaagccaguuguuu

SEQ ID NO: 2997860 - RNA, 19 nt, Artificial Sequence
  Description of Artificial Sequence: Synthetic oligonucleotide
gcaagucuguguuugggcu

SEQ ID NO: 2997861 - RNA, 19 nt, Artificial Sequence
  Description of Artificial Sequence: Synthetic oligonucleotide
uucccgaauuucugucuuu

SEQ ID NO: 2997862 - RNA, 19 nt, Artificial Sequence
  Description of Artificial Sequence: Synthetic oligonucleotide
ccgaacacaaagaugacau

SEQ ID NO: 2997863 - RNA, 19 nt, Artificial Sequence
  Description of Artificial Sequence: Synthetic oligonucleotide
ucguucuucuuugcauaau

SEQ ID NO: 2997864 - RNA, 19 nt, Artificial Sequence
  Description of Artificial Sequence: Synthetic oligonucleotide
uugccuucccagggugaag

SEQ ID NO: 2997865 - RNA, 19 nt, Artificial Sequence
  Description of Artificial Sequence: Synthetic oligonucleotide
uugcguuccuuacguuguu

SEQ ID NO: 2997866 - RNA, 19 nt, Artificial Sequence
  Description of Artificial Sequence: Synthetic oligonucleotide
agaucaugccaaagccagu

SEQ ID NO: 2997867 - RNA, 19 nt, Artificial Sequence
  Description of Artificial Sequence: Synthetic oligonucleotide
ggugugguuuuguacauuu

SEQ ID NO: 2997868 - RNA, 19 nt, Artificial Sequence
  Description of Artificial Sequence: Synthetic oligonucleotide
cguuacugugucauucaug

SEQ ID NO: 2997869 - RNA, 19 nt, Artificial Sequence
  Description of Artificial Sequence: Synthetic oligonucleotide
uucuugcguuccuuacguu

SEQ ID NO: 2997870 - RNA, 19 nt, Artificial Sequence
  Description of Artificial Sequence: Synthetic oligonucleotide
guguuugggcucguucuuc

SEQ ID NO: 2997871 - RNA, 19 nt, Artificial Sequence
  Description of Artificial Sequence: Synthetic oligonucleotide
agaugacaucugguguggu

SEQ ID NO: 2997872 - RNA, 19 nt, Artificial Sequence
  Description of Artificial Sequence: Synthetic oligonucleotide
gcucguucuucuuugcaua

SEQ ID NO: 2997873 - RNA, 19 nt, Artificial Sequence
  Description of Artificial Sequence: Synthetic oligonucleotide
acguuguuuucgggauguc

SEQ ID NO: 2997874 - RNA, 19 nt, Artificial Sequence
  Description of Artificial Sequence: Synthetic oligonucleotide
cgaauuucugucuuuggua

SEQ ID NO: 2997875 - RNA, 19 nt, Artificial Sequence
  Description of Artificial Sequence: Synthetic oligonucleotide
caguccccugaccuucuuc

SEQ ID NO: 2997876 - RNA, 19 nt, Artificial Sequence
  Description of Artificial Sequence: Synthetic oligonucleotide
guugccuucccagggugaa

SEQ ID NO: 2997877 - RNA, 19 nt, Artificial Sequence
  Description of Artificial Sequence: Synthetic oligonucleotide
cccagggugaaggacauca

SEQ ID NO: 2997878 - RNA, 19 nt, Artificial Sequence
  Description of Artificial Sequence: Synthetic oligonucleotide
ugauggcuacggugcccga

SEQ ID NO: 2997879 - RNA, 19 nt, Artificial Sequence
  Description of Artificial Sequence: Synthetic oligonucleotide
caucuggugugguuuugua

SEQ ID NO: 2997880 - RNA, 19 nt, Artificial Sequence
  Description of Artificial Sequence: Synthetic oligonucleotide
ccugaccuucuucauucug

SEQ ID NO: 2997881 - RNA, 19 nt, Artificial Sequence
  Description of Artificial Sequence: Synthetic oligonucleotide
ugcguuccuuacguuguuu

SEQ ID NO: 2997882 - RNA, 19 nt, Artificial Sequence
  Description of Artificial Sequence: Synthetic oligonucleotide
ggccuuugcaguccccuga

SEQ ID NO: 2997883 - RNA, 19 nt, Artificial Sequence
  Description of Artificial Sequence: Synthetic oligonucleotide
cuagagaaucauagaucau

SEQ ID NO: 2997884 - RNA, 19 nt, Artificial Sequence
  Description of Artificial Sequence: Synthetic oligonucleotide
cauucaugauggcuacggu

SEQ ID NO: 2997885 - RNA, 19 nt, Artificial Sequence
  Description of Artificial Sequence: Synthetic oligonucleotide
caccaaaaguggguucuga

SEQ ID NO: 2997886 - RNA, 19 nt, Artificial Sequence
  Description of Artificial Sequence: Synthetic oligonucleotide
gcuaacuuuucccgaauuu

SEQ ID NO: 2997887 - RNA, 19 nt, Artificial Sequence
  Description of Artificial Sequence: Synthetic oligonucleotide
ggccaugucuugcaagucu

SEQ ID NO: 2997888 - RNA, 19 nt, Artificial Sequence
  Description of Artificial Sequence: Synthetic oligonucleotide
caugccaaagccaguuguu

SEQ ID NO: 2997889 - RNA, 19 nt, Artificial Sequence
  Description of Artificial Sequence: Synthetic oligonucleotide
uggugugguuuuguacauu

SEQ ID NO: 2997890 - RNA, 19 nt, Artificial Sequence
  Description of Artificial Sequence: Synthetic oligonucleotide
ggacaucaaugaccaucug

SEQ ID NO: 2997891 - RNA, 19 nt, Artificial Sequence
  Description of Artificial Sequence: Synthetic oligonucleotide
gccuuugcaguccccugac

SEQ ID NO: 2997892 - RNA, 19 nt, Artificial Sequence
  Description of Artificial Sequence: Synthetic oligonucleotide
ccaguuguuuugccgccac

SEQ ID NO: 2997893 - RNA, 19 nt, Artificial Sequence
  Description of Artificial Sequence: Synthetic oligonucleotide
acuuccugguccggaucgu

SEQ ID NO: 2997894 - RNA, 19 nt, Artificial Sequence
  Description of Artificial Sequence: Synthetic oligonucleotide
ccagcaccaacauuggccu

SEQ ID NO: 2997895 - RNA, 19 nt, Artificial Sequence
  Description of Artificial Sequence: Synthetic oligonucleotide
guccggaucguuacugugu

SEQ ID NO: 2997896 - RNA, 19 nt, Artificial Sequence
  Description of Artificial Sequence: Synthetic oligonucleotide
caccaacauuggccuuugc

SEQ ID NO: 2997897 - RNA, 19 nt, Artificial Sequence
  Description of Artificial Sequence: Synthetic oligonucleotide
gcauaaucuagagaaucau

SEQ ID NO: 2997898 - RNA, 19 nt, Artificial Sequence
  Description of Artificial Sequence: Synthetic oligonucleotide
cguuccuuacguuguuuuc

SEQ ID NO: 2997899 - RNA, 19 nt, Artificial Sequence
  Description of Artificial Sequence: Synthetic oligonucleotide
cgaacacaaagaugacauc

SEQ ID NO: 2997900 - RNA, 19 nt, Artificial Sequence
  Description of Artificial Sequence: Synthetic oligonucleotide
cagggugaaggacaucaau

SEQ ID NO: 2997901 - RNA, 19 nt, Artificial Sequence
  Description of Artificial Sequence: Synthetic oligonucleotide
ggcucguucuucuuugcau

SEQ ID NO: 2997902 - RNA, 19 nt, Artificial Sequence
  Description of Artificial Sequence: Synthetic oligonucleotide
ccaucuguuuuccucugaa

SEQ ID NO: 2997903 - RNA, 19 nt, Artificial Sequence
  Description of Artificial Sequence: Synthetic oligonucleotide
ccaaaaguggguucugaau

SEQ ID NO: 2997904 - RNA, 19 nt, Artificial Sequence
  Description of Artificial Sequence: Synthetic oligonucleotide
ccgaauuucugucuuuggu

SEQ ID NO: 2997905 - RNA, 19 nt, Artificial Sequence
  Description of Artificial Sequence: Synthetic oligonucleotide
ccuuugcaguccccugacc

SEQ ID NO: 2997906 - RNA, 19 nt, Artificial Sequence
  Description of Artificial Sequence: Synthetic oligonucleotide
gggcucguucuucuuugca

SEQ ID NO: 2997907 - RNA, 19 nt, Artificial Sequence
  Description of Artificial Sequence: Synthetic oligonucleotide
cuggugugguuuuguacau

SEQ ID NO: 2997908 - RNA, 19 nt, Artificial Sequence
  Description of Artificial Sequence: Synthetic oligonucleotide
gccaccaaaaguggguucu

SEQ ID NO: 2997909 - RNA, 19 nt, Artificial Sequence
  Description of Artificial Sequence: Synthetic oligonucleotide
gaaggacaucaaugaccau

SEQ ID NO: 2997910 - RNA, 19 nt, Artificial Sequence
  Description of Artificial Sequence: Synthetic oligonucleotide
gcaccaacauuggccuuug

SEQ ID NO: 2997911 - RNA, 19 nt, Artificial Sequence
  Description of Artificial Sequence: Synthetic oligonucleotide
ggcuaacuuuucccgaauu

SEQ ID NO: 2997912 - RNA, 19 nt, Artificial Sequence
  Description of Artificial Sequence: Synthetic oligonucleotide
gucuugcaagucuguguuu

SEQ ID NO: 2997913 - RNA, 19 nt, Artificial Sequence
  Description of Artificial Sequence: Synthetic oligonucleotide
ccaccaaaaguggguucug

SEQ ID NO: 2997914 - RNA, 19 nt, Artificial Sequence
  Description of Artificial Sequence: Synthetic oligonucleotide
agucuguguuugggcucgu

SEQ ID NO: 2997915 - RNA, 19 nt, Artificial Sequence
  Description of Artificial Sequence: Synthetic oligonucleotide
guuugggcucguucuucuu

SEQ ID NO: 2997916 - RNA, 19 nt, Artificial Sequence
  Description of Artificial Sequence: Synthetic oligonucleotide
ccucugaagcagacgguua

SEQ ID NO: 2997917 - RNA, 19 nt, Artificial Sequence
  Description of Artificial Sequence: Synthetic oligonucleotide
gcguuccuuacguuguuuu

SEQ ID NO: 2997918 - RNA, 19 nt, Artificial Sequence
  Description of Artificial Sequence: Synthetic oligonucleotide
gccaguuguuuugccgcca

SEQ ID NO: 2997919 - RNA, 19 nt, Artificial Sequence
  Description of Artificial Sequence: Synthetic oligonucleotide
gccuucccagggugaagga

SEQ ID NO: 2997920 - RNA, 19 nt, Artificial Sequence
  Description of Artificial Sequence: Synthetic oligonucleotide
gccgccaccaaaagugggu

SEQ ID NO: 2997921 - RNA, 19 nt, Artificial Sequence
  Description of Artificial Sequence: Synthetic oligonucleotide
guccccugaccuucuucau

SEQ ID NO: 2997922 - RNA, 19 nt, Artificial Sequence
  Description of Artificial Sequence: Synthetic oligonucleotide
gcagacgguuagucaugaa

SEQ ID NO: 2997923 - RNA, 19 nt, Artificial Sequence
  Description of Artificial Sequence: Synthetic oligonucleotide
ccagggugaaggacaucaa

SEQ ID NO: 2997924 - RNA, 19 nt, Artificial Sequence
  Description of Artificial Sequence: Synthetic oligonucleotide
ggaucguuacugugucauu

SEQ ID NO: 2997925 - RNA, 19 nt, Artificial Sequence
  Description of Artificial Sequence: Synthetic oligonucleotide
cgccaccaaaaguggguuc

SEQ ID NO: 2997926 - RNA, 19 nt, Artificial Sequence
  Description of Artificial Sequence: Synthetic oligonucleotide
ccaugucuugcaagucugu

SEQ ID NO: 2997927 - RNA, 19 nt, Artificial Sequence
  Description of Artificial Sequence: Synthetic oligonucleotide
ccggaucguuacuguguca

SEQ ID NO: 2997928 - RNA, 19 nt, Artificial Sequence
  Description of Artificial Sequence: Synthetic oligonucleotide
cguuguuuucgggaugucu

SEQ ID NO: 2997929 - RNA, 19 nt, Artificial Sequence
  Description of Artificial Sequence: Synthetic oligonucleotide
cuuccugguccggaucguu

SEQ ID NO: 2997930 - RNA, 19 nt, Artificial Sequence
  Description of Artificial Sequence: Synthetic oligonucleotide
cggaucguuacugugucau

SEQ ID NO: 2997931 - RNA, 19 nt, Artificial Sequence
  Description of Artificial Sequence: Synthetic oligonucleotide
cagcaccaacauuggccuu

SEQ ID NO: 2997932 - RNA, 19 nt, Artificial Sequence
  Description of Artificial Sequence: Synthetic oligonucleotide
gucuguguuugggcucguu

SEQ ID NO: 2997933 - RNA, 19 nt, Artificial Sequence
  Description of Artificial Sequence: Synthetic oligonucleotide
ccugguccggaucguuacu

SEQ ID NO: 2997934 - RNA, 19 nt, Artificial Sequence
  Description of Artificial Sequence: Synthetic oligonucleotide
gcaguccccugaccuucuu

SEQ ID NO: 2997935 - RNA, 19 nt, Artificial Sequence
  Description of Artificial Sequence: Synthetic oligonucleotide
ccgccaccaaaaguggguu

SEQ ID NO: 2997936 - RNA, 19 nt, Artificial Sequence
  Description of Artificial Sequence: Synthetic oligonucleotide
ucuguuuccugucauaacg

SEQ ID NO: 2997937 - RNA, 19 nt, Artificial Sequence
  Description of Artificial Sequence: Synthetic oligonucleotide
auacaaagaauccuugccc

SEQ ID NO: 2997938 - RNA, 19 nt, Artificial Sequence
  Description of Artificial Sequence: Synthetic oligonucleotide
uacugugucacuuuauggg

SEQ ID NO: 2997939 - RNA, 19 nt, Artificial Sequence
  Description of Artificial Sequence: Synthetic oligonucleotide
uaucggcacagaaagaacg

SEQ ID NO: 2997940 - RNA, 19 nt, Artificial Sequence
  Description of Artificial Sequence: Synthetic oligonucleotide
uuuuauugucuccauacca

SEQ ID NO: 2997941 - RNA, 19 nt, Artificial Sequence
  Description of Artificial Sequence: Synthetic oligonucleotide
gaaagaacgaggcaaggcc

SEQ ID NO: 2997942 - RNA, 19 nt, Artificial Sequence
  Description of Artificial Sequence: Synthetic oligonucleotide
cuucuuuguaguuuuagcc

SEQ ID NO: 2997943 - RNA, 19 nt, Artificial Sequence
  Description of Artificial Sequence: Synthetic oligonucleotide
auuuuauugucuccauacc

SEQ ID NO: 2997944 - RNA, 19 nt, Artificial Sequence
  Description of Artificial Sequence: Synthetic oligonucleotide
uuaauagccagcauccucu

SEQ ID NO: 2997945 - RNA, 19 nt, Artificial Sequence
  Description of Artificial Sequence: Synthetic oligonucleotide
agcacaaucuucuuuguag

SEQ ID NO: 2997946 - RNA, 19 nt, Artificial Sequence
  Description of Artificial Sequence: Synthetic oligonucleotide
cuugcaucucuuaauagcc

SEQ ID NO: 2997947 - RNA, 19 nt, Artificial Sequence
  Description of Artificial Sequence: Synthetic oligonucleotide
accauagccacucuguuuc

SEQ ID NO: 2997948 - RNA, 19 nt, Artificial Sequence
  Description of Artificial Sequence: Synthetic oligonucleotide
accaagagcagcuuagaac

SEQ ID NO: 2997949 - RNA, 19 nt, Artificial Sequence
  Description of Artificial Sequence: Synthetic oligonucleotide
aaaauaggcuuagucugcc

SEQ ID NO: 2997950 - RNA, 19 nt, Artificial Sequence
  Description of Artificial Sequence: Synthetic oligonucleotide
cucuuaauagccagcaucc

SEQ ID NO: 2997951 - RNA, 19 nt, Artificial Sequence
  Description of Artificial Sequence: Synthetic oligonucleotide
cauacaaagaauccuugcc

SEQ ID NO: 2997952 - RNA, 19 nt, Artificial Sequence
  Description of Artificial Sequence: Synthetic oligonucleotide
uuucccugggcauacaaag

SEQ ID NO: 2997953 - RNA, 19 nt, Artificial Sequence
  Description of Artificial Sequence: Synthetic oligonucleotide
auugucuccauaccaagag

SEQ ID NO: 2997954 - RNA, 19 nt, Artificial Sequence
  Description of Artificial Sequence: Synthetic oligonucleotide
uuuauugucuccauaccaa

SEQ ID NO: 2997955 - RNA, 19 nt, Artificial Sequence
  Description of Artificial Sequence: Synthetic oligonucleotide
uguacugugucacuuuaug

SEQ ID NO: 2997956 - RNA, 19 nt, Artificial Sequence
  Description of Artificial Sequence: Synthetic oligonucleotide
uuuccugucauaacgccgc

SEQ ID NO: 2997957 - RNA, 19 nt, Artificial Sequence
  Description of Artificial Sequence: Synthetic oligonucleotide
aauaggcuuagucugccca

SEQ ID NO: 2997958 - RNA, 19 nt, Artificial Sequence
  Description of Artificial Sequence: Synthetic oligonucleotide
auagccagcauccucuuag

SEQ ID NO: 2997959 - RNA, 19 nt, Artificial Sequence
  Description of Artificial Sequence: Synthetic oligonucleotide
ugucuccauaccaagagca

SEQ ID NO: 2997960 - RNA, 19 nt, Artificial Sequence
  Description of Artificial Sequence: Synthetic oligonucleotide
ggaaaauaggcuuagucug

SEQ ID NO: 2997961 - RNA, 19 nt, Artificial Sequence
  Description of Artificial Sequence: Synthetic oligonucleotide
aaauaggcuuagucugccc

SEQ ID NO: 2997962 - RNA, 19 nt, Artificial Sequence
  Description of Artificial Sequence: Synthetic oligonucleotide
uucuuuguaguuuuagccu

SEQ ID NO: 2997963 - RNA, 19 nt, Artificial Sequence
  Description of Artificial Sequence: Synthetic oligonucleotide
acguucaccauguuggcgg

SEQ ID NO: 2997964 - RNA, 19 nt, Artificial Sequence
  Description of Artificial Sequence: Synthetic oligonucleotide
ucuuagaucugcaguuggg

SEQ ID NO: 2997965 - RNA, 19 nt, Artificial Sequence
  Description of Artificial Sequence: Synthetic oligonucleotide
agcagcuuagaacuggauc

SEQ ID NO: 2997966 - RNA, 19 nt, Artificial Sequence
  Description of Artificial Sequence: Synthetic oligonucleotide
ggaacguucaccauguugg

SEQ ID NO: 2997967 - RNA, 19 nt, Artificial Sequence
  Description of Artificial Sequence: Synthetic oligonucleotide
ucuucuuuguaguuuuagc

SEQ ID NO: 2997968 - RNA, 19 nt, Artificial Sequence
  Description of Artificial Sequence: Synthetic oligonucleotide
agaaagaacgaggcaaggc

SEQ ID NO: 2997969 - RNA, 19 nt, Artificial Sequence
  Description of Artificial Sequence: Synthetic oligonucleotide
uuaggaacguucaccaugu

SEQ ID NO: 2997970 - RNA, 19 nt, Artificial Sequence
  Description of Artificial Sequence: Synthetic oligonucleotide
cauuucuugcagaacgucc

SEQ ID NO: 2997971 - RNA, 19 nt, Artificial Sequence
  Description of Artificial Sequence: Synthetic oligonucleotide
uacaaagaauccuugcccu

SEQ ID NO: 2997972 - RNA, 19 nt, Artificial Sequence
  Description of Artificial Sequence: Synthetic oligonucleotide
cacuuuauggggcuggugc

SEQ ID NO: 2997973 - RNA, 19 nt, Artificial Sequence
  Description of Artificial Sequence: Synthetic oligonucleotide
ucuugcagaacguccggcg

SEQ ID NO: 2997974 - RNA, 19 nt, Artificial Sequence
  Description of Artificial Sequence: Synthetic oligonucleotide
cuuaggaacguucaccaug

SEQ ID NO: 2997975 - RNA, 19 nt, Artificial Sequence
  Description of Artificial Sequence: Synthetic oligonucleotide
cauaccaagagcagcuuag

SEQ ID NO: 2997976 - RNA, 19 nt, Artificial Sequence
  Description of Artificial Sequence: Synthetic oligonucleotide
ugcaucucuuaauagccag

SEQ ID NO: 2997977 - RNA, 19 nt, Artificial Sequence
  Description of Artificial Sequence: Synthetic oligonucleotide
aagagcagcuuagaacugg

SEQ ID NO: 2997978 - RNA, 19 nt, Artificial Sequence
  Description of Artificial Sequence: Synthetic oligonucleotide
auuucuugcagaacguccg

SEQ ID NO: 2997979 - RNA, 19 nt, Artificial Sequence
  Description of Artificial Sequence: Synthetic oligonucleotide
guacugugucacuuuaugg

SEQ ID NO: 2997980 - RNA, 19 nt, Artificial Sequence
  Description of Artificial Sequence: Synthetic oligonucleotide
cuuagucugcccaccauag

SEQ ID NO: 2997981 - RNA, 19 nt, Artificial Sequence
  Description of Artificial Sequence: Synthetic oligonucleotide
guuggcgggagcgauaucg

SEQ ID NO: 2997982 - RNA, 19 nt, Artificial Sequence
  Description of Artificial Sequence: Synthetic oligonucleotide
uauugucuccauaccaaga

SEQ ID NO: 2997983 - RNA, 19 nt, Artificial Sequence
  Description of Artificial Sequence: Synthetic oligonucleotide
agggacggaaguuuauagg

SEQ ID NO: 2997984 - RNA, 19 nt, Artificial Sequence
  Description of Artificial Sequence: Synthetic oligonucleotide
gaaaauaggcuuagucugc

SEQ ID NO: 2997985 - RNA, 19 nt, Artificial Sequence
  Description of Artificial Sequence: Synthetic oligonucleotide
uuucuugcagaacguccgg

SEQ ID NO: 2997986 - RNA, 19 nt, Artificial Sequence
  Description of Artificial Sequence: Synthetic oligonucleotide
gcgauaucggcacagaaag

SEQ ID NO: 2997987 - RNA, 19 nt, Artificial Sequence
  Description of Artificial Sequence: Synthetic oligonucleotide
auaggcuuagucugcccac

SEQ ID NO: 2997988 - RNA, 19 nt, Artificial Sequence
  Description of Artificial Sequence: Synthetic oligonucleotide
gauaucggcacagaaagaa

SEQ ID NO: 2997989 - RNA, 19 nt, Artificial Sequence
  Description of Artificial Sequence: Synthetic oligonucleotide
uguuuccugucauaacgcc

SEQ ID NO: 2997990 - RNA, 19 nt, Artificial Sequence
  Description of Artificial Sequence: Synthetic oligonucleotide
aaagaauccuugcccuucu

SEQ ID NO: 2997991 - RNA, 19 nt, Artificial Sequence
  Description of Artificial Sequence: Synthetic oligonucleotide
cauaacgccgcuuucccug

SEQ ID NO: 2997992 - RNA, 19 nt, Artificial Sequence
  Description of Artificial Sequence: Synthetic oligonucleotide
cucaacacacucaagccuc

SEQ ID NO: 2997993 - RNA, 19 nt, Artificial Sequence
  Description of Artificial Sequence: Synthetic oligonucleotide
cuuaauagccagcauccuc

SEQ ID NO: 2997994 - RNA, 19 nt, Artificial Sequence
  Description of Artificial Sequence: Synthetic oligonucleotide
ccacauuucuugcagaacg

SEQ ID NO: 2997995 - RNA, 19 nt, Artificial Sequence
  Description of Artificial Sequence: Synthetic oligonucleotide
aaagaacgaggcaaggcca

SEQ ID NO: 2997996 - RNA, 19 nt, Artificial Sequence
  Description of Artificial Sequence: Synthetic oligonucleotide
uugcagaacguccggcggg

SEQ ID NO: 2997997 - RNA, 19 nt, Artificial Sequence
  Description of Artificial Sequence: Synthetic oligonucleotide
aggaacguucaccauguug

SEQ ID NO: 2997998 - RNA, 19 nt, Artificial Sequence
  Description of Artificial Sequence: Synthetic oligonucleotide
cuuagaucugcaguugggc

SEQ ID NO: 2997999 - RNA, 19 nt, Artificial Sequence
  Description of Artificial Sequence: Synthetic oligonucleotide
ugucauaacgccgcuuucc

SEQ ID NO: 2998000 - RNA, 19 nt, Artificial Sequence
  Description of Artificial Sequence: Synthetic oligonucleotide
aacguucaccauguuggcg

SEQ ID NO: 2998001 - RNA, 19 nt, Artificial Sequence
  Description of Artificial Sequence: Synthetic oligonucleotide
cuguuuccugucauaacgc

SEQ ID NO: 2998002 - RNA, 19 nt, Artificial Sequence
  Description of Artificial Sequence: Synthetic oligonucleotide
uugucuccauaccaagagc

SEQ ID NO: 2998003 - RNA, 19 nt, Artificial Sequence
  Description of Artificial Sequence: Synthetic oligonucleotide
cucuuagaucugcaguugg

SEQ ID NO: 2998004 - RNA, 19 nt, Artificial Sequence
  Description of Artificial Sequence: Synthetic oligonucleotide
aacgccgcuuucccugggc

SEQ ID NO: 2998005 - RNA, 19 nt, Artificial Sequence
  Description of Artificial Sequence: Synthetic oligonucleotide
uugggcucaacacacucaa

SEQ ID NO: 2998006 - RNA, 19 nt, Artificial Sequence
  Description of Artificial Sequence: Synthetic oligonucleotide
ugcuugcaucucuuaauag

SEQ ID NO: 2998007 - RNA, 19 nt, Artificial Sequence
  Description of Artificial Sequence: Synthetic oligonucleotide
gcagcuuagaacuggauca

SEQ ID NO: 2998008 - RNA, 19 nt, Artificial Sequence
  Description of Artificial Sequence: Synthetic oligonucleotide
gucuuaggaacguucacca

SEQ ID NO: 2998009 - RNA, 19 nt, Artificial Sequence
  Description of Artificial Sequence: Synthetic oligonucleotide
ugucacuuuauggggcugg

SEQ ID NO: 2998010 - RNA, 19 nt, Artificial Sequence
  Description of Artificial Sequence: Synthetic oligonucleotide
cuuaucgccucccaguuca

SEQ ID NO: 2998011 - RNA, 19 nt, Artificial Sequence
  Description of Artificial Sequence: Synthetic oligonucleotide
gcuugcaucucuuaauagc

SEQ ID NO: 2998012 - RNA, 19 nt, Artificial Sequence
  Description of Artificial Sequence: Synthetic oligonucleotide
auccucuuagaucugcagu

SEQ ID NO: 2998013 - RNA, 19 nt, Artificial Sequence
  Description of Artificial Sequence: Synthetic oligonucleotide
uccucuuagaucugcaguu

SEQ ID NO: 2998014 - RNA, 19 nt, Artificial Sequence
  Description of Artificial Sequence: Synthetic oligonucleotide
uuucggaaaauaggcuuag

SEQ ID NO: 2998015 - RNA, 19 nt, Artificial Sequence
  Description of Artificial Sequence: Synthetic oligonucleotide
guuuccugucauaacgccg

SEQ ID NO: 2998016 - RNA, 19 nt, Artificial Sequence
  Description of Artificial Sequence: Synthetic oligonucleotide
ugugucacuuuauggggcu

SEQ ID NO: 2998017 - RNA, 19 nt, Artificial Sequence
  Description of Artificial Sequence: Synthetic oligonucleotide
ucccugggcauacaaagaa

SEQ ID NO: 2998018 - RNA, 19 nt, Artificial Sequence
  Description of Artificial Sequence: Synthetic oligonucleotide
ucuccauaccaagagcagc

SEQ ID NO: 2998019 - RNA, 19 nt, Artificial Sequence
  Description of Artificial Sequence: Synthetic oligonucleotide
cuugcagaacguccggcgg

SEQ ID NO: 2998020 - RNA, 19 nt, Artificial Sequence
  Description of Artificial Sequence: Synthetic oligonucleotide
uggugcuugccacauuucu

SEQ ID NO: 2998021 - RNA, 19 nt, Artificial Sequence
  Description of Artificial Sequence: Synthetic oligonucleotide
acgaggcaaggccagggac

SEQ ID NO: 2998022 - RNA, 19 nt, Artificial Sequence
  Description of Artificial Sequence: Synthetic oligonucleotide
uugcaucucuuaauagcca

SEQ ID NO: 2998023 - RNA, 19 nt, Artificial Sequence
  Description of Artificial Sequence: Synthetic oligonucleotide
acagaaagaacgaggcaag

SEQ ID NO: 2998024 - RNA, 19 nt, Artificial Sequence
  Description of Artificial Sequence: Synthetic oligonucleotide
gucauaacgccgcuuuccc

SEQ ID NO: 2998025 - RNA, 19 nt, Artificial Sequence
  Description of Artificial Sequence: Synthetic oligonucleotide
cagggacggaaguuuauag

SEQ ID NO: 2998026 - RNA, 19 nt, Artificial Sequence
  Description of Artificial Sequence: Synthetic oligonucleotide
uuggcgggagcgauaucgg

SEQ ID NO: 2998027 - RNA, 19 nt, Artificial Sequence
  Description of Artificial Sequence: Synthetic oligonucleotide
aagaacgaggcaaggccag

SEQ ID NO: 2998028 - RNA, 19 nt, Artificial Sequence
  Description of Artificial Sequence: Synthetic oligonucleotide
acuuuauggggcuggugcu

SEQ ID NO: 2998029 - RNA, 19 nt, Artificial Sequence
  Description of Artificial Sequence: Synthetic oligonucleotide
aucuucuuuguaguuuuag

SEQ ID NO: 2998030 - RNA, 19 nt, Artificial Sequence
  Description of Artificial Sequence: Synthetic oligonucleotide
gggcucaacacacucaagc

SEQ ID NO: 2998031 - RNA, 19 nt, Artificial Sequence
  Description of Artificial Sequence: Synthetic oligonucleotide
auaucggcacagaaagaac

SEQ ID NO: 2998032 - RNA, 19 nt, Artificial Sequence
  Description of Artificial Sequence: Synthetic oligonucleotide
uuagucugcccaccauagc

SEQ ID NO: 2998033 - RNA, 19 nt, Artificial Sequence
  Description of Artificial Sequence: Synthetic oligonucleotide
uucaccauguuggcgggag

SEQ ID NO: 2998034 - RNA, 19 nt, Artificial Sequence
  Description of Artificial Sequence: Synthetic oligonucleotide
agcuuagaacuggaucacc

SEQ ID NO: 2998035 - RNA, 19 nt, Artificial Sequence
  Description of Artificial Sequence: Synthetic oligonucleotide
auagccacucuguuuccug

SEQ ID NO: 2998036 - RNA, 19 nt, Artificial Sequence
  Description of Artificial Sequence: Synthetic oligonucleotide
aucaccuggcccuuucucu

SEQ ID NO: 2998037 - RNA, 19 nt, Artificial Sequence
  Description of Artificial Sequence: Synthetic oligonucleotide
gaacguucaccauguuggc

SEQ ID NO: 2998038 - RNA, 19 nt, Artificial Sequence
  Description of Artificial Sequence: Synthetic oligonucleotide
cacagaaagaacgaggcaa

SEQ ID NO: 2998039 - RNA, 19 nt, Artificial Sequence
  Description of Artificial Sequence: Synthetic oligonucleotide
uugcccuucuuguacugug

SEQ ID NO: 2998040 - RNA, 19 nt, Artificial Sequence
  Description of Artificial Sequence: Synthetic oligonucleotide
uaccaagagcagcuuagaa

SEQ ID NO: 2998041 - RNA, 19 nt, Artificial Sequence
  Description of Artificial Sequence: Synthetic oligonucleotide
uucuuaucgccucccaguu

SEQ ID NO: 2998042 - RNA, 19 nt, Artificial Sequence
  Description of Artificial Sequence: Synthetic oligonucleotide
uuuauggggcuggugcuug

SEQ ID NO: 2998043 - RNA, 19 nt, Artificial Sequence
  Description of Artificial Sequence: Synthetic oligonucleotide
ggcacagaaagaacgaggc

SEQ ID NO: 2998044 - RNA, 19 nt, Artificial Sequence
  Description of Artificial Sequence: Synthetic oligonucleotide
aacgaggcaaggccaggga

SEQ ID NO: 2998045 - RNA, 19 nt, Artificial Sequence
  Description of Artificial Sequence: Synthetic oligonucleotide
gaacgaggcaaggccaggg

SEQ ID NO: 2998046 - RNA, 19 nt, Artificial Sequence
  Description of Artificial Sequence: Synthetic oligonucleotide
gcauacaaagaauccuugc

SEQ ID NO: 2998047 - RNA, 19 nt, Artificial Sequence
  Description of Artificial Sequence: Synthetic oligonucleotide
uucccugggcauacaaaga

SEQ ID NO: 2998048 - RNA, 19 nt, Artificial Sequence
  Description of Artificial Sequence: Synthetic oligonucleotide
ggcucaacacacucaagcc

SEQ ID NO: 2998049 - RNA, 19 nt, Artificial Sequence
  Description of Artificial Sequence: Synthetic oligonucleotide
uccggcgggucuuaggaac

SEQ ID NO: 2998050 - RNA, 19 nt, Artificial Sequence
  Description of Artificial Sequence: Synthetic oligonucleotide
ucggcacagaaagaacgag

SEQ ID NO: 2998051 - RNA, 19 nt, Artificial Sequence
  Description of Artificial Sequence: Synthetic oligonucleotide
ucuuguacugugucacuuu

SEQ ID NO: 2998052 - RNA, 19 nt, Artificial Sequence
  Description of Artificial Sequence: Synthetic oligonucleotide
ggucuuaggaacguucacc

SEQ ID NO: 2998053 - RNA, 19 nt, Artificial Sequence
  Description of Artificial Sequence: Synthetic oligonucleotide
caaagaauccuugcccuuc

SEQ ID NO: 2998054 - RNA, 19 nt, Artificial Sequence
  Description of Artificial Sequence: Synthetic oligonucleotide
caccauguuggcgggagcg

SEQ ID NO: 2998055 - RNA, 19 nt, Artificial Sequence
  Description of Artificial Sequence: Synthetic oligonucleotide
cagaaagaacgaggcaagg

SEQ ID NO: 2998056 - RNA, 19 nt, Artificial Sequence
  Description of Artificial Sequence: Synthetic oligonucleotide
ucuuaauagccagcauccu

SEQ ID NO: 2998057 - RNA, 19 nt, Artificial Sequence
  Description of Artificial Sequence: Synthetic oligonucleotide
ucauaacgccgcuuucccu

SEQ ID NO: 2998058 - RNA, 19 nt, Artificial Sequence
  Description of Artificial Sequence: Synthetic oligonucleotide
aucgccucccaguucaaaa

SEQ ID NO: 2998059 - RNA, 19 nt, Artificial Sequence
  Description of Artificial Sequence: Synthetic oligonucleotide
caucucuuaauagccagca

SEQ ID NO: 2998060 - RNA, 19 nt, Artificial Sequence
  Description of Artificial Sequence: Synthetic oligonucleotide
agccacucuguuuccuguc

SEQ ID NO: 2998061 - RNA, 19 nt, Artificial Sequence
  Description of Artificial Sequence: Synthetic oligonucleotide
gaucaccuggcccuuucuc

SEQ ID NO: 2998062 - RNA, 19 nt, Artificial Sequence
  Description of Artificial Sequence: Synthetic oligonucleotide
uucuugcagaacguccggc

SEQ ID NO: 2998063 - RNA, 19 nt, Artificial Sequence
  Description of Artificial Sequence: Synthetic oligonucleotide
uuguacugugucacuuuau

SEQ ID NO: 2998064 - RNA, 19 nt, Artificial Sequence
  Description of Artificial Sequence: Synthetic oligonucleotide
acucuguuuccugucauaa

SEQ ID NO: 2998065 - RNA, 19 nt, Artificial Sequence
  Description of Artificial Sequence: Synthetic oligonucleotide
aauagccagcauccucuua

SEQ ID NO: 2998066 - RNA, 19 nt, Artificial Sequence
  Description of Artificial Sequence: Synthetic oligonucleotide
ccugggcauacaaagaauc

SEQ ID NO: 2998067 - RNA, 19 nt, Artificial Sequence
  Description of Artificial Sequence: Synthetic oligonucleotide
acaaagaauccuugcccuu

SEQ ID NO: 2998068 - RNA, 19 nt, Artificial Sequence
  Description of Artificial Sequence: Synthetic oligonucleotide
uucuuguacugugucacuu

SEQ ID NO: 2998069 - RNA, 19 nt, Artificial Sequence
  Description of Artificial Sequence: Synthetic oligonucleotide
caagagcagcuuagaacug

SEQ ID NO: 2998070 - RNA, 19 nt, Artificial Sequence
  Description of Artificial Sequence: Synthetic oligonucleotide
ccaagagcagcuuagaacu

SEQ ID NO: 2998071 - RNA, 19 nt, Artificial Sequence
  Description of Artificial Sequence: Synthetic oligonucleotide
ucuuaggaacguucaccau

SEQ ID NO: 2998072 - RNA, 19 nt, Artificial Sequence
  Description of Artificial Sequence: Synthetic oligonucleotide
uagccacucuguuuccugu

SEQ ID NO: 2998073 - RNA, 19 nt, Artificial Sequence
  Description of Artificial Sequence: Synthetic oligonucleotide
uaggcuuagucugcccacc

SEQ ID NO: 2998074 - RNA, 19 nt, Artificial Sequence
  Description of Artificial Sequence: Synthetic oligonucleotide
ugggcucaacacacucaag

SEQ ID NO: 2998075 - RNA, 19 nt, Artificial Sequence
  Description of Artificial Sequence: Synthetic oligonucleotide
agcgauaucggcacagaaa

SEQ ID NO: 2998076 - RNA, 19 nt, Artificial Sequence
  Description of Artificial Sequence: Synthetic oligonucleotide
gucuccauaccaagagcag

SEQ ID NO: 2998077 - RNA, 19 nt, Artificial Sequence
  Description of Artificial Sequence: Synthetic oligonucleotide
ucgccucccaguucaaaau

SEQ ID NO: 2998078 - RNA, 19 nt, Artificial Sequence
  Description of Artificial Sequence: Synthetic oligonucleotide
agaacgaggcaaggccagg

SEQ ID NO: 2998079 - RNA, 19 nt, Artificial Sequence
  Description of Artificial Sequence: Synthetic oligonucleotide
ucaccauguuggcgggagc

SEQ ID NO: 2998080 - RNA, 19 nt, Artificial Sequence
  Description of Artificial Sequence: Synthetic oligonucleotide
aucucuuaauagccagcau

SEQ ID NO: 2998081 - RNA, 19 nt, Artificial Sequence
  Description of Artificial Sequence: Synthetic oligonucleotide
uuauggggcuggugcuugc

SEQ ID NO: 2998082 - RNA, 19 nt, Artificial Sequence
  Description of Artificial Sequence: Synthetic oligonucleotide
ggcauacaaagaauccuug

SEQ ID NO: 2998083 - RNA, 19 nt, Artificial Sequence
  Description of Artificial Sequence: Synthetic oligonucleotide
ccuucuuguacugugucac

SEQ ID NO: 2998084 - RNA, 19 nt, Artificial Sequence
  Description of Artificial Sequence: Synthetic oligonucleotide
uggggcuggugcuugccac

SEQ ID NO: 2998085 - RNA, 19 nt, Artificial Sequence
  Description of Artificial Sequence: Synthetic oligonucleotide
uagccagcauccucuuaga

SEQ ID NO: 2998086 - RNA, 19 nt, Artificial Sequence
  Description of Artificial Sequence: Synthetic oligonucleotide
uuuguaguuuuagccuuuu

SEQ ID NO: 2998087 - RNA, 19 nt, Artificial Sequence
  Description of Artificial Sequence: Synthetic oligonucleotide
uggaucaccuggcccuuuc

SEQ ID NO: 2998088 - RNA, 19 nt, Artificial Sequence
  Description of Artificial Sequence: Synthetic oligonucleotide
aucggcacagaaagaacga

SEQ ID NO: 2998089 - RNA, 19 nt, Artificial Sequence
  Description of Artificial Sequence: Synthetic oligonucleotide
ucaccuggcccuuucucuu

SEQ ID NO: 2998090 - RNA, 19 nt, Artificial Sequence
  Description of Artificial Sequence: Synthetic oligonucleotide
cuccauaccaagagcagcu

SEQ ID NO: 2998091 - RNA, 19 nt, Artificial Sequence
  Description of Artificial Sequence: Synthetic oligonucleotide
auaccaagagcagcuuaga

SEQ ID NO: 2998092 - RNA, 19 nt, Artificial Sequence
  Description of Artificial Sequence: Synthetic oligonucleotide
uaacgccgcuuucccuggg

SEQ ID NO: 2998093 - RNA, 19 nt, Artificial Sequence
  Description of Artificial Sequence: Synthetic oligonucleotide
uggcgggagcgauaucggc

SEQ ID NO: 2998094 - RNA, 19 nt, Artificial Sequence
  Description of Artificial Sequence: Synthetic oligonucleotide
uauggggcuggugcuugcc

SEQ ID NO: 2998095 - RNA, 19 nt, Artificial Sequence
  Description of Artificial Sequence: Synthetic oligonucleotide
aagaauccuugcccuucuu

SEQ ID NO: 2998096 - RNA, 19 nt, Artificial Sequence
  Description of Artificial Sequence: Synthetic oligonucleotide
gagcgauaucggcacagaa

SEQ ID NO: 2998097 - RNA, 19 nt, Artificial Sequence
  Description of Artificial Sequence: Synthetic oligonucleotide
uaauagccagcauccucuu

SEQ ID NO: 2998098 - RNA, 19 nt, Artificial Sequence
  Description of Artificial Sequence: Synthetic oligonucleotide
cagcuuagaacuggaucac

SEQ ID NO: 2998099 - RNA, 19 nt, Artificial Sequence
  Description of Artificial Sequence: Synthetic oligonucleotide
uuccugucauaacgccgcu

SEQ ID NO: 2998100 - RNA, 19 nt, Artificial Sequence
  Description of Artificial Sequence: Synthetic oligonucleotide
ugcagaacguccggcgggu

SEQ ID NO: 2998101 - RNA, 19 nt, Artificial Sequence
  Description of Artificial Sequence: Synthetic oligonucleotide
cuuucccugggcauacaaa

SEQ ID NO: 2998102 - RNA, 19 nt, Artificial Sequence
  Description of Artificial Sequence: Synthetic oligonucleotide
aggcuuagucugcccacca

SEQ ID NO: 2998103 - RNA, 19 nt, Artificial Sequence
  Description of Artificial Sequence: Synthetic oligonucleotide
auguuggcgggagcgauau

SEQ ID NO: 2998104 - RNA, 19 nt, Artificial Sequence
  Description of Artificial Sequence: Synthetic oligonucleotide
acguccggcgggucuuagg

SEQ ID NO: 2998105 - RNA, 19 nt, Artificial Sequence
  Description of Artificial Sequence: Synthetic oligonucleotide
cugucauaacgccgcuuuc

SEQ ID NO: 2998106 - RNA, 19 nt, Artificial Sequence
  Description of Artificial Sequence: Synthetic oligonucleotide
aaucuucuuuguaguuuua

SEQ ID NO: 2998107 - RNA, 19 nt, Artificial Sequence
  Description of Artificial Sequence: Synthetic oligonucleotide
cuggugcuugccacauuuc

SEQ ID NO: 2998108 - RNA, 19 nt, Artificial Sequence
  Description of Artificial Sequence: Synthetic oligonucleotide
uuaucgccucccaguucaa

SEQ ID NO: 2998109 - RNA, 19 nt, Artificial Sequence
  Description of Artificial Sequence: Synthetic oligonucleotide
gcaucucuuaauagccagc

SEQ ID NO: 2998110 - RNA, 19 nt, Artificial Sequence
  Description of Artificial Sequence: Synthetic oligonucleotide
gcgggagcgauaucggcac

SEQ ID NO: 2998111 - RNA, 19 nt, Artificial Sequence
  Description of Artificial Sequence: Synthetic oligonucleotide
gcucaacacacucaagccu

SEQ ID NO: 2998112 - RNA, 19 nt, Artificial Sequence
  Description of Artificial Sequence: Synthetic oligonucleotide
cggaaaauaggcuuagucu

SEQ ID NO: 2998113 - RNA, 19 nt, Artificial Sequence
  Description of Artificial Sequence: Synthetic oligonucleotide
gggagcgauaucggcacag

SEQ ID NO: 2998114 - RNA, 19 nt, Artificial Sequence
  Description of Artificial Sequence: Synthetic oligonucleotide
gggucuuaggaacguucac

SEQ ID NO: 2998115 - RNA, 19 nt, Artificial Sequence
  Description of Artificial Sequence: Synthetic oligonucleotide
aacguccggcgggucuuag

SEQ ID NO: 2998116 - RNA, 19 nt, Artificial Sequence
  Description of Artificial Sequence: Synthetic oligonucleotide
uccauaccaagagcagcuu

SEQ ID NO: 2998117 - RNA, 19 nt, Artificial Sequence
  Description of Artificial Sequence: Synthetic oligonucleotide
gcacagaaagaacgaggca

SEQ ID NO: 2998118 - RNA, 19 nt, Artificial Sequence
  Description of Artificial Sequence: Synthetic oligonucleotide
accauguuggcgggagcga

SEQ ID NO: 2998119 - RNA, 19 nt, Artificial Sequence
  Description of Artificial Sequence: Synthetic oligonucleotide
uaucgccucccaguucaaa

SEQ ID NO: 2998120 - RNA, 19 nt, Artificial Sequence
  Description of Artificial Sequence: Synthetic oligonucleotide
agaacguccggcgggucuu

SEQ ID NO: 2998121 - RNA, 19 nt, Artificial Sequence
  Description of Artificial Sequence: Synthetic oligonucleotide
caccuggcccuuucucuuc

SEQ ID NO: 2998122 - RNA, 19 nt, Artificial Sequence
  Description of Artificial Sequence: Synthetic oligonucleotide
gugucacuuuauggggcug

SEQ ID NO: 2998123 - RNA, 19 nt, Artificial Sequence
  Description of Artificial Sequence: Synthetic oligonucleotide
gcuuagaacuggaucaccu

SEQ ID NO: 2998124 - RNA, 19 nt, Artificial Sequence
  Description of Artificial Sequence: Synthetic oligonucleotide
cuuuguaguuuuagccuuu

SEQ ID NO: 2998125 - RNA, 19 nt, Artificial Sequence
  Description of Artificial Sequence: Synthetic oligonucleotide
cuucuuguacugugucacu

SEQ ID NO: 2998126 - RNA, 19 nt, Artificial Sequence
  Description of Artificial Sequence: Synthetic oligonucleotide
ccucuuagaucugcaguug

SEQ ID NO: 2998127 - RNA, 19 nt, Artificial Sequence
  Description of Artificial Sequence: Synthetic oligonucleotide
ccggcgggucuuaggaacg

SEQ ID NO: 2998128 - RNA, 19 nt, Artificial Sequence
  Description of Artificial Sequence: Synthetic oligonucleotide
cacucuguuuccugucaua

SEQ ID NO: 2998129 - RNA, 19 nt, Artificial Sequence
  Description of Artificial Sequence: Synthetic oligonucleotide
uaggaacguucaccauguu

SEQ ID NO: 2998130 - RNA, 19 nt, Artificial Sequence
  Description of Artificial Sequence: Synthetic oligonucleotide
gccacucuguuuccuguca

SEQ ID NO: 2998131 - RNA, 19 nt, Artificial Sequence
  Description of Artificial Sequence: Synthetic oligonucleotide
ggcgggagcgauaucggca

SEQ ID NO: 2998132 - RNA, 19 nt, Artificial Sequence
  Description of Artificial Sequence: Synthetic oligonucleotide
ugcccaccauagccacucu

SEQ ID NO: 2998133 - RNA, 19 nt, Artificial Sequence
  Description of Artificial Sequence: Synthetic oligonucleotide
cauguuggcgggagcgaua

SEQ ID NO: 2998134 - RNA, 19 nt, Artificial Sequence
  Description of Artificial Sequence: Synthetic oligonucleotide
uguuggcgggagcgauauc

SEQ ID NO: 2998135 - RNA, 19 nt, Artificial Sequence
  Description of Artificial Sequence: Synthetic oligonucleotide
ccauagccacucuguuucc

SEQ ID NO: 2998136 - RNA, 19 nt, Artificial Sequence
  Description of Artificial Sequence: Synthetic oligonucleotide
cguucaccauguuggcggg

SEQ ID NO: 2998137 - RNA, 19 nt, Artificial Sequence
  Description of Artificial Sequence: Synthetic oligonucleotide
uccugucauaacgccgcuu

SEQ ID NO: 2998138 - RNA, 19 nt, Artificial Sequence
  Description of Artificial Sequence: Synthetic oligonucleotide
gcuggugcuugccacauuu

SEQ ID NO: 2998139 - RNA, 19 nt, Artificial Sequence
  Description of Artificial Sequence: Synthetic oligonucleotide
gcuuucccugggcauacaa

SEQ ID NO: 2998140 - RNA, 19 nt, Artificial Sequence
  Description of Artificial Sequence: Synthetic oligonucleotide
ggcaaggccagggacggaa

SEQ ID NO: 2998141 - RNA, 19 nt, Artificial Sequence
  Description of Artificial Sequence: Synthetic oligonucleotide
gcccaccauagccacucug

SEQ ID NO: 2998142 - RNA, 19 nt, Artificial Sequence
  Description of Artificial Sequence: Synthetic oligonucleotide
gcgggucuuaggaacguuc

SEQ ID NO: 2998143 - RNA, 19 nt, Artificial Sequence
  Description of Artificial Sequence: Synthetic oligonucleotide
caccauagccacucuguuu

SEQ ID NO: 2998144 - RNA, 19 nt, Artificial Sequence
  Description of Artificial Sequence: Synthetic oligonucleotide
ggagcgauaucggcacaga

SEQ ID NO: 2998145 - RNA, 19 nt, Artificial Sequence
  Description of Artificial Sequence: Synthetic oligonucleotide
cagaacguccggcgggucu

SEQ ID NO: 2998146 - RNA, 19 nt, Artificial Sequence
  Description of Artificial Sequence: Synthetic oligonucleotide
gcaaggccagggacggaag

SEQ ID NO: 2998147 - RNA, 19 nt, Artificial Sequence
  Description of Artificial Sequence: Synthetic oligonucleotide
caaggccagggacggaagu

SEQ ID NO: 2998148 - RNA, 19 nt, Artificial Sequence
  Description of Artificial Sequence: Synthetic oligonucleotide
cauagccacucuguuuccu

SEQ ID NO: 2998149 - RNA, 19 nt, Artificial Sequence
  Description of Artificial Sequence: Synthetic oligonucleotide
cgccucccaguucaaaaug

SEQ ID NO: 2998150 - RNA, 19 nt, Artificial Sequence
  Description of Artificial Sequence: Synthetic oligonucleotide
guccggcgggucuuaggaa

SEQ ID NO: 2998151 - RNA, 19 nt, Artificial Sequence
  Description of Artificial Sequence: Synthetic oligonucleotide
cgggucuuaggaacguuca

SEQ ID NO: 2998152 - RNA, 19 nt, Artificial Sequence
  Description of Artificial Sequence: Synthetic oligonucleotide
gucacuuuauggggcuggu

SEQ ID NO: 2998153 - RNA, 19 nt, Artificial Sequence
  Description of Artificial Sequence: Synthetic oligonucleotide
guucaccauguuggcggga

SEQ ID NO: 2998154 - RNA, 19 nt, Artificial Sequence
  Description of Artificial Sequence: Synthetic oligonucleotide
ccugucauaacgccgcuuu

SEQ ID NO: 2998155 - RNA, 19 nt, Artificial Sequence
  Description of Artificial Sequence: Synthetic oligonucleotide
ccauaccaagagcagcuua

SEQ ID NO: 2998156 - RNA, 19 nt, Artificial Sequence
  Description of Artificial Sequence: Synthetic oligonucleotide
cuuuauggggcuggugcuu

SEQ ID NO: 2998157 - RNA, 19 nt, Artificial Sequence
  Description of Artificial Sequence: Synthetic oligonucleotide
cguccggcgggucuuagga

SEQ ID NO: 2998158 - RNA, 19 nt, Artificial Sequence
  Description of Artificial Sequence: Synthetic oligonucleotide
gagcagcuuagaacuggau

SEQ ID NO: 2998159 - RNA, 19 nt, Artificial Sequence
  Description of Artificial Sequence: Synthetic oligonucleotide
ggugcuugccacauuucuu

SEQ ID NO: 2998160 - RNA, 19 nt, Artificial Sequence
  Description of Artificial Sequence: Synthetic oligonucleotide
cgauaucggcacagaaaga

SEQ ID NO: 2998161 - RNA, 19 nt, Artificial Sequence
  Description of Artificial Sequence: Synthetic oligonucleotide
ggaucaccuggcccuuucu

SEQ ID NO: 2998162 - RNA, 19 nt, Artificial Sequence
  Description of Artificial Sequence: Synthetic oligonucleotide
gaacguccggcgggucuua

SEQ ID NO: 2998163 - RNA, 19 nt, Artificial Sequence
  Description of Artificial Sequence: Synthetic oligonucleotide
ggcuuagucugcccaccau

SEQ ID NO: 2998164 - RNA, 19 nt, Artificial Sequence
  Description of Artificial Sequence: Synthetic oligonucleotide
ccagggacggaaguuuaua

SEQ ID NO: 2998165 - RNA, 19 nt, Artificial Sequence
  Description of Artificial Sequence: Synthetic oligonucleotide
aggcaaggccagggacgga

SEQ ID NO: 2998166 - RNA, 19 nt, Artificial Sequence
  Description of Artificial Sequence: Synthetic oligonucleotide
ggccagggacggaaguuua

SEQ ID NO: 2998167 - RNA, 19 nt, Artificial Sequence
  Description of Artificial Sequence: Synthetic oligonucleotide
cccugggcauacaaagaau

SEQ ID NO: 2998168 - RNA, 19 nt, Artificial Sequence
  Description of Artificial Sequence: Synthetic oligonucleotide
gcagaacguccggcggguc

SEQ ID NO: 2998169 - RNA, 19 nt, Artificial Sequence
  Description of Artificial Sequence: Synthetic oligonucleotide
ccacucuguuuccugucau

SEQ ID NO: 2998170 - RNA, 19 nt, Artificial Sequence
  Description of Artificial Sequence: Synthetic oligonucleotide
gccagggacggaaguuuau

SEQ ID NO: 2998171 - RNA, 19 nt, Artificial Sequence
  Description of Artificial Sequence: Synthetic oligonucleotide
ccauguuggcgggagcgau

SEQ ID NO: 2998172 - RNA, 19 nt, Artificial Sequence
  Description of Artificial Sequence: Synthetic oligonucleotide
gggcuggugcuugccacau

SEQ ID NO: 2998173 - RNA, 19 nt, Artificial Sequence
  Description of Artificial Sequence: Synthetic oligonucleotide
ggcgggucuuaggaacguu

SEQ ID NO: 2998174 - RNA, 19 nt, Artificial Sequence
  Description of Artificial Sequence: Synthetic oligonucleotide
ggcuggugcuugccacauu

SEQ ID NO: 2998175 - RNA, 19 nt, Artificial Sequence
  Description of Artificial Sequence: Synthetic oligonucleotide
cgggagcgauaucggcaca

SEQ ID NO: 2998176 - RNA, 19 nt, Artificial Sequence
  Description of Artificial Sequence: Synthetic oligonucleotide
cgcuuucccugggcauaca

SEQ ID NO: 2998177 - RNA, 19 nt, Artificial Sequence
  Description of Artificial Sequence: Synthetic oligonucleotide
cggcgggucuuaggaacgu

SEQ ID NO: 2998178 - RNA, 19 nt, Artificial Sequence
  Description of Artificial Sequence: Synthetic oligonucleotide
aauguaauaacccaaaaca

SEQ ID NO: 2998179 - RNA, 19 nt, Artificial Sequence
  Description of Artificial Sequence: Synthetic oligonucleotide
uuccuuaugaacaugauca

SEQ ID NO: 2998180 - RNA, 19 nt, Artificial Sequence
  Description of Artificial Sequence: Synthetic oligonucleotide
ugaacaugaucaaugaagg

SEQ ID NO: 2998181 - RNA, 19 nt, Artificial Sequence
  Description of Artificial Sequence: Synthetic oligonucleotide
uucauguucauucucuucc

SEQ ID NO: 2998182 - RNA, 19 nt, Artificial Sequence
  Description of Artificial Sequence: Synthetic oligonucleotide
ucucuuuugagauucaugu

SEQ ID NO: 2998183 - RNA, 19 nt, Artificial Sequence
  Description of Artificial Sequence: Synthetic oligonucleotide
cuuaugaacaugaucaaug

SEQ ID NO: 2998184 - RNA, 19 nt, Artificial Sequence
  Description of Artificial Sequence: Synthetic oligonucleotide
ugcuuuuacacuuuguuca

SEQ ID NO: 2998185 - RNA, 19 nt, Artificial Sequence
  Description of Artificial Sequence: Synthetic oligonucleotide
aaucugaaaagucugccca

SEQ ID NO: 2998186 - RNA, 19 nt, Artificial Sequence
  Description of Artificial Sequence: Synthetic oligonucleotide
uguuucaugaauucuguca

SEQ ID NO: 2998187 - RNA, 19 nt, Artificial Sequence
  Description of Artificial Sequence: Synthetic oligonucleotide
aauaacccaaaacaucugu

SEQ ID NO: 2998188 - RNA, 19 nt, Artificial Sequence
  Description of Artificial Sequence: Synthetic oligonucleotide
uguaauaacccaaaacauc

SEQ ID NO: 2998189 - RNA, 19 nt, Artificial Sequence
  Description of Artificial Sequence: Synthetic oligonucleotide
agaaacugcaaucugaaaa

SEQ ID NO: 2998190 - RNA, 19 nt, Artificial Sequence
  Description of Artificial Sequence: Synthetic oligonucleotide
uguucaaaaguacuugcug

SEQ ID NO: 2998191 - RNA, 19 nt, Artificial Sequence
  Description of Artificial Sequence: Synthetic oligonucleotide
uuacacuuuguucaaaagu

SEQ ID NO: 2998192 - RNA, 19 nt, Artificial Sequence
  Description of Artificial Sequence: Synthetic oligonucleotide
aaaguaauccauuuccuua

SEQ ID NO: 2998193 - RNA, 19 nt, Artificial Sequence
  Description of Artificial Sequence: Synthetic oligonucleotide
gaauguaauaacccaaaac

SEQ ID NO: 2998194 - RNA, 19 nt, Artificial Sequence
  Description of Artificial Sequence: Synthetic oligonucleotide
uuuguucaaaaguacuugc

SEQ ID NO: 2998195 - RNA, 19 nt, Artificial Sequence
  Description of Artificial Sequence: Synthetic oligonucleotide
ucauucucuuccauguugg

SEQ ID NO: 2998196 - RNA, 19 nt, Artificial Sequence
  Description of Artificial Sequence: Synthetic oligonucleotide
caugaauucugucauagug

SEQ ID NO: 2998197 - RNA, 19 nt, Artificial Sequence
  Description of Artificial Sequence: Synthetic oligonucleotide
acaugaucaaugaaggagc

SEQ ID NO: 2998198 - RNA, 19 nt, Artificial Sequence
  Description of Artificial Sequence: Synthetic oligonucleotide
uacacuuuguucaaaagua

SEQ ID NO: 2998199 - RNA, 19 nt, Artificial Sequence
  Description of Artificial Sequence: Synthetic oligonucleotide
aacucaguagucuggcagg

SEQ ID NO: 2998200 - RNA, 19 nt, Artificial Sequence
  Description of Artificial Sequence: Synthetic oligonucleotide
augaacaugaucaaugaag

SEQ ID NO: 2998201 - RNA, 19 nt, Artificial Sequence
  Description of Artificial Sequence: Synthetic oligonucleotide
aaaguacuugcugaugaac

SEQ ID NO: 2998202 - RNA, 19 nt, Artificial Sequence
  Description of Artificial Sequence: Synthetic oligonucleotide
gaacuuauucauugcgugg

SEQ ID NO: 2998203 - RNA, 19 nt, Artificial Sequence
  Description of Artificial Sequence: Synthetic oligonucleotide
uuaugaacaugaucaauga

SEQ ID NO: 2998204 - RNA, 19 nt, Artificial Sequence
  Description of Artificial Sequence: Synthetic oligonucleotide
uucaugaauucugucauag

SEQ ID NO: 2998205 - RNA, 19 nt, Artificial Sequence
  Description of Artificial Sequence: Synthetic oligonucleotide
uuauaaaguaauccauuuc

SEQ ID NO: 2998206 - RNA, 19 nt, Artificial Sequence
  Description of Artificial Sequence: Synthetic oligonucleotide
uucauucucuuccauguug

SEQ ID NO: 2998207 - RNA, 19 nt, Artificial Sequence
  Description of Artificial Sequence: Synthetic oligonucleotide
uuuacacuuuguucaaaag

SEQ ID NO: 2998208 - RNA, 19 nt, Artificial Sequence
  Description of Artificial Sequence: Synthetic oligonucleotide
uuuggcugcacaaauuuuc

SEQ ID NO: 2998209 - RNA, 19 nt, Artificial Sequence
  Description of Artificial Sequence: Synthetic oligonucleotide
uguguuggguaccaaaccu

SEQ ID NO: 2998210 - RNA, 19 nt, Artificial Sequence
  Description of Artificial Sequence: Synthetic oligonucleotide
augcuuuuacacuuuguuc

SEQ ID NO: 2998211 - RNA, 19 nt, Artificial Sequence
  Description of Artificial Sequence: Synthetic oligonucleotide
ucaaguagcagcuugucuu

SEQ ID NO: 2998212 - RNA, 19 nt, Artificial Sequence
  Description of Artificial Sequence: Synthetic oligonucleotide
ugcugaugaacucaguagu

SEQ ID NO: 2998213 - RNA, 19 nt, Artificial Sequence
  Description of Artificial Sequence: Synthetic oligonucleotide
aaguaauccauuuccuuau

SEQ ID NO: 2998214 - RNA, 19 nt, Artificial Sequence
  Description of Artificial Sequence: Synthetic oligonucleotide
uugcugaugaacucaguag

SEQ ID NO: 2998215 - RNA, 19 nt, Artificial Sequence
  Description of Artificial Sequence: Synthetic oligonucleotide
aguacuugcugaugaacuc

SEQ ID NO: 2998216 - RNA, 19 nt, Artificial Sequence
  Description of Artificial Sequence: Synthetic oligonucleotide
aaauuuuccgcuucucuuu

SEQ ID NO: 2998217 - RNA, 19 nt, Artificial Sequence
  Description of Artificial Sequence: Synthetic oligonucleotide
cagcuugucuuuuauaaag

SEQ ID NO: 2998218 - RNA, 19 nt, Artificial Sequence
  Description of Artificial Sequence: Synthetic oligonucleotide
uuuuacacuuuguucaaaa

SEQ ID NO: 2998219 - RNA, 19 nt, Artificial Sequence
  Description of Artificial Sequence: Synthetic oligonucleotide
uuuccuuaugaacaugauc

SEQ ID NO: 2998220 - RNA, 19 nt, Artificial Sequence
  Description of Artificial Sequence: Synthetic oligonucleotide
gucucaucugaucagaaac

SEQ ID NO: 2998221 - RNA, 19 nt, Artificial Sequence
  Description of Artificial Sequence: Synthetic oligonucleotide
ucuguguuggguaccaaac

SEQ ID NO: 2998222 - RNA, 19 nt, Artificial Sequence
  Description of Artificial Sequence: Synthetic oligonucleotide
auaguguugucucaucuga

SEQ ID NO: 2998223 - RNA, 19 nt, Artificial Sequence
  Description of Artificial Sequence: Synthetic oligonucleotide
ugaucaaugaaggagccaa

SEQ ID NO: 2998224 - RNA, 19 nt, Artificial Sequence
  Description of Artificial Sequence: Synthetic oligonucleotide
ucugucauaguguugucuc

SEQ ID NO: 2998225 - RNA, 19 nt, Artificial Sequence
  Description of Artificial Sequence: Synthetic oligonucleotide
aacuuauucauugcguggu

SEQ ID NO: 2998226 - RNA, 19 nt, Artificial Sequence
  Description of Artificial Sequence: Synthetic oligonucleotide
uucuccaugggcuccauga

SEQ ID NO: 2998227 - RNA, 19 nt, Artificial Sequence
  Description of Artificial Sequence: Synthetic oligonucleotide
ugaugaacucaguagucug

SEQ ID NO: 2998228 - RNA, 19 nt, Artificial Sequence
  Description of Artificial Sequence: Synthetic oligonucleotide
ucauaguguugucucaucu

SEQ ID NO: 2998229 - RNA, 19 nt, Artificial Sequence
  Description of Artificial Sequence: Synthetic oligonucleotide
ugaucagaaacugcaaucu

SEQ ID NO: 2998230 - RNA, 19 nt, Artificial Sequence
  Description of Artificial Sequence: Synthetic oligonucleotide
uucucuuuugagauucaug

SEQ ID NO: 2998231 - RNA, 19 nt, Artificial Sequence
  Description of Artificial Sequence: Synthetic oligonucleotide
uuauucauugcgugguaug

SEQ ID NO: 2998232 - RNA, 19 nt, Artificial Sequence
  Description of Artificial Sequence: Synthetic oligonucleotide
ucucaucugaucagaaacu

SEQ ID NO: 2998233 - RNA, 19 nt, Artificial Sequence
  Description of Artificial Sequence: Synthetic oligonucleotide
auucauguucauucucuuc

SEQ ID NO: 2998234 - RNA, 19 nt, Artificial Sequence
  Description of Artificial Sequence: Synthetic oligonucleotide
ugcaaucugaaaagucugc

SEQ ID NO: 2998235 - RNA, 19 nt, Artificial Sequence
  Description of Artificial Sequence: Synthetic oligonucleotide
gaugaacucaguagucugg

SEQ ID NO: 2998236 - RNA, 19 nt, Artificial Sequence
  Description of Artificial Sequence: Synthetic oligonucleotide
ucugaucagaaacugcaau

SEQ ID NO: 2998237 - RNA, 19 nt, Artificial Sequence
  Description of Artificial Sequence: Synthetic oligonucleotide
uuguucaaaaguacuugcu

SEQ ID NO: 2998238 - RNA, 19 nt, Artificial Sequence
  Description of Artificial Sequence: Synthetic oligonucleotide
ucaucugaucagaaacugc

SEQ ID NO: 2998239 - RNA, 19 nt, Artificial Sequence
  Description of Artificial Sequence: Synthetic oligonucleotide
acaaauuuuccgcuucucu

SEQ ID NO: 2998240 - RNA, 19 nt, Artificial Sequence
  Description of Artificial Sequence: Synthetic oligonucleotide
guucaaaaguacuugcuga

SEQ ID NO: 2998241 - RNA, 19 nt, Artificial Sequence
  Description of Artificial Sequence: Synthetic oligonucleotide
agcagcuugucuuuuauaa

SEQ ID NO: 2998242 - RNA, 19 nt, Artificial Sequence
  Description of Artificial Sequence: Synthetic oligonucleotide
uccaugggcuccaugaacu

SEQ ID NO: 2998243 - RNA, 19 nt, Artificial Sequence
  Description of Artificial Sequence: Synthetic oligonucleotide
uaauaacccaaaacaucug

SEQ ID NO: 2998244 - RNA, 19 nt, Artificial Sequence
  Description of Artificial Sequence: Synthetic oligonucleotide
uuggcugcacaaauuuucc

SEQ ID NO: 2998245 - RNA, 19 nt, Artificial Sequence
  Description of Artificial Sequence: Synthetic oligonucleotide
uauucauugcgugguaugc

SEQ ID NO: 2998246 - RNA, 19 nt, Artificial Sequence
  Description of Artificial Sequence: Synthetic oligonucleotide
uguuggguaccaaaccucu

SEQ ID NO: 2998247 - RNA, 19 nt, Artificial Sequence
  Description of Artificial Sequence: Synthetic oligonucleotide
ucuuuggcugcacaaauuu

SEQ ID NO: 2998248 - RNA, 19 nt, Artificial Sequence
  Description of Artificial Sequence: Synthetic oligonucleotide
ugaauguaauaacccaaaa

SEQ ID NO: 2998249 - RNA, 19 nt, Artificial Sequence
  Description of Artificial Sequence: Synthetic oligonucleotide
uguuaguguuucaugaauu

SEQ ID NO: 2998250 - RNA, 19 nt, Artificial Sequence
  Description of Artificial Sequence: Synthetic oligonucleotide
aaguacuugcugaugaacu

SEQ ID NO: 2998251 - RNA, 19 nt, Artificial Sequence
  Description of Artificial Sequence: Synthetic oligonucleotide
augaacuccauccccagga

SEQ ID NO: 2998252 - RNA, 19 nt, Artificial Sequence
  Description of Artificial Sequence: Synthetic oligonucleotide
ugaauucugucauaguguu

SEQ ID NO: 2998253 - RNA, 19 nt, Artificial Sequence
  Description of Artificial Sequence: Synthetic oligonucleotide
aaaaguacuugcugaugaa

SEQ ID NO: 2998254 - RNA, 19 nt, Artificial Sequence
  Description of Artificial Sequence: Synthetic oligonucleotide
uguugucucaucugaucag

SEQ ID NO: 2998255 - RNA, 19 nt, Artificial Sequence
  Description of Artificial Sequence: Synthetic oligonucleotide
cuuuguucaaaaguacuug

SEQ ID NO: 2998256 - RNA, 19 nt, Artificial Sequence
  Description of Artificial Sequence: Synthetic oligonucleotide
uguccauggacugaccucc

SEQ ID NO: 2998257 - RNA, 19 nt, Artificial Sequence
  Description of Artificial Sequence: Synthetic oligonucleotide
augaacucaguagucuggc

SEQ ID NO: 2998258 - RNA, 19 nt, Artificial Sequence
  Description of Artificial Sequence: Synthetic oligonucleotide
caugaucaaugaaggagcc

SEQ ID NO: 2998259 - RNA, 19 nt, Artificial Sequence
  Description of Artificial Sequence: Synthetic oligonucleotide
uuguuaguguuucaugaau

SEQ ID NO: 2998260 - RNA, 19 nt, Artificial Sequence
  Description of Artificial Sequence: Synthetic oligonucleotide
aucaaugaaggagccaagg

SEQ ID NO: 2998261 - RNA, 19 nt, Artificial Sequence
  Description of Artificial Sequence: Synthetic oligonucleotide
uaugaacaugaucaaugaa

SEQ ID NO: 2998262 - RNA, 19 nt, Artificial Sequence
  Description of Artificial Sequence: Synthetic oligonucleotide
uaaaguaauccauuuccuu

SEQ ID NO: 2998263 - RNA, 19 nt, Artificial Sequence
  Description of Artificial Sequence: Synthetic oligonucleotide
ugagauucauguucauucu

SEQ ID NO: 2998264 - RNA, 19 nt, Artificial Sequence
  Description of Artificial Sequence: Synthetic oligonucleotide
caucugaucagaaacugca

SEQ ID NO: 2998265 - RNA, 19 nt, Artificial Sequence
  Description of Artificial Sequence: Synthetic oligonucleotide
guuaguguuucaugaauuc

SEQ ID NO: 2998266 - RNA, 19 nt, Artificial Sequence
  Description of Artificial Sequence: Synthetic oligonucleotide
gacccucucaaguagcagc

SEQ ID NO: 2998267 - RNA, 19 nt, Artificial Sequence
  Description of Artificial Sequence: Synthetic oligonucleotide
caaaaguacuugcugauga

SEQ ID NO: 2998268 - RNA, 19 nt, Artificial Sequence
  Description of Artificial Sequence: Synthetic oligonucleotide
uucaaaaguacuugcugau

SEQ ID NO: 2998269 - RNA, 19 nt, Artificial Sequence
  Description of Artificial Sequence: Synthetic oligonucleotide
uuuuccgcuucucuuuuga

SEQ ID NO: 2998270 - RNA, 19 nt, Artificial Sequence
  Description of Artificial Sequence: Synthetic oligonucleotide
cugaucagaaacugcaauc

SEQ ID NO: 2998271 - RNA, 19 nt, Artificial Sequence
  Description of Artificial Sequence: Synthetic oligonucleotide
aaagucugcccaucugugu

SEQ ID NO: 2998272 - RNA, 19 nt, Artificial Sequence
  Description of Artificial Sequence: Synthetic oligonucleotide
guaauaacccaaaacaucu

SEQ ID NO: 2998273 - RNA, 19 nt, Artificial Sequence
  Description of Artificial Sequence: Synthetic oligonucleotide
uccgcuucucuuuugagau

SEQ ID NO: 2998274 - RNA, 19 nt, Artificial Sequence
  Description of Artificial Sequence: Synthetic oligonucleotide
cuuuugagauucauguuca

SEQ ID NO: 2998275 - RNA, 19 nt, Artificial Sequence
  Description of Artificial Sequence: Synthetic oligonucleotide
ucugcauguccauggacug

SEQ ID NO: 2998276 - RNA, 19 nt, Artificial Sequence
  Description of Artificial Sequence: Synthetic oligonucleotide
ggaacuuauucauugcgug

SEQ ID NO: 2998277 - RNA, 19 nt, Artificial Sequence
  Description of Artificial Sequence: Synthetic oligonucleotide
caaggaacuuauucauugc

SEQ ID NO: 2998278 - RNA, 19 nt, Artificial Sequence
  Description of Artificial Sequence: Synthetic oligonucleotide
gaucagaaacugcaaucug

SEQ ID NO: 2998279 - RNA, 19 nt, Artificial Sequence
  Description of Artificial Sequence: Synthetic oligonucleotide
uuaguguuucaugaauucu

SEQ ID NO: 2998280 - RNA, 19 nt, Artificial Sequence
  Description of Artificial Sequence: Synthetic oligonucleotide
aaaagucugcccaucugug

SEQ ID NO: 2998281 - RNA, 19 nt, Artificial Sequence
  Description of Artificial Sequence: Synthetic oligonucleotide
cauuuccuuaugaacauga

SEQ ID NO: 2998282 - RNA, 19 nt, Artificial Sequence
  Description of Artificial Sequence: Synthetic oligonucleotide
ggugucugcauguccaugg

SEQ ID NO: 2998283 - RNA, 19 nt, Artificial Sequence
  Description of Artificial Sequence: Synthetic oligonucleotide
cauaguguugucucaucug

SEQ ID NO: 2998284 - RNA, 19 nt, Artificial Sequence
  Description of Artificial Sequence: Synthetic oligonucleotide
acacuuuguucaaaaguac

SEQ ID NO: 2998285 - RNA, 19 nt, Artificial Sequence
  Description of Artificial Sequence: Synthetic oligonucleotide
uccuuguuaguguuucaug

SEQ ID NO: 2998286 - RNA, 19 nt, Artificial Sequence
  Description of Artificial Sequence: Synthetic oligonucleotide
ugcacaaauuuuccgcuuc

SEQ ID NO: 2998287 - RNA, 19 nt, Artificial Sequence
  Description of Artificial Sequence: Synthetic oligonucleotide
ucaaaaguacuugcugaug

SEQ ID NO: 2998288 - RNA, 19 nt, Artificial Sequence
  Description of Artificial Sequence: Synthetic oligonucleotide
uggguaccaaaccucuuug

SEQ ID NO: 2998289 - RNA, 19 nt, Artificial Sequence
  Description of Artificial Sequence: Synthetic oligonucleotide
uguuggugucugcaugucc

SEQ ID NO: 2998290 - RNA, 19 nt, Artificial Sequence
  Description of Artificial Sequence: Synthetic oligonucleotide
cugcaaucugaaaagucug

SEQ ID NO: 2998291 - RNA, 19 nt, Artificial Sequence
  Description of Artificial Sequence: Synthetic oligonucleotide
caugaauguaauaacccaa

SEQ ID NO: 2998292 - RNA, 19 nt, Artificial Sequence
  Description of Artificial Sequence: Synthetic oligonucleotide
ggccauuucuccuuguuag

SEQ ID NO: 2998293 - RNA, 19 nt, Artificial Sequence
  Description of Artificial Sequence: Synthetic oligonucleotide
auguccauggacugaccuc

SEQ ID NO: 2998294 - RNA, 19 nt, Artificial Sequence
  Description of Artificial Sequence: Synthetic oligonucleotide
cuugucuuuuauaaaguaa

SEQ ID NO: 2998295 - RNA, 19 nt, Artificial Sequence
  Description of Artificial Sequence: Synthetic oligonucleotide
aauuuuccgcuucucuuuu

SEQ ID NO: 2998296 - RNA, 19 nt, Artificial Sequence
  Description of Artificial Sequence: Synthetic oligonucleotide
augaauucugucauagugu

SEQ ID NO: 2998297 - RNA, 19 nt, Artificial Sequence
  Description of Artificial Sequence: Synthetic oligonucleotide
accaaaccucuuuggcugc

SEQ ID NO: 2998298 - RNA, 19 nt, Artificial Sequence
  Description of Artificial Sequence: Synthetic oligonucleotide
auaaaguaauccauuuccu

SEQ ID NO: 2998299 - RNA, 19 nt, Artificial Sequence
  Description of Artificial Sequence: Synthetic oligonucleotide
ugaccucccaugaauguaa

SEQ ID NO: 2998300 - RNA, 19 nt, Artificial Sequence
  Description of Artificial Sequence: Synthetic oligonucleotide
gaaaagucugcccaucugu

SEQ ID NO: 2998301 - RNA, 19 nt, Artificial Sequence
  Description of Artificial Sequence: Synthetic oligonucleotide
aagucugcccaucuguguu

SEQ ID NO: 2998302 - RNA, 19 nt, Artificial Sequence
  Description of Artificial Sequence: Synthetic oligonucleotide
gguaccaaaccucuuuggc

SEQ ID NO: 2998303 - RNA, 19 nt, Artificial Sequence
  Description of Artificial Sequence: Synthetic oligonucleotide
uggcugcacaaauuuuccg

SEQ ID NO: 2998304 - RNA, 19 nt, Artificial Sequence
  Description of Artificial Sequence: Synthetic oligonucleotide
ucuuccauguuggugucug

SEQ ID NO: 2998305 - RNA, 19 nt, Artificial Sequence
  Description of Artificial Sequence: Synthetic oligonucleotide
uccauuuccuuaugaacau

SEQ ID NO: 2998306 - RNA, 19 nt, Artificial Sequence
  Description of Artificial Sequence: Synthetic oligonucleotide
uuccgcuucucuuuugaga

SEQ ID NO: 2998307 - RNA, 19 nt, Artificial Sequence
  Description of Artificial Sequence: Synthetic oligonucleotide
aaacugcaaucugaaaagu

SEQ ID NO: 2998308 - RNA, 19 nt, Artificial Sequence
  Description of Artificial Sequence: Synthetic oligonucleotide
agauucauguucauucucu

SEQ ID NO: 2998309 - RNA, 19 nt, Artificial Sequence
  Description of Artificial Sequence: Synthetic oligonucleotide
ccaaggaacuuauucauug

SEQ ID NO: 2998310 - RNA, 19 nt, Artificial Sequence
  Description of Artificial Sequence: Synthetic oligonucleotide
auguaauaacccaaaacau

SEQ ID NO: 2998311 - RNA, 19 nt, Artificial Sequence
  Description of Artificial Sequence: Synthetic oligonucleotide
cucccaugaauguaauaac

SEQ ID NO: 2998312 - RNA, 19 nt, Artificial Sequence
  Description of Artificial Sequence: Synthetic oligonucleotide
cccaugaauguaauaaccc

SEQ ID NO: 2998313 - RNA, 19 nt, Artificial Sequence
  Description of Artificial Sequence: Synthetic oligonucleotide
uuggguaccaaaccucuuu

SEQ ID NO: 2998314 - RNA, 19 nt, Artificial Sequence
  Description of Artificial Sequence: Synthetic oligonucleotide
cuguguuggguaccaaacc

SEQ ID NO: 2998315 - RNA, 19 nt, Artificial Sequence
  Description of Artificial Sequence: Synthetic oligonucleotide
guguugucucaucugauca

SEQ ID NO: 2998316 - RNA, 19 nt, Artificial Sequence
  Description of Artificial Sequence: Synthetic oligonucleotide
aguaauccauuuccuuaug

SEQ ID NO: 2998317 - RNA, 19 nt, Artificial Sequence
  Description of Artificial Sequence: Synthetic oligonucleotide
agccaaggaacuuauucau

SEQ ID NO: 2998318 - RNA, 19 nt, Artificial Sequence
  Description of Artificial Sequence: Synthetic oligonucleotide
gaacaugaucaaugaagga

SEQ ID NO: 2998319 - RNA, 19 nt, Artificial Sequence
  Description of Artificial Sequence: Synthetic oligonucleotide
aaaccucuuuggcugcaca

SEQ ID NO: 2998320 - RNA, 19 nt, Artificial Sequence
  Description of Artificial Sequence: Synthetic oligonucleotide
gagauucauguucauucuc

SEQ ID NO: 2998321 - RNA, 19 nt, Artificial Sequence
  Description of Artificial Sequence: Synthetic oligonucleotide
caaugaaggagccaaggaa

SEQ ID NO: 2998322 - RNA, 19 nt, Artificial Sequence
  Description of Artificial Sequence: Synthetic oligonucleotide
ugcgugguaugcuuuuaca

SEQ ID NO: 2998323 - RNA, 19 nt, Artificial Sequence
  Description of Artificial Sequence: Synthetic oligonucleotide
cucaucugaucagaaacug

SEQ ID NO: 2998324 - RNA, 19 nt, Artificial Sequence
  Description of Artificial Sequence: Synthetic oligonucleotide
ggcugcacaaauuuuccgc

SEQ ID NO: 2998325 - RNA, 19 nt, Artificial Sequence
  Description of Artificial Sequence: Synthetic oligonucleotide
aaccucuuuggcugcacaa

SEQ ID NO: 2998326 - RNA, 19 nt, Artificial Sequence
  Description of Artificial Sequence: Synthetic oligonucleotide
guaauccauuuccuuauga

SEQ ID NO: 2998327 - RNA, 19 nt, Artificial Sequence
  Description of Artificial Sequence: Synthetic oligonucleotide
uuuccgcuucucuuuugag

SEQ ID NO: 2998328 - RNA, 19 nt, Artificial Sequence
  Description of Artificial Sequence: Synthetic oligonucleotide
ugucucaucugaucagaaa

SEQ ID NO: 2998329 - RNA, 19 nt, Artificial Sequence
  Description of Artificial Sequence: Synthetic oligonucleotide
uccuuaugaacaugaucaa

SEQ ID NO: 2998330 - RNA, 19 nt, Artificial Sequence
  Description of Artificial Sequence: Synthetic oligonucleotide
uucauugcgugguaugcuu

SEQ ID NO: 2998331 - RNA, 19 nt, Artificial Sequence
  Description of Artificial Sequence: Synthetic oligonucleotide
ugaacuccauccccaggac

SEQ ID NO: 2998332 - RNA, 19 nt, Artificial Sequence
  Description of Artificial Sequence: Synthetic oligonucleotide
uuugagauucauguucauu

SEQ ID NO: 2998333 - RNA, 19 nt, Artificial Sequence
  Description of Artificial Sequence: Synthetic oligonucleotide
cauggacugaccucccaug

SEQ ID NO: 2998334 - RNA, 19 nt, Artificial Sequence
  Description of Artificial Sequence: Synthetic oligonucleotide
acugaccucccaugaaugu

SEQ ID NO: 2998335 - RNA, 19 nt, Artificial Sequence
  Description of Artificial Sequence: Synthetic oligonucleotide
ugaacucaguagucuggca

SEQ ID NO: 2998336 - RNA, 19 nt, Artificial Sequence
  Description of Artificial Sequence: Synthetic oligonucleotide
caugaacuccauccccagg

SEQ ID NO: 2998337 - RNA, 19 nt, Artificial Sequence
  Description of Artificial Sequence: Synthetic oligonucleotide
uucugucauaguguugucu

SEQ ID NO: 2998338 - RNA, 19 nt, Artificial Sequence
  Description of Artificial Sequence: Synthetic oligonucleotide
gaucaaugaaggagccaag

SEQ ID NO: 2998339 - RNA, 19 nt, Artificial Sequence
  Description of Artificial Sequence: Synthetic oligonucleotide
ugucugcauguccauggac

SEQ ID NO: 2998340 - RNA, 19 nt, Artificial Sequence
  Description of Artificial Sequence: Synthetic oligonucleotide
augaauguaauaacccaaa

SEQ ID NO: 2998341 - RNA, 19 nt, Artificial Sequence
  Description of Artificial Sequence: Synthetic oligonucleotide
auggacugaccucccauga

SEQ ID NO: 2998342 - RNA, 19 nt, Artificial Sequence
  Description of Artificial Sequence: Synthetic oligonucleotide
uugcgugguaugcuuuuac

SEQ ID NO: 2998343 - RNA, 19 nt, Artificial Sequence
  Description of Artificial Sequence: Synthetic oligonucleotide
auucugucauaguguuguc

SEQ ID NO: 2998344 - RNA, 19 nt, Artificial Sequence
  Description of Artificial Sequence: Synthetic oligonucleotide
acuuuguucaaaaguacuu

SEQ ID NO: 2998345 - RNA, 19 nt, Artificial Sequence
  Description of Artificial Sequence: Synthetic oligonucleotide
aggaacuuauucauugcgu

SEQ ID NO: 2998346 - RNA, 19 nt, Artificial Sequence
  Description of Artificial Sequence: Synthetic oligonucleotide
uuccauguuggugucugca

SEQ ID NO: 2998347 - RNA, 19 nt, Artificial Sequence
  Description of Artificial Sequence: Synthetic oligonucleotide
acucaguagucuggcaggg

SEQ ID NO: 2998348 - RNA, 19 nt, Artificial Sequence
  Description of Artificial Sequence: Synthetic oligonucleotide
guuggugucugcaugucca

SEQ ID NO: 2998349 - RNA, 19 nt, Artificial Sequence
  Description of Artificial Sequence: Synthetic oligonucleotide
cuuguuaguguuucaugaa

SEQ ID NO: 2998350 - RNA, 19 nt, Artificial Sequence
  Description of Artificial Sequence: Synthetic oligonucleotide
aucuguguuggguaccaaa

SEQ ID NO: 2998351 - RNA, 19 nt, Artificial Sequence
  Description of Artificial Sequence: Synthetic oligonucleotide
gacugaccucccaugaaug

SEQ ID NO: 2998352 - RNA, 19 nt, Artificial Sequence
  Description of Artificial Sequence: Synthetic oligonucleotide
uugucucaucugaucagaa

SEQ ID NO: 2998353 - RNA, 19 nt, Artificial Sequence
  Description of Artificial Sequence: Synthetic oligonucleotide
ugucauaguguugucucau

SEQ ID NO: 2998354 - RNA, 19 nt, Artificial Sequence
  Description of Artificial Sequence: Synthetic oligonucleotide
ucugaaaagucugcccauc

SEQ ID NO: 2998355 - RNA, 19 nt, Artificial Sequence
  Description of Artificial Sequence: Synthetic oligonucleotide
aucugaaaagucugcccau

SEQ ID NO: 2998356 - RNA, 19 nt, Artificial Sequence
  Description of Artificial Sequence: Synthetic oligonucleotide
agucugcccaucuguguug

SEQ ID NO: 2998357 - RNA, 19 nt, Artificial Sequence
  Description of Artificial Sequence: Synthetic oligonucleotide
uuuugagauucauguucau

SEQ ID NO: 2998358 - RNA, 19 nt, Artificial Sequence
  Description of Artificial Sequence: Synthetic oligonucleotide
ucuccaugggcuccaugaa

SEQ ID NO: 2998359 - RNA, 19 nt, Artificial Sequence
  Description of Artificial Sequence: Synthetic oligonucleotide
uaguguugucucaucugau

SEQ ID NO: 2998360 - RNA, 19 nt, Artificial Sequence
  Description of Artificial Sequence: Synthetic oligonucleotide
uccauguuggugucugcau

SEQ ID NO: 2998361 - RNA, 19 nt, Artificial Sequence
  Description of Artificial Sequence: Synthetic oligonucleotide
gguaugcuuuuacacuuug

SEQ ID NO: 2998362 - RNA, 19 nt, Artificial Sequence
  Description of Artificial Sequence: Synthetic oligonucleotide
guaccaaaccucuuuggcu

SEQ ID NO: 2998363 - RNA, 19 nt, Artificial Sequence
  Description of Artificial Sequence: Synthetic oligonucleotide
ccuuguuaguguuucauga

SEQ ID NO: 2998364 - RNA, 19 nt, Artificial Sequence
  Description of Artificial Sequence: Synthetic oligonucleotide
auucauugcgugguaugcu

SEQ ID NO: 2998365 - RNA, 19 nt, Artificial Sequence
  Description of Artificial Sequence: Synthetic oligonucleotide
auuuuccgcuucucuuuug

SEQ ID NO: 2998366 - RNA, 19 nt, Artificial Sequence
  Description of Artificial Sequence: Synthetic oligonucleotide
agcuugucuuuuauaaagu

SEQ ID NO: 2998367 - RNA, 19 nt, Artificial Sequence
  Description of Artificial Sequence: Synthetic oligonucleotide
augaaggagccaaggaacu

SEQ ID NO: 2998368 - RNA, 19 nt, Artificial Sequence
  Description of Artificial Sequence: Synthetic oligonucleotide
ggguaccaaaccucuuugg

SEQ ID NO: 2998369 - RNA, 19 nt, Artificial Sequence
  Description of Artificial Sequence: Synthetic oligonucleotide
uggacugaccucccaugaa

SEQ ID NO: 2998370 - RNA, 19 nt, Artificial Sequence
  Description of Artificial Sequence: Synthetic oligonucleotide
guacuugcugaugaacuca

SEQ ID NO: 2998371 - RNA, 19 nt, Artificial Sequence
  Description of Artificial Sequence: Synthetic oligonucleotide
cuccaugggcuccaugaac

SEQ ID NO: 2998372 - RNA, 19 nt, Artificial Sequence
  Description of Artificial Sequence: Synthetic oligonucleotide
ucauugcgugguaugcuuu

SEQ ID NO: 2998373 - RNA, 19 nt, Artificial Sequence
  Description of Artificial Sequence: Synthetic oligonucleotide
caggacccucucaaguagc

SEQ ID NO: 2998374 - RNA, 19 nt, Artificial Sequence
  Description of Artificial Sequence: Synthetic oligonucleotide
auccccaggacccucucaa

SEQ ID NO: 2998375 - RNA, 19 nt, Artificial Sequence
  Description of Artificial Sequence: Synthetic oligonucleotide
caugggcuccaugaacucc

SEQ ID NO: 2998376 - RNA, 19 nt, Artificial Sequence
  Description of Artificial Sequence: Synthetic oligonucleotide
ucuccuuguuaguguuuca

SEQ ID NO: 2998377 - RNA, 19 nt, Artificial Sequence
  Description of Artificial Sequence: Synthetic oligonucleotide
cacuuuguucaaaaguacu

SEQ ID NO: 2998378 - RNA, 19 nt, Artificial Sequence
  Description of Artificial Sequence: Synthetic oligonucleotide
agucuggcagggccauuuc

SEQ ID NO: 2998379 - RNA, 19 nt, Artificial Sequence
  Description of Artificial Sequence: Synthetic oligonucleotide
ugcccaucuguguugggua

SEQ ID NO: 2998380 - RNA, 19 nt, Artificial Sequence
  Description of Artificial Sequence: Synthetic oligonucleotide
ucucaaguagcagcuuguc

SEQ ID NO: 2998381 - RNA, 19 nt, Artificial Sequence
  Description of Artificial Sequence: Synthetic oligonucleotide
ccaugaauguaauaaccca

SEQ ID NO: 2998382 - RNA, 19 nt, Artificial Sequence
  Description of Artificial Sequence: Synthetic oligonucleotide
uccauggacugaccuccca

SEQ ID NO: 2998383 - RNA, 19 nt, Artificial Sequence
  Description of Artificial Sequence: Synthetic oligonucleotide
guguuucaugaauucuguc

SEQ ID NO: 2998384 - RNA, 19 nt, Artificial Sequence
  Description of Artificial Sequence: Synthetic oligonucleotide
aaggagccaaggaacuuau

SEQ ID NO: 2998385 - RNA, 19 nt, Artificial Sequence
  Description of Artificial Sequence: Synthetic oligonucleotide
acuuauucauugcguggua

SEQ ID NO: 2998386 - RNA, 19 nt, Artificial Sequence
  Description of Artificial Sequence: Synthetic oligonucleotide
aguagcagcuugucuuuua

SEQ ID NO: 2998387 - RNA, 19 nt, Artificial Sequence
  Description of Artificial Sequence: Synthetic oligonucleotide
ugguaugcuuuuacacuuu

SEQ ID NO: 2998388 - RNA, 19 nt, Artificial Sequence
  Description of Artificial Sequence: Synthetic oligonucleotide
gcgugguaugcuuuuacac

SEQ ID NO: 2998389 - RNA, 19 nt, Artificial Sequence
  Description of Artificial Sequence: Synthetic oligonucleotide
gucauaguguugucucauc

SEQ ID NO: 2998390 - RNA, 19 nt, Artificial Sequence
  Description of Artificial Sequence: Synthetic oligonucleotide
caaauuuuccgcuucucuu

SEQ ID NO: 2998391 - RNA, 19 nt, Artificial Sequence
  Description of Artificial Sequence: Synthetic oligonucleotide
augaucaaugaaggagcca

SEQ ID NO: 2998392 - RNA, 19 nt, Artificial Sequence
  Description of Artificial Sequence: Synthetic oligonucleotide
auguuggugucugcauguc

SEQ ID NO: 2998393 - RNA, 19 nt, Artificial Sequence
  Description of Artificial Sequence: Synthetic oligonucleotide
cuuccauguuggugucugc

SEQ ID NO: 2998394 - RNA, 19 nt, Artificial Sequence
  Description of Artificial Sequence: Synthetic oligonucleotide
uccauccccaggacccucu

SEQ ID NO: 2998395 - RNA, 19 nt, Artificial Sequence
  Description of Artificial Sequence: Synthetic oligonucleotide
gugguaugcuuuuacacuu

SEQ ID NO: 2998396 - RNA, 19 nt, Artificial Sequence
  Description of Artificial Sequence: Synthetic oligonucleotide
gucugcccaucuguguugg

SEQ ID NO: 2998397 - RNA, 19 nt, Artificial Sequence
  Description of Artificial Sequence: Synthetic oligonucleotide
gauucauguucauucucuu

SEQ ID NO: 2998398 - RNA, 19 nt, Artificial Sequence
  Description of Artificial Sequence: Synthetic oligonucleotide
cauuucuccuuguuagugu

SEQ ID NO: 2998399 - RNA, 19 nt, Artificial Sequence
  Description of Artificial Sequence: Synthetic oligonucleotide
cacaaauuuuccgcuucuc

SEQ ID NO: 2998400 - RNA, 19 nt, Artificial Sequence
  Description of Artificial Sequence: Synthetic oligonucleotide
cugucauaguguugucuca

SEQ ID NO: 2998401 - RNA, 19 nt, Artificial Sequence
  Description of Artificial Sequence: Synthetic oligonucleotide
ucugcccaucuguguuggg

SEQ ID NO: 2998402 - RNA, 19 nt, Artificial Sequence
  Description of Artificial Sequence: Synthetic oligonucleotide
auuuccuuaugaacaugau

SEQ ID NO: 2998403 - RNA, 19 nt, Artificial Sequence
  Description of Artificial Sequence: Synthetic oligonucleotide
uccccaggacccucucaag

SEQ ID NO: 2998404 - RNA, 19 nt, Artificial Sequence
  Description of Artificial Sequence: Synthetic oligonucleotide
guguuggguaccaaaccuc

SEQ ID NO: 2998405 - RNA, 19 nt, Artificial Sequence
  Description of Artificial Sequence: Synthetic oligonucleotide
gucugcauguccauggacu

SEQ ID NO: 2998406 - RNA, 19 nt, Artificial Sequence
  Description of Artificial Sequence: Synthetic oligonucleotide
uuggugucugcauguccau

SEQ ID NO: 2998407 - RNA, 19 nt, Artificial Sequence
  Description of Artificial Sequence: Synthetic oligonucleotide
uggugucugcauguccaug

SEQ ID NO: 2998408 - RNA, 19 nt, Artificial Sequence
  Description of Artificial Sequence: Synthetic oligonucleotide
acccucucaaguagcagcu

SEQ ID NO: 2998409 - RNA, 19 nt, Artificial Sequence
  Description of Artificial Sequence: Synthetic oligonucleotide
uagcagcuugucuuuuaua

SEQ ID NO: 2998410 - RNA, 19 nt, Artificial Sequence
  Description of Artificial Sequence: Synthetic oligonucleotide
uagucuggcagggccauuu

SEQ ID NO: 2998411 - RNA, 19 nt, Artificial Sequence
  Description of Artificial Sequence: Synthetic oligonucleotide
ccucucaaguagcagcuug

SEQ ID NO: 2998412 - RNA, 19 nt, Artificial Sequence
  Description of Artificial Sequence: Synthetic oligonucleotide
ccucccaugaauguaauaa

SEQ ID NO: 2998413 - RNA, 19 nt, Artificial Sequence
  Description of Artificial Sequence: Synthetic oligonucleotide
ccauguuggugucugcaug

SEQ ID NO: 2998414 - RNA, 19 nt, Artificial Sequence
  Description of Artificial Sequence: Synthetic oligonucleotide
ccauuucuccuuguuagug

SEQ ID NO: 2998415 - RNA, 19 nt, Artificial Sequence
  Description of Artificial Sequence: Synthetic oligonucleotide
cucaguagucuggcagggc

SEQ ID NO: 2998416 - RNA, 19 nt, Artificial Sequence
  Description of Artificial Sequence: Synthetic oligonucleotide
accucuuuggcugcacaaa

SEQ ID NO: 2998417 - RNA, 19 nt, Artificial Sequence
  Description of Artificial Sequence: Synthetic oligonucleotide
cauguccauggacugaccu

SEQ ID NO: 2998418 - RNA, 19 nt, Artificial Sequence
  Description of Artificial Sequence: Synthetic oligonucleotide
gcuuuuacacuuuguucaa

SEQ ID NO: 2998419 - RNA, 19 nt, Artificial Sequence
  Description of Artificial Sequence: Synthetic oligonucleotide
agggccauuucuccuuguu

SEQ ID NO: 2998420 - RNA, 19 nt, Artificial Sequence
  Description of Artificial Sequence: Synthetic oligonucleotide
ccaggacccucucaaguag

SEQ ID NO: 2998421 - RNA, 19 nt, Artificial Sequence
  Description of Artificial Sequence: Synthetic oligonucleotide
caguagucuggcagggcca

SEQ ID NO: 2998422 - RNA, 19 nt, Artificial Sequence
  Description of Artificial Sequence: Synthetic oligonucleotide
cugaugaacucaguagucu

SEQ ID NO: 2998423 - RNA, 19 nt, Artificial Sequence
  Description of Artificial Sequence: Synthetic oligonucleotide
aaguagcagcuugucuuuu

SEQ ID NO: 2998424 - RNA, 19 nt, Artificial Sequence
  Description of Artificial Sequence: Synthetic oligonucleotide
cucaaguagcagcuugucu

SEQ ID NO: 2998425 - RNA, 19 nt, Artificial Sequence
  Description of Artificial Sequence: Synthetic oligonucleotide
gcugaugaacucaguaguc

SEQ ID NO: 2998426 - RNA, 19 nt, Artificial Sequence
  Description of Artificial Sequence: Synthetic oligonucleotide
gugucugcauguccaugga

SEQ ID NO: 2998427 - RNA, 19 nt, Artificial Sequence
  Description of Artificial Sequence: Synthetic oligonucleotide
cucucaaguagcagcuugu

SEQ ID NO: 2998428 - RNA, 19 nt, Artificial Sequence
  Description of Artificial Sequence: Synthetic oligonucleotide
ccaugaacuccauccccag

SEQ ID NO: 2998429 - RNA, 19 nt, Artificial Sequence
  Description of Artificial Sequence: Synthetic oligonucleotide
gcugcacaaauuuuccgcu

SEQ ID NO: 2998430 - RNA, 19 nt, Artificial Sequence
  Description of Artificial Sequence: Synthetic oligonucleotide
guagcagcuugucuuuuau

SEQ ID NO: 2998431 - RNA, 19 nt, Artificial Sequence
  Description of Artificial Sequence: Synthetic oligonucleotide
aggacccucucaaguagca

SEQ ID NO: 2998432 - RNA, 19 nt, Artificial Sequence
  Description of Artificial Sequence: Synthetic oligonucleotide
caaaccucuuuggcugcac

SEQ ID NO: 2998433 - RNA, 19 nt, Artificial Sequence
  Description of Artificial Sequence: Synthetic oligonucleotide
gcagcuugucuuuuauaaa

SEQ ID NO: 2998434 - RNA, 19 nt, Artificial Sequence
  Description of Artificial Sequence: Synthetic oligonucleotide
cuuuuacacuuuguucaaa

SEQ ID NO: 2998435 - RNA, 19 nt, Artificial Sequence
  Description of Artificial Sequence: Synthetic oligonucleotide
cuuauucauugcgugguau

SEQ ID NO: 2998436 - RNA, 19 nt, Artificial Sequence
  Description of Artificial Sequence: Synthetic oligonucleotide
auugcgugguaugcuuuua

SEQ ID NO: 2998437 - RNA, 19 nt, Artificial Sequence
  Description of Artificial Sequence: Synthetic oligonucleotide
acuugcugaugaacucagu

SEQ ID NO: 2998438 - RNA, 19 nt, Artificial Sequence
  Description of Artificial Sequence: Synthetic oligonucleotide
caaguagcagcuugucuuu

SEQ ID NO: 2998439 - RNA, 19 nt, Artificial Sequence
  Description of Artificial Sequence: Synthetic oligonucleotide
cucuuuugagauucauguu

SEQ ID NO: 2998440 - RNA, 19 nt, Artificial Sequence
  Description of Artificial Sequence: Synthetic oligonucleotide
cuuuggcugcacaaauuuu

SEQ ID NO: 2998441 - RNA, 19 nt, Artificial Sequence
  Description of Artificial Sequence: Synthetic oligonucleotide
cugaccucccaugaaugua

SEQ ID NO: 2998442 - RNA, 19 nt, Artificial Sequence
  Description of Artificial Sequence: Synthetic oligonucleotide
ggacccucucaaguagcag

SEQ ID NO: 2998443 - RNA, 19 nt, Artificial Sequence
  Description of Artificial Sequence: Synthetic oligonucleotide
ggacugaccucccaugaau

SEQ ID NO: 2998444 - RNA, 19 nt, Artificial Sequence
  Description of Artificial Sequence: Synthetic oligonucleotide
cauucucuuccauguuggu

SEQ ID NO: 2998445 - RNA, 19 nt, Artificial Sequence
  Description of Artificial Sequence: Synthetic oligonucleotide
gucuggcagggccauuucu

SEQ ID NO: 2998446 - RNA, 19 nt, Artificial Sequence
  Description of Artificial Sequence: Synthetic oligonucleotide
cgugguaugcuuuuacacu

SEQ ID NO: 2998447 - RNA, 19 nt, Artificial Sequence
  Description of Artificial Sequence: Synthetic oligonucleotide
cauguucauucucuuccau

SEQ ID NO: 2998448 - RNA, 19 nt, Artificial Sequence
  Description of Artificial Sequence: Synthetic oligonucleotide
guccauggacugaccuccc

SEQ ID NO: 2998449 - RNA, 19 nt, Artificial Sequence
  Description of Artificial Sequence: Synthetic oligonucleotide
cucuuuggcugcacaaauu

SEQ ID NO: 2998450 - RNA, 19 nt, Artificial Sequence
  Description of Artificial Sequence: Synthetic oligonucleotide
ccauuuccuuaugaacaug

SEQ ID NO: 2998451 - RNA, 19 nt, Artificial Sequence
  Description of Artificial Sequence: Synthetic oligonucleotide
cugcauguccauggacuga

SEQ ID NO: 2998452 - RNA, 19 nt, Artificial Sequence
  Description of Artificial Sequence: Synthetic oligonucleotide
cauugcgugguaugcuuuu

SEQ ID NO: 2998453 - RNA, 19 nt, Artificial Sequence
  Description of Artificial Sequence: Synthetic oligonucleotide
gcacaaauuuuccgcuucu

SEQ ID NO: 2998454 - RNA, 19 nt, Artificial Sequence
  Description of Artificial Sequence: Synthetic oligonucleotide
cauccccaggacccucuca

SEQ ID NO: 2998455 - RNA, 19 nt, Artificial Sequence
  Description of Artificial Sequence: Synthetic oligonucleotide
ccaugggcuccaugaacuc

SEQ ID NO: 2998456 - RNA, 19 nt, Artificial Sequence
  Description of Artificial Sequence: Synthetic oligonucleotide
cugcacaaauuuuccgcuu

SEQ ID NO: 2998457 - RNA, 19 nt, Artificial Sequence
  Description of Artificial Sequence: Synthetic oligonucleotide
cugcccaucuguguugggu

SEQ ID NO: 2998458 - RNA, 19 nt, Artificial Sequence
  Description of Artificial Sequence: Synthetic oligonucleotide
cuccauccccaggacccuc

SEQ ID NO: 2998459 - RNA, 19 nt, Artificial Sequence
  Description of Artificial Sequence: Synthetic oligonucleotide
cccaggacccucucaagua

SEQ ID NO: 2998460 - RNA, 19 nt, Artificial Sequence
  Description of Artificial Sequence: Synthetic oligonucleotide
gcauguccauggacugacc

SEQ ID NO: 2998461 - RNA, 19 nt, Artificial Sequence
  Description of Artificial Sequence: Synthetic oligonucleotide
ccaucuguguuggguacca

SEQ ID NO: 2998462 - RNA, 19 nt, Artificial Sequence
  Description of Artificial Sequence: Synthetic oligonucleotide
ccuuaugaacaugaucaau

SEQ ID NO: 2998463 - RNA, 19 nt, Artificial Sequence
  Description of Artificial Sequence: Synthetic oligonucleotide
ggcagggccauuucuccuu

SEQ ID NO: 2998464 - RNA, 19 nt, Artificial Sequence
  Description of Artificial Sequence: Synthetic oligonucleotide
aggagccaaggaacuuauu

SEQ ID NO: 2998465 - RNA, 19 nt, Artificial Sequence
  Description of Artificial Sequence: Synthetic oligonucleotide
gaccucccaugaauguaau

SEQ ID NO: 2998466 - RNA, 19 nt, Artificial Sequence
  Description of Artificial Sequence: Synthetic oligonucleotide
ccucuuuggcugcacaaau

SEQ ID NO: 2998467 - RNA, 19 nt, Artificial Sequence
  Description of Artificial Sequence: Synthetic oligonucleotide
guuggguaccaaaccucuu

SEQ ID NO: 2998468 - RNA, 19 nt, Artificial Sequence
  Description of Artificial Sequence: Synthetic oligonucleotide
gggcuccaugaacuccauc

SEQ ID NO: 2998469 - RNA, 19 nt, Artificial Sequence
  Description of Artificial Sequence: Synthetic oligonucleotide
caucuguguuggguaccaa

SEQ ID NO: 2998470 - RNA, 19 nt, Artificial Sequence
  Description of Artificial Sequence: Synthetic oligonucleotide
gccaaggaacuuauucauu

SEQ ID NO: 2998471 - RNA, 19 nt, Artificial Sequence
  Description of Artificial Sequence: Synthetic oligonucleotide
ccauggacugaccucccau

SEQ ID NO: 2998472 - RNA, 19 nt, Artificial Sequence
  Description of Artificial Sequence: Synthetic oligonucleotide
ccaaaccucuuuggcugca

SEQ ID NO: 2998473 - RNA, 19 nt, Artificial Sequence
  Description of Artificial Sequence: Synthetic oligonucleotide
ccccaggacccucucaagu

SEQ ID NO: 2998474 - RNA, 19 nt, Artificial Sequence
  Description of Artificial Sequence: Synthetic oligonucleotide
cagggccauuucuccuugu

SEQ ID NO: 2998475 - RNA, 19 nt, Artificial Sequence
  Description of Artificial Sequence: Synthetic oligonucleotide
guagucuggcagggccauu

SEQ ID NO: 2998476 - RNA, 19 nt, Artificial Sequence
  Description of Artificial Sequence: Synthetic oligonucleotide
ccgcuucucuuuugagauu

SEQ ID NO: 2998477 - RNA, 19 nt, Artificial Sequence
  Description of Artificial Sequence: Synthetic oligonucleotide
cccucucaaguagcagcuu

SEQ ID NO: 2998478 - RNA, 19 nt, Artificial Sequence
  Description of Artificial Sequence: Synthetic oligonucleotide
agugucucaaaccuaaagc

SEQ ID NO: 2998479 - RNA, 19 nt, Artificial Sequence
  Description of Artificial Sequence: Synthetic oligonucleotide
ucucucaggaccaugaggg

SEQ ID NO: 2998480 - RNA, 19 nt, Artificial Sequence
  Description of Artificial Sequence: Synthetic oligonucleotide
uugagaauccaaaagaaga

SEQ ID NO: 2998481 - RNA, 19 nt, Artificial Sequence
  Description of Artificial Sequence: Synthetic oligonucleotide
gaauagaggagauucaugc

SEQ ID NO: 2998482 - RNA, 19 nt, Artificial Sequence
  Description of Artificial Sequence: Synthetic oligonucleotide
uuucugauggaauagagga

SEQ ID NO: 2998483 - RNA, 19 nt, Artificial Sequence
  Description of Artificial Sequence: Synthetic oligonucleotide
aaacaaugaugugacagcc

SEQ ID NO: 2998484 - RNA, 19 nt, Artificial Sequence
  Description of Artificial Sequence: Synthetic oligonucleotide
ugagaauccaaaagaagag

SEQ ID NO: 2998485 - RNA, 19 nt, Artificial Sequence
  Description of Artificial Sequence: Synthetic oligonucleotide
uccagguaaacaaugaugu

SEQ ID NO: 2998486 - RNA, 19 nt, Artificial Sequence
  Description of Artificial Sequence: Synthetic oligonucleotide
uauaacaauauuuuauuau

SEQ ID NO: 2998487 - RNA, 19 nt, Artificial Sequence
  Description of Artificial Sequence: Synthetic oligonucleotide
uguuguaaaauguuuguac

SEQ ID NO: 2998488 - RNA, 19 nt, Artificial Sequence
  Description of Artificial Sequence: Synthetic oligonucleotide
uuguauauaacaauauuuu

SEQ ID NO: 2998489 - RNA, 19 nt, Artificial Sequence
  Description of Artificial Sequence: Synthetic oligonucleotide
aggagauucaugcugauca

SEQ ID NO: 2998490 - RNA, 19 nt, Artificial Sequence
  Description of Artificial Sequence: Synthetic oligonucleotide
uaaacaaugaugugacagc

SEQ ID NO: 2998491 - RNA, 19 nt, Artificial Sequence
  Description of Artificial Sequence: Synthetic oligonucleotide
aacaauauuuuauuauuuu

SEQ ID NO: 2998492 - RNA, 19 nt, Artificial Sequence
  Description of Artificial Sequence: Synthetic oligonucleotide
aaugaugugacagccaaca

SEQ ID NO: 2998493 - RNA, 19 nt, Artificial Sequence
  Description of Artificial Sequence: Synthetic oligonucleotide
guaaacaaugaugugacag

SEQ ID NO: 2998494 - RNA, 19 nt, Artificial Sequence
  Description of Artificial Sequence: Synthetic oligonucleotide
aacacugcaucucucagga

SEQ ID NO: 2998495 - RNA, 19 nt, Artificial Sequence
  Description of Artificial Sequence: Synthetic oligonucleotide
acugugaggagacugcugg

SEQ ID NO: 2998496 - RNA, 19 nt, Artificial Sequence
  Description of Artificial Sequence: Synthetic oligonucleotide
uucuguuguaaaauguuug

SEQ ID NO: 2998497 - RNA, 19 nt, Artificial Sequence
  Description of Artificial Sequence: Synthetic oligonucleotide
aaacacugcaucucucagg

SEQ ID NO: 2998498 - RNA, 19 nt, Artificial Sequence
  Description of Artificial Sequence: Synthetic oligonucleotide
gauggaauagaggagauuc

SEQ ID NO: 2998499 - RNA, 19 nt, Artificial Sequence
  Description of Artificial Sequence: Synthetic oligonucleotide
aagugucucaaaccuaaag

SEQ ID NO: 2998500 - RNA, 19 nt, Artificial Sequence
  Description of Artificial Sequence: Synthetic oligonucleotide
auguuuguaccucuguuuc

SEQ ID NO: 2998501 - RNA, 19 nt, Artificial Sequence
  Description of Artificial Sequence: Synthetic oligonucleotide
caugaugauggcuuggacc

SEQ ID NO: 2998502 - RNA, 19 nt, Artificial Sequence
  Description of Artificial Sequence: Synthetic oligonucleotide
uaggaagugucucaaaccu

SEQ ID NO: 2998503 - RNA, 19 nt, Artificial Sequence
  Description of Artificial Sequence: Synthetic oligonucleotide
aaacauguuguuuacuuuu

SEQ ID NO: 2998504 - RNA, 19 nt, Artificial Sequence
  Description of Artificial Sequence: Synthetic oligonucleotide
auagaggagauucaugcug

SEQ ID NO: 2998505 - RNA, 19 nt, Artificial Sequence
  Description of Artificial Sequence: Synthetic oligonucleotide
gccaacaucaccuaggaag

SEQ ID NO: 2998506 - RNA, 19 nt, Artificial Sequence
  Description of Artificial Sequence: Synthetic oligonucleotide
uguuucugauggaauagag

SEQ ID NO: 2998507 - RNA, 19 nt, Artificial Sequence
  Description of Artificial Sequence: Synthetic oligonucleotide
uuccagguaaacaaugaug

SEQ ID NO: 2998508 - RNA, 19 nt, Artificial Sequence
  Description of Artificial Sequence: Synthetic oligonucleotide
gaugugacagccaacauca

SEQ ID NO: 2998509 - RNA, 19 nt, Artificial Sequence
  Description of Artificial Sequence: Synthetic oligonucleotide
uuuuguauauaacaauauu

SEQ ID NO: 2998510 - RNA, 19 nt, Artificial Sequence
  Description of Artificial Sequence: Synthetic oligonucleotide
auguuguuuacuuuucuug

SEQ ID NO: 2998511 - RNA, 19 nt, Artificial Sequence
  Description of Artificial Sequence: Synthetic oligonucleotide
uguuguuuacuuuucuugu

SEQ ID NO: 2998512 - RNA, 19 nt, Artificial Sequence
  Description of Artificial Sequence: Synthetic oligonucleotide
cauucuacagaccucaguc

SEQ ID NO: 2998513 - RNA, 19 nt, Artificial Sequence
  Description of Artificial Sequence: Synthetic oligonucleotide
guaccucuguuucugaugg

SEQ ID NO: 2998514 - RNA, 19 nt, Artificial Sequence
  Description of Artificial Sequence: Synthetic oligonucleotide
aaaauguuuguaccucugu

SEQ ID NO: 2998515 - RNA, 19 nt, Artificial Sequence
  Description of Artificial Sequence: Synthetic oligonucleotide
aauguuuguaccucuguuu

SEQ ID NO: 2998516 - RNA, 19 nt, Artificial Sequence
  Description of Artificial Sequence: Synthetic oligonucleotide
aauccaaaagaagagcagu

SEQ ID NO: 2998517 - RNA, 19 nt, Artificial Sequence
  Description of Artificial Sequence: Synthetic oligonucleotide
uguauauaacaauauuuua

SEQ ID NO: 2998518 - RNA, 19 nt, Artificial Sequence
  Description of Artificial Sequence: Synthetic oligonucleotide
aauagaggagauucaugcu

SEQ ID NO: 2998519 - RNA, 19 nt, Artificial Sequence
  Description of Artificial Sequence: Synthetic oligonucleotide
gagggcaagaaacauguug

SEQ ID NO: 2998520 - RNA, 19 nt, Artificial Sequence
  Description of Artificial Sequence: Synthetic oligonucleotide
ucugauggaauagaggaga

SEQ ID NO: 2998521 - RNA, 19 nt, Artificial Sequence
  Description of Artificial Sequence: Synthetic oligonucleotide
ugucucaaaccuaaagcug

SEQ ID NO: 2998522 - RNA, 19 nt, Artificial Sequence
  Description of Artificial Sequence: Synthetic oligonucleotide
agaagcacacauucuacag

SEQ ID NO: 2998523 - RNA, 19 nt, Artificial Sequence
  Description of Artificial Sequence: Synthetic oligonucleotide
gaucaaggaauugagaauc

SEQ ID NO: 2998524 - RNA, 19 nt, Artificial Sequence
  Description of Artificial Sequence: Synthetic oligonucleotide
ucuguuguaaaauguuugu

SEQ ID NO: 2998525 - RNA, 19 nt, Artificial Sequence
  Description of Artificial Sequence: Synthetic oligonucleotide
uuguuuacuuuucuuguac

SEQ ID NO: 2998526 - RNA, 19 nt, Artificial Sequence
  Description of Artificial Sequence: Synthetic oligonucleotide
uuguaaaauguuuguaccu

SEQ ID NO: 2998527 - RNA, 19 nt, Artificial Sequence
  Description of Artificial Sequence: Synthetic oligonucleotide
agguaaacaaugaugugac

SEQ ID NO: 2998528 - RNA, 19 nt, Artificial Sequence
  Description of Artificial Sequence: Synthetic oligonucleotide
uuuacuucuguuguaaaau

SEQ ID NO: 2998529 - RNA, 19 nt, Artificial Sequence
  Description of Artificial Sequence: Synthetic oligonucleotide
uaaaauguuuguaccucug

SEQ ID NO: 2998530 - RNA, 19 nt, Artificial Sequence
  Description of Artificial Sequence: Synthetic oligonucleotide
aauugagaauccaaaagaa

SEQ ID NO: 2998531 - RNA, 19 nt, Artificial Sequence
  Description of Artificial Sequence: Synthetic oligonucleotide
agagcagugagagaagcac

SEQ ID NO: 2998532 - RNA, 19 nt, Artificial Sequence
  Description of Artificial Sequence: Synthetic oligonucleotide
ugcugaucaaggaauugag

SEQ ID NO: 2998533 - RNA, 19 nt, Artificial Sequence
  Description of Artificial Sequence: Synthetic oligonucleotide
uucaugcugaucaaggaau

SEQ ID NO: 2998534 - RNA, 19 nt, Artificial Sequence
  Description of Artificial Sequence: Synthetic oligonucleotide
ugugacagccaacaucacc

SEQ ID NO: 2998535 - RNA, 19 nt, Artificial Sequence
  Description of Artificial Sequence: Synthetic oligonucleotide
cuaggaagugucucaaacc

SEQ ID NO: 2998536 - RNA, 19 nt, Artificial Sequence
  Description of Artificial Sequence: Synthetic oligonucleotide
uaacaauauuuuauuauuu

SEQ ID NO: 2998537 - RNA, 19 nt, Artificial Sequence
  Description of Artificial Sequence: Synthetic oligonucleotide
agacugcuggugcagaugg

SEQ ID NO: 2998538 - RNA, 19 nt, Artificial Sequence
  Description of Artificial Sequence: Synthetic oligonucleotide
ugaugugacagccaacauc

SEQ ID NO: 2998539 - RNA, 19 nt, Artificial Sequence
  Description of Artificial Sequence: Synthetic oligonucleotide
agaaacauguuguuuacuu

SEQ ID NO: 2998540 - RNA, 19 nt, Artificial Sequence
  Description of Artificial Sequence: Synthetic oligonucleotide
aaauguuuguaccucuguu

SEQ ID NO: 2998541 - RNA, 19 nt, Artificial Sequence
  Description of Artificial Sequence: Synthetic oligonucleotide
gauggcuuggaccacugug

SEQ ID NO: 2998542 - RNA, 19 nt, Artificial Sequence
  Description of Artificial Sequence: Synthetic oligonucleotide
ugaaacacugcaucucuca

SEQ ID NO: 2998543 - RNA, 19 nt, Artificial Sequence
  Description of Artificial Sequence: Synthetic oligonucleotide
cacugcaucucucaggacc

SEQ ID NO: 2998544 - RNA, 19 nt, Artificial Sequence
  Description of Artificial Sequence: Synthetic oligonucleotide
uuacuuuucuuguacuuuc

SEQ ID NO: 2998545 - RNA, 19 nt, Artificial Sequence
  Description of Artificial Sequence: Synthetic oligonucleotide
agauucaugcugaucaagg

SEQ ID NO: 2998546 - RNA, 19 nt, Artificial Sequence
  Description of Artificial Sequence: Synthetic oligonucleotide
uucugauggaauagaggag

SEQ ID NO: 2998547 - RNA, 19 nt, Artificial Sequence
  Description of Artificial Sequence: Synthetic oligonucleotide
uacuucuguuguaaaaugu

SEQ ID NO: 2998548 - RNA, 19 nt, Artificial Sequence
  Description of Artificial Sequence: Synthetic oligonucleotide
uguaaaauguuuguaccuc

SEQ ID NO: 2998549 - RNA, 19 nt, Artificial Sequence
  Description of Artificial Sequence: Synthetic oligonucleotide
ucuguuucugauggaauag

SEQ ID NO: 2998550 - RNA, 19 nt, Artificial Sequence
  Description of Artificial Sequence: Synthetic oligonucleotide
uagaggagauucaugcuga

SEQ ID NO: 2998551 - RNA, 19 nt, Artificial Sequence
  Description of Artificial Sequence: Synthetic oligonucleotide
acaaugaugugacagccaa

SEQ ID NO: 2998552 - RNA, 19 nt, Artificial Sequence
  Description of Artificial Sequence: Synthetic oligonucleotide
gaaacacugcaucucucag

SEQ ID NO: 2998553 - RNA, 19 nt, Artificial Sequence
  Description of Artificial Sequence: Synthetic oligonucleotide
aacauguuguuuacuuuuc

SEQ ID NO: 2998554 - RNA, 19 nt, Artificial Sequence
  Description of Artificial Sequence: Synthetic oligonucleotide
cugaucaaggaauugagaa

SEQ ID NO: 2998555 - RNA, 19 nt, Artificial Sequence
  Description of Artificial Sequence: Synthetic oligonucleotide
aucucucaggaccaugagg

SEQ ID NO: 2998556 - RNA, 19 nt, Artificial Sequence
  Description of Artificial Sequence: Synthetic oligonucleotide
auugagaauccaaaagaag

SEQ ID NO: 2998557 - RNA, 19 nt, Artificial Sequence
  Description of Artificial Sequence: Synthetic oligonucleotide
gagaauccaaaagaagagc

SEQ ID NO: 2998558 - RNA, 19 nt, Artificial Sequence
  Description of Artificial Sequence: Synthetic oligonucleotide
gaauccaaaagaagagcag

SEQ ID NO: 2998559 - RNA, 19 nt, Artificial Sequence
  Description of Artificial Sequence: Synthetic oligonucleotide
agaauccaaaagaagagca

SEQ ID NO: 2998560 - RNA, 19 nt, Artificial Sequence
  Description of Artificial Sequence: Synthetic oligonucleotide
gaccaugagggcaagaaac

SEQ ID NO: 2998561 - RNA, 19 nt, Artificial Sequence
  Description of Artificial Sequence: Synthetic oligonucleotide
uguaccucuguuucugaug

SEQ ID NO: 2998562 - RNA, 19 nt, Artificial Sequence
  Description of Artificial Sequence: Synthetic oligonucleotide
gugagagaagcacacauuc

SEQ ID NO: 2998563 - RNA, 19 nt, Artificial Sequence
  Description of Artificial Sequence: Synthetic oligonucleotide
agaccucagucuuagccuc

SEQ ID NO: 2998564 - RNA, 19 nt, Artificial Sequence
  Description of Artificial Sequence: Synthetic oligonucleotide
aaggaauugagaauccaaa

SEQ ID NO: 2998565 - RNA, 19 nt, Artificial Sequence
  Description of Artificial Sequence: Synthetic oligonucleotide
agauggagaggccccgagc

SEQ ID NO: 2998566 - RNA, 19 nt, Artificial Sequence
  Description of Artificial Sequence: Synthetic oligonucleotide
uuuccagguaaacaaugau

SEQ ID NO: 2998567 - RNA, 19 nt, Artificial Sequence
  Description of Artificial Sequence: Synthetic oligonucleotide
aacaucaccuaggaagugu

SEQ ID NO: 2998568 - RNA, 19 nt, Artificial Sequence
  Description of Artificial Sequence: Synthetic oligonucleotide
ugagagaagcacacauucu

SEQ ID NO: 2998569 - RNA, 19 nt, Artificial Sequence
  Description of Artificial Sequence: Synthetic oligonucleotide
agagaagcacacauucuac

SEQ ID NO: 2998570 - RNA, 19 nt, Artificial Sequence
  Description of Artificial Sequence: Synthetic oligonucleotide
gauucaugcugaucaagga

SEQ ID NO: 2998571 - RNA, 19 nt, Artificial Sequence
  Description of Artificial Sequence: Synthetic oligonucleotide
aggaauugagaauccaaaa

SEQ ID NO: 2998572 - RNA, 19 nt, Artificial Sequence
  Description of Artificial Sequence: Synthetic oligonucleotide
aucaaggaauugagaaucc

SEQ ID NO: 2998573 - RNA, 19 nt, Artificial Sequence
  Description of Artificial Sequence: Synthetic oligonucleotide
caugagggcaagaaacaug

SEQ ID NO: 2998574 - RNA, 19 nt, Artificial Sequence
  Description of Artificial Sequence: Synthetic oligonucleotide
uccaaaagaagagcaguga

SEQ ID NO: 2998575 - RNA, 19 nt, Artificial Sequence
  Description of Artificial Sequence: Synthetic oligonucleotide
cacucugaaacacugcauc

SEQ ID NO: 2998576 - RNA, 19 nt, Artificial Sequence
  Description of Artificial Sequence: Synthetic oligonucleotide
acccuuuccagguaaacaa

SEQ ID NO: 2998577 - RNA, 19 nt, Artificial Sequence
  Description of Artificial Sequence: Synthetic oligonucleotide
augagggcaagaaacaugu

SEQ ID NO: 2998578 - RNA, 19 nt, Artificial Sequence
  Description of Artificial Sequence: Synthetic oligonucleotide
gagagaagcacacauucua

SEQ ID NO: 2998579 - RNA, 19 nt, Artificial Sequence
  Description of Artificial Sequence: Synthetic oligonucleotide
agcagugagagaagcacac

SEQ ID NO: 2998580 - RNA, 19 nt, Artificial Sequence
  Description of Artificial Sequence: Synthetic oligonucleotide
uucuacagaccucagucuu

SEQ ID NO: 2998581 - RNA, 19 nt, Artificial Sequence
  Description of Artificial Sequence: Synthetic oligonucleotide
guauauaacaauauuuuau

SEQ ID NO: 2998582 - RNA, 19 nt, Artificial Sequence
  Description of Artificial Sequence: Synthetic oligonucleotide
auucuacagaccucagucu

SEQ ID NO: 2998583 - RNA, 19 nt, Artificial Sequence
  Description of Artificial Sequence: Synthetic oligonucleotide
acucugaaacacugcaucu

SEQ ID NO: 2998584 - RNA, 19 nt, Artificial Sequence
  Description of Artificial Sequence: Synthetic oligonucleotide
aucaccuaggaagugucuc

SEQ ID NO: 2998585 - RNA, 19 nt, Artificial Sequence
  Description of Artificial Sequence: Synthetic oligonucleotide
gagaagcacacauucuaca

SEQ ID NO: 2998586 - RNA, 19 nt, Artificial Sequence
  Description of Artificial Sequence: Synthetic oligonucleotide
ucaccuaggaagugucuca

SEQ ID NO: 2998587 - RNA, 19 nt, Artificial Sequence
  Description of Artificial Sequence: Synthetic oligonucleotide
acagccaacaucaccuagg

SEQ ID NO: 2998588 - RNA, 19 nt, Artificial Sequence
  Description of Artificial Sequence: Synthetic oligonucleotide
uggaccacugugaggagac

SEQ ID NO: 2998589 - RNA, 19 nt, Artificial Sequence
  Description of Artificial Sequence: Synthetic oligonucleotide
agggcaagaaacauguugu

SEQ ID NO: 2998590 - RNA, 19 nt, Artificial Sequence
  Description of Artificial Sequence: Synthetic oligonucleotide
acacauucuacagaccuca

SEQ ID NO: 2998591 - RNA, 19 nt, Artificial Sequence
  Description of Artificial Sequence: Synthetic oligonucleotide
cagguaaacaaugauguga

SEQ ID NO: 2998592 - RNA, 19 nt, Artificial Sequence
  Description of Artificial Sequence: Synthetic oligonucleotide
uacuuuucuuguacuuucu

SEQ ID NO: 2998593 - RNA, 19 nt, Artificial Sequence
  Description of Artificial Sequence: Synthetic oligonucleotide
guuuguaccucuguuucug

SEQ ID NO: 2998594 - RNA, 19 nt, Artificial Sequence
  Description of Artificial Sequence: Synthetic oligonucleotide
acauguuguuuacuuuucu

SEQ ID NO: 2998595 - RNA, 19 nt, Artificial Sequence
  Description of Artificial Sequence: Synthetic oligonucleotide
accacugugaggagacugc

SEQ ID NO: 2998596 - RNA, 19 nt, Artificial Sequence
  Description of Artificial Sequence: Synthetic oligonucleotide
gagauucaugcugaucaag

SEQ ID NO: 2998597 - RNA, 19 nt, Artificial Sequence
  Description of Artificial Sequence: Synthetic oligonucleotide
ucaaggaauugagaaucca

SEQ ID NO: 2998598 - RNA, 19 nt, Artificial Sequence
  Description of Artificial Sequence: Synthetic oligonucleotide
ugugaggagacugcuggug

SEQ ID NO: 2998599 - RNA, 19 nt, Artificial Sequence
  Description of Artificial Sequence: Synthetic oligonucleotide
uguuuguaccucuguuucu

SEQ ID NO: 2998600 - RNA, 19 nt, Artificial Sequence
  Description of Artificial Sequence: Synthetic oligonucleotide
gugucucaaaccuaaagcu

SEQ ID NO: 2998601 - RNA, 19 nt, Artificial Sequence
  Description of Artificial Sequence: Synthetic oligonucleotide
uggcuuggaccacugugag

SEQ ID NO: 2998602 - RNA, 19 nt, Artificial Sequence
  Description of Artificial Sequence: Synthetic oligonucleotide
gacagccaacaucaccuag

SEQ ID NO: 2998603 - RNA, 19 nt, Artificial Sequence
  Description of Artificial Sequence: Synthetic oligonucleotide
ucaugaugauggcuuggac

SEQ ID NO: 2998604 - RNA, 19 nt, Artificial Sequence
  Description of Artificial Sequence: Synthetic oligonucleotide
aagaaacauguuguuuacu

SEQ ID NO: 2998605 - RNA, 19 nt, Artificial Sequence
  Description of Artificial Sequence: Synthetic oligonucleotide
cuggcacucugaaacacug

SEQ ID NO: 2998606 - RNA, 19 nt, Artificial Sequence
  Description of Artificial Sequence: Synthetic oligonucleotide
cuuuccagguaaacaauga

SEQ ID NO: 2998607 - RNA, 19 nt, Artificial Sequence
  Description of Artificial Sequence: Synthetic oligonucleotide
uggaauagaggagauucau

SEQ ID NO: 2998608 - RNA, 19 nt, Artificial Sequence
  Description of Artificial Sequence: Synthetic oligonucleotide
acauucuacagaccucagu

SEQ ID NO: 2998609 - RNA, 19 nt, Artificial Sequence
  Description of Artificial Sequence: Synthetic oligonucleotide
ucucaggaccaugagggca

SEQ ID NO: 2998610 - RNA, 19 nt, Artificial Sequence
  Description of Artificial Sequence: Synthetic oligonucleotide
gguucuggggcucaugaug

SEQ ID NO: 2998611 - RNA, 19 nt, Artificial Sequence
  Description of Artificial Sequence: Synthetic oligonucleotide
ccaaaagaagagcagugag

SEQ ID NO: 2998612 - RNA, 19 nt, Artificial Sequence
  Description of Artificial Sequence: Synthetic oligonucleotide
gcaagaaacauguuguuua

SEQ ID NO: 2998613 - RNA, 19 nt, Artificial Sequence
  Description of Artificial Sequence: Synthetic oligonucleotide
auccaaaagaagagcagug

SEQ ID NO: 2998614 - RNA, 19 nt, Artificial Sequence
  Description of Artificial Sequence: Synthetic oligonucleotide
aacaaugaugugacagcca

SEQ ID NO: 2998615 - RNA, 19 nt, Artificial Sequence
  Description of Artificial Sequence: Synthetic oligonucleotide
uuuguaccucuguuucuga

SEQ ID NO: 2998616 - RNA, 19 nt, Artificial Sequence
  Description of Artificial Sequence: Synthetic oligonucleotide
gugaggagacugcuggugc

SEQ ID NO: 2998617 - RNA, 19 nt, Artificial Sequence
  Description of Artificial Sequence: Synthetic oligonucleotide
acaucaccuaggaaguguc

SEQ ID NO: 2998618 - RNA, 19 nt, Artificial Sequence
  Description of Artificial Sequence: Synthetic oligonucleotide
ugaggagacugcuggugca

SEQ ID NO: 2998619 - RNA, 19 nt, Artificial Sequence
  Description of Artificial Sequence: Synthetic oligonucleotide
augcugaucaaggaauuga

SEQ ID NO: 2998620 - RNA, 19 nt, Artificial Sequence
  Description of Artificial Sequence: Synthetic oligonucleotide
caaggaauugagaauccaa

SEQ ID NO: 2998621 - RNA, 19 nt, Artificial Sequence
  Description of Artificial Sequence: Synthetic oligonucleotide
ucuacagaccucagucuua

SEQ ID NO: 2998622 - RNA, 19 nt, Artificial Sequence
  Description of Artificial Sequence: Synthetic oligonucleotide
gagguucuggggcucauga

SEQ ID NO: 2998623 - RNA, 19 nt, Artificial Sequence
  Description of Artificial Sequence: Synthetic oligonucleotide
ucaugcugaucaaggaauu

SEQ ID NO: 2998624 - RNA, 19 nt, Artificial Sequence
  Description of Artificial Sequence: Synthetic oligonucleotide
cuggugcagauggagaggc

SEQ ID NO: 2998625 - RNA, 19 nt, Artificial Sequence
  Description of Artificial Sequence: Synthetic oligonucleotide
cuacagaccucagucuuag

SEQ ID NO: 2998626 - RNA, 19 nt, Artificial Sequence
  Description of Artificial Sequence: Synthetic oligonucleotide
guaaaauguuuguaccucu

SEQ ID NO: 2998627 - RNA, 19 nt, Artificial Sequence
  Description of Artificial Sequence: Synthetic oligonucleotide
gcuuggaccacugugagga

SEQ ID NO: 2998628 - RNA, 19 nt, Artificial Sequence
  Description of Artificial Sequence: Synthetic oligonucleotide
gaccacugugaggagacug

SEQ ID NO: 2998629 - RNA, 19 nt, Artificial Sequence
  Description of Artificial Sequence: Synthetic oligonucleotide
ccuaggaagugucucaaac

SEQ ID NO: 2998630 - RNA, 19 nt, Artificial Sequence
  Description of Artificial Sequence: Synthetic oligonucleotide
ugcagauggagaggccccg

SEQ ID NO: 2998631 - RNA, 19 nt, Artificial Sequence
  Description of Artificial Sequence: Synthetic oligonucleotide
aagagcagugagagaagca

SEQ ID NO: 2998632 - RNA, 19 nt, Artificial Sequence
  Description of Artificial Sequence: Synthetic oligonucleotide
acuucuguuguaaaauguu

SEQ ID NO: 2998633 - RNA, 19 nt, Artificial Sequence
  Description of Artificial Sequence: Synthetic oligonucleotide
cacacauucuacagaccuc

SEQ ID NO: 2998634 - RNA, 19 nt, Artificial Sequence
  Description of Artificial Sequence: Synthetic oligonucleotide
guuguuuacuuuucuugua

SEQ ID NO: 2998635 - RNA, 19 nt, Artificial Sequence
  Description of Artificial Sequence: Synthetic oligonucleotide
uggcacucugaaacacugc

SEQ ID NO: 2998636 - RNA, 19 nt, Artificial Sequence
  Description of Artificial Sequence: Synthetic oligonucleotide
ucuggggcucaugaugaug

SEQ ID NO: 2998637 - RNA, 19 nt, Artificial Sequence
  Description of Artificial Sequence: Synthetic oligonucleotide
accucagucuuagccuccc

SEQ ID NO: 2998638 - RNA, 19 nt, Artificial Sequence
  Description of Artificial Sequence: Synthetic oligonucleotide
ggcacucugaaacacugca

SEQ ID NO: 2998639 - RNA, 19 nt, Artificial Sequence
  Description of Artificial Sequence: Synthetic oligonucleotide
gaaacauguuguuuacuuu

SEQ ID NO: 2998640 - RNA, 19 nt, Artificial Sequence
  Description of Artificial Sequence: Synthetic oligonucleotide
cucugaaacacugcaucuc

SEQ ID NO: 2998641 - RNA, 19 nt, Artificial Sequence
  Description of Artificial Sequence: Synthetic oligonucleotide
caaugaugugacagccaac

SEQ ID NO: 2998642 - RNA, 19 nt, Artificial Sequence
  Description of Artificial Sequence: Synthetic oligonucleotide
auggcuuggaccacuguga

SEQ ID NO: 2998643 - RNA, 19 nt, Artificial Sequence
  Description of Artificial Sequence: Synthetic oligonucleotide
uuguaccucuguuucugau

SEQ ID NO: 2998644 - RNA, 19 nt, Artificial Sequence
  Description of Artificial Sequence: Synthetic oligonucleotide
acugcaucucucaggacca

SEQ ID NO: 2998645 - RNA, 19 nt, Artificial Sequence
  Description of Artificial Sequence: Synthetic oligonucleotide
cugaaacacugcaucucuc

SEQ ID NO: 2998646 - RNA, 19 nt, Artificial Sequence
  Description of Artificial Sequence: Synthetic oligonucleotide
cucuguuucugauggaaua

SEQ ID NO: 2998647 - RNA, 19 nt, Artificial Sequence
  Description of Artificial Sequence: Synthetic oligonucleotide
ggaauagaggagauucaug

SEQ ID NO: 2998648 - RNA, 19 nt, Artificial Sequence
  Description of Artificial Sequence: Synthetic oligonucleotide
guagccacuggccccuccc

SEQ ID NO: 2998649 - RNA, 19 nt, Artificial Sequence
  Description of Artificial Sequence: Synthetic oligonucleotide
ggugcagauggagaggccc

SEQ ID NO: 2998650 - RNA, 19 nt, Artificial Sequence
  Description of Artificial Sequence: Synthetic oligonucleotide
uuggaccacugugaggaga

SEQ ID NO: 2998651 - RNA, 19 nt, Artificial Sequence
  Description of Artificial Sequence: Synthetic oligonucleotide
ccuuuccagguaaacaaug

SEQ ID NO: 2998652 - RNA, 19 nt, Artificial Sequence
  Description of Artificial Sequence: Synthetic oligonucleotide
aggaccaugagggcaagaa

SEQ ID NO: 2998653 - RNA, 19 nt, Artificial Sequence
  Description of Artificial Sequence: Synthetic oligonucleotide
agccacuggccccucccac

SEQ ID NO: 2998654 - RNA, 19 nt, Artificial Sequence
  Description of Artificial Sequence: Synthetic oligonucleotide
accaugagggcaagaaaca

SEQ ID NO: 2998655 - RNA, 19 nt, Artificial Sequence
  Description of Artificial Sequence: Synthetic oligonucleotide
caucucucaggaccaugag

SEQ ID NO: 2998656 - RNA, 19 nt, Artificial Sequence
  Description of Artificial Sequence: Synthetic oligonucleotide
cucucaggaccaugagggc

SEQ ID NO: 2998657 - RNA, 19 nt, Artificial Sequence
  Description of Artificial Sequence: Synthetic oligonucleotide
gaggagacugcuggugcag

SEQ ID NO: 2998658 - RNA, 19 nt, Artificial Sequence
  Description of Artificial Sequence: Synthetic oligonucleotide
cacauucuacagaccucag

SEQ ID NO: 2998659 - RNA, 19 nt, Artificial Sequence
  Description of Artificial Sequence: Synthetic oligonucleotide
gagacugcuggugcagaug

SEQ ID NO: 2998660 - RNA, 19 nt, Artificial Sequence
  Description of Artificial Sequence: Synthetic oligonucleotide
auggaauagaggagauuca

SEQ ID NO: 2998661 - RNA, 19 nt, Artificial Sequence
  Description of Artificial Sequence: Synthetic oligonucleotide
ggaagugucucaaaccuaa

SEQ ID NO: 2998662 - RNA, 19 nt, Artificial Sequence
  Description of Artificial Sequence: Synthetic oligonucleotide
augaugugacagccaacau

SEQ ID NO: 2998663 - RNA, 19 nt, Artificial Sequence
  Description of Artificial Sequence: Synthetic oligonucleotide
uguagccacuggccccucc

SEQ ID NO: 2998664 - RNA, 19 nt, Artificial Sequence
  Description of Artificial Sequence: Synthetic oligonucleotide
ugcaucucucaggaccaug

SEQ ID NO: 2998665 - RNA, 19 nt, Artificial Sequence
  Description of Artificial Sequence: Synthetic oligonucleotide
cucaggaccaugagggcaa

SEQ ID NO: 2998666 - RNA, 19 nt, Artificial Sequence
  Description of Artificial Sequence: Synthetic oligonucleotide
gagcagugagagaagcaca

SEQ ID NO: 2998667 - RNA, 19 nt, Artificial Sequence
  Description of Artificial Sequence: Synthetic oligonucleotide
ugauggcuuggaccacugu

SEQ ID NO: 2998668 - RNA, 19 nt, Artificial Sequence
  Description of Artificial Sequence: Synthetic oligonucleotide
gcacacauucuacagaccu

SEQ ID NO: 2998669 - RNA, 19 nt, Artificial Sequence
  Description of Artificial Sequence: Synthetic oligonucleotide
uggugcagauggagaggcc

SEQ ID NO: 2998670 - RNA, 19 nt, Artificial Sequence
  Description of Artificial Sequence: Synthetic oligonucleotide
cagauggagaggccccgag

SEQ ID NO: 2998671 - RNA, 19 nt, Artificial Sequence
  Description of Artificial Sequence: Synthetic oligonucleotide
gaggagauucaugcugauc

SEQ ID NO: 2998672 - RNA, 19 nt, Artificial Sequence
  Description of Artificial Sequence: Synthetic oligonucleotide
agugagagaagcacacauu

SEQ ID NO: 2998673 - RNA, 19 nt, Artificial Sequence
  Description of Artificial Sequence: Synthetic oligonucleotide
ugauggaauagaggagauu

SEQ ID NO: 2998674 - RNA, 19 nt, Artificial Sequence
  Description of Artificial Sequence: Synthetic oligonucleotide
cucaugaugauggcuugga

SEQ ID NO: 2998675 - RNA, 19 nt, Artificial Sequence
  Description of Artificial Sequence: Synthetic oligonucleotide
uggggcucaugaugauggc

SEQ ID NO: 2998676 - RNA, 19 nt, Artificial Sequence
  Description of Artificial Sequence: Synthetic oligonucleotide
agaggagauucaugcugau

SEQ ID NO: 2998677 - RNA, 19 nt, Artificial Sequence
  Description of Artificial Sequence: Synthetic oligonucleotide
cuuggaccacugugaggag

SEQ ID NO: 2998678 - RNA, 19 nt, Artificial Sequence
  Description of Artificial Sequence: Synthetic oligonucleotide
auggagaggccccgagcca

SEQ ID NO: 2998679 - RNA, 19 nt, Artificial Sequence
  Description of Artificial Sequence: Synthetic oligonucleotide
cagaccucagucuuagccu

SEQ ID NO: 2998680 - RNA, 19 nt, Artificial Sequence
  Description of Artificial Sequence: Synthetic oligonucleotide
ugacagccaacaucaccua

SEQ ID NO: 2998681 - RNA, 19 nt, Artificial Sequence
  Description of Artificial Sequence: Synthetic oligonucleotide
uacagaccucagucuuagc

SEQ ID NO: 2998682 - RNA, 19 nt, Artificial Sequence
  Description of Artificial Sequence: Synthetic oligonucleotide
acuggcacucugaaacacu

SEQ ID NO: 2998683 - RNA, 19 nt, Artificial Sequence
  Description of Artificial Sequence: Synthetic oligonucleotide
cacccgggagguucugggg

SEQ ID NO: 2998684 - RNA, 19 nt, Artificial Sequence
  Description of Artificial Sequence: Synthetic oligonucleotide
cagccaacaucaccuagga

SEQ ID NO: 2998685 - RNA, 19 nt, Artificial Sequence
  Description of Artificial Sequence: Synthetic oligonucleotide
cacuggcacucugaaacac

SEQ ID NO: 2998686 - RNA, 19 nt, Artificial Sequence
  Description of Artificial Sequence: Synthetic oligonucleotide
uagccacuggccccuccca

SEQ ID NO: 2998687 - RNA, 19 nt, Artificial Sequence
  Description of Artificial Sequence: Synthetic oligonucleotide
cuguuucugauggaauaga

SEQ ID NO: 2998688 - RNA, 19 nt, Artificial Sequence
  Description of Artificial Sequence: Synthetic oligonucleotide
gguaaacaaugaugugaca

SEQ ID NO: 2998689 - RNA, 19 nt, Artificial Sequence
  Description of Artificial Sequence: Synthetic oligonucleotide
ggcuuggaccacugugagg

SEQ ID NO: 2998690 - RNA, 19 nt, Artificial Sequence
  Description of Artificial Sequence: Synthetic oligonucleotide
ccagguaaacaaugaugug

SEQ ID NO: 2998691 - RNA, 19 nt, Artificial Sequence
  Description of Artificial Sequence: Synthetic oligonucleotide
cuguuguaaaauguuugua

SEQ ID NO: 2998692 - RNA, 19 nt, Artificial Sequence
  Description of Artificial Sequence: Synthetic oligonucleotide
ggcucaugaugauggcuug

SEQ ID NO: 2998693 - RNA, 19 nt, Artificial Sequence
  Description of Artificial Sequence: Synthetic oligonucleotide
cacccuuuccagguaaaca

SEQ ID NO: 2998694 - RNA, 19 nt, Artificial Sequence
  Description of Artificial Sequence: Synthetic oligonucleotide
gaugauggcuuggaccacu

SEQ ID NO: 2998695 - RNA, 19 nt, Artificial Sequence
  Description of Artificial Sequence: Synthetic oligonucleotide
cagugagagaagcacacau

SEQ ID NO: 2998696 - RNA, 19 nt, Artificial Sequence
  Description of Artificial Sequence: Synthetic oligonucleotide
agccacccuuuccagguaa

SEQ ID NO: 2998697 - RNA, 19 nt, Artificial Sequence
  Description of Artificial Sequence: Synthetic oligonucleotide
uaccucuguuucugaugga

SEQ ID NO: 2998698 - RNA, 19 nt, Artificial Sequence
  Description of Artificial Sequence: Synthetic oligonucleotide
ugaugauggcuuggaccac

SEQ ID NO: 2998699 - RNA, 19 nt, Artificial Sequence
  Description of Artificial Sequence: Synthetic oligonucleotide
ugagggcaagaaacauguu

SEQ ID NO: 2998700 - RNA, 19 nt, Artificial Sequence
  Description of Artificial Sequence: Synthetic oligonucleotide
accuaggaagugucucaaa

SEQ ID NO: 2998701 - RNA, 19 nt, Artificial Sequence
  Description of Artificial Sequence: Synthetic oligonucleotide
gaccucagucuuagccucc

SEQ ID NO: 2998702 - RNA, 19 nt, Artificial Sequence
  Description of Artificial Sequence: Synthetic oligonucleotide
caacaucaccuaggaagug

SEQ ID NO: 2998703 - RNA, 19 nt, Artificial Sequence
  Description of Artificial Sequence: Synthetic oligonucleotide
cugcuggugcagauggaga

SEQ ID NO: 2998704 - RNA, 19 nt, Artificial Sequence
  Description of Artificial Sequence: Synthetic oligonucleotide
agguucuggggcucaugau

SEQ ID NO: 2998705 - RNA, 19 nt, Artificial Sequence
  Description of Artificial Sequence: Synthetic oligonucleotide
gcucaugaugauggcuugg

SEQ ID NO: 2998706 - RNA, 19 nt, Artificial Sequence
  Description of Artificial Sequence: Synthetic oligonucleotide
augugacagccaacaucac

SEQ ID NO: 2998707 - RNA, 19 nt, Artificial Sequence
  Description of Artificial Sequence: Synthetic oligonucleotide
augauggcuuggaccacug

SEQ ID NO: 2998708 - RNA, 19 nt, Artificial Sequence
  Description of Artificial Sequence: Synthetic oligonucleotide
gaagugucucaaaccuaaa

SEQ ID NO: 2998709 - RNA, 19 nt, Artificial Sequence
  Description of Artificial Sequence: Synthetic oligonucleotide
gcaucucucaggaccauga

SEQ ID NO: 2998710 - RNA, 19 nt, Artificial Sequence
  Description of Artificial Sequence: Synthetic oligonucleotide
agccaacaucaccuaggaa

SEQ ID NO: 2998711 - RNA, 19 nt, Artificial Sequence
  Description of Artificial Sequence: Synthetic oligonucleotide
uucuggggcucaugaugau

SEQ ID NO: 2998712 - RNA, 19 nt, Artificial Sequence
  Description of Artificial Sequence: Synthetic oligonucleotide
gcugaucaaggaauugaga

SEQ ID NO: 2998713 - RNA, 19 nt, Artificial Sequence
  Description of Artificial Sequence: Synthetic oligonucleotide
ccaacaucaccuaggaagu

SEQ ID NO: 2998714 - RNA, 19 nt, Artificial Sequence
  Description of Artificial Sequence: Synthetic oligonucleotide
ccacccgggagguucuggg

SEQ ID NO: 2998715 - RNA, 19 nt, Artificial Sequence
  Description of Artificial Sequence: Synthetic oligonucleotide
aggaagugucucaaaccua

SEQ ID NO: 2998716 - RNA, 19 nt, Artificial Sequence
  Description of Artificial Sequence: Synthetic oligonucleotide
aggagacugcuggugcaga

SEQ ID NO: 2998717 - RNA, 19 nt, Artificial Sequence
  Description of Artificial Sequence: Synthetic oligonucleotide
ggaccaugagggcaagaaa

SEQ ID NO: 2998718 - RNA, 19 nt, Artificial Sequence
  Description of Artificial Sequence: Synthetic oligonucleotide
cugauggaauagaggagau

SEQ ID NO: 2998719 - RNA, 19 nt, Artificial Sequence
  Description of Artificial Sequence: Synthetic oligonucleotide
gagaggccccgagccaccc

SEQ ID NO: 2998720 - RNA, 19 nt, Artificial Sequence
  Description of Artificial Sequence: Synthetic oligonucleotide
cacuggccccucccacugg

SEQ ID NO: 2998721 - RNA, 19 nt, Artificial Sequence
  Description of Artificial Sequence: Synthetic oligonucleotide
ccgagccacccuuuccagg

SEQ ID NO: 2998722 - RNA, 19 nt, Artificial Sequence
  Description of Artificial Sequence: Synthetic oligonucleotide
caucaccuaggaagugucu

SEQ ID NO: 2998723 - RNA, 19 nt, Artificial Sequence
  Description of Artificial Sequence: Synthetic oligonucleotide
agaggccccgagccacccu

SEQ ID NO: 2998724 - RNA, 19 nt, Artificial Sequence
  Description of Artificial Sequence: Synthetic oligonucleotide
caccuaggaagugucucaa

SEQ ID NO: 2998725 - RNA, 19 nt, Artificial Sequence
  Description of Artificial Sequence: Synthetic oligonucleotide
gacugcuggugcagaugga

SEQ ID NO: 2998726 - RNA, 19 nt, Artificial Sequence
  Description of Artificial Sequence: Synthetic oligonucleotide
ggcaagaaacauguuguuu

SEQ ID NO: 2998727 - RNA, 19 nt, Artificial Sequence
  Description of Artificial Sequence: Synthetic oligonucleotide
ccacuggccccucccacug

SEQ ID NO: 2998728 - RNA, 19 nt, Artificial Sequence
  Description of Artificial Sequence: Synthetic oligonucleotide
cccgagccacccuuuccag

SEQ ID NO: 2998729 - RNA, 19 nt, Artificial Sequence
  Description of Artificial Sequence: Synthetic oligonucleotide
cugugaggagacugcuggu

SEQ ID NO: 2998730 - RNA, 19 nt, Artificial Sequence
  Description of Artificial Sequence: Synthetic oligonucleotide
gagccacccuuuccaggua

SEQ ID NO: 2998731 - RNA, 19 nt, Artificial Sequence
  Description of Artificial Sequence: Synthetic oligonucleotide
gccccgagccacccuuucc

SEQ ID NO: 2998732 - RNA, 19 nt, Artificial Sequence
  Description of Artificial Sequence: Synthetic oligonucleotide
ccacuggcacucugaaaca

SEQ ID NO: 2998733 - RNA, 19 nt, Artificial Sequence
  Description of Artificial Sequence: Synthetic oligonucleotide
gggcucaugaugauggcuu

SEQ ID NO: 2998734 - RNA, 19 nt, Artificial Sequence
  Description of Artificial Sequence: Synthetic oligonucleotide
ccucagucuuagccucccc

SEQ ID NO: 2998735 - RNA, 19 nt, Artificial Sequence
  Description of Artificial Sequence: Synthetic oligonucleotide
ccacccuuuccagguaaac

SEQ ID NO: 2998736 - RNA, 19 nt, Artificial Sequence
  Description of Artificial Sequence: Synthetic oligonucleotide
ggagaggccccgagccacc

SEQ ID NO: 2998737 - RNA, 19 nt, Artificial Sequence
  Description of Artificial Sequence: Synthetic oligonucleotide
ccucccacuggcacucuga

SEQ ID NO: 2998738 - RNA, 19 nt, Artificial Sequence
  Description of Artificial Sequence: Synthetic oligonucleotide
ccccgagccacccuuucca

SEQ ID NO: 2998739 - RNA, 19 nt, Artificial Sequence
  Description of Artificial Sequence: Synthetic oligonucleotide
ggagacugcuggugcagau

SEQ ID NO: 2998740 - RNA, 19 nt, Artificial Sequence
  Description of Artificial Sequence: Synthetic oligonucleotide
ggggcucaugaugauggcu

SEQ ID NO: 2998741 - RNA, 19 nt, Artificial Sequence
  Description of Artificial Sequence: Synthetic oligonucleotide
cgagccacccuuuccaggu

SEQ ID NO: 2998742 - RNA, 19 nt, Artificial Sequence
  Description of Artificial Sequence: Synthetic oligonucleotide
gcagauggagaggccccga

SEQ ID NO: 2998743 - RNA, 19 nt, Artificial Sequence
  Description of Artificial Sequence: Synthetic oligonucleotide
ccucuguuucugauggaau

SEQ ID NO: 2998744 - RNA, 19 nt, Artificial Sequence
  Description of Artificial Sequence: Synthetic oligonucleotide
cccacccgggagguucugg

SEQ ID NO: 2998745 - RNA, 19 nt, Artificial Sequence
  Description of Artificial Sequence: Synthetic oligonucleotide
gccacuggccccucccacu

SEQ ID NO: 2998746 - RNA, 19 nt, Artificial Sequence
  Description of Artificial Sequence: Synthetic oligonucleotide
gccccucccacuggcacuc

SEQ ID NO: 2998747 - RNA, 19 nt, Artificial Sequence
  Description of Artificial Sequence: Synthetic oligonucleotide
ggccccgagccacccuuuc

SEQ ID NO: 2998748 - RNA, 19 nt, Artificial Sequence
  Description of Artificial Sequence: Synthetic oligonucleotide
gcacucugaaacacugcau

SEQ ID NO: 2998749 - RNA, 19 nt, Artificial Sequence
  Description of Artificial Sequence: Synthetic oligonucleotide
cccuuuccagguaaacaau

SEQ ID NO: 2998750 - RNA, 19 nt, Artificial Sequence
  Description of Artificial Sequence: Synthetic oligonucleotide
cccucccacuggcacucug

SEQ ID NO: 2998751 - RNA, 19 nt, Artificial Sequence
  Description of Artificial Sequence: Synthetic oligonucleotide
ccaugagggcaagaaacau

SEQ ID NO: 2998752 - RNA, 19 nt, Artificial Sequence
  Description of Artificial Sequence: Synthetic oligonucleotide
ggccccucccacuggcacu

SEQ ID NO: 2998753 - RNA, 19 nt, Artificial Sequence
  Description of Artificial Sequence: Synthetic oligonucleotide
ccacugugaggagacugcu

SEQ ID NO: 2998754 - RNA, 19 nt, Artificial Sequence
  Description of Artificial Sequence: Synthetic oligonucleotide
aggccccgagccacccuuu

SEQ ID NO: 2998755 - RNA, 19 nt, Artificial Sequence
  Description of Artificial Sequence: Synthetic oligonucleotide
ccgggagguucuggggcuc

SEQ ID NO: 2998756 - RNA, 19 nt, Artificial Sequence
  Description of Artificial Sequence: Synthetic oligonucleotide
ggaccacugugaggagacu

SEQ ID NO: 2998757 - RNA, 19 nt, Artificial Sequence
  Description of Artificial Sequence: Synthetic oligonucleotide
gggagguucuggggcucau

SEQ ID NO: 2998758 - RNA, 19 nt, Artificial Sequence
  Description of Artificial Sequence: Synthetic oligonucleotide
cgggagguucuggggcuca

SEQ ID NO: 2998759 - RNA, 19 nt, Artificial Sequence
  Description of Artificial Sequence: Synthetic oligonucleotide
ccccacccgggagguucug

SEQ ID NO: 2998760 - RNA, 19 nt, Artificial Sequence
  Description of Artificial Sequence: Synthetic oligonucleotide
ccccucccacuggcacucu

SEQ ID NO: 2998761 - RNA, 19 nt, Artificial Sequence
  Description of Artificial Sequence: Synthetic oligonucleotide
aauaaguucuccuuacagg

SEQ ID NO: 2998762 - RNA, 19 nt, Artificial Sequence
  Description of Artificial Sequence: Synthetic oligonucleotide
aauauuuaagucugggguc

SEQ ID NO: 2998763 - RNA, 19 nt, Artificial Sequence
  Description of Artificial Sequence: Synthetic oligonucleotide
uaauauuuaagucuggggu

SEQ ID NO: 2998764 - RNA, 19 nt, Artificial Sequence
  Description of Artificial Sequence: Synthetic oligonucleotide
ugcagaaucaccaccaccg

SEQ ID NO: 2998765 - RNA, 19 nt, Artificial Sequence
  Description of Artificial Sequence: Synthetic oligonucleotide
gucgcuuugauccagaaag

SEQ ID NO: 2998766 - RNA, 19 nt, Artificial Sequence
  Description of Artificial Sequence: Synthetic oligonucleotide
agugguaauauuuaagucu

SEQ ID NO: 2998767 - RNA, 19 nt, Artificial Sequence
  Description of Artificial Sequence: Synthetic oligonucleotide
gucuuugucgcuuugaucc

SEQ ID NO: 2998768 - RNA, 19 nt, Artificial Sequence
  Description of Artificial Sequence: Synthetic oligonucleotide
guaauauuuaagucugggg

SEQ ID NO: 2998769 - RNA, 19 nt, Artificial Sequence
  Description of Artificial Sequence: Synthetic oligonucleotide
gaauaaguucuccuuacag

SEQ ID NO: 2998770 - RNA, 19 nt, Artificial Sequence
  Description of Artificial Sequence: Synthetic oligonucleotide
auaaguucuccuuacagga

SEQ ID NO: 2998771 - RNA, 19 nt, Artificial Sequence
  Description of Artificial Sequence: Synthetic oligonucleotide
cuuugauccagaaagguuc

SEQ ID NO: 2998772 - RNA, 19 nt, Artificial Sequence
  Description of Artificial Sequence: Synthetic oligonucleotide
uuaucgaagaugagaggcg

SEQ ID NO: 2998773 - RNA, 19 nt, Artificial Sequence
  Description of Artificial Sequence: Synthetic oligonucleotide
cuuaguguagugcagaauc

SEQ ID NO: 2998774 - RNA, 19 nt, Artificial Sequence
  Description of Artificial Sequence: Synthetic oligonucleotide
acagugguaauauuuaagu

SEQ ID NO: 2998775 - RNA, 19 nt, Artificial Sequence
  Description of Artificial Sequence: Synthetic oligonucleotide
uuugauccagaaagguucg

SEQ ID NO: 2998776 - RNA, 19 nt, Artificial Sequence
  Description of Artificial Sequence: Synthetic oligonucleotide
aagaugagaggcgaguuuc

SEQ ID NO: 2998777 - RNA, 19 nt, Artificial Sequence
  Description of Artificial Sequence: Synthetic oligonucleotide
guuaucgaagaugagaggc

SEQ ID NO: 2998778 - RNA, 19 nt, Artificial Sequence
  Description of Artificial Sequence: Synthetic oligonucleotide
aaagaggcgccguagugag

SEQ ID NO: 2998779 - RNA, 19 nt, Artificial Sequence
  Description of Artificial Sequence: Synthetic oligonucleotide
guuuccuuuggccugaccc

SEQ ID NO: 2998780 - RNA, 19 nt, Artificial Sequence
  Description of Artificial Sequence: Synthetic oligonucleotide
ucuccuuacaggacagugg

SEQ ID NO: 2998781 - RNA, 19 nt, Artificial Sequence
  Description of Artificial Sequence: Synthetic oligonucleotide
uccagaaagguucgcagag

SEQ ID NO: 2998782 - RNA, 19 nt, Artificial Sequence
  Description of Artificial Sequence: Synthetic oligonucleotide
auauuuaagucuggggucg

SEQ ID NO: 2998783 - RNA, 19 nt, Artificial Sequence
  Description of Artificial Sequence: Synthetic oligonucleotide
accccuacagucuuugucg

SEQ ID NO: 2998784 - RNA, 19 nt, Artificial Sequence
  Description of Artificial Sequence: Synthetic oligonucleotide
ugcggguuaucgaagauga

SEQ ID NO: 2998785 - RNA, 19 nt, Artificial Sequence
  Description of Artificial Sequence: Synthetic oligonucleotide
aggaauccggaauaaguuc

SEQ ID NO: 2998786 - RNA, 19 nt, Artificial Sequence
  Description of Artificial Sequence: Synthetic oligonucleotide
gaggcgaaggcgaagacgg

SEQ ID NO: 2998787 - RNA, 19 nt, Artificial Sequence
  Description of Artificial Sequence: Synthetic oligonucleotide
uuuggccugaccccuacag

SEQ ID NO: 2998788 - RNA, 19 nt, Artificial Sequence
  Description of Artificial Sequence: Synthetic oligonucleotide
guucccuagacucagcagc

SEQ ID NO: 2998789 - RNA, 19 nt, Artificial Sequence
  Description of Artificial Sequence: Synthetic oligonucleotide
gauccagaaagguucgcag

SEQ ID NO: 2998790 - RNA, 19 nt, Artificial Sequence
  Description of Artificial Sequence: Synthetic oligonucleotide
aauccggaauaaguucucc

SEQ ID NO: 2998791 - RNA, 19 nt, Artificial Sequence
  Description of Artificial Sequence: Synthetic oligonucleotide
uuugcgggaucccaaggag

SEQ ID NO: 2998792 - RNA, 19 nt, Artificial Sequence
  Description of Artificial Sequence: Synthetic oligonucleotide
cagaaagguucgcagagcg

SEQ ID NO: 2998793 - RNA, 19 nt, Artificial Sequence
  Description of Artificial Sequence: Synthetic oligonucleotide
uuaguguagugcagaauca

SEQ ID NO: 2998794 - RNA, 19 nt, Artificial Sequence
  Description of Artificial Sequence: Synthetic oligonucleotide
uucccuagacucagcagcg

SEQ ID NO: 2998795 - RNA, 19 nt, Artificial Sequence
  Description of Artificial Sequence: Synthetic oligonucleotide
uuaacacuguccagguuug

SEQ ID NO: 2998796 - RNA, 19 nt, Artificial Sequence
  Description of Artificial Sequence: Synthetic oligonucleotide
aacacuguccagguuugcg

SEQ ID NO: 2998797 - RNA, 19 nt, Artificial Sequence
  Description of Artificial Sequence: Synthetic oligonucleotide
uagugcagaaucaccacca

SEQ ID NO: 2998798 - RNA, 19 nt, Artificial Sequence
  Description of Artificial Sequence: Synthetic oligonucleotide
agaggcgccguagugaggc

SEQ ID NO: 2998799 - RNA, 19 nt, Artificial Sequence
  Description of Artificial Sequence: Synthetic oligonucleotide
aguguagugcagaaucacc

SEQ ID NO: 2998800 - RNA, 19 nt, Artificial Sequence
  Description of Artificial Sequence: Synthetic oligonucleotide
gugguaauauuuaagucug

SEQ ID NO: 2998801 - RNA, 19 nt, Artificial Sequence
  Description of Artificial Sequence: Synthetic oligonucleotide
uuuccuuuggccugacccc

SEQ ID NO: 2998802 - RNA, 19 nt, Artificial Sequence
  Description of Artificial Sequence: Synthetic oligonucleotide
gacagugguaauauuuaag

SEQ ID NO: 2998803 - RNA, 19 nt, Artificial Sequence
  Description of Artificial Sequence: Synthetic oligonucleotide
aaaagaggcgccguaguga

SEQ ID NO: 2998804 - RNA, 19 nt, Artificial Sequence
  Description of Artificial Sequence: Synthetic oligonucleotide
gguaauauuuaagucuggg

SEQ ID NO: 2998805 - RNA, 19 nt, Artificial Sequence
  Description of Artificial Sequence: Synthetic oligonucleotide
acacuguccagguuugcgg

SEQ ID NO: 2998806 - RNA, 19 nt, Artificial Sequence
  Description of Artificial Sequence: Synthetic oligonucleotide
uaggaauccggaauaaguu

SEQ ID NO: 2998807 - RNA, 19 nt, Artificial Sequence
  Description of Artificial Sequence: Synthetic oligonucleotide
agaaucaccaccaccgcuc

SEQ ID NO: 2998808 - RNA, 19 nt, Artificial Sequence
  Description of Artificial Sequence: Synthetic oligonucleotide
ugguaauauuuaagucugg

SEQ ID NO: 2998809 - RNA, 19 nt, Artificial Sequence
  Description of Artificial Sequence: Synthetic oligonucleotide
aggcggaaggggcagagcg

SEQ ID NO: 2998810 - RNA, 19 nt, Artificial Sequence
  Description of Artificial Sequence: Synthetic oligonucleotide
ucagcagcgcuccuggggc

SEQ ID NO: 2998811 - RNA, 19 nt, Artificial Sequence
  Description of Artificial Sequence: Synthetic oligonucleotide
aggcgaguuuccuuuggcc

SEQ ID NO: 2998812 - RNA, 19 nt, Artificial Sequence
  Description of Artificial Sequence: Synthetic oligonucleotide
ucgcuuugauccagaaagg

SEQ ID NO: 2998813 - RNA, 19 nt, Artificial Sequence
  Description of Artificial Sequence: Synthetic oligonucleotide
agucuuugucgcuuugauc

SEQ ID NO: 2998814 - RNA, 19 nt, Artificial Sequence
  Description of Artificial Sequence: Synthetic oligonucleotide
agagcggcacgcuggagac

SEQ ID NO: 2998815 - RNA, 19 nt, Artificial Sequence
  Description of Artificial Sequence: Synthetic oligonucleotide
uugcgggaucccaaggagg

SEQ ID NO: 2998816 - RNA, 19 nt, Artificial Sequence
  Description of Artificial Sequence: Synthetic oligonucleotide
gacucagcagcgcuccugg

SEQ ID NO: 2998817 - RNA, 19 nt, Artificial Sequence
  Description of Artificial Sequence: Synthetic oligonucleotide
caaggagguaggaauccgg

SEQ ID NO: 2998818 - RNA, 19 nt, Artificial Sequence
  Description of Artificial Sequence: Synthetic oligonucleotide
uguagugcagaaucaccac

SEQ ID NO: 2998819 - RNA, 19 nt, Artificial Sequence
  Description of Artificial Sequence: Synthetic oligonucleotide
accaccaccgcuccgagga

SEQ ID NO: 2998820 - RNA, 19 nt, Artificial Sequence
  Description of Artificial Sequence: Synthetic oligonucleotide
ugaggcgugaggguggcgg

SEQ ID NO: 2998821 - RNA, 19 nt, Artificial Sequence
  Description of Artificial Sequence: Synthetic oligonucleotide
guagugcagaaucaccacc

SEQ ID NO: 2998822 - RNA, 19 nt, Artificial Sequence
  Description of Artificial Sequence: Synthetic oligonucleotide
cuugcguugcggguuaucg

SEQ ID NO: 2998823 - RNA, 19 nt, Artificial Sequence
  Description of Artificial Sequence: Synthetic oligonucleotide
aaggcgaagacggcgaaga

SEQ ID NO: 2998824 - RNA, 19 nt, Artificial Sequence
  Description of Artificial Sequence: Synthetic oligonucleotide
gaacugcuugcguugcggg

SEQ ID NO: 2998825 - RNA, 19 nt, Artificial Sequence
  Description of Artificial Sequence: Synthetic oligonucleotide
agugcagaaucaccaccac

SEQ ID NO: 2998826 - RNA, 19 nt, Artificial Sequence
  Description of Artificial Sequence: Synthetic oligonucleotide
ucuggggucgcgaacugcu

SEQ ID NO: 2998827 - RNA, 19 nt, Artificial Sequence
  Description of Artificial Sequence: Synthetic oligonucleotide
aucccaaggagguaggaau

SEQ ID NO: 2998828 - RNA, 19 nt, Artificial Sequence
  Description of Artificial Sequence: Synthetic oligonucleotide
ggguuaucgaagaugagag

SEQ ID NO: 2998829 - RNA, 19 nt, Artificial Sequence
  Description of Artificial Sequence: Synthetic oligonucleotide
uucuccuuacaggacagug

SEQ ID NO: 2998830 - RNA, 19 nt, Artificial Sequence
  Description of Artificial Sequence: Synthetic oligonucleotide
ugcgggaucccaaggaggu

SEQ ID NO: 2998831 - RNA, 19 nt, Artificial Sequence
  Description of Artificial Sequence: Synthetic oligonucleotide
uagugaggcgugagggugg

SEQ ID NO: 2998832 - RNA, 19 nt, Artificial Sequence
  Description of Artificial Sequence: Synthetic oligonucleotide
ugagaggcgaguuuccuuu

SEQ ID NO: 2998833 - RNA, 19 nt, Artificial Sequence
  Description of Artificial Sequence: Synthetic oligonucleotide
uaucgaagaugagaggcga

SEQ ID NO: 2998834 - RNA, 19 nt, Artificial Sequence
  Description of Artificial Sequence: Synthetic oligonucleotide
cacuguccagguuugcggg

SEQ ID NO: 2998835 - RNA, 19 nt, Artificial Sequence
  Description of Artificial Sequence: Synthetic oligonucleotide
gaugccgguggccagcgug

SEQ ID NO: 2998836 - RNA, 19 nt, Artificial Sequence
  Description of Artificial Sequence: Synthetic oligonucleotide
ugauccagaaagguucgca

SEQ ID NO: 2998837 - RNA, 19 nt, Artificial Sequence
  Description of Artificial Sequence: Synthetic oligonucleotide
ugcguugcggguuaucgaa

SEQ ID NO: 2998838 - RNA, 19 nt, Artificial Sequence
  Description of Artificial Sequence: Synthetic oligonucleotide
aagguucgcagagcgcugg

SEQ ID NO: 2998839 - RNA, 19 nt, Artificial Sequence
  Description of Artificial Sequence: Synthetic oligonucleotide
aagucuggggucgcgaacu

SEQ ID NO: 2998840 - RNA, 19 nt, Artificial Sequence
  Description of Artificial Sequence: Synthetic oligonucleotide
aguucccuagacucagcag

SEQ ID NO: 2998841 - RNA, 19 nt, Artificial Sequence
  Description of Artificial Sequence: Synthetic oligonucleotide
ugggcuuaguguagugcag

SEQ ID NO: 2998842 - RNA, 19 nt, Artificial Sequence
  Description of Artificial Sequence: Synthetic oligonucleotide
uacaggacagugguaauau

SEQ ID NO: 2998843 - RNA, 19 nt, Artificial Sequence
  Description of Artificial Sequence: Synthetic oligonucleotide
uggccugaccccuacaguc

SEQ ID NO: 2998844 - RNA, 19 nt, Artificial Sequence
  Description of Artificial Sequence: Synthetic oligonucleotide
uuuaagucuggggucgcga

SEQ ID NO: 2998845 - RNA, 19 nt, Artificial Sequence
  Description of Artificial Sequence: Synthetic oligonucleotide
agaggcgaguuuccuuugg

SEQ ID NO: 2998846 - RNA, 19 nt, Artificial Sequence
  Description of Artificial Sequence: Synthetic oligonucleotide
uuugucgcuuugauccaga

SEQ ID NO: 2998847 - RNA, 19 nt, Artificial Sequence
  Description of Artificial Sequence: Synthetic oligonucleotide
uccggaauaaguucuccuu

SEQ ID NO: 2998848 - RNA, 19 nt, Artificial Sequence
  Description of Artificial Sequence: Synthetic oligonucleotide
cuagacucagcagcgcucc

SEQ ID NO: 2998849 - RNA, 19 nt, Artificial Sequence
  Description of Artificial Sequence: Synthetic oligonucleotide
auccagaaagguucgcaga

SEQ ID NO: 2998850 - RNA, 19 nt, Artificial Sequence
  Description of Artificial Sequence: Synthetic oligonucleotide
agaaagguucgcagagcgc

SEQ ID NO: 2998851 - RNA, 19 nt, Artificial Sequence
  Description of Artificial Sequence: Synthetic oligonucleotide
aacugcuugcguugcgggu

SEQ ID NO: 2998852 - RNA, 19 nt, Artificial Sequence
  Description of Artificial Sequence: Synthetic oligonucleotide
gguuaucgaagaugagagg

SEQ ID NO: 2998853 - RNA, 19 nt, Artificial Sequence
  Description of Artificial Sequence: Synthetic oligonucleotide
agcggcacgcuggagaccg

SEQ ID NO: 2998854 - RNA, 19 nt, Artificial Sequence
  Description of Artificial Sequence: Synthetic oligonucleotide
gaaagguucgcagagcgcu

SEQ ID NO: 2998855 - RNA, 19 nt, Artificial Sequence
  Description of Artificial Sequence: Synthetic oligonucleotide
uuaagucuggggucgcgaa

SEQ ID NO: 2998856 - RNA, 19 nt, Artificial Sequence
  Description of Artificial Sequence: Synthetic oligonucleotide
agaugagaggcgaguuucc

SEQ ID NO: 2998857 - RNA, 19 nt, Artificial Sequence
  Description of Artificial Sequence: Synthetic oligonucleotide
agagcgcugggcuuagugu

SEQ ID NO: 2998858 - RNA, 19 nt, Artificial Sequence
  Description of Artificial Sequence: Synthetic oligonucleotide
ucuuugucgcuuugaucca

SEQ ID NO: 2998859 - RNA, 19 nt, Artificial Sequence
  Description of Artificial Sequence: Synthetic oligonucleotide
uaguguagugcagaaucac

SEQ ID NO: 2998860 - RNA, 19 nt, Artificial Sequence
  Description of Artificial Sequence: Synthetic oligonucleotide
aaggagguaggaauccgga

SEQ ID NO: 2998861 - RNA, 19 nt, Artificial Sequence
  Description of Artificial Sequence: Synthetic oligonucleotide
aggguggcggagcccaggc

SEQ ID NO: 2998862 - RNA, 19 nt, Artificial Sequence
  Description of Artificial Sequence: Synthetic oligonucleotide
aguuuccuuuggccugacc

SEQ ID NO: 2998863 - RNA, 19 nt, Artificial Sequence
  Description of Artificial Sequence: Synthetic oligonucleotide
cuggagaccgaggcgaagg

SEQ ID NO: 2998864 - RNA, 19 nt, Artificial Sequence
  Description of Artificial Sequence: Synthetic oligonucleotide
guagugaggcgugagggug

SEQ ID NO: 2998865 - RNA, 19 nt, Artificial Sequence
  Description of Artificial Sequence: Synthetic oligonucleotide
cuuaacacuguccagguuu

SEQ ID NO: 2998866 - RNA, 19 nt, Artificial Sequence
  Description of Artificial Sequence: Synthetic oligonucleotide
ucgaagaugagaggcgagu

SEQ ID NO: 2998867 - RNA, 19 nt, Artificial Sequence
  Description of Artificial Sequence: Synthetic oligonucleotide
auccggaauaaguucuccu

SEQ ID NO: 2998868 - RNA, 19 nt, Artificial Sequence
  Description of Artificial Sequence: Synthetic oligonucleotide
gaccccuacagucuuuguc

SEQ ID NO: 2998869 - RNA, 19 nt, Artificial Sequence
  Description of Artificial Sequence: Synthetic oligonucleotide
uaagucuggggucgcgaac

SEQ ID NO: 2998870 - RNA, 19 nt, Artificial Sequence
  Description of Artificial Sequence: Synthetic oligonucleotide
guguagugcagaaucacca

SEQ ID NO: 2998871 - RNA, 19 nt, Artificial Sequence
  Description of Artificial Sequence: Synthetic oligonucleotide
uugcggguuaucgaagaug

SEQ ID NO: 2998872 - RNA, 19 nt, Artificial Sequence
  Description of Artificial Sequence: Synthetic oligonucleotide
gguggcggagcccaggcgg

SEQ ID NO: 2998873 - RNA, 19 nt, Artificial Sequence
  Description of Artificial Sequence: Synthetic oligonucleotide
ucccaaggagguaggaauc

SEQ ID NO: 2998874 - RNA, 19 nt, Artificial Sequence
  Description of Artificial Sequence: Synthetic oligonucleotide
uggggucgcgaacugcuug

SEQ ID NO: 2998875 - RNA, 19 nt, Artificial Sequence
  Description of Artificial Sequence: Synthetic oligonucleotide
gaggcgaguuuccuuuggc

SEQ ID NO: 2998876 - RNA, 19 nt, Artificial Sequence
  Description of Artificial Sequence: Synthetic oligonucleotide
auuuaagucuggggucgcg

SEQ ID NO: 2998877 - RNA, 19 nt, Artificial Sequence
  Description of Artificial Sequence: Synthetic oligonucleotide
gagguaggaauccggaaua

SEQ ID NO: 2998878 - RNA, 19 nt, Artificial Sequence
  Description of Artificial Sequence: Synthetic oligonucleotide
cugggcuuaguguagugca

SEQ ID NO: 2998879 - RNA, 19 nt, Artificial Sequence
  Description of Artificial Sequence: Synthetic oligonucleotide
ugucgcuuugauccagaaa

SEQ ID NO: 2998880 - RNA, 19 nt, Artificial Sequence
  Description of Artificial Sequence: Synthetic oligonucleotide
guuugcgggaucccaagga

SEQ ID NO: 2998881 - RNA, 19 nt, Artificial Sequence
  Description of Artificial Sequence: Synthetic oligonucleotide
agguuugcgggaucccaag

SEQ ID NO: 2998882 - RNA, 19 nt, Artificial Sequence
  Description of Artificial Sequence: Synthetic oligonucleotide
ucgcgaacugcuugcguug

SEQ ID NO: 2998883 - RNA, 19 nt, Artificial Sequence
  Description of Artificial Sequence: Synthetic oligonucleotide
uacagucuuugucgcuuug

SEQ ID NO: 2998884 - RNA, 19 nt, Artificial Sequence
  Description of Artificial Sequence: Synthetic oligonucleotide
gugcagaaucaccaccacc

SEQ ID NO: 2998885 - RNA, 19 nt, Artificial Sequence
  Description of Artificial Sequence: Synthetic oligonucleotide
uauuuaagucuggggucgc

SEQ ID NO: 2998886 - RNA, 19 nt, Artificial Sequence
  Description of Artificial Sequence: Synthetic oligonucleotide
guaggaauccggaauaagu

SEQ ID NO: 2998887 - RNA, 19 nt, Artificial Sequence
  Description of Artificial Sequence: Synthetic oligonucleotide
uuacaggacagugguaaua

SEQ ID NO: 2998888 - RNA, 19 nt, Artificial Sequence
  Description of Artificial Sequence: Synthetic oligonucleotide
aguucuccuuacaggacag

SEQ ID NO: 2998889 - RNA, 19 nt, Artificial Sequence
  Description of Artificial Sequence: Synthetic oligonucleotide
gcccuuaacacuguccagg

SEQ ID NO: 2998890 - RNA, 19 nt, Artificial Sequence
  Description of Artificial Sequence: Synthetic oligonucleotide
gagaccgaggcgaaggcga

SEQ ID NO: 2998891 - RNA, 19 nt, Artificial Sequence
  Description of Artificial Sequence: Synthetic oligonucleotide
uuggccugaccccuacagu

SEQ ID NO: 2998892 - RNA, 19 nt, Artificial Sequence
  Description of Artificial Sequence: Synthetic oligonucleotide
agugaggcgugaggguggc

SEQ ID NO: 2998893 - RNA, 19 nt, Artificial Sequence
  Description of Artificial Sequence: Synthetic oligonucleotide
aaagguucgcagagcgcug

SEQ ID NO: 2998894 - RNA, 19 nt, Artificial Sequence
  Description of Artificial Sequence: Synthetic oligonucleotide
uugcguugcggguuaucga

SEQ ID NO: 2998895 - RNA, 19 nt, Artificial Sequence
  Description of Artificial Sequence: Synthetic oligonucleotide
ucaggaugccgguggccag

SEQ ID NO: 2998896 - RNA, 19 nt, Artificial Sequence
  Description of Artificial Sequence: Synthetic oligonucleotide
aggaggcucaggaugccgg

SEQ ID NO: 2998897 - RNA, 19 nt, Artificial Sequence
  Description of Artificial Sequence: Synthetic oligonucleotide
cacgcuggagaccgaggcg

SEQ ID NO: 2998898 - RNA, 19 nt, Artificial Sequence
  Description of Artificial Sequence: Synthetic oligonucleotide
aucaccaccaccgcuccga

SEQ ID NO: 2998899 - RNA, 19 nt, Artificial Sequence
  Description of Artificial Sequence: Synthetic oligonucleotide
cuuugucgcuuugauccag

SEQ ID NO: 2998900 - RNA, 19 nt, Artificial Sequence
  Description of Artificial Sequence: Synthetic oligonucleotide
gaggaggcucaggaugccg

SEQ ID NO: 2998901 - RNA, 19 nt, Artificial Sequence
  Description of Artificial Sequence: Synthetic oligonucleotide
gguuugcgggaucccaagg

SEQ ID NO: 2998902 - RNA, 19 nt, Artificial Sequence
  Description of Artificial Sequence: Synthetic oligonucleotide
gaaggcgaagacggcgaag

SEQ ID NO: 2998903 - RNA, 19 nt, Artificial Sequence
  Description of Artificial Sequence: Synthetic oligonucleotide
aggacagugguaauauuua

SEQ ID NO: 2998904 - RNA, 19 nt, Artificial Sequence
  Description of Artificial Sequence: Synthetic oligonucleotide
gagaggcgaguuuccuuug

SEQ ID NO: 2998905 - RNA, 19 nt, Artificial Sequence
  Description of Artificial Sequence: Synthetic oligonucleotide
aggagguaggaauccggaa

SEQ ID NO: 2998906 - RNA, 19 nt, Artificial Sequence
  Description of Artificial Sequence: Synthetic oligonucleotide
cagagcgcugggcuuagug

SEQ ID NO: 2998907 - RNA, 19 nt, Artificial Sequence
  Description of Artificial Sequence: Synthetic oligonucleotide
gaauccggaauaaguucuc

SEQ ID NO: 2998908 - RNA, 19 nt, Artificial Sequence
  Description of Artificial Sequence: Synthetic oligonucleotide
ucaccaccaccgcuccgag

SEQ ID NO: 2998909 - RNA, 19 nt, Artificial Sequence
  Description of Artificial Sequence: Synthetic oligonucleotide
ggaauaaguucuccuuaca

SEQ ID NO: 2998910 - RNA, 19 nt, Artificial Sequence
  Description of Artificial Sequence: Synthetic oligonucleotide
uugauccagaaagguucgc

SEQ ID NO: 2998911 - RNA, 19 nt, Artificial Sequence
  Description of Artificial Sequence: Synthetic oligonucleotide
gguaggaauccggaauaag

SEQ ID NO: 2998912 - RNA, 19 nt, Artificial Sequence
  Description of Artificial Sequence: Synthetic oligonucleotide
ggcgaaggcgaagacggcg

SEQ ID NO: 2998913 - RNA, 19 nt, Artificial Sequence
  Description of Artificial Sequence: Synthetic oligonucleotide
acagucuuugucgcuuuga

SEQ ID NO: 2998914 - RNA, 19 nt, Artificial Sequence
  Description of Artificial Sequence: Synthetic oligonucleotide
gagcgcugggcuuagugua

SEQ ID NO: 2998915 - RNA, 19 nt, Artificial Sequence
  Description of Artificial Sequence: Synthetic oligonucleotide
augagaggcgaguuuccuu

SEQ ID NO: 2998916 - RNA, 19 nt, Artificial Sequence
  Description of Artificial Sequence: Synthetic oligonucleotide
acuguccagguuugcggga

SEQ ID NO: 2998917 - RNA, 19 nt, Artificial Sequence
  Description of Artificial Sequence: Synthetic oligonucleotide
acgcuggagaccgaggcga

SEQ ID NO: 2998918 - RNA, 19 nt, Artificial Sequence
  Description of Artificial Sequence: Synthetic oligonucleotide
cuccuuacaggacaguggu

SEQ ID NO: 2998919 - RNA, 19 nt, Artificial Sequence
  Description of Artificial Sequence: Synthetic oligonucleotide
uugucgcuuugauccagaa

SEQ ID NO: 2998920 - RNA, 19 nt, Artificial Sequence
  Description of Artificial Sequence: Synthetic oligonucleotide
aucgaagaugagaggcgag

SEQ ID NO: 2998921 - RNA, 19 nt, Artificial Sequence
  Description of Artificial Sequence: Synthetic oligonucleotide
caccgcuccgaggaggagg

SEQ ID NO: 2998922 - RNA, 19 nt, Artificial Sequence
  Description of Artificial Sequence: Synthetic oligonucleotide
agguucgcagagcgcuggg

SEQ ID NO: 2998923 - RNA, 19 nt, Artificial Sequence
  Description of Artificial Sequence: Synthetic oligonucleotide
gcgaguuuccuuuggccug

SEQ ID NO: 2998924 - RNA, 19 nt, Artificial Sequence
  Description of Artificial Sequence: Synthetic oligonucleotide
gaucccaaggagguaggaa

SEQ ID NO: 2998925 - RNA, 19 nt, Artificial Sequence
  Description of Artificial Sequence: Synthetic oligonucleotide
gaagaugagaggcgaguuu

SEQ ID NO: 2998926 - RNA, 19 nt, Artificial Sequence
  Description of Artificial Sequence: Synthetic oligonucleotide
aggcgaagacggcgaagag

SEQ ID NO: 2998927 - RNA, 19 nt, Artificial Sequence
  Description of Artificial Sequence: Synthetic oligonucleotide
caggacagugguaauauuu

SEQ ID NO: 2998928 - RNA, 19 nt, Artificial Sequence
  Description of Artificial Sequence: Synthetic oligonucleotide
accgaggcgaaggcgaaga

SEQ ID NO: 2998929 - RNA, 19 nt, Artificial Sequence
  Description of Artificial Sequence: Synthetic oligonucleotide
agcagcgcuccuggggcgc

SEQ ID NO: 2998930 - RNA, 19 nt, Artificial Sequence
  Description of Artificial Sequence: Synthetic oligonucleotide
caguucccuagacucagca

SEQ ID NO: 2998931 - RNA, 19 nt, Artificial Sequence
  Description of Artificial Sequence: Synthetic oligonucleotide
acugcuugcguugcggguu

SEQ ID NO: 2998932 - RNA, 19 nt, Artificial Sequence
  Description of Artificial Sequence: Synthetic oligonucleotide
agacucagcagcgcuccug

SEQ ID NO: 2998933 - RNA, 19 nt, Artificial Sequence
  Description of Artificial Sequence: Synthetic oligonucleotide
cugaccccuacagucuuug

SEQ ID NO: 2998934 - RNA, 19 nt, Artificial Sequence
  Description of Artificial Sequence: Synthetic oligonucleotide
guccagguuugcgggaucc

SEQ ID NO: 2998935 - RNA, 19 nt, Artificial Sequence
  Description of Artificial Sequence: Synthetic oligonucleotide
ccguagugaggcgugaggg

SEQ ID NO: 2998936 - RNA, 19 nt, Artificial Sequence
  Description of Artificial Sequence: Synthetic oligonucleotide
uccuuacaggacaguggua

SEQ ID NO: 2998937 - RNA, 19 nt, Artificial Sequence
  Description of Artificial Sequence: Synthetic oligonucleotide
uggccagcgugacccaaaa

SEQ ID NO: 2998938 - RNA, 19 nt, Artificial Sequence
  Description of Artificial Sequence: Synthetic oligonucleotide
uaacacuguccagguuugc

SEQ ID NO: 2998939 - RNA, 19 nt, Artificial Sequence
  Description of Artificial Sequence: Synthetic oligonucleotide
gccguagugaggcgugagg

SEQ ID NO: 2998940 - RNA, 19 nt, Artificial Sequence
  Description of Artificial Sequence: Synthetic oligonucleotide
agucuggggucgcgaacug

SEQ ID NO: 2998941 - RNA, 19 nt, Artificial Sequence
  Description of Artificial Sequence: Synthetic oligonucleotide
uucgcagagcgcugggcuu

SEQ ID NO: 2998942 - RNA, 19 nt, Artificial Sequence
  Description of Artificial Sequence: Synthetic oligonucleotide
uccgaggaggaggcucagg

SEQ ID NO: 2998943 - RNA, 19 nt, Artificial Sequence
  Description of Artificial Sequence: Synthetic oligonucleotide
cucaggaugccgguggcca

SEQ ID NO: 2998944 - RNA, 19 nt, Artificial Sequence
  Description of Artificial Sequence: Synthetic oligonucleotide
aagaggcgccguagugagg

SEQ ID NO: 2998945 - RNA, 19 nt, Artificial Sequence
  Description of Artificial Sequence: Synthetic oligonucleotide
gcagaaucaccaccaccgc

SEQ ID NO: 2998946 - RNA, 19 nt, Artificial Sequence
  Description of Artificial Sequence: Synthetic oligonucleotide
ggaauccggaauaaguucu

SEQ ID NO: 2998947 - RNA, 19 nt, Artificial Sequence
  Description of Artificial Sequence: Synthetic oligonucleotide
cggaauaaguucuccuuac

SEQ ID NO: 2998948 - RNA, 19 nt, Artificial Sequence
  Description of Artificial Sequence: Synthetic oligonucleotide
ggacagugguaauauuuaa

SEQ ID NO: 2998949 - RNA, 19 nt, Artificial Sequence
  Description of Artificial Sequence: Synthetic oligonucleotide
gcgcccuuaacacugucca

SEQ ID NO: 2998950 - RNA, 19 nt, Artificial Sequence
  Description of Artificial Sequence: Synthetic oligonucleotide
guucgcagagcgcugggcu

SEQ ID NO: 2998951 - RNA, 19 nt, Artificial Sequence
  Description of Artificial Sequence: Synthetic oligonucleotide
uccagguuugcgggauccc

SEQ ID NO: 2998952 - RNA, 19 nt, Artificial Sequence
  Description of Artificial Sequence: Synthetic oligonucleotide
ggagguaggaauccggaau

SEQ ID NO: 2998953 - RNA, 19 nt, Artificial Sequence
  Description of Artificial Sequence: Synthetic oligonucleotide
ggagaccgaggcgaaggcg

SEQ ID NO: 2998954 - RNA, 19 nt, Artificial Sequence
  Description of Artificial Sequence: Synthetic oligonucleotide
uguccagguuugcgggauc

SEQ ID NO: 2998955 - RNA, 19 nt, Artificial Sequence
  Description of Artificial Sequence: Synthetic oligonucleotide
ggggucgcgaacugcuugc

SEQ ID NO: 2998956 - RNA, 19 nt, Artificial Sequence
  Description of Artificial Sequence: Synthetic oligonucleotide
acaggacagugguaauauu

SEQ ID NO: 2998957 - RNA, 19 nt, Artificial Sequence
  Description of Artificial Sequence: Synthetic oligonucleotide
gaggguggcggagcccagg

SEQ ID NO: 2998958 - RNA, 19 nt, Artificial Sequence
  Description of Artificial Sequence: Synthetic oligonucleotide
gaggcgccguagugaggcg

SEQ ID NO: 2998959 - RNA, 19 nt, Artificial Sequence
  Description of Artificial Sequence: Synthetic oligonucleotide
aggaugccgguggccagcg

SEQ ID NO: 2998960 - RNA, 19 nt, Artificial Sequence
  Description of Artificial Sequence: Synthetic oligonucleotide
uagacucagcagcgcuccu

SEQ ID NO: 2998961 - RNA, 19 nt, Artificial Sequence
  Description of Artificial Sequence: Synthetic oligonucleotide
ccuuacaggacagugguaa

SEQ ID NO: 2998962 - RNA, 19 nt, Artificial Sequence
  Description of Artificial Sequence: Synthetic oligonucleotide
gaugagaggcgaguuuccu

SEQ ID NO: 2998963 - RNA, 19 nt, Artificial Sequence
  Description of Artificial Sequence: Synthetic oligonucleotide
agcgcugggcuuaguguag

SEQ ID NO: 2998964 - RNA, 19 nt, Artificial Sequence
  Description of Artificial Sequence: Synthetic oligonucleotide
ucccuagacucagcagcgc

SEQ ID NO: 2998965 - RNA, 19 nt, Artificial Sequence
  Description of Artificial Sequence: Synthetic oligonucleotide
ugaccccuacagucuuugu

SEQ ID NO: 2998966 - RNA, 19 nt, Artificial Sequence
  Description of Artificial Sequence: Synthetic oligonucleotide
ccgguggccagcgugaccc

SEQ ID NO: 2998967 - RNA, 19 nt, Artificial Sequence
  Description of Artificial Sequence: Synthetic oligonucleotide
ggcgaguuuccuuuggccu

SEQ ID NO: 2998968 - RNA, 19 nt, Artificial Sequence
  Description of Artificial Sequence: Synthetic oligonucleotide
agguaggaauccggaauaa

SEQ ID NO: 2998969 - RNA, 19 nt, Artificial Sequence
  Description of Artificial Sequence: Synthetic oligonucleotide
gcugggcuuaguguagugc

SEQ ID NO: 2998970 - RNA, 19 nt, Artificial Sequence
  Description of Artificial Sequence: Synthetic oligonucleotide
ccaaggagguaggaauccg

SEQ ID NO: 2998971 - RNA, 19 nt, Artificial Sequence
  Description of Artificial Sequence: Synthetic oligonucleotide
cagcagcgcuccuggggcg

SEQ ID NO: 2998972 - RNA, 19 nt, Artificial Sequence
  Description of Artificial Sequence: Synthetic oligonucleotide
aggcgaaggcgaagacggc

SEQ ID NO: 2998973 - RNA, 19 nt, Artificial Sequence
  Description of Artificial Sequence: Synthetic oligonucleotide
ccuagacucagcagcgcuc

SEQ ID NO: 2998974 - RNA, 19 nt, Artificial Sequence
  Description of Artificial Sequence: Synthetic oligonucleotide
gaggcgugaggguggcgga

SEQ ID NO: 2998975 - RNA, 19 nt, Artificial Sequence
  Description of Artificial Sequence: Synthetic oligonucleotide
cagguuugcgggaucccaa

SEQ ID NO: 2998976 - RNA, 19 nt, Artificial Sequence
  Description of Artificial Sequence: Synthetic oligonucleotide
cccaaggagguaggaaucc

SEQ ID NO: 2998977 - RNA, 19 nt, Artificial Sequence
  Description of Artificial Sequence: Synthetic oligonucleotide
caccaccaccgcuccgagg

SEQ ID NO: 2998978 - RNA, 19 nt, Artificial Sequence
  Description of Artificial Sequence: Synthetic oligonucleotide
gcggagcccaggcggaagg

SEQ ID NO: 2998979 - RNA, 19 nt, Artificial Sequence
  Description of Artificial Sequence: Synthetic oligonucleotide
gucgcgaacugcuugcguu

SEQ ID NO: 2998980 - RNA, 19 nt, Artificial Sequence
  Description of Artificial Sequence: Synthetic oligonucleotide
uccuuuggccugaccccua

SEQ ID NO: 2998981 - RNA, 19 nt, Artificial Sequence
  Description of Artificial Sequence: Synthetic oligonucleotide
gaccgaggcgaaggcgaag

SEQ ID NO: 2998982 - RNA, 19 nt, Artificial Sequence
  Description of Artificial Sequence: Synthetic oligonucleotide
ggcuuaguguagugcagaa

SEQ ID NO: 2998983 - RNA, 19 nt, Artificial Sequence
  Description of Artificial Sequence: Synthetic oligonucleotide
ccagaaagguucgcagagc

SEQ ID NO: 2998984 - RNA, 19 nt, Artificial Sequence
  Description of Artificial Sequence: Synthetic oligonucleotide
cagaaucaccaccaccgcu

SEQ ID NO: 2998985 - RNA, 19 nt, Artificial Sequence
  Description of Artificial Sequence: Synthetic oligonucleotide
gcggaaggggcagagcggc

SEQ ID NO: 2998986 - RNA, 19 nt, Artificial Sequence
  Description of Artificial Sequence: Synthetic oligonucleotide
ccccuacagucuuugucgc

SEQ ID NO: 2998987 - RNA, 19 nt, Artificial Sequence
  Description of Artificial Sequence: Synthetic oligonucleotide
ucgcagagcgcugggcuua

SEQ ID NO: 2998988 - RNA, 19 nt, Artificial Sequence
  Description of Artificial Sequence: Synthetic oligonucleotide
gggaucccaaggagguagg

SEQ ID NO: 2998989 - RNA, 19 nt, Artificial Sequence
  Description of Artificial Sequence: Synthetic oligonucleotide
gcgaacugcuugcguugcg

SEQ ID NO: 2998990 - RNA, 19 nt, Artificial Sequence
  Description of Artificial Sequence: Synthetic oligonucleotide
gucuggggucgcgaacugc

SEQ ID NO: 2998991 - RNA, 19 nt, Artificial Sequence
  Description of Artificial Sequence: Synthetic oligonucleotide
cgaacugcuugcguugcgg

SEQ ID NO: 2998992 - RNA, 19 nt, Artificial Sequence
  Description of Artificial Sequence: Synthetic oligonucleotide
uggggcgcgcgcccuuaac

SEQ ID NO: 2998993 - RNA, 19 nt, Artificial Sequence
  Description of Artificial Sequence: Synthetic oligonucleotide
gggcgcgcgcccuuaacac

SEQ ID NO: 2998994 - RNA, 19 nt, Artificial Sequence
  Description of Artificial Sequence: Synthetic oligonucleotide
cuuacaggacagugguaau

SEQ ID NO: 2998995 - RNA, 19 nt, Artificial Sequence
  Description of Artificial Sequence: Synthetic oligonucleotide
accaccgcuccgaggagga

SEQ ID NO: 2998996 - RNA, 19 nt, Artificial Sequence
  Description of Artificial Sequence: Synthetic oligonucleotide
aggcgugaggguggcggag

SEQ ID NO: 2998997 - RNA, 19 nt, Artificial Sequence
  Description of Artificial Sequence: Synthetic oligonucleotide
ccgaggaggaggcucagga

SEQ ID NO: 2998998 - RNA, 19 nt, Artificial Sequence
  Description of Artificial Sequence: Synthetic oligonucleotide
cgaggcgaaggcgaagacg

SEQ ID NO: 2998999 - RNA, 19 nt, Artificial Sequence
  Description of Artificial Sequence: Synthetic oligonucleotide
augccgguggccagcguga

SEQ ID NO: 2999000 - RNA, 19 nt, Artificial Sequence
  Description of Artificial Sequence: Synthetic oligonucleotide
ggcucaggaugccgguggc

SEQ ID NO: 2999001 - RNA, 19 nt, Artificial Sequence
  Description of Artificial Sequence: Synthetic oligonucleotide
cagucuuugucgcuuugau

SEQ ID NO: 2999002 - RNA, 19 nt, Artificial Sequence
  Description of Artificial Sequence: Synthetic oligonucleotide
gggcuuaguguagugcaga

SEQ ID NO: 2999003 - RNA, 19 nt, Artificial Sequence
  Description of Artificial Sequence: Synthetic oligonucleotide
cgggaucccaaggagguag

SEQ ID NO: 2999004 - RNA, 19 nt, Artificial Sequence
  Description of Artificial Sequence: Synthetic oligonucleotide
gguucgcagagcgcugggc

SEQ ID NO: 2999005 - RNA, 19 nt, Artificial Sequence
  Description of Artificial Sequence: Synthetic oligonucleotide
cggguuaucgaagaugaga

SEQ ID NO: 2999006 - RNA, 19 nt, Artificial Sequence
  Description of Artificial Sequence: Synthetic oligonucleotide
guugcggguuaucgaagau

SEQ ID NO: 2999007 - RNA, 19 nt, Artificial Sequence
  Description of Artificial Sequence: Synthetic oligonucleotide
agcgcuccuggggcgcgcg

SEQ ID NO: 2999008 - RNA, 19 nt, Artificial Sequence
  Description of Artificial Sequence: Synthetic oligonucleotide
cuuuggccugaccccuaca

SEQ ID NO: 2999009 - RNA, 19 nt, Artificial Sequence
  Description of Artificial Sequence: Synthetic oligonucleotide
ggcacgcuggagaccgagg

SEQ ID NO: 2999010 - RNA, 19 nt, Artificial Sequence
  Description of Artificial Sequence: Synthetic oligonucleotide
aggcgccguagugaggcgu

SEQ ID NO: 2999011 - RNA, 19 nt, Artificial Sequence
  Description of Artificial Sequence: Synthetic oligonucleotide
ggguggcggagcccaggcg

SEQ ID NO: 2999012 - RNA, 19 nt, Artificial Sequence
  Description of Artificial Sequence: Synthetic oligonucleotide
ggggcgcgcgcccuuaaca

SEQ ID NO: 2999013 - RNA, 19 nt, Artificial Sequence
  Description of Artificial Sequence: Synthetic oligonucleotide
cgcgcccuuaacacugucc

SEQ ID NO: 2999014 - RNA, 19 nt, Artificial Sequence
  Description of Artificial Sequence: Synthetic oligonucleotide
gggucgcgaacugcuugcg

SEQ ID NO: 2999015 - RNA, 19 nt, Artificial Sequence
  Description of Artificial Sequence: Synthetic oligonucleotide
ccggaauaaguucuccuua

SEQ ID NO: 2999016 - RNA, 19 nt, Artificial Sequence
  Description of Artificial Sequence: Synthetic oligonucleotide
agcccaggcggaaggggca

SEQ ID NO: 2999017 - RNA, 19 nt, Artificial Sequence
  Description of Artificial Sequence: Synthetic oligonucleotide
gcgugaggguggcggagcc

SEQ ID NO: 2999018 - RNA, 19 nt, Artificial Sequence
  Description of Artificial Sequence: Synthetic oligonucleotide
gagcggcacgcuggagacc

SEQ ID NO: 2999019 - RNA, 19 nt, Artificial Sequence
  Description of Artificial Sequence: Synthetic oligonucleotide
gcgcgcgcccuuaacacug

SEQ ID NO: 2999020 - RNA, 19 nt, Artificial Sequence
  Description of Artificial Sequence: Synthetic oligonucleotide
gcgaaggcgaagacggcga

SEQ ID NO: 2999021 - RNA, 19 nt, Artificial Sequence
  Description of Artificial Sequence: Synthetic oligonucleotide
ggcgugaggguggcggagc

SEQ ID NO: 2999022 - RNA, 19 nt, Artificial Sequence
  Description of Artificial Sequence: Synthetic oligonucleotide
gcguugcggguuaucgaag

SEQ ID NO: 2999023 - RNA, 19 nt, Artificial Sequence
  Description of Artificial Sequence: Synthetic oligonucleotide
gcuuugauccagaaagguu

SEQ ID NO: 2999024 - RNA, 19 nt, Artificial Sequence
  Description of Artificial Sequence: Synthetic oligonucleotide
ccuuuggccugaccccuac

SEQ ID NO: 2999025 - RNA, 19 nt, Artificial Sequence
  Description of Artificial Sequence: Synthetic oligonucleotide
agaccgaggcgaaggcgaa

SEQ ID NO: 2999026 - RNA, 19 nt, Artificial Sequence
  Description of Artificial Sequence: Synthetic oligonucleotide
ggaggaggcucaggaugcc

SEQ ID NO: 2999027 - RNA, 19 nt, Artificial Sequence
  Description of Artificial Sequence: Synthetic oligonucleotide
ugccgguggccagcgugac

SEQ ID NO: 2999028 - RNA, 19 nt, Artificial Sequence
  Description of Artificial Sequence: Synthetic oligonucleotide
ggcgccguagugaggcgug

SEQ ID NO: 2999029 - RNA, 19 nt, Artificial Sequence
  Description of Artificial Sequence: Synthetic oligonucleotide
gcuggagaccgaggcgaag

SEQ ID NO: 2999030 - RNA, 19 nt, Artificial Sequence
  Description of Artificial Sequence: Synthetic oligonucleotide
cguugcggguuaucgaaga

SEQ ID NO: 2999031 - RNA, 19 nt, Artificial Sequence
  Description of Artificial Sequence: Synthetic oligonucleotide
cuccgaggaggaggcucag

SEQ ID NO: 2999032 - RNA, 19 nt, Artificial Sequence
  Description of Artificial Sequence: Synthetic oligonucleotide
gcuccgaggaggaggcuca

SEQ ID NO: 2999033 - RNA, 19 nt, Artificial Sequence
  Description of Artificial Sequence: Synthetic oligonucleotide
gugaggcgugaggguggcg

SEQ ID NO: 2999034 - RNA, 19 nt, Artificial Sequence
  Description of Artificial Sequence: Synthetic oligonucleotide
gcuccuggggcgcgcgccc

SEQ ID NO: 2999035 - RNA, 19 nt, Artificial Sequence
  Description of Artificial Sequence: Synthetic oligonucleotide
cuacagucuuugucgcuuu

SEQ ID NO: 2999036 - RNA, 19 nt, Artificial Sequence
  Description of Artificial Sequence: Synthetic oligonucleotide
ggaucccaaggagguagga

SEQ ID NO: 2999037 - RNA, 19 nt, Artificial Sequence
  Description of Artificial Sequence: Synthetic oligonucleotide
gcggguuaucgaagaugag

SEQ ID NO: 2999038 - RNA, 19 nt, Artificial Sequence
  Description of Artificial Sequence: Synthetic oligonucleotide
guggcggagcccaggcgga

SEQ ID NO: 2999039 - RNA, 19 nt, Artificial Sequence
  Description of Artificial Sequence: Synthetic oligonucleotide
cugcuugcguugcggguua

SEQ ID NO: 2999040 - RNA, 19 nt, Artificial Sequence
  Description of Artificial Sequence: Synthetic oligonucleotide
gcaguucccuagacucagc

SEQ ID NO: 2999041 - RNA, 19 nt, Artificial Sequence
  Description of Artificial Sequence: Synthetic oligonucleotide
ccaggcggaaggggcagag

SEQ ID NO: 2999042 - RNA, 19 nt, Artificial Sequence
  Description of Artificial Sequence: Synthetic oligonucleotide
ggcggagcccaggcggaag

SEQ ID NO: 2999043 - RNA, 19 nt, Artificial Sequence
  Description of Artificial Sequence: Synthetic oligonucleotide
guggccagcgugacccaaa

SEQ ID NO: 2999044 - RNA, 19 nt, Artificial Sequence
  Description of Artificial Sequence: Synthetic oligonucleotide
ccagguuugcgggauccca

SEQ ID NO: 2999045 - RNA, 19 nt, Artificial Sequence
  Description of Artificial Sequence: Synthetic oligonucleotide
cgcccuuaacacuguccag

SEQ ID NO: 2999046 - RNA, 19 nt, Artificial Sequence
  Description of Artificial Sequence: Synthetic oligonucleotide
cccuuaacacuguccaggu

SEQ ID NO: 2999047 - RNA, 19 nt, Artificial Sequence
  Description of Artificial Sequence: Synthetic oligonucleotide
uccuggggcgcgcgcccuu

SEQ ID NO: 2999048 - RNA, 19 nt, Artificial Sequence
  Description of Artificial Sequence: Synthetic oligonucleotide
ggaggcucaggaugccggu

SEQ ID NO: 2999049 - RNA, 19 nt, Artificial Sequence
  Description of Artificial Sequence: Synthetic oligonucleotide
guucuccuuacaggacagu

SEQ ID NO: 2999050 - RNA, 19 nt, Artificial Sequence
  Description of Artificial Sequence: Synthetic oligonucleotide
uggcggagcccaggcggaa

SEQ ID NO: 2999051 - RNA, 19 nt, Artificial Sequence
  Description of Artificial Sequence: Synthetic oligonucleotide
ugcuugcguugcggguuau

SEQ ID NO: 2999052 - RNA, 19 nt, Artificial Sequence
  Description of Artificial Sequence: Synthetic oligonucleotide
gccgguggccagcgugacc

SEQ ID NO: 2999053 - RNA, 19 nt, Artificial Sequence
  Description of Artificial Sequence: Synthetic oligonucleotide
ccgaggcgaaggcgaagac

SEQ ID NO: 2999054 - RNA, 19 nt, Artificial Sequence
  Description of Artificial Sequence: Synthetic oligonucleotide
gcagcgcuccuggggcgcg

SEQ ID NO: 2999055 - RNA, 19 nt, Artificial Sequence
  Description of Artificial Sequence: Synthetic oligonucleotide
cgcgaacugcuugcguugc

SEQ ID NO: 2999056 - RNA, 19 nt, Artificial Sequence
  Description of Artificial Sequence: Synthetic oligonucleotide
gcccaggcggaaggggcag

SEQ ID NO: 2999057 - RNA, 19 nt, Artificial Sequence
  Description of Artificial Sequence: Synthetic oligonucleotide
cuguccagguuugcgggau

SEQ ID NO: 2999058 - RNA, 19 nt, Artificial Sequence
  Description of Artificial Sequence: Synthetic oligonucleotide
gcuuaguguagugcagaau

SEQ ID NO: 2999059 - RNA, 19 nt, Artificial Sequence
  Description of Artificial Sequence: Synthetic oligonucleotide
ggucgcgaacugcuugcgu

SEQ ID NO: 2999060 - RNA, 19 nt, Artificial Sequence
  Description of Artificial Sequence: Synthetic oligonucleotide
cccuagacucagcagcgcu

SEQ ID NO: 2999061 - RNA, 19 nt, Artificial Sequence
  Description of Artificial Sequence: Synthetic oligonucleotide
ccuacagucuuugucgcuu

SEQ ID NO: 2999062 - RNA, 19 nt, Artificial Sequence
  Description of Artificial Sequence: Synthetic oligonucleotide
gcagagcggcacgcuggag

SEQ ID NO: 2999063 - RNA, 19 nt, Artificial Sequence
  Description of Artificial Sequence: Synthetic oligonucleotide
ggccugaccccuacagucu

SEQ ID NO: 2999064 - RNA, 19 nt, Artificial Sequence
  Description of Artificial Sequence: Synthetic oligonucleotide
ggcgcgcgcccuuaacacu

SEQ ID NO: 2999065 - RNA, 19 nt, Artificial Sequence
  Description of Artificial Sequence: Synthetic oligonucleotide
ccaccaccgcuccgaggag

SEQ ID NO: 2999066 - RNA, 19 nt, Artificial Sequence
  Description of Artificial Sequence: Synthetic oligonucleotide
gcuugcguugcggguuauc

SEQ ID NO: 2999067 - RNA, 19 nt, Artificial Sequence
  Description of Artificial Sequence: Synthetic oligonucleotide
cgcugggcuuaguguagug

SEQ ID NO: 2999068 - RNA, 19 nt, Artificial Sequence
  Description of Artificial Sequence: Synthetic oligonucleotide
cagcgcuccuggggcgcgc

SEQ ID NO: 2999069 - RNA, 19 nt, Artificial Sequence
  Description of Artificial Sequence: Synthetic oligonucleotide
cgcuccgaggaggaggcuc

SEQ ID NO: 2999070 - RNA, 19 nt, Artificial Sequence
  Description of Artificial Sequence: Synthetic oligonucleotide
cguagugaggcgugagggu

SEQ ID NO: 2999071 - RNA, 19 nt, Artificial Sequence
  Description of Artificial Sequence: Synthetic oligonucleotide
gguggccagcgugacccaa

SEQ ID NO: 2999072 - RNA, 19 nt, Artificial Sequence
  Description of Artificial Sequence: Synthetic oligonucleotide
cgcuuugauccagaaaggu

SEQ ID NO: 2999073 - RNA, 19 nt, Artificial Sequence
  Description of Artificial Sequence: Synthetic oligonucleotide
cuggggucgcgaacugcuu

SEQ ID NO: 2999074 - RNA, 19 nt, Artificial Sequence
  Description of Artificial Sequence: Synthetic oligonucleotide
cggagcccaggcggaaggg

SEQ ID NO: 2999075 - RNA, 19 nt, Artificial Sequence
  Description of Artificial Sequence: Synthetic oligonucleotide
gcgcgcccuuaacacuguc

SEQ ID NO: 2999076 - RNA, 19 nt, Artificial Sequence
  Description of Artificial Sequence: Synthetic oligonucleotide
cgccguagugaggcgugag

SEQ ID NO: 2999077 - RNA, 19 nt, Artificial Sequence
  Description of Artificial Sequence: Synthetic oligonucleotide
cuggggcgcgcgcccuuaa

SEQ ID NO: 2999078 - RNA, 19 nt, Artificial Sequence
  Description of Artificial Sequence: Synthetic oligonucleotide
cggcacgcuggagaccgag

SEQ ID NO: 2999079 - RNA, 19 nt, Artificial Sequence
  Description of Artificial Sequence: Synthetic oligonucleotide
cccuacagucuuugucgcu

SEQ ID NO: 2999080 - RNA, 19 nt, Artificial Sequence
  Description of Artificial Sequence: Synthetic oligonucleotide
cgcuccuggggcgcgcgcc

SEQ ID NO: 2999081 - RNA, 19 nt, Artificial Sequence
  Description of Artificial Sequence: Synthetic oligonucleotide
cgaaggcgaagacggcgaa

SEQ ID NO: 2999082 - RNA, 19 nt, Artificial Sequence
  Description of Artificial Sequence: Synthetic oligonucleotide
gcgcuccuggggcgcgcgc

SEQ ID NO: 2999083 - RNA, 19 nt, Artificial Sequence
  Description of Artificial Sequence: Synthetic oligonucleotide
ccaccgcuccgaggaggag

SEQ ID NO: 2999084 - RNA, 19 nt, Artificial Sequence
  Description of Artificial Sequence: Synthetic oligonucleotide
cgaagaugagaggcgaguu

SEQ ID NO: 2999085 - RNA, 19 nt, Artificial Sequence
  Description of Artificial Sequence: Synthetic oligonucleotide
cgcagagcgcugggcuuag

SEQ ID NO: 2999086 - RNA, 19 nt, Artificial Sequence
  Description of Artificial Sequence: Synthetic oligonucleotide
ccuuaacacuguccagguu

SEQ ID NO: 2999087 - RNA, 19 nt, Artificial Sequence
  Description of Artificial Sequence: Synthetic oligonucleotide
gcgccguagugaggcguga

SEQ ID NO: 2999088 - RNA, 19 nt, Artificial Sequence
  Description of Artificial Sequence: Synthetic oligonucleotide
gcgggaucccaaggaggua

SEQ ID NO: 2999089 - RNA, 19 nt, Artificial Sequence
  Description of Artificial Sequence: Synthetic oligonucleotide
cgaggaggaggcucaggau

SEQ ID NO: 2999090 - RNA, 19 nt, Artificial Sequence
  Description of Artificial Sequence: Synthetic oligonucleotide
gcgcugggcuuaguguagu

SEQ ID NO: 2999091 - RNA, 19 nt, Artificial Sequence
  Description of Artificial Sequence: Synthetic oligonucleotide
cggaaggggcagagcggca

SEQ ID NO: 2999092 - RNA, 19 nt, Artificial Sequence
  Description of Artificial Sequence: Synthetic oligonucleotide
cgcuggagaccgaggcgaa

SEQ ID NO: 2999093 - RNA, 19 nt, Artificial Sequence
  Description of Artificial Sequence: Synthetic oligonucleotide
ggaugccgguggccagcgu

SEQ ID NO: 2999094 - RNA, 19 nt, Artificial Sequence
  Description of Artificial Sequence: Synthetic oligonucleotide
cuccuggggcgcgcgcccu

SEQ ID NO: 2999095 - RNA, 19 nt, Artificial Sequence
  Description of Artificial Sequence: Synthetic oligonucleotide
ccugaccccuacagucuuu

SEQ ID NO: 2999096 - RNA, 19 nt, Artificial Sequence
  Description of Artificial Sequence: Synthetic oligonucleotide
cccaggcggaaggggcaga

SEQ ID NO: 2999097 - RNA, 19 nt, Artificial Sequence
  Description of Artificial Sequence: Synthetic oligonucleotide
gcggcacgcuggagaccga

SEQ ID NO: 2999098 - RNA, 19 nt, Artificial Sequence
  Description of Artificial Sequence: Synthetic oligonucleotide
cgguggccagcgugaccca

SEQ ID NO: 2999099 - RNA, 19 nt, Artificial Sequence
  Description of Artificial Sequence: Synthetic oligonucleotide
ccuggggcgcgcgcccuua

SEQ ID NO: 2999100 - RNA, 19 nt, Artificial Sequence
  Description of Artificial Sequence: Synthetic oligonucleotide
gcagagcgcugggcuuagu

SEQ ID NO: 2999101 - RNA, 19 nt, Artificial Sequence
  Description of Artificial Sequence: Synthetic oligonucleotide
cgcgcgcccuuaacacugu

SEQ ID NO: 2999102 - RNA, 19 nt, Artificial Sequence
  Description of Artificial Sequence: Synthetic oligonucleotide
guaguagucauacagaagg

SEQ ID NO: 2999103 - RNA, 19 nt, Artificial Sequence
  Description of Artificial Sequence: Synthetic oligonucleotide
aaccuuguaguagucauac

SEQ ID NO: 2999104 - RNA, 19 nt, Artificial Sequence
  Description of Artificial Sequence: Synthetic oligonucleotide
uugcuuugcucacagacag

SEQ ID NO: 2999105 - RNA, 19 nt, Artificial Sequence
  Description of Artificial Sequence: Synthetic oligonucleotide
ugcucgaagauaacgacgc

SEQ ID NO: 2999106 - RNA, 19 nt, Artificial Sequence
  Description of Artificial Sequence: Synthetic oligonucleotide
uucaccacggugaugcccg

SEQ ID NO: 2999107 - RNA, 19 nt, Artificial Sequence
  Description of Artificial Sequence: Synthetic oligonucleotide
gucauacugagucugcucg

SEQ ID NO: 2999108 - RNA, 19 nt, Artificial Sequence
  Description of Artificial Sequence: Synthetic oligonucleotide
aguagucauacagaaggcc

SEQ ID NO: 2999109 - RNA, 19 nt, Artificial Sequence
  Description of Artificial Sequence: Synthetic oligonucleotide
gauaacgacgcgcugcucc

SEQ ID NO: 2999110 - RNA, 19 nt, Artificial Sequence
  Description of Artificial Sequence: Synthetic oligonucleotide
ucggcuuucaccacgguga

SEQ ID NO: 2999111 - RNA, 19 nt, Artificial Sequence
  Description of Artificial Sequence: Synthetic oligonucleotide
acagaagucgcuugucucg

SEQ ID NO: 2999112 - RNA, 19 nt, Artificial Sequence
  Description of Artificial Sequence: Synthetic oligonucleotide
auacagaaggcccagggca

SEQ ID NO: 2999113 - RNA, 19 nt, Artificial Sequence
  Description of Artificial Sequence: Synthetic oligonucleotide
uguaguagucauacagaag

SEQ ID NO: 2999114 - RNA, 19 nt, Artificial Sequence
  Description of Artificial Sequence: Synthetic oligonucleotide
ugagucugcucgaagauaa

SEQ ID NO: 2999115 - RNA, 19 nt, Artificial Sequence
  Description of Artificial Sequence: Synthetic oligonucleotide
ucgaagauaacgacgcgcu

SEQ ID NO: 2999116 - RNA, 19 nt, Artificial Sequence
  Description of Artificial Sequence: Synthetic oligonucleotide
uuguaguagucauacagaa

SEQ ID NO: 2999117 - RNA, 19 nt, Artificial Sequence
  Description of Artificial Sequence: Synthetic oligonucleotide
gaagauaacgacgcgcugc

SEQ ID NO: 2999118 - RNA, 19 nt, Artificial Sequence
  Description of Artificial Sequence: Synthetic oligonucleotide
aagauaacgacgcgcugcu

SEQ ID NO: 2999119 - RNA, 19 nt, Artificial Sequence
  Description of Artificial Sequence: Synthetic oligonucleotide
uucuuggucuucuuggcug

SEQ ID NO: 2999120 - RNA, 19 nt, Artificial Sequence
  Description of Artificial Sequence: Synthetic oligonucleotide
uucaccggugcugagacag

SEQ ID NO: 2999121 - RNA, 19 nt, Artificial Sequence
  Description of Artificial Sequence: Synthetic oligonucleotide
gaggcagagguucaccggg

SEQ ID NO: 2999122 - RNA, 19 nt, Artificial Sequence
  Description of Artificial Sequence: Synthetic oligonucleotide
cuugucucgaggaaccuug

SEQ ID NO: 2999123 - RNA, 19 nt, Artificial Sequence
  Description of Artificial Sequence: Synthetic oligonucleotide
gucucgaggaaccuuguag

SEQ ID NO: 2999124 - RNA, 19 nt, Artificial Sequence
  Description of Artificial Sequence: Synthetic oligonucleotide
ugcucacagacagaagucg

SEQ ID NO: 2999125 - RNA, 19 nt, Artificial Sequence
  Description of Artificial Sequence: Synthetic oligonucleotide
guagucauacagaaggccc

SEQ ID NO: 2999126 - RNA, 19 nt, Artificial Sequence
  Description of Artificial Sequence: Synthetic oligonucleotide
ucucgaggaaccuuguagu

SEQ ID NO: 2999127 - RNA, 19 nt, Artificial Sequence
  Description of Artificial Sequence: Synthetic oligonucleotide
aagugcugugggcuucacc

SEQ ID NO: 2999128 - RNA, 19 nt, Artificial Sequence
  Description of Artificial Sequence: Synthetic oligonucleotide
uagucauacagaaggccca

SEQ ID NO: 2999129 - RNA, 19 nt, Artificial Sequence
  Description of Artificial Sequence: Synthetic oligonucleotide
uacugagucugcucgaaga

SEQ ID NO: 2999130 - RNA, 19 nt, Artificial Sequence
  Description of Artificial Sequence: Synthetic oligonucleotide
uaguagucauacagaaggc

SEQ ID NO: 2999131 - RNA, 19 nt, Artificial Sequence
  Description of Artificial Sequence: Synthetic oligonucleotide
uacagaaggcccagggcag

SEQ ID NO: 2999132 - RNA, 19 nt, Artificial Sequence
  Description of Artificial Sequence: Synthetic oligonucleotide
gaagucgcuugucucgagg

SEQ ID NO: 2999133 - RNA, 19 nt, Artificial Sequence
  Description of Artificial Sequence: Synthetic oligonucleotide
ccuuguaguagucauacag

SEQ ID NO: 2999134 - RNA, 19 nt, Artificial Sequence
  Description of Artificial Sequence: Synthetic oligonucleotide
ucugcucgaagauaacgac

SEQ ID NO: 2999135 - RNA, 19 nt, Artificial Sequence
  Description of Artificial Sequence: Synthetic oligonucleotide
augaacaccggcgugaagu

SEQ ID NO: 2999136 - RNA, 19 nt, Artificial Sequence
  Description of Artificial Sequence: Synthetic oligonucleotide
acgugguccuggcugaggc

SEQ ID NO: 2999137 - RNA, 19 nt, Artificial Sequence
  Description of Artificial Sequence: Synthetic oligonucleotide
cugcucgaagauaacgacg

SEQ ID NO: 2999138 - RNA, 19 nt, Artificial Sequence
  Description of Artificial Sequence: Synthetic oligonucleotide
aacgacgcgcugcuccucg

SEQ ID NO: 2999139 - RNA, 19 nt, Artificial Sequence
  Description of Artificial Sequence: Synthetic oligonucleotide
aagucgcuugucucgagga

SEQ ID NO: 2999140 - RNA, 19 nt, Artificial Sequence
  Description of Artificial Sequence: Synthetic oligonucleotide
ugaggcagagguucaccgg

SEQ ID NO: 2999141 - RNA, 19 nt, Artificial Sequence
  Description of Artificial Sequence: Synthetic oligonucleotide
cuuguaguagucauacaga

SEQ ID NO: 2999142 - RNA, 19 nt, Artificial Sequence
  Description of Artificial Sequence: Synthetic oligonucleotide
agucugcucgaagauaacg

SEQ ID NO: 2999143 - RNA, 19 nt, Artificial Sequence
  Description of Artificial Sequence: Synthetic oligonucleotide
ucgccuccgaccaaagugc

SEQ ID NO: 2999144 - RNA, 19 nt, Artificial Sequence
  Description of Artificial Sequence: Synthetic oligonucleotide
uuggcugucgcuugcuuug

SEQ ID NO: 2999145 - RNA, 19 nt, Artificial Sequence
  Description of Artificial Sequence: Synthetic oligonucleotide
cagagguucaccgggacgg

SEQ ID NO: 2999146 - RNA, 19 nt, Artificial Sequence
  Description of Artificial Sequence: Synthetic oligonucleotide
cugaggcagagguucaccg

SEQ ID NO: 2999147 - RNA, 19 nt, Artificial Sequence
  Description of Artificial Sequence: Synthetic oligonucleotide
acggugaugcccgacacgg

SEQ ID NO: 2999148 - RNA, 19 nt, Artificial Sequence
  Description of Artificial Sequence: Synthetic oligonucleotide
uuucuuggucuucuuggcu

SEQ ID NO: 2999149 - RNA, 19 nt, Artificial Sequence
  Description of Artificial Sequence: Synthetic oligonucleotide
ucggugauggacacgcugu

SEQ ID NO: 2999150 - RNA, 19 nt, Artificial Sequence
  Description of Artificial Sequence: Synthetic oligonucleotide
cucgccuccgaccaaagug

SEQ ID NO: 2999151 - RNA, 19 nt, Artificial Sequence
  Description of Artificial Sequence: Synthetic oligonucleotide
ucgcuugucucgaggaacc

SEQ ID NO: 2999152 - RNA, 19 nt, Artificial Sequence
  Description of Artificial Sequence: Synthetic oligonucleotide
cucgaagauaacgacgcgc

SEQ ID NO: 2999153 - RNA, 19 nt, Artificial Sequence
  Description of Artificial Sequence: Synthetic oligonucleotide
ucgaggaaccuuguaguag

SEQ ID NO: 2999154 - RNA, 19 nt, Artificial Sequence
  Description of Artificial Sequence: Synthetic oligonucleotide
accgggacggucuucagga

SEQ ID NO: 2999155 - RNA, 19 nt, Artificial Sequence
  Description of Artificial Sequence: Synthetic oligonucleotide
gacagaagucgcuugucuc

SEQ ID NO: 2999156 - RNA, 19 nt, Artificial Sequence
  Description of Artificial Sequence: Synthetic oligonucleotide
cucucggugauggacacgc

SEQ ID NO: 2999157 - RNA, 19 nt, Artificial Sequence
  Description of Artificial Sequence: Synthetic oligonucleotide
acagacagaagucgcuugu

SEQ ID NO: 2999158 - RNA, 19 nt, Artificial Sequence
  Description of Artificial Sequence: Synthetic oligonucleotide
agacagaagucgcuugucu

SEQ ID NO: 2999159 - RNA, 19 nt, Artificial Sequence
  Description of Artificial Sequence: Synthetic oligonucleotide
ugcugagacaguuucuuuu

SEQ ID NO: 2999160 - RNA, 19 nt, Artificial Sequence
  Description of Artificial Sequence: Synthetic oligonucleotide
ggugaugcccgacacgggg

SEQ ID NO: 2999161 - RNA, 19 nt, Artificial Sequence
  Description of Artificial Sequence: Synthetic oligonucleotide
gcuugcuuugcucacagac

SEQ ID NO: 2999162 - RNA, 19 nt, Artificial Sequence
  Description of Artificial Sequence: Synthetic oligonucleotide
uccucggcuuucaccacgg

SEQ ID NO: 2999163 - RNA, 19 nt, Artificial Sequence
  Description of Artificial Sequence: Synthetic oligonucleotide
uucgaggucuccacguggu

SEQ ID NO: 2999164 - RNA, 19 nt, Artificial Sequence
  Description of Artificial Sequence: Synthetic oligonucleotide
aggaccugcacucgguucu

SEQ ID NO: 2999165 - RNA, 19 nt, Artificial Sequence
  Description of Artificial Sequence: Synthetic oligonucleotide
cuucgaggucuccacgugg

SEQ ID NO: 2999166 - RNA, 19 nt, Artificial Sequence
  Description of Artificial Sequence: Synthetic oligonucleotide
uggucuucuuggcugucgc

SEQ ID NO: 2999167 - RNA, 19 nt, Artificial Sequence
  Description of Artificial Sequence: Synthetic oligonucleotide
ucgcuugcuuugcucacag

SEQ ID NO: 2999168 - RNA, 19 nt, Artificial Sequence
  Description of Artificial Sequence: Synthetic oligonucleotide
gauggacacgcuguacugc

SEQ ID NO: 2999169 - RNA, 19 nt, Artificial Sequence
  Description of Artificial Sequence: Synthetic oligonucleotide
cuugcuuugcucacagaca

SEQ ID NO: 2999170 - RNA, 19 nt, Artificial Sequence
  Description of Artificial Sequence: Synthetic oligonucleotide
auggacacgcuguacugcu

SEQ ID NO: 2999171 - RNA, 19 nt, Artificial Sequence
  Description of Artificial Sequence: Synthetic oligonucleotide
acggggaugacggcggggc

SEQ ID NO: 2999172 - RNA, 19 nt, Artificial Sequence
  Description of Artificial Sequence: Synthetic oligonucleotide
ucauacugagucugcucga

SEQ ID NO: 2999173 - RNA, 19 nt, Artificial Sequence
  Description of Artificial Sequence: Synthetic oligonucleotide
ucuuggucuucuuggcugu

SEQ ID NO: 2999174 - RNA, 19 nt, Artificial Sequence
  Description of Artificial Sequence: Synthetic oligonucleotide
aacaccggcgugaaguccu

SEQ ID NO: 2999175 - RNA, 19 nt, Artificial Sequence
  Description of Artificial Sequence: Synthetic oligonucleotide
accugcacucgguucucgc

SEQ ID NO: 2999176 - RNA, 19 nt, Artificial Sequence
  Description of Artificial Sequence: Synthetic oligonucleotide
acugagucugcucgaagau

SEQ ID NO: 2999177 - RNA, 19 nt, Artificial Sequence
  Description of Artificial Sequence: Synthetic oligonucleotide
gacacggggaugacggcgg

SEQ ID NO: 2999178 - RNA, 19 nt, Artificial Sequence
  Description of Artificial Sequence: Synthetic oligonucleotide
uuucaccacggugaugccc

SEQ ID NO: 2999179 - RNA, 19 nt, Artificial Sequence
  Description of Artificial Sequence: Synthetic oligonucleotide
auacugagucugcucgaag

SEQ ID NO: 2999180 - RNA, 19 nt, Artificial Sequence
  Description of Artificial Sequence: Synthetic oligonucleotide
uuggucuucuuggcugucg

SEQ ID NO: 2999181 - RNA, 19 nt, Artificial Sequence
  Description of Artificial Sequence: Synthetic oligonucleotide
ucgguucucgccuccgacc

SEQ ID NO: 2999182 - RNA, 19 nt, Artificial Sequence
  Description of Artificial Sequence: Synthetic oligonucleotide
auaacgacgcgcugcuccu

SEQ ID NO: 2999183 - RNA, 19 nt, Artificial Sequence
  Description of Artificial Sequence: Synthetic oligonucleotide
ggacacgcuguacugcucg

SEQ ID NO: 2999184 - RNA, 19 nt, Artificial Sequence
  Description of Artificial Sequence: Synthetic oligonucleotide
cuggcugaggcagagguuc

SEQ ID NO: 2999185 - RNA, 19 nt, Artificial Sequence
  Description of Artificial Sequence: Synthetic oligonucleotide
ggcagcagcacuguccucg

SEQ ID NO: 2999186 - RNA, 19 nt, Artificial Sequence
  Description of Artificial Sequence: Synthetic oligonucleotide
augacggcggggcucucgg

SEQ ID NO: 2999187 - RNA, 19 nt, Artificial Sequence
  Description of Artificial Sequence: Synthetic oligonucleotide
ugaacaccggcgugaaguc

SEQ ID NO: 2999188 - RNA, 19 nt, Artificial Sequence
  Description of Artificial Sequence: Synthetic oligonucleotide
cuuugcucacagacagaag

SEQ ID NO: 2999189 - RNA, 19 nt, Artificial Sequence
  Description of Artificial Sequence: Synthetic oligonucleotide
cacagacagaagucgcuug

SEQ ID NO: 2999190 - RNA, 19 nt, Artificial Sequence
  Description of Artificial Sequence: Synthetic oligonucleotide
accggcgugaaguccucgg

SEQ ID NO: 2999191 - RNA, 19 nt, Artificial Sequence
  Description of Artificial Sequence: Synthetic oligonucleotide
uccgaccaaagugcugugg

SEQ ID NO: 2999192 - RNA, 19 nt, Artificial Sequence
  Description of Artificial Sequence: Synthetic oligonucleotide
agucauacagaaggcccag

SEQ ID NO: 2999193 - RNA, 19 nt, Artificial Sequence
  Description of Artificial Sequence: Synthetic oligonucleotide
ugcugugggcuucaccggu

SEQ ID NO: 2999194 - RNA, 19 nt, Artificial Sequence
  Description of Artificial Sequence: Synthetic oligonucleotide
uucaccgggacggucuuca

SEQ ID NO: 2999195 - RNA, 19 nt, Artificial Sequence
  Description of Artificial Sequence: Synthetic oligonucleotide
gacgcgcugcuccucgccg

SEQ ID NO: 2999196 - RNA, 19 nt, Artificial Sequence
  Description of Artificial Sequence: Synthetic oligonucleotide
cucggugauggacacgcug

SEQ ID NO: 2999197 - RNA, 19 nt, Artificial Sequence
  Description of Artificial Sequence: Synthetic oligonucleotide
cccgacacggggaugacgg

SEQ ID NO: 2999198 - RNA, 19 nt, Artificial Sequence
  Description of Artificial Sequence: Synthetic oligonucleotide
cacgcuguacugcucgcgc

SEQ ID NO: 2999199 - RNA, 19 nt, Artificial Sequence
  Description of Artificial Sequence: Synthetic oligonucleotide
uccacgugguccuggcuga

SEQ ID NO: 2999200 - RNA, 19 nt, Artificial Sequence
  Description of Artificial Sequence: Synthetic oligonucleotide
cucggcuuucaccacggug

SEQ ID NO: 2999201 - RNA, 19 nt, Artificial Sequence
  Description of Artificial Sequence: Synthetic oligonucleotide
guccucggcuuucaccacg

SEQ ID NO: 2999202 - RNA, 19 nt, Artificial Sequence
  Description of Artificial Sequence: Synthetic oligonucleotide
accacggugaugcccgaca

SEQ ID NO: 2999203 - RNA, 19 nt, Artificial Sequence
  Description of Artificial Sequence: Synthetic oligonucleotide
gucugcucgaagauaacga

SEQ ID NO: 2999204 - RNA, 19 nt, Artificial Sequence
  Description of Artificial Sequence: Synthetic oligonucleotide
gacggcggggcucucggug

SEQ ID NO: 2999205 - RNA, 19 nt, Artificial Sequence
  Description of Artificial Sequence: Synthetic oligonucleotide
gugguccuggcugaggcag

SEQ ID NO: 2999206 - RNA, 19 nt, Artificial Sequence
  Description of Artificial Sequence: Synthetic oligonucleotide
aguccucggcuuucaccac

SEQ ID NO: 2999207 - RNA, 19 nt, Artificial Sequence
  Description of Artificial Sequence: Synthetic oligonucleotide
aaagugcugugggcuucac

SEQ ID NO: 2999208 - RNA, 19 nt, Artificial Sequence
  Description of Artificial Sequence: Synthetic oligonucleotide
agaagucgcuugucucgag

SEQ ID NO: 2999209 - RNA, 19 nt, Artificial Sequence
  Description of Artificial Sequence: Synthetic oligonucleotide
ugggcuucaccggugcuga

SEQ ID NO: 2999210 - RNA, 19 nt, Artificial Sequence
  Description of Artificial Sequence: Synthetic oligonucleotide
cugucgcuugcuuugcuca

SEQ ID NO: 2999211 - RNA, 19 nt, Artificial Sequence
  Description of Artificial Sequence: Synthetic oligonucleotide
gaugacggcggggcucucg

SEQ ID NO: 2999212 - RNA, 19 nt, Artificial Sequence
  Description of Artificial Sequence: Synthetic oligonucleotide
ugucgcuugcuuugcucac

SEQ ID NO: 2999213 - RNA, 19 nt, Artificial Sequence
  Description of Artificial Sequence: Synthetic oligonucleotide
ugaugcccgacacggggau

SEQ ID NO: 2999214 - RNA, 19 nt, Artificial Sequence
  Description of Artificial Sequence: Synthetic oligonucleotide
ccgaccaaagugcuguggg

SEQ ID NO: 2999215 - RNA, 19 nt, Artificial Sequence
  Description of Artificial Sequence: Synthetic oligonucleotide
ucacagacagaagucgcuu

SEQ ID NO: 2999216 - RNA, 19 nt, Artificial Sequence
  Description of Artificial Sequence: Synthetic oligonucleotide
uugucucgaggaaccuugu

SEQ ID NO: 2999217 - RNA, 19 nt, Artificial Sequence
  Description of Artificial Sequence: Synthetic oligonucleotide
gacacgcuguacugcucgc

SEQ ID NO: 2999218 - RNA, 19 nt, Artificial Sequence
  Description of Artificial Sequence: Synthetic oligonucleotide
cacggugaugcccgacacg

SEQ ID NO: 2999219 - RNA, 19 nt, Artificial Sequence
  Description of Artificial Sequence: Synthetic oligonucleotide
uucucgccuccgaccaaag

SEQ ID NO: 2999220 - RNA, 19 nt, Artificial Sequence
  Description of Artificial Sequence: Synthetic oligonucleotide
ucggcgcggggauagugca

SEQ ID NO: 2999221 - RNA, 19 nt, Artificial Sequence
  Description of Artificial Sequence: Synthetic oligonucleotide
gucgcuugucucgaggaac

SEQ ID NO: 2999222 - RNA, 19 nt, Artificial Sequence
  Description of Artificial Sequence: Synthetic oligonucleotide
aggaaccuuguaguaguca

SEQ ID NO: 2999223 - RNA, 19 nt, Artificial Sequence
  Description of Artificial Sequence: Synthetic oligonucleotide
gcggggauagugcaccggg

SEQ ID NO: 2999224 - RNA, 19 nt, Artificial Sequence
  Description of Artificial Sequence: Synthetic oligonucleotide
ggccccaugaacaccggcg

SEQ ID NO: 2999225 - RNA, 19 nt, Artificial Sequence
  Description of Artificial Sequence: Synthetic oligonucleotide
gcagagguucaccgggacg

SEQ ID NO: 2999226 - RNA, 19 nt, Artificial Sequence
  Description of Artificial Sequence: Synthetic oligonucleotide
caccgggacggucuucagg

SEQ ID NO: 2999227 - RNA, 19 nt, Artificial Sequence
  Description of Artificial Sequence: Synthetic oligonucleotide
gaacaccggcgugaagucc

SEQ ID NO: 2999228 - RNA, 19 nt, Artificial Sequence
  Description of Artificial Sequence: Synthetic oligonucleotide
acacgcuguacugcucgcg

SEQ ID NO: 2999229 - RNA, 19 nt, Artificial Sequence
  Description of Artificial Sequence: Synthetic oligonucleotide
accaaagugcugugggcuu

SEQ ID NO: 2999230 - RNA, 19 nt, Artificial Sequence
  Description of Artificial Sequence: Synthetic oligonucleotide
gucauacagaaggcccagg

SEQ ID NO: 2999231 - RNA, 19 nt, Artificial Sequence
  Description of Artificial Sequence: Synthetic oligonucleotide
ugucucgaggaaccuugua

SEQ ID NO: 2999232 - RNA, 19 nt, Artificial Sequence
  Description of Artificial Sequence: Synthetic oligonucleotide
gcuucaccggugcugagac

SEQ ID NO: 2999233 - RNA, 19 nt, Artificial Sequence
  Description of Artificial Sequence: Synthetic oligonucleotide
ucucgccuccgaccaaagu

SEQ ID NO: 2999234 - RNA, 19 nt, Artificial Sequence
  Description of Artificial Sequence: Synthetic oligonucleotide
cuguacugcucgcgcuucg

SEQ ID NO: 2999235 - RNA, 19 nt, Artificial Sequence
  Description of Artificial Sequence: Synthetic oligonucleotide
gaccaaagugcugugggcu

SEQ ID NO: 2999236 - RNA, 19 nt, Artificial Sequence
  Description of Artificial Sequence: Synthetic oligonucleotide
cugugggcuucaccggugc

SEQ ID NO: 2999237 - RNA, 19 nt, Artificial Sequence
  Description of Artificial Sequence: Synthetic oligonucleotide
cucgguucucgccuccgac

SEQ ID NO: 2999238 - RNA, 19 nt, Artificial Sequence
  Description of Artificial Sequence: Synthetic oligonucleotide
accuuguaguagucauaca

SEQ ID NO: 2999239 - RNA, 19 nt, Artificial Sequence
  Description of Artificial Sequence: Synthetic oligonucleotide
agucgcuugucucgaggaa

SEQ ID NO: 2999240 - RNA, 19 nt, Artificial Sequence
  Description of Artificial Sequence: Synthetic oligonucleotide
ugugggcuucaccggugcu

SEQ ID NO: 2999241 - RNA, 19 nt, Artificial Sequence
  Description of Artificial Sequence: Synthetic oligonucleotide
uggcugaggcagagguuca

SEQ ID NO: 2999242 - RNA, 19 nt, Artificial Sequence
  Description of Artificial Sequence: Synthetic oligonucleotide
ggucauacugagucugcuc

SEQ ID NO: 2999243 - RNA, 19 nt, Artificial Sequence
  Description of Artificial Sequence: Synthetic oligonucleotide
acgacgcgcugcuccucgc

SEQ ID NO: 2999244 - RNA, 19 nt, Artificial Sequence
  Description of Artificial Sequence: Synthetic oligonucleotide
ucuuggcugucgcuugcuu

SEQ ID NO: 2999245 - RNA, 19 nt, Artificial Sequence
  Description of Artificial Sequence: Synthetic oligonucleotide
gaggucuccacgugguccu

SEQ ID NO: 2999246 - RNA, 19 nt, Artificial Sequence
  Description of Artificial Sequence: Synthetic oligonucleotide
ugcacucgguucucgccuc

SEQ ID NO: 2999247 - RNA, 19 nt, Artificial Sequence
  Description of Artificial Sequence: Synthetic oligonucleotide
gacggucuucaggaccugc

SEQ ID NO: 2999248 - RNA, 19 nt, Artificial Sequence
  Description of Artificial Sequence: Synthetic oligonucleotide
ggaaccuuguaguagucau

SEQ ID NO: 2999249 - RNA, 19 nt, Artificial Sequence
  Description of Artificial Sequence: Synthetic oligonucleotide
augcccgacacggggauga

SEQ ID NO: 2999250 - RNA, 19 nt, Artificial Sequence
  Description of Artificial Sequence: Synthetic oligonucleotide
agguucaccgggacggucu

SEQ ID NO: 2999251 - RNA, 19 nt, Artificial Sequence
  Description of Artificial Sequence: Synthetic oligonucleotide
gcuuugcucacagacagaa

SEQ ID NO: 2999252 - RNA, 19 nt, Artificial Sequence
  Description of Artificial Sequence: Synthetic oligonucleotide
gugggcuucaccggugcug

SEQ ID NO: 2999253 - RNA, 19 nt, Artificial Sequence
  Description of Artificial Sequence: Synthetic oligonucleotide
ucuccacgugguccuggcu

SEQ ID NO: 2999254 - RNA, 19 nt, Artificial Sequence
  Description of Artificial Sequence: Synthetic oligonucleotide
acacggggaugacggcggg

SEQ ID NO: 2999255 - RNA, 19 nt, Artificial Sequence
  Description of Artificial Sequence: Synthetic oligonucleotide
gcucgaagauaacgacgcg

SEQ ID NO: 2999256 - RNA, 19 nt, Artificial Sequence
  Description of Artificial Sequence: Synthetic oligonucleotide
ugcucgcgcuucgaggucu

SEQ ID NO: 2999257 - RNA, 19 nt, Artificial Sequence
  Description of Artificial Sequence: Synthetic oligonucleotide
acgcuguacugcucgcgcu

SEQ ID NO: 2999258 - RNA, 19 nt, Artificial Sequence
  Description of Artificial Sequence: Synthetic oligonucleotide
caugaacaccggcgugaag

SEQ ID NO: 2999259 - RNA, 19 nt, Artificial Sequence
  Description of Artificial Sequence: Synthetic oligonucleotide
gcucacagacagaagucgc

SEQ ID NO: 2999260 - RNA, 19 nt, Artificial Sequence
  Description of Artificial Sequence: Synthetic oligonucleotide
cucacagacagaagucgcu

SEQ ID NO: 2999261 - RNA, 19 nt, Artificial Sequence
  Description of Artificial Sequence: Synthetic oligonucleotide
ucgaggucuccacgugguc

SEQ ID NO: 2999262 - RNA, 19 nt, Artificial Sequence
  Description of Artificial Sequence: Synthetic oligonucleotide
agauaacgacgcgcugcuc

SEQ ID NO: 2999263 - RNA, 19 nt, Artificial Sequence
  Description of Artificial Sequence: Synthetic oligonucleotide
gaaccuuguaguagucaua

SEQ ID NO: 2999264 - RNA, 19 nt, Artificial Sequence
  Description of Artificial Sequence: Synthetic oligonucleotide
cagacagaagucgcuuguc

SEQ ID NO: 2999265 - RNA, 19 nt, Artificial Sequence
  Description of Artificial Sequence: Synthetic oligonucleotide
cucgaggaaccuuguagua

SEQ ID NO: 2999266 - RNA, 19 nt, Artificial Sequence
  Description of Artificial Sequence: Synthetic oligonucleotide
ugguccuggcugaggcaga

SEQ ID NO: 2999267 - RNA, 19 nt, Artificial Sequence
  Description of Artificial Sequence: Synthetic oligonucleotide
gaccugcacucgguucucg

SEQ ID NO: 2999268 - RNA, 19 nt, Artificial Sequence
  Description of Artificial Sequence: Synthetic oligonucleotide
ucucggugauggacacgcu

SEQ ID NO: 2999269 - RNA, 19 nt, Artificial Sequence
  Description of Artificial Sequence: Synthetic oligonucleotide
ucaccggugcugagacagu

SEQ ID NO: 2999270 - RNA, 19 nt, Artificial Sequence
  Description of Artificial Sequence: Synthetic oligonucleotide
ucaccgggacggucuucag

SEQ ID NO: 2999271 - RNA, 19 nt, Artificial Sequence
  Description of Artificial Sequence: Synthetic oligonucleotide
ccugcacucgguucucgcc

SEQ ID NO: 2999272 - RNA, 19 nt, Artificial Sequence
  Description of Artificial Sequence: Synthetic oligonucleotide
acggcggggcucucgguga

SEQ ID NO: 2999273 - RNA, 19 nt, Artificial Sequence
  Description of Artificial Sequence: Synthetic oligonucleotide
acucgguucucgccuccga

SEQ ID NO: 2999274 - RNA, 19 nt, Artificial Sequence
  Description of Artificial Sequence: Synthetic oligonucleotide
gaggaaccuuguaguaguc

SEQ ID NO: 2999275 - RNA, 19 nt, Artificial Sequence
  Description of Artificial Sequence: Synthetic oligonucleotide
agaaggcccagggcagcag

SEQ ID NO: 2999276 - RNA, 19 nt, Artificial Sequence
  Description of Artificial Sequence: Synthetic oligonucleotide
gucggcgcggggauagugc

SEQ ID NO: 2999277 - RNA, 19 nt, Artificial Sequence
  Description of Artificial Sequence: Synthetic oligonucleotide
aggcccagggcagcagcac

SEQ ID NO: 2999278 - RNA, 19 nt, Artificial Sequence
  Description of Artificial Sequence: Synthetic oligonucleotide
acggucuucaggaccugca

SEQ ID NO: 2999279 - RNA, 19 nt, Artificial Sequence
  Description of Artificial Sequence: Synthetic oligonucleotide
cauacugagucugcucgaa

SEQ ID NO: 2999280 - RNA, 19 nt, Artificial Sequence
  Description of Artificial Sequence: Synthetic oligonucleotide
ucgcgcuucgaggucucca

SEQ ID NO: 2999281 - RNA, 19 nt, Artificial Sequence
  Description of Artificial Sequence: Synthetic oligonucleotide
gcuucgaggucuccacgug

SEQ ID NO: 2999282 - RNA, 19 nt, Artificial Sequence
  Description of Artificial Sequence: Synthetic oligonucleotide
gagucugcucgaagauaac

SEQ ID NO: 2999283 - RNA, 19 nt, Artificial Sequence
  Description of Artificial Sequence: Synthetic oligonucleotide
uggcugucgcuugcuuugc

SEQ ID NO: 2999284 - RNA, 19 nt, Artificial Sequence
  Description of Artificial Sequence: Synthetic oligonucleotide
cagaagucgcuugucucga

SEQ ID NO: 2999285 - RNA, 19 nt, Artificial Sequence
  Description of Artificial Sequence: Synthetic oligonucleotide
ggcgcggggauagugcacc

SEQ ID NO: 2999286 - RNA, 19 nt, Artificial Sequence
  Description of Artificial Sequence: Synthetic oligonucleotide
ggugauggacacgcuguac

SEQ ID NO: 2999287 - RNA, 19 nt, Artificial Sequence
  Description of Artificial Sequence: Synthetic oligonucleotide
ccggugcugagacaguuuc

SEQ ID NO: 2999288 - RNA, 19 nt, Artificial Sequence
  Description of Artificial Sequence: Synthetic oligonucleotide
cacgugguccuggcugagg

SEQ ID NO: 2999289 - RNA, 19 nt, Artificial Sequence
  Description of Artificial Sequence: Synthetic oligonucleotide
gaugcccgacacggggaug

SEQ ID NO: 2999290 - RNA, 19 nt, Artificial Sequence
  Description of Artificial Sequence: Synthetic oligonucleotide
cuccgaccaaagugcugug

SEQ ID NO: 2999291 - RNA, 19 nt, Artificial Sequence
  Description of Artificial Sequence: Synthetic oligonucleotide
cacucgguucucgccuccg

SEQ ID NO: 2999292 - RNA, 19 nt, Artificial Sequence
  Description of Artificial Sequence: Synthetic oligonucleotide
gcugucgcuugcuuugcuc

SEQ ID NO: 2999293 - RNA, 19 nt, Artificial Sequence
  Description of Artificial Sequence: Synthetic oligonucleotide
ggcagagguucaccgggac

SEQ ID NO: 2999294 - RNA, 19 nt, Artificial Sequence
  Description of Artificial Sequence: Synthetic oligonucleotide
gagguucaccgggacgguc

SEQ ID NO: 2999295 - RNA, 19 nt, Artificial Sequence
  Description of Artificial Sequence: Synthetic oligonucleotide
ggggcucucggugauggac

SEQ ID NO: 2999296 - RNA, 19 nt, Artificial Sequence
  Description of Artificial Sequence: Synthetic oligonucleotide
gugaugcccgacacgggga

SEQ ID NO: 2999297 - RNA, 19 nt, Artificial Sequence
  Description of Artificial Sequence: Synthetic oligonucleotide
ggcucucggugauggacac

SEQ ID NO: 2999298 - RNA, 19 nt, Artificial Sequence
  Description of Artificial Sequence: Synthetic oligonucleotide
agagguucaccgggacggu

SEQ ID NO: 2999299 - RNA, 19 nt, Artificial Sequence
  Description of Artificial Sequence: Synthetic oligonucleotide
gcggggcucucggugaugg

SEQ ID NO: 2999300 - RNA, 19 nt, Artificial Sequence
  Description of Artificial Sequence: Synthetic oligonucleotide
caaagugcugugggcuuca

SEQ ID NO: 2999301 - RNA, 19 nt, Artificial Sequence
  Description of Artificial Sequence: Synthetic oligonucleotide
gcgcuucgaggucuccacg

SEQ ID NO: 2999302 - RNA, 19 nt, Artificial Sequence
  Description of Artificial Sequence: Synthetic oligonucleotide
cgaccaaagugcugugggc

SEQ ID NO: 2999303 - RNA, 19 nt, Artificial Sequence
  Description of Artificial Sequence: Synthetic oligonucleotide
guucucgccuccgaccaaa

SEQ ID NO: 2999304 - RNA, 19 nt, Artificial Sequence
  Description of Artificial Sequence: Synthetic oligonucleotide
ggucuucaggaccugcacu

SEQ ID NO: 2999305 - RNA, 19 nt, Artificial Sequence
  Description of Artificial Sequence: Synthetic oligonucleotide
ucaccacggugaugcccga

SEQ ID NO: 2999306 - RNA, 19 nt, Artificial Sequence
  Description of Artificial Sequence: Synthetic oligonucleotide
gucgcuugcuuugcucaca

SEQ ID NO: 2999307 - RNA, 19 nt, Artificial Sequence
  Description of Artificial Sequence: Synthetic oligonucleotide
cacggggaugacggcgggg

SEQ ID NO: 2999308 - RNA, 19 nt, Artificial Sequence
  Description of Artificial Sequence: Synthetic oligonucleotide
cuuggucuucuuggcuguc

SEQ ID NO: 2999309 - RNA, 19 nt, Artificial Sequence
  Description of Artificial Sequence: Synthetic oligonucleotide
gguccuggcugaggcagag

SEQ ID NO: 2999310 - RNA, 19 nt, Artificial Sequence
  Description of Artificial Sequence: Synthetic oligonucleotide
cgaggucuccacguggucc

SEQ ID NO: 2999311 - RNA, 19 nt, Artificial Sequence
  Description of Artificial Sequence: Synthetic oligonucleotide
cugcacucgguucucgccu

SEQ ID NO: 2999312 - RNA, 19 nt, Artificial Sequence
  Description of Artificial Sequence: Synthetic oligonucleotide
ggucuccacgugguccugg

SEQ ID NO: 2999313 - RNA, 19 nt, Artificial Sequence
  Description of Artificial Sequence: Synthetic oligonucleotide
cugagucugcucgaagaua

SEQ ID NO: 2999314 - RNA, 19 nt, Artificial Sequence
  Description of Artificial Sequence: Synthetic oligonucleotide
cuuggcugucgcuugcuuu

SEQ ID NO: 2999315 - RNA, 19 nt, Artificial Sequence
  Description of Artificial Sequence: Synthetic oligonucleotide
cuccucgccgucggcgcgg

SEQ ID NO: 2999316 - RNA, 19 nt, Artificial Sequence
  Description of Artificial Sequence: Synthetic oligonucleotide
guccuggcugaggcagagg

SEQ ID NO: 2999317 - RNA, 19 nt, Artificial Sequence
  Description of Artificial Sequence: Synthetic oligonucleotide
ugacggcggggcucucggu

SEQ ID NO: 2999318 - RNA, 19 nt, Artificial Sequence
  Description of Artificial Sequence: Synthetic oligonucleotide
uccucgccgucggcgcggg

SEQ ID NO: 2999319 - RNA, 19 nt, Artificial Sequence
  Description of Artificial Sequence: Synthetic oligonucleotide
acaccggcgugaaguccuc

SEQ ID NO: 2999320 - RNA, 19 nt, Artificial Sequence
  Description of Artificial Sequence: Synthetic oligonucleotide
cgggacggucuucaggacc

SEQ ID NO: 2999321 - RNA, 19 nt, Artificial Sequence
  Description of Artificial Sequence: Synthetic oligonucleotide
uaacgacgcgcugcuccuc

SEQ ID NO: 2999322 - RNA, 19 nt, Artificial Sequence
  Description of Artificial Sequence: Synthetic oligonucleotide
cgacacggggaugacggcg

SEQ ID NO: 2999323 - RNA, 19 nt, Artificial Sequence
  Description of Artificial Sequence: Synthetic oligonucleotide
cuucaccggugcugagaca

SEQ ID NO: 2999324 - RNA, 19 nt, Artificial Sequence
  Description of Artificial Sequence: Synthetic oligonucleotide
ccggcgugaaguccucggc

SEQ ID NO: 2999325 - RNA, 19 nt, Artificial Sequence
  Description of Artificial Sequence: Synthetic oligonucleotide
ccacggugaugcccgacac

SEQ ID NO: 2999326 - RNA, 19 nt, Artificial Sequence
  Description of Artificial Sequence: Synthetic oligonucleotide
caccggcgugaaguccucg

SEQ ID NO: 2999327 - RNA, 19 nt, Artificial Sequence
  Description of Artificial Sequence: Synthetic oligonucleotide
cugcucgcgcuucgagguc

SEQ ID NO: 2999328 - RNA, 19 nt, Artificial Sequence
  Description of Artificial Sequence: Synthetic oligonucleotide
gggcucucggugauggaca

SEQ ID NO: 2999329 - RNA, 19 nt, Artificial Sequence
  Description of Artificial Sequence: Synthetic oligonucleotide
cccaugaacaccggcguga

SEQ ID NO: 2999330 - RNA, 19 nt, Artificial Sequence
  Description of Artificial Sequence: Synthetic oligonucleotide
cggggauagugcaccgggg

SEQ ID NO: 2999331 - RNA, 19 nt, Artificial Sequence
  Description of Artificial Sequence: Synthetic oligonucleotide
ggcuucaccggugcugaga

SEQ ID NO: 2999332 - RNA, 19 nt, Artificial Sequence
  Description of Artificial Sequence: Synthetic oligonucleotide
gggacggucuucaggaccu

SEQ ID NO: 2999333 - RNA, 19 nt, Artificial Sequence
  Description of Artificial Sequence: Synthetic oligonucleotide
gggccccaugaacaccggc

SEQ ID NO: 2999334 - RNA, 19 nt, Artificial Sequence
  Description of Artificial Sequence: Synthetic oligonucleotide
gcugugggcuucaccggug

SEQ ID NO: 2999335 - RNA, 19 nt, Artificial Sequence
  Description of Artificial Sequence: Synthetic oligonucleotide
gccgucggcgcggggauag

SEQ ID NO: 2999336 - RNA, 19 nt, Artificial Sequence
  Description of Artificial Sequence: Synthetic oligonucleotide
cgaggaaccuuguaguagu

SEQ ID NO: 2999337 - RNA, 19 nt, Artificial Sequence
  Description of Artificial Sequence: Synthetic oligonucleotide
cgcgcuucgaggucuccac

SEQ ID NO: 2999338 - RNA, 19 nt, Artificial Sequence
  Description of Artificial Sequence: Synthetic oligonucleotide
gcucucggugauggacacg

SEQ ID NO: 2999339 - RNA, 19 nt, Artificial Sequence
  Description of Artificial Sequence: Synthetic oligonucleotide
gcacucgguucucgccucc

SEQ ID NO: 2999340 - RNA, 19 nt, Artificial Sequence
  Description of Artificial Sequence: Synthetic oligonucleotide
ggggaugacggcggggcuc

SEQ ID NO: 2999341 - RNA, 19 nt, Artificial Sequence
  Description of Artificial Sequence: Synthetic oligonucleotide
gcgcggggauagugcaccg

SEQ ID NO: 2999342 - RNA, 19 nt, Artificial Sequence
  Description of Artificial Sequence: Synthetic oligonucleotide
cucgcgcuucgaggucucc

SEQ ID NO: 2999343 - RNA, 19 nt, Artificial Sequence
  Description of Artificial Sequence: Synthetic oligonucleotide
accggugcugagacaguuu

SEQ ID NO: 2999344 - RNA, 19 nt, Artificial Sequence
  Description of Artificial Sequence: Synthetic oligonucleotide
gcccagggcagcagcacug

SEQ ID NO: 2999345 - RNA, 19 nt, Artificial Sequence
  Description of Artificial Sequence: Synthetic oligonucleotide
gcuguacugcucgcgcuuc

SEQ ID NO: 2999346 - RNA, 19 nt, Artificial Sequence
  Description of Artificial Sequence: Synthetic oligonucleotide
aggucuccacgugguccug

SEQ ID NO: 2999347 - RNA, 19 nt, Artificial Sequence
  Description of Artificial Sequence: Synthetic oligonucleotide
ccuccgaccaaagugcugu

SEQ ID NO: 2999348 - RNA, 19 nt, Artificial Sequence
  Description of Artificial Sequence: Synthetic oligonucleotide
caccacggugaugcccgac

SEQ ID NO: 2999349 - RNA, 19 nt, Artificial Sequence
  Description of Artificial Sequence: Synthetic oligonucleotide
ccccaugaacaccggcgug

SEQ ID NO: 2999350 - RNA, 19 nt, Artificial Sequence
  Description of Artificial Sequence: Synthetic oligonucleotide
gcccgacacggggaugacg

SEQ ID NO: 2999351 - RNA, 19 nt, Artificial Sequence
  Description of Artificial Sequence: Synthetic oligonucleotide
ggcgugaaguccucggcuu

SEQ ID NO: 2999352 - RNA, 19 nt, Artificial Sequence
  Description of Artificial Sequence: Synthetic oligonucleotide
ugcccgacacggggaugac

SEQ ID NO: 2999353 - RNA, 19 nt, Artificial Sequence
  Description of Artificial Sequence: Synthetic oligonucleotide
gccccaugaacaccggcgu

SEQ ID NO: 2999354 - RNA, 19 nt, Artificial Sequence
  Description of Artificial Sequence: Synthetic oligonucleotide
ggcuuucaccacggugaug

SEQ ID NO: 2999355 - RNA, 19 nt, Artificial Sequence
  Description of Artificial Sequence: Synthetic oligonucleotide
ggucuucuuggcugucgcu

SEQ ID NO: 2999356 - RNA, 19 nt, Artificial Sequence
  Description of Artificial Sequence: Synthetic oligonucleotide
ccgacacggggaugacggc

SEQ ID NO: 2999357 - RNA, 19 nt, Artificial Sequence
  Description of Artificial Sequence: Synthetic oligonucleotide
guucaccgggacggucuuc

SEQ ID NO: 2999358 - RNA, 19 nt, Artificial Sequence
  Description of Artificial Sequence: Synthetic oligonucleotide
cgguucucgccuccgacca

SEQ ID NO: 2999359 - RNA, 19 nt, Artificial Sequence
  Description of Artificial Sequence: Synthetic oligonucleotide
gggcuucaccggugcugag

SEQ ID NO: 2999360 - RNA, 19 nt, Artificial Sequence
  Description of Artificial Sequence: Synthetic oligonucleotide
cgugaaguccucggcuuuc

SEQ ID NO: 2999361 - RNA, 19 nt, Artificial Sequence
  Description of Artificial Sequence: Synthetic oligonucleotide
cggugaugcccgacacggg

SEQ ID NO: 2999362 - RNA, 19 nt, Artificial Sequence
  Description of Artificial Sequence: Synthetic oligonucleotide
gccuccgaccaaagugcug

SEQ ID NO: 2999363 - RNA, 19 nt, Artificial Sequence
  Description of Artificial Sequence: Synthetic oligonucleotide
gguucucgccuccgaccaa

SEQ ID NO: 2999364 - RNA, 19 nt, Artificial Sequence
  Description of Artificial Sequence: Synthetic oligonucleotide
ggggccccaugaacaccgg

SEQ ID NO: 2999365 - RNA, 19 nt, Artificial Sequence
  Description of Artificial Sequence: Synthetic oligonucleotide
ggaccugcacucgguucuc

SEQ ID NO: 2999366 - RNA, 19 nt, Artificial Sequence
  Description of Artificial Sequence: Synthetic oligonucleotide
ccgggacggucuucaggac

SEQ ID NO: 2999367 - RNA, 19 nt, Artificial Sequence
  Description of Artificial Sequence: Synthetic oligonucleotide
gggaugacggcggggcucu

SEQ ID NO: 2999368 - RNA, 19 nt, Artificial Sequence
  Description of Artificial Sequence: Synthetic oligonucleotide
ggacggucuucaggaccug

SEQ ID NO: 2999369 - RNA, 19 nt, Artificial Sequence
  Description of Artificial Sequence: Synthetic oligonucleotide
ggcccagggcagcagcacu

SEQ ID NO: 2999370 - RNA, 19 nt, Artificial Sequence
  Description of Artificial Sequence: Synthetic oligonucleotide
cgacgcgcugcuccucgcc

SEQ ID NO: 2999371 - RNA, 19 nt, Artificial Sequence
  Description of Artificial Sequence: Synthetic oligonucleotide
ccaugaacaccggcgugaa

SEQ ID NO: 2999372 - RNA, 19 nt, Artificial Sequence
  Description of Artificial Sequence: Synthetic oligonucleotide
cgcggggauagugcaccgg

SEQ ID NO: 2999373 - RNA, 19 nt, Artificial Sequence
  Description of Artificial Sequence: Synthetic oligonucleotide
ggcugucgcuugcuuugcu

SEQ ID NO: 2999374 - RNA, 19 nt, Artificial Sequence
  Description of Artificial Sequence: Synthetic oligonucleotide
caccggugcugagacaguu

SEQ ID NO: 2999375 - RNA, 19 nt, Artificial Sequence
  Description of Artificial Sequence: Synthetic oligonucleotide
gguucaccgggacggucuu

SEQ ID NO: 2999376 - RNA, 19 nt, Artificial Sequence
  Description of Artificial Sequence: Synthetic oligonucleotide
gcuugucucgaggaaccuu

SEQ ID NO: 2999377 - RNA, 19 nt, Artificial Sequence
  Description of Artificial Sequence: Synthetic oligonucleotide
cgugguccuggcugaggca

SEQ ID NO: 2999378 - RNA, 19 nt, Artificial Sequence
  Description of Artificial Sequence: Synthetic oligonucleotide
ccacgugguccuggcugag

SEQ ID NO: 2999379 - RNA, 19 nt, Artificial Sequence
  Description of Artificial Sequence: Synthetic oligonucleotide
cgcuucgaggucuccacgu

SEQ ID NO: 2999380 - RNA, 19 nt, Artificial Sequence
  Description of Artificial Sequence: Synthetic oligonucleotide
ggcggggcucucggugaug

SEQ ID NO: 2999381 - RNA, 19 nt, Artificial Sequence
  Description of Artificial Sequence: Synthetic oligonucleotide
gggcagcagcacuguccuc

SEQ ID NO: 2999382 - RNA, 19 nt, Artificial Sequence
  Description of Artificial Sequence: Synthetic oligonucleotide
gcgugaaguccucggcuuu

SEQ ID NO: 2999383 - RNA, 19 nt, Artificial Sequence
  Description of Artificial Sequence: Synthetic oligonucleotide
cgucggcgcggggauagug

SEQ ID NO: 2999384 - RNA, 19 nt, Artificial Sequence
  Description of Artificial Sequence: Synthetic oligonucleotide
gcucgcgcuucgaggucuc

SEQ ID NO: 2999385 - RNA, 19 nt, Artificial Sequence
  Description of Artificial Sequence: Synthetic oligonucleotide
cggcgcggggauagugcac

SEQ ID NO: 2999386 - RNA, 19 nt, Artificial Sequence
  Description of Artificial Sequence: Synthetic oligonucleotide
cggugauggacacgcugua

SEQ ID NO: 2999387 - RNA, 19 nt, Artificial Sequence
  Description of Artificial Sequence: Synthetic oligonucleotide
cggcgugaaguccucggcu

SEQ ID NO: 2999388 - RNA, 19 nt, Artificial Sequence
  Description of Artificial Sequence: Synthetic oligonucleotide
ccuggcugaggcagagguu

SEQ ID NO: 2999389 - RNA, 19 nt, Artificial Sequence
  Description of Artificial Sequence: Synthetic oligonucleotide
cgcuugcuuugcucacaga

SEQ ID NO: 2999390 - RNA, 19 nt, Artificial Sequence
  Description of Artificial Sequence: Synthetic oligonucleotide
cggugcugagacaguuucu

SEQ ID NO: 2999391 - RNA, 19 nt, Artificial Sequence
  Description of Artificial Sequence: Synthetic oligonucleotide
ggaugacggcggggcucuc

SEQ ID NO: 2999392 - RNA, 19 nt, Artificial Sequence
  Description of Artificial Sequence: Synthetic oligonucleotide
ccucgccgucggcgcgggg

SEQ ID NO: 2999393 - RNA, 19 nt, Artificial Sequence
  Description of Artificial Sequence: Synthetic oligonucleotide
cgccuccgaccaaagugcu

SEQ ID NO: 2999394 - RNA, 19 nt, Artificial Sequence
  Description of Artificial Sequence: Synthetic oligonucleotide
cgcuguacugcucgcgcuu

SEQ ID NO: 2999395 - RNA, 19 nt, Artificial Sequence
  Description of Artificial Sequence: Synthetic oligonucleotide
cggcuuucaccacggugau

SEQ ID NO: 2999396 - RNA, 19 nt, Artificial Sequence
  Description of Artificial Sequence: Synthetic oligonucleotide
cggggcucucggugaugga

SEQ ID NO: 2999397 - RNA, 19 nt, Artificial Sequence
  Description of Artificial Sequence: Synthetic oligonucleotide
cgcuugucucgaggaaccu

SEQ ID NO: 2999398 - RNA, 19 nt, Artificial Sequence
  Description of Artificial Sequence: Synthetic oligonucleotide
cggggaugacggcggggcu

SEQ ID NO: 2999399 - RNA, 19 nt, Artificial Sequence
  Description of Artificial Sequence: Synthetic oligonucleotide
cggcggggcucucggugau

SEQ ID NO: 2999400 - RNA, 19 nt, Artificial Sequence
  Description of Artificial Sequence: Synthetic oligonucleotide
ccgucggcgcggggauagu

SEQ ID NO: 2999401 - RNA, 19 nt, Artificial Sequence
  Description of Artificial Sequence: Synthetic oligonucleotide
cgccgucggcgcggggaua

SEQ ID NO: 2999402 - RNA, 19 nt, Artificial Sequence
  Description of Artificial Sequence: Synthetic oligonucleotide
ucuccuuugaugcacaugg

SEQ ID NO: 2999403 - RNA, 19 nt, Artificial Sequence
  Description of Artificial Sequence: Synthetic oligonucleotide
aauucaucaacacccuggc

SEQ ID NO: 2999404 - RNA, 19 nt, Artificial Sequence
  Description of Artificial Sequence: Synthetic oligonucleotide
cacgaauucaucaacaccc

SEQ ID NO: 2999405 - RNA, 19 nt, Artificial Sequence
  Description of Artificial Sequence: Synthetic oligonucleotide
aucgaugaagucuaaaguc

SEQ ID NO: 2999406 - RNA, 19 nt, Artificial Sequence
  Description of Artificial Sequence: Synthetic oligonucleotide
aaagucuuagacuuagccu

SEQ ID NO: 2999407 - RNA, 19 nt, Artificial Sequence
  Description of Artificial Sequence: Synthetic oligonucleotide
aagucuaaagucuuagacu

SEQ ID NO: 2999408 - RNA, 19 nt, Artificial Sequence
  Description of Artificial Sequence: Synthetic oligonucleotide
gaagucuaaagucuuagac

SEQ ID NO: 2999409 - RNA, 19 nt, Artificial Sequence
  Description of Artificial Sequence: Synthetic oligonucleotide
uuagacuuagccuuggccu

SEQ ID NO: 2999410 - RNA, 19 nt, Artificial Sequence
  Description of Artificial Sequence: Synthetic oligonucleotide
aagucuuagacuuagccuu

SEQ ID NO: 2999411 - RNA, 19 nt, Artificial Sequence
  Description of Artificial Sequence: Synthetic oligonucleotide
aucaagagcacaucgauga

SEQ ID NO: 2999412 - RNA, 19 nt, Artificial Sequence
  Description of Artificial Sequence: Synthetic oligonucleotide
uccuuggccaucaagagca

SEQ ID NO: 2999413 - RNA, 19 nt, Artificial Sequence
  Description of Artificial Sequence: Synthetic oligonucleotide
gaauucaucaacacccugg

SEQ ID NO: 2999414 - RNA, 19 nt, Artificial Sequence
  Description of Artificial Sequence: Synthetic oligonucleotide
uuagccuuggccuucacga

SEQ ID NO: 2999415 - RNA, 19 nt, Artificial Sequence
  Description of Artificial Sequence: Synthetic oligonucleotide
acaucgaugaagucuaaag

SEQ ID NO: 2999416 - RNA, 19 nt, Artificial Sequence
  Description of Artificial Sequence: Synthetic oligonucleotide
ucuaaagucuuagacuuag

SEQ ID NO: 2999417 - RNA, 19 nt, Artificial Sequence
  Description of Artificial Sequence: Synthetic oligonucleotide
agucuaaagucuuagacuu

SEQ ID NO: 2999418 - RNA, 19 nt, Artificial Sequence
  Description of Artificial Sequence: Synthetic oligonucleotide
ucgaugaagucuaaagucu

SEQ ID NO: 2999419 - RNA, 19 nt, Artificial Sequence
  Description of Artificial Sequence: Synthetic oligonucleotide
ucacgaauucaucaacacc

SEQ ID NO: 2999420 - RNA, 19 nt, Artificial Sequence
  Description of Artificial Sequence: Synthetic oligonucleotide
ucguccuuggccaucaaga

SEQ ID NO: 2999421 - RNA, 19 nt, Artificial Sequence
  Description of Artificial Sequence: Synthetic oligonucleotide
cuuugaugcacauggugag

SEQ ID NO: 2999422 - RNA, 19 nt, Artificial Sequence
  Description of Artificial Sequence: Synthetic oligonucleotide
uccuuugaugcacauggug

SEQ ID NO: 2999423 - RNA, 19 nt, Artificial Sequence
  Description of Artificial Sequence: Synthetic oligonucleotide
acacccuggcuauugaggg

SEQ ID NO: 2999424 - RNA, 19 nt, Artificial Sequence
  Description of Artificial Sequence: Synthetic oligonucleotide
aacacccuggcuauugagg

SEQ ID NO: 2999425 - RNA, 19 nt, Artificial Sequence
  Description of Artificial Sequence: Synthetic oligonucleotide
aagagcacaucgaugaagu

SEQ ID NO: 2999426 - RNA, 19 nt, Artificial Sequence
  Description of Artificial Sequence: Synthetic oligonucleotide
uucacgaauucaucaacac

SEQ ID NO: 2999427 - RNA, 19 nt, Artificial Sequence
  Description of Artificial Sequence: Synthetic oligonucleotide
guuuguacaggauccagga

SEQ ID NO: 2999428 - RNA, 19 nt, Artificial Sequence
  Description of Artificial Sequence: Synthetic oligonucleotide
ugaagucuaaagucuuaga

SEQ ID NO: 2999429 - RNA, 19 nt, Artificial Sequence
  Description of Artificial Sequence: Synthetic oligonucleotide
augaagucuaaagucuuag

SEQ ID NO: 2999430 - RNA, 19 nt, Artificial Sequence
  Description of Artificial Sequence: Synthetic oligonucleotide
uuggccaucaagagcacau

SEQ ID NO: 2999431 - RNA, 19 nt, Artificial Sequence
  Description of Artificial Sequence: Synthetic oligonucleotide
ucaucagcuccuuuccaug

SEQ ID NO: 2999432 - RNA, 19 nt, Artificial Sequence
  Description of Artificial Sequence: Synthetic oligonucleotide
ucaucaacacccuggcuau

SEQ ID NO: 2999433 - RNA, 19 nt, Artificial Sequence
  Description of Artificial Sequence: Synthetic oligonucleotide
cuuagccuuggccuucacg

SEQ ID NO: 2999434 - RNA, 19 nt, Artificial Sequence
  Description of Artificial Sequence: Synthetic oligonucleotide
caucaagagcacaucgaug

SEQ ID NO: 2999435 - RNA, 19 nt, Artificial Sequence
  Description of Artificial Sequence: Synthetic oligonucleotide
ucuuagacuuagccuuggc

SEQ ID NO: 2999436 - RNA, 19 nt, Artificial Sequence
  Description of Artificial Sequence: Synthetic oligonucleotide
cuucacgaauucaucaaca

SEQ ID NO: 2999437 - RNA, 19 nt, Artificial Sequence
  Description of Artificial Sequence: Synthetic oligonucleotide
agacucuccuuugaugcac

SEQ ID NO: 2999438 - RNA, 19 nt, Artificial Sequence
  Description of Artificial Sequence: Synthetic oligonucleotide
cuaaagucuuagacuuagc

SEQ ID NO: 2999439 - RNA, 19 nt, Artificial Sequence
  Description of Artificial Sequence: Synthetic oligonucleotide
auccaggagagcccacugg

SEQ ID NO: 2999440 - RNA, 19 nt, Artificial Sequence
  Description of Artificial Sequence: Synthetic oligonucleotide
acaggauccaggagagccc

SEQ ID NO: 2999441 - RNA, 19 nt, Artificial Sequence
  Description of Artificial Sequence: Synthetic oligonucleotide
uggcuauugagggugcggc

SEQ ID NO: 2999442 - RNA, 19 nt, Artificial Sequence
  Description of Artificial Sequence: Synthetic oligonucleotide
ggccaucaagagcacaucg

SEQ ID NO: 2999443 - RNA, 19 nt, Artificial Sequence
  Description of Artificial Sequence: Synthetic oligonucleotide
gguuuguacaggauccagg

SEQ ID NO: 2999444 - RNA, 19 nt, Artificial Sequence
  Description of Artificial Sequence: Synthetic oligonucleotide
gauccaggagagcccacug

SEQ ID NO: 2999445 - RNA, 19 nt, Artificial Sequence
  Description of Artificial Sequence: Synthetic oligonucleotide
ucaagagcacaucgaugaa

SEQ ID NO: 2999446 - RNA, 19 nt, Artificial Sequence
  Description of Artificial Sequence: Synthetic oligonucleotide
aucaacacccuggcuauug

SEQ ID NO: 2999447 - RNA, 19 nt, Artificial Sequence
  Description of Artificial Sequence: Synthetic oligonucleotide
uagacuuagccuuggccuu

SEQ ID NO: 2999448 - RNA, 19 nt, Artificial Sequence
  Description of Artificial Sequence: Synthetic oligonucleotide
ugccucgccagguuuguac

SEQ ID NO: 2999449 - RNA, 19 nt, Artificial Sequence
  Description of Artificial Sequence: Synthetic oligonucleotide
guccuuggccaucaagagc

SEQ ID NO: 2999450 - RNA, 19 nt, Artificial Sequence
  Description of Artificial Sequence: Synthetic oligonucleotide
uguucguccuuggccauca

SEQ ID NO: 2999451 - RNA, 19 nt, Artificial Sequence
  Description of Artificial Sequence: Synthetic oligonucleotide
caggucgcaggccuugcgg

SEQ ID NO: 2999452 - RNA, 19 nt, Artificial Sequence
  Description of Artificial Sequence: Synthetic oligonucleotide
caacacccuggcuauugag

SEQ ID NO: 2999453 - RNA, 19 nt, Artificial Sequence
  Description of Artificial Sequence: Synthetic oligonucleotide
ucgccagguuuguacagga

SEQ ID NO: 2999454 - RNA, 19 nt, Artificial Sequence
  Description of Artificial Sequence: Synthetic oligonucleotide
gagggugcggcgucucucc

SEQ ID NO: 2999455 - RNA, 19 nt, Artificial Sequence
  Description of Artificial Sequence: Synthetic oligonucleotide
agguuuguacaggauccag

SEQ ID NO: 2999456 - RNA, 19 nt, Artificial Sequence
  Description of Artificial Sequence: Synthetic oligonucleotide
caucgaugaagucuaaagu

SEQ ID NO: 2999457 - RNA, 19 nt, Artificial Sequence
  Description of Artificial Sequence: Synthetic oligonucleotide
acccuggcuauugagggug

SEQ ID NO: 2999458 - RNA, 19 nt, Artificial Sequence
  Description of Artificial Sequence: Synthetic oligonucleotide
uggccuucacgaauucauc

SEQ ID NO: 2999459 - RNA, 19 nt, Artificial Sequence
  Description of Artificial Sequence: Synthetic oligonucleotide
cucgccagguuuguacagg

SEQ ID NO: 2999460 - RNA, 19 nt, Artificial Sequence
  Description of Artificial Sequence: Synthetic oligonucleotide
cuggcuauugagggugcgg

SEQ ID NO: 2999461 - RNA, 19 nt, Artificial Sequence
  Description of Artificial Sequence: Synthetic oligonucleotide
gucuuagacuuagccuugg

SEQ ID NO: 2999462 - RNA, 19 nt, Artificial Sequence
  Description of Artificial Sequence: Synthetic oligonucleotide
agucuuagacuuagccuug

SEQ ID NO: 2999463 - RNA, 19 nt, Artificial Sequence
  Description of Artificial Sequence: Synthetic oligonucleotide
aggucgcaggccuugcgga

SEQ ID NO: 2999464 - RNA, 19 nt, Artificial Sequence
  Description of Artificial Sequence: Synthetic oligonucleotide
ggcuauugagggugcggcg

SEQ ID NO: 2999465 - RNA, 19 nt, Artificial Sequence
  Description of Artificial Sequence: Synthetic oligonucleotide
cuauugagggugcggcguc

SEQ ID NO: 2999466 - RNA, 19 nt, Artificial Sequence
  Description of Artificial Sequence: Synthetic oligonucleotide
agggugcggcgucucuccc

SEQ ID NO: 2999467 - RNA, 19 nt, Artificial Sequence
  Description of Artificial Sequence: Synthetic oligonucleotide
acgaauucaucaacacccu

SEQ ID NO: 2999468 - RNA, 19 nt, Artificial Sequence
  Description of Artificial Sequence: Synthetic oligonucleotide
ggccuucacgaauucauca

SEQ ID NO: 2999469 - RNA, 19 nt, Artificial Sequence
  Description of Artificial Sequence: Synthetic oligonucleotide
auugagggugcggcgucuc

SEQ ID NO: 2999470 - RNA, 19 nt, Artificial Sequence
  Description of Artificial Sequence: Synthetic oligonucleotide
ccuucacgaauucaucaac

SEQ ID NO: 2999471 - RNA, 19 nt, Artificial Sequence
  Description of Artificial Sequence: Synthetic oligonucleotide
ggacguccucaucagcucc

SEQ ID NO: 2999472 - RNA, 19 nt, Artificial Sequence
  Description of Artificial Sequence: Synthetic oligonucleotide
ccauguucguccuuggcca

SEQ ID NO: 2999473 - RNA, 19 nt, Artificial Sequence
  Description of Artificial Sequence: Synthetic oligonucleotide
acuuagccuuggccuucac

SEQ ID NO: 2999474 - RNA, 19 nt, Artificial Sequence
  Description of Artificial Sequence: Synthetic oligonucleotide
uugagggugcggcgucucu

SEQ ID NO: 2999475 - RNA, 19 nt, Artificial Sequence
  Description of Artificial Sequence: Synthetic oligonucleotide
uauugagggugcggcgucu

SEQ ID NO: 2999476 - RNA, 19 nt, Artificial Sequence
  Description of Artificial Sequence: Synthetic oligonucleotide
cucuccuuugaugcacaug

SEQ ID NO: 2999477 - RNA, 19 nt, Artificial Sequence
  Description of Artificial Sequence: Synthetic oligonucleotide
accaggucgcaggccuugc

SEQ ID NO: 2999478 - RNA, 19 nt, Artificial Sequence
  Description of Artificial Sequence: Synthetic oligonucleotide
auguucguccuuggccauc

SEQ ID NO: 2999479 - RNA, 19 nt, Artificial Sequence
  Description of Artificial Sequence: Synthetic oligonucleotide
cagacucuccuuugaugca

SEQ ID NO: 2999480 - RNA, 19 nt, Artificial Sequence
  Description of Artificial Sequence: Synthetic oligonucleotide
ugagggugcggcgucucuc

SEQ ID NO: 2999481 - RNA, 19 nt, Artificial Sequence
  Description of Artificial Sequence: Synthetic oligonucleotide
ggugcggcgucucucccug

SEQ ID NO: 2999482 - RNA, 19 nt, Artificial Sequence
  Description of Artificial Sequence: Synthetic oligonucleotide
gucgcaggccuugcggaag

SEQ ID NO: 2999483 - RNA, 19 nt, Artificial Sequence
  Description of Artificial Sequence: Synthetic oligonucleotide
acucuccuuugaugcacau

SEQ ID NO: 2999484 - RNA, 19 nt, Artificial Sequence
  Description of Artificial Sequence: Synthetic oligonucleotide
cucaucagcuccuuuccau

SEQ ID NO: 2999485 - RNA, 19 nt, Artificial Sequence
  Description of Artificial Sequence: Synthetic oligonucleotide
uggccaucaagagcacauc

SEQ ID NO: 2999486 - RNA, 19 nt, Artificial Sequence
  Description of Artificial Sequence: Synthetic oligonucleotide
gccuucacgaauucaucaa

SEQ ID NO: 2999487 - RNA, 19 nt, Artificial Sequence
  Description of Artificial Sequence: Synthetic oligonucleotide
cguccuuggccaucaagag

SEQ ID NO: 2999488 - RNA, 19 nt, Artificial Sequence
  Description of Artificial Sequence: Synthetic oligonucleotide
gcuguggugucauggccuc

SEQ ID NO: 2999489 - RNA, 19 nt, Artificial Sequence
  Description of Artificial Sequence: Synthetic oligonucleotide
gccaucaagagcacaucga

SEQ ID NO: 2999490 - RNA, 19 nt, Artificial Sequence
  Description of Artificial Sequence: Synthetic oligonucleotide
guacaggauccaggagagc

SEQ ID NO: 2999491 - RNA, 19 nt, Artificial Sequence
  Description of Artificial Sequence: Synthetic oligonucleotide
aggauccaggagagcccac

SEQ ID NO: 2999492 - RNA, 19 nt, Artificial Sequence
  Description of Artificial Sequence: Synthetic oligonucleotide
cacaucgaugaagucuaaa

SEQ ID NO: 2999493 - RNA, 19 nt, Artificial Sequence
  Description of Artificial Sequence: Synthetic oligonucleotide
cgcagacucuccuuugaug

SEQ ID NO: 2999494 - RNA, 19 nt, Artificial Sequence
  Description of Artificial Sequence: Synthetic oligonucleotide
gucuaaagucuuagacuua

SEQ ID NO: 2999495 - RNA, 19 nt, Artificial Sequence
  Description of Artificial Sequence: Synthetic oligonucleotide
cgaauucaucaacacccug

SEQ ID NO: 2999496 - RNA, 19 nt, Artificial Sequence
  Description of Artificial Sequence: Synthetic oligonucleotide
ccucgccagguuuguacag

SEQ ID NO: 2999497 - RNA, 19 nt, Artificial Sequence
  Description of Artificial Sequence: Synthetic oligonucleotide
cuguggugucauggccucc

SEQ ID NO: 2999498 - RNA, 19 nt, Artificial Sequence
  Description of Artificial Sequence: Synthetic oligonucleotide
gccucgccagguuuguaca

SEQ ID NO: 2999499 - RNA, 19 nt, Artificial Sequence
  Description of Artificial Sequence: Synthetic oligonucleotide
gacguccucaucagcuccu

SEQ ID NO: 2999500 - RNA, 19 nt, Artificial Sequence
  Description of Artificial Sequence: Synthetic oligonucleotide
gcuauugagggugcggcgu

SEQ ID NO: 2999501 - RNA, 19 nt, Artificial Sequence
  Description of Artificial Sequence: Synthetic oligonucleotide
ccaggucgcaggccuugcg

SEQ ID NO: 2999502 - RNA, 19 nt, Artificial Sequence
  Description of Artificial Sequence: Synthetic oligonucleotide
ccaucaagagcacaucgau

SEQ ID NO: 2999503 - RNA, 19 nt, Artificial Sequence
  Description of Artificial Sequence: Synthetic oligonucleotide
gccgcagacucuccuuuga

SEQ ID NO: 2999504 - RNA, 19 nt, Artificial Sequence
  Description of Artificial Sequence: Synthetic oligonucleotide
ccuggcuauugagggugcg

SEQ ID NO: 2999505 - RNA, 19 nt, Artificial Sequence
  Description of Artificial Sequence: Synthetic oligonucleotide
cuccuuugaugcacauggu

SEQ ID NO: 2999506 - RNA, 19 nt, Artificial Sequence
  Description of Artificial Sequence: Synthetic oligonucleotide
ccggacguccucaucagcu

SEQ ID NO: 2999507 - RNA, 19 nt, Artificial Sequence
  Description of Artificial Sequence: Synthetic oligonucleotide
cccuggcuauugagggugc

SEQ ID NO: 2999508 - RNA, 19 nt, Artificial Sequence
  Description of Artificial Sequence: Synthetic oligonucleotide
ggucgcaggccuugcggaa

SEQ ID NO: 2999509 - RNA, 19 nt, Artificial Sequence
  Description of Artificial Sequence: Synthetic oligonucleotide
cauguucguccuuggccau

SEQ ID NO: 2999510 - RNA, 19 nt, Artificial Sequence
  Description of Artificial Sequence: Synthetic oligonucleotide
ccucaucagcuccuuucca

SEQ ID NO: 2999511 - RNA, 19 nt, Artificial Sequence
  Description of Artificial Sequence: Synthetic oligonucleotide
cacccuggcuauugagggu

SEQ ID NO: 2999512 - RNA, 19 nt, Artificial Sequence
  Description of Artificial Sequence: Synthetic oligonucleotide
ccuuggccaucaagagcac

SEQ ID NO: 2999513 - RNA, 19 nt, Artificial Sequence
  Description of Artificial Sequence: Synthetic oligonucleotide
ggauccaggagagcccacu

SEQ ID NO: 2999514 - RNA, 19 nt, Artificial Sequence
  Description of Artificial Sequence: Synthetic oligonucleotide
cggacguccucaucagcuc

SEQ ID NO: 2999515 - RNA, 19 nt, Artificial Sequence
  Description of Artificial Sequence: Synthetic oligonucleotide
acguccucaucagcuccuu

SEQ ID NO: 2999516 - RNA, 19 nt, Artificial Sequence
  Description of Artificial Sequence: Synthetic oligonucleotide
guucguccuuggccaucaa

SEQ ID NO: 2999517 - RNA, 19 nt, Artificial Sequence
  Description of Artificial Sequence: Synthetic oligonucleotide
ggugccucgccagguuugu

SEQ ID NO: 2999518 - RNA, 19 nt, Artificial Sequence
  Description of Artificial Sequence: Synthetic oligonucleotide
gggugcggcgucucucccu

SEQ ID NO: 2999519 - RNA, 19 nt, Artificial Sequence
  Description of Artificial Sequence: Synthetic oligonucleotide
gcacaucgaugaagucuaa

SEQ ID NO: 2999520 - RNA, 19 nt, Artificial Sequence
  Description of Artificial Sequence: Synthetic oligonucleotide
gugccucgccagguuugua

SEQ ID NO: 2999521 - RNA, 19 nt, Artificial Sequence
  Description of Artificial Sequence: Synthetic oligonucleotide
caucaacacccuggcuauu

SEQ ID NO: 2999522 - RNA, 19 nt, Artificial Sequence
  Description of Artificial Sequence: Synthetic oligonucleotide
gccucugcccggacguccu

SEQ ID NO: 2999523 - RNA, 19 nt, Artificial Sequence
  Description of Artificial Sequence: Synthetic oligonucleotide
ccgcagacucuccuuugau

SEQ ID NO: 2999524 - RNA, 19 nt, Artificial Sequence
  Description of Artificial Sequence: Synthetic oligonucleotide
cgccagguuuguacaggau

SEQ ID NO: 2999525 - RNA, 19 nt, Artificial Sequence
  Description of Artificial Sequence: Synthetic oligonucleotide
cguccucaucagcuccuuu

SEQ ID NO: 2999526 - RNA, 19 nt, Artificial Sequence
  Description of Artificial Sequence: Synthetic oligonucleotide
uuugcaaugaaccuaagcc

SEQ ID NO: 2999527 - RNA, 19 nt, Artificial Sequence
  Description of Artificial Sequence: Synthetic oligonucleotide
aaacaauuaaacaauuugc

SEQ ID NO: 2999528 - RNA, 19 nt, Artificial Sequence
  Description of Artificial Sequence: Synthetic oligonucleotide
uaaacaauuaaacaauuug

SEQ ID NO: 2999529 - RNA, 19 nt, Artificial Sequence
  Description of Artificial Sequence: Synthetic oligonucleotide
ucuguguaaaccauuaagg

SEQ ID NO: 2999530 - RNA, 19 nt, Artificial Sequence
  Description of Artificial Sequence: Synthetic oligonucleotide
uuuaaaauuuauuaaccag

SEQ ID NO: 2999531 - RNA, 19 nt, Artificial Sequence
  Description of Artificial Sequence: Synthetic oligonucleotide
aaaauucaggcauugaugu

SEQ ID NO: 2999532 - RNA, 19 nt, Artificial Sequence
  Description of Artificial Sequence: Synthetic oligonucleotide
uguaauaaacaauuaaaca

SEQ ID NO: 2999533 - RNA, 19 nt, Artificial Sequence
  Description of Artificial Sequence: Synthetic oligonucleotide
aagaagaaaggaaaggccc

SEQ ID NO: 2999534 - RNA, 19 nt, Artificial Sequence
  Description of Artificial Sequence: Synthetic oligonucleotide
ucaacaaaggaccaguaag

SEQ ID NO: 2999535 - RNA, 19 nt, Artificial Sequence
  Description of Artificial Sequence: Synthetic oligonucleotide
uagaauuacauucuggucu

SEQ ID NO: 2999536 - RNA, 19 nt, Artificial Sequence
  Description of Artificial Sequence: Synthetic oligonucleotide
uuugguuuaaaauuuauua

SEQ ID NO: 2999537 - RNA, 19 nt, Artificial Sequence
  Description of Artificial Sequence: Synthetic oligonucleotide
guaauaaacaauuaaacaa

SEQ ID NO: 2999538 - RNA, 19 nt, Artificial Sequence
  Description of Artificial Sequence: Synthetic oligonucleotide
aauucaggcauugaugugg

SEQ ID NO: 2999539 - RNA, 19 nt, Artificial Sequence
  Description of Artificial Sequence: Synthetic oligonucleotide
uucaauguaauaaacaauu

SEQ ID NO: 2999540 - RNA, 19 nt, Artificial Sequence
  Description of Artificial Sequence: Synthetic oligonucleotide
acaccuaaagcacaaaagg

SEQ ID NO: 2999541 - RNA, 19 nt, Artificial Sequence
  Description of Artificial Sequence: Synthetic oligonucleotide
acaagaagaaaggaaaggc

SEQ ID NO: 2999542 - RNA, 19 nt, Artificial Sequence
  Description of Artificial Sequence: Synthetic oligonucleotide
uaaggcaucagguacagca

SEQ ID NO: 2999543 - RNA, 19 nt, Artificial Sequence
  Description of Artificial Sequence: Synthetic oligonucleotide
aauuugcuguacuagaaga

SEQ ID NO: 2999544 - RNA, 19 nt, Artificial Sequence
  Description of Artificial Sequence: Synthetic oligonucleotide
aaaccauuaaggcaaguca

SEQ ID NO: 2999545 - RNA, 19 nt, Artificial Sequence
  Description of Artificial Sequence: Synthetic oligonucleotide
aauuuauuaaccagauuuc

SEQ ID NO: 2999546 - RNA, 19 nt, Artificial Sequence
  Description of Artificial Sequence: Synthetic oligonucleotide
uguccauagaauuacauuc

SEQ ID NO: 2999547 - RNA, 19 nt, Artificial Sequence
  Description of Artificial Sequence: Synthetic oligonucleotide
auuuauuaaccagauuucc

SEQ ID NO: 2999548 - RNA, 19 nt, Artificial Sequence
  Description of Artificial Sequence: Synthetic oligonucleotide
agcaucuuacaccuaaagc

SEQ ID NO: 2999549 - RNA, 19 nt, Artificial Sequence
  Description of Artificial Sequence: Synthetic oligonucleotide
aacaagaagaaaggaaagg

SEQ ID NO: 2999550 - RNA, 19 nt, Artificial Sequence
  Description of Artificial Sequence: Synthetic oligonucleotide
ugguuuaaaauuuauuaac

SEQ ID NO: 2999551 - RNA, 19 nt, Artificial Sequence
  Description of Artificial Sequence: Synthetic oligonucleotide
aacaaaggaccaguaaggc

SEQ ID NO: 2999552 - RNA, 19 nt, Artificial Sequence
  Description of Artificial Sequence: Synthetic oligonucleotide
uguguaaaccauuaaggca

SEQ ID NO: 2999553 - RNA, 19 nt, Artificial Sequence
  Description of Artificial Sequence: Synthetic oligonucleotide
uuaaggcaagucaacaaag

SEQ ID NO: 2999554 - RNA, 19 nt, Artificial Sequence
  Description of Artificial Sequence: Synthetic oligonucleotide
aaucugacagcauuuaaaa

SEQ ID NO: 2999555 - RNA, 19 nt, Artificial Sequence
  Description of Artificial Sequence: Synthetic oligonucleotide
aaaaggucacuucaaguca

SEQ ID NO: 2999556 - RNA, 19 nt, Artificial Sequence
  Description of Artificial Sequence: Synthetic oligonucleotide
uaaaauuuauuaaccagau

SEQ ID NO: 2999557 - RNA, 19 nt, Artificial Sequence
  Description of Artificial Sequence: Synthetic oligonucleotide
acuuccuguaaucugacag

SEQ ID NO: 2999558 - RNA, 19 nt, Artificial Sequence
  Description of Artificial Sequence: Synthetic oligonucleotide
aacaauuaaacaauuugcu

SEQ ID NO: 2999559 - RNA, 19 nt, Artificial Sequence
  Description of Artificial Sequence: Synthetic oligonucleotide
ucugacagcauuuaaaauu

SEQ ID NO: 2999560 - RNA, 19 nt, Artificial Sequence
  Description of Artificial Sequence: Synthetic oligonucleotide
acaauuaaacaauuugcug

SEQ ID NO: 2999561 - RNA, 19 nt, Artificial Sequence
  Description of Artificial Sequence: Synthetic oligonucleotide
uacaccuaaagcacaaaag

SEQ ID NO: 2999562 - RNA, 19 nt, Artificial Sequence
  Description of Artificial Sequence: Synthetic oligonucleotide
aacaauuugcuguacuaga

SEQ ID NO: 2999563 - RNA, 19 nt, Artificial Sequence
  Description of Artificial Sequence: Synthetic oligonucleotide
uuuauuaaccagauuuccu

SEQ ID NO: 2999564 - RNA, 19 nt, Artificial Sequence
  Description of Artificial Sequence: Synthetic oligonucleotide
uaaggcaagucaacaaagg

SEQ ID NO: 2999565 - RNA, 19 nt, Artificial Sequence
  Description of Artificial Sequence: Synthetic oligonucleotide
aauuaaacaauuugcugua

SEQ ID NO: 2999566 - RNA, 19 nt, Artificial Sequence
  Description of Artificial Sequence: Synthetic oligonucleotide
auagaauuacauucugguc

SEQ ID NO: 2999567 - RNA, 19 nt, Artificial Sequence
  Description of Artificial Sequence: Synthetic oligonucleotide
uuuagcaucuuacaccuaa

SEQ ID NO: 2999568 - RNA, 19 nt, Artificial Sequence
  Description of Artificial Sequence: Synthetic oligonucleotide
caagaagaaaggaaaggcc

SEQ ID NO: 2999569 - RNA, 19 nt, Artificial Sequence
  Description of Artificial Sequence: Synthetic oligonucleotide
uugguuuaaaauuuauuaa

SEQ ID NO: 2999570 - RNA, 19 nt, Artificial Sequence
  Description of Artificial Sequence: Synthetic oligonucleotide
caacaaaggaccaguaagg

SEQ ID NO: 2999571 - RNA, 19 nt, Artificial Sequence
  Description of Artificial Sequence: Synthetic oligonucleotide
cuguguaaaccauuaaggc

SEQ ID NO: 2999572 - RNA, 19 nt, Artificial Sequence
  Description of Artificial Sequence: Synthetic oligonucleotide
aaacaauuugcuguacuag

SEQ ID NO: 2999573 - RNA, 19 nt, Artificial Sequence
  Description of Artificial Sequence: Synthetic oligonucleotide
uguacuagaagagucagaa

SEQ ID NO: 2999574 - RNA, 19 nt, Artificial Sequence
  Description of Artificial Sequence: Synthetic oligonucleotide
auuaaccagauuuccuaac

SEQ ID NO: 2999575 - RNA, 19 nt, Artificial Sequence
  Description of Artificial Sequence: Synthetic oligonucleotide
uuauuaaccagauuuccua

SEQ ID NO: 2999576 - RNA, 19 nt, Artificial Sequence
  Description of Artificial Sequence: Synthetic oligonucleotide
uuaaacaauuugcuguacu

SEQ ID NO: 2999577 - RNA, 19 nt, Artificial Sequence
  Description of Artificial Sequence: Synthetic oligonucleotide
agagucagaaacaagaaga

SEQ ID NO: 2999578 - RNA, 19 nt, Artificial Sequence
  Description of Artificial Sequence: Synthetic oligonucleotide
aaggcaagucaacaaagga

SEQ ID NO: 2999579 - RNA, 19 nt, Artificial Sequence
  Description of Artificial Sequence: Synthetic oligonucleotide
agaagagucagaaacaaga

SEQ ID NO: 2999580 - RNA, 19 nt, Artificial Sequence
  Description of Artificial Sequence: Synthetic oligonucleotide
uuaaccagauuuccuaacu

SEQ ID NO: 2999581 - RNA, 19 nt, Artificial Sequence
  Description of Artificial Sequence: Synthetic oligonucleotide
aaacaagaagaaaggaaag

SEQ ID NO: 2999582 - RNA, 19 nt, Artificial Sequence
  Description of Artificial Sequence: Synthetic oligonucleotide
agcauuuaaaauucaggca

SEQ ID NO: 2999583 - RNA, 19 nt, Artificial Sequence
  Description of Artificial Sequence: Synthetic oligonucleotide
aaccagauuuccuaacugu

SEQ ID NO: 2999584 - RNA, 19 nt, Artificial Sequence
  Description of Artificial Sequence: Synthetic oligonucleotide
agaauuacauucuggucug

SEQ ID NO: 2999585 - RNA, 19 nt, Artificial Sequence
  Description of Artificial Sequence: Synthetic oligonucleotide
agcacaaaaggucacuuca

SEQ ID NO: 2999586 - RNA, 19 nt, Artificial Sequence
  Description of Artificial Sequence: Synthetic oligonucleotide
aaaggucacuucaagucac

SEQ ID NO: 2999587 - RNA, 19 nt, Artificial Sequence
  Description of Artificial Sequence: Synthetic oligonucleotide
aagcacaaaaggucacuuc

SEQ ID NO: 2999588 - RNA, 19 nt, Artificial Sequence
  Description of Artificial Sequence: Synthetic oligonucleotide
auuaaggcaagucaacaaa

SEQ ID NO: 2999589 - RNA, 19 nt, Artificial Sequence
  Description of Artificial Sequence: Synthetic oligonucleotide
uugcaaugaaccuaagccu

SEQ ID NO: 2999590 - RNA, 19 nt, Artificial Sequence
  Description of Artificial Sequence: Synthetic oligonucleotide
cugacagcauuuaaaauuc

SEQ ID NO: 2999591 - RNA, 19 nt, Artificial Sequence
  Description of Artificial Sequence: Synthetic oligonucleotide
aaaccuguguaacuuccug

SEQ ID NO: 2999592 - RNA, 19 nt, Artificial Sequence
  Description of Artificial Sequence: Synthetic oligonucleotide
uuccuaacuguccauagaa

SEQ ID NO: 2999593 - RNA, 19 nt, Artificial Sequence
  Description of Artificial Sequence: Synthetic oligonucleotide
uuacauucuggucuggaaa

SEQ ID NO: 2999594 - RNA, 19 nt, Artificial Sequence
  Description of Artificial Sequence: Synthetic oligonucleotide
caucuuacaccuaaagcac

SEQ ID NO: 2999595 - RNA, 19 nt, Artificial Sequence
  Description of Artificial Sequence: Synthetic oligonucleotide
ugcaaugaaccuaagccuc

SEQ ID NO: 2999596 - RNA, 19 nt, Artificial Sequence
  Description of Artificial Sequence: Synthetic oligonucleotide
accuaaagcacaaaagguc

SEQ ID NO: 2999597 - RNA, 19 nt, Artificial Sequence
  Description of Artificial Sequence: Synthetic oligonucleotide
gauguggcaaagucaagug

SEQ ID NO: 2999598 - RNA, 19 nt, Artificial Sequence
  Description of Artificial Sequence: Synthetic oligonucleotide
uaagccuccucacuaaggu

SEQ ID NO: 2999599 - RNA, 19 nt, Artificial Sequence
  Description of Artificial Sequence: Synthetic oligonucleotide
caauuaaacaauuugcugu

SEQ ID NO: 2999600 - RNA, 19 nt, Artificial Sequence
  Description of Artificial Sequence: Synthetic oligonucleotide
gguuuaaaauuuauuaacc

SEQ ID NO: 2999601 - RNA, 19 nt, Artificial Sequence
  Description of Artificial Sequence: Synthetic oligonucleotide
uuacaccuaaagcacaaaa

SEQ ID NO: 2999602 - RNA, 19 nt, Artificial Sequence
  Description of Artificial Sequence: Synthetic oligonucleotide
uaaacaauuugcuguacua

SEQ ID NO: 2999603 - RNA, 19 nt, Artificial Sequence
  Description of Artificial Sequence: Synthetic oligonucleotide
uaaccagauuuccuaacug

SEQ ID NO: 2999604 - RNA, 19 nt, Artificial Sequence
  Description of Artificial Sequence: Synthetic oligonucleotide
uccauagaauuacauucug

SEQ ID NO: 2999605 - RNA, 19 nt, Artificial Sequence
  Description of Artificial Sequence: Synthetic oligonucleotide
uguggcaaagucaaguguu

SEQ ID NO: 2999606 - RNA, 19 nt, Artificial Sequence
  Description of Artificial Sequence: Synthetic oligonucleotide
acaaaaggucacuucaagu

SEQ ID NO: 2999607 - RNA, 19 nt, Artificial Sequence
  Description of Artificial Sequence: Synthetic oligonucleotide
aaauucaggcauugaugug

SEQ ID NO: 2999608 - RNA, 19 nt, Artificial Sequence
  Description of Artificial Sequence: Synthetic oligonucleotide
ucacuucaauguaauaaac

SEQ ID NO: 2999609 - RNA, 19 nt, Artificial Sequence
  Description of Artificial Sequence: Synthetic oligonucleotide
aggcaagucaacaaaggac

SEQ ID NO: 2999610 - RNA, 19 nt, Artificial Sequence
  Description of Artificial Sequence: Synthetic oligonucleotide
uagcaucuuacaccuaaag

SEQ ID NO: 2999611 - RNA, 19 nt, Artificial Sequence
  Description of Artificial Sequence: Synthetic oligonucleotide
ucaauguaauaaacaauua

SEQ ID NO: 2999612 - RNA, 19 nt, Artificial Sequence
  Description of Artificial Sequence: Synthetic oligonucleotide
agguccacagaucacagga

SEQ ID NO: 2999613 - RNA, 19 nt, Artificial Sequence
  Description of Artificial Sequence: Synthetic oligonucleotide
agaacauaugcuugcuuug

SEQ ID NO: 2999614 - RNA, 19 nt, Artificial Sequence
  Description of Artificial Sequence: Synthetic oligonucleotide
cuuugcaaugaaccuaagc

SEQ ID NO: 2999615 - RNA, 19 nt, Artificial Sequence
  Description of Artificial Sequence: Synthetic oligonucleotide
agccuccucacuaaggucc

SEQ ID NO: 2999616 - RNA, 19 nt, Artificial Sequence
  Description of Artificial Sequence: Synthetic oligonucleotide
aaugaaccuaagccuccuc

SEQ ID NO: 2999617 - RNA, 19 nt, Artificial Sequence
  Description of Artificial Sequence: Synthetic oligonucleotide
ucaagucacuucaauguaa

SEQ ID NO: 2999618 - RNA, 19 nt, Artificial Sequence
  Description of Artificial Sequence: Synthetic oligonucleotide
uagaagagucagaaacaag

SEQ ID NO: 2999619 - RNA, 19 nt, Artificial Sequence
  Description of Artificial Sequence: Synthetic oligonucleotide
gaucacaggaagcuucccc

SEQ ID NO: 2999620 - RNA, 19 nt, Artificial Sequence
  Description of Artificial Sequence: Synthetic oligonucleotide
agucacuucaauguaauaa

SEQ ID NO: 2999621 - RNA, 19 nt, Artificial Sequence
  Description of Artificial Sequence: Synthetic oligonucleotide
uauuaaccagauuuccuaa

SEQ ID NO: 2999622 - RNA, 19 nt, Artificial Sequence
  Description of Artificial Sequence: Synthetic oligonucleotide
aacauaugcuugcuuugca

SEQ ID NO: 2999623 - RNA, 19 nt, Artificial Sequence
  Description of Artificial Sequence: Synthetic oligonucleotide
ugcuuugcaaugaaccuaa

SEQ ID NO: 2999624 - RNA, 19 nt, Artificial Sequence
  Description of Artificial Sequence: Synthetic oligonucleotide
gacagcauuuaaaauucag

SEQ ID NO: 2999625 - RNA, 19 nt, Artificial Sequence
  Description of Artificial Sequence: Synthetic oligonucleotide
auaugcuugcuuugcaaug

SEQ ID NO: 2999626 - RNA, 19 nt, Artificial Sequence
  Description of Artificial Sequence: Synthetic oligonucleotide
uaagguccacagaucacag

SEQ ID NO: 2999627 - RNA, 19 nt, Artificial Sequence
  Description of Artificial Sequence: Synthetic oligonucleotide
uaaaccauuaaggcaaguc

SEQ ID NO: 2999628 - RNA, 19 nt, Artificial Sequence
  Description of Artificial Sequence: Synthetic oligonucleotide
uguaaaccauuaaggcaag

SEQ ID NO: 2999629 - RNA, 19 nt, Artificial Sequence
  Description of Artificial Sequence: Synthetic oligonucleotide
aagucaacaaaggaccagu

SEQ ID NO: 2999630 - RNA, 19 nt, Artificial Sequence
  Description of Artificial Sequence: Synthetic oligonucleotide
aggcaucagguacagcagc

SEQ ID NO: 2999631 - RNA, 19 nt, Artificial Sequence
  Description of Artificial Sequence: Synthetic oligonucleotide
ugauguggcaaagucaagu

SEQ ID NO: 2999632 - RNA, 19 nt, Artificial Sequence
  Description of Artificial Sequence: Synthetic oligonucleotide
uguguaacuuccuguaauc

SEQ ID NO: 2999633 - RNA, 19 nt, Artificial Sequence
  Description of Artificial Sequence: Synthetic oligonucleotide
uacauucuggucuggaaaa

SEQ ID NO: 2999634 - RNA, 19 nt, Artificial Sequence
  Description of Artificial Sequence: Synthetic oligonucleotide
aaccuguguaacuuccugu

SEQ ID NO: 2999635 - RNA, 19 nt, Artificial Sequence
  Description of Artificial Sequence: Synthetic oligonucleotide
auugauguggcaaagucaa

SEQ ID NO: 2999636 - RNA, 19 nt, Artificial Sequence
  Description of Artificial Sequence: Synthetic oligonucleotide
ugcuguacuagaagaguca

SEQ ID NO: 2999637 - RNA, 19 nt, Artificial Sequence
  Description of Artificial Sequence: Synthetic oligonucleotide
ucaggcuucuguguaaacc

SEQ ID NO: 2999638 - RNA, 19 nt, Artificial Sequence
  Description of Artificial Sequence: Synthetic oligonucleotide
uuugcuguacuagaagagu

SEQ ID NO: 2999639 - RNA, 19 nt, Artificial Sequence
  Description of Artificial Sequence: Synthetic oligonucleotide
agaaacaagaagaaaggaa

SEQ ID NO: 2999640 - RNA, 19 nt, Artificial Sequence
  Description of Artificial Sequence: Synthetic oligonucleotide
ucuuacaccuaaagcacaa

SEQ ID NO: 2999641 - RNA, 19 nt, Artificial Sequence
  Description of Artificial Sequence: Synthetic oligonucleotide
guguaaaccauuaaggcaa

SEQ ID NO: 2999642 - RNA, 19 nt, Artificial Sequence
  Description of Artificial Sequence: Synthetic oligonucleotide
cauagaauuacauucuggu

SEQ ID NO: 2999643 - RNA, 19 nt, Artificial Sequence
  Description of Artificial Sequence: Synthetic oligonucleotide
aaggaaaggcccuuugguu

SEQ ID NO: 2999644 - RNA, 19 nt, Artificial Sequence
  Description of Artificial Sequence: Synthetic oligonucleotide
uuuccuaacuguccauaga

SEQ ID NO: 2999645 - RNA, 19 nt, Artificial Sequence
  Description of Artificial Sequence: Synthetic oligonucleotide
acagaucacaggaagcuuc

SEQ ID NO: 2999646 - RNA, 19 nt, Artificial Sequence
  Description of Artificial Sequence: Synthetic oligonucleotide
aagguccacagaucacagg

SEQ ID NO: 2999647 - RNA, 19 nt, Artificial Sequence
  Description of Artificial Sequence: Synthetic oligonucleotide
auuaaacaauuugcuguac

SEQ ID NO: 2999648 - RNA, 19 nt, Artificial Sequence
  Description of Artificial Sequence: Synthetic oligonucleotide
uugcuguacuagaagaguc

SEQ ID NO: 2999649 - RNA, 19 nt, Artificial Sequence
  Description of Artificial Sequence: Synthetic oligonucleotide
ggcaagucaacaaaggacc

SEQ ID NO: 2999650 - RNA, 19 nt, Artificial Sequence
  Description of Artificial Sequence: Synthetic oligonucleotide
acaaaggaccaguaaggca

SEQ ID NO: 2999651 - RNA, 19 nt, Artificial Sequence
  Description of Artificial Sequence: Synthetic oligonucleotide
cuaagccuccucacuaagg

SEQ ID NO: 2999652 - RNA, 19 nt, Artificial Sequence
  Description of Artificial Sequence: Synthetic oligonucleotide
cacaaaaggucacuucaag

SEQ ID NO: 2999653 - RNA, 19 nt, Artificial Sequence
  Description of Artificial Sequence: Synthetic oligonucleotide
aagccuccucacuaagguc

SEQ ID NO: 2999654 - RNA, 19 nt, Artificial Sequence
  Description of Artificial Sequence: Synthetic oligonucleotide
gaacauaugcuugcuuugc

SEQ ID NO: 2999655 - RNA, 19 nt, Artificial Sequence
  Description of Artificial Sequence: Synthetic oligonucleotide
aauuacauucuggucugga

SEQ ID NO: 2999656 - RNA, 19 nt, Artificial Sequence
  Description of Artificial Sequence: Synthetic oligonucleotide
aaccauuaaggcaagucaa

SEQ ID NO: 2999657 - RNA, 19 nt, Artificial Sequence
  Description of Artificial Sequence: Synthetic oligonucleotide
augaaccuaagccuccuca

SEQ ID NO: 2999658 - RNA, 19 nt, Artificial Sequence
  Description of Artificial Sequence: Synthetic oligonucleotide
gucacuucaauguaauaaa

SEQ ID NO: 2999659 - RNA, 19 nt, Artificial Sequence
  Description of Artificial Sequence: Synthetic oligonucleotide
cuaaagcacaaaaggucac

SEQ ID NO: 2999660 - RNA, 19 nt, Artificial Sequence
  Description of Artificial Sequence: Synthetic oligonucleotide
auuugcuguacuagaagag

SEQ ID NO: 2999661 - RNA, 19 nt, Artificial Sequence
  Description of Artificial Sequence: Synthetic oligonucleotide
uccucacuaagguccacag

SEQ ID NO: 2999662 - RNA, 19 nt, Artificial Sequence
  Description of Artificial Sequence: Synthetic oligonucleotide
agaaaggaaaggcccuuug

SEQ ID NO: 2999663 - RNA, 19 nt, Artificial Sequence
  Description of Artificial Sequence: Synthetic oligonucleotide
cacuucaauguaauaaaca

SEQ ID NO: 2999664 - RNA, 19 nt, Artificial Sequence
  Description of Artificial Sequence: Synthetic oligonucleotide
aaccuaagccuccucacua

SEQ ID NO: 2999665 - RNA, 19 nt, Artificial Sequence
  Description of Artificial Sequence: Synthetic oligonucleotide
guccacagaucacaggaag

SEQ ID NO: 2999666 - RNA, 19 nt, Artificial Sequence
  Description of Artificial Sequence: Synthetic oligonucleotide
guaacuuccuguaaucuga

SEQ ID NO: 2999667 - RNA, 19 nt, Artificial Sequence
  Description of Artificial Sequence: Synthetic oligonucleotide
auuacauucuggucuggaa

SEQ ID NO: 2999668 - RNA, 19 nt, Artificial Sequence
  Description of Artificial Sequence: Synthetic oligonucleotide
accauuaaggcaagucaac

SEQ ID NO: 2999669 - RNA, 19 nt, Artificial Sequence
  Description of Artificial Sequence: Synthetic oligonucleotide
uacagcagcugaccauggg

SEQ ID NO: 2999670 - RNA, 19 nt, Artificial Sequence
  Description of Artificial Sequence: Synthetic oligonucleotide
auucaggcauugauguggc

SEQ ID NO: 2999671 - RNA, 19 nt, Artificial Sequence
  Description of Artificial Sequence: Synthetic oligonucleotide
ucagguacagcagcugacc

SEQ ID NO: 2999672 - RNA, 19 nt, Artificial Sequence
  Description of Artificial Sequence: Synthetic oligonucleotide
accagauuuccuaacuguc

SEQ ID NO: 2999673 - RNA, 19 nt, Artificial Sequence
  Description of Artificial Sequence: Synthetic oligonucleotide
cauugauguggcaaaguca

SEQ ID NO: 2999674 - RNA, 19 nt, Artificial Sequence
  Description of Artificial Sequence: Synthetic oligonucleotide
acagcagcugaccauggga

SEQ ID NO: 2999675 - RNA, 19 nt, Artificial Sequence
  Description of Artificial Sequence: Synthetic oligonucleotide
uaaagcacaaaaggucacu

SEQ ID NO: 2999676 - RNA, 19 nt, Artificial Sequence
  Description of Artificial Sequence: Synthetic oligonucleotide
acuagaagagucagaaaca

SEQ ID NO: 2999677 - RNA, 19 nt, Artificial Sequence
  Description of Artificial Sequence: Synthetic oligonucleotide
ggaccaguaaggcaucagg

SEQ ID NO: 2999678 - RNA, 19 nt, Artificial Sequence
  Description of Artificial Sequence: Synthetic oligonucleotide
cagaucacaggaagcuucc

SEQ ID NO: 2999679 - RNA, 19 nt, Artificial Sequence
  Description of Artificial Sequence: Synthetic oligonucleotide
caaaggaccaguaaggcau

SEQ ID NO: 2999680 - RNA, 19 nt, Artificial Sequence
  Description of Artificial Sequence: Synthetic oligonucleotide
gcuugcuuugcaaugaacc

SEQ ID NO: 2999681 - RNA, 19 nt, Artificial Sequence
  Description of Artificial Sequence: Synthetic oligonucleotide
aggaaaggcccuuugguuu

SEQ ID NO: 2999682 - RNA, 19 nt, Artificial Sequence
  Description of Artificial Sequence: Synthetic oligonucleotide
cuaacuguccauagaauua

SEQ ID NO: 2999683 - RNA, 19 nt, Artificial Sequence
  Description of Artificial Sequence: Synthetic oligonucleotide
aaagcacaaaaggucacuu

SEQ ID NO: 2999684 - RNA, 19 nt, Artificial Sequence
  Description of Artificial Sequence: Synthetic oligonucleotide
aaggcaucagguacagcag

SEQ ID NO: 2999685 - RNA, 19 nt, Artificial Sequence
  Description of Artificial Sequence: Synthetic oligonucleotide
auguggcaaagucaagugu

SEQ ID NO: 2999686 - RNA, 19 nt, Artificial Sequence
  Description of Artificial Sequence: Synthetic oligonucleotide
ccauagaauuacauucugg

SEQ ID NO: 2999687 - RNA, 19 nt, Artificial Sequence
  Description of Artificial Sequence: Synthetic oligonucleotide
acauaugcuugcuuugcaa

SEQ ID NO: 2999688 - RNA, 19 nt, Artificial Sequence
  Description of Artificial Sequence: Synthetic oligonucleotide
uaacuuccuguaaucugac

SEQ ID NO: 2999689 - RNA, 19 nt, Artificial Sequence
  Description of Artificial Sequence: Synthetic oligonucleotide
cacuaagguccacagauca

SEQ ID NO: 2999690 - RNA, 19 nt, Artificial Sequence
  Description of Artificial Sequence: Synthetic oligonucleotide
uguaaucugacagcauuua

SEQ ID NO: 2999691 - RNA, 19 nt, Artificial Sequence
  Description of Artificial Sequence: Synthetic oligonucleotide
auaaacaauuaaacaauuu

SEQ ID NO: 2999692 - RNA, 19 nt, Artificial Sequence
  Description of Artificial Sequence: Synthetic oligonucleotide
gcauuuaaaauucaggcau

SEQ ID NO: 2999693 - RNA, 19 nt, Artificial Sequence
  Description of Artificial Sequence: Synthetic oligonucleotide
ugacagcauuuaaaauuca

SEQ ID NO: 2999694 - RNA, 19 nt, Artificial Sequence
  Description of Artificial Sequence: Synthetic oligonucleotide
uuagcaucuuacaccuaaa

SEQ ID NO: 2999695 - RNA, 19 nt, Artificial Sequence
  Description of Artificial Sequence: Synthetic oligonucleotide
aaaggaccaguaaggcauc

SEQ ID NO: 2999696 - RNA, 19 nt, Artificial Sequence
  Description of Artificial Sequence: Synthetic oligonucleotide
aacuuccuguaaucugaca

SEQ ID NO: 2999697 - RNA, 19 nt, Artificial Sequence
  Description of Artificial Sequence: Synthetic oligonucleotide
aguaaggcaucagguacag

SEQ ID NO: 2999698 - RNA, 19 nt, Artificial Sequence
  Description of Artificial Sequence: Synthetic oligonucleotide
caggcuucuguguaaacca

SEQ ID NO: 2999699 - RNA, 19 nt, Artificial Sequence
  Description of Artificial Sequence: Synthetic oligonucleotide
uugauguggcaaagucaag

SEQ ID NO: 2999700 - RNA, 19 nt, Artificial Sequence
  Description of Artificial Sequence: Synthetic oligonucleotide
acauucuggucuggaaaac

SEQ ID NO: 2999701 - RNA, 19 nt, Artificial Sequence
  Description of Artificial Sequence: Synthetic oligonucleotide
cauuaaggcaagucaacaa

SEQ ID NO: 2999702 - RNA, 19 nt, Artificial Sequence
  Description of Artificial Sequence: Synthetic oligonucleotide
ugaccaugggaaaccugug

SEQ ID NO: 2999703 - RNA, 19 nt, Artificial Sequence
  Description of Artificial Sequence: Synthetic oligonucleotide
caugggaaaccuguguaac

SEQ ID NO: 2999704 - RNA, 19 nt, Artificial Sequence
  Description of Artificial Sequence: Synthetic oligonucleotide
augggaaaccuguguaacu

SEQ ID NO: 2999705 - RNA, 19 nt, Artificial Sequence
  Description of Artificial Sequence: Synthetic oligonucleotide
acuaagguccacagaucac

SEQ ID NO: 2999706 - RNA, 19 nt, Artificial Sequence
  Description of Artificial Sequence: Synthetic oligonucleotide
cuaagguccacagaucaca

SEQ ID NO: 2999707 - RNA, 19 nt, Artificial Sequence
  Description of Artificial Sequence: Synthetic oligonucleotide
cagauuuccuaacugucca

SEQ ID NO: 2999708 - RNA, 19 nt, Artificial Sequence
  Description of Artificial Sequence: Synthetic oligonucleotide
uccuaacuguccauagaau

SEQ ID NO: 2999709 - RNA, 19 nt, Artificial Sequence
  Description of Artificial Sequence: Synthetic oligonucleotide
aggcccuuugguuuaaaau

SEQ ID NO: 2999710 - RNA, 19 nt, Artificial Sequence
  Description of Artificial Sequence: Synthetic oligonucleotide
aucagguacagcagcugac

SEQ ID NO: 2999711 - RNA, 19 nt, Artificial Sequence
  Description of Artificial Sequence: Synthetic oligonucleotide
ucacuaagguccacagauc

SEQ ID NO: 2999712 - RNA, 19 nt, Artificial Sequence
  Description of Artificial Sequence: Synthetic oligonucleotide
ccagauuuccuaacugucc

SEQ ID NO: 2999713 - RNA, 19 nt, Artificial Sequence
  Description of Artificial Sequence: Synthetic oligonucleotide
ggcaaagucaaguguuuug

SEQ ID NO: 2999714 - RNA, 19 nt, Artificial Sequence
  Description of Artificial Sequence: Synthetic oligonucleotide
aagcuuccccuccucucag

SEQ ID NO: 2999715 - RNA, 19 nt, Artificial Sequence
  Description of Artificial Sequence: Synthetic oligonucleotide
ccuaaagcacaaaagguca

SEQ ID NO: 2999716 - RNA, 19 nt, Artificial Sequence
  Description of Artificial Sequence: Synthetic oligonucleotide
aucugacagcauuuaaaau

SEQ ID NO: 2999717 - RNA, 19 nt, Artificial Sequence
  Description of Artificial Sequence: Synthetic oligonucleotide
caagucaacaaaggaccag

SEQ ID NO: 2999718 - RNA, 19 nt, Artificial Sequence
  Description of Artificial Sequence: Synthetic oligonucleotide
accaugggaaaccugugua

SEQ ID NO: 2999719 - RNA, 19 nt, Artificial Sequence
  Description of Artificial Sequence: Synthetic oligonucleotide
accuguguaacuuccugua

SEQ ID NO: 2999720 - RNA, 19 nt, Artificial Sequence
  Description of Artificial Sequence: Synthetic oligonucleotide
gagucagaaacaagaagaa

SEQ ID NO: 2999721 - RNA, 19 nt, Artificial Sequence
  Description of Artificial Sequence: Synthetic oligonucleotide
uacagaacauaugcuugcu

SEQ ID NO: 2999722 - RNA, 19 nt, Artificial Sequence
  Description of Artificial Sequence: Synthetic oligonucleotide
ugcuugcuuugcaaugaac

SEQ ID NO: 2999723 - RNA, 19 nt, Artificial Sequence
  Description of Artificial Sequence: Synthetic oligonucleotide
aaggcccuuugguuuaaaa

SEQ ID NO: 2999724 - RNA, 19 nt, Artificial Sequence
  Description of Artificial Sequence: Synthetic oligonucleotide
ugggaaaccuguguaacuu

SEQ ID NO: 2999725 - RNA, 19 nt, Artificial Sequence
  Description of Artificial Sequence: Synthetic oligonucleotide
uugcuuugcaaugaaccua

SEQ ID NO: 2999726 - RNA, 19 nt, Artificial Sequence
  Description of Artificial Sequence: Synthetic oligonucleotide
agaucacaggaagcuuccc

SEQ ID NO: 2999727 - RNA, 19 nt, Artificial Sequence
  Description of Artificial Sequence: Synthetic oligonucleotide
cuagaagagucagaaacaa

SEQ ID NO: 2999728 - RNA, 19 nt, Artificial Sequence
  Description of Artificial Sequence: Synthetic oligonucleotide
uuccccuccucucaggcuu

SEQ ID NO: 2999729 - RNA, 19 nt, Artificial Sequence
  Description of Artificial Sequence: Synthetic oligonucleotide
gaauuacauucuggucugg

SEQ ID NO: 2999730 - RNA, 19 nt, Artificial Sequence
  Description of Artificial Sequence: Synthetic oligonucleotide
gcauugauguggcaaaguc

SEQ ID NO: 2999731 - RNA, 19 nt, Artificial Sequence
  Description of Artificial Sequence: Synthetic oligonucleotide
aagucacuucaauguaaua

SEQ ID NO: 2999732 - RNA, 19 nt, Artificial Sequence
  Description of Artificial Sequence: Synthetic oligonucleotide
uccucucaggcuucugugu

SEQ ID NO: 2999733 - RNA, 19 nt, Artificial Sequence
  Description of Artificial Sequence: Synthetic oligonucleotide
cuugcuuugcaaugaaccu

SEQ ID NO: 2999734 - RNA, 19 nt, Artificial Sequence
  Description of Artificial Sequence: Synthetic oligonucleotide
gguacagcagcugaccaug

SEQ ID NO: 2999735 - RNA, 19 nt, Artificial Sequence
  Description of Artificial Sequence: Synthetic oligonucleotide
guaaucugacagcauuuaa

SEQ ID NO: 2999736 - RNA, 19 nt, Artificial Sequence
  Description of Artificial Sequence: Synthetic oligonucleotide
agucagaaacaagaagaaa

SEQ ID NO: 2999737 - RNA, 19 nt, Artificial Sequence
  Description of Artificial Sequence: Synthetic oligonucleotide
cugaccaugggaaaccugu

SEQ ID NO: 2999738 - RNA, 19 nt, Artificial Sequence
  Description of Artificial Sequence: Synthetic oligonucleotide
ggaaaccuguguaacuucc

SEQ ID NO: 2999739 - RNA, 19 nt, Artificial Sequence
  Description of Artificial Sequence: Synthetic oligonucleotide
cuucaauguaauaaacaau

SEQ ID NO: 2999740 - RNA, 19 nt, Artificial Sequence
  Description of Artificial Sequence: Synthetic oligonucleotide
cuccucucaggcuucugug

SEQ ID NO: 2999741 - RNA, 19 nt, Artificial Sequence
  Description of Artificial Sequence: Synthetic oligonucleotide
caccuaaagcacaaaaggu

SEQ ID NO: 2999742 - RNA, 19 nt, Artificial Sequence
  Description of Artificial Sequence: Synthetic oligonucleotide
agauuuccuaacuguccau

SEQ ID NO: 2999743 - RNA, 19 nt, Artificial Sequence
  Description of Artificial Sequence: Synthetic oligonucleotide
caguaaggcaucagguaca

SEQ ID NO: 2999744 - RNA, 19 nt, Artificial Sequence
  Description of Artificial Sequence: Synthetic oligonucleotide
acagaacauaugcuugcuu

SEQ ID NO: 2999745 - RNA, 19 nt, Artificial Sequence
  Description of Artificial Sequence: Synthetic oligonucleotide
caucagguacagcagcuga

SEQ ID NO: 2999746 - RNA, 19 nt, Artificial Sequence
  Description of Artificial Sequence: Synthetic oligonucleotide
gauuuccuaacuguccaua

SEQ ID NO: 2999747 - RNA, 19 nt, Artificial Sequence
  Description of Artificial Sequence: Synthetic oligonucleotide
ucacaggaagcuuccccuc

SEQ ID NO: 2999748 - RNA, 19 nt, Artificial Sequence
  Description of Artificial Sequence: Synthetic oligonucleotide
ucacuucaagucacuucaa

SEQ ID NO: 2999749 - RNA, 19 nt, Artificial Sequence
  Description of Artificial Sequence: Synthetic oligonucleotide
gcuguacuagaagagucag

SEQ ID NO: 2999750 - RNA, 19 nt, Artificial Sequence
  Description of Artificial Sequence: Synthetic oligonucleotide
acuguccauagaauuacau

SEQ ID NO: 2999751 - RNA, 19 nt, Artificial Sequence
  Description of Artificial Sequence: Synthetic oligonucleotide
aucuuacaccuaaagcaca

SEQ ID NO: 2999752 - RNA, 19 nt, Artificial Sequence
  Description of Artificial Sequence: Synthetic oligonucleotide
ggucacuucaagucacuuc

SEQ ID NO: 2999753 - RNA, 19 nt, Artificial Sequence
  Description of Artificial Sequence: Synthetic oligonucleotide
cagaacauaugcuugcuuu

SEQ ID NO: 2999754 - RNA, 19 nt, Artificial Sequence
  Description of Artificial Sequence: Synthetic oligonucleotide
cuuugguuuaaaauuuauu

SEQ ID NO: 2999755 - RNA, 19 nt, Artificial Sequence
  Description of Artificial Sequence: Synthetic oligonucleotide
uccuguaaucugacagcau

SEQ ID NO: 2999756 - RNA, 19 nt, Artificial Sequence
  Description of Artificial Sequence: Synthetic oligonucleotide
accuaagccuccucacuaa

SEQ ID NO: 2999757 - RNA, 19 nt, Artificial Sequence
  Description of Artificial Sequence: Synthetic oligonucleotide
cagcugaccaugggaaacc

SEQ ID NO: 2999758 - RNA, 19 nt, Artificial Sequence
  Description of Artificial Sequence: Synthetic oligonucleotide
ucucaggcuucuguguaaa

SEQ ID NO: 2999759 - RNA, 19 nt, Artificial Sequence
  Description of Artificial Sequence: Synthetic oligonucleotide
aaggucacuucaagucacu

SEQ ID NO: 2999760 - RNA, 19 nt, Artificial Sequence
  Description of Artificial Sequence: Synthetic oligonucleotide
uuuuagcaucuuacaccua

SEQ ID NO: 2999761 - RNA, 19 nt, Artificial Sequence
  Description of Artificial Sequence: Synthetic oligonucleotide
aaggaccaguaaggcauca

SEQ ID NO: 2999762 - RNA, 19 nt, Artificial Sequence
  Description of Artificial Sequence: Synthetic oligonucleotide
agcuuccccuccucucagg

SEQ ID NO: 2999763 - RNA, 19 nt, Artificial Sequence
  Description of Artificial Sequence: Synthetic oligonucleotide
gaccaguaaggcaucaggu

SEQ ID NO: 2999764 - RNA, 19 nt, Artificial Sequence
  Description of Artificial Sequence: Synthetic oligonucleotide
cauaugcuugcuuugcaau

SEQ ID NO: 2999765 - RNA, 19 nt, Artificial Sequence
  Description of Artificial Sequence: Synthetic oligonucleotide
aggcauugauguggcaaag

SEQ ID NO: 2999766 - RNA, 19 nt, Artificial Sequence
  Description of Artificial Sequence: Synthetic oligonucleotide
agcagcugaccaugggaaa

SEQ ID NO: 2999767 - RNA, 19 nt, Artificial Sequence
  Description of Artificial Sequence: Synthetic oligonucleotide
cuguacuagaagagucaga

SEQ ID NO: 2999768 - RNA, 19 nt, Artificial Sequence
  Description of Artificial Sequence: Synthetic oligonucleotide
gaccaugggaaaccugugu

SEQ ID NO: 2999769 - RNA, 19 nt, Artificial Sequence
  Description of Artificial Sequence: Synthetic oligonucleotide
aggaccaguaaggcaucag

SEQ ID NO: 2999770 - RNA, 19 nt, Artificial Sequence
  Description of Artificial Sequence: Synthetic oligonucleotide
guacagcagcugaccaugg

SEQ ID NO: 2999771 - RNA, 19 nt, Artificial Sequence
  Description of Artificial Sequence: Synthetic oligonucleotide
caagucacuucaauguaau

SEQ ID NO: 2999772 - RNA, 19 nt, Artificial Sequence
  Description of Artificial Sequence: Synthetic oligonucleotide
guccauagaauuacauucu

SEQ ID NO: 2999773 - RNA, 19 nt, Artificial Sequence
  Description of Artificial Sequence: Synthetic oligonucleotide
augcuugcuuugcaaugaa

SEQ ID NO: 2999774 - RNA, 19 nt, Artificial Sequence
  Description of Artificial Sequence: Synthetic oligonucleotide
uucaggcauugauguggca

SEQ ID NO: 2999775 - RNA, 19 nt, Artificial Sequence
  Description of Artificial Sequence: Synthetic oligonucleotide
ggcccuuugguuuaaaauu

SEQ ID NO: 2999776 - RNA, 19 nt, Artificial Sequence
  Description of Artificial Sequence: Synthetic oligonucleotide
gcaaugaaccuaagccucc

SEQ ID NO: 2999777 - RNA, 19 nt, Artificial Sequence
  Description of Artificial Sequence: Synthetic oligonucleotide
cucaggcuucuguguaaac

SEQ ID NO: 2999778 - RNA, 19 nt, Artificial Sequence
  Description of Artificial Sequence: Synthetic oligonucleotide
cauuuaaaauucaggcauu

SEQ ID NO: 2999779 - RNA, 19 nt, Artificial Sequence
  Description of Artificial Sequence: Synthetic oligonucleotide
uggcaaagucaaguguuuu

SEQ ID NO: 2999780 - RNA, 19 nt, Artificial Sequence
  Description of Artificial Sequence: Synthetic oligonucleotide
cagguacagcagcugacca

SEQ ID NO: 2999781 - RNA, 19 nt, Artificial Sequence
  Description of Artificial Sequence: Synthetic oligonucleotide
cuguccauagaauuacauu

SEQ ID NO: 2999782 - RNA, 19 nt, Artificial Sequence
  Description of Artificial Sequence: Synthetic oligonucleotide
gggaaaccuguguaacuuc

SEQ ID NO: 2999783 - RNA, 19 nt, Artificial Sequence
  Description of Artificial Sequence: Synthetic oligonucleotide
gcuuccccuccucucaggc

SEQ ID NO: 2999784 - RNA, 19 nt, Artificial Sequence
  Description of Artificial Sequence: Synthetic oligonucleotide
guguaacuuccuguaaucu

SEQ ID NO: 2999785 - RNA, 19 nt, Artificial Sequence
  Description of Artificial Sequence: Synthetic oligonucleotide
gaaaccuguguaacuuccu

SEQ ID NO: 2999786 - RNA, 19 nt, Artificial Sequence
  Description of Artificial Sequence: Synthetic oligonucleotide
gcaaagucaaguguuuugu

SEQ ID NO: 2999787 - RNA, 19 nt, Artificial Sequence
  Description of Artificial Sequence: Synthetic oligonucleotide
ccuaagccuccucacuaag

SEQ ID NO: 2999788 - RNA, 19 nt, Artificial Sequence
  Description of Artificial Sequence: Synthetic oligonucleotide
agucaacaaaggaccagua

SEQ ID NO: 2999789 - RNA, 19 nt, Artificial Sequence
  Description of Artificial Sequence: Synthetic oligonucleotide
gcagcugaccaugggaaac

SEQ ID NO: 2999790 - RNA, 19 nt, Artificial Sequence
  Description of Artificial Sequence: Synthetic oligonucleotide
ggaaaggcccuuugguuua

SEQ ID NO: 2999791 - RNA, 19 nt, Artificial Sequence
  Description of Artificial Sequence: Synthetic oligonucleotide
agcugaccaugggaaaccu

SEQ ID NO: 2999792 - RNA, 19 nt, Artificial Sequence
  Description of Artificial Sequence: Synthetic oligonucleotide
cuguaaucugacagcauuu

SEQ ID NO: 2999793 - RNA, 19 nt, Artificial Sequence
  Description of Artificial Sequence: Synthetic oligonucleotide
ccauuaaggcaagucaaca

SEQ ID NO: 2999794 - RNA, 19 nt, Artificial Sequence
  Description of Artificial Sequence: Synthetic oligonucleotide
cucucaggcuucuguguaa

SEQ ID NO: 2999795 - RNA, 19 nt, Artificial Sequence
  Description of Artificial Sequence: Synthetic oligonucleotide
ccuaacuguccauagaauu

SEQ ID NO: 2999796 - RNA, 19 nt, Artificial Sequence
  Description of Artificial Sequence: Synthetic oligonucleotide
cuuacaccuaaagcacaaa

SEQ ID NO: 2999797 - RNA, 19 nt, Artificial Sequence
  Description of Artificial Sequence: Synthetic oligonucleotide
gcaagucaacaaaggacca

SEQ ID NO: 2999798 - RNA, 19 nt, Artificial Sequence
  Description of Artificial Sequence: Synthetic oligonucleotide
guaaggcaucagguacagc

SEQ ID NO: 2999799 - RNA, 19 nt, Artificial Sequence
  Description of Artificial Sequence: Synthetic oligonucleotide
aaaggcccuuugguuuaaa

SEQ ID NO: 2999800 - RNA, 19 nt, Artificial Sequence
  Description of Artificial Sequence: Synthetic oligonucleotide
cuccucacuaagguccaca

SEQ ID NO: 2999801 - RNA, 19 nt, Artificial Sequence
  Description of Artificial Sequence: Synthetic oligonucleotide
caaagucaaguguuuuguu

SEQ ID NO: 2999802 - RNA, 19 nt, Artificial Sequence
  Description of Artificial Sequence: Synthetic oligonucleotide
uccccuccucucaggcuuc

SEQ ID NO: 2999803 - RNA, 19 nt, Artificial Sequence
  Description of Artificial Sequence: Synthetic oligonucleotide
aggcuucuguguaaaccau

SEQ ID NO: 2999804 - RNA, 19 nt, Artificial Sequence
  Description of Artificial Sequence: Synthetic oligonucleotide
cacuucaagucacuucaau

SEQ ID NO: 2999805 - RNA, 19 nt, Artificial Sequence
  Description of Artificial Sequence: Synthetic oligonucleotide
ccaugggaaaccuguguaa

SEQ ID NO: 2999806 - RNA, 19 nt, Artificial Sequence
  Description of Artificial Sequence: Synthetic oligonucleotide
ccuguaaucugacagcauu

SEQ ID NO: 2999807 - RNA, 19 nt, Artificial Sequence
  Description of Artificial Sequence: Synthetic oligonucleotide
gaaaggcccuuugguuuaa

SEQ ID NO: 2999808 - RNA, 19 nt, Artificial Sequence
  Description of Artificial Sequence: Synthetic oligonucleotide
guaaaccauuaaggcaagu

SEQ ID NO: 2999809 - RNA, 19 nt, Artificial Sequence
  Description of Artificial Sequence: Synthetic oligonucleotide
caaugaaccuaagccuccu

SEQ ID NO: 2999810 - RNA, 19 nt, Artificial Sequence
  Description of Artificial Sequence: Synthetic oligonucleotide
gcugaccaugggaaaccug

SEQ ID NO: 2999811 - RNA, 19 nt, Artificial Sequence
  Description of Artificial Sequence: Synthetic oligonucleotide
ccuuugguuuaaaauuuau

SEQ ID NO: 2999812 - RNA, 19 nt, Artificial Sequence
  Description of Artificial Sequence: Synthetic oligonucleotide
gcuuugcaaugaaccuaag

SEQ ID NO: 2999813 - RNA, 19 nt, Artificial Sequence
  Description of Artificial Sequence: Synthetic oligonucleotide
gguccacagaucacaggaa

SEQ ID NO: 2999814 - RNA, 19 nt, Artificial Sequence
  Description of Artificial Sequence: Synthetic oligonucleotide
ggcaucagguacagcagcu

SEQ ID NO: 2999815 - RNA, 19 nt, Artificial Sequence
  Description of Artificial Sequence: Synthetic oligonucleotide
guggcaaagucaaguguuu

SEQ ID NO: 2999816 - RNA, 19 nt, Artificial Sequence
  Description of Artificial Sequence: Synthetic oligonucleotide
cuuccccuccucucaggcu

SEQ ID NO: 2999817 - RNA, 19 nt, Artificial Sequence
  Description of Artificial Sequence: Synthetic oligonucleotide
ggcauugauguggcaaagu

SEQ ID NO: 2999818 - RNA, 19 nt, Artificial Sequence
  Description of Artificial Sequence: Synthetic oligonucleotide
gcccuuugguuuaaaauuu

SEQ ID NO: 2999819 - RNA, 19 nt, Artificial Sequence
  Description of Artificial Sequence: Synthetic oligonucleotide
ccucacuaagguccacaga

SEQ ID NO: 2999820 - RNA, 19 nt, Artificial Sequence
  Description of Artificial Sequence: Synthetic oligonucleotide
ccucucaggcuucugugua

SEQ ID NO: 2999821 - RNA, 19 nt, Artificial Sequence
  Description of Artificial Sequence: Synthetic oligonucleotide
ggcuucuguguaaaccauu

SEQ ID NO: 2999822 - RNA, 19 nt, Artificial Sequence
  Description of Artificial Sequence: Synthetic oligonucleotide
ccuccucacuaagguccac

SEQ ID NO: 2999823 - RNA, 19 nt, Artificial Sequence
  Description of Artificial Sequence: Synthetic oligonucleotide
cccuccucucaggcuucug

SEQ ID NO: 2999824 - RNA, 19 nt, Artificial Sequence
  Description of Artificial Sequence: Synthetic oligonucleotide
ccccuccucucaggcuucu

SEQ ID NO: 2999825 - RNA, 19 nt, Artificial Sequence
  Description of Artificial Sequence: Synthetic oligonucleotide
aauuguagagcagaagagg

SEQ ID NO: 2999826 - RNA, 19 nt, Artificial Sequence
  Description of Artificial Sequence: Synthetic oligonucleotide
agcaucaacagccagagca

SEQ ID NO: 2999827 - RNA, 19 nt, Artificial Sequence
  Description of Artificial Sequence: Synthetic oligonucleotide
auuguagagcagaagaggc

SEQ ID NO: 2999828 - RNA, 19 nt, Artificial Sequence
  Description of Artificial Sequence: Synthetic oligonucleotide
gaucaagccgcacagcgcg

SEQ ID NO: 2999829 - RNA, 19 nt, Artificial Sequence
  Description of Artificial Sequence: Synthetic oligonucleotide
uuccacagagcccaaauug

SEQ ID NO: 2999830 - RNA, 19 nt, Artificial Sequence
  Description of Artificial Sequence: Synthetic oligonucleotide
aaauuguagagcagaagag

SEQ ID NO: 2999831 - RNA, 19 nt, Artificial Sequence
  Description of Artificial Sequence: Synthetic oligonucleotide
uguagagcagaagaggccc

SEQ ID NO: 2999832 - RNA, 19 nt, Artificial Sequence
  Description of Artificial Sequence: Synthetic oligonucleotide
gacagaucaagccgcacag

SEQ ID NO: 2999833 - RNA, 19 nt, Artificial Sequence
  Description of Artificial Sequence: Synthetic oligonucleotide
cagaucaagccgcacagcg

SEQ ID NO: 2999834 - RNA, 19 nt, Artificial Sequence
  Description of Artificial Sequence: Synthetic oligonucleotide
aaccccgcuaccucugcgc

SEQ ID NO: 2999835 - RNA, 19 nt, Artificial Sequence
  Description of Artificial Sequence: Synthetic oligonucleotide
ugcagcgacagaucaagcc

SEQ ID NO: 2999836 - RNA, 19 nt, Artificial Sequence
  Description of Artificial Sequence: Synthetic oligonucleotide
uuguagagcagaagaggcc

SEQ ID NO: 2999837 - RNA, 19 nt, Artificial Sequence
  Description of Artificial Sequence: Synthetic oligonucleotide
accgaagcccuccugcacc

SEQ ID NO: 2999838 - RNA, 19 nt, Artificial Sequence
  Description of Artificial Sequence: Synthetic oligonucleotide
gagcccaaauuguagagca

SEQ ID NO: 2999839 - RNA, 19 nt, Artificial Sequence
  Description of Artificial Sequence: Synthetic oligonucleotide
agagcccaaauuguagagc

SEQ ID NO: 2999840 - RNA, 19 nt, Artificial Sequence
  Description of Artificial Sequence: Synthetic oligonucleotide
aaccgaagcccuccugcac

SEQ ID NO: 2999841 - RNA, 19 nt, Artificial Sequence
  Description of Artificial Sequence: Synthetic oligonucleotide
aaggguggcaggcagccgu

SEQ ID NO: 2999842 - RNA, 19 nt, Artificial Sequence
  Description of Artificial Sequence: Synthetic oligonucleotide
ugagcggcuuccagcaccg

SEQ ID NO: 2999843 - RNA, 19 nt, Artificial Sequence
  Description of Artificial Sequence: Synthetic oligonucleotide
acagagcccaaauuguaga

SEQ ID NO: 2999844 - RNA, 19 nt, Artificial Sequence
  Description of Artificial Sequence: Synthetic oligonucleotide
gcagcgacagaucaagccg

SEQ ID NO: 2999845 - RNA, 19 nt, Artificial Sequence
  Description of Artificial Sequence: Synthetic oligonucleotide
cacagagcccaaauuguag

SEQ ID NO: 2999846 - RNA, 19 nt, Artificial Sequence
  Description of Artificial Sequence: Synthetic oligonucleotide
agaagaggcccuggaaggc

SEQ ID NO: 2999847 - RNA, 19 nt, Artificial Sequence
  Description of Artificial Sequence: Synthetic oligonucleotide
uggaaggcggccuggcggg

SEQ ID NO: 2999848 - RNA, 19 nt, Artificial Sequence
  Description of Artificial Sequence: Synthetic oligonucleotide
cagccguagaacuuccugc

SEQ ID NO: 2999849 - RNA, 19 nt, Artificial Sequence
  Description of Artificial Sequence: Synthetic oligonucleotide
agcagcgccgcagcgaacc

SEQ ID NO: 2999850 - RNA, 19 nt, Artificial Sequence
  Description of Artificial Sequence: Synthetic oligonucleotide
acugccagcaacguggccu

SEQ ID NO: 2999851 - RNA, 19 nt, Artificial Sequence
  Description of Artificial Sequence: Synthetic oligonucleotide
cuggaaggcggccuggcgg

SEQ ID NO: 2999852 - RNA, 19 nt, Artificial Sequence
  Description of Artificial Sequence: Synthetic oligonucleotide
gcagaagaggcccuggaag

SEQ ID NO: 2999853 - RNA, 19 nt, Artificial Sequence
  Description of Artificial Sequence: Synthetic oligonucleotide
gaagaggcccuggaaggcg

SEQ ID NO: 2999854 - RNA, 19 nt, Artificial Sequence
  Description of Artificial Sequence: Synthetic oligonucleotide
ugcaccugcgucugcagca

SEQ ID NO: 2999855 - RNA, 19 nt, Artificial Sequence
  Description of Artificial Sequence: Synthetic oligonucleotide
agaucaagccgcacagcgc

SEQ ID NO: 2999856 - RNA, 19 nt, Artificial Sequence
  Description of Artificial Sequence: Synthetic oligonucleotide
cagagcccaaauuguagag

SEQ ID NO: 2999857 - RNA, 19 nt, Artificial Sequence
  Description of Artificial Sequence: Synthetic oligonucleotide
cuaccucugcgcacgacgc

SEQ ID NO: 2999858 - RNA, 19 nt, Artificial Sequence
  Description of Artificial Sequence: Synthetic oligonucleotide
agccguagaacuuccugca

SEQ ID NO: 2999859 - RNA, 19 nt, Artificial Sequence
  Description of Artificial Sequence: Synthetic oligonucleotide
cagcgacagaucaagccgc

SEQ ID NO: 2999860 - RNA, 19 nt, Artificial Sequence
  Description of Artificial Sequence: Synthetic oligonucleotide
gcuaccucugcgcacgacg

SEQ ID NO: 2999861 - RNA, 19 nt, Artificial Sequence
  Description of Artificial Sequence: Synthetic oligonucleotide
agcagcaccggguccgggg

SEQ ID NO: 2999862 - RNA, 19 nt, Artificial Sequence
  Description of Artificial Sequence: Synthetic oligonucleotide
acagaucaagccgcacagc

SEQ ID NO: 2999863 - RNA, 19 nt, Artificial Sequence
  Description of Artificial Sequence: Synthetic oligonucleotide
cugagcggcuuccagcacc

SEQ ID NO: 2999864 - RNA, 19 nt, Artificial Sequence
  Description of Artificial Sequence: Synthetic oligonucleotide
gaagcccuccugcaccugc

SEQ ID NO: 2999865 - RNA, 19 nt, Artificial Sequence
  Description of Artificial Sequence: Synthetic oligonucleotide
ugaagggguggggcgaggg

SEQ ID NO: 2999866 - RNA, 19 nt, Artificial Sequence
  Description of Artificial Sequence: Synthetic oligonucleotide
aagaggcccuggaaggcgg

SEQ ID NO: 2999867 - RNA, 19 nt, Artificial Sequence
  Description of Artificial Sequence: Synthetic oligonucleotide
cagcaacguggccugagcg

SEQ ID NO: 2999868 - RNA, 19 nt, Artificial Sequence
  Description of Artificial Sequence: Synthetic oligonucleotide
aggcgguccgccacgaacc

SEQ ID NO: 2999869 - RNA, 19 nt, Artificial Sequence
  Description of Artificial Sequence: Synthetic oligonucleotide
agcaccgccgcuguuuccg

SEQ ID NO: 2999870 - RNA, 19 nt, Artificial Sequence
  Description of Artificial Sequence: Synthetic oligonucleotide
aagggguggggcgagggca

SEQ ID NO: 2999871 - RNA, 19 nt, Artificial Sequence
  Description of Artificial Sequence: Synthetic oligonucleotide
uaccucugcgcacgacgcg

SEQ ID NO: 2999872 - RNA, 19 nt, Artificial Sequence
  Description of Artificial Sequence: Synthetic oligonucleotide
aucaacagccagagcaguc

SEQ ID NO: 2999873 - RNA, 19 nt, Artificial Sequence
  Description of Artificial Sequence: Synthetic oligonucleotide
gcagcaucaacagccagag

SEQ ID NO: 2999874 - RNA, 19 nt, Artificial Sequence
  Description of Artificial Sequence: Synthetic oligonucleotide
cguagaacuuccugcaggg

SEQ ID NO: 2999875 - RNA, 19 nt, Artificial Sequence
  Description of Artificial Sequence: Synthetic oligonucleotide
gaaccccgcuaccucugcg

SEQ ID NO: 2999876 - RNA, 19 nt, Artificial Sequence
  Description of Artificial Sequence: Synthetic oligonucleotide
ucuucgggucgcagccgcg

SEQ ID NO: 2999877 - RNA, 19 nt, Artificial Sequence
  Description of Artificial Sequence: Synthetic oligonucleotide
agagcagaagaggcccugg

SEQ ID NO: 2999878 - RNA, 19 nt, Artificial Sequence
  Description of Artificial Sequence: Synthetic oligonucleotide
gaaccgaagcccuccugca

SEQ ID NO: 2999879 - RNA, 19 nt, Artificial Sequence
  Description of Artificial Sequence: Synthetic oligonucleotide
agcagucugaagggguggg

SEQ ID NO: 2999880 - RNA, 19 nt, Artificial Sequence
  Description of Artificial Sequence: Synthetic oligonucleotide
gagcagucugaaggggugg

SEQ ID NO: 2999881 - RNA, 19 nt, Artificial Sequence
  Description of Artificial Sequence: Synthetic oligonucleotide
agcagaagaggcccuggaa

SEQ ID NO: 2999882 - RNA, 19 nt, Artificial Sequence
  Description of Artificial Sequence: Synthetic oligonucleotide
aacuuccugcagggcuucc

SEQ ID NO: 2999883 - RNA, 19 nt, Artificial Sequence
  Description of Artificial Sequence: Synthetic oligonucleotide
uccgccacgaaccccgcua

SEQ ID NO: 2999884 - RNA, 19 nt, Artificial Sequence
  Description of Artificial Sequence: Synthetic oligonucleotide
ucugaagggguggggcgag

SEQ ID NO: 2999885 - RNA, 19 nt, Artificial Sequence
  Description of Artificial Sequence: Synthetic oligonucleotide
ucugcgcacgacgcgucgg

SEQ ID NO: 2999886 - RNA, 19 nt, Artificial Sequence
  Description of Artificial Sequence: Synthetic oligonucleotide
cucuucgggucgcagccgc

SEQ ID NO: 2999887 - RNA, 19 nt, Artificial Sequence
  Description of Artificial Sequence: Synthetic oligonucleotide
uagagcagaagaggcccug

SEQ ID NO: 2999888 - RNA, 19 nt, Artificial Sequence
  Description of Artificial Sequence: Synthetic oligonucleotide
aagccgcacagcgcgcagg

SEQ ID NO: 2999889 - RNA, 19 nt, Artificial Sequence
  Description of Artificial Sequence: Synthetic oligonucleotide
caacagccagagcagucug

SEQ ID NO: 2999890 - RNA, 19 nt, Artificial Sequence
  Description of Artificial Sequence: Synthetic oligonucleotide
uggccugagcggcuuccag

SEQ ID NO: 2999891 - RNA, 19 nt, Artificial Sequence
  Description of Artificial Sequence: Synthetic oligonucleotide
uucgggucgcagccgcgcc

SEQ ID NO: 2999892 - RNA, 19 nt, Artificial Sequence
  Description of Artificial Sequence: Synthetic oligonucleotide
acgaaggguggcaggcagc

SEQ ID NO: 2999893 - RNA, 19 nt, Artificial Sequence
  Description of Artificial Sequence: Synthetic oligonucleotide
aagcccuccugcaccugcg

SEQ ID NO: 2999894 - RNA, 19 nt, Artificial Sequence
  Description of Artificial Sequence: Synthetic oligonucleotide
gcaucaacagccagagcag

SEQ ID NO: 2999895 - RNA, 19 nt, Artificial Sequence
  Description of Artificial Sequence: Synthetic oligonucleotide
ucaagccgcacagcgcgca

SEQ ID NO: 2999896 - RNA, 19 nt, Artificial Sequence
  Description of Artificial Sequence: Synthetic oligonucleotide
caggcgguccgccacgaac

SEQ ID NO: 2999897 - RNA, 19 nt, Artificial Sequence
  Description of Artificial Sequence: Synthetic oligonucleotide
aacagccagagcagucuga

SEQ ID NO: 2999898 - RNA, 19 nt, Artificial Sequence
  Description of Artificial Sequence: Synthetic oligonucleotide
guagcagcgccgcagcgaa

SEQ ID NO: 2999899 - RNA, 19 nt, Artificial Sequence
  Description of Artificial Sequence: Synthetic oligonucleotide
cugccagcaacguggccug

SEQ ID NO: 2999900 - RNA, 19 nt, Artificial Sequence
  Description of Artificial Sequence: Synthetic oligonucleotide
gcagccguagaacuuccug

SEQ ID NO: 2999901 - RNA, 19 nt, Artificial Sequence
  Description of Artificial Sequence: Synthetic oligonucleotide
cugcgucugcagcagcacc

SEQ ID NO: 2999902 - RNA, 19 nt, Artificial Sequence
  Description of Artificial Sequence: Synthetic oligonucleotide
aggcagcaucaacagccag

SEQ ID NO: 2999903 - RNA, 19 nt, Artificial Sequence
  Description of Artificial Sequence: Synthetic oligonucleotide
acagcgcgcaggcgguccg

SEQ ID NO: 2999904 - RNA, 19 nt, Artificial Sequence
  Description of Artificial Sequence: Synthetic oligonucleotide
ccugcagcgacagaucaag

SEQ ID NO: 2999905 - RNA, 19 nt, Artificial Sequence
  Description of Artificial Sequence: Synthetic oligonucleotide
gagcagaagaggcccugga

SEQ ID NO: 2999906 - RNA, 19 nt, Artificial Sequence
  Description of Artificial Sequence: Synthetic oligonucleotide
gccgcagcgaaccgaagcc

SEQ ID NO: 2999907 - RNA, 19 nt, Artificial Sequence
  Description of Artificial Sequence: Synthetic oligonucleotide
guagaacuuccugcagggc

SEQ ID NO: 2999908 - RNA, 19 nt, Artificial Sequence
  Description of Artificial Sequence: Synthetic oligonucleotide
acagccagagcagucugaa

SEQ ID NO: 2999909 - RNA, 19 nt, Artificial Sequence
  Description of Artificial Sequence: Synthetic oligonucleotide
agaacuuccugcagggcuu

SEQ ID NO: 2999910 - RNA, 19 nt, Artificial Sequence
  Description of Artificial Sequence: Synthetic oligonucleotide
cugcagcgacagaucaagc

SEQ ID NO: 2999911 - RNA, 19 nt, Artificial Sequence
  Description of Artificial Sequence: Synthetic oligonucleotide
caggcagccguagaacuuc

SEQ ID NO: 2999912 - RNA, 19 nt, Artificial Sequence
  Description of Artificial Sequence: Synthetic oligonucleotide
gccucuucgggucgcagcc

SEQ ID NO: 2999913 - RNA, 19 nt, Artificial Sequence
  Description of Artificial Sequence: Synthetic oligonucleotide
ggcgagggcacgaagggug

SEQ ID NO: 2999914 - RNA, 19 nt, Artificial Sequence
  Description of Artificial Sequence: Synthetic oligonucleotide
aucaagccgcacagcgcgc

SEQ ID NO: 2999915 - RNA, 19 nt, Artificial Sequence
  Description of Artificial Sequence: Synthetic oligonucleotide
gaaggguggcaggcagccg

SEQ ID NO: 2999916 - RNA, 19 nt, Artificial Sequence
  Description of Artificial Sequence: Synthetic oligonucleotide
aggcagccguagaacuucc

SEQ ID NO: 2999917 - RNA, 19 nt, Artificial Sequence
  Description of Artificial Sequence: Synthetic oligonucleotide
guggcaggcagccguagaa

SEQ ID NO: 2999918 - RNA, 19 nt, Artificial Sequence
  Description of Artificial Sequence: Synthetic oligonucleotide
uggcaggcagccguagaac

SEQ ID NO: 2999919 - RNA, 19 nt, Artificial Sequence
  Description of Artificial Sequence: Synthetic oligonucleotide
cucugcgcacgacgcgucg

SEQ ID NO: 2999920 - RNA, 19 nt, Artificial Sequence
  Description of Artificial Sequence: Synthetic oligonucleotide
agggcacgaaggguggcag

SEQ ID NO: 2999921 - RNA, 19 nt, Artificial Sequence
  Description of Artificial Sequence: Synthetic oligonucleotide
gcaacguggccugagcggc

SEQ ID NO: 2999922 - RNA, 19 nt, Artificial Sequence
  Description of Artificial Sequence: Synthetic oligonucleotide
cuccgcgcgccucuucggg

SEQ ID NO: 2999923 - RNA, 19 nt, Artificial Sequence
  Description of Artificial Sequence: Synthetic oligonucleotide
ugcgcacgacgcgucggcg

SEQ ID NO: 2999924 - RNA, 19 nt, Artificial Sequence
  Description of Artificial Sequence: Synthetic oligonucleotide
acgcccugcagcgacagau

SEQ ID NO: 2999925 - RNA, 19 nt, Artificial Sequence
  Description of Artificial Sequence: Synthetic oligonucleotide
cgaaccgaagcccuccugc

SEQ ID NO: 2999926 - RNA, 19 nt, Artificial Sequence
  Description of Artificial Sequence: Synthetic oligonucleotide
uggccccgcgcguagcagc

SEQ ID NO: 2999927 - RNA, 19 nt, Artificial Sequence
  Description of Artificial Sequence: Synthetic oligonucleotide
accucugcgcacgacgcgu

SEQ ID NO: 2999928 - RNA, 19 nt, Artificial Sequence
  Description of Artificial Sequence: Synthetic oligonucleotide
gcggcuuccagcaccgccg

SEQ ID NO: 2999929 - RNA, 19 nt, Artificial Sequence
  Description of Artificial Sequence: Synthetic oligonucleotide
ggcacgaaggguggcaggc

SEQ ID NO: 2999930 - RNA, 19 nt, Artificial Sequence
  Description of Artificial Sequence: Synthetic oligonucleotide
agcgaaccgaagcccuccu

SEQ ID NO: 2999931 - RNA, 19 nt, Artificial Sequence
  Description of Artificial Sequence: Synthetic oligonucleotide
uccagcaccgccgcuguuu

SEQ ID NO: 2999932 - RNA, 19 nt, Artificial Sequence
  Description of Artificial Sequence: Synthetic oligonucleotide
cuucgggucgcagccgcgc

SEQ ID NO: 2999933 - RNA, 19 nt, Artificial Sequence
  Description of Artificial Sequence: Synthetic oligonucleotide
cagcgaaccgaagcccucc

SEQ ID NO: 2999934 - RNA, 19 nt, Artificial Sequence
  Description of Artificial Sequence: Synthetic oligonucleotide
agcccaaauuguagagcag

SEQ ID NO: 2999935 - RNA, 19 nt, Artificial Sequence
  Description of Artificial Sequence: Synthetic oligonucleotide
accccgcuaccucugcgca

SEQ ID NO: 2999936 - RNA, 19 nt, Artificial Sequence
  Description of Artificial Sequence: Synthetic oligonucleotide
ggcuccgcgcgccucuucg

SEQ ID NO: 2999937 - RNA, 19 nt, Artificial Sequence
  Description of Artificial Sequence: Synthetic oligonucleotide
cagccagagcagucugaag

SEQ ID NO: 2999938 - RNA, 19 nt, Artificial Sequence
  Description of Artificial Sequence: Synthetic oligonucleotide
ggccugagcggcuuccagc

SEQ ID NO: 2999939 - RNA, 19 nt, Artificial Sequence
  Description of Artificial Sequence: Synthetic oligonucleotide
accgccgcuguuuccgcgu

SEQ ID NO: 2999940 - RNA, 19 nt, Artificial Sequence
  Description of Artificial Sequence: Synthetic oligonucleotide
cugcgcacgacgcgucggc

SEQ ID NO: 2999941 - RNA, 19 nt, Artificial Sequence
  Description of Artificial Sequence: Synthetic oligonucleotide
gcccaaauuguagagcaga

SEQ ID NO: 2999942 - RNA, 19 nt, Artificial Sequence
  Description of Artificial Sequence: Synthetic oligonucleotide
caccacugccagcaacgug

SEQ ID NO: 2999943 - RNA, 19 nt, Artificial Sequence
  Description of Artificial Sequence: Synthetic oligonucleotide
acuuccugcagggcuucca

SEQ ID NO: 2999944 - RNA, 19 nt, Artificial Sequence
  Description of Artificial Sequence: Synthetic oligonucleotide
ugcggggccuggccccgcg

SEQ ID NO: 2999945 - RNA, 19 nt, Artificial Sequence
  Description of Artificial Sequence: Synthetic oligonucleotide
ggcagcaucaacagccaga

SEQ ID NO: 2999946 - RNA, 19 nt, Artificial Sequence
  Description of Artificial Sequence: Synthetic oligonucleotide
agcgcgcaggcgguccgcc

SEQ ID NO: 2999947 - RNA, 19 nt, Artificial Sequence
  Description of Artificial Sequence: Synthetic oligonucleotide
ccgcacagcgcgcaggcgg

SEQ ID NO: 2999948 - RNA, 19 nt, Artificial Sequence
  Description of Artificial Sequence: Synthetic oligonucleotide
gccguagaacuuccugcag

SEQ ID NO: 2999949 - RNA, 19 nt, Artificial Sequence
  Description of Artificial Sequence: Synthetic oligonucleotide
gccugagcggcuuccagca

SEQ ID NO: 2999950 - RNA, 19 nt, Artificial Sequence
  Description of Artificial Sequence: Synthetic oligonucleotide
gaacuuccugcagggcuuc

SEQ ID NO: 2999951 - RNA, 19 nt, Artificial Sequence
  Description of Artificial Sequence: Synthetic oligonucleotide
gagggcacgaaggguggca

SEQ ID NO: 2999952 - RNA, 19 nt, Artificial Sequence
  Description of Artificial Sequence: Synthetic oligonucleotide
agcaccggguccggggcuc

SEQ ID NO: 2999953 - RNA, 19 nt, Artificial Sequence
  Description of Artificial Sequence: Synthetic oligonucleotide
ggguccggggcuccgcgcg

SEQ ID NO: 2999954 - RNA, 19 nt, Artificial Sequence
  Description of Artificial Sequence: Synthetic oligonucleotide
uccgcgcgccucuucgggu

SEQ ID NO: 2999955 - RNA, 19 nt, Artificial Sequence
  Description of Artificial Sequence: Synthetic oligonucleotide
gcuuccagcaccgccgcug

SEQ ID NO: 2999956 - RNA, 19 nt, Artificial Sequence
  Description of Artificial Sequence: Synthetic oligonucleotide
caagccgcacagcgcgcag

SEQ ID NO: 2999957 - RNA, 19 nt, Artificial Sequence
  Description of Artificial Sequence: Synthetic oligonucleotide
caccgccgcuguuuccgcg

SEQ ID NO: 2999958 - RNA, 19 nt, Artificial Sequence
  Description of Artificial Sequence: Synthetic oligonucleotide
guggggcgagggcacgaag

SEQ ID NO: 2999959 - RNA, 19 nt, Artificial Sequence
  Description of Artificial Sequence: Synthetic oligonucleotide
gucugaagggguggggcga

SEQ ID NO: 2999960 - RNA, 19 nt, Artificial Sequence
  Description of Artificial Sequence: Synthetic oligonucleotide
aacguggccugagcggcuu

SEQ ID NO: 2999961 - RNA, 19 nt, Artificial Sequence
  Description of Artificial Sequence: Synthetic oligonucleotide
cacagcgcgcaggcggucc

SEQ ID NO: 2999962 - RNA, 19 nt, Artificial Sequence
  Description of Artificial Sequence: Synthetic oligonucleotide
cagcaucaacagccagagc

SEQ ID NO: 2999963 - RNA, 19 nt, Artificial Sequence
  Description of Artificial Sequence: Synthetic oligonucleotide
ucgcagccgcgccaccacu

SEQ ID NO: 2999964 - RNA, 19 nt, Artificial Sequence
  Description of Artificial Sequence: Synthetic oligonucleotide
cccgcuaccucugcgcacg

SEQ ID NO: 2999965 - RNA, 19 nt, Artificial Sequence
  Description of Artificial Sequence: Synthetic oligonucleotide
agcgacagaucaagccgca

SEQ ID NO: 2999966 - RNA, 19 nt, Artificial Sequence
  Description of Artificial Sequence: Synthetic oligonucleotide
cgguccgccacgaaccccg

SEQ ID NO: 2999967 - RNA, 19 nt, Artificial Sequence
  Description of Artificial Sequence: Synthetic oligonucleotide
gucgcagccgcgccaccac

SEQ ID NO: 2999968 - RNA, 19 nt, Artificial Sequence
  Description of Artificial Sequence: Synthetic oligonucleotide
gggcacgaaggguggcagg

SEQ ID NO: 2999969 - RNA, 19 nt, Artificial Sequence
  Description of Artificial Sequence: Synthetic oligonucleotide
ccagcaacguggccugagc

SEQ ID NO: 2999970 - RNA, 19 nt, Artificial Sequence
  Description of Artificial Sequence: Synthetic oligonucleotide
gaggcccuggaaggcggcc

SEQ ID NO: 2999971 - RNA, 19 nt, Artificial Sequence
  Description of Artificial Sequence: Synthetic oligonucleotide
accggguccggggcuccgc

SEQ ID NO: 2999972 - RNA, 19 nt, Artificial Sequence
  Description of Artificial Sequence: Synthetic oligonucleotide
acgaaccccgcuaccucug

SEQ ID NO: 2999973 - RNA, 19 nt, Artificial Sequence
  Description of Artificial Sequence: Synthetic oligonucleotide
cccaaauuguagagcagaa

SEQ ID NO: 2999974 - RNA, 19 nt, Artificial Sequence
  Description of Artificial Sequence: Synthetic oligonucleotide
cacugccagcaacguggcc

SEQ ID NO: 2999975 - RNA, 19 nt, Artificial Sequence
  Description of Artificial Sequence: Synthetic oligonucleotide
agcccuccugcaccugcgu

SEQ ID NO: 2999976 - RNA, 19 nt, Artificial Sequence
  Description of Artificial Sequence: Synthetic oligonucleotide
acgacgcgucggcgcggcc

SEQ ID NO: 2999977 - RNA, 19 nt, Artificial Sequence
  Description of Artificial Sequence: Synthetic oligonucleotide
cacgaaccccgcuaccucu

SEQ ID NO: 2999978 - RNA, 19 nt, Artificial Sequence
  Description of Artificial Sequence: Synthetic oligonucleotide
cugaagggguggggcgagg

SEQ ID NO: 2999979 - RNA, 19 nt, Artificial Sequence
  Description of Artificial Sequence: Synthetic oligonucleotide
ggcaggcagccguagaacu

SEQ ID NO: 2999980 - RNA, 19 nt, Artificial Sequence
  Description of Artificial Sequence: Synthetic oligonucleotide
cagccgcgccaccacugcc

SEQ ID NO: 2999981 - RNA, 19 nt, Artificial Sequence
  Description of Artificial Sequence: Synthetic oligonucleotide
agcgccgcagcgaaccgaa

SEQ ID NO: 2999982 - RNA, 19 nt, Artificial Sequence
  Description of Artificial Sequence: Synthetic oligonucleotide
agccgcgccaccacugcca

SEQ ID NO: 2999983 - RNA, 19 nt, Artificial Sequence
  Description of Artificial Sequence: Synthetic oligonucleotide
gcccugcagcgacagauca

SEQ ID NO: 2999984 - RNA, 19 nt, Artificial Sequence
  Description of Artificial Sequence: Synthetic oligonucleotide
gcgagggcacgaagggugg

SEQ ID NO: 2999985 - RNA, 19 nt, Artificial Sequence
  Description of Artificial Sequence: Synthetic oligonucleotide
ggggugcggggccuggccc

SEQ ID NO: 2999986 - RNA, 19 nt, Artificial Sequence
  Description of Artificial Sequence: Synthetic oligonucleotide
cacgacgcgucggcgcggc

SEQ ID NO: 2999987 - RNA, 19 nt, Artificial Sequence
  Description of Artificial Sequence: Synthetic oligonucleotide
aggcccuggaaggcggccu

SEQ ID NO: 2999988 - RNA, 19 nt, Artificial Sequence
  Description of Artificial Sequence: Synthetic oligonucleotide
ccacugccagcaacguggc

SEQ ID NO: 2999989 - RNA, 19 nt, Artificial Sequence
  Description of Artificial Sequence: Synthetic oligonucleotide
gcguagcagcgccgcagcg

SEQ ID NO: 2999990 - RNA, 19 nt, Artificial Sequence
  Description of Artificial Sequence: Synthetic oligonucleotide
cagcaccgccgcuguuucc

SEQ ID NO: 2999991 - RNA, 19 nt, Artificial Sequence
  Description of Artificial Sequence: Synthetic oligonucleotide
ggcgguccgccacgaaccc

SEQ ID NO: 2999992 - RNA, 19 nt, Artificial Sequence
  Description of Artificial Sequence: Synthetic oligonucleotide
gcagccgcgccaccacugc

SEQ ID NO: 2999993 - RNA, 19 nt, Artificial Sequence
  Description of Artificial Sequence: Synthetic oligonucleotide
cgacagaucaagccgcaca

SEQ ID NO: 2999994 - RNA, 19 nt, Artificial Sequence
  Description of Artificial Sequence: Synthetic oligonucleotide
gguggcaggcagccguaga

SEQ ID NO: 2999995 - RNA, 19 nt, Artificial Sequence
  Description of Artificial Sequence: Synthetic oligonucleotide
gggugcggggccuggcccc

SEQ ID NO: 2999996 - RNA, 19 nt, Artificial Sequence
  Description of Artificial Sequence: Synthetic oligonucleotide
gcuuccacagagcccaaau

SEQ ID NO: 2999997 - RNA, 19 nt, Artificial Sequence
  Description of Artificial Sequence: Synthetic oligonucleotide
gcagcgccgcagcgaaccg

SEQ ID NO: 2999998 - RNA, 19 nt, Artificial Sequence
  Description of Artificial Sequence: Synthetic oligonucleotide
caucaacagccagagcagu

SEQ ID NO: 2999999 - RNA, 19 nt, Artificial Sequence
  Description of Artificial Sequence: Synthetic oligonucleotide
guagagcagaagaggcccu

SEQ ID NO: 3000000 - RNA, 19 nt, Artificial Sequence
  Description of Artificial Sequence: Synthetic oligonucleotide
gcgcacgacgcgucggcgc

SEQ ID NO: 3000001 - RNA, 19 nt, Artificial Sequence
  Description of Artificial Sequence: Synthetic oligonucleotide
gccgcuguuuccgcguccc

SEQ ID NO: 3000002 - RNA, 19 nt, Artificial Sequence
  Description of Artificial Sequence: Synthetic oligonucleotide
gcuccgcgcgccucuucgg

SEQ ID NO: 3000003 - RNA, 19 nt, Artificial Sequence
  Description of Artificial Sequence: Synthetic oligonucleotide
cgccgcagcgaaccgaagc

SEQ ID NO: 3000004 - RNA, 19 nt, Artificial Sequence
  Description of Artificial Sequence: Synthetic oligonucleotide
ggcccuggaaggcggccug

SEQ ID NO: 3000005 - RNA, 19 nt, Artificial Sequence
  Description of Artificial Sequence: Synthetic oligonucleotide
gcgaaccgaagcccuccug

SEQ ID NO: 3000006 - RNA, 19 nt, Artificial Sequence
  Description of Artificial Sequence: Synthetic oligonucleotide
cgcacgacgcgucggcgcg

SEQ ID NO: 3000007 - RNA, 19 nt, Artificial Sequence
  Description of Artificial Sequence: Synthetic oligonucleotide
ccacagagcccaaauugua

SEQ ID NO: 3000008 - RNA, 19 nt, Artificial Sequence
  Description of Artificial Sequence: Synthetic oligonucleotide
gcgcguagcagcgccgcag

SEQ ID NO: 3000009 - RNA, 19 nt, Artificial Sequence
  Description of Artificial Sequence: Synthetic oligonucleotide
gccgcgccaccacugccag

SEQ ID NO: 3000010 - RNA, 19 nt, Artificial Sequence
  Description of Artificial Sequence: Synthetic oligonucleotide
uccggggcuccgcgcgccu

SEQ ID NO: 3000011 - RNA, 19 nt, Artificial Sequence
  Description of Artificial Sequence: Synthetic oligonucleotide
cuggccccgcgcguagcag

SEQ ID NO: 3000012 - RNA, 19 nt, Artificial Sequence
  Description of Artificial Sequence: Synthetic oligonucleotide
ggccccgcgcguagcagcg

SEQ ID NO: 3000013 - RNA, 19 nt, Artificial Sequence
  Description of Artificial Sequence: Synthetic oligonucleotide
ccacgaaccccgcuaccuc

SEQ ID NO: 3000014 - RNA, 19 nt, Artificial Sequence
  Description of Artificial Sequence: Synthetic oligonucleotide
cuuccagcaccgccgcugu

SEQ ID NO: 3000015 - RNA, 19 nt, Artificial Sequence
  Description of Artificial Sequence: Synthetic oligonucleotide
ccagcaccgccgcuguuuc

SEQ ID NO: 3000016 - RNA, 19 nt, Artificial Sequence
  Description of Artificial Sequence: Synthetic oligonucleotide
gcgcaggcgguccgccacg

SEQ ID NO: 3000017 - RNA, 19 nt, Artificial Sequence
  Description of Artificial Sequence: Synthetic oligonucleotide
ggugcggggccuggccccg

SEQ ID NO: 3000018 - RNA, 19 nt, Artificial Sequence
  Description of Artificial Sequence: Synthetic oligonucleotide
uuccagcaccgccgcuguu

SEQ ID NO: 3000019 - RNA, 19 nt, Artificial Sequence
  Description of Artificial Sequence: Synthetic oligonucleotide
ccgcagcgaaccgaagccc

SEQ ID NO: 3000020 - RNA, 19 nt, Artificial Sequence
  Description of Artificial Sequence: Synthetic oligonucleotide
cgccucuucgggucgcagc

SEQ ID NO: 3000021 - RNA, 19 nt, Artificial Sequence
  Description of Artificial Sequence: Synthetic oligonucleotide
ggaaggcggccuggcgggg

SEQ ID NO: 3000022 - RNA, 19 nt, Artificial Sequence
  Description of Artificial Sequence: Synthetic oligonucleotide
gcagcagcaccggguccgg

SEQ ID NO: 3000023 - RNA, 19 nt, Artificial Sequence
  Description of Artificial Sequence: Synthetic oligonucleotide
cagcagcaccggguccggg

SEQ ID NO: 3000024 - RNA, 19 nt, Artificial Sequence
  Description of Artificial Sequence: Synthetic oligonucleotide
ccuccugcaccugcgucug

SEQ ID NO: 3000025 - RNA, 19 nt, Artificial Sequence
  Description of Artificial Sequence: Synthetic oligonucleotide
ccugcgucugcagcagcac

SEQ ID NO: 3000026 - RNA, 19 nt, Artificial Sequence
  Description of Artificial Sequence: Synthetic oligonucleotide
cgcguagcagcgccgcagc

SEQ ID NO: 3000027 - RNA, 19 nt, Artificial Sequence
  Description of Artificial Sequence: Synthetic oligonucleotide
ccucuucgggucgcagccg

SEQ ID NO: 3000028 - RNA, 19 nt, Artificial Sequence
  Description of Artificial Sequence: Synthetic oligonucleotide
guggccugagcggcuucca

SEQ ID NO: 3000029 - RNA, 19 nt, Artificial Sequence
  Description of Artificial Sequence: Synthetic oligonucleotide
ccccgcgcguagcagcgcc

SEQ ID NO: 3000030 - RNA, 19 nt, Artificial Sequence
  Description of Artificial Sequence: Synthetic oligonucleotide
ccccacgcccugcagcgac

SEQ ID NO: 3000031 - RNA, 19 nt, Artificial Sequence
  Description of Artificial Sequence: Synthetic oligonucleotide
ccgccacgaaccccgcuac

SEQ ID NO: 3000032 - RNA, 19 nt, Artificial Sequence
  Description of Artificial Sequence: Synthetic oligonucleotide
gcaccgccgcuguuuccgc

SEQ ID NO: 3000033 - RNA, 19 nt, Artificial Sequence
  Description of Artificial Sequence: Synthetic oligonucleotide
gagcggcuuccagcaccgc

SEQ ID NO: 3000034 - RNA, 19 nt, Artificial Sequence
  Description of Artificial Sequence: Synthetic oligonucleotide
gccacgaaccccgcuaccu

SEQ ID NO: 3000035 - RNA, 19 nt, Artificial Sequence
  Description of Artificial Sequence: Synthetic oligonucleotide
gcagcgaaccgaagcccuc

SEQ ID NO: 3000036 - RNA, 19 nt, Artificial Sequence
  Description of Artificial Sequence: Synthetic oligonucleotide
gcgacagaucaagccgcac

SEQ ID NO: 3000037 - RNA, 19 nt, Artificial Sequence
  Description of Artificial Sequence: Synthetic oligonucleotide
ccucugcgcacgacgcguc

SEQ ID NO: 3000038 - RNA, 19 nt, Artificial Sequence
  Description of Artificial Sequence: Synthetic oligonucleotide
ggccuggccccgcgcguag

SEQ ID NO: 3000039 - RNA, 19 nt, Artificial Sequence
  Description of Artificial Sequence: Synthetic oligonucleotide
cccgcgcguagcagcgccg

SEQ ID NO: 3000040 - RNA, 19 nt, Artificial Sequence
  Description of Artificial Sequence: Synthetic oligonucleotide
ccggguccggggcuccgcg

SEQ ID NO: 3000041 - RNA, 19 nt, Artificial Sequence
  Description of Artificial Sequence: Synthetic oligonucleotide
gcccuccugcaccugcguc

SEQ ID NO: 3000042 - RNA, 19 nt, Artificial Sequence
  Description of Artificial Sequence: Synthetic oligonucleotide
cgaaccccgcuaccucugc

SEQ ID NO: 3000043 - RNA, 19 nt, Artificial Sequence
  Description of Artificial Sequence: Synthetic oligonucleotide
cagcgcgcaggcgguccgc

SEQ ID NO: 3000044 - RNA, 19 nt, Artificial Sequence
  Description of Artificial Sequence: Synthetic oligonucleotide
ccugagcggcuuccagcac

SEQ ID NO: 3000045 - RNA, 19 nt, Artificial Sequence
  Description of Artificial Sequence: Synthetic oligonucleotide
caccggguccggggcuccg

SEQ ID NO: 3000046 - RNA, 19 nt, Artificial Sequence
  Description of Artificial Sequence: Synthetic oligonucleotide
caacguggccugagcggcu

SEQ ID NO: 3000047 - RNA, 19 nt, Artificial Sequence
  Description of Artificial Sequence: Synthetic oligonucleotide
aggguggcaggcagccgua

SEQ ID NO: 3000048 - RNA, 19 nt, Artificial Sequence
  Description of Artificial Sequence: Synthetic oligonucleotide
ccacgcccugcagcgacag

SEQ ID NO: 3000049 - RNA, 19 nt, Artificial Sequence
  Description of Artificial Sequence: Synthetic oligonucleotide
cgcagccgcgccaccacug

SEQ ID NO: 3000050 - RNA, 19 nt, Artificial Sequence
  Description of Artificial Sequence: Synthetic oligonucleotide
gccgcacagcgcgcaggcg

SEQ ID NO: 3000051 - RNA, 19 nt, Artificial Sequence
  Description of Artificial Sequence: Synthetic oligonucleotide
ccgcgcgccucuucggguc

SEQ ID NO: 3000052 - RNA, 19 nt, Artificial Sequence
  Description of Artificial Sequence: Synthetic oligonucleotide
cagcgccgcagcgaaccga

SEQ ID NO: 3000053 - RNA, 19 nt, Artificial Sequence
  Description of Artificial Sequence: Synthetic oligonucleotide
ccccgcuaccucugcgcac

SEQ ID NO: 3000054 - RNA, 19 nt, Artificial Sequence
  Description of Artificial Sequence: Synthetic oligonucleotide
gcacgacgcgucggcgcgg

SEQ ID NO: 3000055 - RNA, 19 nt, Artificial Sequence
  Description of Artificial Sequence: Synthetic oligonucleotide
cgccaccacugccagcaac

SEQ ID NO: 3000056 - RNA, 19 nt, Artificial Sequence
  Description of Artificial Sequence: Synthetic oligonucleotide
cgcgcaggcgguccgccac

SEQ ID NO: 3000057 - RNA, 19 nt, Artificial Sequence
  Description of Artificial Sequence: Synthetic oligonucleotide
cggggccuggccccgcgcg

SEQ ID NO: 3000058 - RNA, 19 nt, Artificial Sequence
  Description of Artificial Sequence: Synthetic oligonucleotide
cggcuuccagcaccgccgc

SEQ ID NO: 3000059 - RNA, 19 nt, Artificial Sequence
  Description of Artificial Sequence: Synthetic oligonucleotide
gcgguccgccacgaacccc

SEQ ID NO: 3000060 - RNA, 19 nt, Artificial Sequence
  Description of Artificial Sequence: Synthetic oligonucleotide
cccugcagcgacagaucaa

SEQ ID NO: 3000061 - RNA, 19 nt, Artificial Sequence
  Description of Artificial Sequence: Synthetic oligonucleotide
ccgcgcguagcagcgccgc

SEQ ID NO: 3000062 - RNA, 19 nt, Artificial Sequence
  Description of Artificial Sequence: Synthetic oligonucleotide
cacgcccugcagcgacaga

SEQ ID NO: 3000063 - RNA, 19 nt, Artificial Sequence
  Description of Artificial Sequence: Synthetic oligonucleotide
gguggggcgagggcacgaa

SEQ ID NO: 3000064 - RNA, 19 nt, Artificial Sequence
  Description of Artificial Sequence: Synthetic oligonucleotide
cgcccugcagcgacagauc

SEQ ID NO: 3000065 - RNA, 19 nt, Artificial Sequence
  Description of Artificial Sequence: Synthetic oligonucleotide
ccgcuguuuccgcgucccc

SEQ ID NO: 3000066 - RNA, 19 nt, Artificial Sequence
  Description of Artificial Sequence: Synthetic oligonucleotide
cgcgcgccucuucgggucg

SEQ ID NO: 3000067 - RNA, 19 nt, Artificial Sequence
  Description of Artificial Sequence: Synthetic oligonucleotide
ggcuuccacagagcccaaa

SEQ ID NO: 3000068 - RNA, 19 nt, Artificial Sequence
  Description of Artificial Sequence: Synthetic oligonucleotide
gcgccucuucgggucgcag

SEQ ID NO: 3000069 - RNA, 19 nt, Artificial Sequence
  Description of Artificial Sequence: Synthetic oligonucleotide
gggucgcagccgcgccacc

SEQ ID NO: 3000070 - RNA, 19 nt, Artificial Sequence
  Description of Artificial Sequence: Synthetic oligonucleotide
ccuggccccgcgcguagca

SEQ ID NO: 3000071 - RNA, 19 nt, Artificial Sequence
  Description of Artificial Sequence: Synthetic oligonucleotide
cgccacgaaccccgcuacc

SEQ ID NO: 3000072 - RNA, 19 nt, Artificial Sequence
  Description of Artificial Sequence: Synthetic oligonucleotide
guccgccacgaaccccgcu

SEQ ID NO: 3000073 - RNA, 19 nt, Artificial Sequence
  Description of Artificial Sequence: Synthetic oligonucleotide
cgagggcacgaaggguggc

SEQ ID NO: 3000074 - RNA, 19 nt, Artificial Sequence
  Description of Artificial Sequence: Synthetic oligonucleotide
cgcagcgaaccgaagcccu

SEQ ID NO: 3000075 - RNA, 19 nt, Artificial Sequence
  Description of Artificial Sequence: Synthetic oligonucleotide
gcaggcagccguagaacuu

SEQ ID NO: 3000076 - RNA, 19 nt, Artificial Sequence
  Description of Artificial Sequence: Synthetic oligonucleotide
ggguggggcgagggcacga

SEQ ID NO: 3000077 - RNA, 19 nt, Artificial Sequence
  Description of Artificial Sequence: Synthetic oligonucleotide
cagcaccggguccggggcu

SEQ ID NO: 3000078 - RNA, 19 nt, Artificial Sequence
  Description of Artificial Sequence: Synthetic oligonucleotide
gcaccggguccggggcucc

SEQ ID NO: 3000079 - RNA, 19 nt, Artificial Sequence
  Description of Artificial Sequence: Synthetic oligonucleotide
cgccgcuguuuccgcgucc

SEQ ID NO: 3000080 - RNA, 19 nt, Artificial Sequence
  Description of Artificial Sequence: Synthetic oligonucleotide
ccgccgcuguuuccgcguc

SEQ ID NO: 3000081 - RNA, 19 nt, Artificial Sequence
  Description of Artificial Sequence: Synthetic oligonucleotide
gggcgagggcacgaagggu

SEQ ID NO: 3000082 - RNA, 19 nt, Artificial Sequence
  Description of Artificial Sequence: Synthetic oligonucleotide
cggguccggggcuccgcgc

SEQ ID NO: 3000083 - RNA, 19 nt, Artificial Sequence
  Description of Artificial Sequence: Synthetic oligonucleotide
gugcggggccuggccccgc

SEQ ID NO: 3000084 - RNA, 19 nt, Artificial Sequence
  Description of Artificial Sequence: Synthetic oligonucleotide
cccacgcccugcagcgaca

SEQ ID NO: 3000085 - RNA, 19 nt, Artificial Sequence
  Description of Artificial Sequence: Synthetic oligonucleotide
ggcagccguagaacuuccu

SEQ ID NO: 3000086 - RNA, 19 nt, Artificial Sequence
  Description of Artificial Sequence: Synthetic oligonucleotide
gcgcgcaggcgguccgcca

SEQ ID NO: 3000087 - RNA, 19 nt, Artificial Sequence
  Description of Artificial Sequence: Synthetic oligonucleotide
ccgcgccaccacugccagc

SEQ ID NO: 3000088 - RNA, 19 nt, Artificial Sequence
  Description of Artificial Sequence: Synthetic oligonucleotide
gggcuccgcgcgccucuuc

SEQ ID NO: 3000089 - RNA, 19 nt, Artificial Sequence
  Description of Artificial Sequence: Synthetic oligonucleotide
gcgccgcagcgaaccgaag

SEQ ID NO: 3000090 - RNA, 19 nt, Artificial Sequence
  Description of Artificial Sequence: Synthetic oligonucleotide
gccuggccccgcgcguagc

SEQ ID NO: 3000091 - RNA, 19 nt, Artificial Sequence
  Description of Artificial Sequence: Synthetic oligonucleotide
gcaggcgguccgccacgaa

SEQ ID NO: 3000092 - RNA, 19 nt, Artificial Sequence
  Description of Artificial Sequence: Synthetic oligonucleotide
gcgcgccucuucgggucgc

SEQ ID NO: 3000093 - RNA, 19 nt, Artificial Sequence
  Description of Artificial Sequence: Synthetic oligonucleotide
gcacagcgcgcaggcgguc

SEQ ID NO: 3000094 - RNA, 19 nt, Artificial Sequence
  Description of Artificial Sequence: Synthetic oligonucleotide
ggcuuccagcaccgccgcu

SEQ ID NO: 3000095 - RNA, 19 nt, Artificial Sequence
  Description of Artificial Sequence: Synthetic oligonucleotide
ggggccuggccccgcgcgu

SEQ ID NO: 3000096 - RNA, 19 nt, Artificial Sequence
  Description of Artificial Sequence: Synthetic oligonucleotide
cgcuaccucugcgcacgac

SEQ ID NO: 3000097 - RNA, 19 nt, Artificial Sequence
  Description of Artificial Sequence: Synthetic oligonucleotide
gccccgcgcguagcagcgc

SEQ ID NO: 3000098 - RNA, 19 nt, Artificial Sequence
  Description of Artificial Sequence: Synthetic oligonucleotide
gggccuggccccgcgcgua

SEQ ID NO: 3000099 - RNA, 19 nt, Artificial Sequence
  Description of Artificial Sequence: Synthetic oligonucleotide
ccaccacugccagcaacgu

SEQ ID NO: 3000100 - RNA, 19 nt, Artificial Sequence
  Description of Artificial Sequence: Synthetic oligonucleotide
cgcacagcgcgcaggcggu

SEQ ID NO: 3000101 - RNA, 19 nt, Artificial Sequence
  Description of Artificial Sequence: Synthetic oligonucleotide
gcgccaccacugccagcaa

SEQ ID NO: 3000102 - RNA, 19 nt, Artificial Sequence
  Description of Artificial Sequence: Synthetic oligonucleotide
ccgcuaccucugcgcacga

SEQ ID NO: 3000103 - RNA, 19 nt, Artificial Sequence
  Description of Artificial Sequence: Synthetic oligonucleotide
gggcuuccacagagcccaa

SEQ ID NO: 3000104 - RNA, 19 nt, Artificial Sequence
  Description of Artificial Sequence: Synthetic oligonucleotide
cgcgcguagcagcgccgca

SEQ ID NO: 3000105 - RNA, 19 nt, Artificial Sequence
  Description of Artificial Sequence: Synthetic oligonucleotide
ccggggcuccgcgcgccuc

SEQ ID NO: 3000106 - RNA, 19 nt, Artificial Sequence
  Description of Artificial Sequence: Synthetic oligonucleotide
cgcaggcgguccgccacga

SEQ ID NO: 3000107 - RNA, 19 nt, Artificial Sequence
  Description of Artificial Sequence: Synthetic oligonucleotide
cggggcuccgcgcgccucu

SEQ ID NO: 3000108 - RNA, 19 nt, Artificial Sequence
  Description of Artificial Sequence: Synthetic oligonucleotide
cgcgccucuucgggucgca

SEQ ID NO: 3000109 - RNA, 19 nt, Artificial Sequence
  Description of Artificial Sequence: Synthetic oligonucleotide
ggggcuccgcgcgccucuu

SEQ ID NO: 3000110 - RNA, 19 nt, Artificial Sequence
  Description of Artificial Sequence: Synthetic oligonucleotide
aaugccugcuaccucagcc

SEQ ID NO: 3000111 - RNA, 19 nt, Artificial Sequence
  Description of Artificial Sequence: Synthetic oligonucleotide
aacuacucgcuucuuagcc

SEQ ID NO: 3000112 - RNA, 19 nt, Artificial Sequence
  Description of Artificial Sequence: Synthetic oligonucleotide
ucuucagaaaccaaagugu

SEQ ID NO: 3000113 - RNA, 19 nt, Artificial Sequence
  Description of Artificial Sequence: Synthetic oligonucleotide
gauggcuucaacgugaugc

SEQ ID NO: 3000114 - RNA, 19 nt, Artificial Sequence
  Description of Artificial Sequence: Synthetic oligonucleotide
cauuuugauggcuucaacg

SEQ ID NO: 3000115 - RNA, 19 nt, Artificial Sequence
  Description of Artificial Sequence: Synthetic oligonucleotide
uguucuuuagcuucaguug

SEQ ID NO: 3000116 - RNA, 19 nt, Artificial Sequence
  Description of Artificial Sequence: Synthetic oligonucleotide
aaaccaaagugucugggcu

SEQ ID NO: 3000117 - RNA, 19 nt, Artificial Sequence
  Description of Artificial Sequence: Synthetic oligonucleotide
auuuugauggcuucaacgu

SEQ ID NO: 3000118 - RNA, 19 nt, Artificial Sequence
  Description of Artificial Sequence: Synthetic oligonucleotide
uucaacgugaugcugguac

SEQ ID NO: 3000119 - RNA, 19 nt, Artificial Sequence
  Description of Artificial Sequence: Synthetic oligonucleotide
uuugauggcuucaacguga

SEQ ID NO: 3000120 - RNA, 19 nt, Artificial Sequence
  Description of Artificial Sequence: Synthetic oligonucleotide
agccagaaaauucuguagg

SEQ ID NO: 3000121 - RNA, 19 nt, Artificial Sequence
  Description of Artificial Sequence: Synthetic oligonucleotide
acaaauuccucgaggaucc

SEQ ID NO: 3000122 - RNA, 19 nt, Artificial Sequence
  Description of Artificial Sequence: Synthetic oligonucleotide
aaguucacuaccugaagcu

SEQ ID NO: 3000123 - RNA, 19 nt, Artificial Sequence
  Description of Artificial Sequence: Synthetic oligonucleotide
cagaaaauucuguaggaag

SEQ ID NO: 3000124 - RNA, 19 nt, Artificial Sequence
  Description of Artificial Sequence: Synthetic oligonucleotide
ucagaaaccaaagugucug

SEQ ID NO: 3000125 - RNA, 19 nt, Artificial Sequence
  Description of Artificial Sequence: Synthetic oligonucleotide
ugaagcuggcuacagagca

SEQ ID NO: 3000126 - RNA, 19 nt, Artificial Sequence
  Description of Artificial Sequence: Synthetic oligonucleotide
gaaguucacuaccugaagc

SEQ ID NO: 3000127 - RNA, 19 nt, Artificial Sequence
  Description of Artificial Sequence: Synthetic oligonucleotide
gucuucagaaaccaaagug

SEQ ID NO: 3000128 - RNA, 19 nt, Artificial Sequence
  Description of Artificial Sequence: Synthetic oligonucleotide
acuaccugaagcuggcuac

SEQ ID NO: 3000129 - RNA, 19 nt, Artificial Sequence
  Description of Artificial Sequence: Synthetic oligonucleotide
ugugucuucagaaaccaaa

SEQ ID NO: 3000130 - RNA, 19 nt, Artificial Sequence
  Description of Artificial Sequence: Synthetic oligonucleotide
cuggagaugcucauaagcc

SEQ ID NO: 3000131 - RNA, 19 nt, Artificial Sequence
  Description of Artificial Sequence: Synthetic oligonucleotide
uauagguucuagaaugccu

SEQ ID NO: 3000132 - RNA, 19 nt, Artificial Sequence
  Description of Artificial Sequence: Synthetic oligonucleotide
uauggccugagucagggca

SEQ ID NO: 3000133 - RNA, 19 nt, Artificial Sequence
  Description of Artificial Sequence: Synthetic oligonucleotide
aagccuauagguucuagaa

SEQ ID NO: 3000134 - RNA, 19 nt, Artificial Sequence
  Description of Artificial Sequence: Synthetic oligonucleotide
gagaguuccucacaaauuc

SEQ ID NO: 3000135 - RNA, 19 nt, Artificial Sequence
  Description of Artificial Sequence: Synthetic oligonucleotide
guucuuuagcuucaguugc

SEQ ID NO: 3000136 - RNA, 19 nt, Artificial Sequence
  Description of Artificial Sequence: Synthetic oligonucleotide
aaagugucugggcucuggg

SEQ ID NO: 3000137 - RNA, 19 nt, Artificial Sequence
  Description of Artificial Sequence: Synthetic oligonucleotide
aaccaaagugucugggcuc

SEQ ID NO: 3000138 - RNA, 19 nt, Artificial Sequence
  Description of Artificial Sequence: Synthetic oligonucleotide
ggcaguaucuuccugagcc

SEQ ID NO: 3000139 - RNA, 19 nt, Artificial Sequence
  Description of Artificial Sequence: Synthetic oligonucleotide
uguaggaaguucacuaccu

SEQ ID NO: 3000140 - RNA, 19 nt, Artificial Sequence
  Description of Artificial Sequence: Synthetic oligonucleotide
uccauuguucuuuagcuuc

SEQ ID NO: 3000141 - RNA, 19 nt, Artificial Sequence
  Description of Artificial Sequence: Synthetic oligonucleotide
ugcuaccucagccaggacc

SEQ ID NO: 3000142 - RNA, 19 nt, Artificial Sequence
  Description of Artificial Sequence: Synthetic oligonucleotide
ucuaccugggguauggccu

SEQ ID NO: 3000143 - RNA, 19 nt, Artificial Sequence
  Description of Artificial Sequence: Synthetic oligonucleotide
gaaaccaaagugucugggc

SEQ ID NO: 3000144 - RNA, 19 nt, Artificial Sequence
  Description of Artificial Sequence: Synthetic oligonucleotide
cucauaagccuucuggagc

SEQ ID NO: 3000145 - RNA, 19 nt, Artificial Sequence
  Description of Artificial Sequence: Synthetic oligonucleotide
uagaaugccugcuaccuca

SEQ ID NO: 3000146 - RNA, 19 nt, Artificial Sequence
  Description of Artificial Sequence: Synthetic oligonucleotide
uuccucgaggauccgagcg

SEQ ID NO: 3000147 - RNA, 19 nt, Artificial Sequence
  Description of Artificial Sequence: Synthetic oligonucleotide
aagcuggcuacagagcagc

SEQ ID NO: 3000148 - RNA, 19 nt, Artificial Sequence
  Description of Artificial Sequence: Synthetic oligonucleotide
uuuagcuucaguugccuuc

SEQ ID NO: 3000149 - RNA, 19 nt, Artificial Sequence
  Description of Artificial Sequence: Synthetic oligonucleotide
ucugcaacuacucgcuucu

SEQ ID NO: 3000150 - RNA, 19 nt, Artificial Sequence
  Description of Artificial Sequence: Synthetic oligonucleotide
uggagcuccaagcacuucc

SEQ ID NO: 3000151 - RNA, 19 nt, Artificial Sequence
  Description of Artificial Sequence: Synthetic oligonucleotide
ucuuucuuccgagaguucc

SEQ ID NO: 3000152 - RNA, 19 nt, Artificial Sequence
  Description of Artificial Sequence: Synthetic oligonucleotide
ucauaagccuucuggagcu

SEQ ID NO: 3000153 - RNA, 19 nt, Artificial Sequence
  Description of Artificial Sequence: Synthetic oligonucleotide
acuugugucuucagaaacc

SEQ ID NO: 3000154 - RNA, 19 nt, Artificial Sequence
  Description of Artificial Sequence: Synthetic oligonucleotide
cuuccugcaagccuauagg

SEQ ID NO: 3000155 - RNA, 19 nt, Artificial Sequence
  Description of Artificial Sequence: Synthetic oligonucleotide
cuucuuagccuggagaugc

SEQ ID NO: 3000156 - RNA, 19 nt, Artificial Sequence
  Description of Artificial Sequence: Synthetic oligonucleotide
uccugagccagaaaauucu

SEQ ID NO: 3000157 - RNA, 19 nt, Artificial Sequence
  Description of Artificial Sequence: Synthetic oligonucleotide
cuucagaaaccaaaguguc

SEQ ID NO: 3000158 - RNA, 19 nt, Artificial Sequence
  Description of Artificial Sequence: Synthetic oligonucleotide
gagccagaaaauucuguag

SEQ ID NO: 3000159 - RNA, 19 nt, Artificial Sequence
  Description of Artificial Sequence: Synthetic oligonucleotide
ucuagaaugccugcuaccu

SEQ ID NO: 3000160 - RNA, 19 nt, Artificial Sequence
  Description of Artificial Sequence: Synthetic oligonucleotide
aauuccucgaggauccgag

SEQ ID NO: 3000161 - RNA, 19 nt, Artificial Sequence
  Description of Artificial Sequence: Synthetic oligonucleotide
guuucucugcaacuacucg

SEQ ID NO: 3000162 - RNA, 19 nt, Artificial Sequence
  Description of Artificial Sequence: Synthetic oligonucleotide
agaaaauucuguaggaagu

SEQ ID NO: 3000163 - RNA, 19 nt, Artificial Sequence
  Description of Artificial Sequence: Synthetic oligonucleotide
ucgacuugugucuucagaa

SEQ ID NO: 3000164 - RNA, 19 nt, Artificial Sequence
  Description of Artificial Sequence: Synthetic oligonucleotide
gacuugugucuucagaaac

SEQ ID NO: 3000165 - RNA, 19 nt, Artificial Sequence
  Description of Artificial Sequence: Synthetic oligonucleotide
ucaacgugaugcugguacg

SEQ ID NO: 3000166 - RNA, 19 nt, Artificial Sequence
  Description of Artificial Sequence: Synthetic oligonucleotide
uucagaaaccaaagugucu

SEQ ID NO: 3000167 - RNA, 19 nt, Artificial Sequence
  Description of Artificial Sequence: Synthetic oligonucleotide
ucuucuaccugggguaugg

SEQ ID NO: 3000168 - RNA, 19 nt, Artificial Sequence
  Description of Artificial Sequence: Synthetic oligonucleotide
aucuuccugagccagaaaa

SEQ ID NO: 3000169 - RNA, 19 nt, Artificial Sequence
  Description of Artificial Sequence: Synthetic oligonucleotide
acauuuugauggcuucaac

SEQ ID NO: 3000170 - RNA, 19 nt, Artificial Sequence
  Description of Artificial Sequence: Synthetic oligonucleotide
ucuguaggaaguucacuac

SEQ ID NO: 3000171 - RNA, 19 nt, Artificial Sequence
  Description of Artificial Sequence: Synthetic oligonucleotide
gccuauagguucuagaaug

SEQ ID NO: 3000172 - RNA, 19 nt, Artificial Sequence
  Description of Artificial Sequence: Synthetic oligonucleotide
uucuggagcuccaagcacu

SEQ ID NO: 3000173 - RNA, 19 nt, Artificial Sequence
  Description of Artificial Sequence: Synthetic oligonucleotide
uucuuuagcuucaguugcc

SEQ ID NO: 3000174 - RNA, 19 nt, Artificial Sequence
  Description of Artificial Sequence: Synthetic oligonucleotide
ugagccagaaaauucugua

SEQ ID NO: 3000175 - RNA, 19 nt, Artificial Sequence
  Description of Artificial Sequence: Synthetic oligonucleotide
uucacuaccugaagcuggc

SEQ ID NO: 3000176 - RNA, 19 nt, Artificial Sequence
  Description of Artificial Sequence: Synthetic oligonucleotide
agugucugggcucugggca

SEQ ID NO: 3000177 - RNA, 19 nt, Artificial Sequence
  Description of Artificial Sequence: Synthetic oligonucleotide
ugggguauggccugaguca

SEQ ID NO: 3000178 - RNA, 19 nt, Artificial Sequence
  Description of Artificial Sequence: Synthetic oligonucleotide
cuggcuacagagcagcuug

SEQ ID NO: 3000179 - RNA, 19 nt, Artificial Sequence
  Description of Artificial Sequence: Synthetic oligonucleotide
auagguucuagaaugccug

SEQ ID NO: 3000180 - RNA, 19 nt, Artificial Sequence
  Description of Artificial Sequence: Synthetic oligonucleotide
uucgacuugugucuucaga

SEQ ID NO: 3000181 - RNA, 19 nt, Artificial Sequence
  Description of Artificial Sequence: Synthetic oligonucleotide
uuagcuucaguugccuucc

SEQ ID NO: 3000182 - RNA, 19 nt, Artificial Sequence
  Description of Artificial Sequence: Synthetic oligonucleotide
agaaaccaaagugucuggg

SEQ ID NO: 3000183 - RNA, 19 nt, Artificial Sequence
  Description of Artificial Sequence: Synthetic oligonucleotide
uggagaugcucauaagccu

SEQ ID NO: 3000184 - RNA, 19 nt, Artificial Sequence
  Description of Artificial Sequence: Synthetic oligonucleotide
cucacaaauuccucgagga

SEQ ID NO: 3000185 - RNA, 19 nt, Artificial Sequence
  Description of Artificial Sequence: Synthetic oligonucleotide
ucaguugccuuccuucgac

SEQ ID NO: 3000186 - RNA, 19 nt, Artificial Sequence
  Description of Artificial Sequence: Synthetic oligonucleotide
uucuagaaugccugcuacc

SEQ ID NO: 3000187 - RNA, 19 nt, Artificial Sequence
  Description of Artificial Sequence: Synthetic oligonucleotide
cuguaggaaguucacuacc

SEQ ID NO: 3000188 - RNA, 19 nt, Artificial Sequence
  Description of Artificial Sequence: Synthetic oligonucleotide
uccucgaggauccgagcgg

SEQ ID NO: 3000189 - RNA, 19 nt, Artificial Sequence
  Description of Artificial Sequence: Synthetic oligonucleotide
agaguuccucacaaauucc

SEQ ID NO: 3000190 - RNA, 19 nt, Artificial Sequence
  Description of Artificial Sequence: Synthetic oligonucleotide
uucaguuccuuccauuguu

SEQ ID NO: 3000191 - RNA, 19 nt, Artificial Sequence
  Description of Artificial Sequence: Synthetic oligonucleotide
auaagccuucuggagcucc

SEQ ID NO: 3000192 - RNA, 19 nt, Artificial Sequence
  Description of Artificial Sequence: Synthetic oligonucleotide
uuccugagccagaaaauuc

SEQ ID NO: 3000193 - RNA, 19 nt, Artificial Sequence
  Description of Artificial Sequence: Synthetic oligonucleotide
cacaaauuccucgaggauc

SEQ ID NO: 3000194 - RNA, 19 nt, Artificial Sequence
  Description of Artificial Sequence: Synthetic oligonucleotide
guacguggccuucaguucc

SEQ ID NO: 3000195 - RNA, 19 nt, Artificial Sequence
  Description of Artificial Sequence: Synthetic oligonucleotide
uuccucacaaauuccucga

SEQ ID NO: 3000196 - RNA, 19 nt, Artificial Sequence
  Description of Artificial Sequence: Synthetic oligonucleotide
uucuaccugggguauggcc

SEQ ID NO: 3000197 - RNA, 19 nt, Artificial Sequence
  Description of Artificial Sequence: Synthetic oligonucleotide
uccaagcacuuccucuggg

SEQ ID NO: 3000198 - RNA, 19 nt, Artificial Sequence
  Description of Artificial Sequence: Synthetic oligonucleotide
acgugaugcugguacgugg

SEQ ID NO: 3000199 - RNA, 19 nt, Artificial Sequence
  Description of Artificial Sequence: Synthetic oligonucleotide
ugguacguggccuucaguu

SEQ ID NO: 3000200 - RNA, 19 nt, Artificial Sequence
  Description of Artificial Sequence: Synthetic oligonucleotide
auuccucgaggauccgagc

SEQ ID NO: 3000201 - RNA, 19 nt, Artificial Sequence
  Description of Artificial Sequence: Synthetic oligonucleotide
uuccugcaagccuauaggu

SEQ ID NO: 3000202 - RNA, 19 nt, Artificial Sequence
  Description of Artificial Sequence: Synthetic oligonucleotide
ucgcuucuuagccuggaga

SEQ ID NO: 3000203 - RNA, 19 nt, Artificial Sequence
  Description of Artificial Sequence: Synthetic oligonucleotide
ucuuccugagccagaaaau

SEQ ID NO: 3000204 - RNA, 19 nt, Artificial Sequence
  Description of Artificial Sequence: Synthetic oligonucleotide
gcaacuacucgcuucuuag

SEQ ID NO: 3000205 - RNA, 19 nt, Artificial Sequence
  Description of Artificial Sequence: Synthetic oligonucleotide
ugucuuucuuccgagaguu

SEQ ID NO: 3000206 - RNA, 19 nt, Artificial Sequence
  Description of Artificial Sequence: Synthetic oligonucleotide
uccucacaaauuccucgag

SEQ ID NO: 3000207 - RNA, 19 nt, Artificial Sequence
  Description of Artificial Sequence: Synthetic oligonucleotide
ucuuccgagaguuccucac

SEQ ID NO: 3000208 - RNA, 19 nt, Artificial Sequence
  Description of Artificial Sequence: Synthetic oligonucleotide
guucuagaaugccugcuac

SEQ ID NO: 3000209 - RNA, 19 nt, Artificial Sequence
  Description of Artificial Sequence: Synthetic oligonucleotide
gugucuucagaaaccaaag

SEQ ID NO: 3000210 - RNA, 19 nt, Artificial Sequence
  Description of Artificial Sequence: Synthetic oligonucleotide
ugggcaguaucuuccugag

SEQ ID NO: 3000211 - RNA, 19 nt, Artificial Sequence
  Description of Artificial Sequence: Synthetic oligonucleotide
ugcuucuuccugcaagccu

SEQ ID NO: 3000212 - RNA, 19 nt, Artificial Sequence
  Description of Artificial Sequence: Synthetic oligonucleotide
cucugcuucuuccugcaag

SEQ ID NO: 3000213 - RNA, 19 nt, Artificial Sequence
  Description of Artificial Sequence: Synthetic oligonucleotide
cuauagguucuagaaugcc

SEQ ID NO: 3000214 - RNA, 19 nt, Artificial Sequence
  Description of Artificial Sequence: Synthetic oligonucleotide
acuacucgcuucuuagccu

SEQ ID NO: 3000215 - RNA, 19 nt, Artificial Sequence
  Description of Artificial Sequence: Synthetic oligonucleotide
ccugaagcuggcuacagag

SEQ ID NO: 3000216 - RNA, 19 nt, Artificial Sequence
  Description of Artificial Sequence: Synthetic oligonucleotide
cagaaaccaaagugucugg

SEQ ID NO: 3000217 - RNA, 19 nt, Artificial Sequence
  Description of Artificial Sequence: Synthetic oligonucleotide
ucaguuccuuccauuguuc

SEQ ID NO: 3000218 - RNA, 19 nt, Artificial Sequence
  Description of Artificial Sequence: Synthetic oligonucleotide
cuacucgcuucuuagccug

SEQ ID NO: 3000219 - RNA, 19 nt, Artificial Sequence
  Description of Artificial Sequence: Synthetic oligonucleotide
agcuccaagcacuuccucu

SEQ ID NO: 3000220 - RNA, 19 nt, Artificial Sequence
  Description of Artificial Sequence: Synthetic oligonucleotide
ucacaaauuccucgaggau

SEQ ID NO: 3000221 - RNA, 19 nt, Artificial Sequence
  Description of Artificial Sequence: Synthetic oligonucleotide
uagguucuagaaugccugc

SEQ ID NO: 3000222 - RNA, 19 nt, Artificial Sequence
  Description of Artificial Sequence: Synthetic oligonucleotide
agucagggcacauuuugau

SEQ ID NO: 3000223 - RNA, 19 nt, Artificial Sequence
  Description of Artificial Sequence: Synthetic oligonucleotide
cuuccauuguucuuuagcu

SEQ ID NO: 3000224 - RNA, 19 nt, Artificial Sequence
  Description of Artificial Sequence: Synthetic oligonucleotide
guaggaaguucacuaccug

SEQ ID NO: 3000225 - RNA, 19 nt, Artificial Sequence
  Description of Artificial Sequence: Synthetic oligonucleotide
uucaguugccuuccuucga

SEQ ID NO: 3000226 - RNA, 19 nt, Artificial Sequence
  Description of Artificial Sequence: Synthetic oligonucleotide
agcuugucuuucuuccgag

SEQ ID NO: 3000227 - RNA, 19 nt, Artificial Sequence
  Description of Artificial Sequence: Synthetic oligonucleotide
ccuggagaugcucauaagc

SEQ ID NO: 3000228 - RNA, 19 nt, Artificial Sequence
  Description of Artificial Sequence: Synthetic oligonucleotide
auggcuucaacgugaugcu

SEQ ID NO: 3000229 - RNA, 19 nt, Artificial Sequence
  Description of Artificial Sequence: Synthetic oligonucleotide
uuccgagaguuccucacaa

SEQ ID NO: 3000230 - RNA, 19 nt, Artificial Sequence
  Description of Artificial Sequence: Synthetic oligonucleotide
cugaagcuggcuacagagc

SEQ ID NO: 3000231 - RNA, 19 nt, Artificial Sequence
  Description of Artificial Sequence: Synthetic oligonucleotide
caacuacucgcuucuuagc

SEQ ID NO: 3000232 - RNA, 19 nt, Artificial Sequence
  Description of Artificial Sequence: Synthetic oligonucleotide
aacgugaugcugguacgug

SEQ ID NO: 3000233 - RNA, 19 nt, Artificial Sequence
  Description of Artificial Sequence: Synthetic oligonucleotide
gucagggcacauuuugaug

SEQ ID NO: 3000234 - RNA, 19 nt, Artificial Sequence
  Description of Artificial Sequence: Synthetic oligonucleotide
ugccugcuaccucagccag

SEQ ID NO: 3000235 - RNA, 19 nt, Artificial Sequence
  Description of Artificial Sequence: Synthetic oligonucleotide
aguuccucacaaauuccuc

SEQ ID NO: 3000236 - RNA, 19 nt, Artificial Sequence
  Description of Artificial Sequence: Synthetic oligonucleotide
aaauuccucgaggauccga

SEQ ID NO: 3000237 - RNA, 19 nt, Artificial Sequence
  Description of Artificial Sequence: Synthetic oligonucleotide
aguucacuaccugaagcug

SEQ ID NO: 3000238 - RNA, 19 nt, Artificial Sequence
  Description of Artificial Sequence: Synthetic oligonucleotide
gaugcucauaagccuucug

SEQ ID NO: 3000239 - RNA, 19 nt, Artificial Sequence
  Description of Artificial Sequence: Synthetic oligonucleotide
ugcaacuacucgcuucuua

SEQ ID NO: 3000240 - RNA, 19 nt, Artificial Sequence
  Description of Artificial Sequence: Synthetic oligonucleotide
ucuuuagcuucaguugccu

SEQ ID NO: 3000241 - RNA, 19 nt, Artificial Sequence
  Description of Artificial Sequence: Synthetic oligonucleotide
auuguucuuuagcuucagu

SEQ ID NO: 3000242 - RNA, 19 nt, Artificial Sequence
  Description of Artificial Sequence: Synthetic oligonucleotide
ccugcaagccuauagguuc

SEQ ID NO: 3000243 - RNA, 19 nt, Artificial Sequence
  Description of Artificial Sequence: Synthetic oligonucleotide
cuuagccuggagaugcuca

SEQ ID NO: 3000244 - RNA, 19 nt, Artificial Sequence
  Description of Artificial Sequence: Synthetic oligonucleotide
gcucauaagccuucuggag

SEQ ID NO: 3000245 - RNA, 19 nt, Artificial Sequence
  Description of Artificial Sequence: Synthetic oligonucleotide
gguauggccugagucaggg

SEQ ID NO: 3000246 - RNA, 19 nt, Artificial Sequence
  Description of Artificial Sequence: Synthetic oligonucleotide
agccuauagguucuagaau

SEQ ID NO: 3000247 - RNA, 19 nt, Artificial Sequence
  Description of Artificial Sequence: Synthetic oligonucleotide
guugccuuccuucgacuug

SEQ ID NO: 3000248 - RNA, 19 nt, Artificial Sequence
  Description of Artificial Sequence: Synthetic oligonucleotide
ccuuccauuguucuuuagc

SEQ ID NO: 3000249 - RNA, 19 nt, Artificial Sequence
  Description of Artificial Sequence: Synthetic oligonucleotide
ggcuucaacgugaugcugg

SEQ ID NO: 3000250 - RNA, 19 nt, Artificial Sequence
  Description of Artificial Sequence: Synthetic oligonucleotide
uccugcaagccuauagguu

SEQ ID NO: 3000251 - RNA, 19 nt, Artificial Sequence
  Description of Artificial Sequence: Synthetic oligonucleotide
ggaaguucacuaccugaag

SEQ ID NO: 3000252 - RNA, 19 nt, Artificial Sequence
  Description of Artificial Sequence: Synthetic oligonucleotide
cucugcaacuacucgcuuc

SEQ ID NO: 3000253 - RNA, 19 nt, Artificial Sequence
  Description of Artificial Sequence: Synthetic oligonucleotide
uaagccuucuggagcucca

SEQ ID NO: 3000254 - RNA, 19 nt, Artificial Sequence
  Description of Artificial Sequence: Synthetic oligonucleotide
cuucuggagcuccaagcac

SEQ ID NO: 3000255 - RNA, 19 nt, Artificial Sequence
  Description of Artificial Sequence: Synthetic oligonucleotide
uuccauuguucuuuagcuu

SEQ ID NO: 3000256 - RNA, 19 nt, Artificial Sequence
  Description of Artificial Sequence: Synthetic oligonucleotide
ccuauagguucuagaaugc

SEQ ID NO: 3000257 - RNA, 19 nt, Artificial Sequence
  Description of Artificial Sequence: Synthetic oligonucleotide
agccuggagaugcucauaa

SEQ ID NO: 3000258 - RNA, 19 nt, Artificial Sequence
  Description of Artificial Sequence: Synthetic oligonucleotide
ucugggcaguaucuuccug

SEQ ID NO: 3000259 - RNA, 19 nt, Artificial Sequence
  Description of Artificial Sequence: Synthetic oligonucleotide
cuugugucuucagaaacca

SEQ ID NO: 3000260 - RNA, 19 nt, Artificial Sequence
  Description of Artificial Sequence: Synthetic oligonucleotide
uggccuucaguuccuucca

SEQ ID NO: 3000261 - RNA, 19 nt, Artificial Sequence
  Description of Artificial Sequence: Synthetic oligonucleotide
gaagcuggcuacagagcag

SEQ ID NO: 3000262 - RNA, 19 nt, Artificial Sequence
  Description of Artificial Sequence: Synthetic oligonucleotide
augccugcuaccucagcca

SEQ ID NO: 3000263 - RNA, 19 nt, Artificial Sequence
  Description of Artificial Sequence: Synthetic oligonucleotide
uacucgcuucuuagccugg

SEQ ID NO: 3000264 - RNA, 19 nt, Artificial Sequence
  Description of Artificial Sequence: Synthetic oligonucleotide
uuagccuggagaugcucau

SEQ ID NO: 3000265 - RNA, 19 nt, Artificial Sequence
  Description of Artificial Sequence: Synthetic oligonucleotide
acuuccucugggccucuuc

SEQ ID NO: 3000266 - RNA, 19 nt, Artificial Sequence
  Description of Artificial Sequence: Synthetic oligonucleotide
ccuuccuucgacuuguguc

SEQ ID NO: 3000267 - RNA, 19 nt, Artificial Sequence
  Description of Artificial Sequence: Synthetic oligonucleotide
caagccuauagguucuaga

SEQ ID NO: 3000268 - RNA, 19 nt, Artificial Sequence
  Description of Artificial Sequence: Synthetic oligonucleotide
caaagugucugggcucugg

SEQ ID NO: 3000269 - RNA, 19 nt, Artificial Sequence
  Description of Artificial Sequence: Synthetic oligonucleotide
ugaugcugguacguggccu

SEQ ID NO: 3000270 - RNA, 19 nt, Artificial Sequence
  Description of Artificial Sequence: Synthetic oligonucleotide
uugauggcuucaacgugau

SEQ ID NO: 3000271 - RNA, 19 nt, Artificial Sequence
  Description of Artificial Sequence: Synthetic oligonucleotide
uugccuuccuucgacuugu

SEQ ID NO: 3000272 - RNA, 19 nt, Artificial Sequence
  Description of Artificial Sequence: Synthetic oligonucleotide
cugggcaguaucuuccuga

SEQ ID NO: 3000273 - RNA, 19 nt, Artificial Sequence
  Description of Artificial Sequence: Synthetic oligonucleotide
aggaaguucacuaccugaa

SEQ ID NO: 3000274 - RNA, 19 nt, Artificial Sequence
  Description of Artificial Sequence: Synthetic oligonucleotide
caguaucuuccugagccag

SEQ ID NO: 3000275 - RNA, 19 nt, Artificial Sequence
  Description of Artificial Sequence: Synthetic oligonucleotide
ccuucaguuccuuccauug

SEQ ID NO: 3000276 - RNA, 19 nt, Artificial Sequence
  Description of Artificial Sequence: Synthetic oligonucleotide
cuagaaugccugcuaccuc

SEQ ID NO: 3000277 - RNA, 19 nt, Artificial Sequence
  Description of Artificial Sequence: Synthetic oligonucleotide
uucuuccgagaguuccuca

SEQ ID NO: 3000278 - RNA, 19 nt, Artificial Sequence
  Description of Artificial Sequence: Synthetic oligonucleotide
cuccaagcacuuccucugg

SEQ ID NO: 3000279 - RNA, 19 nt, Artificial Sequence
  Description of Artificial Sequence: Synthetic oligonucleotide
cagcucugcuucuuccugc

SEQ ID NO: 3000280 - RNA, 19 nt, Artificial Sequence
  Description of Artificial Sequence: Synthetic oligonucleotide
cuaccugggguauggccug

SEQ ID NO: 3000281 - RNA, 19 nt, Artificial Sequence
  Description of Artificial Sequence: Synthetic oligonucleotide
accaaagugucugggcucu

SEQ ID NO: 3000282 - RNA, 19 nt, Artificial Sequence
  Description of Artificial Sequence: Synthetic oligonucleotide
uugugucuucagaaaccaa

SEQ ID NO: 3000283 - RNA, 19 nt, Artificial Sequence
  Description of Artificial Sequence: Synthetic oligonucleotide
uuucuuccgagaguuccuc

SEQ ID NO: 3000284 - RNA, 19 nt, Artificial Sequence
  Description of Artificial Sequence: Synthetic oligonucleotide
aguuccuuccauuguucuu

SEQ ID NO: 3000285 - RNA, 19 nt, Artificial Sequence
  Description of Artificial Sequence: Synthetic oligonucleotide
ucgaggauccgagcgggca

SEQ ID NO: 3000286 - RNA, 19 nt, Artificial Sequence
  Description of Artificial Sequence: Synthetic oligonucleotide
aguugccuuccuucgacuu

SEQ ID NO: 3000287 - RNA, 19 nt, Artificial Sequence
  Description of Artificial Sequence: Synthetic oligonucleotide
gauccgagcgggcagcucu

SEQ ID NO: 3000288 - RNA, 19 nt, Artificial Sequence
  Description of Artificial Sequence: Synthetic oligonucleotide
gugucugggcucugggcag

SEQ ID NO: 3000289 - RNA, 19 nt, Artificial Sequence
  Description of Artificial Sequence: Synthetic oligonucleotide
auggccugagucagggcac

SEQ ID NO: 3000290 - RNA, 19 nt, Artificial Sequence
  Description of Artificial Sequence: Synthetic oligonucleotide
agccuucuggagcuccaag

SEQ ID NO: 3000291 - RNA, 19 nt, Artificial Sequence
  Description of Artificial Sequence: Synthetic oligonucleotide
ucuggagcuccaagcacuu

SEQ ID NO: 3000292 - RNA, 19 nt, Artificial Sequence
  Description of Artificial Sequence: Synthetic oligonucleotide
gagcgggcagcucugcuuc

SEQ ID NO: 3000293 - RNA, 19 nt, Artificial Sequence
  Description of Artificial Sequence: Synthetic oligonucleotide
agcucugcuucuuccugca

SEQ ID NO: 3000294 - RNA, 19 nt, Artificial Sequence
  Description of Artificial Sequence: Synthetic oligonucleotide
acagagcagcuugucuuuc

SEQ ID NO: 3000295 - RNA, 19 nt, Artificial Sequence
  Description of Artificial Sequence: Synthetic oligonucleotide
gcagcuugucuuucuuccg

SEQ ID NO: 3000296 - RNA, 19 nt, Artificial Sequence
  Description of Artificial Sequence: Synthetic oligonucleotide
uucuuagccuggagaugcu

SEQ ID NO: 3000297 - RNA, 19 nt, Artificial Sequence
  Description of Artificial Sequence: Synthetic oligonucleotide
uaccugaagcuggcuacag

SEQ ID NO: 3000298 - RNA, 19 nt, Artificial Sequence
  Description of Artificial Sequence: Synthetic oligonucleotide
gaaugccugcuaccucagc

SEQ ID NO: 3000299 - RNA, 19 nt, Artificial Sequence
  Description of Artificial Sequence: Synthetic oligonucleotide
uccuuccauuguucuuuag

SEQ ID NO: 3000300 - RNA, 19 nt, Artificial Sequence
  Description of Artificial Sequence: Synthetic oligonucleotide
cauuguucuuuagcuucag

SEQ ID NO: 3000301 - RNA, 19 nt, Artificial Sequence
  Description of Artificial Sequence: Synthetic oligonucleotide
gccagaaaauucuguagga

SEQ ID NO: 3000302 - RNA, 19 nt, Artificial Sequence
  Description of Artificial Sequence: Synthetic oligonucleotide
gccuucuggagcuccaagc

SEQ ID NO: 3000303 - RNA, 19 nt, Artificial Sequence
  Description of Artificial Sequence: Synthetic oligonucleotide
gaaaauucuguaggaaguu

SEQ ID NO: 3000304 - RNA, 19 nt, Artificial Sequence
  Description of Artificial Sequence: Synthetic oligonucleotide
ugauggcuucaacgugaug

SEQ ID NO: 3000305 - RNA, 19 nt, Artificial Sequence
  Description of Artificial Sequence: Synthetic oligonucleotide
gugaugcugguacguggcc

SEQ ID NO: 3000306 - RNA, 19 nt, Artificial Sequence
  Description of Artificial Sequence: Synthetic oligonucleotide
gagaugcucauaagccuuc

SEQ ID NO: 3000307 - RNA, 19 nt, Artificial Sequence
  Description of Artificial Sequence: Synthetic oligonucleotide
accugaagcuggcuacaga

SEQ ID NO: 3000308 - RNA, 19 nt, Artificial Sequence
  Description of Artificial Sequence: Synthetic oligonucleotide
agguucuagaaugccugcu

SEQ ID NO: 3000309 - RNA, 19 nt, Artificial Sequence
  Description of Artificial Sequence: Synthetic oligonucleotide
cucgcuucuuagccuggag

SEQ ID NO: 3000310 - RNA, 19 nt, Artificial Sequence
  Description of Artificial Sequence: Synthetic oligonucleotide
gaguuccucacaaauuccu

SEQ ID NO: 3000311 - RNA, 19 nt, Artificial Sequence
  Description of Artificial Sequence: Synthetic oligonucleotide
cuucgacuugugucuucag

SEQ ID NO: 3000312 - RNA, 19 nt, Artificial Sequence
  Description of Artificial Sequence: Synthetic oligonucleotide
uccgagaguuccucacaaa

SEQ ID NO: 3000313 - RNA, 19 nt, Artificial Sequence
  Description of Artificial Sequence: Synthetic oligonucleotide
uaucuuccugagccagaaa

SEQ ID NO: 3000314 - RNA, 19 nt, Artificial Sequence
  Description of Artificial Sequence: Synthetic oligonucleotide
gagucagggcacauuuuga

SEQ ID NO: 3000315 - RNA, 19 nt, Artificial Sequence
  Description of Artificial Sequence: Synthetic oligonucleotide
uggcuacagagcagcuugu

SEQ ID NO: 3000316 - RNA, 19 nt, Artificial Sequence
  Description of Artificial Sequence: Synthetic oligonucleotide
ucuuagccuggagaugcuc

SEQ ID NO: 3000317 - RNA, 19 nt, Artificial Sequence
  Description of Artificial Sequence: Synthetic oligonucleotide
ccaagcacuuccucugggc

SEQ ID NO: 3000318 - RNA, 19 nt, Artificial Sequence
  Description of Artificial Sequence: Synthetic oligonucleotide
gguacguggccuucaguuc

SEQ ID NO: 3000319 - RNA, 19 nt, Artificial Sequence
  Description of Artificial Sequence: Synthetic oligonucleotide
guaucuuccugagccagaa

SEQ ID NO: 3000320 - RNA, 19 nt, Artificial Sequence
  Description of Artificial Sequence: Synthetic oligonucleotide
agaaugccugcuaccucag

SEQ ID NO: 3000321 - RNA, 19 nt, Artificial Sequence
  Description of Artificial Sequence: Synthetic oligonucleotide
cugggcucugggcaguauc

SEQ ID NO: 3000322 - RNA, 19 nt, Artificial Sequence
  Description of Artificial Sequence: Synthetic oligonucleotide
aguaucuuccugagccaga

SEQ ID NO: 3000323 - RNA, 19 nt, Artificial Sequence
  Description of Artificial Sequence: Synthetic oligonucleotide
cagcuugucuuucuuccga

SEQ ID NO: 3000324 - RNA, 19 nt, Artificial Sequence
  Description of Artificial Sequence: Synthetic oligonucleotide
cuuccgagaguuccucaca

SEQ ID NO: 3000325 - RNA, 19 nt, Artificial Sequence
  Description of Artificial Sequence: Synthetic oligonucleotide
gggguauggccugagucag

SEQ ID NO: 3000326 - RNA, 19 nt, Artificial Sequence
  Description of Artificial Sequence: Synthetic oligonucleotide
uuccuuccauuguucuuua

SEQ ID NO: 3000327 - RNA, 19 nt, Artificial Sequence
  Description of Artificial Sequence: Synthetic oligonucleotide
cugcuucuuccugcaagcc

SEQ ID NO: 3000328 - RNA, 19 nt, Artificial Sequence
  Description of Artificial Sequence: Synthetic oligonucleotide
gcucugggcaguaucuucc

SEQ ID NO: 3000329 - RNA, 19 nt, Artificial Sequence
  Description of Artificial Sequence: Synthetic oligonucleotide
gguucuagaaugccugcua

SEQ ID NO: 3000330 - RNA, 19 nt, Artificial Sequence
  Description of Artificial Sequence: Synthetic oligonucleotide
uaccucagccaggaccucu

SEQ ID NO: 3000331 - RNA, 19 nt, Artificial Sequence
  Description of Artificial Sequence: Synthetic oligonucleotide
caaauuccucgaggauccg

SEQ ID NO: 3000332 - RNA, 19 nt, Artificial Sequence
  Description of Artificial Sequence: Synthetic oligonucleotide
agaugcucauaagccuucu

SEQ ID NO: 3000333 - RNA, 19 nt, Artificial Sequence
  Description of Artificial Sequence: Synthetic oligonucleotide
cgugaugcugguacguggc

SEQ ID NO: 3000334 - RNA, 19 nt, Artificial Sequence
  Description of Artificial Sequence: Synthetic oligonucleotide
cacauuuugauggcuucaa

SEQ ID NO: 3000335 - RNA, 19 nt, Artificial Sequence
  Description of Artificial Sequence: Synthetic oligonucleotide
ucucugcaacuacucgcuu

SEQ ID NO: 3000336 - RNA, 19 nt, Artificial Sequence
  Description of Artificial Sequence: Synthetic oligonucleotide
guauggccugagucagggc

SEQ ID NO: 3000337 - RNA, 19 nt, Artificial Sequence
  Description of Artificial Sequence: Synthetic oligonucleotide
cuuucuuccgagaguuccu

SEQ ID NO: 3000338 - RNA, 19 nt, Artificial Sequence
  Description of Artificial Sequence: Synthetic oligonucleotide
cucgaggauccgagcgggc

SEQ ID NO: 3000339 - RNA, 19 nt, Artificial Sequence
  Description of Artificial Sequence: Synthetic oligonucleotide
uccuucgacuugugucuuc

SEQ ID NO: 3000340 - RNA, 19 nt, Artificial Sequence
  Description of Artificial Sequence: Synthetic oligonucleotide
cugagccagaaaauucugu

SEQ ID NO: 3000341 - RNA, 19 nt, Artificial Sequence
  Description of Artificial Sequence: Synthetic oligonucleotide
gaugcugguacguggccuu

SEQ ID NO: 3000342 - RNA, 19 nt, Artificial Sequence
  Description of Artificial Sequence: Synthetic oligonucleotide
gagcuccaagcacuuccuc

SEQ ID NO: 3000343 - RNA, 19 nt, Artificial Sequence
  Description of Artificial Sequence: Synthetic oligonucleotide
agggcacauuuugauggcu

SEQ ID NO: 3000344 - RNA, 19 nt, Artificial Sequence
  Description of Artificial Sequence: Synthetic oligonucleotide
cacuaccugaagcuggcua

SEQ ID NO: 3000345 - RNA, 19 nt, Artificial Sequence
  Description of Artificial Sequence: Synthetic oligonucleotide
ugcugguacguggccuuca

SEQ ID NO: 3000346 - RNA, 19 nt, Artificial Sequence
  Description of Artificial Sequence: Synthetic oligonucleotide
cuucuaccugggguauggc

SEQ ID NO: 3000347 - RNA, 19 nt, Artificial Sequence
  Description of Artificial Sequence: Synthetic oligonucleotide
gcugguacguggccuucag

SEQ ID NO: 3000348 - RNA, 19 nt, Artificial Sequence
  Description of Artificial Sequence: Synthetic oligonucleotide
ccuucuggagcuccaagca

SEQ ID NO: 3000349 - RNA, 19 nt, Artificial Sequence
  Description of Artificial Sequence: Synthetic oligonucleotide
ggcucugggcaguaucuuc

SEQ ID NO: 3000350 - RNA, 19 nt, Artificial Sequence
  Description of Artificial Sequence: Synthetic oligonucleotide
aagccuucuggagcuccaa

SEQ ID NO: 3000351 - RNA, 19 nt, Artificial Sequence
  Description of Artificial Sequence: Synthetic oligonucleotide
ugccuuccuucgacuugug

SEQ ID NO: 3000352 - RNA, 19 nt, Artificial Sequence
  Description of Artificial Sequence: Synthetic oligonucleotide
gcaguaucuuccugagcca

SEQ ID NO: 3000353 - RNA, 19 nt, Artificial Sequence
  Description of Artificial Sequence: Synthetic oligonucleotide
uagcuucaguugccuuccu

SEQ ID NO: 3000354 - RNA, 19 nt, Artificial Sequence
  Description of Artificial Sequence: Synthetic oligonucleotide
ucacuaccugaagcuggcu

SEQ ID NO: 3000355 - RNA, 19 nt, Artificial Sequence
  Description of Artificial Sequence: Synthetic oligonucleotide
cuuccucugggccucuucu

SEQ ID NO: 3000356 - RNA, 19 nt, Artificial Sequence
  Description of Artificial Sequence: Synthetic oligonucleotide
gcuucuuccugcaagccua

SEQ ID NO: 3000357 - RNA, 19 nt, Artificial Sequence
  Description of Artificial Sequence: Synthetic oligonucleotide
uggccugagucagggcaca

SEQ ID NO: 3000358 - RNA, 19 nt, Artificial Sequence
  Description of Artificial Sequence: Synthetic oligonucleotide
augcugguacguggccuuc

SEQ ID NO: 3000359 - RNA, 19 nt, Artificial Sequence
  Description of Artificial Sequence: Synthetic oligonucleotide
ccauuguucuuuagcuuca

SEQ ID NO: 3000360 - RNA, 19 nt, Artificial Sequence
  Description of Artificial Sequence: Synthetic oligonucleotide
gcuacagagcagcuugucu

SEQ ID NO: 3000361 - RNA, 19 nt, Artificial Sequence
  Description of Artificial Sequence: Synthetic oligonucleotide
ccucugggccucuucuacc

SEQ ID NO: 3000362 - RNA, 19 nt, Artificial Sequence
  Description of Artificial Sequence: Synthetic oligonucleotide
acucgcuucuuagccugga

SEQ ID NO: 3000363 - RNA, 19 nt, Artificial Sequence
  Description of Artificial Sequence: Synthetic oligonucleotide
caguuccuuccauuguucu

SEQ ID NO: 3000364 - RNA, 19 nt, Artificial Sequence
  Description of Artificial Sequence: Synthetic oligonucleotide
gcuaccucagccaggaccu

SEQ ID NO: 3000365 - RNA, 19 nt, Artificial Sequence
  Description of Artificial Sequence: Synthetic oligonucleotide
ccucgaggauccgagcggg

SEQ ID NO: 3000366 - RNA, 19 nt, Artificial Sequence
  Description of Artificial Sequence: Synthetic oligonucleotide
gccuggagaugcucauaag

SEQ ID NO: 3000367 - RNA, 19 nt, Artificial Sequence
  Description of Artificial Sequence: Synthetic oligonucleotide
cucugggccucuucuaccu

SEQ ID NO: 3000368 - RNA, 19 nt, Artificial Sequence
  Description of Artificial Sequence: Synthetic oligonucleotide
cucuucuaccugggguaug

SEQ ID NO: 3000369 - RNA, 19 nt, Artificial Sequence
  Description of Artificial Sequence: Synthetic oligonucleotide
cuuccugagccagaaaauu

SEQ ID NO: 3000370 - RNA, 19 nt, Artificial Sequence
  Description of Artificial Sequence: Synthetic oligonucleotide
cauaagccuucuggagcuc

SEQ ID NO: 3000371 - RNA, 19 nt, Artificial Sequence
  Description of Artificial Sequence: Synthetic oligonucleotide
uuccuucgacuugugucuu

SEQ ID NO: 3000372 - RNA, 19 nt, Artificial Sequence
  Description of Artificial Sequence: Synthetic oligonucleotide
gcaagccuauagguucuag

SEQ ID NO: 3000373 - RNA, 19 nt, Artificial Sequence
  Description of Artificial Sequence: Synthetic oligonucleotide
cugcaagccuauagguucu

SEQ ID NO: 3000374 - RNA, 19 nt, Artificial Sequence
  Description of Artificial Sequence: Synthetic oligonucleotide
gcacauuuugauggcuuca

SEQ ID NO: 3000375 - RNA, 19 nt, Artificial Sequence
  Description of Artificial Sequence: Synthetic oligonucleotide
gggcaguaucuuccugagc

SEQ ID NO: 3000376 - RNA, 19 nt, Artificial Sequence
  Description of Artificial Sequence: Synthetic oligonucleotide
ccagaaaauucuguaggaa

SEQ ID NO: 3000377 - RNA, 19 nt, Artificial Sequence
  Description of Artificial Sequence: Synthetic oligonucleotide
ugcaagccuauagguucua

SEQ ID NO: 3000378 - RNA, 19 nt, Artificial Sequence
  Description of Artificial Sequence: Synthetic oligonucleotide
uccgagcgggcagcucugc

SEQ ID NO: 3000379 - RNA, 19 nt, Artificial Sequence
  Description of Artificial Sequence: Synthetic oligonucleotide
ccugcuaccucagccagga

SEQ ID NO: 3000380 - RNA, 19 nt, Artificial Sequence
  Description of Artificial Sequence: Synthetic oligonucleotide
agcgggcagcucugcuucu

SEQ ID NO: 3000381 - RNA, 19 nt, Artificial Sequence
  Description of Artificial Sequence: Synthetic oligonucleotide
gggccucuucuaccugggg

SEQ ID NO: 3000382 - RNA, 19 nt, Artificial Sequence
  Description of Artificial Sequence: Synthetic oligonucleotide
cuuuagcuucaguugccuu

SEQ ID NO: 3000383 - RNA, 19 nt, Artificial Sequence
  Description of Artificial Sequence: Synthetic oligonucleotide
accugggguauggccugag

SEQ ID NO: 3000384 - RNA, 19 nt, Artificial Sequence
  Description of Artificial Sequence: Synthetic oligonucleotide
ggguauggccugagucagg

SEQ ID NO: 3000385 - RNA, 19 nt, Artificial Sequence
  Description of Artificial Sequence: Synthetic oligonucleotide
ggagaugcucauaagccuu

SEQ ID NO: 3000386 - RNA, 19 nt, Artificial Sequence
  Description of Artificial Sequence: Synthetic oligonucleotide
cagagcagcuugucuuucu

SEQ ID NO: 3000387 - RNA, 19 nt, Artificial Sequence
  Description of Artificial Sequence: Synthetic oligonucleotide
aggauccgagcgggcagcu

SEQ ID NO: 3000388 - RNA, 19 nt, Artificial Sequence
  Description of Artificial Sequence: Synthetic oligonucleotide
gcuucaacgugaugcuggu

SEQ ID NO: 3000389 - RNA, 19 nt, Artificial Sequence
  Description of Artificial Sequence: Synthetic oligonucleotide
uucuuccugcaagccuaua

SEQ ID NO: 3000390 - RNA, 19 nt, Artificial Sequence
  Description of Artificial Sequence: Synthetic oligonucleotide
ucugggcucugggcaguau

SEQ ID NO: 3000391 - RNA, 19 nt, Artificial Sequence
  Description of Artificial Sequence: Synthetic oligonucleotide
cgaggauccgagcgggcag

SEQ ID NO: 3000392 - RNA, 19 nt, Artificial Sequence
  Description of Artificial Sequence: Synthetic oligonucleotide
auccgagcgggcagcucug

SEQ ID NO: 3000393 - RNA, 19 nt, Artificial Sequence
  Description of Artificial Sequence: Synthetic oligonucleotide
cucugggcaguaucuuccu

SEQ ID NO: 3000394 - RNA, 19 nt, Artificial Sequence
  Description of Artificial Sequence: Synthetic oligonucleotide
ggcuacagagcagcuuguc

SEQ ID NO: 3000395 - RNA, 19 nt, Artificial Sequence
  Description of Artificial Sequence: Synthetic oligonucleotide
agcuggcuacagagcagcu

SEQ ID NO: 3000396 - RNA, 19 nt, Artificial Sequence
  Description of Artificial Sequence: Synthetic oligonucleotide
caacgugaugcugguacgu

SEQ ID NO: 3000397 - RNA, 19 nt, Artificial Sequence
  Description of Artificial Sequence: Synthetic oligonucleotide
ccuucgacuugugucuuca

SEQ ID NO: 3000398 - RNA, 19 nt, Artificial Sequence
  Description of Artificial Sequence: Synthetic oligonucleotide
caguugccuuccuucgacu

SEQ ID NO: 3000399 - RNA, 19 nt, Artificial Sequence
  Description of Artificial Sequence: Synthetic oligonucleotide
gccugcuaccucagccagg

SEQ ID NO: 3000400 - RNA, 19 nt, Artificial Sequence
  Description of Artificial Sequence: Synthetic oligonucleotide
ccgagaguuccucacaaau

SEQ ID NO: 3000401 - RNA, 19 nt, Artificial Sequence
  Description of Artificial Sequence: Synthetic oligonucleotide
cugcuaccucagccaggac

SEQ ID NO: 3000402 - RNA, 19 nt, Artificial Sequence
  Description of Artificial Sequence: Synthetic oligonucleotide
cuucuuccugcaagccuau

SEQ ID NO: 3000403 - RNA, 19 nt, Artificial Sequence
  Description of Artificial Sequence: Synthetic oligonucleotide
cuaccucagccaggaccuc

SEQ ID NO: 3000404 - RNA, 19 nt, Artificial Sequence
  Description of Artificial Sequence: Synthetic oligonucleotide
cgacuugugucuucagaaa

SEQ ID NO: 3000405 - RNA, 19 nt, Artificial Sequence
  Description of Artificial Sequence: Synthetic oligonucleotide
cugagucagggcacauuuu

SEQ ID NO: 3000406 - RNA, 19 nt, Artificial Sequence
  Description of Artificial Sequence: Synthetic oligonucleotide
ggagcuccaagcacuuccu

SEQ ID NO: 3000407 - RNA, 19 nt, Artificial Sequence
  Description of Artificial Sequence: Synthetic oligonucleotide
cuucaacgugaugcuggua

SEQ ID NO: 3000408 - RNA, 19 nt, Artificial Sequence
  Description of Artificial Sequence: Synthetic oligonucleotide
cugguacguggccuucagu

SEQ ID NO: 3000409 - RNA, 19 nt, Artificial Sequence
  Description of Artificial Sequence: Synthetic oligonucleotide
cgcuucuuagccuggagau

SEQ ID NO: 3000410 - RNA, 19 nt, Artificial Sequence
  Description of Artificial Sequence: Synthetic oligonucleotide
cguggccuucaguuccuuc

SEQ ID NO: 3000411 - RNA, 19 nt, Artificial Sequence
  Description of Artificial Sequence: Synthetic oligonucleotide
gccuucaguuccuuccauu

SEQ ID NO: 3000412 - RNA, 19 nt, Artificial Sequence
  Description of Artificial Sequence: Synthetic oligonucleotide
cgagaguuccucacaaauu

SEQ ID NO: 3000413 - RNA, 19 nt, Artificial Sequence
  Description of Artificial Sequence: Synthetic oligonucleotide
gggcacauuuugauggcuu

SEQ ID NO: 3000414 - RNA, 19 nt, Artificial Sequence
  Description of Artificial Sequence: Synthetic oligonucleotide
gccuuccuucgacuugugu

SEQ ID NO: 3000415 - RNA, 19 nt, Artificial Sequence
  Description of Artificial Sequence: Synthetic oligonucleotide
ggauccgagcgggcagcuc

SEQ ID NO: 3000416 - RNA, 19 nt, Artificial Sequence
  Description of Artificial Sequence: Synthetic oligonucleotide
acguggccuucaguuccuu

SEQ ID NO: 3000417 - RNA, 19 nt, Artificial Sequence
  Description of Artificial Sequence: Synthetic oligonucleotide
cgggcagcucugcuucuuc

SEQ ID NO: 3000418 - RNA, 19 nt, Artificial Sequence
  Description of Artificial Sequence: Synthetic oligonucleotide
gucugggcucugggcagua

SEQ ID NO: 3000419 - RNA, 19 nt, Artificial Sequence
  Description of Artificial Sequence: Synthetic oligonucleotide
gcuggcuacagagcagcuu

SEQ ID NO: 3000420 - RNA, 19 nt, Artificial Sequence
  Description of Artificial Sequence: Synthetic oligonucleotide
ccugggguauggccugagu

SEQ ID NO: 3000421 - RNA, 19 nt, Artificial Sequence
  Description of Artificial Sequence: Synthetic oligonucleotide
ccucuucuaccugggguau

SEQ ID NO: 3000422 - RNA, 19 nt, Artificial Sequence
  Description of Artificial Sequence: Synthetic oligonucleotide
cugcaacuacucgcuucuu

SEQ ID NO: 3000423 - RNA, 19 nt, Artificial Sequence
  Description of Artificial Sequence: Synthetic oligonucleotide
gccugagucagggcacauu

SEQ ID NO: 3000424 - RNA, 19 nt, Artificial Sequence
  Description of Artificial Sequence: Synthetic oligonucleotide
gggcucugggcaguaucuu

SEQ ID NO: 3000425 - RNA, 19 nt, Artificial Sequence
  Description of Artificial Sequence: Synthetic oligonucleotide
cgagcgggcagcucugcuu

SEQ ID NO: 3000426 - RNA, 19 nt, Artificial Sequence
  Description of Artificial Sequence: Synthetic oligonucleotide
ccgagcgggcagcucugcu

SEQ ID NO: 3000427 - RNA, 19 nt, Artificial Sequence
  Description of Artificial Sequence: Synthetic oligonucleotide
ggccugagucagggcacau

SEQ ID NO: 3000428 - RNA, 19 nt, Artificial Sequence
  Description of Artificial Sequence: Synthetic oligonucleotide
gcgggcagcucugcuucuu

SEQ ID NO: 3000429 - RNA, 19 nt, Artificial Sequence
  Description of Artificial Sequence: Synthetic oligonucleotide
aauaaaagcaucuugcagc

SEQ ID NO: 3000430 - RNA, 19 nt, Artificial Sequence
  Description of Artificial Sequence: Synthetic oligonucleotide
uaaaauagcaauuaaauau

SEQ ID NO: 3000431 - RNA, 19 nt, Artificial Sequence
  Description of Artificial Sequence: Synthetic oligonucleotide
auaucuaguaaauaagccc

SEQ ID NO: 3000432 - RNA, 19 nt, Artificial Sequence
  Description of Artificial Sequence: Synthetic oligonucleotide
ucuaacuagaauaaaagca

SEQ ID NO: 3000433 - RNA, 19 nt, Artificial Sequence
  Description of Artificial Sequence: Synthetic oligonucleotide
uuuaaaauagcaauuaaau

SEQ ID NO: 3000434 - RNA, 19 nt, Artificial Sequence
  Description of Artificial Sequence: Synthetic oligonucleotide
aacuacaagacuaaagugc

SEQ ID NO: 3000435 - RNA, 19 nt, Artificial Sequence
  Description of Artificial Sequence: Synthetic oligonucleotide
guaaauaagccccaaaagg

SEQ ID NO: 3000436 - RNA, 19 nt, Artificial Sequence
  Description of Artificial Sequence: Synthetic oligonucleotide
uaaacuacaagacuaaagu

SEQ ID NO: 3000437 - RNA, 19 nt, Artificial Sequence
  Description of Artificial Sequence: Synthetic oligonucleotide
uaaauaagccccaaaaggc

SEQ ID NO: 3000438 - RNA, 19 nt, Artificial Sequence
  Description of Artificial Sequence: Synthetic oligonucleotide
uaucuaguaaauaagcccc

SEQ ID NO: 3000439 - RNA, 19 nt, Artificial Sequence
  Description of Artificial Sequence: Synthetic oligonucleotide
uagaauaaaagcaucuugc

SEQ ID NO: 3000440 - RNA, 19 nt, Artificial Sequence
  Description of Artificial Sequence: Synthetic oligonucleotide
uuauaucuaguaaauaagc

SEQ ID NO: 3000441 - RNA, 19 nt, Artificial Sequence
  Description of Artificial Sequence: Synthetic oligonucleotide
aacaaaggaacuaagaaug

SEQ ID NO: 3000442 - RNA, 19 nt, Artificial Sequence
  Description of Artificial Sequence: Synthetic oligonucleotide
aaaaggcuaaacuacaaga

SEQ ID NO: 3000443 - RNA, 19 nt, Artificial Sequence
  Description of Artificial Sequence: Synthetic oligonucleotide
uauaucuaguaaauaagcc

SEQ ID NO: 3000444 - RNA, 19 nt, Artificial Sequence
  Description of Artificial Sequence: Synthetic oligonucleotide
auagcaauuaaauauacaa

SEQ ID NO: 3000445 - RNA, 19 nt, Artificial Sequence
  Description of Artificial Sequence: Synthetic oligonucleotide
aguuccuuaacacugguag

SEQ ID NO: 3000446 - RNA, 19 nt, Artificial Sequence
  Description of Artificial Sequence: Synthetic oligonucleotide
aagacuaaagugccacucc

SEQ ID NO: 3000447 - RNA, 19 nt, Artificial Sequence
  Description of Artificial Sequence: Synthetic oligonucleotide
aaaggaacuaagaaugugg

SEQ ID NO: 3000448 - RNA, 19 nt, Artificial Sequence
  Description of Artificial Sequence: Synthetic oligonucleotide
uacaucaugucuuugaaac

SEQ ID NO: 3000449 - RNA, 19 nt, Artificial Sequence
  Description of Artificial Sequence: Synthetic oligonucleotide
aguuauaucuaguaaauaa

SEQ ID NO: 3000450 - RNA, 19 nt, Artificial Sequence
  Description of Artificial Sequence: Synthetic oligonucleotide
ugaacaaaggaacuaagaa

SEQ ID NO: 3000451 - RNA, 19 nt, Artificial Sequence
  Description of Artificial Sequence: Synthetic oligonucleotide
aaaggcuaaacuacaagac

SEQ ID NO: 3000452 - RNA, 19 nt, Artificial Sequence
  Description of Artificial Sequence: Synthetic oligonucleotide
aguaaauaagccccaaaag

SEQ ID NO: 3000453 - RNA, 19 nt, Artificial Sequence
  Description of Artificial Sequence: Synthetic oligonucleotide
aaacuacaagacuaaagug

SEQ ID NO: 3000454 - RNA, 19 nt, Artificial Sequence
  Description of Artificial Sequence: Synthetic oligonucleotide
aauguggauacuugcuugg

SEQ ID NO: 3000455 - RNA, 19 nt, Artificial Sequence
  Description of Artificial Sequence: Synthetic oligonucleotide
uguacaaacagucuaugaa

SEQ ID NO: 3000456 - RNA, 19 nt, Artificial Sequence
  Description of Artificial Sequence: Synthetic oligonucleotide
auucuuaguguacaaacag

SEQ ID NO: 3000457 - RNA, 19 nt, Artificial Sequence
  Description of Artificial Sequence: Synthetic oligonucleotide
gaauaaaagcaucuugcag

SEQ ID NO: 3000458 - RNA, 19 nt, Artificial Sequence
  Description of Artificial Sequence: Synthetic oligonucleotide
gaauucuuaguguacaaac

SEQ ID NO: 3000459 - RNA, 19 nt, Artificial Sequence
  Description of Artificial Sequence: Synthetic oligonucleotide
aaauagcaauuaaauauac

SEQ ID NO: 3000460 - RNA, 19 nt, Artificial Sequence
  Description of Artificial Sequence: Synthetic oligonucleotide
acuacaagacuaaagugcc

SEQ ID NO: 3000461 - RNA, 19 nt, Artificial Sequence
  Description of Artificial Sequence: Synthetic oligonucleotide
aaaauauucugcugcagaa

SEQ ID NO: 3000462 - RNA, 19 nt, Artificial Sequence
  Description of Artificial Sequence: Synthetic oligonucleotide
uuaaaauagcaauuaaaua

SEQ ID NO: 3000463 - RNA, 19 nt, Artificial Sequence
  Description of Artificial Sequence: Synthetic oligonucleotide
ucuuaguguacaaacaguc

SEQ ID NO: 3000464 - RNA, 19 nt, Artificial Sequence
  Description of Artificial Sequence: Synthetic oligonucleotide
acaaacagucuaugaaacc

SEQ ID NO: 3000465 - RNA, 19 nt, Artificial Sequence
  Description of Artificial Sequence: Synthetic oligonucleotide
uaguaaauaagccccaaaa

SEQ ID NO: 3000466 - RNA, 19 nt, Artificial Sequence
  Description of Artificial Sequence: Synthetic oligonucleotide
aauauucugcugcagaauu

SEQ ID NO: 3000467 - RNA, 19 nt, Artificial Sequence
  Description of Artificial Sequence: Synthetic oligonucleotide
agucuaugaaaccugaggu

SEQ ID NO: 3000468 - RNA, 19 nt, Artificial Sequence
  Description of Artificial Sequence: Synthetic oligonucleotide
guuauaucuaguaaauaag

SEQ ID NO: 3000469 - RNA, 19 nt, Artificial Sequence
  Description of Artificial Sequence: Synthetic oligonucleotide
aaggcuaaacuacaagacu

SEQ ID NO: 3000470 - RNA, 19 nt, Artificial Sequence
  Description of Artificial Sequence: Synthetic oligonucleotide
ugcugcagaauucuuagug

SEQ ID NO: 3000471 - RNA, 19 nt, Artificial Sequence
  Description of Artificial Sequence: Synthetic oligonucleotide
uaagaauguggauacuugc

SEQ ID NO: 3000472 - RNA, 19 nt, Artificial Sequence
  Description of Artificial Sequence: Synthetic oligonucleotide
gaacuaagaauguggauac

SEQ ID NO: 3000473 - RNA, 19 nt, Artificial Sequence
  Description of Artificial Sequence: Synthetic oligonucleotide
uuaguguacaaacagucua

SEQ ID NO: 3000474 - RNA, 19 nt, Artificial Sequence
  Description of Artificial Sequence: Synthetic oligonucleotide
uacaaacagucuaugaaac

SEQ ID NO: 3000475 - RNA, 19 nt, Artificial Sequence
  Description of Artificial Sequence: Synthetic oligonucleotide
acuugcuuggucuaacuag

SEQ ID NO: 3000476 - RNA, 19 nt, Artificial Sequence
  Description of Artificial Sequence: Synthetic oligonucleotide
ucugcugcagaauucuuag

SEQ ID NO: 3000477 - RNA, 19 nt, Artificial Sequence
  Description of Artificial Sequence: Synthetic oligonucleotide
cuagaauaaaagcaucuug

SEQ ID NO: 3000478 - RNA, 19 nt, Artificial Sequence
  Description of Artificial Sequence: Synthetic oligonucleotide
uuccuuaacacugguaggg

SEQ ID NO: 3000479 - RNA, 19 nt, Artificial Sequence
  Description of Artificial Sequence: Synthetic oligonucleotide
ugaaaccugagguucagca

SEQ ID NO: 3000480 - RNA, 19 nt, Artificial Sequence
  Description of Artificial Sequence: Synthetic oligonucleotide
uggguucuaaagcugaaca

SEQ ID NO: 3000481 - RNA, 19 nt, Artificial Sequence
  Description of Artificial Sequence: Synthetic oligonucleotide
gucuaacuagaauaaaagc

SEQ ID NO: 3000482 - RNA, 19 nt, Artificial Sequence
  Description of Artificial Sequence: Synthetic oligonucleotide
cacaaguuccuuaacacug

SEQ ID NO: 3000483 - RNA, 19 nt, Artificial Sequence
  Description of Artificial Sequence: Synthetic oligonucleotide
aaaauagcaauuaaauaua

SEQ ID NO: 3000484 - RNA, 19 nt, Artificial Sequence
  Description of Artificial Sequence: Synthetic oligonucleotide
ugugaacaaaggaacuaag

SEQ ID NO: 3000485 - RNA, 19 nt, Artificial Sequence
  Description of Artificial Sequence: Synthetic oligonucleotide
uguucuuagcuacaucaug

SEQ ID NO: 3000486 - RNA, 19 nt, Artificial Sequence
  Description of Artificial Sequence: Synthetic oligonucleotide
agcaacuuggguucuaaag

SEQ ID NO: 3000487 - RNA, 19 nt, Artificial Sequence
  Description of Artificial Sequence: Synthetic oligonucleotide
agaauaaaagcaucuugca

SEQ ID NO: 3000488 - RNA, 19 nt, Artificial Sequence
  Description of Artificial Sequence: Synthetic oligonucleotide
uucucaaccgcacaaguuc

SEQ ID NO: 3000489 - RNA, 19 nt, Artificial Sequence
  Description of Artificial Sequence: Synthetic oligonucleotide
auaaaagcaucuugcagca

SEQ ID NO: 3000490 - RNA, 19 nt, Artificial Sequence
  Description of Artificial Sequence: Synthetic oligonucleotide
cuuugaaacagcaggggug

SEQ ID NO: 3000491 - RNA, 19 nt, Artificial Sequence
  Description of Artificial Sequence: Synthetic oligonucleotide
gaauguggauacuugcuug

SEQ ID NO: 3000492 - RNA, 19 nt, Artificial Sequence
  Description of Artificial Sequence: Synthetic oligonucleotide
ucuuugaaacagcaggggu

SEQ ID NO: 3000493 - RNA, 19 nt, Artificial Sequence
  Description of Artificial Sequence: Synthetic oligonucleotide
ucuaugaaaccugagguuc

SEQ ID NO: 3000494 - RNA, 19 nt, Artificial Sequence
  Description of Artificial Sequence: Synthetic oligonucleotide
cagucuaugaaaccugagg

SEQ ID NO: 3000495 - RNA, 19 nt, Artificial Sequence
  Description of Artificial Sequence: Synthetic oligonucleotide
uggucuaacuagaauaaaa

SEQ ID NO: 3000496 - RNA, 19 nt, Artificial Sequence
  Description of Artificial Sequence: Synthetic oligonucleotide
cuaaagcugaacaugaaaa

SEQ ID NO: 3000497 - RNA, 19 nt, Artificial Sequence
  Description of Artificial Sequence: Synthetic oligonucleotide
aauucuuaguguacaaaca

SEQ ID NO: 3000498 - RNA, 19 nt, Artificial Sequence
  Description of Artificial Sequence: Synthetic oligonucleotide
cuaagaauguggauacuug

SEQ ID NO: 3000499 - RNA, 19 nt, Artificial Sequence
  Description of Artificial Sequence: Synthetic oligonucleotide
aacuagaauaaaagcaucu

SEQ ID NO: 3000500 - RNA, 19 nt, Artificial Sequence
  Description of Artificial Sequence: Synthetic oligonucleotide
aaauaagccccaaaaggcu

SEQ ID NO: 3000501 - RNA, 19 nt, Artificial Sequence
  Description of Artificial Sequence: Synthetic oligonucleotide
aaaccugagguucagcauu

SEQ ID NO: 3000502 - RNA, 19 nt, Artificial Sequence
  Description of Artificial Sequence: Synthetic oligonucleotide
uucuuaguguacaaacagu

SEQ ID NO: 3000503 - RNA, 19 nt, Artificial Sequence
  Description of Artificial Sequence: Synthetic oligonucleotide
caucaugucuuugaaacag

SEQ ID NO: 3000504 - RNA, 19 nt, Artificial Sequence
  Description of Artificial Sequence: Synthetic oligonucleotide
ucuugcagcaacuuggguu

SEQ ID NO: 3000505 - RNA, 19 nt, Artificial Sequence
  Description of Artificial Sequence: Synthetic oligonucleotide
uaacuagaauaaaagcauc

SEQ ID NO: 3000506 - RNA, 19 nt, Artificial Sequence
  Description of Artificial Sequence: Synthetic oligonucleotide
ucuuagcuacaucaugucu

SEQ ID NO: 3000507 - RNA, 19 nt, Artificial Sequence
  Description of Artificial Sequence: Synthetic oligonucleotide
cuugcagcaacuuggguuc

SEQ ID NO: 3000508 - RNA, 19 nt, Artificial Sequence
  Description of Artificial Sequence: Synthetic oligonucleotide
uugagggaguuauaucuag

SEQ ID NO: 3000509 - RNA, 19 nt, Artificial Sequence
  Description of Artificial Sequence: Synthetic oligonucleotide
caaaaggcuaaacuacaag

SEQ ID NO: 3000510 - RNA, 19 nt, Artificial Sequence
  Description of Artificial Sequence: Synthetic oligonucleotide
aauagcaauuaaauauaca

SEQ ID NO: 3000511 - RNA, 19 nt, Artificial Sequence
  Description of Artificial Sequence: Synthetic oligonucleotide
uuugaaacagcaggggugu

SEQ ID NO: 3000512 - RNA, 19 nt, Artificial Sequence
  Description of Artificial Sequence: Synthetic oligonucleotide
ucucaaccgcacaaguucc

SEQ ID NO: 3000513 - RNA, 19 nt, Artificial Sequence
  Description of Artificial Sequence: Synthetic oligonucleotide
uacaagacuaaagugccac

SEQ ID NO: 3000514 - RNA, 19 nt, Artificial Sequence
  Description of Artificial Sequence: Synthetic oligonucleotide
acagcagggguguucuccc

SEQ ID NO: 3000515 - RNA, 19 nt, Artificial Sequence
  Description of Artificial Sequence: Synthetic oligonucleotide
ugacccugugaacaaagga

SEQ ID NO: 3000516 - RNA, 19 nt, Artificial Sequence
  Description of Artificial Sequence: Synthetic oligonucleotide
aaggaacuaagaaugugga

SEQ ID NO: 3000517 - RNA, 19 nt, Artificial Sequence
  Description of Artificial Sequence: Synthetic oligonucleotide
guacaaacagucuaugaaa

SEQ ID NO: 3000518 - RNA, 19 nt, Artificial Sequence
  Description of Artificial Sequence: Synthetic oligonucleotide
aagaauguggauacuugcu

SEQ ID NO: 3000519 - RNA, 19 nt, Artificial Sequence
  Description of Artificial Sequence: Synthetic oligonucleotide
guuccuuaacacugguagg

SEQ ID NO: 3000520 - RNA, 19 nt, Artificial Sequence
  Description of Artificial Sequence: Synthetic oligonucleotide
gcaacuuggguucuaaagc

SEQ ID NO: 3000521 - RNA, 19 nt, Artificial Sequence
  Description of Artificial Sequence: Synthetic oligonucleotide
ggucuaacuagaauaaaag

SEQ ID NO: 3000522 - RNA, 19 nt, Artificial Sequence
  Description of Artificial Sequence: Synthetic oligonucleotide
gaacaaaggaacuaagaau

SEQ ID NO: 3000523 - RNA, 19 nt, Artificial Sequence
  Description of Artificial Sequence: Synthetic oligonucleotide
uauucugcugcagaauucu

SEQ ID NO: 3000524 - RNA, 19 nt, Artificial Sequence
  Description of Artificial Sequence: Synthetic oligonucleotide
ugcagaauucuuaguguac

SEQ ID NO: 3000525 - RNA, 19 nt, Artificial Sequence
  Description of Artificial Sequence: Synthetic oligonucleotide
auggcugagguuucucaac

SEQ ID NO: 3000526 - RNA, 19 nt, Artificial Sequence
  Description of Artificial Sequence: Synthetic oligonucleotide
aaacagucuaugaaaccug

SEQ ID NO: 3000527 - RNA, 19 nt, Artificial Sequence
  Description of Artificial Sequence: Synthetic oligonucleotide
cuaacuagaauaaaagcau

SEQ ID NO: 3000528 - RNA, 19 nt, Artificial Sequence
  Description of Artificial Sequence: Synthetic oligonucleotide
uaguguacaaacagucuau

SEQ ID NO: 3000529 - RNA, 19 nt, Artificial Sequence
  Description of Artificial Sequence: Synthetic oligonucleotide
agcuacaucaugucuuuga

SEQ ID NO: 3000530 - RNA, 19 nt, Artificial Sequence
  Description of Artificial Sequence: Synthetic oligonucleotide
caugucuuugaaacagcag

SEQ ID NO: 3000531 - RNA, 19 nt, Artificial Sequence
  Description of Artificial Sequence: Synthetic oligonucleotide
ugagguucagcauuucaua

SEQ ID NO: 3000532 - RNA, 19 nt, Artificial Sequence
  Description of Artificial Sequence: Synthetic oligonucleotide
acccugugaacaaaggaac

SEQ ID NO: 3000533 - RNA, 19 nt, Artificial Sequence
  Description of Artificial Sequence: Synthetic oligonucleotide
uuugagggaguuauaucua

SEQ ID NO: 3000534 - RNA, 19 nt, Artificial Sequence
  Description of Artificial Sequence: Synthetic oligonucleotide
caucuugcagcaacuuggg

SEQ ID NO: 3000535 - RNA, 19 nt, Artificial Sequence
  Description of Artificial Sequence: Synthetic oligonucleotide
gguucagcauuucauaaac

SEQ ID NO: 3000536 - RNA, 19 nt, Artificial Sequence
  Description of Artificial Sequence: Synthetic oligonucleotide
aaauauucugcugcagaau

SEQ ID NO: 3000537 - RNA, 19 nt, Artificial Sequence
  Description of Artificial Sequence: Synthetic oligonucleotide
agaauguggauacuugcuu

SEQ ID NO: 3000538 - RNA, 19 nt, Artificial Sequence
  Description of Artificial Sequence: Synthetic oligonucleotide
agcaucuugcagcaacuug

SEQ ID NO: 3000539 - RNA, 19 nt, Artificial Sequence
  Description of Artificial Sequence: Synthetic oligonucleotide
gcaucuugcagcaacuugg

SEQ ID NO: 3000540 - RNA, 19 nt, Artificial Sequence
  Description of Artificial Sequence: Synthetic oligonucleotide
agccccaaaaggcuaaacu

SEQ ID NO: 3000541 - RNA, 19 nt, Artificial Sequence
  Description of Artificial Sequence: Synthetic oligonucleotide
uucucccugacccugugaa

SEQ ID NO: 3000542 - RNA, 19 nt, Artificial Sequence
  Description of Artificial Sequence: Synthetic oligonucleotide
aucaugucuuugaaacagc

SEQ ID NO: 3000543 - RNA, 19 nt, Artificial Sequence
  Description of Artificial Sequence: Synthetic oligonucleotide
cuuggucuaacuagaauaa

SEQ ID NO: 3000544 - RNA, 19 nt, Artificial Sequence
  Description of Artificial Sequence: Synthetic oligonucleotide
guucuaaagcugaacauga

SEQ ID NO: 3000545 - RNA, 19 nt, Artificial Sequence
  Description of Artificial Sequence: Synthetic oligonucleotide
aaccgcacaaguuccuuaa

SEQ ID NO: 3000546 - RNA, 19 nt, Artificial Sequence
  Description of Artificial Sequence: Synthetic oligonucleotide
uguggauacuugcuugguc

SEQ ID NO: 3000547 - RNA, 19 nt, Artificial Sequence
  Description of Artificial Sequence: Synthetic oligonucleotide
gguucuaaagcugaacaug

SEQ ID NO: 3000548 - RNA, 19 nt, Artificial Sequence
  Description of Artificial Sequence: Synthetic oligonucleotide
cuugcuuggucuaacuaga

SEQ ID NO: 3000549 - RNA, 19 nt, Artificial Sequence
  Description of Artificial Sequence: Synthetic oligonucleotide
acaaguuccuuaacacugg

SEQ ID NO: 3000550 - RNA, 19 nt, Artificial Sequence
  Description of Artificial Sequence: Synthetic oligonucleotide
ugagggaguuauaucuagu

SEQ ID NO: 3000551 - RNA, 19 nt, Artificial Sequence
  Description of Artificial Sequence: Synthetic oligonucleotide
uuagcuacaucaugucuuu

SEQ ID NO: 3000552 - RNA, 19 nt, Artificial Sequence
  Description of Artificial Sequence: Synthetic oligonucleotide
gguagggccauguucuuag

SEQ ID NO: 3000553 - RNA, 19 nt, Artificial Sequence
  Description of Artificial Sequence: Synthetic oligonucleotide
aacagucuaugaaaccuga

SEQ ID NO: 3000554 - RNA, 19 nt, Artificial Sequence
  Description of Artificial Sequence: Synthetic oligonucleotide
uaugaaaccugagguucag

SEQ ID NO: 3000555 - RNA, 19 nt, Artificial Sequence
  Description of Artificial Sequence: Synthetic oligonucleotide
acaucaugucuuugaaaca

SEQ ID NO: 3000556 - RNA, 19 nt, Artificial Sequence
  Description of Artificial Sequence: Synthetic oligonucleotide
agggguguucucccugacc

SEQ ID NO: 3000557 - RNA, 19 nt, Artificial Sequence
  Description of Artificial Sequence: Synthetic oligonucleotide
caaaggaacuaagaaugug

SEQ ID NO: 3000558 - RNA, 19 nt, Artificial Sequence
  Description of Artificial Sequence: Synthetic oligonucleotide
uucuuagcuacaucauguc

SEQ ID NO: 3000559 - RNA, 19 nt, Artificial Sequence
  Description of Artificial Sequence: Synthetic oligonucleotide
acuaagaauguggauacuu

SEQ ID NO: 3000560 - RNA, 19 nt, Artificial Sequence
  Description of Artificial Sequence: Synthetic oligonucleotide
uuucucaaccgcacaaguu

SEQ ID NO: 3000561 - RNA, 19 nt, Artificial Sequence
  Description of Artificial Sequence: Synthetic oligonucleotide
agggaguuauaucuaguaa

SEQ ID NO: 3000562 - RNA, 19 nt, Artificial Sequence
  Description of Artificial Sequence: Synthetic oligonucleotide
aacacugguagggccaugu

SEQ ID NO: 3000563 - RNA, 19 nt, Artificial Sequence
  Description of Artificial Sequence: Synthetic oligonucleotide
uucugcugcagaauucuua

SEQ ID NO: 3000564 - RNA, 19 nt, Artificial Sequence
  Description of Artificial Sequence: Synthetic oligonucleotide
auauucugcugcagaauuc

SEQ ID NO: 3000565 - RNA, 19 nt, Artificial Sequence
  Description of Artificial Sequence: Synthetic oligonucleotide
aauaagccccaaaaggcua

SEQ ID NO: 3000566 - RNA, 19 nt, Artificial Sequence
  Description of Artificial Sequence: Synthetic oligonucleotide
gggaguuauaucuaguaaa

SEQ ID NO: 3000567 - RNA, 19 nt, Artificial Sequence
  Description of Artificial Sequence: Synthetic oligonucleotide
gggguguucucccugaccc

SEQ ID NO: 3000568 - RNA, 19 nt, Artificial Sequence
  Description of Artificial Sequence: Synthetic oligonucleotide
gagguucagcauuucauaa

SEQ ID NO: 3000569 - RNA, 19 nt, Artificial Sequence
  Description of Artificial Sequence: Synthetic oligonucleotide
uucuaaagcugaacaugaa

SEQ ID NO: 3000570 - RNA, 19 nt, Artificial Sequence
  Description of Artificial Sequence: Synthetic oligonucleotide
ggaacuaagaauguggaua

SEQ ID NO: 3000571 - RNA, 19 nt, Artificial Sequence
  Description of Artificial Sequence: Synthetic oligonucleotide
caagacuaaagugccacuc

SEQ ID NO: 3000572 - RNA, 19 nt, Artificial Sequence
  Description of Artificial Sequence: Synthetic oligonucleotide
gagggaguuauaucuagua

SEQ ID NO: 3000573 - RNA, 19 nt, Artificial Sequence
  Description of Artificial Sequence: Synthetic oligonucleotide
aguguacaaacagucuaug

SEQ ID NO: 3000574 - RNA, 19 nt, Artificial Sequence
  Description of Artificial Sequence: Synthetic oligonucleotide
gacccugugaacaaaggaa

SEQ ID NO: 3000575 - RNA, 19 nt, Artificial Sequence
  Description of Artificial Sequence: Synthetic oligonucleotide
aacuuggguucuaaagcug

SEQ ID NO: 3000576 - RNA, 19 nt, Artificial Sequence
  Description of Artificial Sequence: Synthetic oligonucleotide
gauacuugcuuggucuaac

SEQ ID NO: 3000577 - RNA, 19 nt, Artificial Sequence
  Description of Artificial Sequence: Synthetic oligonucleotide
acuagaauaaaagcaucuu

SEQ ID NO: 3000578 - RNA, 19 nt, Artificial Sequence
  Description of Artificial Sequence: Synthetic oligonucleotide
uagggccauguucuuagcu

SEQ ID NO: 3000579 - RNA, 19 nt, Artificial Sequence
  Description of Artificial Sequence: Synthetic oligonucleotide
gacuaaagugccacucccc

SEQ ID NO: 3000580 - RNA, 19 nt, Artificial Sequence
  Description of Artificial Sequence: Synthetic oligonucleotide
gcuuggucuaacuagaaua

SEQ ID NO: 3000581 - RNA, 19 nt, Artificial Sequence
  Description of Artificial Sequence: Synthetic oligonucleotide
acaagacuaaagugccacu

SEQ ID NO: 3000582 - RNA, 19 nt, Artificial Sequence
  Description of Artificial Sequence: Synthetic oligonucleotide
ugcuuggucuaacuagaau

SEQ ID NO: 3000583 - RNA, 19 nt, Artificial Sequence
  Description of Artificial Sequence: Synthetic oligonucleotide
uacuugcuuggucuaacua

SEQ ID NO: 3000584 - RNA, 19 nt, Artificial Sequence
  Description of Artificial Sequence: Synthetic oligonucleotide
gugaacaaaggaacuaaga

SEQ ID NO: 3000585 - RNA, 19 nt, Artificial Sequence
  Description of Artificial Sequence: Synthetic oligonucleotide
agaauucuuaguguacaaa

SEQ ID NO: 3000586 - RNA, 19 nt, Artificial Sequence
  Description of Artificial Sequence: Synthetic oligonucleotide
guguacaaacagucuauga

SEQ ID NO: 3000587 - RNA, 19 nt, Artificial Sequence
  Description of Artificial Sequence: Synthetic oligonucleotide
guggauacuugcuuggucu

SEQ ID NO: 3000588 - RNA, 19 nt, Artificial Sequence
  Description of Artificial Sequence: Synthetic oligonucleotide
uccuuaacacugguagggc

SEQ ID NO: 3000589 - RNA, 19 nt, Artificial Sequence
  Description of Artificial Sequence: Synthetic oligonucleotide
auacuugcuuggucuaacu

SEQ ID NO: 3000590 - RNA, 19 nt, Artificial Sequence
  Description of Artificial Sequence: Synthetic oligonucleotide
ucuaguaaauaagccccaa

SEQ ID NO: 3000591 - RNA, 19 nt, Artificial Sequence
  Description of Artificial Sequence: Synthetic oligonucleotide
agguucagcauuucauaaa

SEQ ID NO: 3000592 - RNA, 19 nt, Artificial Sequence
  Description of Artificial Sequence: Synthetic oligonucleotide
augaaaccugagguucagc

SEQ ID NO: 3000593 - RNA, 19 nt, Artificial Sequence
  Description of Artificial Sequence: Synthetic oligonucleotide
aagccccaaaaggcuaaac

SEQ ID NO: 3000594 - RNA, 19 nt, Artificial Sequence
  Description of Artificial Sequence: Synthetic oligonucleotide
aggcuaaacuacaagacua

SEQ ID NO: 3000595 - RNA, 19 nt, Artificial Sequence
  Description of Artificial Sequence: Synthetic oligonucleotide
agguuucucaaccgcacaa

SEQ ID NO: 3000596 - RNA, 19 nt, Artificial Sequence
  Description of Artificial Sequence: Synthetic oligonucleotide
aggaacuaagaauguggau

SEQ ID NO: 3000597 - RNA, 19 nt, Artificial Sequence
  Description of Artificial Sequence: Synthetic oligonucleotide
caaacagucuaugaaaccu

SEQ ID NO: 3000598 - RNA, 19 nt, Artificial Sequence
  Description of Artificial Sequence: Synthetic oligonucleotide
aaacagcagggguguucuc

SEQ ID NO: 3000599 - RNA, 19 nt, Artificial Sequence
  Description of Artificial Sequence: Synthetic oligonucleotide
acuuuccuggccauggcug

SEQ ID NO: 3000600 - RNA, 19 nt, Artificial Sequence
  Description of Artificial Sequence: Synthetic oligonucleotide
ugaaacagcagggguguuc

SEQ ID NO: 3000601 - RNA, 19 nt, Artificial Sequence
  Description of Artificial Sequence: Synthetic oligonucleotide
cuaugaaaccugagguuca

SEQ ID NO: 3000602 - RNA, 19 nt, Artificial Sequence
  Description of Artificial Sequence: Synthetic oligonucleotide
acaaaggaacuaagaaugu

SEQ ID NO: 3000603 - RNA, 19 nt, Artificial Sequence
  Description of Artificial Sequence: Synthetic oligonucleotide
cuuagcuacaucaugucuu

SEQ ID NO: 3000604 - RNA, 19 nt, Artificial Sequence
  Description of Artificial Sequence: Synthetic oligonucleotide
guucuuagcuacaucaugu

SEQ ID NO: 3000605 - RNA, 19 nt, Artificial Sequence
  Description of Artificial Sequence: Synthetic oligonucleotide
acuuggguucuaaagcuga

SEQ ID NO: 3000606 - RNA, 19 nt, Artificial Sequence
  Description of Artificial Sequence: Synthetic oligonucleotide
accgcacaaguuccuuaac

SEQ ID NO: 3000607 - RNA, 19 nt, Artificial Sequence
  Description of Artificial Sequence: Synthetic oligonucleotide
uuggguucuaaagcugaac

SEQ ID NO: 3000608 - RNA, 19 nt, Artificial Sequence
  Description of Artificial Sequence: Synthetic oligonucleotide
agggccauguucuuagcua

SEQ ID NO: 3000609 - RNA, 19 nt, Artificial Sequence
  Description of Artificial Sequence: Synthetic oligonucleotide
cuuaguguacaaacagucu

SEQ ID NO: 3000610 - RNA, 19 nt, Artificial Sequence
  Description of Artificial Sequence: Synthetic oligonucleotide
ccccaaaaggcuaaacuac

SEQ ID NO: 3000611 - RNA, 19 nt, Artificial Sequence
  Description of Artificial Sequence: Synthetic oligonucleotide
aacuaagaauguggauacu

SEQ ID NO: 3000612 - RNA, 19 nt, Artificial Sequence
  Description of Artificial Sequence: Synthetic oligonucleotide
uguucucccugacccugug

SEQ ID NO: 3000613 - RNA, 19 nt, Artificial Sequence
  Description of Artificial Sequence: Synthetic oligonucleotide
caacuuggguucuaaagcu

SEQ ID NO: 3000614 - RNA, 19 nt, Artificial Sequence
  Description of Artificial Sequence: Synthetic oligonucleotide
gcugagguuucucaaccgc

SEQ ID NO: 3000615 - RNA, 19 nt, Artificial Sequence
  Description of Artificial Sequence: Synthetic oligonucleotide
uugcuuggucuaacuagaa

SEQ ID NO: 3000616 - RNA, 19 nt, Artificial Sequence
  Description of Artificial Sequence: Synthetic oligonucleotide
ccuuaacacugguagggcc

SEQ ID NO: 3000617 - RNA, 19 nt, Artificial Sequence
  Description of Artificial Sequence: Synthetic oligonucleotide
gagguuucucaaccgcaca

SEQ ID NO: 3000618 - RNA, 19 nt, Artificial Sequence
  Description of Artificial Sequence: Synthetic oligonucleotide
uggauacuugcuuggucua

SEQ ID NO: 3000619 - RNA, 19 nt, Artificial Sequence
  Description of Artificial Sequence: Synthetic oligonucleotide
uuggucuaacuagaauaaa

SEQ ID NO: 3000620 - RNA, 19 nt, Artificial Sequence
  Description of Artificial Sequence: Synthetic oligonucleotide
gaaacagcagggguguucu

SEQ ID NO: 3000621 - RNA, 19 nt, Artificial Sequence
  Description of Artificial Sequence: Synthetic oligonucleotide
aucuaguaaauaagcccca

SEQ ID NO: 3000622 - RNA, 19 nt, Artificial Sequence
  Description of Artificial Sequence: Synthetic oligonucleotide
acagucuaugaaaccugag

SEQ ID NO: 3000623 - RNA, 19 nt, Artificial Sequence
  Description of Artificial Sequence: Synthetic oligonucleotide
uuaacacugguagggccau

SEQ ID NO: 3000624 - RNA, 19 nt, Artificial Sequence
  Description of Artificial Sequence: Synthetic oligonucleotide
cugcagaauucuuagugua

SEQ ID NO: 3000625 - RNA, 19 nt, Artificial Sequence
  Description of Artificial Sequence: Synthetic oligonucleotide
agcagggguguucucccug

SEQ ID NO: 3000626 - RNA, 19 nt, Artificial Sequence
  Description of Artificial Sequence: Synthetic oligonucleotide
cagcauuucauaaaccuuu

SEQ ID NO: 3000627 - RNA, 19 nt, Artificial Sequence
  Description of Artificial Sequence: Synthetic oligonucleotide
gaguuauaucuaguaaaua

SEQ ID NO: 3000628 - RNA, 19 nt, Artificial Sequence
  Description of Artificial Sequence: Synthetic oligonucleotide
ggcugagguuucucaaccg

SEQ ID NO: 3000629 - RNA, 19 nt, Artificial Sequence
  Description of Artificial Sequence: Synthetic oligonucleotide
cuacaucaugucuuugaaa

SEQ ID NO: 3000630 - RNA, 19 nt, Artificial Sequence
  Description of Artificial Sequence: Synthetic oligonucleotide
guuucucaaccgcacaagu

SEQ ID NO: 3000631 - RNA, 19 nt, Artificial Sequence
  Description of Artificial Sequence: Synthetic oligonucleotide
gguuucucaaccgcacaag

SEQ ID NO: 3000632 - RNA, 19 nt, Artificial Sequence
  Description of Artificial Sequence: Synthetic oligonucleotide
uccuggccauggcugaggu

SEQ ID NO: 3000633 - RNA, 19 nt, Artificial Sequence
  Description of Artificial Sequence: Synthetic oligonucleotide
cugugaacaaaggaacuaa

SEQ ID NO: 3000634 - RNA, 19 nt, Artificial Sequence
  Description of Artificial Sequence: Synthetic oligonucleotide
gaaaccugagguucagcau

SEQ ID NO: 3000635 - RNA, 19 nt, Artificial Sequence
  Description of Artificial Sequence: Synthetic oligonucleotide
cuacaagacuaaagugcca

SEQ ID NO: 3000636 - RNA, 19 nt, Artificial Sequence
  Description of Artificial Sequence: Synthetic oligonucleotide
aucuugcagcaacuugggu

SEQ ID NO: 3000637 - RNA, 19 nt, Artificial Sequence
  Description of Artificial Sequence: Synthetic oligonucleotide
ucucccugacccugugaac

SEQ ID NO: 3000638 - RNA, 19 nt, Artificial Sequence
  Description of Artificial Sequence: Synthetic oligonucleotide
uuuccuggccauggcugag

SEQ ID NO: 3000639 - RNA, 19 nt, Artificial Sequence
  Description of Artificial Sequence: Synthetic oligonucleotide
cucccugacccugugaaca

SEQ ID NO: 3000640 - RNA, 19 nt, Artificial Sequence
  Description of Artificial Sequence: Synthetic oligonucleotide
gcagaauucuuaguguaca

SEQ ID NO: 3000641 - RNA, 19 nt, Artificial Sequence
  Description of Artificial Sequence: Synthetic oligonucleotide
cuuuccuggccauggcuga

SEQ ID NO: 3000642 - RNA, 19 nt, Artificial Sequence
  Description of Artificial Sequence: Synthetic oligonucleotide
cgcacaaguuccuuaacac

SEQ ID NO: 3000643 - RNA, 19 nt, Artificial Sequence
  Description of Artificial Sequence: Synthetic oligonucleotide
gggccauguucuuagcuac

SEQ ID NO: 3000644 - RNA, 19 nt, Artificial Sequence
  Description of Artificial Sequence: Synthetic oligonucleotide
cauggcugagguuucucaa

SEQ ID NO: 3000645 - RNA, 19 nt, Artificial Sequence
  Description of Artificial Sequence: Synthetic oligonucleotide
cugagguucagcauuucau

SEQ ID NO: 3000646 - RNA, 19 nt, Artificial Sequence
  Description of Artificial Sequence: Synthetic oligonucleotide
ccugacccugugaacaaag

SEQ ID NO: 3000647 - RNA, 19 nt, Artificial Sequence
  Description of Artificial Sequence: Synthetic oligonucleotide
gcuacaucaugucuuugaa

SEQ ID NO: 3000648 - RNA, 19 nt, Artificial Sequence
  Description of Artificial Sequence: Synthetic oligonucleotide
auaagccccaaaaggcuaa

SEQ ID NO: 3000649 - RNA, 19 nt, Artificial Sequence
  Description of Artificial Sequence: Synthetic oligonucleotide
auguucuuagcuacaucau

SEQ ID NO: 3000650 - RNA, 19 nt, Artificial Sequence
  Description of Artificial Sequence: Synthetic oligonucleotide
aaguuccuuaacacuggua

SEQ ID NO: 3000651 - RNA, 19 nt, Artificial Sequence
  Description of Artificial Sequence: Synthetic oligonucleotide
gccccaaaaggcuaaacua

SEQ ID NO: 3000652 - RNA, 19 nt, Artificial Sequence
  Description of Artificial Sequence: Synthetic oligonucleotide
aaccugagguucagcauuu

SEQ ID NO: 3000653 - RNA, 19 nt, Artificial Sequence
  Description of Artificial Sequence: Synthetic oligonucleotide
ucccugacccugugaacaa

SEQ ID NO: 3000654 - RNA, 19 nt, Artificial Sequence
  Description of Artificial Sequence: Synthetic oligonucleotide
gucuaugaaaccugagguu

SEQ ID NO: 3000655 - RNA, 19 nt, Artificial Sequence
  Description of Artificial Sequence: Synthetic oligonucleotide
auguggauacuugcuuggu

SEQ ID NO: 3000656 - RNA, 19 nt, Artificial Sequence
  Description of Artificial Sequence: Synthetic oligonucleotide
guagggccauguucuuagc

SEQ ID NO: 3000657 - RNA, 19 nt, Artificial Sequence
  Description of Artificial Sequence: Synthetic oligonucleotide
cuuggguucuaaagcugaa

SEQ ID NO: 3000658 - RNA, 19 nt, Artificial Sequence
  Description of Artificial Sequence: Synthetic oligonucleotide
ucaaccgcacaaguuccuu

SEQ ID NO: 3000659 - RNA, 19 nt, Artificial Sequence
  Description of Artificial Sequence: Synthetic oligonucleotide
cccaaaaggcuaaacuaca

SEQ ID NO: 3000660 - RNA, 19 nt, Artificial Sequence
  Description of Artificial Sequence: Synthetic oligonucleotide
ggaguuauaucuaguaaau

SEQ ID NO: 3000661 - RNA, 19 nt, Artificial Sequence
  Description of Artificial Sequence: Synthetic oligonucleotide
agcauuucauaaaccuuuu

SEQ ID NO: 3000662 - RNA, 19 nt, Artificial Sequence
  Description of Artificial Sequence: Synthetic oligonucleotide
gguguucucccugacccug

SEQ ID NO: 3000663 - RNA, 19 nt, Artificial Sequence
  Description of Artificial Sequence: Synthetic oligonucleotide
uagcuacaucaugucuuug

SEQ ID NO: 3000664 - RNA, 19 nt, Artificial Sequence
  Description of Artificial Sequence: Synthetic oligonucleotide
cccacuuuccuggccaugg

SEQ ID NO: 3000665 - RNA, 19 nt, Artificial Sequence
  Description of Artificial Sequence: Synthetic oligonucleotide
gcugcagaauucuuagugu

SEQ ID NO: 3000666 - RNA, 19 nt, Artificial Sequence
  Description of Artificial Sequence: Synthetic oligonucleotide
uaagccccaaaaggcuaaa

SEQ ID NO: 3000667 - RNA, 19 nt, Artificial Sequence
  Description of Artificial Sequence: Synthetic oligonucleotide
uggccauggcugagguuuc

SEQ ID NO: 3000668 - RNA, 19 nt, Artificial Sequence
  Description of Artificial Sequence: Synthetic oligonucleotide
ggcuaaacuacaagacuaa

SEQ ID NO: 3000669 - RNA, 19 nt, Artificial Sequence
  Description of Artificial Sequence: Synthetic oligonucleotide
cuggccauggcugagguuu

SEQ ID NO: 3000670 - RNA, 19 nt, Artificial Sequence
  Description of Artificial Sequence: Synthetic oligonucleotide
gcacaaguuccuuaacacu

SEQ ID NO: 3000671 - RNA, 19 nt, Artificial Sequence
  Description of Artificial Sequence: Synthetic oligonucleotide
accugagguucagcauuuc

SEQ ID NO: 3000672 - RNA, 19 nt, Artificial Sequence
  Description of Artificial Sequence: Synthetic oligonucleotide
ugguagggccauguucuua

SEQ ID NO: 3000673 - RNA, 19 nt, Artificial Sequence
  Description of Artificial Sequence: Synthetic oligonucleotide
ccaaaaggcuaaacuacaa

SEQ ID NO: 3000674 - RNA, 19 nt, Artificial Sequence
  Description of Artificial Sequence: Synthetic oligonucleotide
caaccgcacaaguuccuua

SEQ ID NO: 3000675 - RNA, 19 nt, Artificial Sequence
  Description of Artificial Sequence: Synthetic oligonucleotide
gcuaaacuacaagacuaaa

SEQ ID NO: 3000676 - RNA, 19 nt, Artificial Sequence
  Description of Artificial Sequence: Synthetic oligonucleotide
guucucccugacccuguga

SEQ ID NO: 3000677 - RNA, 19 nt, Artificial Sequence
  Description of Artificial Sequence: Synthetic oligonucleotide
ggguucuaaagcugaacau

SEQ ID NO: 3000678 - RNA, 19 nt, Artificial Sequence
  Description of Artificial Sequence: Synthetic oligonucleotide
caaguuccuuaacacuggu

SEQ ID NO: 3000679 - RNA, 19 nt, Artificial Sequence
  Description of Artificial Sequence: Synthetic oligonucleotide
acacugguagggccauguu

SEQ ID NO: 3000680 - RNA, 19 nt, Artificial Sequence
  Description of Artificial Sequence: Synthetic oligonucleotide
uugcagcaacuuggguucu

SEQ ID NO: 3000681 - RNA, 19 nt, Artificial Sequence
  Description of Artificial Sequence: Synthetic oligonucleotide
ccgcacaaguuccuuaaca

SEQ ID NO: 3000682 - RNA, 19 nt, Artificial Sequence
  Description of Artificial Sequence: Synthetic oligonucleotide
cagggguguucucccugac

SEQ ID NO: 3000683 - RNA, 19 nt, Artificial Sequence
  Description of Artificial Sequence: Synthetic oligonucleotide
ccugagguucagcauuuca

SEQ ID NO: 3000684 - RNA, 19 nt, Artificial Sequence
  Description of Artificial Sequence: Synthetic oligonucleotide
cacuuuccuggccauggcu

SEQ ID NO: 3000685 - RNA, 19 nt, Artificial Sequence
  Description of Artificial Sequence: Synthetic oligonucleotide
ugcagcaacuuggguucua

SEQ ID NO: 3000686 - RNA, 19 nt, Artificial Sequence
  Description of Artificial Sequence: Synthetic oligonucleotide
uugaaacagcagggguguu

SEQ ID NO: 3000687 - RNA, 19 nt, Artificial Sequence
  Description of Artificial Sequence: Synthetic oligonucleotide
gcagggguguucucccuga

SEQ ID NO: 3000688 - RNA, 19 nt, Artificial Sequence
  Description of Artificial Sequence: Synthetic oligonucleotide
cucaaccgcacaaguuccu

SEQ ID NO: 3000689 - RNA, 19 nt, Artificial Sequence
  Description of Artificial Sequence: Synthetic oligonucleotide
cagcaacuuggguucuaaa

SEQ ID NO: 3000690 - RNA, 19 nt, Artificial Sequence
  Description of Artificial Sequence: Synthetic oligonucleotide
ggauacuugcuuggucuaa

SEQ ID NO: 3000691 - RNA, 19 nt, Artificial Sequence
  Description of Artificial Sequence: Synthetic oligonucleotide
ccugugaacaaaggaacua

SEQ ID NO: 3000692 - RNA, 19 nt, Artificial Sequence
  Description of Artificial Sequence: Synthetic oligonucleotide
ccacuuuccuggccauggc

SEQ ID NO: 3000693 - RNA, 19 nt, Artificial Sequence
  Description of Artificial Sequence: Synthetic oligonucleotide
cugcugcagaauucuuagu

SEQ ID NO: 3000694 - RNA, 19 nt, Artificial Sequence
  Description of Artificial Sequence: Synthetic oligonucleotide
gcagcaacuuggguucuaa

SEQ ID NO: 3000695 - RNA, 19 nt, Artificial Sequence
  Description of Artificial Sequence: Synthetic oligonucleotide
ggccauguucuuagcuaca

SEQ ID NO: 3000696 - RNA, 19 nt, Artificial Sequence
  Description of Artificial Sequence: Synthetic oligonucleotide
cccugugaacaaaggaacu

SEQ ID NO: 3000697 - RNA, 19 nt, Artificial Sequence
  Description of Artificial Sequence: Synthetic oligonucleotide
gccauguucuuagcuacau

SEQ ID NO: 3000698 - RNA, 19 nt, Artificial Sequence
  Description of Artificial Sequence: Synthetic oligonucleotide
ggguguucucccugacccu

SEQ ID NO: 3000699 - RNA, 19 nt, Artificial Sequence
  Description of Artificial Sequence: Synthetic oligonucleotide
guguucucccugacccugu

SEQ ID NO: 3000700 - RNA, 19 nt, Artificial Sequence
  Description of Artificial Sequence: Synthetic oligonucleotide
cugguagggccauguucuu

SEQ ID NO: 3000701 - RNA, 19 nt, Artificial Sequence
  Description of Artificial Sequence: Synthetic oligonucleotide
cagcagggguguucucccu

SEQ ID NO: 3000702 - RNA, 19 nt, Artificial Sequence
  Description of Artificial Sequence: Synthetic oligonucleotide
ccccacuuuccuggccaug

SEQ ID NO: 3000703 - RNA, 19 nt, Artificial Sequence
  Description of Artificial Sequence: Synthetic oligonucleotide
cccugacccugugaacaaa

SEQ ID NO: 3000704 - RNA, 19 nt, Artificial Sequence
  Description of Artificial Sequence: Synthetic oligonucleotide
ccuggccauggcugagguu

SEQ ID NO: 3000705 - RNA, 19 nt, Artificial Sequence
  Description of Artificial Sequence: Synthetic oligonucleotide
gacagaacgaaguuuaggg

SEQ ID NO: 3000706 - RNA, 19 nt, Artificial Sequence
  Description of Artificial Sequence: Synthetic oligonucleotide
ugauugaugaccuuggcca

SEQ ID NO: 3000707 - RNA, 19 nt, Artificial Sequence
  Description of Artificial Sequence: Synthetic oligonucleotide
aaguuuagggagcgaaucc

SEQ ID NO: 3000708 - RNA, 19 nt, Artificial Sequence
  Description of Artificial Sequence: Synthetic oligonucleotide
ugucauauggguaauuggc

SEQ ID NO: 3000709 - RNA, 19 nt, Artificial Sequence
  Description of Artificial Sequence: Synthetic oligonucleotide
ugaagugacaucgugauug

SEQ ID NO: 3000710 - RNA, 19 nt, Artificial Sequence
  Description of Artificial Sequence: Synthetic oligonucleotide
gaaguugcgguucaggucc

SEQ ID NO: 3000711 - RNA, 19 nt, Artificial Sequence
  Description of Artificial Sequence: Synthetic oligonucleotide
uucaccugaagugacaucg

SEQ ID NO: 3000712 - RNA, 19 nt, Artificial Sequence
  Description of Artificial Sequence: Synthetic oligonucleotide
caaccagauacccagaugc

SEQ ID NO: 3000713 - RNA, 19 nt, Artificial Sequence
  Description of Artificial Sequence: Synthetic oligonucleotide
guuccugccaaccagauac

SEQ ID NO: 3000714 - RNA, 19 nt, Artificial Sequence
  Description of Artificial Sequence: Synthetic oligonucleotide
acccagaugcauuugggcc

SEQ ID NO: 3000715 - RNA, 19 nt, Artificial Sequence
  Description of Artificial Sequence: Synthetic oligonucleotide
uuguaguagaaguaggugu

SEQ ID NO: 3000716 - RNA, 19 nt, Artificial Sequence
  Description of Artificial Sequence: Synthetic oligonucleotide
uuuuccaguugucugggag

SEQ ID NO: 3000717 - RNA, 19 nt, Artificial Sequence
  Description of Artificial Sequence: Synthetic oligonucleotide
acuccguuugcguuguucc

SEQ ID NO: 3000718 - RNA, 19 nt, Artificial Sequence
  Description of Artificial Sequence: Synthetic oligonucleotide
gacuuuuccaguugucugg

SEQ ID NO: 3000719 - RNA, 19 nt, Artificial Sequence
  Description of Artificial Sequence: Synthetic oligonucleotide
gauacccagaugcauuugg

SEQ ID NO: 3000720 - RNA, 19 nt, Artificial Sequence
  Description of Artificial Sequence: Synthetic oligonucleotide
aguaaucccauguucaccu

SEQ ID NO: 3000721 - RNA, 19 nt, Artificial Sequence
  Description of Artificial Sequence: Synthetic oligonucleotide
cuagggacuugucauaugg

SEQ ID NO: 3000722 - RNA, 19 nt, Artificial Sequence
  Description of Artificial Sequence: Synthetic oligonucleotide
aaguaaucccauguucacc

SEQ ID NO: 3000723 - RNA, 19 nt, Artificial Sequence
  Description of Artificial Sequence: Synthetic oligonucleotide
gaaguagguguugaggucg

SEQ ID NO: 3000724 - RNA, 19 nt, Artificial Sequence
  Description of Artificial Sequence: Synthetic oligonucleotide
  modified_base (19)..(19): a, c, u, g, unknown or other
uggaucacggcccuggucn

SEQ ID NO: 3000725 - RNA, 19 nt, Artificial Sequence
  Description of Artificial Sequence: Synthetic oligonucleotide
guaauuggccaccacagcc

SEQ ID NO: 3000726 - RNA, 19 nt, Artificial Sequence
  Description of Artificial Sequence: Synthetic oligonucleotide
cagaacgaaguuuagggag

SEQ ID NO: 3000727 - RNA, 19 nt, Artificial Sequence
  Description of Artificial Sequence: Synthetic oligonucleotide
uugucauauggguaauugg

SEQ ID NO: 3000728 - RNA, 19 nt, Artificial Sequence
  Description of Artificial Sequence: Synthetic oligonucleotide
uucucguuguaguagaagu

SEQ ID NO: 3000729 - RNA, 19 nt, Artificial Sequence
  Description of Artificial Sequence: Synthetic oligonucleotide
aauuggccaccacagcccg

SEQ ID NO: 3000730 - RNA, 19 nt, Artificial Sequence
  Description of Artificial Sequence: Synthetic oligonucleotide
uuuccaguugucugggagg

SEQ ID NO: 3000731 - RNA, 19 nt, Artificial Sequence
  Description of Artificial Sequence: Synthetic oligonucleotide
cagauuggccgacagaacg

SEQ ID NO: 3000732 - RNA, 19 nt, Artificial Sequence
  Description of Artificial Sequence: Synthetic oligonucleotide
gacaucgugauugaugacc

SEQ ID NO: 3000733 - RNA, 19 nt, Artificial Sequence
  Description of Artificial Sequence: Synthetic oligonucleotide
ucauauggguaauuggcca

SEQ ID NO: 3000734 - RNA, 19 nt, Artificial Sequence
  Description of Artificial Sequence: Synthetic oligonucleotide
uucagguccacuccguuug

SEQ ID NO: 3000735 - RNA, 19 nt, Artificial Sequence
  Description of Artificial Sequence: Synthetic oligonucleotide
uaauuggccaccacagccc

SEQ ID NO: 3000736 - RNA, 19 nt, Artificial Sequence
  Description of Artificial Sequence: Synthetic oligonucleotide
ucguuguaguagaaguagg

SEQ ID NO: 3000737 - RNA, 19 nt, Artificial Sequence
  Description of Artificial Sequence: Synthetic oligonucleotide
ucgugauugaugaccuugg

SEQ ID NO: 3000738 - RNA, 19 nt, Artificial Sequence
  Description of Artificial Sequence: Synthetic oligonucleotide
uguaguagaaguagguguu

SEQ ID NO: 3000739 - RNA, 19 nt, Artificial Sequence
  Description of Artificial Sequence: Synthetic oligonucleotide
gaggacuucgguaacuagg

SEQ ID NO: 3000740 - RNA, 19 nt, Artificial Sequence
  Description of Artificial Sequence: Synthetic oligonucleotide
guagaaguagguguugagg

SEQ ID NO: 3000741 - RNA, 19 nt, Artificial Sequence
  Description of Artificial Sequence: Synthetic oligonucleotide
agcagacggaaguaauccc

SEQ ID NO: 3000742 - RNA, 19 nt, Artificial Sequence
  Description of Artificial Sequence: Synthetic oligonucleotide
agaacgaaguuuagggagc

SEQ ID NO: 3000743 - RNA, 19 nt, Artificial Sequence
  Description of Artificial Sequence: Synthetic oligonucleotide
uggguaauuggccaccaca

SEQ ID NO: 3000744 - RNA, 19 nt, Artificial Sequence
  Description of Artificial Sequence: Synthetic oligonucleotide
gacuucgguaacuagggac

SEQ ID NO: 3000745 - RNA, 19 nt, Artificial Sequence
  Description of Artificial Sequence: Synthetic oligonucleotide
ugacuuuuccaguugucug

SEQ ID NO: 3000746 - RNA, 19 nt, Artificial Sequence
  Description of Artificial Sequence: Synthetic oligonucleotide
ucugggagggguaaguggu

SEQ ID NO: 3000747 - RNA, 19 nt, Artificial Sequence
  Description of Artificial Sequence: Synthetic oligonucleotide
uuagggagcgaauccacug

SEQ ID NO: 3000748 - RNA, 19 nt, Artificial Sequence
  Description of Artificial Sequence: Synthetic oligonucleotide
uagggagcgaauccacugg

SEQ ID NO: 3000749 - RNA, 19 nt, Artificial Sequence
  Description of Artificial Sequence: Synthetic oligonucleotide
gugacaucgugauugauga

SEQ ID NO: 3000750 - RNA, 19 nt, Artificial Sequence
  Description of Artificial Sequence: Synthetic oligonucleotide
uuugcguuguuccugccaa

SEQ ID NO: 3000751 - RNA, 19 nt, Artificial Sequence
  Description of Artificial Sequence: Synthetic oligonucleotide
gaaguaaucccauguucac

SEQ ID NO: 3000752 - RNA, 19 nt, Artificial Sequence
  Description of Artificial Sequence: Synthetic oligonucleotide
ucccauguucaccugaagu

SEQ ID NO: 3000753 - RNA, 19 nt, Artificial Sequence
  Description of Artificial Sequence: Synthetic oligonucleotide
aguagaaguagguguugag

SEQ ID NO: 3000754 - RNA, 19 nt, Artificial Sequence
  Description of Artificial Sequence: Synthetic oligonucleotide
uuggccgacagaacgaagu

SEQ ID NO: 3000755 - RNA, 19 nt, Artificial Sequence
  Description of Artificial Sequence: Synthetic oligonucleotide
ugcagauuggccgacagaa

SEQ ID NO: 3000756 - RNA, 19 nt, Artificial Sequence
  Description of Artificial Sequence: Synthetic oligonucleotide
gauugaugaccuuggccag

SEQ ID NO: 3000757 - RNA, 19 nt, Artificial Sequence
  Description of Artificial Sequence: Synthetic oligonucleotide
cugccaaccagauacccag

SEQ ID NO: 3000758 - RNA, 19 nt, Artificial Sequence
  Description of Artificial Sequence: Synthetic oligonucleotide
gugauugaugaccuuggcc

SEQ ID NO: 3000759 - RNA, 19 nt, Artificial Sequence
  Description of Artificial Sequence: Synthetic oligonucleotide
auauggguaauuggccacc

SEQ ID NO: 3000760 - RNA, 19 nt, Artificial Sequence
  Description of Artificial Sequence: Synthetic oligonucleotide
uagggacuugucauauggg

SEQ ID NO: 3000761 - RNA, 19 nt, Artificial Sequence
  Description of Artificial Sequence: Synthetic oligonucleotide
cucguuguaguagaaguag

SEQ ID NO: 3000762 - RNA, 19 nt, Artificial Sequence
  Description of Artificial Sequence: Synthetic oligonucleotide
cuugucauauggguaauug

SEQ ID NO: 3000763 - RNA, 19 nt, Artificial Sequence
  Description of Artificial Sequence: Synthetic oligonucleotide
guaaguacccggaagcagc

SEQ ID NO: 3000764 - RNA, 19 nt, Artificial Sequence
  Description of Artificial Sequence: Synthetic oligonucleotide
uaaguggugguuggggccg

SEQ ID NO: 3000765 - RNA, 19 nt, Artificial Sequence
  Description of Artificial Sequence: Synthetic oligonucleotide
acagaacgaaguuuaggga

SEQ ID NO: 3000766 - RNA, 19 nt, Artificial Sequence
  Description of Artificial Sequence: Synthetic oligonucleotide
aggacuucgguaacuaggg

SEQ ID NO: 3000767 - RNA, 19 nt, Artificial Sequence
  Description of Artificial Sequence: Synthetic oligonucleotide
uuggccagcgucuggaaga

SEQ ID NO: 3000768 - RNA, 19 nt, Artificial Sequence
  Description of Artificial Sequence: Synthetic oligonucleotide
agggacuugucauaugggu

SEQ ID NO: 3000769 - RNA, 19 nt, Artificial Sequence
  Description of Artificial Sequence: Synthetic oligonucleotide
gagcgaauccacuggauca

SEQ ID NO: 3000770 - RNA, 19 nt, Artificial Sequence
  Description of Artificial Sequence: Synthetic oligonucleotide
uuccaguugucugggaggg

SEQ ID NO: 3000771 - RNA, 19 nt, Artificial Sequence
  Description of Artificial Sequence: Synthetic oligonucleotide
gaaguuuagggagcgaauc

SEQ ID NO: 3000772 - RNA, 19 nt, Artificial Sequence
  Description of Artificial Sequence: Synthetic oligonucleotide
uuuagggagcgaauccacu

SEQ ID NO: 3000773 - RNA, 19 nt, Artificial Sequence
  Description of Artificial Sequence: Synthetic oligonucleotide
ggaagagcuggucaucugg

SEQ ID NO: 3000774 - RNA, 19 nt, Artificial Sequence
  Description of Artificial Sequence: Synthetic oligonucleotide
uaaucccauguucaccuga

SEQ ID NO: 3000775 - RNA, 19 nt, Artificial Sequence
  Description of Artificial Sequence: Synthetic oligonucleotide
agugacaucgugauugaug

SEQ ID NO: 3000776 - RNA, 19 nt, Artificial Sequence
  Description of Artificial Sequence: Synthetic oligonucleotide
uacuucucguuguaguaga

SEQ ID NO: 3000777 - RNA, 19 nt, Artificial Sequence
  Description of Artificial Sequence: Synthetic oligonucleotide
acccggaagcagcagacgg

SEQ ID NO: 3000778 - RNA, 19 nt, Artificial Sequence
  Description of Artificial Sequence: Synthetic oligonucleotide
gaauccacuggaucacggc

SEQ ID NO: 3000779 - RNA, 19 nt, Artificial Sequence
  Description of Artificial Sequence: Synthetic oligonucleotide
cauauggguaauuggccac

SEQ ID NO: 3000780 - RNA, 19 nt, Artificial Sequence
  Description of Artificial Sequence: Synthetic oligonucleotide
uugaugaccuuggccagcg

SEQ ID NO: 3000781 - RNA, 19 nt, Artificial Sequence
  Description of Artificial Sequence: Synthetic oligonucleotide
uagguguugaggucgggga

SEQ ID NO: 3000782 - RNA, 19 nt, Artificial Sequence
  Description of Artificial Sequence: Synthetic oligonucleotide
gaacgaaguuuagggagcg

SEQ ID NO: 3000783 - RNA, 19 nt, Artificial Sequence
  Description of Artificial Sequence: Synthetic oligonucleotide
guaaguggugguuggggcc

SEQ ID NO: 3000784 - RNA, 19 nt, Artificial Sequence
  Description of Artificial Sequence: Synthetic oligonucleotide
uacccagaugcauuugggc

SEQ ID NO: 3000785 - RNA, 19 nt, Artificial Sequence
  Description of Artificial Sequence: Synthetic oligonucleotide
uaaguacccggaagcagca

SEQ ID NO: 3000786 - RNA, 19 nt, Artificial Sequence
  Description of Artificial Sequence: Synthetic oligonucleotide
gucauauggguaauuggcc

SEQ ID NO: 3000787 - RNA, 19 nt, Artificial Sequence
  Description of Artificial Sequence: Synthetic oligonucleotide
auacuucucguuguaguag

SEQ ID NO: 3000788 - RNA, 19 nt, Artificial Sequence
  Description of Artificial Sequence: Synthetic oligonucleotide
aucgugauugaugaccuug

SEQ ID NO: 3000789 - RNA, 19 nt, Artificial Sequence
  Description of Artificial Sequence: Synthetic oligonucleotide
agggguaaguggugguugg

SEQ ID NO: 3000790 - RNA, 19 nt, Artificial Sequence
  Description of Artificial Sequence: Synthetic oligonucleotide
cauguucaccugaagugac

SEQ ID NO: 3000791 - RNA, 19 nt, Artificial Sequence
  Description of Artificial Sequence: Synthetic oligonucleotide
ucucguuguaguagaagua

SEQ ID NO: 3000792 - RNA, 19 nt, Artificial Sequence
  Description of Artificial Sequence: Synthetic oligonucleotide
ugcgguucagguccacucc

SEQ ID NO: 3000793 - RNA, 19 nt, Artificial Sequence
  Description of Artificial Sequence: Synthetic oligonucleotide
auccacuggaucacggccc

SEQ ID NO: 3000794 - RNA, 19 nt, Artificial Sequence
  Description of Artificial Sequence: Synthetic oligonucleotide
guaacuagggacuugucau

SEQ ID NO: 3000795 - RNA, 19 nt, Artificial Sequence
  Description of Artificial Sequence: Synthetic oligonucleotide
ugaggacuucgguaacuag

SEQ ID NO: 3000796 - RNA, 19 nt, Artificial Sequence
  Description of Artificial Sequence: Synthetic oligonucleotide
aauuggaggugcggugagg

SEQ ID NO: 3000797 - RNA, 19 nt, Artificial Sequence
  Description of Artificial Sequence: Synthetic oligonucleotide
cagcagacggaaguaaucc

SEQ ID NO: 3000798 - RNA, 19 nt, Artificial Sequence
  Description of Artificial Sequence: Synthetic oligonucleotide
accacagcccgccaugcag

SEQ ID NO: 3000799 - RNA, 19 nt, Artificial Sequence
  Description of Artificial Sequence: Synthetic oligonucleotide
gagcuggucaucuggugug

SEQ ID NO: 3000800 - RNA, 19 nt, Artificial Sequence
  Description of Artificial Sequence: Synthetic oligonucleotide
gaauuggaggugcggugag

SEQ ID NO: 3000801 - RNA, 19 nt, Artificial Sequence
  Description of Artificial Sequence: Synthetic oligonucleotide
cagcccgccaugcagauug

SEQ ID NO: 3000802 - RNA, 19 nt, Artificial Sequence
  Description of Artificial Sequence: Synthetic oligonucleotide
aguuuagggagcgaaucca

SEQ ID NO: 3000803 - RNA, 19 nt, Artificial Sequence
  Description of Artificial Sequence: Synthetic oligonucleotide
agcgaauccacuggaucac

SEQ ID NO: 3000804 - RNA, 19 nt, Artificial Sequence
  Description of Artificial Sequence: Synthetic oligonucleotide
acuucgguaacuagggacu

SEQ ID NO: 3000805 - RNA, 19 nt, Artificial Sequence
  Description of Artificial Sequence: Synthetic oligonucleotide
uaguagaaguagguguuga

SEQ ID NO: 3000806 - RNA, 19 nt, Artificial Sequence
  Description of Artificial Sequence: Synthetic oligonucleotide
gguaacuagggacuuguca

SEQ ID NO: 3000807 - RNA, 19 nt, Artificial Sequence
  Description of Artificial Sequence: Synthetic oligonucleotide
guagguguugaggucgggg

SEQ ID NO: 3000808 - RNA, 19 nt, Artificial Sequence
  Description of Artificial Sequence: Synthetic oligonucleotide
aacuagggacuugucauau

SEQ ID NO: 3000809 - RNA, 19 nt, Artificial Sequence
  Description of Artificial Sequence: Synthetic oligonucleotide
guugaggucggggaaguug

SEQ ID NO: 3000810 - RNA, 19 nt, Artificial Sequence
  Description of Artificial Sequence: Synthetic oligonucleotide
gguaaguggugguuggggc

SEQ ID NO: 3000811 - RNA, 19 nt, Artificial Sequence
  Description of Artificial Sequence: Synthetic oligonucleotide
ucgguaacuagggacuugu

SEQ ID NO: 3000812 - RNA, 19 nt, Artificial Sequence
  Description of Artificial Sequence: Synthetic oligonucleotide
ugggagggguaaguggugg

SEQ ID NO: 3000813 - RNA, 19 nt, Artificial Sequence
  Description of Artificial Sequence: Synthetic oligonucleotide
gacggaaguaaucccaugu

SEQ ID NO: 3000814 - RNA, 19 nt, Artificial Sequence
  Description of Artificial Sequence: Synthetic oligonucleotide
aaguagguguugaggucgg

SEQ ID NO: 3000815 - RNA, 19 nt, Artificial Sequence
  Description of Artificial Sequence: Synthetic oligonucleotide
gguuccaccugacuuuucc

SEQ ID NO: 3000816 - RNA, 19 nt, Artificial Sequence
  Description of Artificial Sequence: Synthetic oligonucleotide
ggaaguaaucccauguuca

SEQ ID NO: 3000817 - RNA, 19 nt, Artificial Sequence
  Description of Artificial Sequence: Synthetic oligonucleotide
auacccagaugcauuuggg

SEQ ID NO: 3000818 - RNA, 19 nt, Artificial Sequence
  Description of Artificial Sequence: Synthetic oligonucleotide
uccaccugacuuuuccagu

SEQ ID NO: 3000819 - RNA, 19 nt, Artificial Sequence
  Description of Artificial Sequence: Synthetic oligonucleotide
uguucaccugaagugacau

SEQ ID NO: 3000820 - RNA, 19 nt, Artificial Sequence
  Description of Artificial Sequence: Synthetic oligonucleotide
ugaggucggggaaguugcg

SEQ ID NO: 3000821 - RNA, 19 nt, Artificial Sequence
  Description of Artificial Sequence: Synthetic oligonucleotide
gaagugacaucgugauuga

SEQ ID NO: 3000822 - RNA, 19 nt, Artificial Sequence
  Description of Artificial Sequence: Synthetic oligonucleotide
auuggaggugcggugagga

SEQ ID NO: 3000823 - RNA, 19 nt, Artificial Sequence
  Description of Artificial Sequence: Synthetic oligonucleotide
uccguuugcguuguuccug

SEQ ID NO: 3000824 - RNA, 19 nt, Artificial Sequence
  Description of Artificial Sequence: Synthetic oligonucleotide
cccauguucaccugaagug

SEQ ID NO: 3000825 - RNA, 19 nt, Artificial Sequence
  Description of Artificial Sequence: Synthetic oligonucleotide
auggguaauuggccaccac

SEQ ID NO: 3000826 - RNA, 19 nt, Artificial Sequence
  Description of Artificial Sequence: Synthetic oligonucleotide
  modified_base (16)..(16): a, c, u, g, unknown or other
aucacggcccuggucncgg

SEQ ID NO: 3000827 - RNA, 19 nt, Artificial Sequence
  Description of Artificial Sequence: Synthetic oligonucleotide
uggaggugcggugaggacu

SEQ ID NO: 3000828 - RNA, 19 nt, Artificial Sequence
  Description of Artificial Sequence: Synthetic oligonucleotide
uaacuagggacuugucaua

SEQ ID NO: 3000829 - RNA, 19 nt, Artificial Sequence
  Description of Artificial Sequence: Synthetic oligonucleotide
ugcggugaggacuucggua

SEQ ID NO: 3000830 - RNA, 19 nt, Artificial Sequence
  Description of Artificial Sequence: Synthetic oligonucleotide
cuucucguuguaguagaag

SEQ ID NO: 3000831 - RNA, 19 nt, Artificial Sequence
  Description of Artificial Sequence: Synthetic oligonucleotide
acaucgugauugaugaccu

SEQ ID NO: 3000832 - RNA, 19 nt, Artificial Sequence
  Description of Artificial Sequence: Synthetic oligonucleotide
ggguaauuggccaccacag

SEQ ID NO: 3000833 - RNA, 19 nt, Artificial Sequence
  Description of Artificial Sequence: Synthetic oligonucleotide
uugcgguucagguccacuc

SEQ ID NO: 3000834 - RNA, 19 nt, Artificial Sequence
  Description of Artificial Sequence: Synthetic oligonucleotide
gagggguaaguggugguug

SEQ ID NO: 3000835 - RNA, 19 nt, Artificial Sequence
  Description of Artificial Sequence: Synthetic oligonucleotide
uuggccaccacagcccgcc

SEQ ID NO: 3000836 - RNA, 19 nt, Artificial Sequence
  Description of Artificial Sequence: Synthetic oligonucleotide
ggggccgccauacuucucg

SEQ ID NO: 3000837 - RNA, 19 nt, Artificial Sequence
  Description of Artificial Sequence: Synthetic oligonucleotide
ggacuugucauauggguaa

SEQ ID NO: 3000838 - RNA, 19 nt, Artificial Sequence
  Description of Artificial Sequence: Synthetic oligonucleotide
aggucggggaaguugcggu

SEQ ID NO: 3000839 - RNA, 19 nt, Artificial Sequence
  Description of Artificial Sequence: Synthetic oligonucleotide
acgaaguuuagggagcgaa

SEQ ID NO: 3000840 - RNA, 19 nt, Artificial Sequence
  Description of Artificial Sequence: Synthetic oligonucleotide
uccacuggaucacggcccu

SEQ ID NO: 3000841 - RNA, 19 nt, Artificial Sequence
  Description of Artificial Sequence: Synthetic oligonucleotide
ucaccugaagugacaucgu

SEQ ID NO: 3000842 - RNA, 19 nt, Artificial Sequence
  Description of Artificial Sequence: Synthetic oligonucleotide
uauggguaauuggccacca

SEQ ID NO: 3000843 - RNA, 19 nt, Artificial Sequence
  Description of Artificial Sequence: Synthetic oligonucleotide
acuagggacuugucauaug

SEQ ID NO: 3000844 - RNA, 19 nt, Artificial Sequence
  Description of Artificial Sequence: Synthetic oligonucleotide
cauacuucucguuguagua

SEQ ID NO: 3000845 - RNA, 19 nt, Artificial Sequence
  Description of Artificial Sequence: Synthetic oligonucleotide
guaguagaaguagguguug

SEQ ID NO: 3000846 - RNA, 19 nt, Artificial Sequence
  Description of Artificial Sequence: Synthetic oligonucleotide
gguaauuggccaccacagc

SEQ ID NO: 3000847 - RNA, 19 nt, Artificial Sequence
  Description of Artificial Sequence: Synthetic oligonucleotide
agacggaaguaaucccaug

SEQ ID NO: 3000848 - RNA, 19 nt, Artificial Sequence
  Description of Artificial Sequence: Synthetic oligonucleotide
aaucccauguucaccugaa

SEQ ID NO: 3000849 - RNA, 19 nt, Artificial Sequence
  Description of Artificial Sequence: Synthetic oligonucleotide
gaggucggggaaguugcgg

SEQ ID NO: 3000850 - RNA, 19 nt, Artificial Sequence
  Description of Artificial Sequence: Synthetic oligonucleotide
cacuggaucacggcccugg

SEQ ID NO: 3000851 - RNA, 19 nt, Artificial Sequence
  Description of Artificial Sequence: Synthetic oligonucleotide
acggaaguaaucccauguu

SEQ ID NO: 3000852 - RNA, 19 nt, Artificial Sequence
  Description of Artificial Sequence: Synthetic oligonucleotide
uuccugccaaccagauacc

SEQ ID NO: 3000853 - RNA, 19 nt, Artificial Sequence
  Description of Artificial Sequence: Synthetic oligonucleotide
aaccagauacccagaugca

SEQ ID NO: 3000854 - RNA, 19 nt, Artificial Sequence
  Description of Artificial Sequence: Synthetic oligonucleotide
cccagaugcauuugggccc

SEQ ID NO: 3000855 - RNA, 19 nt, Artificial Sequence
  Description of Artificial Sequence: Synthetic oligonucleotide
guuuagggagcgaauccac

SEQ ID NO: 3000856 - RNA, 19 nt, Artificial Sequence
  Description of Artificial Sequence: Synthetic oligonucleotide
ugucugggagggguaagug

SEQ ID NO: 3000857 - RNA, 19 nt, Artificial Sequence
  Description of Artificial Sequence: Synthetic oligonucleotide
cagcgucuggaagagcugg

SEQ ID NO: 3000858 - RNA, 19 nt, Artificial Sequence
  Description of Artificial Sequence: Synthetic oligonucleotide
agggagcgaauccacugga

SEQ ID NO: 3000859 - RNA, 19 nt, Artificial Sequence
  Description of Artificial Sequence: Synthetic oligonucleotide
ccgccaugcagauuggccg

SEQ ID NO: 3000860 - RNA, 19 nt, Artificial Sequence
  Description of Artificial Sequence: Synthetic oligonucleotide
uccugccaaccagauaccc

SEQ ID NO: 3000861 - RNA, 19 nt, Artificial Sequence
  Description of Artificial Sequence: Synthetic oligonucleotide
guuugcguuguuccugcca

SEQ ID NO: 3000862 - RNA, 19 nt, Artificial Sequence
  Description of Artificial Sequence: Synthetic oligonucleotide
caccugaagugacaucgug

SEQ ID NO: 3000863 - RNA, 19 nt, Artificial Sequence
  Description of Artificial Sequence: Synthetic oligonucleotide
accugaagugacaucguga

SEQ ID NO: 3000864 - RNA, 19 nt, Artificial Sequence
  Description of Artificial Sequence: Synthetic oligonucleotide
ucggggaaguugcgguuca

SEQ ID NO: 3000865 - RNA, 19 nt, Artificial Sequence
  Description of Artificial Sequence: Synthetic oligonucleotide
ggaaguugcgguucagguc

SEQ ID NO: 3000866 - RNA, 19 nt, Artificial Sequence
  Description of Artificial Sequence: Synthetic oligonucleotide
aaguggugguuggggccgc

SEQ ID NO: 3000867 - RNA, 19 nt, Artificial Sequence
  Description of Artificial Sequence: Synthetic oligonucleotide
agguccacuccguuugcgu

SEQ ID NO: 3000868 - RNA, 19 nt, Artificial Sequence
  Description of Artificial Sequence: Synthetic oligonucleotide
guaaucccauguucaccug

SEQ ID NO: 3000869 - RNA, 19 nt, Artificial Sequence
  Description of Artificial Sequence: Synthetic oligonucleotide
aucccauguucaccugaag

SEQ ID NO: 3000870 - RNA, 19 nt, Artificial Sequence
  Description of Artificial Sequence: Synthetic oligonucleotide
ggagcgaauccacuggauc

SEQ ID NO: 3000871 - RNA, 19 nt, Artificial Sequence
  Description of Artificial Sequence: Synthetic oligonucleotide
uucgguaacuagggacuug

SEQ ID NO: 3000872 - RNA, 19 nt, Artificial Sequence
  Description of Artificial Sequence: Synthetic oligonucleotide
uacccggaagcagcagacg

SEQ ID NO: 3000873 - RNA, 19 nt, Artificial Sequence
  Description of Artificial Sequence: Synthetic oligonucleotide
uguuccugccaaccagaua

SEQ ID NO: 3000874 - RNA, 19 nt, Artificial Sequence
  Description of Artificial Sequence: Synthetic oligonucleotide
agauuggccgacagaacga

SEQ ID NO: 3000875 - RNA, 19 nt, Artificial Sequence
  Description of Artificial Sequence: Synthetic oligonucleotide
uugucugggagggguaagu

SEQ ID NO: 3000876 - RNA, 19 nt, Artificial Sequence
  Description of Artificial Sequence: Synthetic oligonucleotide
gccgccauacuucucguug

SEQ ID NO: 3000877 - RNA, 19 nt, Artificial Sequence
  Description of Artificial Sequence: Synthetic oligonucleotide
aagcagcagacggaaguaa

SEQ ID NO: 3000878 - RNA, 19 nt, Artificial Sequence
  Description of Artificial Sequence: Synthetic oligonucleotide
uuggggccgccauacuucu

SEQ ID NO: 3000879 - RNA, 19 nt, Artificial Sequence
  Description of Artificial Sequence: Synthetic oligonucleotide
gggaauuggaggugcggug

SEQ ID NO: 3000880 - RNA, 19 nt, Artificial Sequence
  Description of Artificial Sequence: Synthetic oligonucleotide
  modified_base (3)..(3): a, c, u, g, unknown or other
ucncggguuccaccugacu

SEQ ID NO: 3000881 - RNA, 19 nt, Artificial Sequence
  Description of Artificial Sequence: Synthetic oligonucleotide
guuguuccugccaaccaga

SEQ ID NO: 3000882 - RNA, 19 nt, Artificial Sequence
  Description of Artificial Sequence: Synthetic oligonucleotide
ugacaucgugauugaugac

SEQ ID NO: 3000883 - RNA, 19 nt, Artificial Sequence
  Description of Artificial Sequence: Synthetic oligonucleotide
ggguaaguggugguugggg

SEQ ID NO: 3000884 - RNA, 19 nt, Artificial Sequence
  Description of Artificial Sequence: Synthetic oligonucleotide
accagauacccagaugcau

SEQ ID NO: 3000885 - RNA, 19 nt, Artificial Sequence
  Description of Artificial Sequence: Synthetic oligonucleotide
agguguugaggucggggaa

SEQ ID NO: 3000886 - RNA, 19 nt, Artificial Sequence
  Description of Artificial Sequence: Synthetic oligonucleotide
  modified_base (17)..(17): a, c, u, g, unknown or other
gaucacggcccuggucncg

SEQ ID NO: 3000887 - RNA, 19 nt, Artificial Sequence
  Description of Artificial Sequence: Synthetic oligonucleotide
aaguacccggaagcagcag

SEQ ID NO: 3000888 - RNA, 19 nt, Artificial Sequence
  Description of Artificial Sequence: Synthetic oligonucleotide
uggccgacagaacgaaguu

SEQ ID NO: 3000889 - RNA, 19 nt, Artificial Sequence
  Description of Artificial Sequence: Synthetic oligonucleotide
gguguugaggucggggaag

SEQ ID NO: 3000890 - RNA, 19 nt, Artificial Sequence
  Description of Artificial Sequence: Synthetic oligonucleotide
guuggggccgccauacuuc

SEQ ID NO: 3000891 - RNA, 19 nt, Artificial Sequence
  Description of Artificial Sequence: Synthetic oligonucleotide
guuccaccugacuuuucca

SEQ ID NO: 3000892 - RNA, 19 nt, Artificial Sequence
  Description of Artificial Sequence: Synthetic oligonucleotide
aacgaaguuuagggagcga

SEQ ID NO: 3000893 - RNA, 19 nt, Artificial Sequence
  Description of Artificial Sequence: Synthetic oligonucleotide
ugccaaccagauacccaga

SEQ ID NO: 3000894 - RNA, 19 nt, Artificial Sequence
  Description of Artificial Sequence: Synthetic oligonucleotide
ggaagcagcagacggaagu

SEQ ID NO: 3000895 - RNA, 19 nt, Artificial Sequence
  Description of Artificial Sequence: Synthetic oligonucleotide
agcuggucaucuggugugg

SEQ ID NO: 3000896 - RNA, 19 nt, Artificial Sequence
  Description of Artificial Sequence: Synthetic oligonucleotide
gaccuuggccagcgucugg

SEQ ID NO: 3000897 - RNA, 19 nt, Artificial Sequence
  Description of Artificial Sequence: Synthetic oligonucleotide
gauuggccgacagaacgaa

SEQ ID NO: 3000898 - RNA, 19 nt, Artificial Sequence
  Description of Artificial Sequence: Synthetic oligonucleotide
ugaccuuggccagcgucug

SEQ ID NO: 3000899 - RNA, 19 nt, Artificial Sequence
  Description of Artificial Sequence: Synthetic oligonucleotide
gaagcagcagacggaagua

SEQ ID NO: 3000900 - RNA, 19 nt, Artificial Sequence
  Description of Artificial Sequence: Synthetic oligonucleotide
gcgguucagguccacuccg

SEQ ID NO: 3000901 - RNA, 19 nt, Artificial Sequence
  Description of Artificial Sequence: Synthetic oligonucleotide
uggccagcgucuggaagag

SEQ ID NO: 3000902 - RNA, 19 nt, Artificial Sequence
  Description of Artificial Sequence: Synthetic oligonucleotide
  modified_base (6)..(6): a, c, u, g, unknown or other
uggucncggguuccaccug

SEQ ID NO: 3000903 - RNA, 19 nt, Artificial Sequence
  Description of Artificial Sequence: Synthetic oligonucleotide
uuggaggugcggugaggac

SEQ ID NO: 3000904 - RNA, 19 nt, Artificial Sequence
  Description of Artificial Sequence: Synthetic oligonucleotide
uccaguugucugggagggg

SEQ ID NO: 3000905 - RNA, 19 nt, Artificial Sequence
  Description of Artificial Sequence: Synthetic oligonucleotide
caccugacuuuuccaguug

SEQ ID NO: 3000906 - RNA, 19 nt, Artificial Sequence
  Description of Artificial Sequence: Synthetic oligonucleotide
guacccggaagcagcagac

SEQ ID NO: 3000907 - RNA, 19 nt, Artificial Sequence
  Description of Artificial Sequence: Synthetic oligonucleotide
agauacccagaugcauuug

SEQ ID NO: 3000908 - RNA, 19 nt, Artificial Sequence
  Description of Artificial Sequence: Synthetic oligonucleotide
gugguuggggccgccauac

SEQ ID NO: 3000909 - RNA, 19 nt, Artificial Sequence
  Description of Artificial Sequence: Synthetic oligonucleotide
guugucugggagggguaag

SEQ ID NO: 3000910 - RNA, 19 nt, Artificial Sequence
  Description of Artificial Sequence: Synthetic oligonucleotide
aguagguguugaggucggg

SEQ ID NO: 3000911 - RNA, 19 nt, Artificial Sequence
  Description of Artificial Sequence: Synthetic oligonucleotide
ggugcggugaggacuucgg

SEQ ID NO: 3000912 - RNA, 19 nt, Artificial Sequence
  Description of Artificial Sequence: Synthetic oligonucleotide
aggugcggugaggacuucg

SEQ ID NO: 3000913 - RNA, 19 nt, Artificial Sequence
  Description of Artificial Sequence: Synthetic oligonucleotide
  modified_base (7)..(7): a, c, u, g, unknown or other
cuggucncggguuccaccu

SEQ ID NO: 3000914 - RNA, 19 nt, Artificial Sequence
  Description of Artificial Sequence: Synthetic oligonucleotide
ggaauuggaggugcgguga

SEQ ID NO: 3000915 - RNA, 19 nt, Artificial Sequence
  Description of Artificial Sequence: Synthetic oligonucleotide
uccacuccguuugcguugu

SEQ ID NO: 3000916 - RNA, 19 nt, Artificial Sequence
  Description of Artificial Sequence: Synthetic oligonucleotide
guucaccugaagugacauc

SEQ ID NO: 3000917 - RNA, 19 nt, Artificial Sequence
  Description of Artificial Sequence: Synthetic oligonucleotide
aagugacaucgugauugau

SEQ ID NO: 3000918 - RNA, 19 nt, Artificial Sequence
  Description of Artificial Sequence: Synthetic oligonucleotide
auuggccgacagaacgaag

SEQ ID NO: 3000919 - RNA, 19 nt, Artificial Sequence
  Description of Artificial Sequence: Synthetic oligonucleotide
accuuggccagcgucugga

SEQ ID NO: 3000920 - RNA, 19 nt, Artificial Sequence
  Description of Artificial Sequence: Synthetic oligonucleotide
ggggaaguugcgguucagg

SEQ ID NO: 3000921 - RNA, 19 nt, Artificial Sequence
  Description of Artificial Sequence: Synthetic oligonucleotide
gaagagcuggucaucuggu

SEQ ID NO: 3000922 - RNA, 19 nt, Artificial Sequence
  Description of Artificial Sequence: Synthetic oligonucleotide
aguugucugggagggguaa

SEQ ID NO: 3000923 - RNA, 19 nt, Artificial Sequence
  Description of Artificial Sequence: Synthetic oligonucleotide
auuggccaccacagcccgc

SEQ ID NO: 3000924 - RNA, 19 nt, Artificial Sequence
  Description of Artificial Sequence: Synthetic oligonucleotide
cugacuuuuccaguugucu

SEQ ID NO: 3000925 - RNA, 19 nt, Artificial Sequence
  Description of Artificial Sequence: Synthetic oligonucleotide
cccgccaugcagauuggcc

SEQ ID NO: 3000926 - RNA, 19 nt, Artificial Sequence
  Description of Artificial Sequence: Synthetic oligonucleotide
uggugguuggggccgccau

SEQ ID NO: 3000927 - RNA, 19 nt, Artificial Sequence
  Description of Artificial Sequence: Synthetic oligonucleotide
gcagacggaaguaauccca

SEQ ID NO: 3000928 - RNA, 19 nt, Artificial Sequence
  Description of Artificial Sequence: Synthetic oligonucleotide
gcggugaggacuucgguaa

SEQ ID NO: 3000929 - RNA, 19 nt, Artificial Sequence
  Description of Artificial Sequence: Synthetic oligonucleotide
cgaauccacuggaucacgg

SEQ ID NO: 3000930 - RNA, 19 nt, Artificial Sequence
  Description of Artificial Sequence: Synthetic oligonucleotide
cguuguuccugccaaccag

SEQ ID NO: 3000931 - RNA, 19 nt, Artificial Sequence
  Description of Artificial Sequence: Synthetic oligonucleotide
cagguccacuccguuugcg

SEQ ID NO: 3000932 - RNA, 19 nt, Artificial Sequence
  Description of Artificial Sequence: Synthetic oligonucleotide
cuggaucacggcccugguc

SEQ ID NO: 3000933 - RNA, 19 nt, Artificial Sequence
  Description of Artificial Sequence: Synthetic oligonucleotide
aguggugguuggggccgcc

SEQ ID NO: 3000934 - RNA, 19 nt, Artificial Sequence
  Description of Artificial Sequence: Synthetic oligonucleotide
cacuccguuugcguuguuc

SEQ ID NO: 3000935 - RNA, 19 nt, Artificial Sequence
  Description of Artificial Sequence: Synthetic oligonucleotide
gggaaguugcgguucaggu

SEQ ID NO: 3000936 - RNA, 19 nt, Artificial Sequence
  Description of Artificial Sequence: Synthetic oligonucleotide
ccguuugcguuguuccugc

SEQ ID NO: 3000937 - RNA, 19 nt, Artificial Sequence
  Description of Artificial Sequence: Synthetic oligonucleotide
cggaaguaaucccauguuc

SEQ ID NO: 3000938 - RNA, 19 nt, Artificial Sequence
  Description of Artificial Sequence: Synthetic oligonucleotide
  modified_base (8)..(8): a, c, u, g, unknown or other
ccuggucncggguuccacc

SEQ ID NO: 3000939 - RNA, 19 nt, Artificial Sequence
  Description of Artificial Sequence: Synthetic oligonucleotide
  modified_base (15)..(15): a, c, u, g, unknown or other
ucacggcccuggucncggg

SEQ ID NO: 3000940 - RNA, 19 nt, Artificial Sequence
  Description of Artificial Sequence: Synthetic oligonucleotide
ccaaccagauacccagaug

SEQ ID NO: 3000941 - RNA, 19 nt, Artificial Sequence
  Description of Artificial Sequence: Synthetic oligonucleotide
aguugcgguucagguccac

SEQ ID NO: 3000942 - RNA, 19 nt, Artificial Sequence
  Description of Artificial Sequence: Synthetic oligonucleotide
ugaugaccuuggccagcgu

SEQ ID NO: 3000943 - RNA, 19 nt, Artificial Sequence
  Description of Artificial Sequence: Synthetic oligonucleotide
  modified_base (5)..(5): a, c, u, g, unknown or other
ggucncggguuccaccuga

SEQ ID NO: 3000944 - RNA, 19 nt, Artificial Sequence
  Description of Artificial Sequence: Synthetic oligonucleotide
cgacagaacgaaguuuagg

SEQ ID NO: 3000945 - RNA, 19 nt, Artificial Sequence
  Description of Artificial Sequence: Synthetic oligonucleotide
gccauacuucucguuguag

SEQ ID NO: 3000946 - RNA, 19 nt, Artificial Sequence
  Description of Artificial Sequence: Synthetic oligonucleotide
acuugucauauggguaauu

SEQ ID NO: 3000947 - RNA, 19 nt, Artificial Sequence
  Description of Artificial Sequence: Synthetic oligonucleotide
gccgacagaacgaaguuua

SEQ ID NO: 3000948 - RNA, 19 nt, Artificial Sequence
  Description of Artificial Sequence: Synthetic oligonucleotide
gucggggaaguugcgguuc

SEQ ID NO: 3000949 - RNA, 19 nt, Artificial Sequence
  Description of Artificial Sequence: Synthetic oligonucleotide
  modified_base (2)..(2): a, c, u, g, unknown or other
cncggguuccaccugacuu

SEQ ID NO: 3000950 - RNA, 19 nt, Artificial Sequence
  Description of Artificial Sequence: Synthetic oligonucleotide
ccauguucaccugaaguga

SEQ ID NO: 3000951 - RNA, 19 nt, Artificial Sequence
  Description of Artificial Sequence: Synthetic oligonucleotide
gcgaauccacuggaucacg

SEQ ID NO: 3000952 - RNA, 19 nt, Artificial Sequence
  Description of Artificial Sequence: Synthetic oligonucleotide
aaguugcgguucaggucca

SEQ ID NO: 3000953 - RNA, 19 nt, Artificial Sequence
  Description of Artificial Sequence: Synthetic oligonucleotide
gggguaaguggugguuggg

SEQ ID NO: 3000954 - RNA, 19 nt, Artificial Sequence
  Description of Artificial Sequence: Synthetic oligonucleotide
gugaggacuucgguaacua

SEQ ID NO: 3000955 - RNA, 19 nt, Artificial Sequence
  Description of Artificial Sequence: Synthetic oligonucleotide
cagauacccagaugcauuu

SEQ ID NO: 3000956 - RNA, 19 nt, Artificial Sequence
  Description of Artificial Sequence: Synthetic oligonucleotide
ccgacagaacgaaguuuag

SEQ ID NO: 3000957 - RNA, 19 nt, Artificial Sequence
  Description of Artificial Sequence: Synthetic oligonucleotide
ccugaagugacaucgugau

SEQ ID NO: 3000958 - RNA, 19 nt, Artificial Sequence
  Description of Artificial Sequence: Synthetic oligonucleotide
acuucucguuguaguagaa

SEQ ID NO: 3000959 - RNA, 19 nt, Artificial Sequence
  Description of Artificial Sequence: Synthetic oligonucleotide
cgugauugaugaccuuggc

SEQ ID NO: 3000960 - RNA, 19 nt, Artificial Sequence
  Description of Artificial Sequence: Synthetic oligonucleotide
gggacuugucauaugggua

SEQ ID NO: 3000961 - RNA, 19 nt, Artificial Sequence
  Description of Artificial Sequence: Synthetic oligonucleotide
cagacggaaguaaucccau

SEQ ID NO: 3000962 - RNA, 19 nt, Artificial Sequence
  Description of Artificial Sequence: Synthetic oligonucleotide
cuggaagagcuggucaucu

SEQ ID NO: 3000963 - RNA, 19 nt, Artificial Sequence
  Description of Artificial Sequence: Synthetic oligonucleotide
guucagguccacuccguuu

SEQ ID NO: 3000964 - RNA, 19 nt, Artificial Sequence
  Description of Artificial Sequence: Synthetic oligonucleotide
ccauacuucucguuguagu

SEQ ID NO: 3000965 - RNA, 19 nt, Artificial Sequence
  Description of Artificial Sequence: Synthetic oligonucleotide
  modified_base (18)..(18): a, c, u, g, unknown or other
ggaucacggcccuggucnc

SEQ ID NO: 3000966 - RNA, 19 nt, Artificial Sequence
  Description of Artificial Sequence: Synthetic oligonucleotide
gcuggucaucugguguggg

SEQ ID NO: 3000967 - RNA, 19 nt, Artificial Sequence
  Description of Artificial Sequence: Synthetic oligonucleotide
ggacuucgguaacuaggga

SEQ ID NO: 3000968 - RNA, 19 nt, Artificial Sequence
  Description of Artificial Sequence: Synthetic oligonucleotide
  modified_base (4)..(4): a, c, u, g, unknown or other
gucncggguuccaccugac

SEQ ID NO: 3000969 - RNA, 19 nt, Artificial Sequence
  Description of Artificial Sequence: Synthetic oligonucleotide
agcgucuggaagagcuggu

SEQ ID NO: 3000970 - RNA, 19 nt, Artificial Sequence
  Description of Artificial Sequence: Synthetic oligonucleotide
ccugccaaccagauaccca

SEQ ID NO: 3000971 - RNA, 19 nt, Artificial Sequence
  Description of Artificial Sequence: Synthetic oligonucleotide
ccagcgucuggaagagcug

SEQ ID NO: 3000972 - RNA, 19 nt, Artificial Sequence
  Description of Artificial Sequence: Synthetic oligonucleotide
gccagcgucuggaagagcu

SEQ ID NO: 3000973 - RNA, 19 nt, Artificial Sequence
  Description of Artificial Sequence: Synthetic oligonucleotide
cguuguaguagaaguaggu

SEQ ID NO: 3000974 - RNA, 19 nt, Artificial Sequence
  Description of Artificial Sequence: Synthetic oligonucleotide
gacuugucauauggguaau

SEQ ID NO: 3000975 - RNA, 19 nt, Artificial Sequence
  Description of Artificial Sequence: Synthetic oligonucleotide
cuccguuugcguuguuccu

SEQ ID NO: 3000976 - RNA, 19 nt, Artificial Sequence
  Description of Artificial Sequence: Synthetic oligonucleotide
ggggaauuggaggugcggu

SEQ ID NO: 3000977 - RNA, 19 nt, Artificial Sequence
  Description of Artificial Sequence: Synthetic oligonucleotide
uggggccgccauacuucuc

SEQ ID NO: 3000978 - RNA, 19 nt, Artificial Sequence
  Description of Artificial Sequence: Synthetic oligonucleotide
caguugucugggaggggua

SEQ ID NO: 3000979 - RNA, 19 nt, Artificial Sequence
  Description of Artificial Sequence: Synthetic oligonucleotide
guguugaggucggggaagu

SEQ ID NO: 3000980 - RNA, 19 nt, Artificial Sequence
  Description of Artificial Sequence: Synthetic oligonucleotide
ccagauacccagaugcauu

SEQ ID NO: 3000981 - RNA, 19 nt, Artificial Sequence
  Description of Artificial Sequence: Synthetic oligonucleotide
guugcgguucagguccacu

SEQ ID NO: 3000982 - RNA, 19 nt, Artificial Sequence
  Description of Artificial Sequence: Synthetic oligonucleotide
gguuggggccgccauacuu

SEQ ID NO: 3000983 - RNA, 19 nt, Artificial Sequence
  Description of Artificial Sequence: Synthetic oligonucleotide
ggugaggacuucgguaacu

SEQ ID NO: 3000984 - RNA, 19 nt, Artificial Sequence
  Description of Artificial Sequence: Synthetic oligonucleotide
agcccgccaugcagauugg

SEQ ID NO: 3000985 - RNA, 19 nt, Artificial Sequence
  Description of Artificial Sequence: Synthetic oligonucleotide
ccacagcccgccaugcaga

SEQ ID NO: 3000986 - RNA, 19 nt, Artificial Sequence
  Description of Artificial Sequence: Synthetic oligonucleotide
cccggaagcagcagacgga

SEQ ID NO: 3000987 - RNA, 19 nt, Artificial Sequence
  Description of Artificial Sequence: Synthetic oligonucleotide
caccacagcccgccaugca

SEQ ID NO: 3000988 - RNA, 19 nt, Artificial Sequence
  Description of Artificial Sequence: Synthetic oligonucleotide
  modified_base (13)..(13): a, c, u, g, unknown or other
acggcccuggucncggguu

SEQ ID NO: 3000989 - RNA, 19 nt, Artificial Sequence
  Description of Artificial Sequence: Synthetic oligonucleotide
gugcggugaggacuucggu

SEQ ID NO: 3000990 - RNA, 19 nt, Artificial Sequence
  Description of Artificial Sequence: Synthetic oligonucleotide
gccaaccagauacccagau

SEQ ID NO: 3000991 - RNA, 19 nt, Artificial Sequence
  Description of Artificial Sequence: Synthetic oligonucleotide
gguccacuccguuugcguu

SEQ ID NO: 3000992 - RNA, 19 nt, Artificial Sequence
  Description of Artificial Sequence: Synthetic oligonucleotide
cugaagugacaucgugauu

SEQ ID NO: 3000993 - RNA, 19 nt, Artificial Sequence
  Description of Artificial Sequence: Synthetic oligonucleotide
guggugguuggggccgcca

SEQ ID NO: 3000994 - RNA, 19 nt, Artificial Sequence
  Description of Artificial Sequence: Synthetic oligonucleotide
  modified_base (11)..(11): a, c, u, g, unknown or other
ggcccuggucncggguucc

SEQ ID NO: 3000995 - RNA, 19 nt, Artificial Sequence
  Description of Artificial Sequence: Synthetic oligonucleotide
ccaguugucugggaggggu

SEQ ID NO: 3000996 - RNA, 19 nt, Artificial Sequence
  Description of Artificial Sequence: Synthetic oligonucleotide
  modified_base (14)..(14): a, c, u, g, unknown or other
cacggcccuggucncgggu

SEQ ID NO: 3000997 - RNA, 19 nt, Artificial Sequence
  Description of Artificial Sequence: Synthetic oligonucleotide
cuucgguaacuagggacuu

SEQ ID NO: 3000998 - RNA, 19 nt, Artificial Sequence
  Description of Artificial Sequence: Synthetic oligonucleotide
ccggaagcagcagacggaa

SEQ ID NO: 3000999 - RNA, 19 nt, Artificial Sequence
  Description of Artificial Sequence: Synthetic oligonucleotide
cguuugcguuguuccugcc

SEQ ID NO: 3001000 - RNA, 19 nt, Artificial Sequence
  Description of Artificial Sequence: Synthetic oligonucleotide
cggaagcagcagacggaag

SEQ ID NO: 3001001 - RNA, 19 nt, Artificial Sequence
  Description of Artificial Sequence: Synthetic oligonucleotide
gggagggguaagugguggu

SEQ ID NO: 3001002 - RNA, 19 nt, Artificial Sequence
  Description of Artificial Sequence: Synthetic oligonucleotide
gguucagguccacuccguu

SEQ ID NO: 3001003 - RNA, 19 nt, Artificial Sequence
  Description of Artificial Sequence: Synthetic oligonucleotide
ggaggugcggugaggacuu

SEQ ID NO: 3001004 - RNA, 19 nt, Artificial Sequence
  Description of Artificial Sequence: Synthetic oligonucleotide
cgccaugcagauuggccga

SEQ ID NO: 3001005 - RNA, 19 nt, Artificial Sequence
  Description of Artificial Sequence: Synthetic oligonucleotide
caucgugauugaugaccuu

SEQ ID NO: 3001006 - RNA, 19 nt, Artificial Sequence
  Description of Artificial Sequence: Synthetic oligonucleotide
acagcccgccaugcagauu

SEQ ID NO: 3001007 - RNA, 19 nt, Artificial Sequence
  Description of Artificial Sequence: Synthetic oligonucleotide
ccaccugacuuuuccaguu

SEQ ID NO: 3001008 - RNA, 19 nt, Artificial Sequence
  Description of Artificial Sequence: Synthetic oligonucleotide
gaggugcggugaggacuuc

SEQ ID NO: 3001009 - RNA, 19 nt, Artificial Sequence
  Description of Artificial Sequence: Synthetic oligonucleotide
cgguaacuagggacuuguc

SEQ ID NO: 3001010 - RNA, 19 nt, Artificial Sequence
  Description of Artificial Sequence: Synthetic oligonucleotide
cggugaggacuucgguaac

SEQ ID NO: 3001011 - RNA, 19 nt, Artificial Sequence
  Description of Artificial Sequence: Synthetic oligonucleotide
ggagggguaaguggugguu

SEQ ID NO: 3001012 - RNA, 19 nt, Artificial Sequence
  Description of Artificial Sequence: Synthetic oligonucleotide
gcccgccaugcagauuggc

SEQ ID NO: 3001013 - RNA, 19 nt, Artificial Sequence
  Description of Artificial Sequence: Synthetic oligonucleotide
cgaaguuuagggagcgaau

SEQ ID NO: 3001014 - RNA, 19 nt, Artificial Sequence
  Description of Artificial Sequence: Synthetic oligonucleotide
ggucggggaaguugcgguu

SEQ ID NO: 3001015 - RNA, 19 nt, Artificial Sequence
  Description of Artificial Sequence: Synthetic oligonucleotide
ccgccauacuucucguugu

SEQ ID NO: 3001016 - RNA, 19 nt, Artificial Sequence
  Description of Artificial Sequence: Synthetic oligonucleotide
ggccgacagaacgaaguuu

SEQ ID NO: 3001017 - RNA, 19 nt, Artificial Sequence
  Description of Artificial Sequence: Synthetic oligonucleotide
  modified_base (10)..(10): a, c, u, g, unknown or other
gcccuggucncggguucca

SEQ ID NO: 3001018 - RNA, 19 nt, Artificial Sequence
  Description of Artificial Sequence: Synthetic oligonucleotide
ggccagcgucuggaagagc

SEQ ID NO: 3001019 - RNA, 19 nt, Artificial Sequence
  Description of Artificial Sequence: Synthetic oligonucleotide
  modified_base (9)..(9): a, c, u, g, unknown or other
cccuggucncggguuccac

SEQ ID NO: 3001020 - RNA, 19 nt, Artificial Sequence
  Description of Artificial Sequence: Synthetic oligonucleotide
ccuuggccagcgucuggaa

SEQ ID NO: 3001021 - RNA, 19 nt, Artificial Sequence
  Description of Artificial Sequence: Synthetic oligonucleotide
gggagcgaauccacuggau

SEQ ID NO: 3001022 - RNA, 19 nt, Artificial Sequence
  Description of Artificial Sequence: Synthetic oligonucleotide
ggguuccaccugacuuuuc

SEQ ID NO: 3001023 - RNA, 19 nt, Artificial Sequence
  Description of Artificial Sequence: Synthetic oligonucleotide
gggccgccauacuucucgu

SEQ ID NO: 3001024 - RNA, 19 nt, Artificial Sequence
  Description of Artificial Sequence: Synthetic oligonucleotide
  modified_base (12)..(12): a, c, u, g, unknown or other
cggcccuggucncggguuc

SEQ ID NO: 3001025 - RNA, 19 nt, Artificial Sequence
  Description of Artificial Sequence: Synthetic oligonucleotide
ccacuggaucacggcccug

SEQ ID NO: 3001026 - RNA, 19 nt, Artificial Sequence
  Description of Artificial Sequence: Synthetic oligonucleotide
cggggaaguugcgguucag

SEQ ID NO: 3001027 - RNA, 19 nt, Artificial Sequence
  Description of Artificial Sequence: Synthetic oligonucleotide
cgccauacuucucguugua

SEQ ID NO: 3001028 - RNA, 19 nt, Artificial Sequence
  Description of Artificial Sequence: Synthetic oligonucleotide
ggccgccauacuucucguu

SEQ ID NO: 3001029 - RNA, 19 nt, Artificial Sequence
  Description of Artificial Sequence: Synthetic oligonucleotide
cgguucagguccacuccgu

SEQ ID NO: 3001030 - RNA, 19 nt, Artificial Sequence
  Description of Artificial Sequence: Synthetic oligonucleotide
cggguuccaccugacuuuu

SEQ ID NO: 3001031 - RNA, 19 nt, Artificial Sequence
  Description of Artificial Sequence: Synthetic oligonucleotide
ccacuccguuugcguuguu

SEQ ID NO: 3001032 - RNA, 19 nt, Artificial Sequence
  Description of Artificial Sequence: Synthetic oligonucleotide
  modified_base (1)..(1): a, c, u, g, unknown or other
ncggguuccaccugacuuu

SEQ ID NO: 3001033 - RNA, 19 nt, Artificial Sequence
  Description of Artificial Sequence: Synthetic oligonucleotide
gauuucuugccuuaguucc

SEQ ID NO: 3001034 - RNA, 19 nt, Artificial Sequence
  Description of Artificial Sequence: Synthetic oligonucleotide
aaaugaguuguucgcacuc

SEQ ID NO: 3001035 - RNA, 19 nt, Artificial Sequence
  Description of Artificial Sequence: Synthetic oligonucleotide
agagcugccgcuucaaagc

SEQ ID NO: 3001036 - RNA, 19 nt, Artificial Sequence
  Description of Artificial Sequence: Synthetic oligonucleotide
guuguucgcacucacagag

SEQ ID NO: 3001037 - RNA, 19 nt, Artificial Sequence
  Description of Artificial Sequence: Synthetic oligonucleotide
cuugcaguagcucuucugg

SEQ ID NO: 3001038 - RNA, 19 nt, Artificial Sequence
  Description of Artificial Sequence: Synthetic oligonucleotide
ucuccaaguccagagaugg

SEQ ID NO: 3001039 - RNA, 19 nt, Artificial Sequence
  Description of Artificial Sequence: Synthetic oligonucleotide
agauuucuugccuuaguuc

SEQ ID NO: 3001040 - RNA, 19 nt, Artificial Sequence
  Description of Artificial Sequence: Synthetic oligonucleotide
cagacuuucugcauggcgg

SEQ ID NO: 3001041 - RNA, 19 nt, Artificial Sequence
  Description of Artificial Sequence: Synthetic oligonucleotide
gaguuguucgcacucacag

SEQ ID NO: 3001042 - RNA, 19 nt, Artificial Sequence
  Description of Artificial Sequence: Synthetic oligonucleotide
agaggccaacaccugaugc

SEQ ID NO: 3001043 - RNA, 19 nt, Artificial Sequence
  Description of Artificial Sequence: Synthetic oligonucleotide
uacucuuccugccucagcc

SEQ ID NO: 3001044 - RNA, 19 nt, Artificial Sequence
  Description of Artificial Sequence: Synthetic oligonucleotide
cuggcaaaugaguuguucg

SEQ ID NO: 3001045 - RNA, 19 nt, Artificial Sequence
  Description of Artificial Sequence: Synthetic oligonucleotide
ugaugcaucccucuccugc

SEQ ID NO: 3001046 - RNA, 19 nt, Artificial Sequence
  Description of Artificial Sequence: Synthetic oligonucleotide
cuagguucgagauuucuug

SEQ ID NO: 3001047 - RNA, 19 nt, Artificial Sequence
  Description of Artificial Sequence: Synthetic oligonucleotide
uccaaguccagagaugggg

SEQ ID NO: 3001048 - RNA, 19 nt, Artificial Sequence
  Description of Artificial Sequence: Synthetic oligonucleotide
ucuguacuccucuagacuc

SEQ ID NO: 3001049 - RNA, 19 nt, Artificial Sequence
  Description of Artificial Sequence: Synthetic oligonucleotide
uucaaagcaucuuucucug

SEQ ID NO: 3001050 - RNA, 19 nt, Artificial Sequence
  Description of Artificial Sequence: Synthetic oligonucleotide
agguucgagauuucuugcc

SEQ ID NO: 3001051 - RNA, 19 nt, Artificial Sequence
  Description of Artificial Sequence: Synthetic oligonucleotide
ugagaggacugcuucacgc

SEQ ID NO: 3001052 - RNA, 19 nt, Artificial Sequence
  Description of Artificial Sequence: Synthetic oligonucleotide
agugccaugauccagccua

SEQ ID NO: 3001053 - RNA, 19 nt, Artificial Sequence
  Description of Artificial Sequence: Synthetic oligonucleotide
uguucgcacucacagagcu

SEQ ID NO: 3001054 - RNA, 19 nt, Artificial Sequence
  Description of Artificial Sequence: Synthetic oligonucleotide
agcaucuuucucuguggcc

SEQ ID NO: 3001055 - RNA, 19 nt, Artificial Sequence
  Description of Artificial Sequence: Synthetic oligonucleotide
accugaugcaucccucucc

SEQ ID NO: 3001056 - RNA, 19 nt, Artificial Sequence
  Description of Artificial Sequence: Synthetic oligonucleotide
ugauccagccuacucuucc

SEQ ID NO: 3001057 - RNA, 19 nt, Artificial Sequence
  Description of Artificial Sequence: Synthetic oligonucleotide
ucuccugccggauagccug

SEQ ID NO: 3001058 - RNA, 19 nt, Artificial Sequence
  Description of Artificial Sequence: Synthetic oligonucleotide
uagacucugggccagacuu

SEQ ID NO: 3001059 - RNA, 19 nt, Artificial Sequence
  Description of Artificial Sequence: Synthetic oligonucleotide
uucuguacuccucuagacu

SEQ ID NO: 3001060 - RNA, 19 nt, Artificial Sequence
  Description of Artificial Sequence: Synthetic oligonucleotide
auagccuggaucuccaagu

SEQ ID NO: 3001061 - RNA, 19 nt, Artificial Sequence
  Description of Artificial Sequence: Synthetic oligonucleotide
cuccucuagacucugggcc

SEQ ID NO: 3001062 - RNA, 19 nt, Artificial Sequence
  Description of Artificial Sequence: Synthetic oligonucleotide
acuccucuagacucugggc

SEQ ID NO: 3001063 - RNA, 19 nt, Artificial Sequence
  Description of Artificial Sequence: Synthetic oligonucleotide
uucgcacucacagagcugc

SEQ ID NO: 3001064 - RNA, 19 nt, Artificial Sequence
  Description of Artificial Sequence: Synthetic oligonucleotide
uggcaaaugaguuguucgc

SEQ ID NO: 3001065 - RNA, 19 nt, Artificial Sequence
  Description of Artificial Sequence: Synthetic oligonucleotide
agacuuucugcauggcggg

SEQ ID NO: 3001066 - RNA, 19 nt, Artificial Sequence
  Description of Artificial Sequence: Synthetic oligonucleotide
uucacgcuggcaaaugagu

SEQ ID NO: 3001067 - RNA, 19 nt, Artificial Sequence
  Description of Artificial Sequence: Synthetic oligonucleotide
augaguuguucgcacucac

SEQ ID NO: 3001068 - RNA, 19 nt, Artificial Sequence
  Description of Artificial Sequence: Synthetic oligonucleotide
ugccggauagccuggaucu

SEQ ID NO: 3001069 - RNA, 19 nt, Artificial Sequence
  Description of Artificial Sequence: Synthetic oligonucleotide
gucucguucugcuagcagc

SEQ ID NO: 3001070 - RNA, 19 nt, Artificial Sequence
  Description of Artificial Sequence: Synthetic oligonucleotide
ucuugccuuaguuccuggg

SEQ ID NO: 3001071 - RNA, 19 nt, Artificial Sequence
  Description of Artificial Sequence: Synthetic oligonucleotide
cuggcucagacucaacugc

SEQ ID NO: 3001072 - RNA, 19 nt, Artificial Sequence
  Description of Artificial Sequence: Synthetic oligonucleotide
cuuaguuccuggguagugg

SEQ ID NO: 3001073 - RNA, 19 nt, Artificial Sequence
  Description of Artificial Sequence: Synthetic oligonucleotide
agugguucuguacuccucu

SEQ ID NO: 3001074 - RNA, 19 nt, Artificial Sequence
  Description of Artificial Sequence: Synthetic oligonucleotide
gaugcaucccucuccugcc

SEQ ID NO: 3001075 - RNA, 19 nt, Artificial Sequence
  Description of Artificial Sequence: Synthetic oligonucleotide
ucucguucugcuagcagcu

SEQ ID NO: 3001076 - RNA, 19 nt, Artificial Sequence
  Description of Artificial Sequence: Synthetic oligonucleotide
aguuccuggguagugguuc

SEQ ID NO: 3001077 - RNA, 19 nt, Artificial Sequence
  Description of Artificial Sequence: Synthetic oligonucleotide
uagguucgagauuucuugc

SEQ ID NO: 3001078 - RNA, 19 nt, Artificial Sequence
  Description of Artificial Sequence: Synthetic oligonucleotide
uuaguuccuggguaguggu

SEQ ID NO: 3001079 - RNA, 19 nt, Artificial Sequence
  Description of Artificial Sequence: Synthetic oligonucleotide
ugguucuguacuccucuag

SEQ ID NO: 3001080 - RNA, 19 nt, Artificial Sequence
  Description of Artificial Sequence: Synthetic oligonucleotide
gacuggagaggccaacacc

SEQ ID NO: 3001081 - RNA, 19 nt, Artificial Sequence
  Description of Artificial Sequence: Synthetic oligonucleotide
aacugcuccucuagguucg

SEQ ID NO: 3001082 - RNA, 19 nt, Artificial Sequence
  Description of Artificial Sequence: Synthetic oligonucleotide
uccuggcucagacucaacu

SEQ ID NO: 3001083 - RNA, 19 nt, Artificial Sequence
  Description of Artificial Sequence: Synthetic oligonucleotide
aaugaguuguucgcacuca

SEQ ID NO: 3001084 - RNA, 19 nt, Artificial Sequence
  Description of Artificial Sequence: Synthetic oligonucleotide
ucuagguucgagauuucuu

SEQ ID NO: 3001085 - RNA, 19 nt, Artificial Sequence
  Description of Artificial Sequence: Synthetic oligonucleotide
ugccuuaguuccuggguag

SEQ ID NO: 3001086 - RNA, 19 nt, Artificial Sequence
  Description of Artificial Sequence: Synthetic oligonucleotide
uccucuagguucgagauuu

SEQ ID NO: 3001087 - RNA, 19 nt, Artificial Sequence
  Description of Artificial Sequence: Synthetic oligonucleotide
acucuuccugccucagccc

SEQ ID NO: 3001088 - RNA, 19 nt, Artificial Sequence
  Description of Artificial Sequence: Synthetic oligonucleotide
acuggagaggccaacaccu

SEQ ID NO: 3001089 - RNA, 19 nt, Artificial Sequence
  Description of Artificial Sequence: Synthetic oligonucleotide
cuucacgcuggcaaaugag

SEQ ID NO: 3001090 - RNA, 19 nt, Artificial Sequence
  Description of Artificial Sequence: Synthetic oligonucleotide
ucaacugcuccucuagguu

SEQ ID NO: 3001091 - RNA, 19 nt, Artificial Sequence
  Description of Artificial Sequence: Synthetic oligonucleotide
cuucaaagcaucuuucucu

SEQ ID NO: 3001092 - RNA, 19 nt, Artificial Sequence
  Description of Artificial Sequence: Synthetic oligonucleotide
acucaacugcuccucuagg

SEQ ID NO: 3001093 - RNA, 19 nt, Artificial Sequence
  Description of Artificial Sequence: Synthetic oligonucleotide
ugaguuguucgcacucaca

SEQ ID NO: 3001094 - RNA, 19 nt, Artificial Sequence
  Description of Artificial Sequence: Synthetic oligonucleotide
ucuucacuccgucucguuc

SEQ ID NO: 3001095 - RNA, 19 nt, Artificial Sequence
  Description of Artificial Sequence: Synthetic oligonucleotide
aacaccugaugcaucccuc

SEQ ID NO: 3001096 - RNA, 19 nt, Artificial Sequence
  Description of Artificial Sequence: Synthetic oligonucleotide
guucuguacuccucuagac

SEQ ID NO: 3001097 - RNA, 19 nt, Artificial Sequence
  Description of Artificial Sequence: Synthetic oligonucleotide
ucccauucucuuccuguag

SEQ ID NO: 3001098 - RNA, 19 nt, Artificial Sequence
  Description of Artificial Sequence: Synthetic oligonucleotide
uucucuguggccagcuccu

SEQ ID NO: 3001099 - RNA, 19 nt, Artificial Sequence
  Description of Artificial Sequence: Synthetic oligonucleotide
uccucuagacucugggcca

SEQ ID NO: 3001100 - RNA, 19 nt, Artificial Sequence
  Description of Artificial Sequence: Synthetic oligonucleotide
ucugggccagacuuucugc

SEQ ID NO: 3001101 - RNA, 19 nt, Artificial Sequence
  Description of Artificial Sequence: Synthetic oligonucleotide
gacugcuucacgcuggcaa

SEQ ID NO: 3001102 - RNA, 19 nt, Artificial Sequence
  Description of Artificial Sequence: Synthetic oligonucleotide
ggcggguacgcucugagag

SEQ ID NO: 3001103 - RNA, 19 nt, Artificial Sequence
  Description of Artificial Sequence: Synthetic oligonucleotide
uggccagcuccucacuccg

SEQ ID NO: 3001104 - RNA, 19 nt, Artificial Sequence
  Description of Artificial Sequence: Synthetic oligonucleotide
uugccuuaguuccugggua

SEQ ID NO: 3001105 - RNA, 19 nt, Artificial Sequence
  Description of Artificial Sequence: Synthetic oligonucleotide
ucccucuccugccggauag

SEQ ID NO: 3001106 - RNA, 19 nt, Artificial Sequence
  Description of Artificial Sequence: Synthetic oligonucleotide
agaggacugcuucacgcug

SEQ ID NO: 3001107 - RNA, 19 nt, Artificial Sequence
  Description of Artificial Sequence: Synthetic oligonucleotide
uccacacagaggacuggag

SEQ ID NO: 3001108 - RNA, 19 nt, Artificial Sequence
  Description of Artificial Sequence: Synthetic oligonucleotide
aggacugcuucacgcuggc

SEQ ID NO: 3001109 - RNA, 19 nt, Artificial Sequence
  Description of Artificial Sequence: Synthetic oligonucleotide
ugcauggcggguacgcucu

SEQ ID NO: 3001110 - RNA, 19 nt, Artificial Sequence
  Description of Artificial Sequence: Synthetic oligonucleotide
ugcuccucuagguucgaga

SEQ ID NO: 3001111 - RNA, 19 nt, Artificial Sequence
  Description of Artificial Sequence: Synthetic oligonucleotide
ugcaucccucuccugccgg

SEQ ID NO: 3001112 - RNA, 19 nt, Artificial Sequence
  Description of Artificial Sequence: Synthetic oligonucleotide
ucugagaggacugcuucac

SEQ ID NO: 3001113 - RNA, 19 nt, Artificial Sequence
  Description of Artificial Sequence: Synthetic oligonucleotide
ucuguggccagcuccucac

SEQ ID NO: 3001114 - RNA, 19 nt, Artificial Sequence
  Description of Artificial Sequence: Synthetic oligonucleotide
caacugcuccucuagguuc

SEQ ID NO: 3001115 - RNA, 19 nt, Artificial Sequence
  Description of Artificial Sequence: Synthetic oligonucleotide
uuucuugccuuaguuccug

SEQ ID NO: 3001116 - RNA, 19 nt, Artificial Sequence
  Description of Artificial Sequence: Synthetic oligonucleotide
aguuguucgcacucacaga

SEQ ID NO: 3001117 - RNA, 19 nt, Artificial Sequence
  Description of Artificial Sequence: Synthetic oligonucleotide
cacgcuggcaaaugaguug

SEQ ID NO: 3001118 - RNA, 19 nt, Artificial Sequence
  Description of Artificial Sequence: Synthetic oligonucleotide
acacagaggacuggagagg

SEQ ID NO: 3001119 - RNA, 19 nt, Artificial Sequence
  Description of Artificial Sequence: Synthetic oligonucleotide
cuggguagugguucuguac

SEQ ID NO: 3001120 - RNA, 19 nt, Artificial Sequence
  Description of Artificial Sequence: Synthetic oligonucleotide
ucacgcuggcaaaugaguu

SEQ ID NO: 3001121 - RNA, 19 nt, Artificial Sequence
  Description of Artificial Sequence: Synthetic oligonucleotide
cacagaggacuggagaggc

SEQ ID NO: 3001122 - RNA, 19 nt, Artificial Sequence
  Description of Artificial Sequence: Synthetic oligonucleotide
uccagccuacucuuccugc

SEQ ID NO: 3001123 - RNA, 19 nt, Artificial Sequence
  Description of Artificial Sequence: Synthetic oligonucleotide
cuccgucucguucugcuag

SEQ ID NO: 3001124 - RNA, 19 nt, Artificial Sequence
  Description of Artificial Sequence: Synthetic oligonucleotide
uuguucgcacucacagagc

SEQ ID NO: 3001125 - RNA, 19 nt, Artificial Sequence
  Description of Artificial Sequence: Synthetic oligonucleotide
gaggacugcuucacgcugg

SEQ ID NO: 3001126 - RNA, 19 nt, Artificial Sequence
  Description of Artificial Sequence: Synthetic oligonucleotide
uucuugccuuaguuccugg

SEQ ID NO: 3001127 - RNA, 19 nt, Artificial Sequence
  Description of Artificial Sequence: Synthetic oligonucleotide
uucgagauuucuugccuua

SEQ ID NO: 3001128 - RNA, 19 nt, Artificial Sequence
  Description of Artificial Sequence: Synthetic oligonucleotide
uggcucagacucaacugcu

SEQ ID NO: 3001129 - RNA, 19 nt, Artificial Sequence
  Description of Artificial Sequence: Synthetic oligonucleotide
agccuacucuuccugccuc

SEQ ID NO: 3001130 - RNA, 19 nt, Artificial Sequence
  Description of Artificial Sequence: Synthetic oligonucleotide
cuagcagcuucccauucuc

SEQ ID NO: 3001131 - RNA, 19 nt, Artificial Sequence
  Description of Artificial Sequence: Synthetic oligonucleotide
uucugcauggcggguacgc

SEQ ID NO: 3001132 - RNA, 19 nt, Artificial Sequence
  Description of Artificial Sequence: Synthetic oligonucleotide
ucguucugcuagcagcuuc

SEQ ID NO: 3001133 - RNA, 19 nt, Artificial Sequence
  Description of Artificial Sequence: Synthetic oligonucleotide
agccccuugcaguagcucu

SEQ ID NO: 3001134 - RNA, 19 nt, Artificial Sequence
  Description of Artificial Sequence: Synthetic oligonucleotide
ucgagauuucuugccuuag

SEQ ID NO: 3001135 - RNA, 19 nt, Artificial Sequence
  Description of Artificial Sequence: Synthetic oligonucleotide
uccucacuccgccucuuca

SEQ ID NO: 3001136 - RNA, 19 nt, Artificial Sequence
  Description of Artificial Sequence: Synthetic oligonucleotide
uguacuccucuagacucug

SEQ ID NO: 3001137 - RNA, 19 nt, Artificial Sequence
  Description of Artificial Sequence: Synthetic oligonucleotide
cuuucugcauggcggguac

SEQ ID NO: 3001138 - RNA, 19 nt, Artificial Sequence
  Description of Artificial Sequence: Synthetic oligonucleotide
ugccucagccccuugcagu

SEQ ID NO: 3001139 - RNA, 19 nt, Artificial Sequence
  Description of Artificial Sequence: Synthetic oligonucleotide
ucagacucaacugcuccuc

SEQ ID NO: 3001140 - RNA, 19 nt, Artificial Sequence
  Description of Artificial Sequence: Synthetic oligonucleotide
cugagaggacugcuucacg

SEQ ID NO: 3001141 - RNA, 19 nt, Artificial Sequence
  Description of Artificial Sequence: Synthetic oligonucleotide
acaccugaugcaucccucu

SEQ ID NO: 3001142 - RNA, 19 nt, Artificial Sequence
  Description of Artificial Sequence: Synthetic oligonucleotide
gcaaaugaguuguucgcac

SEQ ID NO: 3001143 - RNA, 19 nt, Artificial Sequence
  Description of Artificial Sequence: Synthetic oligonucleotide
gccaacaccugaugcaucc

SEQ ID NO: 3001144 - RNA, 19 nt, Artificial Sequence
  Description of Artificial Sequence: Synthetic oligonucleotide
uucacuccgucucguucug

SEQ ID NO: 3001145 - RNA, 19 nt, Artificial Sequence
  Description of Artificial Sequence: Synthetic oligonucleotide
gagaggccaacaccugaug

SEQ ID NO: 3001146 - RNA, 19 nt, Artificial Sequence
  Description of Artificial Sequence: Synthetic oligonucleotide
uucugggcccuccuggcuc

SEQ ID NO: 3001147 - RNA, 19 nt, Artificial Sequence
  Description of Artificial Sequence: Synthetic oligonucleotide
auggcggguacgcucugag

SEQ ID NO: 3001148 - RNA, 19 nt, Artificial Sequence
  Description of Artificial Sequence: Synthetic oligonucleotide
uagccuggaucuccaaguc

SEQ ID NO: 3001149 - RNA, 19 nt, Artificial Sequence
  Description of Artificial Sequence: Synthetic oligonucleotide
ucacagagcugccgcuuca

SEQ ID NO: 3001150 - RNA, 19 nt, Artificial Sequence
  Description of Artificial Sequence: Synthetic oligonucleotide
augcaucccucuccugccg

SEQ ID NO: 3001151 - RNA, 19 nt, Artificial Sequence
  Description of Artificial Sequence: Synthetic oligonucleotide
gagauuucuugccuuaguu

SEQ ID NO: 3001152 - RNA, 19 nt, Artificial Sequence
  Description of Artificial Sequence: Synthetic oligonucleotide
gcaguagcucuucugggcc

SEQ ID NO: 3001153 - RNA, 19 nt, Artificial Sequence
  Description of Artificial Sequence: Synthetic oligonucleotide
uccugccucagccccuugc

SEQ ID NO: 3001154 - RNA, 19 nt, Artificial Sequence
  Description of Artificial Sequence: Synthetic oligonucleotide
acgcuggcaaaugaguugu

SEQ ID NO: 3001155 - RNA, 19 nt, Artificial Sequence
  Description of Artificial Sequence: Synthetic oligonucleotide
cucugggccagacuuucug

SEQ ID NO: 3001156 - RNA, 19 nt, Artificial Sequence
  Description of Artificial Sequence: Synthetic oligonucleotide
ggccagacuuucugcaugg

SEQ ID NO: 3001157 - RNA, 19 nt, Artificial Sequence
  Description of Artificial Sequence: Synthetic oligonucleotide
uucccauucucuuccugua

SEQ ID NO: 3001158 - RNA, 19 nt, Artificial Sequence
  Description of Artificial Sequence: Synthetic oligonucleotide
cacuccgccucuucacucc

SEQ ID NO: 3001159 - RNA, 19 nt, Artificial Sequence
  Description of Artificial Sequence: Synthetic oligonucleotide
ccauucucuuccuguagcg

SEQ ID NO: 3001160 - RNA, 19 nt, Artificial Sequence
  Description of Artificial Sequence: Synthetic oligonucleotide
gcucagacucaacugcucc

SEQ ID NO: 3001161 - RNA, 19 nt, Artificial Sequence
  Description of Artificial Sequence: Synthetic oligonucleotide
acuccgccucuucacuccg

SEQ ID NO: 3001162 - RNA, 19 nt, Artificial Sequence
  Description of Artificial Sequence: Synthetic oligonucleotide
caguagcucuucugggccc

SEQ ID NO: 3001163 - RNA, 19 nt, Artificial Sequence
  Description of Artificial Sequence: Synthetic oligonucleotide
gguucuguacuccucuaga

SEQ ID NO: 3001164 - RNA, 19 nt, Artificial Sequence
  Description of Artificial Sequence: Synthetic oligonucleotide
ccagacuuucugcauggcg

SEQ ID NO: 3001165 - RNA, 19 nt, Artificial Sequence
  Description of Artificial Sequence: Synthetic oligonucleotide
uacgcucugagaggacugc

SEQ ID NO: 3001166 - RNA, 19 nt, Artificial Sequence
  Description of Artificial Sequence: Synthetic oligonucleotide
acagaggacuggagaggcc

SEQ ID NO: 3001167 - RNA, 19 nt, Artificial Sequence
  Description of Artificial Sequence: Synthetic oligonucleotide
uccgucucguucugcuagc

SEQ ID NO: 3001168 - RNA, 19 nt, Artificial Sequence
  Description of Artificial Sequence: Synthetic oligonucleotide
cugccggauagccuggauc

SEQ ID NO: 3001169 - RNA, 19 nt, Artificial Sequence
  Description of Artificial Sequence: Synthetic oligonucleotide
gguagugguucuguacucc

SEQ ID NO: 3001170 - RNA, 19 nt, Artificial Sequence
  Description of Artificial Sequence: Synthetic oligonucleotide
ugcuucacgcuggcaaaug

SEQ ID NO: 3001171 - RNA, 19 nt, Artificial Sequence
  Description of Artificial Sequence: Synthetic oligonucleotide
ucuagacucugggccagac

SEQ ID NO: 3001172 - RNA, 19 nt, Artificial Sequence
  Description of Artificial Sequence: Synthetic oligonucleotide
cuacucuuccugccucagc

SEQ ID NO: 3001173 - RNA, 19 nt, Artificial Sequence
  Description of Artificial Sequence: Synthetic oligonucleotide
uuucugcauggcggguacg

SEQ ID NO: 3001174 - RNA, 19 nt, Artificial Sequence
  Description of Artificial Sequence: Synthetic oligonucleotide
ucacuccgccucuucacuc

SEQ ID NO: 3001175 - RNA, 19 nt, Artificial Sequence
  Description of Artificial Sequence: Synthetic oligonucleotide
cugcauggcggguacgcuc

SEQ ID NO: 3001176 - RNA, 19 nt, Artificial Sequence
  Description of Artificial Sequence: Synthetic oligonucleotide
ucugggcccuccuggcuca

SEQ ID NO: 3001177 - RNA, 19 nt, Artificial Sequence
  Description of Artificial Sequence: Synthetic oligonucleotide
ucagccccuugcaguagcu

SEQ ID NO: 3001178 - RNA, 19 nt, Artificial Sequence
  Description of Artificial Sequence: Synthetic oligonucleotide
uccgccucuucacuccguc

SEQ ID NO: 3001179 - RNA, 19 nt, Artificial Sequence
  Description of Artificial Sequence: Synthetic oligonucleotide
acuccacacagaggacugg

SEQ ID NO: 3001180 - RNA, 19 nt, Artificial Sequence
  Description of Artificial Sequence: Synthetic oligonucleotide
gagaggacugcuucacgcu

SEQ ID NO: 3001181 - RNA, 19 nt, Artificial Sequence
  Description of Artificial Sequence: Synthetic oligonucleotide
cccauucucuuccuguagc

SEQ ID NO: 3001182 - RNA, 19 nt, Artificial Sequence
  Description of Artificial Sequence: Synthetic oligonucleotide
aucuccaaguccagagaug

SEQ ID NO: 3001183 - RNA, 19 nt, Artificial Sequence
  Description of Artificial Sequence: Synthetic oligonucleotide
gcacucacagagcugccgc

SEQ ID NO: 3001184 - RNA, 19 nt, Artificial Sequence
  Description of Artificial Sequence: Synthetic oligonucleotide
cuucacuccgucucguucu

SEQ ID NO: 3001185 - RNA, 19 nt, Artificial Sequence
  Description of Artificial Sequence: Synthetic oligonucleotide
cuucccauucucuuccugu

SEQ ID NO: 3001186 - RNA, 19 nt, Artificial Sequence
  Description of Artificial Sequence: Synthetic oligonucleotide
ccuggcucagacucaacug

SEQ ID NO: 3001187 - RNA, 19 nt, Artificial Sequence
  Description of Artificial Sequence: Synthetic oligonucleotide
cucacagagcugccgcuuc

SEQ ID NO: 3001188 - RNA, 19 nt, Artificial Sequence
  Description of Artificial Sequence: Synthetic oligonucleotide
cagaggacuggagaggcca

SEQ ID NO: 3001189 - RNA, 19 nt, Artificial Sequence
  Description of Artificial Sequence: Synthetic oligonucleotide
cugggccagacuuucugca

SEQ ID NO: 3001190 - RNA, 19 nt, Artificial Sequence
  Description of Artificial Sequence: Synthetic oligonucleotide
ugggccagacuuucugcau

SEQ ID NO: 3001191 - RNA, 19 nt, Artificial Sequence
  Description of Artificial Sequence: Synthetic oligonucleotide
cucugagaggacugcuuca

SEQ ID NO: 3001192 - RNA, 19 nt, Artificial Sequence
  Description of Artificial Sequence: Synthetic oligonucleotide
uccuggguagugguucugu

SEQ ID NO: 3001193 - RNA, 19 nt, Artificial Sequence
  Description of Artificial Sequence: Synthetic oligonucleotide
caaaugaguuguucgcacu

SEQ ID NO: 3001194 - RNA, 19 nt, Artificial Sequence
  Description of Artificial Sequence: Synthetic oligonucleotide
aggacuggagaggccaaca

SEQ ID NO: 3001195 - RNA, 19 nt, Artificial Sequence
  Description of Artificial Sequence: Synthetic oligonucleotide
guacgcucugagaggacug

SEQ ID NO: 3001196 - RNA, 19 nt, Artificial Sequence
  Description of Artificial Sequence: Synthetic oligonucleotide
cucaacugcuccucuaggu

SEQ ID NO: 3001197 - RNA, 19 nt, Artificial Sequence
  Description of Artificial Sequence: Synthetic oligonucleotide
ucugcauggcggguacgcu

SEQ ID NO: 3001198 - RNA, 19 nt, Artificial Sequence
  Description of Artificial Sequence: Synthetic oligonucleotide
aguagcucuucugggcccu

SEQ ID NO: 3001199 - RNA, 19 nt, Artificial Sequence
  Description of Artificial Sequence: Synthetic oligonucleotide
cuugccuuaguuccugggu

SEQ ID NO: 3001200 - RNA, 19 nt, Artificial Sequence
  Description of Artificial Sequence: Synthetic oligonucleotide
agacucaacugcuccucua

SEQ ID NO: 3001201 - RNA, 19 nt, Artificial Sequence
  Description of Artificial Sequence: Synthetic oligonucleotide
augauccagccuacucuuc

SEQ ID NO: 3001202 - RNA, 19 nt, Artificial Sequence
  Description of Artificial Sequence: Synthetic oligonucleotide
gcucugagaggacugcuuc

SEQ ID NO: 3001203 - RNA, 19 nt, Artificial Sequence
  Description of Artificial Sequence: Synthetic oligonucleotide
aggccaacaccugaugcau

SEQ ID NO: 3001204 - RNA, 19 nt, Artificial Sequence
  Description of Artificial Sequence: Synthetic oligonucleotide
guagugguucuguacuccu

SEQ ID NO: 3001205 - RNA, 19 nt, Artificial Sequence
  Description of Artificial Sequence: Synthetic oligonucleotide
gcggguacgcucugagagg

SEQ ID NO: 3001206 - RNA, 19 nt, Artificial Sequence
  Description of Artificial Sequence: Synthetic oligonucleotide
gccucuucacuccgucucg

SEQ ID NO: 3001207 - RNA, 19 nt, Artificial Sequence
  Description of Artificial Sequence: Synthetic oligonucleotide
ggcaaaugaguuguucgca

SEQ ID NO: 3001208 - RNA, 19 nt, Artificial Sequence
  Description of Artificial Sequence: Synthetic oligonucleotide
cugccucagccccuugcag

SEQ ID NO: 3001209 - RNA, 19 nt, Artificial Sequence
  Description of Artificial Sequence: Synthetic oligonucleotide
ucgcacucacagagcugcc

SEQ ID NO: 3001210 - RNA, 19 nt, Artificial Sequence
  Description of Artificial Sequence: Synthetic oligonucleotide
gauccagccuacucuuccu

SEQ ID NO: 3001211 - RNA, 19 nt, Artificial Sequence
  Description of Artificial Sequence: Synthetic oligonucleotide
cguucugcuagcagcuucc

SEQ ID NO: 3001212 - RNA, 19 nt, Artificial Sequence
  Description of Artificial Sequence: Synthetic oligonucleotide
gggccagacuuucugcaug

SEQ ID NO: 3001213 - RNA, 19 nt, Artificial Sequence
  Description of Artificial Sequence: Synthetic oligonucleotide
ccagccuacucuuccugcc

SEQ ID NO: 3001214 - RNA, 19 nt, Artificial Sequence
  Description of Artificial Sequence: Synthetic oligonucleotide
acuuucugcauggcgggua

SEQ ID NO: 3001215 - RNA, 19 nt, Artificial Sequence
  Description of Artificial Sequence: Synthetic oligonucleotide
uaguuccuggguagugguu

SEQ ID NO: 3001216 - RNA, 19 nt, Artificial Sequence
  Description of Artificial Sequence: Synthetic oligonucleotide
guacuccucuagacucugg

SEQ ID NO: 3001217 - RNA, 19 nt, Artificial Sequence
  Description of Artificial Sequence: Synthetic oligonucleotide
ggacuggagaggccaacac

SEQ ID NO: 3001218 - RNA, 19 nt, Artificial Sequence
  Description of Artificial Sequence: Synthetic oligonucleotide
cuccugccggauagccugg

SEQ ID NO: 3001219 - RNA, 19 nt, Artificial Sequence
  Description of Artificial Sequence: Synthetic oligonucleotide
ccuugcaguagcucuucug

SEQ ID NO: 3001220 - RNA, 19 nt, Artificial Sequence
  Description of Artificial Sequence: Synthetic oligonucleotide
gguucgagauuucuugccu

SEQ ID NO: 3001221 - RNA, 19 nt, Artificial Sequence
  Description of Artificial Sequence: Synthetic oligonucleotide
uggcggguacgcucugaga

SEQ ID NO: 3001222 - RNA, 19 nt, Artificial Sequence
  Description of Artificial Sequence: Synthetic oligonucleotide
caugauccagccuacucuu

SEQ ID NO: 3001223 - RNA, 19 nt, Artificial Sequence
  Description of Artificial Sequence: Synthetic oligonucleotide
caccugaugcaucccucuc

SEQ ID NO: 3001224 - RNA, 19 nt, Artificial Sequence
  Description of Artificial Sequence: Synthetic oligonucleotide
gccaugauccagccuacuc

SEQ ID NO: 3001225 - RNA, 19 nt, Artificial Sequence
  Description of Artificial Sequence: Synthetic oligonucleotide
gaggacuggagaggccaac

SEQ ID NO: 3001226 - RNA, 19 nt, Artificial Sequence
  Description of Artificial Sequence: Synthetic oligonucleotide
cugaugcaucccucuccug

SEQ ID NO: 3001227 - RNA, 19 nt, Artificial Sequence
  Description of Artificial Sequence: Synthetic oligonucleotide
agcuucccauucucuuccu

SEQ ID NO: 3001228 - RNA, 19 nt, Artificial Sequence
  Description of Artificial Sequence: Synthetic oligonucleotide
guucugcuagcagcuuccc

SEQ ID NO: 3001229 - RNA, 19 nt, Artificial Sequence
  Description of Artificial Sequence: Synthetic oligonucleotide
gcccuccuggcucagacuc

SEQ ID NO: 3001230 - RNA, 19 nt, Artificial Sequence
  Description of Artificial Sequence: Synthetic oligonucleotide
gcuucacgcuggcaaauga

SEQ ID NO: 3001231 - RNA, 19 nt, Artificial Sequence
  Description of Artificial Sequence: Synthetic oligonucleotide
guucgcacucacagagcug

SEQ ID NO: 3001232 - RNA, 19 nt, Artificial Sequence
  Description of Artificial Sequence: Synthetic oligonucleotide
uagcucuucugggcccucc

SEQ ID NO: 3001233 - RNA, 19 nt, Artificial Sequence
  Description of Artificial Sequence: Synthetic oligonucleotide
cucagacucaacugcuccu

SEQ ID NO: 3001234 - RNA, 19 nt, Artificial Sequence
  Description of Artificial Sequence: Synthetic oligonucleotide
uuccuggguagugguucug

SEQ ID NO: 3001235 - RNA, 19 nt, Artificial Sequence
  Description of Artificial Sequence: Synthetic oligonucleotide
ggguagugguucuguacuc

SEQ ID NO: 3001236 - RNA, 19 nt, Artificial Sequence
  Description of Artificial Sequence: Synthetic oligonucleotide
gcuggcaaaugaguuguuc

SEQ ID NO: 3001237 - RNA, 19 nt, Artificial Sequence
  Description of Artificial Sequence: Synthetic oligonucleotide
cuccacacagaggacugga

SEQ ID NO: 3001238 - RNA, 19 nt, Artificial Sequence
  Description of Artificial Sequence: Synthetic oligonucleotide
guucgagauuucuugccuu

SEQ ID NO: 3001239 - RNA, 19 nt, Artificial Sequence
  Description of Artificial Sequence: Synthetic oligonucleotide
ucacuccgucucguucugc

SEQ ID NO: 3001240 - RNA, 19 nt, Artificial Sequence
  Description of Artificial Sequence: Synthetic oligonucleotide
acuccgucucguucugcua

SEQ ID NO: 3001241 - RNA, 19 nt, Artificial Sequence
  Description of Artificial Sequence: Synthetic oligonucleotide
acucacagagcugccgcuu

SEQ ID NO: 3001242 - RNA, 19 nt, Artificial Sequence
  Description of Artificial Sequence: Synthetic oligonucleotide
ccucacuccgccucuucac

SEQ ID NO: 3001243 - RNA, 19 nt, Artificial Sequence
  Description of Artificial Sequence: Synthetic oligonucleotide
ccggauagccuggaucucc

SEQ ID NO: 3001244 - RNA, 19 nt, Artificial Sequence
  Description of Artificial Sequence: Synthetic oligonucleotide
ccacacagaggacuggaga

SEQ ID NO: 3001245 - RNA, 19 nt, Artificial Sequence
  Description of Artificial Sequence: Synthetic oligonucleotide
ugccgcuucaaagcaucuu

SEQ ID NO: 3001246 - RNA, 19 nt, Artificial Sequence
  Description of Artificial Sequence: Synthetic oligonucleotide
cuguacuccucuagacucu

SEQ ID NO: 3001247 - RNA, 19 nt, Artificial Sequence
  Description of Artificial Sequence: Synthetic oligonucleotide
guuccuggguagugguucu

SEQ ID NO: 3001248 - RNA, 19 nt, Artificial Sequence
  Description of Artificial Sequence: Synthetic oligonucleotide
ccgcuucaaagcaucuuuc

SEQ ID NO: 3001249 - RNA, 19 nt, Artificial Sequence
  Description of Artificial Sequence: Synthetic oligonucleotide
gcugccgcuucaaagcauc

SEQ ID NO: 3001250 - RNA, 19 nt, Artificial Sequence
  Description of Artificial Sequence: Synthetic oligonucleotide
acgcucugagaggacugcu

SEQ ID NO: 3001251 - RNA, 19 nt, Artificial Sequence
  Description of Artificial Sequence: Synthetic oligonucleotide
ccaugauccagccuacucu

SEQ ID NO: 3001252 - RNA, 19 nt, Artificial Sequence
  Description of Artificial Sequence: Synthetic oligonucleotide
cacuccgucucguucugcu

SEQ ID NO: 3001253 - RNA, 19 nt, Artificial Sequence
  Description of Artificial Sequence: Synthetic oligonucleotide
gugguucuguacuccucua

SEQ ID NO: 3001254 - RNA, 19 nt, Artificial Sequence
  Description of Artificial Sequence: Synthetic oligonucleotide
gcuccucuagguucgagau

SEQ ID NO: 3001255 - RNA, 19 nt, Artificial Sequence
  Description of Artificial Sequence: Synthetic oligonucleotide
cucacuccgccucuucacu

SEQ ID NO: 3001256 - RNA, 19 nt, Artificial Sequence
  Description of Artificial Sequence: Synthetic oligonucleotide
cuccucacuccgccucuuc

SEQ ID NO: 3001257 - RNA, 19 nt, Artificial Sequence
  Description of Artificial Sequence: Synthetic oligonucleotide
aucccucuccugccggaua

SEQ ID NO: 3001258 - RNA, 19 nt, Artificial Sequence
  Description of Artificial Sequence: Synthetic oligonucleotide
gguacgcucugagaggacu

SEQ ID NO: 3001259 - RNA, 19 nt, Artificial Sequence
  Description of Artificial Sequence: Synthetic oligonucleotide
cucuagguucgagauuucu

SEQ ID NO: 3001260 - RNA, 19 nt, Artificial Sequence
  Description of Artificial Sequence: Synthetic oligonucleotide
gggcccuccuggcucagac

SEQ ID NO: 3001261 - RNA, 19 nt, Artificial Sequence
  Description of Artificial Sequence: Synthetic oligonucleotide
agaggacuggagaggccaa

SEQ ID NO: 3001262 - RNA, 19 nt, Artificial Sequence
  Description of Artificial Sequence: Synthetic oligonucleotide
ccucuccugccggauagcc

SEQ ID NO: 3001263 - RNA, 19 nt, Artificial Sequence
  Description of Artificial Sequence: Synthetic oligonucleotide
cuagacucugggccagacu

SEQ ID NO: 3001264 - RNA, 19 nt, Artificial Sequence
  Description of Artificial Sequence: Synthetic oligonucleotide
cuccuggcucagacucaac

SEQ ID NO: 3001265 - RNA, 19 nt, Artificial Sequence
  Description of Artificial Sequence: Synthetic oligonucleotide
uccugccggauagccugga

SEQ ID NO: 3001266 - RNA, 19 nt, Artificial Sequence
  Description of Artificial Sequence: Synthetic oligonucleotide
gccgcuucaaagcaucuuu

SEQ ID NO: 3001267 - RNA, 19 nt, Artificial Sequence
  Description of Artificial Sequence: Synthetic oligonucleotide
cugcuccucuagguucgag

SEQ ID NO: 3001268 - RNA, 19 nt, Artificial Sequence
  Description of Artificial Sequence: Synthetic oligonucleotide
gcuagcagcuucccauucu

SEQ ID NO: 3001269 - RNA, 19 nt, Artificial Sequence
  Description of Artificial Sequence: Synthetic oligonucleotide
agacucugggccagacuuu

SEQ ID NO: 3001270 - RNA, 19 nt, Artificial Sequence
  Description of Artificial Sequence: Synthetic oligonucleotide
ccuacucuuccugccucag

SEQ ID NO: 3001271 - RNA, 19 nt, Artificial Sequence
  Description of Artificial Sequence: Synthetic oligonucleotide
cagacucaacugcuccucu

SEQ ID NO: 3001272 - RNA, 19 nt, Artificial Sequence
  Description of Artificial Sequence: Synthetic oligonucleotide
acucugggccagacuuucu

SEQ ID NO: 3001273 - RNA, 19 nt, Artificial Sequence
  Description of Artificial Sequence: Synthetic oligonucleotide
gccuacucuuccugccuca

SEQ ID NO: 3001274 - RNA, 19 nt, Artificial Sequence
  Description of Artificial Sequence: Synthetic oligonucleotide
ggcucagacucaacugcuc

SEQ ID NO: 3001275 - RNA, 19 nt, Artificial Sequence
  Description of Artificial Sequence: Synthetic oligonucleotide
cgccucuucacuccgucuc

SEQ ID NO: 3001276 - RNA, 19 nt, Artificial Sequence
  Description of Artificial Sequence: Synthetic oligonucleotide
ccucuagacucugggccag

SEQ ID NO: 3001277 - RNA, 19 nt, Artificial Sequence
  Description of Artificial Sequence: Synthetic oligonucleotide
cucuccugccggauagccu

SEQ ID NO: 3001278 - RNA, 19 nt, Artificial Sequence
  Description of Artificial Sequence: Synthetic oligonucleotide
acugcuccucuagguucga

SEQ ID NO: 3001279 - RNA, 19 nt, Artificial Sequence
  Description of Artificial Sequence: Synthetic oligonucleotide
cacucacagagcugccgcu

SEQ ID NO: 3001280 - RNA, 19 nt, Artificial Sequence
  Description of Artificial Sequence: Synthetic oligonucleotide
agcugccgcuucaaagcau

SEQ ID NO: 3001281 - RNA, 19 nt, Artificial Sequence
  Description of Artificial Sequence: Synthetic oligonucleotide
gacuuucugcauggcgggu

SEQ ID NO: 3001282 - RNA, 19 nt, Artificial Sequence
  Description of Artificial Sequence: Synthetic oligonucleotide
cagccccuugcaguagcuc

SEQ ID NO: 3001283 - RNA, 19 nt, Artificial Sequence
  Description of Artificial Sequence: Synthetic oligonucleotide
cgcacucacagagcugccg

SEQ ID NO: 3001284 - RNA, 19 nt, Artificial Sequence
  Description of Artificial Sequence: Synthetic oligonucleotide
gccucagccccuugcagua

SEQ ID NO: 3001285 - RNA, 19 nt, Artificial Sequence
  Description of Artificial Sequence: Synthetic oligonucleotide
ccugaugcaucccucuccu

SEQ ID NO: 3001286 - RNA, 19 nt, Artificial Sequence
  Description of Artificial Sequence: Synthetic oligonucleotide
cagccuacucuuccugccu

SEQ ID NO: 3001287 - RNA, 19 nt, Artificial Sequence
  Description of Artificial Sequence: Synthetic oligonucleotide
ccugccucagccccuugca

SEQ ID NO: 3001288 - RNA, 19 nt, Artificial Sequence
  Description of Artificial Sequence: Synthetic oligonucleotide
cgucucguucugcuagcag

SEQ ID NO: 3001289 - RNA, 19 nt, Artificial Sequence
  Description of Artificial Sequence: Synthetic oligonucleotide
cauggcggguacgcucuga

SEQ ID NO: 3001290 - RNA, 19 nt, Artificial Sequence
  Description of Artificial Sequence: Synthetic oligonucleotide
cacagagcugccgcuucaa

SEQ ID NO: 3001291 - RNA, 19 nt, Artificial Sequence
  Description of Artificial Sequence: Synthetic oligonucleotide
cuucugggcccuccuggcu

SEQ ID NO: 3001292 - RNA, 19 nt, Artificial Sequence
  Description of Artificial Sequence: Synthetic oligonucleotide
ggauagccuggaucuccaa

SEQ ID NO: 3001293 - RNA, 19 nt, Artificial Sequence
  Description of Artificial Sequence: Synthetic oligonucleotide
gccagacuuucugcauggc

SEQ ID NO: 3001294 - RNA, 19 nt, Artificial Sequence
  Description of Artificial Sequence: Synthetic oligonucleotide
gcaucccucuccugccgga

SEQ ID NO: 3001295 - RNA, 19 nt, Artificial Sequence
  Description of Artificial Sequence: Synthetic oligonucleotide
ggagaggccaacaccugau

SEQ ID NO: 3001296 - RNA, 19 nt, Artificial Sequence
  Description of Artificial Sequence: Synthetic oligonucleotide
cugcuagcagcuucccauu

SEQ ID NO: 3001297 - RNA, 19 nt, Artificial Sequence
  Description of Artificial Sequence: Synthetic oligonucleotide
guagcucuucugggcccuc

SEQ ID NO: 3001298 - RNA, 19 nt, Artificial Sequence
  Description of Artificial Sequence: Synthetic oligonucleotide
ugggcccuccuggcucaga

SEQ ID NO: 3001299 - RNA, 19 nt, Artificial Sequence
  Description of Artificial Sequence: Synthetic oligonucleotide
cugccgcuucaaagcaucu

SEQ ID NO: 3001300 - RNA, 19 nt, Artificial Sequence
  Description of Artificial Sequence: Synthetic oligonucleotide
cucuagacucugggccaga

SEQ ID NO: 3001301 - RNA, 19 nt, Artificial Sequence
  Description of Artificial Sequence: Synthetic oligonucleotide
ccucuagguucgagauuuc

SEQ ID NO: 3001302 - RNA, 19 nt, Artificial Sequence
  Description of Artificial Sequence: Synthetic oligonucleotide
ggccaacaccugaugcauc

SEQ ID NO: 3001303 - RNA, 19 nt, Artificial Sequence
  Description of Artificial Sequence: Synthetic oligonucleotide
cgcuucaaagcaucuuucu

SEQ ID NO: 3001304 - RNA, 19 nt, Artificial Sequence
  Description of Artificial Sequence: Synthetic oligonucleotide
cggauagccuggaucucca

SEQ ID NO: 3001305 - RNA, 19 nt, Artificial Sequence
  Description of Artificial Sequence: Synthetic oligonucleotide
cucuucacuccgucucguu

SEQ ID NO: 3001306 - RNA, 19 nt, Artificial Sequence
  Description of Artificial Sequence: Synthetic oligonucleotide
gcauggcggguacgcucug

SEQ ID NO: 3001307 - RNA, 19 nt, Artificial Sequence
  Description of Artificial Sequence: Synthetic oligonucleotide
cuccucuagguucgagauu

SEQ ID NO: 3001308 - RNA, 19 nt, Artificial Sequence
  Description of Artificial Sequence: Synthetic oligonucleotide
ccucagccccuugcaguag

SEQ ID NO: 3001309 - RNA, 19 nt, Artificial Sequence
  Description of Artificial Sequence: Synthetic oligonucleotide
cggguacgcucugagagga

SEQ ID NO: 3001310 - RNA, 19 nt, Artificial Sequence
  Description of Artificial Sequence: Synthetic oligonucleotide
ggccagcuccucacuccgc

SEQ ID NO: 3001311 - RNA, 19 nt, Artificial Sequence
  Description of Artificial Sequence: Synthetic oligonucleotide
cuguggccagcuccucacu

SEQ ID NO: 3001312 - RNA, 19 nt, Artificial Sequence
  Description of Artificial Sequence: Synthetic oligonucleotide
ggguacgcucugagaggac

SEQ ID NO: 3001313 - RNA, 19 nt, Artificial Sequence
  Description of Artificial Sequence: Synthetic oligonucleotide
cagugccaugauccagccu

SEQ ID NO: 3001314 - RNA, 19 nt, Artificial Sequence
  Description of Artificial Sequence: Synthetic oligonucleotide
ccccuugcaguagcucuuc

SEQ ID NO: 3001315 - RNA, 19 nt, Artificial Sequence
  Description of Artificial Sequence: Synthetic oligonucleotide
cugcuucacgcuggcaaau

SEQ ID NO: 3001316 - RNA, 19 nt, Artificial Sequence
  Description of Artificial Sequence: Synthetic oligonucleotide
cgagauuucuugccuuagu

SEQ ID NO: 3001317 - RNA, 19 nt, Artificial Sequence
  Description of Artificial Sequence: Synthetic oligonucleotide
gccggauagccuggaucuc

SEQ ID NO: 3001318 - RNA, 19 nt, Artificial Sequence
  Description of Artificial Sequence: Synthetic oligonucleotide
ccuccuggcucagacucaa

SEQ ID NO: 3001319 - RNA, 19 nt, Artificial Sequence
  Description of Artificial Sequence: Synthetic oligonucleotide
gccuuaguuccuggguagu

SEQ ID NO: 3001320 - RNA, 19 nt, Artificial Sequence
  Description of Artificial Sequence: Synthetic oligonucleotide
cuccgccucuucacuccgu

SEQ ID NO: 3001321 - RNA, 19 nt, Artificial Sequence
  Description of Artificial Sequence: Synthetic oligonucleotide
ggcccuccuggcucagacu

SEQ ID NO: 3001322 - RNA, 19 nt, Artificial Sequence
  Description of Artificial Sequence: Synthetic oligonucleotide
cucguucugcuagcagcuu

SEQ ID NO: 3001323 - RNA, 19 nt, Artificial Sequence
  Description of Artificial Sequence: Synthetic oligonucleotide
ccgucucguucugcuagca

SEQ ID NO: 3001324 - RNA, 19 nt, Artificial Sequence
  Description of Artificial Sequence: Synthetic oligonucleotide
ccucuucacuccgucucgu

SEQ ID NO: 3001325 - RNA, 19 nt, Artificial Sequence
  Description of Artificial Sequence: Synthetic oligonucleotide
gccccuugcaguagcucuu

SEQ ID NO: 3001326 - RNA, 19 nt, Artificial Sequence
  Description of Artificial Sequence: Synthetic oligonucleotide
ccgccucuucacuccgucu

SEQ ID NO: 3001327 - RNA, 19 nt, Artificial Sequence
  Description of Artificial Sequence: Synthetic oligonucleotide
cccuugcaguagcucuucu

SEQ ID NO: 3001328 - RNA, 19 nt, Artificial Sequence
  Description of Artificial Sequence: Synthetic oligonucleotide
cgcucugagaggacugcuu

SEQ ID NO: 3001329 - RNA, 19 nt, Artificial Sequence
  Description of Artificial Sequence: Synthetic oligonucleotide
ccugccggauagccuggau

SEQ ID NO: 3001330 - RNA, 19 nt, Artificial Sequence
  Description of Artificial Sequence: Synthetic oligonucleotide
cgcuggcaaaugaguuguu

SEQ ID NO: 3001331 - RNA, 19 nt, Artificial Sequence
  Description of Artificial Sequence: Synthetic oligonucleotide
aauuuaucauuucuaggcc

SEQ ID NO: 3001332 - RNA, 19 nt, Artificial Sequence
  Description of Artificial Sequence: Synthetic oligonucleotide
uaauuuaucauuucuaggc

SEQ ID NO: 3001333 - RNA, 19 nt, Artificial Sequence
  Description of Artificial Sequence: Synthetic oligonucleotide
aauaacuucauccaccuga

SEQ ID NO: 3001334 - RNA, 19 nt, Artificial Sequence
  Description of Artificial Sequence: Synthetic oligonucleotide
aacuucauccaccugauuc

SEQ ID NO: 3001335 - RNA, 19 nt, Artificial Sequence
  Description of Artificial Sequence: Synthetic oligonucleotide
aguuguuuggaucuguugc

SEQ ID NO: 3001336 - RNA, 19 nt, Artificial Sequence
  Description of Artificial Sequence: Synthetic oligonucleotide
caaaucuugguccagaugg

SEQ ID NO: 3001337 - RNA, 19 nt, Artificial Sequence
  Description of Artificial Sequence: Synthetic oligonucleotide
uacaucaauaacuucaucc

SEQ ID NO: 3001338 - RNA, 19 nt, Artificial Sequence
  Description of Artificial Sequence: Synthetic oligonucleotide
aucaucaucauuuaggugu

SEQ ID NO: 3001339 - RNA, 19 nt, Artificial Sequence
  Description of Artificial Sequence: Synthetic oligonucleotide
uuagcaaaaggauagcugc

SEQ ID NO: 3001340 - RNA, 19 nt, Artificial Sequence
  Description of Artificial Sequence: Synthetic oligonucleotide
aaagcaguugcauuauccg

SEQ ID NO: 3001341 - RNA, 19 nt, Artificial Sequence
  Description of Artificial Sequence: Synthetic oligonucleotide
ugaaucaucuuccaaaaga

SEQ ID NO: 3001342 - RNA, 19 nt, Artificial Sequence
  Description of Artificial Sequence: Synthetic oligonucleotide
aaaagauuucuccuuucac

SEQ ID NO: 3001343 - RNA, 19 nt, Artificial Sequence
  Description of Artificial Sequence: Synthetic oligonucleotide
uuaauuuaucauuucuagg

SEQ ID NO: 3001344 - RNA, 19 nt, Artificial Sequence
  Description of Artificial Sequence: Synthetic oligonucleotide
auuuaucauuucuaggccc

SEQ ID NO: 3001345 - RNA, 19 nt, Artificial Sequence
  Description of Artificial Sequence: Synthetic oligonucleotide
aauauuuucuugcauuaca

SEQ ID NO: 3001346 - RNA, 19 nt, Artificial Sequence
  Description of Artificial Sequence: Synthetic oligonucleotide
uuuuauuuugcauccacgc

SEQ ID NO: 3001347 - RNA, 19 nt, Artificial Sequence
  Description of Artificial Sequence: Synthetic oligonucleotide
uugcauuacaucaauaacu

SEQ ID NO: 3001348 - RNA, 19 nt, Artificial Sequence
  Description of Artificial Sequence: Synthetic oligonucleotide
uuauuuugcauccacgcca

SEQ ID NO: 3001349 - RNA, 19 nt, Artificial Sequence
  Description of Artificial Sequence: Synthetic oligonucleotide
auuuucuugcauuacauca

SEQ ID NO: 3001350 - RNA, 19 nt, Artificial Sequence
  Description of Artificial Sequence: Synthetic oligonucleotide
gacaucaucaucauuuagg

SEQ ID NO: 3001351 - RNA, 19 nt, Artificial Sequence
  Description of Artificial Sequence: Synthetic oligonucleotide
gauaaucauuagcaaaagg

SEQ ID NO: 3001352 - RNA, 19 nt, Artificial Sequence
  Description of Artificial Sequence: Synthetic oligonucleotide
uaagcuuucugauuugucc

SEQ ID NO: 3001353 - RNA, 19 nt, Artificial Sequence
  Description of Artificial Sequence: Synthetic oligonucleotide
cauuacaucaauaacuuca

SEQ ID NO: 3001354 - RNA, 19 nt, Artificial Sequence
  Description of Artificial Sequence: Synthetic oligonucleotide
uuucacuagacccagugac

SEQ ID NO: 3001355 - RNA, 19 nt, Artificial Sequence
  Description of Artificial Sequence: Synthetic oligonucleotide
ugucgcuugaacuugggag

SEQ ID NO: 3001356 - RNA, 19 nt, Artificial Sequence
  Description of Artificial Sequence: Synthetic oligonucleotide
uuuauuuugcauccacgcc

SEQ ID NO: 3001357 - RNA, 19 nt, Artificial Sequence
  Description of Artificial Sequence: Synthetic oligonucleotide
uauccgauaagcuuucuga

SEQ ID NO: 3001358 - RNA, 19 nt, Artificial Sequence
  Description of Artificial Sequence: Synthetic oligonucleotide
ucuccuuucacuuuucacu

SEQ ID NO: 3001359 - RNA, 19 nt, Artificial Sequence
  Description of Artificial Sequence: Synthetic oligonucleotide
aucauuagcaaaaggauag

SEQ ID NO: 3001360 - RNA, 19 nt, Artificial Sequence
  Description of Artificial Sequence: Synthetic oligonucleotide
aucaauaacuucauccacc

SEQ ID NO: 3001361 - RNA, 19 nt, Artificial Sequence
  Description of Artificial Sequence: Synthetic oligonucleotide
uuuguaauauuuucuugca

SEQ ID NO: 3001362 - RNA, 19 nt, Artificial Sequence
  Description of Artificial Sequence: Synthetic oligonucleotide
uuuaucauuucuaggccca

SEQ ID NO: 3001363 - RNA, 19 nt, Artificial Sequence
  Description of Artificial Sequence: Synthetic oligonucleotide
cuuuuauuuugcauccacg

SEQ ID NO: 3001364 - RNA, 19 nt, Artificial Sequence
  Description of Artificial Sequence: Synthetic oligonucleotide
ugcuuaauuuaucauuucu

SEQ ID NO: 3001365 - RNA, 19 nt, Artificial Sequence
  Description of Artificial Sequence: Synthetic oligonucleotide
aguucaucuagucucucuc

SEQ ID NO: 3001366 - RNA, 19 nt, Artificial Sequence
  Description of Artificial Sequence: Synthetic oligonucleotide
cuuucaauuaccuuuguaa

SEQ ID NO: 3001367 - RNA, 19 nt, Artificial Sequence
  Description of Artificial Sequence: Synthetic oligonucleotide
uguccugcaguucaucuag

SEQ ID NO: 3001368 - RNA, 19 nt, Artificial Sequence
  Description of Artificial Sequence: Synthetic oligonucleotide
aagauuucuccuuucacuu

SEQ ID NO: 3001369 - RNA, 19 nt, Artificial Sequence
  Description of Artificial Sequence: Synthetic oligonucleotide
ucaauuaccuuuguaauau

SEQ ID NO: 3001370 - RNA, 19 nt, Artificial Sequence
  Description of Artificial Sequence: Synthetic oligonucleotide
ucaauaacuucauccaccu

SEQ ID NO: 3001371 - RNA, 19 nt, Artificial Sequence
  Description of Artificial Sequence: Synthetic oligonucleotide
uuuaggugucgcuugaacu

SEQ ID NO: 3001372 - RNA, 19 nt, Artificial Sequence
  Description of Artificial Sequence: Synthetic oligonucleotide
auuuaggugucgcuugaac

SEQ ID NO: 3001373 - RNA, 19 nt, Artificial Sequence
  Description of Artificial Sequence: Synthetic oligonucleotide
caaaaggauagcugcagcc

SEQ ID NO: 3001374 - RNA, 19 nt, Artificial Sequence
  Description of Artificial Sequence: Synthetic oligonucleotide
aagcuuucugauuuguccu

SEQ ID NO: 3001375 - RNA, 19 nt, Artificial Sequence
  Description of Artificial Sequence: Synthetic oligonucleotide
ugcauuacaucaauaacuu

SEQ ID NO: 3001376 - RNA, 19 nt, Artificial Sequence
  Description of Artificial Sequence: Synthetic oligonucleotide
uuggaucuguugcugaaag

SEQ ID NO: 3001377 - RNA, 19 nt, Artificial Sequence
  Description of Artificial Sequence: Synthetic oligonucleotide
accacauuugccuucggag

SEQ ID NO: 3001378 - RNA, 19 nt, Artificial Sequence
  Description of Artificial Sequence: Synthetic oligonucleotide
uuaccuuuguaauauuuuc

SEQ ID NO: 3001379 - RNA, 19 nt, Artificial Sequence
  Description of Artificial Sequence: Synthetic oligonucleotide
ucacuuuucacuagaccca

SEQ ID NO: 3001380 - RNA, 19 nt, Artificial Sequence
  Description of Artificial Sequence: Synthetic oligonucleotide
uuuucuugcauuacaucaa

SEQ ID NO: 3001381 - RNA, 19 nt, Artificial Sequence
  Description of Artificial Sequence: Synthetic oligonucleotide
acuugggaggcauacuuuc

SEQ ID NO: 3001382 - RNA, 19 nt, Artificial Sequence
  Description of Artificial Sequence: Synthetic oligonucleotide
agugacaucaucaucauuu

SEQ ID NO: 3001383 - RNA, 19 nt, Artificial Sequence
  Description of Artificial Sequence: Synthetic oligonucleotide
cuugcauuacaucaauaac

SEQ ID NO: 3001384 - RNA, 19 nt, Artificial Sequence
  Description of Artificial Sequence: Synthetic oligonucleotide
aucugaaucaucuuccaaa

SEQ ID NO: 3001385 - RNA, 19 nt, Artificial Sequence
  Description of Artificial Sequence: Synthetic oligonucleotide
caugauggcuuuuauuuug

SEQ ID NO: 3001386 - RNA, 19 nt, Artificial Sequence
  Description of Artificial Sequence: Synthetic oligonucleotide
gucgcuugaacuugggagg

SEQ ID NO: 3001387 - RNA, 19 nt, Artificial Sequence
  Description of Artificial Sequence: Synthetic oligonucleotide
uucuaggcccaaaucuugg

SEQ ID NO: 3001388 - RNA, 19 nt, Artificial Sequence
  Description of Artificial Sequence: Synthetic oligonucleotide
uaccuuuguaauauuuucu

SEQ ID NO: 3001389 - RNA, 19 nt, Artificial Sequence
  Description of Artificial Sequence: Synthetic oligonucleotide
ucugaaucaucuuccaaaa

SEQ ID NO: 3001390 - RNA, 19 nt, Artificial Sequence
  Description of Artificial Sequence: Synthetic oligonucleotide
aaaaggauagcugcagcca

SEQ ID NO: 3001391 - RNA, 19 nt, Artificial Sequence
  Description of Artificial Sequence: Synthetic oligonucleotide
uucggaguuguuuggaucu

SEQ ID NO: 3001392 - RNA, 19 nt, Artificial Sequence
  Description of Artificial Sequence: Synthetic oligonucleotide
uaggcccaaaucuuggucc

SEQ ID NO: 3001393 - RNA, 19 nt, Artificial Sequence
  Description of Artificial Sequence: Synthetic oligonucleotide
uuucuaggcccaaaucuug

SEQ ID NO: 3001394 - RNA, 19 nt, Artificial Sequence
  Description of Artificial Sequence: Synthetic oligonucleotide
ugcauuauccgauaagcuu

SEQ ID NO: 3001395 - RNA, 19 nt, Artificial Sequence
  Description of Artificial Sequence: Synthetic oligonucleotide
aucaucauuuaggugucgc

SEQ ID NO: 3001396 - RNA, 19 nt, Artificial Sequence
  Description of Artificial Sequence: Synthetic oligonucleotide
aguugcauuauccgauaag

SEQ ID NO: 3001397 - RNA, 19 nt, Artificial Sequence
  Description of Artificial Sequence: Synthetic oligonucleotide
aucauuuaggugucgcuug

SEQ ID NO: 3001398 - RNA, 19 nt, Artificial Sequence
  Description of Artificial Sequence: Synthetic oligonucleotide
uuauccgauaagcuuucug

SEQ ID NO: 3001399 - RNA, 19 nt, Artificial Sequence
  Description of Artificial Sequence: Synthetic oligonucleotide
acaugcuuaauuuaucauu

SEQ ID NO: 3001400 - RNA, 19 nt, Artificial Sequence
  Description of Artificial Sequence: Synthetic oligonucleotide
cuuuucacuagacccagug

SEQ ID NO: 3001401 - RNA, 19 nt, Artificial Sequence
  Description of Artificial Sequence: Synthetic oligonucleotide
gcagccaaagccaugaugg

SEQ ID NO: 3001402 - RNA, 19 nt, Artificial Sequence
  Description of Artificial Sequence: Synthetic oligonucleotide
ugauaaucauuagcaaaag

SEQ ID NO: 3001403 - RNA, 19 nt, Artificial Sequence
  Description of Artificial Sequence: Synthetic oligonucleotide
aagcaguugcauuauccga

SEQ ID NO: 3001404 - RNA, 19 nt, Artificial Sequence
  Description of Artificial Sequence: Synthetic oligonucleotide
uucugaacaugcuuaauuu

SEQ ID NO: 3001405 - RNA, 19 nt, Artificial Sequence
  Description of Artificial Sequence: Synthetic oligonucleotide
uauuuugcauccacgccac

SEQ ID NO: 3001406 - RNA, 19 nt, Artificial Sequence
  Description of Artificial Sequence: Synthetic oligonucleotide
acuucauccaccugauucu

SEQ ID NO: 3001407 - RNA, 19 nt, Artificial Sequence
  Description of Artificial Sequence: Synthetic oligonucleotide
cugcaguucaucuagucuc

SEQ ID NO: 3001408 - RNA, 19 nt, Artificial Sequence
  Description of Artificial Sequence: Synthetic oligonucleotide
uucaauuaccuuuguaaua

SEQ ID NO: 3001409 - RNA, 19 nt, Artificial Sequence
  Description of Artificial Sequence: Synthetic oligonucleotide
aaaggauagcugcagccaa

SEQ ID NO: 3001410 - RNA, 19 nt, Artificial Sequence
  Description of Artificial Sequence: Synthetic oligonucleotide
auucugaacaugcuuaauu

SEQ ID NO: 3001411 - RNA, 19 nt, Artificial Sequence
  Description of Artificial Sequence: Synthetic oligonucleotide
auccaccugauucugaaca

SEQ ID NO: 3001412 - RNA, 19 nt, Artificial Sequence
  Description of Artificial Sequence: Synthetic oligonucleotide
uuuucacuagacccaguga

SEQ ID NO: 3001413 - RNA, 19 nt, Artificial Sequence
  Description of Artificial Sequence: Synthetic oligonucleotide
auuagcaaaaggauagcug

SEQ ID NO: 3001414 - RNA, 19 nt, Artificial Sequence
  Description of Artificial Sequence: Synthetic oligonucleotide
ugaacaugcuuaauuuauc

SEQ ID NO: 3001415 - RNA, 19 nt, Artificial Sequence
  Description of Artificial Sequence: Synthetic oligonucleotide
aaucauuagcaaaaggaua

SEQ ID NO: 3001416 - RNA, 19 nt, Artificial Sequence
  Description of Artificial Sequence: Synthetic oligonucleotide
ugacaucaucaucauuuag

SEQ ID NO: 3001417 - RNA, 19 nt, Artificial Sequence
  Description of Artificial Sequence: Synthetic oligonucleotide
uauuuucuugcauuacauc

SEQ ID NO: 3001418 - RNA, 19 nt, Artificial Sequence
  Description of Artificial Sequence: Synthetic oligonucleotide
aaucuugguccagaugguc

SEQ ID NO: 3001419 - RNA, 19 nt, Artificial Sequence
  Description of Artificial Sequence: Synthetic oligonucleotide
uucaucuagucucucuccu

SEQ ID NO: 3001420 - RNA, 19 nt, Artificial Sequence
  Description of Artificial Sequence: Synthetic oligonucleotide
uugcauuauccgauaagcu

SEQ ID NO: 3001421 - RNA, 19 nt, Artificial Sequence
  Description of Artificial Sequence: Synthetic oligonucleotide
uuuguccugcaguucaucu

SEQ ID NO: 3001422 - RNA, 19 nt, Artificial Sequence
  Description of Artificial Sequence: Synthetic oligonucleotide
acuagacccagugacauca

SEQ ID NO: 3001423 - RNA, 19 nt, Artificial Sequence
  Description of Artificial Sequence: Synthetic oligonucleotide
uucacuagacccagugaca

SEQ ID NO: 3001424 - RNA, 19 nt, Artificial Sequence
  Description of Artificial Sequence: Synthetic oligonucleotide
uuaggugucgcuugaacuu

SEQ ID NO: 3001425 - RNA, 19 nt, Artificial Sequence
  Description of Artificial Sequence: Synthetic oligonucleotide
caccugauucugaacaugc

SEQ ID NO: 3001426 - RNA, 19 nt, Artificial Sequence
  Description of Artificial Sequence: Synthetic oligonucleotide
uugccuucggaguuguuug

SEQ ID NO: 3001427 - RNA, 19 nt, Artificial Sequence
  Description of Artificial Sequence: Synthetic oligonucleotide
uuugcauccacgccaccac

SEQ ID NO: 3001428 - RNA, 19 nt, Artificial Sequence
  Description of Artificial Sequence: Synthetic oligonucleotide
uugggaggcauacuuucug

SEQ ID NO: 3001429 - RNA, 19 nt, Artificial Sequence
  Description of Artificial Sequence: Synthetic oligonucleotide
agaugguccccguagaaaa

SEQ ID NO: 3001430 - RNA, 19 nt, Artificial Sequence
  Description of Artificial Sequence: Synthetic oligonucleotide
ucauuucuaggcccaaauc

SEQ ID NO: 3001431 - RNA, 19 nt, Artificial Sequence
  Description of Artificial Sequence: Synthetic oligonucleotide
guaauauuuucuugcauua

SEQ ID NO: 3001432 - RNA, 19 nt, Artificial Sequence
  Description of Artificial Sequence: Synthetic oligonucleotide
aauuaccuuuguaauauuu

SEQ ID NO: 3001433 - RNA, 19 nt, Artificial Sequence
  Description of Artificial Sequence: Synthetic oligonucleotide
uuucuugcauuacaucaau

SEQ ID NO: 3001434 - RNA, 19 nt, Artificial Sequence
  Description of Artificial Sequence: Synthetic oligonucleotide
uuguaauauuuucuugcau

SEQ ID NO: 3001435 - RNA, 19 nt, Artificial Sequence
  Description of Artificial Sequence: Synthetic oligonucleotide
augcuuaauuuaucauuuc

SEQ ID NO: 3001436 - RNA, 19 nt, Artificial Sequence
  Description of Artificial Sequence: Synthetic oligonucleotide
ucugaacaugcuuaauuua

SEQ ID NO: 3001437 - RNA, 19 nt, Artificial Sequence
  Description of Artificial Sequence: Synthetic oligonucleotide
uccaaaagauuucuccuuu

SEQ ID NO: 3001438 - RNA, 19 nt, Artificial Sequence
  Description of Artificial Sequence: Synthetic oligonucleotide
ucauuuaggugucgcuuga

SEQ ID NO: 3001439 - RNA, 19 nt, Artificial Sequence
  Description of Artificial Sequence: Synthetic oligonucleotide
augauggcuuuuauuuugc

SEQ ID NO: 3001440 - RNA, 19 nt, Artificial Sequence
  Description of Artificial Sequence: Synthetic oligonucleotide
uuuugcauccacgccacca

SEQ ID NO: 3001441 - RNA, 19 nt, Artificial Sequence
  Description of Artificial Sequence: Synthetic oligonucleotide
ucaucauuuaggugucgcu

SEQ ID NO: 3001442 - RNA, 19 nt, Artificial Sequence
  Description of Artificial Sequence: Synthetic oligonucleotide
ucuuucaauuaccuuugua

SEQ ID NO: 3001443 - RNA, 19 nt, Artificial Sequence
  Description of Artificial Sequence: Synthetic oligonucleotide
uaauauuuucuugcauuac

SEQ ID NO: 3001444 - RNA, 19 nt, Artificial Sequence
  Description of Artificial Sequence: Synthetic oligonucleotide
uguuuggaucuguugcuga

SEQ ID NO: 3001445 - RNA, 19 nt, Artificial Sequence
  Description of Artificial Sequence: Synthetic oligonucleotide
ucaucaucauuuagguguc

SEQ ID NO: 3001446 - RNA, 19 nt, Artificial Sequence
  Description of Artificial Sequence: Synthetic oligonucleotide
gaguuguuuggaucuguug

SEQ ID NO: 3001447 - RNA, 19 nt, Artificial Sequence
  Description of Artificial Sequence: Synthetic oligonucleotide
uagcaaaaggauagcugca

SEQ ID NO: 3001448 - RNA, 19 nt, Artificial Sequence
  Description of Artificial Sequence: Synthetic oligonucleotide
aucauuucuaggcccaaau

SEQ ID NO: 3001449 - RNA, 19 nt, Artificial Sequence
  Description of Artificial Sequence: Synthetic oligonucleotide
ugauucugaacaugcuuaa

SEQ ID NO: 3001450 - RNA, 19 nt, Artificial Sequence
  Description of Artificial Sequence: Synthetic oligonucleotide
agcaaaaggauagcugcag

SEQ ID NO: 3001451 - RNA, 19 nt, Artificial Sequence
  Description of Artificial Sequence: Synthetic oligonucleotide
cuuucacuuuucacuagac

SEQ ID NO: 3001452 - RNA, 19 nt, Artificial Sequence
  Description of Artificial Sequence: Synthetic oligonucleotide
guucaucuagucucucucc

SEQ ID NO: 3001453 - RNA, 19 nt, Artificial Sequence
  Description of Artificial Sequence: Synthetic oligonucleotide
ugcaguucaucuagucucu

SEQ ID NO: 3001454 - RNA, 19 nt, Artificial Sequence
  Description of Artificial Sequence: Synthetic oligonucleotide
uucuccuuucacuuuucac

SEQ ID NO: 3001455 - RNA, 19 nt, Artificial Sequence
  Description of Artificial Sequence: Synthetic oligonucleotide
ucauccaccugauucugaa

SEQ ID NO: 3001456 - RNA, 19 nt, Artificial Sequence
  Description of Artificial Sequence: Synthetic oligonucleotide
uugaacuugggaggcauac

SEQ ID NO: 3001457 - RNA, 19 nt, Artificial Sequence
  Description of Artificial Sequence: Synthetic oligonucleotide
cauuucuaggcccaaaucu

SEQ ID NO: 3001458 - RNA, 19 nt, Artificial Sequence
  Description of Artificial Sequence: Synthetic oligonucleotide
ucucuccucuuucaauuac

SEQ ID NO: 3001459 - RNA, 19 nt, Artificial Sequence
  Description of Artificial Sequence: Synthetic oligonucleotide
ugggaggcauacuuucugc

SEQ ID NO: 3001460 - RNA, 19 nt, Artificial Sequence
  Description of Artificial Sequence: Synthetic oligonucleotide
ucauuagcaaaaggauagc

SEQ ID NO: 3001461 - RNA, 19 nt, Artificial Sequence
  Description of Artificial Sequence: Synthetic oligonucleotide
auauuuucuugcauuacau

SEQ ID NO: 3001462 - RNA, 19 nt, Artificial Sequence
  Description of Artificial Sequence: Synthetic oligonucleotide
auuacaucaauaacuucau

SEQ ID NO: 3001463 - RNA, 19 nt, Artificial Sequence
  Description of Artificial Sequence: Synthetic oligonucleotide
auaagcuuucugauuuguc

SEQ ID NO: 3001464 - RNA, 19 nt, Artificial Sequence
  Description of Artificial Sequence: Synthetic oligonucleotide
cugauucugaacaugcuua

SEQ ID NO: 3001465 - RNA, 19 nt, Artificial Sequence
  Description of Artificial Sequence: Synthetic oligonucleotide
uuacaucaauaacuucauc

SEQ ID NO: 3001466 - RNA, 19 nt, Artificial Sequence
  Description of Artificial Sequence: Synthetic oligonucleotide
aaagccaugauggcuuuua

SEQ ID NO: 3001467 - RNA, 19 nt, Artificial Sequence
  Description of Artificial Sequence: Synthetic oligonucleotide
agcuuucugauuuguccug

SEQ ID NO: 3001468 - RNA, 19 nt, Artificial Sequence
  Description of Artificial Sequence: Synthetic oligonucleotide
cauuauccgauaagcuuuc

SEQ ID NO: 3001469 - RNA, 19 nt, Artificial Sequence
  Description of Artificial Sequence: Synthetic oligonucleotide
uccuuucacuuuucacuag

SEQ ID NO: 3001470 - RNA, 19 nt, Artificial Sequence
  Description of Artificial Sequence: Synthetic oligonucleotide
cugaaucaucuuccaaaag

SEQ ID NO: 3001471 - RNA, 19 nt, Artificial Sequence
  Description of Artificial Sequence: Synthetic oligonucleotide
caucaucaucauuuaggug

SEQ ID NO: 3001472 - RNA, 19 nt, Artificial Sequence
  Description of Artificial Sequence: Synthetic oligonucleotide
uuugccuucggaguuguuu

SEQ ID NO: 3001473 - RNA, 19 nt, Artificial Sequence
  Description of Artificial Sequence: Synthetic oligonucleotide
auuaccuuuguaauauuuu

SEQ ID NO: 3001474 - RNA, 19 nt, Artificial Sequence
  Description of Artificial Sequence: Synthetic oligonucleotide
uuguuuggaucuguugcug

SEQ ID NO: 3001475 - RNA, 19 nt, Artificial Sequence
  Description of Artificial Sequence: Synthetic oligonucleotide
uccacgccaccacauuugc

SEQ ID NO: 3001476 - RNA, 19 nt, Artificial Sequence
  Description of Artificial Sequence: Synthetic oligonucleotide
guccagaugguccccguag

SEQ ID NO: 3001477 - RNA, 19 nt, Artificial Sequence
  Description of Artificial Sequence: Synthetic oligonucleotide
cuucggaguuguuuggauc

SEQ ID NO: 3001478 - RNA, 19 nt, Artificial Sequence
  Description of Artificial Sequence: Synthetic oligonucleotide
auccgauaagcuuucugau

SEQ ID NO: 3001479 - RNA, 19 nt, Artificial Sequence
  Description of Artificial Sequence: Synthetic oligonucleotide
ucuaggcccaaaucuuggu

SEQ ID NO: 3001480 - RNA, 19 nt, Artificial Sequence
  Description of Artificial Sequence: Synthetic oligonucleotide
auuuugcauccacgccacc

SEQ ID NO: 3001481 - RNA, 19 nt, Artificial Sequence
  Description of Artificial Sequence: Synthetic oligonucleotide
ucacuagacccagugacau

SEQ ID NO: 3001482 - RNA, 19 nt, Artificial Sequence
  Description of Artificial Sequence: Synthetic oligonucleotide
ugauggcuuuuauuuugca

SEQ ID NO: 3001483 - RNA, 19 nt, Artificial Sequence
  Description of Artificial Sequence: Synthetic oligonucleotide
uccagaugguccccguaga

SEQ ID NO: 3001484 - RNA, 19 nt, Artificial Sequence
  Description of Artificial Sequence: Synthetic oligonucleotide
ugaaagcaguugcauuauc

SEQ ID NO: 3001485 - RNA, 19 nt, Artificial Sequence
  Description of Artificial Sequence: Synthetic oligonucleotide
uagucucucuccucuuuca

SEQ ID NO: 3001486 - RNA, 19 nt, Artificial Sequence
  Description of Artificial Sequence: Synthetic oligonucleotide
gaaucaucuuccaaaagau

SEQ ID NO: 3001487 - RNA, 19 nt, Artificial Sequence
  Description of Artificial Sequence: Synthetic oligonucleotide
agacccagugacaucauca

SEQ ID NO: 3001488 - RNA, 19 nt, Artificial Sequence
  Description of Artificial Sequence: Synthetic oligonucleotide
aaaucuugguccagauggu

SEQ ID NO: 3001489 - RNA, 19 nt, Artificial Sequence
  Description of Artificial Sequence: Synthetic oligonucleotide
ugccuucggaguuguuugg

SEQ ID NO: 3001490 - RNA, 19 nt, Artificial Sequence
  Description of Artificial Sequence: Synthetic oligonucleotide
acccagugacaucaucauc

SEQ ID NO: 3001491 - RNA, 19 nt, Artificial Sequence
  Description of Artificial Sequence: Synthetic oligonucleotide
uccgauaagcuuucugauu

SEQ ID NO: 3001492 - RNA, 19 nt, Artificial Sequence
  Description of Artificial Sequence: Synthetic oligonucleotide
caugcuuaauuuaucauuu

SEQ ID NO: 3001493 - RNA, 19 nt, Artificial Sequence
  Description of Artificial Sequence: Synthetic oligonucleotide
aaucaucuuccaaaagauu

SEQ ID NO: 3001494 - RNA, 19 nt, Artificial Sequence
  Description of Artificial Sequence: Synthetic oligonucleotide
uucauccaccugauucuga

SEQ ID NO: 3001495 - RNA, 19 nt, Artificial Sequence
  Description of Artificial Sequence: Synthetic oligonucleotide
ucaucuagucucucuccuc

SEQ ID NO: 3001496 - RNA, 19 nt, Artificial Sequence
  Description of Artificial Sequence: Synthetic oligonucleotide
ucuagucucucuccucuuu

SEQ ID NO: 3001497 - RNA, 19 nt, Artificial Sequence
  Description of Artificial Sequence: Synthetic oligonucleotide
uaggugucgcuugaacuug

SEQ ID NO: 3001498 - RNA, 19 nt, Artificial Sequence
  Description of Artificial Sequence: Synthetic oligonucleotide
auuuguccugcaguucauc

SEQ ID NO: 3001499 - RNA, 19 nt, Artificial Sequence
  Description of Artificial Sequence: Synthetic oligonucleotide
cuaggcccaaaucuugguc

SEQ ID NO: 3001500 - RNA, 19 nt, Artificial Sequence
  Description of Artificial Sequence: Synthetic oligonucleotide
auuucuaggcccaaaucuu

SEQ ID NO: 3001501 - RNA, 19 nt, Artificial Sequence
  Description of Artificial Sequence: Synthetic oligonucleotide
uucuugcauuacaucaaua

SEQ ID NO: 3001502 - RNA, 19 nt, Artificial Sequence
  Description of Artificial Sequence: Synthetic oligonucleotide
aggauagcugcagccaaag

SEQ ID NO: 3001503 - RNA, 19 nt, Artificial Sequence
  Description of Artificial Sequence: Synthetic oligonucleotide
agcaguugcauuauccgau

SEQ ID NO: 3001504 - RNA, 19 nt, Artificial Sequence
  Description of Artificial Sequence: Synthetic oligonucleotide
cacuuuucacuagacccag

SEQ ID NO: 3001505 - RNA, 19 nt, Artificial Sequence
  Description of Artificial Sequence: Synthetic oligonucleotide
cugaacaugcuuaauuuau

SEQ ID NO: 3001506 - RNA, 19 nt, Artificial Sequence
  Description of Artificial Sequence: Synthetic oligonucleotide
cuagucucucuccucuuuc

SEQ ID NO: 3001507 - RNA, 19 nt, Artificial Sequence
  Description of Artificial Sequence: Synthetic oligonucleotide
ccuuuguaauauuuucuug

SEQ ID NO: 3001508 - RNA, 19 nt, Artificial Sequence
  Description of Artificial Sequence: Synthetic oligonucleotide
gcugaaagcaguugcauua

SEQ ID NO: 3001509 - RNA, 19 nt, Artificial Sequence
  Description of Artificial Sequence: Synthetic oligonucleotide
uuuggaucuguugcugaaa

SEQ ID NO: 3001510 - RNA, 19 nt, Artificial Sequence
  Description of Artificial Sequence: Synthetic oligonucleotide
guuguuuggaucuguugcu

SEQ ID NO: 3001511 - RNA, 19 nt, Artificial Sequence
  Description of Artificial Sequence: Synthetic oligonucleotide
uccaccugauucugaacau

SEQ ID NO: 3001512 - RNA, 19 nt, Artificial Sequence
  Description of Artificial Sequence: Synthetic oligonucleotide
gauuucuccuuucacuuuu

SEQ ID NO: 3001513 - RNA, 19 nt, Artificial Sequence
  Description of Artificial Sequence: Synthetic oligonucleotide
gcaaaaggauagcugcagc

SEQ ID NO: 3001514 - RNA, 19 nt, Artificial Sequence
  Description of Artificial Sequence: Synthetic oligonucleotide
aucuguugcugaaagcagu

SEQ ID NO: 3001515 - RNA, 19 nt, Artificial Sequence
  Description of Artificial Sequence: Synthetic oligonucleotide
uccugcaguucaucuaguc

SEQ ID NO: 3001516 - RNA, 19 nt, Artificial Sequence
  Description of Artificial Sequence: Synthetic oligonucleotide
aagccaugauggcuuuuau

SEQ ID NO: 3001517 - RNA, 19 nt, Artificial Sequence
  Description of Artificial Sequence: Synthetic oligonucleotide
ucgcuugaacuugggaggc

SEQ ID NO: 3001518 - RNA, 19 nt, Artificial Sequence
  Description of Artificial Sequence: Synthetic oligonucleotide
ugcauccacgccaccacau

SEQ ID NO: 3001519 - RNA, 19 nt, Artificial Sequence
  Description of Artificial Sequence: Synthetic oligonucleotide
ccucuuucaauuaccuuug

SEQ ID NO: 3001520 - RNA, 19 nt, Artificial Sequence
  Description of Artificial Sequence: Synthetic oligonucleotide
auaacuucauccaccugau

SEQ ID NO: 3001521 - RNA, 19 nt, Artificial Sequence
  Description of Artificial Sequence: Synthetic oligonucleotide
uugguccagaugguccccg

SEQ ID NO: 3001522 - RNA, 19 nt, Artificial Sequence
  Description of Artificial Sequence: Synthetic oligonucleotide
ugaacuugggaggcauacu

SEQ ID NO: 3001523 - RNA, 19 nt, Artificial Sequence
  Description of Artificial Sequence: Synthetic oligonucleotide
gaacuugggaggcauacuu

SEQ ID NO: 3001524 - RNA, 19 nt, Artificial Sequence
  Description of Artificial Sequence: Synthetic oligonucleotide
uuguccugcaguucaucua

SEQ ID NO: 3001525 - RNA, 19 nt, Artificial Sequence
  Description of Artificial Sequence: Synthetic oligonucleotide
agauuucuccuuucacuuu

SEQ ID NO: 3001526 - RNA, 19 nt, Artificial Sequence
  Description of Artificial Sequence: Synthetic oligonucleotide
cuccuuucacuuuucacua

SEQ ID NO: 3001527 - RNA, 19 nt, Artificial Sequence
  Description of Artificial Sequence: Synthetic oligonucleotide
agccaaagccaugauggcu

SEQ ID NO: 3001528 - RNA, 19 nt, Artificial Sequence
  Description of Artificial Sequence: Synthetic oligonucleotide
uagacccagugacaucauc

SEQ ID NO: 3001529 - RNA, 19 nt, Artificial Sequence
  Description of Artificial Sequence: Synthetic oligonucleotide
guuuggaucuguugcugaa

SEQ ID NO: 3001530 - RNA, 19 nt, Artificial Sequence
  Description of Artificial Sequence: Synthetic oligonucleotide
gauaagcuuucugauuugu

SEQ ID NO: 3001531 - RNA, 19 nt, Artificial Sequence
  Description of Artificial Sequence: Synthetic oligonucleotide
aggcccaaaucuuggucca

SEQ ID NO: 3001532 - RNA, 19 nt, Artificial Sequence
  Description of Artificial Sequence: Synthetic oligonucleotide
cacgccaccacauuugccu

SEQ ID NO: 3001533 - RNA, 19 nt, Artificial Sequence
  Description of Artificial Sequence: Synthetic oligonucleotide
acauuugccuucggaguug

SEQ ID NO: 3001534 - RNA, 19 nt, Artificial Sequence
  Description of Artificial Sequence: Synthetic oligonucleotide
uaucauuucuaggcccaaa

SEQ ID NO: 3001535 - RNA, 19 nt, Artificial Sequence
  Description of Artificial Sequence: Synthetic oligonucleotide
caauaacuucauccaccug

SEQ ID NO: 3001536 - RNA, 19 nt, Artificial Sequence
  Description of Artificial Sequence: Synthetic oligonucleotide
agucucucuccucuuucaa

SEQ ID NO: 3001537 - RNA, 19 nt, Artificial Sequence
  Description of Artificial Sequence: Synthetic oligonucleotide
gccaugauggcuuuuauuu

SEQ ID NO: 3001538 - RNA, 19 nt, Artificial Sequence
  Description of Artificial Sequence: Synthetic oligonucleotide
agccaugauggcuuuuauu

SEQ ID NO: 3001539 - RNA, 19 nt, Artificial Sequence
  Description of Artificial Sequence: Synthetic oligonucleotide
cauccaccugauucugaac

SEQ ID NO: 3001540 - RNA, 19 nt, Artificial Sequence
  Description of Artificial Sequence: Synthetic oligonucleotide
uuaucauuucuaggcccaa

SEQ ID NO: 3001541 - RNA, 19 nt, Artificial Sequence
  Description of Artificial Sequence: Synthetic oligonucleotide
ggaggcauacuuucugcuc

SEQ ID NO: 3001542 - RNA, 19 nt, Artificial Sequence
  Description of Artificial Sequence: Synthetic oligonucleotide
aaggauagcugcagccaaa

SEQ ID NO: 3001543 - RNA, 19 nt, Artificial Sequence
  Description of Artificial Sequence: Synthetic oligonucleotide
gugacaucaucaucauuua

SEQ ID NO: 3001544 - RNA, 19 nt, Artificial Sequence
  Description of Artificial Sequence: Synthetic oligonucleotide
caucaucauuuaggugucg

SEQ ID NO: 3001545 - RNA, 19 nt, Artificial Sequence
  Description of Artificial Sequence: Synthetic oligonucleotide
auccacgccaccacauuug

SEQ ID NO: 3001546 - RNA, 19 nt, Artificial Sequence
  Description of Artificial Sequence: Synthetic oligonucleotide
cauuagcaaaaggauagcu

SEQ ID NO: 3001547 - RNA, 19 nt, Artificial Sequence
  Description of Artificial Sequence: Synthetic oligonucleotide
caucuagucucucuccucu

SEQ ID NO: 3001548 - RNA, 19 nt, Artificial Sequence
  Description of Artificial Sequence: Synthetic oligonucleotide
cugauuuguccugcaguuc

SEQ ID NO: 3001549 - RNA, 19 nt, Artificial Sequence
  Description of Artificial Sequence: Synthetic oligonucleotide
ucggaguuguuuggaucug

SEQ ID NO: 3001550 - RNA, 19 nt, Artificial Sequence
  Description of Artificial Sequence: Synthetic oligonucleotide
cuguugcugaaagcaguug

SEQ ID NO: 3001551 - RNA, 19 nt, Artificial Sequence
  Description of Artificial Sequence: Synthetic oligonucleotide
aggugucgcuugaacuugg

SEQ ID NO: 3001552 - RNA, 19 nt, Artificial Sequence
  Description of Artificial Sequence: Synthetic oligonucleotide
ccaaaagauuucuccuuuc

SEQ ID NO: 3001553 - RNA, 19 nt, Artificial Sequence
  Description of Artificial Sequence: Synthetic oligonucleotide
caucugaaucaucuuccaa

SEQ ID NO: 3001554 - RNA, 19 nt, Artificial Sequence
  Description of Artificial Sequence: Synthetic oligonucleotide
cuugguccagauggucccc

SEQ ID NO: 3001555 - RNA, 19 nt, Artificial Sequence
  Description of Artificial Sequence: Synthetic oligonucleotide
gcauuacaucaauaacuuc

SEQ ID NO: 3001556 - RNA, 19 nt, Artificial Sequence
  Description of Artificial Sequence: Synthetic oligonucleotide
gacccagugacaucaucau

SEQ ID NO: 3001557 - RNA, 19 nt, Artificial Sequence
  Description of Artificial Sequence: Synthetic oligonucleotide
ggauagcugcagccaaagc

SEQ ID NO: 3001558 - RNA, 19 nt, Artificial Sequence
  Description of Artificial Sequence: Synthetic oligonucleotide
uaacuucauccaccugauu

SEQ ID NO: 3001559 - RNA, 19 nt, Artificial Sequence
  Description of Artificial Sequence: Synthetic oligonucleotide
auuauccgauaagcuuucu

SEQ ID NO: 3001560 - RNA, 19 nt, Artificial Sequence
  Description of Artificial Sequence: Synthetic oligonucleotide
cacuagacccagugacauc

SEQ ID NO: 3001561 - RNA, 19 nt, Artificial Sequence
  Description of Artificial Sequence: Synthetic oligonucleotide
gcugcagccaaagccauga

SEQ ID NO: 3001562 - RNA, 19 nt, Artificial Sequence
  Description of Artificial Sequence: Synthetic oligonucleotide
gcuuucugauuuguccugc

SEQ ID NO: 3001563 - RNA, 19 nt, Artificial Sequence
  Description of Artificial Sequence: Synthetic oligonucleotide
gugucgcuugaacuuggga

SEQ ID NO: 3001564 - RNA, 19 nt, Artificial Sequence
  Description of Artificial Sequence: Synthetic oligonucleotide
ccaaaucuugguccagaug

SEQ ID NO: 3001565 - RNA, 19 nt, Artificial Sequence
  Description of Artificial Sequence: Synthetic oligonucleotide
accugauucugaacaugcu

SEQ ID NO: 3001566 - RNA, 19 nt, Artificial Sequence
  Description of Artificial Sequence: Synthetic oligonucleotide
gccaccacauuugccuucg

SEQ ID NO: 3001567 - RNA, 19 nt, Artificial Sequence
  Description of Artificial Sequence: Synthetic oligonucleotide
caucuuccaaaagauuucu

SEQ ID NO: 3001568 - RNA, 19 nt, Artificial Sequence
  Description of Artificial Sequence: Synthetic oligonucleotide
aucuagucucucuccucuu

SEQ ID NO: 3001569 - RNA, 19 nt, Artificial Sequence
  Description of Artificial Sequence: Synthetic oligonucleotide
ccuuucacuuuucacuaga

SEQ ID NO: 3001570 - RNA, 19 nt, Artificial Sequence
  Description of Artificial Sequence: Synthetic oligonucleotide
cuugggaggcauacuuucu

SEQ ID NO: 3001571 - RNA, 19 nt, Artificial Sequence
  Description of Artificial Sequence: Synthetic oligonucleotide
gcauuauccgauaagcuuu

SEQ ID NO: 3001572 - RNA, 19 nt, Artificial Sequence
  Description of Artificial Sequence: Synthetic oligonucleotide
ggugucgcuugaacuuggg

SEQ ID NO: 3001573 - RNA, 19 nt, Artificial Sequence
  Description of Artificial Sequence: Synthetic oligonucleotide
gauucugaacaugcuuaau

SEQ ID NO: 3001574 - RNA, 19 nt, Artificial Sequence
  Description of Artificial Sequence: Synthetic oligonucleotide
caguucaucuagucucucu

SEQ ID NO: 3001575 - RNA, 19 nt, Artificial Sequence
  Description of Artificial Sequence: Synthetic oligonucleotide
caguugcauuauccgauaa

SEQ ID NO: 3001576 - RNA, 19 nt, Artificial Sequence
  Description of Artificial Sequence: Synthetic oligonucleotide
caucauuuaggugucgcuu

SEQ ID NO: 3001577 - RNA, 19 nt, Artificial Sequence
  Description of Artificial Sequence: Synthetic oligonucleotide
cuugaacuugggaggcaua

SEQ ID NO: 3001578 - RNA, 19 nt, Artificial Sequence
  Description of Artificial Sequence: Synthetic oligonucleotide
cagaugguccccguagaaa

SEQ ID NO: 3001579 - RNA, 19 nt, Artificial Sequence
  Description of Artificial Sequence: Synthetic oligonucleotide
acgccaccacauuugccuu

SEQ ID NO: 3001580 - RNA, 19 nt, Artificial Sequence
  Description of Artificial Sequence: Synthetic oligonucleotide
acuuuucacuagacccagu

SEQ ID NO: 3001581 - RNA, 19 nt, Artificial Sequence
  Description of Artificial Sequence: Synthetic oligonucleotide
ccgauaagcuuucugauuu

SEQ ID NO: 3001582 - RNA, 19 nt, Artificial Sequence
  Description of Artificial Sequence: Synthetic oligonucleotide
cgauaagcuuucugauuug

SEQ ID NO: 3001583 - RNA, 19 nt, Artificial Sequence
  Description of Artificial Sequence: Synthetic oligonucleotide
gcaguugcauuauccgaua

SEQ ID NO: 3001584 - RNA, 19 nt, Artificial Sequence
  Description of Artificial Sequence: Synthetic oligonucleotide
cauuuaggugucgcuugaa

SEQ ID NO: 3001585 - RNA, 19 nt, Artificial Sequence
  Description of Artificial Sequence: Synthetic oligonucleotide
agcugcagccaaagccaug

SEQ ID NO: 3001586 - RNA, 19 nt, Artificial Sequence
  Description of Artificial Sequence: Synthetic oligonucleotide
gauuuguccugcaguucau

SEQ ID NO: 3001587 - RNA, 19 nt, Artificial Sequence
  Description of Artificial Sequence: Synthetic oligonucleotide
ccaccugauucugaacaug

SEQ ID NO: 3001588 - RNA, 19 nt, Artificial Sequence
  Description of Artificial Sequence: Synthetic oligonucleotide
gggaggcauacuuucugcu

SEQ ID NO: 3001589 - RNA, 19 nt, Artificial Sequence
  Description of Artificial Sequence: Synthetic oligonucleotide
ccugcaguucaucuagucu

SEQ ID NO: 3001590 - RNA, 19 nt, Artificial Sequence
  Description of Artificial Sequence: Synthetic oligonucleotide
cugaaagcaguugcauuau

SEQ ID NO: 3001591 - RNA, 19 nt, Artificial Sequence
  Description of Artificial Sequence: Synthetic oligonucleotide
cauccacgccaccacauuu

SEQ ID NO: 3001592 - RNA, 19 nt, Artificial Sequence
  Description of Artificial Sequence: Synthetic oligonucleotide
ccacgccaccacauuugcc

SEQ ID NO: 3001593 - RNA, 19 nt, Artificial Sequence
  Description of Artificial Sequence: Synthetic oligonucleotide
caauuaccuuuguaauauu

SEQ ID NO: 3001594 - RNA, 19 nt, Artificial Sequence
  Description of Artificial Sequence: Synthetic oligonucleotide
cucuuucaauuaccuuugu

SEQ ID NO: 3001595 - RNA, 19 nt, Artificial Sequence
  Description of Artificial Sequence: Synthetic oligonucleotide
ccugauucugaacaugcuu

SEQ ID NO: 3001596 - RNA, 19 nt, Artificial Sequence
  Description of Artificial Sequence: Synthetic oligonucleotide
gccaaagccaugauggcuu

SEQ ID NO: 3001597 - RNA, 19 nt, Artificial Sequence
  Description of Artificial Sequence: Synthetic oligonucleotide
ggcccaaaucuugguccag

SEQ ID NO: 3001598 - RNA, 19 nt, Artificial Sequence
  Description of Artificial Sequence: Synthetic oligonucleotide
gcccaaaucuugguccaga

SEQ ID NO: 3001599 - RNA, 19 nt, Artificial Sequence
  Description of Artificial Sequence: Synthetic oligonucleotide
cauuugccuucggaguugu

SEQ ID NO: 3001600 - RNA, 19 nt, Artificial Sequence
  Description of Artificial Sequence: Synthetic oligonucleotide
gccuucggaguuguuugga

SEQ ID NO: 3001601 - RNA, 19 nt, Artificial Sequence
  Description of Artificial Sequence: Synthetic oligonucleotide
ccagaugguccccguagaa

SEQ ID NO: 3001602 - RNA, 19 nt, Artificial Sequence
  Description of Artificial Sequence: Synthetic oligonucleotide
gcuugaacuugggaggcau

SEQ ID NO: 3001603 - RNA, 19 nt, Artificial Sequence
  Description of Artificial Sequence: Synthetic oligonucleotide
gguccagaugguccccgua

SEQ ID NO: 3001604 - RNA, 19 nt, Artificial Sequence
  Description of Artificial Sequence: Synthetic oligonucleotide
cuagacccagugacaucau

SEQ ID NO: 3001605 - RNA, 19 nt, Artificial Sequence
  Description of Artificial Sequence: Synthetic oligonucleotide
ccaugauggcuuuuauuuu

SEQ ID NO: 3001606 - RNA, 19 nt, Artificial Sequence
  Description of Artificial Sequence: Synthetic oligonucleotide
ggaguuguuuggaucuguu

SEQ ID NO: 3001607 - RNA, 19 nt, Artificial Sequence
  Description of Artificial Sequence: Synthetic oligonucleotide
ccaccacauuugccuucgg

SEQ ID NO: 3001608 - RNA, 19 nt, Artificial Sequence
  Description of Artificial Sequence: Synthetic oligonucleotide
auuugccuucggaguuguu

SEQ ID NO: 3001609 - RNA, 19 nt, Artificial Sequence
  Description of Artificial Sequence: Synthetic oligonucleotide
cagugacaucaucaucauu

SEQ ID NO: 3001610 - RNA, 19 nt, Artificial Sequence
  Description of Artificial Sequence: Synthetic oligonucleotide
cccaaaucuugguccagau

SEQ ID NO: 3001611 - RNA, 19 nt, Artificial Sequence
  Description of Artificial Sequence: Synthetic oligonucleotide
ccuucggaguuguuuggau

SEQ ID NO: 3001612 - RNA, 19 nt, Artificial Sequence
  Description of Artificial Sequence: Synthetic oligonucleotide
gcauccacgccaccacauu

SEQ ID NO: 3001613 - RNA, 19 nt, Artificial Sequence
  Description of Artificial Sequence: Synthetic oligonucleotide
cugcagccaaagccaugau

SEQ ID NO: 3001614 - RNA, 19 nt, Artificial Sequence
  Description of Artificial Sequence: Synthetic oligonucleotide
caaagccaugauggcuuuu

SEQ ID NO: 3001615 - RNA, 19 nt, Artificial Sequence
  Description of Artificial Sequence: Synthetic oligonucleotide
ccaaagccaugauggcuuu

SEQ ID NO: 3001616 - RNA, 19 nt, Artificial Sequence
  Description of Artificial Sequence: Synthetic oligonucleotide
cggaguuguuuggaucugu

SEQ ID NO: 3001617 - RNA, 19 nt, Artificial Sequence
  Description of Artificial Sequence: Synthetic oligonucleotide
ucugaaacaaacaauauug

SEQ ID NO: 3001618 - RNA, 19 nt, Artificial Sequence
  Description of Artificial Sequence: Synthetic oligonucleotide
auauauauuacuuauuaag

SEQ ID NO: 3001619 - RNA, 19 nt, Artificial Sequence
  Description of Artificial Sequence: Synthetic oligonucleotide
uuuacaacagacaauauac

SEQ ID NO: 3001620 - RNA, 19 nt, Artificial Sequence
  Description of Artificial Sequence: Synthetic oligonucleotide
uuuaacaugacuaugucac

SEQ ID NO: 3001621 - RNA, 19 nt, Artificial Sequence
  Description of Artificial Sequence: Synthetic oligonucleotide
aagagaguacacuugaaac

SEQ ID NO: 3001622 - RNA, 19 nt, Artificial Sequence
  Description of Artificial Sequence: Synthetic oligonucleotide
ucauuuaucauauauauua

SEQ ID NO: 3001623 - RNA, 19 nt, Artificial Sequence
  Description of Artificial Sequence: Synthetic oligonucleotide
aguauaauaguacauuccg

SEQ ID NO: 3001624 - RNA, 19 nt, Artificial Sequence
  Description of Artificial Sequence: Synthetic oligonucleotide
uauauauuacuuauuaaga

SEQ ID NO: 3001625 - RNA, 19 nt, Artificial Sequence
  Description of Artificial Sequence: Synthetic oligonucleotide
aaugaaaucuuuacaacac

SEQ ID NO: 3001626 - RNA, 19 nt, Artificial Sequence
  Description of Artificial Sequence: Synthetic oligonucleotide
auuuccuccaccuaauuac

SEQ ID NO: 3001627 - RNA, 19 nt, Artificial Sequence
  Description of Artificial Sequence: Synthetic oligonucleotide
uccauuauuaguaugugug

SEQ ID NO: 3001628 - RNA, 19 nt, Artificial Sequence
  Description of Artificial Sequence: Synthetic oligonucleotide
auauauuacuuauuaagag

SEQ ID NO: 3001629 - RNA, 19 nt, Artificial Sequence
  Description of Artificial Sequence: Synthetic oligonucleotide
aacacuuucugaaacaaac

SEQ ID NO: 3001630 - RNA, 19 nt, Artificial Sequence
  Description of Artificial Sequence: Synthetic oligonucleotide
aauauacacaugaaguuac

SEQ ID NO: 3001631 - RNA, 19 nt, Artificial Sequence
  Description of Artificial Sequence: Synthetic oligonucleotide
aauucuuuccauuauuagu

SEQ ID NO: 3001632 - RNA, 19 nt, Artificial Sequence
  Description of Artificial Sequence: Synthetic oligonucleotide
aacucuuaaaagucuuacc

SEQ ID NO: 3001633 - RNA, 19 nt, Artificial Sequence
  Description of Artificial Sequence: Synthetic oligonucleotide
uacacaugaaguuacaaug

SEQ ID NO: 3001634 - RNA, 19 nt, Artificial Sequence
  Description of Artificial Sequence: Synthetic oligonucleotide
ucaauuaguauaauaguac

SEQ ID NO: 3001635 - RNA, 19 nt, Artificial Sequence
  Description of Artificial Sequence: Synthetic oligonucleotide
uauauuacuuauuaagaga

SEQ ID NO: 3001636 - RNA, 19 nt, Artificial Sequence
  Description of Artificial Sequence: Synthetic oligonucleotide
aaaugccuuccuuugaaac

SEQ ID NO: 3001637 - RNA, 19 nt, Artificial Sequence
  Description of Artificial Sequence: Synthetic oligonucleotide
ugaaguuacaaugaaaucu

SEQ ID NO: 3001638 - RNA, 19 nt, Artificial Sequence
  Description of Artificial Sequence: Synthetic oligonucleotide
aaacaaacaauauuguuuu

SEQ ID NO: 3001639 - RNA, 19 nt, Artificial Sequence
  Description of Artificial Sequence: Synthetic oligonucleotide
auuaguaugugugaaugcc

SEQ ID NO: 3001640 - RNA, 19 nt, Artificial Sequence
  Description of Artificial Sequence: Synthetic oligonucleotide
aguacauuccgauaaaucu

SEQ ID NO: 3001641 - RNA, 19 nt, Artificial Sequence
  Description of Artificial Sequence: Synthetic oligonucleotide
aacaugaauuuccuccacc

SEQ ID NO: 3001642 - RNA, 19 nt, Artificial Sequence
  Description of Artificial Sequence: Synthetic oligonucleotide
aguucaauuaguauaauag

SEQ ID NO: 3001643 - RNA, 19 nt, Artificial Sequence
  Description of Artificial Sequence: Synthetic oligonucleotide
auuacugauacuuacucug

SEQ ID NO: 3001644 - RNA, 19 nt, Artificial Sequence
  Description of Artificial Sequence: Synthetic oligonucleotide
uuucauuuaucauauauau

SEQ ID NO: 3001645 - RNA, 19 nt, Artificial Sequence
  Description of Artificial Sequence: Synthetic oligonucleotide
ugcucuuguaguaaaaugc

SEQ ID NO: 3001646 - RNA, 19 nt, Artificial Sequence
  Description of Artificial Sequence: Synthetic oligonucleotide
uuauuuauaggauucccug

SEQ ID NO: 3001647 - RNA, 19 nt, Artificial Sequence
  Description of Artificial Sequence: Synthetic oligonucleotide
aaauucuuuccauuauuag

SEQ ID NO: 3001648 - RNA, 19 nt, Artificial Sequence
  Description of Artificial Sequence: Synthetic oligonucleotide
ucauauauauuacuuauua

SEQ ID NO: 3001649 - RNA, 19 nt, Artificial Sequence
  Description of Artificial Sequence: Synthetic oligonucleotide
uacaaugaaaucuuuacaa

SEQ ID NO: 3001650 - RNA, 19 nt, Artificial Sequence
  Description of Artificial Sequence: Synthetic oligonucleotide
uaauaguacauuccgauaa

SEQ ID NO: 3001651 - RNA, 19 nt, Artificial Sequence
  Description of Artificial Sequence: Synthetic oligonucleotide
ugcaaacucauauugaaga

SEQ ID NO: 3001652 - RNA, 19 nt, Artificial Sequence
  Description of Artificial Sequence: Synthetic oligonucleotide
agauacugaaauucuuucc

SEQ ID NO: 3001653 - RNA, 19 nt, Artificial Sequence
  Description of Artificial Sequence: Synthetic oligonucleotide
aaaucugcauuuuaacaug

SEQ ID NO: 3001654 - RNA, 19 nt, Artificial Sequence
  Description of Artificial Sequence: Synthetic oligonucleotide
acagacaauauacacauga

SEQ ID NO: 3001655 - RNA, 19 nt, Artificial Sequence
  Description of Artificial Sequence: Synthetic oligonucleotide
aaacucuuaaaagucuuac

SEQ ID NO: 3001656 - RNA, 19 nt, Artificial Sequence
  Description of Artificial Sequence: Synthetic oligonucleotide
acugaagauacugaaauuc

SEQ ID NO: 3001657 - RNA, 19 nt, Artificial Sequence
  Description of Artificial Sequence: Synthetic oligonucleotide
aaaacaugaauuuccucca

SEQ ID NO: 3001658 - RNA, 19 nt, Artificial Sequence
  Description of Artificial Sequence: Synthetic oligonucleotide
acucuuaaaagucuuacca

SEQ ID NO: 3001659 - RNA, 19 nt, Artificial Sequence
  Description of Artificial Sequence: Synthetic oligonucleotide
acuugaaacucuuaaaagu

SEQ ID NO: 3001660 - RNA, 19 nt, Artificial Sequence
  Description of Artificial Sequence: Synthetic oligonucleotide
uucaauuaguauaauagua

SEQ ID NO: 3001661 - RNA, 19 nt, Artificial Sequence
  Description of Artificial Sequence: Synthetic oligonucleotide
uuacugaagauacugaaau

SEQ ID NO: 3001662 - RNA, 19 nt, Artificial Sequence
  Description of Artificial Sequence: Synthetic oligonucleotide
aaggugcaaacucauauug

SEQ ID NO: 3001663 - RNA, 19 nt, Artificial Sequence
  Description of Artificial Sequence: Synthetic oligonucleotide
uauaauaguacauuccgau

SEQ ID NO: 3001664 - RNA, 19 nt, Artificial Sequence
  Description of Artificial Sequence: Synthetic oligonucleotide
cauuacuuacugaagauac

SEQ ID NO: 3001665 - RNA, 19 nt, Artificial Sequence
  Description of Artificial Sequence: Synthetic oligonucleotide
uuuauuuauaggauucccu

SEQ ID NO: 3001666 - RNA, 19 nt, Artificial Sequence
  Description of Artificial Sequence: Synthetic oligonucleotide
guuacaaugaaaucuuuac

SEQ ID NO: 3001667 - RNA, 19 nt, Artificial Sequence
  Description of Artificial Sequence: Synthetic oligonucleotide
auaaaucugcauuuuaaca

SEQ ID NO: 3001668 - RNA, 19 nt, Artificial Sequence
  Description of Artificial Sequence: Synthetic oligonucleotide
uaucauauauauuacuuau

SEQ ID NO: 3001669 - RNA, 19 nt, Artificial Sequence
  Description of Artificial Sequence: Synthetic oligonucleotide
uaguauaauaguacauucc

SEQ ID NO: 3001670 - RNA, 19 nt, Artificial Sequence
  Description of Artificial Sequence: Synthetic oligonucleotide
uguuccauuacuuacugaa

SEQ ID NO: 3001671 - RNA, 19 nt, Artificial Sequence
  Description of Artificial Sequence: Synthetic oligonucleotide
uuaguauaauaguacauuc

SEQ ID NO: 3001672 - RNA, 19 nt, Artificial Sequence
  Description of Artificial Sequence: Synthetic oligonucleotide
gauaaaucugcauuuuaac

SEQ ID NO: 3001673 - RNA, 19 nt, Artificial Sequence
  Description of Artificial Sequence: Synthetic oligonucleotide
cuugaaacucuuaaaaguc

SEQ ID NO: 3001674 - RNA, 19 nt, Artificial Sequence
  Description of Artificial Sequence: Synthetic oligonucleotide
agacaauauacacaugaag

SEQ ID NO: 3001675 - RNA, 19 nt, Artificial Sequence
  Description of Artificial Sequence: Synthetic oligonucleotide
ucuuaaaagucuuaccagu

SEQ ID NO: 3001676 - RNA, 19 nt, Artificial Sequence
  Description of Artificial Sequence: Synthetic oligonucleotide
uuuuacaacagacaauaua

SEQ ID NO: 3001677 - RNA, 19 nt, Artificial Sequence
  Description of Artificial Sequence: Synthetic oligonucleotide
gauacugaaauucuuucca

SEQ ID NO: 3001678 - RNA, 19 nt, Artificial Sequence
  Description of Artificial Sequence: Synthetic oligonucleotide
uauuaagagaguacacuug

SEQ ID NO: 3001679 - RNA, 19 nt, Artificial Sequence
  Description of Artificial Sequence: Synthetic oligonucleotide
uuauuaguaugugugaaug

SEQ ID NO: 3001680 - RNA, 19 nt, Artificial Sequence
  Description of Artificial Sequence: Synthetic oligonucleotide
uuacaaugaaaucuuuaca

SEQ ID NO: 3001681 - RNA, 19 nt, Artificial Sequence
  Description of Artificial Sequence: Synthetic oligonucleotide
aaacucauauugaagaugu

SEQ ID NO: 3001682 - RNA, 19 nt, Artificial Sequence
  Description of Artificial Sequence: Synthetic oligonucleotide
aauuacugauacuuacucu

SEQ ID NO: 3001683 - RNA, 19 nt, Artificial Sequence
  Description of Artificial Sequence: Synthetic oligonucleotide
aguaaaaugccuuccuuug

SEQ ID NO: 3001684 - RNA, 19 nt, Artificial Sequence
  Description of Artificial Sequence: Synthetic oligonucleotide
uaauuacugauacuuacuc

SEQ ID NO: 3001685 - RNA, 19 nt, Artificial Sequence
  Description of Artificial Sequence: Synthetic oligonucleotide
auuuuaacaugacuauguc

SEQ ID NO: 3001686 - RNA, 19 nt, Artificial Sequence
  Description of Artificial Sequence: Synthetic oligonucleotide
uacauuccgauaaaucugc

SEQ ID NO: 3001687 - RNA, 19 nt, Artificial Sequence
  Description of Artificial Sequence: Synthetic oligonucleotide
uuuucauuuaucauauaua

SEQ ID NO: 3001688 - RNA, 19 nt, Artificial Sequence
  Description of Artificial Sequence: Synthetic oligonucleotide
auuaagagaguacacuuga

SEQ ID NO: 3001689 - RNA, 19 nt, Artificial Sequence
  Description of Artificial Sequence: Synthetic oligonucleotide
gugaaugccaccuuccagg

SEQ ID NO: 3001690 - RNA, 19 nt, Artificial Sequence
  Description of Artificial Sequence: Synthetic oligonucleotide
uacaacagacaauauacac

SEQ ID NO: 3001691 - RNA, 19 nt, Artificial Sequence
  Description of Artificial Sequence: Synthetic oligonucleotide
uuuuaacaugacuauguca

SEQ ID NO: 3001692 - RNA, 19 nt, Artificial Sequence
  Description of Artificial Sequence: Synthetic oligonucleotide
uuccauuacuuacugaaga

SEQ ID NO: 3001693 - RNA, 19 nt, Artificial Sequence
  Description of Artificial Sequence: Synthetic oligonucleotide
aucuuuacaacacuuucug

SEQ ID NO: 3001694 - RNA, 19 nt, Artificial Sequence
  Description of Artificial Sequence: Synthetic oligonucleotide
aaugccuuccuuugaaaca

SEQ ID NO: 3001695 - RNA, 19 nt, Artificial Sequence
  Description of Artificial Sequence: Synthetic oligonucleotide
cauauugaagauguguucc

SEQ ID NO: 3001696 - RNA, 19 nt, Artificial Sequence
  Description of Artificial Sequence: Synthetic oligonucleotide
gauguguuccauuacuuac

SEQ ID NO: 3001697 - RNA, 19 nt, Artificial Sequence
  Description of Artificial Sequence: Synthetic oligonucleotide
uuuucuguaaggugcaaac

SEQ ID NO: 3001698 - RNA, 19 nt, Artificial Sequence
  Description of Artificial Sequence: Synthetic oligonucleotide
aaacaugaauuuccuccac

SEQ ID NO: 3001699 - RNA, 19 nt, Artificial Sequence
  Description of Artificial Sequence: Synthetic oligonucleotide
aaugccaccuuccagguuu

SEQ ID NO: 3001700 - RNA, 19 nt, Artificial Sequence
  Description of Artificial Sequence: Synthetic oligonucleotide
uccaccuaauuacugauac

SEQ ID NO: 3001701 - RNA, 19 nt, Artificial Sequence
  Description of Artificial Sequence: Synthetic oligonucleotide
auuuaucauauauauuacu

SEQ ID NO: 3001702 - RNA, 19 nt, Artificial Sequence
  Description of Artificial Sequence: Synthetic oligonucleotide
uacuuauuaagagaguaca

SEQ ID NO: 3001703 - RNA, 19 nt, Artificial Sequence
  Description of Artificial Sequence: Synthetic oligonucleotide
uuacuuacugaagauacug

SEQ ID NO: 3001704 - RNA, 19 nt, Artificial Sequence
  Description of Artificial Sequence: Synthetic oligonucleotide
uuauuaagagaguacacuu

SEQ ID NO: 3001705 - RNA, 19 nt, Artificial Sequence
  Description of Artificial Sequence: Synthetic oligonucleotide
uuuuauuuauaggauuccc

SEQ ID NO: 3001706 - RNA, 19 nt, Artificial Sequence
  Description of Artificial Sequence: Synthetic oligonucleotide
ucuguaaggugcaaacuca

SEQ ID NO: 3001707 - RNA, 19 nt, Artificial Sequence
  Description of Artificial Sequence: Synthetic oligonucleotide
agagaguacacuugaaacu

SEQ ID NO: 3001708 - RNA, 19 nt, Artificial Sequence
  Description of Artificial Sequence: Synthetic oligonucleotide
uguaguaaaaugccuuccu

SEQ ID NO: 3001709 - RNA, 19 nt, Artificial Sequence
  Description of Artificial Sequence: Synthetic oligonucleotide
augaaguuacaaugaaauc

SEQ ID NO: 3001710 - RNA, 19 nt, Artificial Sequence
  Description of Artificial Sequence: Synthetic oligonucleotide
uucuguaaggugcaaacuc

SEQ ID NO: 3001711 - RNA, 19 nt, Artificial Sequence
  Description of Artificial Sequence: Synthetic oligonucleotide
uaagagaguacacuugaaa

SEQ ID NO: 3001712 - RNA, 19 nt, Artificial Sequence
  Description of Artificial Sequence: Synthetic oligonucleotide
uugaaacucuuaaaagucu

SEQ ID NO: 3001713 - RNA, 19 nt, Artificial Sequence
  Description of Artificial Sequence: Synthetic oligonucleotide
uccagguuuucauuuauca

SEQ ID NO: 3001714 - RNA, 19 nt, Artificial Sequence
  Description of Artificial Sequence: Synthetic oligonucleotide
uauuuauaggauucccuga

SEQ ID NO: 3001715 - RNA, 19 nt, Artificial Sequence
  Description of Artificial Sequence: Synthetic oligonucleotide
acuuacucugcucuuguag

SEQ ID NO: 3001716 - RNA, 19 nt, Artificial Sequence
  Description of Artificial Sequence: Synthetic oligonucleotide
uauuaguaugugugaaugc

SEQ ID NO: 3001717 - RNA, 19 nt, Artificial Sequence
  Description of Artificial Sequence: Synthetic oligonucleotide
uuacaacacuuucugaaac

SEQ ID NO: 3001718 - RNA, 19 nt, Artificial Sequence
  Description of Artificial Sequence: Synthetic oligonucleotide
cucuuaaaagucuuaccag

SEQ ID NO: 3001719 - RNA, 19 nt, Artificial Sequence
  Description of Artificial Sequence: Synthetic oligonucleotide
cauuuaucauauauauuac

SEQ ID NO: 3001720 - RNA, 19 nt, Artificial Sequence
  Description of Artificial Sequence: Synthetic oligonucleotide
uuaaaagucuuaccaguuc

SEQ ID NO: 3001721 - RNA, 19 nt, Artificial Sequence
  Description of Artificial Sequence: Synthetic oligonucleotide
cuuucugaaacaaacaaua

SEQ ID NO: 3001722 - RNA, 19 nt, Artificial Sequence
  Description of Artificial Sequence: Synthetic oligonucleotide
uuaguaugugugaaugcca

SEQ ID NO: 3001723 - RNA, 19 nt, Artificial Sequence
  Description of Artificial Sequence: Synthetic oligonucleotide
acaauauacacaugaaguu

SEQ ID NO: 3001724 - RNA, 19 nt, Artificial Sequence
  Description of Artificial Sequence: Synthetic oligonucleotide
acacuugaaacucuuaaaa

SEQ ID NO: 3001725 - RNA, 19 nt, Artificial Sequence
  Description of Artificial Sequence: Synthetic oligonucleotide
cacuugaaacucuuaaaag

SEQ ID NO: 3001726 - RNA, 19 nt, Artificial Sequence
  Description of Artificial Sequence: Synthetic oligonucleotide
uaaaaugccuuccuuugaa

SEQ ID NO: 3001727 - RNA, 19 nt, Artificial Sequence
  Description of Artificial Sequence: Synthetic oligonucleotide
ugaaaucuuuacaacacuu

SEQ ID NO: 3001728 - RNA, 19 nt, Artificial Sequence
  Description of Artificial Sequence: Synthetic oligonucleotide
ucuuguaguaaaaugccuu

SEQ ID NO: 3001729 - RNA, 19 nt, Artificial Sequence
  Description of Artificial Sequence: Synthetic oligonucleotide
uucugaaacaaacaauauu

SEQ ID NO: 3001730 - RNA, 19 nt, Artificial Sequence
  Description of Artificial Sequence: Synthetic oligonucleotide
uaccaguucaauuaguaua

SEQ ID NO: 3001731 - RNA, 19 nt, Artificial Sequence
  Description of Artificial Sequence: Synthetic oligonucleotide
agucuuaccaguucaauua

SEQ ID NO: 3001732 - RNA, 19 nt, Artificial Sequence
  Description of Artificial Sequence: Synthetic oligonucleotide
acugauacuuacucugcuc

SEQ ID NO: 3001733 - RNA, 19 nt, Artificial Sequence
  Description of Artificial Sequence: Synthetic oligonucleotide
uaacaugacuaugucacag

SEQ ID NO: 3001734 - RNA, 19 nt, Artificial Sequence
  Description of Artificial Sequence: Synthetic oligonucleotide
aaucuuuacaacacuuucu

SEQ ID NO: 3001735 - RNA, 19 nt, Artificial Sequence
  Description of Artificial Sequence: Synthetic oligonucleotide
caaugaaaucuuuacaaca

SEQ ID NO: 3001736 - RNA, 19 nt, Artificial Sequence
  Description of Artificial Sequence: Synthetic oligonucleotide
uguguuccauuacuuacug

SEQ ID NO: 3001737 - RNA, 19 nt, Artificial Sequence
  Description of Artificial Sequence: Synthetic oligonucleotide
aguaugugugaaugccacc

SEQ ID NO: 3001738 - RNA, 19 nt, Artificial Sequence
  Description of Artificial Sequence: Synthetic oligonucleotide
uuacugauacuuacucugc

SEQ ID NO: 3001739 - RNA, 19 nt, Artificial Sequence
  Description of Artificial Sequence: Synthetic oligonucleotide
ugugaaugccaccuuccag

SEQ ID NO: 3001740 - RNA, 19 nt, Artificial Sequence
  Description of Artificial Sequence: Synthetic oligonucleotide
auuccgauaaaucugcauu

SEQ ID NO: 3001741 - RNA, 19 nt, Artificial Sequence
  Description of Artificial Sequence: Synthetic oligonucleotide
aauaguacauuccgauaaa

SEQ ID NO: 3001742 - RNA, 19 nt, Artificial Sequence
  Description of Artificial Sequence: Synthetic oligonucleotide
ugaaacaaacaauauuguu

SEQ ID NO: 3001743 - RNA, 19 nt, Artificial Sequence
  Description of Artificial Sequence: Synthetic oligonucleotide
ugugugaaugccaccuucc

SEQ ID NO: 3001744 - RNA, 19 nt, Artificial Sequence
  Description of Artificial Sequence: Synthetic oligonucleotide
ugcauuuuaacaugacuau

SEQ ID NO: 3001745 - RNA, 19 nt, Artificial Sequence
  Description of Artificial Sequence: Synthetic oligonucleotide
cuuuacaacacuuucugaa

SEQ ID NO: 3001746 - RNA, 19 nt, Artificial Sequence
  Description of Artificial Sequence: Synthetic oligonucleotide
aauuaguauaauaguacau

SEQ ID NO: 3001747 - RNA, 19 nt, Artificial Sequence
  Description of Artificial Sequence: Synthetic oligonucleotide
uuauaggauucccugaauu

SEQ ID NO: 3001748 - RNA, 19 nt, Artificial Sequence
  Description of Artificial Sequence: Synthetic oligonucleotide
auuuauaggauucccugaa

SEQ ID NO: 3001749 - RNA, 19 nt, Artificial Sequence
  Description of Artificial Sequence: Synthetic oligonucleotide
aauuuccuccaccuaauua

SEQ ID NO: 3001750 - RNA, 19 nt, Artificial Sequence
  Description of Artificial Sequence: Synthetic oligonucleotide
auuaguauaauaguacauu

SEQ ID NO: 3001751 - RNA, 19 nt, Artificial Sequence
  Description of Artificial Sequence: Synthetic oligonucleotide
caauuaguauaauaguaca

SEQ ID NO: 3001752 - RNA, 19 nt, Artificial Sequence
  Description of Artificial Sequence: Synthetic oligonucleotide
auuacuuauuaagagagua

SEQ ID NO: 3001753 - RNA, 19 nt, Artificial Sequence
  Description of Artificial Sequence: Synthetic oligonucleotide
uaguaugugugaaugccac

SEQ ID NO: 3001754 - RNA, 19 nt, Artificial Sequence
  Description of Artificial Sequence: Synthetic oligonucleotide
ucauauugaagauguguuc

SEQ ID NO: 3001755 - RNA, 19 nt, Artificial Sequence
  Description of Artificial Sequence: Synthetic oligonucleotide
uugaagauguguuccauua

SEQ ID NO: 3001756 - RNA, 19 nt, Artificial Sequence
  Description of Artificial Sequence: Synthetic oligonucleotide
augaauuuccuccaccuaa

SEQ ID NO: 3001757 - RNA, 19 nt, Artificial Sequence
  Description of Artificial Sequence: Synthetic oligonucleotide
acaugaauuuccuccaccu

SEQ ID NO: 3001758 - RNA, 19 nt, Artificial Sequence
  Description of Artificial Sequence: Synthetic oligonucleotide
aacaugacuaugucacaga

SEQ ID NO: 3001759 - RNA, 19 nt, Artificial Sequence
  Description of Artificial Sequence: Synthetic oligonucleotide
acuuauuaagagaguacac

SEQ ID NO: 3001760 - RNA, 19 nt, Artificial Sequence
  Description of Artificial Sequence: Synthetic oligonucleotide
ugaaauucuuuccauuauu

SEQ ID NO: 3001761 - RNA, 19 nt, Artificial Sequence
  Description of Artificial Sequence: Synthetic oligonucleotide
acugaaauucuuuccauua

SEQ ID NO: 3001762 - RNA, 19 nt, Artificial Sequence
  Description of Artificial Sequence: Synthetic oligonucleotide
uacaacacuuucugaaaca

SEQ ID NO: 3001763 - RNA, 19 nt, Artificial Sequence
  Description of Artificial Sequence: Synthetic oligonucleotide
uauuacuuauuaagagagu

SEQ ID NO: 3001764 - RNA, 19 nt, Artificial Sequence
  Description of Artificial Sequence: Synthetic oligonucleotide
uaguacauuccgauaaauc

SEQ ID NO: 3001765 - RNA, 19 nt, Artificial Sequence
  Description of Artificial Sequence: Synthetic oligonucleotide
cuuguaguaaaaugccuuc

SEQ ID NO: 3001766 - RNA, 19 nt, Artificial Sequence
  Description of Artificial Sequence: Synthetic oligonucleotide
aagucuuaccaguucaauu

SEQ ID NO: 3001767 - RNA, 19 nt, Artificial Sequence
  Description of Artificial Sequence: Synthetic oligonucleotide
auacacaugaaguuacaau

SEQ ID NO: 3001768 - RNA, 19 nt, Artificial Sequence
  Description of Artificial Sequence: Synthetic oligonucleotide
auuauuaguaugugugaau

SEQ ID NO: 3001769 - RNA, 19 nt, Artificial Sequence
  Description of Artificial Sequence: Synthetic oligonucleotide
uuucugaaacaaacaauau

SEQ ID NO: 3001770 - RNA, 19 nt, Artificial Sequence
  Description of Artificial Sequence: Synthetic oligonucleotide
ugaaacucuuaaaagucuu

SEQ ID NO: 3001771 - RNA, 19 nt, Artificial Sequence
  Description of Artificial Sequence: Synthetic oligonucleotide
uacuuacugaagauacuga

SEQ ID NO: 3001772 - RNA, 19 nt, Artificial Sequence
  Description of Artificial Sequence: Synthetic oligonucleotide
uauaggauucccugaauuu

SEQ ID NO: 3001773 - RNA, 19 nt, Artificial Sequence
  Description of Artificial Sequence: Synthetic oligonucleotide
acucauauugaagaugugu

SEQ ID NO: 3001774 - RNA, 19 nt, Artificial Sequence
  Description of Artificial Sequence: Synthetic oligonucleotide
gaaacaaacaauauuguuu

SEQ ID NO: 3001775 - RNA, 19 nt, Artificial Sequence
  Description of Artificial Sequence: Synthetic oligonucleotide
caugaaguuacaaugaaau

SEQ ID NO: 3001776 - RNA, 19 nt, Artificial Sequence
  Description of Artificial Sequence: Synthetic oligonucleotide
ucuuuccauuauuaguaug

SEQ ID NO: 3001777 - RNA, 19 nt, Artificial Sequence
  Description of Artificial Sequence: Synthetic oligonucleotide
gagaguacacuugaaacuc

SEQ ID NO: 3001778 - RNA, 19 nt, Artificial Sequence
  Description of Artificial Sequence: Synthetic oligonucleotide
uacacuugaaacucuuaaa

SEQ ID NO: 3001779 - RNA, 19 nt, Artificial Sequence
  Description of Artificial Sequence: Synthetic oligonucleotide
augugugaaugccaccuuc

SEQ ID NO: 3001780 - RNA, 19 nt, Artificial Sequence
  Description of Artificial Sequence: Synthetic oligonucleotide
augaaaucuuuacaacacu

SEQ ID NO: 3001781 - RNA, 19 nt, Artificial Sequence
  Description of Artificial Sequence: Synthetic oligonucleotide
acaacagacaauauacaca

SEQ ID NO: 3001782 - RNA, 19 nt, Artificial Sequence
  Description of Artificial Sequence: Synthetic oligonucleotide
ugaagauacugaaauucuu

SEQ ID NO: 3001783 - RNA, 19 nt, Artificial Sequence
  Description of Artificial Sequence: Synthetic oligonucleotide
uaguaaaaugccuuccuuu

SEQ ID NO: 3001784 - RNA, 19 nt, Artificial Sequence
  Description of Artificial Sequence: Synthetic oligonucleotide
cugcauuuuaacaugacua

SEQ ID NO: 3001785 - RNA, 19 nt, Artificial Sequence
  Description of Artificial Sequence: Synthetic oligonucleotide
uuccauuauuaguaugugu

SEQ ID NO: 3001786 - RNA, 19 nt, Artificial Sequence
  Description of Artificial Sequence: Synthetic oligonucleotide
auauugaagauguguucca

SEQ ID NO: 3001787 - RNA, 19 nt, Artificial Sequence
  Description of Artificial Sequence: Synthetic oligonucleotide
gauacuuacucugcucuug

SEQ ID NO: 3001788 - RNA, 19 nt, Artificial Sequence
  Description of Artificial Sequence: Synthetic oligonucleotide
cauuuuaacaugacuaugu

SEQ ID NO: 3001789 - RNA, 19 nt, Artificial Sequence
  Description of Artificial Sequence: Synthetic oligonucleotide
uucauuuaucauauauauu

SEQ ID NO: 3001790 - RNA, 19 nt, Artificial Sequence
  Description of Artificial Sequence: Synthetic oligonucleotide
guacauuccgauaaaucug

SEQ ID NO: 3001791 - RNA, 19 nt, Artificial Sequence
  Description of Artificial Sequence: Synthetic oligonucleotide
ugaagauguguuccauuac

SEQ ID NO: 3001792 - RNA, 19 nt, Artificial Sequence
  Description of Artificial Sequence: Synthetic oligonucleotide
ucuuuacaacacuuucuga

SEQ ID NO: 3001793 - RNA, 19 nt, Artificial Sequence
  Description of Artificial Sequence: Synthetic oligonucleotide
uuaacaugacuaugucaca

SEQ ID NO: 3001794 - RNA, 19 nt, Artificial Sequence
  Description of Artificial Sequence: Synthetic oligonucleotide
guuuucauuuaucauauau

SEQ ID NO: 3001795 - RNA, 19 nt, Artificial Sequence
  Description of Artificial Sequence: Synthetic oligonucleotide
uuuccauuauuaguaugug

SEQ ID NO: 3001796 - RNA, 19 nt, Artificial Sequence
  Description of Artificial Sequence: Synthetic oligonucleotide
uuguaguaaaaugccuucc

SEQ ID NO: 3001797 - RNA, 19 nt, Artificial Sequence
  Description of Artificial Sequence: Synthetic oligonucleotide
uuccuuugaaacaucuuuu

SEQ ID NO: 3001798 - RNA, 19 nt, Artificial Sequence
  Description of Artificial Sequence: Synthetic oligonucleotide
uccauuacuuacugaagau

SEQ ID NO: 3001799 - RNA, 19 nt, Artificial Sequence
  Description of Artificial Sequence: Synthetic oligonucleotide
ugaauuuccuccaccuaau

SEQ ID NO: 3001800 - RNA, 19 nt, Artificial Sequence
  Description of Artificial Sequence: Synthetic oligonucleotide
uuuccuccaccuaauuacu

SEQ ID NO: 3001801 - RNA, 19 nt, Artificial Sequence
  Description of Artificial Sequence: Synthetic oligonucleotide
auaauaguacauuccgaua

SEQ ID NO: 3001802 - RNA, 19 nt, Artificial Sequence
  Description of Artificial Sequence: Synthetic oligonucleotide
ccuaauuacugauacuuac

SEQ ID NO: 3001803 - RNA, 19 nt, Artificial Sequence
  Description of Artificial Sequence: Synthetic oligonucleotide
cuuuccauuauuaguaugu

SEQ ID NO: 3001804 - RNA, 19 nt, Artificial Sequence
  Description of Artificial Sequence: Synthetic oligonucleotide
uacugauacuuacucugcu

SEQ ID NO: 3001805 - RNA, 19 nt, Artificial Sequence
  Description of Artificial Sequence: Synthetic oligonucleotide
uuaccaguucaauuaguau

SEQ ID NO: 3001806 - RNA, 19 nt, Artificial Sequence
  Description of Artificial Sequence: Synthetic oligonucleotide
uuaagagaguacacuugaa

SEQ ID NO: 3001807 - RNA, 19 nt, Artificial Sequence
  Description of Artificial Sequence: Synthetic oligonucleotide
gaagauguguuccauuacu

SEQ ID NO: 3001808 - RNA, 19 nt, Artificial Sequence
  Description of Artificial Sequence: Synthetic oligonucleotide
uuuauaggauucccugaau

SEQ ID NO: 3001809 - RNA, 19 nt, Artificial Sequence
  Description of Artificial Sequence: Synthetic oligonucleotide
uccuccaccuaauuacuga

SEQ ID NO: 3001810 - RNA, 19 nt, Artificial Sequence
  Description of Artificial Sequence: Synthetic oligonucleotide
cagguuuucauuuaucaua

SEQ ID NO: 3001811 - RNA, 19 nt, Artificial Sequence
  Description of Artificial Sequence: Synthetic oligonucleotide
gucuuaccaguucaauuag

SEQ ID NO: 3001812 - RNA, 19 nt, Artificial Sequence
  Description of Artificial Sequence: Synthetic oligonucleotide
caaacaauauuguuuuaaa

SEQ ID NO: 3001813 - RNA, 19 nt, Artificial Sequence
  Description of Artificial Sequence: Synthetic oligonucleotide
uauacacaugaaguuacaa

SEQ ID NO: 3001814 - RNA, 19 nt, Artificial Sequence
  Description of Artificial Sequence: Synthetic oligonucleotide
guucaauuaguauaauagu

SEQ ID NO: 3001815 - RNA, 19 nt, Artificial Sequence
  Description of Artificial Sequence: Synthetic oligonucleotide
ucuuaccaguucaauuagu

SEQ ID NO: 3001816 - RNA, 19 nt, Artificial Sequence
  Description of Artificial Sequence: Synthetic oligonucleotide
uuccgauaaaucugcauuu

SEQ ID NO: 3001817 - RNA, 19 nt, Artificial Sequence
  Description of Artificial Sequence: Synthetic oligonucleotide
guacacuugaaacucuuaa

SEQ ID NO: 3001818 - RNA, 19 nt, Artificial Sequence
  Description of Artificial Sequence: Synthetic oligonucleotide
aaagucuuaccaguucaau

SEQ ID NO: 3001819 - RNA, 19 nt, Artificial Sequence
  Description of Artificial Sequence: Synthetic oligonucleotide
uaaggugcaaacucauauu

SEQ ID NO: 3001820 - RNA, 19 nt, Artificial Sequence
  Description of Artificial Sequence: Synthetic oligonucleotide
cuuaccaguucaauuagua

SEQ ID NO: 3001821 - RNA, 19 nt, Artificial Sequence
  Description of Artificial Sequence: Synthetic oligonucleotide
auacuuacucugcucuugu

SEQ ID NO: 3001822 - RNA, 19 nt, Artificial Sequence
  Description of Artificial Sequence: Synthetic oligonucleotide
cuuacugaagauacugaaa

SEQ ID NO: 3001823 - RNA, 19 nt, Artificial Sequence
  Description of Artificial Sequence: Synthetic oligonucleotide
caacagacaauauacacau

SEQ ID NO: 3001824 - RNA, 19 nt, Artificial Sequence
  Description of Artificial Sequence: Synthetic oligonucleotide
cacuuucugaaacaaacaa

SEQ ID NO: 3001825 - RNA, 19 nt, Artificial Sequence
  Description of Artificial Sequence: Synthetic oligonucleotide
ugaaugccaccuuccaggu

SEQ ID NO: 3001826 - RNA, 19 nt, Artificial Sequence
  Description of Artificial Sequence: Synthetic oligonucleotide
agauguguuccauuacuua

SEQ ID NO: 3001827 - RNA, 19 nt, Artificial Sequence
  Description of Artificial Sequence: Synthetic oligonucleotide
accaguucaauuaguauaa

SEQ ID NO: 3001828 - RNA, 19 nt, Artificial Sequence
  Description of Artificial Sequence: Synthetic oligonucleotide
aacaaacaauauuguuuua

SEQ ID NO: 3001829 - RNA, 19 nt, Artificial Sequence
  Description of Artificial Sequence: Synthetic oligonucleotide
uacugaaauucuuuccauu

SEQ ID NO: 3001830 - RNA, 19 nt, Artificial Sequence
  Description of Artificial Sequence: Synthetic oligonucleotide
agguuuucauuuaucauau

SEQ ID NO: 3001831 - RNA, 19 nt, Artificial Sequence
  Description of Artificial Sequence: Synthetic oligonucleotide
cuuauuaagagaguacacu

SEQ ID NO: 3001832 - RNA, 19 nt, Artificial Sequence
  Description of Artificial Sequence: Synthetic oligonucleotide
uguaaggugcaaacucaua

SEQ ID NO: 3001833 - RNA, 19 nt, Artificial Sequence
  Description of Artificial Sequence: Synthetic oligonucleotide
guaaaaugccuuccuuuga

SEQ ID NO: 3001834 - RNA, 19 nt, Artificial Sequence
  Description of Artificial Sequence: Synthetic oligonucleotide
guuccauuacuuacugaag

SEQ ID NO: 3001835 - RNA, 19 nt, Artificial Sequence
  Description of Artificial Sequence: Synthetic oligonucleotide
auugaagauguguuccauu

SEQ ID NO: 3001836 - RNA, 19 nt, Artificial Sequence
  Description of Artificial Sequence: Synthetic oligonucleotide
uuccuccaccuaauuacug

SEQ ID NO: 3001837 - RNA, 19 nt, Artificial Sequence
  Description of Artificial Sequence: Synthetic oligonucleotide
guauaauaguacauuccga

SEQ ID NO: 3001838 - RNA, 19 nt, Artificial Sequence
  Description of Artificial Sequence: Synthetic oligonucleotide
cuaauuacugauacuuacu

SEQ ID NO: 3001839 - RNA, 19 nt, Artificial Sequence
  Description of Artificial Sequence: Synthetic oligonucleotide
auaggauucccugaauuuu

SEQ ID NO: 3001840 - RNA, 19 nt, Artificial Sequence
  Description of Artificial Sequence: Synthetic oligonucleotide
aagauguguuccauuacuu

SEQ ID NO: 3001841 - RNA, 19 nt, Artificial Sequence
  Description of Artificial Sequence: Synthetic oligonucleotide
ggugcaaacucauauugaa

SEQ ID NO: 3001842 - RNA, 19 nt, Artificial Sequence
  Description of Artificial Sequence: Synthetic oligonucleotide
gugcaaacucauauugaag

SEQ ID NO: 3001843 - RNA, 19 nt, Artificial Sequence
  Description of Artificial Sequence: Synthetic oligonucleotide
caauauacacaugaaguua

SEQ ID NO: 3001844 - RNA, 19 nt, Artificial Sequence
  Description of Artificial Sequence: Synthetic oligonucleotide
uauugaagauguguuccau

SEQ ID NO: 3001845 - RNA, 19 nt, Artificial Sequence
  Description of Artificial Sequence: Synthetic oligonucleotide
uuacucugcucuuguagua

SEQ ID NO: 3001846 - RNA, 19 nt, Artificial Sequence
  Description of Artificial Sequence: Synthetic oligonucleotide
auuacuuacugaagauacu

SEQ ID NO: 3001847 - RNA, 19 nt, Artificial Sequence
  Description of Artificial Sequence: Synthetic oligonucleotide
uuccagguuuucauuuauc

SEQ ID NO: 3001848 - RNA, 19 nt, Artificial Sequence
  Description of Artificial Sequence: Synthetic oligonucleotide
aucugcauuuuaacaugac

SEQ ID NO: 3001849 - RNA, 19 nt, Artificial Sequence
  Description of Artificial Sequence: Synthetic oligonucleotide
auguguuccauuacuuacu

SEQ ID NO: 3001850 - RNA, 19 nt, Artificial Sequence
  Description of Artificial Sequence: Synthetic oligonucleotide
cucauauugaagauguguu

SEQ ID NO: 3001851 - RNA, 19 nt, Artificial Sequence
  Description of Artificial Sequence: Synthetic oligonucleotide
acacuuucugaaacaaaca

SEQ ID NO: 3001852 - RNA, 19 nt, Artificial Sequence
  Description of Artificial Sequence: Synthetic oligonucleotide
gaagauacugaaauucuuu

SEQ ID NO: 3001853 - RNA, 19 nt, Artificial Sequence
  Description of Artificial Sequence: Synthetic oligonucleotide
accuuccagguuuucauuu

SEQ ID NO: 3001854 - RNA, 19 nt, Artificial Sequence
  Description of Artificial Sequence: Synthetic oligonucleotide
cugaaacaaacaauauugu

SEQ ID NO: 3001855 - RNA, 19 nt, Artificial Sequence
  Description of Artificial Sequence: Synthetic oligonucleotide
uaugugugaaugccaccuu

SEQ ID NO: 3001856 - RNA, 19 nt, Artificial Sequence
  Description of Artificial Sequence: Synthetic oligonucleotide
cuuacucugcucuuguagu

SEQ ID NO: 3001857 - RNA, 19 nt, Artificial Sequence
  Description of Artificial Sequence: Synthetic oligonucleotide
cuuccuuugaaacaucuuu

SEQ ID NO: 3001858 - RNA, 19 nt, Artificial Sequence
  Description of Artificial Sequence: Synthetic oligonucleotide
cugauacuuacucugcucu

SEQ ID NO: 3001859 - RNA, 19 nt, Artificial Sequence
  Description of Artificial Sequence: Synthetic oligonucleotide
ugauacuuacucugcucuu

SEQ ID NO: 3001860 - RNA, 19 nt, Artificial Sequence
  Description of Artificial Sequence: Synthetic oligonucleotide
acaugaaguuacaaugaaa

SEQ ID NO: 3001861 - RNA, 19 nt, Artificial Sequence
  Description of Artificial Sequence: Synthetic oligonucleotide
cagacaauauacacaugaa

SEQ ID NO: 3001862 - RNA, 19 nt, Artificial Sequence
  Description of Artificial Sequence: Synthetic oligonucleotide
guaugugugaaugccaccu

SEQ ID NO: 3001863 - RNA, 19 nt, Artificial Sequence
  Description of Artificial Sequence: Synthetic oligonucleotide
augccuuccuuugaaacau

SEQ ID NO: 3001864 - RNA, 19 nt, Artificial Sequence
  Description of Artificial Sequence: Synthetic oligonucleotide
aacucauauugaagaugug

SEQ ID NO: 3001865 - RNA, 19 nt, Artificial Sequence
  Description of Artificial Sequence: Synthetic oligonucleotide
aacagacaauauacacaug

SEQ ID NO: 3001866 - RNA, 19 nt, Artificial Sequence
  Description of Artificial Sequence: Synthetic oligonucleotide
cacaugaaguuacaaugaa

SEQ ID NO: 3001867 - RNA, 19 nt, Artificial Sequence
  Description of Artificial Sequence: Synthetic oligonucleotide
aucauauauauuacuuauu

SEQ ID NO: 3001868 - RNA, 19 nt, Artificial Sequence
  Description of Artificial Sequence: Synthetic oligonucleotide
caguucaauuaguauaaua

SEQ ID NO: 3001869 - RNA, 19 nt, Artificial Sequence
  Description of Artificial Sequence: Synthetic oligonucleotide
uacucugcucuuguaguaa

SEQ ID NO: 3001870 - RNA, 19 nt, Artificial Sequence
  Description of Artificial Sequence: Synthetic oligonucleotide
gcauuuuaacaugacuaug

SEQ ID NO: 3001871 - RNA, 19 nt, Artificial Sequence
  Description of Artificial Sequence: Synthetic oligonucleotide
auauacacaugaaguuaca

SEQ ID NO: 3001872 - RNA, 19 nt, Artificial Sequence
  Description of Artificial Sequence: Synthetic oligonucleotide
cuuaaaagucuuaccaguu

SEQ ID NO: 3001873 - RNA, 19 nt, Artificial Sequence
  Description of Artificial Sequence: Synthetic oligonucleotide
acucugcucuuguaguaaa

SEQ ID NO: 3001874 - RNA, 19 nt, Artificial Sequence
  Description of Artificial Sequence: Synthetic oligonucleotide
uccgauaaaucugcauuuu

SEQ ID NO: 3001875 - RNA, 19 nt, Artificial Sequence
  Description of Artificial Sequence: Synthetic oligonucleotide
aaguuacaaugaaaucuuu

SEQ ID NO: 3001876 - RNA, 19 nt, Artificial Sequence
  Description of Artificial Sequence: Synthetic oligonucleotide
aggugcaaacucauauuga

SEQ ID NO: 3001877 - RNA, 19 nt, Artificial Sequence
  Description of Artificial Sequence: Synthetic oligonucleotide
agaguacacuugaaacucu

SEQ ID NO: 3001878 - RNA, 19 nt, Artificial Sequence
  Description of Artificial Sequence: Synthetic oligonucleotide
gugugaaugccaccuucca

SEQ ID NO: 3001879 - RNA, 19 nt, Artificial Sequence
  Description of Artificial Sequence: Synthetic oligonucleotide
auuuuacaacagacaauau

SEQ ID NO: 3001880 - RNA, 19 nt, Artificial Sequence
  Description of Artificial Sequence: Synthetic oligonucleotide
ccauuauuaguauguguga

SEQ ID NO: 3001881 - RNA, 19 nt, Artificial Sequence
  Description of Artificial Sequence: Synthetic oligonucleotide
caccuaauuacugauacuu

SEQ ID NO: 3001882 - RNA, 19 nt, Artificial Sequence
  Description of Artificial Sequence: Synthetic oligonucleotide
caacacuuucugaaacaaa

SEQ ID NO: 3001883 - RNA, 19 nt, Artificial Sequence
  Description of Artificial Sequence: Synthetic oligonucleotide
uacuuacucugcucuugua

SEQ ID NO: 3001884 - RNA, 19 nt, Artificial Sequence
  Description of Artificial Sequence: Synthetic oligonucleotide
guaguaaaaugccuuccuu

SEQ ID NO: 3001885 - RNA, 19 nt, Artificial Sequence
  Description of Artificial Sequence: Synthetic oligonucleotide
accuaauuacugauacuua

SEQ ID NO: 3001886 - RNA, 19 nt, Artificial Sequence
  Description of Artificial Sequence: Synthetic oligonucleotide
caugaauuuccuccaccua

SEQ ID NO: 3001887 - RNA, 19 nt, Artificial Sequence
  Description of Artificial Sequence: Synthetic oligonucleotide
cgauaaaucugcauuuuaa

SEQ ID NO: 3001888 - RNA, 19 nt, Artificial Sequence
  Description of Artificial Sequence: Synthetic oligonucleotide
cugaaauucuuuccauuau

SEQ ID NO: 3001889 - RNA, 19 nt, Artificial Sequence
  Description of Artificial Sequence: Synthetic oligonucleotide
guguuccauuacuuacuga

SEQ ID NO: 3001890 - RNA, 19 nt, Artificial Sequence
  Description of Artificial Sequence: Synthetic oligonucleotide
ugccuuccuuugaaacauc

SEQ ID NO: 3001891 - RNA, 19 nt, Artificial Sequence
  Description of Artificial Sequence: Synthetic oligonucleotide
aguacacuugaaacucuua

SEQ ID NO: 3001892 - RNA, 19 nt, Artificial Sequence
  Description of Artificial Sequence: Synthetic oligonucleotide
cauuccgauaaaucugcau

SEQ ID NO: 3001893 - RNA, 19 nt, Artificial Sequence
  Description of Artificial Sequence: Synthetic oligonucleotide
acauuccgauaaaucugca

SEQ ID NO: 3001894 - RNA, 19 nt, Artificial Sequence
  Description of Artificial Sequence: Synthetic oligonucleotide
gcaaacucauauugaagau

SEQ ID NO: 3001895 - RNA, 19 nt, Artificial Sequence
  Description of Artificial Sequence: Synthetic oligonucleotide
gaauuuccuccaccuaauu

SEQ ID NO: 3001896 - RNA, 19 nt, Artificial Sequence
  Description of Artificial Sequence: Synthetic oligonucleotide
cuguaaggugcaaacucau

SEQ ID NO: 3001897 - RNA, 19 nt, Artificial Sequence
  Description of Artificial Sequence: Synthetic oligonucleotide
cuccaccuaauuacugaua

SEQ ID NO: 3001898 - RNA, 19 nt, Artificial Sequence
  Description of Artificial Sequence: Synthetic oligonucleotide
cuuccagguuuucauuuau

SEQ ID NO: 3001899 - RNA, 19 nt, Artificial Sequence
  Description of Artificial Sequence: Synthetic oligonucleotide
gaguacacuugaaacucuu

SEQ ID NO: 3001900 - RNA, 19 nt, Artificial Sequence
  Description of Artificial Sequence: Synthetic oligonucleotide
ccauuacuuacugaagaua

SEQ ID NO: 3001901 - RNA, 19 nt, Artificial Sequence
  Description of Artificial Sequence: Synthetic oligonucleotide
ccgauaaaucugcauuuua

SEQ ID NO: 3001902 - RNA, 19 nt, Artificial Sequence
  Description of Artificial Sequence: Synthetic oligonucleotide
ccagguuuucauuuaucau

SEQ ID NO: 3001903 - RNA, 19 nt, Artificial Sequence
  Description of Artificial Sequence: Synthetic oligonucleotide
ccuuccagguuuucauuua

SEQ ID NO: 3001904 - RNA, 19 nt, Artificial Sequence
  Description of Artificial Sequence: Synthetic oligonucleotide
gaaugccaccuuccagguu

SEQ ID NO: 3001905 - RNA, 19 nt, Artificial Sequence
  Description of Artificial Sequence: Synthetic oligonucleotide
gccuuccuuugaaacaucu

SEQ ID NO: 3001906 - RNA, 19 nt, Artificial Sequence
  Description of Artificial Sequence: Synthetic oligonucleotide
caccuuccagguuuucauu

SEQ ID NO: 3001907 - RNA, 19 nt, Artificial Sequence
  Description of Artificial Sequence: Synthetic oligonucleotide
ccaccuuccagguuuucau

SEQ ID NO: 3001908 - RNA, 19 nt, Artificial Sequence
  Description of Artificial Sequence: Synthetic oligonucleotide
ccuccaccuaauuacugau

SEQ ID NO: 3001909 - RNA, 19 nt, Artificial Sequence
  Description of Artificial Sequence: Synthetic oligonucleotide
ccaccuaauuacugauacu

SEQ ID NO: 3001910 - RNA, 19 nt, Artificial Sequence
  Description of Artificial Sequence: Synthetic oligonucleotide
augccaccuuccagguuuu

SEQ ID NO: 3001911 - RNA, 19 nt, Artificial Sequence
  Description of Artificial Sequence: Synthetic oligonucleotide
ccuuccuuugaaacaucuu

SEQ ID NO: 3001912 - RNA, 19 nt, Artificial Sequence
  Description of Artificial Sequence: Synthetic oligonucleotide
ccaguucaauuaguauaau

SEQ ID NO: 3001913 - RNA, 19 nt, Artificial Sequence
  Description of Artificial Sequence: Synthetic oligonucleotide
uauuguuucauacucaacu

SEQ ID NO: 3001914 - RNA, 19 nt, Artificial Sequence
  Description of Artificial Sequence: Synthetic oligonucleotide
uuuguauuguuucauacuc

SEQ ID NO: 3001915 - RNA, 19 nt, Artificial Sequence
  Description of Artificial Sequence: Synthetic oligonucleotide
ucaacuagaguacuacccc

SEQ ID NO: 3001916 - RNA, 19 nt, Artificial Sequence
  Description of Artificial Sequence: Synthetic oligonucleotide
cucaacuagaguacuaccc

SEQ ID NO: 3001917 - RNA, 19 nt, Artificial Sequence
  Description of Artificial Sequence: Synthetic oligonucleotide
ucuuuguauuguuucauac

SEQ ID NO: 3001918 - RNA, 19 nt, Artificial Sequence
  Description of Artificial Sequence: Synthetic oligonucleotide
acucaacuagaguacuacc

SEQ ID NO: 3001919 - RNA, 19 nt, Artificial Sequence
  Description of Artificial Sequence: Synthetic oligonucleotide
aguacuaccccuucaagua

SEQ ID NO: 3001920 - RNA, 19 nt, Artificial Sequence
  Description of Artificial Sequence: Synthetic oligonucleotide
uuguauuguuucauacuca

SEQ ID NO: 3001921 - RNA, 19 nt, Artificial Sequence
  Description of Artificial Sequence: Synthetic oligonucleotide
agccucuuuguauuguuuc

SEQ ID NO: 3001922 - RNA, 19 nt, Artificial Sequence
  Description of Artificial Sequence: Synthetic oligonucleotide
acuagaguacuaccccuuc

SEQ ID NO: 3001923 - RNA, 19 nt, Artificial Sequence
  Description of Artificial Sequence: Synthetic oligonucleotide
auuguuucauacucaacua

SEQ ID NO: 3001924 - RNA, 19 nt, Artificial Sequence
  Description of Artificial Sequence: Synthetic oligonucleotide
uagaguacuaccccuucaa

SEQ ID NO: 3001925 - RNA, 19 nt, Artificial Sequence
  Description of Artificial Sequence: Synthetic oligonucleotide
uacucaacuagaguacuac

SEQ ID NO: 3001926 - RNA, 19 nt, Artificial Sequence
  Description of Artificial Sequence: Synthetic oligonucleotide
agaguacuaccccuucaag

SEQ ID NO: 3001927 - RNA, 19 nt, Artificial Sequence
  Description of Artificial Sequence: Synthetic oligonucleotide
acuaccccuucaaguaucc

SEQ ID NO: 3001928 - RNA, 19 nt, Artificial Sequence
  Description of Artificial Sequence: Synthetic oligonucleotide
gaguacuaccccuucaagu

SEQ ID NO: 3001929 - RNA, 19 nt, Artificial Sequence
  Description of Artificial Sequence: Synthetic oligonucleotide
uacuaccccuucaaguauc

SEQ ID NO: 3001930 - RNA, 19 nt, Artificial Sequence
  Description of Artificial Sequence: Synthetic oligonucleotide
cuuuguauuguuucauacu

SEQ ID NO: 3001931 - RNA, 19 nt, Artificial Sequence
  Description of Artificial Sequence: Synthetic oligonucleotide
aacuagaguacuaccccuu

SEQ ID NO: 3001932 - RNA, 19 nt, Artificial Sequence
  Description of Artificial Sequence: Synthetic oligonucleotide
ugagccucuuuguauuguu

SEQ ID NO: 3001933 - RNA, 19 nt, Artificial Sequence
  Description of Artificial Sequence: Synthetic oligonucleotide
guauuguuucauacucaac

SEQ ID NO: 3001934 - RNA, 19 nt, Artificial Sequence
  Description of Artificial Sequence: Synthetic oligonucleotide
cuagaguacuaccccuuca

SEQ ID NO: 3001935 - RNA, 19 nt, Artificial Sequence
  Description of Artificial Sequence: Synthetic oligonucleotide
cucuuuguauuguuucaua

SEQ ID NO: 3001936 - RNA, 19 nt, Artificial Sequence
  Description of Artificial Sequence: Synthetic oligonucleotide
caacuagaguacuaccccu

SEQ ID NO: 3001937 - RNA, 19 nt, Artificial Sequence
  Description of Artificial Sequence: Synthetic oligonucleotide
gccucuuuguauuguuuca

SEQ ID NO: 3001938 - RNA, 19 nt, Artificial Sequence
  Description of Artificial Sequence: Synthetic oligonucleotide
auacucaacuagaguacua

SEQ ID NO: 3001939 - RNA, 19 nt, Artificial Sequence
  Description of Artificial Sequence: Synthetic oligonucleotide
guacuaccccuucaaguau

SEQ ID NO: 3001940 - RNA, 19 nt, Artificial Sequence
  Description of Artificial Sequence: Synthetic oligonucleotide
gagccucuuuguauuguuu

SEQ ID NO: 3001941 - RNA, 19 nt, Artificial Sequence
  Description of Artificial Sequence: Synthetic oligonucleotide
cugagccucuuuguauugu

SEQ ID NO: 3001942 - RNA, 19 nt, Artificial Sequence
  Description of Artificial Sequence: Synthetic oligonucleotide
ccucuuuguauuguuucau

SEQ ID NO: 3001943 - RNA, 19 nt, Artificial Sequence
  Description of Artificial Sequence: Synthetic oligonucleotide
aaaacaacauuucauaaag

SEQ ID NO: 3001944 - RNA, 19 nt, Artificial Sequence
  Description of Artificial Sequence: Synthetic oligonucleotide
aagaacaagaagcacauuc

SEQ ID NO: 3001945 - RNA, 19 nt, Artificial Sequence
  Description of Artificial Sequence: Synthetic oligonucleotide
uucauaaagauaauaauac

SEQ ID NO: 3001946 - RNA, 19 nt, Artificial Sequence
  Description of Artificial Sequence: Synthetic oligonucleotide
uguaagaacggcaauaaca

SEQ ID NO: 3001947 - RNA, 19 nt, Artificial Sequence
  Description of Artificial Sequence: Synthetic oligonucleotide
cauaaagauaauaauacac

SEQ ID NO: 3001948 - RNA, 19 nt, Artificial Sequence
  Description of Artificial Sequence: Synthetic oligonucleotide
aauacacacguguucaagg

SEQ ID NO: 3001949 - RNA, 19 nt, Artificial Sequence
  Description of Artificial Sequence: Synthetic oligonucleotide
cacuugaagaacaagaagc

SEQ ID NO: 3001950 - RNA, 19 nt, Artificial Sequence
  Description of Artificial Sequence: Synthetic oligonucleotide
ucaaaggagacuuagggga

SEQ ID NO: 3001951 - RNA, 19 nt, Artificial Sequence
  Description of Artificial Sequence: Synthetic oligonucleotide
aacaacauuucauaaagau

SEQ ID NO: 3001952 - RNA, 19 nt, Artificial Sequence
  Description of Artificial Sequence: Synthetic oligonucleotide
aaagauaauaauacacacg

SEQ ID NO: 3001953 - RNA, 19 nt, Artificial Sequence
  Description of Artificial Sequence: Synthetic oligonucleotide
aaaacauuuagugugugug

SEQ ID NO: 3001954 - RNA, 19 nt, Artificial Sequence
  Description of Artificial Sequence: Synthetic oligonucleotide
ucaaggacagacaagaguc

SEQ ID NO: 3001955 - RNA, 19 nt, Artificial Sequence
  Description of Artificial Sequence: Synthetic oligonucleotide
uugaagaacaagaagcaca

SEQ ID NO: 3001956 - RNA, 19 nt, Artificial Sequence
  Description of Artificial Sequence: Synthetic oligonucleotide
aauaauacacacguguuca

SEQ ID NO: 3001957 - RNA, 19 nt, Artificial Sequence
  Description of Artificial Sequence: Synthetic oligonucleotide
ucagaaacaucuuugggug

SEQ ID NO: 3001958 - RNA, 19 nt, Artificial Sequence
  Description of Artificial Sequence: Synthetic oligonucleotide
aagcacauuccccucaugg

SEQ ID NO: 3001959 - RNA, 19 nt, Artificial Sequence
  Description of Artificial Sequence: Synthetic oligonucleotide
cuucaaaggagacuuaggg

SEQ ID NO: 3001960 - RNA, 19 nt, Artificial Sequence
  Description of Artificial Sequence: Synthetic oligonucleotide
uaagagcucagaaacaucu

SEQ ID NO: 3001961 - RNA, 19 nt, Artificial Sequence
  Description of Artificial Sequence: Synthetic oligonucleotide
gauaauaauacacacgugu

SEQ ID NO: 3001962 - RNA, 19 nt, Artificial Sequence
  Description of Artificial Sequence: Synthetic oligonucleotide
uuugagacagccaaaggac

SEQ ID NO: 3001963 - RNA, 19 nt, Artificial Sequence
  Description of Artificial Sequence: Synthetic oligonucleotide
caacauuucauaaagauaa

SEQ ID NO: 3001964 - RNA, 19 nt, Artificial Sequence
  Description of Artificial Sequence: Synthetic oligonucleotide
acagacaagagucugcuag

SEQ ID NO: 3001965 - RNA, 19 nt, Artificial Sequence
  Description of Artificial Sequence: Synthetic oligonucleotide
uucaaaggagacuuagggg

SEQ ID NO: 3001966 - RNA, 19 nt, Artificial Sequence
  Description of Artificial Sequence: Synthetic oligonucleotide
ugauguagccacuugaaga

SEQ ID NO: 3001967 - RNA, 19 nt, Artificial Sequence
  Description of Artificial Sequence: Synthetic oligonucleotide
aacaagaagcacauucccc

SEQ ID NO: 3001968 - RNA, 19 nt, Artificial Sequence
  Description of Artificial Sequence: Synthetic oligonucleotide
ucauaaagauaauaauaca

SEQ ID NO: 3001969 - RNA, 19 nt, Artificial Sequence
  Description of Artificial Sequence: Synthetic oligonucleotide
auggccagaggacucaugc

SEQ ID NO: 3001970 - RNA, 19 nt, Artificial Sequence
  Description of Artificial Sequence: Synthetic oligonucleotide
guaagaacggcaauaacag

SEQ ID NO: 3001971 - RNA, 19 nt, Artificial Sequence
  Description of Artificial Sequence: Synthetic oligonucleotide
aauaacagcagaauguaaa

SEQ ID NO: 3001972 - RNA, 19 nt, Artificial Sequence
  Description of Artificial Sequence: Synthetic oligonucleotide
aagaacggcaauaacagca

SEQ ID NO: 3001973 - RNA, 19 nt, Artificial Sequence
  Description of Artificial Sequence: Synthetic oligonucleotide
ugagacagccaaaggacgg

SEQ ID NO: 3001974 - RNA, 19 nt, Artificial Sequence
  Description of Artificial Sequence: Synthetic oligonucleotide
auaaagauaauaauacaca

SEQ ID NO: 3001975 - RNA, 19 nt, Artificial Sequence
  Description of Artificial Sequence: Synthetic oligonucleotide
uggagggagaguaacagca

SEQ ID NO: 3001976 - RNA, 19 nt, Artificial Sequence
  Description of Artificial Sequence: Synthetic oligonucleotide
uaauaauacacacguguuc

SEQ ID NO: 3001977 - RNA, 19 nt, Artificial Sequence
  Description of Artificial Sequence: Synthetic oligonucleotide
uugagacagccaaaggacg

SEQ ID NO: 3001978 - RNA, 19 nt, Artificial Sequence
  Description of Artificial Sequence: Synthetic oligonucleotide
ucaguguuagguacguucc

SEQ ID NO: 3001979 - RNA, 19 nt, Artificial Sequence
  Description of Artificial Sequence: Synthetic oligonucleotide
augccugggacuucaaggc

SEQ ID NO: 3001980 - RNA, 19 nt, Artificial Sequence
  Description of Artificial Sequence: Synthetic oligonucleotide
gagaguaacagcaaggaga

SEQ ID NO: 3001981 - RNA, 19 nt, Artificial Sequence
  Description of Artificial Sequence: Synthetic oligonucleotide
ugaagaacaagaagcacau

SEQ ID NO: 3001982 - RNA, 19 nt, Artificial Sequence
  Description of Artificial Sequence: Synthetic oligonucleotide
acaagaagcacauuccccu

SEQ ID NO: 3001983 - RNA, 19 nt, Artificial Sequence
  Description of Artificial Sequence: Synthetic oligonucleotide
acaagagucugcuagcuca

SEQ ID NO: 3001984 - RNA, 19 nt, Artificial Sequence
  Description of Artificial Sequence: Synthetic oligonucleotide
caugccugggacuucaagg

SEQ ID NO: 3001985 - RNA, 19 nt, Artificial Sequence
  Description of Artificial Sequence: Synthetic oligonucleotide
gaacaagaagcacauuccc

SEQ ID NO: 3001986 - RNA, 19 nt, Artificial Sequence
  Description of Artificial Sequence: Synthetic oligonucleotide
guuugagacagccaaagga

SEQ ID NO: 3001987 - RNA, 19 nt, Artificial Sequence
  Description of Artificial Sequence: Synthetic oligonucleotide
agcacauuccccucauggc

SEQ ID NO: 3001988 - RNA, 19 nt, Artificial Sequence
  Description of Artificial Sequence: Synthetic oligonucleotide
aguaacagcaaggagaaaa

SEQ ID NO: 3001989 - RNA, 19 nt, Artificial Sequence
  Description of Artificial Sequence: Synthetic oligonucleotide
aacauuuagugugugugug

SEQ ID NO: 3001990 - RNA, 19 nt, Artificial Sequence
  Description of Artificial Sequence: Synthetic oligonucleotide
uguuugagacagccaaagg

SEQ ID NO: 3001991 - RNA, 19 nt, Artificial Sequence
  Description of Artificial Sequence: Synthetic oligonucleotide
aauguaagaacggcaauaa

SEQ ID NO: 3001992 - RNA, 19 nt, Artificial Sequence
  Description of Artificial Sequence: Synthetic oligonucleotide
uuuagugugugugugugug

SEQ ID NO: 3001993 - RNA, 19 nt, Artificial Sequence
  Description of Artificial Sequence: Synthetic oligonucleotide
agcucagaaacaucuuugg

SEQ ID NO: 3001994 - RNA, 19 nt, Artificial Sequence
  Description of Artificial Sequence: Synthetic oligonucleotide
acaucuuugggugucacag

SEQ ID NO: 3001995 - RNA, 19 nt, Artificial Sequence
  Description of Artificial Sequence: Synthetic oligonucleotide
uguagccacuugaagaaca

SEQ ID NO: 3001996 - RNA, 19 nt, Artificial Sequence
  Description of Artificial Sequence: Synthetic oligonucleotide
ucugcuagcucaguguuag

SEQ ID NO: 3001997 - RNA, 19 nt, Artificial Sequence
  Description of Artificial Sequence: Synthetic oligonucleotide
aaaauguaagaacggcaau

SEQ ID NO: 3001998 - RNA, 19 nt, Artificial Sequence
  Description of Artificial Sequence: Synthetic oligonucleotide
gggauaagagcucagaaac

SEQ ID NO: 3001999 - RNA, 19 nt, Artificial Sequence
  Description of Artificial Sequence: Synthetic oligonucleotide
guuuguuugagacagccaa

SEQ ID NO: 3002000 - RNA, 19 nt, Artificial Sequence
  Description of Artificial Sequence: Synthetic oligonucleotide
gauguagccacuugaagaa

SEQ ID NO: 3002001 - RNA, 19 nt, Artificial Sequence
  Description of Artificial Sequence: Synthetic oligonucleotide
uucugauguagccacuuga

SEQ ID NO: 3002002 - RNA, 19 nt, Artificial Sequence
  Description of Artificial Sequence: Synthetic oligonucleotide
gucacaguguguuuguuug

SEQ ID NO: 3002003 - RNA, 19 nt, Artificial Sequence
  Description of Artificial Sequence: Synthetic oligonucleotide
aaauguaagaacggcaaua

SEQ ID NO: 3002004 - RNA, 19 nt, Artificial Sequence
  Description of Artificial Sequence: Synthetic oligonucleotide
uuguuugagacagccaaag

SEQ ID NO: 3002005 - RNA, 19 nt, Artificial Sequence
  Description of Artificial Sequence: Synthetic oligonucleotide
uuaggggauggaaaugucu

SEQ ID NO: 3002006 - RNA, 19 nt, Artificial Sequence
  Description of Artificial Sequence: Synthetic oligonucleotide
caguguguuuguuugagac

SEQ ID NO: 3002007 - RNA, 19 nt, Artificial Sequence
  Description of Artificial Sequence: Synthetic oligonucleotide
cucaguguuagguacguuc

SEQ ID NO: 3002008 - RNA, 19 nt, Artificial Sequence
  Description of Artificial Sequence: Synthetic oligonucleotide
cuagcucaguguuagguac

SEQ ID NO: 3002009 - RNA, 19 nt, Artificial Sequence
  Description of Artificial Sequence: Synthetic oligonucleotide
uuagguacguuccuucaaa

SEQ ID NO: 3002010 - RNA, 19 nt, Artificial Sequence
  Description of Artificial Sequence: Synthetic oligonucleotide
aucuuugggugucacagug

SEQ ID NO: 3002011 - RNA, 19 nt, Artificial Sequence
  Description of Artificial Sequence: Synthetic oligonucleotide
auaacagcagaauguaaaa

SEQ ID NO: 3002012 - RNA, 19 nt, Artificial Sequence
  Description of Artificial Sequence: Synthetic oligonucleotide
agguacguuccuucaaagg

SEQ ID NO: 3002013 - RNA, 19 nt, Artificial Sequence
  Description of Artificial Sequence: Synthetic oligonucleotide
auggaaaugucuggggugg

SEQ ID NO: 3002014 - RNA, 19 nt, Artificial Sequence
  Description of Artificial Sequence: Synthetic oligonucleotide
agaaacaucuuuggguguc

SEQ ID NO: 3002015 - RNA, 19 nt, Artificial Sequence
  Description of Artificial Sequence: Synthetic oligonucleotide
auguaagaacggcaauaac

SEQ ID NO: 3002016 - RNA, 19 nt, Artificial Sequence
  Description of Artificial Sequence: Synthetic oligonucleotide
uaauacacacguguucaag

SEQ ID NO: 3002017 - RNA, 19 nt, Artificial Sequence
  Description of Artificial Sequence: Synthetic oligonucleotide
ugggacagggaacuguucu

SEQ ID NO: 3002018 - RNA, 19 nt, Artificial Sequence
  Description of Artificial Sequence: Synthetic oligonucleotide
aaggagacuuaggggaugg

SEQ ID NO: 3002019 - RNA, 19 nt, Artificial Sequence
  Description of Artificial Sequence: Synthetic oligonucleotide
gagggagaguaacagcaag

SEQ ID NO: 3002020 - RNA, 19 nt, Artificial Sequence
  Description of Artificial Sequence: Synthetic oligonucleotide
aagaagcacauuccccuca

SEQ ID NO: 3002021 - RNA, 19 nt, Artificial Sequence
  Description of Artificial Sequence: Synthetic oligonucleotide
acagccaaaggacgguggg

SEQ ID NO: 3002022 - RNA, 19 nt, Artificial Sequence
  Description of Artificial Sequence: Synthetic oligonucleotide
uccuucaaaggagacuuag

SEQ ID NO: 3002023 - RNA, 19 nt, Artificial Sequence
  Description of Artificial Sequence: Synthetic oligonucleotide
uaagaacggcaauaacagc

SEQ ID NO: 3002024 - RNA, 19 nt, Artificial Sequence
  Description of Artificial Sequence: Synthetic oligonucleotide
cuuugggugucacagugug

SEQ ID NO: 3002025 - RNA, 19 nt, Artificial Sequence
  Description of Artificial Sequence: Synthetic oligonucleotide
auacacacguguucaagga

SEQ ID NO: 3002026 - RNA, 19 nt, Artificial Sequence
  Description of Artificial Sequence: Synthetic oligonucleotide
aguggagggagaguaacag

SEQ ID NO: 3002027 - RNA, 19 nt, Artificial Sequence
  Description of Artificial Sequence: Synthetic oligonucleotide
uacguuccuucaaaggaga

SEQ ID NO: 3002028 - RNA, 19 nt, Artificial Sequence
  Description of Artificial Sequence: Synthetic oligonucleotide
aaggacagacaagagucug

SEQ ID NO: 3002029 - RNA, 19 nt, Artificial Sequence
  Description of Artificial Sequence: Synthetic oligonucleotide
uguuagguacguuccuuca

SEQ ID NO: 3002030 - RNA, 19 nt, Artificial Sequence
  Description of Artificial Sequence: Synthetic oligonucleotide
uguuuguuugagacagcca

SEQ ID NO: 3002031 - RNA, 19 nt, Artificial Sequence
  Description of Artificial Sequence: Synthetic oligonucleotide
gguacguuccuucaaagga

SEQ ID NO: 3002032 - RNA, 19 nt, Artificial Sequence
  Description of Artificial Sequence: Synthetic oligonucleotide
acuugaagaacaagaagca

SEQ ID NO: 3002033 - RNA, 19 nt, Artificial Sequence
  Description of Artificial Sequence: Synthetic oligonucleotide
uagcucaguguuagguacg

SEQ ID NO: 3002034 - RNA, 19 nt, Artificial Sequence
  Description of Artificial Sequence: Synthetic oligonucleotide
uuuguuugagacagccaaa

SEQ ID NO: 3002035 - RNA, 19 nt, Artificial Sequence
  Description of Artificial Sequence: Synthetic oligonucleotide
aaacaucuuugggugucac

SEQ ID NO: 3002036 - RNA, 19 nt, Artificial Sequence
  Description of Artificial Sequence: Synthetic oligonucleotide
agccaaaggacggugggac

SEQ ID NO: 3002037 - RNA, 19 nt, Artificial Sequence
  Description of Artificial Sequence: Synthetic oligonucleotide
aggggauggaaaugucugg

SEQ ID NO: 3002038 - RNA, 19 nt, Artificial Sequence
  Description of Artificial Sequence: Synthetic oligonucleotide
agacuuaggggauggaaau

SEQ ID NO: 3002039 - RNA, 19 nt, Artificial Sequence
  Description of Artificial Sequence: Synthetic oligonucleotide
aguguguuuguuugagaca

SEQ ID NO: 3002040 - RNA, 19 nt, Artificial Sequence
  Description of Artificial Sequence: Synthetic oligonucleotide
gggacuucaaggcaggggc

SEQ ID NO: 3002041 - RNA, 19 nt, Artificial Sequence
  Description of Artificial Sequence: Synthetic oligonucleotide
aacuguucugauguagcca

SEQ ID NO: 3002042 - RNA, 19 nt, Artificial Sequence
  Description of Artificial Sequence: Synthetic oligonucleotide
uagguacguuccuucaaag

SEQ ID NO: 3002043 - RNA, 19 nt, Artificial Sequence
  Description of Artificial Sequence: Synthetic oligonucleotide
acuuaggggauggaaaugu

SEQ ID NO: 3002044 - RNA, 19 nt, Artificial Sequence
  Description of Artificial Sequence: Synthetic oligonucleotide
cacguguucaaggacagac

SEQ ID NO: 3002045 - RNA, 19 nt, Artificial Sequence
  Description of Artificial Sequence: Synthetic oligonucleotide
aaugucuggggugggauaa

SEQ ID NO: 3002046 - RNA, 19 nt, Artificial Sequence
  Description of Artificial Sequence: Synthetic oligonucleotide
agagucugcuagcucagug

SEQ ID NO: 3002047 - RNA, 19 nt, Artificial Sequence
  Description of Artificial Sequence: Synthetic oligonucleotide
aaaggacggugggacaggg

SEQ ID NO: 3002048 - RNA, 19 nt, Artificial Sequence
  Description of Artificial Sequence: Synthetic oligonucleotide
aaacaacauuucauaaaga

SEQ ID NO: 3002049 - RNA, 19 nt, Artificial Sequence
  Description of Artificial Sequence: Synthetic oligonucleotide
uacacacguguucaaggac

SEQ ID NO: 3002050 - RNA, 19 nt, Artificial Sequence
  Description of Artificial Sequence: Synthetic oligonucleotide
cucagaaacaucuuugggu

SEQ ID NO: 3002051 - RNA, 19 nt, Artificial Sequence
  Description of Artificial Sequence: Synthetic oligonucleotide
guguuuguuugagacagcc

SEQ ID NO: 3002052 - RNA, 19 nt, Artificial Sequence
  Description of Artificial Sequence: Synthetic oligonucleotide
guacguuccuucaaaggag

SEQ ID NO: 3002053 - RNA, 19 nt, Artificial Sequence
  Description of Artificial Sequence: Synthetic oligonucleotide
cugauguagccacuugaag

SEQ ID NO: 3002054 - RNA, 19 nt, Artificial Sequence
  Description of Artificial Sequence: Synthetic oligonucleotide
agaguaacagcaaggagaa

SEQ ID NO: 3002055 - RNA, 19 nt, Artificial Sequence
  Description of Artificial Sequence: Synthetic oligonucleotide
cauuuagugugugugugug

SEQ ID NO: 3002056 - RNA, 19 nt, Artificial Sequence
  Description of Artificial Sequence: Synthetic oligonucleotide
uccccucauggccagagga

SEQ ID NO: 3002057 - RNA, 19 nt, Artificial Sequence
  Description of Artificial Sequence: Synthetic oligonucleotide
cagacaagagucugcuagc

SEQ ID NO: 3002058 - RNA, 19 nt, Artificial Sequence
  Description of Artificial Sequence: Synthetic oligonucleotide
ucaugccugggacuucaag

SEQ ID NO: 3002059 - RNA, 19 nt, Artificial Sequence
  Description of Artificial Sequence: Synthetic oligonucleotide
agagcucagaaacaucuuu

SEQ ID NO: 3002060 - RNA, 19 nt, Artificial Sequence
  Description of Artificial Sequence: Synthetic oligonucleotide
acauuuagugugugugugu

SEQ ID NO: 3002061 - RNA, 19 nt, Artificial Sequence
  Description of Artificial Sequence: Synthetic oligonucleotide
auaauaauacacacguguu

SEQ ID NO: 3002062 - RNA, 19 nt, Artificial Sequence
  Description of Artificial Sequence: Synthetic oligonucleotide
aggacagacaagagucugc

SEQ ID NO: 3002063 - RNA, 19 nt, Artificial Sequence
  Description of Artificial Sequence: Synthetic oligonucleotide
gaggacucaugccugggac

SEQ ID NO: 3002064 - RNA, 19 nt, Artificial Sequence
  Description of Artificial Sequence: Synthetic oligonucleotide
agggagaguaacagcaagg

SEQ ID NO: 3002065 - RNA, 19 nt, Artificial Sequence
  Description of Artificial Sequence: Synthetic oligonucleotide
ugcuagcucaguguuaggu

SEQ ID NO: 3002066 - RNA, 19 nt, Artificial Sequence
  Description of Artificial Sequence: Synthetic oligonucleotide
aaaggagacuuaggggaug

SEQ ID NO: 3002067 - RNA, 19 nt, Artificial Sequence
  Description of Artificial Sequence: Synthetic oligonucleotide
agccacuugaagaacaaga

SEQ ID NO: 3002068 - RNA, 19 nt, Artificial Sequence
  Description of Artificial Sequence: Synthetic oligonucleotide
acagggaacuguucugaug

SEQ ID NO: 3002069 - RNA, 19 nt, Artificial Sequence
  Description of Artificial Sequence: Synthetic oligonucleotide
uagugugugugugugugug

SEQ ID NO: 3002070 - RNA, 19 nt, Artificial Sequence
  Description of Artificial Sequence: Synthetic oligonucleotide
agaacggcaauaacagcag

SEQ ID NO: 3002071 - RNA, 19 nt, Artificial Sequence
  Description of Artificial Sequence: Synthetic oligonucleotide
auuuggaguggagggagag

SEQ ID NO: 3002072 - RNA, 19 nt, Artificial Sequence
  Description of Artificial Sequence: Synthetic oligonucleotide
aggacggugggacagggaa

SEQ ID NO: 3002073 - RNA, 19 nt, Artificial Sequence
  Description of Artificial Sequence: Synthetic oligonucleotide
auaagagcucagaaacauc

SEQ ID NO: 3002074 - RNA, 19 nt, Artificial Sequence
  Description of Artificial Sequence: Synthetic oligonucleotide
aacggcaauaacagcagaa

SEQ ID NO: 3002075 - RNA, 19 nt, Artificial Sequence
  Description of Artificial Sequence: Synthetic oligonucleotide
gauaagagcucagaaacau

SEQ ID NO: 3002076 - RNA, 19 nt, Artificial Sequence
  Description of Artificial Sequence: Synthetic oligonucleotide
uuggaguggagggagagua

SEQ ID NO: 3002077 - RNA, 19 nt, Artificial Sequence
  Description of Artificial Sequence: Synthetic oligonucleotide
cacacguguucaaggacag

SEQ ID NO: 3002078 - RNA, 19 nt, Artificial Sequence
  Description of Artificial Sequence: Synthetic oligonucleotide
aaggcaggggcccuuugaa

SEQ ID NO: 3002079 - RNA, 19 nt, Artificial Sequence
  Description of Artificial Sequence: Synthetic oligonucleotide
ucuuugggugucacagugu

SEQ ID NO: 3002080 - RNA, 19 nt, Artificial Sequence
  Description of Artificial Sequence: Synthetic oligonucleotide
uugggugucacaguguguu

SEQ ID NO: 3002081 - RNA, 19 nt, Artificial Sequence
  Description of Artificial Sequence: Synthetic oligonucleotide
acaacauuucauaaagaua

SEQ ID NO: 3002082 - RNA, 19 nt, Artificial Sequence
  Description of Artificial Sequence: Synthetic oligonucleotide
uguguuuguuugagacagc

SEQ ID NO: 3002083 - RNA, 19 nt, Artificial Sequence
  Description of Artificial Sequence: Synthetic oligonucleotide
auuuagugugugugugugu

SEQ ID NO: 3002084 - RNA, 19 nt, Artificial Sequence
  Description of Artificial Sequence: Synthetic oligonucleotide
aaaugucuggggugggaua

SEQ ID NO: 3002085 - RNA, 19 nt, Artificial Sequence
  Description of Artificial Sequence: Synthetic oligonucleotide
caagagucugcuagcucag

SEQ ID NO: 3002086 - RNA, 19 nt, Artificial Sequence
  Description of Artificial Sequence: Synthetic oligonucleotide
gacagccaaaggacggugg

SEQ ID NO: 3002087 - RNA, 19 nt, Artificial Sequence
  Description of Artificial Sequence: Synthetic oligonucleotide
auaauacacacguguucaa

SEQ ID NO: 3002088 - RNA, 19 nt, Artificial Sequence
  Description of Artificial Sequence: Synthetic oligonucleotide
cacaguguguuuguuugag

SEQ ID NO: 3002089 - RNA, 19 nt, Artificial Sequence
  Description of Artificial Sequence: Synthetic oligonucleotide
agauaauaauacacacgug

SEQ ID NO: 3002090 - RNA, 19 nt, Artificial Sequence
  Description of Artificial Sequence: Synthetic oligonucleotide
ggagaguaacagcaaggag

SEQ ID NO: 3002091 - RNA, 19 nt, Artificial Sequence
  Description of Artificial Sequence: Synthetic oligonucleotide
gagacuuaggggauggaaa

SEQ ID NO: 3002092 - RNA, 19 nt, Artificial Sequence
  Description of Artificial Sequence: Synthetic oligonucleotide
ugucacaguguguuuguuu

SEQ ID NO: 3002093 - RNA, 19 nt, Artificial Sequence
  Description of Artificial Sequence: Synthetic oligonucleotide
gacuucaaggcaggggccc

SEQ ID NO: 3002094 - RNA, 19 nt, Artificial Sequence
  Description of Artificial Sequence: Synthetic oligonucleotide
gcacauuccccucauggcc

SEQ ID NO: 3002095 - RNA, 19 nt, Artificial Sequence
  Description of Artificial Sequence: Synthetic oligonucleotide
uuagugugugugugugugu

SEQ ID NO: 3002096 - RNA, 19 nt, Artificial Sequence
  Description of Artificial Sequence: Synthetic oligonucleotide
gggauggaaaugucugggg

SEQ ID NO: 3002097 - RNA, 19 nt, Artificial Sequence
  Description of Artificial Sequence: Synthetic oligonucleotide
aacauuucauaaagauaau

SEQ ID NO: 3002098 - RNA, 19 nt, Artificial Sequence
  Description of Artificial Sequence: Synthetic oligonucleotide
ucacaguguguuuguuuga

SEQ ID NO: 3002099 - RNA, 19 nt, Artificial Sequence
  Description of Artificial Sequence: Synthetic oligonucleotide
uuugggugucacagugugu

SEQ ID NO: 3002100 - RNA, 19 nt, Artificial Sequence
  Description of Artificial Sequence: Synthetic oligonucleotide
cuuaggggauggaaauguc

SEQ ID NO: 3002101 - RNA, 19 nt, Artificial Sequence
  Description of Artificial Sequence: Synthetic oligonucleotide
agucugcuagcucaguguu

SEQ ID NO: 3002102 - RNA, 19 nt, Artificial Sequence
  Description of Artificial Sequence: Synthetic oligonucleotide
gacuuaggggauggaaaug

SEQ ID NO: 3002103 - RNA, 19 nt, Artificial Sequence
  Description of Artificial Sequence: Synthetic oligonucleotide
guggagggagaguaacagc

SEQ ID NO: 3002104 - RNA, 19 nt, Artificial Sequence
  Description of Artificial Sequence: Synthetic oligonucleotide
gacaagagucugcuagcuc

SEQ ID NO: 3002105 - RNA, 19 nt, Artificial Sequence
  Description of Artificial Sequence: Synthetic oligonucleotide
ggaacuguucugauguagc

SEQ ID NO: 3002106 - RNA, 19 nt, Artificial Sequence
  Description of Artificial Sequence: Synthetic oligonucleotide
auguagccacuugaagaac

SEQ ID NO: 3002107 - RNA, 19 nt, Artificial Sequence
  Description of Artificial Sequence: Synthetic oligonucleotide
guguuagguacguuccuuc

SEQ ID NO: 3002108 - RNA, 19 nt, Artificial Sequence
  Description of Artificial Sequence: Synthetic oligonucleotide
guucugauguagccacuug

SEQ ID NO: 3002109 - RNA, 19 nt, Artificial Sequence
  Description of Artificial Sequence: Synthetic oligonucleotide
cagggaacuguucugaugu

SEQ ID NO: 3002110 - RNA, 19 nt, Artificial Sequence
  Description of Artificial Sequence: Synthetic oligonucleotide
ugccugggacuucaaggca

SEQ ID NO: 3002111 - RNA, 19 nt, Artificial Sequence
  Description of Artificial Sequence: Synthetic oligonucleotide
caagaagcacauuccccuc

SEQ ID NO: 3002112 - RNA, 19 nt, Artificial Sequence
  Description of Artificial Sequence: Synthetic oligonucleotide
ugugugugugugugugugu

SEQ ID NO: 3002113 - RNA, 19 nt, Artificial Sequence
  Description of Artificial Sequence: Synthetic oligonucleotide
ggggauggaaaugucuggg

SEQ ID NO: 3002114 - RNA, 19 nt, Artificial Sequence
  Description of Artificial Sequence: Synthetic oligonucleotide
ccuucaaaggagacuuagg

SEQ ID NO: 3002115 - RNA, 19 nt, Artificial Sequence
  Description of Artificial Sequence: Synthetic oligonucleotide
agaggacucaugccuggga

SEQ ID NO: 3002116 - RNA, 19 nt, Artificial Sequence
  Description of Artificial Sequence: Synthetic oligonucleotide
uggccagaggacucaugcc

SEQ ID NO: 3002117 - RNA, 19 nt, Artificial Sequence
  Description of Artificial Sequence: Synthetic oligonucleotide
ccacuugaagaacaagaag

SEQ ID NO: 3002118 - RNA, 19 nt, Artificial Sequence
  Description of Artificial Sequence: Synthetic oligonucleotide
agacaagagucugcuagcu

SEQ ID NO: 3002119 - RNA, 19 nt, Artificial Sequence
  Description of Artificial Sequence: Synthetic oligonucleotide
agaagcacauuccccucau

SEQ ID NO: 3002120 - RNA, 19 nt, Artificial Sequence
  Description of Artificial Sequence: Synthetic oligonucleotide
guucaaggacagacaagag

SEQ ID NO: 3002121 - RNA, 19 nt, Artificial Sequence
  Description of Artificial Sequence: Synthetic oligonucleotide
gugugugugugugugugug

SEQ ID NO: 3002122 - RNA, 19 nt, Artificial Sequence
  Description of Artificial Sequence: Synthetic oligonucleotide
acggcaauaacagcagaau

SEQ ID NO: 3002123 - RNA, 19 nt, Artificial Sequence
  Description of Artificial Sequence: Synthetic oligonucleotide
agugugugugugugugugu

SEQ ID NO: 3002124 - RNA, 19 nt, Artificial Sequence
  Description of Artificial Sequence: Synthetic oligonucleotide
uuccccucauggccagagg

SEQ ID NO: 3002125 - RNA, 19 nt, Artificial Sequence
  Description of Artificial Sequence: Synthetic oligonucleotide
cuggggugggauaagagcu

SEQ ID NO: 3002126 - RNA, 19 nt, Artificial Sequence
  Description of Artificial Sequence: Synthetic oligonucleotide
cacauuccccucauggcca

SEQ ID NO: 3002127 - RNA, 19 nt, Artificial Sequence
  Description of Artificial Sequence: Synthetic oligonucleotide
uguucugauguagccacuu

SEQ ID NO: 3002128 - RNA, 19 nt, Artificial Sequence
  Description of Artificial Sequence: Synthetic oligonucleotide
guuagguacguuccuucaa

SEQ ID NO: 3002129 - RNA, 19 nt, Artificial Sequence
  Description of Artificial Sequence: Synthetic oligonucleotide
uagccacuugaagaacaag

SEQ ID NO: 3002130 - RNA, 19 nt, Artificial Sequence
  Description of Artificial Sequence: Synthetic oligonucleotide
uggggugggauaagagcuc

SEQ ID NO: 3002131 - RNA, 19 nt, Artificial Sequence
  Description of Artificial Sequence: Synthetic oligonucleotide
ggcaauaacagcagaaugu

SEQ ID NO: 3002132 - RNA, 19 nt, Artificial Sequence
  Description of Artificial Sequence: Synthetic oligonucleotide
auuccccucauggccagag

SEQ ID NO: 3002133 - RNA, 19 nt, Artificial Sequence
  Description of Artificial Sequence: Synthetic oligonucleotide
gaacggcaauaacagcaga

SEQ ID NO: 3002134 - RNA, 19 nt, Artificial Sequence
  Description of Artificial Sequence: Synthetic oligonucleotide
gaagcacauuccccucaug

SEQ ID NO: 3002135 - RNA, 19 nt, Artificial Sequence
  Description of Artificial Sequence: Synthetic oligonucleotide
guguucaaggacagacaag

SEQ ID NO: 3002136 - RNA, 19 nt, Artificial Sequence
  Description of Artificial Sequence: Synthetic oligonucleotide
gagucugcuagcucagugu

SEQ ID NO: 3002137 - RNA, 19 nt, Artificial Sequence
  Description of Artificial Sequence: Synthetic oligonucleotide
caauaacagcagaauguaa

SEQ ID NO: 3002138 - RNA, 19 nt, Artificial Sequence
  Description of Artificial Sequence: Synthetic oligonucleotide
uuuggaguggagggagagu

SEQ ID NO: 3002139 - RNA, 19 nt, Artificial Sequence
  Description of Artificial Sequence: Synthetic oligonucleotide
ugucuggggugggauaaga

SEQ ID NO: 3002140 - RNA, 19 nt, Artificial Sequence
  Description of Artificial Sequence: Synthetic oligonucleotide
gaaacaucuuuggguguca

SEQ ID NO: 3002141 - RNA, 19 nt, Artificial Sequence
  Description of Artificial Sequence: Synthetic oligonucleotide
caaaggacggugggacagg

SEQ ID NO: 3002142 - RNA, 19 nt, Artificial Sequence
  Description of Artificial Sequence: Synthetic oligonucleotide
uggaguggagggagaguaa

SEQ ID NO: 3002143 - RNA, 19 nt, Artificial Sequence
  Description of Artificial Sequence: Synthetic oligonucleotide
gggaacuguucugauguag

SEQ ID NO: 3002144 - RNA, 19 nt, Artificial Sequence
  Description of Artificial Sequence: Synthetic oligonucleotide
aguguuagguacguuccuu

SEQ ID NO: 3002145 - RNA, 19 nt, Artificial Sequence
  Description of Artificial Sequence: Synthetic oligonucleotide
ucaaggcaggggcccuuug

SEQ ID NO: 3002146 - RNA, 19 nt, Artificial Sequence
  Description of Artificial Sequence: Synthetic oligonucleotide
acguuccuucaaaggagac

SEQ ID NO: 3002147 - RNA, 19 nt, Artificial Sequence
  Description of Artificial Sequence: Synthetic oligonucleotide
gggccauuuggaguggagg

SEQ ID NO: 3002148 - RNA, 19 nt, Artificial Sequence
  Description of Artificial Sequence: Synthetic oligonucleotide
acucaugccugggacuuca

SEQ ID NO: 3002149 - RNA, 19 nt, Artificial Sequence
  Description of Artificial Sequence: Synthetic oligonucleotide
gggagaguaacagcaagga

SEQ ID NO: 3002150 - RNA, 19 nt, Artificial Sequence
  Description of Artificial Sequence: Synthetic oligonucleotide
aagagucugcuagcucagu

SEQ ID NO: 3002151 - RNA, 19 nt, Artificial Sequence
  Description of Artificial Sequence: Synthetic oligonucleotide
aagagcucagaaacaucuu

SEQ ID NO: 3002152 - RNA, 19 nt, Artificial Sequence
  Description of Artificial Sequence: Synthetic oligonucleotide
agcucaguguuagguacgu

SEQ ID NO: 3002153 - RNA, 19 nt, Artificial Sequence
  Description of Artificial Sequence: Synthetic oligonucleotide
ccauuuggaguggagggag

SEQ ID NO: 3002154 - RNA, 19 nt, Artificial Sequence
  Description of Artificial Sequence: Synthetic oligonucleotide
uuccuucaaaggagacuua

SEQ ID NO: 3002155 - RNA, 19 nt, Artificial Sequence
  Description of Artificial Sequence: Synthetic oligonucleotide
gaguggagggagaguaaca

SEQ ID NO: 3002156 - RNA, 19 nt, Artificial Sequence
  Description of Artificial Sequence: Synthetic oligonucleotide
acguguucaaggacagaca

SEQ ID NO: 3002157 - RNA, 19 nt, Artificial Sequence
  Description of Artificial Sequence: Synthetic oligonucleotide
ggauggaaaugucuggggu

SEQ ID NO: 3002158 - RNA, 19 nt, Artificial Sequence
  Description of Artificial Sequence: Synthetic oligonucleotide
ccaaaggacggugggacag

SEQ ID NO: 3002159 - RNA, 19 nt, Artificial Sequence
  Description of Artificial Sequence: Synthetic oligonucleotide
ggaguggagggagaguaac

SEQ ID NO: 3002160 - RNA, 19 nt, Artificial Sequence
  Description of Artificial Sequence: Synthetic oligonucleotide
gggugucacaguguguuug

SEQ ID NO: 3002161 - RNA, 19 nt, Artificial Sequence
  Description of Artificial Sequence: Synthetic oligonucleotide
ggauaagagcucagaaaca

SEQ ID NO: 3002162 - RNA, 19 nt, Artificial Sequence
  Description of Artificial Sequence: Synthetic oligonucleotide
cagaggacucaugccuggg

SEQ ID NO: 3002163 - RNA, 19 nt, Artificial Sequence
  Description of Artificial Sequence: Synthetic oligonucleotide
gacggugggacagggaacu

SEQ ID NO: 3002164 - RNA, 19 nt, Artificial Sequence
  Description of Artificial Sequence: Synthetic oligonucleotide
cauggccagaggacucaug

SEQ ID NO: 3002165 - RNA, 19 nt, Artificial Sequence
  Description of Artificial Sequence: Synthetic oligonucleotide
gcaggggcccuuugaauug

SEQ ID NO: 3002166 - RNA, 19 nt, Artificial Sequence
  Description of Artificial Sequence: Synthetic oligonucleotide
gaaaugucuggggugggau

SEQ ID NO: 3002167 - RNA, 19 nt, Artificial Sequence
  Description of Artificial Sequence: Synthetic oligonucleotide
ccugggacuucaaggcagg

SEQ ID NO: 3002168 - RNA, 19 nt, Artificial Sequence
  Description of Artificial Sequence: Synthetic oligonucleotide
cauuuggaguggagggaga

SEQ ID NO: 3002169 - RNA, 19 nt, Artificial Sequence
  Description of Artificial Sequence: Synthetic oligonucleotide
cugcuagcucaguguuagg

SEQ ID NO: 3002170 - RNA, 19 nt, Artificial Sequence
  Description of Artificial Sequence: Synthetic oligonucleotide
ccagaggacucaugccugg

SEQ ID NO: 3002171 - RNA, 19 nt, Artificial Sequence
  Description of Artificial Sequence: Synthetic oligonucleotide
caggggcccuuugaauugg

SEQ ID NO: 3002172 - RNA, 19 nt, Artificial Sequence
  Description of Artificial Sequence: Synthetic oligonucleotide
guagccacuugaagaacaa

SEQ ID NO: 3002173 - RNA, 19 nt, Artificial Sequence
  Description of Artificial Sequence: Synthetic oligonucleotide
caaggcaggggcccuuuga

SEQ ID NO: 3002174 - RNA, 19 nt, Artificial Sequence
  Description of Artificial Sequence: Synthetic oligonucleotide
caaggacagacaagagucu

SEQ ID NO: 3002175 - RNA, 19 nt, Artificial Sequence
  Description of Artificial Sequence: Synthetic oligonucleotide
gccacuugaagaacaagaa

SEQ ID NO: 3002176 - RNA, 19 nt, Artificial Sequence
  Description of Artificial Sequence: Synthetic oligonucleotide
gccugggacuucaaggcag

SEQ ID NO: 3002177 - RNA, 19 nt, Artificial Sequence
  Description of Artificial Sequence: Synthetic oligonucleotide
ggugggauaagagcucaga

SEQ ID NO: 3002178 - RNA, 19 nt, Artificial Sequence
  Description of Artificial Sequence: Synthetic oligonucleotide
cugggacuucaaggcaggg

SEQ ID NO: 3002179 - RNA, 19 nt, Artificial Sequence
  Description of Artificial Sequence: Synthetic oligonucleotide
aggcaggggcccuuugaau

SEQ ID NO: 3002180 - RNA, 19 nt, Artificial Sequence
  Description of Artificial Sequence: Synthetic oligonucleotide
acuucaaggcaggggcccu

SEQ ID NO: 3002181 - RNA, 19 nt, Artificial Sequence
  Description of Artificial Sequence: Synthetic oligonucleotide
gacagacaagagucugcua

SEQ ID NO: 3002182 - RNA, 19 nt, Artificial Sequence
  Description of Artificial Sequence: Synthetic oligonucleotide
ggccagaggacucaugccu

SEQ ID NO: 3002183 - RNA, 19 nt, Artificial Sequence
  Description of Artificial Sequence: Synthetic oligonucleotide
cggcaauaacagcagaaug

SEQ ID NO: 3002184 - RNA, 19 nt, Artificial Sequence
  Description of Artificial Sequence: Synthetic oligonucleotide
gcuagcucaguguuaggua

SEQ ID NO: 3002185 - RNA, 19 nt, Artificial Sequence
  Description of Artificial Sequence: Synthetic oligonucleotide
caaaggagacuuaggggau

SEQ ID NO: 3002186 - RNA, 19 nt, Artificial Sequence
  Description of Artificial Sequence: Synthetic oligonucleotide
ggagacuuaggggauggaa

SEQ ID NO: 3002187 - RNA, 19 nt, Artificial Sequence
  Description of Artificial Sequence: Synthetic oligonucleotide
ggacagggaacuguucuga

SEQ ID NO: 3002188 - RNA, 19 nt, Artificial Sequence
  Description of Artificial Sequence: Synthetic oligonucleotide
ugggugucacaguguguuu

SEQ ID NO: 3002189 - RNA, 19 nt, Artificial Sequence
  Description of Artificial Sequence: Synthetic oligonucleotide
augucuggggugggauaag

SEQ ID NO: 3002190 - RNA, 19 nt, Artificial Sequence
  Description of Artificial Sequence: Synthetic oligonucleotide
aaggacggugggacaggga

SEQ ID NO: 3002191 - RNA, 19 nt, Artificial Sequence
  Description of Artificial Sequence: Synthetic oligonucleotide
agggaacuguucugaugua

SEQ ID NO: 3002192 - RNA, 19 nt, Artificial Sequence
  Description of Artificial Sequence: Synthetic oligonucleotide
gacagggaacuguucugau

SEQ ID NO: 3002193 - RNA, 19 nt, Artificial Sequence
  Description of Artificial Sequence: Synthetic oligonucleotide
gagacagccaaaggacggu

SEQ ID NO: 3002194 - RNA, 19 nt, Artificial Sequence
  Description of Artificial Sequence: Synthetic oligonucleotide
cucauggccagaggacuca

SEQ ID NO: 3002195 - RNA, 19 nt, Artificial Sequence
  Description of Artificial Sequence: Synthetic oligonucleotide
ggacuucaaggcaggggcc

SEQ ID NO: 3002196 - RNA, 19 nt, Artificial Sequence
  Description of Artificial Sequence: Synthetic oligonucleotide
cguguucaaggacagacaa

SEQ ID NO: 3002197 - RNA, 19 nt, Artificial Sequence
  Description of Artificial Sequence: Synthetic oligonucleotide
ucauggccagaggacucau

SEQ ID NO: 3002198 - RNA, 19 nt, Artificial Sequence
  Description of Artificial Sequence: Synthetic oligonucleotide
cagaaacaucuuugggugu

SEQ ID NO: 3002199 - RNA, 19 nt, Artificial Sequence
  Description of Artificial Sequence: Synthetic oligonucleotide
gccagaggacucaugccug

SEQ ID NO: 3002200 - RNA, 19 nt, Artificial Sequence
  Description of Artificial Sequence: Synthetic oligonucleotide
uucaaggcaggggcccuuu

SEQ ID NO: 3002201 - RNA, 19 nt, Artificial Sequence
  Description of Artificial Sequence: Synthetic oligonucleotide
ggugucacaguguguuugu

SEQ ID NO: 3002202 - RNA, 19 nt, Artificial Sequence
  Description of Artificial Sequence: Synthetic oligonucleotide
aggggcccuuugaauuggg

SEQ ID NO: 3002203 - RNA, 19 nt, Artificial Sequence
  Description of Artificial Sequence: Synthetic oligonucleotide
ggacagacaagagucugcu

SEQ ID NO: 3002204 - RNA, 19 nt, Artificial Sequence
  Description of Artificial Sequence: Synthetic oligonucleotide
caucuuugggugucacagu

SEQ ID NO: 3002205 - RNA, 19 nt, Artificial Sequence
  Description of Artificial Sequence: Synthetic oligonucleotide
ggggcccuuugaauugggg

SEQ ID NO: 3002206 - RNA, 19 nt, Artificial Sequence
  Description of Artificial Sequence: Synthetic oligonucleotide
ccccucauggccagaggac

SEQ ID NO: 3002207 - RNA, 19 nt, Artificial Sequence
  Description of Artificial Sequence: Synthetic oligonucleotide
acacguguucaaggacaga

SEQ ID NO: 3002208 - RNA, 19 nt, Artificial Sequence
  Description of Artificial Sequence: Synthetic oligonucleotide
aggagacuuaggggaugga

SEQ ID NO: 3002209 - RNA, 19 nt, Artificial Sequence
  Description of Artificial Sequence: Synthetic oligonucleotide
gacucaugccugggacuuc

SEQ ID NO: 3002210 - RNA, 19 nt, Artificial Sequence
  Description of Artificial Sequence: Synthetic oligonucleotide
ggcaggggcccuuugaauu

SEQ ID NO: 3002211 - RNA, 19 nt, Artificial Sequence
  Description of Artificial Sequence: Synthetic oligonucleotide
ggggugggauaagagcuca

SEQ ID NO: 3002212 - RNA, 19 nt, Artificial Sequence
  Description of Artificial Sequence: Synthetic oligonucleotide
cagccaaaggacgguggga

SEQ ID NO: 3002213 - RNA, 19 nt, Artificial Sequence
  Description of Artificial Sequence: Synthetic oligonucleotide
gugggacagggaacuguuc

SEQ ID NO: 3002214 - RNA, 19 nt, Artificial Sequence
  Description of Artificial Sequence: Synthetic oligonucleotide
caguguuagguacguuccu

SEQ ID NO: 3002215 - RNA, 19 nt, Artificial Sequence
  Description of Artificial Sequence: Synthetic oligonucleotide
gccaaaggacggugggaca

SEQ ID NO: 3002216 - RNA, 19 nt, Artificial Sequence
  Description of Artificial Sequence: Synthetic oligonucleotide
ggagggagaguaacagcaa

SEQ ID NO: 3002217 - RNA, 19 nt, Artificial Sequence
  Description of Artificial Sequence: Synthetic oligonucleotide
ggggccauuuggaguggag

SEQ ID NO: 3002218 - RNA, 19 nt, Artificial Sequence
  Description of Artificial Sequence: Synthetic oligonucleotide
gaguaacagcaaggagaaa

SEQ ID NO: 3002219 - RNA, 19 nt, Artificial Sequence
  Description of Artificial Sequence: Synthetic oligonucleotide
ggacggugggacagggaac

SEQ ID NO: 3002220 - RNA, 19 nt, Artificial Sequence
  Description of Artificial Sequence: Synthetic oligonucleotide
gaagaacaagaagcacauu

SEQ ID NO: 3002221 - RNA, 19 nt, Artificial Sequence
  Description of Artificial Sequence: Synthetic oligonucleotide
acggugggacagggaacug

SEQ ID NO: 3002222 - RNA, 19 nt, Artificial Sequence
  Description of Artificial Sequence: Synthetic oligonucleotide
gggugggauaagagcucag

SEQ ID NO: 3002223 - RNA, 19 nt, Artificial Sequence
  Description of Artificial Sequence: Synthetic oligonucleotide
gucugcuagcucaguguua

SEQ ID NO: 3002224 - RNA, 19 nt, Artificial Sequence
  Description of Artificial Sequence: Synthetic oligonucleotide
cucaugccugggacuucaa

SEQ ID NO: 3002225 - RNA, 19 nt, Artificial Sequence
  Description of Artificial Sequence: Synthetic oligonucleotide
ggacucaugccugggacuu

SEQ ID NO: 3002226 - RNA, 19 nt, Artificial Sequence
  Description of Artificial Sequence: Synthetic oligonucleotide
ggugggacagggaacuguu

SEQ ID NO: 3002227 - RNA, 19 nt, Artificial Sequence
  Description of Artificial Sequence: Synthetic oligonucleotide
cauuccccucauggccaga

SEQ ID NO: 3002228 - RNA, 19 nt, Artificial Sequence
  Description of Artificial Sequence: Synthetic oligonucleotide
cccucauggccagaggacu

SEQ ID NO: 3002229 - RNA, 19 nt, Artificial Sequence
  Description of Artificial Sequence: Synthetic oligonucleotide
cguuccuucaaaggagacu

SEQ ID NO: 3002230 - RNA, 19 nt, Artificial Sequence
  Description of Artificial Sequence: Synthetic oligonucleotide
gugucacaguguguuuguu

SEQ ID NO: 3002231 - RNA, 19 nt, Artificial Sequence
  Description of Artificial Sequence: Synthetic oligonucleotide
cuucaaggcaggggcccuu

SEQ ID NO: 3002232 - RNA, 19 nt, Artificial Sequence
  Description of Artificial Sequence: Synthetic oligonucleotide
gcucaguguuagguacguu

SEQ ID NO: 3002233 - RNA, 19 nt, Artificial Sequence
  Description of Artificial Sequence: Synthetic oligonucleotide
cggugggacagggaacugu

SEQ ID NO: 3002234 - RNA, 19 nt, Artificial Sequence
  Description of Artificial Sequence: Synthetic oligonucleotide
acuucuguggcuuuuggcc

SEQ ID NO: 3002235 - RNA, 19 nt, Artificial Sequence
  Description of Artificial Sequence: Synthetic oligonucleotide
aaacugggcggucacaugc

SEQ ID NO: 3002236 - RNA, 19 nt, Artificial Sequence
  Description of Artificial Sequence: Synthetic oligonucleotide
uguggcuccaaacugggcg

SEQ ID NO: 3002237 - RNA, 19 nt, Artificial Sequence
  Description of Artificial Sequence: Synthetic oligonucleotide
aaugaugucacugcaucgg

SEQ ID NO: 3002238 - RNA, 19 nt, Artificial Sequence
  Description of Artificial Sequence: Synthetic oligonucleotide
aaaugaugucacugcaucg

SEQ ID NO: 3002239 - RNA, 19 nt, Artificial Sequence
  Description of Artificial Sequence: Synthetic oligonucleotide
aaggaauaggaaaugaugu

SEQ ID NO: 3002240 - RNA, 19 nt, Artificial Sequence
  Description of Artificial Sequence: Synthetic oligonucleotide
caaauccucggcuaaagcc

SEQ ID NO: 3002241 - RNA, 19 nt, Artificial Sequence
  Description of Artificial Sequence: Synthetic oligonucleotide
ucggcuaaagccauccagg

SEQ ID NO: 3002242 - RNA, 19 nt, Artificial Sequence
  Description of Artificial Sequence: Synthetic oligonucleotide
gaaggaauaggaaaugaug

SEQ ID NO: 3002243 - RNA, 19 nt, Artificial Sequence
  Description of Artificial Sequence: Synthetic oligonucleotide
uguuccugaaacucugggg

SEQ ID NO: 3002244 - RNA, 19 nt, Artificial Sequence
  Description of Artificial Sequence: Synthetic oligonucleotide
ugggacacguagaaguugg

SEQ ID NO: 3002245 - RNA, 19 nt, Artificial Sequence
  Description of Artificial Sequence: Synthetic oligonucleotide
gaaaugaugucacugcauc

SEQ ID NO: 3002246 - RNA, 19 nt, Artificial Sequence
  Description of Artificial Sequence: Synthetic oligonucleotide
acacguagaaguuggcuac

SEQ ID NO: 3002247 - RNA, 19 nt, Artificial Sequence
  Description of Artificial Sequence: Synthetic oligonucleotide
ugcagcgugaagcucacag

SEQ ID NO: 3002248 - RNA, 19 nt, Artificial Sequence
  Description of Artificial Sequence: Synthetic oligonucleotide
uaggaaaugaugucacugc

SEQ ID NO: 3002249 - RNA, 19 nt, Artificial Sequence
  Description of Artificial Sequence: Synthetic oligonucleotide
aggaauaggaaaugauguc

SEQ ID NO: 3002250 - RNA, 19 nt, Artificial Sequence
  Description of Artificial Sequence: Synthetic oligonucleotide
agggcuucugccuggacgc

SEQ ID NO: 3002251 - RNA, 19 nt, Artificial Sequence
  Description of Artificial Sequence: Synthetic oligonucleotide
gaugucacugcaucggagc

SEQ ID NO: 3002252 - RNA, 19 nt, Artificial Sequence
  Description of Artificial Sequence: Synthetic oligonucleotide
gcuaaagccauccaggccc

SEQ ID NO: 3002253 - RNA, 19 nt, Artificial Sequence
  Description of Artificial Sequence: Synthetic oligonucleotide
aauaggaaaugaugucacu

SEQ ID NO: 3002254 - RNA, 19 nt, Artificial Sequence
  Description of Artificial Sequence: Synthetic oligonucleotide
gucuugaguaccuucuccg

SEQ ID NO: 3002255 - RNA, 19 nt, Artificial Sequence
  Description of Artificial Sequence: Synthetic oligonucleotide
ugaaggaauaggaaaugau

SEQ ID NO: 3002256 - RNA, 19 nt, Artificial Sequence
  Description of Artificial Sequence: Synthetic oligonucleotide
aaguuggcuacauccaggu

SEQ ID NO: 3002257 - RNA, 19 nt, Artificial Sequence
  Description of Artificial Sequence: Synthetic oligonucleotide
aaauccucggcuaaagcca

SEQ ID NO: 3002258 - RNA, 19 nt, Artificial Sequence
  Description of Artificial Sequence: Synthetic oligonucleotide
auaggaaaugaugucacug

SEQ ID NO: 3002259 - RNA, 19 nt, Artificial Sequence
  Description of Artificial Sequence: Synthetic oligonucleotide
agaaguuggcuacauccag

SEQ ID NO: 3002260 - RNA, 19 nt, Artificial Sequence
  Description of Artificial Sequence: Synthetic oligonucleotide
agcuugaaggaauaggaaa

SEQ ID NO: 3002261 - RNA, 19 nt, Artificial Sequence
  Description of Artificial Sequence: Synthetic oligonucleotide
aggaaggcggagcacgggc

SEQ ID NO: 3002262 - RNA, 19 nt, Artificial Sequence
  Description of Artificial Sequence: Synthetic oligonucleotide
gaauaggaaaugaugucac

SEQ ID NO: 3002263 - RNA, 19 nt, Artificial Sequence
  Description of Artificial Sequence: Synthetic oligonucleotide
cagcgugaagcucacaggg

SEQ ID NO: 3002264 - RNA, 19 nt, Artificial Sequence
  Description of Artificial Sequence: Synthetic oligonucleotide
gaagcucacagggugaccc

SEQ ID NO: 3002265 - RNA, 19 nt, Artificial Sequence
  Description of Artificial Sequence: Synthetic oligonucleotide
acugcaucggagcagggcu

SEQ ID NO: 3002266 - RNA, 19 nt, Artificial Sequence
  Description of Artificial Sequence: Synthetic oligonucleotide
uccaucaggggcaaauccu

SEQ ID NO: 3002267 - RNA, 19 nt, Artificial Sequence
  Description of Artificial Sequence: Synthetic oligonucleotide
uuggcuacauccaggucug

SEQ ID NO: 3002268 - RNA, 19 nt, Artificial Sequence
  Description of Artificial Sequence: Synthetic oligonucleotide
ugaugucacugcaucggag

SEQ ID NO: 3002269 - RNA, 19 nt, Artificial Sequence
  Description of Artificial Sequence: Synthetic oligonucleotide
uugaguaccuucuccgacu

SEQ ID NO: 3002270 - RNA, 19 nt, Artificial Sequence
  Description of Artificial Sequence: Synthetic oligonucleotide
aucggagcagggcuucugc

SEQ ID NO: 3002271 - RNA, 19 nt, Artificial Sequence
  Description of Artificial Sequence: Synthetic oligonucleotide
acagggaugguccgagggg

SEQ ID NO: 3002272 - RNA, 19 nt, Artificial Sequence
  Description of Artificial Sequence: Synthetic oligonucleotide
uggcuuuuggccucaggag

SEQ ID NO: 3002273 - RNA, 19 nt, Artificial Sequence
  Description of Artificial Sequence: Synthetic oligonucleotide
guuggcuacauccaggucu

SEQ ID NO: 3002274 - RNA, 19 nt, Artificial Sequence
  Description of Artificial Sequence: Synthetic oligonucleotide
ugggcggucacaugcacgc

SEQ ID NO: 3002275 - RNA, 19 nt, Artificial Sequence
  Description of Artificial Sequence: Synthetic oligonucleotide
ucgugcagcgugaagcuca

SEQ ID NO: 3002276 - RNA, 19 nt, Artificial Sequence
  Description of Artificial Sequence: Synthetic oligonucleotide
ggagguagcgcucacggag

SEQ ID NO: 3002277 - RNA, 19 nt, Artificial Sequence
  Description of Artificial Sequence: Synthetic oligonucleotide
aggaaaugaugucacugca

SEQ ID NO: 3002278 - RNA, 19 nt, Artificial Sequence
  Description of Artificial Sequence: Synthetic oligonucleotide
aggucuguggcuccaaacu

SEQ ID NO: 3002279 - RNA, 19 nt, Artificial Sequence
  Description of Artificial Sequence: Synthetic oligonucleotide
aguaccuucuccgacuucu

SEQ ID NO: 3002280 - RNA, 19 nt, Artificial Sequence
  Description of Artificial Sequence: Synthetic oligonucleotide
aucaggggcaaauccucgg

SEQ ID NO: 3002281 - RNA, 19 nt, Artificial Sequence
  Description of Artificial Sequence: Synthetic oligonucleotide
ggcuuuuggccucaggagg

SEQ ID NO: 3002282 - RNA, 19 nt, Artificial Sequence
  Description of Artificial Sequence: Synthetic oligonucleotide
gacacguagaaguuggcua

SEQ ID NO: 3002283 - RNA, 19 nt, Artificial Sequence
  Description of Artificial Sequence: Synthetic oligonucleotide
ucuugaguaccuucuccga

SEQ ID NO: 3002284 - RNA, 19 nt, Artificial Sequence
  Description of Artificial Sequence: Synthetic oligonucleotide
cucggcuaaagccauccag

SEQ ID NO: 3002285 - RNA, 19 nt, Artificial Sequence
  Description of Artificial Sequence: Synthetic oligonucleotide
cacagggugacccaccaug

SEQ ID NO: 3002286 - RNA, 19 nt, Artificial Sequence
  Description of Artificial Sequence: Synthetic oligonucleotide
cuacauccaggucuguggc

SEQ ID NO: 3002287 - RNA, 19 nt, Artificial Sequence
  Description of Artificial Sequence: Synthetic oligonucleotide
cuugaaggaauaggaaaug

SEQ ID NO: 3002288 - RNA, 19 nt, Artificial Sequence
  Description of Artificial Sequence: Synthetic oligonucleotide
ucugcauggcccaggccag

SEQ ID NO: 3002289 - RNA, 19 nt, Artificial Sequence
  Description of Artificial Sequence: Synthetic oligonucleotide
ucacaugcacgccuucgug

SEQ ID NO: 3002290 - RNA, 19 nt, Artificial Sequence
  Description of Artificial Sequence: Synthetic oligonucleotide
cuugaguaccuucuccgac

SEQ ID NO: 3002291 - RNA, 19 nt, Artificial Sequence
  Description of Artificial Sequence: Synthetic oligonucleotide
gacuucuguggcuuuuggc

SEQ ID NO: 3002292 - RNA, 19 nt, Artificial Sequence
  Description of Artificial Sequence: Synthetic oligonucleotide
uuuggccucaggagggccc

SEQ ID NO: 3002293 - RNA, 19 nt, Artificial Sequence
  Description of Artificial Sequence: Synthetic oligonucleotide
accggcacagggauggucc

SEQ ID NO: 3002294 - RNA, 19 nt, Artificial Sequence
  Description of Artificial Sequence: Synthetic oligonucleotide
cacaugcacgccuucgugc

SEQ ID NO: 3002295 - RNA, 19 nt, Artificial Sequence
  Description of Artificial Sequence: Synthetic oligonucleotide
cacagggaugguccgaggg

SEQ ID NO: 3002296 - RNA, 19 nt, Artificial Sequence
  Description of Artificial Sequence: Synthetic oligonucleotide
cagggcuucugccuggacg

SEQ ID NO: 3002297 - RNA, 19 nt, Artificial Sequence
  Description of Artificial Sequence: Synthetic oligonucleotide
aggucugcagcugggacac

SEQ ID NO: 3002298 - RNA, 19 nt, Artificial Sequence
  Description of Artificial Sequence: Synthetic oligonucleotide
guggcuuuuggccucagga

SEQ ID NO: 3002299 - RNA, 19 nt, Artificial Sequence
  Description of Artificial Sequence: Synthetic oligonucleotide
guggcuccaaacugggcgg

SEQ ID NO: 3002300 - RNA, 19 nt, Artificial Sequence
  Description of Artificial Sequence: Synthetic oligonucleotide
caucaggggcaaauccucg

SEQ ID NO: 3002301 - RNA, 19 nt, Artificial Sequence
  Description of Artificial Sequence: Synthetic oligonucleotide
ggaauaggaaaugauguca

SEQ ID NO: 3002302 - RNA, 19 nt, Artificial Sequence
  Description of Artificial Sequence: Synthetic oligonucleotide
aagccauccaggccccgag

SEQ ID NO: 3002303 - RNA, 19 nt, Artificial Sequence
  Description of Artificial Sequence: Synthetic oligonucleotide
guccaucaggggcaaaucc

SEQ ID NO: 3002304 - RNA, 19 nt, Artificial Sequence
  Description of Artificial Sequence: Synthetic oligonucleotide
augggaggucugcagcugg

SEQ ID NO: 3002305 - RNA, 19 nt, Artificial Sequence
  Description of Artificial Sequence: Synthetic oligonucleotide
uguggcuuuuggccucagg

SEQ ID NO: 3002306 - RNA, 19 nt, Artificial Sequence
  Description of Artificial Sequence: Synthetic oligonucleotide
acaugcacgccuucgugca

SEQ ID NO: 3002307 - RNA, 19 nt, Artificial Sequence
  Description of Artificial Sequence: Synthetic oligonucleotide
uaggaggcugcggagguag

SEQ ID NO: 3002308 - RNA, 19 nt, Artificial Sequence
  Description of Artificial Sequence: Synthetic oligonucleotide
acccaccauggcuaggagg

SEQ ID NO: 3002309 - RNA, 19 nt, Artificial Sequence
  Description of Artificial Sequence: Synthetic oligonucleotide
cccaccauggcuaggaggc

SEQ ID NO: 3002310 - RNA, 19 nt, Artificial Sequence
  Description of Artificial Sequence: Synthetic oligonucleotide
cuaaagccauccaggcccc

SEQ ID NO: 3002311 - RNA, 19 nt, Artificial Sequence
  Description of Artificial Sequence: Synthetic oligonucleotide
ugcagcugggacacguaga

SEQ ID NO: 3002312 - RNA, 19 nt, Artificial Sequence
  Description of Artificial Sequence: Synthetic oligonucleotide
ugggaggucugcagcuggg

SEQ ID NO: 3002313 - RNA, 19 nt, Artificial Sequence
  Description of Artificial Sequence: Synthetic oligonucleotide
augaugucacugcaucgga

SEQ ID NO: 3002314 - RNA, 19 nt, Artificial Sequence
  Description of Artificial Sequence: Synthetic oligonucleotide
gagguagcgcucacggagg

SEQ ID NO: 3002315 - RNA, 19 nt, Artificial Sequence
  Description of Artificial Sequence: Synthetic oligonucleotide
uccucggcuaaagccaucc

SEQ ID NO: 3002316 - RNA, 19 nt, Artificial Sequence
  Description of Artificial Sequence: Synthetic oligonucleotide
acugggcggucacaugcac

SEQ ID NO: 3002317 - RNA, 19 nt, Artificial Sequence
  Description of Artificial Sequence: Synthetic oligonucleotide
ugacccaccauggcuagga

SEQ ID NO: 3002318 - RNA, 19 nt, Artificial Sequence
  Description of Artificial Sequence: Synthetic oligonucleotide
augucacugcaucggagca

SEQ ID NO: 3002319 - RNA, 19 nt, Artificial Sequence
  Description of Artificial Sequence: Synthetic oligonucleotide
cacgccuucgugcagcgug

SEQ ID NO: 3002320 - RNA, 19 nt, Artificial Sequence
  Description of Artificial Sequence: Synthetic oligonucleotide
gaggucugcagcugggaca

SEQ ID NO: 3002321 - RNA, 19 nt, Artificial Sequence
  Description of Artificial Sequence: Synthetic oligonucleotide
aguuggcuacauccagguc

SEQ ID NO: 3002322 - RNA, 19 nt, Artificial Sequence
  Description of Artificial Sequence: Synthetic oligonucleotide
guccgaggggucugcaugg

SEQ ID NO: 3002323 - RNA, 19 nt, Artificial Sequence
  Description of Artificial Sequence: Synthetic oligonucleotide
acggagggccgcucgggcc

SEQ ID NO: 3002324 - RNA, 19 nt, Artificial Sequence
  Description of Artificial Sequence: Synthetic oligonucleotide
cucaggagggcccugcguc

SEQ ID NO: 3002325 - RNA, 19 nt, Artificial Sequence
  Description of Artificial Sequence: Synthetic oligonucleotide
ugucacugcaucggagcag

SEQ ID NO: 3002326 - RNA, 19 nt, Artificial Sequence
  Description of Artificial Sequence: Synthetic oligonucleotide
ggucuugaguaccuucucc

SEQ ID NO: 3002327 - RNA, 19 nt, Artificial Sequence
  Description of Artificial Sequence: Synthetic oligonucleotide
caggccccgaggaaggcgg

SEQ ID NO: 3002328 - RNA, 19 nt, Artificial Sequence
  Description of Artificial Sequence: Synthetic oligonucleotide
acagggugacccaccaugg

SEQ ID NO: 3002329 - RNA, 19 nt, Artificial Sequence
  Description of Artificial Sequence: Synthetic oligonucleotide
augcacgccuucgugcagc

SEQ ID NO: 3002330 - RNA, 19 nt, Artificial Sequence
  Description of Artificial Sequence: Synthetic oligonucleotide
acgccuaugggaggucugc

SEQ ID NO: 3002331 - RNA, 19 nt, Artificial Sequence
  Description of Artificial Sequence: Synthetic oligonucleotide
ugaguaccuucuccgacuu

SEQ ID NO: 3002332 - RNA, 19 nt, Artificial Sequence
  Description of Artificial Sequence: Synthetic oligonucleotide
accauggcuaggaggcugc

SEQ ID NO: 3002333 - RNA, 19 nt, Artificial Sequence
  Description of Artificial Sequence: Synthetic oligonucleotide
ccuucgugcagcgugaagc

SEQ ID NO: 3002334 - RNA, 19 nt, Artificial Sequence
  Description of Artificial Sequence: Synthetic oligonucleotide
cauccaggccccgaggaag

SEQ ID NO: 3002335 - RNA, 19 nt, Artificial Sequence
  Description of Artificial Sequence: Synthetic oligonucleotide
cugggcggucacaugcacg

SEQ ID NO: 3002336 - RNA, 19 nt, Artificial Sequence
  Description of Artificial Sequence: Synthetic oligonucleotide
ucggagcagggcuucugcc

SEQ ID NO: 3002337 - RNA, 19 nt, Artificial Sequence
  Description of Artificial Sequence: Synthetic oligonucleotide
aagcucacagggugaccca

SEQ ID NO: 3002338 - RNA, 19 nt, Artificial Sequence
  Description of Artificial Sequence: Synthetic oligonucleotide
uaugggaggucugcagcug

SEQ ID NO: 3002339 - RNA, 19 nt, Artificial Sequence
  Description of Artificial Sequence: Synthetic oligonucleotide
ggucuguggcuccaaacug

SEQ ID NO: 3002340 - RNA, 19 nt, Artificial Sequence
  Description of Artificial Sequence: Synthetic oligonucleotide
gcggagguagcgcucacgg

SEQ ID NO: 3002341 - RNA, 19 nt, Artificial Sequence
  Description of Artificial Sequence: Synthetic oligonucleotide
ugcacgccuucgugcagcg

SEQ ID NO: 3002342 - RNA, 19 nt, Artificial Sequence
  Description of Artificial Sequence: Synthetic oligonucleotide
uacauccaggucuguggcu

SEQ ID NO: 3002343 - RNA, 19 nt, Artificial Sequence
  Description of Artificial Sequence: Synthetic oligonucleotide
uucuccgacuucuguggcu

SEQ ID NO: 3002344 - RNA, 19 nt, Artificial Sequence
  Description of Artificial Sequence: Synthetic oligonucleotide
gaaggcggagcacgggcac

SEQ ID NO: 3002345 - RNA, 19 nt, Artificial Sequence
  Description of Artificial Sequence: Synthetic oligonucleotide
aaagccauccaggccccga

SEQ ID NO: 3002346 - RNA, 19 nt, Artificial Sequence
  Description of Artificial Sequence: Synthetic oligonucleotide
cuucuccgacuucuguggc

SEQ ID NO: 3002347 - RNA, 19 nt, Artificial Sequence
  Description of Artificial Sequence: Synthetic oligonucleotide
gcagcgugaagcucacagg

SEQ ID NO: 3002348 - RNA, 19 nt, Artificial Sequence
  Description of Artificial Sequence: Synthetic oligonucleotide
caggucuguggcuccaaac

SEQ ID NO: 3002349 - RNA, 19 nt, Artificial Sequence
  Description of Artificial Sequence: Synthetic oligonucleotide
uuuuggccucaggagggcc

SEQ ID NO: 3002350 - RNA, 19 nt, Artificial Sequence
  Description of Artificial Sequence: Synthetic oligonucleotide
agcucacagggugacccac

SEQ ID NO: 3002351 - RNA, 19 nt, Artificial Sequence
  Description of Artificial Sequence: Synthetic oligonucleotide
gcgugaagcucacagggug

SEQ ID NO: 3002352 - RNA, 19 nt, Artificial Sequence
  Description of Artificial Sequence: Synthetic oligonucleotide
aauccucggcuaaagccau

SEQ ID NO: 3002353 - RNA, 19 nt, Artificial Sequence
  Description of Artificial Sequence: Synthetic oligonucleotide
ccuaugggaggucugcagc

SEQ ID NO: 3002354 - RNA, 19 nt, Artificial Sequence
  Description of Artificial Sequence: Synthetic oligonucleotide
agcacgggcaccggcacag

SEQ ID NO: 3002355 - RNA, 19 nt, Artificial Sequence
  Description of Artificial Sequence: Synthetic oligonucleotide
ucacugcaucggagcaggg

SEQ ID NO: 3002356 - RNA, 19 nt, Artificial Sequence
  Description of Artificial Sequence: Synthetic oligonucleotide
caaacugggcggucacaug

SEQ ID NO: 3002357 - RNA, 19 nt, Artificial Sequence
  Description of Artificial Sequence: Synthetic oligonucleotide
ggcuaaagccauccaggcc

SEQ ID NO: 3002358 - RNA, 19 nt, Artificial Sequence
  Description of Artificial Sequence: Synthetic oligonucleotide
gguccgaggggucugcaug

SEQ ID NO: 3002359 - RNA, 19 nt, Artificial Sequence
  Description of Artificial Sequence: Synthetic oligonucleotide
gcaaauccucggcuaaagc

SEQ ID NO: 3002360 - RNA, 19 nt, Artificial Sequence
  Description of Artificial Sequence: Synthetic oligonucleotide
ugcggagguagcgcucacg

SEQ ID NO: 3002361 - RNA, 19 nt, Artificial Sequence
  Description of Artificial Sequence: Synthetic oligonucleotide
agccauccaggccccgagg

SEQ ID NO: 3002362 - RNA, 19 nt, Artificial Sequence
  Description of Artificial Sequence: Synthetic oligonucleotide
gaggaaggcggagcacggg

SEQ ID NO: 3002363 - RNA, 19 nt, Artificial Sequence
  Description of Artificial Sequence: Synthetic oligonucleotide
ugaagcucacagggugacc

SEQ ID NO: 3002364 - RNA, 19 nt, Artificial Sequence
  Description of Artificial Sequence: Synthetic oligonucleotide
cauccaggucuguggcucc

SEQ ID NO: 3002365 - RNA, 19 nt, Artificial Sequence
  Description of Artificial Sequence: Synthetic oligonucleotide
ucacggagggccgcucggg

SEQ ID NO: 3002366 - RNA, 19 nt, Artificial Sequence
  Description of Artificial Sequence: Synthetic oligonucleotide
ucuccgacuucuguggcuu

SEQ ID NO: 3002367 - RNA, 19 nt, Artificial Sequence
  Description of Artificial Sequence: Synthetic oligonucleotide
cacugcaucggagcagggc

SEQ ID NO: 3002368 - RNA, 19 nt, Artificial Sequence
  Description of Artificial Sequence: Synthetic oligonucleotide
ggucacaugcacgccuucg

SEQ ID NO: 3002369 - RNA, 19 nt, Artificial Sequence
  Description of Artificial Sequence: Synthetic oligonucleotide
ggagcagggcuucugccug

SEQ ID NO: 3002370 - RNA, 19 nt, Artificial Sequence
  Description of Artificial Sequence: Synthetic oligonucleotide
ggcccugcguccaucaggg

SEQ ID NO: 3002371 - RNA, 19 nt, Artificial Sequence
  Description of Artificial Sequence: Synthetic oligonucleotide
aggggcaaauccucggcua

SEQ ID NO: 3002372 - RNA, 19 nt, Artificial Sequence
  Description of Artificial Sequence: Synthetic oligonucleotide
cugggacacguagaaguug

SEQ ID NO: 3002373 - RNA, 19 nt, Artificial Sequence
  Description of Artificial Sequence: Synthetic oligonucleotide
cauggcuaggaggcugcgg

SEQ ID NO: 3002374 - RNA, 19 nt, Artificial Sequence
  Description of Artificial Sequence: Synthetic oligonucleotide
cuuuuggccucaggagggc

SEQ ID NO: 3002375 - RNA, 19 nt, Artificial Sequence
  Description of Artificial Sequence: Synthetic oligonucleotide
ggcaaauccucggcuaaag

SEQ ID NO: 3002376 - RNA, 19 nt, Artificial Sequence
  Description of Artificial Sequence: Synthetic oligonucleotide
cagcuugaaggaauaggaa

SEQ ID NO: 3002377 - RNA, 19 nt, Artificial Sequence
  Description of Artificial Sequence: Synthetic oligonucleotide
aacugggcggucacaugca

SEQ ID NO: 3002378 - RNA, 19 nt, Artificial Sequence
  Description of Artificial Sequence: Synthetic oligonucleotide
cacgggcaccggcacaggg

SEQ ID NO: 3002379 - RNA, 19 nt, Artificial Sequence
  Description of Artificial Sequence: Synthetic oligonucleotide
gugaagcucacagggugac

SEQ ID NO: 3002380 - RNA, 19 nt, Artificial Sequence
  Description of Artificial Sequence: Synthetic oligonucleotide
gacccaccauggcuaggag

SEQ ID NO: 3002381 - RNA, 19 nt, Artificial Sequence
  Description of Artificial Sequence: Synthetic oligonucleotide
cagggugacccaccauggc

SEQ ID NO: 3002382 - RNA, 19 nt, Artificial Sequence
  Description of Artificial Sequence: Synthetic oligonucleotide
gaggggucugcauggccca

SEQ ID NO: 3002383 - RNA, 19 nt, Artificial Sequence
  Description of Artificial Sequence: Synthetic oligonucleotide
cuucuguggcuuuuggccu

SEQ ID NO: 3002384 - RNA, 19 nt, Artificial Sequence
  Description of Artificial Sequence: Synthetic oligonucleotide
ucugcagcugggacacgua

SEQ ID NO: 3002385 - RNA, 19 nt, Artificial Sequence
  Description of Artificial Sequence: Synthetic oligonucleotide
gaugguccgaggggucugc

SEQ ID NO: 3002386 - RNA, 19 nt, Artificial Sequence
  Description of Artificial Sequence: Synthetic oligonucleotide
uaaagccauccaggccccg

SEQ ID NO: 3002387 - RNA, 19 nt, Artificial Sequence
  Description of Artificial Sequence: Synthetic oligonucleotide
cuguggcuccaaacugggc

SEQ ID NO: 3002388 - RNA, 19 nt, Artificial Sequence
  Description of Artificial Sequence: Synthetic oligonucleotide
cuccaaacugggcggucac

SEQ ID NO: 3002389 - RNA, 19 nt, Artificial Sequence
  Description of Artificial Sequence: Synthetic oligonucleotide
aggcggagcacgggcaccg

SEQ ID NO: 3002390 - RNA, 19 nt, Artificial Sequence
  Description of Artificial Sequence: Synthetic oligonucleotide
uccaaacugggcggucaca

SEQ ID NO: 3002391 - RNA, 19 nt, Artificial Sequence
  Description of Artificial Sequence: Synthetic oligonucleotide
ggugacccaccauggcuag

SEQ ID NO: 3002392 - RNA, 19 nt, Artificial Sequence
  Description of Artificial Sequence: Synthetic oligonucleotide
gggcccugcguccaucagg

SEQ ID NO: 3002393 - RNA, 19 nt, Artificial Sequence
  Description of Artificial Sequence: Synthetic oligonucleotide
agcgcucacggagggccgc

SEQ ID NO: 3002394 - RNA, 19 nt, Artificial Sequence
  Description of Artificial Sequence: Synthetic oligonucleotide
gccuaugggaggucugcag

SEQ ID NO: 3002395 - RNA, 19 nt, Artificial Sequence
  Description of Artificial Sequence: Synthetic oligonucleotide
ccaucaggggcaaauccuc

SEQ ID NO: 3002396 - RNA, 19 nt, Artificial Sequence
  Description of Artificial Sequence: Synthetic oligonucleotide
cuaugggaggucugcagcu

SEQ ID NO: 3002397 - RNA, 19 nt, Artificial Sequence
  Description of Artificial Sequence: Synthetic oligonucleotide
gccuggacgccuaugggag

SEQ ID NO: 3002398 - RNA, 19 nt, Artificial Sequence
  Description of Artificial Sequence: Synthetic oligonucleotide
caccauggcuaggaggcug

SEQ ID NO: 3002399 - RNA, 19 nt, Artificial Sequence
  Description of Artificial Sequence: Synthetic oligonucleotide
ggaggucugcagcugggac

SEQ ID NO: 3002400 - RNA, 19 nt, Artificial Sequence
  Description of Artificial Sequence: Synthetic oligonucleotide
caugcacgccuucgugcag

SEQ ID NO: 3002401 - RNA, 19 nt, Artificial Sequence
  Description of Artificial Sequence: Synthetic oligonucleotide
ccgaggaaggcggagcacg

SEQ ID NO: 3002402 - RNA, 19 nt, Artificial Sequence
  Description of Artificial Sequence: Synthetic oligonucleotide
ugcaucggagcagggcuuc

SEQ ID NO: 3002403 - RNA, 19 nt, Artificial Sequence
  Description of Artificial Sequence: Synthetic oligonucleotide
cgaggggucugcauggccc

SEQ ID NO: 3002404 - RNA, 19 nt, Artificial Sequence
  Description of Artificial Sequence: Synthetic oligonucleotide
ucacagggugacccaccau

SEQ ID NO: 3002405 - RNA, 19 nt, Artificial Sequence
  Description of Artificial Sequence: Synthetic oligonucleotide
gacgccuaugggaggucug

SEQ ID NO: 3002406 - RNA, 19 nt, Artificial Sequence
  Description of Artificial Sequence: Synthetic oligonucleotide
cacggagggccgcucgggc

SEQ ID NO: 3002407 - RNA, 19 nt, Artificial Sequence
  Description of Artificial Sequence: Synthetic oligonucleotide
gcuugaaggaauaggaaau

SEQ ID NO: 3002408 - RNA, 19 nt, Artificial Sequence
  Description of Artificial Sequence: Synthetic oligonucleotide
ggcacagggaugguccgag

SEQ ID NO: 3002409 - RNA, 19 nt, Artificial Sequence
  Description of Artificial Sequence: Synthetic oligonucleotide
cuucgugcagcgugaagcu

SEQ ID NO: 3002410 - RNA, 19 nt, Artificial Sequence
  Description of Artificial Sequence: Synthetic oligonucleotide
agcgugaagcucacagggu

SEQ ID NO: 3002411 - RNA, 19 nt, Artificial Sequence
  Description of Artificial Sequence: Synthetic oligonucleotide
gagggcccugcguccauca

SEQ ID NO: 3002412 - RNA, 19 nt, Artificial Sequence
  Description of Artificial Sequence: Synthetic oligonucleotide
gucacaugcacgccuucgu

SEQ ID NO: 3002413 - RNA, 19 nt, Artificial Sequence
  Description of Artificial Sequence: Synthetic oligonucleotide
uucgugcagcgugaagcuc

SEQ ID NO: 3002414 - RNA, 19 nt, Artificial Sequence
  Description of Artificial Sequence: Synthetic oligonucleotide
acguagaaguuggcuacau

SEQ ID NO: 3002415 - RNA, 19 nt, Artificial Sequence
  Description of Artificial Sequence: Synthetic oligonucleotide
ccugcguccaucaggggca

SEQ ID NO: 3002416 - RNA, 19 nt, Artificial Sequence
  Description of Artificial Sequence: Synthetic oligonucleotide
uucugccuggacgccuaug

SEQ ID NO: 3002417 - RNA, 19 nt, Artificial Sequence
  Description of Artificial Sequence: Synthetic oligonucleotide
agggaugguccgagggguc

SEQ ID NO: 3002418 - RNA, 19 nt, Artificial Sequence
  Description of Artificial Sequence: Synthetic oligonucleotide
ggcuacauccaggucugug

SEQ ID NO: 3002419 - RNA, 19 nt, Artificial Sequence
  Description of Artificial Sequence: Synthetic oligonucleotide
guaccuucuccgacuucug

SEQ ID NO: 3002420 - RNA, 19 nt, Artificial Sequence
  Description of Artificial Sequence: Synthetic oligonucleotide
ggcccgcuguuccugaaac

SEQ ID NO: 3002421 - RNA, 19 nt, Artificial Sequence
  Description of Artificial Sequence: Synthetic oligonucleotide
gggucugcauggcccaggc

SEQ ID NO: 3002422 - RNA, 19 nt, Artificial Sequence
  Description of Artificial Sequence: Synthetic oligonucleotide
gaguaccuucuccgacuuc

SEQ ID NO: 3002423 - RNA, 19 nt, Artificial Sequence
  Description of Artificial Sequence: Synthetic oligonucleotide
uccgaggggucugcauggc

SEQ ID NO: 3002424 - RNA, 19 nt, Artificial Sequence
  Description of Artificial Sequence: Synthetic oligonucleotide
cggcuaaagccauccaggc

SEQ ID NO: 3002425 - RNA, 19 nt, Artificial Sequence
  Description of Artificial Sequence: Synthetic oligonucleotide
ugguccgaggggucugcau

SEQ ID NO: 3002426 - RNA, 19 nt, Artificial Sequence
  Description of Artificial Sequence: Synthetic oligonucleotide
gcucacggagggccgcucg

SEQ ID NO: 3002427 - RNA, 19 nt, Artificial Sequence
  Description of Artificial Sequence: Synthetic oligonucleotide
agggcccugcguccaucag

SEQ ID NO: 3002428 - RNA, 19 nt, Artificial Sequence
  Description of Artificial Sequence: Synthetic oligonucleotide
caucggagcagggcuucug

SEQ ID NO: 3002429 - RNA, 19 nt, Artificial Sequence
  Description of Artificial Sequence: Synthetic oligonucleotide
uccgacuucuguggcuuuu

SEQ ID NO: 3002430 - RNA, 19 nt, Artificial Sequence
  Description of Artificial Sequence: Synthetic oligonucleotide
ucgggcccgcuguuccuga

SEQ ID NO: 3002431 - RNA, 19 nt, Artificial Sequence
  Description of Artificial Sequence: Synthetic oligonucleotide
uggcuccaaacugggcggu

SEQ ID NO: 3002432 - RNA, 19 nt, Artificial Sequence
  Description of Artificial Sequence: Synthetic oligonucleotide
gugacccaccauggcuagg

SEQ ID NO: 3002433 - RNA, 19 nt, Artificial Sequence
  Description of Artificial Sequence: Synthetic oligonucleotide
ccuggacgccuaugggagg

SEQ ID NO: 3002434 - RNA, 19 nt, Artificial Sequence
  Description of Artificial Sequence: Synthetic oligonucleotide
ggagcacgggcaccggcac

SEQ ID NO: 3002435 - RNA, 19 nt, Artificial Sequence
  Description of Artificial Sequence: Synthetic oligonucleotide
gccauccaggccccgagga

SEQ ID NO: 3002436 - RNA, 19 nt, Artificial Sequence
  Description of Artificial Sequence: Synthetic oligonucleotide
acgggcaccggcacaggga

SEQ ID NO: 3002437 - RNA, 19 nt, Artificial Sequence
  Description of Artificial Sequence: Synthetic oligonucleotide
cgaggaaggcggagcacgg

SEQ ID NO: 3002438 - RNA, 19 nt, Artificial Sequence
  Description of Artificial Sequence: Synthetic oligonucleotide
cacguagaaguuggcuaca

SEQ ID NO: 3002439 - RNA, 19 nt, Artificial Sequence
  Description of Artificial Sequence: Synthetic oligonucleotide
ggggcaaauccucggcuaa

SEQ ID NO: 3002440 - RNA, 19 nt, Artificial Sequence
  Description of Artificial Sequence: Synthetic oligonucleotide
cugcauggcccaggccagg

SEQ ID NO: 3002441 - RNA, 19 nt, Artificial Sequence
  Description of Artificial Sequence: Synthetic oligonucleotide
gcacagggaugguccgagg

SEQ ID NO: 3002442 - RNA, 19 nt, Artificial Sequence
  Description of Artificial Sequence: Synthetic oligonucleotide
gagcacgggcaccggcaca

SEQ ID NO: 3002443 - RNA, 19 nt, Artificial Sequence
  Description of Artificial Sequence: Synthetic oligonucleotide
auccucggcuaaagccauc

SEQ ID NO: 3002444 - RNA, 19 nt, Artificial Sequence
  Description of Artificial Sequence: Synthetic oligonucleotide
ggaaaugaugucacugcau

SEQ ID NO: 3002445 - RNA, 19 nt, Artificial Sequence
  Description of Artificial Sequence: Synthetic oligonucleotide
uccaggucuguggcuccaa

SEQ ID NO: 3002446 - RNA, 19 nt, Artificial Sequence
  Description of Artificial Sequence: Synthetic oligonucleotide
auccaggucuguggcucca

SEQ ID NO: 3002447 - RNA, 19 nt, Artificial Sequence
  Description of Artificial Sequence: Synthetic oligonucleotide
ggggucugcauggcccagg

SEQ ID NO: 3002448 - RNA, 19 nt, Artificial Sequence
  Description of Artificial Sequence: Synthetic oligonucleotide
cucgggcccgcuguuccug

SEQ ID NO: 3002449 - RNA, 19 nt, Artificial Sequence
  Description of Artificial Sequence: Synthetic oligonucleotide
ggaaggcggagcacgggca

SEQ ID NO: 3002450 - RNA, 19 nt, Artificial Sequence
  Description of Artificial Sequence: Synthetic oligonucleotide
ggacacguagaaguuggcu

SEQ ID NO: 3002451 - RNA, 19 nt, Artificial Sequence
  Description of Artificial Sequence: Synthetic oligonucleotide
ggucugcauggcccaggcc

SEQ ID NO: 3002452 - RNA, 19 nt, Artificial Sequence
  Description of Artificial Sequence: Synthetic oligonucleotide
acgccuucgugcagcguga

SEQ ID NO: 3002453 - RNA, 19 nt, Artificial Sequence
  Description of Artificial Sequence: Synthetic oligonucleotide
ccggcacagggaugguccg

SEQ ID NO: 3002454 - RNA, 19 nt, Artificial Sequence
  Description of Artificial Sequence: Synthetic oligonucleotide
caggggcaaauccucggcu

SEQ ID NO: 3002455 - RNA, 19 nt, Artificial Sequence
  Description of Artificial Sequence: Synthetic oligonucleotide
ggggucuugaguaccuucu

SEQ ID NO: 3002456 - RNA, 19 nt, Artificial Sequence
  Description of Artificial Sequence: Synthetic oligonucleotide
gcucacagggugacccacc

SEQ ID NO: 3002457 - RNA, 19 nt, Artificial Sequence
  Description of Artificial Sequence: Synthetic oligonucleotide
cagggaugguccgaggggu

SEQ ID NO: 3002458 - RNA, 19 nt, Artificial Sequence
  Description of Artificial Sequence: Synthetic oligonucleotide
gccuucgugcagcgugaag

SEQ ID NO: 3002459 - RNA, 19 nt, Artificial Sequence
  Description of Artificial Sequence: Synthetic oligonucleotide
ggaugguccgaggggucug

SEQ ID NO: 3002460 - RNA, 19 nt, Artificial Sequence
  Description of Artificial Sequence: Synthetic oligonucleotide
gggacacguagaaguuggc

SEQ ID NO: 3002461 - RNA, 19 nt, Artificial Sequence
  Description of Artificial Sequence: Synthetic oligonucleotide
gcuccaaacugggcgguca

SEQ ID NO: 3002462 - RNA, 19 nt, Artificial Sequence
  Description of Artificial Sequence: Synthetic oligonucleotide
gggugacccaccauggcua

SEQ ID NO: 3002463 - RNA, 19 nt, Artificial Sequence
  Description of Artificial Sequence: Synthetic oligonucleotide
gguagcgcucacggagggc

SEQ ID NO: 3002464 - RNA, 19 nt, Artificial Sequence
  Description of Artificial Sequence: Synthetic oligonucleotide
ggcggucacaugcacgccu

SEQ ID NO: 3002465 - RNA, 19 nt, Artificial Sequence
  Description of Artificial Sequence: Synthetic oligonucleotide
gcuaggaggcugcggaggu

SEQ ID NO: 3002466 - RNA, 19 nt, Artificial Sequence
  Description of Artificial Sequence: Synthetic oligonucleotide
uggacgccuaugggagguc

SEQ ID NO: 3002467 - RNA, 19 nt, Artificial Sequence
  Description of Artificial Sequence: Synthetic oligonucleotide
caccggcacagggaugguc

SEQ ID NO: 3002468 - RNA, 19 nt, Artificial Sequence
  Description of Artificial Sequence: Synthetic oligonucleotide
cgugaagcucacaggguga

SEQ ID NO: 3002469 - RNA, 19 nt, Artificial Sequence
  Description of Artificial Sequence: Synthetic oligonucleotide
gcugcggagguagcgcuca

SEQ ID NO: 3002470 - RNA, 19 nt, Artificial Sequence
  Description of Artificial Sequence: Synthetic oligonucleotide
ccgaggggucugcauggcc

SEQ ID NO: 3002471 - RNA, 19 nt, Artificial Sequence
  Description of Artificial Sequence: Synthetic oligonucleotide
augguccgaggggucugca

SEQ ID NO: 3002472 - RNA, 19 nt, Artificial Sequence
  Description of Artificial Sequence: Synthetic oligonucleotide
cuggacgccuaugggaggu

SEQ ID NO: 3002473 - RNA, 19 nt, Artificial Sequence
  Description of Artificial Sequence: Synthetic oligonucleotide
ccaggccccgaggaaggcg

SEQ ID NO: 3002474 - RNA, 19 nt, Artificial Sequence
  Description of Artificial Sequence: Synthetic oligonucleotide
cugcggagguagcgcucac

SEQ ID NO: 3002475 - RNA, 19 nt, Artificial Sequence
  Description of Artificial Sequence: Synthetic oligonucleotide
aggagggcccugcguccau

SEQ ID NO: 3002476 - RNA, 19 nt, Artificial Sequence
  Description of Artificial Sequence: Synthetic oligonucleotide
gcggagcacgggcaccggc

SEQ ID NO: 3002477 - RNA, 19 nt, Artificial Sequence
  Description of Artificial Sequence: Synthetic oligonucleotide
gccccgaggaaggcggagc

SEQ ID NO: 3002478 - RNA, 19 nt, Artificial Sequence
  Description of Artificial Sequence: Synthetic oligonucleotide
uggcuacauccaggucugu

SEQ ID NO: 3002479 - RNA, 19 nt, Artificial Sequence
  Description of Artificial Sequence: Synthetic oligonucleotide
ccgacuucuguggcuuuug

SEQ ID NO: 3002480 - RNA, 19 nt, Artificial Sequence
  Description of Artificial Sequence: Synthetic oligonucleotide
cggagggccgcucgggccc

SEQ ID NO: 3002481 - RNA, 19 nt, Artificial Sequence
  Description of Artificial Sequence: Synthetic oligonucleotide
cgugcagcgugaagcucac

SEQ ID NO: 3002482 - RNA, 19 nt, Artificial Sequence
  Description of Artificial Sequence: Synthetic oligonucleotide
gggaggucugcagcuggga

SEQ ID NO: 3002483 - RNA, 19 nt, Artificial Sequence
  Description of Artificial Sequence: Synthetic oligonucleotide
cgcucgggcccgcuguucc

SEQ ID NO: 3002484 - RNA, 19 nt, Artificial Sequence
  Description of Artificial Sequence: Synthetic oligonucleotide
cuguggcuuuuggccucag

SEQ ID NO: 3002485 - RNA, 19 nt, Artificial Sequence
  Description of Artificial Sequence: Synthetic oligonucleotide
ccauggcuaggaggcugcg

SEQ ID NO: 3002486 - RNA, 19 nt, Artificial Sequence
  Description of Artificial Sequence: Synthetic oligonucleotide
gggcaaauccucggcuaaa

SEQ ID NO: 3002487 - RNA, 19 nt, Artificial Sequence
  Description of Artificial Sequence: Synthetic oligonucleotide
cuaggaggcugcggaggua

SEQ ID NO: 3002488 - RNA, 19 nt, Artificial Sequence
  Description of Artificial Sequence: Synthetic oligonucleotide
gcccugcguccaucagggg

SEQ ID NO: 3002489 - RNA, 19 nt, Artificial Sequence
  Description of Artificial Sequence: Synthetic oligonucleotide
cugcaucggagcagggcuu

SEQ ID NO: 3002490 - RNA, 19 nt, Artificial Sequence
  Description of Artificial Sequence: Synthetic oligonucleotide
ggccccgaggaaggcggag

SEQ ID NO: 3002491 - RNA, 19 nt, Artificial Sequence
  Description of Artificial Sequence: Synthetic oligonucleotide
ccccgaggaaggcggagca

SEQ ID NO: 3002492 - RNA, 19 nt, Artificial Sequence
  Description of Artificial Sequence: Synthetic oligonucleotide
ggcggagcacgggcaccgg

SEQ ID NO: 3002493 - RNA, 19 nt, Artificial Sequence
  Description of Artificial Sequence: Synthetic oligonucleotide
gggaugguccgaggggucu

SEQ ID NO: 3002494 - RNA, 19 nt, Artificial Sequence
  Description of Artificial Sequence: Synthetic oligonucleotide
cggagcacgggcaccggca

SEQ ID NO: 3002495 - RNA, 19 nt, Artificial Sequence
  Description of Artificial Sequence: Synthetic oligonucleotide
gggcggucacaugcacgcc

SEQ ID NO: 3002496 - RNA, 19 nt, Artificial Sequence
  Description of Artificial Sequence: Synthetic oligonucleotide
ggucugcagcugggacacg

SEQ ID NO: 3002497 - RNA, 19 nt, Artificial Sequence
  Description of Artificial Sequence: Synthetic oligonucleotide
ggcuccaaacugggcgguc

SEQ ID NO: 3002498 - RNA, 19 nt, Artificial Sequence
  Description of Artificial Sequence: Synthetic oligonucleotide
gcuucugccuggacgccua

SEQ ID NO: 3002499 - RNA, 19 nt, Artificial Sequence
  Description of Artificial Sequence: Synthetic oligonucleotide
gcguccaucaggggcaaau

SEQ ID NO: 3002500 - RNA, 19 nt, Artificial Sequence
  Description of Artificial Sequence: Synthetic oligonucleotide
ccgcuguuccugaaacucu

SEQ ID NO: 3002501 - RNA, 19 nt, Artificial Sequence
  Description of Artificial Sequence: Synthetic oligonucleotide
ggacgccuaugggaggucu

SEQ ID NO: 3002502 - RNA, 19 nt, Artificial Sequence
  Description of Artificial Sequence: Synthetic oligonucleotide
ccauccaggccccgaggaa

SEQ ID NO: 3002503 - RNA, 19 nt, Artificial Sequence
  Description of Artificial Sequence: Synthetic oligonucleotide
gggcccgcuguuccugaaa

SEQ ID NO: 3002504 - RNA, 19 nt, Artificial Sequence
  Description of Artificial Sequence: Synthetic oligonucleotide
gcacgggcaccggcacagg

SEQ ID NO: 3002505 - RNA, 19 nt, Artificial Sequence
  Description of Artificial Sequence: Synthetic oligonucleotide
ccucggcuaaagccaucca

SEQ ID NO: 3002506 - RNA, 19 nt, Artificial Sequence
  Description of Artificial Sequence: Synthetic oligonucleotide
cccgaggaaggcggagcac

SEQ ID NO: 3002507 - RNA, 19 nt, Artificial Sequence
  Description of Artificial Sequence: Synthetic oligonucleotide
ggagggcccugcguccauc

SEQ ID NO: 3002508 - RNA, 19 nt, Artificial Sequence
  Description of Artificial Sequence: Synthetic oligonucleotide
aggccccgaggaaggcgga

SEQ ID NO: 3002509 - RNA, 19 nt, Artificial Sequence
  Description of Artificial Sequence: Synthetic oligonucleotide
ccaggucuguggcuccaaa

SEQ ID NO: 3002510 - RNA, 19 nt, Artificial Sequence
  Description of Artificial Sequence: Synthetic oligonucleotide
gugcagcgugaagcucaca

SEQ ID NO: 3002511 - RNA, 19 nt, Artificial Sequence
  Description of Artificial Sequence: Synthetic oligonucleotide
cugcguccaucaggggcaa

SEQ ID NO: 3002512 - RNA, 19 nt, Artificial Sequence
  Description of Artificial Sequence: Synthetic oligonucleotide
gcccgcuguuccugaaacu

SEQ ID NO: 3002513 - RNA, 19 nt, Artificial Sequence
  Description of Artificial Sequence: Synthetic oligonucleotide
ggccgcucgggcccgcugu

SEQ ID NO: 3002514 - RNA, 19 nt, Artificial Sequence
  Description of Artificial Sequence: Synthetic oligonucleotide
gggccgcucgggcccgcug

SEQ ID NO: 3002515 - RNA, 19 nt, Artificial Sequence
  Description of Artificial Sequence: Synthetic oligonucleotide
agggccgcucgggcccgcu

SEQ ID NO: 3002516 - RNA, 19 nt, Artificial Sequence
  Description of Artificial Sequence: Synthetic oligonucleotide
cggagcagggcuucugccu

SEQ ID NO: 3002517 - RNA, 19 nt, Artificial Sequence
  Description of Artificial Sequence: Synthetic oligonucleotide
cggagguagcgcucacgga

SEQ ID NO: 3002518 - RNA, 19 nt, Artificial Sequence
  Description of Artificial Sequence: Synthetic oligonucleotide
cuccgacuucuguggcuuu

SEQ ID NO: 3002519 - RNA, 19 nt, Artificial Sequence
  Description of Artificial Sequence: Synthetic oligonucleotide
cggucacaugcacgccuuc

SEQ ID NO: 3002520 - RNA, 19 nt, Artificial Sequence
  Description of Artificial Sequence: Synthetic oligonucleotide
gcucgggcccgcuguuccu

SEQ ID NO: 3002521 - RNA, 19 nt, Artificial Sequence
  Description of Artificial Sequence: Synthetic oligonucleotide
gcggucacaugcacgccuu

SEQ ID NO: 3002522 - RNA, 19 nt, Artificial Sequence
  Description of Artificial Sequence: Synthetic oligonucleotide
cgccuaugggaggucugca

SEQ ID NO: 3002523 - RNA, 19 nt, Artificial Sequence
  Description of Artificial Sequence: Synthetic oligonucleotide
cgggcaccggcacagggau

SEQ ID NO: 3002524 - RNA, 19 nt, Artificial Sequence
  Description of Artificial Sequence: Synthetic oligonucleotide
ccgcucgggcccgcuguuc

SEQ ID NO: 3002525 - RNA, 19 nt, Artificial Sequence
  Description of Artificial Sequence: Synthetic oligonucleotide
ccaccauggcuaggaggcu

SEQ ID NO: 3002526 - RNA, 19 nt, Artificial Sequence
  Description of Artificial Sequence: Synthetic oligonucleotide
cggcacagggaugguccga

SEQ ID NO: 3002527 - RNA, 19 nt, Artificial Sequence
  Description of Artificial Sequence: Synthetic oligonucleotide
cgcucacggagggccgcuc

SEQ ID NO: 3002528 - RNA, 19 nt, Artificial Sequence
  Description of Artificial Sequence: Synthetic oligonucleotide
gcgcucacggagggccgcu

SEQ ID NO: 3002529 - RNA, 19 nt, Artificial Sequence
  Description of Artificial Sequence: Synthetic oligonucleotide
gccgcucgggcccgcuguu

SEQ ID NO: 3002530 - RNA, 19 nt, Artificial Sequence
  Description of Artificial Sequence: Synthetic oligonucleotide
gcacgccuucgugcagcgu

SEQ ID NO: 3002531 - RNA, 19 nt, Artificial Sequence
  Description of Artificial Sequence: Synthetic oligonucleotide
gcaccggcacagggauggu

SEQ ID NO: 3002532 - RNA, 19 nt, Artificial Sequence
  Description of Artificial Sequence: Synthetic oligonucleotide
cgggcccgcuguuccugaa

SEQ ID NO: 3002533 - RNA, 19 nt, Artificial Sequence
  Description of Artificial Sequence: Synthetic oligonucleotide
cgccuucgugcagcgugaa

SEQ ID NO: 3002534 - RNA, 19 nt, Artificial Sequence
  Description of Artificial Sequence: Synthetic oligonucleotide
auucugauccuuuacaacc

SEQ ID NO: 3002535 - RNA, 19 nt, Artificial Sequence
  Description of Artificial Sequence: Synthetic oligonucleotide
uucacuucaauuuucagag

SEQ ID NO: 3002536 - RNA, 19 nt, Artificial Sequence
  Description of Artificial Sequence: Synthetic oligonucleotide
auaaaucaaccucagaaac

SEQ ID NO: 3002537 - RNA, 19 nt, Artificial Sequence
  Description of Artificial Sequence: Synthetic oligonucleotide
agguuucucauucugaucc

SEQ ID NO: 3002538 - RNA, 19 nt, Artificial Sequence
  Description of Artificial Sequence: Synthetic oligonucleotide
aauaauucuagacuuauuu

SEQ ID NO: 3002539 - RNA, 19 nt, Artificial Sequence
  Description of Artificial Sequence: Synthetic oligonucleotide
aaacacuaagcucacagag

SEQ ID NO: 3002540 - RNA, 19 nt, Artificial Sequence
  Description of Artificial Sequence: Synthetic oligonucleotide
uuuuguacaaauuuugcug

SEQ ID NO: 3002541 - RNA, 19 nt, Artificial Sequence
  Description of Artificial Sequence: Synthetic oligonucleotide
aaugaauaauucuagacuu

SEQ ID NO: 3002542 - RNA, 19 nt, Artificial Sequence
  Description of Artificial Sequence: Synthetic oligonucleotide
aaaucaaccucagaaacac

SEQ ID NO: 3002543 - RNA, 19 nt, Artificial Sequence
  Description of Artificial Sequence: Synthetic oligonucleotide
uauuaacugauucuggaag

SEQ ID NO: 3002544 - RNA, 19 nt, Artificial Sequence
  Description of Artificial Sequence: Synthetic oligonucleotide
uaaugaauaauucuagacu

SEQ ID NO: 3002545 - RNA, 19 nt, Artificial Sequence
  Description of Artificial Sequence: Synthetic oligonucleotide
agagagacugaguuaaucc

SEQ ID NO: 3002546 - RNA, 19 nt, Artificial Sequence
  Description of Artificial Sequence: Synthetic oligonucleotide
gaagauucaggaauaaucg

SEQ ID NO: 3002547 - RNA, 19 nt, Artificial Sequence
  Description of Artificial Sequence: Synthetic oligonucleotide
caaccuuuaauucauaagc

SEQ ID NO: 3002548 - RNA, 19 nt, Artificial Sequence
  Description of Artificial Sequence: Synthetic oligonucleotide
ucuauuuucacuucaauuu

SEQ ID NO: 3002549 - RNA, 19 nt, Artificial Sequence
  Description of Artificial Sequence: Synthetic oligonucleotide
uuucuuaaccuccaccugg

SEQ ID NO: 3002550 - RNA, 19 nt, Artificial Sequence
  Description of Artificial Sequence: Synthetic oligonucleotide
ugaacuagaaaucuccucu

SEQ ID NO: 3002551 - RNA, 19 nt, Artificial Sequence
  Description of Artificial Sequence: Synthetic oligonucleotide
auaagcugguuucuuaacc

SEQ ID NO: 3002552 - RNA, 19 nt, Artificial Sequence
  Description of Artificial Sequence: Synthetic oligonucleotide
aagauucaggaauaaucgg

SEQ ID NO: 3002553 - RNA, 19 nt, Artificial Sequence
  Description of Artificial Sequence: Synthetic oligonucleotide
agaaacacuaagcucacag

SEQ ID NO: 3002554 - RNA, 19 nt, Artificial Sequence
  Description of Artificial Sequence: Synthetic oligonucleotide
uucugaacuagaaaucucc

SEQ ID NO: 3002555 - RNA, 19 nt, Artificial Sequence
  Description of Artificial Sequence: Synthetic oligonucleotide
aacugauucuggaagauuc

SEQ ID NO: 3002556 - RNA, 19 nt, Artificial Sequence
  Description of Artificial Sequence: Synthetic oligonucleotide
ucaaucaauaaaucaaccu

SEQ ID NO: 3002557 - RNA, 19 nt, Artificial Sequence
  Description of Artificial Sequence: Synthetic oligonucleotide
aaucaauaaaucaaccuca

SEQ ID NO: 3002558 - RNA, 19 nt, Artificial Sequence
  Description of Artificial Sequence: Synthetic oligonucleotide
uaaucgguacuucucagag

SEQ ID NO: 3002559 - RNA, 19 nt, Artificial Sequence
  Description of Artificial Sequence: Synthetic oligonucleotide
uuucacuucaauuuucaga

SEQ ID NO: 3002560 - RNA, 19 nt, Artificial Sequence
  Description of Artificial Sequence: Synthetic oligonucleotide
uuugcuguagucauuucug

SEQ ID NO: 3002561 - RNA, 19 nt, Artificial Sequence
  Description of Artificial Sequence: Synthetic oligonucleotide
guaaugaauaauucuagac

SEQ ID NO: 3002562 - RNA, 19 nt, Artificial Sequence
  Description of Artificial Sequence: Synthetic oligonucleotide
uuuguacaaauuuugcugu

SEQ ID NO: 3002563 - RNA, 19 nt, Artificial Sequence
  Description of Artificial Sequence: Synthetic oligonucleotide
uguauuaacugauucugga

SEQ ID NO: 3002564 - RNA, 19 nt, Artificial Sequence
  Description of Artificial Sequence: Synthetic oligonucleotide
ucuguauuaacugauucug

SEQ ID NO: 3002565 - RNA, 19 nt, Artificial Sequence
  Description of Artificial Sequence: Synthetic oligonucleotide
acacuaagcucacagagag

SEQ ID NO: 3002566 - RNA, 19 nt, Artificial Sequence
  Description of Artificial Sequence: Synthetic oligonucleotide
caaucaauaaaucaaccuc

SEQ ID NO: 3002567 - RNA, 19 nt, Artificial Sequence
  Description of Artificial Sequence: Synthetic oligonucleotide
aauaaucgguacuucucag

SEQ ID NO: 3002568 - RNA, 19 nt, Artificial Sequence
  Description of Artificial Sequence: Synthetic oligonucleotide
cucagaaacacuaagcuca

SEQ ID NO: 3002569 - RNA, 19 nt, Artificial Sequence
  Description of Artificial Sequence: Synthetic oligonucleotide
acuaagcucacagagagag

SEQ ID NO: 3002570 - RNA, 19 nt, Artificial Sequence
  Description of Artificial Sequence: Synthetic oligonucleotide
auuugguucacuuucagua

SEQ ID NO: 3002571 - RNA, 19 nt, Artificial Sequence
  Description of Artificial Sequence: Synthetic oligonucleotide
gauucuggaagauucagga

SEQ ID NO: 3002572 - RNA, 19 nt, Artificial Sequence
  Description of Artificial Sequence: Synthetic oligonucleotide
aauuuucagagguuucuca

SEQ ID NO: 3002573 - RNA, 19 nt, Artificial Sequence
  Description of Artificial Sequence: Synthetic oligonucleotide
uccuuuacaaccuuuaauu

SEQ ID NO: 3002574 - RNA, 19 nt, Artificial Sequence
  Description of Artificial Sequence: Synthetic oligonucleotide
uaaaucaaccucagaaaca

SEQ ID NO: 3002575 - RNA, 19 nt, Artificial Sequence
  Description of Artificial Sequence: Synthetic oligonucleotide
aaccucagaaacacuaagc

SEQ ID NO: 3002576 - RNA, 19 nt, Artificial Sequence
  Description of Artificial Sequence: Synthetic oligonucleotide
gaaaucuccucuaugagac

SEQ ID NO: 3002577 - RNA, 19 nt, Artificial Sequence
  Description of Artificial Sequence: Synthetic oligonucleotide
uguaaugaauaauucuaga

SEQ ID NO: 3002578 - RNA, 19 nt, Artificial Sequence
  Description of Artificial Sequence: Synthetic oligonucleotide
caauaaaucaaccucagaa

SEQ ID NO: 3002579 - RNA, 19 nt, Artificial Sequence
  Description of Artificial Sequence: Synthetic oligonucleotide
uaauucauaagcugguuuc

SEQ ID NO: 3002580 - RNA, 19 nt, Artificial Sequence
  Description of Artificial Sequence: Synthetic oligonucleotide
ugauucuggaagauucagg

SEQ ID NO: 3002581 - RNA, 19 nt, Artificial Sequence
  Description of Artificial Sequence: Synthetic oligonucleotide
uucucagagaccucaauca

SEQ ID NO: 3002582 - RNA, 19 nt, Artificial Sequence
  Description of Artificial Sequence: Synthetic oligonucleotide
uuaaccuccaccuggauuu

SEQ ID NO: 3002583 - RNA, 19 nt, Artificial Sequence
  Description of Artificial Sequence: Synthetic oligonucleotide
uucuggaagauucaggaau

SEQ ID NO: 3002584 - RNA, 19 nt, Artificial Sequence
  Description of Artificial Sequence: Synthetic oligonucleotide
gucauuucuguauuaacug

SEQ ID NO: 3002585 - RNA, 19 nt, Artificial Sequence
  Description of Artificial Sequence: Synthetic oligonucleotide
acaaccuuuaauucauaag

SEQ ID NO: 3002586 - RNA, 19 nt, Artificial Sequence
  Description of Artificial Sequence: Synthetic oligonucleotide
uccucuaugagacaucguc

SEQ ID NO: 3002587 - RNA, 19 nt, Artificial Sequence
  Description of Artificial Sequence: Synthetic oligonucleotide
uccaauggcauuguaauga

SEQ ID NO: 3002588 - RNA, 19 nt, Artificial Sequence
  Description of Artificial Sequence: Synthetic oligonucleotide
uuugucagcagcaccugag

SEQ ID NO: 3002589 - RNA, 19 nt, Artificial Sequence
  Description of Artificial Sequence: Synthetic oligonucleotide
gagagacugaguuaauccc

SEQ ID NO: 3002590 - RNA, 19 nt, Artificial Sequence
  Description of Artificial Sequence: Synthetic oligonucleotide
cucaaucaauaaaucaacc

SEQ ID NO: 3002591 - RNA, 19 nt, Artificial Sequence
  Description of Artificial Sequence: Synthetic oligonucleotide
uuucuguauuaacugauuc

SEQ ID NO: 3002592 - RNA, 19 nt, Artificial Sequence
  Description of Artificial Sequence: Synthetic oligonucleotide
uagaaaucuccucuaugag

SEQ ID NO: 3002593 - RNA, 19 nt, Artificial Sequence
  Description of Artificial Sequence: Synthetic oligonucleotide
aauggcauuguaaugaaua

SEQ ID NO: 3002594 - RNA, 19 nt, Artificial Sequence
  Description of Artificial Sequence: Synthetic oligonucleotide
cuagaaaucuccucuauga

SEQ ID NO: 3002595 - RNA, 19 nt, Artificial Sequence
  Description of Artificial Sequence: Synthetic oligonucleotide
uaagcucacagagagagac

SEQ ID NO: 3002596 - RNA, 19 nt, Artificial Sequence
  Description of Artificial Sequence: Synthetic oligonucleotide
auuaacugauucuggaaga

SEQ ID NO: 3002597 - RNA, 19 nt, Artificial Sequence
  Description of Artificial Sequence: Synthetic oligonucleotide
uucuguauuaacugauucu

SEQ ID NO: 3002598 - RNA, 19 nt, Artificial Sequence
  Description of Artificial Sequence: Synthetic oligonucleotide
auucaggaauaaucgguac

SEQ ID NO: 3002599 - RNA, 19 nt, Artificial Sequence
  Description of Artificial Sequence: Synthetic oligonucleotide
ccuuuaauucauaagcugg

SEQ ID NO: 3002600 - RNA, 19 nt, Artificial Sequence
  Description of Artificial Sequence: Synthetic oligonucleotide
uguccaauggcauuguaau

SEQ ID NO: 3002601 - RNA, 19 nt, Artificial Sequence
  Description of Artificial Sequence: Synthetic oligonucleotide
acaaauuuugcuguaguca

SEQ ID NO: 3002602 - RNA, 19 nt, Artificial Sequence
  Description of Artificial Sequence: Synthetic oligonucleotide
ucauuucuguauuaacuga

SEQ ID NO: 3002603 - RNA, 19 nt, Artificial Sequence
  Description of Artificial Sequence: Synthetic oligonucleotide
cucuaugagacaucguccc

SEQ ID NO: 3002604 - RNA, 19 nt, Artificial Sequence
  Description of Artificial Sequence: Synthetic oligonucleotide
agaaaucuccucuaugaga

SEQ ID NO: 3002605 - RNA, 19 nt, Artificial Sequence
  Description of Artificial Sequence: Synthetic oligonucleotide
accucagaaacacuaagcu

SEQ ID NO: 3002606 - RNA, 19 nt, Artificial Sequence
  Description of Artificial Sequence: Synthetic oligonucleotide
uuaauucauaagcugguuu

SEQ ID NO: 3002607 - RNA, 19 nt, Artificial Sequence
  Description of Artificial Sequence: Synthetic oligonucleotide
gaauaaucgguacuucuca

SEQ ID NO: 3002608 - RNA, 19 nt, Artificial Sequence
  Description of Artificial Sequence: Synthetic oligonucleotide
auuguaaugaauaauucua

SEQ ID NO: 3002609 - RNA, 19 nt, Artificial Sequence
  Description of Artificial Sequence: Synthetic oligonucleotide
uaagcugguuucuuaaccu

SEQ ID NO: 3002610 - RNA, 19 nt, Artificial Sequence
  Description of Artificial Sequence: Synthetic oligonucleotide
auuucugaacuagaaaucu

SEQ ID NO: 3002611 - RNA, 19 nt, Artificial Sequence
  Description of Artificial Sequence: Synthetic oligonucleotide
ucuccucuaugagacaucg

SEQ ID NO: 3002612 - RNA, 19 nt, Artificial Sequence
  Description of Artificial Sequence: Synthetic oligonucleotide
ucagagguuucucauucug

SEQ ID NO: 3002613 - RNA, 19 nt, Artificial Sequence
  Description of Artificial Sequence: Synthetic oligonucleotide
uauuuucacuucaauuuuc

SEQ ID NO: 3002614 - RNA, 19 nt, Artificial Sequence
  Description of Artificial Sequence: Synthetic oligonucleotide
uucaggaauaaucgguacu

SEQ ID NO: 3002615 - RNA, 19 nt, Artificial Sequence
  Description of Artificial Sequence: Synthetic oligonucleotide
uguacaaauuuugcuguag

SEQ ID NO: 3002616 - RNA, 19 nt, Artificial Sequence
  Description of Artificial Sequence: Synthetic oligonucleotide
cuguauuaacugauucugg

SEQ ID NO: 3002617 - RNA, 19 nt, Artificial Sequence
  Description of Artificial Sequence: Synthetic oligonucleotide
uuuucacuucaauuuucag

SEQ ID NO: 3002618 - RNA, 19 nt, Artificial Sequence
  Description of Artificial Sequence: Synthetic oligonucleotide
aauuuugcuguagucauuu

SEQ ID NO: 3002619 - RNA, 19 nt, Artificial Sequence
  Description of Artificial Sequence: Synthetic oligonucleotide
ucaauuuucagagguuucu

SEQ ID NO: 3002620 - RNA, 19 nt, Artificial Sequence
  Description of Artificial Sequence: Synthetic oligonucleotide
uuugguucacuuucaguac

SEQ ID NO: 3002621 - RNA, 19 nt, Artificial Sequence
  Description of Artificial Sequence: Synthetic oligonucleotide
auaauucuagacuuauuuu

SEQ ID NO: 3002622 - RNA, 19 nt, Artificial Sequence
  Description of Artificial Sequence: Synthetic oligonucleotide
aaccuuuaauucauaagcu

SEQ ID NO: 3002623 - RNA, 19 nt, Artificial Sequence
  Description of Artificial Sequence: Synthetic oligonucleotide
uaacucuauuuucacuuca

SEQ ID NO: 3002624 - RNA, 19 nt, Artificial Sequence
  Description of Artificial Sequence: Synthetic oligonucleotide
ucugaacuagaaaucuccu

SEQ ID NO: 3002625 - RNA, 19 nt, Artificial Sequence
  Description of Artificial Sequence: Synthetic oligonucleotide
acuagaaaucuccucuaug

SEQ ID NO: 3002626 - RNA, 19 nt, Artificial Sequence
  Description of Artificial Sequence: Synthetic oligonucleotide
ugauuugguucacuuucag

SEQ ID NO: 3002627 - RNA, 19 nt, Artificial Sequence
  Description of Artificial Sequence: Synthetic oligonucleotide
aggaaggugauuugguuca

SEQ ID NO: 3002628 - RNA, 19 nt, Artificial Sequence
  Description of Artificial Sequence: Synthetic oligonucleotide
ucauucugauccuuuacaa

SEQ ID NO: 3002629 - RNA, 19 nt, Artificial Sequence
  Description of Artificial Sequence: Synthetic oligonucleotide
ucaauaaaucaaccucaga

SEQ ID NO: 3002630 - RNA, 19 nt, Artificial Sequence
  Description of Artificial Sequence: Synthetic oligonucleotide
gaccucaaucaauaaauca

SEQ ID NO: 3002631 - RNA, 19 nt, Artificial Sequence
  Description of Artificial Sequence: Synthetic oligonucleotide
uacaaauuuugcuguaguc

SEQ ID NO: 3002632 - RNA, 19 nt, Artificial Sequence
  Description of Artificial Sequence: Synthetic oligonucleotide
ugguuucuuaaccuccacc

SEQ ID NO: 3002633 - RNA, 19 nt, Artificial Sequence
  Description of Artificial Sequence: Synthetic oligonucleotide
agucauuucuguauuaacu

SEQ ID NO: 3002634 - RNA, 19 nt, Artificial Sequence
  Description of Artificial Sequence: Synthetic oligonucleotide
aggaauaaucgguacuucu

SEQ ID NO: 3002635 - RNA, 19 nt, Artificial Sequence
  Description of Artificial Sequence: Synthetic oligonucleotide
ugaguuaaucccagguaac

SEQ ID NO: 3002636 - RNA, 19 nt, Artificial Sequence
  Description of Artificial Sequence: Synthetic oligonucleotide
ugaauaauucuagacuuau

SEQ ID NO: 3002637 - RNA, 19 nt, Artificial Sequence
  Description of Artificial Sequence: Synthetic oligonucleotide
aauucauaagcugguuucu

SEQ ID NO: 3002638 - RNA, 19 nt, Artificial Sequence
  Description of Artificial Sequence: Synthetic oligonucleotide
ugucugaugaugcuuguuu

SEQ ID NO: 3002639 - RNA, 19 nt, Artificial Sequence
  Description of Artificial Sequence: Synthetic oligonucleotide
uugucagcagcaccugagg

SEQ ID NO: 3002640 - RNA, 19 nt, Artificial Sequence
  Description of Artificial Sequence: Synthetic oligonucleotide
uggauuucugaacuagaaa

SEQ ID NO: 3002641 - RNA, 19 nt, Artificial Sequence
  Description of Artificial Sequence: Synthetic oligonucleotide
aguuaaucccagguaacuc

SEQ ID NO: 3002642 - RNA, 19 nt, Artificial Sequence
  Description of Artificial Sequence: Synthetic oligonucleotide
ucacuuucaguacucuuuc

SEQ ID NO: 3002643 - RNA, 19 nt, Artificial Sequence
  Description of Artificial Sequence: Synthetic oligonucleotide
uucugauccuuuacaaccu

SEQ ID NO: 3002644 - RNA, 19 nt, Artificial Sequence
  Description of Artificial Sequence: Synthetic oligonucleotide
gauuucugaacuagaaauc

SEQ ID NO: 3002645 - RNA, 19 nt, Artificial Sequence
  Description of Artificial Sequence: Synthetic oligonucleotide
gaggaaggugauuugguuc

SEQ ID NO: 3002646 - RNA, 19 nt, Artificial Sequence
  Description of Artificial Sequence: Synthetic oligonucleotide
ggugauuugguucacuuuc

SEQ ID NO: 3002647 - RNA, 19 nt, Artificial Sequence
  Description of Artificial Sequence: Synthetic oligonucleotide
auuuucagagguuucucau

SEQ ID NO: 3002648 - RNA, 19 nt, Artificial Sequence
  Description of Artificial Sequence: Synthetic oligonucleotide
ucuggaagauucaggaaua

SEQ ID NO: 3002649 - RNA, 19 nt, Artificial Sequence
  Description of Artificial Sequence: Synthetic oligonucleotide
uugguucacuuucaguacu

SEQ ID NO: 3002650 - RNA, 19 nt, Artificial Sequence
  Description of Artificial Sequence: Synthetic oligonucleotide
uucaauuuucagagguuuc

SEQ ID NO: 3002651 - RNA, 19 nt, Artificial Sequence
  Description of Artificial Sequence: Synthetic oligonucleotide
aacuagaaaucuccucuau

SEQ ID NO: 3002652 - RNA, 19 nt, Artificial Sequence
  Description of Artificial Sequence: Synthetic oligonucleotide
aaggugauuugguucacuu

SEQ ID NO: 3002653 - RNA, 19 nt, Artificial Sequence
  Description of Artificial Sequence: Synthetic oligonucleotide
uuucugaacuagaaaucuc

SEQ ID NO: 3002654 - RNA, 19 nt, Artificial Sequence
  Description of Artificial Sequence: Synthetic oligonucleotide
cauucugauccuuuacaac

SEQ ID NO: 3002655 - RNA, 19 nt, Artificial Sequence
  Description of Artificial Sequence: Synthetic oligonucleotide
uaugagacaucgucccuug

SEQ ID NO: 3002656 - RNA, 19 nt, Artificial Sequence
  Description of Artificial Sequence: Synthetic oligonucleotide
agauucaggaauaaucggu

SEQ ID NO: 3002657 - RNA, 19 nt, Artificial Sequence
  Description of Artificial Sequence: Synthetic oligonucleotide
ggaagauucaggaauaauc

SEQ ID NO: 3002658 - RNA, 19 nt, Artificial Sequence
  Description of Artificial Sequence: Synthetic oligonucleotide
ugagacaucgucccuuguc

SEQ ID NO: 3002659 - RNA, 19 nt, Artificial Sequence
  Description of Artificial Sequence: Synthetic oligonucleotide
gaaacacuaagcucacaga

SEQ ID NO: 3002660 - RNA, 19 nt, Artificial Sequence
  Description of Artificial Sequence: Synthetic oligonucleotide
ucucauucugauccuuuac

SEQ ID NO: 3002661 - RNA, 19 nt, Artificial Sequence
  Description of Artificial Sequence: Synthetic oligonucleotide
agagguuucucauucugau

SEQ ID NO: 3002662 - RNA, 19 nt, Artificial Sequence
  Description of Artificial Sequence: Synthetic oligonucleotide
auaaucgguacuucucaga

SEQ ID NO: 3002663 - RNA, 19 nt, Artificial Sequence
  Description of Artificial Sequence: Synthetic oligonucleotide
ugauccuuuacaaccuuua

SEQ ID NO: 3002664 - RNA, 19 nt, Artificial Sequence
  Description of Artificial Sequence: Synthetic oligonucleotide
uucuuaaccuccaccugga

SEQ ID NO: 3002665 - RNA, 19 nt, Artificial Sequence
  Description of Artificial Sequence: Synthetic oligonucleotide
agagaccucaaucaauaaa

SEQ ID NO: 3002666 - RNA, 19 nt, Artificial Sequence
  Description of Artificial Sequence: Synthetic oligonucleotide
ucacuucaauuuucagagg

SEQ ID NO: 3002667 - RNA, 19 nt, Artificial Sequence
  Description of Artificial Sequence: Synthetic oligonucleotide
uuucaguacucuuucugau

SEQ ID NO: 3002668 - RNA, 19 nt, Artificial Sequence
  Description of Artificial Sequence: Synthetic oligonucleotide
accucaaucaauaaaucaa

SEQ ID NO: 3002669 - RNA, 19 nt, Artificial Sequence
  Description of Artificial Sequence: Synthetic oligonucleotide
agcugguuucuuaaccucc

SEQ ID NO: 3002670 - RNA, 19 nt, Artificial Sequence
  Description of Artificial Sequence: Synthetic oligonucleotide
ucaaccucagaaacacuaa

SEQ ID NO: 3002671 - RNA, 19 nt, Artificial Sequence
  Description of Artificial Sequence: Synthetic oligonucleotide
uagucauuucuguauuaac

SEQ ID NO: 3002672 - RNA, 19 nt, Artificial Sequence
  Description of Artificial Sequence: Synthetic oligonucleotide
auccuuuacaaccuuuaau

SEQ ID NO: 3002673 - RNA, 19 nt, Artificial Sequence
  Description of Artificial Sequence: Synthetic oligonucleotide
cuuucaguacucuuucuga

SEQ ID NO: 3002674 - RNA, 19 nt, Artificial Sequence
  Description of Artificial Sequence: Synthetic oligonucleotide
ucagaaacacuaagcucac

SEQ ID NO: 3002675 - RNA, 19 nt, Artificial Sequence
  Description of Artificial Sequence: Synthetic oligonucleotide
aaucgguacuucucagaga

SEQ ID NO: 3002676 - RNA, 19 nt, Artificial Sequence
  Description of Artificial Sequence: Synthetic oligonucleotide
aucaauaaaucaaccucag

SEQ ID NO: 3002677 - RNA, 19 nt, Artificial Sequence
  Description of Artificial Sequence: Synthetic oligonucleotide
ugucagcagcaccugagga

SEQ ID NO: 3002678 - RNA, 19 nt, Artificial Sequence
  Description of Artificial Sequence: Synthetic oligonucleotide
aacacuaagcucacagaga

SEQ ID NO: 3002679 - RNA, 19 nt, Artificial Sequence
  Description of Artificial Sequence: Synthetic oligonucleotide
ucucagagaccucaaucaa

SEQ ID NO: 3002680 - RNA, 19 nt, Artificial Sequence
  Description of Artificial Sequence: Synthetic oligonucleotide
ucaggaauaaucgguacuu

SEQ ID NO: 3002681 - RNA, 19 nt, Artificial Sequence
  Description of Artificial Sequence: Synthetic oligonucleotide
cauuguaaugaauaauucu

SEQ ID NO: 3002682 - RNA, 19 nt, Artificial Sequence
  Description of Artificial Sequence: Synthetic oligonucleotide
caaccucagaaacacuaag

SEQ ID NO: 3002683 - RNA, 19 nt, Artificial Sequence
  Description of Artificial Sequence: Synthetic oligonucleotide
uuaaucccagguaacucua

SEQ ID NO: 3002684 - RNA, 19 nt, Artificial Sequence
  Description of Artificial Sequence: Synthetic oligonucleotide
uuuugucagcagcaccuga

SEQ ID NO: 3002685 - RNA, 19 nt, Artificial Sequence
  Description of Artificial Sequence: Synthetic oligonucleotide
cucacagagagagacugag

SEQ ID NO: 3002686 - RNA, 19 nt, Artificial Sequence
  Description of Artificial Sequence: Synthetic oligonucleotide
uccaccuggauuucugaac

SEQ ID NO: 3002687 - RNA, 19 nt, Artificial Sequence
  Description of Artificial Sequence: Synthetic oligonucleotide
auggcauuguaaugaauaa

SEQ ID NO: 3002688 - RNA, 19 nt, Artificial Sequence
  Description of Artificial Sequence: Synthetic oligonucleotide
gagacugaguuaaucccag

SEQ ID NO: 3002689 - RNA, 19 nt, Artificial Sequence
  Description of Artificial Sequence: Synthetic oligonucleotide
acugaguuaaucccaggua

SEQ ID NO: 3002690 - RNA, 19 nt, Artificial Sequence
  Description of Artificial Sequence: Synthetic oligonucleotide
uucauaagcugguuucuua

SEQ ID NO: 3002691 - RNA, 19 nt, Artificial Sequence
  Description of Artificial Sequence: Synthetic oligonucleotide
cugaacuagaaaucuccuc

SEQ ID NO: 3002692 - RNA, 19 nt, Artificial Sequence
  Description of Artificial Sequence: Synthetic oligonucleotide
cugaguuaaucccagguaa

SEQ ID NO: 3002693 - RNA, 19 nt, Artificial Sequence
  Description of Artificial Sequence: Synthetic oligonucleotide
cauaagcugguuucuuaac

SEQ ID NO: 3002694 - RNA, 19 nt, Artificial Sequence
  Description of Artificial Sequence: Synthetic oligonucleotide
auuuucacuucaauuuuca

SEQ ID NO: 3002695 - RNA, 19 nt, Artificial Sequence
  Description of Artificial Sequence: Synthetic oligonucleotide
guuucuuaaccuccaccug

SEQ ID NO: 3002696 - RNA, 19 nt, Artificial Sequence
  Description of Artificial Sequence: Synthetic oligonucleotide
agcucacagagagagacug

SEQ ID NO: 3002697 - RNA, 19 nt, Artificial Sequence
  Description of Artificial Sequence: Synthetic oligonucleotide
ggauuucugaacuagaaau

SEQ ID NO: 3002698 - RNA, 19 nt, Artificial Sequence
  Description of Artificial Sequence: Synthetic oligonucleotide
ucccagguaacucuauuuu

SEQ ID NO: 3002699 - RNA, 19 nt, Artificial Sequence
  Description of Artificial Sequence: Synthetic oligonucleotide
guauuaacugauucuggaa

SEQ ID NO: 3002700 - RNA, 19 nt, Artificial Sequence
  Description of Artificial Sequence: Synthetic oligonucleotide
guuaaucccagguaacucu

SEQ ID NO: 3002701 - RNA, 19 nt, Artificial Sequence
  Description of Artificial Sequence: Synthetic oligonucleotide
aaaucuccucuaugagaca

SEQ ID NO: 3002702 - RNA, 19 nt, Artificial Sequence
  Description of Artificial Sequence: Synthetic oligonucleotide
auuuugcuguagucauuuc

SEQ ID NO: 3002703 - RNA, 19 nt, Artificial Sequence
  Description of Artificial Sequence: Synthetic oligonucleotide
uuaacugauucuggaagau

SEQ ID NO: 3002704 - RNA, 19 nt, Artificial Sequence
  Description of Artificial Sequence: Synthetic oligonucleotide
gagaccucaaucaauaaau

SEQ ID NO: 3002705 - RNA, 19 nt, Artificial Sequence
  Description of Artificial Sequence: Synthetic oligonucleotide
agaccucaaucaauaaauc

SEQ ID NO: 3002706 - RNA, 19 nt, Artificial Sequence
  Description of Artificial Sequence: Synthetic oligonucleotide
cucauucugauccuuuaca

SEQ ID NO: 3002707 - RNA, 19 nt, Artificial Sequence
  Description of Artificial Sequence: Synthetic oligonucleotide
ccucaaucaauaaaucaac

SEQ ID NO: 3002708 - RNA, 19 nt, Artificial Sequence
  Description of Artificial Sequence: Synthetic oligonucleotide
uuuaauucauaagcugguu

SEQ ID NO: 3002709 - RNA, 19 nt, Artificial Sequence
  Description of Artificial Sequence: Synthetic oligonucleotide
cagguaacucuauuuucac

SEQ ID NO: 3002710 - RNA, 19 nt, Artificial Sequence
  Description of Artificial Sequence: Synthetic oligonucleotide
agguaacucuauuuucacu

SEQ ID NO: 3002711 - RNA, 19 nt, Artificial Sequence
  Description of Artificial Sequence: Synthetic oligonucleotide
guaacucuauuuucacuuc

SEQ ID NO: 3002712 - RNA, 19 nt, Artificial Sequence
  Description of Artificial Sequence: Synthetic oligonucleotide
aaucccagguaacucuauu

SEQ ID NO: 3002713 - RNA, 19 nt, Artificial Sequence
  Description of Artificial Sequence: Synthetic oligonucleotide
gauucaggaauaaucggua

SEQ ID NO: 3002714 - RNA, 19 nt, Artificial Sequence
  Description of Artificial Sequence: Synthetic oligonucleotide
uguagucauuucuguauua

SEQ ID NO: 3002715 - RNA, 19 nt, Artificial Sequence
  Description of Artificial Sequence: Synthetic oligonucleotide
cuuuaauucauaagcuggu

SEQ ID NO: 3002716 - RNA, 19 nt, Artificial Sequence
  Description of Artificial Sequence: Synthetic oligonucleotide
agacugaguuaaucccagg

SEQ ID NO: 3002717 - RNA, 19 nt, Artificial Sequence
  Description of Artificial Sequence: Synthetic oligonucleotide
accuggauuucugaacuag

SEQ ID NO: 3002718 - RNA, 19 nt, Artificial Sequence
  Description of Artificial Sequence: Synthetic oligonucleotide
agagacugaguuaauccca

SEQ ID NO: 3002719 - RNA, 19 nt, Artificial Sequence
  Description of Artificial Sequence: Synthetic oligonucleotide
acucuauuuucacuucaau

SEQ ID NO: 3002720 - RNA, 19 nt, Artificial Sequence
  Description of Artificial Sequence: Synthetic oligonucleotide
aucaaccucagaaacacua

SEQ ID NO: 3002721 - RNA, 19 nt, Artificial Sequence
  Description of Artificial Sequence: Synthetic oligonucleotide
gacugaguuaaucccaggu

SEQ ID NO: 3002722 - RNA, 19 nt, Artificial Sequence
  Description of Artificial Sequence: Synthetic oligonucleotide
caaauuuugcuguagucau

SEQ ID NO: 3002723 - RNA, 19 nt, Artificial Sequence
  Description of Artificial Sequence: Synthetic oligonucleotide
uucucauucugauccuuua

SEQ ID NO: 3002724 - RNA, 19 nt, Artificial Sequence
  Description of Artificial Sequence: Synthetic oligonucleotide
aucgucccuugucugauga

SEQ ID NO: 3002725 - RNA, 19 nt, Artificial Sequence
  Description of Artificial Sequence: Synthetic oligonucleotide
gauccuuuacaaccuuuaa

SEQ ID NO: 3002726 - RNA, 19 nt, Artificial Sequence
  Description of Artificial Sequence: Synthetic oligonucleotide
ucacagagagagacugagu

SEQ ID NO: 3002727 - RNA, 19 nt, Artificial Sequence
  Description of Artificial Sequence: Synthetic oligonucleotide
aacucuauuuucacuucaa

SEQ ID NO: 3002728 - RNA, 19 nt, Artificial Sequence
  Description of Artificial Sequence: Synthetic oligonucleotide
ugguucacuuucaguacuc

SEQ ID NO: 3002729 - RNA, 19 nt, Artificial Sequence
  Description of Artificial Sequence: Synthetic oligonucleotide
gagacaucgucccuugucu

SEQ ID NO: 3002730 - RNA, 19 nt, Artificial Sequence
  Description of Artificial Sequence: Synthetic oligonucleotide
gagagagacugaguuaauc

SEQ ID NO: 3002731 - RNA, 19 nt, Artificial Sequence
  Description of Artificial Sequence: Synthetic oligonucleotide
cuggauuucugaacuagaa

SEQ ID NO: 3002732 - RNA, 19 nt, Artificial Sequence
  Description of Artificial Sequence: Synthetic oligonucleotide
gagguuucucauucugauc

SEQ ID NO: 3002733 - RNA, 19 nt, Artificial Sequence
  Description of Artificial Sequence: Synthetic oligonucleotide
gaacuagaaaucuccucua

SEQ ID NO: 3002734 - RNA, 19 nt, Artificial Sequence
  Description of Artificial Sequence: Synthetic oligonucleotide
gacaucgucccuugucuga

SEQ ID NO: 3002735 - RNA, 19 nt, Artificial Sequence
  Description of Artificial Sequence: Synthetic oligonucleotide
ccucuaugagacaucgucc

SEQ ID NO: 3002736 - RNA, 19 nt, Artificial Sequence
  Description of Artificial Sequence: Synthetic oligonucleotide
acagagagagacugaguua

SEQ ID NO: 3002737 - RNA, 19 nt, Artificial Sequence
  Description of Artificial Sequence: Synthetic oligonucleotide
uuguacaaauuuugcugua

SEQ ID NO: 3002738 - RNA, 19 nt, Artificial Sequence
  Description of Artificial Sequence: Synthetic oligonucleotide
guccaauggcauuguaaug

SEQ ID NO: 3002739 - RNA, 19 nt, Artificial Sequence
  Description of Artificial Sequence: Synthetic oligonucleotide
agacaucgucccuugucug

SEQ ID NO: 3002740 - RNA, 19 nt, Artificial Sequence
  Description of Artificial Sequence: Synthetic oligonucleotide
gguaacucuauuuucacuu

SEQ ID NO: 3002741 - RNA, 19 nt, Artificial Sequence
  Description of Artificial Sequence: Synthetic oligonucleotide
cacuucaauuuucagaggu

SEQ ID NO: 3002742 - RNA, 19 nt, Artificial Sequence
  Description of Artificial Sequence: Synthetic oligonucleotide
cagagagagacugaguuaa

SEQ ID NO: 3002743 - RNA, 19 nt, Artificial Sequence
  Description of Artificial Sequence: Synthetic oligonucleotide
gauuugguucacuuucagu

SEQ ID NO: 3002744 - RNA, 19 nt, Artificial Sequence
  Description of Artificial Sequence: Synthetic oligonucleotide
uggcauuguaaugaauaau

SEQ ID NO: 3002745 - RNA, 19 nt, Artificial Sequence
  Description of Artificial Sequence: Synthetic oligonucleotide
aucccagguaacucuauuu

SEQ ID NO: 3002746 - RNA, 19 nt, Artificial Sequence
  Description of Artificial Sequence: Synthetic oligonucleotide
ucugauccuuuacaaccuu

SEQ ID NO: 3002747 - RNA, 19 nt, Artificial Sequence
  Description of Artificial Sequence: Synthetic oligonucleotide
gucccuugucugaugaugc

SEQ ID NO: 3002748 - RNA, 19 nt, Artificial Sequence
  Description of Artificial Sequence: Synthetic oligonucleotide
ccuuuacaaccuuuaauuc

SEQ ID NO: 3002749 - RNA, 19 nt, Artificial Sequence
  Description of Artificial Sequence: Synthetic oligonucleotide
ggaauaaucgguacuucuc

SEQ ID NO: 3002750 - RNA, 19 nt, Artificial Sequence
  Description of Artificial Sequence: Synthetic oligonucleotide
ccuugucugaugaugcuug

SEQ ID NO: 3002751 - RNA, 19 nt, Artificial Sequence
  Description of Artificial Sequence: Synthetic oligonucleotide
guacaaauuuugcuguagu

SEQ ID NO: 3002752 - RNA, 19 nt, Artificial Sequence
  Description of Artificial Sequence: Synthetic oligonucleotide
guagucauuucuguauuaa

SEQ ID NO: 3002753 - RNA, 19 nt, Artificial Sequence
  Description of Artificial Sequence: Synthetic oligonucleotide
uggaagauucaggaauaau

SEQ ID NO: 3002754 - RNA, 19 nt, Artificial Sequence
  Description of Artificial Sequence: Synthetic oligonucleotide
uuuuguccaauggcauugu

SEQ ID NO: 3002755 - RNA, 19 nt, Artificial Sequence
  Description of Artificial Sequence: Synthetic oligonucleotide
uuuguccaauggcauugua

SEQ ID NO: 3002756 - RNA, 19 nt, Artificial Sequence
  Description of Artificial Sequence: Synthetic oligonucleotide
uaaucccagguaacucuau

SEQ ID NO: 3002757 - RNA, 19 nt, Artificial Sequence
  Description of Artificial Sequence: Synthetic oligonucleotide
acugauucuggaagauuca

SEQ ID NO: 3002758 - RNA, 19 nt, Artificial Sequence
  Description of Artificial Sequence: Synthetic oligonucleotide
aaucaaccucagaaacacu

SEQ ID NO: 3002759 - RNA, 19 nt, Artificial Sequence
  Description of Artificial Sequence: Synthetic oligonucleotide
cauuucuguauuaacugau

SEQ ID NO: 3002760 - RNA, 19 nt, Artificial Sequence
  Description of Artificial Sequence: Synthetic oligonucleotide
aaauuuugcuguagucauu

SEQ ID NO: 3002761 - RNA, 19 nt, Artificial Sequence
  Description of Artificial Sequence: Synthetic oligonucleotide
cucuauuuucacuucaauu

SEQ ID NO: 3002762 - RNA, 19 nt, Artificial Sequence
  Description of Artificial Sequence: Synthetic oligonucleotide
cagagguuucucauucuga

SEQ ID NO: 3002763 - RNA, 19 nt, Artificial Sequence
  Description of Artificial Sequence: Synthetic oligonucleotide
gucagcagcaccugaggaa

SEQ ID NO: 3002764 - RNA, 19 nt, Artificial Sequence
  Description of Artificial Sequence: Synthetic oligonucleotide
ucgguacuucucagagacc

SEQ ID NO: 3002765 - RNA, 19 nt, Artificial Sequence
  Description of Artificial Sequence: Synthetic oligonucleotide
ccagguaacucuauuuuca

SEQ ID NO: 3002766 - RNA, 19 nt, Artificial Sequence
  Description of Artificial Sequence: Synthetic oligonucleotide
auuucuguauuaacugauu

SEQ ID NO: 3002767 - RNA, 19 nt, Artificial Sequence
  Description of Artificial Sequence: Synthetic oligonucleotide
aggugauuugguucacuuu

SEQ ID NO: 3002768 - RNA, 19 nt, Artificial Sequence
  Description of Artificial Sequence: Synthetic oligonucleotide
gcauuguaaugaauaauuc

SEQ ID NO: 3002769 - RNA, 19 nt, Artificial Sequence
  Description of Artificial Sequence: Synthetic oligonucleotide
ccugaggaaggugauuugg

SEQ ID NO: 3002770 - RNA, 19 nt, Artificial Sequence
  Description of Artificial Sequence: Synthetic oligonucleotide
augaauaauucuagacuua

SEQ ID NO: 3002771 - RNA, 19 nt, Artificial Sequence
  Description of Artificial Sequence: Synthetic oligonucleotide
ucccuugucugaugaugcu

SEQ ID NO: 3002772 - RNA, 19 nt, Artificial Sequence
  Description of Artificial Sequence: Synthetic oligonucleotide
uaacugauucuggaagauu

SEQ ID NO: 3002773 - RNA, 19 nt, Artificial Sequence
  Description of Artificial Sequence: Synthetic oligonucleotide
cacagagagagacugaguu

SEQ ID NO: 3002774 - RNA, 19 nt, Artificial Sequence
  Description of Artificial Sequence: Synthetic oligonucleotide
cagcaccugaggaagguga

SEQ ID NO: 3002775 - RNA, 19 nt, Artificial Sequence
  Description of Artificial Sequence: Synthetic oligonucleotide
ucuuaaccuccaccuggau

SEQ ID NO: 3002776 - RNA, 19 nt, Artificial Sequence
  Description of Artificial Sequence: Synthetic oligonucleotide
gaguuaaucccagguaacu

SEQ ID NO: 3002777 - RNA, 19 nt, Artificial Sequence
  Description of Artificial Sequence: Synthetic oligonucleotide
cugguuucuuaaccuccac

SEQ ID NO: 3002778 - RNA, 19 nt, Artificial Sequence
  Description of Artificial Sequence: Synthetic oligonucleotide
aagcucacagagagagacu

SEQ ID NO: 3002779 - RNA, 19 nt, Artificial Sequence
  Description of Artificial Sequence: Synthetic oligonucleotide
ggcauuguaaugaauaauu

SEQ ID NO: 3002780 - RNA, 19 nt, Artificial Sequence
  Description of Artificial Sequence: Synthetic oligonucleotide
acuucaauuuucagagguu

SEQ ID NO: 3002781 - RNA, 19 nt, Artificial Sequence
  Description of Artificial Sequence: Synthetic oligonucleotide
aucuccucuaugagacauc

SEQ ID NO: 3002782 - RNA, 19 nt, Artificial Sequence
  Description of Artificial Sequence: Synthetic oligonucleotide
caggaauaaucgguacuuc

SEQ ID NO: 3002783 - RNA, 19 nt, Artificial Sequence
  Description of Artificial Sequence: Synthetic oligonucleotide
gcuguagucauuucuguau

SEQ ID NO: 3002784 - RNA, 19 nt, Artificial Sequence
  Description of Artificial Sequence: Synthetic oligonucleotide
cagcagcaccugaggaagg

SEQ ID NO: 3002785 - RNA, 19 nt, Artificial Sequence
  Description of Artificial Sequence: Synthetic oligonucleotide
cuaagcucacagagagaga

SEQ ID NO: 3002786 - RNA, 19 nt, Artificial Sequence
  Description of Artificial Sequence: Synthetic oligonucleotide
cccagguaacucuauuuuc

SEQ ID NO: 3002787 - RNA, 19 nt, Artificial Sequence
  Description of Artificial Sequence: Synthetic oligonucleotide
cuucaauuuucagagguuu

SEQ ID NO: 3002788 - RNA, 19 nt, Artificial Sequence
  Description of Artificial Sequence: Synthetic oligonucleotide
cugaggaaggugauuuggu

SEQ ID NO: 3002789 - RNA, 19 nt, Artificial Sequence
  Description of Artificial Sequence: Synthetic oligonucleotide
acaucgucccuugucugau

SEQ ID NO: 3002790 - RNA, 19 nt, Artificial Sequence
  Description of Artificial Sequence: Synthetic oligonucleotide
aaccuccaccuggauuucu

SEQ ID NO: 3002791 - RNA, 19 nt, Artificial Sequence
  Description of Artificial Sequence: Synthetic oligonucleotide
accuccaccuggauuucug

SEQ ID NO: 3002792 - RNA, 19 nt, Artificial Sequence
  Description of Artificial Sequence: Synthetic oligonucleotide
caucgucccuugucugaug

SEQ ID NO: 3002793 - RNA, 19 nt, Artificial Sequence
  Description of Artificial Sequence: Synthetic oligonucleotide
cuuaaccuccaccuggauu

SEQ ID NO: 3002794 - RNA, 19 nt, Artificial Sequence
  Description of Artificial Sequence: Synthetic oligonucleotide
gaauaauucuagacuuauu

SEQ ID NO: 3002795 - RNA, 19 nt, Artificial Sequence
  Description of Artificial Sequence: Synthetic oligonucleotide
gucugaugaugcuuguuuu

SEQ ID NO: 3002796 - RNA, 19 nt, Artificial Sequence
  Description of Artificial Sequence: Synthetic oligonucleotide
cacuaagcucacagagaga

SEQ ID NO: 3002797 - RNA, 19 nt, Artificial Sequence
  Description of Artificial Sequence: Synthetic oligonucleotide
cuccaccuggauuucugaa

SEQ ID NO: 3002798 - RNA, 19 nt, Artificial Sequence
  Description of Artificial Sequence: Synthetic oligonucleotide
cagagaccucaaucaauaa

SEQ ID NO: 3002799 - RNA, 19 nt, Artificial Sequence
  Description of Artificial Sequence: Synthetic oligonucleotide
guucacuuucaguacucuu

SEQ ID NO: 3002800 - RNA, 19 nt, Artificial Sequence
  Description of Artificial Sequence: Synthetic oligonucleotide
ccuggauuucugaacuaga

SEQ ID NO: 3002801 - RNA, 19 nt, Artificial Sequence
  Description of Artificial Sequence: Synthetic oligonucleotide
gaaggugauuugguucacu

SEQ ID NO: 3002802 - RNA, 19 nt, Artificial Sequence
  Description of Artificial Sequence: Synthetic oligonucleotide
ucgucccuugucugaugau

SEQ ID NO: 3002803 - RNA, 19 nt, Artificial Sequence
  Description of Artificial Sequence: Synthetic oligonucleotide
uaaccuccaccuggauuuc

SEQ ID NO: 3002804 - RNA, 19 nt, Artificial Sequence
  Description of Artificial Sequence: Synthetic oligonucleotide
agcaccugaggaaggugau

SEQ ID NO: 3002805 - RNA, 19 nt, Artificial Sequence
  Description of Artificial Sequence: Synthetic oligonucleotide
cuugucugaugaugcuugu

SEQ ID NO: 3002806 - RNA, 19 nt, Artificial Sequence
  Description of Artificial Sequence: Synthetic oligonucleotide
cuguagucauuucuguauu

SEQ ID NO: 3002807 - RNA, 19 nt, Artificial Sequence
  Description of Artificial Sequence: Synthetic oligonucleotide
agagagagacugaguuaau

SEQ ID NO: 3002808 - RNA, 19 nt, Artificial Sequence
  Description of Artificial Sequence: Synthetic oligonucleotide
cuaugagacaucgucccuu

SEQ ID NO: 3002809 - RNA, 19 nt, Artificial Sequence
  Description of Artificial Sequence: Synthetic oligonucleotide
ccaauggcauuguaaugaa

SEQ ID NO: 3002810 - RNA, 19 nt, Artificial Sequence
  Description of Artificial Sequence: Synthetic oligonucleotide
gguuucucauucugauccu

SEQ ID NO: 3002811 - RNA, 19 nt, Artificial Sequence
  Description of Artificial Sequence: Synthetic oligonucleotide
cacuuucaguacucuuucu

SEQ ID NO: 3002812 - RNA, 19 nt, Artificial Sequence
  Description of Artificial Sequence: Synthetic oligonucleotide
caccugaggaaggugauuu

SEQ ID NO: 3002813 - RNA, 19 nt, Artificial Sequence
  Description of Artificial Sequence: Synthetic oligonucleotide
cugauccuuuacaaccuuu

SEQ ID NO: 3002814 - RNA, 19 nt, Artificial Sequence
  Description of Artificial Sequence: Synthetic oligonucleotide
caauggcauuguaaugaau

SEQ ID NO: 3002815 - RNA, 19 nt, Artificial Sequence
  Description of Artificial Sequence: Synthetic oligonucleotide
gguacuucucagagaccuc

SEQ ID NO: 3002816 - RNA, 19 nt, Artificial Sequence
  Description of Artificial Sequence: Synthetic oligonucleotide
cagaaacacuaagcucaca

SEQ ID NO: 3002817 - RNA, 19 nt, Artificial Sequence
  Description of Artificial Sequence: Synthetic oligonucleotide
caccuggauuucugaacua

SEQ ID NO: 3002818 - RNA, 19 nt, Artificial Sequence
  Description of Artificial Sequence: Synthetic oligonucleotide
gguucacuuucaguacucu

SEQ ID NO: 3002819 - RNA, 19 nt, Artificial Sequence
  Description of Artificial Sequence: Synthetic oligonucleotide
ccuccaccuggauuucuga

SEQ ID NO: 3002820 - RNA, 19 nt, Artificial Sequence
  Description of Artificial Sequence: Synthetic oligonucleotide
gcucacagagagagacuga

SEQ ID NO: 3002821 - RNA, 19 nt, Artificial Sequence
  Description of Artificial Sequence: Synthetic oligonucleotide
cgguacuucucagagaccu

SEQ ID NO: 3002822 - RNA, 19 nt, Artificial Sequence
  Description of Artificial Sequence: Synthetic oligonucleotide
cuccucuaugagacaucgu

SEQ ID NO: 3002823 - RNA, 19 nt, Artificial Sequence
  Description of Artificial Sequence: Synthetic oligonucleotide
cccuugucugaugaugcuu

SEQ ID NO: 3002824 - RNA, 19 nt, Artificial Sequence
  Description of Artificial Sequence: Synthetic oligonucleotide
gcaccugaggaaggugauu

SEQ ID NO: 3002825 - RNA, 19 nt, Artificial Sequence
  Description of Artificial Sequence: Synthetic oligonucleotide
auuaauaacaaucaggucu

SEQ ID NO: 3002826 - RNA, 19 nt, Artificial Sequence
  Description of Artificial Sequence: Synthetic oligonucleotide
uucauuaauaacaaucagg

SEQ ID NO: 3002827 - RNA, 19 nt, Artificial Sequence
  Description of Artificial Sequence: Synthetic oligonucleotide
ucauuaauaacaaucaggu

SEQ ID NO: 3002828 - RNA, 19 nt, Artificial Sequence
  Description of Artificial Sequence: Synthetic oligonucleotide
ucuucauuaauaacaauca

SEQ ID NO: 3002829 - RNA, 19 nt, Artificial Sequence
  Description of Artificial Sequence: Synthetic oligonucleotide
ugaaauaggaagcaaacuc

SEQ ID NO: 3002830 - RNA, 19 nt, Artificial Sequence
  Description of Artificial Sequence: Synthetic oligonucleotide
aaacaugugaaucugguau

SEQ ID NO: 3002831 - RNA, 19 nt, Artificial Sequence
  Description of Artificial Sequence: Synthetic oligonucleotide
uuaauaacaaucaggucug

SEQ ID NO: 3002832 - RNA, 19 nt, Artificial Sequence
  Description of Artificial Sequence: Synthetic oligonucleotide
uguuuuacgaucuucauua

SEQ ID NO: 3002833 - RNA, 19 nt, Artificial Sequence
  Description of Artificial Sequence: Synthetic oligonucleotide
ugucuguugaaauaggaag

SEQ ID NO: 3002834 - RNA, 19 nt, Artificial Sequence
  Description of Artificial Sequence: Synthetic oligonucleotide
uucaucauaagccaccucu

SEQ ID NO: 3002835 - RNA, 19 nt, Artificial Sequence
  Description of Artificial Sequence: Synthetic oligonucleotide
uucuguaauaaacauguga

SEQ ID NO: 3002836 - RNA, 19 nt, Artificial Sequence
  Description of Artificial Sequence: Synthetic oligonucleotide
uuuacgaucuucauuaaua

SEQ ID NO: 3002837 - RNA, 19 nt, Artificial Sequence
  Description of Artificial Sequence: Synthetic oligonucleotide
ugugaaucugguauaacug

SEQ ID NO: 3002838 - RNA, 19 nt, Artificial Sequence
  Description of Artificial Sequence: Synthetic oligonucleotide
aucuucauuaauaacaauc

SEQ ID NO: 3002839 - RNA, 19 nt, Artificial Sequence
  Description of Artificial Sequence: Synthetic oligonucleotide
ugugaaaucucuugcaaug

SEQ ID NO: 3002840 - RNA, 19 nt, Artificial Sequence
  Description of Artificial Sequence: Synthetic oligonucleotide
auaacaaucaggucuguga

SEQ ID NO: 3002841 - RNA, 19 nt, Artificial Sequence
  Description of Artificial Sequence: Synthetic oligonucleotide
ucugguauaacuguugaga

SEQ ID NO: 3002842 - RNA, 19 nt, Artificial Sequence
  Description of Artificial Sequence: Synthetic oligonucleotide
aucaccaagagcuucucuc

SEQ ID NO: 3002843 - RNA, 19 nt, Artificial Sequence
  Description of Artificial Sequence: Synthetic oligonucleotide
agccuuaucaccaagagcu

SEQ ID NO: 3002844 - RNA, 19 nt, Artificial Sequence
  Description of Artificial Sequence: Synthetic oligonucleotide
uguugaaauaggaagcaaa

SEQ ID NO: 3002845 - RNA, 19 nt, Artificial Sequence
  Description of Artificial Sequence: Synthetic oligonucleotide
aauaaacaugugaaucugg

SEQ ID NO: 3002846 - RNA, 19 nt, Artificial Sequence
  Description of Artificial Sequence: Synthetic oligonucleotide
ugaugagaaucuuaggaga

SEQ ID NO: 3002847 - RNA, 19 nt, Artificial Sequence
  Description of Artificial Sequence: Synthetic oligonucleotide
aagcaaacucauccguggc

SEQ ID NO: 3002848 - RNA, 19 nt, Artificial Sequence
  Description of Artificial Sequence: Synthetic oligonucleotide
cuaacuuuuccuuccgccg

SEQ ID NO: 3002849 - RNA, 19 nt, Artificial Sequence
  Description of Artificial Sequence: Synthetic oligonucleotide
gugaugagaaucuuaggag

SEQ ID NO: 3002850 - RNA, 19 nt, Artificial Sequence
  Description of Artificial Sequence: Synthetic oligonucleotide
aaucuuaggagaugucugu

SEQ ID NO: 3002851 - RNA, 19 nt, Artificial Sequence
  Description of Artificial Sequence: Synthetic oligonucleotide
aaucugguauaacuguuga

SEQ ID NO: 3002852 - RNA, 19 nt, Artificial Sequence
  Description of Artificial Sequence: Synthetic oligonucleotide
uccucuucuguaauaaaca

SEQ ID NO: 3002853 - RNA, 19 nt, Artificial Sequence
  Description of Artificial Sequence: Synthetic oligonucleotide
aaucaggucugugaaaucu

SEQ ID NO: 3002854 - RNA, 19 nt, Artificial Sequence
  Description of Artificial Sequence: Synthetic oligonucleotide
uaggaagcaaacucauccg

SEQ ID NO: 3002855 - RNA, 19 nt, Artificial Sequence
  Description of Artificial Sequence: Synthetic oligonucleotide
augugaaucugguauaacu

SEQ ID NO: 3002856 - RNA, 19 nt, Artificial Sequence
  Description of Artificial Sequence: Synthetic oligonucleotide
uccgaugucgugaugagaa

SEQ ID NO: 3002857 - RNA, 19 nt, Artificial Sequence
  Description of Artificial Sequence: Synthetic oligonucleotide
acgaucuucauuaauaaca

SEQ ID NO: 3002858 - RNA, 19 nt, Artificial Sequence
  Description of Artificial Sequence: Synthetic oligonucleotide
aaucucuugcaaugcacug

SEQ ID NO: 3002859 - RNA, 19 nt, Artificial Sequence
  Description of Artificial Sequence: Synthetic oligonucleotide
uaauaaacaugugaaucug

SEQ ID NO: 3002860 - RNA, 19 nt, Artificial Sequence
  Description of Artificial Sequence: Synthetic oligonucleotide
gaaauaggaagcaaacuca

SEQ ID NO: 3002861 - RNA, 19 nt, Artificial Sequence
  Description of Artificial Sequence: Synthetic oligonucleotide
cugguauaacuguugagag

SEQ ID NO: 3002862 - RNA, 19 nt, Artificial Sequence
  Description of Artificial Sequence: Synthetic oligonucleotide
ucucuugcaaugcacugug

SEQ ID NO: 3002863 - RNA, 19 nt, Artificial Sequence
  Description of Artificial Sequence: Synthetic oligonucleotide
ucugucuguugaaauagga

SEQ ID NO: 3002864 - RNA, 19 nt, Artificial Sequence
  Description of Artificial Sequence: Synthetic oligonucleotide
uugucgauggucuugggaa

SEQ ID NO: 3002865 - RNA, 19 nt, Artificial Sequence
  Description of Artificial Sequence: Synthetic oligonucleotide
uaacaaucaggucugugaa

SEQ ID NO: 3002866 - RNA, 19 nt, Artificial Sequence
  Description of Artificial Sequence: Synthetic oligonucleotide
ugucugucuguugaaauag

SEQ ID NO: 3002867 - RNA, 19 nt, Artificial Sequence
  Description of Artificial Sequence: Synthetic oligonucleotide
acuguugagagcugcucac

SEQ ID NO: 3002868 - RNA, 19 nt, Artificial Sequence
  Description of Artificial Sequence: Synthetic oligonucleotide
agagucguacuguucuccc

SEQ ID NO: 3002869 - RNA, 19 nt, Artificial Sequence
  Description of Artificial Sequence: Synthetic oligonucleotide
aacuguugagagcugcuca

SEQ ID NO: 3002870 - RNA, 19 nt, Artificial Sequence
  Description of Artificial Sequence: Synthetic oligonucleotide
ugaaaucucuugcaaugca

SEQ ID NO: 3002871 - RNA, 19 nt, Artificial Sequence
  Description of Artificial Sequence: Synthetic oligonucleotide
cuucauuaauaacaaucag

SEQ ID NO: 3002872 - RNA, 19 nt, Artificial Sequence
  Description of Artificial Sequence: Synthetic oligonucleotide
uguugagagcugcucacag

SEQ ID NO: 3002873 - RNA, 19 nt, Artificial Sequence
  Description of Artificial Sequence: Synthetic oligonucleotide
uaacuuuuccuuccgccgc

SEQ ID NO: 3002874 - RNA, 19 nt, Artificial Sequence
  Description of Artificial Sequence: Synthetic oligonucleotide
ugugguuucaucguacacu

SEQ ID NO: 3002875 - RNA, 19 nt, Artificial Sequence
  Description of Artificial Sequence: Synthetic oligonucleotide
uuacgaucuucauuaauaa

SEQ ID NO: 3002876 - RNA, 19 nt, Artificial Sequence
  Description of Artificial Sequence: Synthetic oligonucleotide
ucugugaaaucucuugcaa

SEQ ID NO: 3002877 - RNA, 19 nt, Artificial Sequence
  Description of Artificial Sequence: Synthetic oligonucleotide
guaauaaacaugugaaucu

SEQ ID NO: 3002878 - RNA, 19 nt, Artificial Sequence
  Description of Artificial Sequence: Synthetic oligonucleotide
ugagaaucuuaggagaugu

SEQ ID NO: 3002879 - RNA, 19 nt, Artificial Sequence
  Description of Artificial Sequence: Synthetic oligonucleotide
uauaacuguugagagcugc

SEQ ID NO: 3002880 - RNA, 19 nt, Artificial Sequence
  Description of Artificial Sequence: Synthetic oligonucleotide
gaaucuuaggagaugucug

SEQ ID NO: 3002881 - RNA, 19 nt, Artificial Sequence
  Description of Artificial Sequence: Synthetic oligonucleotide
ugauugucgauggucuugg

SEQ ID NO: 3002882 - RNA, 19 nt, Artificial Sequence
  Description of Artificial Sequence: Synthetic oligonucleotide
ucuguugaaauaggaagca

SEQ ID NO: 3002883 - RNA, 19 nt, Artificial Sequence
  Description of Artificial Sequence: Synthetic oligonucleotide
uuugguggagccuuaucac

SEQ ID NO: 3002884 - RNA, 19 nt, Artificial Sequence
  Description of Artificial Sequence: Synthetic oligonucleotide
aauaggaagcaaacucauc

SEQ ID NO: 3002885 - RNA, 19 nt, Artificial Sequence
  Description of Artificial Sequence: Synthetic oligonucleotide
aacuggcuuugguggagcc

SEQ ID NO: 3002886 - RNA, 19 nt, Artificial Sequence
  Description of Artificial Sequence: Synthetic oligonucleotide
aauaacaaucaggucugug

SEQ ID NO: 3002887 - RNA, 19 nt, Artificial Sequence
  Description of Artificial Sequence: Synthetic oligonucleotide
agaaucuuaggagaugucu

SEQ ID NO: 3002888 - RNA, 19 nt, Artificial Sequence
  Description of Artificial Sequence: Synthetic oligonucleotide
uagucugccuaacuuuucc

SEQ ID NO: 3002889 - RNA, 19 nt, Artificial Sequence
  Description of Artificial Sequence: Synthetic oligonucleotide
guugaaauaggaagcaaac

SEQ ID NO: 3002890 - RNA, 19 nt, Artificial Sequence
  Description of Artificial Sequence: Synthetic oligonucleotide
uuucaucguacacucgcug

SEQ ID NO: 3002891 - RNA, 19 nt, Artificial Sequence
  Description of Artificial Sequence: Synthetic oligonucleotide
uaagccaccucuucaucag

SEQ ID NO: 3002892 - RNA, 19 nt, Artificial Sequence
  Description of Artificial Sequence: Synthetic oligonucleotide
aaaucucuugcaaugcacu

SEQ ID NO: 3002893 - RNA, 19 nt, Artificial Sequence
  Description of Artificial Sequence: Synthetic oligonucleotide
ugaggucuguccgaugucg

SEQ ID NO: 3002894 - RNA, 19 nt, Artificial Sequence
  Description of Artificial Sequence: Synthetic oligonucleotide
auaagccaccucuucauca

SEQ ID NO: 3002895 - RNA, 19 nt, Artificial Sequence
  Description of Artificial Sequence: Synthetic oligonucleotide
aucauaagccaccucuuca

SEQ ID NO: 3002896 - RNA, 19 nt, Artificial Sequence
  Description of Artificial Sequence: Synthetic oligonucleotide
gucgugaugagaaucuuag

SEQ ID NO: 3002897 - RNA, 19 nt, Artificial Sequence
  Description of Artificial Sequence: Synthetic oligonucleotide
ugguauaacuguugagagc

SEQ ID NO: 3002898 - RNA, 19 nt, Artificial Sequence
  Description of Artificial Sequence: Synthetic oligonucleotide
aacaugugaaucugguaua

SEQ ID NO: 3002899 - RNA, 19 nt, Artificial Sequence
  Description of Artificial Sequence: Synthetic oligonucleotide
aggucugugaaaucucuug

SEQ ID NO: 3002900 - RNA, 19 nt, Artificial Sequence
  Description of Artificial Sequence: Synthetic oligonucleotide
uugaaauaggaagcaaacu

SEQ ID NO: 3002901 - RNA, 19 nt, Artificial Sequence
  Description of Artificial Sequence: Synthetic oligonucleotide
gagagcugcucacagaguc

SEQ ID NO: 3002902 - RNA, 19 nt, Artificial Sequence
  Description of Artificial Sequence: Synthetic oligonucleotide
ucaucagugggguccacug

SEQ ID NO: 3002903 - RNA, 19 nt, Artificial Sequence
  Description of Artificial Sequence: Synthetic oligonucleotide
aagagcuucucucucuuuu

SEQ ID NO: 3002904 - RNA, 19 nt, Artificial Sequence
  Description of Artificial Sequence: Synthetic oligonucleotide
gucuguugaaauaggaagc

SEQ ID NO: 3002905 - RNA, 19 nt, Artificial Sequence
  Description of Artificial Sequence: Synthetic oligonucleotide
gguuucaucguacacucgc

SEQ ID NO: 3002906 - RNA, 19 nt, Artificial Sequence
  Description of Artificial Sequence: Synthetic oligonucleotide
ugcacugugggauaauuuu

SEQ ID NO: 3002907 - RNA, 19 nt, Artificial Sequence
  Description of Artificial Sequence: Synthetic oligonucleotide
uuuuacgaucuucauuaau

SEQ ID NO: 3002908 - RNA, 19 nt, Artificial Sequence
  Description of Artificial Sequence: Synthetic oligonucleotide
ucuuagucugccuaacuuu

SEQ ID NO: 3002909 - RNA, 19 nt, Artificial Sequence
  Description of Artificial Sequence: Synthetic oligonucleotide
uucaucguacacucgcuga

SEQ ID NO: 3002910 - RNA, 19 nt, Artificial Sequence
  Description of Artificial Sequence: Synthetic oligonucleotide
uucuuagucugccuaacuu

SEQ ID NO: 3002911 - RNA, 19 nt, Artificial Sequence
  Description of Artificial Sequence: Synthetic oligonucleotide
cuuugguggagccuuauca

SEQ ID NO: 3002912 - RNA, 19 nt, Artificial Sequence
  Description of Artificial Sequence: Synthetic oligonucleotide
ugguggagccuuaucacca

SEQ ID NO: 3002913 - RNA, 19 nt, Artificial Sequence
  Description of Artificial Sequence: Synthetic oligonucleotide
uugguggagccuuaucacc

SEQ ID NO: 3002914 - RNA, 19 nt, Artificial Sequence
  Description of Artificial Sequence: Synthetic oligonucleotide
auaaacaugugaaucuggu

SEQ ID NO: 3002915 - RNA, 19 nt, Artificial Sequence
  Description of Artificial Sequence: Synthetic oligonucleotide
gaaucugguauaacuguug

SEQ ID NO: 3002916 - RNA, 19 nt, Artificial Sequence
  Description of Artificial Sequence: Synthetic oligonucleotide
ucaggucugugaaaucucu

SEQ ID NO: 3002917 - RNA, 19 nt, Artificial Sequence
  Description of Artificial Sequence: Synthetic oligonucleotide
ucauaagccaccucuucau

SEQ ID NO: 3002918 - RNA, 19 nt, Artificial Sequence
  Description of Artificial Sequence: Synthetic oligonucleotide
uuucuuagucugccuaacu

SEQ ID NO: 3002919 - RNA, 19 nt, Artificial Sequence
  Description of Artificial Sequence: Synthetic oligonucleotide
cauuaauaacaaucagguc

SEQ ID NO: 3002920 - RNA, 19 nt, Artificial Sequence
  Description of Artificial Sequence: Synthetic oligonucleotide
gaaaucucuugcaaugcac

SEQ ID NO: 3002921 - RNA, 19 nt, Artificial Sequence
  Description of Artificial Sequence: Synthetic oligonucleotide
acucgcugauugucgaugg

SEQ ID NO: 3002922 - RNA, 19 nt, Artificial Sequence
  Description of Artificial Sequence: Synthetic oligonucleotide
ucagugggguccacugugg

SEQ ID NO: 3002923 - RNA, 19 nt, Artificial Sequence
  Description of Artificial Sequence: Synthetic oligonucleotide
ugaaucugguauaacuguu

SEQ ID NO: 3002924 - RNA, 19 nt, Artificial Sequence
  Description of Artificial Sequence: Synthetic oligonucleotide
aucguacacucgcugauug

SEQ ID NO: 3002925 - RNA, 19 nt, Artificial Sequence
  Description of Artificial Sequence: Synthetic oligonucleotide
aucagugggguccacugug

SEQ ID NO: 3002926 - RNA, 19 nt, Artificial Sequence
  Description of Artificial Sequence: Synthetic oligonucleotide
ucugccuaacuuuuccuuc

SEQ ID NO: 3002927 - RNA, 19 nt, Artificial Sequence
  Description of Artificial Sequence: Synthetic oligonucleotide
ucgugaugagaaucuuagg

SEQ ID NO: 3002928 - RNA, 19 nt, Artificial Sequence
  Description of Artificial Sequence: Synthetic oligonucleotide
acaaucaggucugugaaau

SEQ ID NO: 3002929 - RNA, 19 nt, Artificial Sequence
  Description of Artificial Sequence: Synthetic oligonucleotide
auugucgauggucuuggga

SEQ ID NO: 3002930 - RNA, 19 nt, Artificial Sequence
  Description of Artificial Sequence: Synthetic oligonucleotide
aacaaucaggucugugaaa

SEQ ID NO: 3002931 - RNA, 19 nt, Artificial Sequence
  Description of Artificial Sequence: Synthetic oligonucleotide
uccacugugguuucaucgu

SEQ ID NO: 3002932 - RNA, 19 nt, Artificial Sequence
  Description of Artificial Sequence: Synthetic oligonucleotide
gugguuucaucguacacuc

SEQ ID NO: 3002933 - RNA, 19 nt, Artificial Sequence
  Description of Artificial Sequence: Synthetic oligonucleotide
ugccuaacuuuuccuuccg

SEQ ID NO: 3002934 - RNA, 19 nt, Artificial Sequence
  Description of Artificial Sequence: Synthetic oligonucleotide
gagccuuaucaccaagagc

SEQ ID NO: 3002935 - RNA, 19 nt, Artificial Sequence
  Description of Artificial Sequence: Synthetic oligonucleotide
uucagagccaguccucuuc

SEQ ID NO: 3002936 - RNA, 19 nt, Artificial Sequence
  Description of Artificial Sequence: Synthetic oligonucleotide
cguggcuucaucauaagcc

SEQ ID NO: 3002937 - RNA, 19 nt, Artificial Sequence
  Description of Artificial Sequence: Synthetic oligonucleotide
uaaacaugugaaucuggua

SEQ ID NO: 3002938 - RNA, 19 nt, Artificial Sequence
  Description of Artificial Sequence: Synthetic oligonucleotide
aggaagcaaacucauccgu

SEQ ID NO: 3002939 - RNA, 19 nt, Artificial Sequence
  Description of Artificial Sequence: Synthetic oligonucleotide
cugccuaacuuuuccuucc

SEQ ID NO: 3002940 - RNA, 19 nt, Artificial Sequence
  Description of Artificial Sequence: Synthetic oligonucleotide
aucugguauaacuguugag

SEQ ID NO: 3002941 - RNA, 19 nt, Artificial Sequence
  Description of Artificial Sequence: Synthetic oligonucleotide
ucucccgugaggucugucc

SEQ ID NO: 3002942 - RNA, 19 nt, Artificial Sequence
  Description of Artificial Sequence: Synthetic oligonucleotide
aacuuuuccuuccgccgcu

SEQ ID NO: 3002943 - RNA, 19 nt, Artificial Sequence
  Description of Artificial Sequence: Synthetic oligonucleotide
uggagccuuaucaccaaga

SEQ ID NO: 3002944 - RNA, 19 nt, Artificial Sequence
  Description of Artificial Sequence: Synthetic oligonucleotide
uacuguucucccgugaggu

SEQ ID NO: 3002945 - RNA, 19 nt, Artificial Sequence
  Description of Artificial Sequence: Synthetic oligonucleotide
ugcucacagagucguacug

SEQ ID NO: 3002946 - RNA, 19 nt, Artificial Sequence
  Description of Artificial Sequence: Synthetic oligonucleotide
gagucguacuguucucccg

SEQ ID NO: 3002947 - RNA, 19 nt, Artificial Sequence
  Description of Artificial Sequence: Synthetic oligonucleotide
agucguacuguucucccgu

SEQ ID NO: 3002948 - RNA, 19 nt, Artificial Sequence
  Description of Artificial Sequence: Synthetic oligonucleotide
ucaucguacacucgcugau

SEQ ID NO: 3002949 - RNA, 19 nt, Artificial Sequence
  Description of Artificial Sequence: Synthetic oligonucleotide
uuuucagagccaguccucu

SEQ ID NO: 3002950 - RNA, 19 nt, Artificial Sequence
  Description of Artificial Sequence: Synthetic oligonucleotide
uugcaaugcacugugggau

SEQ ID NO: 3002951 - RNA, 19 nt, Artificial Sequence
  Description of Artificial Sequence: Synthetic oligonucleotide
uuaggagaugucugucugu

SEQ ID NO: 3002952 - RNA, 19 nt, Artificial Sequence
  Description of Artificial Sequence: Synthetic oligonucleotide
gguauaacuguugagagcu

SEQ ID NO: 3002953 - RNA, 19 nt, Artificial Sequence
  Description of Artificial Sequence: Synthetic oligonucleotide
agcaaacucauccguggcu

SEQ ID NO: 3002954 - RNA, 19 nt, Artificial Sequence
  Description of Artificial Sequence: Synthetic oligonucleotide
ucagagccaguccucuucu

SEQ ID NO: 3002955 - RNA, 19 nt, Artificial Sequence
  Description of Artificial Sequence: Synthetic oligonucleotide
uuuucuuagucugccuaac

SEQ ID NO: 3002956 - RNA, 19 nt, Artificial Sequence
  Description of Artificial Sequence: Synthetic oligonucleotide
acagagucguacuguucuc

SEQ ID NO: 3002957 - RNA, 19 nt, Artificial Sequence
  Description of Artificial Sequence: Synthetic oligonucleotide
uacacucgcugauugucga

SEQ ID NO: 3002958 - RNA, 19 nt, Artificial Sequence
  Description of Artificial Sequence: Synthetic oligonucleotide
guacuguucucccgugagg

SEQ ID NO: 3002959 - RNA, 19 nt, Artificial Sequence
  Description of Artificial Sequence: Synthetic oligonucleotide
uuuuccuuccgccgcugcu

SEQ ID NO: 3002960 - RNA, 19 nt, Artificial Sequence
  Description of Artificial Sequence: Synthetic oligonucleotide
ucaucauaagccaccucuu

SEQ ID NO: 3002961 - RNA, 19 nt, Artificial Sequence
  Description of Artificial Sequence: Synthetic oligonucleotide
acugugguuucaucguaca

SEQ ID NO: 3002962 - RNA, 19 nt, Artificial Sequence
  Description of Artificial Sequence: Synthetic oligonucleotide
uguccgaugucgugaugag

SEQ ID NO: 3002963 - RNA, 19 nt, Artificial Sequence
  Description of Artificial Sequence: Synthetic oligonucleotide
uggucuugggaacuggcuu

SEQ ID NO: 3002964 - RNA, 19 nt, Artificial Sequence
  Description of Artificial Sequence: Synthetic oligonucleotide
gugaaaucucuugcaaugc

SEQ ID NO: 3002965 - RNA, 19 nt, Artificial Sequence
  Description of Artificial Sequence: Synthetic oligonucleotide
ugguuucaucguacacucg

SEQ ID NO: 3002966 - RNA, 19 nt, Artificial Sequence
  Description of Artificial Sequence: Synthetic oligonucleotide
ugucgugaugagaaucuua

SEQ ID NO: 3002967 - RNA, 19 nt, Artificial Sequence
  Description of Artificial Sequence: Synthetic oligonucleotide
cuugcaaugcacuguggga

SEQ ID NO: 3002968 - RNA, 19 nt, Artificial Sequence
  Description of Artificial Sequence: Synthetic oligonucleotide
ggagccuuaucaccaagag

SEQ ID NO: 3002969 - RNA, 19 nt, Artificial Sequence
  Description of Artificial Sequence: Synthetic oligonucleotide
agagccaguccucuucugu

SEQ ID NO: 3002970 - RNA, 19 nt, Artificial Sequence
  Description of Artificial Sequence: Synthetic oligonucleotide
guccucuucuguaauaaac

SEQ ID NO: 3002971 - RNA, 19 nt, Artificial Sequence
  Description of Artificial Sequence: Synthetic oligonucleotide
guacacucgcugauugucg

SEQ ID NO: 3002972 - RNA, 19 nt, Artificial Sequence
  Description of Artificial Sequence: Synthetic oligonucleotide
uuagucugccuaacuuuuc

SEQ ID NO: 3002973 - RNA, 19 nt, Artificial Sequence
  Description of Artificial Sequence: Synthetic oligonucleotide
uaucaccaagagcuucucu

SEQ ID NO: 3002974 - RNA, 19 nt, Artificial Sequence
  Description of Artificial Sequence: Synthetic oligonucleotide
gauggucuugggaacuggc

SEQ ID NO: 3002975 - RNA, 19 nt, Artificial Sequence
  Description of Artificial Sequence: Synthetic oligonucleotide
aaugcacugugggauaauu

SEQ ID NO: 3002976 - RNA, 19 nt, Artificial Sequence
  Description of Artificial Sequence: Synthetic oligonucleotide
ugucgauggucuugggaac

SEQ ID NO: 3002977 - RNA, 19 nt, Artificial Sequence
  Description of Artificial Sequence: Synthetic oligonucleotide
gucugugaaaucucuugca

SEQ ID NO: 3002978 - RNA, 19 nt, Artificial Sequence
  Description of Artificial Sequence: Synthetic oligonucleotide
caucauaagccaccucuuc

SEQ ID NO: 3002979 - RNA, 19 nt, Artificial Sequence
  Description of Artificial Sequence: Synthetic oligonucleotide
acuguucucccgugagguc

SEQ ID NO: 3002980 - RNA, 19 nt, Artificial Sequence
  Description of Artificial Sequence: Synthetic oligonucleotide
uuuccuuccgccgcugcug

SEQ ID NO: 3002981 - RNA, 19 nt, Artificial Sequence
  Description of Artificial Sequence: Synthetic oligonucleotide
augucugucuguugaaaua

SEQ ID NO: 3002982 - RNA, 19 nt, Artificial Sequence
  Description of Artificial Sequence: Synthetic oligonucleotide
ucauccguggcuucaucau

SEQ ID NO: 3002983 - RNA, 19 nt, Artificial Sequence
  Description of Artificial Sequence: Synthetic oligonucleotide
aaacucauccguggcuuca

SEQ ID NO: 3002984 - RNA, 19 nt, Artificial Sequence
  Description of Artificial Sequence: Synthetic oligonucleotide
gauugucgauggucuuggg

SEQ ID NO: 3002985 - RNA, 19 nt, Artificial Sequence
  Description of Artificial Sequence: Synthetic oligonucleotide
uguucucccgugaggucug

SEQ ID NO: 3002986 - RNA, 19 nt, Artificial Sequence
  Description of Artificial Sequence: Synthetic oligonucleotide
cucccgugaggucuguccg

SEQ ID NO: 3002987 - RNA, 19 nt, Artificial Sequence
  Description of Artificial Sequence: Synthetic oligonucleotide
cuucuguaauaaacaugug

SEQ ID NO: 3002988 - RNA, 19 nt, Artificial Sequence
  Description of Artificial Sequence: Synthetic oligonucleotide
gugaaucugguauaacugu

SEQ ID NO: 3002989 - RNA, 19 nt, Artificial Sequence
  Description of Artificial Sequence: Synthetic oligonucleotide
agucugccuaacuuuuccu

SEQ ID NO: 3002990 - RNA, 19 nt, Artificial Sequence
  Description of Artificial Sequence: Synthetic oligonucleotide
augagaaucuuaggagaug

SEQ ID NO: 3002991 - RNA, 19 nt, Artificial Sequence
  Description of Artificial Sequence: Synthetic oligonucleotide
gaugucgugaugagaaucu

SEQ ID NO: 3002992 - RNA, 19 nt, Artificial Sequence
  Description of Artificial Sequence: Synthetic oligonucleotide
aucaggucugugaaaucuc

SEQ ID NO: 3002993 - RNA, 19 nt, Artificial Sequence
  Description of Artificial Sequence: Synthetic oligonucleotide
cacugugguuucaucguac

SEQ ID NO: 3002994 - RNA, 19 nt, Artificial Sequence
  Description of Artificial Sequence: Synthetic oligonucleotide
cugucuguugaaauaggaa

SEQ ID NO: 3002995 - RNA, 19 nt, Artificial Sequence
  Description of Artificial Sequence: Synthetic oligonucleotide
cugauugucgauggucuug

SEQ ID NO: 3002996 - RNA, 19 nt, Artificial Sequence
  Description of Artificial Sequence: Synthetic oligonucleotide
aucucuugcaaugcacugu

SEQ ID NO: 3002997 - RNA, 19 nt, Artificial Sequence
  Description of Artificial Sequence: Synthetic oligonucleotide
gaugucugucuguugaaau

SEQ ID NO: 3002998 - RNA, 19 nt, Artificial Sequence
  Description of Artificial Sequence: Synthetic oligonucleotide
agagcugcucacagagucg

SEQ ID NO: 3002999 - RNA, 19 nt, Artificial Sequence
  Description of Artificial Sequence: Synthetic oligonucleotide
cuuaucaccaagagcuucu

SEQ ID NO: 3003000 - RNA, 19 nt, Artificial Sequence
  Description of Artificial Sequence: Synthetic oligonucleotide
accucuucaucaguggggu

SEQ ID NO: 3003001 - RNA, 19 nt, Artificial Sequence
  Description of Artificial Sequence: Synthetic oligonucleotide
cagagucguacuguucucc

SEQ ID NO: 3003002 - RNA, 19 nt, Artificial Sequence
  Description of Artificial Sequence: Synthetic oligonucleotide
uaacuguugagagcugcuc

SEQ ID NO: 3003003 - RNA, 19 nt, Artificial Sequence
  Description of Artificial Sequence: Synthetic oligonucleotide
ucacagagucguacuguuc

SEQ ID NO: 3003004 - RNA, 19 nt, Artificial Sequence
  Description of Artificial Sequence: Synthetic oligonucleotide
ucguacuguucucccguga

SEQ ID NO: 3003005 - RNA, 19 nt, Artificial Sequence
  Description of Artificial Sequence: Synthetic oligonucleotide
gucugucuguugaaauagg

SEQ ID NO: 3003006 - RNA, 19 nt, Artificial Sequence
  Description of Artificial Sequence: Synthetic oligonucleotide
ugagagcugcucacagagu

SEQ ID NO: 3003007 - RNA, 19 nt, Artificial Sequence
  Description of Artificial Sequence: Synthetic oligonucleotide
cauaagccaccucuucauc

SEQ ID NO: 3003008 - RNA, 19 nt, Artificial Sequence
  Description of Artificial Sequence: Synthetic oligonucleotide
ugcaaugcacugugggaua

SEQ ID NO: 3003009 - RNA, 19 nt, Artificial Sequence
  Description of Artificial Sequence: Synthetic oligonucleotide
cgugaugagaaucuuagga

SEQ ID NO: 3003010 - RNA, 19 nt, Artificial Sequence
  Description of Artificial Sequence: Synthetic oligonucleotide
aagccaccucuucaucagu

SEQ ID NO: 3003011 - RNA, 19 nt, Artificial Sequence
  Description of Artificial Sequence: Synthetic oligonucleotide
auaacuguugagagcugcu

SEQ ID NO: 3003012 - RNA, 19 nt, Artificial Sequence
  Description of Artificial Sequence: Synthetic oligonucleotide
gaugagaaucuuaggagau

SEQ ID NO: 3003013 - RNA, 19 nt, Artificial Sequence
  Description of Artificial Sequence: Synthetic oligonucleotide
ucgcugauugucgaugguc

SEQ ID NO: 3003014 - RNA, 19 nt, Artificial Sequence
  Description of Artificial Sequence: Synthetic oligonucleotide
acucauccguggcuucauc

SEQ ID NO: 3003015 - RNA, 19 nt, Artificial Sequence
  Description of Artificial Sequence: Synthetic oligonucleotide
uaggagaugucugucuguu

SEQ ID NO: 3003016 - RNA, 19 nt, Artificial Sequence
  Description of Artificial Sequence: Synthetic oligonucleotide
cucauccguggcuucauca

SEQ ID NO: 3003017 - RNA, 19 nt, Artificial Sequence
  Description of Artificial Sequence: Synthetic oligonucleotide
acaugugaaucugguauaa

SEQ ID NO: 3003018 - RNA, 19 nt, Artificial Sequence
  Description of Artificial Sequence: Synthetic oligonucleotide
cugugguuucaucguacac

SEQ ID NO: 3003019 - RNA, 19 nt, Artificial Sequence
  Description of Artificial Sequence: Synthetic oligonucleotide
guugagagcugcucacaga

SEQ ID NO: 3003020 - RNA, 19 nt, Artificial Sequence
  Description of Artificial Sequence: Synthetic oligonucleotide
cacagagucguacuguucu

SEQ ID NO: 3003021 - RNA, 19 nt, Artificial Sequence
  Description of Artificial Sequence: Synthetic oligonucleotide
uccguggcuucaucauaag

SEQ ID NO: 3003022 - RNA, 19 nt, Artificial Sequence
  Description of Artificial Sequence: Synthetic oligonucleotide
ggaagcaaacucauccgug

SEQ ID NO: 3003023 - RNA, 19 nt, Artificial Sequence
  Description of Artificial Sequence: Synthetic oligonucleotide
ucuugggaacuggcuuugg

SEQ ID NO: 3003024 - RNA, 19 nt, Artificial Sequence
  Description of Artificial Sequence: Synthetic oligonucleotide
ucguacacucgcugauugu

SEQ ID NO: 3003025 - RNA, 19 nt, Artificial Sequence
  Description of Artificial Sequence: Synthetic oligonucleotide
uucaucagugggguccacu

SEQ ID NO: 3003026 - RNA, 19 nt, Artificial Sequence
  Description of Artificial Sequence: Synthetic oligonucleotide
cuuuuccuuccgccgcugc

SEQ ID NO: 3003027 - RNA, 19 nt, Artificial Sequence
  Description of Artificial Sequence: Synthetic oligonucleotide
caaucaggucugugaaauc

SEQ ID NO: 3003028 - RNA, 19 nt, Artificial Sequence
  Description of Artificial Sequence: Synthetic oligonucleotide
caugugaaucugguauaac

SEQ ID NO: 3003029 - RNA, 19 nt, Artificial Sequence
  Description of Artificial Sequence: Synthetic oligonucleotide
gaacuggcuuugguggagc

SEQ ID NO: 3003030 - RNA, 19 nt, Artificial Sequence
  Description of Artificial Sequence: Synthetic oligonucleotide
uaauaacaaucaggucugu

SEQ ID NO: 3003031 - RNA, 19 nt, Artificial Sequence
  Description of Artificial Sequence: Synthetic oligonucleotide
aguccucuucuguaauaaa

SEQ ID NO: 3003032 - RNA, 19 nt, Artificial Sequence
  Description of Artificial Sequence: Synthetic oligonucleotide
cuguccgaugucgugauga

SEQ ID NO: 3003033 - RNA, 19 nt, Artificial Sequence
  Description of Artificial Sequence: Synthetic oligonucleotide
gagaugucugucuguugaa

SEQ ID NO: 3003034 - RNA, 19 nt, Artificial Sequence
  Description of Artificial Sequence: Synthetic oligonucleotide
ucgauggucuugggaacug

SEQ ID NO: 3003035 - RNA, 19 nt, Artificial Sequence
  Description of Artificial Sequence: Synthetic oligonucleotide
uuaucaccaagagcuucuc

SEQ ID NO: 3003036 - RNA, 19 nt, Artificial Sequence
  Description of Artificial Sequence: Synthetic oligonucleotide
guggagccuuaucaccaag

SEQ ID NO: 3003037 - RNA, 19 nt, Artificial Sequence
  Description of Artificial Sequence: Synthetic oligonucleotide
cacucgcugauugucgaug

SEQ ID NO: 3003038 - RNA, 19 nt, Artificial Sequence
  Description of Artificial Sequence: Synthetic oligonucleotide
ucuguccgaugucgugaug

SEQ ID NO: 3003039 - RNA, 19 nt, Artificial Sequence
  Description of Artificial Sequence: Synthetic oligonucleotide
agaugucugucuguugaaa

SEQ ID NO: 3003040 - RNA, 19 nt, Artificial Sequence
  Description of Artificial Sequence: Synthetic oligonucleotide
gagaaucuuaggagauguc

SEQ ID NO: 3003041 - RNA, 19 nt, Artificial Sequence
  Description of Artificial Sequence: Synthetic oligonucleotide
cuuagucugccuaacuuuu

SEQ ID NO: 3003042 - RNA, 19 nt, Artificial Sequence
  Description of Artificial Sequence: Synthetic oligonucleotide
agccaguccucuucuguaa

SEQ ID NO: 3003043 - RNA, 19 nt, Artificial Sequence
  Description of Artificial Sequence: Synthetic oligonucleotide
guuuuacgaucuucauuaa

SEQ ID NO: 3003044 - RNA, 19 nt, Artificial Sequence
  Description of Artificial Sequence: Synthetic oligonucleotide
gucguacuguucucccgug

SEQ ID NO: 3003045 - RNA, 19 nt, Artificial Sequence
  Description of Artificial Sequence: Synthetic oligonucleotide
gagccaguccucuucugua

SEQ ID NO: 3003046 - RNA, 19 nt, Artificial Sequence
  Description of Artificial Sequence: Synthetic oligonucleotide
cuucaucauaagccaccuc

SEQ ID NO: 3003047 - RNA, 19 nt, Artificial Sequence
  Description of Artificial Sequence: Synthetic oligonucleotide
caccaagagcuucucucuc

SEQ ID NO: 3003048 - RNA, 19 nt, Artificial Sequence
  Description of Artificial Sequence: Synthetic oligonucleotide
aacucauccguggcuucau

SEQ ID NO: 3003049 - RNA, 19 nt, Artificial Sequence
  Description of Artificial Sequence: Synthetic oligonucleotide
auccguggcuucaucauaa

SEQ ID NO: 3003050 - RNA, 19 nt, Artificial Sequence
  Description of Artificial Sequence: Synthetic oligonucleotide
ucccgugaggucuguccga

SEQ ID NO: 3003051 - RNA, 19 nt, Artificial Sequence
  Description of Artificial Sequence: Synthetic oligonucleotide
uuucagagccaguccucuu

SEQ ID NO: 3003052 - RNA, 19 nt, Artificial Sequence
  Description of Artificial Sequence: Synthetic oligonucleotide
guauaacuguugagagcug

SEQ ID NO: 3003053 - RNA, 19 nt, Artificial Sequence
  Description of Artificial Sequence: Synthetic oligonucleotide
agugggguccacugugguu

SEQ ID NO: 3003054 - RNA, 19 nt, Artificial Sequence
  Description of Artificial Sequence: Synthetic oligonucleotide
guguuuuacgaucuucauu

SEQ ID NO: 3003055 - RNA, 19 nt, Artificial Sequence
  Description of Artificial Sequence: Synthetic oligonucleotide
gucuugggaacuggcuuug

SEQ ID NO: 3003056 - RNA, 19 nt, Artificial Sequence
  Description of Artificial Sequence: Synthetic oligonucleotide
cugugaaaucucuugcaau

SEQ ID NO: 3003057 - RNA, 19 nt, Artificial Sequence
  Description of Artificial Sequence: Synthetic oligonucleotide
acuggcuuugguggagccu

SEQ ID NO: 3003058 - RNA, 19 nt, Artificial Sequence
  Description of Artificial Sequence: Synthetic oligonucleotide
cguacuguucucccgugag

SEQ ID NO: 3003059 - RNA, 19 nt, Artificial Sequence
  Description of Artificial Sequence: Synthetic oligonucleotide
acacucgcugauugucgau

SEQ ID NO: 3003060 - RNA, 19 nt, Artificial Sequence
  Description of Artificial Sequence: Synthetic oligonucleotide
caguccucuucuguaauaa

SEQ ID NO: 3003061 - RNA, 19 nt, Artificial Sequence
  Description of Artificial Sequence: Synthetic oligonucleotide
cuguugaaauaggaagcaa

SEQ ID NO: 3003062 - RNA, 19 nt, Artificial Sequence
  Description of Artificial Sequence: Synthetic oligonucleotide
acuuuuccuuccgccgcug

SEQ ID NO: 3003063 - RNA, 19 nt, Artificial Sequence
  Description of Artificial Sequence: Synthetic oligonucleotide
gugaggucuguccgauguc

SEQ ID NO: 3003064 - RNA, 19 nt, Artificial Sequence
  Description of Artificial Sequence: Synthetic oligonucleotide
gccuaacuuuuccuuccgc

SEQ ID NO: 3003065 - RNA, 19 nt, Artificial Sequence
  Description of Artificial Sequence: Synthetic oligonucleotide
ccuuaucaccaagagcuuc

SEQ ID NO: 3003066 - RNA, 19 nt, Artificial Sequence
  Description of Artificial Sequence: Synthetic oligonucleotide
cagagccaguccucuucug

SEQ ID NO: 3003067 - RNA, 19 nt, Artificial Sequence
  Description of Artificial Sequence: Synthetic oligonucleotide
guuucaucguacacucgcu

SEQ ID NO: 3003068 - RNA, 19 nt, Artificial Sequence
  Description of Artificial Sequence: Synthetic oligonucleotide
ccguggcuucaucauaagc

SEQ ID NO: 3003069 - RNA, 19 nt, Artificial Sequence
  Description of Artificial Sequence: Synthetic oligonucleotide
augcacugugggauaauuu

SEQ ID NO: 3003070 - RNA, 19 nt, Artificial Sequence
  Description of Artificial Sequence: Synthetic oligonucleotide
cuugggaacuggcuuuggu

SEQ ID NO: 3003071 - RNA, 19 nt, Artificial Sequence
  Description of Artificial Sequence: Synthetic oligonucleotide
gucugccuaacuuuuccuu

SEQ ID NO: 3003072 - RNA, 19 nt, Artificial Sequence
  Description of Artificial Sequence: Synthetic oligonucleotide
cuguucucccgugaggucu

SEQ ID NO: 3003073 - RNA, 19 nt, Artificial Sequence
  Description of Artificial Sequence: Synthetic oligonucleotide
cuuccgccgcugcugcuuc

SEQ ID NO: 3003074 - RNA, 19 nt, Artificial Sequence
  Description of Artificial Sequence: Synthetic oligonucleotide
ugggguccacugugguuuc

SEQ ID NO: 3003075 - RNA, 19 nt, Artificial Sequence
  Description of Artificial Sequence: Synthetic oligonucleotide
cuguugagagcugcucaca

SEQ ID NO: 3003076 - RNA, 19 nt, Artificial Sequence
  Description of Artificial Sequence: Synthetic oligonucleotide
gguguuuuacgaucuucau

SEQ ID NO: 3003077 - RNA, 19 nt, Artificial Sequence
  Description of Artificial Sequence: Synthetic oligonucleotide
cauccguggcuucaucaua

SEQ ID NO: 3003078 - RNA, 19 nt, Artificial Sequence
  Description of Artificial Sequence: Synthetic oligonucleotide
cucacagagucguacuguu

SEQ ID NO: 3003079 - RNA, 19 nt, Artificial Sequence
  Description of Artificial Sequence: Synthetic oligonucleotide
gugggguccacugugguuu

SEQ ID NO: 3003080 - RNA, 19 nt, Artificial Sequence
  Description of Artificial Sequence: Synthetic oligonucleotide
augucgugaugagaaucuu

SEQ ID NO: 3003081 - RNA, 19 nt, Artificial Sequence
  Description of Artificial Sequence: Synthetic oligonucleotide
cguacacucgcugauuguc

SEQ ID NO: 3003082 - RNA, 19 nt, Artificial Sequence
  Description of Artificial Sequence: Synthetic oligonucleotide
gcuuugguggagccuuauc

SEQ ID NO: 3003083 - RNA, 19 nt, Artificial Sequence
  Description of Artificial Sequence: Synthetic oligonucleotide
cugcucacagagucguacu

SEQ ID NO: 3003084 - RNA, 19 nt, Artificial Sequence
  Description of Artificial Sequence: Synthetic oligonucleotide
guccgaugucgugaugaga

SEQ ID NO: 3003085 - RNA, 19 nt, Artificial Sequence
  Description of Artificial Sequence: Synthetic oligonucleotide
gguggagccuuaucaccaa

SEQ ID NO: 3003086 - RNA, 19 nt, Artificial Sequence
  Description of Artificial Sequence: Synthetic oligonucleotide
cgaugucgugaugagaauc

SEQ ID NO: 3003087 - RNA, 19 nt, Artificial Sequence
  Description of Artificial Sequence: Synthetic oligonucleotide
gucgauggucuugggaacu

SEQ ID NO: 3003088 - RNA, 19 nt, Artificial Sequence
  Description of Artificial Sequence: Synthetic oligonucleotide
ggucuugggaacuggcuuu

SEQ ID NO: 3003089 - RNA, 19 nt, Artificial Sequence
  Description of Artificial Sequence: Synthetic oligonucleotide
gucuguccgaugucgugau

SEQ ID NO: 3003090 - RNA, 19 nt, Artificial Sequence
  Description of Artificial Sequence: Synthetic oligonucleotide
caucagugggguccacugu

SEQ ID NO: 3003091 - RNA, 19 nt, Artificial Sequence
  Description of Artificial Sequence: Synthetic oligonucleotide
cuggcuuugguggagccuu

SEQ ID NO: 3003092 - RNA, 19 nt, Artificial Sequence
  Description of Artificial Sequence: Synthetic oligonucleotide
gcuucaucauaagccaccu

SEQ ID NO: 3003093 - RNA, 19 nt, Artificial Sequence
  Description of Artificial Sequence: Synthetic oligonucleotide
uucucccgugaggucuguc

SEQ ID NO: 3003094 - RNA, 19 nt, Artificial Sequence
  Description of Artificial Sequence: Synthetic oligonucleotide
gcaaugcacugugggauaa

SEQ ID NO: 3003095 - RNA, 19 nt, Artificial Sequence
  Description of Artificial Sequence: Synthetic oligonucleotide
gcaaacucauccguggcuu

SEQ ID NO: 3003096 - RNA, 19 nt, Artificial Sequence
  Description of Artificial Sequence: Synthetic oligonucleotide
cgauggucuugggaacugg

SEQ ID NO: 3003097 - RNA, 19 nt, Artificial Sequence
  Description of Artificial Sequence: Synthetic oligonucleotide
gcucacagagucguacugu

SEQ ID NO: 3003098 - RNA, 19 nt, Artificial Sequence
  Description of Artificial Sequence: Synthetic oligonucleotide
caggucugugaaaucucuu

SEQ ID NO: 3003099 - RNA, 19 nt, Artificial Sequence
  Description of Artificial Sequence: Synthetic oligonucleotide
cgugaggucuguccgaugu

SEQ ID NO: 3003100 - RNA, 19 nt, Artificial Sequence
  Description of Artificial Sequence: Synthetic oligonucleotide
cucgcugauugucgauggu

SEQ ID NO: 3003101 - RNA, 19 nt, Artificial Sequence
  Description of Artificial Sequence: Synthetic oligonucleotide
cgcugauugucgauggucu

SEQ ID NO: 3003102 - RNA, 19 nt, Artificial Sequence
  Description of Artificial Sequence: Synthetic oligonucleotide
caagagcuucucucucuuu

SEQ ID NO: 3003103 - RNA, 19 nt, Artificial Sequence
  Description of Artificial Sequence: Synthetic oligonucleotide
cagugggguccacuguggu

SEQ ID NO: 3003104 - RNA, 19 nt, Artificial Sequence
  Description of Artificial Sequence: Synthetic oligonucleotide
ccaguccucuucuguaaua

SEQ ID NO: 3003105 - RNA, 19 nt, Artificial Sequence
  Description of Artificial Sequence: Synthetic oligonucleotide
gcugauugucgauggucuu

SEQ ID NO: 3003106 - RNA, 19 nt, Artificial Sequence
  Description of Artificial Sequence: Synthetic oligonucleotide
caucguacacucgcugauu

SEQ ID NO: 3003107 - RNA, 19 nt, Artificial Sequence
  Description of Artificial Sequence: Synthetic oligonucleotide
ccacugugguuucaucgua

SEQ ID NO: 3003108 - RNA, 19 nt, Artificial Sequence
  Description of Artificial Sequence: Synthetic oligonucleotide
gccaguccucuucuguaau

SEQ ID NO: 3003109 - RNA, 19 nt, Artificial Sequence
  Description of Artificial Sequence: Synthetic oligonucleotide
ccgugaggucuguccgaug

SEQ ID NO: 3003110 - RNA, 19 nt, Artificial Sequence
  Description of Artificial Sequence: Synthetic oligonucleotide
caaugcacugugggauaau

SEQ ID NO: 3003111 - RNA, 19 nt, Artificial Sequence
  Description of Artificial Sequence: Synthetic oligonucleotide
ccaagagcuucucucucuu

SEQ ID NO: 3003112 - RNA, 19 nt, Artificial Sequence
  Description of Artificial Sequence: Synthetic oligonucleotide
ggguccacugugguuucau

SEQ ID NO: 3003113 - RNA, 19 nt, Artificial Sequence
  Description of Artificial Sequence: Synthetic oligonucleotide
gggguccacugugguuuca

SEQ ID NO: 3003114 - RNA, 19 nt, Artificial Sequence
  Description of Artificial Sequence: Synthetic oligonucleotide
guucucccgugaggucugu

SEQ ID NO: 3003115 - RNA, 19 nt, Artificial Sequence
  Description of Artificial Sequence: Synthetic oligonucleotide
ccgaugucgugaugagaau

SEQ ID NO: 3003116 - RNA, 19 nt, Artificial Sequence
  Description of Artificial Sequence: Synthetic oligonucleotide
ggcuuugguggagccuuau

SEQ ID NO: 3003117 - RNA, 19 nt, Artificial Sequence
  Description of Artificial Sequence: Synthetic oligonucleotide
gccuuaucaccaagagcuu

SEQ ID NO: 3003118 - RNA, 19 nt, Artificial Sequence
  Description of Artificial Sequence: Synthetic oligonucleotide
cccgugaggucuguccgau

SEQ ID NO: 3003119 - RNA, 19 nt, Artificial Sequence
  Description of Artificial Sequence: Synthetic oligonucleotide
uuuucuuccuuuuauaugg

SEQ ID NO: 3003120 - RNA, 19 nt, Artificial Sequence
  Description of Artificial Sequence: Synthetic oligonucleotide
aacaauguaucucaguggg

SEQ ID NO: 3003121 - RNA, 19 nt, Artificial Sequence
  Description of Artificial Sequence: Synthetic oligonucleotide
aaauuuauuaauuccccag

SEQ ID NO: 3003122 - RNA, 19 nt, Artificial Sequence
  Description of Artificial Sequence: Synthetic oligonucleotide
aauaacugugaacacagag

SEQ ID NO: 3003123 - RNA, 19 nt, Artificial Sequence
  Description of Artificial Sequence: Synthetic oligonucleotide
aacagaauaacugugaaca

SEQ ID NO: 3003124 - RNA, 19 nt, Artificial Sequence
  Description of Artificial Sequence: Synthetic oligonucleotide
uuuuauaugggcuaugaga

SEQ ID NO: 3003125 - RNA, 19 nt, Artificial Sequence
  Description of Artificial Sequence: Synthetic oligonucleotide
auagauuuuauuuauaaau

SEQ ID NO: 3003126 - RNA, 19 nt, Artificial Sequence
  Description of Artificial Sequence: Synthetic oligonucleotide
aaugcagacuucuugaaug

SEQ ID NO: 3003127 - RNA, 19 nt, Artificial Sequence
  Description of Artificial Sequence: Synthetic oligonucleotide
uguuaaauuuauuaauucc

SEQ ID NO: 3003128 - RNA, 19 nt, Artificial Sequence
  Description of Artificial Sequence: Synthetic oligonucleotide
uuaaauuuauuaauucccc

SEQ ID NO: 3003129 - RNA, 19 nt, Artificial Sequence
  Description of Artificial Sequence: Synthetic oligonucleotide
uuuauaugggcuaugagaa

SEQ ID NO: 3003130 - RNA, 19 nt, Artificial Sequence
  Description of Artificial Sequence: Synthetic oligonucleotide
uaacugugaacacagagag

SEQ ID NO: 3003131 - RNA, 19 nt, Artificial Sequence
  Description of Artificial Sequence: Synthetic oligonucleotide
uuaagaaugggacagucca

SEQ ID NO: 3003132 - RNA, 19 nt, Artificial Sequence
  Description of Artificial Sequence: Synthetic oligonucleotide
uuauuaauuccccagacaa

SEQ ID NO: 3003133 - RNA, 19 nt, Artificial Sequence
  Description of Artificial Sequence: Synthetic oligonucleotide
uugaaaguauucuuuaucc

SEQ ID NO: 3003134 - RNA, 19 nt, Artificial Sequence
  Description of Artificial Sequence: Synthetic oligonucleotide
aauggcauagauuuuauuu

SEQ ID NO: 3003135 - RNA, 19 nt, Artificial Sequence
  Description of Artificial Sequence: Synthetic oligonucleotide
aaggaagucaaguaguuca

SEQ ID NO: 3003136 - RNA, 19 nt, Artificial Sequence
  Description of Artificial Sequence: Synthetic oligonucleotide
ucuugaauggcauagauuu

SEQ ID NO: 3003137 - RNA, 19 nt, Artificial Sequence
  Description of Artificial Sequence: Synthetic oligonucleotide
acugugaacacagagaggg

SEQ ID NO: 3003138 - RNA, 19 nt, Artificial Sequence
  Description of Artificial Sequence: Synthetic oligonucleotide
auuguuaucaauugcauau

SEQ ID NO: 3003139 - RNA, 19 nt, Artificial Sequence
  Description of Artificial Sequence: Synthetic oligonucleotide
auguucuggacacuaaugc

SEQ ID NO: 3003140 - RNA, 19 nt, Artificial Sequence
  Description of Artificial Sequence: Synthetic oligonucleotide
aucaauugcauauggacuc

SEQ ID NO: 3003141 - RNA, 19 nt, Artificial Sequence
  Description of Artificial Sequence: Synthetic oligonucleotide
agaacaauguaucucagug

SEQ ID NO: 3003142 - RNA, 19 nt, Artificial Sequence
  Description of Artificial Sequence: Synthetic oligonucleotide
uuaucaauugcauauggac

SEQ ID NO: 3003143 - RNA, 19 nt, Artificial Sequence
  Description of Artificial Sequence: Synthetic oligonucleotide
auuuauuaauuccccagac

SEQ ID NO: 3003144 - RNA, 19 nt, Artificial Sequence
  Description of Artificial Sequence: Synthetic oligonucleotide
guuaaauuuauuaauuccc

SEQ ID NO: 3003145 - RNA, 19 nt, Artificial Sequence
  Description of Artificial Sequence: Synthetic oligonucleotide
uguuaucaauugcauaugg

SEQ ID NO: 3003146 - RNA, 19 nt, Artificial Sequence
  Description of Artificial Sequence: Synthetic oligonucleotide
aaugggacaguccaguuga

SEQ ID NO: 3003147 - RNA, 19 nt, Artificial Sequence
  Description of Artificial Sequence: Synthetic oligonucleotide
uauucuuuauccuuucgcc

SEQ ID NO: 3003148 - RNA, 19 nt, Artificial Sequence
  Description of Artificial Sequence: Synthetic oligonucleotide
ugggcuaugagaauggucu

SEQ ID NO: 3003149 - RNA, 19 nt, Artificial Sequence
  Description of Artificial Sequence: Synthetic oligonucleotide
uggaaaggaagucaaguag

SEQ ID NO: 3003150 - RNA, 19 nt, Artificial Sequence
  Description of Artificial Sequence: Synthetic oligonucleotide
uagauuuuauuuauaaauc

SEQ ID NO: 3003151 - RNA, 19 nt, Artificial Sequence
  Description of Artificial Sequence: Synthetic oligonucleotide
ugcauauggacuccgaagc

SEQ ID NO: 3003152 - RNA, 19 nt, Artificial Sequence
  Description of Artificial Sequence: Synthetic oligonucleotide
agugaaguaacagaauaac

SEQ ID NO: 3003153 - RNA, 19 nt, Artificial Sequence
  Description of Artificial Sequence: Synthetic oligonucleotide
acaagaacaauguaucuca

SEQ ID NO: 3003154 - RNA, 19 nt, Artificial Sequence
  Description of Artificial Sequence: Synthetic oligonucleotide
uaucaauugcauauggacu

SEQ ID NO: 3003155 - RNA, 19 nt, Artificial Sequence
  Description of Artificial Sequence: Synthetic oligonucleotide
aauggucugguuucaguuc

SEQ ID NO: 3003156 - RNA, 19 nt, Artificial Sequence
  Description of Artificial Sequence: Synthetic oligonucleotide
uuuauuaauuccccagaca

SEQ ID NO: 3003157 - RNA, 19 nt, Artificial Sequence
  Description of Artificial Sequence: Synthetic oligonucleotide
gaagucaaguaguucauug

SEQ ID NO: 3003158 - RNA, 19 nt, Artificial Sequence
  Description of Artificial Sequence: Synthetic oligonucleotide
ugaaggaaacucuggaaag

SEQ ID NO: 3003159 - RNA, 19 nt, Artificial Sequence
  Description of Artificial Sequence: Synthetic oligonucleotide
gaacaauguaucucagugg

SEQ ID NO: 3003160 - RNA, 19 nt, Artificial Sequence
  Description of Artificial Sequence: Synthetic oligonucleotide
augagaauggucugguuuc

SEQ ID NO: 3003161 - RNA, 19 nt, Artificial Sequence
  Description of Artificial Sequence: Synthetic oligonucleotide
uauccuuucgccaaaggaa

SEQ ID NO: 3003162 - RNA, 19 nt, Artificial Sequence
  Description of Artificial Sequence: Synthetic oligonucleotide
uuauccuuucgccaaagga

SEQ ID NO: 3003163 - RNA, 19 nt, Artificial Sequence
  Description of Artificial Sequence: Synthetic oligonucleotide
uaaauuuauuaauucccca

SEQ ID NO: 3003164 - RNA, 19 nt, Artificial Sequence
  Description of Artificial Sequence: Synthetic oligonucleotide
aguucauuguuaucaauug

SEQ ID NO: 3003165 - RNA, 19 nt, Artificial Sequence
  Description of Artificial Sequence: Synthetic oligonucleotide
uuuuauuuauaaauccuuu

SEQ ID NO: 3003166 - RNA, 19 nt, Artificial Sequence
  Description of Artificial Sequence: Synthetic oligonucleotide
uuguuaaauuuauuaauuc

SEQ ID NO: 3003167 - RNA, 19 nt, Artificial Sequence
  Description of Artificial Sequence: Synthetic oligonucleotide
acuaaugcagacuucuuga

SEQ ID NO: 3003168 - RNA, 19 nt, Artificial Sequence
  Description of Artificial Sequence: Synthetic oligonucleotide
agccacuucaucuaggaug

SEQ ID NO: 3003169 - RNA, 19 nt, Artificial Sequence
  Description of Artificial Sequence: Synthetic oligonucleotide
uauuaauuccccagacaag

SEQ ID NO: 3003170 - RNA, 19 nt, Artificial Sequence
  Description of Artificial Sequence: Synthetic oligonucleotide
uauaugggcuaugagaaug

SEQ ID NO: 3003171 - RNA, 19 nt, Artificial Sequence
  Description of Artificial Sequence: Synthetic oligonucleotide
agaauaacugugaacacag

SEQ ID NO: 3003172 - RNA, 19 nt, Artificial Sequence
  Description of Artificial Sequence: Synthetic oligonucleotide
ucuuccuuuuauaugggcu

SEQ ID NO: 3003173 - RNA, 19 nt, Artificial Sequence
  Description of Artificial Sequence: Synthetic oligonucleotide
ucuaggauguucuggacac

SEQ ID NO: 3003174 - RNA, 19 nt, Artificial Sequence
  Description of Artificial Sequence: Synthetic oligonucleotide
aaguauucuuuauccuuuc

SEQ ID NO: 3003175 - RNA, 19 nt, Artificial Sequence
  Description of Artificial Sequence: Synthetic oligonucleotide
auuaauuccccagacaaga

SEQ ID NO: 3003176 - RNA, 19 nt, Artificial Sequence
  Description of Artificial Sequence: Synthetic oligonucleotide
uuuauuuauaaauccuuuu

SEQ ID NO: 3003177 - RNA, 19 nt, Artificial Sequence
  Description of Artificial Sequence: Synthetic oligonucleotide
uaugagaauggucugguuu

SEQ ID NO: 3003178 - RNA, 19 nt, Artificial Sequence
  Description of Artificial Sequence: Synthetic oligonucleotide
cagacaagaacaauguauc

SEQ ID NO: 3003179 - RNA, 19 nt, Artificial Sequence
  Description of Artificial Sequence: Synthetic oligonucleotide
ugggagugaaguaacagaa

SEQ ID NO: 3003180 - RNA, 19 nt, Artificial Sequence
  Description of Artificial Sequence: Synthetic oligonucleotide
aagucaaguaguucauugu

SEQ ID NO: 3003181 - RNA, 19 nt, Artificial Sequence
  Description of Artificial Sequence: Synthetic oligonucleotide
uuguacaucugaaggaaac

SEQ ID NO: 3003182 - RNA, 19 nt, Artificial Sequence
  Description of Artificial Sequence: Synthetic oligonucleotide
uugcauauggacuccgaag

SEQ ID NO: 3003183 - RNA, 19 nt, Artificial Sequence
  Description of Artificial Sequence: Synthetic oligonucleotide
acagaauaacugugaacac

SEQ ID NO: 3003184 - RNA, 19 nt, Artificial Sequence
  Description of Artificial Sequence: Synthetic oligonucleotide
ucaaguaguucauuguuau

SEQ ID NO: 3003185 - RNA, 19 nt, Artificial Sequence
  Description of Artificial Sequence: Synthetic oligonucleotide
aauuccccagacaagaaca

SEQ ID NO: 3003186 - RNA, 19 nt, Artificial Sequence
  Description of Artificial Sequence: Synthetic oligonucleotide
uucaucuaggauguucugg

SEQ ID NO: 3003187 - RNA, 19 nt, Artificial Sequence
  Description of Artificial Sequence: Synthetic oligonucleotide
aaaggaagucaaguaguuc

SEQ ID NO: 3003188 - RNA, 19 nt, Artificial Sequence
  Description of Artificial Sequence: Synthetic oligonucleotide
uuuauccuuucgccaaagg

SEQ ID NO: 3003189 - RNA, 19 nt, Artificial Sequence
  Description of Artificial Sequence: Synthetic oligonucleotide
uccccagacaagaacaaug

SEQ ID NO: 3003190 - RNA, 19 nt, Artificial Sequence
  Description of Artificial Sequence: Synthetic oligonucleotide
uacaucugaaggaaacucu

SEQ ID NO: 3003191 - RNA, 19 nt, Artificial Sequence
  Description of Artificial Sequence: Synthetic oligonucleotide
cuuaagaaugggacagucc

SEQ ID NO: 3003192 - RNA, 19 nt, Artificial Sequence
  Description of Artificial Sequence: Synthetic oligonucleotide
gaaggaaacucuggaaagg

SEQ ID NO: 3003193 - RNA, 19 nt, Artificial Sequence
  Description of Artificial Sequence: Synthetic oligonucleotide
aguauucuuuauccuuucg

SEQ ID NO: 3003194 - RNA, 19 nt, Artificial Sequence
  Description of Artificial Sequence: Synthetic oligonucleotide
uaguucauuguuaucaauu

SEQ ID NO: 3003195 - RNA, 19 nt, Artificial Sequence
  Description of Artificial Sequence: Synthetic oligonucleotide
aagaacaauguaucucagu

SEQ ID NO: 3003196 - RNA, 19 nt, Artificial Sequence
  Description of Artificial Sequence: Synthetic oligonucleotide
gaaguaacagaauaacugu

SEQ ID NO: 3003197 - RNA, 19 nt, Artificial Sequence
  Description of Artificial Sequence: Synthetic oligonucleotide
caauguaucucagugggag

SEQ ID NO: 3003198 - RNA, 19 nt, Artificial Sequence
  Description of Artificial Sequence: Synthetic oligonucleotide
guugaaaguauucuuuauc

SEQ ID NO: 3003199 - RNA, 19 nt, Artificial Sequence
  Description of Artificial Sequence: Synthetic oligonucleotide
uuucuuccuuuuauauggg

SEQ ID NO: 3003200 - RNA, 19 nt, Artificial Sequence
  Description of Artificial Sequence: Synthetic oligonucleotide
uguucuggacacuaaugca

SEQ ID NO: 3003201 - RNA, 19 nt, Artificial Sequence
  Description of Artificial Sequence: Synthetic oligonucleotide
ucuggaaaggaagucaagu

SEQ ID NO: 3003202 - RNA, 19 nt, Artificial Sequence
  Description of Artificial Sequence: Synthetic oligonucleotide
gacuucuugaauggcauag

SEQ ID NO: 3003203 - RNA, 19 nt, Artificial Sequence
  Description of Artificial Sequence: Synthetic oligonucleotide
uggacacuaaugcagacuu

SEQ ID NO: 3003204 - RNA, 19 nt, Artificial Sequence
  Description of Artificial Sequence: Synthetic oligonucleotide
aaguaacagaauaacugug

SEQ ID NO: 3003205 - RNA, 19 nt, Artificial Sequence
  Description of Artificial Sequence: Synthetic oligonucleotide
aaacucuggaaaggaaguc

SEQ ID NO: 3003206 - RNA, 19 nt, Artificial Sequence
  Description of Artificial Sequence: Synthetic oligonucleotide
uaagaaugggacaguccag

SEQ ID NO: 3003207 - RNA, 19 nt, Artificial Sequence
  Description of Artificial Sequence: Synthetic oligonucleotide
uaauuccccagacaagaac

SEQ ID NO: 3003208 - RNA, 19 nt, Artificial Sequence
  Description of Artificial Sequence: Synthetic oligonucleotide
uucuuuauccuuucgccaa

SEQ ID NO: 3003209 - RNA, 19 nt, Artificial Sequence
  Description of Artificial Sequence: Synthetic oligonucleotide
agggcuacaauggccagcc

SEQ ID NO: 3003210 - RNA, 19 nt, Artificial Sequence
  Description of Artificial Sequence: Synthetic oligonucleotide
auucuuuauccuuucgcca

SEQ ID NO: 3003211 - RNA, 19 nt, Artificial Sequence
  Description of Artificial Sequence: Synthetic oligonucleotide
accacuuguacaucugaag

SEQ ID NO: 3003212 - RNA, 19 nt, Artificial Sequence
  Description of Artificial Sequence: Synthetic oligonucleotide
uaacagaauaacugugaac

SEQ ID NO: 3003213 - RNA, 19 nt, Artificial Sequence
  Description of Artificial Sequence: Synthetic oligonucleotide
guucauuguuaucaauugc

SEQ ID NO: 3003214 - RNA, 19 nt, Artificial Sequence
  Description of Artificial Sequence: Synthetic oligonucleotide
augcagacuucuugaaugg

SEQ ID NO: 3003215 - RNA, 19 nt, Artificial Sequence
  Description of Artificial Sequence: Synthetic oligonucleotide
aauguaucucagugggagu

SEQ ID NO: 3003216 - RNA, 19 nt, Artificial Sequence
  Description of Artificial Sequence: Synthetic oligonucleotide
aacucuggaaaggaaguca

SEQ ID NO: 3003217 - RNA, 19 nt, Artificial Sequence
  Description of Artificial Sequence: Synthetic oligonucleotide
guucuggacacuaaugcag

SEQ ID NO: 3003218 - RNA, 19 nt, Artificial Sequence
  Description of Artificial Sequence: Synthetic oligonucleotide
ugugaacacagagagggcu

SEQ ID NO: 3003219 - RNA, 19 nt, Artificial Sequence
  Description of Artificial Sequence: Synthetic oligonucleotide
aagaaugggacaguccagu

SEQ ID NO: 3003220 - RNA, 19 nt, Artificial Sequence
  Description of Artificial Sequence: Synthetic oligonucleotide
aaaguauucuuuauccuuu

SEQ ID NO: 3003221 - RNA, 19 nt, Artificial Sequence
  Description of Artificial Sequence: Synthetic oligonucleotide
auaacugugaacacagaga

SEQ ID NO: 3003222 - RNA, 19 nt, Artificial Sequence
  Description of Artificial Sequence: Synthetic oligonucleotide
gacaagaacaauguaucuc

SEQ ID NO: 3003223 - RNA, 19 nt, Artificial Sequence
  Description of Artificial Sequence: Synthetic oligonucleotide
ucugaaggaaacucuggaa

SEQ ID NO: 3003224 - RNA, 19 nt, Artificial Sequence
  Description of Artificial Sequence: Synthetic oligonucleotide
uucuggacacuaaugcaga

SEQ ID NO: 3003225 - RNA, 19 nt, Artificial Sequence
  Description of Artificial Sequence: Synthetic oligonucleotide
caucugaaggaaacucugg

SEQ ID NO: 3003226 - RNA, 19 nt, Artificial Sequence
  Description of Artificial Sequence: Synthetic oligonucleotide
auggcauagauuuuauuua

SEQ ID NO: 3003227 - RNA, 19 nt, Artificial Sequence
  Description of Artificial Sequence: Synthetic oligonucleotide
gaaugggacaguccaguug

SEQ ID NO: 3003228 - RNA, 19 nt, Artificial Sequence
  Description of Artificial Sequence: Synthetic oligonucleotide
aaggaaacucuggaaagga

SEQ ID NO: 3003229 - RNA, 19 nt, Artificial Sequence
  Description of Artificial Sequence: Synthetic oligonucleotide
acaauggccagccagcuua

SEQ ID NO: 3003230 - RNA, 19 nt, Artificial Sequence
  Description of Artificial Sequence: Synthetic oligonucleotide
gauguucuggacacuaaug

SEQ ID NO: 3003231 - RNA, 19 nt, Artificial Sequence
  Description of Artificial Sequence: Synthetic oligonucleotide
agagagggcuacaauggcc

SEQ ID NO: 3003232 - RNA, 19 nt, Artificial Sequence
  Description of Artificial Sequence: Synthetic oligonucleotide
aguaacagaauaacuguga

SEQ ID NO: 3003233 - RNA, 19 nt, Artificial Sequence
  Description of Artificial Sequence: Synthetic oligonucleotide
cuuuuauaugggcuaugag

SEQ ID NO: 3003234 - RNA, 19 nt, Artificial Sequence
  Description of Artificial Sequence: Synthetic oligonucleotide
uacugcaccacuuguacau

SEQ ID NO: 3003235 - RNA, 19 nt, Artificial Sequence
  Description of Artificial Sequence: Synthetic oligonucleotide
caguucuugguacugcacc

SEQ ID NO: 3003236 - RNA, 19 nt, Artificial Sequence
  Description of Artificial Sequence: Synthetic oligonucleotide
ucagugggagugaaguaac

SEQ ID NO: 3003237 - RNA, 19 nt, Artificial Sequence
  Description of Artificial Sequence: Synthetic oligonucleotide
aucuaggauguucuggaca

SEQ ID NO: 3003238 - RNA, 19 nt, Artificial Sequence
  Description of Artificial Sequence: Synthetic oligonucleotide
uucaguucuugguacugca

SEQ ID NO: 3003239 - RNA, 19 nt, Artificial Sequence
  Description of Artificial Sequence: Synthetic oligonucleotide
uugaauggcauagauuuua

SEQ ID NO: 3003240 - RNA, 19 nt, Artificial Sequence
  Description of Artificial Sequence: Synthetic oligonucleotide
aaggaagccacuucaucua

SEQ ID NO: 3003241 - RNA, 19 nt, Artificial Sequence
  Description of Artificial Sequence: Synthetic oligonucleotide
cacuaaugcagacuucuug

SEQ ID NO: 3003242 - RNA, 19 nt, Artificial Sequence
  Description of Artificial Sequence: Synthetic oligonucleotide
aguucuugguacugcacca

SEQ ID NO: 3003243 - RNA, 19 nt, Artificial Sequence
  Description of Artificial Sequence: Synthetic oligonucleotide
agacaagaacaauguaucu

SEQ ID NO: 3003244 - RNA, 19 nt, Artificial Sequence
  Description of Artificial Sequence: Synthetic oligonucleotide
uggcauagauuuuauuuau

SEQ ID NO: 3003245 - RNA, 19 nt, Artificial Sequence
  Description of Artificial Sequence: Synthetic oligonucleotide
agucaaguaguucauuguu

SEQ ID NO: 3003246 - RNA, 19 nt, Artificial Sequence
  Description of Artificial Sequence: Synthetic oligonucleotide
cagcuuaagaaugggacag

SEQ ID NO: 3003247 - RNA, 19 nt, Artificial Sequence
  Description of Artificial Sequence: Synthetic oligonucleotide
uaaugcagacuucuugaau

SEQ ID NO: 3003248 - RNA, 19 nt, Artificial Sequence
  Description of Artificial Sequence: Synthetic oligonucleotide
uucuuccuuuuauaugggc

SEQ ID NO: 3003249 - RNA, 19 nt, Artificial Sequence
  Description of Artificial Sequence: Synthetic oligonucleotide
gaagccacuucaucuagga

SEQ ID NO: 3003250 - RNA, 19 nt, Artificial Sequence
  Description of Artificial Sequence: Synthetic oligonucleotide
aguugaaaguauucuuuau

SEQ ID NO: 3003251 - RNA, 19 nt, Artificial Sequence
  Description of Artificial Sequence: Synthetic oligonucleotide
gaaaguauucuuuauccuu

SEQ ID NO: 3003252 - RNA, 19 nt, Artificial Sequence
  Description of Artificial Sequence: Synthetic oligonucleotide
uguacaucugaaggaaacu

SEQ ID NO: 3003253 - RNA, 19 nt, Artificial Sequence
  Description of Artificial Sequence: Synthetic oligonucleotide
ccacuuguacaucugaagg

SEQ ID NO: 3003254 - RNA, 19 nt, Artificial Sequence
  Description of Artificial Sequence: Synthetic oligonucleotide
ugguuucaguucuugguac

SEQ ID NO: 3003255 - RNA, 19 nt, Artificial Sequence
  Description of Artificial Sequence: Synthetic oligonucleotide
uggccagccagcuuaagaa

SEQ ID NO: 3003256 - RNA, 19 nt, Artificial Sequence
  Description of Artificial Sequence: Synthetic oligonucleotide
uccaguugaaaguauucuu

SEQ ID NO: 3003257 - RNA, 19 nt, Artificial Sequence
  Description of Artificial Sequence: Synthetic oligonucleotide
ggaaacucuggaaaggaag

SEQ ID NO: 3003258 - RNA, 19 nt, Artificial Sequence
  Description of Artificial Sequence: Synthetic oligonucleotide
uuaauuccccagacaagaa

SEQ ID NO: 3003259 - RNA, 19 nt, Artificial Sequence
  Description of Artificial Sequence: Synthetic oligonucleotide
aucucagugggagugaagu

SEQ ID NO: 3003260 - RNA, 19 nt, Artificial Sequence
  Description of Artificial Sequence: Synthetic oligonucleotide
uuguuaucaauugcauaug

SEQ ID NO: 3003261 - RNA, 19 nt, Artificial Sequence
  Description of Artificial Sequence: Synthetic oligonucleotide
agugggagugaaguaacag

SEQ ID NO: 3003262 - RNA, 19 nt, Artificial Sequence
  Description of Artificial Sequence: Synthetic oligonucleotide
acuucaucuaggauguucu

SEQ ID NO: 3003263 - RNA, 19 nt, Artificial Sequence
  Description of Artificial Sequence: Synthetic oligonucleotide
uucuugaauggcauagauu

SEQ ID NO: 3003264 - RNA, 19 nt, Artificial Sequence
  Description of Artificial Sequence: Synthetic oligonucleotide
caagaacaauguaucucag

SEQ ID NO: 3003265 - RNA, 19 nt, Artificial Sequence
  Description of Artificial Sequence: Synthetic oligonucleotide
ugaauggcauagauuuuau

SEQ ID NO: 3003266 - RNA, 19 nt, Artificial Sequence
  Description of Artificial Sequence: Synthetic oligonucleotide
auguaucucagugggagug

SEQ ID NO: 3003267 - RNA, 19 nt, Artificial Sequence
  Description of Artificial Sequence: Synthetic oligonucleotide
guaacagaauaacugugaa

SEQ ID NO: 3003268 - RNA, 19 nt, Artificial Sequence
  Description of Artificial Sequence: Synthetic oligonucleotide
ucaauugcauauggacucc

SEQ ID NO: 3003269 - RNA, 19 nt, Artificial Sequence
  Description of Artificial Sequence: Synthetic oligonucleotide
uuucgccaaaggaagccac

SEQ ID NO: 3003270 - RNA, 19 nt, Artificial Sequence
  Description of Artificial Sequence: Synthetic oligonucleotide
auaugggcuaugagaaugg

SEQ ID NO: 3003271 - RNA, 19 nt, Artificial Sequence
  Description of Artificial Sequence: Synthetic oligonucleotide
aguccaguugaaaguauuc

SEQ ID NO: 3003272 - RNA, 19 nt, Artificial Sequence
  Description of Artificial Sequence: Synthetic oligonucleotide
agaauggucugguuucagu

SEQ ID NO: 3003273 - RNA, 19 nt, Artificial Sequence
  Description of Artificial Sequence: Synthetic oligonucleotide
cuugguacugcaccacuug

SEQ ID NO: 3003274 - RNA, 19 nt, Artificial Sequence
  Description of Artificial Sequence: Synthetic oligonucleotide
auugcauauggacuccgaa

SEQ ID NO: 3003275 - RNA, 19 nt, Artificial Sequence
  Description of Artificial Sequence: Synthetic oligonucleotide
auccuuucgccaaaggaag

SEQ ID NO: 3003276 - RNA, 19 nt, Artificial Sequence
  Description of Artificial Sequence: Synthetic oligonucleotide
aacugugaacacagagagg

SEQ ID NO: 3003277 - RNA, 19 nt, Artificial Sequence
  Description of Artificial Sequence: Synthetic oligonucleotide
uugguacugcaccacuugu

SEQ ID NO: 3003278 - RNA, 19 nt, Artificial Sequence
  Description of Artificial Sequence: Synthetic oligonucleotide
acuuguacaucugaaggaa

SEQ ID NO: 3003279 - RNA, 19 nt, Artificial Sequence
  Description of Artificial Sequence: Synthetic oligonucleotide
ucaguucuugguacugcac

SEQ ID NO: 3003280 - RNA, 19 nt, Artificial Sequence
  Description of Artificial Sequence: Synthetic oligonucleotide
acaucugaaggaaacucug

SEQ ID NO: 3003281 - RNA, 19 nt, Artificial Sequence
  Description of Artificial Sequence: Synthetic oligonucleotide
uucuugguacugcaccacu

SEQ ID NO: 3003282 - RNA, 19 nt, Artificial Sequence
  Description of Artificial Sequence: Synthetic oligonucleotide
aggaagccacuucaucuag

SEQ ID NO: 3003283 - RNA, 19 nt, Artificial Sequence
  Description of Artificial Sequence: Synthetic oligonucleotide
caaaggaagccacuucauc

SEQ ID NO: 3003284 - RNA, 19 nt, Artificial Sequence
  Description of Artificial Sequence: Synthetic oligonucleotide
aacacagagagggcuacaa

SEQ ID NO: 3003285 - RNA, 19 nt, Artificial Sequence
  Description of Artificial Sequence: Synthetic oligonucleotide
uccuuucgccaaaggaagc

SEQ ID NO: 3003286 - RNA, 19 nt, Artificial Sequence
  Description of Artificial Sequence: Synthetic oligonucleotide
ucuuuauccuuucgccaaa

SEQ ID NO: 3003287 - RNA, 19 nt, Artificial Sequence
  Description of Artificial Sequence: Synthetic oligonucleotide
gguacugcaccacuuguac

SEQ ID NO: 3003288 - RNA, 19 nt, Artificial Sequence
  Description of Artificial Sequence: Synthetic oligonucleotide
gugggagugaaguaacaga

SEQ ID NO: 3003289 - RNA, 19 nt, Artificial Sequence
  Description of Artificial Sequence: Synthetic oligonucleotide
uaucucagugggagugaag

SEQ ID NO: 3003290 - RNA, 19 nt, Artificial Sequence
  Description of Artificial Sequence: Synthetic oligonucleotide
gagagggcuacaauggcca

SEQ ID NO: 3003291 - RNA, 19 nt, Artificial Sequence
  Description of Artificial Sequence: Synthetic oligonucleotide
ugcaccacuuguacaucug

SEQ ID NO: 3003292 - RNA, 19 nt, Artificial Sequence
  Description of Artificial Sequence: Synthetic oligonucleotide
ggcuacaauggccagccag

SEQ ID NO: 3003293 - RNA, 19 nt, Artificial Sequence
  Description of Artificial Sequence: Synthetic oligonucleotide
gacacuaaugcagacuucu

SEQ ID NO: 3003294 - RNA, 19 nt, Artificial Sequence
  Description of Artificial Sequence: Synthetic oligonucleotide
uuauaugggcuaugagaau

SEQ ID NO: 3003295 - RNA, 19 nt, Artificial Sequence
  Description of Artificial Sequence: Synthetic oligonucleotide
guuaucaauugcauaugga

SEQ ID NO: 3003296 - RNA, 19 nt, Artificial Sequence
  Description of Artificial Sequence: Synthetic oligonucleotide
ggagugaaguaacagaaua

SEQ ID NO: 3003297 - RNA, 19 nt, Artificial Sequence
  Description of Artificial Sequence: Synthetic oligonucleotide
ucuggacacuaaugcagac

SEQ ID NO: 3003298 - RNA, 19 nt, Artificial Sequence
  Description of Artificial Sequence: Synthetic oligonucleotide
uucgccaaaggaagccacu

SEQ ID NO: 3003299 - RNA, 19 nt, Artificial Sequence
  Description of Artificial Sequence: Synthetic oligonucleotide
gagugaaguaacagaauaa

SEQ ID NO: 3003300 - RNA, 19 nt, Artificial Sequence
  Description of Artificial Sequence: Synthetic oligonucleotide
cuuccuuuuauaugggcua

SEQ ID NO: 3003301 - RNA, 19 nt, Artificial Sequence
  Description of Artificial Sequence: Synthetic oligonucleotide
cagaauaacugugaacaca

SEQ ID NO: 3003302 - RNA, 19 nt, Artificial Sequence
  Description of Artificial Sequence: Synthetic oligonucleotide
auggccagccagcuuaaga

SEQ ID NO: 3003303 - RNA, 19 nt, Artificial Sequence
  Description of Artificial Sequence: Synthetic oligonucleotide
aauugcauauggacuccga

SEQ ID NO: 3003304 - RNA, 19 nt, Artificial Sequence
  Description of Artificial Sequence: Synthetic oligonucleotide
ucuugguacugcaccacuu

SEQ ID NO: 3003305 - RNA, 19 nt, Artificial Sequence
  Description of Artificial Sequence: Synthetic oligonucleotide
cagagagggcuacaauggc

SEQ ID NO: 3003306 - RNA, 19 nt, Artificial Sequence
  Description of Artificial Sequence: Synthetic oligonucleotide
caaguaguucauuguuauc

SEQ ID NO: 3003307 - RNA, 19 nt, Artificial Sequence
  Description of Artificial Sequence: Synthetic oligonucleotide
uguaucucagugggaguga

SEQ ID NO: 3003308 - RNA, 19 nt, Artificial Sequence
  Description of Artificial Sequence: Synthetic oligonucleotide
caauugcauauggacuccg

SEQ ID NO: 3003309 - RNA, 19 nt, Artificial Sequence
  Description of Artificial Sequence: Synthetic oligonucleotide
cucuggaaaggaagucaag

SEQ ID NO: 3003310 - RNA, 19 nt, Artificial Sequence
  Description of Artificial Sequence: Synthetic oligonucleotide
cauuguuaucaauugcaua

SEQ ID NO: 3003311 - RNA, 19 nt, Artificial Sequence
  Description of Artificial Sequence: Synthetic oligonucleotide
cuucaucuaggauguucug

SEQ ID NO: 3003312 - RNA, 19 nt, Artificial Sequence
  Description of Artificial Sequence: Synthetic oligonucleotide
ugagaauggucugguuuca

SEQ ID NO: 3003313 - RNA, 19 nt, Artificial Sequence
  Description of Artificial Sequence: Synthetic oligonucleotide
ugguacugcaccacuugua

SEQ ID NO: 3003314 - RNA, 19 nt, Artificial Sequence
  Description of Artificial Sequence: Synthetic oligonucleotide
cuggaaaggaagucaagua

SEQ ID NO: 3003315 - RNA, 19 nt, Artificial Sequence
  Description of Artificial Sequence: Synthetic oligonucleotide
gaauggucugguuucaguu

SEQ ID NO: 3003316 - RNA, 19 nt, Artificial Sequence
  Description of Artificial Sequence: Synthetic oligonucleotide
augggcuaugagaaugguc

SEQ ID NO: 3003317 - RNA, 19 nt, Artificial Sequence
  Description of Artificial Sequence: Synthetic oligonucleotide
uaggauguucuggacacua

SEQ ID NO: 3003318 - RNA, 19 nt, Artificial Sequence
  Description of Artificial Sequence: Synthetic oligonucleotide
cuuuauccuuucgccaaag

SEQ ID NO: 3003319 - RNA, 19 nt, Artificial Sequence
  Description of Artificial Sequence: Synthetic oligonucleotide
cacuucaucuaggauguuc

SEQ ID NO: 3003320 - RNA, 19 nt, Artificial Sequence
  Description of Artificial Sequence: Synthetic oligonucleotide
ugcagacuucuugaauggc

SEQ ID NO: 3003321 - RNA, 19 nt, Artificial Sequence
  Description of Artificial Sequence: Synthetic oligonucleotide
cugugaacacagagagggc

SEQ ID NO: 3003322 - RNA, 19 nt, Artificial Sequence
  Description of Artificial Sequence: Synthetic oligonucleotide
caucuaggauguucuggac

SEQ ID NO: 3003323 - RNA, 19 nt, Artificial Sequence
  Description of Artificial Sequence: Synthetic oligonucleotide
aagccacuucaucuaggau

SEQ ID NO: 3003324 - RNA, 19 nt, Artificial Sequence
  Description of Artificial Sequence: Synthetic oligonucleotide
gccagcuuaagaaugggac

SEQ ID NO: 3003325 - RNA, 19 nt, Artificial Sequence
  Description of Artificial Sequence: Synthetic oligonucleotide
ccagccagcuuaagaaugg

SEQ ID NO: 3003326 - RNA, 19 nt, Artificial Sequence
  Description of Artificial Sequence: Synthetic oligonucleotide
ggagcuggcuagccuaagg

SEQ ID NO: 3003327 - RNA, 19 nt, Artificial Sequence
  Description of Artificial Sequence: Synthetic oligonucleotide
ggcuaugagaauggucugg

SEQ ID NO: 3003328 - RNA, 19 nt, Artificial Sequence
  Description of Artificial Sequence: Synthetic oligonucleotide
caguugaaaguauucuuua

SEQ ID NO: 3003329 - RNA, 19 nt, Artificial Sequence
  Description of Artificial Sequence: Synthetic oligonucleotide
cuaaugcagacuucuugaa

SEQ ID NO: 3003330 - RNA, 19 nt, Artificial Sequence
  Description of Artificial Sequence: Synthetic oligonucleotide
gagaauggucugguuucag

SEQ ID NO: 3003331 - RNA, 19 nt, Artificial Sequence
  Description of Artificial Sequence: Synthetic oligonucleotide
uccuuuuauaugggcuaug

SEQ ID NO: 3003332 - RNA, 19 nt, Artificial Sequence
  Description of Artificial Sequence: Synthetic oligonucleotide
gcuacaauggccagccagc

SEQ ID NO: 3003333 - RNA, 19 nt, Artificial Sequence
  Description of Artificial Sequence: Synthetic oligonucleotide
gcuggcuagccuaagguug

SEQ ID NO: 3003334 - RNA, 19 nt, Artificial Sequence
  Description of Artificial Sequence: Synthetic oligonucleotide
agagggcuacaauggccag

SEQ ID NO: 3003335 - RNA, 19 nt, Artificial Sequence
  Description of Artificial Sequence: Synthetic oligonucleotide
uuccuuuuauaugggcuau

SEQ ID NO: 3003336 - RNA, 19 nt, Artificial Sequence
  Description of Artificial Sequence: Synthetic oligonucleotide
acuucuugaauggcauaga

SEQ ID NO: 3003337 - RNA, 19 nt, Artificial Sequence
  Description of Artificial Sequence: Synthetic oligonucleotide
cucagugggagugaaguaa

SEQ ID NO: 3003338 - RNA, 19 nt, Artificial Sequence
  Description of Artificial Sequence: Synthetic oligonucleotide
uaugggcuaugagaauggu

SEQ ID NO: 3003339 - RNA, 19 nt, Artificial Sequence
  Description of Artificial Sequence: Synthetic oligonucleotide
cugguuucaguucuuggua

SEQ ID NO: 3003340 - RNA, 19 nt, Artificial Sequence
  Description of Artificial Sequence: Synthetic oligonucleotide
agaaugggacaguccaguu

SEQ ID NO: 3003341 - RNA, 19 nt, Artificial Sequence
  Description of Artificial Sequence: Synthetic oligonucleotide
gugaaguaacagaauaacu

SEQ ID NO: 3003342 - RNA, 19 nt, Artificial Sequence
  Description of Artificial Sequence: Synthetic oligonucleotide
acugcaccacuuguacauc

SEQ ID NO: 3003343 - RNA, 19 nt, Artificial Sequence
  Description of Artificial Sequence: Synthetic oligonucleotide
cuuguacaucugaaggaaa

SEQ ID NO: 3003344 - RNA, 19 nt, Artificial Sequence
  Description of Artificial Sequence: Synthetic oligonucleotide
acucuggaaaggaagucaa

SEQ ID NO: 3003345 - RNA, 19 nt, Artificial Sequence
  Description of Artificial Sequence: Synthetic oligonucleotide
agcuggcuagccuaagguu

SEQ ID NO: 3003346 - RNA, 19 nt, Artificial Sequence
  Description of Artificial Sequence: Synthetic oligonucleotide
auauggacuccgaagcuuu

SEQ ID NO: 3003347 - RNA, 19 nt, Artificial Sequence
  Description of Artificial Sequence: Synthetic oligonucleotide
gagggcuacaauggccagc

SEQ ID NO: 3003348 - RNA, 19 nt, Artificial Sequence
  Description of Artificial Sequence: Synthetic oligonucleotide
acacagagagggcuacaau

SEQ ID NO: 3003349 - RNA, 19 nt, Artificial Sequence
  Description of Artificial Sequence: Synthetic oligonucleotide
guacugcaccacuuguaca

SEQ ID NO: 3003350 - RNA, 19 nt, Artificial Sequence
  Description of Artificial Sequence: Synthetic oligonucleotide
aauggccagccagcuuaag

SEQ ID NO: 3003351 - RNA, 19 nt, Artificial Sequence
  Description of Artificial Sequence: Synthetic oligonucleotide
gagcuggcuagccuaaggu

SEQ ID NO: 3003352 - RNA, 19 nt, Artificial Sequence
  Description of Artificial Sequence: Synthetic oligonucleotide
gaauaacugugaacacaga

SEQ ID NO: 3003353 - RNA, 19 nt, Artificial Sequence
  Description of Artificial Sequence: Synthetic oligonucleotide
uacaauggccagccagcuu

SEQ ID NO: 3003354 - RNA, 19 nt, Artificial Sequence
  Description of Artificial Sequence: Synthetic oligonucleotide
ggaaaggaagucaaguagu

SEQ ID NO: 3003355 - RNA, 19 nt, Artificial Sequence
  Description of Artificial Sequence: Synthetic oligonucleotide
uauggacuccgaagcuuuu

SEQ ID NO: 3003356 - RNA, 19 nt, Artificial Sequence
  Description of Artificial Sequence: Synthetic oligonucleotide
gaaaggaagucaaguaguu

SEQ ID NO: 3003357 - RNA, 19 nt, Artificial Sequence
  Description of Artificial Sequence: Synthetic oligonucleotide
ccagacaagaacaauguau

SEQ ID NO: 3003358 - RNA, 19 nt, Artificial Sequence
  Description of Artificial Sequence: Synthetic oligonucleotide
guucuugguacugcaccac

SEQ ID NO: 3003359 - RNA, 19 nt, Artificial Sequence
  Description of Artificial Sequence: Synthetic oligonucleotide
cagccagcuuaagaauggg

SEQ ID NO: 3003360 - RNA, 19 nt, Artificial Sequence
  Description of Artificial Sequence: Synthetic oligonucleotide
acaauguaucucaguggga

SEQ ID NO: 3003361 - RNA, 19 nt, Artificial Sequence
  Description of Artificial Sequence: Synthetic oligonucleotide
ggaagccacuucaucuagg

SEQ ID NO: 3003362 - RNA, 19 nt, Artificial Sequence
  Description of Artificial Sequence: Synthetic oligonucleotide
aggaagucaaguaguucau

SEQ ID NO: 3003363 - RNA, 19 nt, Artificial Sequence
  Description of Artificial Sequence: Synthetic oligonucleotide
agcuuaagaaugggacagu

SEQ ID NO: 3003364 - RNA, 19 nt, Artificial Sequence
  Description of Artificial Sequence: Synthetic oligonucleotide
cuucuugaauggcauagau

SEQ ID NO: 3003365 - RNA, 19 nt, Artificial Sequence
  Description of Artificial Sequence: Synthetic oligonucleotide
ccuuucgccaaaggaagcc

SEQ ID NO: 3003366 - RNA, 19 nt, Artificial Sequence
  Description of Artificial Sequence: Synthetic oligonucleotide
ugggacaguccaguugaaa

SEQ ID NO: 3003367 - RNA, 19 nt, Artificial Sequence
  Description of Artificial Sequence: Synthetic oligonucleotide
ccagcuuaagaaugggaca

SEQ ID NO: 3003368 - RNA, 19 nt, Artificial Sequence
  Description of Artificial Sequence: Synthetic oligonucleotide
cuuucgccaaaggaagcca

SEQ ID NO: 3003369 - RNA, 19 nt, Artificial Sequence
  Description of Artificial Sequence: Synthetic oligonucleotide
aggaaacucuggaaaggaa

SEQ ID NO: 3003370 - RNA, 19 nt, Artificial Sequence
  Description of Artificial Sequence: Synthetic oligonucleotide
caccacuuguacaucugaa

SEQ ID NO: 3003371 - RNA, 19 nt, Artificial Sequence
  Description of Artificial Sequence: Synthetic oligonucleotide
guccaguugaaaguauucu

SEQ ID NO: 3003372 - RNA, 19 nt, Artificial Sequence
  Description of Artificial Sequence: Synthetic oligonucleotide
gcagacuucuugaauggca

SEQ ID NO: 3003373 - RNA, 19 nt, Artificial Sequence
  Description of Artificial Sequence: Synthetic oligonucleotide
ucgccaaaggaagccacuu

SEQ ID NO: 3003374 - RNA, 19 nt, Artificial Sequence
  Description of Artificial Sequence: Synthetic oligonucleotide
cagacuucuugaauggcau

SEQ ID NO: 3003375 - RNA, 19 nt, Artificial Sequence
  Description of Artificial Sequence: Synthetic oligonucleotide
guaguucauuguuaucaau

SEQ ID NO: 3003376 - RNA, 19 nt, Artificial Sequence
  Description of Artificial Sequence: Synthetic oligonucleotide
uuccccagacaagaacaau

SEQ ID NO: 3003377 - RNA, 19 nt, Artificial Sequence
  Description of Artificial Sequence: Synthetic oligonucleotide
gccagccagcuuaagaaug

SEQ ID NO: 3003378 - RNA, 19 nt, Artificial Sequence
  Description of Artificial Sequence: Synthetic oligonucleotide
auuccccagacaagaacaa

SEQ ID NO: 3003379 - RNA, 19 nt, Artificial Sequence
  Description of Artificial Sequence: Synthetic oligonucleotide
agccagcuuaagaauggga

SEQ ID NO: 3003380 - RNA, 19 nt, Artificial Sequence
  Description of Artificial Sequence: Synthetic oligonucleotide
gaauggcauagauuuuauu

SEQ ID NO: 3003381 - RNA, 19 nt, Artificial Sequence
  Description of Artificial Sequence: Synthetic oligonucleotide
gggcuaugagaauggucug

SEQ ID NO: 3003382 - RNA, 19 nt, Artificial Sequence
  Description of Artificial Sequence: Synthetic oligonucleotide
ccuuuuauaugggcuauga

SEQ ID NO: 3003383 - RNA, 19 nt, Artificial Sequence
  Description of Artificial Sequence: Synthetic oligonucleotide
cagugggagugaaguaaca

SEQ ID NO: 3003384 - RNA, 19 nt, Artificial Sequence
  Description of Artificial Sequence: Synthetic oligonucleotide
gaacacagagagggcuaca

SEQ ID NO: 3003385 - RNA, 19 nt, Artificial Sequence
  Description of Artificial Sequence: Synthetic oligonucleotide
gugaacacagagagggcua

SEQ ID NO: 3003386 - RNA, 19 nt, Artificial Sequence
  Description of Artificial Sequence: Synthetic oligonucleotide
ggucugguuucaguucuug

SEQ ID NO: 3003387 - RNA, 19 nt, Artificial Sequence
  Description of Artificial Sequence: Synthetic oligonucleotide
acaguccaguugaaaguau

SEQ ID NO: 3003388 - RNA, 19 nt, Artificial Sequence
  Description of Artificial Sequence: Synthetic oligonucleotide
guaucucagugggagugaa

SEQ ID NO: 3003389 - RNA, 19 nt, Artificial Sequence
  Description of Artificial Sequence: Synthetic oligonucleotide
cuggcuagccuaagguugu

SEQ ID NO: 3003390 - RNA, 19 nt, Artificial Sequence
  Description of Artificial Sequence: Synthetic oligonucleotide
gcaccacuuguacaucuga

SEQ ID NO: 3003391 - RNA, 19 nt, Artificial Sequence
  Description of Artificial Sequence: Synthetic oligonucleotide
uggucugguuucaguucuu

SEQ ID NO: 3003392 - RNA, 19 nt, Artificial Sequence
  Description of Artificial Sequence: Synthetic oligonucleotide
gguuucaguucuugguacu

SEQ ID NO: 3003393 - RNA, 19 nt, Artificial Sequence
  Description of Artificial Sequence: Synthetic oligonucleotide
ggauguucuggacacuaau

SEQ ID NO: 3003394 - RNA, 19 nt, Artificial Sequence
  Description of Artificial Sequence: Synthetic oligonucleotide
aggauguucuggacacuaa

SEQ ID NO: 3003395 - RNA, 19 nt, Artificial Sequence
  Description of Artificial Sequence: Synthetic oligonucleotide
cuugaauggcauagauuuu

SEQ ID NO: 3003396 - RNA, 19 nt, Artificial Sequence
  Description of Artificial Sequence: Synthetic oligonucleotide
cugcaccacuuguacaucu

SEQ ID NO: 3003397 - RNA, 19 nt, Artificial Sequence
  Description of Artificial Sequence: Synthetic oligonucleotide
acacuaaugcagacuucuu

SEQ ID NO: 3003398 - RNA, 19 nt, Artificial Sequence
  Description of Artificial Sequence: Synthetic oligonucleotide
ccaguugaaaguauucuuu

SEQ ID NO: 3003399 - RNA, 19 nt, Artificial Sequence
  Description of Artificial Sequence: Synthetic oligonucleotide
cuggacacuaaugcagacu

SEQ ID NO: 3003400 - RNA, 19 nt, Artificial Sequence
  Description of Artificial Sequence: Synthetic oligonucleotide
gcuaugagaauggucuggu

SEQ ID NO: 3003401 - RNA, 19 nt, Artificial Sequence
  Description of Artificial Sequence: Synthetic oligonucleotide
cauauggacuccgaagcuu

SEQ ID NO: 3003402 - RNA, 19 nt, Artificial Sequence
  Description of Artificial Sequence: Synthetic oligonucleotide
gcuagccuaagguuguuuu

SEQ ID NO: 3003403 - RNA, 19 nt, Artificial Sequence
  Description of Artificial Sequence: Synthetic oligonucleotide
ggcauagauuuuauuuaua

SEQ ID NO: 3003404 - RNA, 19 nt, Artificial Sequence
  Description of Artificial Sequence: Synthetic oligonucleotide
gcauauggacuccgaagcu

SEQ ID NO: 3003405 - RNA, 19 nt, Artificial Sequence
  Description of Artificial Sequence: Synthetic oligonucleotide
caauggccagccagcuuaa

SEQ ID NO: 3003406 - RNA, 19 nt, Artificial Sequence
  Description of Artificial Sequence: Synthetic oligonucleotide
caguccaguugaaaguauu

SEQ ID NO: 3003407 - RNA, 19 nt, Artificial Sequence
  Description of Artificial Sequence: Synthetic oligonucleotide
cuacaauggccagccagcu

SEQ ID NO: 3003408 - RNA, 19 nt, Artificial Sequence
  Description of Artificial Sequence: Synthetic oligonucleotide
ccccagacaagaacaaugu

SEQ ID NO: 3003409 - RNA, 19 nt, Artificial Sequence
  Description of Artificial Sequence: Synthetic oligonucleotide
ggacacuaaugcagacuuc

SEQ ID NO: 3003410 - RNA, 19 nt, Artificial Sequence
  Description of Artificial Sequence: Synthetic oligonucleotide
cuaugagaauggucugguu

SEQ ID NO: 3003411 - RNA, 19 nt, Artificial Sequence
  Description of Artificial Sequence: Synthetic oligonucleotide
uggcuagccuaagguuguu

SEQ ID NO: 3003412 - RNA, 19 nt, Artificial Sequence
  Description of Artificial Sequence: Synthetic oligonucleotide
augggacaguccaguugaa

SEQ ID NO: 3003413 - RNA, 19 nt, Artificial Sequence
  Description of Artificial Sequence: Synthetic oligonucleotide
ggccagccagcuuaagaau

SEQ ID NO: 3003414 - RNA, 19 nt, Artificial Sequence
  Description of Artificial Sequence: Synthetic oligonucleotide
gggagugaaguaacagaau

SEQ ID NO: 3003415 - RNA, 19 nt, Artificial Sequence
  Description of Artificial Sequence: Synthetic oligonucleotide
cuaggauguucuggacacu

SEQ ID NO: 3003416 - RNA, 19 nt, Artificial Sequence
  Description of Artificial Sequence: Synthetic oligonucleotide
cccagacaagaacaaugua

SEQ ID NO: 3003417 - RNA, 19 nt, Artificial Sequence
  Description of Artificial Sequence: Synthetic oligonucleotide
ccaaaggaagccacuucau

SEQ ID NO: 3003418 - RNA, 19 nt, Artificial Sequence
  Description of Artificial Sequence: Synthetic oligonucleotide
gggcuacaauggccagcca

SEQ ID NO: 3003419 - RNA, 19 nt, Artificial Sequence
  Description of Artificial Sequence: Synthetic oligonucleotide
ggcuagccuaagguuguuu

SEQ ID NO: 3003420 - RNA, 19 nt, Artificial Sequence
  Description of Artificial Sequence: Synthetic oligonucleotide
ccacuucaucuaggauguu

SEQ ID NO: 3003421 - RNA, 19 nt, Artificial Sequence
  Description of Artificial Sequence: Synthetic oligonucleotide
aagaucucagucuggaggc

SEQ ID NO: 3003422 - RNA, 19 nt, Artificial Sequence
  Description of Artificial Sequence: Synthetic oligonucleotide
acuugugucacguuggcgg

SEQ ID NO: 3003423 - RNA, 19 nt, Artificial Sequence
  Description of Artificial Sequence: Synthetic oligonucleotide
cucagugucaugaacaccc

SEQ ID NO: 3003424 - RNA, 19 nt, Artificial Sequence
  Description of Artificial Sequence: Synthetic oligonucleotide
ucugaggucacaauugggc

SEQ ID NO: 3003425 - RNA, 19 nt, Artificial Sequence
  Description of Artificial Sequence: Synthetic oligonucleotide
agugucuucggcaagggcc

SEQ ID NO: 3003426 - RNA, 19 nt, Artificial Sequence
  Description of Artificial Sequence: Synthetic oligonucleotide
ugugacuugugucacguug

SEQ ID NO: 3003427 - RNA, 19 nt, Artificial Sequence
  Description of Artificial Sequence: Synthetic oligonucleotide
uucuguagaagccucugag

SEQ ID NO: 3003428 - RNA, 19 nt, Artificial Sequence
  Description of Artificial Sequence: Synthetic oligonucleotide
aauccaagugucuucggca

SEQ ID NO: 3003429 - RNA, 19 nt, Artificial Sequence
  Description of Artificial Sequence: Synthetic oligonucleotide
agaggaccgacacugcugc

SEQ ID NO: 3003430 - RNA, 19 nt, Artificial Sequence
  Description of Artificial Sequence: Synthetic oligonucleotide
uggauugggccuuaugggg

SEQ ID NO: 3003431 - RNA, 19 nt, Artificial Sequence
  Description of Artificial Sequence: Synthetic oligonucleotide
ucuguagaagccucugagg

SEQ ID NO: 3003432 - RNA, 19 nt, Artificial Sequence
  Description of Artificial Sequence: Synthetic oligonucleotide
aguacugaauccaaguguc

SEQ ID NO: 3003433 - RNA, 19 nt, Artificial Sequence
  Description of Artificial Sequence: Synthetic oligonucleotide
caauugggcauguagaguc

SEQ ID NO: 3003434 - RNA, 19 nt, Artificial Sequence
  Description of Artificial Sequence: Synthetic oligonucleotide
accagcaagguccacggcg

SEQ ID NO: 3003435 - RNA, 19 nt, Artificial Sequence
  Description of Artificial Sequence: Synthetic oligonucleotide
agcacugugagcuuccaug

SEQ ID NO: 3003436 - RNA, 19 nt, Artificial Sequence
  Description of Artificial Sequence: Synthetic oligonucleotide
acugaauccaagugucuuc

SEQ ID NO: 3003437 - RNA, 19 nt, Artificial Sequence
  Description of Artificial Sequence: Synthetic oligonucleotide
aucucagugucaugaacac

SEQ ID NO: 3003438 - RNA, 19 nt, Artificial Sequence
  Description of Artificial Sequence: Synthetic oligonucleotide
ucuggagacacuggcaagg

SEQ ID NO: 3003439 - RNA, 19 nt, Artificial Sequence
  Description of Artificial Sequence: Synthetic oligonucleotide
aagugucuucggcaagggc

SEQ ID NO: 3003440 - RNA, 19 nt, Artificial Sequence
  Description of Artificial Sequence: Synthetic oligonucleotide
uuuacuuuccuuuguuguc

SEQ ID NO: 3003441 - RNA, 19 nt, Artificial Sequence
  Description of Artificial Sequence: Synthetic oligonucleotide
cacaauugggcauguagag

SEQ ID NO: 3003442 - RNA, 19 nt, Artificial Sequence
  Description of Artificial Sequence: Synthetic oligonucleotide
cuggauugggccuuauggg

SEQ ID NO: 3003443 - RNA, 19 nt, Artificial Sequence
  Description of Artificial Sequence: Synthetic oligonucleotide
gaauccaagugucuucggc

SEQ ID NO: 3003444 - RNA, 19 nt, Artificial Sequence
  Description of Artificial Sequence: Synthetic oligonucleotide
acggcgauuccccugagag

SEQ ID NO: 3003445 - RNA, 19 nt, Artificial Sequence
  Description of Artificial Sequence: Synthetic oligonucleotide
ugcaguacugaauccaagu

SEQ ID NO: 3003446 - RNA, 19 nt, Artificial Sequence
  Description of Artificial Sequence: Synthetic oligonucleotide
uccauggccaucuggagac

SEQ ID NO: 3003447 - RNA, 19 nt, Artificial Sequence
  Description of Artificial Sequence: Synthetic oligonucleotide
cuugccagagcacugugag

SEQ ID NO: 3003448 - RNA, 19 nt, Artificial Sequence
  Description of Artificial Sequence: Synthetic oligonucleotide
aauugggcauguagagucc

SEQ ID NO: 3003449 - RNA, 19 nt, Artificial Sequence
  Description of Artificial Sequence: Synthetic oligonucleotide
ugccagagcacugugagcu

SEQ ID NO: 3003450 - RNA, 19 nt, Artificial Sequence
  Description of Artificial Sequence: Synthetic oligonucleotide
acaccagcaagguccacgg

SEQ ID NO: 3003451 - RNA, 19 nt, Artificial Sequence
  Description of Artificial Sequence: Synthetic oligonucleotide
aagggcccaucucaguguc

SEQ ID NO: 3003452 - RNA, 19 nt, Artificial Sequence
  Description of Artificial Sequence: Synthetic oligonucleotide
gauccacacaccagcaagg

SEQ ID NO: 3003453 - RNA, 19 nt, Artificial Sequence
  Description of Artificial Sequence: Synthetic oligonucleotide
cugaauccaagugucuucg

SEQ ID NO: 3003454 - RNA, 19 nt, Artificial Sequence
  Description of Artificial Sequence: Synthetic oligonucleotide
caucucagugucaugaaca

SEQ ID NO: 3003455 - RNA, 19 nt, Artificial Sequence
  Description of Artificial Sequence: Synthetic oligonucleotide
ugagcuuccauggccaucu

SEQ ID NO: 3003456 - RNA, 19 nt, Artificial Sequence
  Description of Artificial Sequence: Synthetic oligonucleotide
ccuggauugggccuuaugg

SEQ ID NO: 3003457 - RNA, 19 nt, Artificial Sequence
  Description of Artificial Sequence: Synthetic oligonucleotide
uuucuguagaagccucuga

SEQ ID NO: 3003458 - RNA, 19 nt, Artificial Sequence
  Description of Artificial Sequence: Synthetic oligonucleotide
uuccauggccaucuggaga

SEQ ID NO: 3003459 - RNA, 19 nt, Artificial Sequence
  Description of Artificial Sequence: Synthetic oligonucleotide
acuuuccuuuguugucucc

SEQ ID NO: 3003460 - RNA, 19 nt, Artificial Sequence
  Description of Artificial Sequence: Synthetic oligonucleotide
cuugugucacguuggcggg

SEQ ID NO: 3003461 - RNA, 19 nt, Artificial Sequence
  Description of Artificial Sequence: Synthetic oligonucleotide
gucucugugacuuguguca

SEQ ID NO: 3003462 - RNA, 19 nt, Artificial Sequence
  Description of Artificial Sequence: Synthetic oligonucleotide
aagguccacggcgauuccc

SEQ ID NO: 3003463 - RNA, 19 nt, Artificial Sequence
  Description of Artificial Sequence: Synthetic oligonucleotide
ugggguuuacuuuccuuug

SEQ ID NO: 3003464 - RNA, 19 nt, Artificial Sequence
  Description of Artificial Sequence: Synthetic oligonucleotide
ugaauccaagugucuucgg

SEQ ID NO: 3003465 - RNA, 19 nt, Artificial Sequence
  Description of Artificial Sequence: Synthetic oligonucleotide
ugagaggaccgacacugcu

SEQ ID NO: 3003466 - RNA, 19 nt, Artificial Sequence
  Description of Artificial Sequence: Synthetic oligonucleotide
guuuacuuuccuuuguugu

SEQ ID NO: 3003467 - RNA, 19 nt, Artificial Sequence
  Description of Artificial Sequence: Synthetic oligonucleotide
uggauucuucugcuggucu

SEQ ID NO: 3003468 - RNA, 19 nt, Artificial Sequence
  Description of Artificial Sequence: Synthetic oligonucleotide
guagaagccucugagguca

SEQ ID NO: 3003469 - RNA, 19 nt, Artificial Sequence
  Description of Artificial Sequence: Synthetic oligonucleotide
ggcauguagaguccgugcg

SEQ ID NO: 3003470 - RNA, 19 nt, Artificial Sequence
  Description of Artificial Sequence: Synthetic oligonucleotide
gugacuugugucacguugg

SEQ ID NO: 3003471 - RNA, 19 nt, Artificial Sequence
  Description of Artificial Sequence: Synthetic oligonucleotide
ucugugacuugugucacgu

SEQ ID NO: 3003472 - RNA, 19 nt, Artificial Sequence
  Description of Artificial Sequence: Synthetic oligonucleotide
accugcuuuagccacugcu

SEQ ID NO: 3003473 - RNA, 19 nt, Artificial Sequence
  Description of Artificial Sequence: Synthetic oligonucleotide
uucugcuggucucugugac

SEQ ID NO: 3003474 - RNA, 19 nt, Artificial Sequence
  Description of Artificial Sequence: Synthetic oligonucleotide
uguagaagccucugagguc

SEQ ID NO: 3003475 - RNA, 19 nt, Artificial Sequence
  Description of Artificial Sequence: Synthetic oligonucleotide
ugacuugugucacguuggc

SEQ ID NO: 3003476 - RNA, 19 nt, Artificial Sequence
  Description of Artificial Sequence: Synthetic oligonucleotide
gagacacuggcaagggccg

SEQ ID NO: 3003477 - RNA, 19 nt, Artificial Sequence
  Description of Artificial Sequence: Synthetic oligonucleotide
uguagaguccgugcgcacc

SEQ ID NO: 3003478 - RNA, 19 nt, Artificial Sequence
  Description of Artificial Sequence: Synthetic oligonucleotide
ugaggucacaauugggcau

SEQ ID NO: 3003479 - RNA, 19 nt, Artificial Sequence
  Description of Artificial Sequence: Synthetic oligonucleotide
ucagugucaugaacacccc

SEQ ID NO: 3003480 - RNA, 19 nt, Artificial Sequence
  Description of Artificial Sequence: Synthetic oligonucleotide
cuccaugggguuuacuuuc

SEQ ID NO: 3003481 - RNA, 19 nt, Artificial Sequence
  Description of Artificial Sequence: Synthetic oligonucleotide
ucuugccagagcacuguga

SEQ ID NO: 3003482 - RNA, 19 nt, Artificial Sequence
  Description of Artificial Sequence: Synthetic oligonucleotide
uccacggcgauuccccuga

SEQ ID NO: 3003483 - RNA, 19 nt, Artificial Sequence
  Description of Artificial Sequence: Synthetic oligonucleotide
auugggcauguagaguccg

SEQ ID NO: 3003484 - RNA, 19 nt, Artificial Sequence
  Description of Artificial Sequence: Synthetic oligonucleotide
uccaagugucuucggcaag

SEQ ID NO: 3003485 - RNA, 19 nt, Artificial Sequence
  Description of Artificial Sequence: Synthetic oligonucleotide
gguuuacuuuccuuuguug

SEQ ID NO: 3003486 - RNA, 19 nt, Artificial Sequence
  Description of Artificial Sequence: Synthetic oligonucleotide
agcuuccauggccaucugg

SEQ ID NO: 3003487 - RNA, 19 nt, Artificial Sequence
  Description of Artificial Sequence: Synthetic oligonucleotide
guagaguccgugcgcaccc

SEQ ID NO: 3003488 - RNA, 19 nt, Artificial Sequence
  Description of Artificial Sequence: Synthetic oligonucleotide
accuccaugggguuuacuu

SEQ ID NO: 3003489 - RNA, 19 nt, Artificial Sequence
  Description of Artificial Sequence: Synthetic oligonucleotide
agucuggaggcccugcagu

SEQ ID NO: 3003490 - RNA, 19 nt, Artificial Sequence
  Description of Artificial Sequence: Synthetic oligonucleotide
gaggucacaauugggcaug

SEQ ID NO: 3003491 - RNA, 19 nt, Artificial Sequence
  Description of Artificial Sequence: Synthetic oligonucleotide
guuggcgggaggcaccucc

SEQ ID NO: 3003492 - RNA, 19 nt, Artificial Sequence
  Description of Artificial Sequence: Synthetic oligonucleotide
gacacugcugcuuucugua

SEQ ID NO: 3003493 - RNA, 19 nt, Artificial Sequence
  Description of Artificial Sequence: Synthetic oligonucleotide
gauuccccugagaggaccg

SEQ ID NO: 3003494 - RNA, 19 nt, Artificial Sequence
  Description of Artificial Sequence: Synthetic oligonucleotide
gcacugugagcuuccaugg

SEQ ID NO: 3003495 - RNA, 19 nt, Artificial Sequence
  Description of Artificial Sequence: Synthetic oligonucleotide
agguccacggcgauucccc

SEQ ID NO: 3003496 - RNA, 19 nt, Artificial Sequence
  Description of Artificial Sequence: Synthetic oligonucleotide
aucuggagacacuggcaag

SEQ ID NO: 3003497 - RNA, 19 nt, Artificial Sequence
  Description of Artificial Sequence: Synthetic oligonucleotide
ugucacguuggcgggaggc

SEQ ID NO: 3003498 - RNA, 19 nt, Artificial Sequence
  Description of Artificial Sequence: Synthetic oligonucleotide
uuuccuuuguugucuccuc

SEQ ID NO: 3003499 - RNA, 19 nt, Artificial Sequence
  Description of Artificial Sequence: Synthetic oligonucleotide
aguccgugcgcaccccucg

SEQ ID NO: 3003500 - RNA, 19 nt, Artificial Sequence
  Description of Artificial Sequence: Synthetic oligonucleotide
gcaguacugaauccaagug

SEQ ID NO: 3003501 - RNA, 19 nt, Artificial Sequence
  Description of Artificial Sequence: Synthetic oligonucleotide
cuuccauggccaucuggag

SEQ ID NO: 3003502 - RNA, 19 nt, Artificial Sequence
  Description of Artificial Sequence: Synthetic oligonucleotide
ugcucuugccagagcacug

SEQ ID NO: 3003503 - RNA, 19 nt, Artificial Sequence
  Description of Artificial Sequence: Synthetic oligonucleotide
gaucucagucuggaggccc

SEQ ID NO: 3003504 - RNA, 19 nt, Artificial Sequence
  Description of Artificial Sequence: Synthetic oligonucleotide
ugugucacguuggcgggag

SEQ ID NO: 3003505 - RNA, 19 nt, Artificial Sequence
  Description of Artificial Sequence: Synthetic oligonucleotide
gacuugugucacguuggcg

SEQ ID NO: 3003506 - RNA, 19 nt, Artificial Sequence
  Description of Artificial Sequence: Synthetic oligonucleotide
cugaggucacaauugggca

SEQ ID NO: 3003507 - RNA, 19 nt, Artificial Sequence
  Description of Artificial Sequence: Synthetic oligonucleotide
agaucucagucuggaggcc

SEQ ID NO: 3003508 - RNA, 19 nt, Artificial Sequence
  Description of Artificial Sequence: Synthetic oligonucleotide
auccaagugucuucggcaa

SEQ ID NO: 3003509 - RNA, 19 nt, Artificial Sequence
  Description of Artificial Sequence: Synthetic oligonucleotide
ucagucuggaggcccugca

SEQ ID NO: 3003510 - RNA, 19 nt, Artificial Sequence
  Description of Artificial Sequence: Synthetic oligonucleotide
caucggauccacacaccag

SEQ ID NO: 3003511 - RNA, 19 nt, Artificial Sequence
  Description of Artificial Sequence: Synthetic oligonucleotide
acaauugggcauguagagu

SEQ ID NO: 3003512 - RNA, 19 nt, Artificial Sequence
  Description of Artificial Sequence: Synthetic oligonucleotide
cuuucuguagaagccucug

SEQ ID NO: 3003513 - RNA, 19 nt, Artificial Sequence
  Description of Artificial Sequence: Synthetic oligonucleotide
uacugaauccaagugucuu

SEQ ID NO: 3003514 - RNA, 19 nt, Artificial Sequence
  Description of Artificial Sequence: Synthetic oligonucleotide
auguagaguccgugcgcac

SEQ ID NO: 3003515 - RNA, 19 nt, Artificial Sequence
  Description of Artificial Sequence: Synthetic oligonucleotide
ggucccuggauucuucugc

SEQ ID NO: 3003516 - RNA, 19 nt, Artificial Sequence
  Description of Artificial Sequence: Synthetic oligonucleotide
gagaggaccgacacugcug

SEQ ID NO: 3003517 - RNA, 19 nt, Artificial Sequence
  Description of Artificial Sequence: Synthetic oligonucleotide
cugcaguacugaauccaag

SEQ ID NO: 3003518 - RNA, 19 nt, Artificial Sequence
  Description of Artificial Sequence: Synthetic oligonucleotide
cuguagaagccucugaggu

SEQ ID NO: 3003519 - RNA, 19 nt, Artificial Sequence
  Description of Artificial Sequence: Synthetic oligonucleotide
ccugagaggaccgacacug

SEQ ID NO: 3003520 - RNA, 19 nt, Artificial Sequence
  Description of Artificial Sequence: Synthetic oligonucleotide
cucugugacuugugucacg

SEQ ID NO: 3003521 - RNA, 19 nt, Artificial Sequence
  Description of Artificial Sequence: Synthetic oligonucleotide
cuuuagccacugcucuugc

SEQ ID NO: 3003522 - RNA, 19 nt, Artificial Sequence
  Description of Artificial Sequence: Synthetic oligonucleotide
gcugcuuucuguagaagcc

SEQ ID NO: 3003523 - RNA, 19 nt, Artificial Sequence
  Description of Artificial Sequence: Synthetic oligonucleotide
caucuggagacacuggcaa

SEQ ID NO: 3003524 - RNA, 19 nt, Artificial Sequence
  Description of Artificial Sequence: Synthetic oligonucleotide
ucugcuggucucugugacu

SEQ ID NO: 3003525 - RNA, 19 nt, Artificial Sequence
  Description of Artificial Sequence: Synthetic oligonucleotide
ucccaccugcuuuagccac

SEQ ID NO: 3003526 - RNA, 19 nt, Artificial Sequence
  Description of Artificial Sequence: Synthetic oligonucleotide
uccccugagaggaccgaca

SEQ ID NO: 3003527 - RNA, 19 nt, Artificial Sequence
  Description of Artificial Sequence: Synthetic oligonucleotide
gugucuucggcaagggccc

SEQ ID NO: 3003528 - RNA, 19 nt, Artificial Sequence
  Description of Artificial Sequence: Synthetic oligonucleotide
cagagcacugugagcuucc

SEQ ID NO: 3003529 - RNA, 19 nt, Artificial Sequence
  Description of Artificial Sequence: Synthetic oligonucleotide
cacugcucuugccagagca

SEQ ID NO: 3003530 - RNA, 19 nt, Artificial Sequence
  Description of Artificial Sequence: Synthetic oligonucleotide
acugcucuugccagagcac

SEQ ID NO: 3003531 - RNA, 19 nt, Artificial Sequence
  Description of Artificial Sequence: Synthetic oligonucleotide
ugggcauguagaguccgug

SEQ ID NO: 3003532 - RNA, 19 nt, Artificial Sequence
  Description of Artificial Sequence: Synthetic oligonucleotide
uccacacaccagcaagguc

SEQ ID NO: 3003533 - RNA, 19 nt, Artificial Sequence
  Description of Artificial Sequence: Synthetic oligonucleotide
ucucugugacuugugucac

SEQ ID NO: 3003534 - RNA, 19 nt, Artificial Sequence
  Description of Artificial Sequence: Synthetic oligonucleotide
caagugucuucggcaaggg

SEQ ID NO: 3003535 - RNA, 19 nt, Artificial Sequence
  Description of Artificial Sequence: Synthetic oligonucleotide
gccaucuggagacacuggc

SEQ ID NO: 3003536 - RNA, 19 nt, Artificial Sequence
  Description of Artificial Sequence: Synthetic oligonucleotide
ggcgauuccccugagagga

SEQ ID NO: 3003537 - RNA, 19 nt, Artificial Sequence
  Description of Artificial Sequence: Synthetic oligonucleotide
uugccagagcacugugagc

SEQ ID NO: 3003538 - RNA, 19 nt, Artificial Sequence
  Description of Artificial Sequence: Synthetic oligonucleotide
cuggagacacuggcaaggg

SEQ ID NO: 3003539 - RNA, 19 nt, Artificial Sequence
  Description of Artificial Sequence: Synthetic oligonucleotide
aagccucugaggucacaau

SEQ ID NO: 3003540 - RNA, 19 nt, Artificial Sequence
  Description of Artificial Sequence: Synthetic oligonucleotide
uucggcaagggcccaucuc

SEQ ID NO: 3003541 - RNA, 19 nt, Artificial Sequence
  Description of Artificial Sequence: Synthetic oligonucleotide
caguacugaauccaagugu

SEQ ID NO: 3003542 - RNA, 19 nt, Artificial Sequence
  Description of Artificial Sequence: Synthetic oligonucleotide
acacuggcaagggccggcc

SEQ ID NO: 3003543 - RNA, 19 nt, Artificial Sequence
  Description of Artificial Sequence: Synthetic oligonucleotide
uugggcauguagaguccgu

SEQ ID NO: 3003544 - RNA, 19 nt, Artificial Sequence
  Description of Artificial Sequence: Synthetic oligonucleotide
cccuggauucuucugcugg

SEQ ID NO: 3003545 - RNA, 19 nt, Artificial Sequence
  Description of Artificial Sequence: Synthetic oligonucleotide
cauguagaguccgugcgca

SEQ ID NO: 3003546 - RNA, 19 nt, Artificial Sequence
  Description of Artificial Sequence: Synthetic oligonucleotide
agggccggcccaucggauc

SEQ ID NO: 3003547 - RNA, 19 nt, Artificial Sequence
  Description of Artificial Sequence: Synthetic oligonucleotide
ggcccugcaguacugaauc

SEQ ID NO: 3003548 - RNA, 19 nt, Artificial Sequence
  Description of Artificial Sequence: Synthetic oligonucleotide
cacugugagcuuccauggc

SEQ ID NO: 3003549 - RNA, 19 nt, Artificial Sequence
  Description of Artificial Sequence: Synthetic oligonucleotide
cugagaggaccgacacugc

SEQ ID NO: 3003550 - RNA, 19 nt, Artificial Sequence
  Description of Artificial Sequence: Synthetic oligonucleotide
ccugcuuuagccacugcuc

SEQ ID NO: 3003551 - RNA, 19 nt, Artificial Sequence
  Description of Artificial Sequence: Synthetic oligonucleotide
cacguuggcgggaggcacc

SEQ ID NO: 3003552 - RNA, 19 nt, Artificial Sequence
  Description of Artificial Sequence: Synthetic oligonucleotide
gcauguagaguccgugcgc

SEQ ID NO: 3003553 - RNA, 19 nt, Artificial Sequence
  Description of Artificial Sequence: Synthetic oligonucleotide
gacacuggcaagggccggc

SEQ ID NO: 3003554 - RNA, 19 nt, Artificial Sequence
  Description of Artificial Sequence: Synthetic oligonucleotide
uggaggcccugcaguacug

SEQ ID NO: 3003555 - RNA, 19 nt, Artificial Sequence
  Description of Artificial Sequence: Synthetic oligonucleotide
aggucccuggauucuucug

SEQ ID NO: 3003556 - RNA, 19 nt, Artificial Sequence
  Description of Artificial Sequence: Synthetic oligonucleotide
ccaagugucuucggcaagg

SEQ ID NO: 3003557 - RNA, 19 nt, Artificial Sequence
  Description of Artificial Sequence: Synthetic oligonucleotide
ucacguuggcgggaggcac

SEQ ID NO: 3003558 - RNA, 19 nt, Artificial Sequence
  Description of Artificial Sequence: Synthetic oligonucleotide
ucccuggauucuucugcug

SEQ ID NO: 3003559 - RNA, 19 nt, Artificial Sequence
  Description of Artificial Sequence: Synthetic oligonucleotide
uuggcgggaggcaccucca

SEQ ID NO: 3003560 - RNA, 19 nt, Artificial Sequence
  Description of Artificial Sequence: Synthetic oligonucleotide
ucuggaggcccugcaguac

SEQ ID NO: 3003561 - RNA, 19 nt, Artificial Sequence
  Description of Artificial Sequence: Synthetic oligonucleotide
gggcauguagaguccgugc

SEQ ID NO: 3003562 - RNA, 19 nt, Artificial Sequence
  Description of Artificial Sequence: Synthetic oligonucleotide
gcuuuagccacugcucuug

SEQ ID NO: 3003563 - RNA, 19 nt, Artificial Sequence
  Description of Artificial Sequence: Synthetic oligonucleotide
uccuggaggcucccaccug

SEQ ID NO: 3003564 - RNA, 19 nt, Artificial Sequence
  Description of Artificial Sequence: Synthetic oligonucleotide
auccacacaccagcaaggu

SEQ ID NO: 3003565 - RNA, 19 nt, Artificial Sequence
  Description of Artificial Sequence: Synthetic oligonucleotide
gcuuccauggccaucugga

SEQ ID NO: 3003566 - RNA, 19 nt, Artificial Sequence
  Description of Artificial Sequence: Synthetic oligonucleotide
cauggccaucuggagacac

SEQ ID NO: 3003567 - RNA, 19 nt, Artificial Sequence
  Description of Artificial Sequence: Synthetic oligonucleotide
cuucugcuggucucuguga

SEQ ID NO: 3003568 - RNA, 19 nt, Artificial Sequence
  Description of Artificial Sequence: Synthetic oligonucleotide
cucuugccagagcacugug

SEQ ID NO: 3003569 - RNA, 19 nt, Artificial Sequence
  Description of Artificial Sequence: Synthetic oligonucleotide
gcaagguccacggcgauuc

SEQ ID NO: 3003570 - RNA, 19 nt, Artificial Sequence
  Description of Artificial Sequence: Synthetic oligonucleotide
accgacacugcugcuuucu

SEQ ID NO: 3003571 - RNA, 19 nt, Artificial Sequence
  Description of Artificial Sequence: Synthetic oligonucleotide
gcccaucggauccacacac

SEQ ID NO: 3003572 - RNA, 19 nt, Artificial Sequence
  Description of Artificial Sequence: Synthetic oligonucleotide
ggcaagggccggcccaucg

SEQ ID NO: 3003573 - RNA, 19 nt, Artificial Sequence
  Description of Artificial Sequence: Synthetic oligonucleotide
uccgugcgcaccccucgga

SEQ ID NO: 3003574 - RNA, 19 nt, Artificial Sequence
  Description of Artificial Sequence: Synthetic oligonucleotide
gaggcucccaccugcuuua

SEQ ID NO: 3003575 - RNA, 19 nt, Artificial Sequence
  Description of Artificial Sequence: Synthetic oligonucleotide
gugcgcaccccucggaaga

SEQ ID NO: 3003576 - RNA, 19 nt, Artificial Sequence
  Description of Artificial Sequence: Synthetic oligonucleotide
cuggauucuucugcugguc

SEQ ID NO: 3003577 - RNA, 19 nt, Artificial Sequence
  Description of Artificial Sequence: Synthetic oligonucleotide
agaguccgugcgcaccccu

SEQ ID NO: 3003578 - RNA, 19 nt, Artificial Sequence
  Description of Artificial Sequence: Synthetic oligonucleotide
ccuggaggcucccaccugc

SEQ ID NO: 3003579 - RNA, 19 nt, Artificial Sequence
  Description of Artificial Sequence: Synthetic oligonucleotide
cacacaccagcaaggucca

SEQ ID NO: 3003580 - RNA, 19 nt, Artificial Sequence
  Description of Artificial Sequence: Synthetic oligonucleotide
ugcuggucucugugacuug

SEQ ID NO: 3003581 - RNA, 19 nt, Artificial Sequence
  Description of Artificial Sequence: Synthetic oligonucleotide
ccaucucagugucaugaac

SEQ ID NO: 3003582 - RNA, 19 nt, Artificial Sequence
  Description of Artificial Sequence: Synthetic oligonucleotide
uugugucacguuggcggga

SEQ ID NO: 3003583 - RNA, 19 nt, Artificial Sequence
  Description of Artificial Sequence: Synthetic oligonucleotide
uuccccugagaggaccgac

SEQ ID NO: 3003584 - RNA, 19 nt, Artificial Sequence
  Description of Artificial Sequence: Synthetic oligonucleotide
gggugguggaggucccugg

SEQ ID NO: 3003585 - RNA, 19 nt, Artificial Sequence
  Description of Artificial Sequence: Synthetic oligonucleotide
cucagucuggaggcccugc

SEQ ID NO: 3003586 - RNA, 19 nt, Artificial Sequence
  Description of Artificial Sequence: Synthetic oligonucleotide
gcaagggccggcccaucgg

SEQ ID NO: 3003587 - RNA, 19 nt, Artificial Sequence
  Description of Artificial Sequence: Synthetic oligonucleotide
guccgugcgcaccccucgg

SEQ ID NO: 3003588 - RNA, 19 nt, Artificial Sequence
  Description of Artificial Sequence: Synthetic oligonucleotide
cucccaccugcuuuagcca

SEQ ID NO: 3003589 - RNA, 19 nt, Artificial Sequence
  Description of Artificial Sequence: Synthetic oligonucleotide
guccacggcgauuccccug

SEQ ID NO: 3003590 - RNA, 19 nt, Artificial Sequence
  Description of Artificial Sequence: Synthetic oligonucleotide
cccucggaagaucucaguc

SEQ ID NO: 3003591 - RNA, 19 nt, Artificial Sequence
  Description of Artificial Sequence: Synthetic oligonucleotide
ucuucggcaagggcccauc

SEQ ID NO: 3003592 - RNA, 19 nt, Artificial Sequence
  Description of Artificial Sequence: Synthetic oligonucleotide
gcccaucucagugucauga

SEQ ID NO: 3003593 - RNA, 19 nt, Artificial Sequence
  Description of Artificial Sequence: Synthetic oligonucleotide
caagguccacggcgauucc

SEQ ID NO: 3003594 - RNA, 19 nt, Artificial Sequence
  Description of Artificial Sequence: Synthetic oligonucleotide
ucucagucuggaggcccug

SEQ ID NO: 3003595 - RNA, 19 nt, Artificial Sequence
  Description of Artificial Sequence: Synthetic oligonucleotide
gaggcccugcaguacugaa

SEQ ID NO: 3003596 - RNA, 19 nt, Artificial Sequence
  Description of Artificial Sequence: Synthetic oligonucleotide
aggaccgacacugcugcuu

SEQ ID NO: 3003597 - RNA, 19 nt, Artificial Sequence
  Description of Artificial Sequence: Synthetic oligonucleotide
aucucagucuggaggcccu

SEQ ID NO: 3003598 - RNA, 19 nt, Artificial Sequence
  Description of Artificial Sequence: Synthetic oligonucleotide
uagaguccgugcgcacccc

SEQ ID NO: 3003599 - RNA, 19 nt, Artificial Sequence
  Description of Artificial Sequence: Synthetic oligonucleotide
caagggccggcccaucgga

SEQ ID NO: 3003600 - RNA, 19 nt, Artificial Sequence
  Description of Artificial Sequence: Synthetic oligonucleotide
gucuggaggcccugcagua

SEQ ID NO: 3003601 - RNA, 19 nt, Artificial Sequence
  Description of Artificial Sequence: Synthetic oligonucleotide
gaggucccuggauucuucu

SEQ ID NO: 3003602 - RNA, 19 nt, Artificial Sequence
  Description of Artificial Sequence: Synthetic oligonucleotide
gccacugcucuugccagag

SEQ ID NO: 3003603 - RNA, 19 nt, Artificial Sequence
  Description of Artificial Sequence: Synthetic oligonucleotide
gggccggcccaucggaucc

SEQ ID NO: 3003604 - RNA, 19 nt, Artificial Sequence
  Description of Artificial Sequence: Synthetic oligonucleotide
accccucggaagaucucag

SEQ ID NO: 3003605 - RNA, 19 nt, Artificial Sequence
  Description of Artificial Sequence: Synthetic oligonucleotide
gugucacguuggcgggagg

SEQ ID NO: 3003606 - RNA, 19 nt, Artificial Sequence
  Description of Artificial Sequence: Synthetic oligonucleotide
ccaucggauccacacacca

SEQ ID NO: 3003607 - RNA, 19 nt, Artificial Sequence
  Description of Artificial Sequence: Synthetic oligonucleotide
cacuggcaagggccggccc

SEQ ID NO: 3003608 - RNA, 19 nt, Artificial Sequence
  Description of Artificial Sequence: Synthetic oligonucleotide
gucccuggauucuucugcu

SEQ ID NO: 3003609 - RNA, 19 nt, Artificial Sequence
  Description of Artificial Sequence: Synthetic oligonucleotide
agagcacugugagcuucca

SEQ ID NO: 3003610 - RNA, 19 nt, Artificial Sequence
  Description of Artificial Sequence: Synthetic oligonucleotide
gucacguuggcgggaggca

SEQ ID NO: 3003611 - RNA, 19 nt, Artificial Sequence
  Description of Artificial Sequence: Synthetic oligonucleotide
auggccaucuggagacacu

SEQ ID NO: 3003612 - RNA, 19 nt, Artificial Sequence
  Description of Artificial Sequence: Synthetic oligonucleotide
caccccucggaagaucuca

SEQ ID NO: 3003613 - RNA, 19 nt, Artificial Sequence
  Description of Artificial Sequence: Synthetic oligonucleotide
uggaggucccuggauucuu

SEQ ID NO: 3003614 - RNA, 19 nt, Artificial Sequence
  Description of Artificial Sequence: Synthetic oligonucleotide
uggaggcucccaccugcuu

SEQ ID NO: 3003615 - RNA, 19 nt, Artificial Sequence
  Description of Artificial Sequence: Synthetic oligonucleotide
ggugguggaggucccugga

SEQ ID NO: 3003616 - RNA, 19 nt, Artificial Sequence
  Description of Artificial Sequence: Synthetic oligonucleotide
caagggcccaucucagugu

SEQ ID NO: 3003617 - RNA, 19 nt, Artificial Sequence
  Description of Artificial Sequence: Synthetic oligonucleotide
ccagcaagguccacggcga

SEQ ID NO: 3003618 - RNA, 19 nt, Artificial Sequence
  Description of Artificial Sequence: Synthetic oligonucleotide
ugucuucggcaagggccca

SEQ ID NO: 3003619 - RNA, 19 nt, Artificial Sequence
  Description of Artificial Sequence: Synthetic oligonucleotide
ggcgggaggcaccuccaug

SEQ ID NO: 3003620 - RNA, 19 nt, Artificial Sequence
  Description of Artificial Sequence: Synthetic oligonucleotide
auuccccugagaggaccga

SEQ ID NO: 3003621 - RNA, 19 nt, Artificial Sequence
  Description of Artificial Sequence: Synthetic oligonucleotide
gagcuuccauggccaucug

SEQ ID NO: 3003622 - RNA, 19 nt, Artificial Sequence
  Description of Artificial Sequence: Synthetic oligonucleotide
gaccgacacugcugcuuuc

SEQ ID NO: 3003623 - RNA, 19 nt, Artificial Sequence
  Description of Artificial Sequence: Synthetic oligonucleotide
acguuggcgggaggcaccu

SEQ ID NO: 3003624 - RNA, 19 nt, Artificial Sequence
  Description of Artificial Sequence: Synthetic oligonucleotide
ggccaucuggagacacugg

SEQ ID NO: 3003625 - RNA, 19 nt, Artificial Sequence
  Description of Artificial Sequence: Synthetic oligonucleotide
agaagccucugaggucaca

SEQ ID NO: 3003626 - RNA, 19 nt, Artificial Sequence
  Description of Artificial Sequence: Synthetic oligonucleotide
guacugaauccaagugucu

SEQ ID NO: 3003627 - RNA, 19 nt, Artificial Sequence
  Description of Artificial Sequence: Synthetic oligonucleotide
aggucacaauugggcaugu

SEQ ID NO: 3003628 - RNA, 19 nt, Artificial Sequence
  Description of Artificial Sequence: Synthetic oligonucleotide
ccugcaguacugaauccaa

SEQ ID NO: 3003629 - RNA, 19 nt, Artificial Sequence
  Description of Artificial Sequence: Synthetic oligonucleotide
acacaccagcaagguccac

SEQ ID NO: 3003630 - RNA, 19 nt, Artificial Sequence
  Description of Artificial Sequence: Synthetic oligonucleotide
ccccugagaggaccgacac

SEQ ID NO: 3003631 - RNA, 19 nt, Artificial Sequence
  Description of Artificial Sequence: Synthetic oligonucleotide
gugagcuuccauggccauc

SEQ ID NO: 3003632 - RNA, 19 nt, Artificial Sequence
  Description of Artificial Sequence: Synthetic oligonucleotide
cugcuuucuguagaagccu

SEQ ID NO: 3003633 - RNA, 19 nt, Artificial Sequence
  Description of Artificial Sequence: Synthetic oligonucleotide
uggcgggaggcaccuccau

SEQ ID NO: 3003634 - RNA, 19 nt, Artificial Sequence
  Description of Artificial Sequence: Synthetic oligonucleotide
gaguccgugcgcaccccuc

SEQ ID NO: 3003635 - RNA, 19 nt, Artificial Sequence
  Description of Artificial Sequence: Synthetic oligonucleotide
agcaagguccacggcgauu

SEQ ID NO: 3003636 - RNA, 19 nt, Artificial Sequence
  Description of Artificial Sequence: Synthetic oligonucleotide
gggguuuacuuuccuuugu

SEQ ID NO: 3003637 - RNA, 19 nt, Artificial Sequence
  Description of Artificial Sequence: Synthetic oligonucleotide
aagggccggcccaucggau

SEQ ID NO: 3003638 - RNA, 19 nt, Artificial Sequence
  Description of Artificial Sequence: Synthetic oligonucleotide
aggcccugcaguacugaau

SEQ ID NO: 3003639 - RNA, 19 nt, Artificial Sequence
  Description of Artificial Sequence: Synthetic oligonucleotide
gcccugcaguacugaaucc

SEQ ID NO: 3003640 - RNA, 19 nt, Artificial Sequence
  Description of Artificial Sequence: Synthetic oligonucleotide
cuggaggcccugcaguacu

SEQ ID NO: 3003641 - RNA, 19 nt, Artificial Sequence
  Description of Artificial Sequence: Synthetic oligonucleotide
cggcccaucggauccacac

SEQ ID NO: 3003642 - RNA, 19 nt, Artificial Sequence
  Description of Artificial Sequence: Synthetic oligonucleotide
caccugcuuuagccacugc

SEQ ID NO: 3003643 - RNA, 19 nt, Artificial Sequence
  Description of Artificial Sequence: Synthetic oligonucleotide
ggcccaucggauccacaca

SEQ ID NO: 3003644 - RNA, 19 nt, Artificial Sequence
  Description of Artificial Sequence: Synthetic oligonucleotide
ugcgcaccccucggaagau

SEQ ID NO: 3003645 - RNA, 19 nt, Artificial Sequence
  Description of Artificial Sequence: Synthetic oligonucleotide
ccucggaagaucucagucu

SEQ ID NO: 3003646 - RNA, 19 nt, Artificial Sequence
  Description of Artificial Sequence: Synthetic oligonucleotide
cugcucuugccagagcacu

SEQ ID NO: 3003647 - RNA, 19 nt, Artificial Sequence
  Description of Artificial Sequence: Synthetic oligonucleotide
ggguuuacuuuccuuuguu

SEQ ID NO: 3003648 - RNA, 19 nt, Artificial Sequence
  Description of Artificial Sequence: Synthetic oligonucleotide
ccagagcacugugagcuuc

SEQ ID NO: 3003649 - RNA, 19 nt, Artificial Sequence
  Description of Artificial Sequence: Synthetic oligonucleotide
cggcgauuccccugagagg

SEQ ID NO: 3003650 - RNA, 19 nt, Artificial Sequence
  Description of Artificial Sequence: Synthetic oligonucleotide
cacggcgauuccccugaga

SEQ ID NO: 3003651 - RNA, 19 nt, Artificial Sequence
  Description of Artificial Sequence: Synthetic oligonucleotide
cccugcaguacugaaucca

SEQ ID NO: 3003652 - RNA, 19 nt, Artificial Sequence
  Description of Artificial Sequence: Synthetic oligonucleotide
cgauuccccugagaggacc

SEQ ID NO: 3003653 - RNA, 19 nt, Artificial Sequence
  Description of Artificial Sequence: Synthetic oligonucleotide
gagcacugugagcuuccau

SEQ ID NO: 3003654 - RNA, 19 nt, Artificial Sequence
  Description of Artificial Sequence: Synthetic oligonucleotide
cugcuggucucugugacuu

SEQ ID NO: 3003655 - RNA, 19 nt, Artificial Sequence
  Description of Artificial Sequence: Synthetic oligonucleotide
ggggugguggaggucccug

SEQ ID NO: 3003656 - RNA, 19 nt, Artificial Sequence
  Description of Artificial Sequence: Synthetic oligonucleotide
ggaggcucccaccugcuuu

SEQ ID NO: 3003657 - RNA, 19 nt, Artificial Sequence
  Description of Artificial Sequence: Synthetic oligonucleotide
cgugcgcaccccucggaag

SEQ ID NO: 3003658 - RNA, 19 nt, Artificial Sequence
  Description of Artificial Sequence: Synthetic oligonucleotide
ggaggucccuggauucuuc

SEQ ID NO: 3003659 - RNA, 19 nt, Artificial Sequence
  Description of Artificial Sequence: Synthetic oligonucleotide
gugguggaggucccuggau

SEQ ID NO: 3003660 - RNA, 19 nt, Artificial Sequence
  Description of Artificial Sequence: Synthetic oligonucleotide
ccgacacugcugcuuucug

SEQ ID NO: 3003661 - RNA, 19 nt, Artificial Sequence
  Description of Artificial Sequence: Synthetic oligonucleotide
ggcccaucucagugucaug

SEQ ID NO: 3003662 - RNA, 19 nt, Artificial Sequence
  Description of Artificial Sequence: Synthetic oligonucleotide
cccuggauugggccuuaug

SEQ ID NO: 3003663 - RNA, 19 nt, Artificial Sequence
  Description of Artificial Sequence: Synthetic oligonucleotide
cuucggcaagggcccaucu

SEQ ID NO: 3003664 - RNA, 19 nt, Artificial Sequence
  Description of Artificial Sequence: Synthetic oligonucleotide
ggcaccuccaugggguuua

SEQ ID NO: 3003665 - RNA, 19 nt, Artificial Sequence
  Description of Artificial Sequence: Synthetic oligonucleotide
gaggaccgacacugcugcu

SEQ ID NO: 3003666 - RNA, 19 nt, Artificial Sequence
  Description of Artificial Sequence: Synthetic oligonucleotide
gcuggucucugugacuugu

SEQ ID NO: 3003667 - RNA, 19 nt, Artificial Sequence
  Description of Artificial Sequence: Synthetic oligonucleotide
cggcaagggcccaucucag

SEQ ID NO: 3003668 - RNA, 19 nt, Artificial Sequence
  Description of Artificial Sequence: Synthetic oligonucleotide
ggaccgacacugcugcuuu

SEQ ID NO: 3003669 - RNA, 19 nt, Artificial Sequence
  Description of Artificial Sequence: Synthetic oligonucleotide
ccuggauucuucugcuggu

SEQ ID NO: 3003670 - RNA, 19 nt, Artificial Sequence
  Description of Artificial Sequence: Synthetic oligonucleotide
gcuuucuguagaagccucu

SEQ ID NO: 3003671 - RNA, 19 nt, Artificial Sequence
  Description of Artificial Sequence: Synthetic oligonucleotide
agggcccaucucaguguca

SEQ ID NO: 3003672 - RNA, 19 nt, Artificial Sequence
  Description of Artificial Sequence: Synthetic oligonucleotide
gaggcaccuccaugggguu

SEQ ID NO: 3003673 - RNA, 19 nt, Artificial Sequence
  Description of Artificial Sequence: Synthetic oligonucleotide
cuggaggcucccaccugcu

SEQ ID NO: 3003674 - RNA, 19 nt, Artificial Sequence
  Description of Artificial Sequence: Synthetic oligonucleotide
ggaggcccugcaguacuga

SEQ ID NO: 3003675 - RNA, 19 nt, Artificial Sequence
  Description of Artificial Sequence: Synthetic oligonucleotide
aggcaccuccaugggguuu

SEQ ID NO: 3003676 - RNA, 19 nt, Artificial Sequence
  Description of Artificial Sequence: Synthetic oligonucleotide
cccaucucagugucaugaa

SEQ ID NO: 3003677 - RNA, 19 nt, Artificial Sequence
  Description of Artificial Sequence: Synthetic oligonucleotide
cgggaggcaccuccauggg

SEQ ID NO: 3003678 - RNA, 19 nt, Artificial Sequence
  Description of Artificial Sequence: Synthetic oligonucleotide
ccacugcucuugccagagc

SEQ ID NO: 3003679 - RNA, 19 nt, Artificial Sequence
  Description of Artificial Sequence: Synthetic oligonucleotide
gcucuugccagagcacugu

SEQ ID NO: 3003680 - RNA, 19 nt, Artificial Sequence
  Description of Artificial Sequence: Synthetic oligonucleotide
uggcaagggccggcccauc

SEQ ID NO: 3003681 - RNA, 19 nt, Artificial Sequence
  Description of Artificial Sequence: Synthetic oligonucleotide
gggcccaucucagugucau

SEQ ID NO: 3003682 - RNA, 19 nt, Artificial Sequence
  Description of Artificial Sequence: Synthetic oligonucleotide
gcgauuccccugagaggac

SEQ ID NO: 3003683 - RNA, 19 nt, Artificial Sequence
  Description of Artificial Sequence: Synthetic oligonucleotide
cugugacuugugucacguu

SEQ ID NO: 3003684 - RNA, 19 nt, Artificial Sequence
  Description of Artificial Sequence: Synthetic oligonucleotide
ggucacaauugggcaugua

SEQ ID NO: 3003685 - RNA, 19 nt, Artificial Sequence
  Description of Artificial Sequence: Synthetic oligonucleotide
cgacacugcugcuuucugu

SEQ ID NO: 3003686 - RNA, 19 nt, Artificial Sequence
  Description of Artificial Sequence: Synthetic oligonucleotide
cgcaccccucggaagaucu

SEQ ID NO: 3003687 - RNA, 19 nt, Artificial Sequence
  Description of Artificial Sequence: Synthetic oligonucleotide
ccacggcgauuccccugag

SEQ ID NO: 3003688 - RNA, 19 nt, Artificial Sequence
  Description of Artificial Sequence: Synthetic oligonucleotide
gcaccccucggaagaucuc

SEQ ID NO: 3003689 - RNA, 19 nt, Artificial Sequence
  Description of Artificial Sequence: Synthetic oligonucleotide
ccgugcgcaccccucggaa

SEQ ID NO: 3003690 - RNA, 19 nt, Artificial Sequence
  Description of Artificial Sequence: Synthetic oligonucleotide
cggauccacacaccagcaa

SEQ ID NO: 3003691 - RNA, 19 nt, Artificial Sequence
  Description of Artificial Sequence: Synthetic oligonucleotide
cagcaagguccacggcgau

SEQ ID NO: 3003692 - RNA, 19 nt, Artificial Sequence
  Description of Artificial Sequence: Synthetic oligonucleotide
gucuucggcaagggcccau

SEQ ID NO: 3003693 - RNA, 19 nt, Artificial Sequence
  Description of Artificial Sequence: Synthetic oligonucleotide
cccaccugcuuuagccacu

SEQ ID NO: 3003694 - RNA, 19 nt, Artificial Sequence
  Description of Artificial Sequence: Synthetic oligonucleotide
gcaccuccaugggguuuac

SEQ ID NO: 3003695 - RNA, 19 nt, Artificial Sequence
  Description of Artificial Sequence: Synthetic oligonucleotide
gccggcccaucggauccac

SEQ ID NO: 3003696 - RNA, 19 nt, Artificial Sequence
  Description of Artificial Sequence: Synthetic oligonucleotide
gcgcaccccucggaagauc

SEQ ID NO: 3003697 - RNA, 19 nt, Artificial Sequence
  Description of Artificial Sequence: Synthetic oligonucleotide
gccagagcacugugagcuu

SEQ ID NO: 3003698 - RNA, 19 nt, Artificial Sequence
  Description of Artificial Sequence: Synthetic oligonucleotide
cccugagaggaccgacacu

SEQ ID NO: 3003699 - RNA, 19 nt, Artificial Sequence
  Description of Artificial Sequence: Synthetic oligonucleotide
ccccucggaagaucucagu

SEQ ID NO: 3003700 - RNA, 19 nt, Artificial Sequence
  Description of Artificial Sequence: Synthetic oligonucleotide
caccuccaugggguuuacu

SEQ ID NO: 3003701 - RNA, 19 nt, Artificial Sequence
  Description of Artificial Sequence: Synthetic oligonucleotide
ggccggcccaucggaucca

SEQ ID NO: 3003702 - RNA, 19 nt, Artificial Sequence
  Description of Artificial Sequence: Synthetic oligonucleotide
ccggcccaucggauccaca

SEQ ID NO: 3003703 - RNA, 19 nt, Artificial Sequence
  Description of Artificial Sequence: Synthetic oligonucleotide
cguuggcgggaggcaccuc

SEQ ID NO: 3003704 - RNA, 19 nt, Artificial Sequence
  Description of Artificial Sequence: Synthetic oligonucleotide
ccccuggauugggccuuau

SEQ ID NO: 3003705 - RNA, 19 nt, Artificial Sequence
  Description of Artificial Sequence: Synthetic oligonucleotide
auuaucaucauuuaaaugu

SEQ ID NO: 3003706 - RNA, 19 nt, Artificial Sequence
  Description of Artificial Sequence: Synthetic oligonucleotide
aaggaaaauauuuaauugg

SEQ ID NO: 3003707 - RNA, 19 nt, Artificial Sequence
  Description of Artificial Sequence: Synthetic oligonucleotide
aucauuuaaauguaggagc

SEQ ID NO: 3003708 - RNA, 19 nt, Artificial Sequence
  Description of Artificial Sequence: Synthetic oligonucleotide
aauucuucuccucugaaac

SEQ ID NO: 3003709 - RNA, 19 nt, Artificial Sequence
  Description of Artificial Sequence: Synthetic oligonucleotide
cauauuauaauccaaaaug

SEQ ID NO: 3003710 - RNA, 19 nt, Artificial Sequence
  Description of Artificial Sequence: Synthetic oligonucleotide
gaaaauauuuaauuggggc

SEQ ID NO: 3003711 - RNA, 19 nt, Artificial Sequence
  Description of Artificial Sequence: Synthetic oligonucleotide
uuauuuaaaagccuaaagu

SEQ ID NO: 3003712 - RNA, 19 nt, Artificial Sequence
  Description of Artificial Sequence: Synthetic oligonucleotide
aaaucucuuacugagauuc

SEQ ID NO: 3003713 - RNA, 19 nt, Artificial Sequence
  Description of Artificial Sequence: Synthetic oligonucleotide
aaaauauuuaauuggggcu

SEQ ID NO: 3003714 - RNA, 19 nt, Artificial Sequence
  Description of Artificial Sequence: Synthetic oligonucleotide
aagccuaaaguucaaaauc

SEQ ID NO: 3003715 - RNA, 19 nt, Artificial Sequence
  Description of Artificial Sequence: Synthetic oligonucleotide
aaaguucaaaaucucuuac

SEQ ID NO: 3003716 - RNA, 19 nt, Artificial Sequence
  Description of Artificial Sequence: Synthetic oligonucleotide
aauguaggagccuaugggg

SEQ ID NO: 3003717 - RNA, 19 nt, Artificial Sequence
  Description of Artificial Sequence: Synthetic oligonucleotide
uuuaaaagccuaaaguuca

SEQ ID NO: 3003718 - RNA, 19 nt, Artificial Sequence
  Description of Artificial Sequence: Synthetic oligonucleotide
aaagcaaccacauucuuca

SEQ ID NO: 3003719 - RNA, 19 nt, Artificial Sequence
  Description of Artificial Sequence: Synthetic oligonucleotide
cauacuaaaauucuucucc

SEQ ID NO: 3003720 - RNA, 19 nt, Artificial Sequence
  Description of Artificial Sequence: Synthetic oligonucleotide
auauuauaauccaaaaugc

SEQ ID NO: 3003721 - RNA, 19 nt, Artificial Sequence
  Description of Artificial Sequence: Synthetic oligonucleotide
uucaaaaucucuuacugag

SEQ ID NO: 3003722 - RNA, 19 nt, Artificial Sequence
  Description of Artificial Sequence: Synthetic oligonucleotide
aguuucagagguuuagucc

SEQ ID NO: 3003723 - RNA, 19 nt, Artificial Sequence
  Description of Artificial Sequence: Synthetic oligonucleotide
agacuuuucagacaaggac

SEQ ID NO: 3003724 - RNA, 19 nt, Artificial Sequence
  Description of Artificial Sequence: Synthetic oligonucleotide
uaauccaaaaugcauuuag

SEQ ID NO: 3003725 - RNA, 19 nt, Artificial Sequence
  Description of Artificial Sequence: Synthetic oligonucleotide
auuucaaaaguuccuauag

SEQ ID NO: 3003726 - RNA, 19 nt, Artificial Sequence
  Description of Artificial Sequence: Synthetic oligonucleotide
caagacuuauuuaaaagcc

SEQ ID NO: 3003727 - RNA, 19 nt, Artificial Sequence
  Description of Artificial Sequence: Synthetic oligonucleotide
ucauuuaaauguaggagcc

SEQ ID NO: 3003728 - RNA, 19 nt, Artificial Sequence
  Description of Artificial Sequence: Synthetic oligonucleotide
uauagccauauuauaaucc

SEQ ID NO: 3003729 - RNA, 19 nt, Artificial Sequence
  Description of Artificial Sequence: Synthetic oligonucleotide
uccaaaaugcauuuagucc

SEQ ID NO: 3003730 - RNA, 19 nt, Artificial Sequence
  Description of Artificial Sequence: Synthetic oligonucleotide
uauuauaauccaaaaugca

SEQ ID NO: 3003731 - RNA, 19 nt, Artificial Sequence
  Description of Artificial Sequence: Synthetic oligonucleotide
uuuaguccaauuucaaaag

SEQ ID NO: 3003732 - RNA, 19 nt, Artificial Sequence
  Description of Artificial Sequence: Synthetic oligonucleotide
aaauauuuaauuggggcug

SEQ ID NO: 3003733 - RNA, 19 nt, Artificial Sequence
  Description of Artificial Sequence: Synthetic oligonucleotide
uaaauguaggagccuaugg

SEQ ID NO: 3003734 - RNA, 19 nt, Artificial Sequence
  Description of Artificial Sequence: Synthetic oligonucleotide
aaaauaaucacaagaacaa

SEQ ID NO: 3003735 - RNA, 19 nt, Artificial Sequence
  Description of Artificial Sequence: Synthetic oligonucleotide
uucaccaaaauaaucacaa

SEQ ID NO: 3003736 - RNA, 19 nt, Artificial Sequence
  Description of Artificial Sequence: Synthetic oligonucleotide
uccauuaucaucauuuaaa

SEQ ID NO: 3003737 - RNA, 19 nt, Artificial Sequence
  Description of Artificial Sequence: Synthetic oligonucleotide
aguucaaaaucucuuacug

SEQ ID NO: 3003738 - RNA, 19 nt, Artificial Sequence
  Description of Artificial Sequence: Synthetic oligonucleotide
cuuauuuaaaagccuaaag

SEQ ID NO: 3003739 - RNA, 19 nt, Artificial Sequence
  Description of Artificial Sequence: Synthetic oligonucleotide
auuuaguccaauuucaaaa

SEQ ID NO: 3003740 - RNA, 19 nt, Artificial Sequence
  Description of Artificial Sequence: Synthetic oligonucleotide
auccaaaaugcauuuaguc

SEQ ID NO: 3003741 - RNA, 19 nt, Artificial Sequence
  Description of Artificial Sequence: Synthetic oligonucleotide
auuuaaaagccuaaaguuc

SEQ ID NO: 3003742 - RNA, 19 nt, Artificial Sequence
  Description of Artificial Sequence: Synthetic oligonucleotide
aaugcauuuaguccaauuu

SEQ ID NO: 3003743 - RNA, 19 nt, Artificial Sequence
  Description of Artificial Sequence: Synthetic oligonucleotide
agagguuuaguccauuauc

SEQ ID NO: 3003744 - RNA, 19 nt, Artificial Sequence
  Description of Artificial Sequence: Synthetic oligonucleotide
uuauaauccaaaaugcauu

SEQ ID NO: 3003745 - RNA, 19 nt, Artificial Sequence
  Description of Artificial Sequence: Synthetic oligonucleotide
cucuuacugagauucaugg

SEQ ID NO: 3003746 - RNA, 19 nt, Artificial Sequence
  Description of Artificial Sequence: Synthetic oligonucleotide
aaagccuaaaguucaaaau

SEQ ID NO: 3003747 - RNA, 19 nt, Artificial Sequence
  Description of Artificial Sequence: Synthetic oligonucleotide
ucaucauuuaaauguagga

SEQ ID NO: 3003748 - RNA, 19 nt, Artificial Sequence
  Description of Artificial Sequence: Synthetic oligonucleotide
uucauggaaucucuuaacc

SEQ ID NO: 3003749 - RNA, 19 nt, Artificial Sequence
  Description of Artificial Sequence: Synthetic oligonucleotide
aaaagccuaaaguucaaaa

SEQ ID NO: 3003750 - RNA, 19 nt, Artificial Sequence
  Description of Artificial Sequence: Synthetic oligonucleotide
cauggaaucucuuaaccag

SEQ ID NO: 3003751 - RNA, 19 nt, Artificial Sequence
  Description of Artificial Sequence: Synthetic oligonucleotide
ucuuacucaagccaucaca

SEQ ID NO: 3003752 - RNA, 19 nt, Artificial Sequence
  Description of Artificial Sequence: Synthetic oligonucleotide
ugcauuuaguccaauuuca

SEQ ID NO: 3003753 - RNA, 19 nt, Artificial Sequence
  Description of Artificial Sequence: Synthetic oligonucleotide
uagguuuauagccauauua

SEQ ID NO: 3003754 - RNA, 19 nt, Artificial Sequence
  Description of Artificial Sequence: Synthetic oligonucleotide
augcauuuaguccaauuuc

SEQ ID NO: 3003755 - RNA, 19 nt, Artificial Sequence
  Description of Artificial Sequence: Synthetic oligonucleotide
cucaagacuuauuuaaaag

SEQ ID NO: 3003756 - RNA, 19 nt, Artificial Sequence
  Description of Artificial Sequence: Synthetic oligonucleotide
aaaagcaaccacauucuuc

SEQ ID NO: 3003757 - RNA, 19 nt, Artificial Sequence
  Description of Artificial Sequence: Synthetic oligonucleotide
acuaaaauucuucuccucu

SEQ ID NO: 3003758 - RNA, 19 nt, Artificial Sequence
  Description of Artificial Sequence: Synthetic oligonucleotide
aggaaaauauuuaauuggg

SEQ ID NO: 3003759 - RNA, 19 nt, Artificial Sequence
  Description of Artificial Sequence: Synthetic oligonucleotide
aauauuuaauuggggcugg

SEQ ID NO: 3003760 - RNA, 19 nt, Artificial Sequence
  Description of Artificial Sequence: Synthetic oligonucleotide
aguuccuauagucuaucac

SEQ ID NO: 3003761 - RNA, 19 nt, Artificial Sequence
  Description of Artificial Sequence: Synthetic oligonucleotide
uagucuaucacauucucaa

SEQ ID NO: 3003762 - RNA, 19 nt, Artificial Sequence
  Description of Artificial Sequence: Synthetic oligonucleotide
auucucaagacuuauuuaa

SEQ ID NO: 3003763 - RNA, 19 nt, Artificial Sequence
  Description of Artificial Sequence: Synthetic oligonucleotide
uccccauagguuuauagcc

SEQ ID NO: 3003764 - RNA, 19 nt, Artificial Sequence
  Description of Artificial Sequence: Synthetic oligonucleotide
acauacuaaaauucuucuc

SEQ ID NO: 3003765 - RNA, 19 nt, Artificial Sequence
  Description of Artificial Sequence: Synthetic oligonucleotide
aaguucaaaaucucuuacu

SEQ ID NO: 3003766 - RNA, 19 nt, Artificial Sequence
  Description of Artificial Sequence: Synthetic oligonucleotide
auucauggaaucucuuaac

SEQ ID NO: 3003767 - RNA, 19 nt, Artificial Sequence
  Description of Artificial Sequence: Synthetic oligonucleotide
aauaaucacaagaacaauu

SEQ ID NO: 3003768 - RNA, 19 nt, Artificial Sequence
  Description of Artificial Sequence: Synthetic oligonucleotide
aauuucaaaaguuccuaua

SEQ ID NO: 3003769 - RNA, 19 nt, Artificial Sequence
  Description of Artificial Sequence: Synthetic oligonucleotide
ucuaucacauucucaagac

SEQ ID NO: 3003770 - RNA, 19 nt, Artificial Sequence
  Description of Artificial Sequence: Synthetic oligonucleotide
agcaaccacauucuucacc

SEQ ID NO: 3003771 - RNA, 19 nt, Artificial Sequence
  Description of Artificial Sequence: Synthetic oligonucleotide
caucauuuaaauguaggag

SEQ ID NO: 3003772 - RNA, 19 nt, Artificial Sequence
  Description of Artificial Sequence: Synthetic oligonucleotide
auagccauauuauaaucca

SEQ ID NO: 3003773 - RNA, 19 nt, Artificial Sequence
  Description of Artificial Sequence: Synthetic oligonucleotide
uccaauuucaaaaguuccu

SEQ ID NO: 3003774 - RNA, 19 nt, Artificial Sequence
  Description of Artificial Sequence: Synthetic oligonucleotide
uacucaagccaucacauuc

SEQ ID NO: 3003775 - RNA, 19 nt, Artificial Sequence
  Description of Artificial Sequence: Synthetic oligonucleotide
uaucaucauuuaaauguag

SEQ ID NO: 3003776 - RNA, 19 nt, Artificial Sequence
  Description of Artificial Sequence: Synthetic oligonucleotide
uaaaauucuucuccucuga

SEQ ID NO: 3003777 - RNA, 19 nt, Artificial Sequence
  Description of Artificial Sequence: Synthetic oligonucleotide
aaccagacuuuucagacaa

SEQ ID NO: 3003778 - RNA, 19 nt, Artificial Sequence
  Description of Artificial Sequence: Synthetic oligonucleotide
ucuccucugaaacaucuug

SEQ ID NO: 3003779 - RNA, 19 nt, Artificial Sequence
  Description of Artificial Sequence: Synthetic oligonucleotide
acauucuucaccaaaauaa

SEQ ID NO: 3003780 - RNA, 19 nt, Artificial Sequence
  Description of Artificial Sequence: Synthetic oligonucleotide
uuucaaaaguuccuauagu

SEQ ID NO: 3003781 - RNA, 19 nt, Artificial Sequence
  Description of Artificial Sequence: Synthetic oligonucleotide
ucauggaaucucuuaacca

SEQ ID NO: 3003782 - RNA, 19 nt, Artificial Sequence
  Description of Artificial Sequence: Synthetic oligonucleotide
guuccuauagucuaucaca

SEQ ID NO: 3003783 - RNA, 19 nt, Artificial Sequence
  Description of Artificial Sequence: Synthetic oligonucleotide
uuuucagacaaggacaaaa

SEQ ID NO: 3003784 - RNA, 19 nt, Artificial Sequence
  Description of Artificial Sequence: Synthetic oligonucleotide
uauaauccaaaaugcauuu

SEQ ID NO: 3003785 - RNA, 19 nt, Artificial Sequence
  Description of Artificial Sequence: Synthetic oligonucleotide
aagccaucacauuccacuc

SEQ ID NO: 3003786 - RNA, 19 nt, Artificial Sequence
  Description of Artificial Sequence: Synthetic oligonucleotide
uaaaguucaaaaucucuua

SEQ ID NO: 3003787 - RNA, 19 nt, Artificial Sequence
  Description of Artificial Sequence: Synthetic oligonucleotide
ugagauucauggaaucucu

SEQ ID NO: 3003788 - RNA, 19 nt, Artificial Sequence
  Description of Artificial Sequence: Synthetic oligonucleotide
uuaucaucauuuaaaugua

SEQ ID NO: 3003789 - RNA, 19 nt, Artificial Sequence
  Description of Artificial Sequence: Synthetic oligonucleotide
aucaucauuuaaauguagg

SEQ ID NO: 3003790 - RNA, 19 nt, Artificial Sequence
  Description of Artificial Sequence: Synthetic oligonucleotide
ucacauuccacucccuggc

SEQ ID NO: 3003791 - RNA, 19 nt, Artificial Sequence
  Description of Artificial Sequence: Synthetic oligonucleotide
uuaguccaauuucaaaagu

SEQ ID NO: 3003792 - RNA, 19 nt, Artificial Sequence
  Description of Artificial Sequence: Synthetic oligonucleotide
ucuuaaccagacuuuucag

SEQ ID NO: 3003793 - RNA, 19 nt, Artificial Sequence
  Description of Artificial Sequence: Synthetic oligonucleotide
guuucagagguuuagucca

SEQ ID NO: 3003794 - RNA, 19 nt, Artificial Sequence
  Description of Artificial Sequence: Synthetic oligonucleotide
ucuucaccaaaauaaucac

SEQ ID NO: 3003795 - RNA, 19 nt, Artificial Sequence
  Description of Artificial Sequence: Synthetic oligonucleotide
uuauagccauauuauaauc

SEQ ID NO: 3003796 - RNA, 19 nt, Artificial Sequence
  Description of Artificial Sequence: Synthetic oligonucleotide
auuauaauccaaaaugcau

SEQ ID NO: 3003797 - RNA, 19 nt, Artificial Sequence
  Description of Artificial Sequence: Synthetic oligonucleotide
aguccaauuucaaaaguuc

SEQ ID NO: 3003798 - RNA, 19 nt, Artificial Sequence
  Description of Artificial Sequence: Synthetic oligonucleotide
aauuggggcuggcuuacag

SEQ ID NO: 3003799 - RNA, 19 nt, Artificial Sequence
  Description of Artificial Sequence: Synthetic oligonucleotide
cuaaaauucuucuccucug

SEQ ID NO: 3003800 - RNA, 19 nt, Artificial Sequence
  Description of Artificial Sequence: Synthetic oligonucleotide
aaaguuccuauagucuauc

SEQ ID NO: 3003801 - RNA, 19 nt, Artificial Sequence
  Description of Artificial Sequence: Synthetic oligonucleotide
cauuaucaucauuuaaaug

SEQ ID NO: 3003802 - RNA, 19 nt, Artificial Sequence
  Description of Artificial Sequence: Synthetic oligonucleotide
cuuacugagauucauggaa

SEQ ID NO: 3003803 - RNA, 19 nt, Artificial Sequence
  Description of Artificial Sequence: Synthetic oligonucleotide
auacuaaaauucuucuccu

SEQ ID NO: 3003804 - RNA, 19 nt, Artificial Sequence
  Description of Artificial Sequence: Synthetic oligonucleotide
gauucauggaaucucuuaa

SEQ ID NO: 3003805 - RNA, 19 nt, Artificial Sequence
  Description of Artificial Sequence: Synthetic oligonucleotide
ucucaagacuuauuuaaaa

SEQ ID NO: 3003806 - RNA, 19 nt, Artificial Sequence
  Description of Artificial Sequence: Synthetic oligonucleotide
acauucucaagacuuauuu

SEQ ID NO: 3003807 - RNA, 19 nt, Artificial Sequence
  Description of Artificial Sequence: Synthetic oligonucleotide
ucaaaaucucuuacugaga

SEQ ID NO: 3003808 - RNA, 19 nt, Artificial Sequence
  Description of Artificial Sequence: Synthetic oligonucleotide
gacuuuucagacaaggaca

SEQ ID NO: 3003809 - RNA, 19 nt, Artificial Sequence
  Description of Artificial Sequence: Synthetic oligonucleotide
aagacuuauuuaaaagccu

SEQ ID NO: 3003810 - RNA, 19 nt, Artificial Sequence
  Description of Artificial Sequence: Synthetic oligonucleotide
aaaauucuucuccucugaa

SEQ ID NO: 3003811 - RNA, 19 nt, Artificial Sequence
  Description of Artificial Sequence: Synthetic oligonucleotide
accaaaauaaucacaagaa

SEQ ID NO: 3003812 - RNA, 19 nt, Artificial Sequence
  Description of Artificial Sequence: Synthetic oligonucleotide
caccaaaauaaucacaaga

SEQ ID NO: 3003813 - RNA, 19 nt, Artificial Sequence
  Description of Artificial Sequence: Synthetic oligonucleotide
uuaaauguaggagccuaug

SEQ ID NO: 3003814 - RNA, 19 nt, Artificial Sequence
  Description of Artificial Sequence: Synthetic oligonucleotide
acucaagccaucacauucc

SEQ ID NO: 3003815 - RNA, 19 nt, Artificial Sequence
  Description of Artificial Sequence: Synthetic oligonucleotide
uuccuauagucuaucacau

SEQ ID NO: 3003816 - RNA, 19 nt, Artificial Sequence
  Description of Artificial Sequence: Synthetic oligonucleotide
aaaugcauuuaguccaauu

SEQ ID NO: 3003817 - RNA, 19 nt, Artificial Sequence
  Description of Artificial Sequence: Synthetic oligonucleotide
aaauaaucacaagaacaau

SEQ ID NO: 3003818 - RNA, 19 nt, Artificial Sequence
  Description of Artificial Sequence: Synthetic oligonucleotide
uuacugagauucauggaau

SEQ ID NO: 3003819 - RNA, 19 nt, Artificial Sequence
  Description of Artificial Sequence: Synthetic oligonucleotide
ucaccaaaauaaucacaag

SEQ ID NO: 3003820 - RNA, 19 nt, Artificial Sequence
  Description of Artificial Sequence: Synthetic oligonucleotide
uaguccaauuucaaaaguu

SEQ ID NO: 3003821 - RNA, 19 nt, Artificial Sequence
  Description of Artificial Sequence: Synthetic oligonucleotide
aauccaaaaugcauuuagu

SEQ ID NO: 3003822 - RNA, 19 nt, Artificial Sequence
  Description of Artificial Sequence: Synthetic oligonucleotide
uuuaaauguaggagccuau

SEQ ID NO: 3003823 - RNA, 19 nt, Artificial Sequence
  Description of Artificial Sequence: Synthetic oligonucleotide
cuccccauagguuuauagc

SEQ ID NO: 3003824 - RNA, 19 nt, Artificial Sequence
  Description of Artificial Sequence: Synthetic oligonucleotide
uucucaagacuuauuuaaa

SEQ ID NO: 3003825 - RNA, 19 nt, Artificial Sequence
  Description of Artificial Sequence: Synthetic oligonucleotide
uaggccacauacuaaaauu

SEQ ID NO: 3003826 - RNA, 19 nt, Artificial Sequence
  Description of Artificial Sequence: Synthetic oligonucleotide
auaaucacaagaacaauuu

SEQ ID NO: 3003827 - RNA, 19 nt, Artificial Sequence
  Description of Artificial Sequence: Synthetic oligonucleotide
gucuaucacauucucaaga

SEQ ID NO: 3003828 - RNA, 19 nt, Artificial Sequence
  Description of Artificial Sequence: Synthetic oligonucleotide
uggaaucucuuaaccagac

SEQ ID NO: 3003829 - RNA, 19 nt, Artificial Sequence
  Description of Artificial Sequence: Synthetic oligonucleotide
gaaucucuuaaccagacuu

SEQ ID NO: 3003830 - RNA, 19 nt, Artificial Sequence
  Description of Artificial Sequence: Synthetic oligonucleotide
aaccacauucuucaccaaa

SEQ ID NO: 3003831 - RNA, 19 nt, Artificial Sequence
  Description of Artificial Sequence: Synthetic oligonucleotide
ucuuacugagauucaugga

SEQ ID NO: 3003832 - RNA, 19 nt, Artificial Sequence
  Description of Artificial Sequence: Synthetic oligonucleotide
uuaaaagccuaaaguucaa

SEQ ID NO: 3003833 - RNA, 19 nt, Artificial Sequence
  Description of Artificial Sequence: Synthetic oligonucleotide
ccuauagucuaucacauuc

SEQ ID NO: 3003834 - RNA, 19 nt, Artificial Sequence
  Description of Artificial Sequence: Synthetic oligonucleotide
cucuuaaccagacuuuuca

SEQ ID NO: 3003835 - RNA, 19 nt, Artificial Sequence
  Description of Artificial Sequence: Synthetic oligonucleotide
uaaucacaagaacaauuuu

SEQ ID NO: 3003836 - RNA, 19 nt, Artificial Sequence
  Description of Artificial Sequence: Synthetic oligonucleotide
aaguuccuauagucuauca

SEQ ID NO: 3003837 - RNA, 19 nt, Artificial Sequence
  Description of Artificial Sequence: Synthetic oligonucleotide
guucaaaaucucuuacuga

SEQ ID NO: 3003838 - RNA, 19 nt, Artificial Sequence
  Description of Artificial Sequence: Synthetic oligonucleotide
ccaaaaugcauuuagucca

SEQ ID NO: 3003839 - RNA, 19 nt, Artificial Sequence
  Description of Artificial Sequence: Synthetic oligonucleotide
agccuaaaguucaaaaucu

SEQ ID NO: 3003840 - RNA, 19 nt, Artificial Sequence
  Description of Artificial Sequence: Synthetic oligonucleotide
aaaaucucuuacugagauu

SEQ ID NO: 3003841 - RNA, 19 nt, Artificial Sequence
  Description of Artificial Sequence: Synthetic oligonucleotide
caaaaguuccuauagucua

SEQ ID NO: 3003842 - RNA, 19 nt, Artificial Sequence
  Description of Artificial Sequence: Synthetic oligonucleotide
agucuaucacauucucaag

SEQ ID NO: 3003843 - RNA, 19 nt, Artificial Sequence
  Description of Artificial Sequence: Synthetic oligonucleotide
aggccacauacuaaaauuc

SEQ ID NO: 3003844 - RNA, 19 nt, Artificial Sequence
  Description of Artificial Sequence: Synthetic oligonucleotide
auuuaaauguaggagccua

SEQ ID NO: 3003845 - RNA, 19 nt, Artificial Sequence
  Description of Artificial Sequence: Synthetic oligonucleotide
aagcaaccacauucuucac

SEQ ID NO: 3003846 - RNA, 19 nt, Artificial Sequence
  Description of Artificial Sequence: Synthetic oligonucleotide
uaaccagacuuuucagaca

SEQ ID NO: 3003847 - RNA, 19 nt, Artificial Sequence
  Description of Artificial Sequence: Synthetic oligonucleotide
agauucauggaaucucuua

SEQ ID NO: 3003848 - RNA, 19 nt, Artificial Sequence
  Description of Artificial Sequence: Synthetic oligonucleotide
uacuaaaauucuucuccuc

SEQ ID NO: 3003849 - RNA, 19 nt, Artificial Sequence
  Description of Artificial Sequence: Synthetic oligonucleotide
aaaaguuccuauagucuau

SEQ ID NO: 3003850 - RNA, 19 nt, Artificial Sequence
  Description of Artificial Sequence: Synthetic oligonucleotide
agguuuauagccauauuau

SEQ ID NO: 3003851 - RNA, 19 nt, Artificial Sequence
  Description of Artificial Sequence: Synthetic oligonucleotide
uuuaggccacauacuaaaa

SEQ ID NO: 3003852 - RNA, 19 nt, Artificial Sequence
  Description of Artificial Sequence: Synthetic oligonucleotide
caguuucagagguuuaguc

SEQ ID NO: 3003853 - RNA, 19 nt, Artificial Sequence
  Description of Artificial Sequence: Synthetic oligonucleotide
ucucuuaaccagacuuuuc

SEQ ID NO: 3003854 - RNA, 19 nt, Artificial Sequence
  Description of Artificial Sequence: Synthetic oligonucleotide
cuucaccaaaauaaucaca

SEQ ID NO: 3003855 - RNA, 19 nt, Artificial Sequence
  Description of Artificial Sequence: Synthetic oligonucleotide
uacugagauucauggaauc

SEQ ID NO: 3003856 - RNA, 19 nt, Artificial Sequence
  Description of Artificial Sequence: Synthetic oligonucleotide
acugagauucauggaaucu

SEQ ID NO: 3003857 - RNA, 19 nt, Artificial Sequence
  Description of Artificial Sequence: Synthetic oligonucleotide
uagccauauuauaauccaa

SEQ ID NO: 3003858 - RNA, 19 nt, Artificial Sequence
  Description of Artificial Sequence: Synthetic oligonucleotide
aaucucuuaaccagacuuu

SEQ ID NO: 3003859 - RNA, 19 nt, Artificial Sequence
  Description of Artificial Sequence: Synthetic oligonucleotide
cugagauucauggaaucuc

SEQ ID NO: 3003860 - RNA, 19 nt, Artificial Sequence
  Description of Artificial Sequence: Synthetic oligonucleotide
gcaaccacauucuucacca

SEQ ID NO: 3003861 - RNA, 19 nt, Artificial Sequence
  Description of Artificial Sequence: Synthetic oligonucleotide
auucuuacucaagccauca

SEQ ID NO: 3003862 - RNA, 19 nt, Artificial Sequence
  Description of Artificial Sequence: Synthetic oligonucleotide
uucuuacucaagccaucac

SEQ ID NO: 3003863 - RNA, 19 nt, Artificial Sequence
  Description of Artificial Sequence: Synthetic oligonucleotide
uuggggcuggcuuacaguu

SEQ ID NO: 3003864 - RNA, 19 nt, Artificial Sequence
  Description of Artificial Sequence: Synthetic oligonucleotide
cuaaaguucaaaaucucuu

SEQ ID NO: 3003865 - RNA, 19 nt, Artificial Sequence
  Description of Artificial Sequence: Synthetic oligonucleotide
cauuuaguccaauuucaaa

SEQ ID NO: 3003866 - RNA, 19 nt, Artificial Sequence
  Description of Artificial Sequence: Synthetic oligonucleotide
cauucuuacucaagccauc

SEQ ID NO: 3003867 - RNA, 19 nt, Artificial Sequence
  Description of Artificial Sequence: Synthetic oligonucleotide
ucagagguuuaguccauua

SEQ ID NO: 3003868 - RNA, 19 nt, Artificial Sequence
  Description of Artificial Sequence: Synthetic oligonucleotide
ccacauacuaaaauucuuc

SEQ ID NO: 3003869 - RNA, 19 nt, Artificial Sequence
  Description of Artificial Sequence: Synthetic oligonucleotide
agacuuauuuaaaagccua

SEQ ID NO: 3003870 - RNA, 19 nt, Artificial Sequence
  Description of Artificial Sequence: Synthetic oligonucleotide
auuggggcuggcuuacagu

SEQ ID NO: 3003871 - RNA, 19 nt, Artificial Sequence
  Description of Artificial Sequence: Synthetic oligonucleotide
agccauauuauaauccaaa

SEQ ID NO: 3003872 - RNA, 19 nt, Artificial Sequence
  Description of Artificial Sequence: Synthetic oligonucleotide
acuuuucagacaaggacaa

SEQ ID NO: 3003873 - RNA, 19 nt, Artificial Sequence
  Description of Artificial Sequence: Synthetic oligonucleotide
aguccauuaucaucauuua

SEQ ID NO: 3003874 - RNA, 19 nt, Artificial Sequence
  Description of Artificial Sequence: Synthetic oligonucleotide
acucccuggcuccccauag

SEQ ID NO: 3003875 - RNA, 19 nt, Artificial Sequence
  Description of Artificial Sequence: Synthetic oligonucleotide
ccagacuuuucagacaagg

SEQ ID NO: 3003876 - RNA, 19 nt, Artificial Sequence
  Description of Artificial Sequence: Synthetic oligonucleotide
cacauacuaaaauucuucu

SEQ ID NO: 3003877 - RNA, 19 nt, Artificial Sequence
  Description of Artificial Sequence: Synthetic oligonucleotide
auagucuaucacauucuca

SEQ ID NO: 3003878 - RNA, 19 nt, Artificial Sequence
  Description of Artificial Sequence: Synthetic oligonucleotide
ucccuggcuccccauaggu

SEQ ID NO: 3003879 - RNA, 19 nt, Artificial Sequence
  Description of Artificial Sequence: Synthetic oligonucleotide
gggccauucuuacucaagc

SEQ ID NO: 3003880 - RNA, 19 nt, Artificial Sequence
  Description of Artificial Sequence: Synthetic oligonucleotide
ucaagccaucacauuccac

SEQ ID NO: 3003881 - RNA, 19 nt, Artificial Sequence
  Description of Artificial Sequence: Synthetic oligonucleotide
cagacuuuucagacaagga

SEQ ID NO: 3003882 - RNA, 19 nt, Artificial Sequence
  Description of Artificial Sequence: Synthetic oligonucleotide
uuucagagguuuaguccau

SEQ ID NO: 3003883 - RNA, 19 nt, Artificial Sequence
  Description of Artificial Sequence: Synthetic oligonucleotide
ucacauucucaagacuuau

SEQ ID NO: 3003884 - RNA, 19 nt, Artificial Sequence
  Description of Artificial Sequence: Synthetic oligonucleotide
ucuucuccucugaaacauc

SEQ ID NO: 3003885 - RNA, 19 nt, Artificial Sequence
  Description of Artificial Sequence: Synthetic oligonucleotide
aaucucuuacugagauuca

SEQ ID NO: 3003886 - RNA, 19 nt, Artificial Sequence
  Description of Artificial Sequence: Synthetic oligonucleotide
cuccucugaaacaucuuga

SEQ ID NO: 3003887 - RNA, 19 nt, Artificial Sequence
  Description of Artificial Sequence: Synthetic oligonucleotide
gccauucuuacucaagcca

SEQ ID NO: 3003888 - RNA, 19 nt, Artificial Sequence
  Description of Artificial Sequence: Synthetic oligonucleotide
cauucucaagacuuauuua

SEQ ID NO: 3003889 - RNA, 19 nt, Artificial Sequence
  Description of Artificial Sequence: Synthetic oligonucleotide
guccauuaucaucauuuaa

SEQ ID NO: 3003890 - RNA, 19 nt, Artificial Sequence
  Description of Artificial Sequence: Synthetic oligonucleotide
auagguuuauagccauauu

SEQ ID NO: 3003891 - RNA, 19 nt, Artificial Sequence
  Description of Artificial Sequence: Synthetic oligonucleotide
auggaaucucuuaaccaga

SEQ ID NO: 3003892 - RNA, 19 nt, Artificial Sequence
  Description of Artificial Sequence: Synthetic oligonucleotide
accacauucuucaccaaaa

SEQ ID NO: 3003893 - RNA, 19 nt, Artificial Sequence
  Description of Artificial Sequence: Synthetic oligonucleotide
ggccauucuuacucaagcc

SEQ ID NO: 3003894 - RNA, 19 nt, Artificial Sequence
  Description of Artificial Sequence: Synthetic oligonucleotide
cuauagucuaucacauucu

SEQ ID NO: 3003895 - RNA, 19 nt, Artificial Sequence
  Description of Artificial Sequence: Synthetic oligonucleotide
gguuuauagccauauuaua

SEQ ID NO: 3003896 - RNA, 19 nt, Artificial Sequence
  Description of Artificial Sequence: Synthetic oligonucleotide
uuacucaagccaucacauu

SEQ ID NO: 3003897 - RNA, 19 nt, Artificial Sequence
  Description of Artificial Sequence: Synthetic oligonucleotide
aucucuuaaccagacuuuu

SEQ ID NO: 3003898 - RNA, 19 nt, Artificial Sequence
  Description of Artificial Sequence: Synthetic oligonucleotide
cauucuucaccaaaauaau

SEQ ID NO: 3003899 - RNA, 19 nt, Artificial Sequence
  Description of Artificial Sequence: Synthetic oligonucleotide
cacauucuucaccaaaaua

SEQ ID NO: 3003900 - RNA, 19 nt, Artificial Sequence
  Description of Artificial Sequence: Synthetic oligonucleotide
auuccacucccuggcuccc

SEQ ID NO: 3003901 - RNA, 19 nt, Artificial Sequence
  Description of Artificial Sequence: Synthetic oligonucleotide
gcuccccauagguuuauag

SEQ ID NO: 3003902 - RNA, 19 nt, Artificial Sequence
  Description of Artificial Sequence: Synthetic oligonucleotide
aucucuuacugagauucau

SEQ ID NO: 3003903 - RNA, 19 nt, Artificial Sequence
  Description of Artificial Sequence: Synthetic oligonucleotide
gccauauuauaauccaaaa

SEQ ID NO: 3003904 - RNA, 19 nt, Artificial Sequence
  Description of Artificial Sequence: Synthetic oligonucleotide
uccuauagucuaucacauu

SEQ ID NO: 3003905 - RNA, 19 nt, Artificial Sequence
  Description of Artificial Sequence: Synthetic oligonucleotide
cuucuccucugaaacaucu

SEQ ID NO: 3003906 - RNA, 19 nt, Artificial Sequence
  Description of Artificial Sequence: Synthetic oligonucleotide
auaauccaaaaugcauuua

SEQ ID NO: 3003907 - RNA, 19 nt, Artificial Sequence
  Description of Artificial Sequence: Synthetic oligonucleotide
uccacucccuggcucccca

SEQ ID NO: 3003908 - RNA, 19 nt, Artificial Sequence
  Description of Artificial Sequence: Synthetic oligonucleotide
uucuccucugaaacaucuu

SEQ ID NO: 3003909 - RNA, 19 nt, Artificial Sequence
  Description of Artificial Sequence: Synthetic oligonucleotide
caauuucaaaaguuccuau

SEQ ID NO: 3003910 - RNA, 19 nt, Artificial Sequence
  Description of Artificial Sequence: Synthetic oligonucleotide
cauagguuuauagccauau

SEQ ID NO: 3003911 - RNA, 19 nt, Artificial Sequence
  Description of Artificial Sequence: Synthetic oligonucleotide
aucacauucucaagacuua

SEQ ID NO: 3003912 - RNA, 19 nt, Artificial Sequence
  Description of Artificial Sequence: Synthetic oligonucleotide
cucaagccaucacauucca

SEQ ID NO: 3003913 - RNA, 19 nt, Artificial Sequence
  Description of Artificial Sequence: Synthetic oligonucleotide
cucccuggcuccccauagg

SEQ ID NO: 3003914 - RNA, 19 nt, Artificial Sequence
  Description of Artificial Sequence: Synthetic oligonucleotide
ggggcuggcuuacaguuuc

SEQ ID NO: 3003915 - RNA, 19 nt, Artificial Sequence
  Description of Artificial Sequence: Synthetic oligonucleotide
ccuaaaguucaaaaucucu

SEQ ID NO: 3003916 - RNA, 19 nt, Artificial Sequence
  Description of Artificial Sequence: Synthetic oligonucleotide
uggggcuggcuuacaguuu

SEQ ID NO: 3003917 - RNA, 19 nt, Artificial Sequence
  Description of Artificial Sequence: Synthetic oligonucleotide
uucagagguuuaguccauu

SEQ ID NO: 3003918 - RNA, 19 nt, Artificial Sequence
  Description of Artificial Sequence: Synthetic oligonucleotide
uaauuggggcuggcuuaca

SEQ ID NO: 3003919 - RNA, 19 nt, Artificial Sequence
  Description of Artificial Sequence: Synthetic oligonucleotide
ccauauuauaauccaaaau

SEQ ID NO: 3003920 - RNA, 19 nt, Artificial Sequence
  Description of Artificial Sequence: Synthetic oligonucleotide
gccuaaaguucaaaaucuc

SEQ ID NO: 3003921 - RNA, 19 nt, Artificial Sequence
  Description of Artificial Sequence: Synthetic oligonucleotide
cauuuaaauguaggagccu

SEQ ID NO: 3003922 - RNA, 19 nt, Artificial Sequence
  Description of Artificial Sequence: Synthetic oligonucleotide
accagacuuuucagacaag

SEQ ID NO: 3003923 - RNA, 19 nt, Artificial Sequence
  Description of Artificial Sequence: Synthetic oligonucleotide
ggggccauucuuacucaag

SEQ ID NO: 3003924 - RNA, 19 nt, Artificial Sequence
  Description of Artificial Sequence: Synthetic oligonucleotide
ccccauagguuuauagcca

SEQ ID NO: 3003925 - RNA, 19 nt, Artificial Sequence
  Description of Artificial Sequence: Synthetic oligonucleotide
ggcuggcuuacaguuucag

SEQ ID NO: 3003926 - RNA, 19 nt, Artificial Sequence
  Description of Artificial Sequence: Synthetic oligonucleotide
cagagguuuaguccauuau

SEQ ID NO: 3003927 - RNA, 19 nt, Artificial Sequence
  Description of Artificial Sequence: Synthetic oligonucleotide
uuccacucccuggcucccc

SEQ ID NO: 3003928 - RNA, 19 nt, Artificial Sequence
  Description of Artificial Sequence: Synthetic oligonucleotide
ggccacauacuaaaauucu

SEQ ID NO: 3003929 - RNA, 19 nt, Artificial Sequence
  Description of Artificial Sequence: Synthetic oligonucleotide
ggaaucucuuaaccagacu

SEQ ID NO: 3003930 - RNA, 19 nt, Artificial Sequence
  Description of Artificial Sequence: Synthetic oligonucleotide
ccauucuuacucaagccau

SEQ ID NO: 3003931 - RNA, 19 nt, Artificial Sequence
  Description of Artificial Sequence: Synthetic oligonucleotide
cacauucucaagacuuauu

SEQ ID NO: 3003932 - RNA, 19 nt, Artificial Sequence
  Description of Artificial Sequence: Synthetic oligonucleotide
cuuuucagacaaggacaaa

SEQ ID NO: 3003933 - RNA, 19 nt, Artificial Sequence
  Description of Artificial Sequence: Synthetic oligonucleotide
gagauucauggaaucucuu

SEQ ID NO: 3003934 - RNA, 19 nt, Artificial Sequence
  Description of Artificial Sequence: Synthetic oligonucleotide
cuggcuccccauagguuua

SEQ ID NO: 3003935 - RNA, 19 nt, Artificial Sequence
  Description of Artificial Sequence: Synthetic oligonucleotide
cacauuccacucccuggcu

SEQ ID NO: 3003936 - RNA, 19 nt, Artificial Sequence
  Description of Artificial Sequence: Synthetic oligonucleotide
uggcuccccauagguuuau

SEQ ID NO: 3003937 - RNA, 19 nt, Artificial Sequence
  Description of Artificial Sequence: Synthetic oligonucleotide
ccuggcuccccauagguuu

SEQ ID NO: 3003938 - RNA, 19 nt, Artificial Sequence
  Description of Artificial Sequence: Synthetic oligonucleotide
cccauagguuuauagccau

SEQ ID NO: 3003939 - RNA, 19 nt, Artificial Sequence
  Description of Artificial Sequence: Synthetic oligonucleotide
cacucccuggcuccccaua

SEQ ID NO: 3003940 - RNA, 19 nt, Artificial Sequence
  Description of Artificial Sequence: Synthetic oligonucleotide
ccauagguuuauagccaua

SEQ ID NO: 3003941 - RNA, 19 nt, Artificial Sequence
  Description of Artificial Sequence: Synthetic oligonucleotide
ccacauucuucaccaaaau

SEQ ID NO: 3003942 - RNA, 19 nt, Artificial Sequence
  Description of Artificial Sequence: Synthetic oligonucleotide
gggcuggcuuacaguuuca

SEQ ID NO: 3003943 - RNA, 19 nt, Artificial Sequence
  Description of Artificial Sequence: Synthetic oligonucleotide
ccaucacauuccacucccu

SEQ ID NO: 3003944 - RNA, 19 nt, Artificial Sequence
  Description of Artificial Sequence: Synthetic oligonucleotide
ggcuccccauagguuuaua

SEQ ID NO: 3003945 - RNA, 19 nt, Artificial Sequence
  Description of Artificial Sequence: Synthetic oligonucleotide
ccacucccuggcuccccau

SEQ ID NO: 3003946 - RNA, 19 nt, Artificial Sequence
  Description of Artificial Sequence: Synthetic oligonucleotide
aauugaaucuuugagaagc

SEQ ID NO: 3003947 - RNA, 19 nt, Artificial Sequence
  Description of Artificial Sequence: Synthetic oligonucleotide
uucaauuagaaucaggucc

SEQ ID NO: 3003948 - RNA, 19 nt, Artificial Sequence
  Description of Artificial Sequence: Synthetic oligonucleotide
cucauuuucaauuagaauc

SEQ ID NO: 3003949 - RNA, 19 nt, Artificial Sequence
  Description of Artificial Sequence: Synthetic oligonucleotide
ugcacuacagcaaagagcc

SEQ ID NO: 3003950 - RNA, 19 nt, Artificial Sequence
  Description of Artificial Sequence: Synthetic oligonucleotide
uuuucaauuagaaucaggu

SEQ ID NO: 3003951 - RNA, 19 nt, Artificial Sequence
  Description of Artificial Sequence: Synthetic oligonucleotide
ugugaauugaaucuuugag

SEQ ID NO: 3003952 - RNA, 19 nt, Artificial Sequence
  Description of Artificial Sequence: Synthetic oligonucleotide
aucuuugagaagcagaccg

SEQ ID NO: 3003953 - RNA, 19 nt, Artificial Sequence
  Description of Artificial Sequence: Synthetic oligonucleotide
ucauuuucaauuagaauca

SEQ ID NO: 3003954 - RNA, 19 nt, Artificial Sequence
  Description of Artificial Sequence: Synthetic oligonucleotide
ugaauugaaucuuugagaa

SEQ ID NO: 3003955 - RNA, 19 nt, Artificial Sequence
  Description of Artificial Sequence: Synthetic oligonucleotide
auuagaaucagguccuccg

SEQ ID NO: 3003956 - RNA, 19 nt, Artificial Sequence
  Description of Artificial Sequence: Synthetic oligonucleotide
aacguauccuuguggauac

SEQ ID NO: 3003957 - RNA, 19 nt, Artificial Sequence
  Description of Artificial Sequence: Synthetic oligonucleotide
ucuggucucuucaacaggg

SEQ ID NO: 3003958 - RNA, 19 nt, Artificial Sequence
  Description of Artificial Sequence: Synthetic oligonucleotide
ugagaagcagaccggaggg

SEQ ID NO: 3003959 - RNA, 19 nt, Artificial Sequence
  Description of Artificial Sequence: Synthetic oligonucleotide
uugagaagcagaccggagg

SEQ ID NO: 3003960 - RNA, 19 nt, Artificial Sequence
  Description of Artificial Sequence: Synthetic oligonucleotide
ucaauuagaaucagguccu

SEQ ID NO: 3003961 - RNA, 19 nt, Artificial Sequence
  Description of Artificial Sequence: Synthetic oligonucleotide
acauacagacaccagccgc

SEQ ID NO: 3003962 - RNA, 19 nt, Artificial Sequence
  Description of Artificial Sequence: Synthetic oligonucleotide
aauuagaaucagguccucc

SEQ ID NO: 3003963 - RNA, 19 nt, Artificial Sequence
  Description of Artificial Sequence: Synthetic oligonucleotide
ugaaucuuugagaagcaga

SEQ ID NO: 3003964 - RNA, 19 nt, Artificial Sequence
  Description of Artificial Sequence: Synthetic oligonucleotide
auucaccuuccucacaacc

SEQ ID NO: 3003965 - RNA, 19 nt, Artificial Sequence
  Description of Artificial Sequence: Synthetic oligonucleotide
aggucuuaggaacguaucc

SEQ ID NO: 3003966 - RNA, 19 nt, Artificial Sequence
  Description of Artificial Sequence: Synthetic oligonucleotide
cuacauacagacaccagcc

SEQ ID NO: 3003967 - RNA, 19 nt, Artificial Sequence
  Description of Artificial Sequence: Synthetic oligonucleotide
ugcggcuacauacagacac

SEQ ID NO: 3003968 - RNA, 19 nt, Artificial Sequence
  Description of Artificial Sequence: Synthetic oligonucleotide
ugcucugugaauugaaucu

SEQ ID NO: 3003969 - RNA, 19 nt, Artificial Sequence
  Description of Artificial Sequence: Synthetic oligonucleotide
aaucuuugagaagcagacc

SEQ ID NO: 3003970 - RNA, 19 nt, Artificial Sequence
  Description of Artificial Sequence: Synthetic oligonucleotide
ucuuugagaagcagaccgg

SEQ ID NO: 3003971 - RNA, 19 nt, Artificial Sequence
  Description of Artificial Sequence: Synthetic oligonucleotide
agcucauucaccuuccuca

SEQ ID NO: 3003972 - RNA, 19 nt, Artificial Sequence
  Description of Artificial Sequence: Synthetic oligonucleotide
uauccuuguggauacgaag

SEQ ID NO: 3003973 - RNA, 19 nt, Artificial Sequence
  Description of Artificial Sequence: Synthetic oligonucleotide
gaaucuuugagaagcagac

SEQ ID NO: 3003974 - RNA, 19 nt, Artificial Sequence
  Description of Artificial Sequence: Synthetic oligonucleotide
uacauacagacaccagccg

SEQ ID NO: 3003975 - RNA, 19 nt, Artificial Sequence
  Description of Artificial Sequence: Synthetic oligonucleotide
uaggaacguauccuugugg

SEQ ID NO: 3003976 - RNA, 19 nt, Artificial Sequence
  Description of Artificial Sequence: Synthetic oligonucleotide
ucauucaccuuccucacaa

SEQ ID NO: 3003977 - RNA, 19 nt, Artificial Sequence
  Description of Artificial Sequence: Synthetic oligonucleotide
ucugugaauugaaucuuug

SEQ ID NO: 3003978 - RNA, 19 nt, Artificial Sequence
  Description of Artificial Sequence: Synthetic oligonucleotide
gugaauugaaucuuugaga

SEQ ID NO: 3003979 - RNA, 19 nt, Artificial Sequence
  Description of Artificial Sequence: Synthetic oligonucleotide
caaagagccggccauacug

SEQ ID NO: 3003980 - RNA, 19 nt, Artificial Sequence
  Description of Artificial Sequence: Synthetic oligonucleotide
ucagggaggucuuaggaac

SEQ ID NO: 3003981 - RNA, 19 nt, Artificial Sequence
  Description of Artificial Sequence: Synthetic oligonucleotide
agaaucagguccuccgagg

SEQ ID NO: 3003982 - RNA, 19 nt, Artificial Sequence
  Description of Artificial Sequence: Synthetic oligonucleotide
uuucaauuagaaucagguc

SEQ ID NO: 3003983 - RNA, 19 nt, Artificial Sequence
  Description of Artificial Sequence: Synthetic oligonucleotide
ucugugugaugucuggucu

SEQ ID NO: 3003984 - RNA, 19 nt, Artificial Sequence
  Description of Artificial Sequence: Synthetic oligonucleotide
aagagccggccauacuggc

SEQ ID NO: 3003985 - RNA, 19 nt, Artificial Sequence
  Description of Artificial Sequence: Synthetic oligonucleotide
ucuuaggaacguauccuug

SEQ ID NO: 3003986 - RNA, 19 nt, Artificial Sequence
  Description of Artificial Sequence: Synthetic oligonucleotide
agugcacuacagcaaagag

SEQ ID NO: 3003987 - RNA, 19 nt, Artificial Sequence
  Description of Artificial Sequence: Synthetic oligonucleotide
gaauugaaucuuugagaag

SEQ ID NO: 3003988 - RNA, 19 nt, Artificial Sequence
  Description of Artificial Sequence: Synthetic oligonucleotide
ugucuggucucuucaacag

SEQ ID NO: 3003989 - RNA, 19 nt, Artificial Sequence
  Description of Artificial Sequence: Synthetic oligonucleotide
uuugagaagcagaccggag

SEQ ID NO: 3003990 - RNA, 19 nt, Artificial Sequence
  Description of Artificial Sequence: Synthetic oligonucleotide
accacuucuucccagggug

SEQ ID NO: 3003991 - RNA, 19 nt, Artificial Sequence
  Description of Artificial Sequence: Synthetic oligonucleotide
uucaccuuccucacaaccu

SEQ ID NO: 3003992 - RNA, 19 nt, Artificial Sequence
  Description of Artificial Sequence: Synthetic oligonucleotide
uuagaaucagguccuccga

SEQ ID NO: 3003993 - RNA, 19 nt, Artificial Sequence
  Description of Artificial Sequence: Synthetic oligonucleotide
aaucagguccuccgagguc

SEQ ID NO: 3003994 - RNA, 19 nt, Artificial Sequence
  Description of Artificial Sequence: Synthetic oligonucleotide
uggccuguggcaaucagcu

SEQ ID NO: 3003995 - RNA, 19 nt, Artificial Sequence
  Description of Artificial Sequence: Synthetic oligonucleotide
cacuacagcaaagagccgg

SEQ ID NO: 3003996 - RNA, 19 nt, Artificial Sequence
  Description of Artificial Sequence: Synthetic oligonucleotide
aacucauuuucaauuagaa

SEQ ID NO: 3003997 - RNA, 19 nt, Artificial Sequence
  Description of Artificial Sequence: Synthetic oligonucleotide
auuuucaauuagaaucagg

SEQ ID NO: 3003998 - RNA, 19 nt, Artificial Sequence
  Description of Artificial Sequence: Synthetic oligonucleotide
acaccagccgcccgaaagc

SEQ ID NO: 3003999 - RNA, 19 nt, Artificial Sequence
  Description of Artificial Sequence: Synthetic oligonucleotide
aaagagccggccauacugg

SEQ ID NO: 3004000 - RNA, 19 nt, Artificial Sequence
  Description of Artificial Sequence: Synthetic oligonucleotide
aggaacguauccuugugga

SEQ ID NO: 3004001 - RNA, 19 nt, Artificial Sequence
  Description of Artificial Sequence: Synthetic oligonucleotide
gauacgaagugcucuguga

SEQ ID NO: 3004002 - RNA, 19 nt, Artificial Sequence
  Description of Artificial Sequence: Synthetic oligonucleotide
uugguggcuggcaaagugc

SEQ ID NO: 3004003 - RNA, 19 nt, Artificial Sequence
  Description of Artificial Sequence: Synthetic oligonucleotide
gcuacauacagacaccagc

SEQ ID NO: 3004004 - RNA, 19 nt, Artificial Sequence
  Description of Artificial Sequence: Synthetic oligonucleotide
uguggauacgaagugcucu

SEQ ID NO: 3004005 - RNA, 19 nt, Artificial Sequence
  Description of Artificial Sequence: Synthetic oligonucleotide
gacaccagccgcccgaaag

SEQ ID NO: 3004006 - RNA, 19 nt, Artificial Sequence
  Description of Artificial Sequence: Synthetic oligonucleotide
ucuucaacagggucuggca

SEQ ID NO: 3004007 - RNA, 19 nt, Artificial Sequence
  Description of Artificial Sequence: Synthetic oligonucleotide
uuccucacaaccucugugu

SEQ ID NO: 3004008 - RNA, 19 nt, Artificial Sequence
  Description of Artificial Sequence: Synthetic oligonucleotide
uggcaaucagcucauucac

SEQ ID NO: 3004009 - RNA, 19 nt, Artificial Sequence
  Description of Artificial Sequence: Synthetic oligonucleotide
uccuuguggauacgaagug

SEQ ID NO: 3004010 - RNA, 19 nt, Artificial Sequence
  Description of Artificial Sequence: Synthetic oligonucleotide
agaagcagaccggagggcg

SEQ ID NO: 3004011 - RNA, 19 nt, Artificial Sequence
  Description of Artificial Sequence: Synthetic oligonucleotide
gacgccgccauuuuccuac

SEQ ID NO: 3004012 - RNA, 19 nt, Artificial Sequence
  Description of Artificial Sequence: Synthetic oligonucleotide
aacgccgaggccgcuaugg

SEQ ID NO: 3004013 - RNA, 19 nt, Artificial Sequence
  Description of Artificial Sequence: Synthetic oligonucleotide
uacagcaaagagccggcca

SEQ ID NO: 3004014 - RNA, 19 nt, Artificial Sequence
  Description of Artificial Sequence: Synthetic oligonucleotide
acucauuuucaauuagaau

SEQ ID NO: 3004015 - RNA, 19 nt, Artificial Sequence
  Description of Artificial Sequence: Synthetic oligonucleotide
auggacgccgccauuuucc

SEQ ID NO: 3004016 - RNA, 19 nt, Artificial Sequence
  Description of Artificial Sequence: Synthetic oligonucleotide
cuggcaaagugcacuacag

SEQ ID NO: 3004017 - RNA, 19 nt, Artificial Sequence
  Description of Artificial Sequence: Synthetic oligonucleotide
uccaacucauuuucaauua

SEQ ID NO: 3004018 - RNA, 19 nt, Artificial Sequence
  Description of Artificial Sequence: Synthetic oligonucleotide
acuacagcaaagagccggc

SEQ ID NO: 3004019 - RNA, 19 nt, Artificial Sequence
  Description of Artificial Sequence: Synthetic oligonucleotide
guggcaaucagcucauuca

SEQ ID NO: 3004020 - RNA, 19 nt, Artificial Sequence
  Description of Artificial Sequence: Synthetic oligonucleotide
aagugcacuacagcaaaga

SEQ ID NO: 3004021 - RNA, 19 nt, Artificial Sequence
  Description of Artificial Sequence: Synthetic oligonucleotide
ggcaaagugcacuacagca

SEQ ID NO: 3004022 - RNA, 19 nt, Artificial Sequence
  Description of Artificial Sequence: Synthetic oligonucleotide
uggcaaagugcacuacagc

SEQ ID NO: 3004023 - RNA, 19 nt, Artificial Sequence
  Description of Artificial Sequence: Synthetic oligonucleotide
gaugucuggucucuucaac

SEQ ID NO: 3004024 - RNA, 19 nt, Artificial Sequence
  Description of Artificial Sequence: Synthetic oligonucleotide
augucuggucucuucaaca

SEQ ID NO: 3004025 - RNA, 19 nt, Artificial Sequence
  Description of Artificial Sequence: Synthetic oligonucleotide
auacgaagugcucugugaa

SEQ ID NO: 3004026 - RNA, 19 nt, Artificial Sequence
  Description of Artificial Sequence: Synthetic oligonucleotide
uugauguccaacucauuuu

SEQ ID NO: 3004027 - RNA, 19 nt, Artificial Sequence
  Description of Artificial Sequence: Synthetic oligonucleotide
aaagcgccuggcaacgccg

SEQ ID NO: 3004028 - RNA, 19 nt, Artificial Sequence
  Description of Artificial Sequence: Synthetic oligonucleotide
gacggugccaggaugcugc

SEQ ID NO: 3004029 - RNA, 19 nt, Artificial Sequence
  Description of Artificial Sequence: Synthetic oligonucleotide
gaaagcgccuggcaacgcc

SEQ ID NO: 3004030 - RNA, 19 nt, Artificial Sequence
  Description of Artificial Sequence: Synthetic oligonucleotide
cucuccacacuugaugucc

SEQ ID NO: 3004031 - RNA, 19 nt, Artificial Sequence
  Description of Artificial Sequence: Synthetic oligonucleotide
aagcagaccggagggcggc

SEQ ID NO: 3004032 - RNA, 19 nt, Artificial Sequence
  Description of Artificial Sequence: Synthetic oligonucleotide
ugguggcuggcaaagugca

SEQ ID NO: 3004033 - RNA, 19 nt, Artificial Sequence
  Description of Artificial Sequence: Synthetic oligonucleotide
uguccaacucauuuucaau

SEQ ID NO: 3004034 - RNA, 19 nt, Artificial Sequence
  Description of Artificial Sequence: Synthetic oligonucleotide
gucaccuuccauugguggc

SEQ ID NO: 3004035 - RNA, 19 nt, Artificial Sequence
  Description of Artificial Sequence: Synthetic oligonucleotide
ggaugcugcggcuacauac

SEQ ID NO: 3004036 - RNA, 19 nt, Artificial Sequence
  Description of Artificial Sequence: Synthetic oligonucleotide
uccucacaaccucugugug

SEQ ID NO: 3004037 - RNA, 19 nt, Artificial Sequence
  Description of Artificial Sequence: Synthetic oligonucleotide
acagcaaagagccggccau

SEQ ID NO: 3004038 - RNA, 19 nt, Artificial Sequence
  Description of Artificial Sequence: Synthetic oligonucleotide
gcugcggcuacauacagac

SEQ ID NO: 3004039 - RNA, 19 nt, Artificial Sequence
  Description of Artificial Sequence: Synthetic oligonucleotide
guggauacgaagugcucug

SEQ ID NO: 3004040 - RNA, 19 nt, Artificial Sequence
  Description of Artificial Sequence: Synthetic oligonucleotide
gugcacuacagcaaagagc

SEQ ID NO: 3004041 - RNA, 19 nt, Artificial Sequence
  Description of Artificial Sequence: Synthetic oligonucleotide
auacagacaccagccgccc

SEQ ID NO: 3004042 - RNA, 19 nt, Artificial Sequence
  Description of Artificial Sequence: Synthetic oligonucleotide
aucagcucauucaccuucc

SEQ ID NO: 3004043 - RNA, 19 nt, Artificial Sequence
  Description of Artificial Sequence: Synthetic oligonucleotide
ugugaugucuggucucuuc

SEQ ID NO: 3004044 - RNA, 19 nt, Artificial Sequence
  Description of Artificial Sequence: Synthetic oligonucleotide
aaagugcacuacagcaaag

SEQ ID NO: 3004045 - RNA, 19 nt, Artificial Sequence
  Description of Artificial Sequence: Synthetic oligonucleotide
accggagggcggcagcucc

SEQ ID NO: 3004046 - RNA, 19 nt, Artificial Sequence
  Description of Artificial Sequence: Synthetic oligonucleotide
acaaccucugugugauguc

SEQ ID NO: 3004047 - RNA, 19 nt, Artificial Sequence
  Description of Artificial Sequence: Synthetic oligonucleotide
agcaaagagccggccauac

SEQ ID NO: 3004048 - RNA, 19 nt, Artificial Sequence
  Description of Artificial Sequence: Synthetic oligonucleotide
caacucauuuucaauuaga

SEQ ID NO: 3004049 - RNA, 19 nt, Artificial Sequence
  Description of Artificial Sequence: Synthetic oligonucleotide
uggucucuucaacaggguc

SEQ ID NO: 3004050 - RNA, 19 nt, Artificial Sequence
  Description of Artificial Sequence: Synthetic oligonucleotide
gucuggucucuucaacagg

SEQ ID NO: 3004051 - RNA, 19 nt, Artificial Sequence
  Description of Artificial Sequence: Synthetic oligonucleotide
auguccaacucauuuucaa

SEQ ID NO: 3004052 - RNA, 19 nt, Artificial Sequence
  Description of Artificial Sequence: Synthetic oligonucleotide
aucagguccuccgagguca

SEQ ID NO: 3004053 - RNA, 19 nt, Artificial Sequence
  Description of Artificial Sequence: Synthetic oligonucleotide
auccuuguggauacgaagu

SEQ ID NO: 3004054 - RNA, 19 nt, Artificial Sequence
  Description of Artificial Sequence: Synthetic oligonucleotide
cagggaggucuuaggaacg

SEQ ID NO: 3004055 - RNA, 19 nt, Artificial Sequence
  Description of Artificial Sequence: Synthetic oligonucleotide
agcucagggaggucuuagg

SEQ ID NO: 3004056 - RNA, 19 nt, Artificial Sequence
  Description of Artificial Sequence: Synthetic oligonucleotide
cucugugugaugucugguc

SEQ ID NO: 3004057 - RNA, 19 nt, Artificial Sequence
  Description of Artificial Sequence: Synthetic oligonucleotide
cauuuucaauuagaaucag

SEQ ID NO: 3004058 - RNA, 19 nt, Artificial Sequence
  Description of Artificial Sequence: Synthetic oligonucleotide
ggucaccuuccauuggugg

SEQ ID NO: 3004059 - RNA, 19 nt, Artificial Sequence
  Description of Artificial Sequence: Synthetic oligonucleotide
cucuucaacagggucuggc

SEQ ID NO: 3004060 - RNA, 19 nt, Artificial Sequence
  Description of Artificial Sequence: Synthetic oligonucleotide
ugugugaugucuggucucu

SEQ ID NO: 3004061 - RNA, 19 nt, Artificial Sequence
  Description of Artificial Sequence: Synthetic oligonucleotide
gugcucugugaauugaauc

SEQ ID NO: 3004062 - RNA, 19 nt, Artificial Sequence
  Description of Artificial Sequence: Synthetic oligonucleotide
uccuccgaggucaccuucc

SEQ ID NO: 3004063 - RNA, 19 nt, Artificial Sequence
  Description of Artificial Sequence: Synthetic oligonucleotide
gaacguauccuuguggaua

SEQ ID NO: 3004064 - RNA, 19 nt, Artificial Sequence
  Description of Artificial Sequence: Synthetic oligonucleotide
caggguggugagcucaggg

SEQ ID NO: 3004065 - RNA, 19 nt, Artificial Sequence
  Description of Artificial Sequence: Synthetic oligonucleotide
ggugccaggaugcugcggc

SEQ ID NO: 3004066 - RNA, 19 nt, Artificial Sequence
  Description of Artificial Sequence: Synthetic oligonucleotide
ucuccacacuugaugucca

SEQ ID NO: 3004067 - RNA, 19 nt, Artificial Sequence
  Description of Artificial Sequence: Synthetic oligonucleotide
uacagacaccagccgcccg

SEQ ID NO: 3004068 - RNA, 19 nt, Artificial Sequence
  Description of Artificial Sequence: Synthetic oligonucleotide
acagacaccagccgcccga

SEQ ID NO: 3004069 - RNA, 19 nt, Artificial Sequence
  Description of Artificial Sequence: Synthetic oligonucleotide
ucaccuuccauugguggcu

SEQ ID NO: 3004070 - RNA, 19 nt, Artificial Sequence
  Description of Artificial Sequence: Synthetic oligonucleotide
caaagugcacuacagcaaa

SEQ ID NO: 3004071 - RNA, 19 nt, Artificial Sequence
  Description of Artificial Sequence: Synthetic oligonucleotide
cacacuugauguccaacuc

SEQ ID NO: 3004072 - RNA, 19 nt, Artificial Sequence
  Description of Artificial Sequence: Synthetic oligonucleotide
cugugaauugaaucuuuga

SEQ ID NO: 3004073 - RNA, 19 nt, Artificial Sequence
  Description of Artificial Sequence: Synthetic oligonucleotide
cuggccuguggcaaucagc

SEQ ID NO: 3004074 - RNA, 19 nt, Artificial Sequence
  Description of Artificial Sequence: Synthetic oligonucleotide
gaggccgcuauggacgccg

SEQ ID NO: 3004075 - RNA, 19 nt, Artificial Sequence
  Description of Artificial Sequence: Synthetic oligonucleotide
cuuguggauacgaagugcu

SEQ ID NO: 3004076 - RNA, 19 nt, Artificial Sequence
  Description of Artificial Sequence: Synthetic oligonucleotide
uauggacgccgccauuuuc

SEQ ID NO: 3004077 - RNA, 19 nt, Artificial Sequence
  Description of Artificial Sequence: Synthetic oligonucleotide
aggguggugagcucaggga

SEQ ID NO: 3004078 - RNA, 19 nt, Artificial Sequence
  Description of Artificial Sequence: Synthetic oligonucleotide
gaagcagaccggagggcgg

SEQ ID NO: 3004079 - RNA, 19 nt, Artificial Sequence
  Description of Artificial Sequence: Synthetic oligonucleotide
gaugcugcggcuacauaca

SEQ ID NO: 3004080 - RNA, 19 nt, Artificial Sequence
  Description of Artificial Sequence: Synthetic oligonucleotide
ugaugucuggucucuucaa

SEQ ID NO: 3004081 - RNA, 19 nt, Artificial Sequence
  Description of Artificial Sequence: Synthetic oligonucleotide
gugaugucuggucucuuca

SEQ ID NO: 3004082 - RNA, 19 nt, Artificial Sequence
  Description of Artificial Sequence: Synthetic oligonucleotide
agggcggcagcuccggguc

SEQ ID NO: 3004083 - RNA, 19 nt, Artificial Sequence
  Description of Artificial Sequence: Synthetic oligonucleotide
ggguggugagcucagggag

SEQ ID NO: 3004084 - RNA, 19 nt, Artificial Sequence
  Description of Artificial Sequence: Synthetic oligonucleotide
gucucuucaacagggucug

SEQ ID NO: 3004085 - RNA, 19 nt, Artificial Sequence
  Description of Artificial Sequence: Synthetic oligonucleotide
uacgaagugcucugugaau

SEQ ID NO: 3004086 - RNA, 19 nt, Artificial Sequence
  Description of Artificial Sequence: Synthetic oligonucleotide
uuguggauacgaagugcuc

SEQ ID NO: 3004087 - RNA, 19 nt, Artificial Sequence
  Description of Artificial Sequence: Synthetic oligonucleotide
ggccauacuggccuguggc

SEQ ID NO: 3004088 - RNA, 19 nt, Artificial Sequence
  Description of Artificial Sequence: Synthetic oligonucleotide
agagccggccauacuggcc

SEQ ID NO: 3004089 - RNA, 19 nt, Artificial Sequence
  Description of Artificial Sequence: Synthetic oligonucleotide
gaaucagguccuccgaggu

SEQ ID NO: 3004090 - RNA, 19 nt, Artificial Sequence
  Description of Artificial Sequence: Synthetic oligonucleotide
ccuggcaacgccgaggccg

SEQ ID NO: 3004091 - RNA, 19 nt, Artificial Sequence
  Description of Artificial Sequence: Synthetic oligonucleotide
cuuaggaacguauccuugu

SEQ ID NO: 3004092 - RNA, 19 nt, Artificial Sequence
  Description of Artificial Sequence: Synthetic oligonucleotide
ugcugcggcuacauacaga

SEQ ID NO: 3004093 - RNA, 19 nt, Artificial Sequence
  Description of Artificial Sequence: Synthetic oligonucleotide
acgaagugcucugugaauu

SEQ ID NO: 3004094 - RNA, 19 nt, Artificial Sequence
  Description of Artificial Sequence: Synthetic oligonucleotide
augcugcggcuacauacag

SEQ ID NO: 3004095 - RNA, 19 nt, Artificial Sequence
  Description of Artificial Sequence: Synthetic oligonucleotide
cuuugagaagcagaccgga

SEQ ID NO: 3004096 - RNA, 19 nt, Artificial Sequence
  Description of Artificial Sequence: Synthetic oligonucleotide
gauguccaacucauuuuca

SEQ ID NO: 3004097 - RNA, 19 nt, Artificial Sequence
  Description of Artificial Sequence: Synthetic oligonucleotide
gaggucuuaggaacguauc

SEQ ID NO: 3004098 - RNA, 19 nt, Artificial Sequence
  Description of Artificial Sequence: Synthetic oligonucleotide
aaccucugugugaugucug

SEQ ID NO: 3004099 - RNA, 19 nt, Artificial Sequence
  Description of Artificial Sequence: Synthetic oligonucleotide
gaagugcucugugaauuga

SEQ ID NO: 3004100 - RNA, 19 nt, Artificial Sequence
  Description of Artificial Sequence: Synthetic oligonucleotide
acuggccuguggcaaucag

SEQ ID NO: 3004101 - RNA, 19 nt, Artificial Sequence
  Description of Artificial Sequence: Synthetic oligonucleotide
uccacacuugauguccaac

SEQ ID NO: 3004102 - RNA, 19 nt, Artificial Sequence
  Description of Artificial Sequence: Synthetic oligonucleotide
ucucuccacacuugauguc

SEQ ID NO: 3004103 - RNA, 19 nt, Artificial Sequence
  Description of Artificial Sequence: Synthetic oligonucleotide
ccaacucauuuucaauuag

SEQ ID NO: 3004104 - RNA, 19 nt, Artificial Sequence
  Description of Artificial Sequence: Synthetic oligonucleotide
ucagcucauucaccuuccu

SEQ ID NO: 3004105 - RNA, 19 nt, Artificial Sequence
  Description of Artificial Sequence: Synthetic oligonucleotide
cugugugaugucuggucuc

SEQ ID NO: 3004106 - RNA, 19 nt, Artificial Sequence
  Description of Artificial Sequence: Synthetic oligonucleotide
ggauacgaagugcucugug

SEQ ID NO: 3004107 - RNA, 19 nt, Artificial Sequence
  Description of Artificial Sequence: Synthetic oligonucleotide
gaggucaccuuccauuggu

SEQ ID NO: 3004108 - RNA, 19 nt, Artificial Sequence
  Description of Artificial Sequence: Synthetic oligonucleotide
gcaaucagcucauucaccu

SEQ ID NO: 3004109 - RNA, 19 nt, Artificial Sequence
  Description of Artificial Sequence: Synthetic oligonucleotide
uucuucccaggguggugag

SEQ ID NO: 3004110 - RNA, 19 nt, Artificial Sequence
  Description of Artificial Sequence: Synthetic oligonucleotide
cucucuccacacuugaugu

SEQ ID NO: 3004111 - RNA, 19 nt, Artificial Sequence
  Description of Artificial Sequence: Synthetic oligonucleotide
auacuggccuguggcaauc

SEQ ID NO: 3004112 - RNA, 19 nt, Artificial Sequence
  Description of Artificial Sequence: Synthetic oligonucleotide
aagugcucugugaauugaa

SEQ ID NO: 3004113 - RNA, 19 nt, Artificial Sequence
  Description of Artificial Sequence: Synthetic oligonucleotide
cucagggaggucuuaggaa

SEQ ID NO: 3004114 - RNA, 19 nt, Artificial Sequence
  Description of Artificial Sequence: Synthetic oligonucleotide
guccaacucauuuucaauu

SEQ ID NO: 3004115 - RNA, 19 nt, Artificial Sequence
  Description of Artificial Sequence: Synthetic oligonucleotide
gagaagcagaccggagggc

SEQ ID NO: 3004116 - RNA, 19 nt, Artificial Sequence
  Description of Artificial Sequence: Synthetic oligonucleotide
gccgaggccgcuauggacg

SEQ ID NO: 3004117 - RNA, 19 nt, Artificial Sequence
  Description of Artificial Sequence: Synthetic oligonucleotide
gagcucagggaggucuuag

SEQ ID NO: 3004118 - RNA, 19 nt, Artificial Sequence
  Description of Artificial Sequence: Synthetic oligonucleotide
cauucaccuuccucacaac

SEQ ID NO: 3004119 - RNA, 19 nt, Artificial Sequence
  Description of Artificial Sequence: Synthetic oligonucleotide
ucccgacggugccaggaug

SEQ ID NO: 3004120 - RNA, 19 nt, Artificial Sequence
  Description of Artificial Sequence: Synthetic oligonucleotide
gguggugagcucagggagg

SEQ ID NO: 3004121 - RNA, 19 nt, Artificial Sequence
  Description of Artificial Sequence: Synthetic oligonucleotide
ccucucuccacacuugaug

SEQ ID NO: 3004122 - RNA, 19 nt, Artificial Sequence
  Description of Artificial Sequence: Synthetic oligonucleotide
ucccaggguggugagcuca

SEQ ID NO: 3004123 - RNA, 19 nt, Artificial Sequence
  Description of Artificial Sequence: Synthetic oligonucleotide
uggacgccgccauuuuccu

SEQ ID NO: 3004124 - RNA, 19 nt, Artificial Sequence
  Description of Artificial Sequence: Synthetic oligonucleotide
uggauacgaagugcucugu

SEQ ID NO: 3004125 - RNA, 19 nt, Artificial Sequence
  Description of Artificial Sequence: Synthetic oligonucleotide
uccgggucccgacggugcc

SEQ ID NO: 3004126 - RNA, 19 nt, Artificial Sequence
  Description of Artificial Sequence: Synthetic oligonucleotide
agugcucugugaauugaau

SEQ ID NO: 3004127 - RNA, 19 nt, Artificial Sequence
  Description of Artificial Sequence: Synthetic oligonucleotide
ccgccauuuuccuacaguc

SEQ ID NO: 3004128 - RNA, 19 nt, Artificial Sequence
  Description of Artificial Sequence: Synthetic oligonucleotide
gagccggccauacuggccu

SEQ ID NO: 3004129 - RNA, 19 nt, Artificial Sequence
  Description of Artificial Sequence: Synthetic oligonucleotide
uccucucuccacacuugau

SEQ ID NO: 3004130 - RNA, 19 nt, Artificial Sequence
  Description of Artificial Sequence: Synthetic oligonucleotide
cagcucauucaccuuccuc

SEQ ID NO: 3004131 - RNA, 19 nt, Artificial Sequence
  Description of Artificial Sequence: Synthetic oligonucleotide
cuacagcaaagagccggcc

SEQ ID NO: 3004132 - RNA, 19 nt, Artificial Sequence
  Description of Artificial Sequence: Synthetic oligonucleotide
cuucuucccagggugguga

SEQ ID NO: 3004133 - RNA, 19 nt, Artificial Sequence
  Description of Artificial Sequence: Synthetic oligonucleotide
caccagccgcccgaaagcg

SEQ ID NO: 3004134 - RNA, 19 nt, Artificial Sequence
  Description of Artificial Sequence: Synthetic oligonucleotide
gcuggcaaagugcacuaca

SEQ ID NO: 3004135 - RNA, 19 nt, Artificial Sequence
  Description of Artificial Sequence: Synthetic oligonucleotide
cuccgggucccgacggugc

SEQ ID NO: 3004136 - RNA, 19 nt, Artificial Sequence
  Description of Artificial Sequence: Synthetic oligonucleotide
ucucuucaacagggucugg

SEQ ID NO: 3004137 - RNA, 19 nt, Artificial Sequence
  Description of Artificial Sequence: Synthetic oligonucleotide
ccuuguggauacgaagugc

SEQ ID NO: 3004138 - RNA, 19 nt, Artificial Sequence
  Description of Artificial Sequence: Synthetic oligonucleotide
uggcuggcaaagugcacua

SEQ ID NO: 3004139 - RNA, 19 nt, Artificial Sequence
  Description of Artificial Sequence: Synthetic oligonucleotide
cacuugauguccaacucau

SEQ ID NO: 3004140 - RNA, 19 nt, Artificial Sequence
  Description of Artificial Sequence: Synthetic oligonucleotide
acuucuucccaggguggug

SEQ ID NO: 3004141 - RNA, 19 nt, Artificial Sequence
  Description of Artificial Sequence: Synthetic oligonucleotide
accuuccauugguggcugg

SEQ ID NO: 3004142 - RNA, 19 nt, Artificial Sequence
  Description of Artificial Sequence: Synthetic oligonucleotide
acggugccaggaugcugcg

SEQ ID NO: 3004143 - RNA, 19 nt, Artificial Sequence
  Description of Artificial Sequence: Synthetic oligonucleotide
ggcaaucagcucauucacc

SEQ ID NO: 3004144 - RNA, 19 nt, Artificial Sequence
  Description of Artificial Sequence: Synthetic oligonucleotide
gcucagggaggucuuagga

SEQ ID NO: 3004145 - RNA, 19 nt, Artificial Sequence
  Description of Artificial Sequence: Synthetic oligonucleotide
acagggucuggcagaacca

SEQ ID NO: 3004146 - RNA, 19 nt, Artificial Sequence
  Description of Artificial Sequence: Synthetic oligonucleotide
cagggucuggcagaaccac

SEQ ID NO: 3004147 - RNA, 19 nt, Artificial Sequence
  Description of Artificial Sequence: Synthetic oligonucleotide
ucuucccaggguggugagc

SEQ ID NO: 3004148 - RNA, 19 nt, Artificial Sequence
  Description of Artificial Sequence: Synthetic oligonucleotide
ucacaaccucugugugaug

SEQ ID NO: 3004149 - RNA, 19 nt, Artificial Sequence
  Description of Artificial Sequence: Synthetic oligonucleotide
caauuagaaucagguccuc

SEQ ID NO: 3004150 - RNA, 19 nt, Artificial Sequence
  Description of Artificial Sequence: Synthetic oligonucleotide
guauccuuguggauacgaa

SEQ ID NO: 3004151 - RNA, 19 nt, Artificial Sequence
  Description of Artificial Sequence: Synthetic oligonucleotide
ccgaggucaccuuccauug

SEQ ID NO: 3004152 - RNA, 19 nt, Artificial Sequence
  Description of Artificial Sequence: Synthetic oligonucleotide
gucuuaggaacguauccuu

SEQ ID NO: 3004153 - RNA, 19 nt, Artificial Sequence
  Description of Artificial Sequence: Synthetic oligonucleotide
agggaggucuuaggaacgu

SEQ ID NO: 3004154 - RNA, 19 nt, Artificial Sequence
  Description of Artificial Sequence: Synthetic oligonucleotide
ccacuucuucccagggugg

SEQ ID NO: 3004155 - RNA, 19 nt, Artificial Sequence
  Description of Artificial Sequence: Synthetic oligonucleotide
cccgaaagcgccuggcaac

SEQ ID NO: 3004156 - RNA, 19 nt, Artificial Sequence
  Description of Artificial Sequence: Synthetic oligonucleotide
cccgacggugccaggaugc

SEQ ID NO: 3004157 - RNA, 19 nt, Artificial Sequence
  Description of Artificial Sequence: Synthetic oligonucleotide
cacaaccucugugugaugu

SEQ ID NO: 3004158 - RNA, 19 nt, Artificial Sequence
  Description of Artificial Sequence: Synthetic oligonucleotide
cucacaaccucugugugau

SEQ ID NO: 3004159 - RNA, 19 nt, Artificial Sequence
  Description of Artificial Sequence: Synthetic oligonucleotide
gcaaagugcacuacagcaa

SEQ ID NO: 3004160 - RNA, 19 nt, Artificial Sequence
  Description of Artificial Sequence: Synthetic oligonucleotide
ccauugguggcuggcaaag

SEQ ID NO: 3004161 - RNA, 19 nt, Artificial Sequence
  Description of Artificial Sequence: Synthetic oligonucleotide
ggucucuucaacagggucu

SEQ ID NO: 3004162 - RNA, 19 nt, Artificial Sequence
  Description of Artificial Sequence: Synthetic oligonucleotide
cuuccauugguggcuggca

SEQ ID NO: 3004163 - RNA, 19 nt, Artificial Sequence
  Description of Artificial Sequence: Synthetic oligonucleotide
guggcuggcaaagugcacu

SEQ ID NO: 3004164 - RNA, 19 nt, Artificial Sequence
  Description of Artificial Sequence: Synthetic oligonucleotide
aggucaccuuccauuggug

SEQ ID NO: 3004165 - RNA, 19 nt, Artificial Sequence
  Description of Artificial Sequence: Synthetic oligonucleotide
ggcuacauacagacaccag

SEQ ID NO: 3004166 - RNA, 19 nt, Artificial Sequence
  Description of Artificial Sequence: Synthetic oligonucleotide
ggucuuaggaacguauccu

SEQ ID NO: 3004167 - RNA, 19 nt, Artificial Sequence
  Description of Artificial Sequence: Synthetic oligonucleotide
agcgccuggcaacgccgag

SEQ ID NO: 3004168 - RNA, 19 nt, Artificial Sequence
  Description of Artificial Sequence: Synthetic oligonucleotide
cagaccggagggcggcagc

SEQ ID NO: 3004169 - RNA, 19 nt, Artificial Sequence
  Description of Artificial Sequence: Synthetic oligonucleotide
acguauccuuguggauacg

SEQ ID NO: 3004170 - RNA, 19 nt, Artificial Sequence
  Description of Artificial Sequence: Synthetic oligonucleotide
agaccggagggcggcagcu

SEQ ID NO: 3004171 - RNA, 19 nt, Artificial Sequence
  Description of Artificial Sequence: Synthetic oligonucleotide
ccgaaagcgccuggcaacg

SEQ ID NO: 3004172 - RNA, 19 nt, Artificial Sequence
  Description of Artificial Sequence: Synthetic oligonucleotide
aagcgccuggcaacgccga

SEQ ID NO: 3004173 - RNA, 19 nt, Artificial Sequence
  Description of Artificial Sequence: Synthetic oligonucleotide
ggugagcucagggaggucu

SEQ ID NO: 3004174 - RNA, 19 nt, Artificial Sequence
  Description of Artificial Sequence: Synthetic oligonucleotide
acgccgaggccgcuaugga

SEQ ID NO: 3004175 - RNA, 19 nt, Artificial Sequence
  Description of Artificial Sequence: Synthetic oligonucleotide
guccuccgaggucaccuuc

SEQ ID NO: 3004176 - RNA, 19 nt, Artificial Sequence
  Description of Artificial Sequence: Synthetic oligonucleotide
agggucuggcagaaccacu

SEQ ID NO: 3004177 - RNA, 19 nt, Artificial Sequence
  Description of Artificial Sequence: Synthetic oligonucleotide
gccauacuggccuguggca

SEQ ID NO: 3004178 - RNA, 19 nt, Artificial Sequence
  Description of Artificial Sequence: Synthetic oligonucleotide
ugagcucagggaggucuua

SEQ ID NO: 3004179 - RNA, 19 nt, Artificial Sequence
  Description of Artificial Sequence: Synthetic oligonucleotide
cucugugaauugaaucuuu

SEQ ID NO: 3004180 - RNA, 19 nt, Artificial Sequence
  Description of Artificial Sequence: Synthetic oligonucleotide
ggucuggcagaaccacuuc

SEQ ID NO: 3004181 - RNA, 19 nt, Artificial Sequence
  Description of Artificial Sequence: Synthetic oligonucleotide
gcggcuacauacagacacc

SEQ ID NO: 3004182 - RNA, 19 nt, Artificial Sequence
  Description of Artificial Sequence: Synthetic oligonucleotide
ccuuccauugguggcuggc

SEQ ID NO: 3004183 - RNA, 19 nt, Artificial Sequence
  Description of Artificial Sequence: Synthetic oligonucleotide
caccuuccauugguggcug

SEQ ID NO: 3004184 - RNA, 19 nt, Artificial Sequence
  Description of Artificial Sequence: Synthetic oligonucleotide
gagggcggcagcuccgggu

SEQ ID NO: 3004185 - RNA, 19 nt, Artificial Sequence
  Description of Artificial Sequence: Synthetic oligonucleotide
gccaggaugcugcggcuac

SEQ ID NO: 3004186 - RNA, 19 nt, Artificial Sequence
  Description of Artificial Sequence: Synthetic oligonucleotide
aggaugcugcggcuacaua

SEQ ID NO: 3004187 - RNA, 19 nt, Artificial Sequence
  Description of Artificial Sequence: Synthetic oligonucleotide
uucccaggguggugagcuc

SEQ ID NO: 3004188 - RNA, 19 nt, Artificial Sequence
  Description of Artificial Sequence: Synthetic oligonucleotide
caaccucugugugaugucu

SEQ ID NO: 3004189 - RNA, 19 nt, Artificial Sequence
  Description of Artificial Sequence: Synthetic oligonucleotide
ccucacaaccucuguguga

SEQ ID NO: 3004190 - RNA, 19 nt, Artificial Sequence
  Description of Artificial Sequence: Synthetic oligonucleotide
agcuccgggucccgacggu

SEQ ID NO: 3004191 - RNA, 19 nt, Artificial Sequence
  Description of Artificial Sequence: Synthetic oligonucleotide
cauacuggccuguggcaau

SEQ ID NO: 3004192 - RNA, 19 nt, Artificial Sequence
  Description of Artificial Sequence: Synthetic oligonucleotide
acuugauguccaacucauu

SEQ ID NO: 3004193 - RNA, 19 nt, Artificial Sequence
  Description of Artificial Sequence: Synthetic oligonucleotide
aggccgcuauggacgccgc

SEQ ID NO: 3004194 - RNA, 19 nt, Artificial Sequence
  Description of Artificial Sequence: Synthetic oligonucleotide
guggugagcucagggaggu

SEQ ID NO: 3004195 - RNA, 19 nt, Artificial Sequence
  Description of Artificial Sequence: Synthetic oligonucleotide
gccgcuauggacgccgcca

SEQ ID NO: 3004196 - RNA, 19 nt, Artificial Sequence
  Description of Artificial Sequence: Synthetic oligonucleotide
acgccgccauuuuccuaca

SEQ ID NO: 3004197 - RNA, 19 nt, Artificial Sequence
  Description of Artificial Sequence: Synthetic oligonucleotide
ggaacguauccuuguggau

SEQ ID NO: 3004198 - RNA, 19 nt, Artificial Sequence
  Description of Artificial Sequence: Synthetic oligonucleotide
ggaggucuuaggaacguau

SEQ ID NO: 3004199 - RNA, 19 nt, Artificial Sequence
  Description of Artificial Sequence: Synthetic oligonucleotide
gcacuacagcaaagagccg

SEQ ID NO: 3004200 - RNA, 19 nt, Artificial Sequence
  Description of Artificial Sequence: Synthetic oligonucleotide
cuccacacuugauguccaa

SEQ ID NO: 3004201 - RNA, 19 nt, Artificial Sequence
  Description of Artificial Sequence: Synthetic oligonucleotide
ccgaggccgcuauggacgc

SEQ ID NO: 3004202 - RNA, 19 nt, Artificial Sequence
  Description of Artificial Sequence: Synthetic oligonucleotide
cuggucucuucaacagggu

SEQ ID NO: 3004203 - RNA, 19 nt, Artificial Sequence
  Description of Artificial Sequence: Synthetic oligonucleotide
cgaggucaccuuccauugg

SEQ ID NO: 3004204 - RNA, 19 nt, Artificial Sequence
  Description of Artificial Sequence: Synthetic oligonucleotide
gcccgaaagcgccuggcaa

SEQ ID NO: 3004205 - RNA, 19 nt, Artificial Sequence
  Description of Artificial Sequence: Synthetic oligonucleotide
cugcggcuacauacagaca

SEQ ID NO: 3004206 - RNA, 19 nt, Artificial Sequence
  Description of Artificial Sequence: Synthetic oligonucleotide
cgccuggcaacgccgaggc

SEQ ID NO: 3004207 - RNA, 19 nt, Artificial Sequence
  Description of Artificial Sequence: Synthetic oligonucleotide
caccuuccucacaaccucu

SEQ ID NO: 3004208 - RNA, 19 nt, Artificial Sequence
  Description of Artificial Sequence: Synthetic oligonucleotide
agacaccagccgcccgaaa

SEQ ID NO: 3004209 - RNA, 19 nt, Artificial Sequence
  Description of Artificial Sequence: Synthetic oligonucleotide
ggagggcggcagcuccggg

SEQ ID NO: 3004210 - RNA, 19 nt, Artificial Sequence
  Description of Artificial Sequence: Synthetic oligonucleotide
ggucccgacggugccagga

SEQ ID NO: 3004211 - RNA, 19 nt, Artificial Sequence
  Description of Artificial Sequence: Synthetic oligonucleotide
cccaggguggugagcucag

SEQ ID NO: 3004212 - RNA, 19 nt, Artificial Sequence
  Description of Artificial Sequence: Synthetic oligonucleotide
caaucagcucauucaccuu

SEQ ID NO: 3004213 - RNA, 19 nt, Artificial Sequence
  Description of Artificial Sequence: Synthetic oligonucleotide
gccgccauuuuccuacagu

SEQ ID NO: 3004214 - RNA, 19 nt, Artificial Sequence
  Description of Artificial Sequence: Synthetic oligonucleotide
gguggcuggcaaagugcac

SEQ ID NO: 3004215 - RNA, 19 nt, Artificial Sequence
  Description of Artificial Sequence: Synthetic oligonucleotide
cagguccuccgaggucacc

SEQ ID NO: 3004216 - RNA, 19 nt, Artificial Sequence
  Description of Artificial Sequence: Synthetic oligonucleotide
agcagaccggagggcggca

SEQ ID NO: 3004217 - RNA, 19 nt, Artificial Sequence
  Description of Artificial Sequence: Synthetic oligonucleotide
caacgccgaggccgcuaug

SEQ ID NO: 3004218 - RNA, 19 nt, Artificial Sequence
  Description of Artificial Sequence: Synthetic oligonucleotide
gaccggagggcggcagcuc

SEQ ID NO: 3004219 - RNA, 19 nt, Artificial Sequence
  Description of Artificial Sequence: Synthetic oligonucleotide
cguauccuuguggauacga

SEQ ID NO: 3004220 - RNA, 19 nt, Artificial Sequence
  Description of Artificial Sequence: Synthetic oligonucleotide
ccggagggcggcagcuccg

SEQ ID NO: 3004221 - RNA, 19 nt, Artificial Sequence
  Description of Artificial Sequence: Synthetic oligonucleotide
uggugagcucagggagguc

SEQ ID NO: 3004222 - RNA, 19 nt, Artificial Sequence
  Description of Artificial Sequence: Synthetic oligonucleotide
gccgcccgaaagcgccugg

SEQ ID NO: 3004223 - RNA, 19 nt, Artificial Sequence
  Description of Artificial Sequence: Synthetic oligonucleotide
gcagaccggagggcggcag

SEQ ID NO: 3004224 - RNA, 19 nt, Artificial Sequence
  Description of Artificial Sequence: Synthetic oligonucleotide
ccauacuggccuguggcaa

SEQ ID NO: 3004225 - RNA, 19 nt, Artificial Sequence
  Description of Artificial Sequence: Synthetic oligonucleotide
gcuauggacgccgccauuu

SEQ ID NO: 3004226 - RNA, 19 nt, Artificial Sequence
  Description of Artificial Sequence: Synthetic oligonucleotide
ggccuguggcaaucagcuc

SEQ ID NO: 3004227 - RNA, 19 nt, Artificial Sequence
  Description of Artificial Sequence: Synthetic oligonucleotide
ggcuggcaaagugcacuac

SEQ ID NO: 3004228 - RNA, 19 nt, Artificial Sequence
  Description of Artificial Sequence: Synthetic oligonucleotide
ggccgcuauggacgccgcc

SEQ ID NO: 3004229 - RNA, 19 nt, Artificial Sequence
  Description of Artificial Sequence: Synthetic oligonucleotide
cacuucuucccaggguggu

SEQ ID NO: 3004230 - RNA, 19 nt, Artificial Sequence
  Description of Artificial Sequence: Synthetic oligonucleotide
cuauggacgccgccauuuu

SEQ ID NO: 3004231 - RNA, 19 nt, Artificial Sequence
  Description of Artificial Sequence: Synthetic oligonucleotide
gcuccgggucccgacggug

SEQ ID NO: 3004232 - RNA, 19 nt, Artificial Sequence
  Description of Artificial Sequence: Synthetic oligonucleotide
cauugguggcuggcaaagu

SEQ ID NO: 3004233 - RNA, 19 nt, Artificial Sequence
  Description of Artificial Sequence: Synthetic oligonucleotide
gcucugugaauugaaucuu

SEQ ID NO: 3004234 - RNA, 19 nt, Artificial Sequence
  Description of Artificial Sequence: Synthetic oligonucleotide
gugccaggaugcugcggcu

SEQ ID NO: 3004235 - RNA, 19 nt, Artificial Sequence
  Description of Artificial Sequence: Synthetic oligonucleotide
cgccgaggccgcuauggac

SEQ ID NO: 3004236 - RNA, 19 nt, Artificial Sequence
  Description of Artificial Sequence: Synthetic oligonucleotide
cagcaaagagccggccaua

SEQ ID NO: 3004237 - RNA, 19 nt, Artificial Sequence
  Description of Artificial Sequence: Synthetic oligonucleotide
cggccauacuggccugugg

SEQ ID NO: 3004238 - RNA, 19 nt, Artificial Sequence
  Description of Artificial Sequence: Synthetic oligonucleotide
cagacaccagccgcccgaa

SEQ ID NO: 3004239 - RNA, 19 nt, Artificial Sequence
  Description of Artificial Sequence: Synthetic oligonucleotide
gggucuggcagaaccacuu

SEQ ID NO: 3004240 - RNA, 19 nt, Artificial Sequence
  Description of Artificial Sequence: Synthetic oligonucleotide
gucccgacggugccaggau

SEQ ID NO: 3004241 - RNA, 19 nt, Artificial Sequence
  Description of Artificial Sequence: Synthetic oligonucleotide
caggaugcugcggcuacau

SEQ ID NO: 3004242 - RNA, 19 nt, Artificial Sequence
  Description of Artificial Sequence: Synthetic oligonucleotide
cggcuacauacagacacca

SEQ ID NO: 3004243 - RNA, 19 nt, Artificial Sequence
  Description of Artificial Sequence: Synthetic oligonucleotide
ccuccgaggucaccuucca

SEQ ID NO: 3004244 - RNA, 19 nt, Artificial Sequence
  Description of Artificial Sequence: Synthetic oligonucleotide
gggucccgacggugccagg

SEQ ID NO: 3004245 - RNA, 19 nt, Artificial Sequence
  Description of Artificial Sequence: Synthetic oligonucleotide
gggaggucuuaggaacgua

SEQ ID NO: 3004246 - RNA, 19 nt, Artificial Sequence
  Description of Artificial Sequence: Synthetic oligonucleotide
gccuggcaacgccgaggcc

SEQ ID NO: 3004247 - RNA, 19 nt, Artificial Sequence
  Description of Artificial Sequence: Synthetic oligonucleotide
ggacgccgccauuuuccua

SEQ ID NO: 3004248 - RNA, 19 nt, Artificial Sequence
  Description of Artificial Sequence: Synthetic oligonucleotide
gcaacgccgaggccgcuau

SEQ ID NO: 3004249 - RNA, 19 nt, Artificial Sequence
  Description of Artificial Sequence: Synthetic oligonucleotide
cgaaagcgccuggcaacgc

SEQ ID NO: 3004250 - RNA, 19 nt, Artificial Sequence
  Description of Artificial Sequence: Synthetic oligonucleotide
gugagcucagggaggucuu

SEQ ID NO: 3004251 - RNA, 19 nt, Artificial Sequence
  Description of Artificial Sequence: Synthetic oligonucleotide
ccgcccgaaagcgccuggc

SEQ ID NO: 3004252 - RNA, 19 nt, Artificial Sequence
  Description of Artificial Sequence: Synthetic oligonucleotide
ccggccauacuggccugug

SEQ ID NO: 3004253 - RNA, 19 nt, Artificial Sequence
  Description of Artificial Sequence: Synthetic oligonucleotide
cuccgaggucaccuuccau

SEQ ID NO: 3004254 - RNA, 19 nt, Artificial Sequence
  Description of Artificial Sequence: Synthetic oligonucleotide
cgggucccgacggugccag

SEQ ID NO: 3004255 - RNA, 19 nt, Artificial Sequence
  Description of Artificial Sequence: Synthetic oligonucleotide
cggagggcggcagcuccgg

SEQ ID NO: 3004256 - RNA, 19 nt, Artificial Sequence
  Description of Artificial Sequence: Synthetic oligonucleotide
ggcaacgccgaggccgcua

SEQ ID NO: 3004257 - RNA, 19 nt, Artificial Sequence
  Description of Artificial Sequence: Synthetic oligonucleotide
gguccuccgaggucaccuu

SEQ ID NO: 3004258 - RNA, 19 nt, Artificial Sequence
  Description of Artificial Sequence: Synthetic oligonucleotide
cgacggugccaggaugcug

SEQ ID NO: 3004259 - RNA, 19 nt, Artificial Sequence
  Description of Artificial Sequence: Synthetic oligonucleotide
cgccgccauuuuccuacag

SEQ ID NO: 3004260 - RNA, 19 nt, Artificial Sequence
  Description of Artificial Sequence: Synthetic oligonucleotide
gugugaugucuggucucuu

SEQ ID NO: 3004261 - RNA, 19 nt, Artificial Sequence
  Description of Artificial Sequence: Synthetic oligonucleotide
ccaggaugcugcggcuaca

SEQ ID NO: 3004262 - RNA, 19 nt, Artificial Sequence
  Description of Artificial Sequence: Synthetic oligonucleotide
cggugccaggaugcugcgg

SEQ ID NO: 3004263 - RNA, 19 nt, Artificial Sequence
  Description of Artificial Sequence: Synthetic oligonucleotide
cgcccgaaagcgccuggca

SEQ ID NO: 3004264 - RNA, 19 nt, Artificial Sequence
  Description of Artificial Sequence: Synthetic oligonucleotide
ccgcuauggacgccgccau

SEQ ID NO: 3004265 - RNA, 19 nt, Artificial Sequence
  Description of Artificial Sequence: Synthetic oligonucleotide
cgaggccgcuauggacgcc

SEQ ID NO: 3004266 - RNA, 19 nt, Artificial Sequence
  Description of Artificial Sequence: Synthetic oligonucleotide
ccgggucccgacggugcca

SEQ ID NO: 3004267 - RNA, 19 nt, Artificial Sequence
  Description of Artificial Sequence: Synthetic oligonucleotide
ccgacggugccaggaugcu

SEQ ID NO: 3004268 - RNA, 19 nt, Artificial Sequence
  Description of Artificial Sequence: Synthetic oligonucleotide
cgcuauggacgccgccauu

SEQ ID NO: 3004269 - RNA, 19 nt, Artificial Sequence
  Description of Artificial Sequence: Synthetic oligonucleotide
aaaacaaauacacaggauc

SEQ ID NO: 3004270 - RNA, 19 nt, Artificial Sequence
  Description of Artificial Sequence: Synthetic oligonucleotide
uauuaaauaauauaaaaca

SEQ ID NO: 3004271 - RNA, 19 nt, Artificial Sequence
  Description of Artificial Sequence: Synthetic oligonucleotide
uaauauaaaacaaauacac

SEQ ID NO: 3004272 - RNA, 19 nt, Artificial Sequence
  Description of Artificial Sequence: Synthetic oligonucleotide
ugaauaaagggcauguggg

SEQ ID NO: 3004273 - RNA, 19 nt, Artificial Sequence
  Description of Artificial Sequence: Synthetic oligonucleotide
acuuuuccaagccagaagc

SEQ ID NO: 3004274 - RNA, 19 nt, Artificial Sequence
  Description of Artificial Sequence: Synthetic oligonucleotide
ucugccaugaauaaagggc

SEQ ID NO: 3004275 - RNA, 19 nt, Artificial Sequence
  Description of Artificial Sequence: Synthetic oligonucleotide
aauacacaggaucagguca

SEQ ID NO: 3004276 - RNA, 19 nt, Artificial Sequence
  Description of Artificial Sequence: Synthetic oligonucleotide
augaauaaagggcaugugg

SEQ ID NO: 3004277 - RNA, 19 nt, Artificial Sequence
  Description of Artificial Sequence: Synthetic oligonucleotide
cuuucugccaugaauaaag

SEQ ID NO: 3004278 - RNA, 19 nt, Artificial Sequence
  Description of Artificial Sequence: Synthetic oligonucleotide
auaaaacaaauacacagga

SEQ ID NO: 3004279 - RNA, 19 nt, Artificial Sequence
  Description of Artificial Sequence: Synthetic oligonucleotide
aaauacacaggaucagguc

SEQ ID NO: 3004280 - RNA, 19 nt, Artificial Sequence
  Description of Artificial Sequence: Synthetic oligonucleotide
aauaaagggcaugugggcg

SEQ ID NO: 3004281 - RNA, 19 nt, Artificial Sequence
  Description of Artificial Sequence: Synthetic oligonucleotide
acuaaggacagcacgaagc

SEQ ID NO: 3004282 - RNA, 19 nt, Artificial Sequence
  Description of Artificial Sequence: Synthetic oligonucleotide
gaucaggucacuuucugcc

SEQ ID NO: 3004283 - RNA, 19 nt, Artificial Sequence
  Description of Artificial Sequence: Synthetic oligonucleotide
uggacggacacuaaggaca

SEQ ID NO: 3004284 - RNA, 19 nt, Artificial Sequence
  Description of Artificial Sequence: Synthetic oligonucleotide
auaaagggcaugugggcgc

SEQ ID NO: 3004285 - RNA, 19 nt, Artificial Sequence
  Description of Artificial Sequence: Synthetic oligonucleotide
aaacaaauacacaggauca

SEQ ID NO: 3004286 - RNA, 19 nt, Artificial Sequence
  Description of Artificial Sequence: Synthetic oligonucleotide
aaauggacggacacuaagg

SEQ ID NO: 3004287 - RNA, 19 nt, Artificial Sequence
  Description of Artificial Sequence: Synthetic oligonucleotide
aauggacggacacuaagga

SEQ ID NO: 3004288 - RNA, 19 nt, Artificial Sequence
  Description of Artificial Sequence: Synthetic oligonucleotide
acguacacagcacggacgc

SEQ ID NO: 3004289 - RNA, 19 nt, Artificial Sequence
  Description of Artificial Sequence: Synthetic oligonucleotide
gaaauggacggacacuaag

SEQ ID NO: 3004290 - RNA, 19 nt, Artificial Sequence
  Description of Artificial Sequence: Synthetic oligonucleotide
acaaaccucgcuuucccac

SEQ ID NO: 3004291 - RNA, 19 nt, Artificial Sequence
  Description of Artificial Sequence: Synthetic oligonucleotide
cuaaggacagcacgaagcg

SEQ ID NO: 3004292 - RNA, 19 nt, Artificial Sequence
  Description of Artificial Sequence: Synthetic oligonucleotide
acaggaucaggucacuuuc

SEQ ID NO: 3004293 - RNA, 19 nt, Artificial Sequence
  Description of Artificial Sequence: Synthetic oligonucleotide
gaauaaagggcaugugggc

SEQ ID NO: 3004294 - RNA, 19 nt, Artificial Sequence
  Description of Artificial Sequence: Synthetic oligonucleotide
ucacuuucugccaugaaua

SEQ ID NO: 3004295 - RNA, 19 nt, Artificial Sequence
  Description of Artificial Sequence: Synthetic oligonucleotide
uaccgcaggggaaagagcc

SEQ ID NO: 3004296 - RNA, 19 nt, Artificial Sequence
  Description of Artificial Sequence: Synthetic oligonucleotide
uucugccaugaauaaaggg

SEQ ID NO: 3004297 - RNA, 19 nt, Artificial Sequence
  Description of Artificial Sequence: Synthetic oligonucleotide
aacaaauacacaggaucag

SEQ ID NO: 3004298 - RNA, 19 nt, Artificial Sequence
  Description of Artificial Sequence: Synthetic oligonucleotide
aaauaauauaaaacaaaua

SEQ ID NO: 3004299 - RNA, 19 nt, Artificial Sequence
  Description of Artificial Sequence: Synthetic oligonucleotide
agaagcgcagcacaaaccu

SEQ ID NO: 3004300 - RNA, 19 nt, Artificial Sequence
  Description of Artificial Sequence: Synthetic oligonucleotide
acaaauacacaggaucagg

SEQ ID NO: 3004301 - RNA, 19 nt, Artificial Sequence
  Description of Artificial Sequence: Synthetic oligonucleotide
uuuccaagccagaagcgca

SEQ ID NO: 3004302 - RNA, 19 nt, Artificial Sequence
  Description of Artificial Sequence: Synthetic oligonucleotide
uaaaacaaauacacaggau

SEQ ID NO: 3004303 - RNA, 19 nt, Artificial Sequence
  Description of Artificial Sequence: Synthetic oligonucleotide
aagcgcagcacaaaccucg

SEQ ID NO: 3004304 - RNA, 19 nt, Artificial Sequence
  Description of Artificial Sequence: Synthetic oligonucleotide
cagucugagagcuugcccc

SEQ ID NO: 3004305 - RNA, 19 nt, Artificial Sequence
  Description of Artificial Sequence: Synthetic oligonucleotide
aggggaaagagcccguuuc

SEQ ID NO: 3004306 - RNA, 19 nt, Artificial Sequence
  Description of Artificial Sequence: Synthetic oligonucleotide
uuuuccaagccagaagcgc

SEQ ID NO: 3004307 - RNA, 19 nt, Artificial Sequence
  Description of Artificial Sequence: Synthetic oligonucleotide
auggacggacacuaaggac

SEQ ID NO: 3004308 - RNA, 19 nt, Artificial Sequence
  Description of Artificial Sequence: Synthetic oligonucleotide
ucccuuguguccucgagcc

SEQ ID NO: 3004309 - RNA, 19 nt, Artificial Sequence
  Description of Artificial Sequence: Synthetic oligonucleotide
cuuuuccaagccagaagcg

SEQ ID NO: 3004310 - RNA, 19 nt, Artificial Sequence
  Description of Artificial Sequence: Synthetic oligonucleotide
ucagucugagagcuugccc

SEQ ID NO: 3004311 - RNA, 19 nt, Artificial Sequence
  Description of Artificial Sequence: Synthetic oligonucleotide
aagccagaagcgcagcaca

SEQ ID NO: 3004312 - RNA, 19 nt, Artificial Sequence
  Description of Artificial Sequence: Synthetic oligonucleotide
aaagagcccguuucccuug

SEQ ID NO: 3004313 - RNA, 19 nt, Artificial Sequence
  Description of Artificial Sequence: Synthetic oligonucleotide
agcacaaaccucgcuuucc

SEQ ID NO: 3004314 - RNA, 19 nt, Artificial Sequence
  Description of Artificial Sequence: Synthetic oligonucleotide
ugcgagcacguacacagca

SEQ ID NO: 3004315 - RNA, 19 nt, Artificial Sequence
  Description of Artificial Sequence: Synthetic oligonucleotide
ggacacuaaggacagcacg

SEQ ID NO: 3004316 - RNA, 19 nt, Artificial Sequence
  Description of Artificial Sequence: Synthetic oligonucleotide
auacacaggaucaggucac

SEQ ID NO: 3004317 - RNA, 19 nt, Artificial Sequence
  Description of Artificial Sequence: Synthetic oligonucleotide
uacacagcacggacgcagg

SEQ ID NO: 3004318 - RNA, 19 nt, Artificial Sequence
  Description of Artificial Sequence: Synthetic oligonucleotide
uuucccuuguguccucgag

SEQ ID NO: 3004319 - RNA, 19 nt, Artificial Sequence
  Description of Artificial Sequence: Synthetic oligonucleotide
uuccaagccagaagcgcag

SEQ ID NO: 3004320 - RNA, 19 nt, Artificial Sequence
  Description of Artificial Sequence: Synthetic oligonucleotide
gacacuaaggacagcacga

SEQ ID NO: 3004321 - RNA, 19 nt, Artificial Sequence
  Description of Artificial Sequence: Synthetic oligonucleotide
cacguacacagcacggacg

SEQ ID NO: 3004322 - RNA, 19 nt, Artificial Sequence
  Description of Artificial Sequence: Synthetic oligonucleotide
uucccuuguguccucgagc

SEQ ID NO: 3004323 - RNA, 19 nt, Artificial Sequence
  Description of Artificial Sequence: Synthetic oligonucleotide
cugccaugaauaaagggca

SEQ ID NO: 3004324 - RNA, 19 nt, Artificial Sequence
  Description of Artificial Sequence: Synthetic oligonucleotide
ucgagccacgcauggaucc

SEQ ID NO: 3004325 - RNA, 19 nt, Artificial Sequence
  Description of Artificial Sequence: Synthetic oligonucleotide
ccacccuucagucugagag

SEQ ID NO: 3004326 - RNA, 19 nt, Artificial Sequence
  Description of Artificial Sequence: Synthetic oligonucleotide
agcccguuucccuuguguc

SEQ ID NO: 3004327 - RNA, 19 nt, Artificial Sequence
  Description of Artificial Sequence: Synthetic oligonucleotide
caaaccucgcuuucccacc

SEQ ID NO: 3004328 - RNA, 19 nt, Artificial Sequence
  Description of Artificial Sequence: Synthetic oligonucleotide
agagcuugccccuacuuuu

SEQ ID NO: 3004329 - RNA, 19 nt, Artificial Sequence
  Description of Artificial Sequence: Synthetic oligonucleotide
cagaagcgcagcacaaacc

SEQ ID NO: 3004330 - RNA, 19 nt, Artificial Sequence
  Description of Artificial Sequence: Synthetic oligonucleotide
aaaccucgcuuucccaccu

SEQ ID NO: 3004331 - RNA, 19 nt, Artificial Sequence
  Description of Artificial Sequence: Synthetic oligonucleotide
agcuugccccuacuuuucc

SEQ ID NO: 3004332 - RNA, 19 nt, Artificial Sequence
  Description of Artificial Sequence: Synthetic oligonucleotide
aggaucaggucacuuucug

SEQ ID NO: 3004333 - RNA, 19 nt, Artificial Sequence
  Description of Artificial Sequence: Synthetic oligonucleotide
acagcacggacgcagggca

SEQ ID NO: 3004334 - RNA, 19 nt, Artificial Sequence
  Description of Artificial Sequence: Synthetic oligonucleotide
auggaucccacccuucagu

SEQ ID NO: 3004335 - RNA, 19 nt, Artificial Sequence
  Description of Artificial Sequence: Synthetic oligonucleotide
guacacagcacggacgcag

SEQ ID NO: 3004336 - RNA, 19 nt, Artificial Sequence
  Description of Artificial Sequence: Synthetic oligonucleotide
acggacacuaaggacagca

SEQ ID NO: 3004337 - RNA, 19 nt, Artificial Sequence
  Description of Artificial Sequence: Synthetic oligonucleotide
uccacgguccccucccggg

SEQ ID NO: 3004338 - RNA, 19 nt, Artificial Sequence
  Description of Artificial Sequence: Synthetic oligonucleotide
ugccccuacuuuuccaagc

SEQ ID NO: 3004339 - RNA, 19 nt, Artificial Sequence
  Description of Artificial Sequence: Synthetic oligonucleotide
acggacgcagggcagcggg

SEQ ID NO: 3004340 - RNA, 19 nt, Artificial Sequence
  Description of Artificial Sequence: Synthetic oligonucleotide
ucgcuuucccaccucgcug

SEQ ID NO: 3004341 - RNA, 19 nt, Artificial Sequence
  Description of Artificial Sequence: Synthetic oligonucleotide
aagcgcaccugccgcaucu

SEQ ID NO: 3004342 - RNA, 19 nt, Artificial Sequence
  Description of Artificial Sequence: Synthetic oligonucleotide
ucaggucacuuucugccau

SEQ ID NO: 3004343 - RNA, 19 nt, Artificial Sequence
  Description of Artificial Sequence: Synthetic oligonucleotide
accucgcuuucccaccucg

SEQ ID NO: 3004344 - RNA, 19 nt, Artificial Sequence
  Description of Artificial Sequence: Synthetic oligonucleotide
ugccgcaucuccccgcgag

SEQ ID NO: 3004345 - RNA, 19 nt, Artificial Sequence
  Description of Artificial Sequence: Synthetic oligonucleotide
uucagucugagagcuugcc

SEQ ID NO: 3004346 - RNA, 19 nt, Artificial Sequence
  Description of Artificial Sequence: Synthetic oligonucleotide
cuccccgcgaggaaggcgc

SEQ ID NO: 3004347 - RNA, 19 nt, Artificial Sequence
  Description of Artificial Sequence: Synthetic oligonucleotide
cuuguguccucgagccacg

SEQ ID NO: 3004348 - RNA, 19 nt, Artificial Sequence
  Description of Artificial Sequence: Synthetic oligonucleotide
gaggugacggccgcggcgg

SEQ ID NO: 3004349 - RNA, 19 nt, Artificial Sequence
  Description of Artificial Sequence: Synthetic oligonucleotide
caugugggcgcagggaggg

SEQ ID NO: 3004350 - RNA, 19 nt, Artificial Sequence
  Description of Artificial Sequence: Synthetic oligonucleotide
cgugcgagcacguacacag

SEQ ID NO: 3004351 - RNA, 19 nt, Artificial Sequence
  Description of Artificial Sequence: Synthetic oligonucleotide
caaauacacaggaucaggu

SEQ ID NO: 3004352 - RNA, 19 nt, Artificial Sequence
  Description of Artificial Sequence: Synthetic oligonucleotide
cacgaagcgcaccugccgc

SEQ ID NO: 3004353 - RNA, 19 nt, Artificial Sequence
  Description of Artificial Sequence: Synthetic oligonucleotide
ucugagagcuugccccuac

SEQ ID NO: 3004354 - RNA, 19 nt, Artificial Sequence
  Description of Artificial Sequence: Synthetic oligonucleotide
caugaauaaagggcaugug

SEQ ID NO: 3004355 - RNA, 19 nt, Artificial Sequence
  Description of Artificial Sequence: Synthetic oligonucleotide
aagggcaugugggcgcagg

SEQ ID NO: 3004356 - RNA, 19 nt, Artificial Sequence
  Description of Artificial Sequence: Synthetic oligonucleotide
uggaucccacccuucaguc

SEQ ID NO: 3004357 - RNA, 19 nt, Artificial Sequence
  Description of Artificial Sequence: Synthetic oligonucleotide
uaaggacagcacgaagcgc

SEQ ID NO: 3004358 - RNA, 19 nt, Artificial Sequence
  Description of Artificial Sequence: Synthetic oligonucleotide
uguccucgagccacgcaug

SEQ ID NO: 3004359 - RNA, 19 nt, Artificial Sequence
  Description of Artificial Sequence: Synthetic oligonucleotide
gagcacguacacagcacgg

SEQ ID NO: 3004360 - RNA, 19 nt, Artificial Sequence
  Description of Artificial Sequence: Synthetic oligonucleotide
cacuaaggacagcacgaag

SEQ ID NO: 3004361 - RNA, 19 nt, Artificial Sequence
  Description of Artificial Sequence: Synthetic oligonucleotide
cacccuucagucugagagc

SEQ ID NO: 3004362 - RNA, 19 nt, Artificial Sequence
  Description of Artificial Sequence: Synthetic oligonucleotide
agcacgaagcgcaccugcc

SEQ ID NO: 3004363 - RNA, 19 nt, Artificial Sequence
  Description of Artificial Sequence: Synthetic oligonucleotide
caucuccccgcgaggaagg

SEQ ID NO: 3004364 - RNA, 19 nt, Artificial Sequence
  Description of Artificial Sequence: Synthetic oligonucleotide
uugccccuacuuuuccaag

SEQ ID NO: 3004365 - RNA, 19 nt, Artificial Sequence
  Description of Artificial Sequence: Synthetic oligonucleotide
agucugagagcuugccccu

SEQ ID NO: 3004366 - RNA, 19 nt, Artificial Sequence
  Description of Artificial Sequence: Synthetic oligonucleotide
ggcaugugggcgcagggag

SEQ ID NO: 3004367 - RNA, 19 nt, Artificial Sequence
  Description of Artificial Sequence: Synthetic oligonucleotide
gguaccgcaggggaaagag

SEQ ID NO: 3004368 - RNA, 19 nt, Artificial Sequence
  Description of Artificial Sequence: Synthetic oligonucleotide
cuucagucugagagcuugc

SEQ ID NO: 3004369 - RNA, 19 nt, Artificial Sequence
  Description of Artificial Sequence: Synthetic oligonucleotide
acacagcacggacgcaggg

SEQ ID NO: 3004370 - RNA, 19 nt, Artificial Sequence
  Description of Artificial Sequence: Synthetic oligonucleotide
cauggaucccacccuucag

SEQ ID NO: 3004371 - RNA, 19 nt, Artificial Sequence
  Description of Artificial Sequence: Synthetic oligonucleotide
agcacggacgcagggcagc

SEQ ID NO: 3004372 - RNA, 19 nt, Artificial Sequence
  Description of Artificial Sequence: Synthetic oligonucleotide
ugagagcuugccccuacuu

SEQ ID NO: 3004373 - RNA, 19 nt, Artificial Sequence
  Description of Artificial Sequence: Synthetic oligonucleotide
aaccucgcuuucccaccuc

SEQ ID NO: 3004374 - RNA, 19 nt, Artificial Sequence
  Description of Artificial Sequence: Synthetic oligonucleotide
ggaucaggucacuuucugc

SEQ ID NO: 3004375 - RNA, 19 nt, Artificial Sequence
  Description of Artificial Sequence: Synthetic oligonucleotide
ugccaugaauaaagggcau

SEQ ID NO: 3004376 - RNA, 19 nt, Artificial Sequence
  Description of Artificial Sequence: Synthetic oligonucleotide
agggcaugugggcgcaggg

SEQ ID NO: 3004377 - RNA, 19 nt, Artificial Sequence
  Description of Artificial Sequence: Synthetic oligonucleotide
ucgcuggggccucuccacg

SEQ ID NO: 3004378 - RNA, 19 nt, Artificial Sequence
  Description of Artificial Sequence: Synthetic oligonucleotide
gucacuuucugccaugaau

SEQ ID NO: 3004379 - RNA, 19 nt, Artificial Sequence
  Description of Artificial Sequence: Synthetic oligonucleotide
cccuacuuuuccaagccag

SEQ ID NO: 3004380 - RNA, 19 nt, Artificial Sequence
  Description of Artificial Sequence: Synthetic oligonucleotide
cucuccacgguccccuccc

SEQ ID NO: 3004381 - RNA, 19 nt, Artificial Sequence
  Description of Artificial Sequence: Synthetic oligonucleotide
accugccgcaucuccccgc

SEQ ID NO: 3004382 - RNA, 19 nt, Artificial Sequence
  Description of Artificial Sequence: Synthetic oligonucleotide
acccuucagucugagagcu

SEQ ID NO: 3004383 - RNA, 19 nt, Artificial Sequence
  Description of Artificial Sequence: Synthetic oligonucleotide
cagcacgaagcgcaccugc

SEQ ID NO: 3004384 - RNA, 19 nt, Artificial Sequence
  Description of Artificial Sequence: Synthetic oligonucleotide
uguguccucgagccacgca

SEQ ID NO: 3004385 - RNA, 19 nt, Artificial Sequence
  Description of Artificial Sequence: Synthetic oligonucleotide
gacagcacgaagcgcaccu

SEQ ID NO: 3004386 - RNA, 19 nt, Artificial Sequence
  Description of Artificial Sequence: Synthetic oligonucleotide
gucacuugggagccacccc

SEQ ID NO: 3004387 - RNA, 19 nt, Artificial Sequence
  Description of Artificial Sequence: Synthetic oligonucleotide
uaaagggcaugugggcgca

SEQ ID NO: 3004388 - RNA, 19 nt, Artificial Sequence
  Description of Artificial Sequence: Synthetic oligonucleotide
aagagcccguuucccuugu

SEQ ID NO: 3004389 - RNA, 19 nt, Artificial Sequence
  Description of Artificial Sequence: Synthetic oligonucleotide
ucuccacgguccccucccg

SEQ ID NO: 3004390 - RNA, 19 nt, Artificial Sequence
  Description of Artificial Sequence: Synthetic oligonucleotide
guccccucccgggaaaugg

SEQ ID NO: 3004391 - RNA, 19 nt, Artificial Sequence
  Description of Artificial Sequence: Synthetic oligonucleotide
ccucccgggaaauggacgg

SEQ ID NO: 3004392 - RNA, 19 nt, Artificial Sequence
  Description of Artificial Sequence: Synthetic oligonucleotide
ggggaaagagcccguuucc

SEQ ID NO: 3004393 - RNA, 19 nt, Artificial Sequence
  Description of Artificial Sequence: Synthetic oligonucleotide
accucgcuggggccucucc

SEQ ID NO: 3004394 - RNA, 19 nt, Artificial Sequence
  Description of Artificial Sequence: Synthetic oligonucleotide
gcacaaaccucgcuuuccc

SEQ ID NO: 3004395 - RNA, 19 nt, Artificial Sequence
  Description of Artificial Sequence: Synthetic oligonucleotide
acuuucugccaugaauaaa

SEQ ID NO: 3004396 - RNA, 19 nt, Artificial Sequence
  Description of Artificial Sequence: Synthetic oligonucleotide
accgcaggggaaagagccc

SEQ ID NO: 3004397 - RNA, 19 nt, Artificial Sequence
  Description of Artificial Sequence: Synthetic oligonucleotide
cuugccccuacuuuuccaa

SEQ ID NO: 3004398 - RNA, 19 nt, Artificial Sequence
  Description of Artificial Sequence: Synthetic oligonucleotide
agcgcagcacaaaccucgc

SEQ ID NO: 3004399 - RNA, 19 nt, Artificial Sequence
  Description of Artificial Sequence: Synthetic oligonucleotide
agcacguacacagcacgga

SEQ ID NO: 3004400 - RNA, 19 nt, Artificial Sequence
  Description of Artificial Sequence: Synthetic oligonucleotide
ucuccccgcgaggaaggcg

SEQ ID NO: 3004401 - RNA, 19 nt, Artificial Sequence
  Description of Artificial Sequence: Synthetic oligonucleotide
cacagcacggacgcagggc

SEQ ID NO: 3004402 - RNA, 19 nt, Artificial Sequence
  Description of Artificial Sequence: Synthetic oligonucleotide
ccacgcauggaucccaccc

SEQ ID NO: 3004403 - RNA, 19 nt, Artificial Sequence
  Description of Artificial Sequence: Synthetic oligonucleotide
cucgcuggggccucuccac

SEQ ID NO: 3004404 - RNA, 19 nt, Artificial Sequence
  Description of Artificial Sequence: Synthetic oligonucleotide
uccccucccgggaaaugga

SEQ ID NO: 3004405 - RNA, 19 nt, Artificial Sequence
  Description of Artificial Sequence: Synthetic oligonucleotide
ccagaagcgcagcacaaac

SEQ ID NO: 3004406 - RNA, 19 nt, Artificial Sequence
  Description of Artificial Sequence: Synthetic oligonucleotide
gcacgaagcgcaccugccg

SEQ ID NO: 3004407 - RNA, 19 nt, Artificial Sequence
  Description of Artificial Sequence: Synthetic oligonucleotide
cucgagccacgcauggauc

SEQ ID NO: 3004408 - RNA, 19 nt, Artificial Sequence
  Description of Artificial Sequence: Synthetic oligonucleotide
gaaagagcccguuucccuu

SEQ ID NO: 3004409 - RNA, 19 nt, Artificial Sequence
  Description of Artificial Sequence: Synthetic oligonucleotide
ccuucagucugagagcuug

SEQ ID NO: 3004410 - RNA, 19 nt, Artificial Sequence
  Description of Artificial Sequence: Synthetic oligonucleotide
cacuuucugccaugaauaa

SEQ ID NO: 3004411 - RNA, 19 nt, Artificial Sequence
  Description of Artificial Sequence: Synthetic oligonucleotide
acacuaaggacagcacgaa

SEQ ID NO: 3004412 - RNA, 19 nt, Artificial Sequence
  Description of Artificial Sequence: Synthetic oligonucleotide
cuacuuuuccaagccagaa

SEQ ID NO: 3004413 - RNA, 19 nt, Artificial Sequence
  Description of Artificial Sequence: Synthetic oligonucleotide
uccaagccagaagcgcagc

SEQ ID NO: 3004414 - RNA, 19 nt, Artificial Sequence
  Description of Artificial Sequence: Synthetic oligonucleotide
gccccuacuuuuccaagcc

SEQ ID NO: 3004415 - RNA, 19 nt, Artificial Sequence
  Description of Artificial Sequence: Synthetic oligonucleotide
ggacggacacuaaggacag

SEQ ID NO: 3004416 - RNA, 19 nt, Artificial Sequence
  Description of Artificial Sequence: Synthetic oligonucleotide
caggucacuuucugccaug

SEQ ID NO: 3004417 - RNA, 19 nt, Artificial Sequence
  Description of Artificial Sequence: Synthetic oligonucleotide
ucccgggaaauggacggac

SEQ ID NO: 3004418 - RNA, 19 nt, Artificial Sequence
  Description of Artificial Sequence: Synthetic oligonucleotide
gaagcgcagcacaaaccuc

SEQ ID NO: 3004419 - RNA, 19 nt, Artificial Sequence
  Description of Artificial Sequence: Synthetic oligonucleotide
acgaagcgcaccugccgca

SEQ ID NO: 3004420 - RNA, 19 nt, Artificial Sequence
  Description of Artificial Sequence: Synthetic oligonucleotide
cgagcacguacacagcacg

SEQ ID NO: 3004421 - RNA, 19 nt, Artificial Sequence
  Description of Artificial Sequence: Synthetic oligonucleotide
gcacguacacagcacggac

SEQ ID NO: 3004422 - RNA, 19 nt, Artificial Sequence
  Description of Artificial Sequence: Synthetic oligonucleotide
gggaaauggacggacacua

SEQ ID NO: 3004423 - RNA, 19 nt, Artificial Sequence
  Description of Artificial Sequence: Synthetic oligonucleotide
uacacaggaucaggucacu

SEQ ID NO: 3004424 - RNA, 19 nt, Artificial Sequence
  Description of Artificial Sequence: Synthetic oligonucleotide
gggaaagagcccguuuccc

SEQ ID NO: 3004425 - RNA, 19 nt, Artificial Sequence
  Description of Artificial Sequence: Synthetic oligonucleotide
aucuccccgcgaggaaggc

SEQ ID NO: 3004426 - RNA, 19 nt, Artificial Sequence
  Description of Artificial Sequence: Synthetic oligonucleotide
cacaaaccucgcuuuccca

SEQ ID NO: 3004427 - RNA, 19 nt, Artificial Sequence
  Description of Artificial Sequence: Synthetic oligonucleotide
cuuucccaccucgcugggg

SEQ ID NO: 3004428 - RNA, 19 nt, Artificial Sequence
  Description of Artificial Sequence: Synthetic oligonucleotide
gcccguuucccuugugucc

SEQ ID NO: 3004429 - RNA, 19 nt, Artificial Sequence
  Description of Artificial Sequence: Synthetic oligonucleotide
uucccaccucgcuggggcc

SEQ ID NO: 3004430 - RNA, 19 nt, Artificial Sequence
  Description of Artificial Sequence: Synthetic oligonucleotide
ccuuguguccucgagccac

SEQ ID NO: 3004431 - RNA, 19 nt, Artificial Sequence
  Description of Artificial Sequence: Synthetic oligonucleotide
gagagcuugccccuacuuu

SEQ ID NO: 3004432 - RNA, 19 nt, Artificial Sequence
  Description of Artificial Sequence: Synthetic oligonucleotide
uccccgcgaggaaggcgcg

SEQ ID NO: 3004433 - RNA, 19 nt, Artificial Sequence
  Description of Artificial Sequence: Synthetic oligonucleotide
cagcacaaaccucgcuuuc

SEQ ID NO: 3004434 - RNA, 19 nt, Artificial Sequence
  Description of Artificial Sequence: Synthetic oligonucleotide
cgcuuucccaccucgcugg

SEQ ID NO: 3004435 - RNA, 19 nt, Artificial Sequence
  Description of Artificial Sequence: Synthetic oligonucleotide
gccaugaauaaagggcaug

SEQ ID NO: 3004436 - RNA, 19 nt, Artificial Sequence
  Description of Artificial Sequence: Synthetic oligonucleotide
cuccacgguccccucccgg

SEQ ID NO: 3004437 - RNA, 19 nt, Artificial Sequence
  Description of Artificial Sequence: Synthetic oligonucleotide
gugacggccgcggcggcgg

SEQ ID NO: 3004438 - RNA, 19 nt, Artificial Sequence
  Description of Artificial Sequence: Synthetic oligonucleotide
gagcuugccccuacuuuuc

SEQ ID NO: 3004439 - RNA, 19 nt, Artificial Sequence
  Description of Artificial Sequence: Synthetic oligonucleotide
guaccgcaggggaaagagc

SEQ ID NO: 3004440 - RNA, 19 nt, Artificial Sequence
  Description of Artificial Sequence: Synthetic oligonucleotide
aaagggcaugugggcgcag

SEQ ID NO: 3004441 - RNA, 19 nt, Artificial Sequence
  Description of Artificial Sequence: Synthetic oligonucleotide
acgcauggaucccacccuu

SEQ ID NO: 3004442 - RNA, 19 nt, Artificial Sequence
  Description of Artificial Sequence: Synthetic oligonucleotide
guguccucgagccacgcau

SEQ ID NO: 3004443 - RNA, 19 nt, Artificial Sequence
  Description of Artificial Sequence: Synthetic oligonucleotide
uuguguccucgagccacgc

SEQ ID NO: 3004444 - RNA, 19 nt, Artificial Sequence
  Description of Artificial Sequence: Synthetic oligonucleotide
gcaccugccgcaucucccc

SEQ ID NO: 3004445 - RNA, 19 nt, Artificial Sequence
  Description of Artificial Sequence: Synthetic oligonucleotide
ggaaagagcccguuucccu

SEQ ID NO: 3004446 - RNA, 19 nt, Artificial Sequence
  Description of Artificial Sequence: Synthetic oligonucleotide
gcaucuccccgcgaggaag

SEQ ID NO: 3004447 - RNA, 19 nt, Artificial Sequence
  Description of Artificial Sequence: Synthetic oligonucleotide
gagcccguuucccuugugu

SEQ ID NO: 3004448 - RNA, 19 nt, Artificial Sequence
  Description of Artificial Sequence: Synthetic oligonucleotide
gcauggaucccacccuuca

SEQ ID NO: 3004449 - RNA, 19 nt, Artificial Sequence
  Description of Artificial Sequence: Synthetic oligonucleotide
ggcgcgugcgagcacguac

SEQ ID NO: 3004450 - RNA, 19 nt, Artificial Sequence
  Description of Artificial Sequence: Synthetic oligonucleotide
guuucccuuguguccucga

SEQ ID NO: 3004451 - RNA, 19 nt, Artificial Sequence
  Description of Artificial Sequence: Synthetic oligonucleotide
ccgggaaauggacggacac

SEQ ID NO: 3004452 - RNA, 19 nt, Artificial Sequence
  Description of Artificial Sequence: Synthetic oligonucleotide
agccacgcauggaucccac

SEQ ID NO: 3004453 - RNA, 19 nt, Artificial Sequence
  Description of Artificial Sequence: Synthetic oligonucleotide
cccucccgggaaauggacg

SEQ ID NO: 3004454 - RNA, 19 nt, Artificial Sequence
  Description of Artificial Sequence: Synthetic oligonucleotide
caccugccgcaucuccccg

SEQ ID NO: 3004455 - RNA, 19 nt, Artificial Sequence
  Description of Artificial Sequence: Synthetic oligonucleotide
uccucgagccacgcaugga

SEQ ID NO: 3004456 - RNA, 19 nt, Artificial Sequence
  Description of Artificial Sequence: Synthetic oligonucleotide
acagcacgaagcgcaccug

SEQ ID NO: 3004457 - RNA, 19 nt, Artificial Sequence
  Description of Artificial Sequence: Synthetic oligonucleotide
cagcacggacgcagggcag

SEQ ID NO: 3004458 - RNA, 19 nt, Artificial Sequence
  Description of Artificial Sequence: Synthetic oligonucleotide
gaagcgcaccugccgcauc

SEQ ID NO: 3004459 - RNA, 19 nt, Artificial Sequence
  Description of Artificial Sequence: Synthetic oligonucleotide
ccuacuuuuccaagccaga

SEQ ID NO: 3004460 - RNA, 19 nt, Artificial Sequence
  Description of Artificial Sequence: Synthetic oligonucleotide
agagcccguuucccuugug

SEQ ID NO: 3004461 - RNA, 19 nt, Artificial Sequence
  Description of Artificial Sequence: Synthetic oligonucleotide
cacaggaucaggucacuuu

SEQ ID NO: 3004462 - RNA, 19 nt, Artificial Sequence
  Description of Artificial Sequence: Synthetic oligonucleotide
gcaugugggcgcagggagg

SEQ ID NO: 3004463 - RNA, 19 nt, Artificial Sequence
  Description of Artificial Sequence: Synthetic oligonucleotide
ucccacccuucagucugag

SEQ ID NO: 3004464 - RNA, 19 nt, Artificial Sequence
  Description of Artificial Sequence: Synthetic oligonucleotide
ucccaccucgcuggggccu

SEQ ID NO: 3004465 - RNA, 19 nt, Artificial Sequence
  Description of Artificial Sequence: Synthetic oligonucleotide
ccgcaggggaaagagcccg

SEQ ID NO: 3004466 - RNA, 19 nt, Artificial Sequence
  Description of Artificial Sequence: Synthetic oligonucleotide
gagccacgcauggauccca

SEQ ID NO: 3004467 - RNA, 19 nt, Artificial Sequence
  Description of Artificial Sequence: Synthetic oligonucleotide
gcuuucccaccucgcuggg

SEQ ID NO: 3004468 - RNA, 19 nt, Artificial Sequence
  Description of Artificial Sequence: Synthetic oligonucleotide
gacggacacuaaggacagc

SEQ ID NO: 3004469 - RNA, 19 nt, Artificial Sequence
  Description of Artificial Sequence: Synthetic oligonucleotide
ccugccgcaucuccccgcg

SEQ ID NO: 3004470 - RNA, 19 nt, Artificial Sequence
  Description of Artificial Sequence: Synthetic oligonucleotide
acacaggaucaggucacuu

SEQ ID NO: 3004471 - RNA, 19 nt, Artificial Sequence
  Description of Artificial Sequence: Synthetic oligonucleotide
gccgcaucuccccgcgagg

SEQ ID NO: 3004472 - RNA, 19 nt, Artificial Sequence
  Description of Artificial Sequence: Synthetic oligonucleotide
cucgcuuucccaccucgcu

SEQ ID NO: 3004473 - RNA, 19 nt, Artificial Sequence
  Description of Artificial Sequence: Synthetic oligonucleotide
agccagaagcgcagcacaa

SEQ ID NO: 3004474 - RNA, 19 nt, Artificial Sequence
  Description of Artificial Sequence: Synthetic oligonucleotide
agcgcaccugccgcaucuc

SEQ ID NO: 3004475 - RNA, 19 nt, Artificial Sequence
  Description of Artificial Sequence: Synthetic oligonucleotide
caggaucaggucacuuucu

SEQ ID NO: 3004476 - RNA, 19 nt, Artificial Sequence
  Description of Artificial Sequence: Synthetic oligonucleotide
cuggggccucuccacgguc

SEQ ID NO: 3004477 - RNA, 19 nt, Artificial Sequence
  Description of Artificial Sequence: Synthetic oligonucleotide
cacgcauggaucccacccu

SEQ ID NO: 3004478 - RNA, 19 nt, Artificial Sequence
  Description of Artificial Sequence: Synthetic oligonucleotide
gcuugccccuacuuuucca

SEQ ID NO: 3004479 - RNA, 19 nt, Artificial Sequence
  Description of Artificial Sequence: Synthetic oligonucleotide
augugggcgcagggagggg

SEQ ID NO: 3004480 - RNA, 19 nt, Artificial Sequence
  Description of Artificial Sequence: Synthetic oligonucleotide
aaggcgcgugcgagcacgu

SEQ ID NO: 3004481 - RNA, 19 nt, Artificial Sequence
  Description of Artificial Sequence: Synthetic oligonucleotide
gugcgagcacguacacagc

SEQ ID NO: 3004482 - RNA, 19 nt, Artificial Sequence
  Description of Artificial Sequence: Synthetic oligonucleotide
ccaugaauaaagggcaugu

SEQ ID NO: 3004483 - RNA, 19 nt, Artificial Sequence
  Description of Artificial Sequence: Synthetic oligonucleotide
ccucgcuuucccaccucgc

SEQ ID NO: 3004484 - RNA, 19 nt, Artificial Sequence
  Description of Artificial Sequence: Synthetic oligonucleotide
cgaggugacggccgcggcg

SEQ ID NO: 3004485 - RNA, 19 nt, Artificial Sequence
  Description of Artificial Sequence: Synthetic oligonucleotide
cacggacgcagggcagcgg

SEQ ID NO: 3004486 - RNA, 19 nt, Artificial Sequence
  Description of Artificial Sequence: Synthetic oligonucleotide
ggggccucuccacgguccc

SEQ ID NO: 3004487 - RNA, 19 nt, Artificial Sequence
  Description of Artificial Sequence: Synthetic oligonucleotide
acgguccccucccgggaaa

SEQ ID NO: 3004488 - RNA, 19 nt, Artificial Sequence
  Description of Artificial Sequence: Synthetic oligonucleotide
ggaaauggacggacacuaa

SEQ ID NO: 3004489 - RNA, 19 nt, Artificial Sequence
  Description of Artificial Sequence: Synthetic oligonucleotide
ggggucacuugggagccac

SEQ ID NO: 3004490 - RNA, 19 nt, Artificial Sequence
  Description of Artificial Sequence: Synthetic oligonucleotide
ggugacggccgcggcggcg

SEQ ID NO: 3004491 - RNA, 19 nt, Artificial Sequence
  Description of Artificial Sequence: Synthetic oligonucleotide
gcacggacgcagggcagcg

SEQ ID NO: 3004492 - RNA, 19 nt, Artificial Sequence
  Description of Artificial Sequence: Synthetic oligonucleotide
ggacagcacgaagcgcacc

SEQ ID NO: 3004493 - RNA, 19 nt, Artificial Sequence
  Description of Artificial Sequence: Synthetic oligonucleotide
cggacacuaaggacagcac

SEQ ID NO: 3004494 - RNA, 19 nt, Artificial Sequence
  Description of Artificial Sequence: Synthetic oligonucleotide
gcagcacaaaccucgcuuu

SEQ ID NO: 3004495 - RNA, 19 nt, Artificial Sequence
  Description of Artificial Sequence: Synthetic oligonucleotide
cgaggaaggcgcgugcgag

SEQ ID NO: 3004496 - RNA, 19 nt, Artificial Sequence
  Description of Artificial Sequence: Synthetic oligonucleotide
gcgagcacguacacagcac

SEQ ID NO: 3004497 - RNA, 19 nt, Artificial Sequence
  Description of Artificial Sequence: Synthetic oligonucleotide
gacggccgcggcggcggcg

SEQ ID NO: 3004498 - RNA, 19 nt, Artificial Sequence
  Description of Artificial Sequence: Synthetic oligonucleotide
gccacgcauggaucccacc

SEQ ID NO: 3004499 - RNA, 19 nt, Artificial Sequence
  Description of Artificial Sequence: Synthetic oligonucleotide
gcgcaccugccgcaucucc

SEQ ID NO: 3004500 - RNA, 19 nt, Artificial Sequence
  Description of Artificial Sequence: Synthetic oligonucleotide
cccgaggugacggccgcgg

SEQ ID NO: 3004501 - RNA, 19 nt, Artificial Sequence
  Description of Artificial Sequence: Synthetic oligonucleotide
ggaucccacccuucagucu

SEQ ID NO: 3004502 - RNA, 19 nt, Artificial Sequence
  Description of Artificial Sequence: Synthetic oligonucleotide
ggucacuuucugccaugaa

SEQ ID NO: 3004503 - RNA, 19 nt, Artificial Sequence
  Description of Artificial Sequence: Synthetic oligonucleotide
ccaagccagaagcgcagca

SEQ ID NO: 3004504 - RNA, 19 nt, Artificial Sequence
  Description of Artificial Sequence: Synthetic oligonucleotide
ccucuccacgguccccucc

SEQ ID NO: 3004505 - RNA, 19 nt, Artificial Sequence
  Description of Artificial Sequence: Synthetic oligonucleotide
gcgaggaaggcgcgugcga

SEQ ID NO: 3004506 - RNA, 19 nt, Artificial Sequence
  Description of Artificial Sequence: Synthetic oligonucleotide
gggguaccgcaggggaaag

SEQ ID NO: 3004507 - RNA, 19 nt, Artificial Sequence
  Description of Artificial Sequence: Synthetic oligonucleotide
aucccacccuucagucuga

SEQ ID NO: 3004508 - RNA, 19 nt, Artificial Sequence
  Description of Artificial Sequence: Synthetic oligonucleotide
cgcuggggccucuccacgg

SEQ ID NO: 3004509 - RNA, 19 nt, Artificial Sequence
  Description of Artificial Sequence: Synthetic oligonucleotide
ccccucccgggaaauggac

SEQ ID NO: 3004510 - RNA, 19 nt, Artificial Sequence
  Description of Artificial Sequence: Synthetic oligonucleotide
cacgguccccucccgggaa

SEQ ID NO: 3004511 - RNA, 19 nt, Artificial Sequence
  Description of Artificial Sequence: Synthetic oligonucleotide
cugagagcuugccccuacu

SEQ ID NO: 3004512 - RNA, 19 nt, Artificial Sequence
  Description of Artificial Sequence: Synthetic oligonucleotide
cguuucccuuguguccucg

SEQ ID NO: 3004513 - RNA, 19 nt, Artificial Sequence
  Description of Artificial Sequence: Synthetic oligonucleotide
gggcaugugggcgcaggga

SEQ ID NO: 3004514 - RNA, 19 nt, Artificial Sequence
  Description of Artificial Sequence: Synthetic oligonucleotide
cucccgggaaauggacgga

SEQ ID NO: 3004515 - RNA, 19 nt, Artificial Sequence
  Description of Artificial Sequence: Synthetic oligonucleotide
gcgcgugcgagcacguaca

SEQ ID NO: 3004516 - RNA, 19 nt, Artificial Sequence
  Description of Artificial Sequence: Synthetic oligonucleotide
cccgggaaauggacggaca

SEQ ID NO: 3004517 - RNA, 19 nt, Artificial Sequence
  Description of Artificial Sequence: Synthetic oligonucleotide
gccagaagcgcagcacaaa

SEQ ID NO: 3004518 - RNA, 19 nt, Artificial Sequence
  Description of Artificial Sequence: Synthetic oligonucleotide
cgcgaggaaggcgcgugcg

SEQ ID NO: 3004519 - RNA, 19 nt, Artificial Sequence
  Description of Artificial Sequence: Synthetic oligonucleotide
ccccuacuuuuccaagcca

SEQ ID NO: 3004520 - RNA, 19 nt, Artificial Sequence
  Description of Artificial Sequence: Synthetic oligonucleotide
gguccccucccgggaaaug

SEQ ID NO: 3004521 - RNA, 19 nt, Artificial Sequence
  Description of Artificial Sequence: Synthetic oligonucleotide
gucugagagcuugccccua

SEQ ID NO: 3004522 - RNA, 19 nt, Artificial Sequence
  Description of Artificial Sequence: Synthetic oligonucleotide
cgagccacgcauggauccc

SEQ ID NO: 3004523 - RNA, 19 nt, Artificial Sequence
  Description of Artificial Sequence: Synthetic oligonucleotide
caggggaaagagcccguuu

SEQ ID NO: 3004524 - RNA, 19 nt, Artificial Sequence
  Description of Artificial Sequence: Synthetic oligonucleotide
cccgcgaggaaggcgcgug

SEQ ID NO: 3004525 - RNA, 19 nt, Artificial Sequence
  Description of Artificial Sequence: Synthetic oligonucleotide
ccgcgaggaaggcgcgugc

SEQ ID NO: 3004526 - RNA, 19 nt, Artificial Sequence
  Description of Artificial Sequence: Synthetic oligonucleotide
gggucacuugggagccacc

SEQ ID NO: 3004527 - RNA, 19 nt, Artificial Sequence
  Description of Artificial Sequence: Synthetic oligonucleotide
ccucgagccacgcauggau

SEQ ID NO: 3004528 - RNA, 19 nt, Artificial Sequence
  Description of Artificial Sequence: Synthetic oligonucleotide
cgcauggaucccacccuuc

SEQ ID NO: 3004529 - RNA, 19 nt, Artificial Sequence
  Description of Artificial Sequence: Synthetic oligonucleotide
ccgaggugacggccgcggc

SEQ ID NO: 3004530 - RNA, 19 nt, Artificial Sequence
  Description of Artificial Sequence: Synthetic oligonucleotide
cggacgcagggcagcgggg

SEQ ID NO: 3004531 - RNA, 19 nt, Artificial Sequence
  Description of Artificial Sequence: Synthetic oligonucleotide
ccucgcuggggccucucca

SEQ ID NO: 3004532 - RNA, 19 nt, Artificial Sequence
  Description of Artificial Sequence: Synthetic oligonucleotide
gcggcggcugcagcagcag

SEQ ID NO: 3004533 - RNA, 19 nt, Artificial Sequence
  Description of Artificial Sequence: Synthetic oligonucleotide
ggguaccgcaggggaaaga

SEQ ID NO: 3004534 - RNA, 19 nt, Artificial Sequence
  Description of Artificial Sequence: Synthetic oligonucleotide
gcgugcgagcacguacaca

SEQ ID NO: 3004535 - RNA, 19 nt, Artificial Sequence
  Description of Artificial Sequence: Synthetic oligonucleotide
cgcagcacaaaccucgcuu

SEQ ID NO: 3004536 - RNA, 19 nt, Artificial Sequence
  Description of Artificial Sequence: Synthetic oligonucleotide
gcuggggccucuccacggu

SEQ ID NO: 3004537 - RNA, 19 nt, Artificial Sequence
  Description of Artificial Sequence: Synthetic oligonucleotide
ggccucuccacgguccccu

SEQ ID NO: 3004538 - RNA, 19 nt, Artificial Sequence
  Description of Artificial Sequence: Synthetic oligonucleotide
gggccucuccacggucccc

SEQ ID NO: 3004539 - RNA, 19 nt, Artificial Sequence
  Description of Artificial Sequence: Synthetic oligonucleotide
ccguuucccuuguguccuc

SEQ ID NO: 3004540 - RNA, 19 nt, Artificial Sequence
  Description of Artificial Sequence: Synthetic oligonucleotide
ccgcaucuccccgcgagga

SEQ ID NO: 3004541 - RNA, 19 nt, Artificial Sequence
  Description of Artificial Sequence: Synthetic oligonucleotide
cgcgugcgagcacguacac

SEQ ID NO: 3004542 - RNA, 19 nt, Artificial Sequence
  Description of Artificial Sequence: Synthetic oligonucleotide
cugccgcaucuccccgcga

SEQ ID NO: 3004543 - RNA, 19 nt, Artificial Sequence
  Description of Artificial Sequence: Synthetic oligonucleotide
caccucgcuggggccucuc

SEQ ID NO: 3004544 - RNA, 19 nt, Artificial Sequence
  Description of Artificial Sequence: Synthetic oligonucleotide
cccuuguguccucgagcca

SEQ ID NO: 3004545 - RNA, 19 nt, Artificial Sequence
  Description of Artificial Sequence: Synthetic oligonucleotide
cccacccuucagucugaga

SEQ ID NO: 3004546 - RNA, 19 nt, Artificial Sequence
  Description of Artificial Sequence: Synthetic oligonucleotide
gccucuccacgguccccuc

SEQ ID NO: 3004547 - RNA, 19 nt, Artificial Sequence
  Description of Artificial Sequence: Synthetic oligonucleotide
aggcgcgugcgagcacgua

SEQ ID NO: 3004548 - RNA, 19 nt, Artificial Sequence
  Description of Artificial Sequence: Synthetic oligonucleotide
gcggcggcggcggcggcug

SEQ ID NO: 3004549 - RNA, 19 nt, Artificial Sequence
  Description of Artificial Sequence: Synthetic oligonucleotide
gcgcagcacaaaccucgcu

SEQ ID NO: 3004550 - RNA, 19 nt, Artificial Sequence
  Description of Artificial Sequence: Synthetic oligonucleotide
ccccgaggugacggccgcg

SEQ ID NO: 3004551 - RNA, 19 nt, Artificial Sequence
  Description of Artificial Sequence: Synthetic oligonucleotide
cccaccucgcuggggccuc

SEQ ID NO: 3004552 - RNA, 19 nt, Artificial Sequence
  Description of Artificial Sequence: Synthetic oligonucleotide
cgggaaauggacggacacu

SEQ ID NO: 3004553 - RNA, 19 nt, Artificial Sequence
  Description of Artificial Sequence: Synthetic oligonucleotide
cguacacagcacggacgca

SEQ ID NO: 3004554 - RNA, 19 nt, Artificial Sequence
  Description of Artificial Sequence: Synthetic oligonucleotide
cgcaucuccccgcgaggaa

SEQ ID NO: 3004555 - RNA, 19 nt, Artificial Sequence
  Description of Artificial Sequence: Synthetic oligonucleotide
cgcaggggaaagagcccgu

SEQ ID NO: 3004556 - RNA, 19 nt, Artificial Sequence
  Description of Artificial Sequence: Synthetic oligonucleotide
cccuucagucugagagcuu

SEQ ID NO: 3004557 - RNA, 19 nt, Artificial Sequence
  Description of Artificial Sequence: Synthetic oligonucleotide
cgaagcgcaccugccgcau

SEQ ID NO: 3004558 - RNA, 19 nt, Artificial Sequence
  Description of Artificial Sequence: Synthetic oligonucleotide
ccgcggcggcggcggcggc

SEQ ID NO: 3004559 - RNA, 19 nt, Artificial Sequence
  Description of Artificial Sequence: Synthetic oligonucleotide
ccccgcgaggaaggcgcgu

SEQ ID NO: 3004560 - RNA, 19 nt, Artificial Sequence
  Description of Artificial Sequence: Synthetic oligonucleotide
ccaccucgcuggggccucu

SEQ ID NO: 3004561 - RNA, 19 nt, Artificial Sequence
  Description of Artificial Sequence: Synthetic oligonucleotide
cgguccccucccgggaaau

SEQ ID NO: 3004562 - RNA, 19 nt, Artificial Sequence
  Description of Artificial Sequence: Synthetic oligonucleotide
cgcggcggcggcggcggcu

SEQ ID NO: 3004563 - RNA, 19 nt, Artificial Sequence
  Description of Artificial Sequence: Synthetic oligonucleotide
aucugugucuuucucuucc

SEQ ID NO: 3004564 - RNA, 19 nt, Artificial Sequence
  Description of Artificial Sequence: Synthetic oligonucleotide
acuauugucacuauggaga

SEQ ID NO: 3004565 - RNA, 19 nt, Artificial Sequence
  Description of Artificial Sequence: Synthetic oligonucleotide
agcaggaggauuccauucc

SEQ ID NO: 3004566 - RNA, 19 nt, Artificial Sequence
  Description of Artificial Sequence: Synthetic oligonucleotide
cauuccaucacgugugucc

SEQ ID NO: 3004567 - RNA, 19 nt, Artificial Sequence
  Description of Artificial Sequence: Synthetic oligonucleotide
aucacguguguccaccacc

SEQ ID NO: 3004568 - RNA, 19 nt, Artificial Sequence
  Description of Artificial Sequence: Synthetic oligonucleotide
uuccauuccaucacgugug

SEQ ID NO: 3004569 - RNA, 19 nt, Artificial Sequence
  Description of Artificial Sequence: Synthetic oligonucleotide
auuccauuccaucacgugu

SEQ ID NO: 3004570 - RNA, 19 nt, Artificial Sequence
  Description of Artificial Sequence: Synthetic oligonucleotide
ugucuuucucuuccugugg

SEQ ID NO: 3004571 - RNA, 19 nt, Artificial Sequence
  Description of Artificial Sequence: Synthetic oligonucleotide
gugguuguacagcaggagg

SEQ ID NO: 3004572 - RNA, 19 nt, Artificial Sequence
  Description of Artificial Sequence: Synthetic oligonucleotide
uuguacagcaggaggauuc

SEQ ID NO: 3004573 - RNA, 19 nt, Artificial Sequence
  Description of Artificial Sequence: Synthetic oligonucleotide
ugcaggguaggguagggug

SEQ ID NO: 3004574 - RNA, 19 nt, Artificial Sequence
  Description of Artificial Sequence: Synthetic oligonucleotide
cacuauugucacuauggag

SEQ ID NO: 3004575 - RNA, 19 nt, Artificial Sequence
  Description of Artificial Sequence: Synthetic oligonucleotide
gauuccauuccaucacgug

SEQ ID NO: 3004576 - RNA, 19 nt, Artificial Sequence
  Description of Artificial Sequence: Synthetic oligonucleotide
ugugucuuucucuuccugu

SEQ ID NO: 3004577 - RNA, 19 nt, Artificial Sequence
  Description of Artificial Sequence: Synthetic oligonucleotide
aggauuccauuccaucacg

SEQ ID NO: 3004578 - RNA, 19 nt, Artificial Sequence
  Description of Artificial Sequence: Synthetic oligonucleotide
uucuuaucuccacagucuc

SEQ ID NO: 3004579 - RNA, 19 nt, Artificial Sequence
  Description of Artificial Sequence: Synthetic oligonucleotide
cccacuauugucacuaugg

SEQ ID NO: 3004580 - RNA, 19 nt, Artificial Sequence
  Description of Artificial Sequence: Synthetic oligonucleotide
gaggauuccauuccaucac

SEQ ID NO: 3004581 - RNA, 19 nt, Artificial Sequence
  Description of Artificial Sequence: Synthetic oligonucleotide
cuuaucuccacagucucac

SEQ ID NO: 3004582 - RNA, 19 nt, Artificial Sequence
  Description of Artificial Sequence: Synthetic oligonucleotide
ggugugguuguacagcagg

SEQ ID NO: 3004583 - RNA, 19 nt, Artificial Sequence
  Description of Artificial Sequence: Synthetic oligonucleotide
acguguguccaccaccuuc

SEQ ID NO: 3004584 - RNA, 19 nt, Artificial Sequence
  Description of Artificial Sequence: Synthetic oligonucleotide
accaccuucuuaucuccac

SEQ ID NO: 3004585 - RNA, 19 nt, Artificial Sequence
  Description of Artificial Sequence: Synthetic oligonucleotide
ucuuaucuccacagucuca

SEQ ID NO: 3004586 - RNA, 19 nt, Artificial Sequence
  Description of Artificial Sequence: Synthetic oligonucleotide
ucucaccuugugcuugggg

SEQ ID NO: 3004587 - RNA, 19 nt, Artificial Sequence
  Description of Artificial Sequence: Synthetic oligonucleotide
ugagggugugguuguacag

SEQ ID NO: 3004588 - RNA, 19 nt, Artificial Sequence
  Description of Artificial Sequence: Synthetic oligonucleotide
accuaacccaccccucccc

SEQ ID NO: 3004589 - RNA, 19 nt, Artificial Sequence
  Description of Artificial Sequence: Synthetic oligonucleotide
ucuccacagucucaccuug

SEQ ID NO: 3004590 - RNA, 19 nt, Artificial Sequence
  Description of Artificial Sequence: Synthetic oligonucleotide
uccacagucucaccuugug

SEQ ID NO: 3004591 - RNA, 19 nt, Artificial Sequence
  Description of Artificial Sequence: Synthetic oligonucleotide
uagggugagggugugguug

SEQ ID NO: 3004592 - RNA, 19 nt, Artificial Sequence
  Description of Artificial Sequence: Synthetic oligonucleotide
caccuucuuaucuccacag

SEQ ID NO: 3004593 - RNA, 19 nt, Artificial Sequence
  Description of Artificial Sequence: Synthetic oligonucleotide
ucuuccuguggugucacca

SEQ ID NO: 3004594 - RNA, 19 nt, Artificial Sequence
  Description of Artificial Sequence: Synthetic oligonucleotide
uccaccaccuucuuaucuc

SEQ ID NO: 3004595 - RNA, 19 nt, Artificial Sequence
  Description of Artificial Sequence: Synthetic oligonucleotide
ucuuucucuuccuguggug

SEQ ID NO: 3004596 - RNA, 19 nt, Artificial Sequence
  Description of Artificial Sequence: Synthetic oligonucleotide
uacagcaggaggauuccau

SEQ ID NO: 3004597 - RNA, 19 nt, Artificial Sequence
  Description of Artificial Sequence: Synthetic oligonucleotide
agucucaccuugugcuugg

SEQ ID NO: 3004598 - RNA, 19 nt, Artificial Sequence
  Description of Artificial Sequence: Synthetic oligonucleotide
uaggguagggugagggugu

SEQ ID NO: 3004599 - RNA, 19 nt, Artificial Sequence
  Description of Artificial Sequence: Synthetic oligonucleotide
guaggguagggugagggug

SEQ ID NO: 3004600 - RNA, 19 nt, Artificial Sequence
  Description of Artificial Sequence: Synthetic oligonucleotide
uguacagcaggaggauucc

SEQ ID NO: 3004601 - RNA, 19 nt, Artificial Sequence
  Description of Artificial Sequence: Synthetic oligonucleotide
agggugugguuguacagca

SEQ ID NO: 3004602 - RNA, 19 nt, Artificial Sequence
  Description of Artificial Sequence: Synthetic oligonucleotide
gagggugugguuguacagc

SEQ ID NO: 3004603 - RNA, 19 nt, Artificial Sequence
  Description of Artificial Sequence: Synthetic oligonucleotide
cuuccuguggugucaccag

SEQ ID NO: 3004604 - RNA, 19 nt, Artificial Sequence
  Description of Artificial Sequence: Synthetic oligonucleotide
uccaucacguguguccacc

SEQ ID NO: 3004605 - RNA, 19 nt, Artificial Sequence
  Description of Artificial Sequence: Synthetic oligonucleotide
caugggcaggcgcaguggg

SEQ ID NO: 3004606 - RNA, 19 nt, Artificial Sequence
  Description of Artificial Sequence: Synthetic oligonucleotide
uuaucuccacagucucacc

SEQ ID NO: 3004607 - RNA, 19 nt, Artificial Sequence
  Description of Artificial Sequence: Synthetic oligonucleotide
ucugugucuuucucuuccu

SEQ ID NO: 3004608 - RNA, 19 nt, Artificial Sequence
  Description of Artificial Sequence: Synthetic oligonucleotide
uuucucuuccugugguguc

SEQ ID NO: 3004609 - RNA, 19 nt, Artificial Sequence
  Description of Artificial Sequence: Synthetic oligonucleotide
auuccaucacgugugucca

SEQ ID NO: 3004610 - RNA, 19 nt, Artificial Sequence
  Description of Artificial Sequence: Synthetic oligonucleotide
cacagucucaccuugugcu

SEQ ID NO: 3004611 - RNA, 19 nt, Artificial Sequence
  Description of Artificial Sequence: Synthetic oligonucleotide
ccuucuuaucuccacaguc

SEQ ID NO: 3004612 - RNA, 19 nt, Artificial Sequence
  Description of Artificial Sequence: Synthetic oligonucleotide
uccauuccaucacgugugu

SEQ ID NO: 3004613 - RNA, 19 nt, Artificial Sequence
  Description of Artificial Sequence: Synthetic oligonucleotide
cagcaggaggauuccauuc

SEQ ID NO: 3004614 - RNA, 19 nt, Artificial Sequence
  Description of Artificial Sequence: Synthetic oligonucleotide
uucucuuccugugguguca

SEQ ID NO: 3004615 - RNA, 19 nt, Artificial Sequence
  Description of Artificial Sequence: Synthetic oligonucleotide
accuucuuaucuccacagu

SEQ ID NO: 3004616 - RNA, 19 nt, Artificial Sequence
  Description of Artificial Sequence: Synthetic oligonucleotide
acagcaggaggauuccauu

SEQ ID NO: 3004617 - RNA, 19 nt, Artificial Sequence
  Description of Artificial Sequence: Synthetic oligonucleotide
uguguccaccaccuucuua

SEQ ID NO: 3004618 - RNA, 19 nt, Artificial Sequence
  Description of Artificial Sequence: Synthetic oligonucleotide
guguccaccaccuucuuau

SEQ ID NO: 3004619 - RNA, 19 nt, Artificial Sequence
  Description of Artificial Sequence: Synthetic oligonucleotide
gugagggugugguuguaca

SEQ ID NO: 3004620 - RNA, 19 nt, Artificial Sequence
  Description of Artificial Sequence: Synthetic oligonucleotide
agggugagggugugguugu

SEQ ID NO: 3004621 - RNA, 19 nt, Artificial Sequence
  Description of Artificial Sequence: Synthetic oligonucleotide
cugugucuuucucuuccug

SEQ ID NO: 3004622 - RNA, 19 nt, Artificial Sequence
  Description of Artificial Sequence: Synthetic oligonucleotide
caccuaacccaccccuccc

SEQ ID NO: 3004623 - RNA, 19 nt, Artificial Sequence
  Description of Artificial Sequence: Synthetic oligonucleotide
acagucucaccuugugcuu

SEQ ID NO: 3004624 - RNA, 19 nt, Artificial Sequence
  Description of Artificial Sequence: Synthetic oligonucleotide
caucacguguguccaccac

SEQ ID NO: 3004625 - RNA, 19 nt, Artificial Sequence
  Description of Artificial Sequence: Synthetic oligonucleotide
caggguaggguagggugag

SEQ ID NO: 3004626 - RNA, 19 nt, Artificial Sequence
  Description of Artificial Sequence: Synthetic oligonucleotide
cagucucaccuugugcuug

SEQ ID NO: 3004627 - RNA, 19 nt, Artificial Sequence
  Description of Artificial Sequence: Synthetic oligonucleotide
ucucuuccuguggugucac

SEQ ID NO: 3004628 - RNA, 19 nt, Artificial Sequence
  Description of Artificial Sequence: Synthetic oligonucleotide
uguccaccaccuucuuauc

SEQ ID NO: 3004629 - RNA, 19 nt, Artificial Sequence
  Description of Artificial Sequence: Synthetic oligonucleotide
uuccaucacguguguccac

SEQ ID NO: 3004630 - RNA, 19 nt, Artificial Sequence
  Description of Artificial Sequence: Synthetic oligonucleotide
ccaccaccuucuuaucucc

SEQ ID NO: 3004631 - RNA, 19 nt, Artificial Sequence
  Description of Artificial Sequence: Synthetic oligonucleotide
gugugguuguacagcagga

SEQ ID NO: 3004632 - RNA, 19 nt, Artificial Sequence
  Description of Artificial Sequence: Synthetic oligonucleotide
ccacagucucaccuugugc

SEQ ID NO: 3004633 - RNA, 19 nt, Artificial Sequence
  Description of Artificial Sequence: Synthetic oligonucleotide
ccaccuaacccaccccucc

SEQ ID NO: 3004634 - RNA, 19 nt, Artificial Sequence
  Description of Artificial Sequence: Synthetic oligonucleotide
cucuuccuguggugucacc

SEQ ID NO: 3004635 - RNA, 19 nt, Artificial Sequence
  Description of Artificial Sequence: Synthetic oligonucleotide
augggcaggcgcagugggg

SEQ ID NO: 3004636 - RNA, 19 nt, Artificial Sequence
  Description of Artificial Sequence: Synthetic oligonucleotide
gcaggaggauuccauucca

SEQ ID NO: 3004637 - RNA, 19 nt, Artificial Sequence
  Description of Artificial Sequence: Synthetic oligonucleotide
guccaccaccuucuuaucu

SEQ ID NO: 3004638 - RNA, 19 nt, Artificial Sequence
  Description of Artificial Sequence: Synthetic oligonucleotide
ccacuauugucacuaugga

SEQ ID NO: 3004639 - RNA, 19 nt, Artificial Sequence
  Description of Artificial Sequence: Synthetic oligonucleotide
ggugagggugugguuguac

SEQ ID NO: 3004640 - RNA, 19 nt, Artificial Sequence
  Description of Artificial Sequence: Synthetic oligonucleotide
gucucaccuugugcuuggg

SEQ ID NO: 3004641 - RNA, 19 nt, Artificial Sequence
  Description of Artificial Sequence: Synthetic oligonucleotide
caccaccuucuuaucucca

SEQ ID NO: 3004642 - RNA, 19 nt, Artificial Sequence
  Description of Artificial Sequence: Synthetic oligonucleotide
gcaugggcaggcgcagugg

SEQ ID NO: 3004643 - RNA, 19 nt, Artificial Sequence
  Description of Artificial Sequence: Synthetic oligonucleotide
guacagcaggaggauucca

SEQ ID NO: 3004644 - RNA, 19 nt, Artificial Sequence
  Description of Artificial Sequence: Synthetic oligonucleotide
gcaggguaggguaggguga

SEQ ID NO: 3004645 - RNA, 19 nt, Artificial Sequence
  Description of Artificial Sequence: Synthetic oligonucleotide
ccccacuauugucacuaug

SEQ ID NO: 3004646 - RNA, 19 nt, Artificial Sequence
  Description of Artificial Sequence: Synthetic oligonucleotide
gguaggguagggugagggu

SEQ ID NO: 3004647 - RNA, 19 nt, Artificial Sequence
  Description of Artificial Sequence: Synthetic oligonucleotide
ccaccuucuuaucuccaca

SEQ ID NO: 3004648 - RNA, 19 nt, Artificial Sequence
  Description of Artificial Sequence: Synthetic oligonucleotide
guuguacagcaggaggauu

SEQ ID NO: 3004649 - RNA, 19 nt, Artificial Sequence
  Description of Artificial Sequence: Synthetic oligonucleotide
ggauuccauuccaucacgu

SEQ ID NO: 3004650 - RNA, 19 nt, Artificial Sequence
  Description of Artificial Sequence: Synthetic oligonucleotide
caggaggauuccauuccau

SEQ ID NO: 3004651 - RNA, 19 nt, Artificial Sequence
  Description of Artificial Sequence: Synthetic oligonucleotide
gguuguacagcaggaggau

SEQ ID NO: 3004652 - RNA, 19 nt, Artificial Sequence
  Description of Artificial Sequence: Synthetic oligonucleotide
cccaccuaacccaccccuc

SEQ ID NO: 3004653 - RNA, 19 nt, Artificial Sequence
  Description of Artificial Sequence: Synthetic oligonucleotide
cuccacagucucaccuugu

SEQ ID NO: 3004654 - RNA, 19 nt, Artificial Sequence
  Description of Artificial Sequence: Synthetic oligonucleotide
ccaucacguguguccacca

SEQ ID NO: 3004655 - RNA, 19 nt, Artificial Sequence
  Description of Artificial Sequence: Synthetic oligonucleotide
ccauuccaucacguguguc

SEQ ID NO: 3004656 - RNA, 19 nt, Artificial Sequence
  Description of Artificial Sequence: Synthetic oligonucleotide
gugcaggguaggguagggu

SEQ ID NO: 3004657 - RNA, 19 nt, Artificial Sequence
  Description of Artificial Sequence: Synthetic oligonucleotide
ccccaccuaacccaccccu

SEQ ID NO: 3004658 - RNA, 19 nt, Artificial Sequence
  Description of Artificial Sequence: Synthetic oligonucleotide
guguguccaccaccuucuu

SEQ ID NO: 3004659 - RNA, 19 nt, Artificial Sequence
  Description of Artificial Sequence: Synthetic oligonucleotide
gggugagggugugguugua

SEQ ID NO: 3004660 - RNA, 19 nt, Artificial Sequence
  Description of Artificial Sequence: Synthetic oligonucleotide
aaaguuaaaaccuucauga

SEQ ID NO: 3004661 - RNA, 19 nt, Artificial Sequence
  Description of Artificial Sequence: Synthetic oligonucleotide
uuuaauacugacaagcuga

SEQ ID NO: 3004662 - RNA, 19 nt, Artificial Sequence
  Description of Artificial Sequence: Synthetic oligonucleotide
aauacugacaagcugaaga

SEQ ID NO: 3004663 - RNA, 19 nt, Artificial Sequence
  Description of Artificial Sequence: Synthetic oligonucleotide
uuuguaaagaacuaaauau

SEQ ID NO: 3004664 - RNA, 19 nt, Artificial Sequence
  Description of Artificial Sequence: Synthetic oligonucleotide
aaauguaucaaacugcagu

SEQ ID NO: 3004665 - RNA, 19 nt, Artificial Sequence
  Description of Artificial Sequence: Synthetic oligonucleotide
aagaacuaaauauccaccg

SEQ ID NO: 3004666 - RNA, 19 nt, Artificial Sequence
  Description of Artificial Sequence: Synthetic oligonucleotide
uguaaagaacuaaauaucc

SEQ ID NO: 3004667 - RNA, 19 nt, Artificial Sequence
  Description of Artificial Sequence: Synthetic oligonucleotide
aagcugaagaaugagaagc

SEQ ID NO: 3004668 - RNA, 19 nt, Artificial Sequence
  Description of Artificial Sequence: Synthetic oligonucleotide
uuuacuuuaaaacccaacu

SEQ ID NO: 3004669 - RNA, 19 nt, Artificial Sequence
  Description of Artificial Sequence: Synthetic oligonucleotide
gauuuuaauacugacaagc

SEQ ID NO: 3004670 - RNA, 19 nt, Artificial Sequence
  Description of Artificial Sequence: Synthetic oligonucleotide
aauucauuuguaaagaacu

SEQ ID NO: 3004671 - RNA, 19 nt, Artificial Sequence
  Description of Artificial Sequence: Synthetic oligonucleotide
aaugagaagcauucgagug

SEQ ID NO: 3004672 - RNA, 19 nt, Artificial Sequence
  Description of Artificial Sequence: Synthetic oligonucleotide
aaagaacuaaauauccacc

SEQ ID NO: 3004673 - RNA, 19 nt, Artificial Sequence
  Description of Artificial Sequence: Synthetic oligonucleotide
gguaauuuacuuuaaaacc

SEQ ID NO: 3004674 - RNA, 19 nt, Artificial Sequence
  Description of Artificial Sequence: Synthetic oligonucleotide
agugguauaauucauuugu

SEQ ID NO: 3004675 - RNA, 19 nt, Artificial Sequence
  Description of Artificial Sequence: Synthetic oligonucleotide
uucaaauguaucaaacugc

SEQ ID NO: 3004676 - RNA, 19 nt, Artificial Sequence
  Description of Artificial Sequence: Synthetic oligonucleotide
aaccauuucaaauguauca

SEQ ID NO: 3004677 - RNA, 19 nt, Artificial Sequence
  Description of Artificial Sequence: Synthetic oligonucleotide
caugauaucaagucgcucc

SEQ ID NO: 3004678 - RNA, 19 nt, Artificial Sequence
  Description of Artificial Sequence: Synthetic oligonucleotide
ugguaauuuacuuuaaaac

SEQ ID NO: 3004679 - RNA, 19 nt, Artificial Sequence
  Description of Artificial Sequence: Synthetic oligonucleotide
aagugauuuuaauacugac

SEQ ID NO: 3004680 - RNA, 19 nt, Artificial Sequence
  Description of Artificial Sequence: Synthetic oligonucleotide
uaaagaacuaaauauccac

SEQ ID NO: 3004681 - RNA, 19 nt, Artificial Sequence
  Description of Artificial Sequence: Synthetic oligonucleotide
ucaagugauuuuaauacug

SEQ ID NO: 3004682 - RNA, 19 nt, Artificial Sequence
  Description of Artificial Sequence: Synthetic oligonucleotide
uacuuuaaaacccaacuuc

SEQ ID NO: 3004683 - RNA, 19 nt, Artificial Sequence
  Description of Artificial Sequence: Synthetic oligonucleotide
ugaagaaugagaagcauuc

SEQ ID NO: 3004684 - RNA, 19 nt, Artificial Sequence
  Description of Artificial Sequence: Synthetic oligonucleotide
guaauuuacuuuaaaaccc

SEQ ID NO: 3004685 - RNA, 19 nt, Artificial Sequence
  Description of Artificial Sequence: Synthetic oligonucleotide
uuuuaauacugacaagcug

SEQ ID NO: 3004686 - RNA, 19 nt, Artificial Sequence
  Description of Artificial Sequence: Synthetic oligonucleotide
uuuaaaacccaacuuccca

SEQ ID NO: 3004687 - RNA, 19 nt, Artificial Sequence
  Description of Artificial Sequence: Synthetic oligonucleotide
agaacuaaauauccaccgc

SEQ ID NO: 3004688 - RNA, 19 nt, Artificial Sequence
  Description of Artificial Sequence: Synthetic oligonucleotide
acuuuaaaacccaacuucc

SEQ ID NO: 3004689 - RNA, 19 nt, Artificial Sequence
  Description of Artificial Sequence: Synthetic oligonucleotide
aaauauccaccgcagcacg

SEQ ID NO: 3004690 - RNA, 19 nt, Artificial Sequence
  Description of Artificial Sequence: Synthetic oligonucleotide
gaggcagugagguugaaag

SEQ ID NO: 3004691 - RNA, 19 nt, Artificial Sequence
  Description of Artificial Sequence: Synthetic oligonucleotide
uauaauucauuuguaaaga

SEQ ID NO: 3004692 - RNA, 19 nt, Artificial Sequence
  Description of Artificial Sequence: Synthetic oligonucleotide
uuguaaagaacuaaauauc

SEQ ID NO: 3004693 - RNA, 19 nt, Artificial Sequence
  Description of Artificial Sequence: Synthetic oligonucleotide
aaaccuucaugauaucaag

SEQ ID NO: 3004694 - RNA, 19 nt, Artificial Sequence
  Description of Artificial Sequence: Synthetic oligonucleotide
aauguaucaaacugcaguu

SEQ ID NO: 3004695 - RNA, 19 nt, Artificial Sequence
  Description of Artificial Sequence: Synthetic oligonucleotide
acauauuucucuucaagug

SEQ ID NO: 3004696 - RNA, 19 nt, Artificial Sequence
  Description of Artificial Sequence: Synthetic oligonucleotide
uaauuuacuuuaaaaccca

SEQ ID NO: 3004697 - RNA, 19 nt, Artificial Sequence
  Description of Artificial Sequence: Synthetic oligonucleotide
accuucaugauaucaaguc

SEQ ID NO: 3004698 - RNA, 19 nt, Artificial Sequence
  Description of Artificial Sequence: Synthetic oligonucleotide
ucaaacugcaguuucuuca

SEQ ID NO: 3004699 - RNA, 19 nt, Artificial Sequence
  Description of Artificial Sequence: Synthetic oligonucleotide
acuaaauauccaccgcagc

SEQ ID NO: 3004700 - RNA, 19 nt, Artificial Sequence
  Description of Artificial Sequence: Synthetic oligonucleotide
uuucaccugagacauguag

SEQ ID NO: 3004701 - RNA, 19 nt, Artificial Sequence
  Description of Artificial Sequence: Synthetic oligonucleotide
ucauuuguaaagaacuaaa

SEQ ID NO: 3004702 - RNA, 19 nt, Artificial Sequence
  Description of Artificial Sequence: Synthetic oligonucleotide
auuucaaauguaucaaacu

SEQ ID NO: 3004703 - RNA, 19 nt, Artificial Sequence
  Description of Artificial Sequence: Synthetic oligonucleotide
auuuguaaagaacuaaaua

SEQ ID NO: 3004704 - RNA, 19 nt, Artificial Sequence
  Description of Artificial Sequence: Synthetic oligonucleotide
gagguugaaagcguuaccg

SEQ ID NO: 3004705 - RNA, 19 nt, Artificial Sequence
  Description of Artificial Sequence: Synthetic oligonucleotide
augagaagcauucgagugg

SEQ ID NO: 3004706 - RNA, 19 nt, Artificial Sequence
  Description of Artificial Sequence: Synthetic oligonucleotide
uucagaaaccauuucaaau

SEQ ID NO: 3004707 - RNA, 19 nt, Artificial Sequence
  Description of Artificial Sequence: Synthetic oligonucleotide
ucuucaagugauuuuaaua

SEQ ID NO: 3004708 - RNA, 19 nt, Artificial Sequence
  Description of Artificial Sequence: Synthetic oligonucleotide
uggaagacgaugacagagg

SEQ ID NO: 3004709 - RNA, 19 nt, Artificial Sequence
  Description of Artificial Sequence: Synthetic oligonucleotide
ucuucagaaaccauuucaa

SEQ ID NO: 3004710 - RNA, 19 nt, Artificial Sequence
  Description of Artificial Sequence: Synthetic oligonucleotide
aacugcaguuucuucauga

SEQ ID NO: 3004711 - RNA, 19 nt, Artificial Sequence
  Description of Artificial Sequence: Synthetic oligonucleotide
aacccaacuucccaucauc

SEQ ID NO: 3004712 - RNA, 19 nt, Artificial Sequence
  Description of Artificial Sequence: Synthetic oligonucleotide
gaacuaaauauccaccgca

SEQ ID NO: 3004713 - RNA, 19 nt, Artificial Sequence
  Description of Artificial Sequence: Synthetic oligonucleotide
aaaccauuucaaauguauc

SEQ ID NO: 3004714 - RNA, 19 nt, Artificial Sequence
  Description of Artificial Sequence: Synthetic oligonucleotide
aucuucagaaaccauuuca

SEQ ID NO: 3004715 - RNA, 19 nt, Artificial Sequence
  Description of Artificial Sequence: Synthetic oligonucleotide
agguugaaagcguuaccgc

SEQ ID NO: 3004716 - RNA, 19 nt, Artificial Sequence
  Description of Artificial Sequence: Synthetic oligonucleotide
cuuuaaaacccaacuuccc

SEQ ID NO: 3004717 - RNA, 19 nt, Artificial Sequence
  Description of Artificial Sequence: Synthetic oligonucleotide
uuacuuuaaaacccaacuu

SEQ ID NO: 3004718 - RNA, 19 nt, Artificial Sequence
  Description of Artificial Sequence: Synthetic oligonucleotide
auucgagugguauaauuca

SEQ ID NO: 3004719 - RNA, 19 nt, Artificial Sequence
  Description of Artificial Sequence: Synthetic oligonucleotide
ucaccugagacauguagug

SEQ ID NO: 3004720 - RNA, 19 nt, Artificial Sequence
  Description of Artificial Sequence: Synthetic oligonucleotide
aacuaaauauccaccgcag

SEQ ID NO: 3004721 - RNA, 19 nt, Artificial Sequence
  Description of Artificial Sequence: Synthetic oligonucleotide
acauguagugguaauuuac

SEQ ID NO: 3004722 - RNA, 19 nt, Artificial Sequence
  Description of Artificial Sequence: Synthetic oligonucleotide
uaaaaccuucaugauauca

SEQ ID NO: 3004723 - RNA, 19 nt, Artificial Sequence
  Description of Artificial Sequence: Synthetic oligonucleotide
cauucgagugguauaauuc

SEQ ID NO: 3004724 - RNA, 19 nt, Artificial Sequence
  Description of Artificial Sequence: Synthetic oligonucleotide
ugauuuuaauacugacaag

SEQ ID NO: 3004725 - RNA, 19 nt, Artificial Sequence
  Description of Artificial Sequence: Synthetic oligonucleotide
auuuacuuuaaaacccaac

SEQ ID NO: 3004726 - RNA, 19 nt, Artificial Sequence
  Description of Artificial Sequence: Synthetic oligonucleotide
uuaaaacccaacuucccau

SEQ ID NO: 3004727 - RNA, 19 nt, Artificial Sequence
  Description of Artificial Sequence: Synthetic oligonucleotide
uucaagugauuuuaauacu

SEQ ID NO: 3004728 - RNA, 19 nt, Artificial Sequence
  Description of Artificial Sequence: Synthetic oligonucleotide
aacaacuggaagacgauga

SEQ ID NO: 3004729 - RNA, 19 nt, Artificial Sequence
  Description of Artificial Sequence: Synthetic oligonucleotide
aguuaaaaccuucaugaua

SEQ ID NO: 3004730 - RNA, 19 nt, Artificial Sequence
  Description of Artificial Sequence: Synthetic oligonucleotide
ugguauaauucauuuguaa

SEQ ID NO: 3004731 - RNA, 19 nt, Artificial Sequence
  Description of Artificial Sequence: Synthetic oligonucleotide
acaacuggaagacgaugac

SEQ ID NO: 3004732 - RNA, 19 nt, Artificial Sequence
  Description of Artificial Sequence: Synthetic oligonucleotide
aaaacccaacuucccauca

SEQ ID NO: 3004733 - RNA, 19 nt, Artificial Sequence
  Description of Artificial Sequence: Synthetic oligonucleotide
aaaaccuucaugauaucaa

SEQ ID NO: 3004734 - RNA, 19 nt, Artificial Sequence
  Description of Artificial Sequence: Synthetic oligonucleotide
aaagcguuaccgcuuccug

SEQ ID NO: 3004735 - RNA, 19 nt, Artificial Sequence
  Description of Artificial Sequence: Synthetic oligonucleotide
uguagugguaauuuacuuu

SEQ ID NO: 3004736 - RNA, 19 nt, Artificial Sequence
  Description of Artificial Sequence: Synthetic oligonucleotide
aucaagucgcuccucauca

SEQ ID NO: 3004737 - RNA, 19 nt, Artificial Sequence
  Description of Artificial Sequence: Synthetic oligonucleotide
uucaccugagacauguagu

SEQ ID NO: 3004738 - RNA, 19 nt, Artificial Sequence
  Description of Artificial Sequence: Synthetic oligonucleotide
cuaaauauccaccgcagca

SEQ ID NO: 3004739 - RNA, 19 nt, Artificial Sequence
  Description of Artificial Sequence: Synthetic oligonucleotide
gacagaggcagugagguug

SEQ ID NO: 3004740 - RNA, 19 nt, Artificial Sequence
  Description of Artificial Sequence: Synthetic oligonucleotide
acugcaguuucuucaugac

SEQ ID NO: 3004741 - RNA, 19 nt, Artificial Sequence
  Description of Artificial Sequence: Synthetic oligonucleotide
uaaauauccaccgcagcac

SEQ ID NO: 3004742 - RNA, 19 nt, Artificial Sequence
  Description of Artificial Sequence: Synthetic oligonucleotide
uuaauacugacaagcugaa

SEQ ID NO: 3004743 - RNA, 19 nt, Artificial Sequence
  Description of Artificial Sequence: Synthetic oligonucleotide
ucaucaucuucagaaacca

SEQ ID NO: 3004744 - RNA, 19 nt, Artificial Sequence
  Description of Artificial Sequence: Synthetic oligonucleotide
auaauucauuuguaaagaa

SEQ ID NO: 3004745 - RNA, 19 nt, Artificial Sequence
  Description of Artificial Sequence: Synthetic oligonucleotide
gaagaaugagaagcauucg

SEQ ID NO: 3004746 - RNA, 19 nt, Artificial Sequence
  Description of Artificial Sequence: Synthetic oligonucleotide
acugacaagcugaagaaug

SEQ ID NO: 3004747 - RNA, 19 nt, Artificial Sequence
  Description of Artificial Sequence: Synthetic oligonucleotide
aaguuaaaaccuucaugau

SEQ ID NO: 3004748 - RNA, 19 nt, Artificial Sequence
  Description of Artificial Sequence: Synthetic oligonucleotide
uucauuuguaaagaacuaa

SEQ ID NO: 3004749 - RNA, 19 nt, Artificial Sequence
  Description of Artificial Sequence: Synthetic oligonucleotide
gauaucaagucgcuccuca

SEQ ID NO: 3004750 - RNA, 19 nt, Artificial Sequence
  Description of Artificial Sequence: Synthetic oligonucleotide
agugauuuuaauacugaca

SEQ ID NO: 3004751 - RNA, 19 nt, Artificial Sequence
  Description of Artificial Sequence: Synthetic oligonucleotide
cauauuucucuucaaguga

SEQ ID NO: 3004752 - RNA, 19 nt, Artificial Sequence
  Description of Artificial Sequence: Synthetic oligonucleotide
guuaaaaccuucaugauau

SEQ ID NO: 3004753 - RNA, 19 nt, Artificial Sequence
  Description of Artificial Sequence: Synthetic oligonucleotide
guagugguaauuuacuuua

SEQ ID NO: 3004754 - RNA, 19 nt, Artificial Sequence
  Description of Artificial Sequence: Synthetic oligonucleotide
agcguuaccgcuuccugag

SEQ ID NO: 3004755 - RNA, 19 nt, Artificial Sequence
  Description of Artificial Sequence: Synthetic oligonucleotide
aaacaacuggaagacgaug

SEQ ID NO: 3004756 - RNA, 19 nt, Artificial Sequence
  Description of Artificial Sequence: Synthetic oligonucleotide
caucaucaucuucagaaac

SEQ ID NO: 3004757 - RNA, 19 nt, Artificial Sequence
  Description of Artificial Sequence: Synthetic oligonucleotide
cuggaagacgaugacagag

SEQ ID NO: 3004758 - RNA, 19 nt, Artificial Sequence
  Description of Artificial Sequence: Synthetic oligonucleotide
auacugacaagcugaagaa

SEQ ID NO: 3004759 - RNA, 19 nt, Artificial Sequence
  Description of Artificial Sequence: Synthetic oligonucleotide
auuuuaauacugacaagcu

SEQ ID NO: 3004760 - RNA, 19 nt, Artificial Sequence
  Description of Artificial Sequence: Synthetic oligonucleotide
accugagacauguaguggu

SEQ ID NO: 3004761 - RNA, 19 nt, Artificial Sequence
  Description of Artificial Sequence: Synthetic oligonucleotide
ucuggcagcacuguuggca

SEQ ID NO: 3004762 - RNA, 19 nt, Artificial Sequence
  Description of Artificial Sequence: Synthetic oligonucleotide
gugguaauuuacuuuaaaa

SEQ ID NO: 3004763 - RNA, 19 nt, Artificial Sequence
  Description of Artificial Sequence: Synthetic oligonucleotide
ugagguugaaagcguuacc

SEQ ID NO: 3004764 - RNA, 19 nt, Artificial Sequence
  Description of Artificial Sequence: Synthetic oligonucleotide
gagugguauaauucauuug

SEQ ID NO: 3004765 - RNA, 19 nt, Artificial Sequence
  Description of Artificial Sequence: Synthetic oligonucleotide
gguauaauucauuuguaaa

SEQ ID NO: 3004766 - RNA, 19 nt, Artificial Sequence
  Description of Artificial Sequence: Synthetic oligonucleotide
caagcugaagaaugagaag

SEQ ID NO: 3004767 - RNA, 19 nt, Artificial Sequence
  Description of Artificial Sequence: Synthetic oligonucleotide
augacagaggcagugaggu

SEQ ID NO: 3004768 - RNA, 19 nt, Artificial Sequence
  Description of Artificial Sequence: Synthetic oligonucleotide
acaagcugaagaaugagaa

SEQ ID NO: 3004769 - RNA, 19 nt, Artificial Sequence
  Description of Artificial Sequence: Synthetic oligonucleotide
ggcagugagguugaaagcg

SEQ ID NO: 3004770 - RNA, 19 nt, Artificial Sequence
  Description of Artificial Sequence: Synthetic oligonucleotide
aauauccaccgcagcacgg

SEQ ID NO: 3004771 - RNA, 19 nt, Artificial Sequence
  Description of Artificial Sequence: Synthetic oligonucleotide
cucaucacagcguacaaaa

SEQ ID NO: 3004772 - RNA, 19 nt, Artificial Sequence
  Description of Artificial Sequence: Synthetic oligonucleotide
auauccaccgcagcacggc

SEQ ID NO: 3004773 - RNA, 19 nt, Artificial Sequence
  Description of Artificial Sequence: Synthetic oligonucleotide
uccugagccagacggcggg

SEQ ID NO: 3004774 - RNA, 19 nt, Artificial Sequence
  Description of Artificial Sequence: Synthetic oligonucleotide
uaucaagucgcuccucauc

SEQ ID NO: 3004775 - RNA, 19 nt, Artificial Sequence
  Description of Artificial Sequence: Synthetic oligonucleotide
aagcguuaccgcuuccuga

SEQ ID NO: 3004776 - RNA, 19 nt, Artificial Sequence
  Description of Artificial Sequence: Synthetic oligonucleotide
augauaucaagucgcuccu

SEQ ID NO: 3004777 - RNA, 19 nt, Artificial Sequence
  Description of Artificial Sequence: Synthetic oligonucleotide
ugagaagcauucgaguggu

SEQ ID NO: 3004778 - RNA, 19 nt, Artificial Sequence
  Description of Artificial Sequence: Synthetic oligonucleotide
gucgcuccucaucacagcg

SEQ ID NO: 3004779 - RNA, 19 nt, Artificial Sequence
  Description of Artificial Sequence: Synthetic oligonucleotide
uaaaacccaacuucccauc

SEQ ID NO: 3004780 - RNA, 19 nt, Artificial Sequence
  Description of Artificial Sequence: Synthetic oligonucleotide
caaauguaucaaacugcag

SEQ ID NO: 3004781 - RNA, 19 nt, Artificial Sequence
  Description of Artificial Sequence: Synthetic oligonucleotide
agugguaauuuacuuuaaa

SEQ ID NO: 3004782 - RNA, 19 nt, Artificial Sequence
  Description of Artificial Sequence: Synthetic oligonucleotide
guaaagaacuaaauaucca

SEQ ID NO: 3004783 - RNA, 19 nt, Artificial Sequence
  Description of Artificial Sequence: Synthetic oligonucleotide
agccacauauuucucuuca

SEQ ID NO: 3004784 - RNA, 19 nt, Artificial Sequence
  Description of Artificial Sequence: Synthetic oligonucleotide
ugacaagcugaagaaugag

SEQ ID NO: 3004785 - RNA, 19 nt, Artificial Sequence
  Description of Artificial Sequence: Synthetic oligonucleotide
aagcauucgagugguauaa

SEQ ID NO: 3004786 - RNA, 19 nt, Artificial Sequence
  Description of Artificial Sequence: Synthetic oligonucleotide
uugaaagcguuaccgcuuc

SEQ ID NO: 3004787 - RNA, 19 nt, Artificial Sequence
  Description of Artificial Sequence: Synthetic oligonucleotide
ccuucaugauaucaagucg

SEQ ID NO: 3004788 - RNA, 19 nt, Artificial Sequence
  Description of Artificial Sequence: Synthetic oligonucleotide
agucgcuccucaucacagc

SEQ ID NO: 3004789 - RNA, 19 nt, Artificial Sequence
  Description of Artificial Sequence: Synthetic oligonucleotide
aaacugcaguuucuucaug

SEQ ID NO: 3004790 - RNA, 19 nt, Artificial Sequence
  Description of Artificial Sequence: Synthetic oligonucleotide
caagugauuuuaauacuga

SEQ ID NO: 3004791 - RNA, 19 nt, Artificial Sequence
  Description of Artificial Sequence: Synthetic oligonucleotide
uccaccgcagcacggcccg

SEQ ID NO: 3004792 - RNA, 19 nt, Artificial Sequence
  Description of Artificial Sequence: Synthetic oligonucleotide
gaaugagaagcauucgagu

SEQ ID NO: 3004793 - RNA, 19 nt, Artificial Sequence
  Description of Artificial Sequence: Synthetic oligonucleotide
acuguuggcaucguuggca

SEQ ID NO: 3004794 - RNA, 19 nt, Artificial Sequence
  Description of Artificial Sequence: Synthetic oligonucleotide
aagucgcuccucaucacag

SEQ ID NO: 3004795 - RNA, 19 nt, Artificial Sequence
  Description of Artificial Sequence: Synthetic oligonucleotide
uucaugacagccacauauu

SEQ ID NO: 3004796 - RNA, 19 nt, Artificial Sequence
  Description of Artificial Sequence: Synthetic oligonucleotide
cuucaugacagccacauau

SEQ ID NO: 3004797 - RNA, 19 nt, Artificial Sequence
  Description of Artificial Sequence: Synthetic oligonucleotide
aauuuacuuuaaaacccaa

SEQ ID NO: 3004798 - RNA, 19 nt, Artificial Sequence
  Description of Artificial Sequence: Synthetic oligonucleotide
aaaacaacuggaagacgau

SEQ ID NO: 3004799 - RNA, 19 nt, Artificial Sequence
  Description of Artificial Sequence: Synthetic oligonucleotide
cuuccugagccagacggcg

SEQ ID NO: 3004800 - RNA, 19 nt, Artificial Sequence
  Description of Artificial Sequence: Synthetic oligonucleotide
aaccuucaugauaucaagu

SEQ ID NO: 3004801 - RNA, 19 nt, Artificial Sequence
  Description of Artificial Sequence: Synthetic oligonucleotide
accauuucaaauguaucaa

SEQ ID NO: 3004802 - RNA, 19 nt, Artificial Sequence
  Description of Artificial Sequence: Synthetic oligonucleotide
ugagacauguagugguaau

SEQ ID NO: 3004803 - RNA, 19 nt, Artificial Sequence
  Description of Artificial Sequence: Synthetic oligonucleotide
ggaagacgaugacagaggc

SEQ ID NO: 3004804 - RNA, 19 nt, Artificial Sequence
  Description of Artificial Sequence: Synthetic oligonucleotide
agcacuguuggcaucguug

SEQ ID NO: 3004805 - RNA, 19 nt, Artificial Sequence
  Description of Artificial Sequence: Synthetic oligonucleotide
uuucucuucaagugauuuu

SEQ ID NO: 3004806 - RNA, 19 nt, Artificial Sequence
  Description of Artificial Sequence: Synthetic oligonucleotide
caguuucuucaugacagcc

SEQ ID NO: 3004807 - RNA, 19 nt, Artificial Sequence
  Description of Artificial Sequence: Synthetic oligonucleotide
auauuucucuucaagugau

SEQ ID NO: 3004808 - RNA, 19 nt, Artificial Sequence
  Description of Artificial Sequence: Synthetic oligonucleotide
uuccugagccagacggcgg

SEQ ID NO: 3004809 - RNA, 19 nt, Artificial Sequence
  Description of Artificial Sequence: Synthetic oligonucleotide
ucgagugguauaauucauu

SEQ ID NO: 3004810 - RNA, 19 nt, Artificial Sequence
  Description of Artificial Sequence: Synthetic oligonucleotide
auguagugguaauuuacuu

SEQ ID NO: 3004811 - RNA, 19 nt, Artificial Sequence
  Description of Artificial Sequence: Synthetic oligonucleotide
ucucuucaagugauuuuaa

SEQ ID NO: 3004812 - RNA, 19 nt, Artificial Sequence
  Description of Artificial Sequence: Synthetic oligonucleotide
aaacccaacuucccaucau

SEQ ID NO: 3004813 - RNA, 19 nt, Artificial Sequence
  Description of Artificial Sequence: Synthetic oligonucleotide
uaauacugacaagcugaag

SEQ ID NO: 3004814 - RNA, 19 nt, Artificial Sequence
  Description of Artificial Sequence: Synthetic oligonucleotide
agaagcauucgagugguau

SEQ ID NO: 3004815 - RNA, 19 nt, Artificial Sequence
  Description of Artificial Sequence: Synthetic oligonucleotide
auuucucuucaagugauuu

SEQ ID NO: 3004816 - RNA, 19 nt, Artificial Sequence
  Description of Artificial Sequence: Synthetic oligonucleotide
gcacuguuggcaucguugg

SEQ ID NO: 3004817 - RNA, 19 nt, Artificial Sequence
  Description of Artificial Sequence: Synthetic oligonucleotide
cacauauuucucuucaagu

SEQ ID NO: 3004818 - RNA, 19 nt, Artificial Sequence
  Description of Artificial Sequence: Synthetic oligonucleotide
gaagcauucgagugguaua

SEQ ID NO: 3004819 - RNA, 19 nt, Artificial Sequence
  Description of Artificial Sequence: Synthetic oligonucleotide
aguuucuucaugacagcca

SEQ ID NO: 3004820 - RNA, 19 nt, Artificial Sequence
  Description of Artificial Sequence: Synthetic oligonucleotide
uauccaccgcagcacggcc

SEQ ID NO: 3004821 - RNA, 19 nt, Artificial Sequence
  Description of Artificial Sequence: Synthetic oligonucleotide
cugacaagcugaagaauga

SEQ ID NO: 3004822 - RNA, 19 nt, Artificial Sequence
  Description of Artificial Sequence: Synthetic oligonucleotide
agacauguagugguaauuu

SEQ ID NO: 3004823 - RNA, 19 nt, Artificial Sequence
  Description of Artificial Sequence: Synthetic oligonucleotide
uuaaaaccuucaugauauc

SEQ ID NO: 3004824 - RNA, 19 nt, Artificial Sequence
  Description of Artificial Sequence: Synthetic oligonucleotide
gugagguugaaagcguuac

SEQ ID NO: 3004825 - RNA, 19 nt, Artificial Sequence
  Description of Artificial Sequence: Synthetic oligonucleotide
uagugguaauuuacuuuaa

SEQ ID NO: 3004826 - RNA, 19 nt, Artificial Sequence
  Description of Artificial Sequence: Synthetic oligonucleotide
gacauguagugguaauuua

SEQ ID NO: 3004827 - RNA, 19 nt, Artificial Sequence
  Description of Artificial Sequence: Synthetic oligonucleotide
gcucuggcagcacuguugg

SEQ ID NO: 3004828 - RNA, 19 nt, Artificial Sequence
  Description of Artificial Sequence: Synthetic oligonucleotide
cauguagugguaauuuacu

SEQ ID NO: 3004829 - RNA, 19 nt, Artificial Sequence
  Description of Artificial Sequence: Synthetic oligonucleotide
cuucagaaaccauuucaaa

SEQ ID NO: 3004830 - RNA, 19 nt, Artificial Sequence
  Description of Artificial Sequence: Synthetic oligonucleotide
ccacauauuucucuucaag

SEQ ID NO: 3004831 - RNA, 19 nt, Artificial Sequence
  Description of Artificial Sequence: Synthetic oligonucleotide
uuaccgcuuccugagccag

SEQ ID NO: 3004832 - RNA, 19 nt, Artificial Sequence
  Description of Artificial Sequence: Synthetic oligonucleotide
uauuucucuucaagugauu

SEQ ID NO: 3004833 - RNA, 19 nt, Artificial Sequence
  Description of Artificial Sequence: Synthetic oligonucleotide
accgcuuccugagccagac

SEQ ID NO: 3004834 - RNA, 19 nt, Artificial Sequence
  Description of Artificial Sequence: Synthetic oligonucleotide
cauuuguaaagaacuaaau

SEQ ID NO: 3004835 - RNA, 19 nt, Artificial Sequence
  Description of Artificial Sequence: Synthetic oligonucleotide
auucauuuguaaagaacua

SEQ ID NO: 3004836 - RNA, 19 nt, Artificial Sequence
  Description of Artificial Sequence: Synthetic oligonucleotide
ugaaagcguuaccgcuucc

SEQ ID NO: 3004837 - RNA, 19 nt, Artificial Sequence
  Description of Artificial Sequence: Synthetic oligonucleotide
agcugaagaaugagaagca

SEQ ID NO: 3004838 - RNA, 19 nt, Artificial Sequence
  Description of Artificial Sequence: Synthetic oligonucleotide
gacagccacauauuucucu

SEQ ID NO: 3004839 - RNA, 19 nt, Artificial Sequence
  Description of Artificial Sequence: Synthetic oligonucleotide
auaucaagucgcuccucau

SEQ ID NO: 3004840 - RNA, 19 nt, Artificial Sequence
  Description of Artificial Sequence: Synthetic oligonucleotide
ucaugauaucaagucgcuc

SEQ ID NO: 3004841 - RNA, 19 nt, Artificial Sequence
  Description of Artificial Sequence: Synthetic oligonucleotide
caccugagacauguagugg

SEQ ID NO: 3004842 - RNA, 19 nt, Artificial Sequence
  Description of Artificial Sequence: Synthetic oligonucleotide
accgcagcacggcccgucc

SEQ ID NO: 3004843 - RNA, 19 nt, Artificial Sequence
  Description of Artificial Sequence: Synthetic oligonucleotide
acuggaagacgaugacaga

SEQ ID NO: 3004844 - RNA, 19 nt, Artificial Sequence
  Description of Artificial Sequence: Synthetic oligonucleotide
ucaagucgcuccucaucac

SEQ ID NO: 3004845 - RNA, 19 nt, Artificial Sequence
  Description of Artificial Sequence: Synthetic oligonucleotide
uccucaucacagcguacaa

SEQ ID NO: 3004846 - RNA, 19 nt, Artificial Sequence
  Description of Artificial Sequence: Synthetic oligonucleotide
agacggcgggcucuggcag

SEQ ID NO: 3004847 - RNA, 19 nt, Artificial Sequence
  Description of Artificial Sequence: Synthetic oligonucleotide
uacugacaagcugaagaau

SEQ ID NO: 3004848 - RNA, 19 nt, Artificial Sequence
  Description of Artificial Sequence: Synthetic oligonucleotide
ugacagccacauauuucuc

SEQ ID NO: 3004849 - RNA, 19 nt, Artificial Sequence
  Description of Artificial Sequence: Synthetic oligonucleotide
gaagacgaugacagaggca

SEQ ID NO: 3004850 - RNA, 19 nt, Artificial Sequence
  Description of Artificial Sequence: Synthetic oligonucleotide
cgcuuccugagccagacgg

SEQ ID NO: 3004851 - RNA, 19 nt, Artificial Sequence
  Description of Artificial Sequence: Synthetic oligonucleotide
cugcaguuucuucaugaca

SEQ ID NO: 3004852 - RNA, 19 nt, Artificial Sequence
  Description of Artificial Sequence: Synthetic oligonucleotide
guuaccgcuuccugagcca

SEQ ID NO: 3004853 - RNA, 19 nt, Artificial Sequence
  Description of Artificial Sequence: Synthetic oligonucleotide
auccaccgcagcacggccc

SEQ ID NO: 3004854 - RNA, 19 nt, Artificial Sequence
  Description of Artificial Sequence: Synthetic oligonucleotide
ucgcuccucaucacagcgu

SEQ ID NO: 3004855 - RNA, 19 nt, Artificial Sequence
  Description of Artificial Sequence: Synthetic oligonucleotide
gguugaaagcguuaccgcu

SEQ ID NO: 3004856 - RNA, 19 nt, Artificial Sequence
  Description of Artificial Sequence: Synthetic oligonucleotide
uuuucaccugagacaugua

SEQ ID NO: 3004857 - RNA, 19 nt, Artificial Sequence
  Description of Artificial Sequence: Synthetic oligonucleotide
caagucgcuccucaucaca

SEQ ID NO: 3004858 - RNA, 19 nt, Artificial Sequence
  Description of Artificial Sequence: Synthetic oligonucleotide
cacuguuggcaucguuggc

SEQ ID NO: 3004859 - RNA, 19 nt, Artificial Sequence
  Description of Artificial Sequence: Synthetic oligonucleotide
agcacggcccguccccauc

SEQ ID NO: 3004860 - RNA, 19 nt, Artificial Sequence
  Description of Artificial Sequence: Synthetic oligonucleotide
cuccucaucacagcguaca

SEQ ID NO: 3004861 - RNA, 19 nt, Artificial Sequence
  Description of Artificial Sequence: Synthetic oligonucleotide
auguaucaaacugcaguuu

SEQ ID NO: 3004862 - RNA, 19 nt, Artificial Sequence
  Description of Artificial Sequence: Synthetic oligonucleotide
ugauaucaagucgcuccuc

SEQ ID NO: 3004863 - RNA, 19 nt, Artificial Sequence
  Description of Artificial Sequence: Synthetic oligonucleotide
ugagccagacggcgggcuc

SEQ ID NO: 3004864 - RNA, 19 nt, Artificial Sequence
  Description of Artificial Sequence: Synthetic oligonucleotide
cugaagaaugagaagcauu

SEQ ID NO: 3004865 - RNA, 19 nt, Artificial Sequence
  Description of Artificial Sequence: Synthetic oligonucleotide
gaaagcguuaccgcuuccu

SEQ ID NO: 3004866 - RNA, 19 nt, Artificial Sequence
  Description of Artificial Sequence: Synthetic oligonucleotide
aacuucccaucaucaucuu

SEQ ID NO: 3004867 - RNA, 19 nt, Artificial Sequence
  Description of Artificial Sequence: Synthetic oligonucleotide
cagccacauauuucucuuc

SEQ ID NO: 3004868 - RNA, 19 nt, Artificial Sequence
  Description of Artificial Sequence: Synthetic oligonucleotide
gacggcgggcucuggcagc

SEQ ID NO: 3004869 - RNA, 19 nt, Artificial Sequence
  Description of Artificial Sequence: Synthetic oligonucleotide
agaaaccauuucaaaugua

SEQ ID NO: 3004870 - RNA, 19 nt, Artificial Sequence
  Description of Artificial Sequence: Synthetic oligonucleotide
guaucaaacugcaguuucu

SEQ ID NO: 3004871 - RNA, 19 nt, Artificial Sequence
  Description of Artificial Sequence: Synthetic oligonucleotide
gugguauaauucauuugua

SEQ ID NO: 3004872 - RNA, 19 nt, Artificial Sequence
  Description of Artificial Sequence: Synthetic oligonucleotide
acagaggcagugagguuga

SEQ ID NO: 3004873 - RNA, 19 nt, Artificial Sequence
  Description of Artificial Sequence: Synthetic oligonucleotide
agugagguugaaagcguua

SEQ ID NO: 3004874 - RNA, 19 nt, Artificial Sequence
  Description of Artificial Sequence: Synthetic oligonucleotide
cguuaccgcuuccugagcc

SEQ ID NO: 3004875 - RNA, 19 nt, Artificial Sequence
  Description of Artificial Sequence: Synthetic oligonucleotide
uaccgcuuccugagccaga

SEQ ID NO: 3004876 - RNA, 19 nt, Artificial Sequence
  Description of Artificial Sequence: Synthetic oligonucleotide
agaggcagugagguugaaa

SEQ ID NO: 3004877 - RNA, 19 nt, Artificial Sequence
  Description of Artificial Sequence: Synthetic oligonucleotide
ugacagaggcagugagguu

SEQ ID NO: 3004878 - RNA, 19 nt, Artificial Sequence
  Description of Artificial Sequence: Synthetic oligonucleotide
cucuucaagugauuuuaau

SEQ ID NO: 3004879 - RNA, 19 nt, Artificial Sequence
  Description of Artificial Sequence: Synthetic oligonucleotide
guuggcaucguuggcauuu

SEQ ID NO: 3004880 - RNA, 19 nt, Artificial Sequence
  Description of Artificial Sequence: Synthetic oligonucleotide
cagacggcgggcucuggca

SEQ ID NO: 3004881 - RNA, 19 nt, Artificial Sequence
  Description of Artificial Sequence: Synthetic oligonucleotide
gagacauguagugguaauu

SEQ ID NO: 3004882 - RNA, 19 nt, Artificial Sequence
  Description of Artificial Sequence: Synthetic oligonucleotide
guugaaagcguuaccgcuu

SEQ ID NO: 3004883 - RNA, 19 nt, Artificial Sequence
  Description of Artificial Sequence: Synthetic oligonucleotide
cugagacauguagugguaa

SEQ ID NO: 3004884 - RNA, 19 nt, Artificial Sequence
  Description of Artificial Sequence: Synthetic oligonucleotide
cucuggcagcacuguuggc

SEQ ID NO: 3004885 - RNA, 19 nt, Artificial Sequence
  Description of Artificial Sequence: Synthetic oligonucleotide
agcauucgagugguauaau

SEQ ID NO: 3004886 - RNA, 19 nt, Artificial Sequence
  Description of Artificial Sequence: Synthetic oligonucleotide
uuggcaucguuggcauuuu

SEQ ID NO: 3004887 - RNA, 19 nt, Artificial Sequence
  Description of Artificial Sequence: Synthetic oligonucleotide
cuguuggcaucguuggcau

SEQ ID NO: 3004888 - RNA, 19 nt, Artificial Sequence
  Description of Artificial Sequence: Synthetic oligonucleotide
gccacauauuucucuucaa

SEQ ID NO: 3004889 - RNA, 19 nt, Artificial Sequence
  Description of Artificial Sequence: Synthetic oligonucleotide
ccagacggcgggcucuggc

SEQ ID NO: 3004890 - RNA, 19 nt, Artificial Sequence
  Description of Artificial Sequence: Synthetic oligonucleotide
gcacggcccguccccaucc

SEQ ID NO: 3004891 - RNA, 19 nt, Artificial Sequence
  Description of Artificial Sequence: Synthetic oligonucleotide
gcauucgagugguauaauu

SEQ ID NO: 3004892 - RNA, 19 nt, Artificial Sequence
  Description of Artificial Sequence: Synthetic oligonucleotide
acggcgggcucuggcagca

SEQ ID NO: 3004893 - RNA, 19 nt, Artificial Sequence
  Description of Artificial Sequence: Synthetic oligonucleotide
agccagacggcgggcucug

SEQ ID NO: 3004894 - RNA, 19 nt, Artificial Sequence
  Description of Artificial Sequence: Synthetic oligonucleotide
gcguuaccgcuuccugagc

SEQ ID NO: 3004895 - RNA, 19 nt, Artificial Sequence
  Description of Artificial Sequence: Synthetic oligonucleotide
cagugagguugaaagcguu

SEQ ID NO: 3004896 - RNA, 19 nt, Artificial Sequence
  Description of Artificial Sequence: Synthetic oligonucleotide
ccugagacauguaguggua

SEQ ID NO: 3004897 - RNA, 19 nt, Artificial Sequence
  Description of Artificial Sequence: Synthetic oligonucleotide
gcugaagaaugagaagcau

SEQ ID NO: 3004898 - RNA, 19 nt, Artificial Sequence
  Description of Artificial Sequence: Synthetic oligonucleotide
gagccagacggcgggcucu

SEQ ID NO: 3004899 - RNA, 19 nt, Artificial Sequence
  Description of Artificial Sequence: Synthetic oligonucleotide
cgagugguauaauucauuu

SEQ ID NO: 3004900 - RNA, 19 nt, Artificial Sequence
  Description of Artificial Sequence: Synthetic oligonucleotide
gcagugagguugaaagcgu

SEQ ID NO: 3004901 - RNA, 19 nt, Artificial Sequence
  Description of Artificial Sequence: Synthetic oligonucleotide
caccgcagcacggcccguc

SEQ ID NO: 3004902 - RNA, 19 nt, Artificial Sequence
  Description of Artificial Sequence: Synthetic oligonucleotide
cgcagcacggcccgucccc

SEQ ID NO: 3004903 - RNA, 19 nt, Artificial Sequence
  Description of Artificial Sequence: Synthetic oligonucleotide
gagaagcauucgaguggua

SEQ ID NO: 3004904 - RNA, 19 nt, Artificial Sequence
  Description of Artificial Sequence: Synthetic oligonucleotide
gcgggcucuggcagcacug

SEQ ID NO: 3004905 - RNA, 19 nt, Artificial Sequence
  Description of Artificial Sequence: Synthetic oligonucleotide
ccucaucacagcguacaaa

SEQ ID NO: 3004906 - RNA, 19 nt, Artificial Sequence
  Description of Artificial Sequence: Synthetic oligonucleotide
gcuccucaucacagcguac

SEQ ID NO: 3004907 - RNA, 19 nt, Artificial Sequence
  Description of Artificial Sequence: Synthetic oligonucleotide
ccugagccagacggcgggc

SEQ ID NO: 3004908 - RNA, 19 nt, Artificial Sequence
  Description of Artificial Sequence: Synthetic oligonucleotide
ccgcuuccugagccagacg

SEQ ID NO: 3004909 - RNA, 19 nt, Artificial Sequence
  Description of Artificial Sequence: Synthetic oligonucleotide
cugagccagacggcgggcu

SEQ ID NO: 3004910 - RNA, 19 nt, Artificial Sequence
  Description of Artificial Sequence: Synthetic oligonucleotide
cgcuccucaucacagcgua

SEQ ID NO: 3004911 - RNA, 19 nt, Artificial Sequence
  Description of Artificial Sequence: Synthetic oligonucleotide
ccgcagcacggcccguccc

SEQ ID NO: 3004912 - RNA, 19 nt, Artificial Sequence
  Description of Artificial Sequence: Synthetic oligonucleotide
ggcgggcucuggcagcacu

SEQ ID NO: 3004913 - RNA, 19 nt, Artificial Sequence
  Description of Artificial Sequence: Synthetic oligonucleotide
gccagacggcgggcucugg

SEQ ID NO: 3004914 - RNA, 19 nt, Artificial Sequence
  Description of Artificial Sequence: Synthetic oligonucleotide
cagcacuguuggcaucguu

SEQ ID NO: 3004915 - RNA, 19 nt, Artificial Sequence
  Description of Artificial Sequence: Synthetic oligonucleotide
cagaggcagugagguugaa

SEQ ID NO: 3004916 - RNA, 19 nt, Artificial Sequence
  Description of Artificial Sequence: Synthetic oligonucleotide
cagcacggcccguccccau

SEQ ID NO: 3004917 - RNA, 19 nt, Artificial Sequence
  Description of Artificial Sequence: Synthetic oligonucleotide
cgggcucuggcagcacugu

SEQ ID NO: 3004918 - RNA, 19 nt, Artificial Sequence
  Description of Artificial Sequence: Synthetic oligonucleotide
cggcgggcucuggcagcac

SEQ ID NO: 3004919 - RNA, 19 nt, Artificial Sequence
  Description of Artificial Sequence: Synthetic oligonucleotide
ccaccgcagcacggcccgu

SEQ ID NO: 3004920 - RNA, 19 nt, Artificial Sequence
  Description of Artificial Sequence: Synthetic oligonucleotide
uuauugaggagacucaugg

SEQ ID NO: 3004921 - RNA, 19 nt, Artificial Sequence
  Description of Artificial Sequence: Synthetic oligonucleotide
uguguguuguucuugaccg

SEQ ID NO: 3004922 - RNA, 19 nt, Artificial Sequence
  Description of Artificial Sequence: Synthetic oligonucleotide
aacaucuuggauauguagc

SEQ ID NO: 3004923 - RNA, 19 nt, Artificial Sequence
  Description of Artificial Sequence: Synthetic oligonucleotide
ugugugagcaccgagaggg

SEQ ID NO: 3004924 - RNA, 19 nt, Artificial Sequence
  Description of Artificial Sequence: Synthetic oligonucleotide
cuaucaaaggccuucaccc

SEQ ID NO: 3004925 - RNA, 19 nt, Artificial Sequence
  Description of Artificial Sequence: Synthetic oligonucleotide
accacaaugacagaguccc

SEQ ID NO: 3004926 - RNA, 19 nt, Artificial Sequence
  Description of Artificial Sequence: Synthetic oligonucleotide
ugcaaugccuaucaaaggc

SEQ ID NO: 3004927 - RNA, 19 nt, Artificial Sequence
  Description of Artificial Sequence: Synthetic oligonucleotide
uguuucgacaguuaaugag

SEQ ID NO: 3004928 - RNA, 19 nt, Artificial Sequence
  Description of Artificial Sequence: Synthetic oligonucleotide
accaguguugaauuccucc

SEQ ID NO: 3004929 - RNA, 19 nt, Artificial Sequence
  Description of Artificial Sequence: Synthetic oligonucleotide
auugaggagacucauggug

SEQ ID NO: 3004930 - RNA, 19 nt, Artificial Sequence
  Description of Artificial Sequence: Synthetic oligonucleotide
uuaaugagcacuugugugu

SEQ ID NO: 3004931 - RNA, 19 nt, Artificial Sequence
  Description of Artificial Sequence: Synthetic oligonucleotide
guugcaaugccuaucaaag

SEQ ID NO: 3004932 - RNA, 19 nt, Artificial Sequence
  Description of Artificial Sequence: Synthetic oligonucleotide
guuaaugagcacuugugug

SEQ ID NO: 3004933 - RNA, 19 nt, Artificial Sequence
  Description of Artificial Sequence: Synthetic oligonucleotide
uauguagcgguccuuguug

SEQ ID NO: 3004934 - RNA, 19 nt, Artificial Sequence
  Description of Artificial Sequence: Synthetic oligonucleotide
agcaccauguugcaaugcc

SEQ ID NO: 3004935 - RNA, 19 nt, Artificial Sequence
  Description of Artificial Sequence: Synthetic oligonucleotide
gaacaucuuggauauguag

SEQ ID NO: 3004936 - RNA, 19 nt, Artificial Sequence
  Description of Artificial Sequence: Synthetic oligonucleotide
guuguuucgacaguuaaug

SEQ ID NO: 3004937 - RNA, 19 nt, Artificial Sequence
  Description of Artificial Sequence: Synthetic oligonucleotide
uacuugccagcgaugagcg

SEQ ID NO: 3004938 - RNA, 19 nt, Artificial Sequence
  Description of Artificial Sequence: Synthetic oligonucleotide
aguuaaugagcacuugugu

SEQ ID NO: 3004939 - RNA, 19 nt, Artificial Sequence
  Description of Artificial Sequence: Synthetic oligonucleotide
uuuauugaggagacucaug

SEQ ID NO: 3004940 - RNA, 19 nt, Artificial Sequence
  Description of Artificial Sequence: Synthetic oligonucleotide
ugaauuccuccucuucccg

SEQ ID NO: 3004941 - RNA, 19 nt, Artificial Sequence
  Description of Artificial Sequence: Synthetic oligonucleotide
uaucaaaggccuucacccg

SEQ ID NO: 3004942 - RNA, 19 nt, Artificial Sequence
  Description of Artificial Sequence: Synthetic oligonucleotide
uuucgacaguuaaugagca

SEQ ID NO: 3004943 - RNA, 19 nt, Artificial Sequence
  Description of Artificial Sequence: Synthetic oligonucleotide
uguuguucuugaccgacug

SEQ ID NO: 3004944 - RNA, 19 nt, Artificial Sequence
  Description of Artificial Sequence: Synthetic oligonucleotide
acucuuggggaccucaguc

SEQ ID NO: 3004945 - RNA, 19 nt, Artificial Sequence
  Description of Artificial Sequence: Synthetic oligonucleotide
guuucgacaguuaaugagc

SEQ ID NO: 3004946 - RNA, 19 nt, Artificial Sequence
  Description of Artificial Sequence: Synthetic oligonucleotide
uuguugacgggcuuggacu

SEQ ID NO: 3004947 - RNA, 19 nt, Artificial Sequence
  Description of Artificial Sequence: Synthetic oligonucleotide
acaguuaaugagcacuugu

SEQ ID NO: 3004948 - RNA, 19 nt, Artificial Sequence
  Description of Artificial Sequence: Synthetic oligonucleotide
uugaauuccuccucuuccc

SEQ ID NO: 3004949 - RNA, 19 nt, Artificial Sequence
  Description of Artificial Sequence: Synthetic oligonucleotide
ucgacaguuaaugagcacu

SEQ ID NO: 3004950 - RNA, 19 nt, Artificial Sequence
  Description of Artificial Sequence: Synthetic oligonucleotide
aaccacaaugacagagucc

SEQ ID NO: 3004951 - RNA, 19 nt, Artificial Sequence
  Description of Artificial Sequence: Synthetic oligonucleotide
uguugcaaugccuaucaaa

SEQ ID NO: 3004952 - RNA, 19 nt, Artificial Sequence
  Description of Artificial Sequence: Synthetic oligonucleotide
uuccgcagaaccacaauga

SEQ ID NO: 3004953 - RNA, 19 nt, Artificial Sequence
  Description of Artificial Sequence: Synthetic oligonucleotide
uugcaaugccuaucaaagg

SEQ ID NO: 3004954 - RNA, 19 nt, Artificial Sequence
  Description of Artificial Sequence: Synthetic oligonucleotide
cacucuuggguuuauugag

SEQ ID NO: 3004955 - RNA, 19 nt, Artificial Sequence
  Description of Artificial Sequence: Synthetic oligonucleotide
uuguucuugaccgacugug

SEQ ID NO: 3004956 - RNA, 19 nt, Artificial Sequence
  Description of Artificial Sequence: Synthetic oligonucleotide
ucgaucgcagcucacuccc

SEQ ID NO: 3004957 - RNA, 19 nt, Artificial Sequence
  Description of Artificial Sequence: Synthetic oligonucleotide
uuggguuuauugaggagac

SEQ ID NO: 3004958 - RNA, 19 nt, Artificial Sequence
  Description of Artificial Sequence: Synthetic oligonucleotide
cuugccagcgaugagcggg

SEQ ID NO: 3004959 - RNA, 19 nt, Artificial Sequence
  Description of Artificial Sequence: Synthetic oligonucleotide
caguuaaugagcacuugug

SEQ ID NO: 3004960 - RNA, 19 nt, Artificial Sequence
  Description of Artificial Sequence: Synthetic oligonucleotide
aguguugaauuccuccucu

SEQ ID NO: 3004961 - RNA, 19 nt, Artificial Sequence
  Description of Artificial Sequence: Synthetic oligonucleotide
uagcgguccuuguugacgg

SEQ ID NO: 3004962 - RNA, 19 nt, Artificial Sequence
  Description of Artificial Sequence: Synthetic oligonucleotide
cacaaugacagaguccccg

SEQ ID NO: 3004963 - RNA, 19 nt, Artificial Sequence
  Description of Artificial Sequence: Synthetic oligonucleotide
ucuugaccgacugugugag

SEQ ID NO: 3004964 - RNA, 19 nt, Artificial Sequence
  Description of Artificial Sequence: Synthetic oligonucleotide
aucuuggauauguagcggu

SEQ ID NO: 3004965 - RNA, 19 nt, Artificial Sequence
  Description of Artificial Sequence: Synthetic oligonucleotide
ucugcagcucuucuggggu

SEQ ID NO: 3004966 - RNA, 19 nt, Artificial Sequence
  Description of Artificial Sequence: Synthetic oligonucleotide
aggaacaucuuggauaugu

SEQ ID NO: 3004967 - RNA, 19 nt, Artificial Sequence
  Description of Artificial Sequence: Synthetic oligonucleotide
uguugaauuccuccucuuc

SEQ ID NO: 3004968 - RNA, 19 nt, Artificial Sequence
  Description of Artificial Sequence: Synthetic oligonucleotide
uccuucacauucuccagca

SEQ ID NO: 3004969 - RNA, 19 nt, Artificial Sequence
  Description of Artificial Sequence: Synthetic oligonucleotide
uguuguuucgacaguuaau

SEQ ID NO: 3004970 - RNA, 19 nt, Artificial Sequence
  Description of Artificial Sequence: Synthetic oligonucleotide
cagaaccacaaugacagag

SEQ ID NO: 3004971 - RNA, 19 nt, Artificial Sequence
  Description of Artificial Sequence: Synthetic oligonucleotide
agaguccccgcgcaggaac

SEQ ID NO: 3004972 - RNA, 19 nt, Artificial Sequence
  Description of Artificial Sequence: Synthetic oligonucleotide
cuacuugccagcgaugagc

SEQ ID NO: 3004973 - RNA, 19 nt, Artificial Sequence
  Description of Artificial Sequence: Synthetic oligonucleotide
uucuugaccgacuguguga

SEQ ID NO: 3004974 - RNA, 19 nt, Artificial Sequence
  Description of Artificial Sequence: Synthetic oligonucleotide
cgcagaaccacaaugacag

SEQ ID NO: 3004975 - RNA, 19 nt, Artificial Sequence
  Description of Artificial Sequence: Synthetic oligonucleotide
uugaccgacugugugagca

SEQ ID NO: 3004976 - RNA, 19 nt, Artificial Sequence
  Description of Artificial Sequence: Synthetic oligonucleotide
guuccgcagaaccacaaug

SEQ ID NO: 3004977 - RNA, 19 nt, Artificial Sequence
  Description of Artificial Sequence: Synthetic oligonucleotide
uuggauauguagcgguccu

SEQ ID NO: 3004978 - RNA, 19 nt, Artificial Sequence
  Description of Artificial Sequence: Synthetic oligonucleotide
acuuguguguuguucuuga

SEQ ID NO: 3004979 - RNA, 19 nt, Artificial Sequence
  Description of Artificial Sequence: Synthetic oligonucleotide
ucuccuucacauucuccag

SEQ ID NO: 3004980 - RNA, 19 nt, Artificial Sequence
  Description of Artificial Sequence: Synthetic oligonucleotide
ucuuggguuuauugaggag

SEQ ID NO: 3004981 - RNA, 19 nt, Artificial Sequence
  Description of Artificial Sequence: Synthetic oligonucleotide
cauguugcaaugccuauca

SEQ ID NO: 3004982 - RNA, 19 nt, Artificial Sequence
  Description of Artificial Sequence: Synthetic oligonucleotide
cuuggguuuauugaggaga

SEQ ID NO: 3004983 - RNA, 19 nt, Artificial Sequence
  Description of Artificial Sequence: Synthetic oligonucleotide
ucuacuugccagcgaugag

SEQ ID NO: 3004984 - RNA, 19 nt, Artificial Sequence
  Description of Artificial Sequence: Synthetic oligonucleotide
uuguuucgacaguuaauga

SEQ ID NO: 3004985 - RNA, 19 nt, Artificial Sequence
  Description of Artificial Sequence: Synthetic oligonucleotide
cuuguugacgggcuuggac

SEQ ID NO: 3004986 - RNA, 19 nt, Artificial Sequence
  Description of Artificial Sequence: Synthetic oligonucleotide
uuuguuguuucgacaguua

SEQ ID NO: 3004987 - RNA, 19 nt, Artificial Sequence
  Description of Artificial Sequence: Synthetic oligonucleotide
uuucgaucgcagcucacuc

SEQ ID NO: 3004988 - RNA, 19 nt, Artificial Sequence
  Description of Artificial Sequence: Synthetic oligonucleotide
cuuggauauguagcggucc

SEQ ID NO: 3004989 - RNA, 19 nt, Artificial Sequence
  Description of Artificial Sequence: Synthetic oligonucleotide
uguguuguucuugaccgac

SEQ ID NO: 3004990 - RNA, 19 nt, Artificial Sequence
  Description of Artificial Sequence: Synthetic oligonucleotide
aaugagcacuuguguguug

SEQ ID NO: 3004991 - RNA, 19 nt, Artificial Sequence
  Description of Artificial Sequence: Synthetic oligonucleotide
cucuuggggaccucagucc

SEQ ID NO: 3004992 - RNA, 19 nt, Artificial Sequence
  Description of Artificial Sequence: Synthetic oligonucleotide
uucgaucgcagcucacucc

SEQ ID NO: 3004993 - RNA, 19 nt, Artificial Sequence
  Description of Artificial Sequence: Synthetic oligonucleotide
ucuuggauauguagcgguc

SEQ ID NO: 3004994 - RNA, 19 nt, Artificial Sequence
  Description of Artificial Sequence: Synthetic oligonucleotide
caugguggagguuucgauc

SEQ ID NO: 3004995 - RNA, 19 nt, Artificial Sequence
  Description of Artificial Sequence: Synthetic oligonucleotide
uauugaggagacucauggu

SEQ ID NO: 3004996 - RNA, 19 nt, Artificial Sequence
  Description of Artificial Sequence: Synthetic oligonucleotide
uuuuguuguuucgacaguu

SEQ ID NO: 3004997 - RNA, 19 nt, Artificial Sequence
  Description of Artificial Sequence: Synthetic oligonucleotide
aucaaaggccuucacccgu

SEQ ID NO: 3004998 - RNA, 19 nt, Artificial Sequence
  Description of Artificial Sequence: Synthetic oligonucleotide
guucuugaccgacugugug

SEQ ID NO: 3004999 - RNA, 19 nt, Artificial Sequence
  Description of Artificial Sequence: Synthetic oligonucleotide
uccgcagaaccacaaugac

SEQ ID NO: 3005000 - RNA, 19 nt, Artificial Sequence
  Description of Artificial Sequence: Synthetic oligonucleotide
ucaguccacaucuccuuca

SEQ ID NO: 3005001 - RNA, 19 nt, Artificial Sequence
  Description of Artificial Sequence: Synthetic oligonucleotide
augccuaucaaaggccuuc

SEQ ID NO: 3005002 - RNA, 19 nt, Artificial Sequence
  Description of Artificial Sequence: Synthetic oligonucleotide
guagcgguccuuguugacg

SEQ ID NO: 3005003 - RNA, 19 nt, Artificial Sequence
  Description of Artificial Sequence: Synthetic oligonucleotide
acauucuccagcaccaugu

SEQ ID NO: 3005004 - RNA, 19 nt, Artificial Sequence
  Description of Artificial Sequence: Synthetic oligonucleotide
aucgcagcucacucccgcc

SEQ ID NO: 3005005 - RNA, 19 nt, Artificial Sequence
  Description of Artificial Sequence: Synthetic oligonucleotide
ugaggagacucauggugga

SEQ ID NO: 3005006 - RNA, 19 nt, Artificial Sequence
  Description of Artificial Sequence: Synthetic oligonucleotide
gagcggguuccgcagaacc

SEQ ID NO: 3005007 - RNA, 19 nt, Artificial Sequence
  Description of Artificial Sequence: Synthetic oligonucleotide
acucuuggguuuauugagg

SEQ ID NO: 3005008 - RNA, 19 nt, Artificial Sequence
  Description of Artificial Sequence: Synthetic oligonucleotide
gaccucaguccacaucucc

SEQ ID NO: 3005009 - RNA, 19 nt, Artificial Sequence
  Description of Artificial Sequence: Synthetic oligonucleotide
acgggcuuggacuucuucu

SEQ ID NO: 3005010 - RNA, 19 nt, Artificial Sequence
  Description of Artificial Sequence: Synthetic oligonucleotide
gaucgcagcucacucccgc

SEQ ID NO: 3005011 - RNA, 19 nt, Artificial Sequence
  Description of Artificial Sequence: Synthetic oligonucleotide
uccuuguugacgggcuugg

SEQ ID NO: 3005012 - RNA, 19 nt, Artificial Sequence
  Description of Artificial Sequence: Synthetic oligonucleotide
ccuaucaaaggccuucacc

SEQ ID NO: 3005013 - RNA, 19 nt, Artificial Sequence
  Description of Artificial Sequence: Synthetic oligonucleotide
caucuuggauauguagcgg

SEQ ID NO: 3005014 - RNA, 19 nt, Artificial Sequence
  Description of Artificial Sequence: Synthetic oligonucleotide
caaugacagaguccccgcg

SEQ ID NO: 3005015 - RNA, 19 nt, Artificial Sequence
  Description of Artificial Sequence: Synthetic oligonucleotide
gacagaguccccgcgcagg

SEQ ID NO: 3005016 - RNA, 19 nt, Artificial Sequence
  Description of Artificial Sequence: Synthetic oligonucleotide
cucacucccgccuccgccg

SEQ ID NO: 3005017 - RNA, 19 nt, Artificial Sequence
  Description of Artificial Sequence: Synthetic oligonucleotide
cuucacccgucccaggagc

SEQ ID NO: 3005018 - RNA, 19 nt, Artificial Sequence
  Description of Artificial Sequence: Synthetic oligonucleotide
uggagguuucgaucgcagc

SEQ ID NO: 3005019 - RNA, 19 nt, Artificial Sequence
  Description of Artificial Sequence: Synthetic oligonucleotide
gacuucuucuugcccuugc

SEQ ID NO: 3005020 - RNA, 19 nt, Artificial Sequence
  Description of Artificial Sequence: Synthetic oligonucleotide
ucaugguggagguuucgau

SEQ ID NO: 3005021 - RNA, 19 nt, Artificial Sequence
  Description of Artificial Sequence: Synthetic oligonucleotide
augacagaguccccgcgca

SEQ ID NO: 3005022 - RNA, 19 nt, Artificial Sequence
  Description of Artificial Sequence: Synthetic oligonucleotide
auauguagcgguccuuguu

SEQ ID NO: 3005023 - RNA, 19 nt, Artificial Sequence
  Description of Artificial Sequence: Synthetic oligonucleotide
ugcccuugccacucuuggg

SEQ ID NO: 3005024 - RNA, 19 nt, Artificial Sequence
  Description of Artificial Sequence: Synthetic oligonucleotide
ggguuuauugaggagacuc

SEQ ID NO: 3005025 - RNA, 19 nt, Artificial Sequence
  Description of Artificial Sequence: Synthetic oligonucleotide
cuucugcagcucuucuggg

SEQ ID NO: 3005026 - RNA, 19 nt, Artificial Sequence
  Description of Artificial Sequence: Synthetic oligonucleotide
gcccuugccacucuugggg

SEQ ID NO: 3005027 - RNA, 19 nt, Artificial Sequence
  Description of Artificial Sequence: Synthetic oligonucleotide
cucuuggguuuauugagga

SEQ ID NO: 3005028 - RNA, 19 nt, Artificial Sequence
  Description of Artificial Sequence: Synthetic oligonucleotide
uucuggggucaucucacuc

SEQ ID NO: 3005029 - RNA, 19 nt, Artificial Sequence
  Description of Artificial Sequence: Synthetic oligonucleotide
ucaucucacucuuggguuu

SEQ ID NO: 3005030 - RNA, 19 nt, Artificial Sequence
  Description of Artificial Sequence: Synthetic oligonucleotide
uucgacaguuaaugagcac

SEQ ID NO: 3005031 - RNA, 19 nt, Artificial Sequence
  Description of Artificial Sequence: Synthetic oligonucleotide
gacaguuaaugagcacuug

SEQ ID NO: 3005032 - RNA, 19 nt, Artificial Sequence
  Description of Artificial Sequence: Synthetic oligonucleotide
agacucaugguggagguuu

SEQ ID NO: 3005033 - RNA, 19 nt, Artificial Sequence
  Description of Artificial Sequence: Synthetic oligonucleotide
ugacagaguccccgcgcag

SEQ ID NO: 3005034 - RNA, 19 nt, Artificial Sequence
  Description of Artificial Sequence: Synthetic oligonucleotide
uguugacgggcuuggacuu

SEQ ID NO: 3005035 - RNA, 19 nt, Artificial Sequence
  Description of Artificial Sequence: Synthetic oligonucleotide
uccccgcgcaggaacaucu

SEQ ID NO: 3005036 - RNA, 19 nt, Artificial Sequence
  Description of Artificial Sequence: Synthetic oligonucleotide
cuuguguguuguucuugac

SEQ ID NO: 3005037 - RNA, 19 nt, Artificial Sequence
  Description of Artificial Sequence: Synthetic oligonucleotide
augagcacuuguguguugu

SEQ ID NO: 3005038 - RNA, 19 nt, Artificial Sequence
  Description of Artificial Sequence: Synthetic oligonucleotide
auguagcgguccuuguuga

SEQ ID NO: 3005039 - RNA, 19 nt, Artificial Sequence
  Description of Artificial Sequence: Synthetic oligonucleotide
gacugugugagcaccgaga

SEQ ID NO: 3005040 - RNA, 19 nt, Artificial Sequence
  Description of Artificial Sequence: Synthetic oligonucleotide
uaaugagcacuuguguguu

SEQ ID NO: 3005041 - RNA, 19 nt, Artificial Sequence
  Description of Artificial Sequence: Synthetic oligonucleotide
ugugagcaccgagagggga

SEQ ID NO: 3005042 - RNA, 19 nt, Artificial Sequence
  Description of Artificial Sequence: Synthetic oligonucleotide
cuugccacucuuggggacc

SEQ ID NO: 3005043 - RNA, 19 nt, Artificial Sequence
  Description of Artificial Sequence: Synthetic oligonucleotide
ggauauguagcgguccuug

SEQ ID NO: 3005044 - RNA, 19 nt, Artificial Sequence
  Description of Artificial Sequence: Synthetic oligonucleotide
cacauucuccagcaccaug

SEQ ID NO: 3005045 - RNA, 19 nt, Artificial Sequence
  Description of Artificial Sequence: Synthetic oligonucleotide
agguuucgaucgcagcuca

SEQ ID NO: 3005046 - RNA, 19 nt, Artificial Sequence
  Description of Artificial Sequence: Synthetic oligonucleotide
ugagcaccgagaggggacc

SEQ ID NO: 3005047 - RNA, 19 nt, Artificial Sequence
  Description of Artificial Sequence: Synthetic oligonucleotide
uucacccgucccaggagcu

SEQ ID NO: 3005048 - RNA, 19 nt, Artificial Sequence
  Description of Artificial Sequence: Synthetic oligonucleotide
agcgaugagcggguuccgc

SEQ ID NO: 3005049 - RNA, 19 nt, Artificial Sequence
  Description of Artificial Sequence: Synthetic oligonucleotide
gagguuucgaucgcagcuc

SEQ ID NO: 3005050 - RNA, 19 nt, Artificial Sequence
  Description of Artificial Sequence: Synthetic oligonucleotide
caguguugaauuccuccuc

SEQ ID NO: 3005051 - RNA, 19 nt, Artificial Sequence
  Description of Artificial Sequence: Synthetic oligonucleotide
uguagcgguccuuguugac

SEQ ID NO: 3005052 - RNA, 19 nt, Artificial Sequence
  Description of Artificial Sequence: Synthetic oligonucleotide
cucuucuggggucaucuca

SEQ ID NO: 3005053 - RNA, 19 nt, Artificial Sequence
  Description of Artificial Sequence: Synthetic oligonucleotide
gcaaugccuaucaaaggcc

SEQ ID NO: 3005054 - RNA, 19 nt, Artificial Sequence
  Description of Artificial Sequence: Synthetic oligonucleotide
ucuucccgcuucugcagcu

SEQ ID NO: 3005055 - RNA, 19 nt, Artificial Sequence
  Description of Artificial Sequence: Synthetic oligonucleotide
acagaguccccgcgcagga

SEQ ID NO: 3005056 - RNA, 19 nt, Artificial Sequence
  Description of Artificial Sequence: Synthetic oligonucleotide
accauguugcaaugccuau

SEQ ID NO: 3005057 - RNA, 19 nt, Artificial Sequence
  Description of Artificial Sequence: Synthetic oligonucleotide
ugguggagguuucgaucgc

SEQ ID NO: 3005058 - RNA, 19 nt, Artificial Sequence
  Description of Artificial Sequence: Synthetic oligonucleotide
cucuacuugccagcgauga

SEQ ID NO: 3005059 - RNA, 19 nt, Artificial Sequence
  Description of Artificial Sequence: Synthetic oligonucleotide
aggggaccaguguugaauu

SEQ ID NO: 3005060 - RNA, 19 nt, Artificial Sequence
  Description of Artificial Sequence: Synthetic oligonucleotide
uugccagcgaugagcgggu

SEQ ID NO: 3005061 - RNA, 19 nt, Artificial Sequence
  Description of Artificial Sequence: Synthetic oligonucleotide
accgagaggggaccagugu

SEQ ID NO: 3005062 - RNA, 19 nt, Artificial Sequence
  Description of Artificial Sequence: Synthetic oligonucleotide
agcucacucccgccuccgc

SEQ ID NO: 3005063 - RNA, 19 nt, Artificial Sequence
  Description of Artificial Sequence: Synthetic oligonucleotide
gagcacuuguguguuguuc

SEQ ID NO: 3005064 - RNA, 19 nt, Artificial Sequence
  Description of Artificial Sequence: Synthetic oligonucleotide
cucuucccgcuucugcagc

SEQ ID NO: 3005065 - RNA, 19 nt, Artificial Sequence
  Description of Artificial Sequence: Synthetic oligonucleotide
gggaccaguguugaauucc

SEQ ID NO: 3005066 - RNA, 19 nt, Artificial Sequence
  Description of Artificial Sequence: Synthetic oligonucleotide
ucgcagcucacucccgccu

SEQ ID NO: 3005067 - RNA, 19 nt, Artificial Sequence
  Description of Artificial Sequence: Synthetic oligonucleotide
ugaccgacugugugagcac

SEQ ID NO: 3005068 - RNA, 19 nt, Artificial Sequence
  Description of Artificial Sequence: Synthetic oligonucleotide
ugccuaucaaaggccuuca

SEQ ID NO: 3005069 - RNA, 19 nt, Artificial Sequence
  Description of Artificial Sequence: Synthetic oligonucleotide
gaccgacugugugagcacc

SEQ ID NO: 3005070 - RNA, 19 nt, Artificial Sequence
  Description of Artificial Sequence: Synthetic oligonucleotide
ugcagcucuucugggguca

SEQ ID NO: 3005071 - RNA, 19 nt, Artificial Sequence
  Description of Artificial Sequence: Synthetic oligonucleotide
gauauguagcgguccuugu

SEQ ID NO: 3005072 - RNA, 19 nt, Artificial Sequence
  Description of Artificial Sequence: Synthetic oligonucleotide
gaggagacucaugguggag

SEQ ID NO: 3005073 - RNA, 19 nt, Artificial Sequence
  Description of Artificial Sequence: Synthetic oligonucleotide
acuugccagcgaugagcgg

SEQ ID NO: 3005074 - RNA, 19 nt, Artificial Sequence
  Description of Artificial Sequence: Synthetic oligonucleotide
gggaccucaguccacaucu

SEQ ID NO: 3005075 - RNA, 19 nt, Artificial Sequence
  Description of Artificial Sequence: Synthetic oligonucleotide
gaugagcggguuccgcaga

SEQ ID NO: 3005076 - RNA, 19 nt, Artificial Sequence
  Description of Artificial Sequence: Synthetic oligonucleotide
caguccacaucuccuucac

SEQ ID NO: 3005077 - RNA, 19 nt, Artificial Sequence
  Description of Artificial Sequence: Synthetic oligonucleotide
caaaggccuucacccgucc

SEQ ID NO: 3005078 - RNA, 19 nt, Artificial Sequence
  Description of Artificial Sequence: Synthetic oligonucleotide
uugacgggcuuggacuucu

SEQ ID NO: 3005079 - RNA, 19 nt, Artificial Sequence
  Description of Artificial Sequence: Synthetic oligonucleotide
caccauguugcaaugccua

SEQ ID NO: 3005080 - RNA, 19 nt, Artificial Sequence
  Description of Artificial Sequence: Synthetic oligonucleotide
guggagguuucgaucgcag

SEQ ID NO: 3005081 - RNA, 19 nt, Artificial Sequence
  Description of Artificial Sequence: Synthetic oligonucleotide
gguuuauugaggagacuca

SEQ ID NO: 3005082 - RNA, 19 nt, Artificial Sequence
  Description of Artificial Sequence: Synthetic oligonucleotide
cuucuugcccuugccacuc

SEQ ID NO: 3005083 - RNA, 19 nt, Artificial Sequence
  Description of Artificial Sequence: Synthetic oligonucleotide
cacuuguguguuguucuug

SEQ ID NO: 3005084 - RNA, 19 nt, Artificial Sequence
  Description of Artificial Sequence: Synthetic oligonucleotide
gggucaucucacucuuggg

SEQ ID NO: 3005085 - RNA, 19 nt, Artificial Sequence
  Description of Artificial Sequence: Synthetic oligonucleotide
caaugccuaucaaaggccu

SEQ ID NO: 3005086 - RNA, 19 nt, Artificial Sequence
  Description of Artificial Sequence: Synthetic oligonucleotide
ggagguuucgaucgcagcu

SEQ ID NO: 3005087 - RNA, 19 nt, Artificial Sequence
  Description of Artificial Sequence: Synthetic oligonucleotide
ggucaucucacucuugggu

SEQ ID NO: 3005088 - RNA, 19 nt, Artificial Sequence
  Description of Artificial Sequence: Synthetic oligonucleotide
accucaguccacaucuccu

SEQ ID NO: 3005089 - RNA, 19 nt, Artificial Sequence
  Description of Artificial Sequence: Synthetic oligonucleotide
cuuggggaccucaguccac

SEQ ID NO: 3005090 - RNA, 19 nt, Artificial Sequence
  Description of Artificial Sequence: Synthetic oligonucleotide
ccgcgcaggaacaucuugg

SEQ ID NO: 3005091 - RNA, 19 nt, Artificial Sequence
  Description of Artificial Sequence: Synthetic oligonucleotide
accgacugugugagcaccg

SEQ ID NO: 3005092 - RNA, 19 nt, Artificial Sequence
  Description of Artificial Sequence: Synthetic oligonucleotide
gagaggggaccaguguuga

SEQ ID NO: 3005093 - RNA, 19 nt, Artificial Sequence
  Description of Artificial Sequence: Synthetic oligonucleotide
cuugaccgacugugugagc

SEQ ID NO: 3005094 - RNA, 19 nt, Artificial Sequence
  Description of Artificial Sequence: Synthetic oligonucleotide
gucaucucacucuuggguu

SEQ ID NO: 3005095 - RNA, 19 nt, Artificial Sequence
  Description of Artificial Sequence: Synthetic oligonucleotide
agcgguccuuguugacggg

SEQ ID NO: 3005096 - RNA, 19 nt, Artificial Sequence
  Description of Artificial Sequence: Synthetic oligonucleotide
guuuauugaggagacucau

SEQ ID NO: 3005097 - RNA, 19 nt, Artificial Sequence
  Description of Artificial Sequence: Synthetic oligonucleotide
gacgggcuuggacuucuuc

SEQ ID NO: 3005098 - RNA, 19 nt, Artificial Sequence
  Description of Artificial Sequence: Synthetic oligonucleotide
caccgagaggggaccagug

SEQ ID NO: 3005099 - RNA, 19 nt, Artificial Sequence
  Description of Artificial Sequence: Synthetic oligonucleotide
ucacucccgccuccgccgc

SEQ ID NO: 3005100 - RNA, 19 nt, Artificial Sequence
  Description of Artificial Sequence: Synthetic oligonucleotide
gugagcaccgagaggggac

SEQ ID NO: 3005101 - RNA, 19 nt, Artificial Sequence
  Description of Artificial Sequence: Synthetic oligonucleotide
guccuuguugacgggcuug

SEQ ID NO: 3005102 - RNA, 19 nt, Artificial Sequence
  Description of Artificial Sequence: Synthetic oligonucleotide
gcaggaacaucuuggauau

SEQ ID NO: 3005103 - RNA, 19 nt, Artificial Sequence
  Description of Artificial Sequence: Synthetic oligonucleotide
augagcggguuccgcagaa

SEQ ID NO: 3005104 - RNA, 19 nt, Artificial Sequence
  Description of Artificial Sequence: Synthetic oligonucleotide
uggguuuauugaggagacu

SEQ ID NO: 3005105 - RNA, 19 nt, Artificial Sequence
  Description of Artificial Sequence: Synthetic oligonucleotide
aggccuucacccgucccag

SEQ ID NO: 3005106 - RNA, 19 nt, Artificial Sequence
  Description of Artificial Sequence: Synthetic oligonucleotide
auguugcaaugccuaucaa

SEQ ID NO: 3005107 - RNA, 19 nt, Artificial Sequence
  Description of Artificial Sequence: Synthetic oligonucleotide
ucuugcccuugccacucuu

SEQ ID NO: 3005108 - RNA, 19 nt, Artificial Sequence
  Description of Artificial Sequence: Synthetic oligonucleotide
guuucgaucgcagcucacu

SEQ ID NO: 3005109 - RNA, 19 nt, Artificial Sequence
  Description of Artificial Sequence: Synthetic oligonucleotide
ugagcacuuguguguuguu

SEQ ID NO: 3005110 - RNA, 19 nt, Artificial Sequence
  Description of Artificial Sequence: Synthetic oligonucleotide
gaggggaccaguguugaau

SEQ ID NO: 3005111 - RNA, 19 nt, Artificial Sequence
  Description of Artificial Sequence: Synthetic oligonucleotide
guguguuguucuugaccga

SEQ ID NO: 3005112 - RNA, 19 nt, Artificial Sequence
  Description of Artificial Sequence: Synthetic oligonucleotide
gugugagcaccgagagggg

SEQ ID NO: 3005113 - RNA, 19 nt, Artificial Sequence
  Description of Artificial Sequence: Synthetic oligonucleotide
cucaugguggagguuucga

SEQ ID NO: 3005114 - RNA, 19 nt, Artificial Sequence
  Description of Artificial Sequence: Synthetic oligonucleotide
ucacauucuccagcaccau

SEQ ID NO: 3005115 - RNA, 19 nt, Artificial Sequence
  Description of Artificial Sequence: Synthetic oligonucleotide
uggauauguagcgguccuu

SEQ ID NO: 3005116 - RNA, 19 nt, Artificial Sequence
  Description of Artificial Sequence: Synthetic oligonucleotide
agcggguuccgcagaacca

SEQ ID NO: 3005117 - RNA, 19 nt, Artificial Sequence
  Description of Artificial Sequence: Synthetic oligonucleotide
agcaccgagaggggaccag

SEQ ID NO: 3005118 - RNA, 19 nt, Artificial Sequence
  Description of Artificial Sequence: Synthetic oligonucleotide
uugccacucuuggggaccu

SEQ ID NO: 3005119 - RNA, 19 nt, Artificial Sequence
  Description of Artificial Sequence: Synthetic oligonucleotide
gaccaguguugaauuccuc

SEQ ID NO: 3005120 - RNA, 19 nt, Artificial Sequence
  Description of Artificial Sequence: Synthetic oligonucleotide
agaggggaccaguguugaa

SEQ ID NO: 3005121 - RNA, 19 nt, Artificial Sequence
  Description of Artificial Sequence: Synthetic oligonucleotide
ugagcggguuccgcagaac

SEQ ID NO: 3005122 - RNA, 19 nt, Artificial Sequence
  Description of Artificial Sequence: Synthetic oligonucleotide
ggagacucaugguggaggu

SEQ ID NO: 3005123 - RNA, 19 nt, Artificial Sequence
  Description of Artificial Sequence: Synthetic oligonucleotide
gcgaugagcggguuccgca

SEQ ID NO: 3005124 - RNA, 19 nt, Artificial Sequence
  Description of Artificial Sequence: Synthetic oligonucleotide
ccagcaccauguugcaaug

SEQ ID NO: 3005125 - RNA, 19 nt, Artificial Sequence
  Description of Artificial Sequence: Synthetic oligonucleotide
cgagaggggaccaguguug

SEQ ID NO: 3005126 - RNA, 19 nt, Artificial Sequence
  Description of Artificial Sequence: Synthetic oligonucleotide
ucucacucuuggguuuauu

SEQ ID NO: 3005127 - RNA, 19 nt, Artificial Sequence
  Description of Artificial Sequence: Synthetic oligonucleotide
ccgcagaaccacaaugaca

SEQ ID NO: 3005128 - RNA, 19 nt, Artificial Sequence
  Description of Artificial Sequence: Synthetic oligonucleotide
gaguccccgcgcaggaaca

SEQ ID NO: 3005129 - RNA, 19 nt, Artificial Sequence
  Description of Artificial Sequence: Synthetic oligonucleotide
gccuucacccgucccagga

SEQ ID NO: 3005130 - RNA, 19 nt, Artificial Sequence
  Description of Artificial Sequence: Synthetic oligonucleotide
ccauguugcaaugccuauc

SEQ ID NO: 3005131 - RNA, 19 nt, Artificial Sequence
  Description of Artificial Sequence: Synthetic oligonucleotide
cgaugagcggguuccgcag

SEQ ID NO: 3005132 - RNA, 19 nt, Artificial Sequence
  Description of Artificial Sequence: Synthetic oligonucleotide
ccuucacccgucccaggag

SEQ ID NO: 3005133 - RNA, 19 nt, Artificial Sequence
  Description of Artificial Sequence: Synthetic oligonucleotide
gcagcucacucccgccucc

SEQ ID NO: 3005134 - RNA, 19 nt, Artificial Sequence
  Description of Artificial Sequence: Synthetic oligonucleotide
ccaguguugaauuccuccu

SEQ ID NO: 3005135 - RNA, 19 nt, Artificial Sequence
  Description of Artificial Sequence: Synthetic oligonucleotide
guugacgggcuuggacuuc

SEQ ID NO: 3005136 - RNA, 19 nt, Artificial Sequence
  Description of Artificial Sequence: Synthetic oligonucleotide
ggggaccaguguugaauuc

SEQ ID NO: 3005137 - RNA, 19 nt, Artificial Sequence
  Description of Artificial Sequence: Synthetic oligonucleotide
gcggguuccgcagaaccac

SEQ ID NO: 3005138 - RNA, 19 nt, Artificial Sequence
  Description of Artificial Sequence: Synthetic oligonucleotide
ucccgcuucugcagcucuu

SEQ ID NO: 3005139 - RNA, 19 nt, Artificial Sequence
  Description of Artificial Sequence: Synthetic oligonucleotide
ccacucuuggggaccucag

SEQ ID NO: 3005140 - RNA, 19 nt, Artificial Sequence
  Description of Artificial Sequence: Synthetic oligonucleotide
ucccgccuccgccgcguug

SEQ ID NO: 3005141 - RNA, 19 nt, Artificial Sequence
  Description of Artificial Sequence: Synthetic oligonucleotide
gguggagguuucgaucgca

SEQ ID NO: 3005142 - RNA, 19 nt, Artificial Sequence
  Description of Artificial Sequence: Synthetic oligonucleotide
ggaacaucuuggauaugua

SEQ ID NO: 3005143 - RNA, 19 nt, Artificial Sequence
  Description of Artificial Sequence: Synthetic oligonucleotide
cagcgaugagcggguuccg

SEQ ID NO: 3005144 - RNA, 19 nt, Artificial Sequence
  Description of Artificial Sequence: Synthetic oligonucleotide
ccacaaugacagagucccc

SEQ ID NO: 3005145 - RNA, 19 nt, Artificial Sequence
  Description of Artificial Sequence: Synthetic oligonucleotide
gccuaucaaaggccuucac

SEQ ID NO: 3005146 - RNA, 19 nt, Artificial Sequence
  Description of Artificial Sequence: Synthetic oligonucleotide
ggggaccucaguccacauc

SEQ ID NO: 3005147 - RNA, 19 nt, Artificial Sequence
  Description of Artificial Sequence: Synthetic oligonucleotide
gcgguccuuguugacgggc

SEQ ID NO: 3005148 - RNA, 19 nt, Artificial Sequence
  Description of Artificial Sequence: Synthetic oligonucleotide
guguugaauuccuccucuu

SEQ ID NO: 3005149 - RNA, 19 nt, Artificial Sequence
  Description of Artificial Sequence: Synthetic oligonucleotide
caucucacucuuggguuua

SEQ ID NO: 3005150 - RNA, 19 nt, Artificial Sequence
  Description of Artificial Sequence: Synthetic oligonucleotide
ucacccgucccaggagcuu

SEQ ID NO: 3005151 - RNA, 19 nt, Artificial Sequence
  Description of Artificial Sequence: Synthetic oligonucleotide
caggaacaucuuggauaug

SEQ ID NO: 3005152 - RNA, 19 nt, Artificial Sequence
  Description of Artificial Sequence: Synthetic oligonucleotide
gcagaaccacaaugacaga

SEQ ID NO: 3005153 - RNA, 19 nt, Artificial Sequence
  Description of Artificial Sequence: Synthetic oligonucleotide
guguuguucuugaccgacu

SEQ ID NO: 3005154 - RNA, 19 nt, Artificial Sequence
  Description of Artificial Sequence: Synthetic oligonucleotide
ugacgggcuuggacuucuu

SEQ ID NO: 3005155 - RNA, 19 nt, Artificial Sequence
  Description of Artificial Sequence: Synthetic oligonucleotide
cccgcgcaggaacaucuug

SEQ ID NO: 3005156 - RNA, 19 nt, Artificial Sequence
  Description of Artificial Sequence: Synthetic oligonucleotide
aucucacucuuggguuuau

SEQ ID NO: 3005157 - RNA, 19 nt, Artificial Sequence
  Description of Artificial Sequence: Synthetic oligonucleotide
ggaccaguguugaauuccu

SEQ ID NO: 3005158 - RNA, 19 nt, Artificial Sequence
  Description of Artificial Sequence: Synthetic oligonucleotide
gagcaccgagaggggacca

SEQ ID NO: 3005159 - RNA, 19 nt, Artificial Sequence
  Description of Artificial Sequence: Synthetic oligonucleotide
cacucuuggggaccucagu

SEQ ID NO: 3005160 - RNA, 19 nt, Artificial Sequence
  Description of Artificial Sequence: Synthetic oligonucleotide
gguuucgaucgcagcucac

SEQ ID NO: 3005161 - RNA, 19 nt, Artificial Sequence
  Description of Artificial Sequence: Synthetic oligonucleotide
cgacugugugagcaccgag

SEQ ID NO: 3005162 - RNA, 19 nt, Artificial Sequence
  Description of Artificial Sequence: Synthetic oligonucleotide
gccagcgaugagcggguuc

SEQ ID NO: 3005163 - RNA, 19 nt, Artificial Sequence
  Description of Artificial Sequence: Synthetic oligonucleotide
aguccccgcgcaggaacau

SEQ ID NO: 3005164 - RNA, 19 nt, Artificial Sequence
  Description of Artificial Sequence: Synthetic oligonucleotide
cuggggucaucucacucuu

SEQ ID NO: 3005165 - RNA, 19 nt, Artificial Sequence
  Description of Artificial Sequence: Synthetic oligonucleotide
gccacucuuggggaccuca

SEQ ID NO: 3005166 - RNA, 19 nt, Artificial Sequence
  Description of Artificial Sequence: Synthetic oligonucleotide
cauucuccagcaccauguu

SEQ ID NO: 3005167 - RNA, 19 nt, Artificial Sequence
  Description of Artificial Sequence: Synthetic oligonucleotide
cccgccuccgccgcguugc

SEQ ID NO: 3005168 - RNA, 19 nt, Artificial Sequence
  Description of Artificial Sequence: Synthetic oligonucleotide
cccuugccacucuugggga

SEQ ID NO: 3005169 - RNA, 19 nt, Artificial Sequence
  Description of Artificial Sequence: Synthetic oligonucleotide
cgaucgcagcucacucccg

SEQ ID NO: 3005170 - RNA, 19 nt, Artificial Sequence
  Description of Artificial Sequence: Synthetic oligonucleotide
gguuccgcagaaccacaau

SEQ ID NO: 3005171 - RNA, 19 nt, Artificial Sequence
  Description of Artificial Sequence: Synthetic oligonucleotide
guccccgcgcaggaacauc

SEQ ID NO: 3005172 - RNA, 19 nt, Artificial Sequence
  Description of Artificial Sequence: Synthetic oligonucleotide
gcaccauguugcaaugccu

SEQ ID NO: 3005173 - RNA, 19 nt, Artificial Sequence
  Description of Artificial Sequence: Synthetic oligonucleotide
cgcgcaggaacaucuugga

SEQ ID NO: 3005174 - RNA, 19 nt, Artificial Sequence
  Description of Artificial Sequence: Synthetic oligonucleotide
ggaccucaguccacaucuc

SEQ ID NO: 3005175 - RNA, 19 nt, Artificial Sequence
  Description of Artificial Sequence: Synthetic oligonucleotide
ggguuccgcagaaccacaa

SEQ ID NO: 3005176 - RNA, 19 nt, Artificial Sequence
  Description of Artificial Sequence: Synthetic oligonucleotide
cagcucuucuggggucauc

SEQ ID NO: 3005177 - RNA, 19 nt, Artificial Sequence
  Description of Artificial Sequence: Synthetic oligonucleotide
gagacucaugguggagguu

SEQ ID NO: 3005178 - RNA, 19 nt, Artificial Sequence
  Description of Artificial Sequence: Synthetic oligonucleotide
ugccacucuuggggaccuc

SEQ ID NO: 3005179 - RNA, 19 nt, Artificial Sequence
  Description of Artificial Sequence: Synthetic oligonucleotide
ugccagcgaugagcggguu

SEQ ID NO: 3005180 - RNA, 19 nt, Artificial Sequence
  Description of Artificial Sequence: Synthetic oligonucleotide
cgcagcucacucccgccuc

SEQ ID NO: 3005181 - RNA, 19 nt, Artificial Sequence
  Description of Artificial Sequence: Synthetic oligonucleotide
ccucaguccacaucuccuu

SEQ ID NO: 3005182 - RNA, 19 nt, Artificial Sequence
  Description of Artificial Sequence: Synthetic oligonucleotide
cagaguccccgcgcaggaa

SEQ ID NO: 3005183 - RNA, 19 nt, Artificial Sequence
  Description of Artificial Sequence: Synthetic oligonucleotide
gcgcaggaacaucuuggau

SEQ ID NO: 3005184 - RNA, 19 nt, Artificial Sequence
  Description of Artificial Sequence: Synthetic oligonucleotide
cgacaguuaaugagcacuu

SEQ ID NO: 3005185 - RNA, 19 nt, Artificial Sequence
  Description of Artificial Sequence: Synthetic oligonucleotide
gguccuuguugacgggcuu

SEQ ID NO: 3005186 - RNA, 19 nt, Artificial Sequence
  Description of Artificial Sequence: Synthetic oligonucleotide
acccgucccaggagcuuuu

SEQ ID NO: 3005187 - RNA, 19 nt, Artificial Sequence
  Description of Artificial Sequence: Synthetic oligonucleotide
ccgagaggggaccaguguu

SEQ ID NO: 3005188 - RNA, 19 nt, Artificial Sequence
  Description of Artificial Sequence: Synthetic oligonucleotide
ccgacugugugagcaccga

SEQ ID NO: 3005189 - RNA, 19 nt, Artificial Sequence
  Description of Artificial Sequence: Synthetic oligonucleotide
gcaccgagaggggaccagu

SEQ ID NO: 3005190 - RNA, 19 nt, Artificial Sequence
  Description of Artificial Sequence: Synthetic oligonucleotide
cggguuccgcagaaccaca

SEQ ID NO: 3005191 - RNA, 19 nt, Artificial Sequence
  Description of Artificial Sequence: Synthetic oligonucleotide
ccuuguugacgggcuugga

SEQ ID NO: 3005192 - RNA, 19 nt, Artificial Sequence
  Description of Artificial Sequence: Synthetic oligonucleotide
cgguccuuguugacgggcu

SEQ ID NO: 3005193 - RNA, 19 nt, Artificial Sequence
  Description of Artificial Sequence: Synthetic oligonucleotide
cucccgccuccgccgcguu

SEQ ID NO: 3005194 - RNA, 19 nt, Artificial Sequence
  Description of Artificial Sequence: Synthetic oligonucleotide
ccccgcgcaggaacaucuu

SEQ ID NO: 3005195 - RNA, 19 nt, Artificial Sequence
  Description of Artificial Sequence: Synthetic oligonucleotide
aaaaugucaaagucuaccc

SEQ ID NO: 3005196 - RNA, 19 nt, Artificial Sequence
  Description of Artificial Sequence: Synthetic oligonucleotide
aaugucaaagucuacccgc

SEQ ID NO: 3005197 - RNA, 19 nt, Artificial Sequence
  Description of Artificial Sequence: Synthetic oligonucleotide
uaauugaugcccaagacgc

SEQ ID NO: 3005198 - RNA, 19 nt, Artificial Sequence
  Description of Artificial Sequence: Synthetic oligonucleotide
aacugcugguaauugaugc

SEQ ID NO: 3005199 - RNA, 19 nt, Artificial Sequence
  Description of Artificial Sequence: Synthetic oligonucleotide
aaugagaggguugaucacc

SEQ ID NO: 3005200 - RNA, 19 nt, Artificial Sequence
  Description of Artificial Sequence: Synthetic oligonucleotide
aaaugucaaagucuacccg

SEQ ID NO: 3005201 - RNA, 19 nt, Artificial Sequence
  Description of Artificial Sequence: Synthetic oligonucleotide
ucaaugagaggguugauca

SEQ ID NO: 3005202 - RNA, 19 nt, Artificial Sequence
  Description of Artificial Sequence: Synthetic oligonucleotide
guaauugaugcccaagacg

SEQ ID NO: 3005203 - RNA, 19 nt, Artificial Sequence
  Description of Artificial Sequence: Synthetic oligonucleotide
ucgguugaugaacuuaucg

SEQ ID NO: 3005204 - RNA, 19 nt, Artificial Sequence
  Description of Artificial Sequence: Synthetic oligonucleotide
uauggugaacgucaaaaug

SEQ ID NO: 3005205 - RNA, 19 nt, Artificial Sequence
  Description of Artificial Sequence: Synthetic oligonucleotide
caguucuucaaugagaggg

SEQ ID NO: 3005206 - RNA, 19 nt, Artificial Sequence
  Description of Artificial Sequence: Synthetic oligonucleotide
uacucgaugucgaaggcgg

SEQ ID NO: 3005207 - RNA, 19 nt, Artificial Sequence
  Description of Artificial Sequence: Synthetic oligonucleotide
acgucaaaaugucaaaguc

SEQ ID NO: 3005208 - RNA, 19 nt, Artificial Sequence
  Description of Artificial Sequence: Synthetic oligonucleotide
aacgucaaaaugucaaagu

SEQ ID NO: 3005209 - RNA, 19 nt, Artificial Sequence
  Description of Artificial Sequence: Synthetic oligonucleotide
augcccaagacgcugagcg

SEQ ID NO: 3005210 - RNA, 19 nt, Artificial Sequence
  Description of Artificial Sequence: Synthetic oligonucleotide
ugaacuuaucgcaacccag

SEQ ID NO: 3005211 - RNA, 19 nt, Artificial Sequence
  Description of Artificial Sequence: Synthetic oligonucleotide
caaaaugucaaagucuacc

SEQ ID NO: 3005212 - RNA, 19 nt, Artificial Sequence
  Description of Artificial Sequence: Synthetic oligonucleotide
ucaaagucuacccgcuggg

SEQ ID NO: 3005213 - RNA, 19 nt, Artificial Sequence
  Description of Artificial Sequence: Synthetic oligonucleotide
acugcugguaauugaugcc

SEQ ID NO: 3005214 - RNA, 19 nt, Artificial Sequence
  Description of Artificial Sequence: Synthetic oligonucleotide
agguacucgaugucgaagg

SEQ ID NO: 3005215 - RNA, 19 nt, Artificial Sequence
  Description of Artificial Sequence: Synthetic oligonucleotide
gagaggguugaucaccucg

SEQ ID NO: 3005216 - RNA, 19 nt, Artificial Sequence
  Description of Artificial Sequence: Synthetic oligonucleotide
uaguucuccagguaguggc

SEQ ID NO: 3005217 - RNA, 19 nt, Artificial Sequence
  Description of Artificial Sequence: Synthetic oligonucleotide
ugguaauugaugcccaaga

SEQ ID NO: 3005218 - RNA, 19 nt, Artificial Sequence
  Description of Artificial Sequence: Synthetic oligonucleotide
ugaugaacuuaucgcaacc

SEQ ID NO: 3005219 - RNA, 19 nt, Artificial Sequence
  Description of Artificial Sequence: Synthetic oligonucleotide
ucuucaaugagaggguuga

SEQ ID NO: 3005220 - RNA, 19 nt, Artificial Sequence
  Description of Artificial Sequence: Synthetic oligonucleotide
gaucggguaguucuccagg

SEQ ID NO: 3005221 - RNA, 19 nt, Artificial Sequence
  Description of Artificial Sequence: Synthetic oligonucleotide
ggguugaucaccucggacg

SEQ ID NO: 3005222 - RNA, 19 nt, Artificial Sequence
  Description of Artificial Sequence: Synthetic oligonucleotide
gaugaacuuaucgcaaccc

SEQ ID NO: 3005223 - RNA, 19 nt, Artificial Sequence
  Description of Artificial Sequence: Synthetic oligonucleotide
auggugaacgucaaaaugu

SEQ ID NO: 3005224 - RNA, 19 nt, Artificial Sequence
  Description of Artificial Sequence: Synthetic oligonucleotide
uucuucaaugagaggguug

SEQ ID NO: 3005225 - RNA, 19 nt, Artificial Sequence
  Description of Artificial Sequence: Synthetic oligonucleotide
uugaugaacuuaucgcaac

SEQ ID NO: 3005226 - RNA, 19 nt, Artificial Sequence
  Description of Artificial Sequence: Synthetic oligonucleotide
ucucgguugaugaacuuau

SEQ ID NO: 3005227 - RNA, 19 nt, Artificial Sequence
  Description of Artificial Sequence: Synthetic oligonucleotide
gacgcagucagggcuaugg

SEQ ID NO: 3005228 - RNA, 19 nt, Artificial Sequence
  Description of Artificial Sequence: Synthetic oligonucleotide
ucaccucggacgcagucag

SEQ ID NO: 3005229 - RNA, 19 nt, Artificial Sequence
  Description of Artificial Sequence: Synthetic oligonucleotide
augaacuuaucgcaaccca

SEQ ID NO: 3005230 - RNA, 19 nt, Artificial Sequence
  Description of Artificial Sequence: Synthetic oligonucleotide
aagacgcugagcggguggc

SEQ ID NO: 3005231 - RNA, 19 nt, Artificial Sequence
  Description of Artificial Sequence: Synthetic oligonucleotide
gucagggcuauggugaacg

SEQ ID NO: 3005232 - RNA, 19 nt, Artificial Sequence
  Description of Artificial Sequence: Synthetic oligonucleotide
gguugaugaacuuaucgca

SEQ ID NO: 3005233 - RNA, 19 nt, Artificial Sequence
  Description of Artificial Sequence: Synthetic oligonucleotide
uggugaacgucaaaauguc

SEQ ID NO: 3005234 - RNA, 19 nt, Artificial Sequence
  Description of Artificial Sequence: Synthetic oligonucleotide
cuuaucgcaacccaguucu

SEQ ID NO: 3005235 - RNA, 19 nt, Artificial Sequence
  Description of Artificial Sequence: Synthetic oligonucleotide
aggguugaucaccucggac

SEQ ID NO: 3005236 - RNA, 19 nt, Artificial Sequence
  Description of Artificial Sequence: Synthetic oligonucleotide
uucaaugagaggguugauc

SEQ ID NO: 3005237 - RNA, 19 nt, Artificial Sequence
  Description of Artificial Sequence: Synthetic oligonucleotide
aacuuaucgcaacccaguu

SEQ ID NO: 3005238 - RNA, 19 nt, Artificial Sequence
  Description of Artificial Sequence: Synthetic oligonucleotide
auugaugcccaagacgcug

SEQ ID NO: 3005239 - RNA, 19 nt, Artificial Sequence
  Description of Artificial Sequence: Synthetic oligonucleotide
aucgcaacccaguucuuca

SEQ ID NO: 3005240 - RNA, 19 nt, Artificial Sequence
  Description of Artificial Sequence: Synthetic oligonucleotide
cagguaguggcgcaggaac

SEQ ID NO: 3005241 - RNA, 19 nt, Artificial Sequence
  Description of Artificial Sequence: Synthetic oligonucleotide
agaggguugaucaccucgg

SEQ ID NO: 3005242 - RNA, 19 nt, Artificial Sequence
  Description of Artificial Sequence: Synthetic oligonucleotide
agggcuauggugaacguca

SEQ ID NO: 3005243 - RNA, 19 nt, Artificial Sequence
  Description of Artificial Sequence: Synthetic oligonucleotide
ucgaaggcggccucccggg

SEQ ID NO: 3005244 - RNA, 19 nt, Artificial Sequence
  Description of Artificial Sequence: Synthetic oligonucleotide
gguaauugaugcccaagac

SEQ ID NO: 3005245 - RNA, 19 nt, Artificial Sequence
  Description of Artificial Sequence: Synthetic oligonucleotide
ugucaaagucuacccgcug

SEQ ID NO: 3005246 - RNA, 19 nt, Artificial Sequence
  Description of Artificial Sequence: Synthetic oligonucleotide
cccaguucuucaaugagag

SEQ ID NO: 3005247 - RNA, 19 nt, Artificial Sequence
  Description of Artificial Sequence: Synthetic oligonucleotide
ugcugguaauugaugccca

SEQ ID NO: 3005248 - RNA, 19 nt, Artificial Sequence
  Description of Artificial Sequence: Synthetic oligonucleotide
guacucgaugucgaaggcg

SEQ ID NO: 3005249 - RNA, 19 nt, Artificial Sequence
  Description of Artificial Sequence: Synthetic oligonucleotide
gugaacgucaaaaugucaa

SEQ ID NO: 3005250 - RNA, 19 nt, Artificial Sequence
  Description of Artificial Sequence: Synthetic oligonucleotide
aggaacugcugguaauuga

SEQ ID NO: 3005251 - RNA, 19 nt, Artificial Sequence
  Description of Artificial Sequence: Synthetic oligonucleotide
accucggacgcagucaggg

SEQ ID NO: 3005252 - RNA, 19 nt, Artificial Sequence
  Description of Artificial Sequence: Synthetic oligonucleotide
gguugaucaccucggacgc

SEQ ID NO: 3005253 - RNA, 19 nt, Artificial Sequence
  Description of Artificial Sequence: Synthetic oligonucleotide
guaguucuccagguagugg

SEQ ID NO: 3005254 - RNA, 19 nt, Artificial Sequence
  Description of Artificial Sequence: Synthetic oligonucleotide
ucacucucgguugaugaac

SEQ ID NO: 3005255 - RNA, 19 nt, Artificial Sequence
  Description of Artificial Sequence: Synthetic oligonucleotide
agaggcucgcccagcagcc

SEQ ID NO: 3005256 - RNA, 19 nt, Artificial Sequence
  Description of Artificial Sequence: Synthetic oligonucleotide
cagaggcucgcccagcagc

SEQ ID NO: 3005257 - RNA, 19 nt, Artificial Sequence
  Description of Artificial Sequence: Synthetic oligonucleotide
gucgaaggcggccucccgg

SEQ ID NO: 3005258 - RNA, 19 nt, Artificial Sequence
  Description of Artificial Sequence: Synthetic oligonucleotide
caagacgcugagcgggugg

SEQ ID NO: 3005259 - RNA, 19 nt, Artificial Sequence
  Description of Artificial Sequence: Synthetic oligonucleotide
aucggguaguucuccaggu

SEQ ID NO: 3005260 - RNA, 19 nt, Artificial Sequence
  Description of Artificial Sequence: Synthetic oligonucleotide
caaugagaggguugaucac

SEQ ID NO: 3005261 - RNA, 19 nt, Artificial Sequence
  Description of Artificial Sequence: Synthetic oligonucleotide
gaacugcugguaauugaug

SEQ ID NO: 3005262 - RNA, 19 nt, Artificial Sequence
  Description of Artificial Sequence: Synthetic oligonucleotide
aguucuucaaugagagggu

SEQ ID NO: 3005263 - RNA, 19 nt, Artificial Sequence
  Description of Artificial Sequence: Synthetic oligonucleotide
ugcccaagacgcugagcgg

SEQ ID NO: 3005264 - RNA, 19 nt, Artificial Sequence
  Description of Artificial Sequence: Synthetic oligonucleotide
aauugaugcccaagacgcu

SEQ ID NO: 3005265 - RNA, 19 nt, Artificial Sequence
  Description of Artificial Sequence: Synthetic oligonucleotide
guugaugaacuuaucgcaa

SEQ ID NO: 3005266 - RNA, 19 nt, Artificial Sequence
  Description of Artificial Sequence: Synthetic oligonucleotide
cugguaauugaugcccaag

SEQ ID NO: 3005267 - RNA, 19 nt, Artificial Sequence
  Description of Artificial Sequence: Synthetic oligonucleotide
gacgcugagcggguggcgg

SEQ ID NO: 3005268 - RNA, 19 nt, Artificial Sequence
  Description of Artificial Sequence: Synthetic oligonucleotide
aguucuccagguaguggcg

SEQ ID NO: 3005269 - RNA, 19 nt, Artificial Sequence
  Description of Artificial Sequence: Synthetic oligonucleotide
guugcgcagguacucgaug

SEQ ID NO: 3005270 - RNA, 19 nt, Artificial Sequence
  Description of Artificial Sequence: Synthetic oligonucleotide
caaagucuacccgcugggg

SEQ ID NO: 3005271 - RNA, 19 nt, Artificial Sequence
  Description of Artificial Sequence: Synthetic oligonucleotide
cgguugaugaacuuaucgc

SEQ ID NO: 3005272 - RNA, 19 nt, Artificial Sequence
  Description of Artificial Sequence: Synthetic oligonucleotide
augucgaaggcggccuccc

SEQ ID NO: 3005273 - RNA, 19 nt, Artificial Sequence
  Description of Artificial Sequence: Synthetic oligonucleotide
caacccaguucuucaauga

SEQ ID NO: 3005274 - RNA, 19 nt, Artificial Sequence
  Description of Artificial Sequence: Synthetic oligonucleotide
uaucgcaacccaguucuuc

SEQ ID NO: 3005275 - RNA, 19 nt, Artificial Sequence
  Description of Artificial Sequence: Synthetic oligonucleotide
uucuccagguaguggcgca

SEQ ID NO: 3005276 - RNA, 19 nt, Artificial Sequence
  Description of Artificial Sequence: Synthetic oligonucleotide
cuggauccggcccggggcg

SEQ ID NO: 3005277 - RNA, 19 nt, Artificial Sequence
  Description of Artificial Sequence: Synthetic oligonucleotide
gcaacccaguucuucaaug

SEQ ID NO: 3005278 - RNA, 19 nt, Artificial Sequence
  Description of Artificial Sequence: Synthetic oligonucleotide
accggggccugccaucggg

SEQ ID NO: 3005279 - RNA, 19 nt, Artificial Sequence
  Description of Artificial Sequence: Synthetic oligonucleotide
uccacgaagcgccgccggc

SEQ ID NO: 3005280 - RNA, 19 nt, Artificial Sequence
  Description of Artificial Sequence: Synthetic oligonucleotide
gcuauggugaacgucaaaa

SEQ ID NO: 3005281 - RNA, 19 nt, Artificial Sequence
  Description of Artificial Sequence: Synthetic oligonucleotide
ucgcccagcagccgggcca

SEQ ID NO: 3005282 - RNA, 19 nt, Artificial Sequence
  Description of Artificial Sequence: Synthetic oligonucleotide
uccagguaguggcgcagga

SEQ ID NO: 3005283 - RNA, 19 nt, Artificial Sequence
  Description of Artificial Sequence: Synthetic oligonucleotide
gaugucgaaggcggccucc

SEQ ID NO: 3005284 - RNA, 19 nt, Artificial Sequence
  Description of Artificial Sequence: Synthetic oligonucleotide
agggcagcgccgccaggcc

SEQ ID NO: 3005285 - RNA, 19 nt, Artificial Sequence
  Description of Artificial Sequence: Synthetic oligonucleotide
gaacuuaucgcaacccagu

SEQ ID NO: 3005286 - RNA, 19 nt, Artificial Sequence
  Description of Artificial Sequence: Synthetic oligonucleotide
uagggcagcgccgccaggc

SEQ ID NO: 3005287 - RNA, 19 nt, Artificial Sequence
  Description of Artificial Sequence: Synthetic oligonucleotide
gaucaccucggacgcaguc

SEQ ID NO: 3005288 - RNA, 19 nt, Artificial Sequence
  Description of Artificial Sequence: Synthetic oligonucleotide
cagguacucgaugucgaag

SEQ ID NO: 3005289 - RNA, 19 nt, Artificial Sequence
  Description of Artificial Sequence: Synthetic oligonucleotide
aggcucgcccagcagccgg

SEQ ID NO: 3005290 - RNA, 19 nt, Artificial Sequence
  Description of Artificial Sequence: Synthetic oligonucleotide
ugcgcagguacucgauguc

SEQ ID NO: 3005291 - RNA, 19 nt, Artificial Sequence
  Description of Artificial Sequence: Synthetic oligonucleotide
augagaggguugaucaccu

SEQ ID NO: 3005292 - RNA, 19 nt, Artificial Sequence
  Description of Artificial Sequence: Synthetic oligonucleotide
gguacucgaugucgaaggc

SEQ ID NO: 3005293 - RNA, 19 nt, Artificial Sequence
  Description of Artificial Sequence: Synthetic oligonucleotide
acccaguucuucaaugaga

SEQ ID NO: 3005294 - RNA, 19 nt, Artificial Sequence
  Description of Artificial Sequence: Synthetic oligonucleotide
augucaaagucuacccgcu

SEQ ID NO: 3005295 - RNA, 19 nt, Artificial Sequence
  Description of Artificial Sequence: Synthetic oligonucleotide
ucuccagguaguggcgcag

SEQ ID NO: 3005296 - RNA, 19 nt, Artificial Sequence
  Description of Artificial Sequence: Synthetic oligonucleotide
aucaccucggacgcaguca

SEQ ID NO: 3005297 - RNA, 19 nt, Artificial Sequence
  Description of Artificial Sequence: Synthetic oligonucleotide
gcagucagggcuaugguga

SEQ ID NO: 3005298 - RNA, 19 nt, Artificial Sequence
  Description of Artificial Sequence: Synthetic oligonucleotide
ucggguaguucuccaggua

SEQ ID NO: 3005299 - RNA, 19 nt, Artificial Sequence
  Description of Artificial Sequence: Synthetic oligonucleotide
gaugcccaagacgcugagc

SEQ ID NO: 3005300 - RNA, 19 nt, Artificial Sequence
  Description of Artificial Sequence: Synthetic oligonucleotide
ucggacgcagucagggcua

SEQ ID NO: 3005301 - RNA, 19 nt, Artificial Sequence
  Description of Artificial Sequence: Synthetic oligonucleotide
guaguggcgcaggaacugc

SEQ ID NO: 3005302 - RNA, 19 nt, Artificial Sequence
  Description of Artificial Sequence: Synthetic oligonucleotide
guucuccagguaguggcgc

SEQ ID NO: 3005303 - RNA, 19 nt, Artificial Sequence
  Description of Artificial Sequence: Synthetic oligonucleotide
acucgaugucgaaggcggc

SEQ ID NO: 3005304 - RNA, 19 nt, Artificial Sequence
  Description of Artificial Sequence: Synthetic oligonucleotide
gguaguucuccagguagug

SEQ ID NO: 3005305 - RNA, 19 nt, Artificial Sequence
  Description of Artificial Sequence: Synthetic oligonucleotide
ucagggcuauggugaacgu

SEQ ID NO: 3005306 - RNA, 19 nt, Artificial Sequence
  Description of Artificial Sequence: Synthetic oligonucleotide
aggccgccagcccgggacc

SEQ ID NO: 3005307 - RNA, 19 nt, Artificial Sequence
  Description of Artificial Sequence: Synthetic oligonucleotide
gcccaagacgcugagcggg

SEQ ID NO: 3005308 - RNA, 19 nt, Artificial Sequence
  Description of Artificial Sequence: Synthetic oligonucleotide
agucagggcuauggugaac

SEQ ID NO: 3005309 - RNA, 19 nt, Artificial Sequence
  Description of Artificial Sequence: Synthetic oligonucleotide
gagcggguggcggaggcgc

SEQ ID NO: 3005310 - RNA, 19 nt, Artificial Sequence
  Description of Artificial Sequence: Synthetic oligonucleotide
agcgccgccaggccgccag

SEQ ID NO: 3005311 - RNA, 19 nt, Artificial Sequence
  Description of Artificial Sequence: Synthetic oligonucleotide
cucgguugaugaacuuauc

SEQ ID NO: 3005312 - RNA, 19 nt, Artificial Sequence
  Description of Artificial Sequence: Synthetic oligonucleotide
ggcgccucguccuccagag

SEQ ID NO: 3005313 - RNA, 19 nt, Artificial Sequence
  Description of Artificial Sequence: Synthetic oligonucleotide
caggccgccagcccgggac

SEQ ID NO: 3005314 - RNA, 19 nt, Artificial Sequence
  Description of Artificial Sequence: Synthetic oligonucleotide
gguaguggcgcaggaacug

SEQ ID NO: 3005315 - RNA, 19 nt, Artificial Sequence
  Description of Artificial Sequence: Synthetic oligonucleotide
gaggguugaucaccucgga

SEQ ID NO: 3005316 - RNA, 19 nt, Artificial Sequence
  Description of Artificial Sequence: Synthetic oligonucleotide
ugagcggguggcggaggcg

SEQ ID NO: 3005317 - RNA, 19 nt, Artificial Sequence
  Description of Artificial Sequence: Synthetic oligonucleotide
ucgcaacccaguucuucaa

SEQ ID NO: 3005318 - RNA, 19 nt, Artificial Sequence
  Description of Artificial Sequence: Synthetic oligonucleotide
cuauggugaacgucaaaau

SEQ ID NO: 3005319 - RNA, 19 nt, Artificial Sequence
  Description of Artificial Sequence: Synthetic oligonucleotide
ggcucggcaggccuccacg

SEQ ID NO: 3005320 - RNA, 19 nt, Artificial Sequence
  Description of Artificial Sequence: Synthetic oligonucleotide
cacgaagcgccgccggcgc

SEQ ID NO: 3005321 - RNA, 19 nt, Artificial Sequence
  Description of Artificial Sequence: Synthetic oligonucleotide
ugagaggguugaucaccuc

SEQ ID NO: 3005322 - RNA, 19 nt, Artificial Sequence
  Description of Artificial Sequence: Synthetic oligonucleotide
gccaccuccgccauccggg

SEQ ID NO: 3005323 - RNA, 19 nt, Artificial Sequence
  Description of Artificial Sequence: Synthetic oligonucleotide
cagcuccuggauccggccc

SEQ ID NO: 3005324 - RNA, 19 nt, Artificial Sequence
  Description of Artificial Sequence: Synthetic oligonucleotide
ucguccuccagaggcucgc

SEQ ID NO: 3005325 - RNA, 19 nt, Artificial Sequence
  Description of Artificial Sequence: Synthetic oligonucleotide
acgcagucagggcuauggu

SEQ ID NO: 3005326 - RNA, 19 nt, Artificial Sequence
  Description of Artificial Sequence: Synthetic oligonucleotide
cuccagguaguggcgcagg

SEQ ID NO: 3005327 - RNA, 19 nt, Artificial Sequence
  Description of Artificial Sequence: Synthetic oligonucleotide
ggggcgaucggguaguucu

SEQ ID NO: 3005328 - RNA, 19 nt, Artificial Sequence
  Description of Artificial Sequence: Synthetic oligonucleotide
cggguaguucuccagguag

SEQ ID NO: 3005329 - RNA, 19 nt, Artificial Sequence
  Description of Artificial Sequence: Synthetic oligonucleotide
agguaguggcgcaggaacu

SEQ ID NO: 3005330 - RNA, 19 nt, Artificial Sequence
  Description of Artificial Sequence: Synthetic oligonucleotide
ccaguucuucaaugagagg

SEQ ID NO: 3005331 - RNA, 19 nt, Artificial Sequence
  Description of Artificial Sequence: Synthetic oligonucleotide
uuaucgcaacccaguucuu

SEQ ID NO: 3005332 - RNA, 19 nt, Artificial Sequence
  Description of Artificial Sequence: Synthetic oligonucleotide
guccuccagaggcucgccc

SEQ ID NO: 3005333 - RNA, 19 nt, Artificial Sequence
  Description of Artificial Sequence: Synthetic oligonucleotide
accuccgccauccgggcuu

SEQ ID NO: 3005334 - RNA, 19 nt, Artificial Sequence
  Description of Artificial Sequence: Synthetic oligonucleotide
aucgggcgccucguccucc

SEQ ID NO: 3005335 - RNA, 19 nt, Artificial Sequence
  Description of Artificial Sequence: Synthetic oligonucleotide
ccuggauccggcccggggc

SEQ ID NO: 3005336 - RNA, 19 nt, Artificial Sequence
  Description of Artificial Sequence: Synthetic oligonucleotide
gcgcagguacucgaugucg

SEQ ID NO: 3005337 - RNA, 19 nt, Artificial Sequence
  Description of Artificial Sequence: Synthetic oligonucleotide
ccugccaucgggcgccucg

SEQ ID NO: 3005338 - RNA, 19 nt, Artificial Sequence
  Description of Artificial Sequence: Synthetic oligonucleotide
cagggcuauggugaacguc

SEQ ID NO: 3005339 - RNA, 19 nt, Artificial Sequence
  Description of Artificial Sequence: Synthetic oligonucleotide
ggugaacgucaaaauguca

SEQ ID NO: 3005340 - RNA, 19 nt, Artificial Sequence
  Description of Artificial Sequence: Synthetic oligonucleotide
ucccgggcucggcaggccu

SEQ ID NO: 3005341 - RNA, 19 nt, Artificial Sequence
  Description of Artificial Sequence: Synthetic oligonucleotide
uccgccauccgggcuuccc

SEQ ID NO: 3005342 - RNA, 19 nt, Artificial Sequence
  Description of Artificial Sequence: Synthetic oligonucleotide
cucggacgcagucagggcu

SEQ ID NO: 3005343 - RNA, 19 nt, Artificial Sequence
  Description of Artificial Sequence: Synthetic oligonucleotide
agacgcugagcggguggcg

SEQ ID NO: 3005344 - RNA, 19 nt, Artificial Sequence
  Description of Artificial Sequence: Synthetic oligonucleotide
cgccucguccuccagaggc

SEQ ID NO: 3005345 - RNA, 19 nt, Artificial Sequence
  Description of Artificial Sequence: Synthetic oligonucleotide
gaggcucgcccagcagccg

SEQ ID NO: 3005346 - RNA, 19 nt, Artificial Sequence
  Description of Artificial Sequence: Synthetic oligonucleotide
gcgcagguagggcagcgcc

SEQ ID NO: 3005347 - RNA, 19 nt, Artificial Sequence
  Description of Artificial Sequence: Synthetic oligonucleotide
gggguugcgcagguacucg

SEQ ID NO: 3005348 - RNA, 19 nt, Artificial Sequence
  Description of Artificial Sequence: Synthetic oligonucleotide
acucucgguugaugaacuu

SEQ ID NO: 3005349 - RNA, 19 nt, Artificial Sequence
  Description of Artificial Sequence: Synthetic oligonucleotide
cacucucgguugaugaacu

SEQ ID NO: 3005350 - RNA, 19 nt, Artificial Sequence
  Description of Artificial Sequence: Synthetic oligonucleotide
ggaggcgcagguagggcag

SEQ ID NO: 3005351 - RNA, 19 nt, Artificial Sequence
  Description of Artificial Sequence: Synthetic oligonucleotide
cucucgguugaugaacuua

SEQ ID NO: 3005352 - RNA, 19 nt, Artificial Sequence
  Description of Artificial Sequence: Synthetic oligonucleotide
auccggcccggggcgaucg

SEQ ID NO: 3005353 - RNA, 19 nt, Artificial Sequence
  Description of Artificial Sequence: Synthetic oligonucleotide
gcagguagggcagcgccgc

SEQ ID NO: 3005354 - RNA, 19 nt, Artificial Sequence
  Description of Artificial Sequence: Synthetic oligonucleotide
gccaucgggcgccucgucc

SEQ ID NO: 3005355 - RNA, 19 nt, Artificial Sequence
  Description of Artificial Sequence: Synthetic oligonucleotide
caccucggacgcagucagg

SEQ ID NO: 3005356 - RNA, 19 nt, Artificial Sequence
  Description of Artificial Sequence: Synthetic oligonucleotide
acgcugagcggguggcgga

SEQ ID NO: 3005357 - RNA, 19 nt, Artificial Sequence
  Description of Artificial Sequence: Synthetic oligonucleotide
ggaacugcugguaauugau

SEQ ID NO: 3005358 - RNA, 19 nt, Artificial Sequence
  Description of Artificial Sequence: Synthetic oligonucleotide
ggcggaggcgcagguaggg

SEQ ID NO: 3005359 - RNA, 19 nt, Artificial Sequence
  Description of Artificial Sequence: Synthetic oligonucleotide
ggaccggggccugccaucg

SEQ ID NO: 3005360 - RNA, 19 nt, Artificial Sequence
  Description of Artificial Sequence: Synthetic oligonucleotide
aggcgcagguagggcagcg

SEQ ID NO: 3005361 - RNA, 19 nt, Artificial Sequence
  Description of Artificial Sequence: Synthetic oligonucleotide
ggcaggccuccacgaagcg

SEQ ID NO: 3005362 - RNA, 19 nt, Artificial Sequence
  Description of Artificial Sequence: Synthetic oligonucleotide
gaaggcggccucccgggcu

SEQ ID NO: 3005363 - RNA, 19 nt, Artificial Sequence
  Description of Artificial Sequence: Synthetic oligonucleotide
ucgggcgccucguccucca

SEQ ID NO: 3005364 - RNA, 19 nt, Artificial Sequence
  Description of Artificial Sequence: Synthetic oligonucleotide
cgcagucagggcuauggug

SEQ ID NO: 3005365 - RNA, 19 nt, Artificial Sequence
  Description of Artificial Sequence: Synthetic oligonucleotide
ggcgaucggguaguucucc

SEQ ID NO: 3005366 - RNA, 19 nt, Artificial Sequence
  Description of Artificial Sequence: Synthetic oligonucleotide
gaagcgccgccggcgcucc

SEQ ID NO: 3005367 - RNA, 19 nt, Artificial Sequence
  Description of Artificial Sequence: Synthetic oligonucleotide
gaccggggccugccaucgg

SEQ ID NO: 3005368 - RNA, 19 nt, Artificial Sequence
  Description of Artificial Sequence: Synthetic oligonucleotide
cucgcccagcagccgggcc

SEQ ID NO: 3005369 - RNA, 19 nt, Artificial Sequence
  Description of Artificial Sequence: Synthetic oligonucleotide
guugaucaccucggacgca

SEQ ID NO: 3005370 - RNA, 19 nt, Artificial Sequence
  Description of Artificial Sequence: Synthetic oligonucleotide
ccagcuccuggauccggcc

SEQ ID NO: 3005371 - RNA, 19 nt, Artificial Sequence
  Description of Artificial Sequence: Synthetic oligonucleotide
gaggcgcagguagggcagc

SEQ ID NO: 3005372 - RNA, 19 nt, Artificial Sequence
  Description of Artificial Sequence: Synthetic oligonucleotide
uccggcccggggcgaucgg

SEQ ID NO: 3005373 - RNA, 19 nt, Artificial Sequence
  Description of Artificial Sequence: Synthetic oligonucleotide
gggcagcgccgccaggccg

SEQ ID NO: 3005374 - RNA, 19 nt, Artificial Sequence
  Description of Artificial Sequence: Synthetic oligonucleotide
cagucagggcuauggugaa

SEQ ID NO: 3005375 - RNA, 19 nt, Artificial Sequence
  Description of Artificial Sequence: Synthetic oligonucleotide
gcugguaauugaugcccaa

SEQ ID NO: 3005376 - RNA, 19 nt, Artificial Sequence
  Description of Artificial Sequence: Synthetic oligonucleotide
acgaagcgccgccggcgcu

SEQ ID NO: 3005377 - RNA, 19 nt, Artificial Sequence
  Description of Artificial Sequence: Synthetic oligonucleotide
ugccaucgggcgccucguc

SEQ ID NO: 3005378 - RNA, 19 nt, Artificial Sequence
  Description of Artificial Sequence: Synthetic oligonucleotide
ggggccugccaucgggcgc

SEQ ID NO: 3005379 - RNA, 19 nt, Artificial Sequence
  Description of Artificial Sequence: Synthetic oligonucleotide
ccacgaagcgccgccggcg

SEQ ID NO: 3005380 - RNA, 19 nt, Artificial Sequence
  Description of Artificial Sequence: Synthetic oligonucleotide
ccucggacgcagucagggc

SEQ ID NO: 3005381 - RNA, 19 nt, Artificial Sequence
  Description of Artificial Sequence: Synthetic oligonucleotide
guucuucaaugagaggguu

SEQ ID NO: 3005382 - RNA, 19 nt, Artificial Sequence
  Description of Artificial Sequence: Synthetic oligonucleotide
ggguugcgcagguacucga

SEQ ID NO: 3005383 - RNA, 19 nt, Artificial Sequence
  Description of Artificial Sequence: Synthetic oligonucleotide
gggccugccaucgggcgcc

SEQ ID NO: 3005384 - RNA, 19 nt, Artificial Sequence
  Description of Artificial Sequence: Synthetic oligonucleotide
cgcagguagggcagcgccg

SEQ ID NO: 3005385 - RNA, 19 nt, Artificial Sequence
  Description of Artificial Sequence: Synthetic oligonucleotide
ccuccagaggcucgcccag

SEQ ID NO: 3005386 - RNA, 19 nt, Artificial Sequence
  Description of Artificial Sequence: Synthetic oligonucleotide
gcaggccuccacgaagcgc

SEQ ID NO: 3005387 - RNA, 19 nt, Artificial Sequence
  Description of Artificial Sequence: Synthetic oligonucleotide
cggcaggccuccacgaagc

SEQ ID NO: 3005388 - RNA, 19 nt, Artificial Sequence
  Description of Artificial Sequence: Synthetic oligonucleotide
caucgggcgccucguccuc

SEQ ID NO: 3005389 - RNA, 19 nt, Artificial Sequence
  Description of Artificial Sequence: Synthetic oligonucleotide
gcagguacucgaugucgaa

SEQ ID NO: 3005390 - RNA, 19 nt, Artificial Sequence
  Description of Artificial Sequence: Synthetic oligonucleotide
uggauccggcccggggcga

SEQ ID NO: 3005391 - RNA, 19 nt, Artificial Sequence
  Description of Artificial Sequence: Synthetic oligonucleotide
ccgccaggccgccagcccg

SEQ ID NO: 3005392 - RNA, 19 nt, Artificial Sequence
  Description of Artificial Sequence: Synthetic oligonucleotide
aggccuccacgaagcgccg

SEQ ID NO: 3005393 - RNA, 19 nt, Artificial Sequence
  Description of Artificial Sequence: Synthetic oligonucleotide
gcccggggcgaucggguag

SEQ ID NO: 3005394 - RNA, 19 nt, Artificial Sequence
  Description of Artificial Sequence: Synthetic oligonucleotide
cucggcaggccuccacgaa

SEQ ID NO: 3005395 - RNA, 19 nt, Artificial Sequence
  Description of Artificial Sequence: Synthetic oligonucleotide
ggcuauggugaacgucaaa

SEQ ID NO: 3005396 - RNA, 19 nt, Artificial Sequence
  Description of Artificial Sequence: Synthetic oligonucleotide
ccaccuccgccauccgggc

SEQ ID NO: 3005397 - RNA, 19 nt, Artificial Sequence
  Description of Artificial Sequence: Synthetic oligonucleotide
gcucggcaggccuccacga

SEQ ID NO: 3005398 - RNA, 19 nt, Artificial Sequence
  Description of Artificial Sequence: Synthetic oligonucleotide
ccagaggcucgcccagcag

SEQ ID NO: 3005399 - RNA, 19 nt, Artificial Sequence
  Description of Artificial Sequence: Synthetic oligonucleotide
gccucccgggcucggcagg

SEQ ID NO: 3005400 - RNA, 19 nt, Artificial Sequence
  Description of Artificial Sequence: Synthetic oligonucleotide
gccgccggcgcuccuccag

SEQ ID NO: 3005401 - RNA, 19 nt, Artificial Sequence
  Description of Artificial Sequence: Synthetic oligonucleotide
gggaccggggccugccauc

SEQ ID NO: 3005402 - RNA, 19 nt, Artificial Sequence
  Description of Artificial Sequence: Synthetic oligonucleotide
cuccuggauccggcccggg

SEQ ID NO: 3005403 - RNA, 19 nt, Artificial Sequence
  Description of Artificial Sequence: Synthetic oligonucleotide
gccagcccgggaccggggc

SEQ ID NO: 3005404 - RNA, 19 nt, Artificial Sequence
  Description of Artificial Sequence: Synthetic oligonucleotide
cgggccaccuccgccaucc

SEQ ID NO: 3005405 - RNA, 19 nt, Artificial Sequence
  Description of Artificial Sequence: Synthetic oligonucleotide
gcgcaggaacugcugguaa

SEQ ID NO: 3005406 - RNA, 19 nt, Artificial Sequence
  Description of Artificial Sequence: Synthetic oligonucleotide
ccggggccugccaucgggc

SEQ ID NO: 3005407 - RNA, 19 nt, Artificial Sequence
  Description of Artificial Sequence: Synthetic oligonucleotide
ccuccacgaagcgccgccg

SEQ ID NO: 3005408 - RNA, 19 nt, Artificial Sequence
  Description of Artificial Sequence: Synthetic oligonucleotide
ccagcccgggaccggggcc

SEQ ID NO: 3005409 - RNA, 19 nt, Artificial Sequence
  Description of Artificial Sequence: Synthetic oligonucleotide
ggcgcagguagggcagcgc

SEQ ID NO: 3005410 - RNA, 19 nt, Artificial Sequence
  Description of Artificial Sequence: Synthetic oligonucleotide
cucccgggcucggcaggcc

SEQ ID NO: 3005411 - RNA, 19 nt, Artificial Sequence
  Description of Artificial Sequence: Synthetic oligonucleotide
ggcgcaggaacugcuggua

SEQ ID NO: 3005412 - RNA, 19 nt, Artificial Sequence
  Description of Artificial Sequence: Synthetic oligonucleotide
gccgccaggccgccagccc

SEQ ID NO: 3005413 - RNA, 19 nt, Artificial Sequence
  Description of Artificial Sequence: Synthetic oligonucleotide
gauccggcccggggcgauc

SEQ ID NO: 3005414 - RNA, 19 nt, Artificial Sequence
  Description of Artificial Sequence: Synthetic oligonucleotide
gcgccucguccuccagagg

SEQ ID NO: 3005415 - RNA, 19 nt, Artificial Sequence
  Description of Artificial Sequence: Synthetic oligonucleotide
cggggccugccaucgggcg

SEQ ID NO: 3005416 - RNA, 19 nt, Artificial Sequence
  Description of Artificial Sequence: Synthetic oligonucleotide
aggcggccucccgggcucg

SEQ ID NO: 3005417 - RNA, 19 nt, Artificial Sequence
  Description of Artificial Sequence: Synthetic oligonucleotide
gcaggaacugcugguaauu

SEQ ID NO: 3005418 - RNA, 19 nt, Artificial Sequence
  Description of Artificial Sequence: Synthetic oligonucleotide
gcggaggcgcagguagggc

SEQ ID NO: 3005419 - RNA, 19 nt, Artificial Sequence
  Description of Artificial Sequence: Synthetic oligonucleotide
cggaggcgcagguagggca

SEQ ID NO: 3005420 - RNA, 19 nt, Artificial Sequence
  Description of Artificial Sequence: Synthetic oligonucleotide
gggcgccucguccuccaga

SEQ ID NO: 3005421 - RNA, 19 nt, Artificial Sequence
  Description of Artificial Sequence: Synthetic oligonucleotide
ggccgccagcccgggaccg

SEQ ID NO: 3005422 - RNA, 19 nt, Artificial Sequence
  Description of Artificial Sequence: Synthetic oligonucleotide
ccucguccuccagaggcuc

SEQ ID NO: 3005423 - RNA, 19 nt, Artificial Sequence
  Description of Artificial Sequence: Synthetic oligonucleotide
ccaagacgcugagcgggug

SEQ ID NO: 3005424 - RNA, 19 nt, Artificial Sequence
  Description of Artificial Sequence: Synthetic oligonucleotide
cuucaaugagaggguugau

SEQ ID NO: 3005425 - RNA, 19 nt, Artificial Sequence
  Description of Artificial Sequence: Synthetic oligonucleotide
agcggguggcggaggcgca

SEQ ID NO: 3005426 - RNA, 19 nt, Artificial Sequence
  Description of Artificial Sequence: Synthetic oligonucleotide
gggcucggcaggccuccac

SEQ ID NO: 3005427 - RNA, 19 nt, Artificial Sequence
  Description of Artificial Sequence: Synthetic oligonucleotide
gggcgaucggguaguucuc

SEQ ID NO: 3005428 - RNA, 19 nt, Artificial Sequence
  Description of Artificial Sequence: Synthetic oligonucleotide
gggcuauggugaacgucaa

SEQ ID NO: 3005429 - RNA, 19 nt, Artificial Sequence
  Description of Artificial Sequence: Synthetic oligonucleotide
ccaucgggcgccucguccu

SEQ ID NO: 3005430 - RNA, 19 nt, Artificial Sequence
  Description of Artificial Sequence: Synthetic oligonucleotide
ggccuccacgaagcgccgc

SEQ ID NO: 3005431 - RNA, 19 nt, Artificial Sequence
  Description of Artificial Sequence: Synthetic oligonucleotide
cgccaggccgccagcccgg

SEQ ID NO: 3005432 - RNA, 19 nt, Artificial Sequence
  Description of Artificial Sequence: Synthetic oligonucleotide
gcggguggcggaggcgcag

SEQ ID NO: 3005433 - RNA, 19 nt, Artificial Sequence
  Description of Artificial Sequence: Synthetic oligonucleotide
ccucccgggcucggcaggc

SEQ ID NO: 3005434 - RNA, 19 nt, Artificial Sequence
  Description of Artificial Sequence: Synthetic oligonucleotide
gguugcgcagguacucgau

SEQ ID NO: 3005435 - RNA, 19 nt, Artificial Sequence
  Description of Artificial Sequence: Synthetic oligonucleotide
ccagguaguggcgcaggaa

SEQ ID NO: 3005436 - RNA, 19 nt, Artificial Sequence
  Description of Artificial Sequence: Synthetic oligonucleotide
cgaaggcggccucccgggc

SEQ ID NO: 3005437 - RNA, 19 nt, Artificial Sequence
  Description of Artificial Sequence: Synthetic oligonucleotide
agcccgggaccggggccug

SEQ ID NO: 3005438 - RNA, 19 nt, Artificial Sequence
  Description of Artificial Sequence: Synthetic oligonucleotide
ggacgcagucagggcuaug

SEQ ID NO: 3005439 - RNA, 19 nt, Artificial Sequence
  Description of Artificial Sequence: Synthetic oligonucleotide
gccggcgcuccuccagcuc

SEQ ID NO: 3005440 - RNA, 19 nt, Artificial Sequence
  Description of Artificial Sequence: Synthetic oligonucleotide
ccgccagcccgggaccggg

SEQ ID NO: 3005441 - RNA, 19 nt, Artificial Sequence
  Description of Artificial Sequence: Synthetic oligonucleotide
cuccgccauccgggcuucc

SEQ ID NO: 3005442 - RNA, 19 nt, Artificial Sequence
  Description of Artificial Sequence: Synthetic oligonucleotide
gcucgcccagcagccgggc

SEQ ID NO: 3005443 - RNA, 19 nt, Artificial Sequence
  Description of Artificial Sequence: Synthetic oligonucleotide
ccggcccggggcgaucggg

SEQ ID NO: 3005444 - RNA, 19 nt, Artificial Sequence
  Description of Artificial Sequence: Synthetic oligonucleotide
gccaggccgccagcccggg

SEQ ID NO: 3005445 - RNA, 19 nt, Artificial Sequence
  Description of Artificial Sequence: Synthetic oligonucleotide
cugccaucgggcgccucgu

SEQ ID NO: 3005446 - RNA, 19 nt, Artificial Sequence
  Description of Artificial Sequence: Synthetic oligonucleotide
cccaagacgcugagcgggu

SEQ ID NO: 3005447 - RNA, 19 nt, Artificial Sequence
  Description of Artificial Sequence: Synthetic oligonucleotide
caccuccgccauccgggcu

SEQ ID NO: 3005448 - RNA, 19 nt, Artificial Sequence
  Description of Artificial Sequence: Synthetic oligonucleotide
cggguggcggaggcgcagg

SEQ ID NO: 3005449 - RNA, 19 nt, Artificial Sequence
  Description of Artificial Sequence: Synthetic oligonucleotide
ggcccggggcgaucgggua

SEQ ID NO: 3005450 - RNA, 19 nt, Artificial Sequence
  Description of Artificial Sequence: Synthetic oligonucleotide
cgaagcgccgccggcgcuc

SEQ ID NO: 3005451 - RNA, 19 nt, Artificial Sequence
  Description of Artificial Sequence: Synthetic oligonucleotide
gccucguccuccagaggcu

SEQ ID NO: 3005452 - RNA, 19 nt, Artificial Sequence
  Description of Artificial Sequence: Synthetic oligonucleotide
ggcggccucccgggcucgg

SEQ ID NO: 3005453 - RNA, 19 nt, Artificial Sequence
  Description of Artificial Sequence: Synthetic oligonucleotide
cgccagcccgggaccgggg

SEQ ID NO: 3005454 - RNA, 19 nt, Artificial Sequence
  Description of Artificial Sequence: Synthetic oligonucleotide
ggguggcggaggcgcaggu

SEQ ID NO: 3005455 - RNA, 19 nt, Artificial Sequence
  Description of Artificial Sequence: Synthetic oligonucleotide
gcggccucccgggcucggc

SEQ ID NO: 3005456 - RNA, 19 nt, Artificial Sequence
  Description of Artificial Sequence: Synthetic oligonucleotide
gcgccgccaggccgccagc

SEQ ID NO: 3005457 - RNA, 19 nt, Artificial Sequence
  Description of Artificial Sequence: Synthetic oligonucleotide
ccuccgccauccgggcuuc

SEQ ID NO: 3005458 - RNA, 19 nt, Artificial Sequence
  Description of Artificial Sequence: Synthetic oligonucleotide
cgcaacccaguucuucaau

SEQ ID NO: 3005459 - RNA, 19 nt, Artificial Sequence
  Description of Artificial Sequence: Synthetic oligonucleotide
cgccgccaggccgccagcc

SEQ ID NO: 3005460 - RNA, 19 nt, Artificial Sequence
  Description of Artificial Sequence: Synthetic oligonucleotide
cggggcgaucggguaguuc

SEQ ID NO: 3005461 - RNA, 19 nt, Artificial Sequence
  Description of Artificial Sequence: Synthetic oligonucleotide
cggccucccgggcucggca

SEQ ID NO: 3005462 - RNA, 19 nt, Artificial Sequence
  Description of Artificial Sequence: Synthetic oligonucleotide
ggauccggcccggggcgau

SEQ ID NO: 3005463 - RNA, 19 nt, Artificial Sequence
  Description of Artificial Sequence: Synthetic oligonucleotide
cccggggcgaucggguagu

SEQ ID NO: 3005464 - RNA, 19 nt, Artificial Sequence
  Description of Artificial Sequence: Synthetic oligonucleotide
ccaggccgccagcccggga

SEQ ID NO: 3005465 - RNA, 19 nt, Artificial Sequence
  Description of Artificial Sequence: Synthetic oligonucleotide
cagcgccgccaggccgcca

SEQ ID NO: 3005466 - RNA, 19 nt, Artificial Sequence
  Description of Artificial Sequence: Synthetic oligonucleotide
gccugccaucgggcgccuc

SEQ ID NO: 3005467 - RNA, 19 nt, Artificial Sequence
  Description of Artificial Sequence: Synthetic oligonucleotide
cggcccggggcgaucgggu

SEQ ID NO: 3005468 - RNA, 19 nt, Artificial Sequence
  Description of Artificial Sequence: Synthetic oligonucleotide
cgggaccggggccugccau

SEQ ID NO: 3005469 - RNA, 19 nt, Artificial Sequence
  Description of Artificial Sequence: Synthetic oligonucleotide
ggccugccaucgggcgccu

SEQ ID NO: 3005470 - RNA, 19 nt, Artificial Sequence
  Description of Artificial Sequence: Synthetic oligonucleotide
cggacgcagucagggcuau

SEQ ID NO: 3005471 - RNA, 19 nt, Artificial Sequence
  Description of Artificial Sequence: Synthetic oligonucleotide
ccggggcgaucggguaguu

SEQ ID NO: 3005472 - RNA, 19 nt, Artificial Sequence
  Description of Artificial Sequence: Synthetic oligonucleotide
aacaacacaggacagagaa

SEQ ID NO: 3005473 - RNA, 19 nt, Artificial Sequence
  Description of Artificial Sequence: Synthetic oligonucleotide
ucauccauuccucucaagg

SEQ ID NO: 3005474 - RNA, 19 nt, Artificial Sequence
  Description of Artificial Sequence: Synthetic oligonucleotide
uugugggccagacagaagg

SEQ ID NO: 3005475 - RNA, 19 nt, Artificial Sequence
  Description of Artificial Sequence: Synthetic oligonucleotide
aagguaggcagccaagguc

SEQ ID NO: 3005476 - RNA, 19 nt, Artificial Sequence
  Description of Artificial Sequence: Synthetic oligonucleotide
cacaggacagagaagaccg

SEQ ID NO: 3005477 - RNA, 19 nt, Artificial Sequence
  Description of Artificial Sequence: Synthetic oligonucleotide
auccauuccucucaagggc

SEQ ID NO: 3005478 - RNA, 19 nt, Artificial Sequence
  Description of Artificial Sequence: Synthetic oligonucleotide
agagaagaccgccaggccg

SEQ ID NO: 3005479 - RNA, 19 nt, Artificial Sequence
  Description of Artificial Sequence: Synthetic oligonucleotide
aagugcacaggcccagacc

SEQ ID NO: 3005480 - RNA, 19 nt, Artificial Sequence
  Description of Artificial Sequence: Synthetic oligonucleotide
agacagaaggcagcgaugc

SEQ ID NO: 3005481 - RNA, 19 nt, Artificial Sequence
  Description of Artificial Sequence: Synthetic oligonucleotide
uaaucugagucacugucac

SEQ ID NO: 3005482 - RNA, 19 nt, Artificial Sequence
  Description of Artificial Sequence: Synthetic oligonucleotide
ugucacuggacgaugugcc

SEQ ID NO: 3005483 - RNA, 19 nt, Artificial Sequence
  Description of Artificial Sequence: Synthetic oligonucleotide
cauccauuccucucaaggg

SEQ ID NO: 3005484 - RNA, 19 nt, Artificial Sequence
  Description of Artificial Sequence: Synthetic oligonucleotide
agggcagcggcguaagugc

SEQ ID NO: 3005485 - RNA, 19 nt, Artificial Sequence
  Description of Artificial Sequence: Synthetic oligonucleotide
aaggcagcgaugcccacag

SEQ ID NO: 3005486 - RNA, 19 nt, Artificial Sequence
  Description of Artificial Sequence: Synthetic oligonucleotide
ggucuugugggccagacag

SEQ ID NO: 3005487 - RNA, 19 nt, Artificial Sequence
  Description of Artificial Sequence: Synthetic oligonucleotide
cucucaagggcucacuggg

SEQ ID NO: 3005488 - RNA, 19 nt, Artificial Sequence
  Description of Artificial Sequence: Synthetic oligonucleotide
agccuuguuggucuugugg

SEQ ID NO: 3005489 - RNA, 19 nt, Artificial Sequence
  Description of Artificial Sequence: Synthetic oligonucleotide
uuggcccaagccuuguugg

SEQ ID NO: 3005490 - RNA, 19 nt, Artificial Sequence
  Description of Artificial Sequence: Synthetic oligonucleotide
agaucauccauuccucuca

SEQ ID NO: 3005491 - RNA, 19 nt, Artificial Sequence
  Description of Artificial Sequence: Synthetic oligonucleotide
aagaccgccaggccgaggu

SEQ ID NO: 3005492 - RNA, 19 nt, Artificial Sequence
  Description of Artificial Sequence: Synthetic oligonucleotide
ucuuggggcagaagaggcg

SEQ ID NO: 3005493 - RNA, 19 nt, Artificial Sequence
  Description of Artificial Sequence: Synthetic oligonucleotide
uggucuuggggcagaagag

SEQ ID NO: 3005494 - RNA, 19 nt, Artificial Sequence
  Description of Artificial Sequence: Synthetic oligonucleotide
agacccacggccaggaccc

SEQ ID NO: 3005495 - RNA, 19 nt, Artificial Sequence
  Description of Artificial Sequence: Synthetic oligonucleotide
ugggccagacagaaggcag

SEQ ID NO: 3005496 - RNA, 19 nt, Artificial Sequence
  Description of Artificial Sequence: Synthetic oligonucleotide
uccauuccucucaagggcu

SEQ ID NO: 3005497 - RNA, 19 nt, Artificial Sequence
  Description of Artificial Sequence: Synthetic oligonucleotide
caacacaggacagagaaga

SEQ ID NO: 3005498 - RNA, 19 nt, Artificial Sequence
  Description of Artificial Sequence: Synthetic oligonucleotide
gacagagaagaccgccagg

SEQ ID NO: 3005499 - RNA, 19 nt, Artificial Sequence
  Description of Artificial Sequence: Synthetic oligonucleotide
agcaggaaggcacggcggg

SEQ ID NO: 3005500 - RNA, 19 nt, Artificial Sequence
  Description of Artificial Sequence: Synthetic oligonucleotide
gucguaaucugagucacug

SEQ ID NO: 3005501 - RNA, 19 nt, Artificial Sequence
  Description of Artificial Sequence: Synthetic oligonucleotide
uggacgaugugcccucgag

SEQ ID NO: 3005502 - RNA, 19 nt, Artificial Sequence
  Description of Artificial Sequence: Synthetic oligonucleotide
ugugcccucgaggucaggg

SEQ ID NO: 3005503 - RNA, 19 nt, Artificial Sequence
  Description of Artificial Sequence: Synthetic oligonucleotide
cuuguuggucuugugggcc

SEQ ID NO: 3005504 - RNA, 19 nt, Artificial Sequence
  Description of Artificial Sequence: Synthetic oligonucleotide
gccuuguuggucuuguggg

SEQ ID NO: 3005505 - RNA, 19 nt, Artificial Sequence
  Description of Artificial Sequence: Synthetic oligonucleotide
guggucuuggggcagaaga

SEQ ID NO: 3005506 - RNA, 19 nt, Artificial Sequence
  Description of Artificial Sequence: Synthetic oligonucleotide
uccucucaagggcucacug

SEQ ID NO: 3005507 - RNA, 19 nt, Artificial Sequence
  Description of Artificial Sequence: Synthetic oligonucleotide
aaucugagucacugucacu

SEQ ID NO: 3005508 - RNA, 19 nt, Artificial Sequence
  Description of Artificial Sequence: Synthetic oligonucleotide
ggcguaagugcacaggccc

SEQ ID NO: 3005509 - RNA, 19 nt, Artificial Sequence
  Description of Artificial Sequence: Synthetic oligonucleotide
ugugggccagacagaaggc

SEQ ID NO: 3005510 - RNA, 19 nt, Artificial Sequence
  Description of Artificial Sequence: Synthetic oligonucleotide
ucuugugggccagacagaa

SEQ ID NO: 3005511 - RNA, 19 nt, Artificial Sequence
  Description of Artificial Sequence: Synthetic oligonucleotide
agggcaacuagggcggggc

SEQ ID NO: 3005512 - RNA, 19 nt, Artificial Sequence
  Description of Artificial Sequence: Synthetic oligonucleotide
gacgaugugcccucgaggu

SEQ ID NO: 3005513 - RNA, 19 nt, Artificial Sequence
  Description of Artificial Sequence: Synthetic oligonucleotide
cuuggcccaagccuuguug

SEQ ID NO: 3005514 - RNA, 19 nt, Artificial Sequence
  Description of Artificial Sequence: Synthetic oligonucleotide
ucucaagggcucacugggc

SEQ ID NO: 3005515 - RNA, 19 nt, Artificial Sequence
  Description of Artificial Sequence: Synthetic oligonucleotide
agguaggcagccaagguca

SEQ ID NO: 3005516 - RNA, 19 nt, Artificial Sequence
  Description of Artificial Sequence: Synthetic oligonucleotide
agaggcgagaggcgaccgc

SEQ ID NO: 3005517 - RNA, 19 nt, Artificial Sequence
  Description of Artificial Sequence: Synthetic oligonucleotide
cagacccacggccaggacc

SEQ ID NO: 3005518 - RNA, 19 nt, Artificial Sequence
  Description of Artificial Sequence: Synthetic oligonucleotide
uagggcggggcucgggagg

SEQ ID NO: 3005519 - RNA, 19 nt, Artificial Sequence
  Description of Artificial Sequence: Synthetic oligonucleotide
ccggagggcaacuagggcg

SEQ ID NO: 3005520 - RNA, 19 nt, Artificial Sequence
  Description of Artificial Sequence: Synthetic oligonucleotide
cugucacuggacgaugugc

SEQ ID NO: 3005521 - RNA, 19 nt, Artificial Sequence
  Description of Artificial Sequence: Synthetic oligonucleotide
agucacugucacuggacga

SEQ ID NO: 3005522 - RNA, 19 nt, Artificial Sequence
  Description of Artificial Sequence: Synthetic oligonucleotide
aagaggcgagaggcgaccg

SEQ ID NO: 3005523 - RNA, 19 nt, Artificial Sequence
  Description of Artificial Sequence: Synthetic oligonucleotide
ugggccucuggccucuuca

SEQ ID NO: 3005524 - RNA, 19 nt, Artificial Sequence
  Description of Artificial Sequence: Synthetic oligonucleotide
uuguuggucuugugggcca

SEQ ID NO: 3005525 - RNA, 19 nt, Artificial Sequence
  Description of Artificial Sequence: Synthetic oligonucleotide
caggacagagaagaccgcc

SEQ ID NO: 3005526 - RNA, 19 nt, Artificial Sequence
  Description of Artificial Sequence: Synthetic oligonucleotide
ggcagcgaugcccacaggc

SEQ ID NO: 3005527 - RNA, 19 nt, Artificial Sequence
  Description of Artificial Sequence: Synthetic oligonucleotide
ucguaaucugagucacugu

SEQ ID NO: 3005528 - RNA, 19 nt, Artificial Sequence
  Description of Artificial Sequence: Synthetic oligonucleotide
acugucacuggacgaugug

SEQ ID NO: 3005529 - RNA, 19 nt, Artificial Sequence
  Description of Artificial Sequence: Synthetic oligonucleotide
gaagaggcgagaggcgacc

SEQ ID NO: 3005530 - RNA, 19 nt, Artificial Sequence
  Description of Artificial Sequence: Synthetic oligonucleotide
guaaucugagucacuguca

SEQ ID NO: 3005531 - RNA, 19 nt, Artificial Sequence
  Description of Artificial Sequence: Synthetic oligonucleotide
caggcccagacccacggcc

SEQ ID NO: 3005532 - RNA, 19 nt, Artificial Sequence
  Description of Artificial Sequence: Synthetic oligonucleotide
gucuuggggcagaagaggc

SEQ ID NO: 3005533 - RNA, 19 nt, Artificial Sequence
  Description of Artificial Sequence: Synthetic oligonucleotide
ugcccucgaggucaggggu

SEQ ID NO: 3005534 - RNA, 19 nt, Artificial Sequence
  Description of Artificial Sequence: Synthetic oligonucleotide
ucacuggacgaugugcccu

SEQ ID NO: 3005535 - RNA, 19 nt, Artificial Sequence
  Description of Artificial Sequence: Synthetic oligonucleotide
agccaaggucaccagggca

SEQ ID NO: 3005536 - RNA, 19 nt, Artificial Sequence
  Description of Artificial Sequence: Synthetic oligonucleotide
cacaggcccagacccacgg

SEQ ID NO: 3005537 - RNA, 19 nt, Artificial Sequence
  Description of Artificial Sequence: Synthetic oligonucleotide
gcagccaaggucaccaggg

SEQ ID NO: 3005538 - RNA, 19 nt, Artificial Sequence
  Description of Artificial Sequence: Synthetic oligonucleotide
cagcaggaaggcacggcgg

SEQ ID NO: 3005539 - RNA, 19 nt, Artificial Sequence
  Description of Artificial Sequence: Synthetic oligonucleotide
ggacagagaagaccgccag

SEQ ID NO: 3005540 - RNA, 19 nt, Artificial Sequence
  Description of Artificial Sequence: Synthetic oligonucleotide
acaggcccagacccacggc

SEQ ID NO: 3005541 - RNA, 19 nt, Artificial Sequence
  Description of Artificial Sequence: Synthetic oligonucleotide
acgaugugcccucgagguc

SEQ ID NO: 3005542 - RNA, 19 nt, Artificial Sequence
  Description of Artificial Sequence: Synthetic oligonucleotide
aggaaggcacggcgggacg

SEQ ID NO: 3005543 - RNA, 19 nt, Artificial Sequence
  Description of Artificial Sequence: Synthetic oligonucleotide
gccgagguggucuuggggc

SEQ ID NO: 3005544 - RNA, 19 nt, Artificial Sequence
  Description of Artificial Sequence: Synthetic oligonucleotide
ggacgaugugcccucgagg

SEQ ID NO: 3005545 - RNA, 19 nt, Artificial Sequence
  Description of Artificial Sequence: Synthetic oligonucleotide
ggucuuggggcagaagagg

SEQ ID NO: 3005546 - RNA, 19 nt, Artificial Sequence
  Description of Artificial Sequence: Synthetic oligonucleotide
gagaagaccgccaggccga

SEQ ID NO: 3005547 - RNA, 19 nt, Artificial Sequence
  Description of Artificial Sequence: Synthetic oligonucleotide
gaggcgagaggcgaccgcc

SEQ ID NO: 3005548 - RNA, 19 nt, Artificial Sequence
  Description of Artificial Sequence: Synthetic oligonucleotide
acaggacagagaagaccgc

SEQ ID NO: 3005549 - RNA, 19 nt, Artificial Sequence
  Description of Artificial Sequence: Synthetic oligonucleotide
uuggggcagaagaggcgag

SEQ ID NO: 3005550 - RNA, 19 nt, Artificial Sequence
  Description of Artificial Sequence: Synthetic oligonucleotide
aucauccauuccucucaag

SEQ ID NO: 3005551 - RNA, 19 nt, Artificial Sequence
  Description of Artificial Sequence: Synthetic oligonucleotide
auuccucucaagggcucac

SEQ ID NO: 3005552 - RNA, 19 nt, Artificial Sequence
  Description of Artificial Sequence: Synthetic oligonucleotide
aagccuuguuggucuugug

SEQ ID NO: 3005553 - RNA, 19 nt, Artificial Sequence
  Description of Artificial Sequence: Synthetic oligonucleotide
gaccgccaggccgaggugg

SEQ ID NO: 3005554 - RNA, 19 nt, Artificial Sequence
  Description of Artificial Sequence: Synthetic oligonucleotide
acuagggcggggcucggga

SEQ ID NO: 3005555 - RNA, 19 nt, Artificial Sequence
  Description of Artificial Sequence: Synthetic oligonucleotide
gucacuggacgaugugccc

SEQ ID NO: 3005556 - RNA, 19 nt, Artificial Sequence
  Description of Artificial Sequence: Synthetic oligonucleotide
cagaaggcagcgaugccca

SEQ ID NO: 3005557 - RNA, 19 nt, Artificial Sequence
  Description of Artificial Sequence: Synthetic oligonucleotide
ccagcaggaaggcacggcg

SEQ ID NO: 3005558 - RNA, 19 nt, Artificial Sequence
  Description of Artificial Sequence: Synthetic oligonucleotide
gccucuggccucuucacag

SEQ ID NO: 3005559 - RNA, 19 nt, Artificial Sequence
  Description of Artificial Sequence: Synthetic oligonucleotide
agcggcguaagugcacagg

SEQ ID NO: 3005560 - RNA, 19 nt, Artificial Sequence
  Description of Artificial Sequence: Synthetic oligonucleotide
acaacacaggacagagaag

SEQ ID NO: 3005561 - RNA, 19 nt, Artificial Sequence
  Description of Artificial Sequence: Synthetic oligonucleotide
uggccucuucacagugggg

SEQ ID NO: 3005562 - RNA, 19 nt, Artificial Sequence
  Description of Artificial Sequence: Synthetic oligonucleotide
ucacugucacuggacgaug

SEQ ID NO: 3005563 - RNA, 19 nt, Artificial Sequence
  Description of Artificial Sequence: Synthetic oligonucleotide
gugcccucgaggucagggg

SEQ ID NO: 3005564 - RNA, 19 nt, Artificial Sequence
  Description of Artificial Sequence: Synthetic oligonucleotide
uggucuugugggccagaca

SEQ ID NO: 3005565 - RNA, 19 nt, Artificial Sequence
  Description of Artificial Sequence: Synthetic oligonucleotide
cuugugggccagacagaag

SEQ ID NO: 3005566 - RNA, 19 nt, Artificial Sequence
  Description of Artificial Sequence: Synthetic oligonucleotide
cguaaucugagucacuguc

SEQ ID NO: 3005567 - RNA, 19 nt, Artificial Sequence
  Description of Artificial Sequence: Synthetic oligonucleotide
aaggcacggcgggacgugg

SEQ ID NO: 3005568 - RNA, 19 nt, Artificial Sequence
  Description of Artificial Sequence: Synthetic oligonucleotide
gaucauccauuccucucaa

SEQ ID NO: 3005569 - RNA, 19 nt, Artificial Sequence
  Description of Artificial Sequence: Synthetic oligonucleotide
ucgggaggcaagguaggca

SEQ ID NO: 3005570 - RNA, 19 nt, Artificial Sequence
  Description of Artificial Sequence: Synthetic oligonucleotide
gccaaggucaccagggcag

SEQ ID NO: 3005571 - RNA, 19 nt, Artificial Sequence
  Description of Artificial Sequence: Synthetic oligonucleotide
uguuggucuugugggccag

SEQ ID NO: 3005572 - RNA, 19 nt, Artificial Sequence
  Description of Artificial Sequence: Synthetic oligonucleotide
cuuggggcagaagaggcga

SEQ ID NO: 3005573 - RNA, 19 nt, Artificial Sequence
  Description of Artificial Sequence: Synthetic oligonucleotide
gcaacuagggcggggcucg

SEQ ID NO: 3005574 - RNA, 19 nt, Artificial Sequence
  Description of Artificial Sequence: Synthetic oligonucleotide
gcggcguaagugcacaggc

SEQ ID NO: 3005575 - RNA, 19 nt, Artificial Sequence
  Description of Artificial Sequence: Synthetic oligonucleotide
ucgaggucaggggucucag

SEQ ID NO: 3005576 - RNA, 19 nt, Artificial Sequence
  Description of Artificial Sequence: Synthetic oligonucleotide
cucuggccucuucacagug

SEQ ID NO: 3005577 - RNA, 19 nt, Artificial Sequence
  Description of Artificial Sequence: Synthetic oligonucleotide
cagggcagcggcguaagug

SEQ ID NO: 3005578 - RNA, 19 nt, Artificial Sequence
  Description of Artificial Sequence: Synthetic oligonucleotide
aacuagggcggggcucggg

SEQ ID NO: 3005579 - RNA, 19 nt, Artificial Sequence
  Description of Artificial Sequence: Synthetic oligonucleotide
ccucucaagggcucacugg

SEQ ID NO: 3005580 - RNA, 19 nt, Artificial Sequence
  Description of Artificial Sequence: Synthetic oligonucleotide
ggcagccaaggucaccagg

SEQ ID NO: 3005581 - RNA, 19 nt, Artificial Sequence
  Description of Artificial Sequence: Synthetic oligonucleotide
uuggucuugugggccagac

SEQ ID NO: 3005582 - RNA, 19 nt, Artificial Sequence
  Description of Artificial Sequence: Synthetic oligonucleotide
ggcucgggaggcaagguag

SEQ ID NO: 3005583 - RNA, 19 nt, Artificial Sequence
  Description of Artificial Sequence: Synthetic oligonucleotide
aggacagagaagaccgcca

SEQ ID NO: 3005584 - RNA, 19 nt, Artificial Sequence
  Description of Artificial Sequence: Synthetic oligonucleotide
cuagggcggggcucgggag

SEQ ID NO: 3005585 - RNA, 19 nt, Artificial Sequence
  Description of Artificial Sequence: Synthetic oligonucleotide
ccuuguuggucuugugggc

SEQ ID NO: 3005586 - RNA, 19 nt, Artificial Sequence
  Description of Artificial Sequence: Synthetic oligonucleotide
ggaggcaagguaggcagcc

SEQ ID NO: 3005587 - RNA, 19 nt, Artificial Sequence
  Description of Artificial Sequence: Synthetic oligonucleotide
agggcggggcucgggaggc

SEQ ID NO: 3005588 - RNA, 19 nt, Artificial Sequence
  Description of Artificial Sequence: Synthetic oligonucleotide
gaaggcagcgaugcccaca

SEQ ID NO: 3005589 - RNA, 19 nt, Artificial Sequence
  Description of Artificial Sequence: Synthetic oligonucleotide
uggcccaagccuuguuggu

SEQ ID NO: 3005590 - RNA, 19 nt, Artificial Sequence
  Description of Artificial Sequence: Synthetic oligonucleotide
cugagucacugucacugga

SEQ ID NO: 3005591 - RNA, 19 nt, Artificial Sequence
  Description of Artificial Sequence: Synthetic oligonucleotide
cacuggacgaugugcccuc

SEQ ID NO: 3005592 - RNA, 19 nt, Artificial Sequence
  Description of Artificial Sequence: Synthetic oligonucleotide
cacggcgggacguggcccc

SEQ ID NO: 3005593 - RNA, 19 nt, Artificial Sequence
  Description of Artificial Sequence: Synthetic oligonucleotide
gagggcaacuagggcgggg

SEQ ID NO: 3005594 - RNA, 19 nt, Artificial Sequence
  Description of Artificial Sequence: Synthetic oligonucleotide
ucaggggucucaggcuccc

SEQ ID NO: 3005595 - RNA, 19 nt, Artificial Sequence
  Description of Artificial Sequence: Synthetic oligonucleotide
ggccagacagaaggcagcg

SEQ ID NO: 3005596 - RNA, 19 nt, Artificial Sequence
  Description of Artificial Sequence: Synthetic oligonucleotide
caggccgagguggucuugg

SEQ ID NO: 3005597 - RNA, 19 nt, Artificial Sequence
  Description of Artificial Sequence: Synthetic oligonucleotide
gaugugcccucgaggucag

SEQ ID NO: 3005598 - RNA, 19 nt, Artificial Sequence
  Description of Artificial Sequence: Synthetic oligonucleotide
caggaaggcacggcgggac

SEQ ID NO: 3005599 - RNA, 19 nt, Artificial Sequence
  Description of Artificial Sequence: Synthetic oligonucleotide
ggccccugccccuuggaag

SEQ ID NO: 3005600 - RNA, 19 nt, Artificial Sequence
  Description of Artificial Sequence: Synthetic oligonucleotide
gcagaagaggcgagaggcg

SEQ ID NO: 3005601 - RNA, 19 nt, Artificial Sequence
  Description of Artificial Sequence: Synthetic oligonucleotide
gaaggcacggcgggacgug

SEQ ID NO: 3005602 - RNA, 19 nt, Artificial Sequence
  Description of Artificial Sequence: Synthetic oligonucleotide
aggccgagguggucuuggg

SEQ ID NO: 3005603 - RNA, 19 nt, Artificial Sequence
  Description of Artificial Sequence: Synthetic oligonucleotide
gggacguggccccugcccc

SEQ ID NO: 3005604 - RNA, 19 nt, Artificial Sequence
  Description of Artificial Sequence: Synthetic oligonucleotide
cagcgaugcccacaggcca

SEQ ID NO: 3005605 - RNA, 19 nt, Artificial Sequence
  Description of Artificial Sequence: Synthetic oligonucleotide
acuggacgaugugcccucg

SEQ ID NO: 3005606 - RNA, 19 nt, Artificial Sequence
  Description of Artificial Sequence: Synthetic oligonucleotide
aggcgagaggcgaccgccc

SEQ ID NO: 3005607 - RNA, 19 nt, Artificial Sequence
  Description of Artificial Sequence: Synthetic oligonucleotide
ggccgagguggucuugggg

SEQ ID NO: 3005608 - RNA, 19 nt, Artificial Sequence
  Description of Artificial Sequence: Synthetic oligonucleotide
gcagcgaugcccacaggcc

SEQ ID NO: 3005609 - RNA, 19 nt, Artificial Sequence
  Description of Artificial Sequence: Synthetic oligonucleotide
uuccucucaagggcucacu

SEQ ID NO: 3005610 - RNA, 19 nt, Artificial Sequence
  Description of Artificial Sequence: Synthetic oligonucleotide
cggagggcaacuagggcgg

SEQ ID NO: 3005611 - RNA, 19 nt, Artificial Sequence
  Description of Artificial Sequence: Synthetic oligonucleotide
ggccggagggcaacuaggg

SEQ ID NO: 3005612 - RNA, 19 nt, Artificial Sequence
  Description of Artificial Sequence: Synthetic oligonucleotide
aggcagccaaggucaccag

SEQ ID NO: 3005613 - RNA, 19 nt, Artificial Sequence
  Description of Artificial Sequence: Synthetic oligonucleotide
guaggcagccaaggucacc

SEQ ID NO: 3005614 - RNA, 19 nt, Artificial Sequence
  Description of Artificial Sequence: Synthetic oligonucleotide
ggcaagguaggcagccaag

SEQ ID NO: 3005615 - RNA, 19 nt, Artificial Sequence
  Description of Artificial Sequence: Synthetic oligonucleotide
caagggcucacugggccuc

SEQ ID NO: 3005616 - RNA, 19 nt, Artificial Sequence
  Description of Artificial Sequence: Synthetic oligonucleotide
accagggcagcggcguaag

SEQ ID NO: 3005617 - RNA, 19 nt, Artificial Sequence
  Description of Artificial Sequence: Synthetic oligonucleotide
uggccccugccccuuggaa

SEQ ID NO: 3005618 - RNA, 19 nt, Artificial Sequence
  Description of Artificial Sequence: Synthetic oligonucleotide
gaagaccgccaggccgagg

SEQ ID NO: 3005619 - RNA, 19 nt, Artificial Sequence
  Description of Artificial Sequence: Synthetic oligonucleotide
gugggccagacagaaggca

SEQ ID NO: 3005620 - RNA, 19 nt, Artificial Sequence
  Description of Artificial Sequence: Synthetic oligonucleotide
aggcacggcgggacguggc

SEQ ID NO: 3005621 - RNA, 19 nt, Artificial Sequence
  Description of Artificial Sequence: Synthetic oligonucleotide
ggggccggagggcaacuag

SEQ ID NO: 3005622 - RNA, 19 nt, Artificial Sequence
  Description of Artificial Sequence: Synthetic oligonucleotide
agaagaccgccaggccgag

SEQ ID NO: 3005623 - RNA, 19 nt, Artificial Sequence
  Description of Artificial Sequence: Synthetic oligonucleotide
gucacugucacuggacgau

SEQ ID NO: 3005624 - RNA, 19 nt, Artificial Sequence
  Description of Artificial Sequence: Synthetic oligonucleotide
gggccggagggcaacuagg

SEQ ID NO: 3005625 - RNA, 19 nt, Artificial Sequence
  Description of Artificial Sequence: Synthetic oligonucleotide
agaccgccaggccgaggug

SEQ ID NO: 3005626 - RNA, 19 nt, Artificial Sequence
  Description of Artificial Sequence: Synthetic oligonucleotide
gaggcaagguaggcagcca

SEQ ID NO: 3005627 - RNA, 19 nt, Artificial Sequence
  Description of Artificial Sequence: Synthetic oligonucleotide
cccgucguaaucugaguca

SEQ ID NO: 3005628 - RNA, 19 nt, Artificial Sequence
  Description of Artificial Sequence: Synthetic oligonucleotide
aagggcucacugggccucu

SEQ ID NO: 3005629 - RNA, 19 nt, Artificial Sequence
  Description of Artificial Sequence: Synthetic oligonucleotide
ccccgucguaaucugaguc

SEQ ID NO: 3005630 - RNA, 19 nt, Artificial Sequence
  Description of Artificial Sequence: Synthetic oligonucleotide
guaagugcacaggcccaga

SEQ ID NO: 3005631 - RNA, 19 nt, Artificial Sequence
  Description of Artificial Sequence: Synthetic oligonucleotide
cagcggcguaagugcacag

SEQ ID NO: 3005632 - RNA, 19 nt, Artificial Sequence
  Description of Artificial Sequence: Synthetic oligonucleotide
ggcgagaggcgaccgcccc

SEQ ID NO: 3005633 - RNA, 19 nt, Artificial Sequence
  Description of Artificial Sequence: Synthetic oligonucleotide
ucaccagggcagcggcgua

SEQ ID NO: 3005634 - RNA, 19 nt, Artificial Sequence
  Description of Artificial Sequence: Synthetic oligonucleotide
ccgucguaaucugagucac

SEQ ID NO: 3005635 - RNA, 19 nt, Artificial Sequence
  Description of Artificial Sequence: Synthetic oligonucleotide
gcucgggaggcaagguagg

SEQ ID NO: 3005636 - RNA, 19 nt, Artificial Sequence
  Description of Artificial Sequence: Synthetic oligonucleotide
gggccagacagaaggcagc

SEQ ID NO: 3005637 - RNA, 19 nt, Artificial Sequence
  Description of Artificial Sequence: Synthetic oligonucleotide
cugccccuuggaagucccc

SEQ ID NO: 3005638 - RNA, 19 nt, Artificial Sequence
  Description of Artificial Sequence: Synthetic oligonucleotide
gggcucacugggccucugg

SEQ ID NO: 3005639 - RNA, 19 nt, Artificial Sequence
  Description of Artificial Sequence: Synthetic oligonucleotide
ggcacggcgggacguggcc

SEQ ID NO: 3005640 - RNA, 19 nt, Artificial Sequence
  Description of Artificial Sequence: Synthetic oligonucleotide
agcgaugcccacaggccaa

SEQ ID NO: 3005641 - RNA, 19 nt, Artificial Sequence
  Description of Artificial Sequence: Synthetic oligonucleotide
gccggagggcaacuagggc

SEQ ID NO: 3005642 - RNA, 19 nt, Artificial Sequence
  Description of Artificial Sequence: Synthetic oligonucleotide
ccugccccuuggaaguccc

SEQ ID NO: 3005643 - RNA, 19 nt, Artificial Sequence
  Description of Artificial Sequence: Synthetic oligonucleotide
cucgaggucaggggucuca

SEQ ID NO: 3005644 - RNA, 19 nt, Artificial Sequence
  Description of Artificial Sequence: Synthetic oligonucleotide
gucuugugggccagacaga

SEQ ID NO: 3005645 - RNA, 19 nt, Artificial Sequence
  Description of Artificial Sequence: Synthetic oligonucleotide
cacugucacuggacgaugu

SEQ ID NO: 3005646 - RNA, 19 nt, Artificial Sequence
  Description of Artificial Sequence: Synthetic oligonucleotide
aggcccagacccacggcca

SEQ ID NO: 3005647 - RNA, 19 nt, Artificial Sequence
  Description of Artificial Sequence: Synthetic oligonucleotide
gagguggucuuggggcaga

SEQ ID NO: 3005648 - RNA, 19 nt, Artificial Sequence
  Description of Artificial Sequence: Synthetic oligonucleotide
ggucaccagggcagcggcg

SEQ ID NO: 3005649 - RNA, 19 nt, Artificial Sequence
  Description of Artificial Sequence: Synthetic oligonucleotide
gucaccagggcagcggcgu

SEQ ID NO: 3005650 - RNA, 19 nt, Artificial Sequence
  Description of Artificial Sequence: Synthetic oligonucleotide
caagccuuguuggucuugu

SEQ ID NO: 3005651 - RNA, 19 nt, Artificial Sequence
  Description of Artificial Sequence: Synthetic oligonucleotide
cguaagugcacaggcccag

SEQ ID NO: 3005652 - RNA, 19 nt, Artificial Sequence
  Description of Artificial Sequence: Synthetic oligonucleotide
ggcaacuagggcggggcuc

SEQ ID NO: 3005653 - RNA, 19 nt, Artificial Sequence
  Description of Artificial Sequence: Synthetic oligonucleotide
ggcccaagccuuguugguc

SEQ ID NO: 3005654 - RNA, 19 nt, Artificial Sequence
  Description of Artificial Sequence: Synthetic oligonucleotide
caacuagggcggggcucgg

SEQ ID NO: 3005655 - RNA, 19 nt, Artificial Sequence
  Description of Artificial Sequence: Synthetic oligonucleotide
cggcguaagugcacaggcc

SEQ ID NO: 3005656 - RNA, 19 nt, Artificial Sequence
  Description of Artificial Sequence: Synthetic oligonucleotide
gcccaagccuuguuggucu

SEQ ID NO: 3005657 - RNA, 19 nt, Artificial Sequence
  Description of Artificial Sequence: Synthetic oligonucleotide
cuggacgaugugcccucga

SEQ ID NO: 3005658 - RNA, 19 nt, Artificial Sequence
  Description of Artificial Sequence: Synthetic oligonucleotide
cgaugugcccucgagguca

SEQ ID NO: 3005659 - RNA, 19 nt, Artificial Sequence
  Description of Artificial Sequence: Synthetic oligonucleotide
gcagcggcguaagugcaca

SEQ ID NO: 3005660 - RNA, 19 nt, Artificial Sequence
  Description of Artificial Sequence: Synthetic oligonucleotide
gguaggcagccaaggucac

SEQ ID NO: 3005661 - RNA, 19 nt, Artificial Sequence
  Description of Artificial Sequence: Synthetic oligonucleotide
guuggucuugugggccaga

SEQ ID NO: 3005662 - RNA, 19 nt, Artificial Sequence
  Description of Artificial Sequence: Synthetic oligonucleotide
gcguaagugcacaggccca

SEQ ID NO: 3005663 - RNA, 19 nt, Artificial Sequence
  Description of Artificial Sequence: Synthetic oligonucleotide
ggagggcaacuagggcggg

SEQ ID NO: 3005664 - RNA, 19 nt, Artificial Sequence
  Description of Artificial Sequence: Synthetic oligonucleotide
accgccaggccgagguggu

SEQ ID NO: 3005665 - RNA, 19 nt, Artificial Sequence
  Description of Artificial Sequence: Synthetic oligonucleotide
ggcgggacguggccccugc

SEQ ID NO: 3005666 - RNA, 19 nt, Artificial Sequence
  Description of Artificial Sequence: Synthetic oligonucleotide
cgaggucaggggucucagg

SEQ ID NO: 3005667 - RNA, 19 nt, Artificial Sequence
  Description of Artificial Sequence: Synthetic oligonucleotide
cgggacguggccccugccc

SEQ ID NO: 3005668 - RNA, 19 nt, Artificial Sequence
  Description of Artificial Sequence: Synthetic oligonucleotide
gcacaggcccagacccacg

SEQ ID NO: 3005669 - RNA, 19 nt, Artificial Sequence
  Description of Artificial Sequence: Synthetic oligonucleotide
acguggccccugccccuug

SEQ ID NO: 3005670 - RNA, 19 nt, Artificial Sequence
  Description of Artificial Sequence: Synthetic oligonucleotide
augugcccucgaggucagg

SEQ ID NO: 3005671 - RNA, 19 nt, Artificial Sequence
  Description of Artificial Sequence: Synthetic oligonucleotide
ggcagcggcguaagugcac

SEQ ID NO: 3005672 - RNA, 19 nt, Artificial Sequence
  Description of Artificial Sequence: Synthetic oligonucleotide
gccccugccccuuggaagu

SEQ ID NO: 3005673 - RNA, 19 nt, Artificial Sequence
  Description of Artificial Sequence: Synthetic oligonucleotide
ccgagguggucuuggggca

SEQ ID NO: 3005674 - RNA, 19 nt, Artificial Sequence
  Description of Artificial Sequence: Synthetic oligonucleotide
guggccccugccccuugga

SEQ ID NO: 3005675 - RNA, 19 nt, Artificial Sequence
  Description of Artificial Sequence: Synthetic oligonucleotide
caggggucucaggcucccc

SEQ ID NO: 3005676 - RNA, 19 nt, Artificial Sequence
  Description of Artificial Sequence: Synthetic oligonucleotide
agguggucuuggggcagaa

SEQ ID NO: 3005677 - RNA, 19 nt, Artificial Sequence
  Description of Artificial Sequence: Synthetic oligonucleotide
ccaagccuuguuggucuug

SEQ ID NO: 3005678 - RNA, 19 nt, Artificial Sequence
  Description of Artificial Sequence: Synthetic oligonucleotide
gacccacggccaggacccc

SEQ ID NO: 3005679 - RNA, 19 nt, Artificial Sequence
  Description of Artificial Sequence: Synthetic oligonucleotide
agggcucacugggccucug

SEQ ID NO: 3005680 - RNA, 19 nt, Artificial Sequence
  Description of Artificial Sequence: Synthetic oligonucleotide
gcccagacccacggccagg

SEQ ID NO: 3005681 - RNA, 19 nt, Artificial Sequence
  Description of Artificial Sequence: Synthetic oligonucleotide
gcacggcgggacguggccc

SEQ ID NO: 3005682 - RNA, 19 nt, Artificial Sequence
  Description of Artificial Sequence: Synthetic oligonucleotide
gcaggaaggcacggcggga

SEQ ID NO: 3005683 - RNA, 19 nt, Artificial Sequence
  Description of Artificial Sequence: Synthetic oligonucleotide
caccagggcagcggcguaa

SEQ ID NO: 3005684 - RNA, 19 nt, Artificial Sequence
  Description of Artificial Sequence: Synthetic oligonucleotide
ggaaggcacggcgggacgu

SEQ ID NO: 3005685 - RNA, 19 nt, Artificial Sequence
  Description of Artificial Sequence: Synthetic oligonucleotide
cccugccccuuggaagucc

SEQ ID NO: 3005686 - RNA, 19 nt, Artificial Sequence
  Description of Artificial Sequence: Synthetic oligonucleotide
gggcagcggcguaagugca

SEQ ID NO: 3005687 - RNA, 19 nt, Artificial Sequence
  Description of Artificial Sequence: Synthetic oligonucleotide
gccagacagaaggcagcga

SEQ ID NO: 3005688 - RNA, 19 nt, Artificial Sequence
  Description of Artificial Sequence: Synthetic oligonucleotide
ccccagcaggaaggcacgg

SEQ ID NO: 3005689 - RNA, 19 nt, Artificial Sequence
  Description of Artificial Sequence: Synthetic oligonucleotide
gcccucgaggucagggguc

SEQ ID NO: 3005690 - RNA, 19 nt, Artificial Sequence
  Description of Artificial Sequence: Synthetic oligonucleotide
cgagguggucuuggggcag

SEQ ID NO: 3005691 - RNA, 19 nt, Artificial Sequence
  Description of Artificial Sequence: Synthetic oligonucleotide
cggggcucgggaggcaagg

SEQ ID NO: 3005692 - RNA, 19 nt, Artificial Sequence
  Description of Artificial Sequence: Synthetic oligonucleotide
cguggccccugccccuugg

SEQ ID NO: 3005693 - RNA, 19 nt, Artificial Sequence
  Description of Artificial Sequence: Synthetic oligonucleotide
acggcgggacguggccccu

SEQ ID NO: 3005694 - RNA, 19 nt, Artificial Sequence
  Description of Artificial Sequence: Synthetic oligonucleotide
ccagacccacggccaggac

SEQ ID NO: 3005695 - RNA, 19 nt, Artificial Sequence
  Description of Artificial Sequence: Synthetic oligonucleotide
cccagacccacggccagga

SEQ ID NO: 3005696 - RNA, 19 nt, Artificial Sequence
  Description of Artificial Sequence: Synthetic oligonucleotide
gcgggacguggccccugcc

SEQ ID NO: 3005697 - RNA, 19 nt, Artificial Sequence
  Description of Artificial Sequence: Synthetic oligonucleotide
gggcaacuagggcggggcu

SEQ ID NO: 3005698 - RNA, 19 nt, Artificial Sequence
  Description of Artificial Sequence: Synthetic oligonucleotide
gcggggcucgggaggcaag

SEQ ID NO: 3005699 - RNA, 19 nt, Artificial Sequence
  Description of Artificial Sequence: Synthetic oligonucleotide
ccucuggccucuucacagu

SEQ ID NO: 3005700 - RNA, 19 nt, Artificial Sequence
  Description of Artificial Sequence: Synthetic oligonucleotide
cacugggccucuggccucu

SEQ ID NO: 3005701 - RNA, 19 nt, Artificial Sequence
  Description of Artificial Sequence: Synthetic oligonucleotide
ggcggggcucgggaggcaa

SEQ ID NO: 3005702 - RNA, 19 nt, Artificial Sequence
  Description of Artificial Sequence: Synthetic oligonucleotide
cgucguaaucugagucacu

SEQ ID NO: 3005703 - RNA, 19 nt, Artificial Sequence
  Description of Artificial Sequence: Synthetic oligonucleotide
ggggcucgggaggcaaggu

SEQ ID NO: 3005704 - RNA, 19 nt, Artificial Sequence
  Description of Artificial Sequence: Synthetic oligonucleotide
cccucgaggucaggggucu

SEQ ID NO: 3005705 - RNA, 19 nt, Artificial Sequence
  Description of Artificial Sequence: Synthetic oligonucleotide
ccucgaggucaggggucuc

SEQ ID NO: 3005706 - RNA, 19 nt, Artificial Sequence
  Description of Artificial Sequence: Synthetic oligonucleotide
gccaggccgagguggucuu

SEQ ID NO: 3005707 - RNA, 19 nt, Artificial Sequence
  Description of Artificial Sequence: Synthetic oligonucleotide
ccccugccccuuggaaguc

SEQ ID NO: 3005708 - RNA, 19 nt, Artificial Sequence
  Description of Artificial Sequence: Synthetic oligonucleotide
ccuuggcccaagccuuguu

SEQ ID NO: 3005709 - RNA, 19 nt, Artificial Sequence
  Description of Artificial Sequence: Synthetic oligonucleotide
ccgccaggccgaggugguc

SEQ ID NO: 3005710 - RNA, 19 nt, Artificial Sequence
  Description of Artificial Sequence: Synthetic oligonucleotide
cccaagccuuguuggucuu

SEQ ID NO: 3005711 - RNA, 19 nt, Artificial Sequence
  Description of Artificial Sequence: Synthetic oligonucleotide
gggcggggcucgggaggca

SEQ ID NO: 3005712 - RNA, 19 nt, Artificial Sequence
  Description of Artificial Sequence: Synthetic oligonucleotide
cccuuggcccaagccuugu

SEQ ID NO: 3005713 - RNA, 19 nt, Artificial Sequence
  Description of Artificial Sequence: Synthetic oligonucleotide
cgaugcccacaggccaaaa

SEQ ID NO: 3005714 - RNA, 19 nt, Artificial Sequence
  Description of Artificial Sequence: Synthetic oligonucleotide
cggcgggacguggccccug

SEQ ID NO: 3005715 - RNA, 19 nt, Artificial Sequence
  Description of Artificial Sequence: Synthetic oligonucleotide
uguacuuuagcaaauaucu

SEQ ID NO: 3005716 - RNA, 19 nt, Artificial Sequence
  Description of Artificial Sequence: Synthetic oligonucleotide
aauguggaaaucuuaagug

SEQ ID NO: 3005717 - RNA, 19 nt, Artificial Sequence
  Description of Artificial Sequence: Synthetic oligonucleotide
aaaucuuaaguguauacca

SEQ ID NO: 3005718 - RNA, 19 nt, Artificial Sequence
  Description of Artificial Sequence: Synthetic oligonucleotide
uuuaauuccugacugaaac

SEQ ID NO: 3005719 - RNA, 19 nt, Artificial Sequence
  Description of Artificial Sequence: Synthetic oligonucleotide
uuaaguguauaccauguug

SEQ ID NO: 3005720 - RNA, 19 nt, Artificial Sequence
  Description of Artificial Sequence: Synthetic oligonucleotide
auucacugaagaugaaucc

SEQ ID NO: 3005721 - RNA, 19 nt, Artificial Sequence
  Description of Artificial Sequence: Synthetic oligonucleotide
aauggguaucuccauuagc

SEQ ID NO: 3005722 - RNA, 19 nt, Artificial Sequence
  Description of Artificial Sequence: Synthetic oligonucleotide
uuuagcaaauaucuucucc

SEQ ID NO: 3005723 - RNA, 19 nt, Artificial Sequence
  Description of Artificial Sequence: Synthetic oligonucleotide
aaauaucuucuccauucac

SEQ ID NO: 3005724 - RNA, 19 nt, Artificial Sequence
  Description of Artificial Sequence: Synthetic oligonucleotide
acaaaugucuucuuuagca

SEQ ID NO: 3005725 - RNA, 19 nt, Artificial Sequence
  Description of Artificial Sequence: Synthetic oligonucleotide
aaauagcucacacaguaga

SEQ ID NO: 3005726 - RNA, 19 nt, Artificial Sequence
  Description of Artificial Sequence: Synthetic oligonucleotide
ucucagauagugaacaucu

SEQ ID NO: 3005727 - RNA, 19 nt, Artificial Sequence
  Description of Artificial Sequence: Synthetic oligonucleotide
uuagcaaauaucuucucca

SEQ ID NO: 3005728 - RNA, 19 nt, Artificial Sequence
  Description of Artificial Sequence: Synthetic oligonucleotide
aagaugaaucccaaaauag

SEQ ID NO: 3005729 - RNA, 19 nt, Artificial Sequence
  Description of Artificial Sequence: Synthetic oligonucleotide
uaaguguauaccauguugu

SEQ ID NO: 3005730 - RNA, 19 nt, Artificial Sequence
  Description of Artificial Sequence: Synthetic oligonucleotide
auguuguuccuuuuaauuc

SEQ ID NO: 3005731 - RNA, 19 nt, Artificial Sequence
  Description of Artificial Sequence: Synthetic oligonucleotide
uguuguuccuuuuaauucc

SEQ ID NO: 3005732 - RNA, 19 nt, Artificial Sequence
  Description of Artificial Sequence: Synthetic oligonucleotide
gaagguguguaagagauag

SEQ ID NO: 3005733 - RNA, 19 nt, Artificial Sequence
  Description of Artificial Sequence: Synthetic oligonucleotide
agguguguaagagauagcc

SEQ ID NO: 3005734 - RNA, 19 nt, Artificial Sequence
  Description of Artificial Sequence: Synthetic oligonucleotide
ucuggagauggaaaugugg

SEQ ID NO: 3005735 - RNA, 19 nt, Artificial Sequence
  Description of Artificial Sequence: Synthetic oligonucleotide
uuggugcacacauuaaugg

SEQ ID NO: 3005736 - RNA, 19 nt, Artificial Sequence
  Description of Artificial Sequence: Synthetic oligonucleotide
aucacgaaugggcagauag

SEQ ID NO: 3005737 - RNA, 19 nt, Artificial Sequence
  Description of Artificial Sequence: Synthetic oligonucleotide
uccuuuuaauuccugacug

SEQ ID NO: 3005738 - RNA, 19 nt, Artificial Sequence
  Description of Artificial Sequence: Synthetic oligonucleotide
ugaacaucucuggagaugg

SEQ ID NO: 3005739 - RNA, 19 nt, Artificial Sequence
  Description of Artificial Sequence: Synthetic oligonucleotide
ucuucuuuagcaugucacg

SEQ ID NO: 3005740 - RNA, 19 nt, Artificial Sequence
  Description of Artificial Sequence: Synthetic oligonucleotide
aaaugucuucuuuagcaug

SEQ ID NO: 3005741 - RNA, 19 nt, Artificial Sequence
  Description of Artificial Sequence: Synthetic oligonucleotide
uacuuuagcaaauaucuuc

SEQ ID NO: 3005742 - RNA, 19 nt, Artificial Sequence
  Description of Artificial Sequence: Synthetic oligonucleotide
ugaaucccaaaauagcuca

SEQ ID NO: 3005743 - RNA, 19 nt, Artificial Sequence
  Description of Artificial Sequence: Synthetic oligonucleotide
auagugaacaucucuggag

SEQ ID NO: 3005744 - RNA, 19 nt, Artificial Sequence
  Description of Artificial Sequence: Synthetic oligonucleotide
gaaaucuuaaguguauacc

SEQ ID NO: 3005745 - RNA, 19 nt, Artificial Sequence
  Description of Artificial Sequence: Synthetic oligonucleotide
ucggcagucaggaacauug

SEQ ID NO: 3005746 - RNA, 19 nt, Artificial Sequence
  Description of Artificial Sequence: Synthetic oligonucleotide
agaugaaucccaaaauagc

SEQ ID NO: 3005747 - RNA, 19 nt, Artificial Sequence
  Description of Artificial Sequence: Synthetic oligonucleotide
ucagauagugaacaucucu

SEQ ID NO: 3005748 - RNA, 19 nt, Artificial Sequence
  Description of Artificial Sequence: Synthetic oligonucleotide
ucuuaaguguauaccaugu

SEQ ID NO: 3005749 - RNA, 19 nt, Artificial Sequence
  Description of Artificial Sequence: Synthetic oligonucleotide
gaaacuaccaggacaaaug

SEQ ID NO: 3005750 - RNA, 19 nt, Artificial Sequence
  Description of Artificial Sequence: Synthetic oligonucleotide
auaucuucuccauucacug

SEQ ID NO: 3005751 - RNA, 19 nt, Artificial Sequence
  Description of Artificial Sequence: Synthetic oligonucleotide
agauagugaacaucucugg

SEQ ID NO: 3005752 - RNA, 19 nt, Artificial Sequence
  Description of Artificial Sequence: Synthetic oligonucleotide
uguaacuggccacugugag

SEQ ID NO: 3005753 - RNA, 19 nt, Artificial Sequence
  Description of Artificial Sequence: Synthetic oligonucleotide
ucuucuaguucacagugac

SEQ ID NO: 3005754 - RNA, 19 nt, Artificial Sequence
  Description of Artificial Sequence: Synthetic oligonucleotide
gaaauguggaaaucuuaag

SEQ ID NO: 3005755 - RNA, 19 nt, Artificial Sequence
  Description of Artificial Sequence: Synthetic oligonucleotide
aaacuaccaggacaaaugu

SEQ ID NO: 3005756 - RNA, 19 nt, Artificial Sequence
  Description of Artificial Sequence: Synthetic oligonucleotide
uauucuagaagcugaugug

SEQ ID NO: 3005757 - RNA, 19 nt, Artificial Sequence
  Description of Artificial Sequence: Synthetic oligonucleotide
ucuccauucacugaagaug

SEQ ID NO: 3005758 - RNA, 19 nt, Artificial Sequence
  Description of Artificial Sequence: Synthetic oligonucleotide
ucauguuuggugcacacau

SEQ ID NO: 3005759 - RNA, 19 nt, Artificial Sequence
  Description of Artificial Sequence: Synthetic oligonucleotide
aucuccauuagcuucucag

SEQ ID NO: 3005760 - RNA, 19 nt, Artificial Sequence
  Description of Artificial Sequence: Synthetic oligonucleotide
agagauagccgucuucagg

SEQ ID NO: 3005761 - RNA, 19 nt, Artificial Sequence
  Description of Artificial Sequence: Synthetic oligonucleotide
uucuaguucacagugacuc

SEQ ID NO: 3005762 - RNA, 19 nt, Artificial Sequence
  Description of Artificial Sequence: Synthetic oligonucleotide
aauaucuucuccauucacu

SEQ ID NO: 3005763 - RNA, 19 nt, Artificial Sequence
  Description of Artificial Sequence: Synthetic oligonucleotide
cauucacugaagaugaauc

SEQ ID NO: 3005764 - RNA, 19 nt, Artificial Sequence
  Description of Artificial Sequence: Synthetic oligonucleotide
auuagcuucucagauagug

SEQ ID NO: 3005765 - RNA, 19 nt, Artificial Sequence
  Description of Artificial Sequence: Synthetic oligonucleotide
uagaacucugccaacccag

SEQ ID NO: 3005766 - RNA, 19 nt, Artificial Sequence
  Description of Artificial Sequence: Synthetic oligonucleotide
ugaagaugaaucccaaaau

SEQ ID NO: 3005767 - RNA, 19 nt, Artificial Sequence
  Description of Artificial Sequence: Synthetic oligonucleotide
uagugaacaucucuggaga

SEQ ID NO: 3005768 - RNA, 19 nt, Artificial Sequence
  Description of Artificial Sequence: Synthetic oligonucleotide
auucuagaagcugaugugg

SEQ ID NO: 3005769 - RNA, 19 nt, Artificial Sequence
  Description of Artificial Sequence: Synthetic oligonucleotide
uaagagauagccgucuuca

SEQ ID NO: 3005770 - RNA, 19 nt, Artificial Sequence
  Description of Artificial Sequence: Synthetic oligonucleotide
aucccaaaauagcucacac

SEQ ID NO: 3005771 - RNA, 19 nt, Artificial Sequence
  Description of Artificial Sequence: Synthetic oligonucleotide
gacuccuagguguaacugg

SEQ ID NO: 3005772 - RNA, 19 nt, Artificial Sequence
  Description of Artificial Sequence: Synthetic oligonucleotide
ucacugaagaugaauccca

SEQ ID NO: 3005773 - RNA, 19 nt, Artificial Sequence
  Description of Artificial Sequence: Synthetic oligonucleotide
guucuucuaguucacagug

SEQ ID NO: 3005774 - RNA, 19 nt, Artificial Sequence
  Description of Artificial Sequence: Synthetic oligonucleotide
uuccuuuuaauuccugacu

SEQ ID NO: 3005775 - RNA, 19 nt, Artificial Sequence
  Description of Artificial Sequence: Synthetic oligonucleotide
uggugcacacauuaauggg

SEQ ID NO: 3005776 - RNA, 19 nt, Artificial Sequence
  Description of Artificial Sequence: Synthetic oligonucleotide
acugugagaucacgaaugg

SEQ ID NO: 3005777 - RNA, 19 nt, Artificial Sequence
  Description of Artificial Sequence: Synthetic oligonucleotide
uguggaaaucuuaagugua

SEQ ID NO: 3005778 - RNA, 19 nt, Artificial Sequence
  Description of Artificial Sequence: Synthetic oligonucleotide
gagauagccgucuucagga

SEQ ID NO: 3005779 - RNA, 19 nt, Artificial Sequence
  Description of Artificial Sequence: Synthetic oligonucleotide
aauuccugacugaaacuac

SEQ ID NO: 3005780 - RNA, 19 nt, Artificial Sequence
  Description of Artificial Sequence: Synthetic oligonucleotide
cagauagugaacaucucug

SEQ ID NO: 3005781 - RNA, 19 nt, Artificial Sequence
  Description of Artificial Sequence: Synthetic oligonucleotide
aagcugauguggaagcagc

SEQ ID NO: 3005782 - RNA, 19 nt, Artificial Sequence
  Description of Artificial Sequence: Synthetic oligonucleotide
gucacgcuauucuagaagc

SEQ ID NO: 3005783 - RNA, 19 nt, Artificial Sequence
  Description of Artificial Sequence: Synthetic oligonucleotide
gaagaugaaucccaaaaua

SEQ ID NO: 3005784 - RNA, 19 nt, Artificial Sequence
  Description of Artificial Sequence: Synthetic oligonucleotide
cccaaaauagcucacacag

SEQ ID NO: 3005785 - RNA, 19 nt, Artificial Sequence
  Description of Artificial Sequence: Synthetic oligonucleotide
acuaccaggacaaaugucu

SEQ ID NO: 3005786 - RNA, 19 nt, Artificial Sequence
  Description of Artificial Sequence: Synthetic oligonucleotide
uucacugaagaugaauccc

SEQ ID NO: 3005787 - RNA, 19 nt, Artificial Sequence
  Description of Artificial Sequence: Synthetic oligonucleotide
ugggcagauaggaagagaa

SEQ ID NO: 3005788 - RNA, 19 nt, Artificial Sequence
  Description of Artificial Sequence: Synthetic oligonucleotide
aucuuaaguguauaccaug

SEQ ID NO: 3005789 - RNA, 19 nt, Artificial Sequence
  Description of Artificial Sequence: Synthetic oligonucleotide
uuagcuucucagauaguga

SEQ ID NO: 3005790 - RNA, 19 nt, Artificial Sequence
  Description of Artificial Sequence: Synthetic oligonucleotide
gacugaaacuaccaggaca

SEQ ID NO: 3005791 - RNA, 19 nt, Artificial Sequence
  Description of Artificial Sequence: Synthetic oligonucleotide
aaugucuucuuuagcaugu

SEQ ID NO: 3005792 - RNA, 19 nt, Artificial Sequence
  Description of Artificial Sequence: Synthetic oligonucleotide
auguggaaaucuuaagugu

SEQ ID NO: 3005793 - RNA, 19 nt, Artificial Sequence
  Description of Artificial Sequence: Synthetic oligonucleotide
ucacgaaugggcagauagg

SEQ ID NO: 3005794 - RNA, 19 nt, Artificial Sequence
  Description of Artificial Sequence: Synthetic oligonucleotide
uagaagcugauguggaagc

SEQ ID NO: 3005795 - RNA, 19 nt, Artificial Sequence
  Description of Artificial Sequence: Synthetic oligonucleotide
uuaauggguaucuccauua

SEQ ID NO: 3005796 - RNA, 19 nt, Artificial Sequence
  Description of Artificial Sequence: Synthetic oligonucleotide
uagcaugucacgcuauucu

SEQ ID NO: 3005797 - RNA, 19 nt, Artificial Sequence
  Description of Artificial Sequence: Synthetic oligonucleotide
ucucucggcagucaggaac

SEQ ID NO: 3005798 - RNA, 19 nt, Artificial Sequence
  Description of Artificial Sequence: Synthetic oligonucleotide
uguuccuuuuaauuccuga

SEQ ID NO: 3005799 - RNA, 19 nt, Artificial Sequence
  Description of Artificial Sequence: Synthetic oligonucleotide
cacugugagaucacgaaug

SEQ ID NO: 3005800 - RNA, 19 nt, Artificial Sequence
  Description of Artificial Sequence: Synthetic oligonucleotide
gauaggaagagaaggugug

SEQ ID NO: 3005801 - RNA, 19 nt, Artificial Sequence
  Description of Artificial Sequence: Synthetic oligonucleotide
auagcucacacaguagaac

SEQ ID NO: 3005802 - RNA, 19 nt, Artificial Sequence
  Description of Artificial Sequence: Synthetic oligonucleotide
uuaauuccugacugaaacu

SEQ ID NO: 3005803 - RNA, 19 nt, Artificial Sequence
  Description of Artificial Sequence: Synthetic oligonucleotide
uaauggguaucuccauuag

SEQ ID NO: 3005804 - RNA, 19 nt, Artificial Sequence
  Description of Artificial Sequence: Synthetic oligonucleotide
auagccgucuucaggaggc

SEQ ID NO: 3005805 - RNA, 19 nt, Artificial Sequence
  Description of Artificial Sequence: Synthetic oligonucleotide
aguguauaccauguuguuc

SEQ ID NO: 3005806 - RNA, 19 nt, Artificial Sequence
  Description of Artificial Sequence: Synthetic oligonucleotide
aaaauagcucacacaguag

SEQ ID NO: 3005807 - RNA, 19 nt, Artificial Sequence
  Description of Artificial Sequence: Synthetic oligonucleotide
gauagccgucuucaggagg

SEQ ID NO: 3005808 - RNA, 19 nt, Artificial Sequence
  Description of Artificial Sequence: Synthetic oligonucleotide
uguucuucuaguucacagu

SEQ ID NO: 3005809 - RNA, 19 nt, Artificial Sequence
  Description of Artificial Sequence: Synthetic oligonucleotide
auuccugacugaaacuacc

SEQ ID NO: 3005810 - RNA, 19 nt, Artificial Sequence
  Description of Artificial Sequence: Synthetic oligonucleotide
uagcucacacaguagaacu

SEQ ID NO: 3005811 - RNA, 19 nt, Artificial Sequence
  Description of Artificial Sequence: Synthetic oligonucleotide
uucuagaagcugaugugga

SEQ ID NO: 3005812 - RNA, 19 nt, Artificial Sequence
  Description of Artificial Sequence: Synthetic oligonucleotide
uuuuaauuccugacugaaa

SEQ ID NO: 3005813 - RNA, 19 nt, Artificial Sequence
  Description of Artificial Sequence: Synthetic oligonucleotide
uucaggaggccuucucucg

SEQ ID NO: 3005814 - RNA, 19 nt, Artificial Sequence
  Description of Artificial Sequence: Synthetic oligonucleotide
gacaaaugucuucuuuagc

SEQ ID NO: 3005815 - RNA, 19 nt, Artificial Sequence
  Description of Artificial Sequence: Synthetic oligonucleotide
cuguacuuuagcaaauauc

SEQ ID NO: 3005816 - RNA, 19 nt, Artificial Sequence
  Description of Artificial Sequence: Synthetic oligonucleotide
cacacaguagaacucugcc

SEQ ID NO: 3005817 - RNA, 19 nt, Artificial Sequence
  Description of Artificial Sequence: Synthetic oligonucleotide
gcaaauaucuucuccauuc

SEQ ID NO: 3005818 - RNA, 19 nt, Artificial Sequence
  Description of Artificial Sequence: Synthetic oligonucleotide
gauagugaacaucucugga

SEQ ID NO: 3005819 - RNA, 19 nt, Artificial Sequence
  Description of Artificial Sequence: Synthetic oligonucleotide
ggcagauaggaagagaagg

SEQ ID NO: 3005820 - RNA, 19 nt, Artificial Sequence
  Description of Artificial Sequence: Synthetic oligonucleotide
caaaauagcucacacagua

SEQ ID NO: 3005821 - RNA, 19 nt, Artificial Sequence
  Description of Artificial Sequence: Synthetic oligonucleotide
uauaccauguuguuccuuu

SEQ ID NO: 3005822 - RNA, 19 nt, Artificial Sequence
  Description of Artificial Sequence: Synthetic oligonucleotide
gaagcagcuguacuuuagc

SEQ ID NO: 3005823 - RNA, 19 nt, Artificial Sequence
  Description of Artificial Sequence: Synthetic oligonucleotide
guuccuuuuaauuccugac

SEQ ID NO: 3005824 - RNA, 19 nt, Artificial Sequence
  Description of Artificial Sequence: Synthetic oligonucleotide
acuuuagcaaauaucuucu

SEQ ID NO: 3005825 - RNA, 19 nt, Artificial Sequence
  Description of Artificial Sequence: Synthetic oligonucleotide
acuccuagguguaacuggc

SEQ ID NO: 3005826 - RNA, 19 nt, Artificial Sequence
  Description of Artificial Sequence: Synthetic oligonucleotide
aagcagcuguacuuuagca

SEQ ID NO: 3005827 - RNA, 19 nt, Artificial Sequence
  Description of Artificial Sequence: Synthetic oligonucleotide
cugacugaaacuaccagga

SEQ ID NO: 3005828 - RNA, 19 nt, Artificial Sequence
  Description of Artificial Sequence: Synthetic oligonucleotide
aagagauagccgucuucag

SEQ ID NO: 3005829 - RNA, 19 nt, Artificial Sequence
  Description of Artificial Sequence: Synthetic oligonucleotide
gaagagaagguguguaaga

SEQ ID NO: 3005830 - RNA, 19 nt, Artificial Sequence
  Description of Artificial Sequence: Synthetic oligonucleotide
cuucuuuagcaugucacgc

SEQ ID NO: 3005831 - RNA, 19 nt, Artificial Sequence
  Description of Artificial Sequence: Synthetic oligonucleotide
uccugacugaaacuaccag

SEQ ID NO: 3005832 - RNA, 19 nt, Artificial Sequence
  Description of Artificial Sequence: Synthetic oligonucleotide
uucuuuagcaugucacgcu

SEQ ID NO: 3005833 - RNA, 19 nt, Artificial Sequence
  Description of Artificial Sequence: Synthetic oligonucleotide
uccuagguguaacuggcca

SEQ ID NO: 3005834 - RNA, 19 nt, Artificial Sequence
  Description of Artificial Sequence: Synthetic oligonucleotide
auggguaucuccauuagcu

SEQ ID NO: 3005835 - RNA, 19 nt, Artificial Sequence
  Description of Artificial Sequence: Synthetic oligonucleotide
augaaucccaaaauagcuc

SEQ ID NO: 3005836 - RNA, 19 nt, Artificial Sequence
  Description of Artificial Sequence: Synthetic oligonucleotide
ucuucaggaggccuucucu

SEQ ID NO: 3005837 - RNA, 19 nt, Artificial Sequence
  Description of Artificial Sequence: Synthetic oligonucleotide
ucaggaggccuucucucgg

SEQ ID NO: 3005838 - RNA, 19 nt, Artificial Sequence
  Description of Artificial Sequence: Synthetic oligonucleotide
uagcuucucagauagugaa

SEQ ID NO: 3005839 - RNA, 19 nt, Artificial Sequence
  Description of Artificial Sequence: Synthetic oligonucleotide
ucacacaguagaacucugc

SEQ ID NO: 3005840 - RNA, 19 nt, Artificial Sequence
  Description of Artificial Sequence: Synthetic oligonucleotide
uaacuggccacugugagau

SEQ ID NO: 3005841 - RNA, 19 nt, Artificial Sequence
  Description of Artificial Sequence: Synthetic oligonucleotide
ucuaguucacagugacucc

SEQ ID NO: 3005842 - RNA, 19 nt, Artificial Sequence
  Description of Artificial Sequence: Synthetic oligonucleotide
aacccaguguucuucuagu

SEQ ID NO: 3005843 - RNA, 19 nt, Artificial Sequence
  Description of Artificial Sequence: Synthetic oligonucleotide
gaugaaucccaaaauagcu

SEQ ID NO: 3005844 - RNA, 19 nt, Artificial Sequence
  Description of Artificial Sequence: Synthetic oligonucleotide
aucuucuccauucacugaa

SEQ ID NO: 3005845 - RNA, 19 nt, Artificial Sequence
  Description of Artificial Sequence: Synthetic oligonucleotide
uguggaagcagcuguacuu

SEQ ID NO: 3005846 - RNA, 19 nt, Artificial Sequence
  Description of Artificial Sequence: Synthetic oligonucleotide
ucuuuagcaugucacgcua

SEQ ID NO: 3005847 - RNA, 19 nt, Artificial Sequence
  Description of Artificial Sequence: Synthetic oligonucleotide
uggaaauguggaaaucuua

SEQ ID NO: 3005848 - RNA, 19 nt, Artificial Sequence
  Description of Artificial Sequence: Synthetic oligonucleotide
cugaagaugaaucccaaaa

SEQ ID NO: 3005849 - RNA, 19 nt, Artificial Sequence
  Description of Artificial Sequence: Synthetic oligonucleotide
ucucuggagauggaaaugu

SEQ ID NO: 3005850 - RNA, 19 nt, Artificial Sequence
  Description of Artificial Sequence: Synthetic oligonucleotide
aaucuuaaguguauaccau

SEQ ID NO: 3005851 - RNA, 19 nt, Artificial Sequence
  Description of Artificial Sequence: Synthetic oligonucleotide
uuccugacugaaacuacca

SEQ ID NO: 3005852 - RNA, 19 nt, Artificial Sequence
  Description of Artificial Sequence: Synthetic oligonucleotide
aacuaccaggacaaauguc

SEQ ID NO: 3005853 - RNA, 19 nt, Artificial Sequence
  Description of Artificial Sequence: Synthetic oligonucleotide
uguguaagagauagccguc

SEQ ID NO: 3005854 - RNA, 19 nt, Artificial Sequence
  Description of Artificial Sequence: Synthetic oligonucleotide
aaucccaaaauagcucaca

SEQ ID NO: 3005855 - RNA, 19 nt, Artificial Sequence
  Description of Artificial Sequence: Synthetic oligonucleotide
ugucuucuuuagcauguca

SEQ ID NO: 3005856 - RNA, 19 nt, Artificial Sequence
  Description of Artificial Sequence: Synthetic oligonucleotide
agagaagguguguaagaga

SEQ ID NO: 3005857 - RNA, 19 nt, Artificial Sequence
  Description of Artificial Sequence: Synthetic oligonucleotide
cuccauucacugaagauga

SEQ ID NO: 3005858 - RNA, 19 nt, Artificial Sequence
  Description of Artificial Sequence: Synthetic oligonucleotide
aaugggcagauaggaagag

SEQ ID NO: 3005859 - RNA, 19 nt, Artificial Sequence
  Description of Artificial Sequence: Synthetic oligonucleotide
ccauuagcuucucagauag

SEQ ID NO: 3005860 - RNA, 19 nt, Artificial Sequence
  Description of Artificial Sequence: Synthetic oligonucleotide
ccugacugaaacuaccagg

SEQ ID NO: 3005861 - RNA, 19 nt, Artificial Sequence
  Description of Artificial Sequence: Synthetic oligonucleotide
acaguagaacucugccaac

SEQ ID NO: 3005862 - RNA, 19 nt, Artificial Sequence
  Description of Artificial Sequence: Synthetic oligonucleotide
gaagcugauguggaagcag

SEQ ID NO: 3005863 - RNA, 19 nt, Artificial Sequence
  Description of Artificial Sequence: Synthetic oligonucleotide
ggacaaaugucuucuuuag

SEQ ID NO: 3005864 - RNA, 19 nt, Artificial Sequence
  Description of Artificial Sequence: Synthetic oligonucleotide
aggacaaaugucuucuuua

SEQ ID NO: 3005865 - RNA, 19 nt, Artificial Sequence
  Description of Artificial Sequence: Synthetic oligonucleotide
cuauucuagaagcugaugu

SEQ ID NO: 3005866 - RNA, 19 nt, Artificial Sequence
  Description of Artificial Sequence: Synthetic oligonucleotide
cuggagauggaaaugugga

SEQ ID NO: 3005867 - RNA, 19 nt, Artificial Sequence
  Description of Artificial Sequence: Synthetic oligonucleotide
auguuuggugcacacauua

SEQ ID NO: 3005868 - RNA, 19 nt, Artificial Sequence
  Description of Artificial Sequence: Synthetic oligonucleotide
ucccaaaauagcucacaca

SEQ ID NO: 3005869 - RNA, 19 nt, Artificial Sequence
  Description of Artificial Sequence: Synthetic oligonucleotide
ugaaacuaccaggacaaau

SEQ ID NO: 3005870 - RNA, 19 nt, Artificial Sequence
  Description of Artificial Sequence: Synthetic oligonucleotide
auuaauggguaucuccauu

SEQ ID NO: 3005871 - RNA, 19 nt, Artificial Sequence
  Description of Artificial Sequence: Synthetic oligonucleotide
ggaaaucuuaaguguauac

SEQ ID NO: 3005872 - RNA, 19 nt, Artificial Sequence
  Description of Artificial Sequence: Synthetic oligonucleotide
uucuucuaguucacaguga

SEQ ID NO: 3005873 - RNA, 19 nt, Artificial Sequence
  Description of Artificial Sequence: Synthetic oligonucleotide
acacaguagaacucugcca

SEQ ID NO: 3005874 - RNA, 19 nt, Artificial Sequence
  Description of Artificial Sequence: Synthetic oligonucleotide
agugacuccuagguguaac

SEQ ID NO: 3005875 - RNA, 19 nt, Artificial Sequence
  Description of Artificial Sequence: Synthetic oligonucleotide
guguguaagagauagccgu

SEQ ID NO: 3005876 - RNA, 19 nt, Artificial Sequence
  Description of Artificial Sequence: Synthetic oligonucleotide
ucacagugacuccuaggug

SEQ ID NO: 3005877 - RNA, 19 nt, Artificial Sequence
  Description of Artificial Sequence: Synthetic oligonucleotide
gauggaaauguggaaaucu

SEQ ID NO: 3005878 - RNA, 19 nt, Artificial Sequence
  Description of Artificial Sequence: Synthetic oligonucleotide
cacaguagaacucugccaa

SEQ ID NO: 3005879 - RNA, 19 nt, Artificial Sequence
  Description of Artificial Sequence: Synthetic oligonucleotide
aagguguguaagagauagc

SEQ ID NO: 3005880 - RNA, 19 nt, Artificial Sequence
  Description of Artificial Sequence: Synthetic oligonucleotide
ucuagaagcugauguggaa

SEQ ID NO: 3005881 - RNA, 19 nt, Artificial Sequence
  Description of Artificial Sequence: Synthetic oligonucleotide
agcagcuguacuuuagcaa

SEQ ID NO: 3005882 - RNA, 19 nt, Artificial Sequence
  Description of Artificial Sequence: Synthetic oligonucleotide
uuuagcaugucacgcuauu

SEQ ID NO: 3005883 - RNA, 19 nt, Artificial Sequence
  Description of Artificial Sequence: Synthetic oligonucleotide
gucuucuuuagcaugucac

SEQ ID NO: 3005884 - RNA, 19 nt, Artificial Sequence
  Description of Artificial Sequence: Synthetic oligonucleotide
accaggacaaaugucuucu

SEQ ID NO: 3005885 - RNA, 19 nt, Artificial Sequence
  Description of Artificial Sequence: Synthetic oligonucleotide
agauggaaauguggaaauc

SEQ ID NO: 3005886 - RNA, 19 nt, Artificial Sequence
  Description of Artificial Sequence: Synthetic oligonucleotide
uguuuggugcacacauuaa

SEQ ID NO: 3005887 - RNA, 19 nt, Artificial Sequence
  Description of Artificial Sequence: Synthetic oligonucleotide
aacaucucuggagauggaa

SEQ ID NO: 3005888 - RNA, 19 nt, Artificial Sequence
  Description of Artificial Sequence: Synthetic oligonucleotide
caacccaguguucuucuag

SEQ ID NO: 3005889 - RNA, 19 nt, Artificial Sequence
  Description of Artificial Sequence: Synthetic oligonucleotide
uggagauggaaauguggaa

SEQ ID NO: 3005890 - RNA, 19 nt, Artificial Sequence
  Description of Artificial Sequence: Synthetic oligonucleotide
cagauaggaagagaaggug

SEQ ID NO: 3005891 - RNA, 19 nt, Artificial Sequence
  Description of Artificial Sequence: Synthetic oligonucleotide
uucucagauagugaacauc

SEQ ID NO: 3005892 - RNA, 19 nt, Artificial Sequence
  Description of Artificial Sequence: Synthetic oligonucleotide
accauguuguuccuuuuaa

SEQ ID NO: 3005893 - RNA, 19 nt, Artificial Sequence
  Description of Artificial Sequence: Synthetic oligonucleotide
uagcaaauaucuucuccau

SEQ ID NO: 3005894 - RNA, 19 nt, Artificial Sequence
  Description of Artificial Sequence: Synthetic oligonucleotide
ugucauguuuggugcacac

SEQ ID NO: 3005895 - RNA, 19 nt, Artificial Sequence
  Description of Artificial Sequence: Synthetic oligonucleotide
uccauuagcuucucagaua

SEQ ID NO: 3005896 - RNA, 19 nt, Artificial Sequence
  Description of Artificial Sequence: Synthetic oligonucleotide
ugacugaaacuaccaggac

SEQ ID NO: 3005897 - RNA, 19 nt, Artificial Sequence
  Description of Artificial Sequence: Synthetic oligonucleotide
ucacgcuauucuagaagcu

SEQ ID NO: 3005898 - RNA, 19 nt, Artificial Sequence
  Description of Artificial Sequence: Synthetic oligonucleotide
cuuuagcaaauaucuucuc

SEQ ID NO: 3005899 - RNA, 19 nt, Artificial Sequence
  Description of Artificial Sequence: Synthetic oligonucleotide
gaaugggcagauaggaaga

SEQ ID NO: 3005900 - RNA, 19 nt, Artificial Sequence
  Description of Artificial Sequence: Synthetic oligonucleotide
caguagaacucugccaacc

SEQ ID NO: 3005901 - RNA, 19 nt, Artificial Sequence
  Description of Artificial Sequence: Synthetic oligonucleotide
uguaagagauagccgucuu

SEQ ID NO: 3005902 - RNA, 19 nt, Artificial Sequence
  Description of Artificial Sequence: Synthetic oligonucleotide
ugacuccuagguguaacug

SEQ ID NO: 3005903 - RNA, 19 nt, Artificial Sequence
  Description of Artificial Sequence: Synthetic oligonucleotide
gagaagguguguaagagau

SEQ ID NO: 3005904 - RNA, 19 nt, Artificial Sequence
  Description of Artificial Sequence: Synthetic oligonucleotide
ggaagagaagguguguaag

SEQ ID NO: 3005905 - RNA, 19 nt, Artificial Sequence
  Description of Artificial Sequence: Synthetic oligonucleotide
gguguguaagagauagccg

SEQ ID NO: 3005906 - RNA, 19 nt, Artificial Sequence
  Description of Artificial Sequence: Synthetic oligonucleotide
cgaaugggcagauaggaag

SEQ ID NO: 3005907 - RNA, 19 nt, Artificial Sequence
  Description of Artificial Sequence: Synthetic oligonucleotide
cacgcuauucuagaagcug

SEQ ID NO: 3005908 - RNA, 19 nt, Artificial Sequence
  Description of Artificial Sequence: Synthetic oligonucleotide
guaagagauagccgucuuc

SEQ ID NO: 3005909 - RNA, 19 nt, Artificial Sequence
  Description of Artificial Sequence: Synthetic oligonucleotide
aggaagagaagguguguaa

SEQ ID NO: 3005910 - RNA, 19 nt, Artificial Sequence
  Description of Artificial Sequence: Synthetic oligonucleotide
agugaacaucucuggagau

SEQ ID NO: 3005911 - RNA, 19 nt, Artificial Sequence
  Description of Artificial Sequence: Synthetic oligonucleotide
agauagccgucuucaggag

SEQ ID NO: 3005912 - RNA, 19 nt, Artificial Sequence
  Description of Artificial Sequence: Synthetic oligonucleotide
cuuuuaauuccugacugaa

SEQ ID NO: 3005913 - RNA, 19 nt, Artificial Sequence
  Description of Artificial Sequence: Synthetic oligonucleotide
caugucacgcuauucuaga

SEQ ID NO: 3005914 - RNA, 19 nt, Artificial Sequence
  Description of Artificial Sequence: Synthetic oligonucleotide
auguggaagcagcuguacu

SEQ ID NO: 3005915 - RNA, 19 nt, Artificial Sequence
  Description of Artificial Sequence: Synthetic oligonucleotide
caaauaucuucuccauuca

SEQ ID NO: 3005916 - RNA, 19 nt, Artificial Sequence
  Description of Artificial Sequence: Synthetic oligonucleotide
gagaucacgaaugggcaga

SEQ ID NO: 3005917 - RNA, 19 nt, Artificial Sequence
  Description of Artificial Sequence: Synthetic oligonucleotide
ugauguggaagcagcugua

SEQ ID NO: 3005918 - RNA, 19 nt, Artificial Sequence
  Description of Artificial Sequence: Synthetic oligonucleotide
uaccauguuguuccuuuua

SEQ ID NO: 3005919 - RNA, 19 nt, Artificial Sequence
  Description of Artificial Sequence: Synthetic oligonucleotide
cacagugacuccuaggugu

SEQ ID NO: 3005920 - RNA, 19 nt, Artificial Sequence
  Description of Artificial Sequence: Synthetic oligonucleotide
uuagcaugucacgcuauuc

SEQ ID NO: 3005921 - RNA, 19 nt, Artificial Sequence
  Description of Artificial Sequence: Synthetic oligonucleotide
acugaagaugaaucccaaa

SEQ ID NO: 3005922 - RNA, 19 nt, Artificial Sequence
  Description of Artificial Sequence: Synthetic oligonucleotide
gauguggaagcagcuguac

SEQ ID NO: 3005923 - RNA, 19 nt, Artificial Sequence
  Description of Artificial Sequence: Synthetic oligonucleotide
guagaacucugccaaccca

SEQ ID NO: 3005924 - RNA, 19 nt, Artificial Sequence
  Description of Artificial Sequence: Synthetic oligonucleotide
acuggccacugugagauca

SEQ ID NO: 3005925 - RNA, 19 nt, Artificial Sequence
  Description of Artificial Sequence: Synthetic oligonucleotide
ggaaauguggaaaucuuaa

SEQ ID NO: 3005926 - RNA, 19 nt, Artificial Sequence
  Description of Artificial Sequence: Synthetic oligonucleotide
agcuucucagauagugaac

SEQ ID NO: 3005927 - RNA, 19 nt, Artificial Sequence
  Description of Artificial Sequence: Synthetic oligonucleotide
agcucacacaguagaacuc

SEQ ID NO: 3005928 - RNA, 19 nt, Artificial Sequence
  Description of Artificial Sequence: Synthetic oligonucleotide
uaccaggacaaaugucuuc

SEQ ID NO: 3005929 - RNA, 19 nt, Artificial Sequence
  Description of Artificial Sequence: Synthetic oligonucleotide
uggaaaucuuaaguguaua

SEQ ID NO: 3005930 - RNA, 19 nt, Artificial Sequence
  Description of Artificial Sequence: Synthetic oligonucleotide
auaggaagagaaggugugu

SEQ ID NO: 3005931 - RNA, 19 nt, Artificial Sequence
  Description of Artificial Sequence: Synthetic oligonucleotide
gugaacaucucuggagaug

SEQ ID NO: 3005932 - RNA, 19 nt, Artificial Sequence
  Description of Artificial Sequence: Synthetic oligonucleotide
cauguuguuccuuuuaauu

SEQ ID NO: 3005933 - RNA, 19 nt, Artificial Sequence
  Description of Artificial Sequence: Synthetic oligonucleotide
agcaugucacgcuauucua

SEQ ID NO: 3005934 - RNA, 19 nt, Artificial Sequence
  Description of Artificial Sequence: Synthetic oligonucleotide
cucuggagauggaaaugug

SEQ ID NO: 3005935 - RNA, 19 nt, Artificial Sequence
  Description of Artificial Sequence: Synthetic oligonucleotide
aucucuggagauggaaaug

SEQ ID NO: 3005936 - RNA, 19 nt, Artificial Sequence
  Description of Artificial Sequence: Synthetic oligonucleotide
cacgaaugggcagauagga

SEQ ID NO: 3005937 - RNA, 19 nt, Artificial Sequence
  Description of Artificial Sequence: Synthetic oligonucleotide
cucacacaguagaacucug

SEQ ID NO: 3005938 - RNA, 19 nt, Artificial Sequence
  Description of Artificial Sequence: Synthetic oligonucleotide
gcagcuguacuuuagcaaa

SEQ ID NO: 3005939 - RNA, 19 nt, Artificial Sequence
  Description of Artificial Sequence: Synthetic oligonucleotide
guaacuggccacugugaga

SEQ ID NO: 3005940 - RNA, 19 nt, Artificial Sequence
  Description of Artificial Sequence: Synthetic oligonucleotide
cugugagaucacgaauggg

SEQ ID NO: 3005941 - RNA, 19 nt, Artificial Sequence
  Description of Artificial Sequence: Synthetic oligonucleotide
uggguaucuccauuagcuu

SEQ ID NO: 3005942 - RNA, 19 nt, Artificial Sequence
  Description of Artificial Sequence: Synthetic oligonucleotide
gcuucucagauagugaaca

SEQ ID NO: 3005943 - RNA, 19 nt, Artificial Sequence
  Description of Artificial Sequence: Synthetic oligonucleotide
cucagauagugaacaucuc

SEQ ID NO: 3005944 - RNA, 19 nt, Artificial Sequence
  Description of Artificial Sequence: Synthetic oligonucleotide
ggagauggaaauguggaaa

SEQ ID NO: 3005945 - RNA, 19 nt, Artificial Sequence
  Description of Artificial Sequence: Synthetic oligonucleotide
cucucggcagucaggaaca

SEQ ID NO: 3005946 - RNA, 19 nt, Artificial Sequence
  Description of Artificial Sequence: Synthetic oligonucleotide
acgcuauucuagaagcuga

SEQ ID NO: 3005947 - RNA, 19 nt, Artificial Sequence
  Description of Artificial Sequence: Synthetic oligonucleotide
guuuggugcacacauuaau

SEQ ID NO: 3005948 - RNA, 19 nt, Artificial Sequence
  Description of Artificial Sequence: Synthetic oligonucleotide
cuccuagguguaacuggcc

SEQ ID NO: 3005949 - RNA, 19 nt, Artificial Sequence
  Description of Artificial Sequence: Synthetic oligonucleotide
aacuggccacugugagauc

SEQ ID NO: 3005950 - RNA, 19 nt, Artificial Sequence
  Description of Artificial Sequence: Synthetic oligonucleotide
gcagucaggaacauugcac

SEQ ID NO: 3005951 - RNA, 19 nt, Artificial Sequence
  Description of Artificial Sequence: Synthetic oligonucleotide
ugcacacauuaauggguau

SEQ ID NO: 3005952 - RNA, 19 nt, Artificial Sequence
  Description of Artificial Sequence: Synthetic oligonucleotide
agaagcugauguggaagca

SEQ ID NO: 3005953 - RNA, 19 nt, Artificial Sequence
  Description of Artificial Sequence: Synthetic oligonucleotide
uggccacugugagaucacg

SEQ ID NO: 3005954 - RNA, 19 nt, Artificial Sequence
  Description of Artificial Sequence: Synthetic oligonucleotide
agguguaacuggccacugu

SEQ ID NO: 3005955 - RNA, 19 nt, Artificial Sequence
  Description of Artificial Sequence: Synthetic oligonucleotide
cugauguggaagcagcugu

SEQ ID NO: 3005956 - RNA, 19 nt, Artificial Sequence
  Description of Artificial Sequence: Synthetic oligonucleotide
augucacgcuauucuagaa

SEQ ID NO: 3005957 - RNA, 19 nt, Artificial Sequence
  Description of Artificial Sequence: Synthetic oligonucleotide
caguguucuucuaguucac

SEQ ID NO: 3005958 - RNA, 19 nt, Artificial Sequence
  Description of Artificial Sequence: Synthetic oligonucleotide
uccauucacugaagaugaa

SEQ ID NO: 3005959 - RNA, 19 nt, Artificial Sequence
  Description of Artificial Sequence: Synthetic oligonucleotide
gcaugucacgcuauucuag

SEQ ID NO: 3005960 - RNA, 19 nt, Artificial Sequence
  Description of Artificial Sequence: Synthetic oligonucleotide
caaaugucuucuuuagcau

SEQ ID NO: 3005961 - RNA, 19 nt, Artificial Sequence
  Description of Artificial Sequence: Synthetic oligonucleotide
caggaggccuucucucggc

SEQ ID NO: 3005962 - RNA, 19 nt, Artificial Sequence
  Description of Artificial Sequence: Synthetic oligonucleotide
ggaagcagcuguacuuuag

SEQ ID NO: 3005963 - RNA, 19 nt, Artificial Sequence
  Description of Artificial Sequence: Synthetic oligonucleotide
cacacauuaauggguaucu

SEQ ID NO: 3005964 - RNA, 19 nt, Artificial Sequence
  Description of Artificial Sequence: Synthetic oligonucleotide
auaccauguuguuccuuuu

SEQ ID NO: 3005965 - RNA, 19 nt, Artificial Sequence
  Description of Artificial Sequence: Synthetic oligonucleotide
ccuagguguaacuggccac

SEQ ID NO: 3005966 - RNA, 19 nt, Artificial Sequence
  Description of Artificial Sequence: Synthetic oligonucleotide
ugccaacccaguguucuuc

SEQ ID NO: 3005967 - RNA, 19 nt, Artificial Sequence
  Description of Artificial Sequence: Synthetic oligonucleotide
caucucuggagauggaaau

SEQ ID NO: 3005968 - RNA, 19 nt, Artificial Sequence
  Description of Artificial Sequence: Synthetic oligonucleotide
cacugaagaugaaucccaa

SEQ ID NO: 3005969 - RNA, 19 nt, Artificial Sequence
  Description of Artificial Sequence: Synthetic oligonucleotide
augggcagauaggaagaga

SEQ ID NO: 3005970 - RNA, 19 nt, Artificial Sequence
  Description of Artificial Sequence: Synthetic oligonucleotide
aggaggccuucucucggca

SEQ ID NO: 3005971 - RNA, 19 nt, Artificial Sequence
  Description of Artificial Sequence: Synthetic oligonucleotide
ggcagucaggaacauugca

SEQ ID NO: 3005972 - RNA, 19 nt, Artificial Sequence
  Description of Artificial Sequence: Synthetic oligonucleotide
gcuauucuagaagcugaug

SEQ ID NO: 3005973 - RNA, 19 nt, Artificial Sequence
  Description of Artificial Sequence: Synthetic oligonucleotide
gcugauguggaagcagcug

SEQ ID NO: 3005974 - RNA, 19 nt, Artificial Sequence
  Description of Artificial Sequence: Synthetic oligonucleotide
gucuucaggaggccuucuc

SEQ ID NO: 3005975 - RNA, 19 nt, Artificial Sequence
  Description of Artificial Sequence: Synthetic oligonucleotide
cuccauuagcuucucagau

SEQ ID NO: 3005976 - RNA, 19 nt, Artificial Sequence
  Description of Artificial Sequence: Synthetic oligonucleotide
guguaacuggccacuguga

SEQ ID NO: 3005977 - RNA, 19 nt, Artificial Sequence
  Description of Artificial Sequence: Synthetic oligonucleotide
cuggccacugugagaucac

SEQ ID NO: 3005978 - RNA, 19 nt, Artificial Sequence
  Description of Artificial Sequence: Synthetic oligonucleotide
cuaguucacagugacuccu

SEQ ID NO: 3005979 - RNA, 19 nt, Artificial Sequence
  Description of Artificial Sequence: Synthetic oligonucleotide
aggccuucucucggcaguc

SEQ ID NO: 3005980 - RNA, 19 nt, Artificial Sequence
  Description of Artificial Sequence: Synthetic oligonucleotide
agcuguacuuuagcaaaua

SEQ ID NO: 3005981 - RNA, 19 nt, Artificial Sequence
  Description of Artificial Sequence: Synthetic oligonucleotide
ccuuuuaauuccugacuga

SEQ ID NO: 3005982 - RNA, 19 nt, Artificial Sequence
  Description of Artificial Sequence: Synthetic oligonucleotide
cccaguguucuucuaguuc

SEQ ID NO: 3005983 - RNA, 19 nt, Artificial Sequence
  Description of Artificial Sequence: Synthetic oligonucleotide
agcugauguggaagcagcu

SEQ ID NO: 3005984 - RNA, 19 nt, Artificial Sequence
  Description of Artificial Sequence: Synthetic oligonucleotide
gucauguuuggugcacaca

SEQ ID NO: 3005985 - RNA, 19 nt, Artificial Sequence
  Description of Artificial Sequence: Synthetic oligonucleotide
ggugcacacauuaaugggu

SEQ ID NO: 3005986 - RNA, 19 nt, Artificial Sequence
  Description of Artificial Sequence: Synthetic oligonucleotide
gugcacacauuaaugggua

SEQ ID NO: 3005987 - RNA, 19 nt, Artificial Sequence
  Description of Artificial Sequence: Synthetic oligonucleotide
gccacugugagaucacgaa

SEQ ID NO: 3005988 - RNA, 19 nt, Artificial Sequence
  Description of Artificial Sequence: Synthetic oligonucleotide
cauuaauggguaucuccau

SEQ ID NO: 3005989 - RNA, 19 nt, Artificial Sequence
  Description of Artificial Sequence: Synthetic oligonucleotide
gguaucuccauuagcuucu

SEQ ID NO: 3005990 - RNA, 19 nt, Artificial Sequence
  Description of Artificial Sequence: Synthetic oligonucleotide
gaggccuucucucggcagu

SEQ ID NO: 3005991 - RNA, 19 nt, Artificial Sequence
  Description of Artificial Sequence: Synthetic oligonucleotide
gugacuccuagguguaacu

SEQ ID NO: 3005992 - RNA, 19 nt, Artificial Sequence
  Description of Artificial Sequence: Synthetic oligonucleotide
acgaaugggcagauaggaa

SEQ ID NO: 3005993 - RNA, 19 nt, Artificial Sequence
  Description of Artificial Sequence: Synthetic oligonucleotide
gcacacauuaauggguauc

SEQ ID NO: 3005994 - RNA, 19 nt, Artificial Sequence
  Description of Artificial Sequence: Synthetic oligonucleotide
gggcagauaggaagagaag

SEQ ID NO: 3005995 - RNA, 19 nt, Artificial Sequence
  Description of Artificial Sequence: Synthetic oligonucleotide
guguaagagauagccgucu

SEQ ID NO: 3005996 - RNA, 19 nt, Artificial Sequence
  Description of Artificial Sequence: Synthetic oligonucleotide
agaucacgaaugggcagau

SEQ ID NO: 3005997 - RNA, 19 nt, Artificial Sequence
  Description of Artificial Sequence: Synthetic oligonucleotide
cuagguguaacuggccacu

SEQ ID NO: 3005998 - RNA, 19 nt, Artificial Sequence
  Description of Artificial Sequence: Synthetic oligonucleotide
cuuaaguguauaccauguu

SEQ ID NO: 3005999 - RNA, 19 nt, Artificial Sequence
  Description of Artificial Sequence: Synthetic oligonucleotide
uucucucggcagucaggaa

SEQ ID NO: 3006000 - RNA, 19 nt, Artificial Sequence
  Description of Artificial Sequence: Synthetic oligonucleotide
gccuucucucggcagucag

SEQ ID NO: 3006001 - RNA, 19 nt, Artificial Sequence
  Description of Artificial Sequence: Synthetic oligonucleotide
guggaaaucuuaaguguau

SEQ ID NO: 3006002 - RNA, 19 nt, Artificial Sequence
  Description of Artificial Sequence: Synthetic oligonucleotide
cuucuaguucacagugacu

SEQ ID NO: 3006003 - RNA, 19 nt, Artificial Sequence
  Description of Artificial Sequence: Synthetic oligonucleotide
acagugacuccuaggugua

SEQ ID NO: 3006004 - RNA, 19 nt, Artificial Sequence
  Description of Artificial Sequence: Synthetic oligonucleotide
gugucauguuuggugcaca

SEQ ID NO: 3006005 - RNA, 19 nt, Artificial Sequence
  Description of Artificial Sequence: Synthetic oligonucleotide
gaacaucucuggagaugga

SEQ ID NO: 3006006 - RNA, 19 nt, Artificial Sequence
  Description of Artificial Sequence: Synthetic oligonucleotide
cucugccaacccaguguuc

SEQ ID NO: 3006007 - RNA, 19 nt, Artificial Sequence
  Description of Artificial Sequence: Synthetic oligonucleotide
agaagguguguaagagaua

SEQ ID NO: 3006008 - RNA, 19 nt, Artificial Sequence
  Description of Artificial Sequence: Synthetic oligonucleotide
cuuuagcaugucacgcuau

SEQ ID NO: 3006009 - RNA, 19 nt, Artificial Sequence
  Description of Artificial Sequence: Synthetic oligonucleotide
gcuguacuuuagcaaauau

SEQ ID NO: 3006010 - RNA, 19 nt, Artificial Sequence
  Description of Artificial Sequence: Synthetic oligonucleotide
cuucucagauagugaacau

SEQ ID NO: 3006011 - RNA, 19 nt, Artificial Sequence
  Description of Artificial Sequence: Synthetic oligonucleotide
guacuuuagcaaauaucuu

SEQ ID NO: 3006012 - RNA, 19 nt, Artificial Sequence
  Description of Artificial Sequence: Synthetic oligonucleotide
cuaccaggacaaaugucuu

SEQ ID NO: 3006013 - RNA, 19 nt, Artificial Sequence
  Description of Artificial Sequence: Synthetic oligonucleotide
gcucacacaguagaacucu

SEQ ID NO: 3006014 - RNA, 19 nt, Artificial Sequence
  Description of Artificial Sequence: Synthetic oligonucleotide
guggaagcagcuguacuuu

SEQ ID NO: 3006015 - RNA, 19 nt, Artificial Sequence
  Description of Artificial Sequence: Synthetic oligonucleotide
cauguuuggugcacacauu

SEQ ID NO: 3006016 - RNA, 19 nt, Artificial Sequence
  Description of Artificial Sequence: Synthetic oligonucleotide
ucucggcagucaggaacau

SEQ ID NO: 3006017 - RNA, 19 nt, Artificial Sequence
  Description of Artificial Sequence: Synthetic oligonucleotide
ccaaaauagcucacacagu

SEQ ID NO: 3006018 - RNA, 19 nt, Artificial Sequence
  Description of Artificial Sequence: Synthetic oligonucleotide
ggccacugugagaucacga

SEQ ID NO: 3006019 - RNA, 19 nt, Artificial Sequence
  Description of Artificial Sequence: Synthetic oligonucleotide
cauuagcuucucagauagu

SEQ ID NO: 3006020 - RNA, 19 nt, Artificial Sequence
  Description of Artificial Sequence: Synthetic oligonucleotide
cagcuguacuuuagcaaau

SEQ ID NO: 3006021 - RNA, 19 nt, Artificial Sequence
  Description of Artificial Sequence: Synthetic oligonucleotide
gaucacgaaugggcagaua

SEQ ID NO: 3006022 - RNA, 19 nt, Artificial Sequence
  Description of Artificial Sequence: Synthetic oligonucleotide
cugaaacuaccaggacaaa

SEQ ID NO: 3006023 - RNA, 19 nt, Artificial Sequence
  Description of Artificial Sequence: Synthetic oligonucleotide
cggcagucaggaacauugc

SEQ ID NO: 3006024 - RNA, 19 nt, Artificial Sequence
  Description of Artificial Sequence: Synthetic oligonucleotide
gccaacccaguguucuucu

SEQ ID NO: 3006025 - RNA, 19 nt, Artificial Sequence
  Description of Artificial Sequence: Synthetic oligonucleotide
ccauguuguuccuuuuaau

SEQ ID NO: 3006026 - RNA, 19 nt, Artificial Sequence
  Description of Artificial Sequence: Synthetic oligonucleotide
ccauucacugaagaugaau

SEQ ID NO: 3006027 - RNA, 19 nt, Artificial Sequence
  Description of Artificial Sequence: Synthetic oligonucleotide
ccacugugagaucacgaau

SEQ ID NO: 3006028 - RNA, 19 nt, Artificial Sequence
  Description of Artificial Sequence: Synthetic oligonucleotide
cagugacuccuagguguaa

SEQ ID NO: 3006029 - RNA, 19 nt, Artificial Sequence
  Description of Artificial Sequence: Synthetic oligonucleotide
ccgucuucaggaggccuuc

SEQ ID NO: 3006030 - RNA, 19 nt, Artificial Sequence
  Description of Artificial Sequence: Synthetic oligonucleotide
ggccuucucucggcaguca

SEQ ID NO: 3006031 - RNA, 19 nt, Artificial Sequence
  Description of Artificial Sequence: Synthetic oligonucleotide
cugccaacccaguguucuu

SEQ ID NO: 3006032 - RNA, 19 nt, Artificial Sequence
  Description of Artificial Sequence: Synthetic oligonucleotide
ccaacccaguguucuucua

SEQ ID NO: 3006033 - RNA, 19 nt, Artificial Sequence
  Description of Artificial Sequence: Synthetic oligonucleotide
cgcuauucuagaagcugau

SEQ ID NO: 3006034 - RNA, 19 nt, Artificial Sequence
  Description of Artificial Sequence: Synthetic oligonucleotide
cucggcagucaggaacauu

SEQ ID NO: 3006035 - RNA, 19 nt, Artificial Sequence
  Description of Artificial Sequence: Synthetic oligonucleotide
cgucuucaggaggccuucu

SEQ ID NO: 3006036 - RNA, 19 nt, Artificial Sequence
  Description of Artificial Sequence: Synthetic oligonucleotide
aauuuaacaaaguauuugc

SEQ ID NO: 3006037 - RNA, 19 nt, Artificial Sequence
  Description of Artificial Sequence: Synthetic oligonucleotide
auuguauugagucagauac

SEQ ID NO: 3006038 - RNA, 19 nt, Artificial Sequence
  Description of Artificial Sequence: Synthetic oligonucleotide
uauaguauucaaauaaggg

SEQ ID NO: 3006039 - RNA, 19 nt, Artificial Sequence
  Description of Artificial Sequence: Synthetic oligonucleotide
auaguauucaaauaagggg

SEQ ID NO: 3006040 - RNA, 19 nt, Artificial Sequence
  Description of Artificial Sequence: Synthetic oligonucleotide
auaaaauaaaaucaccagg

SEQ ID NO: 3006041 - RNA, 19 nt, Artificial Sequence
  Description of Artificial Sequence: Synthetic oligonucleotide
aauauaacaauuuaacaaa

SEQ ID NO: 3006042 - RNA, 19 nt, Artificial Sequence
  Description of Artificial Sequence: Synthetic oligonucleotide
aaggaaaaggcauacauug

SEQ ID NO: 3006043 - RNA, 19 nt, Artificial Sequence
  Description of Artificial Sequence: Synthetic oligonucleotide
uuuaagaugacauuauugu

SEQ ID NO: 3006044 - RNA, 19 nt, Artificial Sequence
  Description of Artificial Sequence: Synthetic oligonucleotide
uaguauucaaauaaggggc

SEQ ID NO: 3006045 - RNA, 19 nt, Artificial Sequence
  Description of Artificial Sequence: Synthetic oligonucleotide
uuaaaauuggcuaagcauc

SEQ ID NO: 3006046 - RNA, 19 nt, Artificial Sequence
  Description of Artificial Sequence: Synthetic oligonucleotide
gaauauaacaauuuaacaa

SEQ ID NO: 3006047 - RNA, 19 nt, Artificial Sequence
  Description of Artificial Sequence: Synthetic oligonucleotide
uauugagucagauacaaca

SEQ ID NO: 3006048 - RNA, 19 nt, Artificial Sequence
  Description of Artificial Sequence: Synthetic oligonucleotide
aaaaucaccaggcauugag

SEQ ID NO: 3006049 - RNA, 19 nt, Artificial Sequence
  Description of Artificial Sequence: Synthetic oligonucleotide
cauuguacacauaugaucc

SEQ ID NO: 3006050 - RNA, 19 nt, Artificial Sequence
  Description of Artificial Sequence: Synthetic oligonucleotide
uuaacaaaguauuugcuug

SEQ ID NO: 3006051 - RNA, 19 nt, Artificial Sequence
  Description of Artificial Sequence: Synthetic oligonucleotide
aaaggcauacauuguacac

SEQ ID NO: 3006052 - RNA, 19 nt, Artificial Sequence
  Description of Artificial Sequence: Synthetic oligonucleotide
gacauuauuguauugaguc

SEQ ID NO: 3006053 - RNA, 19 nt, Artificial Sequence
  Description of Artificial Sequence: Synthetic oligonucleotide
caugauuuugugaauaugc

SEQ ID NO: 3006054 - RNA, 19 nt, Artificial Sequence
  Description of Artificial Sequence: Synthetic oligonucleotide
agaucauacaacaaggagc

SEQ ID NO: 3006055 - RNA, 19 nt, Artificial Sequence
  Description of Artificial Sequence: Synthetic oligonucleotide
uuugugaauaugcaaaaca

SEQ ID NO: 3006056 - RNA, 19 nt, Artificial Sequence
  Description of Artificial Sequence: Synthetic oligonucleotide
caaaacucugcauaaaagg

SEQ ID NO: 3006057 - RNA, 19 nt, Artificial Sequence
  Description of Artificial Sequence: Synthetic oligonucleotide
auauauguugaauuccuac

SEQ ID NO: 3006058 - RNA, 19 nt, Artificial Sequence
  Description of Artificial Sequence: Synthetic oligonucleotide
uuauagagcuugcaggugg

SEQ ID NO: 3006059 - RNA, 19 nt, Artificial Sequence
  Description of Artificial Sequence: Synthetic oligonucleotide
uuguuauagagcuugcagg

SEQ ID NO: 3006060 - RNA, 19 nt, Artificial Sequence
  Description of Artificial Sequence: Synthetic oligonucleotide
  modified_base (3)..(3): a, c, u, g, unknown or other
acnguaaauuguuauagag

SEQ ID NO: 3006061 - RNA, 19 nt, Artificial Sequence
  Description of Artificial Sequence: Synthetic oligonucleotide
aacauugucaaaacucugc

SEQ ID NO: 3006062 - RNA, 19 nt, Artificial Sequence
  Description of Artificial Sequence: Synthetic oligonucleotide
cugaauauaacaauuuaac

SEQ ID NO: 3006063 - RNA, 19 nt, Artificial Sequence
  Description of Artificial Sequence: Synthetic oligonucleotide
uaaauuguuauagagcuug

SEQ ID NO: 3006064 - RNA, 19 nt, Artificial Sequence
  Description of Artificial Sequence: Synthetic oligonucleotide
aaaguauuugcuuguagcu

SEQ ID NO: 3006065 - RNA, 19 nt, Artificial Sequence
  Description of Artificial Sequence: Synthetic oligonucleotide
aauuggcuaagcaucaagc

SEQ ID NO: 3006066 - RNA, 19 nt, Artificial Sequence
  Description of Artificial Sequence: Synthetic oligonucleotide
ugaauauaacaauuuaaca

SEQ ID NO: 3006067 - RNA, 19 nt, Artificial Sequence
  Description of Artificial Sequence: Synthetic oligonucleotide
acauuguacacauaugauc

SEQ ID NO: 3006068 - RNA, 19 nt, Artificial Sequence
  Description of Artificial Sequence: Synthetic oligonucleotide
aaaauuuaagaugacauua

SEQ ID NO: 3006069 - RNA, 19 nt, Artificial Sequence
  Description of Artificial Sequence: Synthetic oligonucleotide
aucaauuugucuucggcac

SEQ ID NO: 3006070 - RNA, 19 nt, Artificial Sequence
  Description of Artificial Sequence: Synthetic oligonucleotide
uccauauuuauucugaaua

SEQ ID NO: 3006071 - RNA, 19 nt, Artificial Sequence
  Description of Artificial Sequence: Synthetic oligonucleotide
aaauaaaaucaccaggcau

SEQ ID NO: 3006072 - RNA, 19 nt, Artificial Sequence
  Description of Artificial Sequence: Synthetic oligonucleotide
cuauaguauucaaauaagg

SEQ ID NO: 3006073 - RNA, 19 nt, Artificial Sequence
  Description of Artificial Sequence: Synthetic oligonucleotide
auuguuauagagcuugcag

SEQ ID NO: 3006074 - RNA, 19 nt, Artificial Sequence
  Description of Artificial Sequence: Synthetic oligonucleotide
gaucauacaacaaggagcc

SEQ ID NO: 3006075 - RNA, 19 nt, Artificial Sequence
  Description of Artificial Sequence: Synthetic oligonucleotide
uaagaugacauuauuguau

SEQ ID NO: 3006076 - RNA, 19 nt, Artificial Sequence
  Description of Artificial Sequence: Synthetic oligonucleotide
agauacaacaacuuuaaaa

SEQ ID NO: 3006077 - RNA, 19 nt, Artificial Sequence
  Description of Artificial Sequence: Synthetic oligonucleotide
ucaaaacucugcauaaaag

SEQ ID NO: 3006078 - RNA, 19 nt, Artificial Sequence
  Description of Artificial Sequence: Synthetic oligonucleotide
uaacaauuuaacaaaguau

SEQ ID NO: 3006079 - RNA, 19 nt, Artificial Sequence
  Description of Artificial Sequence: Synthetic oligonucleotide
ucugaauauaacaauuuaa

SEQ ID NO: 3006080 - RNA, 19 nt, Artificial Sequence
  Description of Artificial Sequence: Synthetic oligonucleotide
aaaauaaaaucaccaggca

SEQ ID NO: 3006081 - RNA, 19 nt, Artificial Sequence
  Description of Artificial Sequence: Synthetic oligonucleotide
auacauuguacacauauga

SEQ ID NO: 3006082 - RNA, 19 nt, Artificial Sequence
  Description of Artificial Sequence: Synthetic oligonucleotide
  modified_base (16)..(16): a, c, u, g, unknown or other
uaagcaucaagcuacngua

SEQ ID NO: 3006083 - RNA, 19 nt, Artificial Sequence
  Description of Artificial Sequence: Synthetic oligonucleotide
  modified_base (10)..(10): a, c, u, g, unknown or other
ucaagcuacnguaaauugu

SEQ ID NO: 3006084 - RNA, 19 nt, Artificial Sequence
  Description of Artificial Sequence: Synthetic oligonucleotide
aacaauuuaacaaaguauu

SEQ ID NO: 3006085 - RNA, 19 nt, Artificial Sequence
  Description of Artificial Sequence: Synthetic oligonucleotide
ugcauaaaaggaaaaggca

SEQ ID NO: 3006086 - RNA, 19 nt, Artificial Sequence
  Description of Artificial Sequence: Synthetic oligonucleotide
cugcauaaaaggaaaaggc

SEQ ID NO: 3006087 - RNA, 19 nt, Artificial Sequence
  Description of Artificial Sequence: Synthetic oligonucleotide
caaaguauuugcuuguagc

SEQ ID NO: 3006088 - RNA, 19 nt, Artificial Sequence
  Description of Artificial Sequence: Synthetic oligonucleotide
gacaaucaaugcuauaucc

SEQ ID NO: 3006089 - RNA, 19 nt, Artificial Sequence
  Description of Artificial Sequence: Synthetic oligonucleotide
uugugaauaugcaaaacac

SEQ ID NO: 3006090 - RNA, 19 nt, Artificial Sequence
  Description of Artificial Sequence: Synthetic oligonucleotide
uuugcuuguagcuauagua

SEQ ID NO: 3006091 - RNA, 19 nt, Artificial Sequence
  Description of Artificial Sequence: Synthetic oligonucleotide
aaaacauugucaaaacucu

SEQ ID NO: 3006092 - RNA, 19 nt, Artificial Sequence
  Description of Artificial Sequence: Synthetic oligonucleotide
aauuccuacuuaaaauugg

SEQ ID NO: 3006093 - RNA, 19 nt, Artificial Sequence
  Description of Artificial Sequence: Synthetic oligonucleotide
auaacaauuuaacaaagua

SEQ ID NO: 3006094 - RNA, 19 nt, Artificial Sequence
  Description of Artificial Sequence: Synthetic oligonucleotide
ucaccaggcauugagaagg

SEQ ID NO: 3006095 - RNA, 19 nt, Artificial Sequence
  Description of Artificial Sequence: Synthetic oligonucleotide
agcuauaguauucaaauaa

SEQ ID NO: 3006096 - RNA, 19 nt, Artificial Sequence
  Description of Artificial Sequence: Synthetic oligonucleotide
aaauuggcuaagcaucaag

SEQ ID NO: 3006097 - RNA, 19 nt, Artificial Sequence
  Description of Artificial Sequence: Synthetic oligonucleotide
ugugaauaugcaaaacaca

SEQ ID NO: 3006098 - RNA, 19 nt, Artificial Sequence
  Description of Artificial Sequence: Synthetic oligonucleotide
ucauauauguugaauuccu

SEQ ID NO: 3006099 - RNA, 19 nt, Artificial Sequence
  Description of Artificial Sequence: Synthetic oligonucleotide
uauauguugaauuccuacu

SEQ ID NO: 3006100 - RNA, 19 nt, Artificial Sequence
  Description of Artificial Sequence: Synthetic oligonucleotide
aaaaggcauacauuguaca

SEQ ID NO: 3006101 - RNA, 19 nt, Artificial Sequence
  Description of Artificial Sequence: Synthetic oligonucleotide
uaaaauuggcuaagcauca

SEQ ID NO: 3006102 - RNA, 19 nt, Artificial Sequence
  Description of Artificial Sequence: Synthetic oligonucleotide
uauaacaauuuaacaaagu

SEQ ID NO: 3006103 - RNA, 19 nt, Artificial Sequence
  Description of Artificial Sequence: Synthetic oligonucleotide
  modified_base (2)..(2): a, c, u, g, unknown or other
cnguaaauuguuauagagc

SEQ ID NO: 3006104 - RNA, 19 nt, Artificial Sequence
  Description of Artificial Sequence: Synthetic oligonucleotide
aauaaaaucaccaggcauu

SEQ ID NO: 3006105 - RNA, 19 nt, Artificial Sequence
  Description of Artificial Sequence: Synthetic oligonucleotide
uguuauagagcuugcaggu

SEQ ID NO: 3006106 - RNA, 19 nt, Artificial Sequence
  Description of Artificial Sequence: Synthetic oligonucleotide
ugagucagauacaacaacu

SEQ ID NO: 3006107 - RNA, 19 nt, Artificial Sequence
  Description of Artificial Sequence: Synthetic oligonucleotide
aaggccagaucauacaaca

SEQ ID NO: 3006108 - RNA, 19 nt, Artificial Sequence
  Description of Artificial Sequence: Synthetic oligonucleotide
ucagauacaacaacuuuaa

SEQ ID NO: 3006109 - RNA, 19 nt, Artificial Sequence
  Description of Artificial Sequence: Synthetic oligonucleotide
aaaacucugcauaaaagga

SEQ ID NO: 3006110 - RNA, 19 nt, Artificial Sequence
  Description of Artificial Sequence: Synthetic oligonucleotide
uaucaauuugucuucggca

SEQ ID NO: 3006111 - RNA, 19 nt, Artificial Sequence
  Description of Artificial Sequence: Synthetic oligonucleotide
uauauccauauuuauucug

SEQ ID NO: 3006112 - RNA, 19 nt, Artificial Sequence
  Description of Artificial Sequence: Synthetic oligonucleotide
uaugauccuaucaauuugu

SEQ ID NO: 3006113 - RNA, 19 nt, Artificial Sequence
  Description of Artificial Sequence: Synthetic oligonucleotide
uuuaacaaaguauuugcuu

SEQ ID NO: 3006114 - RNA, 19 nt, Artificial Sequence
  Description of Artificial Sequence: Synthetic oligonucleotide
ugaauuccuacuuaaaauu

SEQ ID NO: 3006115 - RNA, 19 nt, Artificial Sequence
  Description of Artificial Sequence: Synthetic oligonucleotide
uacacauaugauccuauca

SEQ ID NO: 3006116 - RNA, 19 nt, Artificial Sequence
  Description of Artificial Sequence: Synthetic oligonucleotide
uugaauuccuacuuaaaau

SEQ ID NO: 3006117 - RNA, 19 nt, Artificial Sequence
  Description of Artificial Sequence: Synthetic oligonucleotide
ugcagguggacaaucaaug

SEQ ID NO: 3006118 - RNA, 19 nt, Artificial Sequence
  Description of Artificial Sequence: Synthetic oligonucleotide
  modified_base (5)..(5): a, c, u, g, unknown or other
cuacnguaaauuguuauag

SEQ ID NO: 3006119 - RNA, 19 nt, Artificial Sequence
  Description of Artificial Sequence: Synthetic oligonucleotide
uggcuaagcaucaagcuac

SEQ ID NO: 3006120 - RNA, 19 nt, Artificial Sequence
  Description of Artificial Sequence: Synthetic oligonucleotide
augacauuauuguauugag

SEQ ID NO: 3006121 - RNA, 19 nt, Artificial Sequence
  Description of Artificial Sequence: Synthetic oligonucleotide
auugucaaaacucugcaua

SEQ ID NO: 3006122 - RNA, 19 nt, Artificial Sequence
  Description of Artificial Sequence: Synthetic oligonucleotide
ugucauauauguugaauuc

SEQ ID NO: 3006123 - RNA, 19 nt, Artificial Sequence
  Description of Artificial Sequence: Synthetic oligonucleotide
cauuauuguauugagucag

SEQ ID NO: 3006124 - RNA, 19 nt, Artificial Sequence
  Description of Artificial Sequence: Synthetic oligonucleotide
auuuaagaugacauuauug

SEQ ID NO: 3006125 - RNA, 19 nt, Artificial Sequence
  Description of Artificial Sequence: Synthetic oligonucleotide
auaugauccuaucaauuug

SEQ ID NO: 3006126 - RNA, 19 nt, Artificial Sequence
  Description of Artificial Sequence: Synthetic oligonucleotide
gcuauauccauauuuauuc

SEQ ID NO: 3006127 - RNA, 19 nt, Artificial Sequence
  Description of Artificial Sequence: Synthetic oligonucleotide
caauuuaacaaaguauuug

SEQ ID NO: 3006128 - RNA, 19 nt, Artificial Sequence
  Description of Artificial Sequence: Synthetic oligonucleotide
aauuuaagaugacauuauu

SEQ ID NO: 3006129 - RNA, 19 nt, Artificial Sequence
  Description of Artificial Sequence: Synthetic oligonucleotide
gauuuugugaauaugcaaa

SEQ ID NO: 3006130 - RNA, 19 nt, Artificial Sequence
  Description of Artificial Sequence: Synthetic oligonucleotide
aaucaccaggcauugagaa

SEQ ID NO: 3006131 - RNA, 19 nt, Artificial Sequence
  Description of Artificial Sequence: Synthetic oligonucleotide
uuauucugaauauaacaau

SEQ ID NO: 3006132 - RNA, 19 nt, Artificial Sequence
  Description of Artificial Sequence: Synthetic oligonucleotide
auuccuacuuaaaauuggc

SEQ ID NO: 3006133 - RNA, 19 nt, Artificial Sequence
  Description of Artificial Sequence: Synthetic oligonucleotide
uccuacuuaaaauuggcua

SEQ ID NO: 3006134 - RNA, 19 nt, Artificial Sequence
  Description of Artificial Sequence: Synthetic oligonucleotide
uguagcuauaguauucaaa

SEQ ID NO: 3006135 - RNA, 19 nt, Artificial Sequence
  Description of Artificial Sequence: Synthetic oligonucleotide
acuuaaaauuggcuaagca

SEQ ID NO: 3006136 - RNA, 19 nt, Artificial Sequence
  Description of Artificial Sequence: Synthetic oligonucleotide
aaauuguuauagagcuugc

SEQ ID NO: 3006137 - RNA, 19 nt, Artificial Sequence
  Description of Artificial Sequence: Synthetic oligonucleotide
aucaaugcuauauccauau

SEQ ID NO: 3006138 - RNA, 19 nt, Artificial Sequence
  Description of Artificial Sequence: Synthetic oligonucleotide
aaugcuauauccauauuua

SEQ ID NO: 3006139 - RNA, 19 nt, Artificial Sequence
  Description of Artificial Sequence: Synthetic oligonucleotide
cuaucaauuugucuucggc

SEQ ID NO: 3006140 - RNA, 19 nt, Artificial Sequence
  Description of Artificial Sequence: Synthetic oligonucleotide
gaugacauuauuguauuga

SEQ ID NO: 3006141 - RNA, 19 nt, Artificial Sequence
  Description of Artificial Sequence: Synthetic oligonucleotide
acacauaugauccuaucaa

SEQ ID NO: 3006142 - RNA, 19 nt, Artificial Sequence
  Description of Artificial Sequence: Synthetic oligonucleotide
aguauuugcuuguagcuau

SEQ ID NO: 3006143 - RNA, 19 nt, Artificial Sequence
  Description of Artificial Sequence: Synthetic oligonucleotide
  modified_base (11)..(11): a, c, u, g, unknown or other
aucaagcuacnguaaauug

SEQ ID NO: 3006144 - RNA, 19 nt, Artificial Sequence
  Description of Artificial Sequence: Synthetic oligonucleotide
ugauuuugugaauaugcaa

SEQ ID NO: 3006145 - RNA, 19 nt, Artificial Sequence
  Description of Artificial Sequence: Synthetic oligonucleotide
gaauuccuacuuaaaauug

SEQ ID NO: 3006146 - RNA, 19 nt, Artificial Sequence
  Description of Artificial Sequence: Synthetic oligonucleotide
uguauugagucagauacaa

SEQ ID NO: 3006147 - RNA, 19 nt, Artificial Sequence
  Description of Artificial Sequence: Synthetic oligonucleotide
  modified_base (4)..(4): a, c, u, g, unknown or other
uacnguaaauuguuauaga

SEQ ID NO: 3006148 - RNA, 19 nt, Artificial Sequence
  Description of Artificial Sequence: Synthetic oligonucleotide
uggacaaucaaugcuauau

SEQ ID NO: 3006149 - RNA, 19 nt, Artificial Sequence
  Description of Artificial Sequence: Synthetic oligonucleotide
uucugaauauaacaauuua

SEQ ID NO: 3006150 - RNA, 19 nt, Artificial Sequence
  Description of Artificial Sequence: Synthetic oligonucleotide
auauaacaauuuaacaaag

SEQ ID NO: 3006151 - RNA, 19 nt, Artificial Sequence
  Description of Artificial Sequence: Synthetic oligonucleotide
cauugagaaggccagauca

SEQ ID NO: 3006152 - RNA, 19 nt, Artificial Sequence
  Description of Artificial Sequence: Synthetic oligonucleotide
ugaauaugcaaaacacaaa

SEQ ID NO: 3006153 - RNA, 19 nt, Artificial Sequence
  Description of Artificial Sequence: Synthetic oligonucleotide
cagaucauacaacaaggag

SEQ ID NO: 3006154 - RNA, 19 nt, Artificial Sequence
  Description of Artificial Sequence: Synthetic oligonucleotide
acaacaaggagccaugauu

SEQ ID NO: 3006155 - RNA, 19 nt, Artificial Sequence
  Description of Artificial Sequence: Synthetic oligonucleotide
uuaagaugacauuauugua

SEQ ID NO: 3006156 - RNA, 19 nt, Artificial Sequence
  Description of Artificial Sequence: Synthetic oligonucleotide
auuggcuaagcaucaagcu

SEQ ID NO: 3006157 - RNA, 19 nt, Artificial Sequence
  Description of Artificial Sequence: Synthetic oligonucleotide
aaauuuaagaugacauuau

SEQ ID NO: 3006158 - RNA, 19 nt, Artificial Sequence
  Description of Artificial Sequence: Synthetic oligonucleotide
ugagaaggccagaucauac

SEQ ID NO: 3006159 - RNA, 19 nt, Artificial Sequence
  Description of Artificial Sequence: Synthetic oligonucleotide
acaaaguauuugcuuguag

SEQ ID NO: 3006160 - RNA, 19 nt, Artificial Sequence
  Description of Artificial Sequence: Synthetic oligonucleotide
uugagucagauacaacaac

SEQ ID NO: 3006161 - RNA, 19 nt, Artificial Sequence
  Description of Artificial Sequence: Synthetic oligonucleotide
gauccuaucaauuugucuu

SEQ ID NO: 3006162 - RNA, 19 nt, Artificial Sequence
  Description of Artificial Sequence: Synthetic oligonucleotide
uaacaaaguauuugcuugu

SEQ ID NO: 3006163 - RNA, 19 nt, Artificial Sequence
  Description of Artificial Sequence: Synthetic oligonucleotide
auccuaucaauuugucuuc

SEQ ID NO: 3006164 - RNA, 19 nt, Artificial Sequence
  Description of Artificial Sequence: Synthetic oligonucleotide
  modified_base (7)..(7): a, c, u, g, unknown or other
agcuacnguaaauuguuau

SEQ ID NO: 3006165 - RNA, 19 nt, Artificial Sequence
  Description of Artificial Sequence: Synthetic oligonucleotide
acauugucaaaacucugca

SEQ ID NO: 3006166 - RNA, 19 nt, Artificial Sequence
  Description of Artificial Sequence: Synthetic oligonucleotide
ugacauuauuguauugagu

SEQ ID NO: 3006167 - RNA, 19 nt, Artificial Sequence
  Description of Artificial Sequence: Synthetic oligonucleotide
uugcuuguagcuauaguau

SEQ ID NO: 3006168 - RNA, 19 nt, Artificial Sequence
  Description of Artificial Sequence: Synthetic oligonucleotide
ucaauuugucuucggcacc

SEQ ID NO: 3006169 - RNA, 19 nt, Artificial Sequence
  Description of Artificial Sequence: Synthetic oligonucleotide
aaggcauacauuguacaca

SEQ ID NO: 3006170 - RNA, 19 nt, Artificial Sequence
  Description of Artificial Sequence: Synthetic oligonucleotide
guugaauuccuacuuaaaa

SEQ ID NO: 3006171 - RNA, 19 nt, Artificial Sequence
  Description of Artificial Sequence: Synthetic oligonucleotide
auuuugugaauaugcaaaa

SEQ ID NO: 3006172 - RNA, 19 nt, Artificial Sequence
  Description of Artificial Sequence: Synthetic oligonucleotide
acauuauuguauugaguca

SEQ ID NO: 3006173 - RNA, 19 nt, Artificial Sequence
  Description of Artificial Sequence: Synthetic oligonucleotide
ugcuauauccauauuuauu

SEQ ID NO: 3006174 - RNA, 19 nt, Artificial Sequence
  Description of Artificial Sequence: Synthetic oligonucleotide
guagcuauaguauucaaau

SEQ ID NO: 3006175 - RNA, 19 nt, Artificial Sequence
  Description of Artificial Sequence: Synthetic oligonucleotide
uauguugaauuccuacuua

SEQ ID NO: 3006176 - RNA, 19 nt, Artificial Sequence
  Description of Artificial Sequence: Synthetic oligonucleotide
auauguugaauuccuacuu

SEQ ID NO: 3006177 - RNA, 19 nt, Artificial Sequence
  Description of Artificial Sequence: Synthetic oligonucleotide
cauacauuguacacauaug

SEQ ID NO: 3006178 - RNA, 19 nt, Artificial Sequence
  Description of Artificial Sequence: Synthetic oligonucleotide
gaaaaggcauacauuguac

SEQ ID NO: 3006179 - RNA, 19 nt, Artificial Sequence
  Description of Artificial Sequence: Synthetic oligonucleotide
ugauccuaucaauuugucu

SEQ ID NO: 3006180 - RNA, 19 nt, Artificial Sequence
  Description of Artificial Sequence: Synthetic oligonucleotide
gugaauaugcaaaacacaa

SEQ ID NO: 3006181 - RNA, 19 nt, Artificial Sequence
  Description of Artificial Sequence: Synthetic oligonucleotide
aauuguuauagagcuugca

SEQ ID NO: 3006182 - RNA, 19 nt, Artificial Sequence
  Description of Artificial Sequence: Synthetic oligonucleotide
uugucaaaacucugcauaa

SEQ ID NO: 3006183 - RNA, 19 nt, Artificial Sequence
  Description of Artificial Sequence: Synthetic oligonucleotide
gucauauauguugaauucc

SEQ ID NO: 3006184 - RNA, 19 nt, Artificial Sequence
  Description of Artificial Sequence: Synthetic oligonucleotide
uuggcuaagcaucaagcua

SEQ ID NO: 3006185 - RNA, 19 nt, Artificial Sequence
  Description of Artificial Sequence: Synthetic oligonucleotide
auaaaaucaccaggcauug

SEQ ID NO: 3006186 - RNA, 19 nt, Artificial Sequence
  Description of Artificial Sequence: Synthetic oligonucleotide
ucauacaacaaggagccau

SEQ ID NO: 3006187 - RNA, 19 nt, Artificial Sequence
  Description of Artificial Sequence: Synthetic oligonucleotide
cauacaacaaggagccaug

SEQ ID NO: 3006188 - RNA, 19 nt, Artificial Sequence
  Description of Artificial Sequence: Synthetic oligonucleotide
cuuaaaauuggcuaagcau

SEQ ID NO: 3006189 - RNA, 19 nt, Artificial Sequence
  Description of Artificial Sequence: Synthetic oligonucleotide
uguugaauuccuacuuaaa

SEQ ID NO: 3006190 - RNA, 19 nt, Artificial Sequence
  Description of Artificial Sequence: Synthetic oligonucleotide
uuccuacuuaaaauuggcu

SEQ ID NO: 3006191 - RNA, 19 nt, Artificial Sequence
  Description of Artificial Sequence: Synthetic oligonucleotide
aaacucugcauaaaaggaa

SEQ ID NO: 3006192 - RNA, 19 nt, Artificial Sequence
  Description of Artificial Sequence: Synthetic oligonucleotide
uauuguauugagucagaua

SEQ ID NO: 3006193 - RNA, 19 nt, Artificial Sequence
  Description of Artificial Sequence: Synthetic oligonucleotide
auauccauauuuauucuga

SEQ ID NO: 3006194 - RNA, 19 nt, Artificial Sequence
  Description of Artificial Sequence: Synthetic oligonucleotide
aaacauugucaaaacucug

SEQ ID NO: 3006195 - RNA, 19 nt, Artificial Sequence
  Description of Artificial Sequence: Synthetic oligonucleotide
uuguauugagucagauaca

SEQ ID NO: 3006196 - RNA, 19 nt, Artificial Sequence
  Description of Artificial Sequence: Synthetic oligonucleotide
uguacacauaugauccuau

SEQ ID NO: 3006197 - RNA, 19 nt, Artificial Sequence
  Description of Artificial Sequence: Synthetic oligonucleotide
  modified_base (14)..(14): a, c, u, g, unknown or other
agcaucaagcuacnguaaa

SEQ ID NO: 3006198 - RNA, 19 nt, Artificial Sequence
  Description of Artificial Sequence: Synthetic oligonucleotide
aacucugcauaaaaggaaa

SEQ ID NO: 3006199 - RNA, 19 nt, Artificial Sequence
  Description of Artificial Sequence: Synthetic oligonucleotide
aauuugucuucggcacccc

SEQ ID NO: 3006200 - RNA, 19 nt, Artificial Sequence
  Description of Artificial Sequence: Synthetic oligonucleotide
auuuaacaaaguauuugcu

SEQ ID NO: 3006201 - RNA, 19 nt, Artificial Sequence
  Description of Artificial Sequence: Synthetic oligonucleotide
agagcuugcagguggacaa

SEQ ID NO: 3006202 - RNA, 19 nt, Artificial Sequence
  Description of Artificial Sequence: Synthetic oligonucleotide
aaaggaaaaggcauacauu

SEQ ID NO: 3006203 - RNA, 19 nt, Artificial Sequence
  Description of Artificial Sequence: Synthetic oligonucleotide
uauuugcuuguagcuauag

SEQ ID NO: 3006204 - RNA, 19 nt, Artificial Sequence
  Description of Artificial Sequence: Synthetic oligonucleotide
uauagagcuugcaggugga

SEQ ID NO: 3006205 - RNA, 19 nt, Artificial Sequence
  Description of Artificial Sequence: Synthetic oligonucleotide
ggagccaugauuuugugaa

SEQ ID NO: 3006206 - RNA, 19 nt, Artificial Sequence
  Description of Artificial Sequence: Synthetic oligonucleotide
aggcauacauuguacacau

SEQ ID NO: 3006207 - RNA, 19 nt, Artificial Sequence
  Description of Artificial Sequence: Synthetic oligonucleotide
cuacuuaaaauuggcuaag

SEQ ID NO: 3006208 - RNA, 19 nt, Artificial Sequence
  Description of Artificial Sequence: Synthetic oligonucleotide
auguugaauuccuacuuaa

SEQ ID NO: 3006209 - RNA, 19 nt, Artificial Sequence
  Description of Artificial Sequence: Synthetic oligonucleotide
acaaucaaugcuauaucca

SEQ ID NO: 3006210 - RNA, 19 nt, Artificial Sequence
  Description of Artificial Sequence: Synthetic oligonucleotide
caggcauugagaaggccag

SEQ ID NO: 3006211 - RNA, 19 nt, Artificial Sequence
  Description of Artificial Sequence: Synthetic oligonucleotide
agaaggccagaucauacaa

SEQ ID NO: 3006212 - RNA, 19 nt, Artificial Sequence
  Description of Artificial Sequence: Synthetic oligonucleotide
ggccagaucauacaacaag

SEQ ID NO: 3006213 - RNA, 19 nt, Artificial Sequence
  Description of Artificial Sequence: Synthetic oligonucleotide
uauccauauuuauucugaa

SEQ ID NO: 3006214 - RNA, 19 nt, Artificial Sequence
  Description of Artificial Sequence: Synthetic oligonucleotide
uccuaucaauuugucuucg

SEQ ID NO: 3006215 - RNA, 19 nt, Artificial Sequence
  Description of Artificial Sequence: Synthetic oligonucleotide
cauaaaaggaaaaggcaua

SEQ ID NO: 3006216 - RNA, 19 nt, Artificial Sequence
  Description of Artificial Sequence: Synthetic oligonucleotide
agucagauacaacaacuuu

SEQ ID NO: 3006217 - RNA, 19 nt, Artificial Sequence
  Description of Artificial Sequence: Synthetic oligonucleotide
auuguacacauaugauccu

SEQ ID NO: 3006218 - RNA, 19 nt, Artificial Sequence
  Description of Artificial Sequence: Synthetic oligonucleotide
gucaaaacucugcauaaaa

SEQ ID NO: 3006219 - RNA, 19 nt, Artificial Sequence
  Description of Artificial Sequence: Synthetic oligonucleotide
aguauucaaauaaggggca

SEQ ID NO: 3006220 - RNA, 19 nt, Artificial Sequence
  Description of Artificial Sequence: Synthetic oligonucleotide
gcuauaguauucaaauaag

SEQ ID NO: 3006221 - RNA, 19 nt, Artificial Sequence
  Description of Artificial Sequence: Synthetic oligonucleotide
caauuugucuucggcaccc

SEQ ID NO: 3006222 - RNA, 19 nt, Artificial Sequence
  Description of Artificial Sequence: Synthetic oligonucleotide
aaguauuugcuuguagcua

SEQ ID NO: 3006223 - RNA, 19 nt, Artificial Sequence
  Description of Artificial Sequence: Synthetic oligonucleotide
auuugcuuguagcuauagu

SEQ ID NO: 3006224 - RNA, 19 nt, Artificial Sequence
  Description of Artificial Sequence: Synthetic oligonucleotide
aucaccaggcauugagaag

SEQ ID NO: 3006225 - RNA, 19 nt, Artificial Sequence
  Description of Artificial Sequence: Synthetic oligonucleotide
augauuuugugaauaugca

SEQ ID NO: 3006226 - RNA, 19 nt, Artificial Sequence
  Description of Artificial Sequence: Synthetic oligonucleotide
aaaucaccaggcauugaga

SEQ ID NO: 3006227 - RNA, 19 nt, Artificial Sequence
  Description of Artificial Sequence: Synthetic oligonucleotide
uauucaaauaaggggcaaa

SEQ ID NO: 3006228 - RNA, 19 nt, Artificial Sequence
  Description of Artificial Sequence: Synthetic oligonucleotide
auucaaauaaggggcaaaa

SEQ ID NO: 3006229 - RNA, 19 nt, Artificial Sequence
  Description of Artificial Sequence: Synthetic oligonucleotide
gccagaucauacaacaagg

SEQ ID NO: 3006230 - RNA, 19 nt, Artificial Sequence
  Description of Artificial Sequence: Synthetic oligonucleotide
aaggagccaugauuuugug

SEQ ID NO: 3006231 - RNA, 19 nt, Artificial Sequence
  Description of Artificial Sequence: Synthetic oligonucleotide
auccauauuuauucugaau

SEQ ID NO: 3006232 - RNA, 19 nt, Artificial Sequence
  Description of Artificial Sequence: Synthetic oligonucleotide
cccugugucauauauguug

SEQ ID NO: 3006233 - RNA, 19 nt, Artificial Sequence
  Description of Artificial Sequence: Synthetic oligonucleotide
acaaggagccaugauuuug

SEQ ID NO: 3006234 - RNA, 19 nt, Artificial Sequence
  Description of Artificial Sequence: Synthetic oligonucleotide
uuauuguauugagucagau

SEQ ID NO: 3006235 - RNA, 19 nt, Artificial Sequence
  Description of Artificial Sequence: Synthetic oligonucleotide
uugcagguggacaaucaau

SEQ ID NO: 3006236 - RNA, 19 nt, Artificial Sequence
  Description of Artificial Sequence: Synthetic oligonucleotide
gagaaggccagaucauaca

SEQ ID NO: 3006237 - RNA, 19 nt, Artificial Sequence
  Description of Artificial Sequence: Synthetic oligonucleotide
ugcuuguagcuauaguauu

SEQ ID NO: 3006238 - RNA, 19 nt, Artificial Sequence
  Description of Artificial Sequence: Synthetic oligonucleotide
auugagucagauacaacaa

SEQ ID NO: 3006239 - RNA, 19 nt, Artificial Sequence
  Description of Artificial Sequence: Synthetic oligonucleotide
gucagauacaacaacuuua

SEQ ID NO: 3006240 - RNA, 19 nt, Artificial Sequence
  Description of Artificial Sequence: Synthetic oligonucleotide
uacaacaaggagccaugau

SEQ ID NO: 3006241 - RNA, 19 nt, Artificial Sequence
  Description of Artificial Sequence: Synthetic oligonucleotide
auucugaauauaacaauuu

SEQ ID NO: 3006242 - RNA, 19 nt, Artificial Sequence
  Description of Artificial Sequence: Synthetic oligonucleotide
augcuauauccauauuuau

SEQ ID NO: 3006243 - RNA, 19 nt, Artificial Sequence
  Description of Artificial Sequence: Synthetic oligonucleotide
uagcuauaguauucaaaua

SEQ ID NO: 3006244 - RNA, 19 nt, Artificial Sequence
  Description of Artificial Sequence: Synthetic oligonucleotide
aacaaggagccaugauuuu

SEQ ID NO: 3006245 - RNA, 19 nt, Artificial Sequence
  Description of Artificial Sequence: Synthetic oligonucleotide
aaucaaugcuauauccaua

SEQ ID NO: 3006246 - RNA, 19 nt, Artificial Sequence
  Description of Artificial Sequence: Synthetic oligonucleotide
  modified_base (17)..(17): a, c, u, g, unknown or other
cuaagcaucaagcuacngu

SEQ ID NO: 3006247 - RNA, 19 nt, Artificial Sequence
  Description of Artificial Sequence: Synthetic oligonucleotide
cuuguagcuauaguauuca

SEQ ID NO: 3006248 - RNA, 19 nt, Artificial Sequence
  Description of Artificial Sequence: Synthetic oligonucleotide
uagagcuugcagguggaca

SEQ ID NO: 3006249 - RNA, 19 nt, Artificial Sequence
  Description of Artificial Sequence: Synthetic oligonucleotide
acauaugauccuaucaauu

SEQ ID NO: 3006250 - RNA, 19 nt, Artificial Sequence
  Description of Artificial Sequence: Synthetic oligonucleotide
aaaauuggcuaagcaucaa

SEQ ID NO: 3006251 - RNA, 19 nt, Artificial Sequence
  Description of Artificial Sequence: Synthetic oligonucleotide
aacaaaguauuugcuugua

SEQ ID NO: 3006252 - RNA, 19 nt, Artificial Sequence
  Description of Artificial Sequence: Synthetic oligonucleotide
ggaaaaggcauacauugua

SEQ ID NO: 3006253 - RNA, 19 nt, Artificial Sequence
  Description of Artificial Sequence: Synthetic oligonucleotide
guuauagagcuugcaggug

SEQ ID NO: 3006254 - RNA, 19 nt, Artificial Sequence
  Description of Artificial Sequence: Synthetic oligonucleotide
augauccuaucaauuuguc

SEQ ID NO: 3006255 - RNA, 19 nt, Artificial Sequence
  Description of Artificial Sequence: Synthetic oligonucleotide
aggagccaugauuuuguga

SEQ ID NO: 3006256 - RNA, 19 nt, Artificial Sequence
  Description of Artificial Sequence: Synthetic oligonucleotide
gaaggccagaucauacaac

SEQ ID NO: 3006257 - RNA, 19 nt, Artificial Sequence
  Description of Artificial Sequence: Synthetic oligonucleotide
gugucauauauguugaauu

SEQ ID NO: 3006258 - RNA, 19 nt, Artificial Sequence
  Description of Artificial Sequence: Synthetic oligonucleotide
cauaugauccuaucaauuu

SEQ ID NO: 3006259 - RNA, 19 nt, Artificial Sequence
  Description of Artificial Sequence: Synthetic oligonucleotide
guacacauaugauccuauc

SEQ ID NO: 3006260 - RNA, 19 nt, Artificial Sequence
  Description of Artificial Sequence: Synthetic oligonucleotide
uuguagcuauaguauucaa

SEQ ID NO: 3006261 - RNA, 19 nt, Artificial Sequence
  Description of Artificial Sequence: Synthetic oligonucleotide
ugucaaaacucugcauaaa

SEQ ID NO: 3006262 - RNA, 19 nt, Artificial Sequence
  Description of Artificial Sequence: Synthetic oligonucleotide
auuauuguauugagucaga

SEQ ID NO: 3006263 - RNA, 19 nt, Artificial Sequence
  Description of Artificial Sequence: Synthetic oligonucleotide
caaugcuauauccauauuu

SEQ ID NO: 3006264 - RNA, 19 nt, Artificial Sequence
  Description of Artificial Sequence: Synthetic oligonucleotide
ccuacuuaaaauuggcuaa

SEQ ID NO: 3006265 - RNA, 19 nt, Artificial Sequence
  Description of Artificial Sequence: Synthetic oligonucleotide
caaucaaugcuauauccau

SEQ ID NO: 3006266 - RNA, 19 nt, Artificial Sequence
  Description of Artificial Sequence: Synthetic oligonucleotide
  modified_base (9)..(9): a, c, u, g, unknown or other
caagcuacnguaaauuguu

SEQ ID NO: 3006267 - RNA, 19 nt, Artificial Sequence
  Description of Artificial Sequence: Synthetic oligonucleotide
gcauacauuguacacauau

SEQ ID NO: 3006268 - RNA, 19 nt, Artificial Sequence
  Description of Artificial Sequence: Synthetic oligonucleotide
uugagaaggccagaucaua

SEQ ID NO: 3006269 - RNA, 19 nt, Artificial Sequence
  Description of Artificial Sequence: Synthetic oligonucleotide
auagagcuugcagguggac

SEQ ID NO: 3006270 - RNA, 19 nt, Artificial Sequence
  Description of Artificial Sequence: Synthetic oligonucleotide
ggacaaucaaugcuauauc

SEQ ID NO: 3006271 - RNA, 19 nt, Artificial Sequence
  Description of Artificial Sequence: Synthetic oligonucleotide
uaaaaucaccaggcauuga

SEQ ID NO: 3006272 - RNA, 19 nt, Artificial Sequence
  Description of Artificial Sequence: Synthetic oligonucleotide
cuauauccauauuuauucu

SEQ ID NO: 3006273 - RNA, 19 nt, Artificial Sequence
  Description of Artificial Sequence: Synthetic oligonucleotide
caacaaggagccaugauuu

SEQ ID NO: 3006274 - RNA, 19 nt, Artificial Sequence
  Description of Artificial Sequence: Synthetic oligonucleotide
gcagguggacaaucaaugc

SEQ ID NO: 3006275 - RNA, 19 nt, Artificial Sequence
  Description of Artificial Sequence: Synthetic oligonucleotide
ucaaugcuauauccauauu

SEQ ID NO: 3006276 - RNA, 19 nt, Artificial Sequence
  Description of Artificial Sequence: Synthetic oligonucleotide
agguggacaaucaaugcua

SEQ ID NO: 3006277 - RNA, 19 nt, Artificial Sequence
  Description of Artificial Sequence: Synthetic oligonucleotide
agcuugcagguggacaauc

SEQ ID NO: 3006278 - RNA, 19 nt, Artificial Sequence
  Description of Artificial Sequence: Synthetic oligonucleotide
aggaaaaggcauacauugu

SEQ ID NO: 3006279 - RNA, 19 nt, Artificial Sequence
  Description of Artificial Sequence: Synthetic oligonucleotide
  modified_base (6)..(6): a, c, u, g, unknown or other
gcuacnguaaauuguuaua

SEQ ID NO: 3006280 - RNA, 19 nt, Artificial Sequence
  Description of Artificial Sequence: Synthetic oligonucleotide
cauauauguugaauuccua

SEQ ID NO: 3006281 - RNA, 19 nt, Artificial Sequence
  Description of Artificial Sequence: Synthetic oligonucleotide
auugagaaggccagaucau

SEQ ID NO: 3006282 - RNA, 19 nt, Artificial Sequence
  Description of Artificial Sequence: Synthetic oligonucleotide
auacaacaaggagccauga

SEQ ID NO: 3006283 - RNA, 19 nt, Artificial Sequence
  Description of Artificial Sequence: Synthetic oligonucleotide
  modified_base (15)..(15): a, c, u, g, unknown or other
aagcaucaagcuacnguaa

SEQ ID NO: 3006284 - RNA, 19 nt, Artificial Sequence
  Description of Artificial Sequence: Synthetic oligonucleotide
ccuaucaauuugucuucgg

SEQ ID NO: 3006285 - RNA, 19 nt, Artificial Sequence
  Description of Artificial Sequence: Synthetic oligonucleotide
caaggagccaugauuuugu

SEQ ID NO: 3006286 - RNA, 19 nt, Artificial Sequence
  Description of Artificial Sequence: Synthetic oligonucleotide
agccaugauuuugugaaua

SEQ ID NO: 3006287 - RNA, 19 nt, Artificial Sequence
  Description of Artificial Sequence: Synthetic oligonucleotide
guauugagucagauacaac

SEQ ID NO: 3006288 - RNA, 19 nt, Artificial Sequence
  Description of Artificial Sequence: Synthetic oligonucleotide
caccaggcauugagaaggc

SEQ ID NO: 3006289 - RNA, 19 nt, Artificial Sequence
  Description of Artificial Sequence: Synthetic oligonucleotide
gcauaaaaggaaaaggcau

SEQ ID NO: 3006290 - RNA, 19 nt, Artificial Sequence
  Description of Artificial Sequence: Synthetic oligonucleotide
gcuuguagcuauaguauuc

SEQ ID NO: 3006291 - RNA, 19 nt, Artificial Sequence
  Description of Artificial Sequence: Synthetic oligonucleotide
cuugcagguggacaaucaa

SEQ ID NO: 3006292 - RNA, 19 nt, Artificial Sequence
  Description of Artificial Sequence: Synthetic oligonucleotide
cacauaugauccuaucaau

SEQ ID NO: 3006293 - RNA, 19 nt, Artificial Sequence
  Description of Artificial Sequence: Synthetic oligonucleotide
ccaggcauugagaaggcca

SEQ ID NO: 3006294 - RNA, 19 nt, Artificial Sequence
  Description of Artificial Sequence: Synthetic oligonucleotide
cagguggacaaucaaugcu

SEQ ID NO: 3006295 - RNA, 19 nt, Artificial Sequence
  Description of Artificial Sequence: Synthetic oligonucleotide
guauucaaauaaggggcaa

SEQ ID NO: 3006296 - RNA, 19 nt, Artificial Sequence
  Description of Artificial Sequence: Synthetic oligonucleotide
  modified_base (8)..(8): a, c, u, g, unknown or other
aagcuacnguaaauuguua

SEQ ID NO: 3006297 - RNA, 19 nt, Artificial Sequence
  Description of Artificial Sequence: Synthetic oligonucleotide
ccagaucauacaacaagga

SEQ ID NO: 3006298 - RNA, 19 nt, Artificial Sequence
  Description of Artificial Sequence: Synthetic oligonucleotide
acucugcauaaaaggaaaa

SEQ ID NO: 3006299 - RNA, 19 nt, Artificial Sequence
  Description of Artificial Sequence: Synthetic oligonucleotide
gagucagauacaacaacuu

SEQ ID NO: 3006300 - RNA, 19 nt, Artificial Sequence
  Description of Artificial Sequence: Synthetic oligonucleotide
cauugucaaaacucugcau

SEQ ID NO: 3006301 - RNA, 19 nt, Artificial Sequence
  Description of Artificial Sequence: Synthetic oligonucleotide
ccaugauuuugugaauaug

SEQ ID NO: 3006302 - RNA, 19 nt, Artificial Sequence
  Description of Artificial Sequence: Synthetic oligonucleotide
  modified_base (12)..(12): a, c, u, g, unknown or other
caucaagcuacnguaaauu

SEQ ID NO: 3006303 - RNA, 19 nt, Artificial Sequence
  Description of Artificial Sequence: Synthetic oligonucleotide
gcauugagaaggccagauc

SEQ ID NO: 3006304 - RNA, 19 nt, Artificial Sequence
  Description of Artificial Sequence: Synthetic oligonucleotide
ccauauuuauucugaauau

SEQ ID NO: 3006305 - RNA, 19 nt, Artificial Sequence
  Description of Artificial Sequence: Synthetic oligonucleotide
cagauacaacaacuuuaaa

SEQ ID NO: 3006306 - RNA, 19 nt, Artificial Sequence
  Description of Artificial Sequence: Synthetic oligonucleotide
aucauacaacaaggagcca

SEQ ID NO: 3006307 - RNA, 19 nt, Artificial Sequence
  Description of Artificial Sequence: Synthetic oligonucleotide
  modified_base (18)..(18): a, c, u, g, unknown or other
gcuaagcaucaagcuacng

SEQ ID NO: 3006308 - RNA, 19 nt, Artificial Sequence
  Description of Artificial Sequence: Synthetic oligonucleotide
guggacaaucaaugcuaua

SEQ ID NO: 3006309 - RNA, 19 nt, Artificial Sequence
  Description of Artificial Sequence: Synthetic oligonucleotide
guaaauuguuauagagcuu

SEQ ID NO: 3006310 - RNA, 19 nt, Artificial Sequence
  Description of Artificial Sequence: Synthetic oligonucleotide
aggcauugagaaggccaga

SEQ ID NO: 3006311 - RNA, 19 nt, Artificial Sequence
  Description of Artificial Sequence: Synthetic oligonucleotide
guauuugcuuguagcuaua

SEQ ID NO: 3006312 - RNA, 19 nt, Artificial Sequence
  Description of Artificial Sequence: Synthetic oligonucleotide
aggccagaucauacaacaa

SEQ ID NO: 3006313 - RNA, 19 nt, Artificial Sequence
  Description of Artificial Sequence: Synthetic oligonucleotide
gagccaugauuuugugaau

SEQ ID NO: 3006314 - RNA, 19 nt, Artificial Sequence
  Description of Artificial Sequence: Synthetic oligonucleotide
gcuugcagguggacaauca

SEQ ID NO: 3006315 - RNA, 19 nt, Artificial Sequence
  Description of Artificial Sequence: Synthetic oligonucleotide
gccaugauuuugugaauau

SEQ ID NO: 3006316 - RNA, 19 nt, Artificial Sequence
  Description of Artificial Sequence: Synthetic oligonucleotide
  modified_base (19)..(19): a, c, u, g, unknown or other
ggcuaagcaucaagcuacn

SEQ ID NO: 3006317 - RNA, 19 nt, Artificial Sequence
  Description of Artificial Sequence: Synthetic oligonucleotide
ggcauugagaaggccagau

SEQ ID NO: 3006318 - RNA, 19 nt, Artificial Sequence
  Description of Artificial Sequence: Synthetic oligonucleotide
  modified_base (13)..(13): a, c, u, g, unknown or other
gcaucaagcuacnguaaau

SEQ ID NO: 3006319 - RNA, 19 nt, Artificial Sequence
  Description of Artificial Sequence: Synthetic oligonucleotide
gguggacaaucaaugcuau

SEQ ID NO: 3006320 - RNA, 19 nt, Artificial Sequence
  Description of Artificial Sequence: Synthetic oligonucleotide
gagcuugcagguggacaau

SEQ ID NO: 3006321 - RNA, 19 nt, Artificial Sequence
  Description of Artificial Sequence: Synthetic oligonucleotide
ggcauacauuguacacaua

SEQ ID NO: 3006322 - RNA, 19 nt, Artificial Sequence
  Description of Artificial Sequence: Synthetic oligonucleotide
  modified_base (1)..(1): a, c, u, g, unknown or other
nguaaauuguuauagagcu

SEQ ID NO: 3006323 - RNA, 19 nt, Artificial Sequence
  Description of Artificial Sequence: Synthetic oligonucleotide
aauuccauggacuucaggg

SEQ ID NO: 3006324 - RNA, 19 nt, Artificial Sequence
  Description of Artificial Sequence: Synthetic oligonucleotide
uuuggugcaaauuccaugg

SEQ ID NO: 3006325 - RNA, 19 nt, Artificial Sequence
  Description of Artificial Sequence: Synthetic oligonucleotide
ucaagaucagucaugauca

SEQ ID NO: 3006326 - RNA, 19 nt, Artificial Sequence
  Description of Artificial Sequence: Synthetic oligonucleotide
uuuaggucaaauaauucug

SEQ ID NO: 3006327 - RNA, 19 nt, Artificial Sequence
  Description of Artificial Sequence: Synthetic oligonucleotide
uuuuaggucaaauaauucu

SEQ ID NO: 3006328 - RNA, 19 nt, Artificial Sequence
  Description of Artificial Sequence: Synthetic oligonucleotide
agagcuguucccuuaaagc

SEQ ID NO: 3006329 - RNA, 19 nt, Artificial Sequence
  Description of Artificial Sequence: Synthetic oligonucleotide
ggucaaauaauucuguucg

SEQ ID NO: 3006330 - RNA, 19 nt, Artificial Sequence
  Description of Artificial Sequence: Synthetic oligonucleotide
uucaagaucagucaugauc

SEQ ID NO: 3006331 - RNA, 19 nt, Artificial Sequence
  Description of Artificial Sequence: Synthetic oligonucleotide
ucagucaugaucaucucga

SEQ ID NO: 3006332 - RNA, 19 nt, Artificial Sequence
  Description of Artificial Sequence: Synthetic oligonucleotide
aggaguaaaaccuccagug

SEQ ID NO: 3006333 - RNA, 19 nt, Artificial Sequence
  Description of Artificial Sequence: Synthetic oligonucleotide
uucuucaucauauuuaguu

SEQ ID NO: 3006334 - RNA, 19 nt, Artificial Sequence
  Description of Artificial Sequence: Synthetic oligonucleotide
ucucagacugcagugagcg

SEQ ID NO: 3006335 - RNA, 19 nt, Artificial Sequence
  Description of Artificial Sequence: Synthetic oligonucleotide
aggucaaauaauucuguuc

SEQ ID NO: 3006336 - RNA, 19 nt, Artificial Sequence
  Description of Artificial Sequence: Synthetic oligonucleotide
ucuucucaccucuucauag

SEQ ID NO: 3006337 - RNA, 19 nt, Artificial Sequence
  Description of Artificial Sequence: Synthetic oligonucleotide
ugcaguaguuucuucauca

SEQ ID NO: 3006338 - RNA, 19 nt, Artificial Sequence
  Description of Artificial Sequence: Synthetic oligonucleotide
aaugguuggccgaugagag

SEQ ID NO: 3006339 - RNA, 19 nt, Artificial Sequence
  Description of Artificial Sequence: Synthetic oligonucleotide
aaaaccuccaguggcuucg

SEQ ID NO: 3006340 - RNA, 19 nt, Artificial Sequence
  Description of Artificial Sequence: Synthetic oligonucleotide
aaauaauucuguucguguu

SEQ ID NO: 3006341 - RNA, 19 nt, Artificial Sequence
  Description of Artificial Sequence: Synthetic oligonucleotide
gagcuguucccuuaaagcc

SEQ ID NO: 3006342 - RNA, 19 nt, Artificial Sequence
  Description of Artificial Sequence: Synthetic oligonucleotide
gaucugugaggccagcugg

SEQ ID NO: 3006343 - RNA, 19 nt, Artificial Sequence
  Description of Artificial Sequence: Synthetic oligonucleotide
aauaauucuguucguguuu

SEQ ID NO: 3006344 - RNA, 19 nt, Artificial Sequence
  Description of Artificial Sequence: Synthetic oligonucleotide
uuaggucaaauaauucugu

SEQ ID NO: 3006345 - RNA, 19 nt, Artificial Sequence
  Description of Artificial Sequence: Synthetic oligonucleotide
ucaaauaauucuguucgug

SEQ ID NO: 3006346 - RNA, 19 nt, Artificial Sequence
  Description of Artificial Sequence: Synthetic oligonucleotide
gaucaucucgaucucauca

SEQ ID NO: 3006347 - RNA, 19 nt, Artificial Sequence
  Description of Artificial Sequence: Synthetic oligonucleotide
aucucaucagccuuugcag

SEQ ID NO: 3006348 - RNA, 19 nt, Artificial Sequence
  Description of Artificial Sequence: Synthetic oligonucleotide
aucagucaugaucaucucg

SEQ ID NO: 3006349 - RNA, 19 nt, Artificial Sequence
  Description of Artificial Sequence: Synthetic oligonucleotide
aaauuccauggacuucagg

SEQ ID NO: 3006350 - RNA, 19 nt, Artificial Sequence
  Description of Artificial Sequence: Synthetic oligonucleotide
uucauagucagccugccuu

SEQ ID NO: 3006351 - RNA, 19 nt, Artificial Sequence
  Description of Artificial Sequence: Synthetic oligonucleotide
agaucagucaugaucaucu

SEQ ID NO: 3006352 - RNA, 19 nt, Artificial Sequence
  Description of Artificial Sequence: Synthetic oligonucleotide
uggagagaaugguuggccg

SEQ ID NO: 3006353 - RNA, 19 nt, Artificial Sequence
  Description of Artificial Sequence: Synthetic oligonucleotide
uguucagcucuucucaccu

SEQ ID NO: 3006354 - RNA, 19 nt, Artificial Sequence
  Description of Artificial Sequence: Synthetic oligonucleotide
aguaguuucuucaucauau

SEQ ID NO: 3006355 - RNA, 19 nt, Artificial Sequence
  Description of Artificial Sequence: Synthetic oligonucleotide
aaagccucugcuucucucu

SEQ ID NO: 3006356 - RNA, 19 nt, Artificial Sequence
  Description of Artificial Sequence: Synthetic oligonucleotide
uuccauggacuucagggug

SEQ ID NO: 3006357 - RNA, 19 nt, Artificial Sequence
  Description of Artificial Sequence: Synthetic oligonucleotide
guuggagaugcgcagcgcg

SEQ ID NO: 3006358 - RNA, 19 nt, Artificial Sequence
  Description of Artificial Sequence: Synthetic oligonucleotide
aucaucucgaucucaucag

SEQ ID NO: 3006359 - RNA, 19 nt, Artificial Sequence
  Description of Artificial Sequence: Synthetic oligonucleotide
aagaucagucaugaucauc

SEQ ID NO: 3006360 - RNA, 19 nt, Artificial Sequence
  Description of Artificial Sequence: Synthetic oligonucleotide
agucaugaucaucucgauc

SEQ ID NO: 3006361 - RNA, 19 nt, Artificial Sequence
  Description of Artificial Sequence: Synthetic oligonucleotide
ugagcgguucuucuccagg

SEQ ID NO: 3006362 - RNA, 19 nt, Artificial Sequence
  Description of Artificial Sequence: Synthetic oligonucleotide
ucuucaucauauuuaguuu

SEQ ID NO: 3006363 - RNA, 19 nt, Artificial Sequence
  Description of Artificial Sequence: Synthetic oligonucleotide
uagucagccugccuucugg

SEQ ID NO: 3006364 - RNA, 19 nt, Artificial Sequence
  Description of Artificial Sequence: Synthetic oligonucleotide
cuuuggugcaaauuccaug

SEQ ID NO: 3006365 - RNA, 19 nt, Artificial Sequence
  Description of Artificial Sequence: Synthetic oligonucleotide
cucaccucuucauagucag

SEQ ID NO: 3006366 - RNA, 19 nt, Artificial Sequence
  Description of Artificial Sequence: Synthetic oligonucleotide
ucacuguuggagaugcgca

SEQ ID NO: 3006367 - RNA, 19 nt, Artificial Sequence
  Description of Artificial Sequence: Synthetic oligonucleotide
gagagcuguucccuuaaag

SEQ ID NO: 3006368 - RNA, 19 nt, Artificial Sequence
  Description of Artificial Sequence: Synthetic oligonucleotide
auucucagacugcagugag

SEQ ID NO: 3006369 - RNA, 19 nt, Artificial Sequence
  Description of Artificial Sequence: Synthetic oligonucleotide
aggucacuguuggagaugc

SEQ ID NO: 3006370 - RNA, 19 nt, Artificial Sequence
  Description of Artificial Sequence: Synthetic oligonucleotide
ugccuucuggaucugugag

SEQ ID NO: 3006371 - RNA, 19 nt, Artificial Sequence
  Description of Artificial Sequence: Synthetic oligonucleotide
cuucuccaggaguaaaacc

SEQ ID NO: 3006372 - RNA, 19 nt, Artificial Sequence
  Description of Artificial Sequence: Synthetic oligonucleotide
auuccauggacuucagggu

SEQ ID NO: 3006373 - RNA, 19 nt, Artificial Sequence
  Description of Artificial Sequence: Synthetic oligonucleotide
ucaucucgaucucaucagc

SEQ ID NO: 3006374 - RNA, 19 nt, Artificial Sequence
  Description of Artificial Sequence: Synthetic oligonucleotide
uuggagaugcgcagcgcgg

SEQ ID NO: 3006375 - RNA, 19 nt, Artificial Sequence
  Description of Artificial Sequence: Synthetic oligonucleotide
uccuuuggugcaaauucca

SEQ ID NO: 3006376 - RNA, 19 nt, Artificial Sequence
  Description of Artificial Sequence: Synthetic oligonucleotide
uccagggcuguuugcagcg

SEQ ID NO: 3006377 - RNA, 19 nt, Artificial Sequence
  Description of Artificial Sequence: Synthetic oligonucleotide
uucuggaucugugaggcca

SEQ ID NO: 3006378 - RNA, 19 nt, Artificial Sequence
  Description of Artificial Sequence: Synthetic oligonucleotide
ucagacugcagugagcggu

SEQ ID NO: 3006379 - RNA, 19 nt, Artificial Sequence
  Description of Artificial Sequence: Synthetic oligonucleotide
uggugcaaauuccauggac

SEQ ID NO: 3006380 - RNA, 19 nt, Artificial Sequence
  Description of Artificial Sequence: Synthetic oligonucleotide
ucguucaagaucagucaug

SEQ ID NO: 3006381 - RNA, 19 nt, Artificial Sequence
  Description of Artificial Sequence: Synthetic oligonucleotide
ggaguaaaaccuccagugg

SEQ ID NO: 3006382 - RNA, 19 nt, Artificial Sequence
  Description of Artificial Sequence: Synthetic oligonucleotide
cuuugcaguaguuucuuca

SEQ ID NO: 3006383 - RNA, 19 nt, Artificial Sequence
  Description of Artificial Sequence: Synthetic oligonucleotide
caucucgaucucaucagcc

SEQ ID NO: 3006384 - RNA, 19 nt, Artificial Sequence
  Description of Artificial Sequence: Synthetic oligonucleotide
uuuuccagggcuguuugca

SEQ ID NO: 3006385 - RNA, 19 nt, Artificial Sequence
  Description of Artificial Sequence: Synthetic oligonucleotide
aggguguucagcucuucuc

SEQ ID NO: 3006386 - RNA, 19 nt, Artificial Sequence
  Description of Artificial Sequence: Synthetic oligonucleotide
agcuggagagaaugguugg

SEQ ID NO: 3006387 - RNA, 19 nt, Artificial Sequence
  Description of Artificial Sequence: Synthetic oligonucleotide
guuggcucguucaagauca

SEQ ID NO: 3006388 - RNA, 19 nt, Artificial Sequence
  Description of Artificial Sequence: Synthetic oligonucleotide
acuguuggagaugcgcagc

SEQ ID NO: 3006389 - RNA, 19 nt, Artificial Sequence
  Description of Artificial Sequence: Synthetic oligonucleotide
caccucuucauagucagcc

SEQ ID NO: 3006390 - RNA, 19 nt, Artificial Sequence
  Description of Artificial Sequence: Synthetic oligonucleotide
ucucaccucuucauaguca

SEQ ID NO: 3006391 - RNA, 19 nt, Artificial Sequence
  Description of Artificial Sequence: Synthetic oligonucleotide
cuccuuuggugcaaauucc

SEQ ID NO: 3006392 - RNA, 19 nt, Artificial Sequence
  Description of Artificial Sequence: Synthetic oligonucleotide
ugguuggccgaugagagcu

SEQ ID NO: 3006393 - RNA, 19 nt, Artificial Sequence
  Description of Artificial Sequence: Synthetic oligonucleotide
uucuucuccaggaguaaaa

SEQ ID NO: 3006394 - RNA, 19 nt, Artificial Sequence
  Description of Artificial Sequence: Synthetic oligonucleotide
uucucucugugccaccucu

SEQ ID NO: 3006395 - RNA, 19 nt, Artificial Sequence
  Description of Artificial Sequence: Synthetic oligonucleotide
ucuggaucugugaggccag

SEQ ID NO: 3006396 - RNA, 19 nt, Artificial Sequence
  Description of Artificial Sequence: Synthetic oligonucleotide
ucucaucagccuuugcagu

SEQ ID NO: 3006397 - RNA, 19 nt, Artificial Sequence
  Description of Artificial Sequence: Synthetic oligonucleotide
uuuccagggcuguuugcag

SEQ ID NO: 3006398 - RNA, 19 nt, Artificial Sequence
  Description of Artificial Sequence: Synthetic oligonucleotide
uccaggaguaaaaccucca

SEQ ID NO: 3006399 - RNA, 19 nt, Artificial Sequence
  Description of Artificial Sequence: Synthetic oligonucleotide
uucucaccucuucauaguc

SEQ ID NO: 3006400 - RNA, 19 nt, Artificial Sequence
  Description of Artificial Sequence: Synthetic oligonucleotide
augguuggccgaugagagc

SEQ ID NO: 3006401 - RNA, 19 nt, Artificial Sequence
  Description of Artificial Sequence: Synthetic oligonucleotide
gaaugguuggccgaugaga

SEQ ID NO: 3006402 - RNA, 19 nt, Artificial Sequence
  Description of Artificial Sequence: Synthetic oligonucleotide
ucagccugccuucuggauc

SEQ ID NO: 3006403 - RNA, 19 nt, Artificial Sequence
  Description of Artificial Sequence: Synthetic oligonucleotide
cagcuggagagaaugguug

SEQ ID NO: 3006404 - RNA, 19 nt, Artificial Sequence
  Description of Artificial Sequence: Synthetic oligonucleotide
ucuccaggaguaaaaccuc

SEQ ID NO: 3006405 - RNA, 19 nt, Artificial Sequence
  Description of Artificial Sequence: Synthetic oligonucleotide
aucucgaucucaucagccu

SEQ ID NO: 3006406 - RNA, 19 nt, Artificial Sequence
  Description of Artificial Sequence: Synthetic oligonucleotide
agaaugguuggccgaugag

SEQ ID NO: 3006407 - RNA, 19 nt, Artificial Sequence
  Description of Artificial Sequence: Synthetic oligonucleotide
aguggcuucguagaguccu

SEQ ID NO: 3006408 - RNA, 19 nt, Artificial Sequence
  Description of Artificial Sequence: Synthetic oligonucleotide
acuucaggguguucagcuc

SEQ ID NO: 3006409 - RNA, 19 nt, Artificial Sequence
  Description of Artificial Sequence: Synthetic oligonucleotide
accucugcccucugguugg

SEQ ID NO: 3006410 - RNA, 19 nt, Artificial Sequence
  Description of Artificial Sequence: Synthetic oligonucleotide
ucuucuccaggaguaaaac

SEQ ID NO: 3006411 - RNA, 19 nt, Artificial Sequence
  Description of Artificial Sequence: Synthetic oligonucleotide
aguaaaaccuccaguggcu

SEQ ID NO: 3006412 - RNA, 19 nt, Artificial Sequence
  Description of Artificial Sequence: Synthetic oligonucleotide
guucccuuaaagccucugc

SEQ ID NO: 3006413 - RNA, 19 nt, Artificial Sequence
  Description of Artificial Sequence: Synthetic oligonucleotide
cuguuggagaugcgcagcg

SEQ ID NO: 3006414 - RNA, 19 nt, Artificial Sequence
  Description of Artificial Sequence: Synthetic oligonucleotide
cuccaggaguaaaaccucc

SEQ ID NO: 3006415 - RNA, 19 nt, Artificial Sequence
  Description of Artificial Sequence: Synthetic oligonucleotide
ucucugugccaccucugcc

SEQ ID NO: 3006416 - RNA, 19 nt, Artificial Sequence
  Description of Artificial Sequence: Synthetic oligonucleotide
gucacuguuggagaugcgc

SEQ ID NO: 3006417 - RNA, 19 nt, Artificial Sequence
  Description of Artificial Sequence: Synthetic oligonucleotide
uucucagacugcagugagc

SEQ ID NO: 3006418 - RNA, 19 nt, Artificial Sequence
  Description of Artificial Sequence: Synthetic oligonucleotide
uccauggacuucagggugu

SEQ ID NO: 3006419 - RNA, 19 nt, Artificial Sequence
  Description of Artificial Sequence: Synthetic oligonucleotide
cagugagcgguucuucucc

SEQ ID NO: 3006420 - RNA, 19 nt, Artificial Sequence
  Description of Artificial Sequence: Synthetic oligonucleotide
ucauagucagccugccuuc

SEQ ID NO: 3006421 - RNA, 19 nt, Artificial Sequence
  Description of Artificial Sequence: Synthetic oligonucleotide
ucguagaguccuguguucc

SEQ ID NO: 3006422 - RNA, 19 nt, Artificial Sequence
  Description of Artificial Sequence: Synthetic oligonucleotide
ucaucagccuuugcaguag

SEQ ID NO: 3006423 - RNA, 19 nt, Artificial Sequence
  Description of Artificial Sequence: Synthetic oligonucleotide
caaauaauucuguucgugu

SEQ ID NO: 3006424 - RNA, 19 nt, Artificial Sequence
  Description of Artificial Sequence: Synthetic oligonucleotide
aagccucugcuucucucug

SEQ ID NO: 3006425 - RNA, 19 nt, Artificial Sequence
  Description of Artificial Sequence: Synthetic oligonucleotide
ucugguuggcucguucaag

SEQ ID NO: 3006426 - RNA, 19 nt, Artificial Sequence
  Description of Artificial Sequence: Synthetic oligonucleotide
cuggagagaaugguuggcc

SEQ ID NO: 3006427 - RNA, 19 nt, Artificial Sequence
  Description of Artificial Sequence: Synthetic oligonucleotide
uagaguccuguguuccugc

SEQ ID NO: 3006428 - RNA, 19 nt, Artificial Sequence
  Description of Artificial Sequence: Synthetic oligonucleotide
uuaaagccucugcuucucu

SEQ ID NO: 3006429 - RNA, 19 nt, Artificial Sequence
  Description of Artificial Sequence: Synthetic oligonucleotide
uaggucaaauaauucuguu

SEQ ID NO: 3006430 - RNA, 19 nt, Artificial Sequence
  Description of Artificial Sequence: Synthetic oligonucleotide
gagaaugguuggccgauga

SEQ ID NO: 3006431 - RNA, 19 nt, Artificial Sequence
  Description of Artificial Sequence: Synthetic oligonucleotide
gcuccuuuggugcaaauuc

SEQ ID NO: 3006432 - RNA, 19 nt, Artificial Sequence
  Description of Artificial Sequence: Synthetic oligonucleotide
agcucuucucaccucuuca

SEQ ID NO: 3006433 - RNA, 19 nt, Artificial Sequence
  Description of Artificial Sequence: Synthetic oligonucleotide
ucuucauagucagccugcc

SEQ ID NO: 3006434 - RNA, 19 nt, Artificial Sequence
  Description of Artificial Sequence: Synthetic oligonucleotide
cacuguuggagaugcgcag

SEQ ID NO: 3006435 - RNA, 19 nt, Artificial Sequence
  Description of Artificial Sequence: Synthetic oligonucleotide
ucucgaucucaucagccuu

SEQ ID NO: 3006436 - RNA, 19 nt, Artificial Sequence
  Description of Artificial Sequence: Synthetic oligonucleotide
uaaagccucugcuucucuc

SEQ ID NO: 3006437 - RNA, 19 nt, Artificial Sequence
  Description of Artificial Sequence: Synthetic oligonucleotide
auaauucuguucguguuuu

SEQ ID NO: 3006438 - RNA, 19 nt, Artificial Sequence
  Description of Artificial Sequence: Synthetic oligonucleotide
ucaggucacuguuggagau

SEQ ID NO: 3006439 - RNA, 19 nt, Artificial Sequence
  Description of Artificial Sequence: Synthetic oligonucleotide
ucaugaucaucucgaucuc

SEQ ID NO: 3006440 - RNA, 19 nt, Artificial Sequence
  Description of Artificial Sequence: Synthetic oligonucleotide
uuggugcaaauuccaugga

SEQ ID NO: 3006441 - RNA, 19 nt, Artificial Sequence
  Description of Artificial Sequence: Synthetic oligonucleotide
uucguagaguccuguguuc

SEQ ID NO: 3006442 - RNA, 19 nt, Artificial Sequence
  Description of Artificial Sequence: Synthetic oligonucleotide
cucucugugccaccucugc

SEQ ID NO: 3006443 - RNA, 19 nt, Artificial Sequence
  Description of Artificial Sequence: Synthetic oligonucleotide
agcgguucuucuccaggag

SEQ ID NO: 3006444 - RNA, 19 nt, Artificial Sequence
  Description of Artificial Sequence: Synthetic oligonucleotide
guguucagcucuucucacc

SEQ ID NO: 3006445 - RNA, 19 nt, Artificial Sequence
  Description of Artificial Sequence: Synthetic oligonucleotide
ucccuuaaagccucugcuu

SEQ ID NO: 3006446 - RNA, 19 nt, Artificial Sequence
  Description of Artificial Sequence: Synthetic oligonucleotide
ucagccuuugcaguaguuu

SEQ ID NO: 3006447 - RNA, 19 nt, Artificial Sequence
  Description of Artificial Sequence: Synthetic oligonucleotide
ucugugaggccagcuggag

SEQ ID NO: 3006448 - RNA, 19 nt, Artificial Sequence
  Description of Artificial Sequence: Synthetic oligonucleotide
agcuguucccuuaaagccu

SEQ ID NO: 3006449 - RNA, 19 nt, Artificial Sequence
  Description of Artificial Sequence: Synthetic oligonucleotide
ugcaaauuccauggacuuc

SEQ ID NO: 3006450 - RNA, 19 nt, Artificial Sequence
  Description of Artificial Sequence: Synthetic oligonucleotide
gcauucucagacugcagug

SEQ ID NO: 3006451 - RNA, 19 nt, Artificial Sequence
  Description of Artificial Sequence: Synthetic oligonucleotide
cagcgcggcauucucagac

SEQ ID NO: 3006452 - RNA, 19 nt, Artificial Sequence
  Description of Artificial Sequence: Synthetic oligonucleotide
gaugagagcuguucccuua

SEQ ID NO: 3006453 - RNA, 19 nt, Artificial Sequence
  Description of Artificial Sequence: Synthetic oligonucleotide
gaucagucaugaucaucuc

SEQ ID NO: 3006454 - RNA, 19 nt, Artificial Sequence
  Description of Artificial Sequence: Synthetic oligonucleotide
caaauuccauggacuucag

SEQ ID NO: 3006455 - RNA, 19 nt, Artificial Sequence
  Description of Artificial Sequence: Synthetic oligonucleotide
ccuucuggaucugugaggc

SEQ ID NO: 3006456 - RNA, 19 nt, Artificial Sequence
  Description of Artificial Sequence: Synthetic oligonucleotide
cugcccucugguuggcucg

SEQ ID NO: 3006457 - RNA, 19 nt, Artificial Sequence
  Description of Artificial Sequence: Synthetic oligonucleotide
ucaccucuucauagucagc

SEQ ID NO: 3006458 - RNA, 19 nt, Artificial Sequence
  Description of Artificial Sequence: Synthetic oligonucleotide
auagucagccugccuucug

SEQ ID NO: 3006459 - RNA, 19 nt, Artificial Sequence
  Description of Artificial Sequence: Synthetic oligonucleotide
cugguuggcucguucaaga

SEQ ID NO: 3006460 - RNA, 19 nt, Artificial Sequence
  Description of Artificial Sequence: Synthetic oligonucleotide
cuuaaagccucugcuucuc

SEQ ID NO: 3006461 - RNA, 19 nt, Artificial Sequence
  Description of Artificial Sequence: Synthetic oligonucleotide
gagcgguucuucuccagga

SEQ ID NO: 3006462 - RNA, 19 nt, Artificial Sequence
  Description of Artificial Sequence: Synthetic oligonucleotide
ucugcccucugguuggcuc

SEQ ID NO: 3006463 - RNA, 19 nt, Artificial Sequence
  Description of Artificial Sequence: Synthetic oligonucleotide
ggaucugugaggccagcug

SEQ ID NO: 3006464 - RNA, 19 nt, Artificial Sequence
  Description of Artificial Sequence: Synthetic oligonucleotide
uggagaugcgcagcgcggc

SEQ ID NO: 3006465 - RNA, 19 nt, Artificial Sequence
  Description of Artificial Sequence: Synthetic oligonucleotide
cucaggucacuguuggaga

SEQ ID NO: 3006466 - RNA, 19 nt, Artificial Sequence
  Description of Artificial Sequence: Synthetic oligonucleotide
caccucugcccucugguug

SEQ ID NO: 3006467 - RNA, 19 nt, Artificial Sequence
  Description of Artificial Sequence: Synthetic oligonucleotide
agugagcgguucuucucca

SEQ ID NO: 3006468 - RNA, 19 nt, Artificial Sequence
  Description of Artificial Sequence: Synthetic oligonucleotide
augagagcuguucccuuaa

SEQ ID NO: 3006469 - RNA, 19 nt, Artificial Sequence
  Description of Artificial Sequence: Synthetic oligonucleotide
uccaguggcuucguagagu

SEQ ID NO: 3006470 - RNA, 19 nt, Artificial Sequence
  Description of Artificial Sequence: Synthetic oligonucleotide
augaucaucucgaucucau

SEQ ID NO: 3006471 - RNA, 19 nt, Artificial Sequence
  Description of Artificial Sequence: Synthetic oligonucleotide
uguucccuuaaagccucug

SEQ ID NO: 3006472 - RNA, 19 nt, Artificial Sequence
  Description of Artificial Sequence: Synthetic oligonucleotide
ggcucguucaagaucaguc

SEQ ID NO: 3006473 - RNA, 19 nt, Artificial Sequence
  Description of Artificial Sequence: Synthetic oligonucleotide
cucagacugcagugagcgg

SEQ ID NO: 3006474 - RNA, 19 nt, Artificial Sequence
  Description of Artificial Sequence: Synthetic oligonucleotide
ucgaucucaucagccuuug

SEQ ID NO: 3006475 - RNA, 19 nt, Artificial Sequence
  Description of Artificial Sequence: Synthetic oligonucleotide
agucagccugccuucugga

SEQ ID NO: 3006476 - RNA, 19 nt, Artificial Sequence
  Description of Artificial Sequence: Synthetic oligonucleotide
ugagagcuguucccuuaaa

SEQ ID NO: 3006477 - RNA, 19 nt, Artificial Sequence
  Description of Artificial Sequence: Synthetic oligonucleotide
gccuucuggaucugugagg

SEQ ID NO: 3006478 - RNA, 19 nt, Artificial Sequence
  Description of Artificial Sequence: Synthetic oligonucleotide
ggguguucagcucuucuca

SEQ ID NO: 3006479 - RNA, 19 nt, Artificial Sequence
  Description of Artificial Sequence: Synthetic oligonucleotide
gcucguucaagaucaguca

SEQ ID NO: 3006480 - RNA, 19 nt, Artificial Sequence
  Description of Artificial Sequence: Synthetic oligonucleotide
agaguccuguguuccugcu

SEQ ID NO: 3006481 - RNA, 19 nt, Artificial Sequence
  Description of Artificial Sequence: Synthetic oligonucleotide
cuccaguggcuucguagag

SEQ ID NO: 3006482 - RNA, 19 nt, Artificial Sequence
  Description of Artificial Sequence: Synthetic oligonucleotide
cuucuggaucugugaggcc

SEQ ID NO: 3006483 - RNA, 19 nt, Artificial Sequence
  Description of Artificial Sequence: Synthetic oligonucleotide
uuggcucguucaagaucag

SEQ ID NO: 3006484 - RNA, 19 nt, Artificial Sequence
  Description of Artificial Sequence: Synthetic oligonucleotide
cauucucagacugcaguga

SEQ ID NO: 3006485 - RNA, 19 nt, Artificial Sequence
  Description of Artificial Sequence: Synthetic oligonucleotide
ugguuggcucguucaagau

SEQ ID NO: 3006486 - RNA, 19 nt, Artificial Sequence
  Description of Artificial Sequence: Synthetic oligonucleotide
gguuggcucguucaagauc

SEQ ID NO: 3006487 - RNA, 19 nt, Artificial Sequence
  Description of Artificial Sequence: Synthetic oligonucleotide
uuccugcuccuuuggugca

SEQ ID NO: 3006488 - RNA, 19 nt, Artificial Sequence
  Description of Artificial Sequence: Synthetic oligonucleotide
cccuuaaagccucugcuuc

SEQ ID NO: 3006489 - RNA, 19 nt, Artificial Sequence
  Description of Artificial Sequence: Synthetic oligonucleotide
ccaggaguaaaaccuccag

SEQ ID NO: 3006490 - RNA, 19 nt, Artificial Sequence
  Description of Artificial Sequence: Synthetic oligonucleotide
ggagagaaugguuggccga

SEQ ID NO: 3006491 - RNA, 19 nt, Artificial Sequence
  Description of Artificial Sequence: Synthetic oligonucleotide
uggccgaugagagcuguuc

SEQ ID NO: 3006492 - RNA, 19 nt, Artificial Sequence
  Description of Artificial Sequence: Synthetic oligonucleotide
cucaucagccuuugcagua

SEQ ID NO: 3006493 - RNA, 19 nt, Artificial Sequence
  Description of Artificial Sequence: Synthetic oligonucleotide
ccaguggcuucguagaguc

SEQ ID NO: 3006494 - RNA, 19 nt, Artificial Sequence
  Description of Artificial Sequence: Synthetic oligonucleotide
gccgaugagagcuguuccc

SEQ ID NO: 3006495 - RNA, 19 nt, Artificial Sequence
  Description of Artificial Sequence: Synthetic oligonucleotide
gguguucagcucuucucac

SEQ ID NO: 3006496 - RNA, 19 nt, Artificial Sequence
  Description of Artificial Sequence: Synthetic oligonucleotide
gucaaauaauucuguucgu

SEQ ID NO: 3006497 - RNA, 19 nt, Artificial Sequence
  Description of Artificial Sequence: Synthetic oligonucleotide
uucaggguguucagcucuu

SEQ ID NO: 3006498 - RNA, 19 nt, Artificial Sequence
  Description of Artificial Sequence: Synthetic oligonucleotide
ugcgcagcgcggcauucuc

SEQ ID NO: 3006499 - RNA, 19 nt, Artificial Sequence
  Description of Artificial Sequence: Synthetic oligonucleotide
agcgcggcauucucagacu

SEQ ID NO: 3006500 - RNA, 19 nt, Artificial Sequence
  Description of Artificial Sequence: Synthetic oligonucleotide
gugagcgguucuucuccag

SEQ ID NO: 3006501 - RNA, 19 nt, Artificial Sequence
  Description of Artificial Sequence: Synthetic oligonucleotide
uggaucugugaggccagcu

SEQ ID NO: 3006502 - RNA, 19 nt, Artificial Sequence
  Description of Artificial Sequence: Synthetic oligonucleotide
ggugcaaauuccauggacu

SEQ ID NO: 3006503 - RNA, 19 nt, Artificial Sequence
  Description of Artificial Sequence: Synthetic oligonucleotide
ugcuccuuuggugcaaauu

SEQ ID NO: 3006504 - RNA, 19 nt, Artificial Sequence
  Description of Artificial Sequence: Synthetic oligonucleotide
caugaucaucucgaucuca

SEQ ID NO: 3006505 - RNA, 19 nt, Artificial Sequence
  Description of Artificial Sequence: Synthetic oligonucleotide
ggccgaugagagcuguucc

SEQ ID NO: 3006506 - RNA, 19 nt, Artificial Sequence
  Description of Artificial Sequence: Synthetic oligonucleotide
cuucaggguguucagcucu

SEQ ID NO: 3006507 - RNA, 19 nt, Artificial Sequence
  Description of Artificial Sequence: Synthetic oligonucleotide
agagaaugguuggccgaug

SEQ ID NO: 3006508 - RNA, 19 nt, Artificial Sequence
  Description of Artificial Sequence: Synthetic oligonucleotide
caggaguaaaaccuccagu

SEQ ID NO: 3006509 - RNA, 19 nt, Artificial Sequence
  Description of Artificial Sequence: Synthetic oligonucleotide
ucagcucuucucaccucuu

SEQ ID NO: 3006510 - RNA, 19 nt, Artificial Sequence
  Description of Artificial Sequence: Synthetic oligonucleotide
cugcuucucucugugccac

SEQ ID NO: 3006511 - RNA, 19 nt, Artificial Sequence
  Description of Artificial Sequence: Synthetic oligonucleotide
cugccuucuggaucuguga

SEQ ID NO: 3006512 - RNA, 19 nt, Artificial Sequence
  Description of Artificial Sequence: Synthetic oligonucleotide
caguaguuucuucaucaua

SEQ ID NO: 3006513 - RNA, 19 nt, Artificial Sequence
  Description of Artificial Sequence: Synthetic oligonucleotide
gugcaaauuccauggacuu

SEQ ID NO: 3006514 - RNA, 19 nt, Artificial Sequence
  Description of Artificial Sequence: Synthetic oligonucleotide
cuucguagaguccuguguu

SEQ ID NO: 3006515 - RNA, 19 nt, Artificial Sequence
  Description of Artificial Sequence: Synthetic oligonucleotide
gcuguuugcagcgucugga

SEQ ID NO: 3006516 - RNA, 19 nt, Artificial Sequence
  Description of Artificial Sequence: Synthetic oligonucleotide
caguggcuucguagagucc

SEQ ID NO: 3006517 - RNA, 19 nt, Artificial Sequence
  Description of Artificial Sequence: Synthetic oligonucleotide
aaaccuccaguggcuucgu

SEQ ID NO: 3006518 - RNA, 19 nt, Artificial Sequence
  Description of Artificial Sequence: Synthetic oligonucleotide
acugcagugagcgguucuu

SEQ ID NO: 3006519 - RNA, 19 nt, Artificial Sequence
  Description of Artificial Sequence: Synthetic oligonucleotide
cagcucuucucaccucuuc

SEQ ID NO: 3006520 - RNA, 19 nt, Artificial Sequence
  Description of Artificial Sequence: Synthetic oligonucleotide
uggcucguucaagaucagu

SEQ ID NO: 3006521 - RNA, 19 nt, Artificial Sequence
  Description of Artificial Sequence: Synthetic oligonucleotide
aucugugaggccagcugga

SEQ ID NO: 3006522 - RNA, 19 nt, Artificial Sequence
  Description of Artificial Sequence: Synthetic oligonucleotide
agacugcagugagcgguuc

SEQ ID NO: 3006523 - RNA, 19 nt, Artificial Sequence
  Description of Artificial Sequence: Synthetic oligonucleotide
ccgcucaggucacuguugg

SEQ ID NO: 3006524 - RNA, 19 nt, Artificial Sequence
  Description of Artificial Sequence: Synthetic oligonucleotide
caggucacuguuggagaug

SEQ ID NO: 3006525 - RNA, 19 nt, Artificial Sequence
  Description of Artificial Sequence: Synthetic oligonucleotide
ggcuucguagaguccugug

SEQ ID NO: 3006526 - RNA, 19 nt, Artificial Sequence
  Description of Artificial Sequence: Synthetic oligonucleotide
cucguucaagaucagucau

SEQ ID NO: 3006527 - RNA, 19 nt, Artificial Sequence
  Description of Artificial Sequence: Synthetic oligonucleotide
gcuggagagaaugguuggc

SEQ ID NO: 3006528 - RNA, 19 nt, Artificial Sequence
  Description of Artificial Sequence: Synthetic oligonucleotide
gccucugcuucucucugug

SEQ ID NO: 3006529 - RNA, 19 nt, Artificial Sequence
  Description of Artificial Sequence: Synthetic oligonucleotide
uggcuucguagaguccugu

SEQ ID NO: 3006530 - RNA, 19 nt, Artificial Sequence
  Description of Artificial Sequence: Synthetic oligonucleotide
cucuucucaccucuucaua

SEQ ID NO: 3006531 - RNA, 19 nt, Artificial Sequence
  Description of Artificial Sequence: Synthetic oligonucleotide
cugugaggccagcuggaga

SEQ ID NO: 3006532 - RNA, 19 nt, Artificial Sequence
  Description of Artificial Sequence: Synthetic oligonucleotide
guaguuucuucaucauauu

SEQ ID NO: 3006533 - RNA, 19 nt, Artificial Sequence
  Description of Artificial Sequence: Synthetic oligonucleotide
gcagugagcgguucuucuc

SEQ ID NO: 3006534 - RNA, 19 nt, Artificial Sequence
  Description of Artificial Sequence: Synthetic oligonucleotide
agggcuguuugcagcgucu

SEQ ID NO: 3006535 - RNA, 19 nt, Artificial Sequence
  Description of Artificial Sequence: Synthetic oligonucleotide
cagccugccuucuggaucu

SEQ ID NO: 3006536 - RNA, 19 nt, Artificial Sequence
  Description of Artificial Sequence: Synthetic oligonucleotide
gagagaaugguuggccgau

SEQ ID NO: 3006537 - RNA, 19 nt, Artificial Sequence
  Description of Artificial Sequence: Synthetic oligonucleotide
agaugcgcagcgcggcauu

SEQ ID NO: 3006538 - RNA, 19 nt, Artificial Sequence
  Description of Artificial Sequence: Synthetic oligonucleotide
gcuguucccuuaaagccuc

SEQ ID NO: 3006539 - RNA, 19 nt, Artificial Sequence
  Description of Artificial Sequence: Synthetic oligonucleotide
gcuucguagaguccugugu

SEQ ID NO: 3006540 - RNA, 19 nt, Artificial Sequence
  Description of Artificial Sequence: Synthetic oligonucleotide
gaugcgcagcgcggcauuc

SEQ ID NO: 3006541 - RNA, 19 nt, Artificial Sequence
  Description of Artificial Sequence: Synthetic oligonucleotide
ccuccaguggcuucguaga

SEQ ID NO: 3006542 - RNA, 19 nt, Artificial Sequence
  Description of Artificial Sequence: Synthetic oligonucleotide
gacugcagugagcgguucu

SEQ ID NO: 3006543 - RNA, 19 nt, Artificial Sequence
  Description of Artificial Sequence: Synthetic oligonucleotide
ucaggguguucagcucuuc

SEQ ID NO: 3006544 - RNA, 19 nt, Artificial Sequence
  Description of Artificial Sequence: Synthetic oligonucleotide
cguucaagaucagucauga

SEQ ID NO: 3006545 - RNA, 19 nt, Artificial Sequence
  Description of Artificial Sequence: Synthetic oligonucleotide
aaccuccaguggcuucgua

SEQ ID NO: 3006546 - RNA, 19 nt, Artificial Sequence
  Description of Artificial Sequence: Synthetic oligonucleotide
uuggccgaugagagcuguu

SEQ ID NO: 3006547 - RNA, 19 nt, Artificial Sequence
  Description of Artificial Sequence: Synthetic oligonucleotide
cugcagugagcgguucuuc

SEQ ID NO: 3006548 - RNA, 19 nt, Artificial Sequence
  Description of Artificial Sequence: Synthetic oligonucleotide
guggcuucguagaguccug

SEQ ID NO: 3006549 - RNA, 19 nt, Artificial Sequence
  Description of Artificial Sequence: Synthetic oligonucleotide
cuggaucugugaggccagc

SEQ ID NO: 3006550 - RNA, 19 nt, Artificial Sequence
  Description of Artificial Sequence: Synthetic oligonucleotide
gcgcggcauucucagacug

SEQ ID NO: 3006551 - RNA, 19 nt, Artificial Sequence
  Description of Artificial Sequence: Synthetic oligonucleotide
uccugcuccuuuggugcaa

SEQ ID NO: 3006552 - RNA, 19 nt, Artificial Sequence
  Description of Artificial Sequence: Synthetic oligonucleotide
gcggcauucucagacugca

SEQ ID NO: 3006553 - RNA, 19 nt, Artificial Sequence
  Description of Artificial Sequence: Synthetic oligonucleotide
cucgaucucaucagccuuu

SEQ ID NO: 3006554 - RNA, 19 nt, Artificial Sequence
  Description of Artificial Sequence: Synthetic oligonucleotide
uccuguguuccugcuccuu

SEQ ID NO: 3006555 - RNA, 19 nt, Artificial Sequence
  Description of Artificial Sequence: Synthetic oligonucleotide
cgcagcgcggcauucucag

SEQ ID NO: 3006556 - RNA, 19 nt, Artificial Sequence
  Description of Artificial Sequence: Synthetic oligonucleotide
ggagaugcgcagcgcggca

SEQ ID NO: 3006557 - RNA, 19 nt, Artificial Sequence
  Description of Artificial Sequence: Synthetic oligonucleotide
ccucugguuggcucguuca

SEQ ID NO: 3006558 - RNA, 19 nt, Artificial Sequence
  Description of Artificial Sequence: Synthetic oligonucleotide
ugcccucugguuggcucgu

SEQ ID NO: 3006559 - RNA, 19 nt, Artificial Sequence
  Description of Artificial Sequence: Synthetic oligonucleotide
ggucacuguuggagaugcg

SEQ ID NO: 3006560 - RNA, 19 nt, Artificial Sequence
  Description of Artificial Sequence: Synthetic oligonucleotide
guguuccugcuccuuuggu

SEQ ID NO: 3006561 - RNA, 19 nt, Artificial Sequence
  Description of Artificial Sequence: Synthetic oligonucleotide
guucaagaucagucaugau

SEQ ID NO: 3006562 - RNA, 19 nt, Artificial Sequence
  Description of Artificial Sequence: Synthetic oligonucleotide
aucagccuuugcaguaguu

SEQ ID NO: 3006563 - RNA, 19 nt, Artificial Sequence
  Description of Artificial Sequence: Synthetic oligonucleotide
caggguguucagcucuucu

SEQ ID NO: 3006564 - RNA, 19 nt, Artificial Sequence
  Description of Artificial Sequence: Synthetic oligonucleotide
augcgcagcgcggcauucu

SEQ ID NO: 3006565 - RNA, 19 nt, Artificial Sequence
  Description of Artificial Sequence: Synthetic oligonucleotide
caagaucagucaugaucau

SEQ ID NO: 3006566 - RNA, 19 nt, Artificial Sequence
  Description of Artificial Sequence: Synthetic oligonucleotide
gggcuguuugcagcgucug

SEQ ID NO: 3006567 - RNA, 19 nt, Artificial Sequence
  Description of Artificial Sequence: Synthetic oligonucleotide
ccuuaaagccucugcuucu

SEQ ID NO: 3006568 - RNA, 19 nt, Artificial Sequence
  Description of Artificial Sequence: Synthetic oligonucleotide
gcaguaguuucuucaucau

SEQ ID NO: 3006569 - RNA, 19 nt, Artificial Sequence
  Description of Artificial Sequence: Synthetic oligonucleotide
gcucuucucaccucuucau

SEQ ID NO: 3006570 - RNA, 19 nt, Artificial Sequence
  Description of Artificial Sequence: Synthetic oligonucleotide
cagucaugaucaucucgau

SEQ ID NO: 3006571 - RNA, 19 nt, Artificial Sequence
  Description of Artificial Sequence: Synthetic oligonucleotide
gcgguucuucuccaggagu

SEQ ID NO: 3006572 - RNA, 19 nt, Artificial Sequence
  Description of Artificial Sequence: Synthetic oligonucleotide
gguuggccgaugagagcug

SEQ ID NO: 3006573 - RNA, 19 nt, Artificial Sequence
  Description of Artificial Sequence: Synthetic oligonucleotide
guuggccgaugagagcugu

SEQ ID NO: 3006574 - RNA, 19 nt, Artificial Sequence
  Description of Artificial Sequence: Synthetic oligonucleotide
cgcggcauucucagacugc

SEQ ID NO: 3006575 - RNA, 19 nt, Artificial Sequence
  Description of Artificial Sequence: Synthetic oligonucleotide
cauagucagccugccuucu

SEQ ID NO: 3006576 - RNA, 19 nt, Artificial Sequence
  Description of Artificial Sequence: Synthetic oligonucleotide
gucagccugccuucuggau

SEQ ID NO: 3006577 - RNA, 19 nt, Artificial Sequence
  Description of Artificial Sequence: Synthetic oligonucleotide
caucagccuuugcaguagu

SEQ ID NO: 3006578 - RNA, 19 nt, Artificial Sequence
  Description of Artificial Sequence: Synthetic oligonucleotide
gugaggccagcuggagaga

SEQ ID NO: 3006579 - RNA, 19 nt, Artificial Sequence
  Description of Artificial Sequence: Synthetic oligonucleotide
gagaugcgcagcgcggcau

SEQ ID NO: 3006580 - RNA, 19 nt, Artificial Sequence
  Description of Artificial Sequence: Synthetic oligonucleotide
cagacugcagugagcgguu

SEQ ID NO: 3006581 - RNA, 19 nt, Artificial Sequence
  Description of Artificial Sequence: Synthetic oligonucleotide
cgguucuucuccaggagua

SEQ ID NO: 3006582 - RNA, 19 nt, Artificial Sequence
  Description of Artificial Sequence: Synthetic oligonucleotide
gccagcuggagagaauggu

SEQ ID NO: 3006583 - RNA, 19 nt, Artificial Sequence
  Description of Artificial Sequence: Synthetic oligonucleotide
cccucugguuggcucguuc

SEQ ID NO: 3006584 - RNA, 19 nt, Artificial Sequence
  Description of Artificial Sequence: Synthetic oligonucleotide
ccuuuggugcaaauuccau

SEQ ID NO: 3006585 - RNA, 19 nt, Artificial Sequence
  Description of Artificial Sequence: Synthetic oligonucleotide
ccagcuggagagaaugguu

SEQ ID NO: 3006586 - RNA, 19 nt, Artificial Sequence
  Description of Artificial Sequence: Synthetic oligonucleotide
guccuguguuccugcuccu

SEQ ID NO: 3006587 - RNA, 19 nt, Artificial Sequence
  Description of Artificial Sequence: Synthetic oligonucleotide
cggcauucucagacugcag

SEQ ID NO: 3006588 - RNA, 19 nt, Artificial Sequence
  Description of Artificial Sequence: Synthetic oligonucleotide
cuguucccuuaaagccucu

SEQ ID NO: 3006589 - RNA, 19 nt, Artificial Sequence
  Description of Artificial Sequence: Synthetic oligonucleotide
gaggccagcuggagagaau

SEQ ID NO: 3006590 - RNA, 19 nt, Artificial Sequence
  Description of Artificial Sequence: Synthetic oligonucleotide
gcagcgcggcauucucaga

SEQ ID NO: 3006591 - RNA, 19 nt, Artificial Sequence
  Description of Artificial Sequence: Synthetic oligonucleotide
ccgaugagagcuguucccu

SEQ ID NO: 3006592 - RNA, 19 nt, Artificial Sequence
  Description of Artificial Sequence: Synthetic oligonucleotide
ccuguguuccugcuccuuu

SEQ ID NO: 3006593 - RNA, 19 nt, Artificial Sequence
  Description of Artificial Sequence: Synthetic oligonucleotide
cugcuccuuuggugcaaau

SEQ ID NO: 3006594 - RNA, 19 nt, Artificial Sequence
  Description of Artificial Sequence: Synthetic oligonucleotide
ccucugcccucugguuggc

SEQ ID NO: 3006595 - RNA, 19 nt, Artificial Sequence
  Description of Artificial Sequence: Synthetic oligonucleotide
gcgcagcgcggcauucuca

SEQ ID NO: 3006596 - RNA, 19 nt, Artificial Sequence
  Description of Artificial Sequence: Synthetic oligonucleotide
ccugcuccuuuggugcaaa

SEQ ID NO: 3006597 - RNA, 19 nt, Artificial Sequence
  Description of Artificial Sequence: Synthetic oligonucleotide
cucugcccucugguuggcu

SEQ ID NO: 3006598 - RNA, 19 nt, Artificial Sequence
  Description of Artificial Sequence: Synthetic oligonucleotide
cgaugagagcuguucccuu

SEQ ID NO: 3006599 - RNA, 19 nt, Artificial Sequence
  Description of Artificial Sequence: Synthetic oligonucleotide
gccugccuucuggaucugu

SEQ ID NO: 3006600 - RNA, 19 nt, Artificial Sequence
  Description of Artificial Sequence: Synthetic oligonucleotide
ccauggacuucaggguguu

SEQ ID NO: 3006601 - RNA, 19 nt, Artificial Sequence
  Description of Artificial Sequence: Synthetic oligonucleotide
gcccucugguuggcucguu

SEQ ID NO: 3006602 - RNA, 19 nt, Artificial Sequence
  Description of Artificial Sequence: Synthetic oligonucleotide
aaucuuaaaaguuugcagc

SEQ ID NO: 3006603 - RNA, 19 nt, Artificial Sequence
  Description of Artificial Sequence: Synthetic oligonucleotide
uguaugaaaaucuauaacc

SEQ ID NO: 3006604 - RNA, 19 nt, Artificial Sequence
  Description of Artificial Sequence: Synthetic oligonucleotide
uaaaacguaaucuuaaaag

SEQ ID NO: 3006605 - RNA, 19 nt, Artificial Sequence
  Description of Artificial Sequence: Synthetic oligonucleotide
aaaaucuauaaccacaagu

SEQ ID NO: 3006606 - RNA, 19 nt, Artificial Sequence
  Description of Artificial Sequence: Synthetic oligonucleotide
accaaacucacauuaaucc

SEQ ID NO: 3006607 - RNA, 19 nt, Artificial Sequence
  Description of Artificial Sequence: Synthetic oligonucleotide
uuuaaauguaugaaaaucu

SEQ ID NO: 3006608 - RNA, 19 nt, Artificial Sequence
  Description of Artificial Sequence: Synthetic oligonucleotide
uacacaaucaaucauaaaa

SEQ ID NO: 3006609 - RNA, 19 nt, Artificial Sequence
  Description of Artificial Sequence: Synthetic oligonucleotide
aaaacguaaucuuaaaagu

SEQ ID NO: 3006610 - RNA, 19 nt, Artificial Sequence
  Description of Artificial Sequence: Synthetic oligonucleotide
aauugucaauauuuucucc

SEQ ID NO: 3006611 - RNA, 19 nt, Artificial Sequence
  Description of Artificial Sequence: Synthetic oligonucleotide
ucaauugucaauauuuucu

SEQ ID NO: 3006612 - RNA, 19 nt, Artificial Sequence
  Description of Artificial Sequence: Synthetic oligonucleotide
uuugauaacacuugguuac

SEQ ID NO: 3006613 - RNA, 19 nt, Artificial Sequence
  Description of Artificial Sequence: Synthetic oligonucleotide
uucuccaacauuuaaaugu

SEQ ID NO: 3006614 - RNA, 19 nt, Artificial Sequence
  Description of Artificial Sequence: Synthetic oligonucleotide
cacauuaauccauacaugg

SEQ ID NO: 3006615 - RNA, 19 nt, Artificial Sequence
  Description of Artificial Sequence: Synthetic oligonucleotide
caugguaucagugaaaagg

SEQ ID NO: 3006616 - RNA, 19 nt, Artificial Sequence
  Description of Artificial Sequence: Synthetic oligonucleotide
agcacauacacacagguag

SEQ ID NO: 3006617 - RNA, 19 nt, Artificial Sequence
  Description of Artificial Sequence: Synthetic oligonucleotide
aaauucaugacaugguacu

SEQ ID NO: 3006618 - RNA, 19 nt, Artificial Sequence
  Description of Artificial Sequence: Synthetic oligonucleotide
aaucuauaaccacaaguag

SEQ ID NO: 3006619 - RNA, 19 nt, Artificial Sequence
  Description of Artificial Sequence: Synthetic oligonucleotide
aaguagguuguucaucagc

SEQ ID NO: 3006620 - RNA, 19 nt, Artificial Sequence
  Description of Artificial Sequence: Synthetic oligonucleotide
uaaucuuaaaaguuugcag

SEQ ID NO: 3006621 - RNA, 19 nt, Artificial Sequence
  Description of Artificial Sequence: Synthetic oligonucleotide
ucuauaaccacaaguaggu

SEQ ID NO: 3006622 - RNA, 19 nt, Artificial Sequence
  Description of Artificial Sequence: Synthetic oligonucleotide
aauguaugaaaaucuauaa

SEQ ID NO: 3006623 - RNA, 19 nt, Artificial Sequence
  Description of Artificial Sequence: Synthetic oligonucleotide
aacauuuaaauguaugaaa

SEQ ID NO: 3006624 - RNA, 19 nt, Artificial Sequence
  Description of Artificial Sequence: Synthetic oligonucleotide
uucaucagcacauacacac

SEQ ID NO: 3006625 - RNA, 19 nt, Artificial Sequence
  Description of Artificial Sequence: Synthetic oligonucleotide
aauauuuucuccaacauuu

SEQ ID NO: 3006626 - RNA, 19 nt, Artificial Sequence
  Description of Artificial Sequence: Synthetic oligonucleotide
uuaaaaguuugcagcaggg

SEQ ID NO: 3006627 - RNA, 19 nt, Artificial Sequence
  Description of Artificial Sequence: Synthetic oligonucleotide
aaaauucaugacaugguac

SEQ ID NO: 3006628 - RNA, 19 nt, Artificial Sequence
  Description of Artificial Sequence: Synthetic oligonucleotide
aaucuguagguuuggacuc

SEQ ID NO: 3006629 - RNA, 19 nt, Artificial Sequence
  Description of Artificial Sequence: Synthetic oligonucleotide
uauaaccacaaguagguug

SEQ ID NO: 3006630 - RNA, 19 nt, Artificial Sequence
  Description of Artificial Sequence: Synthetic oligonucleotide
aaagaugaccaucugugug

SEQ ID NO: 3006631 - RNA, 19 nt, Artificial Sequence
  Description of Artificial Sequence: Synthetic oligonucleotide
auguaugaaaaucuauaac

SEQ ID NO: 3006632 - RNA, 19 nt, Artificial Sequence
  Description of Artificial Sequence: Synthetic oligonucleotide
aaucauaaaacguaaucuu

SEQ ID NO: 3006633 - RNA, 19 nt, Artificial Sequence
  Description of Artificial Sequence: Synthetic oligonucleotide
caaaagaugaccaucugug

SEQ ID NO: 3006634 - RNA, 19 nt, Artificial Sequence
  Description of Artificial Sequence: Synthetic oligonucleotide
auaauuacacaaucaauca

SEQ ID NO: 3006635 - RNA, 19 nt, Artificial Sequence
  Description of Artificial Sequence: Synthetic oligonucleotide
uguucaucagcacauacac

SEQ ID NO: 3006636 - RNA, 19 nt, Artificial Sequence
  Description of Artificial Sequence: Synthetic oligonucleotide
ucaaucauaaaacguaauc

SEQ ID NO: 3006637 - RNA, 19 nt, Artificial Sequence
  Description of Artificial Sequence: Synthetic oligonucleotide
acacagguaggacauacgc

SEQ ID NO: 3006638 - RNA, 19 nt, Artificial Sequence
  Description of Artificial Sequence: Synthetic oligonucleotide
guuacuuuauuccuaacac

SEQ ID NO: 3006639 - RNA, 19 nt, Artificial Sequence
  Description of Artificial Sequence: Synthetic oligonucleotide
cacaaucaaucauaaaacg

SEQ ID NO: 3006640 - RNA, 19 nt, Artificial Sequence
  Description of Artificial Sequence: Synthetic oligonucleotide
agcaucaaacaccaaacuc

SEQ ID NO: 3006641 - RNA, 19 nt, Artificial Sequence
  Description of Artificial Sequence: Synthetic oligonucleotide
uacuuuauuccuaacacau

SEQ ID NO: 3006642 - RNA, 19 nt, Artificial Sequence
  Description of Artificial Sequence: Synthetic oligonucleotide
aaaucuauaaccacaagua

SEQ ID NO: 3006643 - RNA, 19 nt, Artificial Sequence
  Description of Artificial Sequence: Synthetic oligonucleotide
uagguuuggacucuaauaa

SEQ ID NO: 3006644 - RNA, 19 nt, Artificial Sequence
  Description of Artificial Sequence: Synthetic oligonucleotide
ugaaaaucuauaaccacaa

SEQ ID NO: 3006645 - RNA, 19 nt, Artificial Sequence
  Description of Artificial Sequence: Synthetic oligonucleotide
agagacagcaucaaacacc

SEQ ID NO: 3006646 - RNA, 19 nt, Artificial Sequence
  Description of Artificial Sequence: Synthetic oligonucleotide
acacaaucaaucauaaaac

SEQ ID NO: 3006647 - RNA, 19 nt, Artificial Sequence
  Description of Artificial Sequence: Synthetic oligonucleotide
ucauaaaacguaaucuuaa

SEQ ID NO: 3006648 - RNA, 19 nt, Artificial Sequence
  Description of Artificial Sequence: Synthetic oligonucleotide
cuuaaaaguuugcagcagg

SEQ ID NO: 3006649 - RNA, 19 nt, Artificial Sequence
  Description of Artificial Sequence: Synthetic oligonucleotide
aaaaguuugcagcaggguu

SEQ ID NO: 3006650 - RNA, 19 nt, Artificial Sequence
  Description of Artificial Sequence: Synthetic oligonucleotide
auugucaauauuuucucca

SEQ ID NO: 3006651 - RNA, 19 nt, Artificial Sequence
  Description of Artificial Sequence: Synthetic oligonucleotide
acagguaggacauacgcug

SEQ ID NO: 3006652 - RNA, 19 nt, Artificial Sequence
  Description of Artificial Sequence: Synthetic oligonucleotide
caggguuucaaucuguagg

SEQ ID NO: 3006653 - RNA, 19 nt, Artificial Sequence
  Description of Artificial Sequence: Synthetic oligonucleotide
uuuucuccaacauuuaaau

SEQ ID NO: 3006654 - RNA, 19 nt, Artificial Sequence
  Description of Artificial Sequence: Synthetic oligonucleotide
uccaacauuuaaauguaug

SEQ ID NO: 3006655 - RNA, 19 nt, Artificial Sequence
  Description of Artificial Sequence: Synthetic oligonucleotide
uuaaauguaugaaaaucua

SEQ ID NO: 3006656 - RNA, 19 nt, Artificial Sequence
  Description of Artificial Sequence: Synthetic oligonucleotide
ugugacauccaguggagag

SEQ ID NO: 3006657 - RNA, 19 nt, Artificial Sequence
  Description of Artificial Sequence: Synthetic oligonucleotide
uggagagacagcaucaaac

SEQ ID NO: 3006658 - RNA, 19 nt, Artificial Sequence
  Description of Artificial Sequence: Synthetic oligonucleotide
aucuauaaccacaaguagg

SEQ ID NO: 3006659 - RNA, 19 nt, Artificial Sequence
  Description of Artificial Sequence: Synthetic oligonucleotide
aaacaccaaacucacauua

SEQ ID NO: 3006660 - RNA, 19 nt, Artificial Sequence
  Description of Artificial Sequence: Synthetic oligonucleotide
ucugucacugagcaaaaga

SEQ ID NO: 3006661 - RNA, 19 nt, Artificial Sequence
  Description of Artificial Sequence: Synthetic oligonucleotide
uuauuccuaacacauaauu

SEQ ID NO: 3006662 - RNA, 19 nt, Artificial Sequence
  Description of Artificial Sequence: Synthetic oligonucleotide
uaaauguaugaaaaucuau

SEQ ID NO: 3006663 - RNA, 19 nt, Artificial Sequence
  Description of Artificial Sequence: Synthetic oligonucleotide
acaaguagguuguucauca

SEQ ID NO: 3006664 - RNA, 19 nt, Artificial Sequence
  Description of Artificial Sequence: Synthetic oligonucleotide
aaauguaugaaaaucuaua

SEQ ID NO: 3006665 - RNA, 19 nt, Artificial Sequence
  Description of Artificial Sequence: Synthetic oligonucleotide
aacucacauuaauccauac

SEQ ID NO: 3006666 - RNA, 19 nt, Artificial Sequence
  Description of Artificial Sequence: Synthetic oligonucleotide
uuuugauaacacuugguua

SEQ ID NO: 3006667 - RNA, 19 nt, Artificial Sequence
  Description of Artificial Sequence: Synthetic oligonucleotide
aauuacacaaucaaucaua

SEQ ID NO: 3006668 - RNA, 19 nt, Artificial Sequence
  Description of Artificial Sequence: Synthetic oligonucleotide
aucugugugacauccagug

SEQ ID NO: 3006669 - RNA, 19 nt, Artificial Sequence
  Description of Artificial Sequence: Synthetic oligonucleotide
uauuccuaacacauaauua

SEQ ID NO: 3006670 - RNA, 19 nt, Artificial Sequence
  Description of Artificial Sequence: Synthetic oligonucleotide
guaucagugaaaaggaacc

SEQ ID NO: 3006671 - RNA, 19 nt, Artificial Sequence
  Description of Artificial Sequence: Synthetic oligonucleotide
ucagcacauacacacaggu

SEQ ID NO: 3006672 - RNA, 19 nt, Artificial Sequence
  Description of Artificial Sequence: Synthetic oligonucleotide
aucuuaaaaguuugcagca

SEQ ID NO: 3006673 - RNA, 19 nt, Artificial Sequence
  Description of Artificial Sequence: Synthetic oligonucleotide
uccuaacacauaauuacac

SEQ ID NO: 3006674 - RNA, 19 nt, Artificial Sequence
  Description of Artificial Sequence: Synthetic oligonucleotide
cacuugguuacuuuauucc

SEQ ID NO: 3006675 - RNA, 19 nt, Artificial Sequence
  Description of Artificial Sequence: Synthetic oligonucleotide
uuacuuuauuccuaacaca

SEQ ID NO: 3006676 - RNA, 19 nt, Artificial Sequence
  Description of Artificial Sequence: Synthetic oligonucleotide
ucacauuaauccauacaug

SEQ ID NO: 3006677 - RNA, 19 nt, Artificial Sequence
  Description of Artificial Sequence: Synthetic oligonucleotide
auaaaacguaaucuuaaaa

SEQ ID NO: 3006678 - RNA, 19 nt, Artificial Sequence
  Description of Artificial Sequence: Synthetic oligonucleotide
acacuugguuacuuuauuc

SEQ ID NO: 3006679 - RNA, 19 nt, Artificial Sequence
  Description of Artificial Sequence: Synthetic oligonucleotide
gacaugguacuuucaauug

SEQ ID NO: 3006680 - RNA, 19 nt, Artificial Sequence
  Description of Artificial Sequence: Synthetic oligonucleotide
acagcaucaaacaccaaac

SEQ ID NO: 3006681 - RNA, 19 nt, Artificial Sequence
  Description of Artificial Sequence: Synthetic oligonucleotide
ugucacugagcaaaagaug

SEQ ID NO: 3006682 - RNA, 19 nt, Artificial Sequence
  Description of Artificial Sequence: Synthetic oligonucleotide
uuguucaucagcacauaca

SEQ ID NO: 3006683 - RNA, 19 nt, Artificial Sequence
  Description of Artificial Sequence: Synthetic oligonucleotide
uagguuguucaucagcaca

SEQ ID NO: 3006684 - RNA, 19 nt, Artificial Sequence
  Description of Artificial Sequence: Synthetic oligonucleotide
uuccuaacacauaauuaca

SEQ ID NO: 3006685 - RNA, 19 nt, Artificial Sequence
  Description of Artificial Sequence: Synthetic oligonucleotide
aauccauacaugguaucag

SEQ ID NO: 3006686 - RNA, 19 nt, Artificial Sequence
  Description of Artificial Sequence: Synthetic oligonucleotide
uaacacauaauuacacaau

SEQ ID NO: 3006687 - RNA, 19 nt, Artificial Sequence
  Description of Artificial Sequence: Synthetic oligonucleotide
uucaauugucaauauuuuc

SEQ ID NO: 3006688 - RNA, 19 nt, Artificial Sequence
  Description of Artificial Sequence: Synthetic oligonucleotide
cuuuauuccuaacacauaa

SEQ ID NO: 3006689 - RNA, 19 nt, Artificial Sequence
  Description of Artificial Sequence: Synthetic oligonucleotide
acauuuaaauguaugaaaa

SEQ ID NO: 3006690 - RNA, 19 nt, Artificial Sequence
  Description of Artificial Sequence: Synthetic oligonucleotide
uccauacaugguaucagug

SEQ ID NO: 3006691 - RNA, 19 nt, Artificial Sequence
  Description of Artificial Sequence: Synthetic oligonucleotide
accacaaguagguuguuca

SEQ ID NO: 3006692 - RNA, 19 nt, Artificial Sequence
  Description of Artificial Sequence: Synthetic oligonucleotide
uuucaauugucaauauuuu

SEQ ID NO: 3006693 - RNA, 19 nt, Artificial Sequence
  Description of Artificial Sequence: Synthetic oligonucleotide
caaucaaucauaaaacgua

SEQ ID NO: 3006694 - RNA, 19 nt, Artificial Sequence
  Description of Artificial Sequence: Synthetic oligonucleotide
ugacaugguacuuucaauu

SEQ ID NO: 3006695 - RNA, 19 nt, Artificial Sequence
  Description of Artificial Sequence: Synthetic oligonucleotide
cuaacacauaauuacacaa

SEQ ID NO: 3006696 - RNA, 19 nt, Artificial Sequence
  Description of Artificial Sequence: Synthetic oligonucleotide
augaaaaucuauaaccaca

SEQ ID NO: 3006697 - RNA, 19 nt, Artificial Sequence
  Description of Artificial Sequence: Synthetic oligonucleotide
gaaaaucuauaaccacaag

SEQ ID NO: 3006698 - RNA, 19 nt, Artificial Sequence
  Description of Artificial Sequence: Synthetic oligonucleotide
gacagcaucaaacaccaaa

SEQ ID NO: 3006699 - RNA, 19 nt, Artificial Sequence
  Description of Artificial Sequence: Synthetic oligonucleotide
caauugucaauauuuucuc

SEQ ID NO: 3006700 - RNA, 19 nt, Artificial Sequence
  Description of Artificial Sequence: Synthetic oligonucleotide
ucugugugacauccagugg

SEQ ID NO: 3006701 - RNA, 19 nt, Artificial Sequence
  Description of Artificial Sequence: Synthetic oligonucleotide
ucaaucuguagguuuggac

SEQ ID NO: 3006702 - RNA, 19 nt, Artificial Sequence
  Description of Artificial Sequence: Synthetic oligonucleotide
caucaaacaccaaacucac

SEQ ID NO: 3006703 - RNA, 19 nt, Artificial Sequence
  Description of Artificial Sequence: Synthetic oligonucleotide
guaugaaaaucuauaacca

SEQ ID NO: 3006704 - RNA, 19 nt, Artificial Sequence
  Description of Artificial Sequence: Synthetic oligonucleotide
aggguuucaaucuguaggu

SEQ ID NO: 3006705 - RNA, 19 nt, Artificial Sequence
  Description of Artificial Sequence: Synthetic oligonucleotide
ugugugacauccaguggag

SEQ ID NO: 3006706 - RNA, 19 nt, Artificial Sequence
  Description of Artificial Sequence: Synthetic oligonucleotide
aaucaaucauaaaacguaa

SEQ ID NO: 3006707 - RNA, 19 nt, Artificial Sequence
  Description of Artificial Sequence: Synthetic oligonucleotide
aacguaaucuuaaaaguuu

SEQ ID NO: 3006708 - RNA, 19 nt, Artificial Sequence
  Description of Artificial Sequence: Synthetic oligonucleotide
acuugguuacuuuauuccu

SEQ ID NO: 3006709 - RNA, 19 nt, Artificial Sequence
  Description of Artificial Sequence: Synthetic oligonucleotide
acaaucaaucauaaaacgu

SEQ ID NO: 3006710 - RNA, 19 nt, Artificial Sequence
  Description of Artificial Sequence: Synthetic oligonucleotide
auacgcugggcucugucac

SEQ ID NO: 3006711 - RNA, 19 nt, Artificial Sequence
  Description of Artificial Sequence: Synthetic oligonucleotide
uuucuccaacauuuaaaug

SEQ ID NO: 3006712 - RNA, 19 nt, Artificial Sequence
  Description of Artificial Sequence: Synthetic oligonucleotide
caucagcacauacacacag

SEQ ID NO: 3006713 - RNA, 19 nt, Artificial Sequence
  Description of Artificial Sequence: Synthetic oligonucleotide
ucuuaaaaguuugcagcag

SEQ ID NO: 3006714 - RNA, 19 nt, Artificial Sequence
  Description of Artificial Sequence: Synthetic oligonucleotide
ugcagcaggguuucaaucu

SEQ ID NO: 3006715 - RNA, 19 nt, Artificial Sequence
  Description of Artificial Sequence: Synthetic oligonucleotide
ucuccaacauuuaaaugua

SEQ ID NO: 3006716 - RNA, 19 nt, Artificial Sequence
  Description of Artificial Sequence: Synthetic oligonucleotide
acauccaguggagagacag

SEQ ID NO: 3006717 - RNA, 19 nt, Artificial Sequence
  Description of Artificial Sequence: Synthetic oligonucleotide
caugguacuuucaauuguc

SEQ ID NO: 3006718 - RNA, 19 nt, Artificial Sequence
  Description of Artificial Sequence: Synthetic oligonucleotide
cauacacacagguaggaca

SEQ ID NO: 3006719 - RNA, 19 nt, Artificial Sequence
  Description of Artificial Sequence: Synthetic oligonucleotide
ugucaauauuuucuccaac

SEQ ID NO: 3006720 - RNA, 19 nt, Artificial Sequence
  Description of Artificial Sequence: Synthetic oligonucleotide
guaaucuuaaaaguuugca

SEQ ID NO: 3006721 - RNA, 19 nt, Artificial Sequence
  Description of Artificial Sequence: Synthetic oligonucleotide
cuuucaauugucaauauuu

SEQ ID NO: 3006722 - RNA, 19 nt, Artificial Sequence
  Description of Artificial Sequence: Synthetic oligonucleotide
cacauaauuacacaaucaa

SEQ ID NO: 3006723 - RNA, 19 nt, Artificial Sequence
  Description of Artificial Sequence: Synthetic oligonucleotide
uacaugguaucagugaaaa

SEQ ID NO: 3006724 - RNA, 19 nt, Artificial Sequence
  Description of Artificial Sequence: Synthetic oligonucleotide
uuuauuccuaacacauaau

SEQ ID NO: 3006725 - RNA, 19 nt, Artificial Sequence
  Description of Artificial Sequence: Synthetic oligonucleotide
gucacugagcaaaagauga

SEQ ID NO: 3006726 - RNA, 19 nt, Artificial Sequence
  Description of Artificial Sequence: Synthetic oligonucleotide
acucacauuaauccauaca

SEQ ID NO: 3006727 - RNA, 19 nt, Artificial Sequence
  Description of Artificial Sequence: Synthetic oligonucleotide
aaguuugcagcaggguuuc

SEQ ID NO: 3006728 - RNA, 19 nt, Artificial Sequence
  Description of Artificial Sequence: Synthetic oligonucleotide
auaaccacaaguagguugu

SEQ ID NO: 3006729 - RNA, 19 nt, Artificial Sequence
  Description of Artificial Sequence: Synthetic oligonucleotide
ugagcaaaagaugaccauc

SEQ ID NO: 3006730 - RNA, 19 nt, Artificial Sequence
  Description of Artificial Sequence: Synthetic oligonucleotide
uugguuacuuuauuccuaa

SEQ ID NO: 3006731 - RNA, 19 nt, Artificial Sequence
  Description of Artificial Sequence: Synthetic oligonucleotide
uucaugacaugguacuuuc

SEQ ID NO: 3006732 - RNA, 19 nt, Artificial Sequence
  Description of Artificial Sequence: Synthetic oligonucleotide
guuucaaucuguagguuug

SEQ ID NO: 3006733 - RNA, 19 nt, Artificial Sequence
  Description of Artificial Sequence: Synthetic oligonucleotide
auaacacuugguuacuuua

SEQ ID NO: 3006734 - RNA, 19 nt, Artificial Sequence
  Description of Artificial Sequence: Synthetic oligonucleotide
cauuaauccauacauggua

SEQ ID NO: 3006735 - RNA, 19 nt, Artificial Sequence
  Description of Artificial Sequence: Synthetic oligonucleotide
uguagguuuggacucuaau

SEQ ID NO: 3006736 - RNA, 19 nt, Artificial Sequence
  Description of Artificial Sequence: Synthetic oligonucleotide
aaaguuugcagcaggguuu

SEQ ID NO: 3006737 - RNA, 19 nt, Artificial Sequence
  Description of Artificial Sequence: Synthetic oligonucleotide
acacacagguaggacauac

SEQ ID NO: 3006738 - RNA, 19 nt, Artificial Sequence
  Description of Artificial Sequence: Synthetic oligonucleotide
acaugguacuuucaauugu

SEQ ID NO: 3006739 - RNA, 19 nt, Artificial Sequence
  Description of Artificial Sequence: Synthetic oligonucleotide
gagacagcaucaaacacca

SEQ ID NO: 3006740 - RNA, 19 nt, Artificial Sequence
  Description of Artificial Sequence: Synthetic oligonucleotide
cucacauuaauccauacau

SEQ ID NO: 3006741 - RNA, 19 nt, Artificial Sequence
  Description of Artificial Sequence: Synthetic oligonucleotide
uaacacuugguuacuuuau

SEQ ID NO: 3006742 - RNA, 19 nt, Artificial Sequence
  Description of Artificial Sequence: Synthetic oligonucleotide
aaccacaaguagguuguuc

SEQ ID NO: 3006743 - RNA, 19 nt, Artificial Sequence
  Description of Artificial Sequence: Synthetic oligonucleotide
uugucaauauuuucuccaa

SEQ ID NO: 3006744 - RNA, 19 nt, Artificial Sequence
  Description of Artificial Sequence: Synthetic oligonucleotide
gguuacuuuauuccuaaca

SEQ ID NO: 3006745 - RNA, 19 nt, Artificial Sequence
  Description of Artificial Sequence: Synthetic oligonucleotide
uuaauccauacaugguauc

SEQ ID NO: 3006746 - RNA, 19 nt, Artificial Sequence
  Description of Artificial Sequence: Synthetic oligonucleotide
uaaaaguuugcagcagggu

SEQ ID NO: 3006747 - RNA, 19 nt, Artificial Sequence
  Description of Artificial Sequence: Synthetic oligonucleotide
cacugagcaaaagaugacc

SEQ ID NO: 3006748 - RNA, 19 nt, Artificial Sequence
  Description of Artificial Sequence: Synthetic oligonucleotide
caccaaacucacauuaauc

SEQ ID NO: 3006749 - RNA, 19 nt, Artificial Sequence
  Description of Artificial Sequence: Synthetic oligonucleotide
auuaauccauacaugguau

SEQ ID NO: 3006750 - RNA, 19 nt, Artificial Sequence
  Description of Artificial Sequence: Synthetic oligonucleotide
guuguucaucagcacauac

SEQ ID NO: 3006751 - RNA, 19 nt, Artificial Sequence
  Description of Artificial Sequence: Synthetic oligonucleotide
caaucuguagguuuggacu

SEQ ID NO: 3006752 - RNA, 19 nt, Artificial Sequence
  Description of Artificial Sequence: Synthetic oligonucleotide
auccauacaugguaucagu

SEQ ID NO: 3006753 - RNA, 19 nt, Artificial Sequence
  Description of Artificial Sequence: Synthetic oligonucleotide
ucacugagcaaaagaugac

SEQ ID NO: 3006754 - RNA, 19 nt, Artificial Sequence
  Description of Artificial Sequence: Synthetic oligonucleotide
guagguuuggacucuaaua

SEQ ID NO: 3006755 - RNA, 19 nt, Artificial Sequence
  Description of Artificial Sequence: Synthetic oligonucleotide
ugguacuuucaauugucaa

SEQ ID NO: 3006756 - RNA, 19 nt, Artificial Sequence
  Description of Artificial Sequence: Synthetic oligonucleotide
ucaucagcacauacacaca

SEQ ID NO: 3006757 - RNA, 19 nt, Artificial Sequence
  Description of Artificial Sequence: Synthetic oligonucleotide
auuacacaaucaaucauaa

SEQ ID NO: 3006758 - RNA, 19 nt, Artificial Sequence
  Description of Artificial Sequence: Synthetic oligonucleotide
augguaucagugaaaagga

SEQ ID NO: 3006759 - RNA, 19 nt, Artificial Sequence
  Description of Artificial Sequence: Synthetic oligonucleotide
cugugugacauccagugga

SEQ ID NO: 3006760 - RNA, 19 nt, Artificial Sequence
  Description of Artificial Sequence: Synthetic oligonucleotide
acaccaaacucacauuaau

SEQ ID NO: 3006761 - RNA, 19 nt, Artificial Sequence
  Description of Artificial Sequence: Synthetic oligonucleotide
acugagcaaaagaugacca

SEQ ID NO: 3006762 - RNA, 19 nt, Artificial Sequence
  Description of Artificial Sequence: Synthetic oligonucleotide
gguaucagugaaaaggaac

SEQ ID NO: 3006763 - RNA, 19 nt, Artificial Sequence
  Description of Artificial Sequence: Synthetic oligonucleotide
cauacaugguaucagugaa

SEQ ID NO: 3006764 - RNA, 19 nt, Artificial Sequence
  Description of Artificial Sequence: Synthetic oligonucleotide
caaucauaaaacguaaucu

SEQ ID NO: 3006765 - RNA, 19 nt, Artificial Sequence
  Description of Artificial Sequence: Synthetic oligonucleotide
agguaggacauacgcuggg

SEQ ID NO: 3006766 - RNA, 19 nt, Artificial Sequence
  Description of Artificial Sequence: Synthetic oligonucleotide
ugacauccaguggagagac

SEQ ID NO: 3006767 - RNA, 19 nt, Artificial Sequence
  Description of Artificial Sequence: Synthetic oligonucleotide
acacauaauuacacaauca

SEQ ID NO: 3006768 - RNA, 19 nt, Artificial Sequence
  Description of Artificial Sequence: Synthetic oligonucleotide
uuugcagcaggguuucaau

SEQ ID NO: 3006769 - RNA, 19 nt, Artificial Sequence
  Description of Artificial Sequence: Synthetic oligonucleotide
uaucagugaaaaggaaccu

SEQ ID NO: 3006770 - RNA, 19 nt, Artificial Sequence
  Description of Artificial Sequence: Synthetic oligonucleotide
gcaucaaacaccaaacuca

SEQ ID NO: 3006771 - RNA, 19 nt, Artificial Sequence
  Description of Artificial Sequence: Synthetic oligonucleotide
acguaaucuuaaaaguuug

SEQ ID NO: 3006772 - RNA, 19 nt, Artificial Sequence
  Description of Artificial Sequence: Synthetic oligonucleotide
acuuucaauugucaauauu

SEQ ID NO: 3006773 - RNA, 19 nt, Artificial Sequence
  Description of Artificial Sequence: Synthetic oligonucleotide
cauaaaacguaaucuuaaa

SEQ ID NO: 3006774 - RNA, 19 nt, Artificial Sequence
  Description of Artificial Sequence: Synthetic oligonucleotide
agcaaaagaugaccaucug

SEQ ID NO: 3006775 - RNA, 19 nt, Artificial Sequence
  Description of Artificial Sequence: Synthetic oligonucleotide
guacuuucaauugucaaua

SEQ ID NO: 3006776 - RNA, 19 nt, Artificial Sequence
  Description of Artificial Sequence: Synthetic oligonucleotide
aucauaaaacguaaucuua

SEQ ID NO: 3006777 - RNA, 19 nt, Artificial Sequence
  Description of Artificial Sequence: Synthetic oligonucleotide
ggagagacagcaucaaaca

SEQ ID NO: 3006778 - RNA, 19 nt, Artificial Sequence
  Description of Artificial Sequence: Synthetic oligonucleotide
cagguaggacauacgcugg

SEQ ID NO: 3006779 - RNA, 19 nt, Artificial Sequence
  Description of Artificial Sequence: Synthetic oligonucleotide
augacaugguacuuucaau

SEQ ID NO: 3006780 - RNA, 19 nt, Artificial Sequence
  Description of Artificial Sequence: Synthetic oligonucleotide
ccaacauuuaaauguauga

SEQ ID NO: 3006781 - RNA, 19 nt, Artificial Sequence
  Description of Artificial Sequence: Synthetic oligonucleotide
acaugguaucagugaaaag

SEQ ID NO: 3006782 - RNA, 19 nt, Artificial Sequence
  Description of Artificial Sequence: Synthetic oligonucleotide
ugguaucagugaaaaggaa

SEQ ID NO: 3006783 - RNA, 19 nt, Artificial Sequence
  Description of Artificial Sequence: Synthetic oligonucleotide
uaggacauacgcugggcuc

SEQ ID NO: 3006784 - RNA, 19 nt, Artificial Sequence
  Description of Artificial Sequence: Synthetic oligonucleotide
caugacaugguacuuucaa

SEQ ID NO: 3006785 - RNA, 19 nt, Artificial Sequence
  Description of Artificial Sequence: Synthetic oligonucleotide
cacacagguaggacauacg

SEQ ID NO: 3006786 - RNA, 19 nt, Artificial Sequence
  Description of Artificial Sequence: Synthetic oligonucleotide
acauacgcugggcucuguc

SEQ ID NO: 3006787 - RNA, 19 nt, Artificial Sequence
  Description of Artificial Sequence: Synthetic oligonucleotide
caacauuuaaauguaugaa

SEQ ID NO: 3006788 - RNA, 19 nt, Artificial Sequence
  Description of Artificial Sequence: Synthetic oligonucleotide
ucaugacaugguacuuuca

SEQ ID NO: 3006789 - RNA, 19 nt, Artificial Sequence
  Description of Artificial Sequence: Synthetic oligonucleotide
aauucaugacaugguacuu

SEQ ID NO: 3006790 - RNA, 19 nt, Artificial Sequence
  Description of Artificial Sequence: Synthetic oligonucleotide
uuacacaaucaaucauaaa

SEQ ID NO: 3006791 - RNA, 19 nt, Artificial Sequence
  Description of Artificial Sequence: Synthetic oligonucleotide
auccaguggagagacagca

SEQ ID NO: 3006792 - RNA, 19 nt, Artificial Sequence
  Description of Artificial Sequence: Synthetic oligonucleotide
aacaccaaacucacauuaa

SEQ ID NO: 3006793 - RNA, 19 nt, Artificial Sequence
  Description of Artificial Sequence: Synthetic oligonucleotide
uugauaacacuugguuacu

SEQ ID NO: 3006794 - RNA, 19 nt, Artificial Sequence
  Description of Artificial Sequence: Synthetic oligonucleotide
agguuuggacucuaauaaa

SEQ ID NO: 3006795 - RNA, 19 nt, Artificial Sequence
  Description of Artificial Sequence: Synthetic oligonucleotide
auacacacagguaggacau

SEQ ID NO: 3006796 - RNA, 19 nt, Artificial Sequence
  Description of Artificial Sequence: Synthetic oligonucleotide
uugcagcaggguuucaauc

SEQ ID NO: 3006797 - RNA, 19 nt, Artificial Sequence
  Description of Artificial Sequence: Synthetic oligonucleotide
uacuuucaauugucaauau

SEQ ID NO: 3006798 - RNA, 19 nt, Artificial Sequence
  Description of Artificial Sequence: Synthetic oligonucleotide
caaguagguuguucaucag

SEQ ID NO: 3006799 - RNA, 19 nt, Artificial Sequence
  Description of Artificial Sequence: Synthetic oligonucleotide
aaacucacauuaauccaua

SEQ ID NO: 3006800 - RNA, 19 nt, Artificial Sequence
  Description of Artificial Sequence: Synthetic oligonucleotide
cauccaguggagagacagc

SEQ ID NO: 3006801 - RNA, 19 nt, Artificial Sequence
  Description of Artificial Sequence: Synthetic oligonucleotide
caaacucacauuaauccau

SEQ ID NO: 3006802 - RNA, 19 nt, Artificial Sequence
  Description of Artificial Sequence: Synthetic oligonucleotide
gagcaaaagaugaccaucu

SEQ ID NO: 3006803 - RNA, 19 nt, Artificial Sequence
  Description of Artificial Sequence: Synthetic oligonucleotide
aggacauacgcugggcucu

SEQ ID NO: 3006804 - RNA, 19 nt, Artificial Sequence
  Description of Artificial Sequence: Synthetic oligonucleotide
cacaaguagguuguucauc

SEQ ID NO: 3006805 - RNA, 19 nt, Artificial Sequence
  Description of Artificial Sequence: Synthetic oligonucleotide
gauaacacuugguuacuuu

SEQ ID NO: 3006806 - RNA, 19 nt, Artificial Sequence
  Description of Artificial Sequence: Synthetic oligonucleotide
cguaaucuuaaaaguuugc

SEQ ID NO: 3006807 - RNA, 19 nt, Artificial Sequence
  Description of Artificial Sequence: Synthetic oligonucleotide
gguacuuucaauugucaau

SEQ ID NO: 3006808 - RNA, 19 nt, Artificial Sequence
  Description of Artificial Sequence: Synthetic oligonucleotide
agguuguucaucagcacau

SEQ ID NO: 3006809 - RNA, 19 nt, Artificial Sequence
  Description of Artificial Sequence: Synthetic oligonucleotide
aucaaucauaaaacguaau

SEQ ID NO: 3006810 - RNA, 19 nt, Artificial Sequence
  Description of Artificial Sequence: Synthetic oligonucleotide
cugucacugagcaaaagau

SEQ ID NO: 3006811 - RNA, 19 nt, Artificial Sequence
  Description of Artificial Sequence: Synthetic oligonucleotide
gguuuggacucuaauaaaa

SEQ ID NO: 3006812 - RNA, 19 nt, Artificial Sequence
  Description of Artificial Sequence: Synthetic oligonucleotide
cauacgcugggcucuguca

SEQ ID NO: 3006813 - RNA, 19 nt, Artificial Sequence
  Description of Artificial Sequence: Synthetic oligonucleotide
cugggcucugucacugagc

SEQ ID NO: 3006814 - RNA, 19 nt, Artificial Sequence
  Description of Artificial Sequence: Synthetic oligonucleotide
ccuaacacauaauuacaca

SEQ ID NO: 3006815 - RNA, 19 nt, Artificial Sequence
  Description of Artificial Sequence: Synthetic oligonucleotide
caguggagagacagcauca

SEQ ID NO: 3006816 - RNA, 19 nt, Artificial Sequence
  Description of Artificial Sequence: Synthetic oligonucleotide
ugguuacuuuauuccuaac

SEQ ID NO: 3006817 - RNA, 19 nt, Artificial Sequence
  Description of Artificial Sequence: Synthetic oligonucleotide
gcacauacacacagguagg

SEQ ID NO: 3006818 - RNA, 19 nt, Artificial Sequence
  Description of Artificial Sequence: Synthetic oligonucleotide
uccaguggagagacagcau

SEQ ID NO: 3006819 - RNA, 19 nt, Artificial Sequence
  Description of Artificial Sequence: Synthetic oligonucleotide
ccaaacucacauuaaucca

SEQ ID NO: 3006820 - RNA, 19 nt, Artificial Sequence
  Description of Artificial Sequence: Synthetic oligonucleotide
ugauaacacuugguuacuu

SEQ ID NO: 3006821 - RNA, 19 nt, Artificial Sequence
  Description of Artificial Sequence: Synthetic oligonucleotide
augguacuuucaauuguca

SEQ ID NO: 3006822 - RNA, 19 nt, Artificial Sequence
  Description of Artificial Sequence: Synthetic oligonucleotide
gcaggguuucaaucuguag

SEQ ID NO: 3006823 - RNA, 19 nt, Artificial Sequence
  Description of Artificial Sequence: Synthetic oligonucleotide
ccauacaugguaucaguga

SEQ ID NO: 3006824 - RNA, 19 nt, Artificial Sequence
  Description of Artificial Sequence: Synthetic oligonucleotide
gcaaaagaugaccaucugu

SEQ ID NO: 3006825 - RNA, 19 nt, Artificial Sequence
  Description of Artificial Sequence: Synthetic oligonucleotide
ccaguggagagacagcauc

SEQ ID NO: 3006826 - RNA, 19 nt, Artificial Sequence
  Description of Artificial Sequence: Synthetic oligonucleotide
gugacauccaguggagaga

SEQ ID NO: 3006827 - RNA, 19 nt, Artificial Sequence
  Description of Artificial Sequence: Synthetic oligonucleotide
uacgcugggcucugucacu

SEQ ID NO: 3006828 - RNA, 19 nt, Artificial Sequence
  Description of Artificial Sequence: Synthetic oligonucleotide
guaggacauacgcugggcu

SEQ ID NO: 3006829 - RNA, 19 nt, Artificial Sequence
  Description of Artificial Sequence: Synthetic oligonucleotide
auacaugguaucagugaaa

SEQ ID NO: 3006830 - RNA, 19 nt, Artificial Sequence
  Description of Artificial Sequence: Synthetic oligonucleotide
aguggagagacagcaucaa

SEQ ID NO: 3006831 - RNA, 19 nt, Artificial Sequence
  Description of Artificial Sequence: Synthetic oligonucleotide
auauuuucuccaacauuua

SEQ ID NO: 3006832 - RNA, 19 nt, Artificial Sequence
  Description of Artificial Sequence: Synthetic oligonucleotide
ugaccaucugugugacauc

SEQ ID NO: 3006833 - RNA, 19 nt, Artificial Sequence
  Description of Artificial Sequence: Synthetic oligonucleotide
acuuuauuccuaacacaua

SEQ ID NO: 3006834 - RNA, 19 nt, Artificial Sequence
  Description of Artificial Sequence: Synthetic oligonucleotide
cacauacacacagguagga

SEQ ID NO: 3006835 - RNA, 19 nt, Artificial Sequence
  Description of Artificial Sequence: Synthetic oligonucleotide
aucuguagguuuggacucu

SEQ ID NO: 3006836 - RNA, 19 nt, Artificial Sequence
  Description of Artificial Sequence: Synthetic oligonucleotide
gguaggacauacgcugggc

SEQ ID NO: 3006837 - RNA, 19 nt, Artificial Sequence
  Description of Artificial Sequence: Synthetic oligonucleotide
cucugucacugagcaaaag

SEQ ID NO: 3006838 - RNA, 19 nt, Artificial Sequence
  Description of Artificial Sequence: Synthetic oligonucleotide
gaugaccaucugugugaca

SEQ ID NO: 3006839 - RNA, 19 nt, Artificial Sequence
  Description of Artificial Sequence: Synthetic oligonucleotide
gguuucaaucuguagguuu

SEQ ID NO: 3006840 - RNA, 19 nt, Artificial Sequence
  Description of Artificial Sequence: Synthetic oligonucleotide
guggagagacagcaucaaa

SEQ ID NO: 3006841 - RNA, 19 nt, Artificial Sequence
  Description of Artificial Sequence: Synthetic oligonucleotide
ucuguagguuuggacucua

SEQ ID NO: 3006842 - RNA, 19 nt, Artificial Sequence
  Description of Artificial Sequence: Synthetic oligonucleotide
gcugggcucugucacugag

SEQ ID NO: 3006843 - RNA, 19 nt, Artificial Sequence
  Description of Artificial Sequence: Synthetic oligonucleotide
aucaaacaccaaacucaca

SEQ ID NO: 3006844 - RNA, 19 nt, Artificial Sequence
  Description of Artificial Sequence: Synthetic oligonucleotide
acgcugggcucugucacug

SEQ ID NO: 3006845 - RNA, 19 nt, Artificial Sequence
  Description of Artificial Sequence: Synthetic oligonucleotide
cagcaucaaacaccaaacu

SEQ ID NO: 3006846 - RNA, 19 nt, Artificial Sequence
  Description of Artificial Sequence: Synthetic oligonucleotide
cugagcaaaagaugaccau

SEQ ID NO: 3006847 - RNA, 19 nt, Artificial Sequence
  Description of Artificial Sequence: Synthetic oligonucleotide
cagcacauacacacaggua

SEQ ID NO: 3006848 - RNA, 19 nt, Artificial Sequence
  Description of Artificial Sequence: Synthetic oligonucleotide
caaacaccaaacucacauu

SEQ ID NO: 3006849 - RNA, 19 nt, Artificial Sequence
  Description of Artificial Sequence: Synthetic oligonucleotide
caucugugugacauccagu

SEQ ID NO: 3006850 - RNA, 19 nt, Artificial Sequence
  Description of Artificial Sequence: Synthetic oligonucleotide
uacacacagguaggacaua

SEQ ID NO: 3006851 - RNA, 19 nt, Artificial Sequence
  Description of Artificial Sequence: Synthetic oligonucleotide
accaucugugugacaucca

SEQ ID NO: 3006852 - RNA, 19 nt, Artificial Sequence
  Description of Artificial Sequence: Synthetic oligonucleotide
gugugacauccaguggaga

SEQ ID NO: 3006853 - RNA, 19 nt, Artificial Sequence
  Description of Artificial Sequence: Synthetic oligonucleotide
cuguagguuuggacucuaa

SEQ ID NO: 3006854 - RNA, 19 nt, Artificial Sequence
  Description of Artificial Sequence: Synthetic oligonucleotide
cuccaacauuuaaauguau

SEQ ID NO: 3006855 - RNA, 19 nt, Artificial Sequence
  Description of Artificial Sequence: Synthetic oligonucleotide
uaaccacaaguagguuguu

SEQ ID NO: 3006856 - RNA, 19 nt, Artificial Sequence
  Description of Artificial Sequence: Synthetic oligonucleotide
gacauccaguggagagaca

SEQ ID NO: 3006857 - RNA, 19 nt, Artificial Sequence
  Description of Artificial Sequence: Synthetic oligonucleotide
aguuugcagcaggguuuca

SEQ ID NO: 3006858 - RNA, 19 nt, Artificial Sequence
  Description of Artificial Sequence: Synthetic oligonucleotide
cagcaggguuucaaucugu

SEQ ID NO: 3006859 - RNA, 19 nt, Artificial Sequence
  Description of Artificial Sequence: Synthetic oligonucleotide
ggacauacgcugggcucug

SEQ ID NO: 3006860 - RNA, 19 nt, Artificial Sequence
  Description of Artificial Sequence: Synthetic oligonucleotide
cuauaaccacaaguagguu

SEQ ID NO: 3006861 - RNA, 19 nt, Artificial Sequence
  Description of Artificial Sequence: Synthetic oligonucleotide
agacagcaucaaacaccaa

SEQ ID NO: 3006862 - RNA, 19 nt, Artificial Sequence
  Description of Artificial Sequence: Synthetic oligonucleotide
gcucugucacugagcaaaa

SEQ ID NO: 3006863 - RNA, 19 nt, Artificial Sequence
  Description of Artificial Sequence: Synthetic oligonucleotide
gacauacgcugggcucugu

SEQ ID NO: 3006864 - RNA, 19 nt, Artificial Sequence
  Description of Artificial Sequence: Synthetic oligonucleotide
ccacaaguagguuguucau

SEQ ID NO: 3006865 - RNA, 19 nt, Artificial Sequence
  Description of Artificial Sequence: Synthetic oligonucleotide
gggcucugucacugagcaa

SEQ ID NO: 3006866 - RNA, 19 nt, Artificial Sequence
  Description of Artificial Sequence: Synthetic oligonucleotide
ggguuucaaucuguagguu

SEQ ID NO: 3006867 - RNA, 19 nt, Artificial Sequence
  Description of Artificial Sequence: Synthetic oligonucleotide
cgcugggcucugucacuga

SEQ ID NO: 3006868 - RNA, 19 nt, Artificial Sequence
  Description of Artificial Sequence: Synthetic oligonucleotide
aguccucacaaauagaucc

SEQ ID NO: 3006869 - RNA, 19 nt, Artificial Sequence
  Description of Artificial Sequence: Synthetic oligonucleotide
cuugauuuggcacagagag

SEQ ID NO: 3006870 - RNA, 19 nt, Artificial Sequence
  Description of Artificial Sequence: Synthetic oligonucleotide
uuagaaagcauucauggcu

SEQ ID NO: 3006871 - RNA, 19 nt, Artificial Sequence
  Description of Artificial Sequence: Synthetic oligonucleotide
auucauucaugucagcugc

SEQ ID NO: 3006872 - RNA, 19 nt, Artificial Sequence
  Description of Artificial Sequence: Synthetic oligonucleotide
caaaaugucccacagaggc

SEQ ID NO: 3006873 - RNA, 19 nt, Artificial Sequence
  Description of Artificial Sequence: Synthetic oligonucleotide
auaaaguccucacaaauag

SEQ ID NO: 3006874 - RNA, 19 nt, Artificial Sequence
  Description of Artificial Sequence: Synthetic oligonucleotide
aauuuuggggagcacggac

SEQ ID NO: 3006875 - RNA, 19 nt, Artificial Sequence
  Description of Artificial Sequence: Synthetic oligonucleotide
aaagcaaaaugucccacag

SEQ ID NO: 3006876 - RNA, 19 nt, Artificial Sequence
  Description of Artificial Sequence: Synthetic oligonucleotide
cauguaaagcaaaaugucc

SEQ ID NO: 3006877 - RNA, 19 nt, Artificial Sequence
  Description of Artificial Sequence: Synthetic oligonucleotide
aaauagauccgggaaugcc

SEQ ID NO: 3006878 - RNA, 19 nt, Artificial Sequence
  Description of Artificial Sequence: Synthetic oligonucleotide
agacauguaaagcaaaaug

SEQ ID NO: 3006879 - RNA, 19 nt, Artificial Sequence
  Description of Artificial Sequence: Synthetic oligonucleotide
auguaaagcaaaauguccc

SEQ ID NO: 3006880 - RNA, 19 nt, Artificial Sequence
  Description of Artificial Sequence: Synthetic oligonucleotide
accguugucccacacaagc

SEQ ID NO: 3006881 - RNA, 19 nt, Artificial Sequence
  Description of Artificial Sequence: Synthetic oligonucleotide
aauagauccgggaaugccg

SEQ ID NO: 3006882 - RNA, 19 nt, Artificial Sequence
  Description of Artificial Sequence: Synthetic oligonucleotide
acacaagcagcauucauuc

SEQ ID NO: 3006883 - RNA, 19 nt, Artificial Sequence
  Description of Artificial Sequence: Synthetic oligonucleotide
acagagagcaaacaggaca

SEQ ID NO: 3006884 - RNA, 19 nt, Artificial Sequence
  Description of Artificial Sequence: Synthetic oligonucleotide
gaguucagcugcuucagcg

SEQ ID NO: 3006885 - RNA, 19 nt, Artificial Sequence
  Description of Artificial Sequence: Synthetic oligonucleotide
uccagguugagucacgaug

SEQ ID NO: 3006886 - RNA, 19 nt, Artificial Sequence
  Description of Artificial Sequence: Synthetic oligonucleotide
agagaguccucauugccac

SEQ ID NO: 3006887 - RNA, 19 nt, Artificial Sequence
  Description of Artificial Sequence: Synthetic oligonucleotide
caaacaggacagcagaggg

SEQ ID NO: 3006888 - RNA, 19 nt, Artificial Sequence
  Description of Artificial Sequence: Synthetic oligonucleotide
aaugucucucuugauuugg

SEQ ID NO: 3006889 - RNA, 19 nt, Artificial Sequence
  Description of Artificial Sequence: Synthetic oligonucleotide
ccuuagaaagcauucaugg

SEQ ID NO: 3006890 - RNA, 19 nt, Artificial Sequence
  Description of Artificial Sequence: Synthetic oligonucleotide
agagggugaccauaaaguc

SEQ ID NO: 3006891 - RNA, 19 nt, Artificial Sequence
  Description of Artificial Sequence: Synthetic oligonucleotide
uguaaagcaaaauguccca

SEQ ID NO: 3006892 - RNA, 19 nt, Artificial Sequence
  Description of Artificial Sequence: Synthetic oligonucleotide
uggaauuuuggggagcacg

SEQ ID NO: 3006893 - RNA, 19 nt, Artificial Sequence
  Description of Artificial Sequence: Synthetic oligonucleotide
acauguaaagcaaaauguc

SEQ ID NO: 3006894 - RNA, 19 nt, Artificial Sequence
  Description of Artificial Sequence: Synthetic oligonucleotide
agagcucucaccaaccagc

SEQ ID NO: 3006895 - RNA, 19 nt, Artificial Sequence
  Description of Artificial Sequence: Synthetic oligonucleotide
ucacaaauagauccgggaa

SEQ ID NO: 3006896 - RNA, 19 nt, Artificial Sequence
  Description of Artificial Sequence: Synthetic oligonucleotide
aaaguccucacaaauagau

SEQ ID NO: 3006897 - RNA, 19 nt, Artificial Sequence
  Description of Artificial Sequence: Synthetic oligonucleotide
cuuagaaagcauucauggc

SEQ ID NO: 3006898 - RNA, 19 nt, Artificial Sequence
  Description of Artificial Sequence: Synthetic oligonucleotide
caaccagcuccuuagaaag

SEQ ID NO: 3006899 - RNA, 19 nt, Artificial Sequence
  Description of Artificial Sequence: Synthetic oligonucleotide
acacccaagacauguaaag

SEQ ID NO: 3006900 - RNA, 19 nt, Artificial Sequence
  Description of Artificial Sequence: Synthetic oligonucleotide
uccuuagaaagcauucaug

SEQ ID NO: 3006901 - RNA, 19 nt, Artificial Sequence
  Description of Artificial Sequence: Synthetic oligonucleotide
ucaccaaccagcuccuuag

SEQ ID NO: 3006902 - RNA, 19 nt, Artificial Sequence
  Description of Artificial Sequence: Synthetic oligonucleotide
ugagucacgaugacuguug

SEQ ID NO: 3006903 - RNA, 19 nt, Artificial Sequence
  Description of Artificial Sequence: Synthetic oligonucleotide
gacuguuggugccugagcc

SEQ ID NO: 3006904 - RNA, 19 nt, Artificial Sequence
  Description of Artificial Sequence: Synthetic oligonucleotide
uaucggguucgguagagag

SEQ ID NO: 3006905 - RNA, 19 nt, Artificial Sequence
  Description of Artificial Sequence: Synthetic oligonucleotide
cagagagcaaacaggacag

SEQ ID NO: 3006906 - RNA, 19 nt, Artificial Sequence
  Description of Artificial Sequence: Synthetic oligonucleotide
uagaaagcauucauggcuc

SEQ ID NO: 3006907 - RNA, 19 nt, Artificial Sequence
  Description of Artificial Sequence: Synthetic oligonucleotide
ucucucuugauuuggcaca

SEQ ID NO: 3006908 - RNA, 19 nt, Artificial Sequence
  Description of Artificial Sequence: Synthetic oligonucleotide
cauucauucaugucagcug

SEQ ID NO: 3006909 - RNA, 19 nt, Artificial Sequence
  Description of Artificial Sequence: Synthetic oligonucleotide
uggcacagagagcaaacag

SEQ ID NO: 3006910 - RNA, 19 nt, Artificial Sequence
  Description of Artificial Sequence: Synthetic oligonucleotide
uagagaguccucauugcca

SEQ ID NO: 3006911 - RNA, 19 nt, Artificial Sequence
  Description of Artificial Sequence: Synthetic oligonucleotide
acaagcagcauucauucau

SEQ ID NO: 3006912 - RNA, 19 nt, Artificial Sequence
  Description of Artificial Sequence: Synthetic oligonucleotide
aaucacacaggcugcucug

SEQ ID NO: 3006913 - RNA, 19 nt, Artificial Sequence
  Description of Artificial Sequence: Synthetic oligonucleotide
acaaauagauccgggaaug

SEQ ID NO: 3006914 - RNA, 19 nt, Artificial Sequence
  Description of Artificial Sequence: Synthetic oligonucleotide
agcgagagcucucaccaac

SEQ ID NO: 3006915 - RNA, 19 nt, Artificial Sequence
  Description of Artificial Sequence: Synthetic oligonucleotide
gacauguaaagcaaaaugu

SEQ ID NO: 3006916 - RNA, 19 nt, Artificial Sequence
  Description of Artificial Sequence: Synthetic oligonucleotide
ucuugauuuggcacagaga

SEQ ID NO: 3006917 - RNA, 19 nt, Artificial Sequence
  Description of Artificial Sequence: Synthetic oligonucleotide
gaccauaaaguccucacaa

SEQ ID NO: 3006918 - RNA, 19 nt, Artificial Sequence
  Description of Artificial Sequence: Synthetic oligonucleotide
uuuggcacagagagcaaac

SEQ ID NO: 3006919 - RNA, 19 nt, Artificial Sequence
  Description of Artificial Sequence: Synthetic oligonucleotide
ugccacuugacacccaaga

SEQ ID NO: 3006920 - RNA, 19 nt, Artificial Sequence
  Description of Artificial Sequence: Synthetic oligonucleotide
gucacgaugacuguuggug

SEQ ID NO: 3006921 - RNA, 19 nt, Artificial Sequence
  Description of Artificial Sequence: Synthetic oligonucleotide
ugaccauaaaguccucaca

SEQ ID NO: 3006922 - RNA, 19 nt, Artificial Sequence
  Description of Artificial Sequence: Synthetic oligonucleotide
gccaguuggaauuuugggg

SEQ ID NO: 3006923 - RNA, 19 nt, Artificial Sequence
  Description of Artificial Sequence: Synthetic oligonucleotide
cucuugauuuggcacagag

SEQ ID NO: 3006924 - RNA, 19 nt, Artificial Sequence
  Description of Artificial Sequence: Synthetic oligonucleotide
auucaugucagcugccacu

SEQ ID NO: 3006925 - RNA, 19 nt, Artificial Sequence
  Description of Artificial Sequence: Synthetic oligonucleotide
agcugcuucagcgagagcu

SEQ ID NO: 3006926 - RNA, 19 nt, Artificial Sequence
  Description of Artificial Sequence: Synthetic oligonucleotide
auugccaccguugucccac

SEQ ID NO: 3006927 - RNA, 19 nt, Artificial Sequence
  Description of Artificial Sequence: Synthetic oligonucleotide
ucuccuccgguuaaugucu

SEQ ID NO: 3006928 - RNA, 19 nt, Artificial Sequence
  Description of Artificial Sequence: Synthetic oligonucleotide
guagagaguccucauugcc

SEQ ID NO: 3006929 - RNA, 19 nt, Artificial Sequence
  Description of Artificial Sequence: Synthetic oligonucleotide
gguugagucacgaugacug

SEQ ID NO: 3006930 - RNA, 19 nt, Artificial Sequence
  Description of Artificial Sequence: Synthetic oligonucleotide
agcacggacaaauccaggu

SEQ ID NO: 3006931 - RNA, 19 nt, Artificial Sequence
  Description of Artificial Sequence: Synthetic oligonucleotide
ucugccaguuggaauuuug

SEQ ID NO: 3006932 - RNA, 19 nt, Artificial Sequence
  Description of Artificial Sequence: Synthetic oligonucleotide
uugauuuggcacagagagc

SEQ ID NO: 3006933 - RNA, 19 nt, Artificial Sequence
  Description of Artificial Sequence: Synthetic oligonucleotide
cugaagcaaucacacaggc

SEQ ID NO: 3006934 - RNA, 19 nt, Artificial Sequence
  Description of Artificial Sequence: Synthetic oligonucleotide
gagggugaccauaaagucc

SEQ ID NO: 3006935 - RNA, 19 nt, Artificial Sequence
  Description of Artificial Sequence: Synthetic oligonucleotide
ucacgaugacuguuggugc

SEQ ID NO: 3006936 - RNA, 19 nt, Artificial Sequence
  Description of Artificial Sequence: Synthetic oligonucleotide
ugagccaucuucgaugcga

SEQ ID NO: 3006937 - RNA, 19 nt, Artificial Sequence
  Description of Artificial Sequence: Synthetic oligonucleotide
acuccgcagucgcugaagc

SEQ ID NO: 3006938 - RNA, 19 nt, Artificial Sequence
  Description of Artificial Sequence: Synthetic oligonucleotide
aaguccucacaaauagauc

SEQ ID NO: 3006939 - RNA, 19 nt, Artificial Sequence
  Description of Artificial Sequence: Synthetic oligonucleotide
agcagcauucauucauguc

SEQ ID NO: 3006940 - RNA, 19 nt, Artificial Sequence
  Description of Artificial Sequence: Synthetic oligonucleotide
ugaagcaaucacacaggcu

SEQ ID NO: 3006941 - RNA, 19 nt, Artificial Sequence
  Description of Artificial Sequence: Synthetic oligonucleotide
cagcauucauucaugucag

SEQ ID NO: 3006942 - RNA, 19 nt, Artificial Sequence
  Description of Artificial Sequence: Synthetic oligonucleotide
aguuggaauuuuggggagc

SEQ ID NO: 3006943 - RNA, 19 nt, Artificial Sequence
  Description of Artificial Sequence: Synthetic oligonucleotide
uaaugucucucuugauuug

SEQ ID NO: 3006944 - RNA, 19 nt, Artificial Sequence
  Description of Artificial Sequence: Synthetic oligonucleotide
aagacauguaaagcaaaau

SEQ ID NO: 3006945 - RNA, 19 nt, Artificial Sequence
  Description of Artificial Sequence: Synthetic oligonucleotide
uucagcgagagcucucacc

SEQ ID NO: 3006946 - RNA, 19 nt, Artificial Sequence
  Description of Artificial Sequence: Synthetic oligonucleotide
cacggacaaauccagguug

SEQ ID NO: 3006947 - RNA, 19 nt, Artificial Sequence
  Description of Artificial Sequence: Synthetic oligonucleotide
uccucacaaauagauccgg

SEQ ID NO: 3006948 - RNA, 19 nt, Artificial Sequence
  Description of Artificial Sequence: Synthetic oligonucleotide
aagcagcauucauucaugu

SEQ ID NO: 3006949 - RNA, 19 nt, Artificial Sequence
  Description of Artificial Sequence: Synthetic oligonucleotide
ucccacacaagcagcauuc

SEQ ID NO: 3006950 - RNA, 19 nt, Artificial Sequence
  Description of Artificial Sequence: Synthetic oligonucleotide
cugccaguuggaauuuugg

SEQ ID NO: 3006951 - RNA, 19 nt, Artificial Sequence
  Description of Artificial Sequence: Synthetic oligonucleotide
ugcucugccaguuggaauu

SEQ ID NO: 3006952 - RNA, 19 nt, Artificial Sequence
  Description of Artificial Sequence: Synthetic oligonucleotide
uuuuggggagcacggacaa

SEQ ID NO: 3006953 - RNA, 19 nt, Artificial Sequence
  Description of Artificial Sequence: Synthetic oligonucleotide
aggcagacuccgcagucgc

SEQ ID NO: 3006954 - RNA, 19 nt, Artificial Sequence
  Description of Artificial Sequence: Synthetic oligonucleotide
auucauggcucuccuccgg

SEQ ID NO: 3006955 - RNA, 19 nt, Artificial Sequence
  Description of Artificial Sequence: Synthetic oligonucleotide
gcauucauggcucuccucc

SEQ ID NO: 3006956 - RNA, 19 nt, Artificial Sequence
  Description of Artificial Sequence: Synthetic oligonucleotide
ucagcugcuucagcgagag

SEQ ID NO: 3006957 - RNA, 19 nt, Artificial Sequence
  Description of Artificial Sequence: Synthetic oligonucleotide
ugacacccaagacauguaa

SEQ ID NO: 3006958 - RNA, 19 nt, Artificial Sequence
  Description of Artificial Sequence: Synthetic oligonucleotide
ucggguucgguagagaguc

SEQ ID NO: 3006959 - RNA, 19 nt, Artificial Sequence
  Description of Artificial Sequence: Synthetic oligonucleotide
cauucauggcucuccuccg

SEQ ID NO: 3006960 - RNA, 19 nt, Artificial Sequence
  Description of Artificial Sequence: Synthetic oligonucleotide
gucucucuugauuuggcac

SEQ ID NO: 3006961 - RNA, 19 nt, Artificial Sequence
  Description of Artificial Sequence: Synthetic oligonucleotide
gagucacgaugacuguugg

SEQ ID NO: 3006962 - RNA, 19 nt, Artificial Sequence
  Description of Artificial Sequence: Synthetic oligonucleotide
agcauucauucaugucagc

SEQ ID NO: 3006963 - RNA, 19 nt, Artificial Sequence
  Description of Artificial Sequence: Synthetic oligonucleotide
agggugaccauaaaguccu

SEQ ID NO: 3006964 - RNA, 19 nt, Artificial Sequence
  Description of Artificial Sequence: Synthetic oligonucleotide
uccucauugccaccguugu

SEQ ID NO: 3006965 - RNA, 19 nt, Artificial Sequence
  Description of Artificial Sequence: Synthetic oligonucleotide
ggaauuuuggggagcacgg

SEQ ID NO: 3006966 - RNA, 19 nt, Artificial Sequence
  Description of Artificial Sequence: Synthetic oligonucleotide
uugucccacacaagcagca

SEQ ID NO: 3006967 - RNA, 19 nt, Artificial Sequence
  Description of Artificial Sequence: Synthetic oligonucleotide
gugaccauaaaguccucac

SEQ ID NO: 3006968 - RNA, 19 nt, Artificial Sequence
  Description of Artificial Sequence: Synthetic oligonucleotide
aaccagcuccuuagaaagc

SEQ ID NO: 3006969 - RNA, 19 nt, Artificial Sequence
  Description of Artificial Sequence: Synthetic oligonucleotide
agaggcagacuccgcaguc

SEQ ID NO: 3006970 - RNA, 19 nt, Artificial Sequence
  Description of Artificial Sequence: Synthetic oligonucleotide
uucauucaugucagcugcc

SEQ ID NO: 3006971 - RNA, 19 nt, Artificial Sequence
  Description of Artificial Sequence: Synthetic oligonucleotide
cucacaaauagauccggga

SEQ ID NO: 3006972 - RNA, 19 nt, Artificial Sequence
  Description of Artificial Sequence: Synthetic oligonucleotide
ugucucucuugauuuggca

SEQ ID NO: 3006973 - RNA, 19 nt, Artificial Sequence
  Description of Artificial Sequence: Synthetic oligonucleotide
agagcaaacaggacagcag

SEQ ID NO: 3006974 - RNA, 19 nt, Artificial Sequence
  Description of Artificial Sequence: Synthetic oligonucleotide
agcuccuuagaaagcauuc

SEQ ID NO: 3006975 - RNA, 19 nt, Artificial Sequence
  Description of Artificial Sequence: Synthetic oligonucleotide
ggcacagagagcaaacagg

SEQ ID NO: 3006976 - RNA, 19 nt, Artificial Sequence
  Description of Artificial Sequence: Synthetic oligonucleotide
acagaggcagacuccgcag

SEQ ID NO: 3006977 - RNA, 19 nt, Artificial Sequence
  Description of Artificial Sequence: Synthetic oligonucleotide
aaaaugucccacagaggca

SEQ ID NO: 3006978 - RNA, 19 nt, Artificial Sequence
  Description of Artificial Sequence: Synthetic oligonucleotide
cauaaaguccucacaaaua

SEQ ID NO: 3006979 - RNA, 19 nt, Artificial Sequence
  Description of Artificial Sequence: Synthetic oligonucleotide
guucagcugcuucagcgag

SEQ ID NO: 3006980 - RNA, 19 nt, Artificial Sequence
  Description of Artificial Sequence: Synthetic oligonucleotide
aguucagcugcuucagcga

SEQ ID NO: 3006981 - RNA, 19 nt, Artificial Sequence
  Description of Artificial Sequence: Synthetic oligonucleotide
aaauccagguugagucacg

SEQ ID NO: 3006982 - RNA, 19 nt, Artificial Sequence
  Description of Artificial Sequence: Synthetic oligonucleotide
ugacuguuggugccugagc

SEQ ID NO: 3006983 - RNA, 19 nt, Artificial Sequence
  Description of Artificial Sequence: Synthetic oligonucleotide
cucuccuccgguuaauguc

SEQ ID NO: 3006984 - RNA, 19 nt, Artificial Sequence
  Description of Artificial Sequence: Synthetic oligonucleotide
ucacacaggcugcucugcc

SEQ ID NO: 3006985 - RNA, 19 nt, Artificial Sequence
  Description of Artificial Sequence: Synthetic oligonucleotide
aaugccguaucggguucgg

SEQ ID NO: 3006986 - RNA, 19 nt, Artificial Sequence
  Description of Artificial Sequence: Synthetic oligonucleotide
caagacauguaaagcaaaa

SEQ ID NO: 3006987 - RNA, 19 nt, Artificial Sequence
  Description of Artificial Sequence: Synthetic oligonucleotide
aauccagguugagucacga

SEQ ID NO: 3006988 - RNA, 19 nt, Artificial Sequence
  Description of Artificial Sequence: Synthetic oligonucleotide
gagagcaaacaggacagca

SEQ ID NO: 3006989 - RNA, 19 nt, Artificial Sequence
  Description of Artificial Sequence: Synthetic oligonucleotide
uccgggaaugccguaucgg

SEQ ID NO: 3006990 - RNA, 19 nt, Artificial Sequence
  Description of Artificial Sequence: Synthetic oligonucleotide
aucacacaggcugcucugc

SEQ ID NO: 3006991 - RNA, 19 nt, Artificial Sequence
  Description of Artificial Sequence: Synthetic oligonucleotide
uuggggagcacggacaaau

SEQ ID NO: 3006992 - RNA, 19 nt, Artificial Sequence
  Description of Artificial Sequence: Synthetic oligonucleotide
accauaaaguccucacaaa

SEQ ID NO: 3006993 - RNA, 19 nt, Artificial Sequence
  Description of Artificial Sequence: Synthetic oligonucleotide
gcagagggugaccauaaag

SEQ ID NO: 3006994 - RNA, 19 nt, Artificial Sequence
  Description of Artificial Sequence: Synthetic oligonucleotide
guccucacaaauagauccg

SEQ ID NO: 3006995 - RNA, 19 nt, Artificial Sequence
  Description of Artificial Sequence: Synthetic oligonucleotide
caaauccagguugagucac

SEQ ID NO: 3006996 - RNA, 19 nt, Artificial Sequence
  Description of Artificial Sequence: Synthetic oligonucleotide
guaaagcaaaaugucccac

SEQ ID NO: 3006997 - RNA, 19 nt, Artificial Sequence
  Description of Artificial Sequence: Synthetic oligonucleotide
augucucucuugauuuggc

SEQ ID NO: 3006998 - RNA, 19 nt, Artificial Sequence
  Description of Artificial Sequence: Synthetic oligonucleotide
cacccaagacauguaaagc

SEQ ID NO: 3006999 - RNA, 19 nt, Artificial Sequence
  Description of Artificial Sequence: Synthetic oligonucleotide
agagagcaaacaggacagc

SEQ ID NO: 3007000 - RNA, 19 nt, Artificial Sequence
  Description of Artificial Sequence: Synthetic oligonucleotide
caaauagauccgggaaugc

SEQ ID NO: 3007001 - RNA, 19 nt, Artificial Sequence
  Description of Artificial Sequence: Synthetic oligonucleotide
ucgaugcgaggucucaaaa

SEQ ID NO: 3007002 - RNA, 19 nt, Artificial Sequence
  Description of Artificial Sequence: Synthetic oligonucleotide
cagagggugaccauaaagu

SEQ ID NO: 3007003 - RNA, 19 nt, Artificial Sequence
  Description of Artificial Sequence: Synthetic oligonucleotide
uucgaugcgaggucucaaa

SEQ ID NO: 3007004 - RNA, 19 nt, Artificial Sequence
  Description of Artificial Sequence: Synthetic oligonucleotide
auccgggaaugccguaucg

SEQ ID NO: 3007005 - RNA, 19 nt, Artificial Sequence
  Description of Artificial Sequence: Synthetic oligonucleotide
gguagagaguccucauugc

SEQ ID NO: 3007006 - RNA, 19 nt, Artificial Sequence
  Description of Artificial Sequence: Synthetic oligonucleotide
uccgcagucgcugaagcaa

SEQ ID NO: 3007007 - RNA, 19 nt, Artificial Sequence
  Description of Artificial Sequence: Synthetic oligonucleotide
uucauggcucuccuccggu

SEQ ID NO: 3007008 - RNA, 19 nt, Artificial Sequence
  Description of Artificial Sequence: Synthetic oligonucleotide
uggugccugagccaucuuc

SEQ ID NO: 3007009 - RNA, 19 nt, Artificial Sequence
  Description of Artificial Sequence: Synthetic oligonucleotide
agaaagcauucauggcucu

SEQ ID NO: 3007010 - RNA, 19 nt, Artificial Sequence
  Description of Artificial Sequence: Synthetic oligonucleotide
ggugccugagccaucuucg

SEQ ID NO: 3007011 - RNA, 19 nt, Artificial Sequence
  Description of Artificial Sequence: Synthetic oligonucleotide
cauucaugucagcugccac

SEQ ID NO: 3007012 - RNA, 19 nt, Artificial Sequence
  Description of Artificial Sequence: Synthetic oligonucleotide
gcaaacaggacagcagagg

SEQ ID NO: 3007013 - RNA, 19 nt, Artificial Sequence
  Description of Artificial Sequence: Synthetic oligonucleotide
auuuuggggagcacggaca

SEQ ID NO: 3007014 - RNA, 19 nt, Artificial Sequence
  Description of Artificial Sequence: Synthetic oligonucleotide
cgcugaagcaaucacacag

SEQ ID NO: 3007015 - RNA, 19 nt, Artificial Sequence
  Description of Artificial Sequence: Synthetic oligonucleotide
gaggcagacuccgcagucg

SEQ ID NO: 3007016 - RNA, 19 nt, Artificial Sequence
  Description of Artificial Sequence: Synthetic oligonucleotide
ugccguaucggguucggua

SEQ ID NO: 3007017 - RNA, 19 nt, Artificial Sequence
  Description of Artificial Sequence: Synthetic oligonucleotide
ucccacagaggcagacucc

SEQ ID NO: 3007018 - RNA, 19 nt, Artificial Sequence
  Description of Artificial Sequence: Synthetic oligonucleotide
ccaguuggaauuuugggga

SEQ ID NO: 3007019 - RNA, 19 nt, Artificial Sequence
  Description of Artificial Sequence: Synthetic oligonucleotide
uucagcugcuucagcgaga

SEQ ID NO: 3007020 - RNA, 19 nt, Artificial Sequence
  Description of Artificial Sequence: Synthetic oligonucleotide
gcugaagcaaucacacagg

SEQ ID NO: 3007021 - RNA, 19 nt, Artificial Sequence
  Description of Artificial Sequence: Synthetic oligonucleotide
gaaugccguaucggguucg

SEQ ID NO: 3007022 - RNA, 19 nt, Artificial Sequence
  Description of Artificial Sequence: Synthetic oligonucleotide
agcaaacaggacagcagag

SEQ ID NO: 3007023 - RNA, 19 nt, Artificial Sequence
  Description of Artificial Sequence: Synthetic oligonucleotide
augacuguuggugccugag

SEQ ID NO: 3007024 - RNA, 19 nt, Artificial Sequence
  Description of Artificial Sequence: Synthetic oligonucleotide
guuggaauuuuggggagca

SEQ ID NO: 3007025 - RNA, 19 nt, Artificial Sequence
  Description of Artificial Sequence: Synthetic oligonucleotide
uuggcacagagagcaaaca

SEQ ID NO: 3007026 - RNA, 19 nt, Artificial Sequence
  Description of Artificial Sequence: Synthetic oligonucleotide
guugucccacacaagcagc

SEQ ID NO: 3007027 - RNA, 19 nt, Artificial Sequence
  Description of Artificial Sequence: Synthetic oligonucleotide
auagauccgggaaugccgu

SEQ ID NO: 3007028 - RNA, 19 nt, Artificial Sequence
  Description of Artificial Sequence: Synthetic oligonucleotide
uccgguuaaugucucucuu

SEQ ID NO: 3007029 - RNA, 19 nt, Artificial Sequence
  Description of Artificial Sequence: Synthetic oligonucleotide
uucaugucagcugccacuu

SEQ ID NO: 3007030 - RNA, 19 nt, Artificial Sequence
  Description of Artificial Sequence: Synthetic oligonucleotide
cacagagagcaaacaggac

SEQ ID NO: 3007031 - RNA, 19 nt, Artificial Sequence
  Description of Artificial Sequence: Synthetic oligonucleotide
ucuucgaugcgaggucuca

SEQ ID NO: 3007032 - RNA, 19 nt, Artificial Sequence
  Description of Artificial Sequence: Synthetic oligonucleotide
gucccacagaggcagacuc

SEQ ID NO: 3007033 - RNA, 19 nt, Artificial Sequence
  Description of Artificial Sequence: Synthetic oligonucleotide
cacuugacacccaagacau

SEQ ID NO: 3007034 - RNA, 19 nt, Artificial Sequence
  Description of Artificial Sequence: Synthetic oligonucleotide
cuugacacccaagacaugu

SEQ ID NO: 3007035 - RNA, 19 nt, Artificial Sequence
  Description of Artificial Sequence: Synthetic oligonucleotide
gccguaucggguucgguag

SEQ ID NO: 3007036 - RNA, 19 nt, Artificial Sequence
  Description of Artificial Sequence: Synthetic oligonucleotide
ggggagcacggacaaaucc

SEQ ID NO: 3007037 - RNA, 19 nt, Artificial Sequence
  Description of Artificial Sequence: Synthetic oligonucleotide
accaaccagcuccuuagaa

SEQ ID NO: 3007038 - RNA, 19 nt, Artificial Sequence
  Description of Artificial Sequence: Synthetic oligonucleotide
auuuggcacagagagcaaa

SEQ ID NO: 3007039 - RNA, 19 nt, Artificial Sequence
  Description of Artificial Sequence: Synthetic oligonucleotide
cucucuugauuuggcacag

SEQ ID NO: 3007040 - RNA, 19 nt, Artificial Sequence
  Description of Artificial Sequence: Synthetic oligonucleotide
gagccaucuucgaugcgag

SEQ ID NO: 3007041 - RNA, 19 nt, Artificial Sequence
  Description of Artificial Sequence: Synthetic oligonucleotide
gccugagccaucuucgaug

SEQ ID NO: 3007042 - RNA, 19 nt, Artificial Sequence
  Description of Artificial Sequence: Synthetic oligonucleotide
uucgguagagaguccucau

SEQ ID NO: 3007043 - RNA, 19 nt, Artificial Sequence
  Description of Artificial Sequence: Synthetic oligonucleotide
augucccacagaggcagac

SEQ ID NO: 3007044 - RNA, 19 nt, Artificial Sequence
  Description of Artificial Sequence: Synthetic oligonucleotide
ucgguagagaguccucauu

SEQ ID NO: 3007045 - RNA, 19 nt, Artificial Sequence
  Description of Artificial Sequence: Synthetic oligonucleotide
uugacacccaagacaugua

SEQ ID NO: 3007046 - RNA, 19 nt, Artificial Sequence
  Description of Artificial Sequence: Synthetic oligonucleotide
ccugagccaucuucgaugc

SEQ ID NO: 3007047 - RNA, 19 nt, Artificial Sequence
  Description of Artificial Sequence: Synthetic oligonucleotide
agucacgaugacuguuggu

SEQ ID NO: 3007048 - RNA, 19 nt, Artificial Sequence
  Description of Artificial Sequence: Synthetic oligonucleotide
cagucgcugaagcaaucac

SEQ ID NO: 3007049 - RNA, 19 nt, Artificial Sequence
  Description of Artificial Sequence: Synthetic oligonucleotide
gauccgggaaugccguauc

SEQ ID NO: 3007050 - RNA, 19 nt, Artificial Sequence
  Description of Artificial Sequence: Synthetic oligonucleotide
ccucacaaauagauccggg

SEQ ID NO: 3007051 - RNA, 19 nt, Artificial Sequence
  Description of Artificial Sequence: Synthetic oligonucleotide
gagcacggacaaauccagg

SEQ ID NO: 3007052 - RNA, 19 nt, Artificial Sequence
  Description of Artificial Sequence: Synthetic oligonucleotide
gaaagcauucauggcucuc

SEQ ID NO: 3007053 - RNA, 19 nt, Artificial Sequence
  Description of Artificial Sequence: Synthetic oligonucleotide
agcucucaccaaccagcuc

SEQ ID NO: 3007054 - RNA, 19 nt, Artificial Sequence
  Description of Artificial Sequence: Synthetic oligonucleotide
ucgcugaagcaaucacaca

SEQ ID NO: 3007055 - RNA, 19 nt, Artificial Sequence
  Description of Artificial Sequence: Synthetic oligonucleotide
gaauuuuggggagcacgga

SEQ ID NO: 3007056 - RNA, 19 nt, Artificial Sequence
  Description of Artificial Sequence: Synthetic oligonucleotide
ggagcacggacaaauccag

SEQ ID NO: 3007057 - RNA, 19 nt, Artificial Sequence
  Description of Artificial Sequence: Synthetic oligonucleotide
uugagucacgaugacuguu

SEQ ID NO: 3007058 - RNA, 19 nt, Artificial Sequence
  Description of Artificial Sequence: Synthetic oligonucleotide
ccgggaaugccguaucggg

SEQ ID NO: 3007059 - RNA, 19 nt, Artificial Sequence
  Description of Artificial Sequence: Synthetic oligonucleotide
agccaucuucgaugcgagg

SEQ ID NO: 3007060 - RNA, 19 nt, Artificial Sequence
  Description of Artificial Sequence: Synthetic oligonucleotide
ugccugagccaucuucgau

SEQ ID NO: 3007061 - RNA, 19 nt, Artificial Sequence
  Description of Artificial Sequence: Synthetic oligonucleotide
gcacagagagcaaacagga

SEQ ID NO: 3007062 - RNA, 19 nt, Artificial Sequence
  Description of Artificial Sequence: Synthetic oligonucleotide
guucgguagagaguccuca

SEQ ID NO: 3007063 - RNA, 19 nt, Artificial Sequence
  Description of Artificial Sequence: Synthetic oligonucleotide
gacacccaagacauguaaa

SEQ ID NO: 3007064 - RNA, 19 nt, Artificial Sequence
  Description of Artificial Sequence: Synthetic oligonucleotide
ccagguugagucacgauga

SEQ ID NO: 3007065 - RNA, 19 nt, Artificial Sequence
  Description of Artificial Sequence: Synthetic oligonucleotide
gacuccgcagucgcugaag

SEQ ID NO: 3007066 - RNA, 19 nt, Artificial Sequence
  Description of Artificial Sequence: Synthetic oligonucleotide
cacaaauagauccgggaau

SEQ ID NO: 3007067 - RNA, 19 nt, Artificial Sequence
  Description of Artificial Sequence: Synthetic oligonucleotide
ccacuugacacccaagaca

SEQ ID NO: 3007068 - RNA, 19 nt, Artificial Sequence
  Description of Artificial Sequence: Synthetic oligonucleotide
agguugagucacgaugacu

SEQ ID NO: 3007069 - RNA, 19 nt, Artificial Sequence
  Description of Artificial Sequence: Synthetic oligonucleotide
acggacaaauccagguuga

SEQ ID NO: 3007070 - RNA, 19 nt, Artificial Sequence
  Description of Artificial Sequence: Synthetic oligonucleotide
gaugacuguuggugccuga

SEQ ID NO: 3007071 - RNA, 19 nt, Artificial Sequence
  Description of Artificial Sequence: Synthetic oligonucleotide
uggggagcacggacaaauc

SEQ ID NO: 3007072 - RNA, 19 nt, Artificial Sequence
  Description of Artificial Sequence: Synthetic oligonucleotide
cacacaagcagcauucauu

SEQ ID NO: 3007073 - RNA, 19 nt, Artificial Sequence
  Description of Artificial Sequence: Synthetic oligonucleotide
ugcuucagcgagagcucuc

SEQ ID NO: 3007074 - RNA, 19 nt, Artificial Sequence
  Description of Artificial Sequence: Synthetic oligonucleotide
ugucccacagaggcagacu

SEQ ID NO: 3007075 - RNA, 19 nt, Artificial Sequence
  Description of Artificial Sequence: Synthetic oligonucleotide
cguugucccacacaagcag

SEQ ID NO: 3007076 - RNA, 19 nt, Artificial Sequence
  Description of Artificial Sequence: Synthetic oligonucleotide
acagcagagggugaccaua

SEQ ID NO: 3007077 - RNA, 19 nt, Artificial Sequence
  Description of Artificial Sequence: Synthetic oligonucleotide
cagguugagucacgaugac

SEQ ID NO: 3007078 - RNA, 19 nt, Artificial Sequence
  Description of Artificial Sequence: Synthetic oligonucleotide
gccacuugacacccaagac

SEQ ID NO: 3007079 - RNA, 19 nt, Artificial Sequence
  Description of Artificial Sequence: Synthetic oligonucleotide
agauccgggaaugccguau

SEQ ID NO: 3007080 - RNA, 19 nt, Artificial Sequence
  Description of Artificial Sequence: Synthetic oligonucleotide
caaucacacaggcugcucu

SEQ ID NO: 3007081 - RNA, 19 nt, Artificial Sequence
  Description of Artificial Sequence: Synthetic oligonucleotide
auggcucuccuccgguuaa

SEQ ID NO: 3007082 - RNA, 19 nt, Artificial Sequence
  Description of Artificial Sequence: Synthetic oligonucleotide
aucuucgaugcgaggucuc

SEQ ID NO: 3007083 - RNA, 19 nt, Artificial Sequence
  Description of Artificial Sequence: Synthetic oligonucleotide
cgguagagaguccucauug

SEQ ID NO: 3007084 - RNA, 19 nt, Artificial Sequence
  Description of Artificial Sequence: Synthetic oligonucleotide
uuggaauuuuggggagcac

SEQ ID NO: 3007085 - RNA, 19 nt, Artificial Sequence
  Description of Artificial Sequence: Synthetic oligonucleotide
acgaugacuguuggugccu

SEQ ID NO: 3007086 - RNA, 19 nt, Artificial Sequence
  Description of Artificial Sequence: Synthetic oligonucleotide
cugccacuugacacccaag

SEQ ID NO: 3007087 - RNA, 19 nt, Artificial Sequence
  Description of Artificial Sequence: Synthetic oligonucleotide
gggagcacggacaaaucca

SEQ ID NO: 3007088 - RNA, 19 nt, Artificial Sequence
  Description of Artificial Sequence: Synthetic oligonucleotide
aucggguucgguagagagu

SEQ ID NO: 3007089 - RNA, 19 nt, Artificial Sequence
  Description of Artificial Sequence: Synthetic oligonucleotide
aaugucccacagaggcaga

SEQ ID NO: 3007090 - RNA, 19 nt, Artificial Sequence
  Description of Artificial Sequence: Synthetic oligonucleotide
caccguugucccacacaag

SEQ ID NO: 3007091 - RNA, 19 nt, Artificial Sequence
  Description of Artificial Sequence: Synthetic oligonucleotide
ucauggcucuccuccgguu

SEQ ID NO: 3007092 - RNA, 19 nt, Artificial Sequence
  Description of Artificial Sequence: Synthetic oligonucleotide
uccuccgguuaaugucucu

SEQ ID NO: 3007093 - RNA, 19 nt, Artificial Sequence
  Description of Artificial Sequence: Synthetic oligonucleotide
uguuggugccugagccauc

SEQ ID NO: 3007094 - RNA, 19 nt, Artificial Sequence
  Description of Artificial Sequence: Synthetic oligonucleotide
cacaagcagcauucauuca

SEQ ID NO: 3007095 - RNA, 19 nt, Artificial Sequence
  Description of Artificial Sequence: Synthetic oligonucleotide
cuucagcgagagcucucac

SEQ ID NO: 3007096 - RNA, 19 nt, Artificial Sequence
  Description of Artificial Sequence: Synthetic oligonucleotide
cgaugcgaggucucaaaag

SEQ ID NO: 3007097 - RNA, 19 nt, Artificial Sequence
  Description of Artificial Sequence: Synthetic oligonucleotide
cuccuuagaaagcauucau

SEQ ID NO: 3007098 - RNA, 19 nt, Artificial Sequence
  Description of Artificial Sequence: Synthetic oligonucleotide
aguccucauugccaccguu

SEQ ID NO: 3007099 - RNA, 19 nt, Artificial Sequence
  Description of Artificial Sequence: Synthetic oligonucleotide
cugagccaucuucgaugcg

SEQ ID NO: 3007100 - RNA, 19 nt, Artificial Sequence
  Description of Artificial Sequence: Synthetic oligonucleotide
ucucuugauuuggcacaga

SEQ ID NO: 3007101 - RNA, 19 nt, Artificial Sequence
  Description of Artificial Sequence: Synthetic oligonucleotide
gcagacuccgcagucgcug

SEQ ID NO: 3007102 - RNA, 19 nt, Artificial Sequence
  Description of Artificial Sequence: Synthetic oligonucleotide
guugagucacgaugacugu

SEQ ID NO: 3007103 - RNA, 19 nt, Artificial Sequence
  Description of Artificial Sequence: Synthetic oligonucleotide
cucaccaaccagcuccuua

SEQ ID NO: 3007104 - RNA, 19 nt, Artificial Sequence
  Description of Artificial Sequence: Synthetic oligonucleotide
auccagguugagucacgau

SEQ ID NO: 3007105 - RNA, 19 nt, Artificial Sequence
  Description of Artificial Sequence: Synthetic oligonucleotide
cccaagacauguaaagcaa

SEQ ID NO: 3007106 - RNA, 19 nt, Artificial Sequence
  Description of Artificial Sequence: Synthetic oligonucleotide
ugucccacacaagcagcau

SEQ ID NO: 3007107 - RNA, 19 nt, Artificial Sequence
  Description of Artificial Sequence: Synthetic oligonucleotide
ccaaccagcuccuuagaaa

SEQ ID NO: 3007108 - RNA, 19 nt, Artificial Sequence
  Description of Artificial Sequence: Synthetic oligonucleotide
gcauucauucaugucagcu

SEQ ID NO: 3007109 - RNA, 19 nt, Artificial Sequence
  Description of Artificial Sequence: Synthetic oligonucleotide
cagcagagggugaccauaa

SEQ ID NO: 3007110 - RNA, 19 nt, Artificial Sequence
  Description of Artificial Sequence: Synthetic oligonucleotide
agcagagggugaccauaaa

SEQ ID NO: 3007111 - RNA, 19 nt, Artificial Sequence
  Description of Artificial Sequence: Synthetic oligonucleotide
gcuccuuagaaagcauuca

SEQ ID NO: 3007112 - RNA, 19 nt, Artificial Sequence
  Description of Artificial Sequence: Synthetic oligonucleotide
ggugaccauaaaguccuca

SEQ ID NO: 3007113 - RNA, 19 nt, Artificial Sequence
  Description of Artificial Sequence: Synthetic oligonucleotide
ggaaugccguaucggguuc

SEQ ID NO: 3007114 - RNA, 19 nt, Artificial Sequence
  Description of Artificial Sequence: Synthetic oligonucleotide
ccaucuucgaugcgagguc

SEQ ID NO: 3007115 - RNA, 19 nt, Artificial Sequence
  Description of Artificial Sequence: Synthetic oligonucleotide
caggcugcucugccaguug

SEQ ID NO: 3007116 - RNA, 19 nt, Artificial Sequence
  Description of Artificial Sequence: Synthetic oligonucleotide
uuuggggagcacggacaaa

SEQ ID NO: 3007117 - RNA, 19 nt, Artificial Sequence
  Description of Artificial Sequence: Synthetic oligonucleotide
cauggcucuccuccgguua

SEQ ID NO: 3007118 - RNA, 19 nt, Artificial Sequence
  Description of Artificial Sequence: Synthetic oligonucleotide
guuggugccugagccaucu

SEQ ID NO: 3007119 - RNA, 19 nt, Artificial Sequence
  Description of Artificial Sequence: Synthetic oligonucleotide
gugccugagccaucuucga

SEQ ID NO: 3007120 - RNA, 19 nt, Artificial Sequence
  Description of Artificial Sequence: Synthetic oligonucleotide
gauuuggcacagagagcaa

SEQ ID NO: 3007121 - RNA, 19 nt, Artificial Sequence
  Description of Artificial Sequence: Synthetic oligonucleotide
uagauccgggaaugccgua

SEQ ID NO: 3007122 - RNA, 19 nt, Artificial Sequence
  Description of Artificial Sequence: Synthetic oligonucleotide
ugccaccguugucccacac

SEQ ID NO: 3007123 - RNA, 19 nt, Artificial Sequence
  Description of Artificial Sequence: Synthetic oligonucleotide
ccauaaaguccucacaaau

SEQ ID NO: 3007124 - RNA, 19 nt, Artificial Sequence
  Description of Artificial Sequence: Synthetic oligonucleotide
ggacagcagagggugacca

SEQ ID NO: 3007125 - RNA, 19 nt, Artificial Sequence
  Description of Artificial Sequence: Synthetic oligonucleotide
acuugacacccaagacaug

SEQ ID NO: 3007126 - RNA, 19 nt, Artificial Sequence
  Description of Artificial Sequence: Synthetic oligonucleotide
cagacuccgcagucgcuga

SEQ ID NO: 3007127 - RNA, 19 nt, Artificial Sequence
  Description of Artificial Sequence: Synthetic oligonucleotide
cuccgguuaaugucucucu

SEQ ID NO: 3007128 - RNA, 19 nt, Artificial Sequence
  Description of Artificial Sequence: Synthetic oligonucleotide
cgguuaaugucucucuuga

SEQ ID NO: 3007129 - RNA, 19 nt, Artificial Sequence
  Description of Artificial Sequence: Synthetic oligonucleotide
cuccgcagucgcugaagca

SEQ ID NO: 3007130 - RNA, 19 nt, Artificial Sequence
  Description of Artificial Sequence: Synthetic oligonucleotide
uugccaccguugucccaca

SEQ ID NO: 3007131 - RNA, 19 nt, Artificial Sequence
  Description of Artificial Sequence: Synthetic oligonucleotide
gcgagagcucucaccaacc

SEQ ID NO: 3007132 - RNA, 19 nt, Artificial Sequence
  Description of Artificial Sequence: Synthetic oligonucleotide
agacuccgcagucgcugaa

SEQ ID NO: 3007133 - RNA, 19 nt, Artificial Sequence
  Description of Artificial Sequence: Synthetic oligonucleotide
ccaccguugucccacacaa

SEQ ID NO: 3007134 - RNA, 19 nt, Artificial Sequence
  Description of Artificial Sequence: Synthetic oligonucleotide
gcugccacuugacacccaa

SEQ ID NO: 3007135 - RNA, 19 nt, Artificial Sequence
  Description of Artificial Sequence: Synthetic oligonucleotide
guaucggguucgguagaga

SEQ ID NO: 3007136 - RNA, 19 nt, Artificial Sequence
  Description of Artificial Sequence: Synthetic oligonucleotide
gagcucucaccaaccagcu

SEQ ID NO: 3007137 - RNA, 19 nt, Artificial Sequence
  Description of Artificial Sequence: Synthetic oligonucleotide
gcuucagcgagagcucuca

SEQ ID NO: 3007138 - RNA, 19 nt, Artificial Sequence
  Description of Artificial Sequence: Synthetic oligonucleotide
gggaaugccguaucggguu

SEQ ID NO: 3007139 - RNA, 19 nt, Artificial Sequence
  Description of Artificial Sequence: Synthetic oligonucleotide
gcagucgcugaagcaauca

SEQ ID NO: 3007140 - RNA, 19 nt, Artificial Sequence
  Description of Artificial Sequence: Synthetic oligonucleotide
ggacaaauccagguugagu

SEQ ID NO: 3007141 - RNA, 19 nt, Artificial Sequence
  Description of Artificial Sequence: Synthetic oligonucleotide
caucuucgaugcgaggucu

SEQ ID NO: 3007142 - RNA, 19 nt, Artificial Sequence
  Description of Artificial Sequence: Synthetic oligonucleotide
gacagcagagggugaccau

SEQ ID NO: 3007143 - RNA, 19 nt, Artificial Sequence
  Description of Artificial Sequence: Synthetic oligonucleotide
ccuccgguuaaugucucuc

SEQ ID NO: 3007144 - RNA, 19 nt, Artificial Sequence
  Description of Artificial Sequence: Synthetic oligonucleotide
cuucgaugcgaggucucaa

SEQ ID NO: 3007145 - RNA, 19 nt, Artificial Sequence
  Description of Artificial Sequence: Synthetic oligonucleotide
caccaaccagcuccuuaga

SEQ ID NO: 3007146 - RNA, 19 nt, Artificial Sequence
  Description of Artificial Sequence: Synthetic oligonucleotide
gucccacacaagcagcauu

SEQ ID NO: 3007147 - RNA, 19 nt, Artificial Sequence
  Description of Artificial Sequence: Synthetic oligonucleotide
ggcucuccuccgguuaaug

SEQ ID NO: 3007148 - RNA, 19 nt, Artificial Sequence
  Description of Artificial Sequence: Synthetic oligonucleotide
gccaccguugucccacaca

SEQ ID NO: 3007149 - RNA, 19 nt, Artificial Sequence
  Description of Artificial Sequence: Synthetic oligonucleotide
ccguugucccacacaagca

SEQ ID NO: 3007150 - RNA, 19 nt, Artificial Sequence
  Description of Artificial Sequence: Synthetic oligonucleotide
gguucgguagagaguccuc

SEQ ID NO: 3007151 - RNA, 19 nt, Artificial Sequence
  Description of Artificial Sequence: Synthetic oligonucleotide
cagaggcagacuccgcagu

SEQ ID NO: 3007152 - RNA, 19 nt, Artificial Sequence
  Description of Artificial Sequence: Synthetic oligonucleotide
cagcuccuuagaaagcauu

SEQ ID NO: 3007153 - RNA, 19 nt, Artificial Sequence
  Description of Artificial Sequence: Synthetic oligonucleotide
gaguccucauugccaccgu

SEQ ID NO: 3007154 - RNA, 19 nt, Artificial Sequence
  Description of Artificial Sequence: Synthetic oligonucleotide
uuggugccugagccaucuu

SEQ ID NO: 3007155 - RNA, 19 nt, Artificial Sequence
  Description of Artificial Sequence: Synthetic oligonucleotide
cuguuggugccugagccau

SEQ ID NO: 3007156 - RNA, 19 nt, Artificial Sequence
  Description of Artificial Sequence: Synthetic oligonucleotide
cguaucggguucgguagag

SEQ ID NO: 3007157 - RNA, 19 nt, Artificial Sequence
  Description of Artificial Sequence: Synthetic oligonucleotide
ccucauugccaccguuguc

SEQ ID NO: 3007158 - RNA, 19 nt, Artificial Sequence
  Description of Artificial Sequence: Synthetic oligonucleotide
augccguaucggguucggu

SEQ ID NO: 3007159 - RNA, 19 nt, Artificial Sequence
  Description of Artificial Sequence: Synthetic oligonucleotide
gcucuccuccgguuaaugu

SEQ ID NO: 3007160 - RNA, 19 nt, Artificial Sequence
  Description of Artificial Sequence: Synthetic oligonucleotide
uggcucuccuccgguuaau

SEQ ID NO: 3007161 - RNA, 19 nt, Artificial Sequence
  Description of Artificial Sequence: Synthetic oligonucleotide
cugcucugccaguuggaau

SEQ ID NO: 3007162 - RNA, 19 nt, Artificial Sequence
  Description of Artificial Sequence: Synthetic oligonucleotide
cagcugcuucagcgagagc

SEQ ID NO: 3007163 - RNA, 19 nt, Artificial Sequence
  Description of Artificial Sequence: Synthetic oligonucleotide
gcugcucugccaguuggaa

SEQ ID NO: 3007164 - RNA, 19 nt, Artificial Sequence
  Description of Artificial Sequence: Synthetic oligonucleotide
cagcgagagcucucaccaa

SEQ ID NO: 3007165 - RNA, 19 nt, Artificial Sequence
  Description of Artificial Sequence: Synthetic oligonucleotide
ggguucgguagagaguccu

SEQ ID NO: 3007166 - RNA, 19 nt, Artificial Sequence
  Description of Artificial Sequence: Synthetic oligonucleotide
gcacggacaaauccagguu

SEQ ID NO: 3007167 - RNA, 19 nt, Artificial Sequence
  Description of Artificial Sequence: Synthetic oligonucleotide
cugcuucagcgagagcucu

SEQ ID NO: 3007168 - RNA, 19 nt, Artificial Sequence
  Description of Artificial Sequence: Synthetic oligonucleotide
cggacaaauccagguugag

SEQ ID NO: 3007169 - RNA, 19 nt, Artificial Sequence
  Description of Artificial Sequence: Synthetic oligonucleotide
cgagagcucucaccaacca

SEQ ID NO: 3007170 - RNA, 19 nt, Artificial Sequence
  Description of Artificial Sequence: Synthetic oligonucleotide
ggcugcucugccaguugga

SEQ ID NO: 3007171 - RNA, 19 nt, Artificial Sequence
  Description of Artificial Sequence: Synthetic oligonucleotide
cgaugacuguuggugccug

SEQ ID NO: 3007172 - RNA, 19 nt, Artificial Sequence
  Description of Artificial Sequence: Synthetic oligonucleotide
agcugccacuugacaccca

SEQ ID NO: 3007173 - RNA, 19 nt, Artificial Sequence
  Description of Artificial Sequence: Synthetic oligonucleotide
cacaggcugcucugccagu

SEQ ID NO: 3007174 - RNA, 19 nt, Artificial Sequence
  Description of Artificial Sequence: Synthetic oligonucleotide
cgcagucgcugaagcaauc

SEQ ID NO: 3007175 - RNA, 19 nt, Artificial Sequence
  Description of Artificial Sequence: Synthetic oligonucleotide
ccguaucggguucgguaga

SEQ ID NO: 3007176 - RNA, 19 nt, Artificial Sequence
  Description of Artificial Sequence: Synthetic oligonucleotide
cggguucgguagagagucc

SEQ ID NO: 3007177 - RNA, 19 nt, Artificial Sequence
  Description of Artificial Sequence: Synthetic oligonucleotide
cccacacaagcagcauuca

SEQ ID NO: 3007178 - RNA, 19 nt, Artificial Sequence
  Description of Artificial Sequence: Synthetic oligonucleotide
ccacacaagcagcauucau

SEQ ID NO: 3007179 - RNA, 19 nt, Artificial Sequence
  Description of Artificial Sequence: Synthetic oligonucleotide
gggugaccauaaaguccuc

SEQ ID NO: 3007180 - RNA, 19 nt, Artificial Sequence
  Description of Artificial Sequence: Synthetic oligonucleotide
cgggaaugccguaucgggu

SEQ ID NO: 3007181 - RNA, 19 nt, Artificial Sequence
  Description of Artificial Sequence: Synthetic oligonucleotide
ccagcuccuuagaaagcau

SEQ ID NO: 3007182 - RNA, 19 nt, Artificial Sequence
  Description of Artificial Sequence: Synthetic oligonucleotide
ggcagacuccgcagucgcu

SEQ ID NO: 3007183 - RNA, 19 nt, Artificial Sequence
  Description of Artificial Sequence: Synthetic oligonucleotide
ccgcagucgcugaagcaau

SEQ ID NO: 3007184 - RNA, 19 nt, Artificial Sequence
  Description of Artificial Sequence: Synthetic oligonucleotide
cucugccaguuggaauuuu

SEQ ID NO: 3007185 - RNA, 19 nt, Artificial Sequence
  Description of Artificial Sequence: Synthetic oligonucleotide
gcucugccaguuggaauuu

SEQ ID NO: 3007186 - RNA, 19 nt, Artificial Sequence
  Description of Artificial Sequence: Synthetic oligonucleotide
aaauuaaaugagcauauac

SEQ ID NO: 3007187 - RNA, 19 nt, Artificial Sequence
  Description of Artificial Sequence: Synthetic oligonucleotide
aaagaauaaaccuaugaag

SEQ ID NO: 3007188 - RNA, 19 nt, Artificial Sequence
  Description of Artificial Sequence: Synthetic oligonucleotide
uagauuaaaaucaagcccg

SEQ ID NO: 3007189 - RNA, 19 nt, Artificial Sequence
  Description of Artificial Sequence: Synthetic oligonucleotide
ugugcuuuaacaaauagcc

SEQ ID NO: 3007190 - RNA, 19 nt, Artificial Sequence
  Description of Artificial Sequence: Synthetic oligonucleotide
aauuaaaugagcauauacc

SEQ ID NO: 3007191 - RNA, 19 nt, Artificial Sequence
  Description of Artificial Sequence: Synthetic oligonucleotide
uaagucauaaauauaaaag

SEQ ID NO: 3007192 - RNA, 19 nt, Artificial Sequence
  Description of Artificial Sequence: Synthetic oligonucleotide
aaauauaaaagaaacaaug

SEQ ID NO: 3007193 - RNA, 19 nt, Artificial Sequence
  Description of Artificial Sequence: Synthetic oligonucleotide
uucuauagaaauuaaauga

SEQ ID NO: 3007194 - RNA, 19 nt, Artificial Sequence
  Description of Artificial Sequence: Synthetic oligonucleotide
uauauuucaagauaagagc

SEQ ID NO: 3007195 - RNA, 19 nt, Artificial Sequence
  Description of Artificial Sequence: Synthetic oligonucleotide
uauaagauuauguagauua

SEQ ID NO: 3007196 - RNA, 19 nt, Artificial Sequence
  Description of Artificial Sequence: Synthetic oligonucleotide
ucuauagaaauuaaaugag

SEQ ID NO: 3007197 - RNA, 19 nt, Artificial Sequence
  Description of Artificial Sequence: Synthetic oligonucleotide
uauguauaagauuauguag

SEQ ID NO: 3007198 - RNA, 19 nt, Artificial Sequence
  Description of Artificial Sequence: Synthetic oligonucleotide
uauagaaauuaaaugagca

SEQ ID NO: 3007199 - RNA, 19 nt, Artificial Sequence
  Description of Artificial Sequence: Synthetic oligonucleotide
aaagaaacaauguauaguu

SEQ ID NO: 3007200 - RNA, 19 nt, Artificial Sequence
  Description of Artificial Sequence: Synthetic oligonucleotide
ucuacauuaagucauaaau

SEQ ID NO: 3007201 - RNA, 19 nt, Artificial Sequence
  Description of Artificial Sequence: Synthetic oligonucleotide
aacucaaacacauauacaa

SEQ ID NO: 3007202 - RNA, 19 nt, Artificial Sequence
  Description of Artificial Sequence: Synthetic oligonucleotide
gauuauguagauuaaaauc

SEQ ID NO: 3007203 - RNA, 19 nt, Artificial Sequence
  Description of Artificial Sequence: Synthetic oligonucleotide
aaaagaauaaaccuaugaa

SEQ ID NO: 3007204 - RNA, 19 nt, Artificial Sequence
  Description of Artificial Sequence: Synthetic oligonucleotide
uguaaaauaacugaaauuu

SEQ ID NO: 3007205 - RNA, 19 nt, Artificial Sequence
  Description of Artificial Sequence: Synthetic oligonucleotide
uuuucuauagaaauuaaau

SEQ ID NO: 3007206 - RNA, 19 nt, Artificial Sequence
  Description of Artificial Sequence: Synthetic oligonucleotide
auuaaaugagcauauacca

SEQ ID NO: 3007207 - RNA, 19 nt, Artificial Sequence
  Description of Artificial Sequence: Synthetic oligonucleotide
uuuacauucuacauuaagu

SEQ ID NO: 3007208 - RNA, 19 nt, Artificial Sequence
  Description of Artificial Sequence: Synthetic oligonucleotide
uuucuauagaaauuaaaug

SEQ ID NO: 3007209 - RNA, 19 nt, Artificial Sequence
  Description of Artificial Sequence: Synthetic oligonucleotide
aagaauacauuucuggugu

SEQ ID NO: 3007210 - RNA, 19 nt, Artificial Sequence
  Description of Artificial Sequence: Synthetic oligonucleotide
ugugguauguauaagauua

SEQ ID NO: 3007211 - RNA, 19 nt, Artificial Sequence
  Description of Artificial Sequence: Synthetic oligonucleotide
uaaaagaauaaaccuauga

SEQ ID NO: 3007212 - RNA, 19 nt, Artificial Sequence
  Description of Artificial Sequence: Synthetic oligonucleotide
auauuucaagauaagagcc

SEQ ID NO: 3007213 - RNA, 19 nt, Artificial Sequence
  Description of Artificial Sequence: Synthetic oligonucleotide
auaaauauaaaagaaacaa

SEQ ID NO: 3007214 - RNA, 19 nt, Artificial Sequence
  Description of Artificial Sequence: Synthetic oligonucleotide
aaugagcauauaccaaacc

SEQ ID NO: 3007215 - RNA, 19 nt, Artificial Sequence
  Description of Artificial Sequence: Synthetic oligonucleotide
ugaacucaaacacauauac

SEQ ID NO: 3007216 - RNA, 19 nt, Artificial Sequence
  Description of Artificial Sequence: Synthetic oligonucleotide
aauaacugaaauuuucuau

SEQ ID NO: 3007217 - RNA, 19 nt, Artificial Sequence
  Description of Artificial Sequence: Synthetic oligonucleotide
aguuuaauaguucacauau

SEQ ID NO: 3007218 - RNA, 19 nt, Artificial Sequence
  Description of Artificial Sequence: Synthetic oligonucleotide
uuuaauaguucacauauua

SEQ ID NO: 3007219 - RNA, 19 nt, Artificial Sequence
  Description of Artificial Sequence: Synthetic oligonucleotide
aacuuuuaagcucuuaagu

SEQ ID NO: 3007220 - RNA, 19 nt, Artificial Sequence
  Description of Artificial Sequence: Synthetic oligonucleotide
acauauuaaaagaauaaac

SEQ ID NO: 3007221 - RNA, 19 nt, Artificial Sequence
  Description of Artificial Sequence: Synthetic oligonucleotide
guagauuaaaaucaagccc

SEQ ID NO: 3007222 - RNA, 19 nt, Artificial Sequence
  Description of Artificial Sequence: Synthetic oligonucleotide
gaucaagagauuuacauuc

SEQ ID NO: 3007223 - RNA, 19 nt, Artificial Sequence
  Description of Artificial Sequence: Synthetic oligonucleotide
uauuaaaagaauaaaccua

SEQ ID NO: 3007224 - RNA, 19 nt, Artificial Sequence
  Description of Artificial Sequence: Synthetic oligonucleotide
aauacauuucugguguacc

SEQ ID NO: 3007225 - RNA, 19 nt, Artificial Sequence
  Description of Artificial Sequence: Synthetic oligonucleotide
uuaauguuaggaaccagag

SEQ ID NO: 3007226 - RNA, 19 nt, Artificial Sequence
  Description of Artificial Sequence: Synthetic oligonucleotide
aagaauaaaccuaugaaga

SEQ ID NO: 3007227 - RNA, 19 nt, Artificial Sequence
  Description of Artificial Sequence: Synthetic oligonucleotide
uaaguauauuucaagauaa

SEQ ID NO: 3007228 - RNA, 19 nt, Artificial Sequence
  Description of Artificial Sequence: Synthetic oligonucleotide
auguagauuaaaaucaagc

SEQ ID NO: 3007229 - RNA, 19 nt, Artificial Sequence
  Description of Artificial Sequence: Synthetic oligonucleotide
uaaaagaaacaauguauag

SEQ ID NO: 3007230 - RNA, 19 nt, Artificial Sequence
  Description of Artificial Sequence: Synthetic oligonucleotide
aaauauacagugcagugaa

SEQ ID NO: 3007231 - RNA, 19 nt, Artificial Sequence
  Description of Artificial Sequence: Synthetic oligonucleotide
auaguucacauauuaaaag

SEQ ID NO: 3007232 - RNA, 19 nt, Artificial Sequence
  Description of Artificial Sequence: Synthetic oligonucleotide
guauauuucaagauaagag

SEQ ID NO: 3007233 - RNA, 19 nt, Artificial Sequence
  Description of Artificial Sequence: Synthetic oligonucleotide
uacauuaagucauaaauau

SEQ ID NO: 3007234 - RNA, 19 nt, Artificial Sequence
  Description of Artificial Sequence: Synthetic oligonucleotide
auuauguagauuaaaauca

SEQ ID NO: 3007235 - RNA, 19 nt, Artificial Sequence
  Description of Artificial Sequence: Synthetic oligonucleotide
ucuuaaguauauuucaaga

SEQ ID NO: 3007236 - RNA, 19 nt, Artificial Sequence
  Description of Artificial Sequence: Synthetic oligonucleotide
aagagauuuacauucuaca

SEQ ID NO: 3007237 - RNA, 19 nt, Artificial Sequence
  Description of Artificial Sequence: Synthetic oligonucleotide
uuaaaaucaagcccgcuga

SEQ ID NO: 3007238 - RNA, 19 nt, Artificial Sequence
  Description of Artificial Sequence: Synthetic oligonucleotide
uuaaguauauuucaagaua

SEQ ID NO: 3007239 - RNA, 19 nt, Artificial Sequence
  Description of Artificial Sequence: Synthetic oligonucleotide
gguaaagcaacuuuuaagc

SEQ ID NO: 3007240 - RNA, 19 nt, Artificial Sequence
  Description of Artificial Sequence: Synthetic oligonucleotide
aguaaaguuuaauaguuca

SEQ ID NO: 3007241 - RNA, 19 nt, Artificial Sequence
  Description of Artificial Sequence: Synthetic oligonucleotide
aaaagaaacaauguauagu

SEQ ID NO: 3007242 - RNA, 19 nt, Artificial Sequence
  Description of Artificial Sequence: Synthetic oligonucleotide
uaauaguucacauauuaaa

SEQ ID NO: 3007243 - RNA, 19 nt, Artificial Sequence
  Description of Artificial Sequence: Synthetic oligonucleotide
uuacauucuacauuaaguc

SEQ ID NO: 3007244 - RNA, 19 nt, Artificial Sequence
  Description of Artificial Sequence: Synthetic oligonucleotide
auuaaaaucaagcccgcug

SEQ ID NO: 3007245 - RNA, 19 nt, Artificial Sequence
  Description of Artificial Sequence: Synthetic oligonucleotide
uuaagucauaaauauaaaa

SEQ ID NO: 3007246 - RNA, 19 nt, Artificial Sequence
  Description of Artificial Sequence: Synthetic oligonucleotide
gaagaauacauuucuggug

SEQ ID NO: 3007247 - RNA, 19 nt, Artificial Sequence
  Description of Artificial Sequence: Synthetic oligonucleotide
aaaguuuaauaguucacau

SEQ ID NO: 3007248 - RNA, 19 nt, Artificial Sequence
  Description of Artificial Sequence: Synthetic oligonucleotide
acugaaauuuucuauagaa

SEQ ID NO: 3007249 - RNA, 19 nt, Artificial Sequence
  Description of Artificial Sequence: Synthetic oligonucleotide
ugagcauauaccaaaccug

SEQ ID NO: 3007250 - RNA, 19 nt, Artificial Sequence
  Description of Artificial Sequence: Synthetic oligonucleotide
cuauagaaauuaaaugagc

SEQ ID NO: 3007251 - RNA, 19 nt, Artificial Sequence
  Description of Artificial Sequence: Synthetic oligonucleotide
aaaccuaugaagaauacau

SEQ ID NO: 3007252 - RNA, 19 nt, Artificial Sequence
  Description of Artificial Sequence: Synthetic oligonucleotide
ugguaaagcaacuuuuaag

SEQ ID NO: 3007253 - RNA, 19 nt, Artificial Sequence
  Description of Artificial Sequence: Synthetic oligonucleotide
uaaaugagcauauaccaaa

SEQ ID NO: 3007254 - RNA, 19 nt, Artificial Sequence
  Description of Artificial Sequence: Synthetic oligonucleotide
aaaauaacugaaauuuucu

SEQ ID NO: 3007255 - RNA, 19 nt, Artificial Sequence
  Description of Artificial Sequence: Synthetic oligonucleotide
ugcuuuaacaaauagccau

SEQ ID NO: 3007256 - RNA, 19 nt, Artificial Sequence
  Description of Artificial Sequence: Synthetic oligonucleotide
uugaucaagagauuuacau

SEQ ID NO: 3007257 - RNA, 19 nt, Artificial Sequence
  Description of Artificial Sequence: Synthetic oligonucleotide
auuuacauucuacauuaag

SEQ ID NO: 3007258 - RNA, 19 nt, Artificial Sequence
  Description of Artificial Sequence: Synthetic oligonucleotide
agauuuacauucuacauua

SEQ ID NO: 3007259 - RNA, 19 nt, Artificial Sequence
  Description of Artificial Sequence: Synthetic oligonucleotide
uaguucacauauuaaaaga

SEQ ID NO: 3007260 - RNA, 19 nt, Artificial Sequence
  Description of Artificial Sequence: Synthetic oligonucleotide
uaacugaaauuuucuauag

SEQ ID NO: 3007261 - RNA, 19 nt, Artificial Sequence
  Description of Artificial Sequence: Synthetic oligonucleotide
ugaagaauacauuucuggu

SEQ ID NO: 3007262 - RNA, 19 nt, Artificial Sequence
  Description of Artificial Sequence: Synthetic oligonucleotide
uuucugguguaccaaauga

SEQ ID NO: 3007263 - RNA, 19 nt, Artificial Sequence
  Description of Artificial Sequence: Synthetic oligonucleotide
uauguagauuaaaaucaag

SEQ ID NO: 3007264 - RNA, 19 nt, Artificial Sequence
  Description of Artificial Sequence: Synthetic oligonucleotide
agugaacucaaacacauau

SEQ ID NO: 3007265 - RNA, 19 nt, Artificial Sequence
  Description of Artificial Sequence: Synthetic oligonucleotide
aaaauauacagugcaguga

SEQ ID NO: 3007266 - RNA, 19 nt, Artificial Sequence
  Description of Artificial Sequence: Synthetic oligonucleotide
acauauacaaaacaauuuu

SEQ ID NO: 3007267 - RNA, 19 nt, Artificial Sequence
  Description of Artificial Sequence: Synthetic oligonucleotide
aaagcaacuuuuaagcucu

SEQ ID NO: 3007268 - RNA, 19 nt, Artificial Sequence
  Description of Artificial Sequence: Synthetic oligonucleotide
ucaagauaagagccugugg

SEQ ID NO: 3007269 - RNA, 19 nt, Artificial Sequence
  Description of Artificial Sequence: Synthetic oligonucleotide
agugcagugaacucaaaca

SEQ ID NO: 3007270 - RNA, 19 nt, Artificial Sequence
  Description of Artificial Sequence: Synthetic oligonucleotide
aauaguucacauauuaaaa

SEQ ID NO: 3007271 - RNA, 19 nt, Artificial Sequence
  Description of Artificial Sequence: Synthetic oligonucleotide
augagcauauaccaaaccu

SEQ ID NO: 3007272 - RNA, 19 nt, Artificial Sequence
  Description of Artificial Sequence: Synthetic oligonucleotide
uaaagcaacuuuuaagcuc

SEQ ID NO: 3007273 - RNA, 19 nt, Artificial Sequence
  Description of Artificial Sequence: Synthetic oligonucleotide
aaauaacugaaauuuucua

SEQ ID NO: 3007274 - RNA, 19 nt, Artificial Sequence
  Description of Artificial Sequence: Synthetic oligonucleotide
agaaacaauguauaguuuu

SEQ ID NO: 3007275 - RNA, 19 nt, Artificial Sequence
  Description of Artificial Sequence: Synthetic oligonucleotide
uacauucuacauuaaguca

SEQ ID NO: 3007276 - RNA, 19 nt, Artificial Sequence
  Description of Artificial Sequence: Synthetic oligonucleotide
uuaggaaccagaguaaagu

SEQ ID NO: 3007277 - RNA, 19 nt, Artificial Sequence
  Description of Artificial Sequence: Synthetic oligonucleotide
auuaaaagaauaaaccuau

SEQ ID NO: 3007278 - RNA, 19 nt, Artificial Sequence
  Description of Artificial Sequence: Synthetic oligonucleotide
uuaauaguucacauauuaa

SEQ ID NO: 3007279 - RNA, 19 nt, Artificial Sequence
  Description of Artificial Sequence: Synthetic oligonucleotide
uagaaauuaaaugagcaua

SEQ ID NO: 3007280 - RNA, 19 nt, Artificial Sequence
  Description of Artificial Sequence: Synthetic oligonucleotide
auaacugaaauuuucuaua

SEQ ID NO: 3007281 - RNA, 19 nt, Artificial Sequence
  Description of Artificial Sequence: Synthetic oligonucleotide
aaaucaagcccgcugaguu

SEQ ID NO: 3007282 - RNA, 19 nt, Artificial Sequence
  Description of Artificial Sequence: Synthetic oligonucleotide
uuaaaugagcauauaccaa

SEQ ID NO: 3007283 - RNA, 19 nt, Artificial Sequence
  Description of Artificial Sequence: Synthetic oligonucleotide
aaacacauauacaaaacaa

SEQ ID NO: 3007284 - RNA, 19 nt, Artificial Sequence
  Description of Artificial Sequence: Synthetic oligonucleotide
gagcauauaccaaaccugg

SEQ ID NO: 3007285 - RNA, 19 nt, Artificial Sequence
  Description of Artificial Sequence: Synthetic oligonucleotide
aauaaaccuaugaagaaua

SEQ ID NO: 3007286 - RNA, 19 nt, Artificial Sequence
  Description of Artificial Sequence: Synthetic oligonucleotide
agauuauguagauuaaaau

SEQ ID NO: 3007287 - RNA, 19 nt, Artificial Sequence
  Description of Artificial Sequence: Synthetic oligonucleotide
cauaaauauaaaagaaaca

SEQ ID NO: 3007288 - RNA, 19 nt, Artificial Sequence
  Description of Artificial Sequence: Synthetic oligonucleotide
uuauguagauuaaaaucaa

SEQ ID NO: 3007289 - RNA, 19 nt, Artificial Sequence
  Description of Artificial Sequence: Synthetic oligonucleotide
aagcucuuaaguauauuuc

SEQ ID NO: 3007290 - RNA, 19 nt, Artificial Sequence
  Description of Artificial Sequence: Synthetic oligonucleotide
uuuugaucaagagauuuac

SEQ ID NO: 3007291 - RNA, 19 nt, Artificial Sequence
  Description of Artificial Sequence: Synthetic oligonucleotide
aacaaauagccauguaaaa

SEQ ID NO: 3007292 - RNA, 19 nt, Artificial Sequence
  Description of Artificial Sequence: Synthetic oligonucleotide
aagauuauguagauuaaaa

SEQ ID NO: 3007293 - RNA, 19 nt, Artificial Sequence
  Description of Artificial Sequence: Synthetic oligonucleotide
agccauguaaaauaacuga

SEQ ID NO: 3007294 - RNA, 19 nt, Artificial Sequence
  Description of Artificial Sequence: Synthetic oligonucleotide
acuuuuaagcucuuaagua

SEQ ID NO: 3007295 - RNA, 19 nt, Artificial Sequence
  Description of Artificial Sequence: Synthetic oligonucleotide
uaagcucuuaaguauauuu

SEQ ID NO: 3007296 - RNA, 19 nt, Artificial Sequence
  Description of Artificial Sequence: Synthetic oligonucleotide
auagaaauuaaaugagcau

SEQ ID NO: 3007297 - RNA, 19 nt, Artificial Sequence
  Description of Artificial Sequence: Synthetic oligonucleotide
uagccauguaaaauaacug

SEQ ID NO: 3007298 - RNA, 19 nt, Artificial Sequence
  Description of Artificial Sequence: Synthetic oligonucleotide
cucuuaaguauauuucaag

SEQ ID NO: 3007299 - RNA, 19 nt, Artificial Sequence
  Description of Artificial Sequence: Synthetic oligonucleotide
auguauaagauuauguaga

SEQ ID NO: 3007300 - RNA, 19 nt, Artificial Sequence
  Description of Artificial Sequence: Synthetic oligonucleotide
aguuaugcugugcuuuaac

SEQ ID NO: 3007301 - RNA, 19 nt, Artificial Sequence
  Description of Artificial Sequence: Synthetic oligonucleotide
aguauauuucaagauaaga

SEQ ID NO: 3007302 - RNA, 19 nt, Artificial Sequence
  Description of Artificial Sequence: Synthetic oligonucleotide
uaugcugugcuuuaacaaa

SEQ ID NO: 3007303 - RNA, 19 nt, Artificial Sequence
  Description of Artificial Sequence: Synthetic oligonucleotide
cugugcuuuaacaaauagc

SEQ ID NO: 3007304 - RNA, 19 nt, Artificial Sequence
  Description of Artificial Sequence: Synthetic oligonucleotide
caacuuuuaagcucuuaag

SEQ ID NO: 3007305 - RNA, 19 nt, Artificial Sequence
  Description of Artificial Sequence: Synthetic oligonucleotide
aauagccauguaaaauaac

SEQ ID NO: 3007306 - RNA, 19 nt, Artificial Sequence
  Description of Artificial Sequence: Synthetic oligonucleotide
aacugaaauuuucuauaga

SEQ ID NO: 3007307 - RNA, 19 nt, Artificial Sequence
  Description of Artificial Sequence: Synthetic oligonucleotide
agagauuuacauucuacau

SEQ ID NO: 3007308 - RNA, 19 nt, Artificial Sequence
  Description of Artificial Sequence: Synthetic oligonucleotide
ucugguguaccaaaugaaa

SEQ ID NO: 3007309 - RNA, 19 nt, Artificial Sequence
  Description of Artificial Sequence: Synthetic oligonucleotide
uguauaagauuauguagau

SEQ ID NO: 3007310 - RNA, 19 nt, Artificial Sequence
  Description of Artificial Sequence: Synthetic oligonucleotide
auagccauguaaaauaacu

SEQ ID NO: 3007311 - RNA, 19 nt, Artificial Sequence
  Description of Artificial Sequence: Synthetic oligonucleotide
ccagaguaaaguuuaauag

SEQ ID NO: 3007312 - RNA, 19 nt, Artificial Sequence
  Description of Artificial Sequence: Synthetic oligonucleotide
aacacauauacaaaacaau

SEQ ID NO: 3007313 - RNA, 19 nt, Artificial Sequence
  Description of Artificial Sequence: Synthetic oligonucleotide
accuaugaagaauacauuu

SEQ ID NO: 3007314 - RNA, 19 nt, Artificial Sequence
  Description of Artificial Sequence: Synthetic oligonucleotide
agaauaaaccuaugaagaa

SEQ ID NO: 3007315 - RNA, 19 nt, Artificial Sequence
  Description of Artificial Sequence: Synthetic oligonucleotide
uuaugcugugcuuuaacaa

SEQ ID NO: 3007316 - RNA, 19 nt, Artificial Sequence
  Description of Artificial Sequence: Synthetic oligonucleotide
uuugaucaagagauuuaca

SEQ ID NO: 3007317 - RNA, 19 nt, Artificial Sequence
  Description of Artificial Sequence: Synthetic oligonucleotide
aaguuuaauaguucacaua

SEQ ID NO: 3007318 - RNA, 19 nt, Artificial Sequence
  Description of Artificial Sequence: Synthetic oligonucleotide
uaaaaucaagcccgcugag

SEQ ID NO: 3007319 - RNA, 19 nt, Artificial Sequence
  Description of Artificial Sequence: Synthetic oligonucleotide
auauacagugcagugaacu

SEQ ID NO: 3007320 - RNA, 19 nt, Artificial Sequence
  Description of Artificial Sequence: Synthetic oligonucleotide
agucauaaauauaaaagaa

SEQ ID NO: 3007321 - RNA, 19 nt, Artificial Sequence
  Description of Artificial Sequence: Synthetic oligonucleotide
caaauagccauguaaaaua

SEQ ID NO: 3007322 - RNA, 19 nt, Artificial Sequence
  Description of Artificial Sequence: Synthetic oligonucleotide
uggagauaucacaauauuu

SEQ ID NO: 3007323 - RNA, 19 nt, Artificial Sequence
  Description of Artificial Sequence: Synthetic oligonucleotide
uaauguuaggaaccagagu

SEQ ID NO: 3007324 - RNA, 19 nt, Artificial Sequence
  Description of Artificial Sequence: Synthetic oligonucleotide
auguaaaauaacugaaauu

SEQ ID NO: 3007325 - RNA, 19 nt, Artificial Sequence
  Description of Artificial Sequence: Synthetic oligonucleotide
accagaguaaaguuuaaua

SEQ ID NO: 3007326 - RNA, 19 nt, Artificial Sequence
  Description of Artificial Sequence: Synthetic oligonucleotide
caaacacauauacaaaaca

SEQ ID NO: 3007327 - RNA, 19 nt, Artificial Sequence
  Description of Artificial Sequence: Synthetic oligonucleotide
auauaccaaaccuggagau

SEQ ID NO: 3007328 - RNA, 19 nt, Artificial Sequence
  Description of Artificial Sequence: Synthetic oligonucleotide
auuucaagauaagagccug

SEQ ID NO: 3007329 - RNA, 19 nt, Artificial Sequence
  Description of Artificial Sequence: Synthetic oligonucleotide
auuucugguguaccaaaug

SEQ ID NO: 3007330 - RNA, 19 nt, Artificial Sequence
  Description of Artificial Sequence: Synthetic oligonucleotide
uaaaccuaugaagaauaca

SEQ ID NO: 3007331 - RNA, 19 nt, Artificial Sequence
  Description of Artificial Sequence: Synthetic oligonucleotide
aaguauauuucaagauaag

SEQ ID NO: 3007332 - RNA, 19 nt, Artificial Sequence
  Description of Artificial Sequence: Synthetic oligonucleotide
uucaagauaagagccugug

SEQ ID NO: 3007333 - RNA, 19 nt, Artificial Sequence
  Description of Artificial Sequence: Synthetic oligonucleotide
uugguaaagcaacuuuuaa

SEQ ID NO: 3007334 - RNA, 19 nt, Artificial Sequence
  Description of Artificial Sequence: Synthetic oligonucleotide
aagauaagagccuguggua

SEQ ID NO: 3007335 - RNA, 19 nt, Artificial Sequence
  Description of Artificial Sequence: Synthetic oligonucleotide
ugaucaagagauuuacauu

SEQ ID NO: 3007336 - RNA, 19 nt, Artificial Sequence
  Description of Artificial Sequence: Synthetic oligonucleotide
acaaauagccauguaaaau

SEQ ID NO: 3007337 - RNA, 19 nt, Artificial Sequence
  Description of Artificial Sequence: Synthetic oligonucleotide
gagauaucacaauauuuaa

SEQ ID NO: 3007338 - RNA, 19 nt, Artificial Sequence
  Description of Artificial Sequence: Synthetic oligonucleotide
auaucacaauauuuaauua

SEQ ID NO: 3007339 - RNA, 19 nt, Artificial Sequence
  Description of Artificial Sequence: Synthetic oligonucleotide
uaagauuauguagauuaaa

SEQ ID NO: 3007340 - RNA, 19 nt, Artificial Sequence
  Description of Artificial Sequence: Synthetic oligonucleotide
agauuaaaaucaagcccgc

SEQ ID NO: 3007341 - RNA, 19 nt, Artificial Sequence
  Description of Artificial Sequence: Synthetic oligonucleotide
aauauacagugcagugaac

SEQ ID NO: 3007342 - RNA, 19 nt, Artificial Sequence
  Description of Artificial Sequence: Synthetic oligonucleotide
gauaagagccugugguaug

SEQ ID NO: 3007343 - RNA, 19 nt, Artificial Sequence
  Description of Artificial Sequence: Synthetic oligonucleotide
uauacagugcagugaacuc

SEQ ID NO: 3007344 - RNA, 19 nt, Artificial Sequence
  Description of Artificial Sequence: Synthetic oligonucleotide
gugcagugaacucaaacac

SEQ ID NO: 3007345 - RNA, 19 nt, Artificial Sequence
  Description of Artificial Sequence: Synthetic oligonucleotide
auaaaccuaugaagaauac

SEQ ID NO: 3007346 - RNA, 19 nt, Artificial Sequence
  Description of Artificial Sequence: Synthetic oligonucleotide
agaguaaaguuuaauaguu

SEQ ID NO: 3007347 - RNA, 19 nt, Artificial Sequence
  Description of Artificial Sequence: Synthetic oligonucleotide
aaauagccauguaaaauaa

SEQ ID NO: 3007348 - RNA, 19 nt, Artificial Sequence
  Description of Artificial Sequence: Synthetic oligonucleotide
auacauuucugguguacca

SEQ ID NO: 3007349 - RNA, 19 nt, Artificial Sequence
  Description of Artificial Sequence: Synthetic oligonucleotide
cauauaccaaaccuggaga

SEQ ID NO: 3007350 - RNA, 19 nt, Artificial Sequence
  Description of Artificial Sequence: Synthetic oligonucleotide
gcauauaccaaaccuggag

SEQ ID NO: 3007351 - RNA, 19 nt, Artificial Sequence
  Description of Artificial Sequence: Synthetic oligonucleotide
aaaccuggagauaucacaa

SEQ ID NO: 3007352 - RNA, 19 nt, Artificial Sequence
  Description of Artificial Sequence: Synthetic oligonucleotide
uucugguguaccaaaugaa

SEQ ID NO: 3007353 - RNA, 19 nt, Artificial Sequence
  Description of Artificial Sequence: Synthetic oligonucleotide
cuacauuaagucauaaaua

SEQ ID NO: 3007354 - RNA, 19 nt, Artificial Sequence
  Description of Artificial Sequence: Synthetic oligonucleotide
guuaugcugugcuuuaaca

SEQ ID NO: 3007355 - RNA, 19 nt, Artificial Sequence
  Description of Artificial Sequence: Synthetic oligonucleotide
acauucuacauuaagucau

SEQ ID NO: 3007356 - RNA, 19 nt, Artificial Sequence
  Description of Artificial Sequence: Synthetic oligonucleotide
uucuacauuaagucauaaa

SEQ ID NO: 3007357 - RNA, 19 nt, Artificial Sequence
  Description of Artificial Sequence: Synthetic oligonucleotide
aaaaucaagcccgcugagu

SEQ ID NO: 3007358 - RNA, 19 nt, Artificial Sequence
  Description of Artificial Sequence: Synthetic oligonucleotide
ugguauguauaagauuaug

SEQ ID NO: 3007359 - RNA, 19 nt, Artificial Sequence
  Description of Artificial Sequence: Synthetic oligonucleotide
acacauauacaaaacaauu

SEQ ID NO: 3007360 - RNA, 19 nt, Artificial Sequence
  Description of Artificial Sequence: Synthetic oligonucleotide
uacagugcagugaacucaa

SEQ ID NO: 3007361 - RNA, 19 nt, Artificial Sequence
  Description of Artificial Sequence: Synthetic oligonucleotide
uuucaagauaagagccugu

SEQ ID NO: 3007362 - RNA, 19 nt, Artificial Sequence
  Description of Artificial Sequence: Synthetic oligonucleotide
aguucacauauuaaaagaa

SEQ ID NO: 3007363 - RNA, 19 nt, Artificial Sequence
  Description of Artificial Sequence: Synthetic oligonucleotide
auaccaaaccuggagauau

SEQ ID NO: 3007364 - RNA, 19 nt, Artificial Sequence
  Description of Artificial Sequence: Synthetic oligonucleotide
ucaagagauuuacauucua

SEQ ID NO: 3007365 - RNA, 19 nt, Artificial Sequence
  Description of Artificial Sequence: Synthetic oligonucleotide
caagauaagagccuguggu

SEQ ID NO: 3007366 - RNA, 19 nt, Artificial Sequence
  Description of Artificial Sequence: Synthetic oligonucleotide
cuaugaagaauacauuucu

SEQ ID NO: 3007367 - RNA, 19 nt, Artificial Sequence
  Description of Artificial Sequence: Synthetic oligonucleotide
cugaaauuuucuauagaaa

SEQ ID NO: 3007368 - RNA, 19 nt, Artificial Sequence
  Description of Artificial Sequence: Synthetic oligonucleotide
auuuucuauagaaauuaaa

SEQ ID NO: 3007369 - RNA, 19 nt, Artificial Sequence
  Description of Artificial Sequence: Synthetic oligonucleotide
cuuaaguauauuucaagau

SEQ ID NO: 3007370 - RNA, 19 nt, Artificial Sequence
  Description of Artificial Sequence: Synthetic oligonucleotide
gaauacauuucugguguac

SEQ ID NO: 3007371 - RNA, 19 nt, Artificial Sequence
  Description of Artificial Sequence: Synthetic oligonucleotide
cauguaaaauaacugaaau

SEQ ID NO: 3007372 - RNA, 19 nt, Artificial Sequence
  Description of Artificial Sequence: Synthetic oligonucleotide
guuaggaaccagaguaaag

SEQ ID NO: 3007373 - RNA, 19 nt, Artificial Sequence
  Description of Artificial Sequence: Synthetic oligonucleotide
auacagugcagugaacuca

SEQ ID NO: 3007374 - RNA, 19 nt, Artificial Sequence
  Description of Artificial Sequence: Synthetic oligonucleotide
ggagauaucacaauauuua

SEQ ID NO: 3007375 - RNA, 19 nt, Artificial Sequence
  Description of Artificial Sequence: Synthetic oligonucleotide
cuuuuaagcucuuaaguau

SEQ ID NO: 3007376 - RNA, 19 nt, Artificial Sequence
  Description of Artificial Sequence: Synthetic oligonucleotide
uguuaggaaccagaguaaa

SEQ ID NO: 3007377 - RNA, 19 nt, Artificial Sequence
  Description of Artificial Sequence: Synthetic oligonucleotide
gaguaaaguuuaauaguuc

SEQ ID NO: 3007378 - RNA, 19 nt, Artificial Sequence
  Description of Artificial Sequence: Synthetic oligonucleotide
gagauuuacauucuacauu

SEQ ID NO: 3007379 - RNA, 19 nt, Artificial Sequence
  Description of Artificial Sequence: Synthetic oligonucleotide
aagagccugugguauguau

SEQ ID NO: 3007380 - RNA, 19 nt, Artificial Sequence
  Description of Artificial Sequence: Synthetic oligonucleotide
cagaguaaaguuuaauagu

SEQ ID NO: 3007381 - RNA, 19 nt, Artificial Sequence
  Description of Artificial Sequence: Synthetic oligonucleotide
agauaagagccugugguau

SEQ ID NO: 3007382 - RNA, 19 nt, Artificial Sequence
  Description of Artificial Sequence: Synthetic oligonucleotide
uaggaaccagaguaaaguu

SEQ ID NO: 3007383 - RNA, 19 nt, Artificial Sequence
  Description of Artificial Sequence: Synthetic oligonucleotide
ugaguuaugcugugcuuua

SEQ ID NO: 3007384 - RNA, 19 nt, Artificial Sequence
  Description of Artificial Sequence: Synthetic oligonucleotide
ccuaugaagaauacauuuc

SEQ ID NO: 3007385 - RNA, 19 nt, Artificial Sequence
  Description of Artificial Sequence: Synthetic oligonucleotide
auuaagucauaaauauaaa

SEQ ID NO: 3007386 - RNA, 19 nt, Artificial Sequence
  Description of Artificial Sequence: Synthetic oligonucleotide
agauaucacaauauuuaau

SEQ ID NO: 3007387 - RNA, 19 nt, Artificial Sequence
  Description of Artificial Sequence: Synthetic oligonucleotide
cagugcagugaacucaaac

SEQ ID NO: 3007388 - RNA, 19 nt, Artificial Sequence
  Description of Artificial Sequence: Synthetic oligonucleotide
aaucaagcccgcugaguua

SEQ ID NO: 3007389 - RNA, 19 nt, Artificial Sequence
  Description of Artificial Sequence: Synthetic oligonucleotide
guaaagcaacuuuuaagcu

SEQ ID NO: 3007390 - RNA, 19 nt, Artificial Sequence
  Description of Artificial Sequence: Synthetic oligonucleotide
aaccuggagauaucacaau

SEQ ID NO: 3007391 - RNA, 19 nt, Artificial Sequence
  Description of Artificial Sequence: Synthetic oligonucleotide
gaacucaaacacauauaca

SEQ ID NO: 3007392 - RNA, 19 nt, Artificial Sequence
  Description of Artificial Sequence: Synthetic oligonucleotide
uacauuucugguguaccaa

SEQ ID NO: 3007393 - RNA, 19 nt, Artificial Sequence
  Description of Artificial Sequence: Synthetic oligonucleotide
gaauaaaccuaugaagaau

SEQ ID NO: 3007394 - RNA, 19 nt, Artificial Sequence
  Description of Artificial Sequence: Synthetic oligonucleotide
agcccgcugaguuaugcug

SEQ ID NO: 3007395 - RNA, 19 nt, Artificial Sequence
  Description of Artificial Sequence: Synthetic oligonucleotide
gcugugcuuuaacaaauag

SEQ ID NO: 3007396 - RNA, 19 nt, Artificial Sequence
  Description of Artificial Sequence: Synthetic oligonucleotide
gaaauuuucuauagaaauu

SEQ ID NO: 3007397 - RNA, 19 nt, Artificial Sequence
  Description of Artificial Sequence: Synthetic oligonucleotide
cugguguaccaaaugaaaa

SEQ ID NO: 3007398 - RNA, 19 nt, Artificial Sequence
  Description of Artificial Sequence: Synthetic oligonucleotide
accuggagauaucacaaua

SEQ ID NO: 3007399 - RNA, 19 nt, Artificial Sequence
  Description of Artificial Sequence: Synthetic oligonucleotide
gagccugugguauguauaa

SEQ ID NO: 3007400 - RNA, 19 nt, Artificial Sequence
  Description of Artificial Sequence: Synthetic oligonucleotide
auaagagccugugguaugu

SEQ ID NO: 3007401 - RNA, 19 nt, Artificial Sequence
  Description of Artificial Sequence: Synthetic oligonucleotide
accaaaccuggagauauca

SEQ ID NO: 3007402 - RNA, 19 nt, Artificial Sequence
  Description of Artificial Sequence: Synthetic oligonucleotide
aagaaacaauguauaguuu

SEQ ID NO: 3007403 - RNA, 19 nt, Artificial Sequence
  Description of Artificial Sequence: Synthetic oligonucleotide
aaccagaguaaaguuuaau

SEQ ID NO: 3007404 - RNA, 19 nt, Artificial Sequence
  Description of Artificial Sequence: Synthetic oligonucleotide
gcaacuuuuaagcucuuaa

SEQ ID NO: 3007405 - RNA, 19 nt, Artificial Sequence
  Description of Artificial Sequence: Synthetic oligonucleotide
cacauauacaaaacaauuu

SEQ ID NO: 3007406 - RNA, 19 nt, Artificial Sequence
  Description of Artificial Sequence: Synthetic oligonucleotide
auaagauuauguagauuaa

SEQ ID NO: 3007407 - RNA, 19 nt, Artificial Sequence
  Description of Artificial Sequence: Synthetic oligonucleotide
uauaccaaaccuggagaua

SEQ ID NO: 3007408 - RNA, 19 nt, Artificial Sequence
  Description of Artificial Sequence: Synthetic oligonucleotide
aagcccgcugaguuaugcu

SEQ ID NO: 3007409 - RNA, 19 nt, Artificial Sequence
  Description of Artificial Sequence: Synthetic oligonucleotide
aaccuaugaagaauacauu

SEQ ID NO: 3007410 - RNA, 19 nt, Artificial Sequence
  Description of Artificial Sequence: Synthetic oligonucleotide
gcuuuaacaaauagccaug

SEQ ID NO: 3007411 - RNA, 19 nt, Artificial Sequence
  Description of Artificial Sequence: Synthetic oligonucleotide
aucaagagauuuacauucu

SEQ ID NO: 3007412 - RNA, 19 nt, Artificial Sequence
  Description of Artificial Sequence: Synthetic oligonucleotide
ugcugugcuuuaacaaaua

SEQ ID NO: 3007413 - RNA, 19 nt, Artificial Sequence
  Description of Artificial Sequence: Synthetic oligonucleotide
gguauguauaagauuaugu

SEQ ID NO: 3007414 - RNA, 19 nt, Artificial Sequence
  Description of Artificial Sequence: Synthetic oligonucleotide
acucaaacacauauacaaa

SEQ ID NO: 3007415 - RNA, 19 nt, Artificial Sequence
  Description of Artificial Sequence: Synthetic oligonucleotide
aucaagcccgcugaguuau

SEQ ID NO: 3007416 - RNA, 19 nt, Artificial Sequence
  Description of Artificial Sequence: Synthetic oligonucleotide
acauuaagucauaaauaua

SEQ ID NO: 3007417 - RNA, 19 nt, Artificial Sequence
  Description of Artificial Sequence: Synthetic oligonucleotide
ggaaccagaguaaaguuua

SEQ ID NO: 3007418 - RNA, 19 nt, Artificial Sequence
  Description of Artificial Sequence: Synthetic oligonucleotide
agaauacauuucuggugua

SEQ ID NO: 3007419 - RNA, 19 nt, Artificial Sequence
  Description of Artificial Sequence: Synthetic oligonucleotide
aggaaccagaguaaaguuu

SEQ ID NO: 3007420 - RNA, 19 nt, Artificial Sequence
  Description of Artificial Sequence: Synthetic oligonucleotide
gccugugguauguauaaga

SEQ ID NO: 3007421 - RNA, 19 nt, Artificial Sequence
  Description of Artificial Sequence: Synthetic oligonucleotide
auucuacauuaagucauaa

SEQ ID NO: 3007422 - RNA, 19 nt, Artificial Sequence
  Description of Artificial Sequence: Synthetic oligonucleotide
cauucuacauuaagucaua

SEQ ID NO: 3007423 - RNA, 19 nt, Artificial Sequence
  Description of Artificial Sequence: Synthetic oligonucleotide
caagcccgcugaguuaugc

SEQ ID NO: 3007424 - RNA, 19 nt, Artificial Sequence
  Description of Artificial Sequence: Synthetic oligonucleotide
uaccaaaccuggagauauc

SEQ ID NO: 3007425 - RNA, 19 nt, Artificial Sequence
  Description of Artificial Sequence: Synthetic oligonucleotide
gugcuuuaacaaauagcca

SEQ ID NO: 3007426 - RNA, 19 nt, Artificial Sequence
  Description of Artificial Sequence: Synthetic oligonucleotide
agcauauaccaaaccugga

SEQ ID NO: 3007427 - RNA, 19 nt, Artificial Sequence
  Description of Artificial Sequence: Synthetic oligonucleotide
ccauguaaaauaacugaaa

SEQ ID NO: 3007428 - RNA, 19 nt, Artificial Sequence
  Description of Artificial Sequence: Synthetic oligonucleotide
gauuaaaaucaagcccgcu

SEQ ID NO: 3007429 - RNA, 19 nt, Artificial Sequence
  Description of Artificial Sequence: Synthetic oligonucleotide
gccauguaaaauaacugaa

SEQ ID NO: 3007430 - RNA, 19 nt, Artificial Sequence
  Description of Artificial Sequence: Synthetic oligonucleotide
gugaacucaaacacauaua

SEQ ID NO: 3007431 - RNA, 19 nt, Artificial Sequence
  Description of Artificial Sequence: Synthetic oligonucleotide
agagccugugguauguaua

SEQ ID NO: 3007432 - RNA, 19 nt, Artificial Sequence
  Description of Artificial Sequence: Synthetic oligonucleotide
ucaagcccgcugaguuaug

SEQ ID NO: 3007433 - RNA, 19 nt, Artificial Sequence
  Description of Artificial Sequence: Synthetic oligonucleotide
ccaaaccuggagauaucac

SEQ ID NO: 3007434 - RNA, 19 nt, Artificial Sequence
  Description of Artificial Sequence: Synthetic oligonucleotide
agccugugguauguauaag

SEQ ID NO: 3007435 - RNA, 19 nt, Artificial Sequence
  Description of Artificial Sequence: Synthetic oligonucleotide
gaaccagaguaaaguuuaa

SEQ ID NO: 3007436 - RNA, 19 nt, Artificial Sequence
  Description of Artificial Sequence: Synthetic oligonucleotide
cuggagauaucacaauauu

SEQ ID NO: 3007437 - RNA, 19 nt, Artificial Sequence
  Description of Artificial Sequence: Synthetic oligonucleotide
gcucuuaaguauauuucaa

SEQ ID NO: 3007438 - RNA, 19 nt, Artificial Sequence
  Description of Artificial Sequence: Synthetic oligonucleotide
agcaacuuuuaagcucuua

SEQ ID NO: 3007439 - RNA, 19 nt, Artificial Sequence
  Description of Artificial Sequence: Synthetic oligonucleotide
gaguuaugcugugcuuuaa

SEQ ID NO: 3007440 - RNA, 19 nt, Artificial Sequence
  Description of Artificial Sequence: Synthetic oligonucleotide
uaagagccugugguaugua

SEQ ID NO: 3007441 - RNA, 19 nt, Artificial Sequence
  Description of Artificial Sequence: Synthetic oligonucleotide
guauaagauuauguagauu

SEQ ID NO: 3007442 - RNA, 19 nt, Artificial Sequence
  Description of Artificial Sequence: Synthetic oligonucleotide
cugaguuaugcugugcuuu

SEQ ID NO: 3007443 - RNA, 19 nt, Artificial Sequence
  Description of Artificial Sequence: Synthetic oligonucleotide
cagugaacucaaacacaua

SEQ ID NO: 3007444 - RNA, 19 nt, Artificial Sequence
  Description of Artificial Sequence: Synthetic oligonucleotide
ccugugguauguauaagau

SEQ ID NO: 3007445 - RNA, 19 nt, Artificial Sequence
  Description of Artificial Sequence: Synthetic oligonucleotide
ccuggagauaucacaauau

SEQ ID NO: 3007446 - RNA, 19 nt, Artificial Sequence
  Description of Artificial Sequence: Synthetic oligonucleotide
gugguauguauaagauuau

SEQ ID NO: 3007447 - RNA, 19 nt, Artificial Sequence
  Description of Artificial Sequence: Synthetic oligonucleotide
aagcaacuuuuaagcucuu

SEQ ID NO: 3007448 - RNA, 19 nt, Artificial Sequence
  Description of Artificial Sequence: Synthetic oligonucleotide
gcugaguuaugcugugcuu

SEQ ID NO: 3007449 - RNA, 19 nt, Artificial Sequence
  Description of Artificial Sequence: Synthetic oligonucleotide
ccgcugaguuaugcugugc

SEQ ID NO: 3007450 - RNA, 19 nt, Artificial Sequence
  Description of Artificial Sequence: Synthetic oligonucleotide
cgcugaguuaugcugugcu

SEQ ID NO: 3007451 - RNA, 19 nt, Artificial Sequence
  Description of Artificial Sequence: Synthetic oligonucleotide
gcccgcugaguuaugcugu

SEQ ID NO: 3007452 - RNA, 19 nt, Artificial Sequence
  Description of Artificial Sequence: Synthetic oligonucleotide
aauaguuguauuuauauuc

SEQ ID NO: 3007453 - RNA, 19 nt, Artificial Sequence
  Description of Artificial Sequence: Synthetic oligonucleotide
aagaaaauaauauauauau

SEQ ID NO: 3007454 - RNA, 19 nt, Artificial Sequence
  Description of Artificial Sequence: Synthetic oligonucleotide
aauaaaauaacacauuaga

SEQ ID NO: 3007455 - RNA, 19 nt, Artificial Sequence
  Description of Artificial Sequence: Synthetic oligonucleotide
aaaauaacacauuagagaa

SEQ ID NO: 3007456 - RNA, 19 nt, Artificial Sequence
  Description of Artificial Sequence: Synthetic oligonucleotide
ucuaacaugacauucagug

SEQ ID NO: 3007457 - RNA, 19 nt, Artificial Sequence
  Description of Artificial Sequence: Synthetic oligonucleotide
uaaaauaacacauuagaga

SEQ ID NO: 3007458 - RNA, 19 nt, Artificial Sequence
  Description of Artificial Sequence: Synthetic oligonucleotide
aauaacacauuagagaaag

SEQ ID NO: 3007459 - RNA, 19 nt, Artificial Sequence
  Description of Artificial Sequence: Synthetic oligonucleotide
ucaugaacaaauaaaauaa

SEQ ID NO: 3007460 - RNA, 19 nt, Artificial Sequence
  Description of Artificial Sequence: Synthetic oligonucleotide
uuuauauuccacaauuugc

SEQ ID NO: 3007461 - RNA, 19 nt, Artificial Sequence
  Description of Artificial Sequence: Synthetic oligonucleotide
aaaauaguuguauuuauau

SEQ ID NO: 3007462 - RNA, 19 nt, Artificial Sequence
  Description of Artificial Sequence: Synthetic oligonucleotide
auauauauacuuuaaccag

SEQ ID NO: 3007463 - RNA, 19 nt, Artificial Sequence
  Description of Artificial Sequence: Synthetic oligonucleotide
uaacaugacauucagugag

SEQ ID NO: 3007464 - RNA, 19 nt, Artificial Sequence
  Description of Artificial Sequence: Synthetic oligonucleotide
uuaaacuaaauucucuuca

SEQ ID NO: 3007465 - RNA, 19 nt, Artificial Sequence
  Description of Artificial Sequence: Synthetic oligonucleotide
auucucuucacauuucacc

SEQ ID NO: 3007466 - RNA, 19 nt, Artificial Sequence
  Description of Artificial Sequence: Synthetic oligonucleotide
uuucuuauaaacuuucuac

SEQ ID NO: 3007467 - RNA, 19 nt, Artificial Sequence
  Description of Artificial Sequence: Synthetic oligonucleotide
uuauaaacuuucuacagga

SEQ ID NO: 3007468 - RNA, 19 nt, Artificial Sequence
  Description of Artificial Sequence: Synthetic oligonucleotide
aaccagauuaguuucauga

SEQ ID NO: 3007469 - RNA, 19 nt, Artificial Sequence
  Description of Artificial Sequence: Synthetic oligonucleotide
uuauauuccacaauuugcu

SEQ ID NO: 3007470 - RNA, 19 nt, Artificial Sequence
  Description of Artificial Sequence: Synthetic oligonucleotide
uaaacuuucuacaggaugu

SEQ ID NO: 3007471 - RNA, 19 nt, Artificial Sequence
  Description of Artificial Sequence: Synthetic oligonucleotide
ucuuauaaacuuucuacag

SEQ ID NO: 3007472 - RNA, 19 nt, Artificial Sequence
  Description of Artificial Sequence: Synthetic oligonucleotide
uggaccaucccuuugaugc

SEQ ID NO: 3007473 - RNA, 19 nt, Artificial Sequence
  Description of Artificial Sequence: Synthetic oligonucleotide
ucacauuucaccuugacua

SEQ ID NO: 3007474 - RNA, 19 nt, Artificial Sequence
  Description of Artificial Sequence: Synthetic oligonucleotide
uucaugaacaaauaaaaua

SEQ ID NO: 3007475 - RNA, 19 nt, Artificial Sequence
  Description of Artificial Sequence: Synthetic oligonucleotide
uauauauacuuuaaccaga

SEQ ID NO: 3007476 - RNA, 19 nt, Artificial Sequence
  Description of Artificial Sequence: Synthetic oligonucleotide
aucccuuugaugcugaagg

SEQ ID NO: 3007477 - RNA, 19 nt, Artificial Sequence
  Description of Artificial Sequence: Synthetic oligonucleotide
uucaccuugacuauguacu

SEQ ID NO: 3007478 - RNA, 19 nt, Artificial Sequence
  Description of Artificial Sequence: Synthetic oligonucleotide
cuuauaaacuuucuacagg

SEQ ID NO: 3007479 - RNA, 19 nt, Artificial Sequence
  Description of Artificial Sequence: Synthetic oligonucleotide
ucacaugcaguccaugugg

SEQ ID NO: 3007480 - RNA, 19 nt, Artificial Sequence
  Description of Artificial Sequence: Synthetic oligonucleotide
uuuuaauagcuuaaucugu

SEQ ID NO: 3007481 - RNA, 19 nt, Artificial Sequence
  Description of Artificial Sequence: Synthetic oligonucleotide
aacuaaauucucuucacau

SEQ ID NO: 3007482 - RNA, 19 nt, Artificial Sequence
  Description of Artificial Sequence: Synthetic oligonucleotide
aauagcuuaaucuguacua

SEQ ID NO: 3007483 - RNA, 19 nt, Artificial Sequence
  Description of Artificial Sequence: Synthetic oligonucleotide
ugcaucuguugaaagaagg

SEQ ID NO: 3007484 - RNA, 19 nt, Artificial Sequence
  Description of Artificial Sequence: Synthetic oligonucleotide
aauuugcucaaauacuggu

SEQ ID NO: 3007485 - RNA, 19 nt, Artificial Sequence
  Description of Artificial Sequence: Synthetic oligonucleotide
aagguaaugcaucuguuga

SEQ ID NO: 3007486 - RNA, 19 nt, Artificial Sequence
  Description of Artificial Sequence: Synthetic oligonucleotide
aauacugguuuucuuauaa

SEQ ID NO: 3007487 - RNA, 19 nt, Artificial Sequence
  Description of Artificial Sequence: Synthetic oligonucleotide
uucuuauaaacuuucuaca

SEQ ID NO: 3007488 - RNA, 19 nt, Artificial Sequence
  Description of Artificial Sequence: Synthetic oligonucleotide
auaguuguauuuauauucc

SEQ ID NO: 3007489 - RNA, 19 nt, Artificial Sequence
  Description of Artificial Sequence: Synthetic oligonucleotide
auaaacuuucuacaggaug

SEQ ID NO: 3007490 - RNA, 19 nt, Artificial Sequence
  Description of Artificial Sequence: Synthetic oligonucleotide
cuuaaucuguacuacuggg

SEQ ID NO: 3007491 - RNA, 19 nt, Artificial Sequence
  Description of Artificial Sequence: Synthetic oligonucleotide
uguagauuuggauuacugc

SEQ ID NO: 3007492 - RNA, 19 nt, Artificial Sequence
  Description of Artificial Sequence: Synthetic oligonucleotide
auaaaauaacacauuagag

SEQ ID NO: 3007493 - RNA, 19 nt, Artificial Sequence
  Description of Artificial Sequence: Synthetic oligonucleotide
ugaaagaagggacuguaga

SEQ ID NO: 3007494 - RNA, 19 nt, Artificial Sequence
  Description of Artificial Sequence: Synthetic oligonucleotide
cauuagagaaagaaaguac

SEQ ID NO: 3007495 - RNA, 19 nt, Artificial Sequence
  Description of Artificial Sequence: Synthetic oligonucleotide
uacuuacggaacuucaggg

SEQ ID NO: 3007496 - RNA, 19 nt, Artificial Sequence
  Description of Artificial Sequence: Synthetic oligonucleotide
ugggauucuaacaugacau

SEQ ID NO: 3007497 - RNA, 19 nt, Artificial Sequence
  Description of Artificial Sequence: Synthetic oligonucleotide
agaaagaaaguacuuaaaa

SEQ ID NO: 3007498 - RNA, 19 nt, Artificial Sequence
  Description of Artificial Sequence: Synthetic oligonucleotide
cuugacuauguacuuacgg

SEQ ID NO: 3007499 - RNA, 19 nt, Artificial Sequence
  Description of Artificial Sequence: Synthetic oligonucleotide
uugacuauguacuuacgga

SEQ ID NO: 3007500 - RNA, 19 nt, Artificial Sequence
  Description of Artificial Sequence: Synthetic oligonucleotide
uguacuacugggauggcac

SEQ ID NO: 3007501 - RNA, 19 nt, Artificial Sequence
  Description of Artificial Sequence: Synthetic oligonucleotide
auuaguuucaugaacaaau

SEQ ID NO: 3007502 - RNA, 19 nt, Artificial Sequence
  Description of Artificial Sequence: Synthetic oligonucleotide
aaauucucuucacauuuca

SEQ ID NO: 3007503 - RNA, 19 nt, Artificial Sequence
  Description of Artificial Sequence: Synthetic oligonucleotide
uuuaaacuaaauucucuuc

SEQ ID NO: 3007504 - RNA, 19 nt, Artificial Sequence
  Description of Artificial Sequence: Synthetic oligonucleotide
uuuuaaacuaaauucucuu

SEQ ID NO: 3007505 - RNA, 19 nt, Artificial Sequence
  Description of Artificial Sequence: Synthetic oligonucleotide
uuuaauagcuuaaucugua

SEQ ID NO: 3007506 - RNA, 19 nt, Artificial Sequence
  Description of Artificial Sequence: Synthetic oligonucleotide
aaacuaaauucucuucaca

SEQ ID NO: 3007507 - RNA, 19 nt, Artificial Sequence
  Description of Artificial Sequence: Synthetic oligonucleotide
uguacuuacggaacuucag

SEQ ID NO: 3007508 - RNA, 19 nt, Artificial Sequence
  Description of Artificial Sequence: Synthetic oligonucleotide
accuugacuauguacuuac

SEQ ID NO: 3007509 - RNA, 19 nt, Artificial Sequence
  Description of Artificial Sequence: Synthetic oligonucleotide
ucaaauacugguuuucuua

SEQ ID NO: 3007510 - RNA, 19 nt, Artificial Sequence
  Description of Artificial Sequence: Synthetic oligonucleotide
aucuguacuacugggaugg

SEQ ID NO: 3007511 - RNA, 19 nt, Artificial Sequence
  Description of Artificial Sequence: Synthetic oligonucleotide
uuaaucuguacuacuggga

SEQ ID NO: 3007512 - RNA, 19 nt, Artificial Sequence
  Description of Artificial Sequence: Synthetic oligonucleotide
auucagugaguuuucugac

SEQ ID NO: 3007513 - RNA, 19 nt, Artificial Sequence
  Description of Artificial Sequence: Synthetic oligonucleotide
aaauaguuguauuuauauu

SEQ ID NO: 3007514 - RNA, 19 nt, Artificial Sequence
  Description of Artificial Sequence: Synthetic oligonucleotide
agagaaagaaaguacuuaa

SEQ ID NO: 3007515 - RNA, 19 nt, Artificial Sequence
  Description of Artificial Sequence: Synthetic oligonucleotide
uucucuucacauuucaccu

SEQ ID NO: 3007516 - RNA, 19 nt, Artificial Sequence
  Description of Artificial Sequence: Synthetic oligonucleotide
acuuuaaccagauuaguuu

SEQ ID NO: 3007517 - RNA, 19 nt, Artificial Sequence
  Description of Artificial Sequence: Synthetic oligonucleotide
aaugcaucuguugaaagaa

SEQ ID NO: 3007518 - RNA, 19 nt, Artificial Sequence
  Description of Artificial Sequence: Synthetic oligonucleotide
uaaacuaaauucucuucac

SEQ ID NO: 3007519 - RNA, 19 nt, Artificial Sequence
  Description of Artificial Sequence: Synthetic oligonucleotide
auauuccacaauuugcuca

SEQ ID NO: 3007520 - RNA, 19 nt, Artificial Sequence
  Description of Artificial Sequence: Synthetic oligonucleotide
auuagagaaagaaaguacu

SEQ ID NO: 3007521 - RNA, 19 nt, Artificial Sequence
  Description of Artificial Sequence: Synthetic oligonucleotide
uuucaugaacaaauaaaau

SEQ ID NO: 3007522 - RNA, 19 nt, Artificial Sequence
  Description of Artificial Sequence: Synthetic oligonucleotide
ucuguugaaagaagggacu

SEQ ID NO: 3007523 - RNA, 19 nt, Artificial Sequence
  Description of Artificial Sequence: Synthetic oligonucleotide
uggauuacugcucucugca

SEQ ID NO: 3007524 - RNA, 19 nt, Artificial Sequence
  Description of Artificial Sequence: Synthetic oligonucleotide
uaacacauuagagaaagaa

SEQ ID NO: 3007525 - RNA, 19 nt, Artificial Sequence
  Description of Artificial Sequence: Synthetic oligonucleotide
ucagugaguuuucugacgu

SEQ ID NO: 3007526 - RNA, 19 nt, Artificial Sequence
  Description of Artificial Sequence: Synthetic oligonucleotide
uacugguuuucuuauaaac

SEQ ID NO: 3007527 - RNA, 19 nt, Artificial Sequence
  Description of Artificial Sequence: Synthetic oligonucleotide
cuuuaaccagauuaguuuc

SEQ ID NO: 3007528 - RNA, 19 nt, Artificial Sequence
  Description of Artificial Sequence: Synthetic oligonucleotide
guuguauuuauauuccaca

SEQ ID NO: 3007529 - RNA, 19 nt, Artificial Sequence
  Description of Artificial Sequence: Synthetic oligonucleotide
auucuaacaugacauucag

SEQ ID NO: 3007530 - RNA, 19 nt, Artificial Sequence
  Description of Artificial Sequence: Synthetic oligonucleotide
auggcaccuggucacaugc

SEQ ID NO: 3007531 - RNA, 19 nt, Artificial Sequence
  Description of Artificial Sequence: Synthetic oligonucleotide
uucagugaguuuucugacg

SEQ ID NO: 3007532 - RNA, 19 nt, Artificial Sequence
  Description of Artificial Sequence: Synthetic oligonucleotide
uaaucuguacuacugggau

SEQ ID NO: 3007533 - RNA, 19 nt, Artificial Sequence
  Description of Artificial Sequence: Synthetic oligonucleotide
uuugcucaaauacugguuu

SEQ ID NO: 3007534 - RNA, 19 nt, Artificial Sequence
  Description of Artificial Sequence: Synthetic oligonucleotide
guacuuacggaacuucagg

SEQ ID NO: 3007535 - RNA, 19 nt, Artificial Sequence
  Description of Artificial Sequence: Synthetic oligonucleotide
auagcuuaaucuguacuac

SEQ ID NO: 3007536 - RNA, 19 nt, Artificial Sequence
  Description of Artificial Sequence: Synthetic oligonucleotide
uguauuuauauuccacaau

SEQ ID NO: 3007537 - RNA, 19 nt, Artificial Sequence
  Description of Artificial Sequence: Synthetic oligonucleotide
aguuguauuuauauuccac

SEQ ID NO: 3007538 - RNA, 19 nt, Artificial Sequence
  Description of Artificial Sequence: Synthetic oligonucleotide
aucuguugaaagaagggac

SEQ ID NO: 3007539 - RNA, 19 nt, Artificial Sequence
  Description of Artificial Sequence: Synthetic oligonucleotide
caugaacaaauaaaauaac

SEQ ID NO: 3007540 - RNA, 19 nt, Artificial Sequence
  Description of Artificial Sequence: Synthetic oligonucleotide
uuguauuuauauuccacaa

SEQ ID NO: 3007541 - RNA, 19 nt, Artificial Sequence
  Description of Artificial Sequence: Synthetic oligonucleotide
aacuucagggaaauaguuc

SEQ ID NO: 3007542 - RNA, 19 nt, Artificial Sequence
  Description of Artificial Sequence: Synthetic oligonucleotide
uaaugcaucuguugaaaga

SEQ ID NO: 3007543 - RNA, 19 nt, Artificial Sequence
  Description of Artificial Sequence: Synthetic oligonucleotide
uuuaaccagauuaguuuca

SEQ ID NO: 3007544 - RNA, 19 nt, Artificial Sequence
  Description of Artificial Sequence: Synthetic oligonucleotide
aagaagggacuguagauuu

SEQ ID NO: 3007545 - RNA, 19 nt, Artificial Sequence
  Description of Artificial Sequence: Synthetic oligonucleotide
acaauuugcucaaauacug

SEQ ID NO: 3007546 - RNA, 19 nt, Artificial Sequence
  Description of Artificial Sequence: Synthetic oligonucleotide
uucacauuucaccuugacu

SEQ ID NO: 3007547 - RNA, 19 nt, Artificial Sequence
  Description of Artificial Sequence: Synthetic oligonucleotide
agugaguuuucugacgugg

SEQ ID NO: 3007548 - RNA, 19 nt, Artificial Sequence
  Description of Artificial Sequence: Synthetic oligonucleotide
ugacuauguacuuacggaa

SEQ ID NO: 3007549 - RNA, 19 nt, Artificial Sequence
  Description of Artificial Sequence: Synthetic oligonucleotide
aaucuguacuacugggaug

SEQ ID NO: 3007550 - RNA, 19 nt, Artificial Sequence
  Description of Artificial Sequence: Synthetic oligonucleotide
aguuuucugacguggacca

SEQ ID NO: 3007551 - RNA, 19 nt, Artificial Sequence
  Description of Artificial Sequence: Synthetic oligonucleotide
caaauaaaauaacacauua

SEQ ID NO: 3007552 - RNA, 19 nt, Artificial Sequence
  Description of Artificial Sequence: Synthetic oligonucleotide
caauuugcucaaauacugg

SEQ ID NO: 3007553 - RNA, 19 nt, Artificial Sequence
  Description of Artificial Sequence: Synthetic oligonucleotide
aauucucuucacauuucac

SEQ ID NO: 3007554 - RNA, 19 nt, Artificial Sequence
  Description of Artificial Sequence: Synthetic oligonucleotide
uauuuauauuccacaauuu

SEQ ID NO: 3007555 - RNA, 19 nt, Artificial Sequence
  Description of Artificial Sequence: Synthetic oligonucleotide
ucugacguggaccaucccu

SEQ ID NO: 3007556 - RNA, 19 nt, Artificial Sequence
  Description of Artificial Sequence: Synthetic oligonucleotide
uuuggauuacugcucucug

SEQ ID NO: 3007557 - RNA, 19 nt, Artificial Sequence
  Description of Artificial Sequence: Synthetic oligonucleotide
gaagggacuguagauuugg

SEQ ID NO: 3007558 - RNA, 19 nt, Artificial Sequence
  Description of Artificial Sequence: Synthetic oligonucleotide
cauucagugaguuuucuga

SEQ ID NO: 3007559 - RNA, 19 nt, Artificial Sequence
  Description of Artificial Sequence: Synthetic oligonucleotide
uuagagaaagaaaguacuu

SEQ ID NO: 3007560 - RNA, 19 nt, Artificial Sequence
  Description of Artificial Sequence: Synthetic oligonucleotide
guuucaugaacaaauaaaa

SEQ ID NO: 3007561 - RNA, 19 nt, Artificial Sequence
  Description of Artificial Sequence: Synthetic oligonucleotide
uagauuuggauuacugcuc

SEQ ID NO: 3007562 - RNA, 19 nt, Artificial Sequence
  Description of Artificial Sequence: Synthetic oligonucleotide
agggaaauaguucuguuuu

SEQ ID NO: 3007563 - RNA, 19 nt, Artificial Sequence
  Description of Artificial Sequence: Synthetic oligonucleotide
uaguuucaugaacaaauaa

SEQ ID NO: 3007564 - RNA, 19 nt, Artificial Sequence
  Description of Artificial Sequence: Synthetic oligonucleotide
uuaauagcuuaaucuguac

SEQ ID NO: 3007565 - RNA, 19 nt, Artificial Sequence
  Description of Artificial Sequence: Synthetic oligonucleotide
cagauuaguuucaugaaca

SEQ ID NO: 3007566 - RNA, 19 nt, Artificial Sequence
  Description of Artificial Sequence: Synthetic oligonucleotide
acuauguacuuacggaacu

SEQ ID NO: 3007567 - RNA, 19 nt, Artificial Sequence
  Description of Artificial Sequence: Synthetic oligonucleotide
uacuuuaaccagauuaguu

SEQ ID NO: 3007568 - RNA, 19 nt, Artificial Sequence
  Description of Artificial Sequence: Synthetic oligonucleotide
aacacauuagagaaagaaa

SEQ ID NO: 3007569 - RNA, 19 nt, Artificial Sequence
  Description of Artificial Sequence: Synthetic oligonucleotide
uuaguuucaugaacaaaua

SEQ ID NO: 3007570 - RNA, 19 nt, Artificial Sequence
  Description of Artificial Sequence: Synthetic oligonucleotide
uuucaccuugacuauguac

SEQ ID NO: 3007571 - RNA, 19 nt, Artificial Sequence
  Description of Artificial Sequence: Synthetic oligonucleotide
uuucugacguggaccaucc

SEQ ID NO: 3007572 - RNA, 19 nt, Artificial Sequence
  Description of Artificial Sequence: Synthetic oligonucleotide
uauuccacaauuugcucaa

SEQ ID NO: 3007573 - RNA, 19 nt, Artificial Sequence
  Description of Artificial Sequence: Synthetic oligonucleotide
ugaugcugaagguaaugca

SEQ ID NO: 3007574 - RNA, 19 nt, Artificial Sequence
  Description of Artificial Sequence: Synthetic oligonucleotide
agauuuggauuacugcucu

SEQ ID NO: 3007575 - RNA, 19 nt, Artificial Sequence
  Description of Artificial Sequence: Synthetic oligonucleotide
gauucuaacaugacauuca

SEQ ID NO: 3007576 - RNA, 19 nt, Artificial Sequence
  Description of Artificial Sequence: Synthetic oligonucleotide
uugaugcugaagguaaugc

SEQ ID NO: 3007577 - RNA, 19 nt, Artificial Sequence
  Description of Artificial Sequence: Synthetic oligonucleotide
guaaugcaucuguugaaag

SEQ ID NO: 3007578 - RNA, 19 nt, Artificial Sequence
  Description of Artificial Sequence: Synthetic oligonucleotide
augacauucagugaguuuu

SEQ ID NO: 3007579 - RNA, 19 nt, Artificial Sequence
  Description of Artificial Sequence: Synthetic oligonucleotide
uccaugugggauucuaaca

SEQ ID NO: 3007580 - RNA, 19 nt, Artificial Sequence
  Description of Artificial Sequence: Synthetic oligonucleotide
acugggauggcaccugguc

SEQ ID NO: 3007581 - RNA, 19 nt, Artificial Sequence
  Description of Artificial Sequence: Synthetic oligonucleotide
gauuacugcucucugcauc

SEQ ID NO: 3007582 - RNA, 19 nt, Artificial Sequence
  Description of Artificial Sequence: Synthetic oligonucleotide
aaagaagggacuguagauu

SEQ ID NO: 3007583 - RNA, 19 nt, Artificial Sequence
  Description of Artificial Sequence: Synthetic oligonucleotide
gaguuuucugacguggacc

SEQ ID NO: 3007584 - RNA, 19 nt, Artificial Sequence
  Description of Artificial Sequence: Synthetic oligonucleotide
uaaauucucuucacauuuc

SEQ ID NO: 3007585 - RNA, 19 nt, Artificial Sequence
  Description of Artificial Sequence: Synthetic oligonucleotide
uuggauuacugcucucugc

SEQ ID NO: 3007586 - RNA, 19 nt, Artificial Sequence
  Description of Artificial Sequence: Synthetic oligonucleotide
cuguagauuuggauuacug

SEQ ID NO: 3007587 - RNA, 19 nt, Artificial Sequence
  Description of Artificial Sequence: Synthetic oligonucleotide
uuugaugcugaagguaaug

SEQ ID NO: 3007588 - RNA, 19 nt, Artificial Sequence
  Description of Artificial Sequence: Synthetic oligonucleotide
guauuuauauuccacaauu

SEQ ID NO: 3007589 - RNA, 19 nt, Artificial Sequence
  Description of Artificial Sequence: Synthetic oligonucleotide
acugguuuucuuauaaacu

SEQ ID NO: 3007590 - RNA, 19 nt, Artificial Sequence
  Description of Artificial Sequence: Synthetic oligonucleotide
ugaguuuucugacguggac

SEQ ID NO: 3007591 - RNA, 19 nt, Artificial Sequence
  Description of Artificial Sequence: Synthetic oligonucleotide
acauuagagaaagaaagua

SEQ ID NO: 3007592 - RNA, 19 nt, Artificial Sequence
  Description of Artificial Sequence: Synthetic oligonucleotide
uauaaacuuucuacaggau

SEQ ID NO: 3007593 - RNA, 19 nt, Artificial Sequence
  Description of Artificial Sequence: Synthetic oligonucleotide
acuaaauucucuucacauu

SEQ ID NO: 3007594 - RNA, 19 nt, Artificial Sequence
  Description of Artificial Sequence: Synthetic oligonucleotide
uaguuguauuuauauucca

SEQ ID NO: 3007595 - RNA, 19 nt, Artificial Sequence
  Description of Artificial Sequence: Synthetic oligonucleotide
acuuacggaacuucaggga

SEQ ID NO: 3007596 - RNA, 19 nt, Artificial Sequence
  Description of Artificial Sequence: Synthetic oligonucleotide
uagagaaagaaaguacuua

SEQ ID NO: 3007597 - RNA, 19 nt, Artificial Sequence
  Description of Artificial Sequence: Synthetic oligonucleotide
gcuuaaucuguacuacugg

SEQ ID NO: 3007598 - RNA, 19 nt, Artificial Sequence
  Description of Artificial Sequence: Synthetic oligonucleotide
acugcucucugcaucuucc

SEQ ID NO: 3007599 - RNA, 19 nt, Artificial Sequence
  Description of Artificial Sequence: Synthetic oligonucleotide
cucuucacauuucaccuug

SEQ ID NO: 3007600 - RNA, 19 nt, Artificial Sequence
  Description of Artificial Sequence: Synthetic oligonucleotide
ccacaauuugcucaaauac

SEQ ID NO: 3007601 - RNA, 19 nt, Artificial Sequence
  Description of Artificial Sequence: Synthetic oligonucleotide
auuuggauuacugcucucu

SEQ ID NO: 3007602 - RNA, 19 nt, Artificial Sequence
  Description of Artificial Sequence: Synthetic oligonucleotide
acauucagugaguuuucug

SEQ ID NO: 3007603 - RNA, 19 nt, Artificial Sequence
  Description of Artificial Sequence: Synthetic oligonucleotide
agauuaguuucaugaacaa

SEQ ID NO: 3007604 - RNA, 19 nt, Artificial Sequence
  Description of Artificial Sequence: Synthetic oligonucleotide
ugguuuucuuauaaacuuu

SEQ ID NO: 3007605 - RNA, 19 nt, Artificial Sequence
  Description of Artificial Sequence: Synthetic oligonucleotide
ugcugaagguaaugcaucu

SEQ ID NO: 3007606 - RNA, 19 nt, Artificial Sequence
  Description of Artificial Sequence: Synthetic oligonucleotide
gacuauguacuuacggaac

SEQ ID NO: 3007607 - RNA, 19 nt, Artificial Sequence
  Description of Artificial Sequence: Synthetic oligonucleotide
uucuaacaugacauucagu

SEQ ID NO: 3007608 - RNA, 19 nt, Artificial Sequence
  Description of Artificial Sequence: Synthetic oligonucleotide
ugcucucugcaucuuccag

SEQ ID NO: 3007609 - RNA, 19 nt, Artificial Sequence
  Description of Artificial Sequence: Synthetic oligonucleotide
cacaugcaguccauguggg

SEQ ID NO: 3007610 - RNA, 19 nt, Artificial Sequence
  Description of Artificial Sequence: Synthetic oligonucleotide
agcuuaaucuguacuacug

SEQ ID NO: 3007611 - RNA, 19 nt, Artificial Sequence
  Description of Artificial Sequence: Synthetic oligonucleotide
uagcuuaaucuguacuacu

SEQ ID NO: 3007612 - RNA, 19 nt, Artificial Sequence
  Description of Artificial Sequence: Synthetic oligonucleotide
aaauaacacauuagagaaa

SEQ ID NO: 3007613 - RNA, 19 nt, Artificial Sequence
  Description of Artificial Sequence: Synthetic oligonucleotide
uauguacuuacggaacuuc

SEQ ID NO: 3007614 - RNA, 19 nt, Artificial Sequence
  Description of Artificial Sequence: Synthetic oligonucleotide
caugugggauucuaacaug

SEQ ID NO: 3007615 - RNA, 19 nt, Artificial Sequence
  Description of Artificial Sequence: Synthetic oligonucleotide
ugugggauucuaacaugac

SEQ ID NO: 3007616 - RNA, 19 nt, Artificial Sequence
  Description of Artificial Sequence: Synthetic oligonucleotide
auauauacuuuaaccagau

SEQ ID NO: 3007617 - RNA, 19 nt, Artificial Sequence
  Description of Artificial Sequence: Synthetic oligonucleotide
ugggauggcaccuggucac

SEQ ID NO: 3007618 - RNA, 19 nt, Artificial Sequence
  Description of Artificial Sequence: Synthetic oligonucleotide
gaaagaagggacuguagau

SEQ ID NO: 3007619 - RNA, 19 nt, Artificial Sequence
  Description of Artificial Sequence: Synthetic oligonucleotide
cuaacaugacauucaguga

SEQ ID NO: 3007620 - RNA, 19 nt, Artificial Sequence
  Description of Artificial Sequence: Synthetic oligonucleotide
uaaccagauuaguuucaug

SEQ ID NO: 3007621 - RNA, 19 nt, Artificial Sequence
  Description of Artificial Sequence: Synthetic oligonucleotide
gucacaugcaguccaugug

SEQ ID NO: 3007622 - RNA, 19 nt, Artificial Sequence
  Description of Artificial Sequence: Synthetic oligonucleotide
ugaagguaaugcaucuguu

SEQ ID NO: 3007623 - RNA, 19 nt, Artificial Sequence
  Description of Artificial Sequence: Synthetic oligonucleotide
accagauuaguuucaugaa

SEQ ID NO: 3007624 - RNA, 19 nt, Artificial Sequence
  Description of Artificial Sequence: Synthetic oligonucleotide
uuacggaacuucagggaaa

SEQ ID NO: 3007625 - RNA, 19 nt, Artificial Sequence
  Description of Artificial Sequence: Synthetic oligonucleotide
augcugaagguaaugcauc

SEQ ID NO: 3007626 - RNA, 19 nt, Artificial Sequence
  Description of Artificial Sequence: Synthetic oligonucleotide
cuuacggaacuucagggaa

SEQ ID NO: 3007627 - RNA, 19 nt, Artificial Sequence
  Description of Artificial Sequence: Synthetic oligonucleotide
uuccacaauuugcucaaau

SEQ ID NO: 3007628 - RNA, 19 nt, Artificial Sequence
  Description of Artificial Sequence: Synthetic oligonucleotide
uuuucugacguggaccauc

SEQ ID NO: 3007629 - RNA, 19 nt, Artificial Sequence
  Description of Artificial Sequence: Synthetic oligonucleotide
agaaaauaauauauauaua

SEQ ID NO: 3007630 - RNA, 19 nt, Artificial Sequence
  Description of Artificial Sequence: Synthetic oligonucleotide
gugggauucuaacaugaca

SEQ ID NO: 3007631 - RNA, 19 nt, Artificial Sequence
  Description of Artificial Sequence: Synthetic oligonucleotide
uguugaaagaagggacugu

SEQ ID NO: 3007632 - RNA, 19 nt, Artificial Sequence
  Description of Artificial Sequence: Synthetic oligonucleotide
auacuuuaaccagauuagu

SEQ ID NO: 3007633 - RNA, 19 nt, Artificial Sequence
  Description of Artificial Sequence: Synthetic oligonucleotide
aacaugacauucagugagu

SEQ ID NO: 3007634 - RNA, 19 nt, Artificial Sequence
  Description of Artificial Sequence: Synthetic oligonucleotide
guccaugugggauucuaac

SEQ ID NO: 3007635 - RNA, 19 nt, Artificial Sequence
  Description of Artificial Sequence: Synthetic oligonucleotide
ugacauucagugaguuuuc

SEQ ID NO: 3007636 - RNA, 19 nt, Artificial Sequence
  Description of Artificial Sequence: Synthetic oligonucleotide
uuaaccagauuaguuucau

SEQ ID NO: 3007637 - RNA, 19 nt, Artificial Sequence
  Description of Artificial Sequence: Synthetic oligonucleotide
cacaauuugcucaaauacu

SEQ ID NO: 3007638 - RNA, 19 nt, Artificial Sequence
  Description of Artificial Sequence: Synthetic oligonucleotide
uauauacuuuaaccagauu

SEQ ID NO: 3007639 - RNA, 19 nt, Artificial Sequence
  Description of Artificial Sequence: Synthetic oligonucleotide
cuucagggaaauaguucug

SEQ ID NO: 3007640 - RNA, 19 nt, Artificial Sequence
  Description of Artificial Sequence: Synthetic oligonucleotide
cuucacauuucaccuugac

SEQ ID NO: 3007641 - RNA, 19 nt, Artificial Sequence
  Description of Artificial Sequence: Synthetic oligonucleotide
cuguugaaagaagggacug

SEQ ID NO: 3007642 - RNA, 19 nt, Artificial Sequence
  Description of Artificial Sequence: Synthetic oligonucleotide
caucuguugaaagaaggga

SEQ ID NO: 3007643 - RNA, 19 nt, Artificial Sequence
  Description of Artificial Sequence: Synthetic oligonucleotide
agggacuguagauuuggau

SEQ ID NO: 3007644 - RNA, 19 nt, Artificial Sequence
  Description of Artificial Sequence: Synthetic oligonucleotide
ccagauuaguuucaugaac

SEQ ID NO: 3007645 - RNA, 19 nt, Artificial Sequence
  Description of Artificial Sequence: Synthetic oligonucleotide
gcaucuguugaaagaaggg

SEQ ID NO: 3007646 - RNA, 19 nt, Artificial Sequence
  Description of Artificial Sequence: Synthetic oligonucleotide
agguaaugcaucuguugaa

SEQ ID NO: 3007647 - RNA, 19 nt, Artificial Sequence
  Description of Artificial Sequence: Synthetic oligonucleotide
auacugguuuucuuauaaa

SEQ ID NO: 3007648 - RNA, 19 nt, Artificial Sequence
  Description of Artificial Sequence: Synthetic oligonucleotide
ucuucacauuucaccuuga

SEQ ID NO: 3007649 - RNA, 19 nt, Artificial Sequence
  Description of Artificial Sequence: Synthetic oligonucleotide
caccuggucacaugcaguc

SEQ ID NO: 3007650 - RNA, 19 nt, Artificial Sequence
  Description of Artificial Sequence: Synthetic oligonucleotide
ugcucaaauacugguuuuc

SEQ ID NO: 3007651 - RNA, 19 nt, Artificial Sequence
  Description of Artificial Sequence: Synthetic oligonucleotide
gauggcaccuggucacaug

SEQ ID NO: 3007652 - RNA, 19 nt, Artificial Sequence
  Description of Artificial Sequence: Synthetic oligonucleotide
gguuuucuuauaaacuuuc

SEQ ID NO: 3007653 - RNA, 19 nt, Artificial Sequence
  Description of Artificial Sequence: Synthetic oligonucleotide
augugggauucuaacauga

SEQ ID NO: 3007654 - RNA, 19 nt, Artificial Sequence
  Description of Artificial Sequence: Synthetic oligonucleotide
acuuucuacaggauguuuu

SEQ ID NO: 3007655 - RNA, 19 nt, Artificial Sequence
  Description of Artificial Sequence: Synthetic oligonucleotide
acguggaccaucccuuuga

SEQ ID NO: 3007656 - RNA, 19 nt, Artificial Sequence
  Description of Artificial Sequence: Synthetic oligonucleotide
ucagggaaauaguucuguu

SEQ ID NO: 3007657 - RNA, 19 nt, Artificial Sequence
  Description of Artificial Sequence: Synthetic oligonucleotide
ggauucuaacaugacauuc

SEQ ID NO: 3007658 - RNA, 19 nt, Artificial Sequence
  Description of Artificial Sequence: Synthetic oligonucleotide
gaugcugaagguaaugcau

SEQ ID NO: 3007659 - RNA, 19 nt, Artificial Sequence
  Description of Artificial Sequence: Synthetic oligonucleotide
ucccuuugaugcugaaggu

SEQ ID NO: 3007660 - RNA, 19 nt, Artificial Sequence
  Description of Artificial Sequence: Synthetic oligonucleotide
guacuacugggauggcacc

SEQ ID NO: 3007661 - RNA, 19 nt, Artificial Sequence
  Description of Artificial Sequence: Synthetic oligonucleotide
aaacuuucuacaggauguu

SEQ ID NO: 3007662 - RNA, 19 nt, Artificial Sequence
  Description of Artificial Sequence: Synthetic oligonucleotide
cugguuuucuuauaaacuu

SEQ ID NO: 3007663 - RNA, 19 nt, Artificial Sequence
  Description of Artificial Sequence: Synthetic oligonucleotide
cacauuagagaaagaaagu

SEQ ID NO: 3007664 - RNA, 19 nt, Artificial Sequence
  Description of Artificial Sequence: Synthetic oligonucleotide
acauuucaccuugacuaug

SEQ ID NO: 3007665 - RNA, 19 nt, Artificial Sequence
  Description of Artificial Sequence: Synthetic oligonucleotide
guugaaagaagggacugua

SEQ ID NO: 3007666 - RNA, 19 nt, Artificial Sequence
  Description of Artificial Sequence: Synthetic oligonucleotide
ggacuguagauuuggauua

SEQ ID NO: 3007667 - RNA, 19 nt, Artificial Sequence
  Description of Artificial Sequence: Synthetic oligonucleotide
accuggucacaugcagucc

SEQ ID NO: 3007668 - RNA, 19 nt, Artificial Sequence
  Description of Artificial Sequence: Synthetic oligonucleotide
auguacuuacggaacuuca

SEQ ID NO: 3007669 - RNA, 19 nt, Artificial Sequence
  Description of Artificial Sequence: Synthetic oligonucleotide
aacuuucuacaggauguuu

SEQ ID NO: 3007670 - RNA, 19 nt, Artificial Sequence
  Description of Artificial Sequence: Synthetic oligonucleotide
ucucuucacauuucaccuu

SEQ ID NO: 3007671 - RNA, 19 nt, Artificial Sequence
  Description of Artificial Sequence: Synthetic oligonucleotide
gauuuggauuacugcucuc

SEQ ID NO: 3007672 - RNA, 19 nt, Artificial Sequence
  Description of Artificial Sequence: Synthetic oligonucleotide
ucaccuugacuauguacuu

SEQ ID NO: 3007673 - RNA, 19 nt, Artificial Sequence
  Description of Artificial Sequence: Synthetic oligonucleotide
auuugcucaaauacugguu

SEQ ID NO: 3007674 - RNA, 19 nt, Artificial Sequence
  Description of Artificial Sequence: Synthetic oligonucleotide
cugaagguaaugcaucugu

SEQ ID NO: 3007675 - RNA, 19 nt, Artificial Sequence
  Description of Artificial Sequence: Synthetic oligonucleotide
uacuacugggauggcaccu

SEQ ID NO: 3007676 - RNA, 19 nt, Artificial Sequence
  Description of Artificial Sequence: Synthetic oligonucleotide
gacguggaccaucccuuug

SEQ ID NO: 3007677 - RNA, 19 nt, Artificial Sequence
  Description of Artificial Sequence: Synthetic oligonucleotide
uugcucaaauacugguuuu

SEQ ID NO: 3007678 - RNA, 19 nt, Artificial Sequence
  Description of Artificial Sequence: Synthetic oligonucleotide
uacggaacuucagggaaau

SEQ ID NO: 3007679 - RNA, 19 nt, Artificial Sequence
  Description of Artificial Sequence: Synthetic oligonucleotide
caaauacugguuuucuuau

SEQ ID NO: 3007680 - RNA, 19 nt, Artificial Sequence
  Description of Artificial Sequence: Synthetic oligonucleotide
cggaacuucagggaaauag

SEQ ID NO: 3007681 - RNA, 19 nt, Artificial Sequence
  Description of Artificial Sequence: Synthetic oligonucleotide
acuguagauuuggauuacu

SEQ ID NO: 3007682 - RNA, 19 nt, Artificial Sequence
  Description of Artificial Sequence: Synthetic oligonucleotide
gacuguagauuuggauuac

SEQ ID NO: 3007683 - RNA, 19 nt, Artificial Sequence
  Description of Artificial Sequence: Synthetic oligonucleotide
caucccuuugaugcugaag

SEQ ID NO: 3007684 - RNA, 19 nt, Artificial Sequence
  Description of Artificial Sequence: Synthetic oligonucleotide
acuacugggauggcaccug

SEQ ID NO: 3007685 - RNA, 19 nt, Artificial Sequence
  Description of Artificial Sequence: Synthetic oligonucleotide
augcaucuguugaaagaag

SEQ ID NO: 3007686 - RNA, 19 nt, Artificial Sequence
  Description of Artificial Sequence: Synthetic oligonucleotide
cauuucaccuugacuaugu

SEQ ID NO: 3007687 - RNA, 19 nt, Artificial Sequence
  Description of Artificial Sequence: Synthetic oligonucleotide
gaccaucccuuugaugcug

SEQ ID NO: 3007688 - RNA, 19 nt, Artificial Sequence
  Description of Artificial Sequence: Synthetic oligonucleotide
ccuuugaugcugaagguaa

SEQ ID NO: 3007689 - RNA, 19 nt, Artificial Sequence
  Description of Artificial Sequence: Synthetic oligonucleotide
gguaaugcaucuguugaaa

SEQ ID NO: 3007690 - RNA, 19 nt, Artificial Sequence
  Description of Artificial Sequence: Synthetic oligonucleotide
guggaccaucccuuugaug

SEQ ID NO: 3007691 - RNA, 19 nt, Artificial Sequence
  Description of Artificial Sequence: Synthetic oligonucleotide
augcaguccaugugggauu

SEQ ID NO: 3007692 - RNA, 19 nt, Artificial Sequence
  Description of Artificial Sequence: Synthetic oligonucleotide
uacugggauggcaccuggu

SEQ ID NO: 3007693 - RNA, 19 nt, Artificial Sequence
  Description of Artificial Sequence: Synthetic oligonucleotide
ugcaguccaugugggauuc

SEQ ID NO: 3007694 - RNA, 19 nt, Artificial Sequence
  Description of Artificial Sequence: Synthetic oligonucleotide
cagugaguuuucugacgug

SEQ ID NO: 3007695 - RNA, 19 nt, Artificial Sequence
  Description of Artificial Sequence: Synthetic oligonucleotide
agaagggacuguagauuug

SEQ ID NO: 3007696 - RNA, 19 nt, Artificial Sequence
  Description of Artificial Sequence: Synthetic oligonucleotide
aagggacuguagauuugga

SEQ ID NO: 3007697 - RNA, 19 nt, Artificial Sequence
  Description of Artificial Sequence: Synthetic oligonucleotide
auuucaccuugacuaugua

SEQ ID NO: 3007698 - RNA, 19 nt, Artificial Sequence
  Description of Artificial Sequence: Synthetic oligonucleotide
auaacacauuagagaaaga

SEQ ID NO: 3007699 - RNA, 19 nt, Artificial Sequence
  Description of Artificial Sequence: Synthetic oligonucleotide
gggacuguagauuuggauu

SEQ ID NO: 3007700 - RNA, 19 nt, Artificial Sequence
  Description of Artificial Sequence: Synthetic oligonucleotide
uucugacguggaccauccc

SEQ ID NO: 3007701 - RNA, 19 nt, Artificial Sequence
  Description of Artificial Sequence: Synthetic oligonucleotide
acaugacauucagugaguu

SEQ ID NO: 3007702 - RNA, 19 nt, Artificial Sequence
  Description of Artificial Sequence: Synthetic oligonucleotide
gaacuucagggaaauaguu

SEQ ID NO: 3007703 - RNA, 19 nt, Artificial Sequence
  Description of Artificial Sequence: Synthetic oligonucleotide
ccuugacuauguacuuacg

SEQ ID NO: 3007704 - RNA, 19 nt, Artificial Sequence
  Description of Artificial Sequence: Synthetic oligonucleotide
ucuguacuacugggauggc

SEQ ID NO: 3007705 - RNA, 19 nt, Artificial Sequence
  Description of Artificial Sequence: Synthetic oligonucleotide
cucugcaucuuccaguuuu

SEQ ID NO: 3007706 - RNA, 19 nt, Artificial Sequence
  Description of Artificial Sequence: Synthetic oligonucleotide
gugaguuuucugacgugga

SEQ ID NO: 3007707 - RNA, 19 nt, Artificial Sequence
  Description of Artificial Sequence: Synthetic oligonucleotide
ugacguggaccaucccuuu

SEQ ID NO: 3007708 - RNA, 19 nt, Artificial Sequence
  Description of Artificial Sequence: Synthetic oligonucleotide
ggaacuucagggaaauagu

SEQ ID NO: 3007709 - RNA, 19 nt, Artificial Sequence
  Description of Artificial Sequence: Synthetic oligonucleotide
ggucacaugcaguccaugu

SEQ ID NO: 3007710 - RNA, 19 nt, Artificial Sequence
  Description of Artificial Sequence: Synthetic oligonucleotide
cuguacuacugggauggca

SEQ ID NO: 3007711 - RNA, 19 nt, Artificial Sequence
  Description of Artificial Sequence: Synthetic oligonucleotide
cagggaaauaguucuguuu

SEQ ID NO: 3007712 - RNA, 19 nt, Artificial Sequence
  Description of Artificial Sequence: Synthetic oligonucleotide
aguccaugugggauucuaa

SEQ ID NO: 3007713 - RNA, 19 nt, Artificial Sequence
  Description of Artificial Sequence: Synthetic oligonucleotide
gcugaagguaaugcaucug

SEQ ID NO: 3007714 - RNA, 19 nt, Artificial Sequence
  Description of Artificial Sequence: Synthetic oligonucleotide
caugcaguccaugugggau

SEQ ID NO: 3007715 - RNA, 19 nt, Artificial Sequence
  Description of Artificial Sequence: Synthetic oligonucleotide
cacauuucaccuugacuau

SEQ ID NO: 3007716 - RNA, 19 nt, Artificial Sequence
  Description of Artificial Sequence: Synthetic oligonucleotide
cucaaauacugguuuucuu

SEQ ID NO: 3007717 - RNA, 19 nt, Artificial Sequence
  Description of Artificial Sequence: Synthetic oligonucleotide
ucucugcaucuuccaguuu

SEQ ID NO: 3007718 - RNA, 19 nt, Artificial Sequence
  Description of Artificial Sequence: Synthetic oligonucleotide
ccuggucacaugcagucca

SEQ ID NO: 3007719 - RNA, 19 nt, Artificial Sequence
  Description of Artificial Sequence: Synthetic oligonucleotide
cugcucucugcaucuucca

SEQ ID NO: 3007720 - RNA, 19 nt, Artificial Sequence
  Description of Artificial Sequence: Synthetic oligonucleotide
cugacguggaccaucccuu

SEQ ID NO: 3007721 - RNA, 19 nt, Artificial Sequence
  Description of Artificial Sequence: Synthetic oligonucleotide
cuuugaugcugaagguaau

SEQ ID NO: 3007722 - RNA, 19 nt, Artificial Sequence
  Description of Artificial Sequence: Synthetic oligonucleotide
accaucccuuugaugcuga

SEQ ID NO: 3007723 - RNA, 19 nt, Artificial Sequence
  Description of Artificial Sequence: Synthetic oligonucleotide
caugacauucagugaguuu

SEQ ID NO: 3007724 - RNA, 19 nt, Artificial Sequence
  Description of Artificial Sequence: Synthetic oligonucleotide
ccaugugggauucuaacau

SEQ ID NO: 3007725 - RNA, 19 nt, Artificial Sequence
  Description of Artificial Sequence: Synthetic oligonucleotide
auuccacaauuugcucaaa

SEQ ID NO: 3007726 - RNA, 19 nt, Artificial Sequence
  Description of Artificial Sequence: Synthetic oligonucleotide
gcucaaauacugguuuucu

SEQ ID NO: 3007727 - RNA, 19 nt, Artificial Sequence
  Description of Artificial Sequence: Synthetic oligonucleotide
caccuugacuauguacuua

SEQ ID NO: 3007728 - RNA, 19 nt, Artificial Sequence
  Description of Artificial Sequence: Synthetic oligonucleotide
cuauguacuuacggaacuu

SEQ ID NO: 3007729 - RNA, 19 nt, Artificial Sequence
  Description of Artificial Sequence: Synthetic oligonucleotide
caguccaugugggauucua

SEQ ID NO: 3007730 - RNA, 19 nt, Artificial Sequence
  Description of Artificial Sequence: Synthetic oligonucleotide
gggauucuaacaugacauu

SEQ ID NO: 3007731 - RNA, 19 nt, Artificial Sequence
  Description of Artificial Sequence: Synthetic oligonucleotide
ggaccaucccuuugaugcu

SEQ ID NO: 3007732 - RNA, 19 nt, Artificial Sequence
  Description of Artificial Sequence: Synthetic oligonucleotide
ggauuacugcucucugcau

SEQ ID NO: 3007733 - RNA, 19 nt, Artificial Sequence
  Description of Artificial Sequence: Synthetic oligonucleotide
cuggucacaugcaguccau

SEQ ID NO: 3007734 - RNA, 19 nt, Artificial Sequence
  Description of Artificial Sequence: Synthetic oligonucleotide
acggaacuucagggaaaua

SEQ ID NO: 3007735 - RNA, 19 nt, Artificial Sequence
  Description of Artificial Sequence: Synthetic oligonucleotide
cccuuugaugcugaaggua

SEQ ID NO: 3007736 - RNA, 19 nt, Artificial Sequence
  Description of Artificial Sequence: Synthetic oligonucleotide
guuuucugacguggaccau

SEQ ID NO: 3007737 - RNA, 19 nt, Artificial Sequence
  Description of Artificial Sequence: Synthetic oligonucleotide
gggauggcaccuggucaca

SEQ ID NO: 3007738 - RNA, 19 nt, Artificial Sequence
  Description of Artificial Sequence: Synthetic oligonucleotide
gcaccuggucacaugcagu

SEQ ID NO: 3007739 - RNA, 19 nt, Artificial Sequence
  Description of Artificial Sequence: Synthetic oligonucleotide
ccaucccuuugaugcugaa

SEQ ID NO: 3007740 - RNA, 19 nt, Artificial Sequence
  Description of Artificial Sequence: Synthetic oligonucleotide
ggauggcaccuggucacau

SEQ ID NO: 3007741 - RNA, 19 nt, Artificial Sequence
  Description of Artificial Sequence: Synthetic oligonucleotide
gcaguccaugugggauucu

SEQ ID NO: 3007742 - RNA, 19 nt, Artificial Sequence
  Description of Artificial Sequence: Synthetic oligonucleotide
auuauauugagaaacagcc

SEQ ID NO: 3007743 - RNA, 19 nt, Artificial Sequence
  Description of Artificial Sequence: Synthetic oligonucleotide
aagaugauguaaugaaucc

SEQ ID NO: 3007744 - RNA, 19 nt, Artificial Sequence
  Description of Artificial Sequence: Synthetic oligonucleotide
aauuauauugagaaacagc

SEQ ID NO: 3007745 - RNA, 19 nt, Artificial Sequence
  Description of Artificial Sequence: Synthetic oligonucleotide
uguaaugaaucccaaacag

SEQ ID NO: 3007746 - RNA, 19 nt, Artificial Sequence
  Description of Artificial Sequence: Synthetic oligonucleotide
uauauugagaaacagccca

SEQ ID NO: 3007747 - RNA, 19 nt, Artificial Sequence
  Description of Artificial Sequence: Synthetic oligonucleotide
uaaugaaucccaaacagug

SEQ ID NO: 3007748 - RNA, 19 nt, Artificial Sequence
  Description of Artificial Sequence: Synthetic oligonucleotide
aacaaugaagcccuggaag

SEQ ID NO: 3007749 - RNA, 19 nt, Artificial Sequence
  Description of Artificial Sequence: Synthetic oligonucleotide
gaaguguugacuuggaaag

SEQ ID NO: 3007750 - RNA, 19 nt, Artificial Sequence
  Description of Artificial Sequence: Synthetic oligonucleotide
gauguaaugaaucccaaac

SEQ ID NO: 3007751 - RNA, 19 nt, Artificial Sequence
  Description of Artificial Sequence: Synthetic oligonucleotide
aagaaguugaagaugaugu

SEQ ID NO: 3007752 - RNA, 19 nt, Artificial Sequence
  Description of Artificial Sequence: Synthetic oligonucleotide
uggucuagcacucugaggu

SEQ ID NO: 3007753 - RNA, 19 nt, Artificial Sequence
  Description of Artificial Sequence: Synthetic oligonucleotide
caggaugcaaauuauauug

SEQ ID NO: 3007754 - RNA, 19 nt, Artificial Sequence
  Description of Artificial Sequence: Synthetic oligonucleotide
aagucgccaguacugagcc

SEQ ID NO: 3007755 - RNA, 19 nt, Artificial Sequence
  Description of Artificial Sequence: Synthetic oligonucleotide
ucaggcaagaaguugaaga

SEQ ID NO: 3007756 - RNA, 19 nt, Artificial Sequence
  Description of Artificial Sequence: Synthetic oligonucleotide
agaaguucaggaucguggc

SEQ ID NO: 3007757 - RNA, 19 nt, Artificial Sequence
  Description of Artificial Sequence: Synthetic oligonucleotide
aaauuauauugagaaacag

SEQ ID NO: 3007758 - RNA, 19 nt, Artificial Sequence
  Description of Artificial Sequence: Synthetic oligonucleotide
caaacagugguauaaggag

SEQ ID NO: 3007759 - RNA, 19 nt, Artificial Sequence
  Description of Artificial Sequence: Synthetic oligonucleotide
augcaaauuauauugagaa

SEQ ID NO: 3007760 - RNA, 19 nt, Artificial Sequence
  Description of Artificial Sequence: Synthetic oligonucleotide
ugagaaacagcccaaaguu

SEQ ID NO: 3007761 - RNA, 19 nt, Artificial Sequence
  Description of Artificial Sequence: Synthetic oligonucleotide
agcaguagaggacagcaac

SEQ ID NO: 3007762 - RNA, 19 nt, Artificial Sequence
  Description of Artificial Sequence: Synthetic oligonucleotide
agcaccuucacucucgauc

SEQ ID NO: 3007763 - RNA, 19 nt, Artificial Sequence
  Description of Artificial Sequence: Synthetic oligonucleotide
uugaagaugauguaaugaa

SEQ ID NO: 3007764 - RNA, 19 nt, Artificial Sequence
  Description of Artificial Sequence: Synthetic oligonucleotide
uuauauugagaaacagccc

SEQ ID NO: 3007765 - RNA, 19 nt, Artificial Sequence
  Description of Artificial Sequence: Synthetic oligonucleotide
uugagaaacagcccaaagu

SEQ ID NO: 3007766 - RNA, 19 nt, Artificial Sequence
  Description of Artificial Sequence: Synthetic oligonucleotide
cagaaguucaggaucgugg

SEQ ID NO: 3007767 - RNA, 19 nt, Artificial Sequence
  Description of Artificial Sequence: Synthetic oligonucleotide
uugaggaagcaguagagga

SEQ ID NO: 3007768 - RNA, 19 nt, Artificial Sequence
  Description of Artificial Sequence: Synthetic oligonucleotide
aaagucgccaguacugagc

SEQ ID NO: 3007769 - RNA, 19 nt, Artificial Sequence
  Description of Artificial Sequence: Synthetic oligonucleotide
agaugauguaaugaauccc

SEQ ID NO: 3007770 - RNA, 19 nt, Artificial Sequence
  Description of Artificial Sequence: Synthetic oligonucleotide
aaugaaucccaaacagugg

SEQ ID NO: 3007771 - RNA, 19 nt, Artificial Sequence
  Description of Artificial Sequence: Synthetic oligonucleotide
agcacugucaggcaagaag

SEQ ID NO: 3007772 - RNA, 19 nt, Artificial Sequence
  Description of Artificial Sequence: Synthetic oligonucleotide
ucuugguugaggaagcagu

SEQ ID NO: 3007773 - RNA, 19 nt, Artificial Sequence
  Description of Artificial Sequence: Synthetic oligonucleotide
gaagaugauguaaugaauc

SEQ ID NO: 3007774 - RNA, 19 nt, Artificial Sequence
  Description of Artificial Sequence: Synthetic oligonucleotide
gacagcaacaaugaagccc

SEQ ID NO: 3007775 - RNA, 19 nt, Artificial Sequence
  Description of Artificial Sequence: Synthetic oligonucleotide
aaucagugcagguccuacg

SEQ ID NO: 3007776 - RNA, 19 nt, Artificial Sequence
  Description of Artificial Sequence: Synthetic oligonucleotide
uggaaagucgccaguacug

SEQ ID NO: 3007777 - RNA, 19 nt, Artificial Sequence
  Description of Artificial Sequence: Synthetic oligonucleotide
agaaguguugacuuggaaa

SEQ ID NO: 3007778 - RNA, 19 nt, Artificial Sequence
  Description of Artificial Sequence: Synthetic oligonucleotide
uagaggacagcaacaauga

SEQ ID NO: 3007779 - RNA, 19 nt, Artificial Sequence
  Description of Artificial Sequence: Synthetic oligonucleotide
gcaaauuauauugagaaac

SEQ ID NO: 3007780 - RNA, 19 nt, Artificial Sequence
  Description of Artificial Sequence: Synthetic oligonucleotide
gaugauguaaugaauccca

SEQ ID NO: 3007781 - RNA, 19 nt, Artificial Sequence
  Description of Artificial Sequence: Synthetic oligonucleotide
uguugacuuggaaagucgc

SEQ ID NO: 3007782 - RNA, 19 nt, Artificial Sequence
  Description of Artificial Sequence: Synthetic oligonucleotide
gaggucagcaccuucacuc

SEQ ID NO: 3007783 - RNA, 19 nt, Artificial Sequence
  Description of Artificial Sequence: Synthetic oligonucleotide
aaacagcccaaaguucacc

SEQ ID NO: 3007784 - RNA, 19 nt, Artificial Sequence
  Description of Artificial Sequence: Synthetic oligonucleotide
auaccauuugcgugaaauc

SEQ ID NO: 3007785 - RNA, 19 nt, Artificial Sequence
  Description of Artificial Sequence: Synthetic oligonucleotide
auguaaugaaucccaaaca

SEQ ID NO: 3007786 - RNA, 19 nt, Artificial Sequence
  Description of Artificial Sequence: Synthetic oligonucleotide
auugagaaacagcccaaag

SEQ ID NO: 3007787 - RNA, 19 nt, Artificial Sequence
  Description of Artificial Sequence: Synthetic oligonucleotide
ugaagaugauguaaugaau

SEQ ID NO: 3007788 - RNA, 19 nt, Artificial Sequence
  Description of Artificial Sequence: Synthetic oligonucleotide
uuugcgugaaaucuccguc

SEQ ID NO: 3007789 - RNA, 19 nt, Artificial Sequence
  Description of Artificial Sequence: Synthetic oligonucleotide
ugguugaggaagcaguaga

SEQ ID NO: 3007790 - RNA, 19 nt, Artificial Sequence
  Description of Artificial Sequence: Synthetic oligonucleotide
caaauuauauugagaaaca

SEQ ID NO: 3007791 - RNA, 19 nt, Artificial Sequence
  Description of Artificial Sequence: Synthetic oligonucleotide
aguguugacuuggaaaguc

SEQ ID NO: 3007792 - RNA, 19 nt, Artificial Sequence
  Description of Artificial Sequence: Synthetic oligonucleotide
aaguucaggaucguggcca

SEQ ID NO: 3007793 - RNA, 19 nt, Artificial Sequence
  Description of Artificial Sequence: Synthetic oligonucleotide
ugguauaaggagaaguguu

SEQ ID NO: 3007794 - RNA, 19 nt, Artificial Sequence
  Description of Artificial Sequence: Synthetic oligonucleotide
uaaggagaaguguugacuu

SEQ ID NO: 3007795 - RNA, 19 nt, Artificial Sequence
  Description of Artificial Sequence: Synthetic oligonucleotide
uaccauuugcgugaaaucu

SEQ ID NO: 3007796 - RNA, 19 nt, Artificial Sequence
  Description of Artificial Sequence: Synthetic oligonucleotide
uuggaaagucgccaguacu

SEQ ID NO: 3007797 - RNA, 19 nt, Artificial Sequence
  Description of Artificial Sequence: Synthetic oligonucleotide
aguugaagaugauguaaug

SEQ ID NO: 3007798 - RNA, 19 nt, Artificial Sequence
  Description of Artificial Sequence: Synthetic oligonucleotide
aaaucuccguccucaccuc

SEQ ID NO: 3007799 - RNA, 19 nt, Artificial Sequence
  Description of Artificial Sequence: Synthetic oligonucleotide
uauaaggagaaguguugac

SEQ ID NO: 3007800 - RNA, 19 nt, Artificial Sequence
  Description of Artificial Sequence: Synthetic oligonucleotide
agugguauaaggagaagug

SEQ ID NO: 3007801 - RNA, 19 nt, Artificial Sequence
  Description of Artificial Sequence: Synthetic oligonucleotide
aaggagaaguguugacuug

SEQ ID NO: 3007802 - RNA, 19 nt, Artificial Sequence
  Description of Artificial Sequence: Synthetic oligonucleotide
agaaacagcccaaaguuca

SEQ ID NO: 3007803 - RNA, 19 nt, Artificial Sequence
  Description of Artificial Sequence: Synthetic oligonucleotide
uugacuuggaaagucgcca

SEQ ID NO: 3007804 - RNA, 19 nt, Artificial Sequence
  Description of Artificial Sequence: Synthetic oligonucleotide
aaacagugguauaaggaga

SEQ ID NO: 3007805 - RNA, 19 nt, Artificial Sequence
  Description of Artificial Sequence: Synthetic oligonucleotide
auaaggagaaguguugacu

SEQ ID NO: 3007806 - RNA, 19 nt, Artificial Sequence
  Description of Artificial Sequence: Synthetic oligonucleotide
uugcgugaaaucuccgucc

SEQ ID NO: 3007807 - RNA, 19 nt, Artificial Sequence
  Description of Artificial Sequence: Synthetic oligonucleotide
acagcaacaaugaagcccu

SEQ ID NO: 3007808 - RNA, 19 nt, Artificial Sequence
  Description of Artificial Sequence: Synthetic oligonucleotide
gaugcaaauuauauugaga

SEQ ID NO: 3007809 - RNA, 19 nt, Artificial Sequence
  Description of Artificial Sequence: Synthetic oligonucleotide
guccaaucagugcaggucc

SEQ ID NO: 3007810 - RNA, 19 nt, Artificial Sequence
  Description of Artificial Sequence: Synthetic oligonucleotide
agugcagguccuacgagcc

SEQ ID NO: 3007811 - RNA, 19 nt, Artificial Sequence
  Description of Artificial Sequence: Synthetic oligonucleotide
gaaaucuccguccucaccu

SEQ ID NO: 3007812 - RNA, 19 nt, Artificial Sequence
  Description of Artificial Sequence: Synthetic oligonucleotide
ugcaaauuauauugagaaa

SEQ ID NO: 3007813 - RNA, 19 nt, Artificial Sequence
  Description of Artificial Sequence: Synthetic oligonucleotide
uaggcggaugccaaggcca

SEQ ID NO: 3007814 - RNA, 19 nt, Artificial Sequence
  Description of Artificial Sequence: Synthetic oligonucleotide
gaagcaguagaggacagca

SEQ ID NO: 3007815 - RNA, 19 nt, Artificial Sequence
  Description of Artificial Sequence: Synthetic oligonucleotide
ugaaaucuccguccucacc

SEQ ID NO: 3007816 - RNA, 19 nt, Artificial Sequence
  Description of Artificial Sequence: Synthetic oligonucleotide
aggagaaguguugacuugg

SEQ ID NO: 3007817 - RNA, 19 nt, Artificial Sequence
  Description of Artificial Sequence: Synthetic oligonucleotide
ugacuuggaaagucgccag

SEQ ID NO: 3007818 - RNA, 19 nt, Artificial Sequence
  Description of Artificial Sequence: Synthetic oligonucleotide
ugugguccaaucagugcag

SEQ ID NO: 3007819 - RNA, 19 nt, Artificial Sequence
  Description of Artificial Sequence: Synthetic oligonucleotide
aaguugaagaugauguaau

SEQ ID NO: 3007820 - RNA, 19 nt, Artificial Sequence
  Description of Artificial Sequence: Synthetic oligonucleotide
cuggaaggagcccaguccc

SEQ ID NO: 3007821 - RNA, 19 nt, Artificial Sequence
  Description of Artificial Sequence: Synthetic oligonucleotide
auuugcgugaaaucuccgu

SEQ ID NO: 3007822 - RNA, 19 nt, Artificial Sequence
  Description of Artificial Sequence: Synthetic oligonucleotide
agcacucugaggucagcac

SEQ ID NO: 3007823 - RNA, 19 nt, Artificial Sequence
  Description of Artificial Sequence: Synthetic oligonucleotide
ggaugcaaauuauauugag

SEQ ID NO: 3007824 - RNA, 19 nt, Artificial Sequence
  Description of Artificial Sequence: Synthetic oligonucleotide
guugaagaugauguaauga

SEQ ID NO: 3007825 - RNA, 19 nt, Artificial Sequence
  Description of Artificial Sequence: Synthetic oligonucleotide
gaaagucgccaguacugag

SEQ ID NO: 3007826 - RNA, 19 nt, Artificial Sequence
  Description of Artificial Sequence: Synthetic oligonucleotide
gucgccaguacugagcccg

SEQ ID NO: 3007827 - RNA, 19 nt, Artificial Sequence
  Description of Artificial Sequence: Synthetic oligonucleotide
uccaguuuccugagcagga

SEQ ID NO: 3007828 - RNA, 19 nt, Artificial Sequence
  Description of Artificial Sequence: Synthetic oligonucleotide
aacagugguauaaggagaa

SEQ ID NO: 3007829 - RNA, 19 nt, Artificial Sequence
  Description of Artificial Sequence: Synthetic oligonucleotide
caagaaguugaagaugaug

SEQ ID NO: 3007830 - RNA, 19 nt, Artificial Sequence
  Description of Artificial Sequence: Synthetic oligonucleotide
ugauguaaugaaucccaaa

SEQ ID NO: 3007831 - RNA, 19 nt, Artificial Sequence
  Description of Artificial Sequence: Synthetic oligonucleotide
gcaccuucacucucgaucg

SEQ ID NO: 3007832 - RNA, 19 nt, Artificial Sequence
  Description of Artificial Sequence: Synthetic oligonucleotide
aaggagcccagucccagcu

SEQ ID NO: 3007833 - RNA, 19 nt, Artificial Sequence
  Description of Artificial Sequence: Synthetic oligonucleotide
uggccauaccauuugcgug

SEQ ID NO: 3007834 - RNA, 19 nt, Artificial Sequence
  Description of Artificial Sequence: Synthetic oligonucleotide
aucagugcagguccuacga

SEQ ID NO: 3007835 - RNA, 19 nt, Artificial Sequence
  Description of Artificial Sequence: Synthetic oligonucleotide
ucuagcacucugaggucag

SEQ ID NO: 3007836 - RNA, 19 nt, Artificial Sequence
  Description of Artificial Sequence: Synthetic oligonucleotide
ugagcaggaugcaaauuau

SEQ ID NO: 3007837 - RNA, 19 nt, Artificial Sequence
  Description of Artificial Sequence: Synthetic oligonucleotide
ugaagcccuggaaggagcc

SEQ ID NO: 3007838 - RNA, 19 nt, Artificial Sequence
  Description of Artificial Sequence: Synthetic oligonucleotide
ugcagguccuacgagccgg

SEQ ID NO: 3007839 - RNA, 19 nt, Artificial Sequence
  Description of Artificial Sequence: Synthetic oligonucleotide
aguacugagcccgugugug

SEQ ID NO: 3007840 - RNA, 19 nt, Artificial Sequence
  Description of Artificial Sequence: Synthetic oligonucleotide
gugugguccaaucagugca

SEQ ID NO: 3007841 - RNA, 19 nt, Artificial Sequence
  Description of Artificial Sequence: Synthetic oligonucleotide
gaaguucaggaucguggcc

SEQ ID NO: 3007842 - RNA, 19 nt, Artificial Sequence
  Description of Artificial Sequence: Synthetic oligonucleotide
ucagugcagguccuacgag

SEQ ID NO: 3007843 - RNA, 19 nt, Artificial Sequence
  Description of Artificial Sequence: Synthetic oligonucleotide
ucacucucgaucggggagg

SEQ ID NO: 3007844 - RNA, 19 nt, Artificial Sequence
  Description of Artificial Sequence: Synthetic oligonucleotide
ggaggugugguccaaucag

SEQ ID NO: 3007845 - RNA, 19 nt, Artificial Sequence
  Description of Artificial Sequence: Synthetic oligonucleotide
uucaggaucguggccauac

SEQ ID NO: 3007846 - RNA, 19 nt, Artificial Sequence
  Description of Artificial Sequence: Synthetic oligonucleotide
uuccugagcaggaugcaaa

SEQ ID NO: 3007847 - RNA, 19 nt, Artificial Sequence
  Description of Artificial Sequence: Synthetic oligonucleotide
cagugcagguccuacgagc

SEQ ID NO: 3007848 - RNA, 19 nt, Artificial Sequence
  Description of Artificial Sequence: Synthetic oligonucleotide
ugcgugaaaucuccguccu

SEQ ID NO: 3007849 - RNA, 19 nt, Artificial Sequence
  Description of Artificial Sequence: Synthetic oligonucleotide
accauuugcgugaaaucuc

SEQ ID NO: 3007850 - RNA, 19 nt, Artificial Sequence
  Description of Artificial Sequence: Synthetic oligonucleotide
uccagggguaggcggaugc

SEQ ID NO: 3007851 - RNA, 19 nt, Artificial Sequence
  Description of Artificial Sequence: Synthetic oligonucleotide
cugucaggcaagaaguuga

SEQ ID NO: 3007852 - RNA, 19 nt, Artificial Sequence
  Description of Artificial Sequence: Synthetic oligonucleotide
guguugacuuggaaagucg

SEQ ID NO: 3007853 - RNA, 19 nt, Artificial Sequence
  Description of Artificial Sequence: Synthetic oligonucleotide
agaaguugaagaugaugua

SEQ ID NO: 3007854 - RNA, 19 nt, Artificial Sequence
  Description of Artificial Sequence: Synthetic oligonucleotide
uugguugaggaagcaguag

SEQ ID NO: 3007855 - RNA, 19 nt, Artificial Sequence
  Description of Artificial Sequence: Synthetic oligonucleotide
gguauaaggagaaguguug

SEQ ID NO: 3007856 - RNA, 19 nt, Artificial Sequence
  Description of Artificial Sequence: Synthetic oligonucleotide
cauuugcgugaaaucuccg

SEQ ID NO: 3007857 - RNA, 19 nt, Artificial Sequence
  Description of Artificial Sequence: Synthetic oligonucleotide
agcaggaugcaaauuauau

SEQ ID NO: 3007858 - RNA, 19 nt, Artificial Sequence
  Description of Artificial Sequence: Synthetic oligonucleotide
uguguggaggccacccugu

SEQ ID NO: 3007859 - RNA, 19 nt, Artificial Sequence
  Description of Artificial Sequence: Synthetic oligonucleotide
cuuggaaagucgccaguac

SEQ ID NO: 3007860 - RNA, 19 nt, Artificial Sequence
  Description of Artificial Sequence: Synthetic oligonucleotide
agcaacaaugaagcccugg

SEQ ID NO: 3007861 - RNA, 19 nt, Artificial Sequence
  Description of Artificial Sequence: Synthetic oligonucleotide
uguggaggccacccugugc

SEQ ID NO: 3007862 - RNA, 19 nt, Artificial Sequence
  Description of Artificial Sequence: Synthetic oligonucleotide
caccucuugguugaggaag

SEQ ID NO: 3007863 - RNA, 19 nt, Artificial Sequence
  Description of Artificial Sequence: Synthetic oligonucleotide
augaagcccuggaaggagc

SEQ ID NO: 3007864 - RNA, 19 nt, Artificial Sequence
  Description of Artificial Sequence: Synthetic oligonucleotide
accucuugguugaggaagc

SEQ ID NO: 3007865 - RNA, 19 nt, Artificial Sequence
  Description of Artificial Sequence: Synthetic oligonucleotide
aaucuccguccucaccucu

SEQ ID NO: 3007866 - RNA, 19 nt, Artificial Sequence
  Description of Artificial Sequence: Synthetic oligonucleotide
guauaaggagaaguguuga

SEQ ID NO: 3007867 - RNA, 19 nt, Artificial Sequence
  Description of Artificial Sequence: Synthetic oligonucleotide
guugacuuggaaagucgcc

SEQ ID NO: 3007868 - RNA, 19 nt, Artificial Sequence
  Description of Artificial Sequence: Synthetic oligonucleotide
cuggucuagcacucugagg

SEQ ID NO: 3007869 - RNA, 19 nt, Artificial Sequence
  Description of Artificial Sequence: Synthetic oligonucleotide
ucccaaacagugguauaag

SEQ ID NO: 3007870 - RNA, 19 nt, Artificial Sequence
  Description of Artificial Sequence: Synthetic oligonucleotide
uauugagaaacagcccaaa

SEQ ID NO: 3007871 - RNA, 19 nt, Artificial Sequence
  Description of Artificial Sequence: Synthetic oligonucleotide
aaucccaaacagugguaua

SEQ ID NO: 3007872 - RNA, 19 nt, Artificial Sequence
  Description of Artificial Sequence: Synthetic oligonucleotide
ugaaucccaaacaguggua

SEQ ID NO: 3007873 - RNA, 19 nt, Artificial Sequence
  Description of Artificial Sequence: Synthetic oligonucleotide
gagaaacagcccaaaguuc

SEQ ID NO: 3007874 - RNA, 19 nt, Artificial Sequence
  Description of Artificial Sequence: Synthetic oligonucleotide
gaucggggagguguggucc

SEQ ID NO: 3007875 - RNA, 19 nt, Artificial Sequence
  Description of Artificial Sequence: Synthetic oligonucleotide
aaguguugacuuggaaagu

SEQ ID NO: 3007876 - RNA, 19 nt, Artificial Sequence
  Description of Artificial Sequence: Synthetic oligonucleotide
ccauuugcgugaaaucucc

SEQ ID NO: 3007877 - RNA, 19 nt, Artificial Sequence
  Description of Artificial Sequence: Synthetic oligonucleotide
ugaggucagcaccuucacu

SEQ ID NO: 3007878 - RNA, 19 nt, Artificial Sequence
  Description of Artificial Sequence: Synthetic oligonucleotide
gucagcaccuucacucucg

SEQ ID NO: 3007879 - RNA, 19 nt, Artificial Sequence
  Description of Artificial Sequence: Synthetic oligonucleotide
cucaccucuugguugagga

SEQ ID NO: 3007880 - RNA, 19 nt, Artificial Sequence
  Description of Artificial Sequence: Synthetic oligonucleotide
guaggcggaugccaaggcc

SEQ ID NO: 3007881 - RNA, 19 nt, Artificial Sequence
  Description of Artificial Sequence: Synthetic oligonucleotide
ugucaggcaagaaguugaa

SEQ ID NO: 3007882 - RNA, 19 nt, Artificial Sequence
  Description of Artificial Sequence: Synthetic oligonucleotide
guacugagcccgugugugg

SEQ ID NO: 3007883 - RNA, 19 nt, Artificial Sequence
  Description of Artificial Sequence: Synthetic oligonucleotide
ucaggaucguggccauacc

SEQ ID NO: 3007884 - RNA, 19 nt, Artificial Sequence
  Description of Artificial Sequence: Synthetic oligonucleotide
aguagaggacagcaacaau

SEQ ID NO: 3007885 - RNA, 19 nt, Artificial Sequence
  Description of Artificial Sequence: Synthetic oligonucleotide
aucccaaacagugguauaa

SEQ ID NO: 3007886 - RNA, 19 nt, Artificial Sequence
  Description of Artificial Sequence: Synthetic oligonucleotide
ucuccguccucaccucuug

SEQ ID NO: 3007887 - RNA, 19 nt, Artificial Sequence
  Description of Artificial Sequence: Synthetic oligonucleotide
ucucgaucggggaggugug

SEQ ID NO: 3007888 - RNA, 19 nt, Artificial Sequence
  Description of Artificial Sequence: Synthetic oligonucleotide
accuucacucucgaucggg

SEQ ID NO: 3007889 - RNA, 19 nt, Artificial Sequence
  Description of Artificial Sequence: Synthetic oligonucleotide
ucguggccauaccauuugc

SEQ ID NO: 3007890 - RNA, 19 nt, Artificial Sequence
  Description of Artificial Sequence: Synthetic oligonucleotide
uccaaucagugcagguccu

SEQ ID NO: 3007891 - RNA, 19 nt, Artificial Sequence
  Description of Artificial Sequence: Synthetic oligonucleotide
aagcccuggaaggagccca

SEQ ID NO: 3007892 - RNA, 19 nt, Artificial Sequence
  Description of Artificial Sequence: Synthetic oligonucleotide
ucagcaccuucacucucga

SEQ ID NO: 3007893 - RNA, 19 nt, Artificial Sequence
  Description of Artificial Sequence: Synthetic oligonucleotide
aggaugcaaauuauauuga

SEQ ID NO: 3007894 - RNA, 19 nt, Artificial Sequence
  Description of Artificial Sequence: Synthetic oligonucleotide
agguccuacgagccggcag

SEQ ID NO: 3007895 - RNA, 19 nt, Artificial Sequence
  Description of Artificial Sequence: Synthetic oligonucleotide
cccaaacagugguauaagg

SEQ ID NO: 3007896 - RNA, 19 nt, Artificial Sequence
  Description of Artificial Sequence: Synthetic oligonucleotide
agucgccaguacugagccc

SEQ ID NO: 3007897 - RNA, 19 nt, Artificial Sequence
  Description of Artificial Sequence: Synthetic oligonucleotide
gaaggagcccagucccagc

SEQ ID NO: 3007898 - RNA, 19 nt, Artificial Sequence
  Description of Artificial Sequence: Synthetic oligonucleotide
gaaacagcccaaaguucac

SEQ ID NO: 3007899 - RNA, 19 nt, Artificial Sequence
  Description of Artificial Sequence: Synthetic oligonucleotide
ggugugguccaaucagugc

SEQ ID NO: 3007900 - RNA, 19 nt, Artificial Sequence
  Description of Artificial Sequence: Synthetic oligonucleotide
uccguccucaccucuuggu

SEQ ID NO: 3007901 - RNA, 19 nt, Artificial Sequence
  Description of Artificial Sequence: Synthetic oligonucleotide
caguuuccugagcaggaug

SEQ ID NO: 3007902 - RNA, 19 nt, Artificial Sequence
  Description of Artificial Sequence: Synthetic oligonucleotide
uggcuggucuagcacucug

SEQ ID NO: 3007903 - RNA, 19 nt, Artificial Sequence
  Description of Artificial Sequence: Synthetic oligonucleotide
uccugagcaggaugcaaau

SEQ ID NO: 3007904 - RNA, 19 nt, Artificial Sequence
  Description of Artificial Sequence: Synthetic oligonucleotide
aggucagcaccuucacucu

SEQ ID NO: 3007905 - RNA, 19 nt, Artificial Sequence
  Description of Artificial Sequence: Synthetic oligonucleotide
guguguggaggccacccug

SEQ ID NO: 3007906 - RNA, 19 nt, Artificial Sequence
  Description of Artificial Sequence: Synthetic oligonucleotide
ggccauaccauuugcguga

SEQ ID NO: 3007907 - RNA, 19 nt, Artificial Sequence
  Description of Artificial Sequence: Synthetic oligonucleotide
uagcacucugaggucagca

SEQ ID NO: 3007908 - RNA, 19 nt, Artificial Sequence
  Description of Artificial Sequence: Synthetic oligonucleotide
ugagcccguguguggaggc

SEQ ID NO: 3007909 - RNA, 19 nt, Artificial Sequence
  Description of Artificial Sequence: Synthetic oligonucleotide
uggaaggagcccaguccca

SEQ ID NO: 3007910 - RNA, 19 nt, Artificial Sequence
  Description of Artificial Sequence: Synthetic oligonucleotide
cucuugguugaggaagcag

SEQ ID NO: 3007911 - RNA, 19 nt, Artificial Sequence
  Description of Artificial Sequence: Synthetic oligonucleotide
guaaugaaucccaaacagu

SEQ ID NO: 3007912 - RNA, 19 nt, Artificial Sequence
  Description of Artificial Sequence: Synthetic oligonucleotide
gagaaguguugacuuggaa

SEQ ID NO: 3007913 - RNA, 19 nt, Artificial Sequence
  Description of Artificial Sequence: Synthetic oligonucleotide
auauugagaaacagcccaa

SEQ ID NO: 3007914 - RNA, 19 nt, Artificial Sequence
  Description of Artificial Sequence: Synthetic oligonucleotide
caaucagugcagguccuac

SEQ ID NO: 3007915 - RNA, 19 nt, Artificial Sequence
  Description of Artificial Sequence: Synthetic oligonucleotide
gcuggucuagcacucugag

SEQ ID NO: 3007916 - RNA, 19 nt, Artificial Sequence
  Description of Artificial Sequence: Synthetic oligonucleotide
ccuggaaggagcccagucc

SEQ ID NO: 3007917 - RNA, 19 nt, Artificial Sequence
  Description of Artificial Sequence: Synthetic oligonucleotide
gcacucugaggucagcacc

SEQ ID NO: 3007918 - RNA, 19 nt, Artificial Sequence
  Description of Artificial Sequence: Synthetic oligonucleotide
cauaccauuugcgugaaau

SEQ ID NO: 3007919 - RNA, 19 nt, Artificial Sequence
  Description of Artificial Sequence: Synthetic oligonucleotide
cagcuccagggguaggcgg

SEQ ID NO: 3007920 - RNA, 19 nt, Artificial Sequence
  Description of Artificial Sequence: Synthetic oligonucleotide
cuugguugaggaagcagua

SEQ ID NO: 3007921 - RNA, 19 nt, Artificial Sequence
  Description of Artificial Sequence: Synthetic oligonucleotide
agccggcagaaguucagga

SEQ ID NO: 3007922 - RNA, 19 nt, Artificial Sequence
  Description of Artificial Sequence: Synthetic oligonucleotide
gauggcuggucuagcacuc

SEQ ID NO: 3007923 - RNA, 19 nt, Artificial Sequence
  Description of Artificial Sequence: Synthetic oligonucleotide
acagugguauaaggagaag

SEQ ID NO: 3007924 - RNA, 19 nt, Artificial Sequence
  Description of Artificial Sequence: Synthetic oligonucleotide
acuuggaaagucgccagua

SEQ ID NO: 3007925 - RNA, 19 nt, Artificial Sequence
  Description of Artificial Sequence: Synthetic oligonucleotide
acugagcccguguguggag

SEQ ID NO: 3007926 - RNA, 19 nt, Artificial Sequence
  Description of Artificial Sequence: Synthetic oligonucleotide
cugaggucagcaccuucac

SEQ ID NO: 3007927 - RNA, 19 nt, Artificial Sequence
  Description of Artificial Sequence: Synthetic oligonucleotide
aggugugguccaaucagug

SEQ ID NO: 3007928 - RNA, 19 nt, Artificial Sequence
  Description of Artificial Sequence: Synthetic oligonucleotide
ggcuccaguuuccugagca

SEQ ID NO: 3007929 - RNA, 19 nt, Artificial Sequence
  Description of Artificial Sequence: Synthetic oligonucleotide
uggaggccacccugugccg

SEQ ID NO: 3007930 - RNA, 19 nt, Artificial Sequence
  Description of Artificial Sequence: Synthetic oligonucleotide
ggagcccagucccagcucc

SEQ ID NO: 3007931 - RNA, 19 nt, Artificial Sequence
  Description of Artificial Sequence: Synthetic oligonucleotide
ucaccucuugguugaggaa

SEQ ID NO: 3007932 - RNA, 19 nt, Artificial Sequence
  Description of Artificial Sequence: Synthetic oligonucleotide
gugaaaucuccguccucac

SEQ ID NO: 3007933 - RNA, 19 nt, Artificial Sequence
  Description of Artificial Sequence: Synthetic oligonucleotide
gaaucccaaacagugguau

SEQ ID NO: 3007934 - RNA, 19 nt, Artificial Sequence
  Description of Artificial Sequence: Synthetic oligonucleotide
guggccauaccauuugcgu

SEQ ID NO: 3007935 - RNA, 19 nt, Artificial Sequence
  Description of Artificial Sequence: Synthetic oligonucleotide
gucaggcaagaaguugaag

SEQ ID NO: 3007936 - RNA, 19 nt, Artificial Sequence
  Description of Artificial Sequence: Synthetic oligonucleotide
ccuucacucucgaucgggg

SEQ ID NO: 3007937 - RNA, 19 nt, Artificial Sequence
  Description of Artificial Sequence: Synthetic oligonucleotide
caacaaugaagcccuggaa

SEQ ID NO: 3007938 - RNA, 19 nt, Artificial Sequence
  Description of Artificial Sequence: Synthetic oligonucleotide
aguucaggaucguggccau

SEQ ID NO: 3007939 - RNA, 19 nt, Artificial Sequence
  Description of Artificial Sequence: Synthetic oligonucleotide
gugcagguccuacgagccg

SEQ ID NO: 3007940 - RNA, 19 nt, Artificial Sequence
  Description of Artificial Sequence: Synthetic oligonucleotide
caggaucguggccauacca

SEQ ID NO: 3007941 - RNA, 19 nt, Artificial Sequence
  Description of Artificial Sequence: Synthetic oligonucleotide
gucuagcacucugagguca

SEQ ID NO: 3007942 - RNA, 19 nt, Artificial Sequence
  Description of Artificial Sequence: Synthetic oligonucleotide
uacgagccggcagaaguuc

SEQ ID NO: 3007943 - RNA, 19 nt, Artificial Sequence
  Description of Artificial Sequence: Synthetic oligonucleotide
gguccuacgagccggcaga

SEQ ID NO: 3007944 - RNA, 19 nt, Artificial Sequence
  Description of Artificial Sequence: Synthetic oligonucleotide
aggagcccagucccagcuc

SEQ ID NO: 3007945 - RNA, 19 nt, Artificial Sequence
  Description of Artificial Sequence: Synthetic oligonucleotide
gugguccaaucagugcagg

SEQ ID NO: 3007946 - RNA, 19 nt, Artificial Sequence
  Description of Artificial Sequence: Synthetic oligonucleotide
aggaucguggccauaccau

SEQ ID NO: 3007947 - RNA, 19 nt, Artificial Sequence
  Description of Artificial Sequence: Synthetic oligonucleotide
augauguaaugaaucccaa

SEQ ID NO: 3007948 - RNA, 19 nt, Artificial Sequence
  Description of Artificial Sequence: Synthetic oligonucleotide
cuucacucucgaucgggga

SEQ ID NO: 3007949 - RNA, 19 nt, Artificial Sequence
  Description of Artificial Sequence: Synthetic oligonucleotide
caggcaagaaguugaagau

SEQ ID NO: 3007950 - RNA, 19 nt, Artificial Sequence
  Description of Artificial Sequence: Synthetic oligonucleotide
caaugaagcccuggaagga

SEQ ID NO: 3007951 - RNA, 19 nt, Artificial Sequence
  Description of Artificial Sequence: Synthetic oligonucleotide
cugagcccguguguggagg

SEQ ID NO: 3007952 - RNA, 19 nt, Artificial Sequence
  Description of Artificial Sequence: Synthetic oligonucleotide
gaagcccuggaaggagccc

SEQ ID NO: 3007953 - RNA, 19 nt, Artificial Sequence
  Description of Artificial Sequence: Synthetic oligonucleotide
aagcaguagaggacagcaa

SEQ ID NO: 3007954 - RNA, 19 nt, Artificial Sequence
  Description of Artificial Sequence: Synthetic oligonucleotide
gguaggcggaugccaaggc

SEQ ID NO: 3007955 - RNA, 19 nt, Artificial Sequence
  Description of Artificial Sequence: Synthetic oligonucleotide
gaggccacccugugccggc

SEQ ID NO: 3007956 - RNA, 19 nt, Artificial Sequence
  Description of Artificial Sequence: Synthetic oligonucleotide
ucgaucggggagguguggu

SEQ ID NO: 3007957 - RNA, 19 nt, Artificial Sequence
  Description of Artificial Sequence: Synthetic oligonucleotide
gugguauaaggagaagugu

SEQ ID NO: 3007958 - RNA, 19 nt, Artificial Sequence
  Description of Artificial Sequence: Synthetic oligonucleotide
cggcagaaguucaggaucg

SEQ ID NO: 3007959 - RNA, 19 nt, Artificial Sequence
  Description of Artificial Sequence: Synthetic oligonucleotide
cuccguccucaccucuugg

SEQ ID NO: 3007960 - RNA, 19 nt, Artificial Sequence
  Description of Artificial Sequence: Synthetic oligonucleotide
aucggggagguguggucca

SEQ ID NO: 3007961 - RNA, 19 nt, Artificial Sequence
  Description of Artificial Sequence: Synthetic oligonucleotide
ccggcagaaguucaggauc

SEQ ID NO: 3007962 - RNA, 19 nt, Artificial Sequence
  Description of Artificial Sequence: Synthetic oligonucleotide
ggacagcaacaaugaagcc

SEQ ID NO: 3007963 - RNA, 19 nt, Artificial Sequence
  Description of Artificial Sequence: Synthetic oligonucleotide
ggguaggcggaugccaagg

SEQ ID NO: 3007964 - RNA, 19 nt, Artificial Sequence
  Description of Artificial Sequence: Synthetic oligonucleotide
caguagaggacagcaacaa

SEQ ID NO: 3007965 - RNA, 19 nt, Artificial Sequence
  Description of Artificial Sequence: Synthetic oligonucleotide
ggaaggagcccagucccag

SEQ ID NO: 3007966 - RNA, 19 nt, Artificial Sequence
  Description of Artificial Sequence: Synthetic oligonucleotide
cagugguauaaggagaagu

SEQ ID NO: 3007967 - RNA, 19 nt, Artificial Sequence
  Description of Artificial Sequence: Synthetic oligonucleotide
cguggccauaccauuugcg

SEQ ID NO: 3007968 - RNA, 19 nt, Artificial Sequence
  Description of Artificial Sequence: Synthetic oligonucleotide
ggaaagucgccaguacuga

SEQ ID NO: 3007969 - RNA, 19 nt, Artificial Sequence
  Description of Artificial Sequence: Synthetic oligonucleotide
caccuucacucucgaucgg

SEQ ID NO: 3007970 - RNA, 19 nt, Artificial Sequence
  Description of Artificial Sequence: Synthetic oligonucleotide
gacuuggaaagucgccagu

SEQ ID NO: 3007971 - RNA, 19 nt, Artificial Sequence
  Description of Artificial Sequence: Synthetic oligonucleotide
cacucugaggucagcaccu

SEQ ID NO: 3007972 - RNA, 19 nt, Artificial Sequence
  Description of Artificial Sequence: Synthetic oligonucleotide
gccggcuccaguuuccuga

SEQ ID NO: 3007973 - RNA, 19 nt, Artificial Sequence
  Description of Artificial Sequence: Synthetic oligonucleotide
uccuacgagccggcagaag

SEQ ID NO: 3007974 - RNA, 19 nt, Artificial Sequence
  Description of Artificial Sequence: Synthetic oligonucleotide
cucucgaucggggaggugu

SEQ ID NO: 3007975 - RNA, 19 nt, Artificial Sequence
  Description of Artificial Sequence: Synthetic oligonucleotide
ccaguacugagcccgugug

SEQ ID NO: 3007976 - RNA, 19 nt, Artificial Sequence
  Description of Artificial Sequence: Synthetic oligonucleotide
cuagcacucugaggucagc

SEQ ID NO: 3007977 - RNA, 19 nt, Artificial Sequence
  Description of Artificial Sequence: Synthetic oligonucleotide
ggaagcaguagaggacagc

SEQ ID NO: 3007978 - RNA, 19 nt, Artificial Sequence
  Description of Artificial Sequence: Synthetic oligonucleotide
cucgaucggggaggugugg

SEQ ID NO: 3007979 - RNA, 19 nt, Artificial Sequence
  Description of Artificial Sequence: Synthetic oligonucleotide
gagcaggaugcaaauuaua

SEQ ID NO: 3007980 - RNA, 19 nt, Artificial Sequence
  Description of Artificial Sequence: Synthetic oligonucleotide
gcaguagaggacagcaaca

SEQ ID NO: 3007981 - RNA, 19 nt, Artificial Sequence
  Description of Artificial Sequence: Synthetic oligonucleotide
gggaggugugguccaauca

SEQ ID NO: 3007982 - RNA, 19 nt, Artificial Sequence
  Description of Artificial Sequence: Synthetic oligonucleotide
guguggaggccacccugug

SEQ ID NO: 3007983 - RNA, 19 nt, Artificial Sequence
  Description of Artificial Sequence: Synthetic oligonucleotide
gcagaaguucaggaucgug

SEQ ID NO: 3007984 - RNA, 19 nt, Artificial Sequence
  Description of Artificial Sequence: Synthetic oligonucleotide
guuuccugagcaggaugca

SEQ ID NO: 3007985 - RNA, 19 nt, Artificial Sequence
  Description of Artificial Sequence: Synthetic oligonucleotide
gcacugucaggcaagaagu

SEQ ID NO: 3007986 - RNA, 19 nt, Artificial Sequence
  Description of Artificial Sequence: Synthetic oligonucleotide
aggcggaugccaaggccag

SEQ ID NO: 3007987 - RNA, 19 nt, Artificial Sequence
  Description of Artificial Sequence: Synthetic oligonucleotide
ucgccaguacugagcccgu

SEQ ID NO: 3007988 - RNA, 19 nt, Artificial Sequence
  Description of Artificial Sequence: Synthetic oligonucleotide
agcuccagggguaggcgga

SEQ ID NO: 3007989 - RNA, 19 nt, Artificial Sequence
  Description of Artificial Sequence: Synthetic oligonucleotide
ggucuagcacucugagguc

SEQ ID NO: 3007990 - RNA, 19 nt, Artificial Sequence
  Description of Artificial Sequence: Synthetic oligonucleotide
cguccucaccucuugguug

SEQ ID NO: 3007991 - RNA, 19 nt, Artificial Sequence
  Description of Artificial Sequence: Synthetic oligonucleotide
ggaggccacccugugccgg

SEQ ID NO: 3007992 - RNA, 19 nt, Artificial Sequence
  Description of Artificial Sequence: Synthetic oligonucleotide
gccagcacugucaggcaag

SEQ ID NO: 3007993 - RNA, 19 nt, Artificial Sequence
  Description of Artificial Sequence: Synthetic oligonucleotide
gggguaggcggaugccaag

SEQ ID NO: 3007994 - RNA, 19 nt, Artificial Sequence
  Description of Artificial Sequence: Synthetic oligonucleotide
agcccguguguggaggcca

SEQ ID NO: 3007995 - RNA, 19 nt, Artificial Sequence
  Description of Artificial Sequence: Synthetic oligonucleotide
gcaggaugcaaauuauauu

SEQ ID NO: 3007996 - RNA, 19 nt, Artificial Sequence
  Description of Artificial Sequence: Synthetic oligonucleotide
agcccagucccagcuccag

SEQ ID NO: 3007997 - RNA, 19 nt, Artificial Sequence
  Description of Artificial Sequence: Synthetic oligonucleotide
cgugaaaucuccguccuca

SEQ ID NO: 3007998 - RNA, 19 nt, Artificial Sequence
  Description of Artificial Sequence: Synthetic oligonucleotide
gagcccguguguggaggcc

SEQ ID NO: 3007999 - RNA, 19 nt, Artificial Sequence
  Description of Artificial Sequence: Synthetic oligonucleotide
gucccagcuccagggguag

SEQ ID NO: 3008000 - RNA, 19 nt, Artificial Sequence
  Description of Artificial Sequence: Synthetic oligonucleotide
gaucguggccauaccauuu

SEQ ID NO: 3008001 - RNA, 19 nt, Artificial Sequence
  Description of Artificial Sequence: Synthetic oligonucleotide
agggguaggcggaugccaa

SEQ ID NO: 3008002 - RNA, 19 nt, Artificial Sequence
  Description of Artificial Sequence: Synthetic oligonucleotide
uccucaccucuugguugag

SEQ ID NO: 3008003 - RNA, 19 nt, Artificial Sequence
  Description of Artificial Sequence: Synthetic oligonucleotide
ggggaggugugguccaauc

SEQ ID NO: 3008004 - RNA, 19 nt, Artificial Sequence
  Description of Artificial Sequence: Synthetic oligonucleotide
ggucagcaccuucacucuc

SEQ ID NO: 3008005 - RNA, 19 nt, Artificial Sequence
  Description of Artificial Sequence: Synthetic oligonucleotide
ggagaaguguugacuugga

SEQ ID NO: 3008006 - RNA, 19 nt, Artificial Sequence
  Description of Artificial Sequence: Synthetic oligonucleotide
auggcuggucuagcacucu

SEQ ID NO: 3008007 - RNA, 19 nt, Artificial Sequence
  Description of Artificial Sequence: Synthetic oligonucleotide
ccuacgagccggcagaagu

SEQ ID NO: 3008008 - RNA, 19 nt, Artificial Sequence
  Description of Artificial Sequence: Synthetic oligonucleotide
cagggguaggcggaugcca

SEQ ID NO: 3008009 - RNA, 19 nt, Artificial Sequence
  Description of Artificial Sequence: Synthetic oligonucleotide
cagcaacaaugaagcccug

SEQ ID NO: 3008010 - RNA, 19 nt, Artificial Sequence
  Description of Artificial Sequence: Synthetic oligonucleotide
acgagccggcagaaguuca

SEQ ID NO: 3008011 - RNA, 19 nt, Artificial Sequence
  Description of Artificial Sequence: Synthetic oligonucleotide
agcccuggaaggagcccag

SEQ ID NO: 3008012 - RNA, 19 nt, Artificial Sequence
  Description of Artificial Sequence: Synthetic oligonucleotide
ggaugccaaggccagcacu

SEQ ID NO: 3008013 - RNA, 19 nt, Artificial Sequence
  Description of Artificial Sequence: Synthetic oligonucleotide
acccugugccggcuccagu

SEQ ID NO: 3008014 - RNA, 19 nt, Artificial Sequence
  Description of Artificial Sequence: Synthetic oligonucleotide
gcggaugccaaggccagca

SEQ ID NO: 3008015 - RNA, 19 nt, Artificial Sequence
  Description of Artificial Sequence: Synthetic oligonucleotide
ccagcuccagggguaggcg

SEQ ID NO: 3008016 - RNA, 19 nt, Artificial Sequence
  Description of Artificial Sequence: Synthetic oligonucleotide
caguacugagcccgugugu

SEQ ID NO: 3008017 - RNA, 19 nt, Artificial Sequence
  Description of Artificial Sequence: Synthetic oligonucleotide
ccguguguggaggccaccc

SEQ ID NO: 3008018 - RNA, 19 nt, Artificial Sequence
  Description of Artificial Sequence: Synthetic oligonucleotide
ccggcuccaguuuccugag

SEQ ID NO: 3008019 - RNA, 19 nt, Artificial Sequence
  Description of Artificial Sequence: Synthetic oligonucleotide
cccuggaaggagcccaguc

SEQ ID NO: 3008020 - RNA, 19 nt, Artificial Sequence
  Description of Artificial Sequence: Synthetic oligonucleotide
cacccugugccggcuccag

SEQ ID NO: 3008021 - RNA, 19 nt, Artificial Sequence
  Description of Artificial Sequence: Synthetic oligonucleotide
gccacccugugccggcucc

SEQ ID NO: 3008022 - RNA, 19 nt, Artificial Sequence
  Description of Artificial Sequence: Synthetic oligonucleotide
aucuccguccucaccucuu

SEQ ID NO: 3008023 - RNA, 19 nt, Artificial Sequence
  Description of Artificial Sequence: Synthetic oligonucleotide
cgagccggcagaaguucag

SEQ ID NO: 3008024 - RNA, 19 nt, Artificial Sequence
  Description of Artificial Sequence: Synthetic oligonucleotide
ggcuggucuagcacucuga

SEQ ID NO: 3008025 - RNA, 19 nt, Artificial Sequence
  Description of Artificial Sequence: Synthetic oligonucleotide
ccucaccucuugguugagg

SEQ ID NO: 3008026 - RNA, 19 nt, Artificial Sequence
  Description of Artificial Sequence: Synthetic oligonucleotide
acucugaggucagcaccuu

SEQ ID NO: 3008027 - RNA, 19 nt, Artificial Sequence
  Description of Artificial Sequence: Synthetic oligonucleotide
ggaucguggccauaccauu

SEQ ID NO: 3008028 - RNA, 19 nt, Artificial Sequence
  Description of Artificial Sequence: Synthetic oligonucleotide
ggccagcacugucaggcaa

SEQ ID NO: 3008029 - RNA, 19 nt, Artificial Sequence
  Description of Artificial Sequence: Synthetic oligonucleotide
cacugucaggcaagaaguu

SEQ ID NO: 3008030 - RNA, 19 nt, Artificial Sequence
  Description of Artificial Sequence: Synthetic oligonucleotide
gagcccagucccagcucca

SEQ ID NO: 3008031 - RNA, 19 nt, Artificial Sequence
  Description of Artificial Sequence: Synthetic oligonucleotide
ucggggaggugugguccaa

SEQ ID NO: 3008032 - RNA, 19 nt, Artificial Sequence
  Description of Artificial Sequence: Synthetic oligonucleotide
cuccagggguaggcggaug

SEQ ID NO: 3008033 - RNA, 19 nt, Artificial Sequence
  Description of Artificial Sequence: Synthetic oligonucleotide
gccaguacugagcccgugu

SEQ ID NO: 3008034 - RNA, 19 nt, Artificial Sequence
  Description of Artificial Sequence: Synthetic oligonucleotide
acucucgaucggggaggug

SEQ ID NO: 3008035 - RNA, 19 nt, Artificial Sequence
  Description of Artificial Sequence: Synthetic oligonucleotide
gcgugaaaucuccguccuc

SEQ ID NO: 3008036 - RNA, 19 nt, Artificial Sequence
  Description of Artificial Sequence: Synthetic oligonucleotide
ccagggguaggcggaugcc

SEQ ID NO: 3008037 - RNA, 19 nt, Artificial Sequence
  Description of Artificial Sequence: Synthetic oligonucleotide
gcagguccuacgagccggc

SEQ ID NO: 3008038 - RNA, 19 nt, Artificial Sequence
  Description of Artificial Sequence: Synthetic oligonucleotide
gccggcagaaguucaggau

SEQ ID NO: 3008039 - RNA, 19 nt, Artificial Sequence
  Description of Artificial Sequence: Synthetic oligonucleotide
guccuacgagccggcagaa

SEQ ID NO: 3008040 - RNA, 19 nt, Artificial Sequence
  Description of Artificial Sequence: Synthetic oligonucleotide
cgaucggggaggugugguc

SEQ ID NO: 3008041 - RNA, 19 nt, Artificial Sequence
  Description of Artificial Sequence: Synthetic oligonucleotide
ggcggaugccaaggccagc

SEQ ID NO: 3008042 - RNA, 19 nt, Artificial Sequence
  Description of Artificial Sequence: Synthetic oligonucleotide
guucaggaucguggccaua

SEQ ID NO: 3008043 - RNA, 19 nt, Artificial Sequence
  Description of Artificial Sequence: Synthetic oligonucleotide
ccagcacugucaggcaaga

SEQ ID NO: 3008044 - RNA, 19 nt, Artificial Sequence
  Description of Artificial Sequence: Synthetic oligonucleotide
gccauaccauuugcgugaa

SEQ ID NO: 3008045 - RNA, 19 nt, Artificial Sequence
  Description of Artificial Sequence: Synthetic oligonucleotide
cagguccuacgagccggca

SEQ ID NO: 3008046 - RNA, 19 nt, Artificial Sequence
  Description of Artificial Sequence: Synthetic oligonucleotide
cagcacugucaggcaagaa

SEQ ID NO: 3008047 - RNA, 19 nt, Artificial Sequence
  Description of Artificial Sequence: Synthetic oligonucleotide
gcaagaaguugaagaugau

SEQ ID NO: 3008048 - RNA, 19 nt, Artificial Sequence
  Description of Artificial Sequence: Synthetic oligonucleotide
ccucuugguugaggaagca

SEQ ID NO: 3008049 - RNA, 19 nt, Artificial Sequence
  Description of Artificial Sequence: Synthetic oligonucleotide
cacucucgaucggggaggu

SEQ ID NO: 3008050 - RNA, 19 nt, Artificial Sequence
  Description of Artificial Sequence: Synthetic oligonucleotide
ggcagaaguucaggaucgu

SEQ ID NO: 3008051 - RNA, 19 nt, Artificial Sequence
  Description of Artificial Sequence: Synthetic oligonucleotide
gcccguguguggaggccac

SEQ ID NO: 3008052 - RNA, 19 nt, Artificial Sequence
  Description of Artificial Sequence: Synthetic oligonucleotide
gugccggcuccaguuuccu

SEQ ID NO: 3008053 - RNA, 19 nt, Artificial Sequence
  Description of Artificial Sequence: Synthetic oligonucleotide
ggccacccugugccggcuc

SEQ ID NO: 3008054 - RNA, 19 nt, Artificial Sequence
  Description of Artificial Sequence: Synthetic oligonucleotide
cccguguguggaggccacc

SEQ ID NO: 3008055 - RNA, 19 nt, Artificial Sequence
  Description of Artificial Sequence: Synthetic oligonucleotide
cccugugccggcuccaguu

SEQ ID NO: 3008056 - RNA, 19 nt, Artificial Sequence
  Description of Artificial Sequence: Synthetic oligonucleotide
cagcaccuucacucucgau

SEQ ID NO: 3008057 - RNA, 19 nt, Artificial Sequence
  Description of Artificial Sequence: Synthetic oligonucleotide
cggcuccaguuuccugagc

SEQ ID NO: 3008058 - RNA, 19 nt, Artificial Sequence
  Description of Artificial Sequence: Synthetic oligonucleotide
ccguccucaccucuugguu

SEQ ID NO: 3008059 - RNA, 19 nt, Artificial Sequence
  Description of Artificial Sequence: Synthetic oligonucleotide
ccauaccauuugcgugaaa

SEQ ID NO: 3008060 - RNA, 19 nt, Artificial Sequence
  Description of Artificial Sequence: Synthetic oligonucleotide
cguguguggaggccacccu

SEQ ID NO: 3008061 - RNA, 19 nt, Artificial Sequence
  Description of Artificial Sequence: Synthetic oligonucleotide
ccugagcaggaugcaaauu

SEQ ID NO: 3008062 - RNA, 19 nt, Artificial Sequence
  Description of Artificial Sequence: Synthetic oligonucleotide
cgccaguacugagcccgug

SEQ ID NO: 3008063 - RNA, 19 nt, Artificial Sequence
  Description of Artificial Sequence: Synthetic oligonucleotide
ccugugccggcuccaguuu

SEQ ID NO: 3008064 - RNA, 19 nt, Artificial Sequence
  Description of Artificial Sequence: Synthetic oligonucleotide
ccacccugugccggcucca

SEQ ID NO: 3008065 - RNA, 19 nt, Artificial Sequence
  Description of Artificial Sequence: Synthetic oligonucleotide
gcuccagggguaggcggau

SEQ ID NO: 3008066 - RNA, 19 nt, Artificial Sequence
  Description of Artificial Sequence: Synthetic oligonucleotide
gcccuggaaggagcccagu

SEQ ID NO: 3008067 - RNA, 19 nt, Artificial Sequence
  Description of Artificial Sequence: Synthetic oligonucleotide
cggggaggugugguccaau

SEQ ID NO: 3008068 - RNA, 19 nt, Artificial Sequence
  Description of Artificial Sequence: Synthetic oligonucleotide
uuuaacaucaguaugaauu

SEQ ID NO: 3008069 - RNA, 19 nt, Artificial Sequence
  Description of Artificial Sequence: Synthetic oligonucleotide
auuguguacauucauaagg

SEQ ID NO: 3008070 - RNA, 19 nt, Artificial Sequence
  Description of Artificial Sequence: Synthetic oligonucleotide
ucuaaaaugcccaagaaau

SEQ ID NO: 3008071 - RNA, 19 nt, Artificial Sequence
  Description of Artificial Sequence: Synthetic oligonucleotide
uaaaguacuccccacauug

SEQ ID NO: 3008072 - RNA, 19 nt, Artificial Sequence
  Description of Artificial Sequence: Synthetic oligonucleotide
aauucuaaaaugcccaaga

SEQ ID NO: 3008073 - RNA, 19 nt, Artificial Sequence
  Description of Artificial Sequence: Synthetic oligonucleotide
uguaccacgaauaaagccu

SEQ ID NO: 3008074 - RNA, 19 nt, Artificial Sequence
  Description of Artificial Sequence: Synthetic oligonucleotide
uugauguacuuuaagaucu

SEQ ID NO: 3008075 - RNA, 19 nt, Artificial Sequence
  Description of Artificial Sequence: Synthetic oligonucleotide
auuccuuacauugaaaggg

SEQ ID NO: 3008076 - RNA, 19 nt, Artificial Sequence
  Description of Artificial Sequence: Synthetic oligonucleotide
ucucucgugaauucgaagg

SEQ ID NO: 3008077 - RNA, 19 nt, Artificial Sequence
  Description of Artificial Sequence: Synthetic oligonucleotide
aguaaguugguacugaagu

SEQ ID NO: 3008078 - RNA, 19 nt, Artificial Sequence
  Description of Artificial Sequence: Synthetic oligonucleotide
ugaaagcugacccacacug

SEQ ID NO: 3008079 - RNA, 19 nt, Artificial Sequence
  Description of Artificial Sequence: Synthetic oligonucleotide
auugaaagggcuucucacc

SEQ ID NO: 3008080 - RNA, 19 nt, Artificial Sequence
  Description of Artificial Sequence: Synthetic oligonucleotide
ugguacugaagucugaaag

SEQ ID NO: 3008081 - RNA, 19 nt, Artificial Sequence
  Description of Artificial Sequence: Synthetic oligonucleotide
ucuuugauguacuuuaaga

SEQ ID NO: 3008082 - RNA, 19 nt, Artificial Sequence
  Description of Artificial Sequence: Synthetic oligonucleotide
acugaaaggguuuaacauc

SEQ ID NO: 3008083 - RNA, 19 nt, Artificial Sequence
  Description of Artificial Sequence: Synthetic oligonucleotide
acauuccuuacauugaaag

SEQ ID NO: 3008084 - RNA, 19 nt, Artificial Sequence
  Description of Artificial Sequence: Synthetic oligonucleotide
aauucgaaggccuguacca

SEQ ID NO: 3008085 - RNA, 19 nt, Artificial Sequence
  Description of Artificial Sequence: Synthetic oligonucleotide
aaugauauugaaaggccuc

SEQ ID NO: 3008086 - RNA, 19 nt, Artificial Sequence
  Description of Artificial Sequence: Synthetic oligonucleotide
uaaaaugcccaagaaauug

SEQ ID NO: 3008087 - RNA, 19 nt, Artificial Sequence
  Description of Artificial Sequence: Synthetic oligonucleotide
uguacuuuaagaucugcac

SEQ ID NO: 3008088 - RNA, 19 nt, Artificial Sequence
  Description of Artificial Sequence: Synthetic oligonucleotide
uuugauguacuuuaagauc

SEQ ID NO: 3008089 - RNA, 19 nt, Artificial Sequence
  Description of Artificial Sequence: Synthetic oligonucleotide
uuguguacauucauaagga

SEQ ID NO: 3008090 - RNA, 19 nt, Artificial Sequence
  Description of Artificial Sequence: Synthetic oligonucleotide
uacuuuaagaucugcaccu

SEQ ID NO: 3008091 - RNA, 19 nt, Artificial Sequence
  Description of Artificial Sequence: Synthetic oligonucleotide
uuaacaucaguaugaauuc

SEQ ID NO: 3008092 - RNA, 19 nt, Artificial Sequence
  Description of Artificial Sequence: Synthetic oligonucleotide
aaaaugcccaagaaauugg

SEQ ID NO: 3008093 - RNA, 19 nt, Artificial Sequence
  Description of Artificial Sequence: Synthetic oligonucleotide
aagccuuucccacacaccu

SEQ ID NO: 3008094 - RNA, 19 nt, Artificial Sequence
  Description of Artificial Sequence: Synthetic oligonucleotide
aaggguuuaacaucaguau

SEQ ID NO: 3008095 - RNA, 19 nt, Artificial Sequence
  Description of Artificial Sequence: Synthetic oligonucleotide
uaaugauauugaaaggccu

SEQ ID NO: 3008096 - RNA, 19 nt, Artificial Sequence
  Description of Artificial Sequence: Synthetic oligonucleotide
aaggauucuugccagugug

SEQ ID NO: 3008097 - RNA, 19 nt, Artificial Sequence
  Description of Artificial Sequence: Synthetic oligonucleotide
acaccuugcacugaaaggg

SEQ ID NO: 3008098 - RNA, 19 nt, Artificial Sequence
  Description of Artificial Sequence: Synthetic oligonucleotide
ugcaccucgaguaaaguac

SEQ ID NO: 3008099 - RNA, 19 nt, Artificial Sequence
  Description of Artificial Sequence: Synthetic oligonucleotide
uucuaaaaugcccaagaaa

SEQ ID NO: 3008100 - RNA, 19 nt, Artificial Sequence
  Description of Artificial Sequence: Synthetic oligonucleotide
aagaucugcaccucgagua

SEQ ID NO: 3008101 - RNA, 19 nt, Artificial Sequence
  Description of Artificial Sequence: Synthetic oligonucleotide
aaagcugacccacacugcu

SEQ ID NO: 3008102 - RNA, 19 nt, Artificial Sequence
  Description of Artificial Sequence: Synthetic oligonucleotide
aaugcucuggugccgagug

SEQ ID NO: 3008103 - RNA, 19 nt, Artificial Sequence
  Description of Artificial Sequence: Synthetic oligonucleotide
cauuccuuacauugaaagg

SEQ ID NO: 3008104 - RNA, 19 nt, Artificial Sequence
  Description of Artificial Sequence: Synthetic oligonucleotide
uuuaagaucugcaccucga

SEQ ID NO: 3008105 - RNA, 19 nt, Artificial Sequence
  Description of Artificial Sequence: Synthetic oligonucleotide
acgaauaaagccuuuccca

SEQ ID NO: 3008106 - RNA, 19 nt, Artificial Sequence
  Description of Artificial Sequence: Synthetic oligonucleotide
augcugaguaaguugguac

SEQ ID NO: 3008107 - RNA, 19 nt, Artificial Sequence
  Description of Artificial Sequence: Synthetic oligonucleotide
augauauugaaaggccucc

SEQ ID NO: 3008108 - RNA, 19 nt, Artificial Sequence
  Description of Artificial Sequence: Synthetic oligonucleotide
guacuuuaagaucugcacc

SEQ ID NO: 3008109 - RNA, 19 nt, Artificial Sequence
  Description of Artificial Sequence: Synthetic oligonucleotide
gaauucgaaggccuguacc

SEQ ID NO: 3008110 - RNA, 19 nt, Artificial Sequence
  Description of Artificial Sequence: Synthetic oligonucleotide
gauauugaaaggccucccc

SEQ ID NO: 3008111 - RNA, 19 nt, Artificial Sequence
  Description of Artificial Sequence: Synthetic oligonucleotide
guaaugauauugaaaggcc

SEQ ID NO: 3008112 - RNA, 19 nt, Artificial Sequence
  Description of Artificial Sequence: Synthetic oligonucleotide
acauuguguacauucauaa

SEQ ID NO: 3008113 - RNA, 19 nt, Artificial Sequence
  Description of Artificial Sequence: Synthetic oligonucleotide
uuaagaucugcaccucgag

SEQ ID NO: 3008114 - RNA, 19 nt, Artificial Sequence
  Description of Artificial Sequence: Synthetic oligonucleotide
cacucaaaagacuucuccc

SEQ ID NO: 3008115 - RNA, 19 nt, Artificial Sequence
  Description of Artificial Sequence: Synthetic oligonucleotide
ucgaguaaaguacucccca

SEQ ID NO: 3008116 - RNA, 19 nt, Artificial Sequence
  Description of Artificial Sequence: Synthetic oligonucleotide
aaaggguuuaacaucagua

SEQ ID NO: 3008117 - RNA, 19 nt, Artificial Sequence
  Description of Artificial Sequence: Synthetic oligonucleotide
aaguacuccccacauugug

SEQ ID NO: 3008118 - RNA, 19 nt, Artificial Sequence
  Description of Artificial Sequence: Synthetic oligonucleotide
cacgaauaaagccuuuccc

SEQ ID NO: 3008119 - RNA, 19 nt, Artificial Sequence
  Description of Artificial Sequence: Synthetic oligonucleotide
aggguuuaacaucaguaug

SEQ ID NO: 3008120 - RNA, 19 nt, Artificial Sequence
  Description of Artificial Sequence: Synthetic oligonucleotide
cuguaccacgaauaaagcc

SEQ ID NO: 3008121 - RNA, 19 nt, Artificial Sequence
  Description of Artificial Sequence: Synthetic oligonucleotide
cauugaaagggcuucucac

SEQ ID NO: 3008122 - RNA, 19 nt, Artificial Sequence
  Description of Artificial Sequence: Synthetic oligonucleotide
cuuuaagaucugcaccucg

SEQ ID NO: 3008123 - RNA, 19 nt, Artificial Sequence
  Description of Artificial Sequence: Synthetic oligonucleotide
guaugaaugcucuggugcc

SEQ ID NO: 3008124 - RNA, 19 nt, Artificial Sequence
  Description of Artificial Sequence: Synthetic oligonucleotide
auauugaaaggccucccca

SEQ ID NO: 3008125 - RNA, 19 nt, Artificial Sequence
  Description of Artificial Sequence: Synthetic oligonucleotide
uauugaaaggccuccccac

SEQ ID NO: 3008126 - RNA, 19 nt, Artificial Sequence
  Description of Artificial Sequence: Synthetic oligonucleotide
augcccaagaaauugguaa

SEQ ID NO: 3008127 - RNA, 19 nt, Artificial Sequence
  Description of Artificial Sequence: Synthetic oligonucleotide
cugaaaggguuuaacauca

SEQ ID NO: 3008128 - RNA, 19 nt, Artificial Sequence
  Description of Artificial Sequence: Synthetic oligonucleotide
acacaccuugcacugaaag

SEQ ID NO: 3008129 - RNA, 19 nt, Artificial Sequence
  Description of Artificial Sequence: Synthetic oligonucleotide
aguaaaguacuccccacau

SEQ ID NO: 3008130 - RNA, 19 nt, Artificial Sequence
  Description of Artificial Sequence: Synthetic oligonucleotide
cacaccuugcacugaaagg

SEQ ID NO: 3008131 - RNA, 19 nt, Artificial Sequence
  Description of Artificial Sequence: Synthetic oligonucleotide
agucugaaagcugacccac

SEQ ID NO: 3008132 - RNA, 19 nt, Artificial Sequence
  Description of Artificial Sequence: Synthetic oligonucleotide
uucgaaggccuguaccacg

SEQ ID NO: 3008133 - RNA, 19 nt, Artificial Sequence
  Description of Artificial Sequence: Synthetic oligonucleotide
cuuacauugaaagggcuuc

SEQ ID NO: 3008134 - RNA, 19 nt, Artificial Sequence
  Description of Artificial Sequence: Synthetic oligonucleotide
gguacugaagucugaaagc

SEQ ID NO: 3008135 - RNA, 19 nt, Artificial Sequence
  Description of Artificial Sequence: Synthetic oligonucleotide
uaagaucugcaccucgagu

SEQ ID NO: 3008136 - RNA, 19 nt, Artificial Sequence
  Description of Artificial Sequence: Synthetic oligonucleotide
gaauucuaaaaugcccaag

SEQ ID NO: 3008137 - RNA, 19 nt, Artificial Sequence
  Description of Artificial Sequence: Synthetic oligonucleotide
cauuguguacauucauaag

SEQ ID NO: 3008138 - RNA, 19 nt, Artificial Sequence
  Description of Artificial Sequence: Synthetic oligonucleotide
accucgaguaaaguacucc

SEQ ID NO: 3008139 - RNA, 19 nt, Artificial Sequence
  Description of Artificial Sequence: Synthetic oligonucleotide
ugaauucuaaaaugcccaa

SEQ ID NO: 3008140 - RNA, 19 nt, Artificial Sequence
  Description of Artificial Sequence: Synthetic oligonucleotide
ugcugaguaaguugguacu

SEQ ID NO: 3008141 - RNA, 19 nt, Artificial Sequence
  Description of Artificial Sequence: Synthetic oligonucleotide
uaugaaugcucuggugccg

SEQ ID NO: 3008142 - RNA, 19 nt, Artificial Sequence
  Description of Artificial Sequence: Synthetic oligonucleotide
gugaauucuaaaaugccca

SEQ ID NO: 3008143 - RNA, 19 nt, Artificial Sequence
  Description of Artificial Sequence: Synthetic oligonucleotide
cucgaguaaaguacucccc

SEQ ID NO: 3008144 - RNA, 19 nt, Artificial Sequence
  Description of Artificial Sequence: Synthetic oligonucleotide
gaauaaagccuuucccaca

SEQ ID NO: 3008145 - RNA, 19 nt, Artificial Sequence
  Description of Artificial Sequence: Synthetic oligonucleotide
auucuaaaaugcccaagaa

SEQ ID NO: 3008146 - RNA, 19 nt, Artificial Sequence
  Description of Artificial Sequence: Synthetic oligonucleotide
acauugaaagggcuucuca

SEQ ID NO: 3008147 - RNA, 19 nt, Artificial Sequence
  Description of Artificial Sequence: Synthetic oligonucleotide
ugauguacuuuaagaucug

SEQ ID NO: 3008148 - RNA, 19 nt, Artificial Sequence
  Description of Artificial Sequence: Synthetic oligonucleotide
uaaggauucuugccagugu

SEQ ID NO: 3008149 - RNA, 19 nt, Artificial Sequence
  Description of Artificial Sequence: Synthetic oligonucleotide
cucucgugaauucgaaggc

SEQ ID NO: 3008150 - RNA, 19 nt, Artificial Sequence
  Description of Artificial Sequence: Synthetic oligonucleotide
aaggccuccccacauuccu

SEQ ID NO: 3008151 - RNA, 19 nt, Artificial Sequence
  Description of Artificial Sequence: Synthetic oligonucleotide
uucucaucagugugaauuc

SEQ ID NO: 3008152 - RNA, 19 nt, Artificial Sequence
  Description of Artificial Sequence: Synthetic oligonucleotide
ugaauucgaaggccuguac

SEQ ID NO: 3008153 - RNA, 19 nt, Artificial Sequence
  Description of Artificial Sequence: Synthetic oligonucleotide
guaaguugguacugaaguc

SEQ ID NO: 3008154 - RNA, 19 nt, Artificial Sequence
  Description of Artificial Sequence: Synthetic oligonucleotide
uucucucgugaauucgaag

SEQ ID NO: 3008155 - RNA, 19 nt, Artificial Sequence
  Description of Artificial Sequence: Synthetic oligonucleotide
gauguacuuuaagaucugc

SEQ ID NO: 3008156 - RNA, 19 nt, Artificial Sequence
  Description of Artificial Sequence: Synthetic oligonucleotide
ugaaaggguuuaacaucag

SEQ ID NO: 3008157 - RNA, 19 nt, Artificial Sequence
  Description of Artificial Sequence: Synthetic oligonucleotide
uccccaguaugaaugcucu

SEQ ID NO: 3008158 - RNA, 19 nt, Artificial Sequence
  Description of Artificial Sequence: Synthetic oligonucleotide
ugauauugaaaggccuccc

SEQ ID NO: 3008159 - RNA, 19 nt, Artificial Sequence
  Description of Artificial Sequence: Synthetic oligonucleotide
auugaaaggccuccccaca

SEQ ID NO: 3008160 - RNA, 19 nt, Artificial Sequence
  Description of Artificial Sequence: Synthetic oligonucleotide
gccuguaccacgaauaaag

SEQ ID NO: 3008161 - RNA, 19 nt, Artificial Sequence
  Description of Artificial Sequence: Synthetic oligonucleotide
gaguaaaguacuccccaca

SEQ ID NO: 3008162 - RNA, 19 nt, Artificial Sequence
  Description of Artificial Sequence: Synthetic oligonucleotide
aaguugguacugaagucug

SEQ ID NO: 3008163 - RNA, 19 nt, Artificial Sequence
  Description of Artificial Sequence: Synthetic oligonucleotide
aaaugcccaagaaauuggu

SEQ ID NO: 3008164 - RNA, 19 nt, Artificial Sequence
  Description of Artificial Sequence: Synthetic oligonucleotide
ugaguaaguugguacugaa

SEQ ID NO: 3008165 - RNA, 19 nt, Artificial Sequence
  Description of Artificial Sequence: Synthetic oligonucleotide
gaguaaguugguacugaag

SEQ ID NO: 3008166 - RNA, 19 nt, Artificial Sequence
  Description of Artificial Sequence: Synthetic oligonucleotide
uguggauucucucgugaau

SEQ ID NO: 3008167 - RNA, 19 nt, Artificial Sequence
  Description of Artificial Sequence: Synthetic oligonucleotide
uguguacauucauaaggau

SEQ ID NO: 3008168 - RNA, 19 nt, Artificial Sequence
  Description of Artificial Sequence: Synthetic oligonucleotide
caucagugugaauucuuug

SEQ ID NO: 3008169 - RNA, 19 nt, Artificial Sequence
  Description of Artificial Sequence: Synthetic oligonucleotide
auucgaaggccuguaccac

SEQ ID NO: 3008170 - RNA, 19 nt, Artificial Sequence
  Description of Artificial Sequence: Synthetic oligonucleotide
ucgaaggccuguaccacga

SEQ ID NO: 3008171 - RNA, 19 nt, Artificial Sequence
  Description of Artificial Sequence: Synthetic oligonucleotide
ugcucuggugccgagugag

SEQ ID NO: 3008172 - RNA, 19 nt, Artificial Sequence
  Description of Artificial Sequence: Synthetic oligonucleotide
agcugacccacacugcuca

SEQ ID NO: 3008173 - RNA, 19 nt, Artificial Sequence
  Description of Artificial Sequence: Synthetic oligonucleotide
accacgaauaaagccuuuc

SEQ ID NO: 3008174 - RNA, 19 nt, Artificial Sequence
  Description of Artificial Sequence: Synthetic oligonucleotide
ugcccaagaaauugguaau

SEQ ID NO: 3008175 - RNA, 19 nt, Artificial Sequence
  Description of Artificial Sequence: Synthetic oligonucleotide
ugcacugaaaggguuuaac

SEQ ID NO: 3008176 - RNA, 19 nt, Artificial Sequence
  Description of Artificial Sequence: Synthetic oligonucleotide
ucgugaauucgaaggccug

SEQ ID NO: 3008177 - RNA, 19 nt, Artificial Sequence
  Description of Artificial Sequence: Synthetic oligonucleotide
acuuuaagaucugcaccuc

SEQ ID NO: 3008178 - RNA, 19 nt, Artificial Sequence
  Description of Artificial Sequence: Synthetic oligonucleotide
gauucucucgugaauucga

SEQ ID NO: 3008179 - RNA, 19 nt, Artificial Sequence
  Description of Artificial Sequence: Synthetic oligonucleotide
uugccagugugaauucuaa

SEQ ID NO: 3008180 - RNA, 19 nt, Artificial Sequence
  Description of Artificial Sequence: Synthetic oligonucleotide
uggauucucucgugaauuc

SEQ ID NO: 3008181 - RNA, 19 nt, Artificial Sequence
  Description of Artificial Sequence: Synthetic oligonucleotide
auguacuuuaagaucugca

SEQ ID NO: 3008182 - RNA, 19 nt, Artificial Sequence
  Description of Artificial Sequence: Synthetic oligonucleotide
ucuggugccgagugagcug

SEQ ID NO: 3008183 - RNA, 19 nt, Artificial Sequence
  Description of Artificial Sequence: Synthetic oligonucleotide
aaaguacuccccacauugu

SEQ ID NO: 3008184 - RNA, 19 nt, Artificial Sequence
  Description of Artificial Sequence: Synthetic oligonucleotide
gaaagcugacccacacugc

SEQ ID NO: 3008185 - RNA, 19 nt, Artificial Sequence
  Description of Artificial Sequence: Synthetic oligonucleotide
ccucgaguaaaguacuccc

SEQ ID NO: 3008186 - RNA, 19 nt, Artificial Sequence
  Description of Artificial Sequence: Synthetic oligonucleotide
ggguuuaacaucaguauga

SEQ ID NO: 3008187 - RNA, 19 nt, Artificial Sequence
  Description of Artificial Sequence: Synthetic oligonucleotide
aaggccuguaccacgaaua

SEQ ID NO: 3008188 - RNA, 19 nt, Artificial Sequence
  Description of Artificial Sequence: Synthetic oligonucleotide
ugaugcugaguaaguuggu

SEQ ID NO: 3008189 - RNA, 19 nt, Artificial Sequence
  Description of Artificial Sequence: Synthetic oligonucleotide
gaaaggguuuaacaucagu

SEQ ID NO: 3008190 - RNA, 19 nt, Artificial Sequence
  Description of Artificial Sequence: Synthetic oligonucleotide
ugccgagugagcugugcca

SEQ ID NO: 3008191 - RNA, 19 nt, Artificial Sequence
  Description of Artificial Sequence: Synthetic oligonucleotide
ucucaucagugugaauucu

SEQ ID NO: 3008192 - RNA, 19 nt, Artificial Sequence
  Description of Artificial Sequence: Synthetic oligonucleotide
aguacuccccacauugugu

SEQ ID NO: 3008193 - RNA, 19 nt, Artificial Sequence
  Description of Artificial Sequence: Synthetic oligonucleotide
agaucugcaccucgaguaa

SEQ ID NO: 3008194 - RNA, 19 nt, Artificial Sequence
  Description of Artificial Sequence: Synthetic oligonucleotide
aagcugacccacacugcuc

SEQ ID NO: 3008195 - RNA, 19 nt, Artificial Sequence
  Description of Artificial Sequence: Synthetic oligonucleotide
gccagugugaauucuaaaa

SEQ ID NO: 3008196 - RNA, 19 nt, Artificial Sequence
  Description of Artificial Sequence: Synthetic oligonucleotide
cugaagucugaaagcugac

SEQ ID NO: 3008197 - RNA, 19 nt, Artificial Sequence
  Description of Artificial Sequence: Synthetic oligonucleotide
ggauucucucgugaauucg

SEQ ID NO: 3008198 - RNA, 19 nt, Artificial Sequence
  Description of Artificial Sequence: Synthetic oligonucleotide
aaugcccaagaaauuggua

SEQ ID NO: 3008199 - RNA, 19 nt, Artificial Sequence
  Description of Artificial Sequence: Synthetic oligonucleotide
ugaaugcucuggugccgag

SEQ ID NO: 3008200 - RNA, 19 nt, Artificial Sequence
  Description of Artificial Sequence: Synthetic oligonucleotide
cacugaaaggguuuaacau

SEQ ID NO: 3008201 - RNA, 19 nt, Artificial Sequence
  Description of Artificial Sequence: Synthetic oligonucleotide
cacauuguguacauucaua

SEQ ID NO: 3008202 - RNA, 19 nt, Artificial Sequence
  Description of Artificial Sequence: Synthetic oligonucleotide
guacugaagucugaaagcu

SEQ ID NO: 3008203 - RNA, 19 nt, Artificial Sequence
  Description of Artificial Sequence: Synthetic oligonucleotide
ugaaaggccuccccacauu

SEQ ID NO: 3008204 - RNA, 19 nt, Artificial Sequence
  Description of Artificial Sequence: Synthetic oligonucleotide
gcacugaaaggguuuaaca

SEQ ID NO: 3008205 - RNA, 19 nt, Artificial Sequence
  Description of Artificial Sequence: Synthetic oligonucleotide
ccacgaauaaagccuuucc

SEQ ID NO: 3008206 - RNA, 19 nt, Artificial Sequence
  Description of Artificial Sequence: Synthetic oligonucleotide
ccuguaccacgaauaaagc

SEQ ID NO: 3008207 - RNA, 19 nt, Artificial Sequence
  Description of Artificial Sequence: Synthetic oligonucleotide
gaugcugaguaaguuggua

SEQ ID NO: 3008208 - RNA, 19 nt, Artificial Sequence
  Description of Artificial Sequence: Synthetic oligonucleotide
ugccagugugaauucuaaa

SEQ ID NO: 3008209 - RNA, 19 nt, Artificial Sequence
  Description of Artificial Sequence: Synthetic oligonucleotide
guugguacugaagucugaa

SEQ ID NO: 3008210 - RNA, 19 nt, Artificial Sequence
  Description of Artificial Sequence: Synthetic oligonucleotide
aggccuguaccacgaauaa

SEQ ID NO: 3008211 - RNA, 19 nt, Artificial Sequence
  Description of Artificial Sequence: Synthetic oligonucleotide
ucugcaccucgaguaaagu

SEQ ID NO: 3008212 - RNA, 19 nt, Artificial Sequence
  Description of Artificial Sequence: Synthetic oligonucleotide
aucugcaccucgaguaaag

SEQ ID NO: 3008213 - RNA, 19 nt, Artificial Sequence
  Description of Artificial Sequence: Synthetic oligonucleotide
ucuugccagugugaauucu

SEQ ID NO: 3008214 - RNA, 19 nt, Artificial Sequence
  Description of Artificial Sequence: Synthetic oligonucleotide
gccuuucccacacaccuug

SEQ ID NO: 3008215 - RNA, 19 nt, Artificial Sequence
  Description of Artificial Sequence: Synthetic oligonucleotide
gugccgagugagcugugcc

SEQ ID NO: 3008216 - RNA, 19 nt, Artificial Sequence
  Description of Artificial Sequence: Synthetic oligonucleotide
guacuccccacauugugua

SEQ ID NO: 3008217 - RNA, 19 nt, Artificial Sequence
  Description of Artificial Sequence: Synthetic oligonucleotide
augaaugcucuggugccga

SEQ ID NO: 3008218 - RNA, 19 nt, Artificial Sequence
  Description of Artificial Sequence: Synthetic oligonucleotide
agacuucuccccaguauga

SEQ ID NO: 3008219 - RNA, 19 nt, Artificial Sequence
  Description of Artificial Sequence: Synthetic oligonucleotide
cugaguaaguugguacuga

SEQ ID NO: 3008220 - RNA, 19 nt, Artificial Sequence
  Description of Artificial Sequence: Synthetic oligonucleotide
cucgugaauucgaaggccu

SEQ ID NO: 3008221 - RNA, 19 nt, Artificial Sequence
  Description of Artificial Sequence: Synthetic oligonucleotide
cuaaaaugcccaagaaauu

SEQ ID NO: 3008222 - RNA, 19 nt, Artificial Sequence
  Description of Artificial Sequence: Synthetic oligonucleotide
uacuccccacauuguguac

SEQ ID NO: 3008223 - RNA, 19 nt, Artificial Sequence
  Description of Artificial Sequence: Synthetic oligonucleotide
gcugaguaaguugguacug

SEQ ID NO: 3008224 - RNA, 19 nt, Artificial Sequence
  Description of Artificial Sequence: Synthetic oligonucleotide
aggauucuugccaguguga

SEQ ID NO: 3008225 - RNA, 19 nt, Artificial Sequence
  Description of Artificial Sequence: Synthetic oligonucleotide
gugaauucuuugauguacu

SEQ ID NO: 3008226 - RNA, 19 nt, Artificial Sequence
  Description of Artificial Sequence: Synthetic oligonucleotide
gguuuaacaucaguaugaa

SEQ ID NO: 3008227 - RNA, 19 nt, Artificial Sequence
  Description of Artificial Sequence: Synthetic oligonucleotide
guguacauucauaaggauu

SEQ ID NO: 3008228 - RNA, 19 nt, Artificial Sequence
  Description of Artificial Sequence: Synthetic oligonucleotide
caccucgaguaaaguacuc

SEQ ID NO: 3008229 - RNA, 19 nt, Artificial Sequence
  Description of Artificial Sequence: Synthetic oligonucleotide
auucucucgugaauucgaa

SEQ ID NO: 3008230 - RNA, 19 nt, Artificial Sequence
  Description of Artificial Sequence: Synthetic oligonucleotide
guuuaacaucaguaugaau

SEQ ID NO: 3008231 - RNA, 19 nt, Artificial Sequence
  Description of Artificial Sequence: Synthetic oligonucleotide
cugcaccucgaguaaagua

SEQ ID NO: 3008232 - RNA, 19 nt, Artificial Sequence
  Description of Artificial Sequence: Synthetic oligonucleotide
gauucuugccagugugaau

SEQ ID NO: 3008233 - RNA, 19 nt, Artificial Sequence
  Description of Artificial Sequence: Synthetic oligonucleotide
aguugguacugaagucuga

SEQ ID NO: 3008234 - RNA, 19 nt, Artificial Sequence
  Description of Artificial Sequence: Synthetic oligonucleotide
gaaggccuguaccacgaau

SEQ ID NO: 3008235 - RNA, 19 nt, Artificial Sequence
  Description of Artificial Sequence: Synthetic oligonucleotide
uaccacgaauaaagccuuu

SEQ ID NO: 3008236 - RNA, 19 nt, Artificial Sequence
  Description of Artificial Sequence: Synthetic oligonucleotide
gcccaagaaauugguaaug

SEQ ID NO: 3008237 - RNA, 19 nt, Artificial Sequence
  Description of Artificial Sequence: Synthetic oligonucleotide
gacuucuccccaguaugaa

SEQ ID NO: 3008238 - RNA, 19 nt, Artificial Sequence
  Description of Artificial Sequence: Synthetic oligonucleotide
gaucugcaccucgaguaaa

SEQ ID NO: 3008239 - RNA, 19 nt, Artificial Sequence
  Description of Artificial Sequence: Synthetic oligonucleotide
ggauucuugccagugugaa

SEQ ID NO: 3008240 - RNA, 19 nt, Artificial Sequence
  Description of Artificial Sequence: Synthetic oligonucleotide
uugcacugaaaggguuuaa

SEQ ID NO: 3008241 - RNA, 19 nt, Artificial Sequence
  Description of Artificial Sequence: Synthetic oligonucleotide
gugaauucgaaggccugua

SEQ ID NO: 3008242 - RNA, 19 nt, Artificial Sequence
  Description of Artificial Sequence: Synthetic oligonucleotide
cgaguaaaguacuccccac

SEQ ID NO: 3008243 - RNA, 19 nt, Artificial Sequence
  Description of Artificial Sequence: Synthetic oligonucleotide
gccgagugagcugugccag

SEQ ID NO: 3008244 - RNA, 19 nt, Artificial Sequence
  Description of Artificial Sequence: Synthetic oligonucleotide
guaaaguacuccccacauu

SEQ ID NO: 3008245 - RNA, 19 nt, Artificial Sequence
  Description of Artificial Sequence: Synthetic oligonucleotide
augcucuggugccgaguga

SEQ ID NO: 3008246 - RNA, 19 nt, Artificial Sequence
  Description of Artificial Sequence: Synthetic oligonucleotide
guggauucucucgugaauu

SEQ ID NO: 3008247 - RNA, 19 nt, Artificial Sequence
  Description of Artificial Sequence: Synthetic oligonucleotide
uccccacauuccuuacauu

SEQ ID NO: 3008248 - RNA, 19 nt, Artificial Sequence
  Description of Artificial Sequence: Synthetic oligonucleotide
cucaucagugugaauucuu

SEQ ID NO: 3008249 - RNA, 19 nt, Artificial Sequence
  Description of Artificial Sequence: Synthetic oligonucleotide
ccagugugaauucuaaaau

SEQ ID NO: 3008250 - RNA, 19 nt, Artificial Sequence
  Description of Artificial Sequence: Synthetic oligonucleotide
gucugaaagcugacccaca

SEQ ID NO: 3008251 - RNA, 19 nt, Artificial Sequence
  Description of Artificial Sequence: Synthetic oligonucleotide
caccuugcacugaaagggu

SEQ ID NO: 3008252 - RNA, 19 nt, Artificial Sequence
  Description of Artificial Sequence: Synthetic oligonucleotide
accuugcacugaaaggguu

SEQ ID NO: 3008253 - RNA, 19 nt, Artificial Sequence
  Description of Artificial Sequence: Synthetic oligonucleotide
guaccacgaauaaagccuu

SEQ ID NO: 3008254 - RNA, 19 nt, Artificial Sequence
  Description of Artificial Sequence: Synthetic oligonucleotide
uggugccgagugagcugug

SEQ ID NO: 3008255 - RNA, 19 nt, Artificial Sequence
  Description of Artificial Sequence: Synthetic oligonucleotide
gaaugcucuggugccgagu

SEQ ID NO: 3008256 - RNA, 19 nt, Artificial Sequence
  Description of Artificial Sequence: Synthetic oligonucleotide
ggugccgagugagcugugc

SEQ ID NO: 3008257 - RNA, 19 nt, Artificial Sequence
  Description of Artificial Sequence: Synthetic oligonucleotide
cucuggugccgagugagcu

SEQ ID NO: 3008258 - RNA, 19 nt, Artificial Sequence
  Description of Artificial Sequence: Synthetic oligonucleotide
cacacaccuugcacugaaa

SEQ ID NO: 3008259 - RNA, 19 nt, Artificial Sequence
  Description of Artificial Sequence: Synthetic oligonucleotide
cuggugccgagugagcugu

SEQ ID NO: 3008260 - RNA, 19 nt, Artificial Sequence
  Description of Artificial Sequence: Synthetic oligonucleotide
ggccuccccacauuccuua

SEQ ID NO: 3008261 - RNA, 19 nt, Artificial Sequence
  Description of Artificial Sequence: Synthetic oligonucleotide
agccuuucccacacaccuu

SEQ ID NO: 3008262 - RNA, 19 nt, Artificial Sequence
  Description of Artificial Sequence: Synthetic oligonucleotide
cucugaugcugaguaaguu

SEQ ID NO: 3008263 - RNA, 19 nt, Artificial Sequence
  Description of Artificial Sequence: Synthetic oligonucleotide
cuccccacauuguguacau

SEQ ID NO: 3008264 - RNA, 19 nt, Artificial Sequence
  Description of Artificial Sequence: Synthetic oligonucleotide
ccccaguaugaaugcucug

SEQ ID NO: 3008265 - RNA, 19 nt, Artificial Sequence
  Description of Artificial Sequence: Synthetic oligonucleotide
ccacacaccuugcacugaa

SEQ ID NO: 3008266 - RNA, 19 nt, Artificial Sequence
  Description of Artificial Sequence: Synthetic oligonucleotide
uccccacauuguguacauu

SEQ ID NO: 3008267 - RNA, 19 nt, Artificial Sequence
  Description of Artificial Sequence: Synthetic oligonucleotide
gcaccucgaguaaaguacu

SEQ ID NO: 3008268 - RNA, 19 nt, Artificial Sequence
  Description of Artificial Sequence: Synthetic oligonucleotide
gccuccccacauuccuuac

SEQ ID NO: 3008269 - RNA, 19 nt, Artificial Sequence
  Description of Artificial Sequence: Synthetic oligonucleotide
ggccuguaccacgaauaaa

SEQ ID NO: 3008270 - RNA, 19 nt, Artificial Sequence
  Description of Artificial Sequence: Synthetic oligonucleotide
aggccuccccacauuccuu

SEQ ID NO: 3008271 - RNA, 19 nt, Artificial Sequence
  Description of Artificial Sequence: Synthetic oligonucleotide
cgugaauucgaaggccugu

SEQ ID NO: 3008272 - RNA, 19 nt, Artificial Sequence
  Description of Artificial Sequence: Synthetic oligonucleotide
cccacacaccuugcacuga

SEQ ID NO: 3008273 - RNA, 19 nt, Artificial Sequence
  Description of Artificial Sequence: Synthetic oligonucleotide
cgaaggccuguaccacgaa

SEQ ID NO: 3008274 - RNA, 19 nt, Artificial Sequence
  Description of Artificial Sequence: Synthetic oligonucleotide
  modified_base (5)..(5): a, c, u, g, unknown or other
ucuunaaaaccuuugauga

SEQ ID NO: 3008275 - RNA, 19 nt, Artificial Sequence
  Description of Artificial Sequence: Synthetic oligonucleotide
aaaaccuuugaugacuucc

SEQ ID NO: 3008276 - RNA, 19 nt, Artificial Sequence
  Description of Artificial Sequence: Synthetic oligonucleotide
aacuugaaagguuuguuuc

SEQ ID NO: 3008277 - RNA, 19 nt, Artificial Sequence
  Description of Artificial Sequence: Synthetic oligonucleotide
aaagguuuguuucugucuc

SEQ ID NO: 3008278 - RNA, 19 nt, Artificial Sequence
  Description of Artificial Sequence: Synthetic oligonucleotide
uccacgucaaagaugaggg

SEQ ID NO: 3008279 - RNA, 19 nt, Artificial Sequence
  Description of Artificial Sequence: Synthetic oligonucleotide
  modified_base (6)..(6): a, c, u, g, unknown or other
uucuunaaaaccuuugaug

SEQ ID NO: 3008280 - RNA, 19 nt, Artificial Sequence
  Description of Artificial Sequence: Synthetic oligonucleotide
uuucuugccauuuuggagc

SEQ ID NO: 3008281 - RNA, 19 nt, Artificial Sequence
  Description of Artificial Sequence: Synthetic oligonucleotide
augaaucaaauuucuugcc

SEQ ID NO: 3008282 - RNA, 19 nt, Artificial Sequence
  Description of Artificial Sequence: Synthetic oligonucleotide
  modified_base (3)..(3): a, c, u, g, unknown or other
uunaaaaccuuugaugacu

SEQ ID NO: 3008283 - RNA, 19 nt, Artificial Sequence
  Description of Artificial Sequence: Synthetic oligonucleotide
agcacacuagaucaagagc

SEQ ID NO: 3008284 - RNA, 19 nt, Artificial Sequence
  Description of Artificial Sequence: Synthetic oligonucleotide
caauucugaacuugaaagg

SEQ ID NO: 3008285 - RNA, 19 nt, Artificial Sequence
  Description of Artificial Sequence: Synthetic oligonucleotide
aauucugaacuugaaaggu

SEQ ID NO: 3008286 - RNA, 19 nt, Artificial Sequence
  Description of Artificial Sequence: Synthetic oligonucleotide
aaauuucuugccauuuugg

SEQ ID NO: 3008287 - RNA, 19 nt, Artificial Sequence
  Description of Artificial Sequence: Synthetic oligonucleotide
ucuggaugaaucaaauuuc

SEQ ID NO: 3008288 - RNA, 19 nt, Artificial Sequence
  Description of Artificial Sequence: Synthetic oligonucleotide
uguaggaggagccauccca

SEQ ID NO: 3008289 - RNA, 19 nt, Artificial Sequence
  Description of Artificial Sequence: Synthetic oligonucleotide
ggaugaaucaaauuucuug

SEQ ID NO: 3008290 - RNA, 19 nt, Artificial Sequence
  Description of Artificial Sequence: Synthetic oligonucleotide
augaggguagcauugggag

SEQ ID NO: 3008291 - RNA, 19 nt, Artificial Sequence
  Description of Artificial Sequence: Synthetic oligonucleotide
uguuuugccaauucugaac

SEQ ID NO: 3008292 - RNA, 19 nt, Artificial Sequence
  Description of Artificial Sequence: Synthetic oligonucleotide
aaguugagcagcuccacgu

SEQ ID NO: 3008293 - RNA, 19 nt, Artificial Sequence
  Description of Artificial Sequence: Synthetic oligonucleotide
ucuaaguugagcagcucca

SEQ ID NO: 3008294 - RNA, 19 nt, Artificial Sequence
  Description of Artificial Sequence: Synthetic oligonucleotide
aggagugcaggucagcuuc

SEQ ID NO: 3008295 - RNA, 19 nt, Artificial Sequence
  Description of Artificial Sequence: Synthetic oligonucleotide
aaagaugaggguagcauug

SEQ ID NO: 3008296 - RNA, 19 nt, Artificial Sequence
  Description of Artificial Sequence: Synthetic oligonucleotide
  modified_base (4)..(4): a, c, u, g, unknown or other
cuunaaaaccuuugaugac

SEQ ID NO: 3008297 - RNA, 19 nt, Artificial Sequence
  Description of Artificial Sequence: Synthetic oligonucleotide
uaaguugagcagcuccacg

SEQ ID NO: 3008298 - RNA, 19 nt, Artificial Sequence
  Description of Artificial Sequence: Synthetic oligonucleotide
uccuguuuugccaauucug

SEQ ID NO: 3008299 - RNA, 19 nt, Artificial Sequence
  Description of Artificial Sequence: Synthetic oligonucleotide
gagagcaggagccaucucc

SEQ ID NO: 3008300 - RNA, 19 nt, Artificial Sequence
  Description of Artificial Sequence: Synthetic oligonucleotide
uccauaugccacaucagga

SEQ ID NO: 3008301 - RNA, 19 nt, Artificial Sequence
  Description of Artificial Sequence: Synthetic oligonucleotide
gaugacuuccuguuuugcc

SEQ ID NO: 3008302 - RNA, 19 nt, Artificial Sequence
  Description of Artificial Sequence: Synthetic oligonucleotide
aggucagcacacuagauca

SEQ ID NO: 3008303 - RNA, 19 nt, Artificial Sequence
  Description of Artificial Sequence: Synthetic oligonucleotide
uuugaugacuuccuguuuu

SEQ ID NO: 3008304 - RNA, 19 nt, Artificial Sequence
  Description of Artificial Sequence: Synthetic oligonucleotide
gaggguagcauugggaggg

SEQ ID NO: 3008305 - RNA, 19 nt, Artificial Sequence
  Description of Artificial Sequence: Synthetic oligonucleotide
agcuccauaugccacauca

SEQ ID NO: 3008306 - RNA, 19 nt, Artificial Sequence
  Description of Artificial Sequence: Synthetic oligonucleotide
uucacucuaaguugagcag

SEQ ID NO: 3008307 - RNA, 19 nt, Artificial Sequence
  Description of Artificial Sequence: Synthetic oligonucleotide
uuguuucugucucuggaug

SEQ ID NO: 3008308 - RNA, 19 nt, Artificial Sequence
  Description of Artificial Sequence: Synthetic oligonucleotide
uagaucaagagcccugugu

SEQ ID NO: 3008309 - RNA, 19 nt, Artificial Sequence
  Description of Artificial Sequence: Synthetic oligonucleotide
cuccauaugccacaucagg

SEQ ID NO: 3008310 - RNA, 19 nt, Artificial Sequence
  Description of Artificial Sequence: Synthetic oligonucleotide
cucuaaguugagcagcucc

SEQ ID NO: 3008311 - RNA, 19 nt, Artificial Sequence
  Description of Artificial Sequence: Synthetic oligonucleotide
caaauuucuugccauuuug

SEQ ID NO: 3008312 - RNA, 19 nt, Artificial Sequence
  Description of Artificial Sequence: Synthetic oligonucleotide
agcaggcuaggacagagag

SEQ ID NO: 3008313 - RNA, 19 nt, Artificial Sequence
  Description of Artificial Sequence: Synthetic oligonucleotide
gucagcuucacccucugcc

SEQ ID NO: 3008314 - RNA, 19 nt, Artificial Sequence
  Description of Artificial Sequence: Synthetic oligonucleotide
aacaggaggggcgagugag

SEQ ID NO: 3008315 - RNA, 19 nt, Artificial Sequence
  Description of Artificial Sequence: Synthetic oligonucleotide
uuugccaauucugaacuug

SEQ ID NO: 3008316 - RNA, 19 nt, Artificial Sequence
  Description of Artificial Sequence: Synthetic oligonucleotide
cuucacucuaaguugagca

SEQ ID NO: 3008317 - RNA, 19 nt, Artificial Sequence
  Description of Artificial Sequence: Synthetic oligonucleotide
gugcaggucagcuucaccc

SEQ ID NO: 3008318 - RNA, 19 nt, Artificial Sequence
  Description of Artificial Sequence: Synthetic oligonucleotide
acuugaaagguuuguuucu

SEQ ID NO: 3008319 - RNA, 19 nt, Artificial Sequence
  Description of Artificial Sequence: Synthetic oligonucleotide
ugaggguagcauugggagg

SEQ ID NO: 3008320 - RNA, 19 nt, Artificial Sequence
  Description of Artificial Sequence: Synthetic oligonucleotide
accucgaguuccuuccugc

SEQ ID NO: 3008321 - RNA, 19 nt, Artificial Sequence
  Description of Artificial Sequence: Synthetic oligonucleotide
ucugaacuugaaagguuug

SEQ ID NO: 3008322 - RNA, 19 nt, Artificial Sequence
  Description of Artificial Sequence: Synthetic oligonucleotide
uguuucugucucuggauga

SEQ ID NO: 3008323 - RNA, 19 nt, Artificial Sequence
  Description of Artificial Sequence: Synthetic oligonucleotide
  modified_base (2)..(2): a, c, u, g, unknown or other
unaaaaccuuugaugacuu

SEQ ID NO: 3008324 - RNA, 19 nt, Artificial Sequence
  Description of Artificial Sequence: Synthetic oligonucleotide
aucaagagcccuguguagg

SEQ ID NO: 3008325 - RNA, 19 nt, Artificial Sequence
  Description of Artificial Sequence: Synthetic oligonucleotide
ugaaagguuuguuucuguc

SEQ ID NO: 3008326 - RNA, 19 nt, Artificial Sequence
  Description of Artificial Sequence: Synthetic oligonucleotide
gaucaagagcccuguguag

SEQ ID NO: 3008327 - RNA, 19 nt, Artificial Sequence
  Description of Artificial Sequence: Synthetic oligonucleotide
uuuguuucugucucuggau

SEQ ID NO: 3008328 - RNA, 19 nt, Artificial Sequence
  Description of Artificial Sequence: Synthetic oligonucleotide
gcacacuagaucaagagcc

SEQ ID NO: 3008329 - RNA, 19 nt, Artificial Sequence
  Description of Artificial Sequence: Synthetic oligonucleotide
ucacucuaaguugagcagc

SEQ ID NO: 3008330 - RNA, 19 nt, Artificial Sequence
  Description of Artificial Sequence: Synthetic oligonucleotide
uugccaauucugaacuuga

SEQ ID NO: 3008331 - RNA, 19 nt, Artificial Sequence
  Description of Artificial Sequence: Synthetic oligonucleotide
agggaugacaccagggugg

SEQ ID NO: 3008332 - RNA, 19 nt, Artificial Sequence
  Description of Artificial Sequence: Synthetic oligonucleotide
agaucaagagcccugugua

SEQ ID NO: 3008333 - RNA, 19 nt, Artificial Sequence
  Description of Artificial Sequence: Synthetic oligonucleotide
auugggagggaugacacca

SEQ ID NO: 3008334 - RNA, 19 nt, Artificial Sequence
  Description of Artificial Sequence: Synthetic oligonucleotide
aaccuuugaugacuuccug

SEQ ID NO: 3008335 - RNA, 19 nt, Artificial Sequence
  Description of Artificial Sequence: Synthetic oligonucleotide
agaugaggguagcauuggg

SEQ ID NO: 3008336 - RNA, 19 nt, Artificial Sequence
  Description of Artificial Sequence: Synthetic oligonucleotide
ucagcacacuagaucaaga

SEQ ID NO: 3008337 - RNA, 19 nt, Artificial Sequence
  Description of Artificial Sequence: Synthetic oligonucleotide
agugcaggucagcuucacc

SEQ ID NO: 3008338 - RNA, 19 nt, Artificial Sequence
  Description of Artificial Sequence: Synthetic oligonucleotide
aguugagcagcuccacguc

SEQ ID NO: 3008339 - RNA, 19 nt, Artificial Sequence
  Description of Artificial Sequence: Synthetic oligonucleotide
aaaccuuugaugacuuccu

SEQ ID NO: 3008340 - RNA, 19 nt, Artificial Sequence
  Description of Artificial Sequence: Synthetic oligonucleotide
ugccuucacucuaaguuga

SEQ ID NO: 3008341 - RNA, 19 nt, Artificial Sequence
  Description of Artificial Sequence: Synthetic oligonucleotide
cagcacacuagaucaagag

SEQ ID NO: 3008342 - RNA, 19 nt, Artificial Sequence
  Description of Artificial Sequence: Synthetic oligonucleotide
caggcuaggacagagagca

SEQ ID NO: 3008343 - RNA, 19 nt, Artificial Sequence
  Description of Artificial Sequence: Synthetic oligonucleotide
aguagcuccauaugccaca

SEQ ID NO: 3008344 - RNA, 19 nt, Artificial Sequence
  Description of Artificial Sequence: Synthetic oligonucleotide
agcuccacgucaaagauga

SEQ ID NO: 3008345 - RNA, 19 nt, Artificial Sequence
  Description of Artificial Sequence: Synthetic oligonucleotide
cuccacgucaaagaugagg

SEQ ID NO: 3008346 - RNA, 19 nt, Artificial Sequence
  Description of Artificial Sequence: Synthetic oligonucleotide
uucugucucuggaugaauc

SEQ ID NO: 3008347 - RNA, 19 nt, Artificial Sequence
  Description of Artificial Sequence: Synthetic oligonucleotide
ugccccaagcucaucuggg

SEQ ID NO: 3008348 - RNA, 19 nt, Artificial Sequence
  Description of Artificial Sequence: Synthetic oligonucleotide
cacacuagaucaagagccc

SEQ ID NO: 3008349 - RNA, 19 nt, Artificial Sequence
  Description of Artificial Sequence: Synthetic oligonucleotide
uugaugacuuccuguuuug

SEQ ID NO: 3008350 - RNA, 19 nt, Artificial Sequence
  Description of Artificial Sequence: Synthetic oligonucleotide
guuuguuucugucucugga

SEQ ID NO: 3008351 - RNA, 19 nt, Artificial Sequence
  Description of Artificial Sequence: Synthetic oligonucleotide
ugucucuggaugaaucaaa

SEQ ID NO: 3008352 - RNA, 19 nt, Artificial Sequence
  Description of Artificial Sequence: Synthetic oligonucleotide
cugccuucacucuaaguug

SEQ ID NO: 3008353 - RNA, 19 nt, Artificial Sequence
  Description of Artificial Sequence: Synthetic oligonucleotide
uuccuguuuugccaauucu

SEQ ID NO: 3008354 - RNA, 19 nt, Artificial Sequence
  Description of Artificial Sequence: Synthetic oligonucleotide
agcagcuccacgucaaaga

SEQ ID NO: 3008355 - RNA, 19 nt, Artificial Sequence
  Description of Artificial Sequence: Synthetic oligonucleotide
uuuugaacaggaggggcga

SEQ ID NO: 3008356 - RNA, 19 nt, Artificial Sequence
  Description of Artificial Sequence: Synthetic oligonucleotide
aagguuuguuucugucucu

SEQ ID NO: 3008357 - RNA, 19 nt, Artificial Sequence
  Description of Artificial Sequence: Synthetic oligonucleotide
accuuugaugacuuccugu

SEQ ID NO: 3008358 - RNA, 19 nt, Artificial Sequence
  Description of Artificial Sequence: Synthetic oligonucleotide
guuuugccaauucugaacu

SEQ ID NO: 3008359 - RNA, 19 nt, Artificial Sequence
  Description of Artificial Sequence: Synthetic oligonucleotide
gaaagguuuguuucugucu

SEQ ID NO: 3008360 - RNA, 19 nt, Artificial Sequence
  Description of Artificial Sequence: Synthetic oligonucleotide
aguuccuuccugccuucac

SEQ ID NO: 3008361 - RNA, 19 nt, Artificial Sequence
  Description of Artificial Sequence: Synthetic oligonucleotide
agugaggucagcacacuag

SEQ ID NO: 3008362 - RNA, 19 nt, Artificial Sequence
  Description of Artificial Sequence: Synthetic oligonucleotide
ucaagagcccuguguagga

SEQ ID NO: 3008363 - RNA, 19 nt, Artificial Sequence
  Description of Artificial Sequence: Synthetic oligonucleotide
ugggagggaugacaccagg

SEQ ID NO: 3008364 - RNA, 19 nt, Artificial Sequence
  Description of Artificial Sequence: Synthetic oligonucleotide
cuugaaagguuuguuucug

SEQ ID NO: 3008365 - RNA, 19 nt, Artificial Sequence
  Description of Artificial Sequence: Synthetic oligonucleotide
uugaaagguuuguuucugu

SEQ ID NO: 3008366 - RNA, 19 nt, Artificial Sequence
  Description of Artificial Sequence: Synthetic oligonucleotide
agcccuguguaggaggagc

SEQ ID NO: 3008367 - RNA, 19 nt, Artificial Sequence
  Description of Artificial Sequence: Synthetic oligonucleotide
ugaacaggaggggcgagug

SEQ ID NO: 3008368 - RNA, 19 nt, Artificial Sequence
  Description of Artificial Sequence: Synthetic oligonucleotide
uucuugccauuuuggagca

SEQ ID NO: 3008369 - RNA, 19 nt, Artificial Sequence
  Description of Artificial Sequence: Synthetic oligonucleotide
uucacccucugccccaagc

SEQ ID NO: 3008370 - RNA, 19 nt, Artificial Sequence
  Description of Artificial Sequence: Synthetic oligonucleotide
  modified_base (12)..(12): a, c, u, g, unknown or other
agcgccuucuunaaaaccu

SEQ ID NO: 3008371 - RNA, 19 nt, Artificial Sequence
  Description of Artificial Sequence: Synthetic oligonucleotide
acgucaaagaugaggguag

SEQ ID NO: 3008372 - RNA, 19 nt, Artificial Sequence
  Description of Artificial Sequence: Synthetic oligonucleotide
ugaacuugaaagguuuguu

SEQ ID NO: 3008373 - RNA, 19 nt, Artificial Sequence
  Description of Artificial Sequence: Synthetic oligonucleotide
uaugccacaucaggagugc

SEQ ID NO: 3008374 - RNA, 19 nt, Artificial Sequence
  Description of Artificial Sequence: Synthetic oligonucleotide
cacuagaucaagagcccug

SEQ ID NO: 3008375 - RNA, 19 nt, Artificial Sequence
  Description of Artificial Sequence: Synthetic oligonucleotide
gaugaggguagcauuggga

SEQ ID NO: 3008376 - RNA, 19 nt, Artificial Sequence
  Description of Artificial Sequence: Synthetic oligonucleotide
agagcaggcuaggacagag

SEQ ID NO: 3008377 - RNA, 19 nt, Artificial Sequence
  Description of Artificial Sequence: Synthetic oligonucleotide
caggguggccaguagcucc

SEQ ID NO: 3008378 - RNA, 19 nt, Artificial Sequence
  Description of Artificial Sequence: Synthetic oligonucleotide
ucgaguuccuuccugccuu

SEQ ID NO: 3008379 - RNA, 19 nt, Artificial Sequence
  Description of Artificial Sequence: Synthetic oligonucleotide
cucuggaugaaucaaauuu

SEQ ID NO: 3008380 - RNA, 19 nt, Artificial Sequence
  Description of Artificial Sequence: Synthetic oligonucleotide
auaugccacaucaggagug

SEQ ID NO: 3008381 - RNA, 19 nt, Artificial Sequence
  Description of Artificial Sequence: Synthetic oligonucleotide
gcaggagccaucuccagcc

SEQ ID NO: 3008382 - RNA, 19 nt, Artificial Sequence
  Description of Artificial Sequence: Synthetic oligonucleotide
ccauaugccacaucaggag

SEQ ID NO: 3008383 - RNA, 19 nt, Artificial Sequence
  Description of Artificial Sequence: Synthetic oligonucleotide
uugggagggaugacaccag

SEQ ID NO: 3008384 - RNA, 19 nt, Artificial Sequence
  Description of Artificial Sequence: Synthetic oligonucleotide
uggaugaaucaaauuucuu

SEQ ID NO: 3008385 - RNA, 19 nt, Artificial Sequence
  Description of Artificial Sequence: Synthetic oligonucleotide
  modified_base (7)..(7): a, c, u, g, unknown or other
cuucuunaaaaccuuugau

SEQ ID NO: 3008386 - RNA, 19 nt, Artificial Sequence
  Description of Artificial Sequence: Synthetic oligonucleotide
acuagaucaagagcccugu

SEQ ID NO: 3008387 - RNA, 19 nt, Artificial Sequence
  Description of Artificial Sequence: Synthetic oligonucleotide
uggccaguagcuccauaug

SEQ ID NO: 3008388 - RNA, 19 nt, Artificial Sequence
  Description of Artificial Sequence: Synthetic oligonucleotide
aggagccaucuccagccac

SEQ ID NO: 3008389 - RNA, 19 nt, Artificial Sequence
  Description of Artificial Sequence: Synthetic oligonucleotide
  modified_base (13)..(13): a, c, u, g, unknown or other
cagcgccuucuunaaaacc

SEQ ID NO: 3008390 - RNA, 19 nt, Artificial Sequence
  Description of Artificial Sequence: Synthetic oligonucleotide
ugaugacuuccuguuuugc

SEQ ID NO: 3008391 - RNA, 19 nt, Artificial Sequence
  Description of Artificial Sequence: Synthetic oligonucleotide
ugcaggucagcuucacccu

SEQ ID NO: 3008392 - RNA, 19 nt, Artificial Sequence
  Description of Artificial Sequence: Synthetic oligonucleotide
gucagcacacuagaucaag

SEQ ID NO: 3008393 - RNA, 19 nt, Artificial Sequence
  Description of Artificial Sequence: Synthetic oligonucleotide
ggcuaggacagagagcagg

SEQ ID NO: 3008394 - RNA, 19 nt, Artificial Sequence
  Description of Artificial Sequence: Synthetic oligonucleotide
cuuccuguuuugccaauuc

SEQ ID NO: 3008395 - RNA, 19 nt, Artificial Sequence
  Description of Artificial Sequence: Synthetic oligonucleotide
aucaaauuucuugccauuu

SEQ ID NO: 3008396 - RNA, 19 nt, Artificial Sequence
  Description of Artificial Sequence: Synthetic oligonucleotide
gaacuugaaagguuuguuu

SEQ ID NO: 3008397 - RNA, 19 nt, Artificial Sequence
  Description of Artificial Sequence: Synthetic oligonucleotide
cauugggagggaugacacc

SEQ ID NO: 3008398 - RNA, 19 nt, Artificial Sequence
  Description of Artificial Sequence: Synthetic oligonucleotide
ggcagagcaggcuaggaca

SEQ ID NO: 3008399 - RNA, 19 nt, Artificial Sequence
  Description of Artificial Sequence: Synthetic oligonucleotide
caguagcuccauaugccac

SEQ ID NO: 3008400 - RNA, 19 nt, Artificial Sequence
  Description of Artificial Sequence: Synthetic oligonucleotide
ugccauuuuggagcauucc

SEQ ID NO: 3008401 - RNA, 19 nt, Artificial Sequence
  Description of Artificial Sequence: Synthetic oligonucleotide
aucaggagugcaggucagc

SEQ ID NO: 3008402 - RNA, 19 nt, Artificial Sequence
  Description of Artificial Sequence: Synthetic oligonucleotide
uugccauuuuggagcauuc

SEQ ID NO: 3008403 - RNA, 19 nt, Artificial Sequence
  Description of Artificial Sequence: Synthetic oligonucleotide
ggagccaucccaguggcag

SEQ ID NO: 3008404 - RNA, 19 nt, Artificial Sequence
  Description of Artificial Sequence: Synthetic oligonucleotide
ugccaauucugaacuugaa

SEQ ID NO: 3008405 - RNA, 19 nt, Artificial Sequence
  Description of Artificial Sequence: Synthetic oligonucleotide
uuugaacaggaggggcgag

SEQ ID NO: 3008406 - RNA, 19 nt, Artificial Sequence
  Description of Artificial Sequence: Synthetic oligonucleotide
agccaccucgaguuccuuc

SEQ ID NO: 3008407 - RNA, 19 nt, Artificial Sequence
  Description of Artificial Sequence: Synthetic oligonucleotide
cuaaguugagcagcuccac

SEQ ID NO: 3008408 - RNA, 19 nt, Artificial Sequence
  Description of Artificial Sequence: Synthetic oligonucleotide
cugccccaagcucaucugg

SEQ ID NO: 3008409 - RNA, 19 nt, Artificial Sequence
  Description of Artificial Sequence: Synthetic oligonucleotide
cuggaugaaucaaauuucu

SEQ ID NO: 3008410 - RNA, 19 nt, Artificial Sequence
  Description of Artificial Sequence: Synthetic oligonucleotide
agguuuguuucugucucug

SEQ ID NO: 3008411 - RNA, 19 nt, Artificial Sequence
  Description of Artificial Sequence: Synthetic oligonucleotide
caucaggagugcaggucag

SEQ ID NO: 3008412 - RNA, 19 nt, Artificial Sequence
  Description of Artificial Sequence: Synthetic oligonucleotide
aguggcagagcaggcuagg

SEQ ID NO: 3008413 - RNA, 19 nt, Artificial Sequence
  Description of Artificial Sequence: Synthetic oligonucleotide
acagagagcaggagccauc

SEQ ID NO: 3008414 - RNA, 19 nt, Artificial Sequence
  Description of Artificial Sequence: Synthetic oligonucleotide
agagcaggagccaucucca

SEQ ID NO: 3008415 - RNA, 19 nt, Artificial Sequence
  Description of Artificial Sequence: Synthetic oligonucleotide
uuuugccaauucugaacuu

SEQ ID NO: 3008416 - RNA, 19 nt, Artificial Sequence
  Description of Artificial Sequence: Synthetic oligonucleotide
caccaggguggccaguagc

SEQ ID NO: 3008417 - RNA, 19 nt, Artificial Sequence
  Description of Artificial Sequence: Synthetic oligonucleotide
cuagaucaagagcccugug

SEQ ID NO: 3008418 - RNA, 19 nt, Artificial Sequence
  Description of Artificial Sequence: Synthetic oligonucleotide
gccaccucgaguuccuucc

SEQ ID NO: 3008419 - RNA, 19 nt, Artificial Sequence
  Description of Artificial Sequence: Synthetic oligonucleotide
uugaacaggaggggcgagu

SEQ ID NO: 3008420 - RNA, 19 nt, Artificial Sequence
  Description of Artificial Sequence: Synthetic oligonucleotide
acacuagaucaagagcccu

SEQ ID NO: 3008421 - RNA, 19 nt, Artificial Sequence
  Description of Artificial Sequence: Synthetic oligonucleotide
agagagcaggagccaucuc

SEQ ID NO: 3008422 - RNA, 19 nt, Artificial Sequence
  Description of Artificial Sequence: Synthetic oligonucleotide
uuccugccuucacucuaag

SEQ ID NO: 3008423 - RNA, 19 nt, Artificial Sequence
  Description of Artificial Sequence: Synthetic oligonucleotide
auucugaacuugaaagguu

SEQ ID NO: 3008424 - RNA, 19 nt, Artificial Sequence
  Description of Artificial Sequence: Synthetic oligonucleotide
ccuguuuugccaauucuga

SEQ ID NO: 3008425 - RNA, 19 nt, Artificial Sequence
  Description of Artificial Sequence: Synthetic oligonucleotide
cacaucaggagugcagguc

SEQ ID NO: 3008426 - RNA, 19 nt, Artificial Sequence
  Description of Artificial Sequence: Synthetic oligonucleotide
gagcaggagccaucuccag

SEQ ID NO: 3008427 - RNA, 19 nt, Artificial Sequence
  Description of Artificial Sequence: Synthetic oligonucleotide
cuguuuugccaauucugaa

SEQ ID NO: 3008428 - RNA, 19 nt, Artificial Sequence
  Description of Artificial Sequence: Synthetic oligonucleotide
cagcuccacgucaaagaug

SEQ ID NO: 3008429 - RNA, 19 nt, Artificial Sequence
  Description of Artificial Sequence: Synthetic oligonucleotide
cuguguaggaggagccauc

SEQ ID NO: 3008430 - RNA, 19 nt, Artificial Sequence
  Description of Artificial Sequence: Synthetic oligonucleotide
cuaggacagagagcaggag

SEQ ID NO: 3008431 - RNA, 19 nt, Artificial Sequence
  Description of Artificial Sequence: Synthetic oligonucleotide
acucuaaguugagcagcuc

SEQ ID NO: 3008432 - RNA, 19 nt, Artificial Sequence
  Description of Artificial Sequence: Synthetic oligonucleotide
aggaggggcgagugagguc

SEQ ID NO: 3008433 - RNA, 19 nt, Artificial Sequence
  Description of Artificial Sequence: Synthetic oligonucleotide
caguggcagagcaggcuag

SEQ ID NO: 3008434 - RNA, 19 nt, Artificial Sequence
  Description of Artificial Sequence: Synthetic oligonucleotide
  modified_base (14)..(14): a, c, u, g, unknown or other
gcagcgccuucuunaaaac

SEQ ID NO: 3008435 - RNA, 19 nt, Artificial Sequence
  Description of Artificial Sequence: Synthetic oligonucleotide
cacgucaaagaugagggua

SEQ ID NO: 3008436 - RNA, 19 nt, Artificial Sequence
  Description of Artificial Sequence: Synthetic oligonucleotide
  modified_base (18)..(18): a, c, u, g, unknown or other
cugggcagcgccuucuuna

SEQ ID NO: 3008437 - RNA, 19 nt, Artificial Sequence
  Description of Artificial Sequence: Synthetic oligonucleotide
uccuuccugccuucacucu

SEQ ID NO: 3008438 - RNA, 19 nt, Artificial Sequence
  Description of Artificial Sequence: Synthetic oligonucleotide
  modified_base (8)..(8): a, c, u, g, unknown or other
ccuucuunaaaaccuuuga

SEQ ID NO: 3008439 - RNA, 19 nt, Artificial Sequence
  Description of Artificial Sequence: Synthetic oligonucleotide
uaggaggagccaucccagu

SEQ ID NO: 3008440 - RNA, 19 nt, Artificial Sequence
  Description of Artificial Sequence: Synthetic oligonucleotide
uccugccuucacucuaagu

SEQ ID NO: 3008441 - RNA, 19 nt, Artificial Sequence
  Description of Artificial Sequence: Synthetic oligonucleotide
  modified_base (17)..(17): a, c, u, g, unknown or other
ugggcagcgccuucuunaa

SEQ ID NO: 3008442 - RNA, 19 nt, Artificial Sequence
  Description of Artificial Sequence: Synthetic oligonucleotide
accaggguggccaguagcu

SEQ ID NO: 3008443 - RNA, 19 nt, Artificial Sequence
  Description of Artificial Sequence: Synthetic oligonucleotide
gccaguagcuccauaugcc

SEQ ID NO: 3008444 - RNA, 19 nt, Artificial Sequence
  Description of Artificial Sequence: Synthetic oligonucleotide
agccaucccaguggcagag

SEQ ID NO: 3008445 - RNA, 19 nt, Artificial Sequence
  Description of Artificial Sequence: Synthetic oligonucleotide
ggaggggcgagugagguca

SEQ ID NO: 3008446 - RNA, 19 nt, Artificial Sequence
  Description of Artificial Sequence: Synthetic oligonucleotide
  modified_base (9)..(9): a, c, u, g, unknown or other
gccuucuunaaaaccuuug

SEQ ID NO: 3008447 - RNA, 19 nt, Artificial Sequence
  Description of Artificial Sequence: Synthetic oligonucleotide
uuucugucucuggaugaau

SEQ ID NO: 3008448 - RNA, 19 nt, Artificial Sequence
  Description of Artificial Sequence: Synthetic oligonucleotide
ggcgagugaggucagcaca

SEQ ID NO: 3008449 - RNA, 19 nt, Artificial Sequence
  Description of Artificial Sequence: Synthetic oligonucleotide
cauaugccacaucaggagu

SEQ ID NO: 3008450 - RNA, 19 nt, Artificial Sequence
  Description of Artificial Sequence: Synthetic oligonucleotide
gccaauucugaacuugaaa

SEQ ID NO: 3008451 - RNA, 19 nt, Artificial Sequence
  Description of Artificial Sequence: Synthetic oligonucleotide
caaagaugaggguagcauu

SEQ ID NO: 3008452 - RNA, 19 nt, Artificial Sequence
  Description of Artificial Sequence: Synthetic oligonucleotide
caagagcccuguguaggag

SEQ ID NO: 3008453 - RNA, 19 nt, Artificial Sequence
  Description of Artificial Sequence: Synthetic oligonucleotide
gggagggaugacaccaggg

SEQ ID NO: 3008454 - RNA, 19 nt, Artificial Sequence
  Description of Artificial Sequence: Synthetic oligonucleotide
acaccaggguggccaguag

SEQ ID NO: 3008455 - RNA, 19 nt, Artificial Sequence
  Description of Artificial Sequence: Synthetic oligonucleotide
  modified_base (15)..(15): a, c, u, g, unknown or other
ggcagcgccuucuunaaaa

SEQ ID NO: 3008456 - RNA, 19 nt, Artificial Sequence
  Description of Artificial Sequence: Synthetic oligonucleotide
  modified_base (19)..(19): a, c, u, g, unknown or other
ucugggcagcgccuucuun

SEQ ID NO: 3008457 - RNA, 19 nt, Artificial Sequence
  Description of Artificial Sequence: Synthetic oligonucleotide
gaacaggaggggcgaguga

SEQ ID NO: 3008458 - RNA, 19 nt, Artificial Sequence
  Description of Artificial Sequence: Synthetic oligonucleotide
gagugaggucagcacacua

SEQ ID NO: 3008459 - RNA, 19 nt, Artificial Sequence
  Description of Artificial Sequence: Synthetic oligonucleotide
acaggaggggcgagugagg

SEQ ID NO: 3008460 - RNA, 19 nt, Artificial Sequence
  Description of Artificial Sequence: Synthetic oligonucleotide
caagcucaucugggcagcg

SEQ ID NO: 3008461 - RNA, 19 nt, Artificial Sequence
  Description of Artificial Sequence: Synthetic oligonucleotide
guggccaguagcuccauau

SEQ ID NO: 3008462 - RNA, 19 nt, Artificial Sequence
  Description of Artificial Sequence: Synthetic oligonucleotide
cuuccugccuucacucuaa

SEQ ID NO: 3008463 - RNA, 19 nt, Artificial Sequence
  Description of Artificial Sequence: Synthetic oligonucleotide
ggagccaucuccagccacc

SEQ ID NO: 3008464 - RNA, 19 nt, Artificial Sequence
  Description of Artificial Sequence: Synthetic oligonucleotide
guuucugucucuggaugaa

SEQ ID NO: 3008465 - RNA, 19 nt, Artificial Sequence
  Description of Artificial Sequence: Synthetic oligonucleotide
gcagagcaggcuaggacag

SEQ ID NO: 3008466 - RNA, 19 nt, Artificial Sequence
  Description of Artificial Sequence: Synthetic oligonucleotide
cacucuaaguugagcagcu

SEQ ID NO: 3008467 - RNA, 19 nt, Artificial Sequence
  Description of Artificial Sequence: Synthetic oligonucleotide
gccauuuuggagcauuccu

SEQ ID NO: 3008468 - RNA, 19 nt, Artificial Sequence
  Description of Artificial Sequence: Synthetic oligonucleotide
ggagggaugacaccagggu

SEQ ID NO: 3008469 - RNA, 19 nt, Artificial Sequence
  Description of Artificial Sequence: Synthetic oligonucleotide
caccucgaguuccuuccug

SEQ ID NO: 3008470 - RNA, 19 nt, Artificial Sequence
  Description of Artificial Sequence: Synthetic oligonucleotide
gagccaucccaguggcaga

SEQ ID NO: 3008471 - RNA, 19 nt, Artificial Sequence
  Description of Artificial Sequence: Synthetic oligonucleotide
ccaguagcuccauaugcca

SEQ ID NO: 3008472 - RNA, 19 nt, Artificial Sequence
  Description of Artificial Sequence: Synthetic oligonucleotide
cugaacuugaaagguuugu

SEQ ID NO: 3008473 - RNA, 19 nt, Artificial Sequence
  Description of Artificial Sequence: Synthetic oligonucleotide
ccuucacucuaaguugagc

SEQ ID NO: 3008474 - RNA, 19 nt, Artificial Sequence
  Description of Artificial Sequence: Synthetic oligonucleotide
cugucucuggaugaaucaa

SEQ ID NO: 3008475 - RNA, 19 nt, Artificial Sequence
  Description of Artificial Sequence: Synthetic oligonucleotide
gcuaggacagagagcagga

SEQ ID NO: 3008476 - RNA, 19 nt, Artificial Sequence
  Description of Artificial Sequence: Synthetic oligonucleotide
gcuccauaugccacaucag

SEQ ID NO: 3008477 - RNA, 19 nt, Artificial Sequence
  Description of Artificial Sequence: Synthetic oligonucleotide
gacaccaggguggccagua

SEQ ID NO: 3008478 - RNA, 19 nt, Artificial Sequence
  Description of Artificial Sequence: Synthetic oligonucleotide
ccugccuucacucuaaguu

SEQ ID NO: 3008479 - RNA, 19 nt, Artificial Sequence
  Description of Artificial Sequence: Synthetic oligonucleotide
ccucgaguuccuuccugcc

SEQ ID NO: 3008480 - RNA, 19 nt, Artificial Sequence
  Description of Artificial Sequence: Synthetic oligonucleotide
caucuccagccaccucgag

SEQ ID NO: 3008481 - RNA, 19 nt, Artificial Sequence
  Description of Artificial Sequence: Synthetic oligonucleotide
gagugcaggucagcuucac

SEQ ID NO: 3008482 - RNA, 19 nt, Artificial Sequence
  Description of Artificial Sequence: Synthetic oligonucleotide
cucugccccaagcucaucu

SEQ ID NO: 3008483 - RNA, 19 nt, Artificial Sequence
  Description of Artificial Sequence: Synthetic oligonucleotide
gccccaagcucaucugggc

SEQ ID NO: 3008484 - RNA, 19 nt, Artificial Sequence
  Description of Artificial Sequence: Synthetic oligonucleotide
aggggcgagugaggucagc

SEQ ID NO: 3008485 - RNA, 19 nt, Artificial Sequence
  Description of Artificial Sequence: Synthetic oligonucleotide
uagcuccauaugccacauc

SEQ ID NO: 3008486 - RNA, 19 nt, Artificial Sequence
  Description of Artificial Sequence: Synthetic oligonucleotide
gcgagugaggucagcacac

SEQ ID NO: 3008487 - RNA, 19 nt, Artificial Sequence
  Description of Artificial Sequence: Synthetic oligonucleotide
aggguggccaguagcucca

SEQ ID NO: 3008488 - RNA, 19 nt, Artificial Sequence
  Description of Artificial Sequence: Synthetic oligonucleotide
gagcccuguguaggaggag

SEQ ID NO: 3008489 - RNA, 19 nt, Artificial Sequence
  Description of Artificial Sequence: Synthetic oligonucleotide
gcaggcuaggacagagagc

SEQ ID NO: 3008490 - RNA, 19 nt, Artificial Sequence
  Description of Artificial Sequence: Synthetic oligonucleotide
gggcgagugaggucagcac

SEQ ID NO: 3008491 - RNA, 19 nt, Artificial Sequence
  Description of Artificial Sequence: Synthetic oligonucleotide
gacagagagcaggagccau

SEQ ID NO: 3008492 - RNA, 19 nt, Artificial Sequence
  Description of Artificial Sequence: Synthetic oligonucleotide
cucgaguuccuuccugccu

SEQ ID NO: 3008493 - RNA, 19 nt, Artificial Sequence
  Description of Artificial Sequence: Synthetic oligonucleotide
gagcaggcuaggacagaga

SEQ ID NO: 3008494 - RNA, 19 nt, Artificial Sequence
  Description of Artificial Sequence: Synthetic oligonucleotide
ccaagcucaucugggcagc

SEQ ID NO: 3008495 - RNA, 19 nt, Artificial Sequence
  Description of Artificial Sequence: Synthetic oligonucleotide
gcaggucagcuucacccuc

SEQ ID NO: 3008496 - RNA, 19 nt, Artificial Sequence
  Description of Artificial Sequence: Synthetic oligonucleotide
ggucagcuucacccucugc

SEQ ID NO: 3008497 - RNA, 19 nt, Artificial Sequence
  Description of Artificial Sequence: Synthetic oligonucleotide
augccacaucaggagugca

SEQ ID NO: 3008498 - RNA, 19 nt, Artificial Sequence
  Description of Artificial Sequence: Synthetic oligonucleotide
gaguuccuuccugccuuca

SEQ ID NO: 3008499 - RNA, 19 nt, Artificial Sequence
  Description of Artificial Sequence: Synthetic oligonucleotide
guggcagagcaggcuagga

SEQ ID NO: 3008500 - RNA, 19 nt, Artificial Sequence
  Description of Artificial Sequence: Synthetic oligonucleotide
cagagagcaggagccaucu

SEQ ID NO: 3008501 - RNA, 19 nt, Artificial Sequence
  Description of Artificial Sequence: Synthetic oligonucleotide
cuucacccucugccccaag

SEQ ID NO: 3008502 - RNA, 19 nt, Artificial Sequence
  Description of Artificial Sequence: Synthetic oligonucleotide
gaggggcgagugaggucag

SEQ ID NO: 3008503 - RNA, 19 nt, Artificial Sequence
  Description of Artificial Sequence: Synthetic oligonucleotide
gcccuguguaggaggagcc

SEQ ID NO: 3008504 - RNA, 19 nt, Artificial Sequence
  Description of Artificial Sequence: Synthetic oligonucleotide
caggucagcuucacccucu

SEQ ID NO: 3008505 - RNA, 19 nt, Artificial Sequence
  Description of Artificial Sequence: Synthetic oligonucleotide
ccaucccaguggcagagca

SEQ ID NO: 3008506 - RNA, 19 nt, Artificial Sequence
  Description of Artificial Sequence: Synthetic oligonucleotide
ugacaccaggguggccagu

SEQ ID NO: 3008507 - RNA, 19 nt, Artificial Sequence
  Description of Artificial Sequence: Synthetic oligonucleotide
ucuugccauuuuggagcau

SEQ ID NO: 3008508 - RNA, 19 nt, Artificial Sequence
  Description of Artificial Sequence: Synthetic oligonucleotide
aggguagcauugggaggga

SEQ ID NO: 3008509 - RNA, 19 nt, Artificial Sequence
  Description of Artificial Sequence: Synthetic oligonucleotide
ggggcgagugaggucagca

SEQ ID NO: 3008510 - RNA, 19 nt, Artificial Sequence
  Description of Artificial Sequence: Synthetic oligonucleotide
gccuucacucuaaguugag

SEQ ID NO: 3008511 - RNA, 19 nt, Artificial Sequence
  Description of Artificial Sequence: Synthetic oligonucleotide
aggcuaggacagagagcag

SEQ ID NO: 3008512 - RNA, 19 nt, Artificial Sequence
  Description of Artificial Sequence: Synthetic oligonucleotide
gagccaucuccagccaccu

SEQ ID NO: 3008513 - RNA, 19 nt, Artificial Sequence
  Description of Artificial Sequence: Synthetic oligonucleotide
ggacagagagcaggagcca

SEQ ID NO: 3008514 - RNA, 19 nt, Artificial Sequence
  Description of Artificial Sequence: Synthetic oligonucleotide
caggagccaucuccagcca

SEQ ID NO: 3008515 - RNA, 19 nt, Artificial Sequence
  Description of Artificial Sequence: Synthetic oligonucleotide
guagcuccauaugccacau

SEQ ID NO: 3008516 - RNA, 19 nt, Artificial Sequence
  Description of Artificial Sequence: Synthetic oligonucleotide
cgucaaagaugaggguagc

SEQ ID NO: 3008517 - RNA, 19 nt, Artificial Sequence
  Description of Artificial Sequence: Synthetic oligonucleotide
ccccaagcucaucugggca

SEQ ID NO: 3008518 - RNA, 19 nt, Artificial Sequence
  Description of Artificial Sequence: Synthetic oligonucleotide
caggaggggcgagugaggu

SEQ ID NO: 3008519 - RNA, 19 nt, Artificial Sequence
  Description of Artificial Sequence: Synthetic oligonucleotide
ggagugcaggucagcuuca

SEQ ID NO: 3008520 - RNA, 19 nt, Artificial Sequence
  Description of Artificial Sequence: Synthetic oligonucleotide
ccaucuccagccaccucga

SEQ ID NO: 3008521 - RNA, 19 nt, Artificial Sequence
  Description of Artificial Sequence: Synthetic oligonucleotide
ggucagcacacuagaucaa

SEQ ID NO: 3008522 - RNA, 19 nt, Artificial Sequence
  Description of Artificial Sequence: Synthetic oligonucleotide
aggagccaucccaguggca

SEQ ID NO: 3008523 - RNA, 19 nt, Artificial Sequence
  Description of Artificial Sequence: Synthetic oligonucleotide
ccuuccugccuucacucua

SEQ ID NO: 3008524 - RNA, 19 nt, Artificial Sequence
  Description of Artificial Sequence: Synthetic oligonucleotide
cagagcaggcuaggacaga

SEQ ID NO: 3008525 - RNA, 19 nt, Artificial Sequence
  Description of Artificial Sequence: Synthetic oligonucleotide
caggagugcaggucagcuu

SEQ ID NO: 3008526 - RNA, 19 nt, Artificial Sequence
  Description of Artificial Sequence: Synthetic oligonucleotide
ggaugacaccaggguggcc

SEQ ID NO: 3008527 - RNA, 19 nt, Artificial Sequence
  Description of Artificial Sequence: Synthetic oligonucleotide
ccaggguggccaguagcuc

SEQ ID NO: 3008528 - RNA, 19 nt, Artificial Sequence
  Description of Artificial Sequence: Synthetic oligonucleotide
cgaguuccuuccugccuuc

SEQ ID NO: 3008529 - RNA, 19 nt, Artificial Sequence
  Description of Artificial Sequence: Synthetic oligonucleotide
cucaucugggcagcgccuu

SEQ ID NO: 3008530 - RNA, 19 nt, Artificial Sequence
  Description of Artificial Sequence: Synthetic oligonucleotide
gcuccacgucaaagaugag

SEQ ID NO: 3008531 - RNA, 19 nt, Artificial Sequence
  Description of Artificial Sequence: Synthetic oligonucleotide
ccacaucaggagugcaggu

SEQ ID NO: 3008532 - RNA, 19 nt, Artificial Sequence
  Description of Artificial Sequence: Synthetic oligonucleotide
ccacgucaaagaugagggu

SEQ ID NO: 3008533 - RNA, 19 nt, Artificial Sequence
  Description of Artificial Sequence: Synthetic oligonucleotide
cccuguguaggaggagcca

SEQ ID NO: 3008534 - RNA, 19 nt, Artificial Sequence
  Description of Artificial Sequence: Synthetic oligonucleotide
ccuguguaggaggagccau

SEQ ID NO: 3008535 - RNA, 19 nt, Artificial Sequence
  Description of Artificial Sequence: Synthetic oligonucleotide
gcucaucugggcagcgccu

SEQ ID NO: 3008536 - RNA, 19 nt, Artificial Sequence
  Description of Artificial Sequence: Synthetic oligonucleotide
  modified_base (10)..(10): a, c, u, g, unknown or other
cgccuucuunaaaaccuuu

SEQ ID NO: 3008537 - RNA, 19 nt, Artificial Sequence
  Description of Artificial Sequence: Synthetic oligonucleotide
ccagccaccucgaguuccu

SEQ ID NO: 3008538 - RNA, 19 nt, Artificial Sequence
  Description of Artificial Sequence: Synthetic oligonucleotide
cccaguggcagagcaggcu

SEQ ID NO: 3008539 - RNA, 19 nt, Artificial Sequence
  Description of Artificial Sequence: Synthetic oligonucleotide
ggguagcauugggagggau

SEQ ID NO: 3008540 - RNA, 19 nt, Artificial Sequence
  Description of Artificial Sequence: Synthetic oligonucleotide
ccaccucgaguuccuuccu

SEQ ID NO: 3008541 - RNA, 19 nt, Artificial Sequence
  Description of Artificial Sequence: Synthetic oligonucleotide
cgagugaggucagcacacu

SEQ ID NO: 3008542 - RNA, 19 nt, Artificial Sequence
  Description of Artificial Sequence: Synthetic oligonucleotide
cagccaccucgaguuccuu

SEQ ID NO: 3008543 - RNA, 19 nt, Artificial Sequence
  Description of Artificial Sequence: Synthetic oligonucleotide
ggguggccaguagcuccau

SEQ ID NO: 3008544 - RNA, 19 nt, Artificial Sequence
  Description of Artificial Sequence: Synthetic oligonucleotide
  modified_base (1)..(1): a, c, u, g, unknown or other
naaaaccuuugaugacuuc

SEQ ID NO: 3008545 - RNA, 19 nt, Artificial Sequence
  Description of Artificial Sequence: Synthetic oligonucleotide
aaucugaagacccagauuc

SEQ ID NO: 3008546 - RNA, 19 nt, Artificial Sequence
  Description of Artificial Sequence: Synthetic oligonucleotide
aagacuuacauauaguugu

SEQ ID NO: 3008547 - RNA, 19 nt, Artificial Sequence
  Description of Artificial Sequence: Synthetic oligonucleotide
uauaguuguacccaaaaug

SEQ ID NO: 3008548 - RNA, 19 nt, Artificial Sequence
  Description of Artificial Sequence: Synthetic oligonucleotide
gaaaaggccuguuugaugg

SEQ ID NO: 3008549 - RNA, 19 nt, Artificial Sequence
  Description of Artificial Sequence: Synthetic oligonucleotide
uuuaauucccuccagaaau

SEQ ID NO: 3008550 - RNA, 19 nt, Artificial Sequence
  Description of Artificial Sequence: Synthetic oligonucleotide
aauguuucugaccugcguc

SEQ ID NO: 3008551 - RNA, 19 nt, Artificial Sequence
  Description of Artificial Sequence: Synthetic oligonucleotide
acuuacauauaguuguacc

SEQ ID NO: 3008552 - RNA, 19 nt, Artificial Sequence
  Description of Artificial Sequence: Synthetic oligonucleotide
uuuauuuguuaucuucugg

SEQ ID NO: 3008553 - RNA, 19 nt, Artificial Sequence
  Description of Artificial Sequence: Synthetic oligonucleotide
ucugcuauuaaacauccca

SEQ ID NO: 3008554 - RNA, 19 nt, Artificial Sequence
  Description of Artificial Sequence: Synthetic oligonucleotide
uaaacaucccacuacaucu

SEQ ID NO: 3008555 - RNA, 19 nt, Artificial Sequence
  Description of Artificial Sequence: Synthetic oligonucleotide
aacccacauauuuaauucc

SEQ ID NO: 3008556 - RNA, 19 nt, Artificial Sequence
  Description of Artificial Sequence: Synthetic oligonucleotide
uuggaagcaguauagauca

SEQ ID NO: 3008557 - RNA, 19 nt, Artificial Sequence
  Description of Artificial Sequence: Synthetic oligonucleotide
ucuagaagauucuuuagug

SEQ ID NO: 3008558 - RNA, 19 nt, Artificial Sequence
  Description of Artificial Sequence: Synthetic oligonucleotide
aaaucuauggugguacugg

SEQ ID NO: 3008559 - RNA, 19 nt, Artificial Sequence
  Description of Artificial Sequence: Synthetic oligonucleotide
cuuacauauaguuguaccc

SEQ ID NO: 3008560 - RNA, 19 nt, Artificial Sequence
  Description of Artificial Sequence: Synthetic oligonucleotide
uauagaucaugccacaaga

SEQ ID NO: 3008561 - RNA, 19 nt, Artificial Sequence
  Description of Artificial Sequence: Synthetic oligonucleotide
uggcauuugguucugacag

SEQ ID NO: 3008562 - RNA, 19 nt, Artificial Sequence
  Description of Artificial Sequence: Synthetic oligonucleotide
uauuaaacaucccacuaca

SEQ ID NO: 3008563 - RNA, 19 nt, Artificial Sequence
  Description of Artificial Sequence: Synthetic oligonucleotide
uagaagauucuuuaguggc

SEQ ID NO: 3008564 - RNA, 19 nt, Artificial Sequence
  Description of Artificial Sequence: Synthetic oligonucleotide
cuacuuauuccacagauug

SEQ ID NO: 3008565 - RNA, 19 nt, Artificial Sequence
  Description of Artificial Sequence: Synthetic oligonucleotide
aaaacucugcuacuacccg

SEQ ID NO: 3008566 - RNA, 19 nt, Artificial Sequence
  Description of Artificial Sequence: Synthetic oligonucleotide
cuuuucaaucugaagaccc

SEQ ID NO: 3008567 - RNA, 19 nt, Artificial Sequence
  Description of Artificial Sequence: Synthetic oligonucleotide
gauucuacuuauuccacag

SEQ ID NO: 3008568 - RNA, 19 nt, Artificial Sequence
  Description of Artificial Sequence: Synthetic oligonucleotide
ucugacagaacacgaaaag

SEQ ID NO: 3008569 - RNA, 19 nt, Artificial Sequence
  Description of Artificial Sequence: Synthetic oligonucleotide
uugcacuucgucuucaggg

SEQ ID NO: 3008570 - RNA, 19 nt, Artificial Sequence
  Description of Artificial Sequence: Synthetic oligonucleotide
ucaaugacaaacugggucu

SEQ ID NO: 3008571 - RNA, 19 nt, Artificial Sequence
  Description of Artificial Sequence: Synthetic oligonucleotide
uuauuccacagauugcagg

SEQ ID NO: 3008572 - RNA, 19 nt, Artificial Sequence
  Description of Artificial Sequence: Synthetic oligonucleotide
auuugguucugacagaaca

SEQ ID NO: 3008573 - RNA, 19 nt, Artificial Sequence
  Description of Artificial Sequence: Synthetic oligonucleotide
cuagaagauucuuuagugg

SEQ ID NO: 3008574 - RNA, 19 nt, Artificial Sequence
  Description of Artificial Sequence: Synthetic oligonucleotide
ugguacaucugaaacacug

SEQ ID NO: 3008575 - RNA, 19 nt, Artificial Sequence
  Description of Artificial Sequence: Synthetic oligonucleotide
ugcgucaaugacaaacugg

SEQ ID NO: 3008576 - RNA, 19 nt, Artificial Sequence
  Description of Artificial Sequence: Synthetic oligonucleotide
ucuauggugguacuggaga

SEQ ID NO: 3008577 - RNA, 19 nt, Artificial Sequence
  Description of Artificial Sequence: Synthetic oligonucleotide
agcaguauagaucaugcca

SEQ ID NO: 3008578 - RNA, 19 nt, Artificial Sequence
  Description of Artificial Sequence: Synthetic oligonucleotide
aucugaaacacugccaagc

SEQ ID NO: 3008579 - RNA, 19 nt, Artificial Sequence
  Description of Artificial Sequence: Synthetic oligonucleotide
aagcaguauagaucaugcc

SEQ ID NO: 3008580 - RNA, 19 nt, Artificial Sequence
  Description of Artificial Sequence: Synthetic oligonucleotide
uuuaguggcauuugguucu

SEQ ID NO: 3008581 - RNA, 19 nt, Artificial Sequence
  Description of Artificial Sequence: Synthetic oligonucleotide
aacugggucuuuuccuucc

SEQ ID NO: 3008582 - RNA, 19 nt, Artificial Sequence
  Description of Artificial Sequence: Synthetic oligonucleotide
acugccaagcucuagaaga

SEQ ID NO: 3008583 - RNA, 19 nt, Artificial Sequence
  Description of Artificial Sequence: Synthetic oligonucleotide
ugccacaagacuuacauau

SEQ ID NO: 3008584 - RNA, 19 nt, Artificial Sequence
  Description of Artificial Sequence: Synthetic oligonucleotide
uuaaacaucccacuacauc

SEQ ID NO: 3008585 - RNA, 19 nt, Artificial Sequence
  Description of Artificial Sequence: Synthetic oligonucleotide
cacauauuuaauucccucc

SEQ ID NO: 3008586 - RNA, 19 nt, Artificial Sequence
  Description of Artificial Sequence: Synthetic oligonucleotide
uauuuaauucccuccagaa

SEQ ID NO: 3008587 - RNA, 19 nt, Artificial Sequence
  Description of Artificial Sequence: Synthetic oligonucleotide
uagaucaugccacaagacu

SEQ ID NO: 3008588 - RNA, 19 nt, Artificial Sequence
  Description of Artificial Sequence: Synthetic oligonucleotide
uucuacuuauuccacagau

SEQ ID NO: 3008589 - RNA, 19 nt, Artificial Sequence
  Description of Artificial Sequence: Synthetic oligonucleotide
acauauuuaauucccucca

SEQ ID NO: 3008590 - RNA, 19 nt, Artificial Sequence
  Description of Artificial Sequence: Synthetic oligonucleotide
auucuuuaguggcauuugg

SEQ ID NO: 3008591 - RNA, 19 nt, Artificial Sequence
  Description of Artificial Sequence: Synthetic oligonucleotide
auaguuguacccaaaaugu

SEQ ID NO: 3008592 - RNA, 19 nt, Artificial Sequence
  Description of Artificial Sequence: Synthetic oligonucleotide
ucuuccaacccacauauuu

SEQ ID NO: 3008593 - RNA, 19 nt, Artificial Sequence
  Description of Artificial Sequence: Synthetic oligonucleotide
uuacauauaguuguaccca

SEQ ID NO: 3008594 - RNA, 19 nt, Artificial Sequence
  Description of Artificial Sequence: Synthetic oligonucleotide
ucugguacaucugaaacac

SEQ ID NO: 3008595 - RNA, 19 nt, Artificial Sequence
  Description of Artificial Sequence: Synthetic oligonucleotide
agauugcagguucugguac

SEQ ID NO: 3008596 - RNA, 19 nt, Artificial Sequence
  Description of Artificial Sequence: Synthetic oligonucleotide
uauuccacagauugcaggu

SEQ ID NO: 3008597 - RNA, 19 nt, Artificial Sequence
  Description of Artificial Sequence: Synthetic oligonucleotide
aacacugccaagcucuaga

SEQ ID NO: 3008598 - RNA, 19 nt, Artificial Sequence
  Description of Artificial Sequence: Synthetic oligonucleotide
cuauuaaacaucccacuac

SEQ ID NO: 3008599 - RNA, 19 nt, Artificial Sequence
  Description of Artificial Sequence: Synthetic oligonucleotide
ucucuuccaacccacauau

SEQ ID NO: 3008600 - RNA, 19 nt, Artificial Sequence
  Description of Artificial Sequence: Synthetic oligonucleotide
gaagcaguauagaucaugc

SEQ ID NO: 3008601 - RNA, 19 nt, Artificial Sequence
  Description of Artificial Sequence: Synthetic oligonucleotide
acccaaaauguuucugacc

SEQ ID NO: 3008602 - RNA, 19 nt, Artificial Sequence
  Description of Artificial Sequence: Synthetic oligonucleotide
caagacuuacauauaguug

SEQ ID NO: 3008603 - RNA, 19 nt, Artificial Sequence
  Description of Artificial Sequence: Synthetic oligonucleotide
gucaaugacaaacuggguc

SEQ ID NO: 3008604 - RNA, 19 nt, Artificial Sequence
  Description of Artificial Sequence: Synthetic oligonucleotide
acaagacuuacauauaguu

SEQ ID NO: 3008605 - RNA, 19 nt, Artificial Sequence
  Description of Artificial Sequence: Synthetic oligonucleotide
aaaggccuguuugaugggc

SEQ ID NO: 3008606 - RNA, 19 nt, Artificial Sequence
  Description of Artificial Sequence: Synthetic oligonucleotide
uccuuuauuuguuaucuuc

SEQ ID NO: 3008607 - RNA, 19 nt, Artificial Sequence
  Description of Artificial Sequence: Synthetic oligonucleotide
accugcgucaaugacaaac

SEQ ID NO: 3008608 - RNA, 19 nt, Artificial Sequence
  Description of Artificial Sequence: Synthetic oligonucleotide
caaaauguuucugaccugc

SEQ ID NO: 3008609 - RNA, 19 nt, Artificial Sequence
  Description of Artificial Sequence: Synthetic oligonucleotide
aaauguuucugaccugcgu

SEQ ID NO: 3008610 - RNA, 19 nt, Artificial Sequence
  Description of Artificial Sequence: Synthetic oligonucleotide
uuuucaaucugaagaccca

SEQ ID NO: 3008611 - RNA, 19 nt, Artificial Sequence
  Description of Artificial Sequence: Synthetic oligonucleotide
auauuuaauucccuccaga

SEQ ID NO: 3008612 - RNA, 19 nt, Artificial Sequence
  Description of Artificial Sequence: Synthetic oligonucleotide
acuuauuccacagauugca

SEQ ID NO: 3008613 - RNA, 19 nt, Artificial Sequence
  Description of Artificial Sequence: Synthetic oligonucleotide
acccagauucuacuuauuc

SEQ ID NO: 3008614 - RNA, 19 nt, Artificial Sequence
  Description of Artificial Sequence: Synthetic oligonucleotide
uucugguacaucugaaaca

SEQ ID NO: 3008615 - RNA, 19 nt, Artificial Sequence
  Description of Artificial Sequence: Synthetic oligonucleotide
guacaucugaaacacugcc

SEQ ID NO: 3008616 - RNA, 19 nt, Artificial Sequence
  Description of Artificial Sequence: Synthetic oligonucleotide
ucgucuucaggguuggaag

SEQ ID NO: 3008617 - RNA, 19 nt, Artificial Sequence
  Description of Artificial Sequence: Synthetic oligonucleotide
guauagaucaugccacaag

SEQ ID NO: 3008618 - RNA, 19 nt, Artificial Sequence
  Description of Artificial Sequence: Synthetic oligonucleotide
aaacugggucuuuuccuuc

SEQ ID NO: 3008619 - RNA, 19 nt, Artificial Sequence
  Description of Artificial Sequence: Synthetic oligonucleotide
cuuuauuuguuaucuucug

SEQ ID NO: 3008620 - RNA, 19 nt, Artificial Sequence
  Description of Artificial Sequence: Synthetic oligonucleotide
ucugaaacacugccaagcu

SEQ ID NO: 3008621 - RNA, 19 nt, Artificial Sequence
  Description of Artificial Sequence: Synthetic oligonucleotide
acacgaaaaggccuguuug

SEQ ID NO: 3008622 - RNA, 19 nt, Artificial Sequence
  Description of Artificial Sequence: Synthetic oligonucleotide
ugcuauuaaacaucccacu

SEQ ID NO: 3008623 - RNA, 19 nt, Artificial Sequence
  Description of Artificial Sequence: Synthetic oligonucleotide
cuuuaguggcauuugguuc

SEQ ID NO: 3008624 - RNA, 19 nt, Artificial Sequence
  Description of Artificial Sequence: Synthetic oligonucleotide
acaucugaaacacugccaa

SEQ ID NO: 3008625 - RNA, 19 nt, Artificial Sequence
  Description of Artificial Sequence: Synthetic oligonucleotide
caacccacauauuuaauuc

SEQ ID NO: 3008626 - RNA, 19 nt, Artificial Sequence
  Description of Artificial Sequence: Synthetic oligonucleotide
uacaucugaaacacugcca

SEQ ID NO: 3008627 - RNA, 19 nt, Artificial Sequence
  Description of Artificial Sequence: Synthetic oligonucleotide
ucaaucugaagacccagau

SEQ ID NO: 3008628 - RNA, 19 nt, Artificial Sequence
  Description of Artificial Sequence: Synthetic oligonucleotide
aguggcauuugguucugac

SEQ ID NO: 3008629 - RNA, 19 nt, Artificial Sequence
  Description of Artificial Sequence: Synthetic oligonucleotide
ugaccugcgucaaugacaa

SEQ ID NO: 3008630 - RNA, 19 nt, Artificial Sequence
  Description of Artificial Sequence: Synthetic oligonucleotide
uucuuuaguggcauuuggu

SEQ ID NO: 3008631 - RNA, 19 nt, Artificial Sequence
  Description of Artificial Sequence: Synthetic oligonucleotide
gacagaacacgaaaaggcc

SEQ ID NO: 3008632 - RNA, 19 nt, Artificial Sequence
  Description of Artificial Sequence: Synthetic oligonucleotide
ucuuuaguggcauuugguu

SEQ ID NO: 3008633 - RNA, 19 nt, Artificial Sequence
  Description of Artificial Sequence: Synthetic oligonucleotide
aaaaggccuguuugauggg

SEQ ID NO: 3008634 - RNA, 19 nt, Artificial Sequence
  Description of Artificial Sequence: Synthetic oligonucleotide
cugacagaacacgaaaagg

SEQ ID NO: 3008635 - RNA, 19 nt, Artificial Sequence
  Description of Artificial Sequence: Synthetic oligonucleotide
guucugguacaucugaaac

SEQ ID NO: 3008636 - RNA, 19 nt, Artificial Sequence
  Description of Artificial Sequence: Synthetic oligonucleotide
aaucuauggugguacugga

SEQ ID NO: 3008637 - RNA, 19 nt, Artificial Sequence
  Description of Artificial Sequence: Synthetic oligonucleotide
uacuuauuccacagauugc

SEQ ID NO: 3008638 - RNA, 19 nt, Artificial Sequence
  Description of Artificial Sequence: Synthetic oligonucleotide
acccacauauuuaauuccc

SEQ ID NO: 3008639 - RNA, 19 nt, Artificial Sequence
  Description of Artificial Sequence: Synthetic oligonucleotide
aaacucugcuacuacccgu

SEQ ID NO: 3008640 - RNA, 19 nt, Artificial Sequence
  Description of Artificial Sequence: Synthetic oligonucleotide
cugcuauuaaacaucccac

SEQ ID NO: 3008641 - RNA, 19 nt, Artificial Sequence
  Description of Artificial Sequence: Synthetic oligonucleotide
cuggagauguugcacuucg

SEQ ID NO: 3008642 - RNA, 19 nt, Artificial Sequence
  Description of Artificial Sequence: Synthetic oligonucleotide
aaaauguuucugaccugcg

SEQ ID NO: 3008643 - RNA, 19 nt, Artificial Sequence
  Description of Artificial Sequence: Synthetic oligonucleotide
uuucaaucugaagacccag

SEQ ID NO: 3008644 - RNA, 19 nt, Artificial Sequence
  Description of Artificial Sequence: Synthetic oligonucleotide
acuacaucuucccauccca

SEQ ID NO: 3008645 - RNA, 19 nt, Artificial Sequence
  Description of Artificial Sequence: Synthetic oligonucleotide
acagauugcagguucuggu

SEQ ID NO: 3008646 - RNA, 19 nt, Artificial Sequence
  Description of Artificial Sequence: Synthetic oligonucleotide
cauauuuaauucccuccag

SEQ ID NO: 3008647 - RNA, 19 nt, Artificial Sequence
  Description of Artificial Sequence: Synthetic oligonucleotide
ugaagacccagauucuacu

SEQ ID NO: 3008648 - RNA, 19 nt, Artificial Sequence
  Description of Artificial Sequence: Synthetic oligonucleotide
uucugacagaacacgaaaa

SEQ ID NO: 3008649 - RNA, 19 nt, Artificial Sequence
  Description of Artificial Sequence: Synthetic oligonucleotide
uuaauucccuccagaaauc

SEQ ID NO: 3008650 - RNA, 19 nt, Artificial Sequence
  Description of Artificial Sequence: Synthetic oligonucleotide
auuuaauucccuccagaaa

SEQ ID NO: 3008651 - RNA, 19 nt, Artificial Sequence
  Description of Artificial Sequence: Synthetic oligonucleotide
acuacccguucucucuucc

SEQ ID NO: 3008652 - RNA, 19 nt, Artificial Sequence
  Description of Artificial Sequence: Synthetic oligonucleotide
auauaguuguacccaaaau

SEQ ID NO: 3008653 - RNA, 19 nt, Artificial Sequence
  Description of Artificial Sequence: Synthetic oligonucleotide
auagaucaugccacaagac

SEQ ID NO: 3008654 - RNA, 19 nt, Artificial Sequence
  Description of Artificial Sequence: Synthetic oligonucleotide
aacacgaaaaggccuguuu

SEQ ID NO: 3008655 - RNA, 19 nt, Artificial Sequence
  Description of Artificial Sequence: Synthetic oligonucleotide
ucugcuacuacccguucuc

SEQ ID NO: 3008656 - RNA, 19 nt, Artificial Sequence
  Description of Artificial Sequence: Synthetic oligonucleotide
ucccuccagaaaucuaugg

SEQ ID NO: 3008657 - RNA, 19 nt, Artificial Sequence
  Description of Artificial Sequence: Synthetic oligonucleotide
uucaaucugaagacccaga

SEQ ID NO: 3008658 - RNA, 19 nt, Artificial Sequence
  Description of Artificial Sequence: Synthetic oligonucleotide
uuaucuucuggaauucauu

SEQ ID NO: 3008659 - RNA, 19 nt, Artificial Sequence
  Description of Artificial Sequence: Synthetic oligonucleotide
uuucugaccugcgucaaug

SEQ ID NO: 3008660 - RNA, 19 nt, Artificial Sequence
  Description of Artificial Sequence: Synthetic oligonucleotide
agauucuacuuauuccaca

SEQ ID NO: 3008661 - RNA, 19 nt, Artificial Sequence
  Description of Artificial Sequence: Synthetic oligonucleotide
cuuauuccacagauugcag

SEQ ID NO: 3008662 - RNA, 19 nt, Artificial Sequence
  Description of Artificial Sequence: Synthetic oligonucleotide
uacauauaguuguacccaa

SEQ ID NO: 3008663 - RNA, 19 nt, Artificial Sequence
  Description of Artificial Sequence: Synthetic oligonucleotide
cagaacacgaaaaggccug

SEQ ID NO: 3008664 - RNA, 19 nt, Artificial Sequence
  Description of Artificial Sequence: Synthetic oligonucleotide
agcucuagaagauucuuua

SEQ ID NO: 3008665 - RNA, 19 nt, Artificial Sequence
  Description of Artificial Sequence: Synthetic oligonucleotide
uuccaacccacauauuuaa

SEQ ID NO: 3008666 - RNA, 19 nt, Artificial Sequence
  Description of Artificial Sequence: Synthetic oligonucleotide
cagaaaucuauggugguac

SEQ ID NO: 3008667 - RNA, 19 nt, Artificial Sequence
  Description of Artificial Sequence: Synthetic oligonucleotide
gcgucaaugacaaacuggg

SEQ ID NO: 3008668 - RNA, 19 nt, Artificial Sequence
  Description of Artificial Sequence: Synthetic oligonucleotide
ugggcucugcuauuaaaca

SEQ ID NO: 3008669 - RNA, 19 nt, Artificial Sequence
  Description of Artificial Sequence: Synthetic oligonucleotide
caucccacuacaucuuccc

SEQ ID NO: 3008670 - RNA, 19 nt, Artificial Sequence
  Description of Artificial Sequence: Synthetic oligonucleotide
guuggaagcaguauagauc

SEQ ID NO: 3008671 - RNA, 19 nt, Artificial Sequence
  Description of Artificial Sequence: Synthetic oligonucleotide
uacccaaaauguuucugac

SEQ ID NO: 3008672 - RNA, 19 nt, Artificial Sequence
  Description of Artificial Sequence: Synthetic oligonucleotide
gaaaucuauggugguacug

SEQ ID NO: 3008673 - RNA, 19 nt, Artificial Sequence
  Description of Artificial Sequence: Synthetic oligonucleotide
agauguugcacuucgucuu

SEQ ID NO: 3008674 - RNA, 19 nt, Artificial Sequence
  Description of Artificial Sequence: Synthetic oligonucleotide
guacccaaaauguuucuga

SEQ ID NO: 3008675 - RNA, 19 nt, Artificial Sequence
  Description of Artificial Sequence: Synthetic oligonucleotide
ucuacuuauuccacagauu

SEQ ID NO: 3008676 - RNA, 19 nt, Artificial Sequence
  Description of Artificial Sequence: Synthetic oligonucleotide
aagacccagauucuacuua

SEQ ID NO: 3008677 - RNA, 19 nt, Artificial Sequence
  Description of Artificial Sequence: Synthetic oligonucleotide
uguuugaugggcucugcua

SEQ ID NO: 3008678 - RNA, 19 nt, Artificial Sequence
  Description of Artificial Sequence: Synthetic oligonucleotide
uuccacagauugcagguuc

SEQ ID NO: 3008679 - RNA, 19 nt, Artificial Sequence
  Description of Artificial Sequence: Synthetic oligonucleotide
ugcacuucgucuucagggu

SEQ ID NO: 3008680 - RNA, 19 nt, Artificial Sequence
  Description of Artificial Sequence: Synthetic oligonucleotide
cugaagacccagauucuac

SEQ ID NO: 3008681 - RNA, 19 nt, Artificial Sequence
  Description of Artificial Sequence: Synthetic oligonucleotide
ucugaccugcgucaaugac

SEQ ID NO: 3008682 - RNA, 19 nt, Artificial Sequence
  Description of Artificial Sequence: Synthetic oligonucleotide
guuguacccaaaauguuuc

SEQ ID NO: 3008683 - RNA, 19 nt, Artificial Sequence
  Description of Artificial Sequence: Synthetic oligonucleotide
guugcacuucgucuucagg

SEQ ID NO: 3008684 - RNA, 19 nt, Artificial Sequence
  Description of Artificial Sequence: Synthetic oligonucleotide
acaucuucccaucccaaaa

SEQ ID NO: 3008685 - RNA, 19 nt, Artificial Sequence
  Description of Artificial Sequence: Synthetic oligonucleotide
cagauucuacuuauuccac

SEQ ID NO: 3008686 - RNA, 19 nt, Artificial Sequence
  Description of Artificial Sequence: Synthetic oligonucleotide
uccagaaaucuaugguggu

SEQ ID NO: 3008687 - RNA, 19 nt, Artificial Sequence
  Description of Artificial Sequence: Synthetic oligonucleotide
agaaaucuauggugguacu

SEQ ID NO: 3008688 - RNA, 19 nt, Artificial Sequence
  Description of Artificial Sequence: Synthetic oligonucleotide
gagauguugcacuucgucu

SEQ ID NO: 3008689 - RNA, 19 nt, Artificial Sequence
  Description of Artificial Sequence: Synthetic oligonucleotide
cauauaguuguacccaaaa

SEQ ID NO: 3008690 - RNA, 19 nt, Artificial Sequence
  Description of Artificial Sequence: Synthetic oligonucleotide
acagaacacgaaaaggccu

SEQ ID NO: 3008691 - RNA, 19 nt, Artificial Sequence
  Description of Artificial Sequence: Synthetic oligonucleotide
agaucaugccacaagacuu

SEQ ID NO: 3008692 - RNA, 19 nt, Artificial Sequence
  Description of Artificial Sequence: Synthetic oligonucleotide
uguugcacuucgucuucag

SEQ ID NO: 3008693 - RNA, 19 nt, Artificial Sequence
  Description of Artificial Sequence: Synthetic oligonucleotide
uaauucccuccagaaaucu

SEQ ID NO: 3008694 - RNA, 19 nt, Artificial Sequence
  Description of Artificial Sequence: Synthetic oligonucleotide
cacuacaucuucccauccc

SEQ ID NO: 3008695 - RNA, 19 nt, Artificial Sequence
  Description of Artificial Sequence: Synthetic oligonucleotide
aguuguacccaaaauguuu

SEQ ID NO: 3008696 - RNA, 19 nt, Artificial Sequence
  Description of Artificial Sequence: Synthetic oligonucleotide
aucuucuggaauucauuau

SEQ ID NO: 3008697 - RNA, 19 nt, Artificial Sequence
  Description of Artificial Sequence: Synthetic oligonucleotide
agacccagauucuacuuau

SEQ ID NO: 3008698 - RNA, 19 nt, Artificial Sequence
  Description of Artificial Sequence: Synthetic oligonucleotide
aggguuggaagcaguauag

SEQ ID NO: 3008699 - RNA, 19 nt, Artificial Sequence
  Description of Artificial Sequence: Synthetic oligonucleotide
gauugcagguucugguaca

SEQ ID NO: 3008700 - RNA, 19 nt, Artificial Sequence
  Description of Artificial Sequence: Synthetic oligonucleotide
uaguuguacccaaaauguu

SEQ ID NO: 3008701 - RNA, 19 nt, Artificial Sequence
  Description of Artificial Sequence: Synthetic oligonucleotide
uauggugguacuggagaug

SEQ ID NO: 3008702 - RNA, 19 nt, Artificial Sequence
  Description of Artificial Sequence: Synthetic oligonucleotide
uguuaucuucuggaauuca

SEQ ID NO: 3008703 - RNA, 19 nt, Artificial Sequence
  Description of Artificial Sequence: Synthetic oligonucleotide
ucucucuuccaacccacau

SEQ ID NO: 3008704 - RNA, 19 nt, Artificial Sequence
  Description of Artificial Sequence: Synthetic oligonucleotide
auucuacuuauuccacaga

SEQ ID NO: 3008705 - RNA, 19 nt, Artificial Sequence
  Description of Artificial Sequence: Synthetic oligonucleotide
guucugacagaacacgaaa

SEQ ID NO: 3008706 - RNA, 19 nt, Artificial Sequence
  Description of Artificial Sequence: Synthetic oligonucleotide
uucccuccagaaaucuaug

SEQ ID NO: 3008707 - RNA, 19 nt, Artificial Sequence
  Description of Artificial Sequence: Synthetic oligonucleotide
uccacagauugcagguucu

SEQ ID NO: 3008708 - RNA, 19 nt, Artificial Sequence
  Description of Artificial Sequence: Synthetic oligonucleotide
cccagauucuacuuauucc

SEQ ID NO: 3008709 - RNA, 19 nt, Artificial Sequence
  Description of Artificial Sequence: Synthetic oligonucleotide
ucuucaggguuggaagcag

SEQ ID NO: 3008710 - RNA, 19 nt, Artificial Sequence
  Description of Artificial Sequence: Synthetic oligonucleotide
ucccacuacaucuucccau

SEQ ID NO: 3008711 - RNA, 19 nt, Artificial Sequence
  Description of Artificial Sequence: Synthetic oligonucleotide
ccacaagacuuacauauag

SEQ ID NO: 3008712 - RNA, 19 nt, Artificial Sequence
  Description of Artificial Sequence: Synthetic oligonucleotide
uacaucuucccaucccaaa

SEQ ID NO: 3008713 - RNA, 19 nt, Artificial Sequence
  Description of Artificial Sequence: Synthetic oligonucleotide
auggugguacuggagaugu

SEQ ID NO: 3008714 - RNA, 19 nt, Artificial Sequence
  Description of Artificial Sequence: Synthetic oligonucleotide
uucuggaauucauuauuuu

SEQ ID NO: 3008715 - RNA, 19 nt, Artificial Sequence
  Description of Artificial Sequence: Synthetic oligonucleotide
gauguugcacuucgucuuc

SEQ ID NO: 3008716 - RNA, 19 nt, Artificial Sequence
  Description of Artificial Sequence: Synthetic oligonucleotide
gacuuacauauaguuguac

SEQ ID NO: 3008717 - RNA, 19 nt, Artificial Sequence
  Description of Artificial Sequence: Synthetic oligonucleotide
agaagauucuuuaguggca

SEQ ID NO: 3008718 - RNA, 19 nt, Artificial Sequence
  Description of Artificial Sequence: Synthetic oligonucleotide
cugaccugcgucaaugaca

SEQ ID NO: 3008719 - RNA, 19 nt, Artificial Sequence
  Description of Artificial Sequence: Synthetic oligonucleotide
ccagauucuacuuauucca

SEQ ID NO: 3008720 - RNA, 19 nt, Artificial Sequence
  Description of Artificial Sequence: Synthetic oligonucleotide
cacagauugcagguucugg

SEQ ID NO: 3008721 - RNA, 19 nt, Artificial Sequence
  Description of Artificial Sequence: Synthetic oligonucleotide
uuguacccaaaauguuucu

SEQ ID NO: 3008722 - RNA, 19 nt, Artificial Sequence
  Description of Artificial Sequence: Synthetic oligonucleotide
uucgucuucaggguuggaa

SEQ ID NO: 3008723 - RNA, 19 nt, Artificial Sequence
  Description of Artificial Sequence: Synthetic oligonucleotide
gcaguauagaucaugccac

SEQ ID NO: 3008724 - RNA, 19 nt, Artificial Sequence
  Description of Artificial Sequence: Synthetic oligonucleotide
caucugaaacacugccaag

SEQ ID NO: 3008725 - RNA, 19 nt, Artificial Sequence
  Description of Artificial Sequence: Synthetic oligonucleotide
uucaggguuggaagcagua

SEQ ID NO: 3008726 - RNA, 19 nt, Artificial Sequence
  Description of Artificial Sequence: Synthetic oligonucleotide
auucccuccagaaaucuau

SEQ ID NO: 3008727 - RNA, 19 nt, Artificial Sequence
  Description of Artificial Sequence: Synthetic oligonucleotide
cacuucgucuucaggguug

SEQ ID NO: 3008728 - RNA, 19 nt, Artificial Sequence
  Description of Artificial Sequence: Synthetic oligonucleotide
aucaugccacaagacuuac

SEQ ID NO: 3008729 - RNA, 19 nt, Artificial Sequence
  Description of Artificial Sequence: Synthetic oligonucleotide
aaacacugccaagcucuag

SEQ ID NO: 3008730 - RNA, 19 nt, Artificial Sequence
  Description of Artificial Sequence: Synthetic oligonucleotide
uacccguucucucuuccaa

SEQ ID NO: 3008731 - RNA, 19 nt, Artificial Sequence
  Description of Artificial Sequence: Synthetic oligonucleotide
agauucuuuaguggcauuu

SEQ ID NO: 3008732 - RNA, 19 nt, Artificial Sequence
  Description of Artificial Sequence: Synthetic oligonucleotide
ggugguacuggagauguug

SEQ ID NO: 3008733 - RNA, 19 nt, Artificial Sequence
  Description of Artificial Sequence: Synthetic oligonucleotide
uccuuccuuuauuuguuau

SEQ ID NO: 3008734 - RNA, 19 nt, Artificial Sequence
  Description of Artificial Sequence: Synthetic oligonucleotide
cacgaaaaggccuguuuga

SEQ ID NO: 3008735 - RNA, 19 nt, Artificial Sequence
  Description of Artificial Sequence: Synthetic oligonucleotide
ucugaagacccagauucua

SEQ ID NO: 3008736 - RNA, 19 nt, Artificial Sequence
  Description of Artificial Sequence: Synthetic oligonucleotide
ucaugccacaagacuuaca

SEQ ID NO: 3008737 - RNA, 19 nt, Artificial Sequence
  Description of Artificial Sequence: Synthetic oligonucleotide
ggaagcaguauagaucaug

SEQ ID NO: 3008738 - RNA, 19 nt, Artificial Sequence
  Description of Artificial Sequence: Synthetic oligonucleotide
cuuccuuuauuuguuaucu

SEQ ID NO: 3008739 - RNA, 19 nt, Artificial Sequence
  Description of Artificial Sequence: Synthetic oligonucleotide
aggccuguuugaugggcuc

SEQ ID NO: 3008740 - RNA, 19 nt, Artificial Sequence
  Description of Artificial Sequence: Synthetic oligonucleotide
gcucuagaagauucuuuag

SEQ ID NO: 3008741 - RNA, 19 nt, Artificial Sequence
  Description of Artificial Sequence: Synthetic oligonucleotide
guggcauuugguucugaca

SEQ ID NO: 3008742 - RNA, 19 nt, Artificial Sequence
  Description of Artificial Sequence: Synthetic oligonucleotide
aagauucuuuaguggcauu

SEQ ID NO: 3008743 - RNA, 19 nt, Artificial Sequence
  Description of Artificial Sequence: Synthetic oligonucleotide
acuucgucuucaggguugg

SEQ ID NO: 3008744 - RNA, 19 nt, Artificial Sequence
  Description of Artificial Sequence: Synthetic oligonucleotide
cucuagaagauucuuuagu

SEQ ID NO: 3008745 - RNA, 19 nt, Artificial Sequence
  Description of Artificial Sequence: Synthetic oligonucleotide
ugggucuuuuccuuccuuu

SEQ ID NO: 3008746 - RNA, 19 nt, Artificial Sequence
  Description of Artificial Sequence: Synthetic oligonucleotide
gaugggcucugcuauuaaa

SEQ ID NO: 3008747 - RNA, 19 nt, Artificial Sequence
  Description of Artificial Sequence: Synthetic oligonucleotide
aguauagaucaugccacaa

SEQ ID NO: 3008748 - RNA, 19 nt, Artificial Sequence
  Description of Artificial Sequence: Synthetic oligonucleotide
cuuccaacccacauauuua

SEQ ID NO: 3008749 - RNA, 19 nt, Artificial Sequence
  Description of Artificial Sequence: Synthetic oligonucleotide
gugguacuggagauguugc

SEQ ID NO: 3008750 - RNA, 19 nt, Artificial Sequence
  Description of Artificial Sequence: Synthetic oligonucleotide
cauuugguucugacagaac

SEQ ID NO: 3008751 - RNA, 19 nt, Artificial Sequence
  Description of Artificial Sequence: Synthetic oligonucleotide
guuugaugggcucugcuau

SEQ ID NO: 3008752 - RNA, 19 nt, Artificial Sequence
  Description of Artificial Sequence: Synthetic oligonucleotide
gguacaucugaaacacugc

SEQ ID NO: 3008753 - RNA, 19 nt, Artificial Sequence
  Description of Artificial Sequence: Synthetic oligonucleotide
uccaacccacauauuuaau

SEQ ID NO: 3008754 - RNA, 19 nt, Artificial Sequence
  Description of Artificial Sequence: Synthetic oligonucleotide
ugcuacuacccguucucuc

SEQ ID NO: 3008755 - RNA, 19 nt, Artificial Sequence
  Description of Artificial Sequence: Synthetic oligonucleotide
cucugcuauuaaacauccc

SEQ ID NO: 3008756 - RNA, 19 nt, Artificial Sequence
  Description of Artificial Sequence: Synthetic oligonucleotide
gcuauuaaacaucccacua

SEQ ID NO: 3008757 - RNA, 19 nt, Artificial Sequence
  Description of Artificial Sequence: Synthetic oligonucleotide
acucugcuacuacccguuc

SEQ ID NO: 3008758 - RNA, 19 nt, Artificial Sequence
  Description of Artificial Sequence: Synthetic oligonucleotide
aaacaucccacuacaucuu

SEQ ID NO: 3008759 - RNA, 19 nt, Artificial Sequence
  Description of Artificial Sequence: Synthetic oligonucleotide
uuugaugggcucugcuauu

SEQ ID NO: 3008760 - RNA, 19 nt, Artificial Sequence
  Description of Artificial Sequence: Synthetic oligonucleotide
aucuauggugguacuggag

SEQ ID NO: 3008761 - RNA, 19 nt, Artificial Sequence
  Description of Artificial Sequence: Synthetic oligonucleotide
auuaaacaucccacuacau

SEQ ID NO: 3008762 - RNA, 19 nt, Artificial Sequence
  Description of Artificial Sequence: Synthetic oligonucleotide
aagcucuagaagauucuuu

SEQ ID NO: 3008763 - RNA, 19 nt, Artificial Sequence
  Description of Artificial Sequence: Synthetic oligonucleotide
aacucugcuacuacccguu

SEQ ID NO: 3008764 - RNA, 19 nt, Artificial Sequence
  Description of Artificial Sequence: Synthetic oligonucleotide
gguacuggagauguugcac

SEQ ID NO: 3008765 - RNA, 19 nt, Artificial Sequence
  Description of Artificial Sequence: Synthetic oligonucleotide
cugcgucaaugacaaacug

SEQ ID NO: 3008766 - RNA, 19 nt, Artificial Sequence
  Description of Artificial Sequence: Synthetic oligonucleotide
cacugccaagcucuagaag

SEQ ID NO: 3008767 - RNA, 19 nt, Artificial Sequence
  Description of Artificial Sequence: Synthetic oligonucleotide
aaggccuguuugaugggcu

SEQ ID NO: 3008768 - RNA, 19 nt, Artificial Sequence
  Description of Artificial Sequence: Synthetic oligonucleotide
acacugccaagcucuagaa

SEQ ID NO: 3008769 - RNA, 19 nt, Artificial Sequence
  Description of Artificial Sequence: Synthetic oligonucleotide
gaucaugccacaagacuua

SEQ ID NO: 3008770 - RNA, 19 nt, Artificial Sequence
  Description of Artificial Sequence: Synthetic oligonucleotide
ugaugggcucugcuauuaa

SEQ ID NO: 3008771 - RNA, 19 nt, Artificial Sequence
  Description of Artificial Sequence: Synthetic oligonucleotide
ccacauauuuaauucccuc

SEQ ID NO: 3008772 - RNA, 19 nt, Artificial Sequence
  Description of Artificial Sequence: Synthetic oligonucleotide
guacuggagauguugcacu

SEQ ID NO: 3008773 - RNA, 19 nt, Artificial Sequence
  Description of Artificial Sequence: Synthetic oligonucleotide
uacuggagauguugcacuu

SEQ ID NO: 3008774 - RNA, 19 nt, Artificial Sequence
  Description of Artificial Sequence: Synthetic oligonucleotide
aaugacaaacugggucuuu

SEQ ID NO: 3008775 - RNA, 19 nt, Artificial Sequence
  Description of Artificial Sequence: Synthetic oligonucleotide
gaagauucuuuaguggcau

SEQ ID NO: 3008776 - RNA, 19 nt, Artificial Sequence
  Description of Artificial Sequence: Synthetic oligonucleotide
uggagauguugcacuucgu

SEQ ID NO: 3008777 - RNA, 19 nt, Artificial Sequence
  Description of Artificial Sequence: Synthetic oligonucleotide
cagguucugguacaucuga

SEQ ID NO: 3008778 - RNA, 19 nt, Artificial Sequence
  Description of Artificial Sequence: Synthetic oligonucleotide
ucaggguuggaagcaguau

SEQ ID NO: 3008779 - RNA, 19 nt, Artificial Sequence
  Description of Artificial Sequence: Synthetic oligonucleotide
gcucugcuauuaaacaucc

SEQ ID NO: 3008780 - RNA, 19 nt, Artificial Sequence
  Description of Artificial Sequence: Synthetic oligonucleotide
acgaaaaggccuguuugau

SEQ ID NO: 3008781 - RNA, 19 nt, Artificial Sequence
  Description of Artificial Sequence: Synthetic oligonucleotide
uuaguggcauuugguucug

SEQ ID NO: 3008782 - RNA, 19 nt, Artificial Sequence
  Description of Artificial Sequence: Synthetic oligonucleotide
cccaaaauguuucugaccu

SEQ ID NO: 3008783 - RNA, 19 nt, Artificial Sequence
  Description of Artificial Sequence: Synthetic oligonucleotide
caguauagaucaugccaca

SEQ ID NO: 3008784 - RNA, 19 nt, Artificial Sequence
  Description of Artificial Sequence: Synthetic oligonucleotide
aucccacuacaucuuccca

SEQ ID NO: 3008785 - RNA, 19 nt, Artificial Sequence
  Description of Artificial Sequence: Synthetic oligonucleotide
uugaugggcucugcuauua

SEQ ID NO: 3008786 - RNA, 19 nt, Artificial Sequence
  Description of Artificial Sequence: Synthetic oligonucleotide
uguuucugaccugcgucaa

SEQ ID NO: 3008787 - RNA, 19 nt, Artificial Sequence
  Description of Artificial Sequence: Synthetic oligonucleotide
aauucccuccagaaaucua

SEQ ID NO: 3008788 - RNA, 19 nt, Artificial Sequence
  Description of Artificial Sequence: Synthetic oligonucleotide
acugggucuuuuccuuccu

SEQ ID NO: 3008789 - RNA, 19 nt, Artificial Sequence
  Description of Artificial Sequence: Synthetic oligonucleotide
ccuuccuuuauuuguuauc

SEQ ID NO: 3008790 - RNA, 19 nt, Artificial Sequence
  Description of Artificial Sequence: Synthetic oligonucleotide
ggcucugcuauuaaacauc

SEQ ID NO: 3008791 - RNA, 19 nt, Artificial Sequence
  Description of Artificial Sequence: Synthetic oligonucleotide
cacaagacuuacauauagu

SEQ ID NO: 3008792 - RNA, 19 nt, Artificial Sequence
  Description of Artificial Sequence: Synthetic oligonucleotide
caggguuggaagcaguaua

SEQ ID NO: 3008793 - RNA, 19 nt, Artificial Sequence
  Description of Artificial Sequence: Synthetic oligonucleotide
cagauugcagguucuggua

SEQ ID NO: 3008794 - RNA, 19 nt, Artificial Sequence
  Description of Artificial Sequence: Synthetic oligonucleotide
cuucuggaauucauuauuu

SEQ ID NO: 3008795 - RNA, 19 nt, Artificial Sequence
  Description of Artificial Sequence: Synthetic oligonucleotide
acauauaguuguacccaaa

SEQ ID NO: 3008796 - RNA, 19 nt, Artificial Sequence
  Description of Artificial Sequence: Synthetic oligonucleotide
gucuucaggguuggaagca

SEQ ID NO: 3008797 - RNA, 19 nt, Artificial Sequence
  Description of Artificial Sequence: Synthetic oligonucleotide
gguuggaagcaguauagau

SEQ ID NO: 3008798 - RNA, 19 nt, Artificial Sequence
  Description of Artificial Sequence: Synthetic oligonucleotide
aucugaagacccagauucu

SEQ ID NO: 3008799 - RNA, 19 nt, Artificial Sequence
  Description of Artificial Sequence: Synthetic oligonucleotide
gaagacccagauucuacuu

SEQ ID NO: 3008800 - RNA, 19 nt, Artificial Sequence
  Description of Artificial Sequence: Synthetic oligonucleotide
auugcagguucugguacau

SEQ ID NO: 3008801 - RNA, 19 nt, Artificial Sequence
  Description of Artificial Sequence: Synthetic oligonucleotide
guuaucuucuggaauucau

SEQ ID NO: 3008802 - RNA, 19 nt, Artificial Sequence
  Description of Artificial Sequence: Synthetic oligonucleotide
cucucuuccaacccacaua

SEQ ID NO: 3008803 - RNA, 19 nt, Artificial Sequence
  Description of Artificial Sequence: Synthetic oligonucleotide
ccuuuauuuguuaucuucu

SEQ ID NO: 3008804 - RNA, 19 nt, Artificial Sequence
  Description of Artificial Sequence: Synthetic oligonucleotide
gccaagcucuagaagauuc

SEQ ID NO: 3008805 - RNA, 19 nt, Artificial Sequence
  Description of Artificial Sequence: Synthetic oligonucleotide
augccacaagacuuacaua

SEQ ID NO: 3008806 - RNA, 19 nt, Artificial Sequence
  Description of Artificial Sequence: Synthetic oligonucleotide
uacuacccguucucucuuc

SEQ ID NO: 3008807 - RNA, 19 nt, Artificial Sequence
  Description of Artificial Sequence: Synthetic oligonucleotide
cuacaucuucccaucccaa

SEQ ID NO: 3008808 - RNA, 19 nt, Artificial Sequence
  Description of Artificial Sequence: Synthetic oligonucleotide
uggaagcaguauagaucau

SEQ ID NO: 3008809 - RNA, 19 nt, Artificial Sequence
  Description of Artificial Sequence: Synthetic oligonucleotide
agacuuacauauaguugua

SEQ ID NO: 3008810 - RNA, 19 nt, Artificial Sequence
  Description of Artificial Sequence: Synthetic oligonucleotide
gcuacuacccguucucucu

SEQ ID NO: 3008811 - RNA, 19 nt, Artificial Sequence
  Description of Artificial Sequence: Synthetic oligonucleotide
ccaaaauguuucugaccug

SEQ ID NO: 3008812 - RNA, 19 nt, Artificial Sequence
  Description of Artificial Sequence: Synthetic oligonucleotide
cgucuucaggguuggaagc

SEQ ID NO: 3008813 - RNA, 19 nt, Artificial Sequence
  Description of Artificial Sequence: Synthetic oligonucleotide
cgaaaaggccuguuugaug

SEQ ID NO: 3008814 - RNA, 19 nt, Artificial Sequence
  Description of Artificial Sequence: Synthetic oligonucleotide
cuauggugguacuggagau

SEQ ID NO: 3008815 - RNA, 19 nt, Artificial Sequence
  Description of Artificial Sequence: Synthetic oligonucleotide
gcauuugguucugacagaa

SEQ ID NO: 3008816 - RNA, 19 nt, Artificial Sequence
  Description of Artificial Sequence: Synthetic oligonucleotide
gguucugacagaacacgaa

SEQ ID NO: 3008817 - RNA, 19 nt, Artificial Sequence
  Description of Artificial Sequence: Synthetic oligonucleotide
auguugcacuucgucuuca

SEQ ID NO: 3008818 - RNA, 19 nt, Artificial Sequence
  Description of Artificial Sequence: Synthetic oligonucleotide
cuacccguucucucuucca

SEQ ID NO: 3008819 - RNA, 19 nt, Artificial Sequence
  Description of Artificial Sequence: Synthetic oligonucleotide
ggcauuugguucugacaga

SEQ ID NO: 3008820 - RNA, 19 nt, Artificial Sequence
  Description of Artificial Sequence: Synthetic oligonucleotide
gucuuuuccuuccuuuauu

SEQ ID NO: 3008821 - RNA, 19 nt, Artificial Sequence
  Description of Artificial Sequence: Synthetic oligonucleotide
ugccaagcucuagaagauu

SEQ ID NO: 3008822 - RNA, 19 nt, Artificial Sequence
  Description of Artificial Sequence: Synthetic oligonucleotide
gaaacacugccaagcucua

SEQ ID NO: 3008823 - RNA, 19 nt, Artificial Sequence
  Description of Artificial Sequence: Synthetic oligonucleotide
ccacuacaucuucccaucc

SEQ ID NO: 3008824 - RNA, 19 nt, Artificial Sequence
  Description of Artificial Sequence: Synthetic oligonucleotide
agguucugguacaucugaa

SEQ ID NO: 3008825 - RNA, 19 nt, Artificial Sequence
  Description of Artificial Sequence: Synthetic oligonucleotide
ccguucucucuuccaaccc

SEQ ID NO: 3008826 - RNA, 19 nt, Artificial Sequence
  Description of Artificial Sequence: Synthetic oligonucleotide
gcagguucugguacaucug

SEQ ID NO: 3008827 - RNA, 19 nt, Artificial Sequence
  Description of Artificial Sequence: Synthetic oligonucleotide
gggucuuuuccuuccuuua

SEQ ID NO: 3008828 - RNA, 19 nt, Artificial Sequence
  Description of Artificial Sequence: Synthetic oligonucleotide
caaucugaagacccagauu

SEQ ID NO: 3008829 - RNA, 19 nt, Artificial Sequence
  Description of Artificial Sequence: Synthetic oligonucleotide
cuucaggguuggaagcagu

SEQ ID NO: 3008830 - RNA, 19 nt, Artificial Sequence
  Description of Artificial Sequence: Synthetic oligonucleotide
uaguggcauuugguucuga

SEQ ID NO: 3008831 - RNA, 19 nt, Artificial Sequence
  Description of Artificial Sequence: Synthetic oligonucleotide
cugccaagcucuagaagau

SEQ ID NO: 3008832 - RNA, 19 nt, Artificial Sequence
  Description of Artificial Sequence: Synthetic oligonucleotide
ggucuuuuccuuccuuuau

SEQ ID NO: 3008833 - RNA, 19 nt, Artificial Sequence
  Description of Artificial Sequence: Synthetic oligonucleotide
cucugcuacuacccguucu

SEQ ID NO: 3008834 - RNA, 19 nt, Artificial Sequence
  Description of Artificial Sequence: Synthetic oligonucleotide
cuguuugaugggcucugcu

SEQ ID NO: 3008835 - RNA, 19 nt, Artificial Sequence
  Description of Artificial Sequence: Synthetic oligonucleotide
uggugguacuggagauguu

SEQ ID NO: 3008836 - RNA, 19 nt, Artificial Sequence
  Description of Artificial Sequence: Synthetic oligonucleotide
gggcucugcuauuaaacau

SEQ ID NO: 3008837 - RNA, 19 nt, Artificial Sequence
  Description of Artificial Sequence: Synthetic oligonucleotide
ccugcgucaaugacaaacu

SEQ ID NO: 3008838 - RNA, 19 nt, Artificial Sequence
  Description of Artificial Sequence: Synthetic oligonucleotide
ccaacccacauauuuaauu

SEQ ID NO: 3008839 - RNA, 19 nt, Artificial Sequence
  Description of Artificial Sequence: Synthetic oligonucleotide
ggguuggaagcaguauaga

SEQ ID NO: 3008840 - RNA, 19 nt, Artificial Sequence
  Description of Artificial Sequence: Synthetic oligonucleotide
caagcucuagaagauucuu

SEQ ID NO: 3008841 - RNA, 19 nt, Artificial Sequence
  Description of Artificial Sequence: Synthetic oligonucleotide
guuucugaccugcgucaau

SEQ ID NO: 3008842 - RNA, 19 nt, Artificial Sequence
  Description of Artificial Sequence: Synthetic oligonucleotide
ccuguuugaugggcucugc

SEQ ID NO: 3008843 - RNA, 19 nt, Artificial Sequence
  Description of Artificial Sequence: Synthetic oligonucleotide
cguucucucuuccaaccca

SEQ ID NO: 3008844 - RNA, 19 nt, Artificial Sequence
  Description of Artificial Sequence: Synthetic oligonucleotide
cugguacaucugaaacacu

SEQ ID NO: 3008845 - RNA, 19 nt, Artificial Sequence
  Description of Artificial Sequence: Synthetic oligonucleotide
ccacagauugcagguucug

SEQ ID NO: 3008846 - RNA, 19 nt, Artificial Sequence
  Description of Artificial Sequence: Synthetic oligonucleotide
cccuccagaaaucuauggu

SEQ ID NO: 3008847 - RNA, 19 nt, Artificial Sequence
  Description of Artificial Sequence: Synthetic oligonucleotide
cccacauauuuaauucccu

SEQ ID NO: 3008848 - RNA, 19 nt, Artificial Sequence
  Description of Artificial Sequence: Synthetic oligonucleotide
ccaagcucuagaagauucu

SEQ ID NO: 3008849 - RNA, 19 nt, Artificial Sequence
  Description of Artificial Sequence: Synthetic oligonucleotide
cuacuacccguucucucuu

SEQ ID NO: 3008850 - RNA, 19 nt, Artificial Sequence
  Description of Artificial Sequence: Synthetic oligonucleotide
ccagaaaucuaugguggua

SEQ ID NO: 3008851 - RNA, 19 nt, Artificial Sequence
  Description of Artificial Sequence: Synthetic oligonucleotide
caaugacaaacugggucuu

SEQ ID NO: 3008852 - RNA, 19 nt, Artificial Sequence
  Description of Artificial Sequence: Synthetic oligonucleotide
cugcuacuacccguucucu

SEQ ID NO: 3008853 - RNA, 19 nt, Artificial Sequence
  Description of Artificial Sequence: Synthetic oligonucleotide
gacccagauucuacuuauu

SEQ ID NO: 3008854 - RNA, 19 nt, Artificial Sequence
  Description of Artificial Sequence: Synthetic oligonucleotide
gaccugcgucaaugacaaa

SEQ ID NO: 3008855 - RNA, 19 nt, Artificial Sequence
  Description of Artificial Sequence: Synthetic oligonucleotide
cugggucuuuuccuuccuu

SEQ ID NO: 3008856 - RNA, 19 nt, Artificial Sequence
  Description of Artificial Sequence: Synthetic oligonucleotide
cuucgucuucaggguugga

SEQ ID NO: 3008857 - RNA, 19 nt, Artificial Sequence
  Description of Artificial Sequence: Synthetic oligonucleotide
gcacuucgucuucaggguu

SEQ ID NO: 3008858 - RNA, 19 nt, Artificial Sequence
  Description of Artificial Sequence: Synthetic oligonucleotide
ggccuguuugaugggcucu

SEQ ID NO: 3008859 - RNA, 19 nt, Artificial Sequence
  Description of Artificial Sequence: Synthetic oligonucleotide
cucuuccaacccacauauu

SEQ ID NO: 3008860 - RNA, 19 nt, Artificial Sequence
  Description of Artificial Sequence: Synthetic oligonucleotide
cgucaaugacaaacugggu

SEQ ID NO: 3008861 - RNA, 19 nt, Artificial Sequence
  Description of Artificial Sequence: Synthetic oligonucleotide
aauucuuucuccuuuaagc

SEQ ID NO: 3008862 - RNA, 19 nt, Artificial Sequence
  Description of Artificial Sequence: Synthetic oligonucleotide
auucuuucuccuuuaagcc

SEQ ID NO: 3008863 - RNA, 19 nt, Artificial Sequence
  Description of Artificial Sequence: Synthetic oligonucleotide
aagaguauugagcaaacug

SEQ ID NO: 3008864 - RNA, 19 nt, Artificial Sequence
  Description of Artificial Sequence: Synthetic oligonucleotide
aacuuaggaaaauucuuuc

SEQ ID NO: 3008865 - RNA, 19 nt, Artificial Sequence
  Description of Artificial Sequence: Synthetic oligonucleotide
aucuacauaacuuaggaaa

SEQ ID NO: 3008866 - RNA, 19 nt, Artificial Sequence
  Description of Artificial Sequence: Synthetic oligonucleotide
caacauuugucuaagcacg

SEQ ID NO: 3008867 - RNA, 19 nt, Artificial Sequence
  Description of Artificial Sequence: Synthetic oligonucleotide
aaucagacagcuccguuuc

SEQ ID NO: 3008868 - RNA, 19 nt, Artificial Sequence
  Description of Artificial Sequence: Synthetic oligonucleotide
ucaucuacauaacuuagga

SEQ ID NO: 3008869 - RNA, 19 nt, Artificial Sequence
  Description of Artificial Sequence: Synthetic oligonucleotide
uuaggaaaauucuuucucc

SEQ ID NO: 3008870 - RNA, 19 nt, Artificial Sequence
  Description of Artificial Sequence: Synthetic oligonucleotide
ucaacauuugucuaagcac

SEQ ID NO: 3008871 - RNA, 19 nt, Artificial Sequence
  Description of Artificial Sequence: Synthetic oligonucleotide
guccucaacaaucagacag

SEQ ID NO: 3008872 - RNA, 19 nt, Artificial Sequence
  Description of Artificial Sequence: Synthetic oligonucleotide
ucuaggucaacauuugucu

SEQ ID NO: 3008873 - RNA, 19 nt, Artificial Sequence
  Description of Artificial Sequence: Synthetic oligonucleotide
uucaucuacauaacuuagg

SEQ ID NO: 3008874 - RNA, 19 nt, Artificial Sequence
  Description of Artificial Sequence: Synthetic oligonucleotide
agacacugaagcuucuugc

SEQ ID NO: 3008875 - RNA, 19 nt, Artificial Sequence
  Description of Artificial Sequence: Synthetic oligonucleotide
aaauucuuucuccuuuaag

SEQ ID NO: 3008876 - RNA, 19 nt, Artificial Sequence
  Description of Artificial Sequence: Synthetic oligonucleotide
ucugcaaacguucugucac

SEQ ID NO: 3008877 - RNA, 19 nt, Artificial Sequence
  Description of Artificial Sequence: Synthetic oligonucleotide
uuucaucuacauaacuuag

SEQ ID NO: 3008878 - RNA, 19 nt, Artificial Sequence
  Description of Artificial Sequence: Synthetic oligonucleotide
caaacguucugucacaggc

SEQ ID NO: 3008879 - RNA, 19 nt, Artificial Sequence
  Description of Artificial Sequence: Synthetic oligonucleotide
uuuucaucuacauaacuua

SEQ ID NO: 3008880 - RNA, 19 nt, Artificial Sequence
  Description of Artificial Sequence: Synthetic oligonucleotide
caaacuguccucaacaauc

SEQ ID NO: 3008881 - RNA, 19 nt, Artificial Sequence
  Description of Artificial Sequence: Synthetic oligonucleotide
aacguucugucacaggcag

SEQ ID NO: 3008882 - RNA, 19 nt, Artificial Sequence
  Description of Artificial Sequence: Synthetic oligonucleotide
ucuacauaacuuaggaaaa

SEQ ID NO: 3008883 - RNA, 19 nt, Artificial Sequence
  Description of Artificial Sequence: Synthetic oligonucleotide
aagcuucuugcacuggaac

SEQ ID NO: 3008884 - RNA, 19 nt, Artificial Sequence
  Description of Artificial Sequence: Synthetic oligonucleotide
aucucgauguuguuguugg

SEQ ID NO: 3008885 - RNA, 19 nt, Artificial Sequence
  Description of Artificial Sequence: Synthetic oligonucleotide
acagcuccguuucagggcc

SEQ ID NO: 3008886 - RNA, 19 nt, Artificial Sequence
  Description of Artificial Sequence: Synthetic oligonucleotide
uuccccuaaaagcagacac

SEQ ID NO: 3008887 - RNA, 19 nt, Artificial Sequence
  Description of Artificial Sequence: Synthetic oligonucleotide
uuugcugggucuaaucucu

SEQ ID NO: 3008888 - RNA, 19 nt, Artificial Sequence
  Description of Artificial Sequence: Synthetic oligonucleotide
cuuaggaaaauucuuucuc

SEQ ID NO: 3008889 - RNA, 19 nt, Artificial Sequence
  Description of Artificial Sequence: Synthetic oligonucleotide
agcggaagaguauugagca

SEQ ID NO: 3008890 - RNA, 19 nt, Artificial Sequence
  Description of Artificial Sequence: Synthetic oligonucleotide
acauaacuuaggaaaauuc

SEQ ID NO: 3008891 - RNA, 19 nt, Artificial Sequence
  Description of Artificial Sequence: Synthetic oligonucleotide
uaacuuaggaaaauucuuu

SEQ ID NO: 3008892 - RNA, 19 nt, Artificial Sequence
  Description of Artificial Sequence: Synthetic oligonucleotide
cuguccucaacaaucagac

SEQ ID NO: 3008893 - RNA, 19 nt, Artificial Sequence
  Description of Artificial Sequence: Synthetic oligonucleotide
guaauucccagugaguucc

SEQ ID NO: 3008894 - RNA, 19 nt, Artificial Sequence
  Description of Artificial Sequence: Synthetic oligonucleotide
aguauugagcaaacugucc

SEQ ID NO: 3008895 - RNA, 19 nt, Artificial Sequence
  Description of Artificial Sequence: Synthetic oligonucleotide
cuugcacuggaacagcccg

SEQ ID NO: 3008896 - RNA, 19 nt, Artificial Sequence
  Description of Artificial Sequence: Synthetic oligonucleotide
ucgauguuguuguugguca

SEQ ID NO: 3008897 - RNA, 19 nt, Artificial Sequence
  Description of Artificial Sequence: Synthetic oligonucleotide
agaguauugagcaaacugu

SEQ ID NO: 3008898 - RNA, 19 nt, Artificial Sequence
  Description of Artificial Sequence: Synthetic oligonucleotide
acuuaggaaaauucuuucu

SEQ ID NO: 3008899 - RNA, 19 nt, Artificial Sequence
  Description of Artificial Sequence: Synthetic oligonucleotide
uuugucuaagcacgucugc

SEQ ID NO: 3008900 - RNA, 19 nt, Artificial Sequence
  Description of Artificial Sequence: Synthetic oligonucleotide
ucuccuuuaagccccggga

SEQ ID NO: 3008901 - RNA, 19 nt, Artificial Sequence
  Description of Artificial Sequence: Synthetic oligonucleotide
agcaucucgauguuguugu

SEQ ID NO: 3008902 - RNA, 19 nt, Artificial Sequence
  Description of Artificial Sequence: Synthetic oligonucleotide
uaggaaaauucuuucuccu

SEQ ID NO: 3008903 - RNA, 19 nt, Artificial Sequence
  Description of Artificial Sequence: Synthetic oligonucleotide
acacugaagcuucuugcac

SEQ ID NO: 3008904 - RNA, 19 nt, Artificial Sequence
  Description of Artificial Sequence: Synthetic oligonucleotide
uuggucacggcgaaguacu

SEQ ID NO: 3008905 - RNA, 19 nt, Artificial Sequence
  Description of Artificial Sequence: Synthetic oligonucleotide
gucaacauuugucuaagca

SEQ ID NO: 3008906 - RNA, 19 nt, Artificial Sequence
  Description of Artificial Sequence: Synthetic oligonucleotide
aaucucuaggucaacauuu

SEQ ID NO: 3008907 - RNA, 19 nt, Artificial Sequence
  Description of Artificial Sequence: Synthetic oligonucleotide
ugaagcuucuugcacugga

SEQ ID NO: 3008908 - RNA, 19 nt, Artificial Sequence
  Description of Artificial Sequence: Synthetic oligonucleotide
agauauguuaggcuguuuu

SEQ ID NO: 3008909 - RNA, 19 nt, Artificial Sequence
  Description of Artificial Sequence: Synthetic oligonucleotide
gaggggacagauauguuag

SEQ ID NO: 3008910 - RNA, 19 nt, Artificial Sequence
  Description of Artificial Sequence: Synthetic oligonucleotide
agacagcuccguuucaggg

SEQ ID NO: 3008911 - RNA, 19 nt, Artificial Sequence
  Description of Artificial Sequence: Synthetic oligonucleotide
aaaauucuuucuccuuuaa

SEQ ID NO: 3008912 - RNA, 19 nt, Artificial Sequence
  Description of Artificial Sequence: Synthetic oligonucleotide
uccuuuaagccccgggacc

SEQ ID NO: 3008913 - RNA, 19 nt, Artificial Sequence
  Description of Artificial Sequence: Synthetic oligonucleotide
uucuccuuuaagccccggg

SEQ ID NO: 3008914 - RNA, 19 nt, Artificial Sequence
  Description of Artificial Sequence: Synthetic oligonucleotide
ucuaaucucuaggucaaca

SEQ ID NO: 3008915 - RNA, 19 nt, Artificial Sequence
  Description of Artificial Sequence: Synthetic oligonucleotide
uuguuguuggucacggcga

SEQ ID NO: 3008916 - RNA, 19 nt, Artificial Sequence
  Description of Artificial Sequence: Synthetic oligonucleotide
uucccagugaguuccaggu

SEQ ID NO: 3008917 - RNA, 19 nt, Artificial Sequence
  Description of Artificial Sequence: Synthetic oligonucleotide
cuaagcacgucugcaaacg

SEQ ID NO: 3008918 - RNA, 19 nt, Artificial Sequence
  Description of Artificial Sequence: Synthetic oligonucleotide
cucuaggucaacauuuguc

SEQ ID NO: 3008919 - RNA, 19 nt, Artificial Sequence
  Description of Artificial Sequence: Synthetic oligonucleotide
ggacagauauguuaggcug

SEQ ID NO: 3008920 - RNA, 19 nt, Artificial Sequence
  Description of Artificial Sequence: Synthetic oligonucleotide
gagcaaacuguccucaaca

SEQ ID NO: 3008921 - RNA, 19 nt, Artificial Sequence
  Description of Artificial Sequence: Synthetic oligonucleotide
gauguuguuguuggucacg

SEQ ID NO: 3008922 - RNA, 19 nt, Artificial Sequence
  Description of Artificial Sequence: Synthetic oligonucleotide
uuuugcugggucuaaucuc

SEQ ID NO: 3008923 - RNA, 19 nt, Artificial Sequence
  Description of Artificial Sequence: Synthetic oligonucleotide
aaacgcuuuugcugggucu

SEQ ID NO: 3008924 - RNA, 19 nt, Artificial Sequence
  Description of Artificial Sequence: Synthetic oligonucleotide
aacagcccguccuggcagc

SEQ ID NO: 3008925 - RNA, 19 nt, Artificial Sequence
  Description of Artificial Sequence: Synthetic oligonucleotide
auucccagugaguuccagg

SEQ ID NO: 3008926 - RNA, 19 nt, Artificial Sequence
  Description of Artificial Sequence: Synthetic oligonucleotide
ugagguuugacagcucccc

SEQ ID NO: 3008927 - RNA, 19 nt, Artificial Sequence
  Description of Artificial Sequence: Synthetic oligonucleotide
cauaacuuaggaaaauucu

SEQ ID NO: 3008928 - RNA, 19 nt, Artificial Sequence
  Description of Artificial Sequence: Synthetic oligonucleotide
uucugucacaggcagcgga

SEQ ID NO: 3008929 - RNA, 19 nt, Artificial Sequence
  Description of Artificial Sequence: Synthetic oligonucleotide
uaaucucuaggucaacauu

SEQ ID NO: 3008930 - RNA, 19 nt, Artificial Sequence
  Description of Artificial Sequence: Synthetic oligonucleotide
uuuuccccuaaaagcagac

SEQ ID NO: 3008931 - RNA, 19 nt, Artificial Sequence
  Description of Artificial Sequence: Synthetic oligonucleotide
acugaagcuucuugcacug

SEQ ID NO: 3008932 - RNA, 19 nt, Artificial Sequence
  Description of Artificial Sequence: Synthetic oligonucleotide
uaggucaacauuugucuaa

SEQ ID NO: 3008933 - RNA, 19 nt, Artificial Sequence
  Description of Artificial Sequence: Synthetic oligonucleotide
ucuugcacuggaacagccc

SEQ ID NO: 3008934 - RNA, 19 nt, Artificial Sequence
  Description of Artificial Sequence: Synthetic oligonucleotide
cagcggaagaguauugagc

SEQ ID NO: 3008935 - RNA, 19 nt, Artificial Sequence
  Description of Artificial Sequence: Synthetic oligonucleotide
ucuaagcacgucugcaaac

SEQ ID NO: 3008936 - RNA, 19 nt, Artificial Sequence
  Description of Artificial Sequence: Synthetic oligonucleotide
uucuugcacuggaacagcc

SEQ ID NO: 3008937 - RNA, 19 nt, Artificial Sequence
  Description of Artificial Sequence: Synthetic oligonucleotide
aacuguccucaacaaucag

SEQ ID NO: 3008938 - RNA, 19 nt, Artificial Sequence
  Description of Artificial Sequence: Synthetic oligonucleotide
agaggggacagauauguua

SEQ ID NO: 3008939 - RNA, 19 nt, Artificial Sequence
  Description of Artificial Sequence: Synthetic oligonucleotide
ugagcaaacuguccucaac

SEQ ID NO: 3008940 - RNA, 19 nt, Artificial Sequence
  Description of Artificial Sequence: Synthetic oligonucleotide
gacacugaagcuucuugca

SEQ ID NO: 3008941 - RNA, 19 nt, Artificial Sequence
  Description of Artificial Sequence: Synthetic oligonucleotide
gacagcuccguuucagggc

SEQ ID NO: 3008942 - RNA, 19 nt, Artificial Sequence
  Description of Artificial Sequence: Synthetic oligonucleotide
uauugagcaaacuguccuc

SEQ ID NO: 3008943 - RNA, 19 nt, Artificial Sequence
  Description of Artificial Sequence: Synthetic oligonucleotide
aaacuguccucaacaauca

SEQ ID NO: 3008944 - RNA, 19 nt, Artificial Sequence
  Description of Artificial Sequence: Synthetic oligonucleotide
auaacuuaggaaaauucuu

SEQ ID NO: 3008945 - RNA, 19 nt, Artificial Sequence
  Description of Artificial Sequence: Synthetic oligonucleotide
acccuuccagcucuggagg

SEQ ID NO: 3008946 - RNA, 19 nt, Artificial Sequence
  Description of Artificial Sequence: Synthetic oligonucleotide
acccagaggggacagauau

SEQ ID NO: 3008947 - RNA, 19 nt, Artificial Sequence
  Description of Artificial Sequence: Synthetic oligonucleotide
ugucuaagcacgucugcaa

SEQ ID NO: 3008948 - RNA, 19 nt, Artificial Sequence
  Description of Artificial Sequence: Synthetic oligonucleotide
agcacgucugcaaacguuc

SEQ ID NO: 3008949 - RNA, 19 nt, Artificial Sequence
  Description of Artificial Sequence: Synthetic oligonucleotide
gaguauugagcaaacuguc

SEQ ID NO: 3008950 - RNA, 19 nt, Artificial Sequence
  Description of Artificial Sequence: Synthetic oligonucleotide
gaaaauucuuucuccuuua

SEQ ID NO: 3008951 - RNA, 19 nt, Artificial Sequence
  Description of Artificial Sequence: Synthetic oligonucleotide
uucaaacgcuuuugcuggg

SEQ ID NO: 3008952 - RNA, 19 nt, Artificial Sequence
  Description of Artificial Sequence: Synthetic oligonucleotide
ucagacagcuccguuucag

SEQ ID NO: 3008953 - RNA, 19 nt, Artificial Sequence
  Description of Artificial Sequence: Synthetic oligonucleotide
gaacagcccguccuggcag

SEQ ID NO: 3008954 - RNA, 19 nt, Artificial Sequence
  Description of Artificial Sequence: Synthetic oligonucleotide
cuccagguaauucccagug

SEQ ID NO: 3008955 - RNA, 19 nt, Artificial Sequence
  Description of Artificial Sequence: Synthetic oligonucleotide
guauugagcaaacuguccu

SEQ ID NO: 3008956 - RNA, 19 nt, Artificial Sequence
  Description of Artificial Sequence: Synthetic oligonucleotide
ucucuaggucaacauuugu

SEQ ID NO: 3008957 - RNA, 19 nt, Artificial Sequence
  Description of Artificial Sequence: Synthetic oligonucleotide
uacauaacuuaggaaaauu

SEQ ID NO: 3008958 - RNA, 19 nt, Artificial Sequence
  Description of Artificial Sequence: Synthetic oligonucleotide
uuguuggucacggcgaagu

SEQ ID NO: 3008959 - RNA, 19 nt, Artificial Sequence
  Description of Artificial Sequence: Synthetic oligonucleotide
uugucuaagcacgucugca

SEQ ID NO: 3008960 - RNA, 19 nt, Artificial Sequence
  Description of Artificial Sequence: Synthetic oligonucleotide
ggugagguuugacagcucc

SEQ ID NO: 3008961 - RNA, 19 nt, Artificial Sequence
  Description of Artificial Sequence: Synthetic oligonucleotide
ugucacaggcagcggaaga

SEQ ID NO: 3008962 - RNA, 19 nt, Artificial Sequence
  Description of Artificial Sequence: Synthetic oligonucleotide
gggucuaaucucuagguca

SEQ ID NO: 3008963 - RNA, 19 nt, Artificial Sequence
  Description of Artificial Sequence: Synthetic oligonucleotide
auuugucuaagcacgucug

SEQ ID NO: 3008964 - RNA, 19 nt, Artificial Sequence
  Description of Artificial Sequence: Synthetic oligonucleotide
ugggucuaaucucuagguc

SEQ ID NO: 3008965 - RNA, 19 nt, Artificial Sequence
  Description of Artificial Sequence: Synthetic oligonucleotide
ucugucacaggcagcggaa

SEQ ID NO: 3008966 - RNA, 19 nt, Artificial Sequence
  Description of Artificial Sequence: Synthetic oligonucleotide
auugagcaaacuguccuca

SEQ ID NO: 3008967 - RNA, 19 nt, Artificial Sequence
  Description of Artificial Sequence: Synthetic oligonucleotide
aacauuugucuaagcacgu

SEQ ID NO: 3008968 - RNA, 19 nt, Artificial Sequence
  Description of Artificial Sequence: Synthetic oligonucleotide
uaagcacgucugcaaacgu

SEQ ID NO: 3008969 - RNA, 19 nt, Artificial Sequence
  Description of Artificial Sequence: Synthetic oligonucleotide
aacaaucagacagcuccgu

SEQ ID NO: 3008970 - RNA, 19 nt, Artificial Sequence
  Description of Artificial Sequence: Synthetic oligonucleotide
acuggaacagcccguccug

SEQ ID NO: 3008971 - RNA, 19 nt, Artificial Sequence
  Description of Artificial Sequence: Synthetic oligonucleotide
cacccuuccagcucuggag

SEQ ID NO: 3008972 - RNA, 19 nt, Artificial Sequence
  Description of Artificial Sequence: Synthetic oligonucleotide
ugcaaacguucugucacag

SEQ ID NO: 3008973 - RNA, 19 nt, Artificial Sequence
  Description of Artificial Sequence: Synthetic oligonucleotide
agugaguuccaggugggug

SEQ ID NO: 3008974 - RNA, 19 nt, Artificial Sequence
  Description of Artificial Sequence: Synthetic oligonucleotide
agguaauucccagugaguu

SEQ ID NO: 3008975 - RNA, 19 nt, Artificial Sequence
  Description of Artificial Sequence: Synthetic oligonucleotide
aggugggugagguuugaca

SEQ ID NO: 3008976 - RNA, 19 nt, Artificial Sequence
  Description of Artificial Sequence: Synthetic oligonucleotide
gugaguuccagguggguga

SEQ ID NO: 3008977 - RNA, 19 nt, Artificial Sequence
  Description of Artificial Sequence: Synthetic oligonucleotide
ugcugggucuaaucucuag

SEQ ID NO: 3008978 - RNA, 19 nt, Artificial Sequence
  Description of Artificial Sequence: Synthetic oligonucleotide
cagacagcuccguuucagg

SEQ ID NO: 3008979 - RNA, 19 nt, Artificial Sequence
  Description of Artificial Sequence: Synthetic oligonucleotide
aggucaacauuugucuaag

SEQ ID NO: 3008980 - RNA, 19 nt, Artificial Sequence
  Description of Artificial Sequence: Synthetic oligonucleotide
agcaaacuguccucaacaa

SEQ ID NO: 3008981 - RNA, 19 nt, Artificial Sequence
  Description of Artificial Sequence: Synthetic oligonucleotide
aaacguucugucacaggca

SEQ ID NO: 3008982 - RNA, 19 nt, Artificial Sequence
  Description of Artificial Sequence: Synthetic oligonucleotide
acauuugucuaagcacguc

SEQ ID NO: 3008983 - RNA, 19 nt, Artificial Sequence
  Description of Artificial Sequence: Synthetic oligonucleotide
uguuguuggucacggcgaa

SEQ ID NO: 3008984 - RNA, 19 nt, Artificial Sequence
  Description of Artificial Sequence: Synthetic oligonucleotide
cuccuuuaagccccgggac

SEQ ID NO: 3008985 - RNA, 19 nt, Artificial Sequence
  Description of Artificial Sequence: Synthetic oligonucleotide
gucacggcgaaguacugca

SEQ ID NO: 3008986 - RNA, 19 nt, Artificial Sequence
  Description of Artificial Sequence: Synthetic oligonucleotide
aggaaaauucuuucuccuu

SEQ ID NO: 3008987 - RNA, 19 nt, Artificial Sequence
  Description of Artificial Sequence: Synthetic oligonucleotide
ucuccagguaauucccagu

SEQ ID NO: 3008988 - RNA, 19 nt, Artificial Sequence
  Description of Artificial Sequence: Synthetic oligonucleotide
acuguccucaacaaucaga

SEQ ID NO: 3008989 - RNA, 19 nt, Artificial Sequence
  Description of Artificial Sequence: Synthetic oligonucleotide
aggggacagauauguuagg

SEQ ID NO: 3008990 - RNA, 19 nt, Artificial Sequence
  Description of Artificial Sequence: Synthetic oligonucleotide
ugucuccagguaauuccca

SEQ ID NO: 3008991 - RNA, 19 nt, Artificial Sequence
  Description of Artificial Sequence: Synthetic oligonucleotide
cccagugaguuccaggugg

SEQ ID NO: 3008992 - RNA, 19 nt, Artificial Sequence
  Description of Artificial Sequence: Synthetic oligonucleotide
uccguuucagggccugaca

SEQ ID NO: 3008993 - RNA, 19 nt, Artificial Sequence
  Description of Artificial Sequence: Synthetic oligonucleotide
cucgauguuguuguugguc

SEQ ID NO: 3008994 - RNA, 19 nt, Artificial Sequence
  Description of Artificial Sequence: Synthetic oligonucleotide
gucacaggcagcggaagag

SEQ ID NO: 3008995 - RNA, 19 nt, Artificial Sequence
  Description of Artificial Sequence: Synthetic oligonucleotide
ggacccugcuuucaaacgc

SEQ ID NO: 3008996 - RNA, 19 nt, Artificial Sequence
  Description of Artificial Sequence: Synthetic oligonucleotide
uccaggugggugagguuug

SEQ ID NO: 3008997 - RNA, 19 nt, Artificial Sequence
  Description of Artificial Sequence: Synthetic oligonucleotide
cuuucuccuuuaagccccg

SEQ ID NO: 3008998 - RNA, 19 nt, Artificial Sequence
  Description of Artificial Sequence: Synthetic oligonucleotide
uguccucaacaaucagaca

SEQ ID NO: 3008999 - RNA, 19 nt, Artificial Sequence
  Description of Artificial Sequence: Synthetic oligonucleotide
uuuccccuaaaagcagaca

SEQ ID NO: 3009000 - RNA, 19 nt, Artificial Sequence
  Description of Artificial Sequence: Synthetic oligonucleotide
uuccaggugggugagguuu

SEQ ID NO: 3009001 - RNA, 19 nt, Artificial Sequence
  Description of Artificial Sequence: Synthetic oligonucleotide
ugaguuccaggugggugag

SEQ ID NO: 3009002 - RNA, 19 nt, Artificial Sequence
  Description of Artificial Sequence: Synthetic oligonucleotide
uuaagccccgggacccugc

SEQ ID NO: 3009003 - RNA, 19 nt, Artificial Sequence
  Description of Artificial Sequence: Synthetic oligonucleotide
ucacggcgaaguacugcag

SEQ ID NO: 3009004 - RNA, 19 nt, Artificial Sequence
  Description of Artificial Sequence: Synthetic oligonucleotide
aacgcuuuugcugggucua

SEQ ID NO: 3009005 - RNA, 19 nt, Artificial Sequence
  Description of Artificial Sequence: Synthetic oligonucleotide
cauuugucuaagcacgucu

SEQ ID NO: 3009006 - RNA, 19 nt, Artificial Sequence
  Description of Artificial Sequence: Synthetic oligonucleotide
caucuacauaacuuaggaa

SEQ ID NO: 3009007 - RNA, 19 nt, Artificial Sequence
  Description of Artificial Sequence: Synthetic oligonucleotide
guuggucacggcgaaguac

SEQ ID NO: 3009008 - RNA, 19 nt, Artificial Sequence
  Description of Artificial Sequence: Synthetic oligonucleotide
cuucuugcacuggaacagc

SEQ ID NO: 3009009 - RNA, 19 nt, Artificial Sequence
  Description of Artificial Sequence: Synthetic oligonucleotide
gggacccugcuuucaaacg

SEQ ID NO: 3009010 - RNA, 19 nt, Artificial Sequence
  Description of Artificial Sequence: Synthetic oligonucleotide
aucucuaggucaacauuug

SEQ ID NO: 3009011 - RNA, 19 nt, Artificial Sequence
  Description of Artificial Sequence: Synthetic oligonucleotide
gcagcggaagaguauugag

SEQ ID NO: 3009012 - RNA, 19 nt, Artificial Sequence
  Description of Artificial Sequence: Synthetic oligonucleotide
gguaauucccagugaguuc

SEQ ID NO: 3009013 - RNA, 19 nt, Artificial Sequence
  Description of Artificial Sequence: Synthetic oligonucleotide
cucaacaaucagacagcuc

SEQ ID NO: 3009014 - RNA, 19 nt, Artificial Sequence
  Description of Artificial Sequence: Synthetic oligonucleotide
caucucgauguuguuguug

SEQ ID NO: 3009015 - RNA, 19 nt, Artificial Sequence
  Description of Artificial Sequence: Synthetic oligonucleotide
ccuaaaagcagacacugaa

SEQ ID NO: 3009016 - RNA, 19 nt, Artificial Sequence
  Description of Artificial Sequence: Synthetic oligonucleotide
gugucuccagguaauuccc

SEQ ID NO: 3009017 - RNA, 19 nt, Artificial Sequence
  Description of Artificial Sequence: Synthetic oligonucleotide
agcccguccuggcagcauc

SEQ ID NO: 3009018 - RNA, 19 nt, Artificial Sequence
  Description of Artificial Sequence: Synthetic oligonucleotide
uugcacuggaacagcccgu

SEQ ID NO: 3009019 - RNA, 19 nt, Artificial Sequence
  Description of Artificial Sequence: Synthetic oligonucleotide
caaacgcuuuugcuggguc

SEQ ID NO: 3009020 - RNA, 19 nt, Artificial Sequence
  Description of Artificial Sequence: Synthetic oligonucleotide
gucugcaaacguucuguca

SEQ ID NO: 3009021 - RNA, 19 nt, Artificial Sequence
  Description of Artificial Sequence: Synthetic oligonucleotide
acaaucagacagcuccguu

SEQ ID NO: 3009022 - RNA, 19 nt, Artificial Sequence
  Description of Artificial Sequence: Synthetic oligonucleotide
uugagcaaacuguccucaa

SEQ ID NO: 3009023 - RNA, 19 nt, Artificial Sequence
  Description of Artificial Sequence: Synthetic oligonucleotide
uaauucccagugaguucca

SEQ ID NO: 3009024 - RNA, 19 nt, Artificial Sequence
  Description of Artificial Sequence: Synthetic oligonucleotide
ucaaacgcuuuugcugggu

SEQ ID NO: 3009025 - RNA, 19 nt, Artificial Sequence
  Description of Artificial Sequence: Synthetic oligonucleotide
ucacaggcagcggaagagu

SEQ ID NO: 3009026 - RNA, 19 nt, Artificial Sequence
  Description of Artificial Sequence: Synthetic oligonucleotide
gucuaagcacgucugcaaa

SEQ ID NO: 3009027 - RNA, 19 nt, Artificial Sequence
  Description of Artificial Sequence: Synthetic oligonucleotide
ggggacagauauguuaggc

SEQ ID NO: 3009028 - RNA, 19 nt, Artificial Sequence
  Description of Artificial Sequence: Synthetic oligonucleotide
cguucugucacaggcagcg

SEQ ID NO: 3009029 - RNA, 19 nt, Artificial Sequence
  Description of Artificial Sequence: Synthetic oligonucleotide
uuuaagccccgggacccug

SEQ ID NO: 3009030 - RNA, 19 nt, Artificial Sequence
  Description of Artificial Sequence: Synthetic oligonucleotide
acacccuuccagcucugga

SEQ ID NO: 3009031 - RNA, 19 nt, Artificial Sequence
  Description of Artificial Sequence: Synthetic oligonucleotide
cagcaucucgauguuguug

SEQ ID NO: 3009032 - RNA, 19 nt, Artificial Sequence
  Description of Artificial Sequence: Synthetic oligonucleotide
aggcagugucuccagguaa

SEQ ID NO: 3009033 - RNA, 19 nt, Artificial Sequence
  Description of Artificial Sequence: Synthetic oligonucleotide
gcaaacguucugucacagg

SEQ ID NO: 3009034 - RNA, 19 nt, Artificial Sequence
  Description of Artificial Sequence: Synthetic oligonucleotide
uguuggucacggcgaagua

SEQ ID NO: 3009035 - RNA, 19 nt, Artificial Sequence
  Description of Artificial Sequence: Synthetic oligonucleotide
cuaaucucuaggucaacau

SEQ ID NO: 3009036 - RNA, 19 nt, Artificial Sequence
  Description of Artificial Sequence: Synthetic oligonucleotide
cuaggucaacauuugucua

SEQ ID NO: 3009037 - RNA, 19 nt, Artificial Sequence
  Description of Artificial Sequence: Synthetic oligonucleotide
ugcacuggaacagcccguc

SEQ ID NO: 3009038 - RNA, 19 nt, Artificial Sequence
  Description of Artificial Sequence: Synthetic oligonucleotide
ucucgauguuguuguuggu

SEQ ID NO: 3009039 - RNA, 19 nt, Artificial Sequence
  Description of Artificial Sequence: Synthetic oligonucleotide
ggaaaauucuuucuccuuu

SEQ ID NO: 3009040 - RNA, 19 nt, Artificial Sequence
  Description of Artificial Sequence: Synthetic oligonucleotide
cagcucuggaggcaguguc

SEQ ID NO: 3009041 - RNA, 19 nt, Artificial Sequence
  Description of Artificial Sequence: Synthetic oligonucleotide
cacgucugcaaacguucug

SEQ ID NO: 3009042 - RNA, 19 nt, Artificial Sequence
  Description of Artificial Sequence: Synthetic oligonucleotide
cagggccugacacccuucc

SEQ ID NO: 3009043 - RNA, 19 nt, Artificial Sequence
  Description of Artificial Sequence: Synthetic oligonucleotide
gacagauauguuaggcugu

SEQ ID NO: 3009044 - RNA, 19 nt, Artificial Sequence
  Description of Artificial Sequence: Synthetic oligonucleotide
cugggucuaaucucuaggu

SEQ ID NO: 3009045 - RNA, 19 nt, Artificial Sequence
  Description of Artificial Sequence: Synthetic oligonucleotide
aagcacgucugcaaacguu

SEQ ID NO: 3009046 - RNA, 19 nt, Artificial Sequence
  Description of Artificial Sequence: Synthetic oligonucleotide
gugagguuugacagcuccc

SEQ ID NO: 3009047 - RNA, 19 nt, Artificial Sequence
  Description of Artificial Sequence: Synthetic oligonucleotide
gaagcuucuugcacuggaa

SEQ ID NO: 3009048 - RNA, 19 nt, Artificial Sequence
  Description of Artificial Sequence: Synthetic oligonucleotide
cuggaacagcccguccugg

SEQ ID NO: 3009049 - RNA, 19 nt, Artificial Sequence
  Description of Artificial Sequence: Synthetic oligonucleotide
cucuggaggcagugucucc

SEQ ID NO: 3009050 - RNA, 19 nt, Artificial Sequence
  Description of Artificial Sequence: Synthetic oligonucleotide
uuucuccuuuaagccccgg

SEQ ID NO: 3009051 - RNA, 19 nt, Artificial Sequence
  Description of Artificial Sequence: Synthetic oligonucleotide
ggaagaguauugagcaaac

SEQ ID NO: 3009052 - RNA, 19 nt, Artificial Sequence
  Description of Artificial Sequence: Synthetic oligonucleotide
acagauauguuaggcuguu

SEQ ID NO: 3009053 - RNA, 19 nt, Artificial Sequence
  Description of Artificial Sequence: Synthetic oligonucleotide
uggucacggcgaaguacug

SEQ ID NO: 3009054 - RNA, 19 nt, Artificial Sequence
  Description of Artificial Sequence: Synthetic oligonucleotide
cacugaagcuucuugcacu

SEQ ID NO: 3009055 - RNA, 19 nt, Artificial Sequence
  Description of Artificial Sequence: Synthetic oligonucleotide
uuucagggccugacacccu

SEQ ID NO: 3009056 - RNA, 19 nt, Artificial Sequence
  Description of Artificial Sequence: Synthetic oligonucleotide
ccuuuaagccccgggaccc

SEQ ID NO: 3009057 - RNA, 19 nt, Artificial Sequence
  Description of Artificial Sequence: Synthetic oligonucleotide
gacacccuuccagcucugg

SEQ ID NO: 3009058 - RNA, 19 nt, Artificial Sequence
  Description of Artificial Sequence: Synthetic oligonucleotide
acguucugucacaggcagc

SEQ ID NO: 3009059 - RNA, 19 nt, Artificial Sequence
  Description of Artificial Sequence: Synthetic oligonucleotide
aucagacagcuccguuuca

SEQ ID NO: 3009060 - RNA, 19 nt, Artificial Sequence
  Description of Artificial Sequence: Synthetic oligonucleotide
ccccuaaaagcagacacug

SEQ ID NO: 3009061 - RNA, 19 nt, Artificial Sequence
  Description of Artificial Sequence: Synthetic oligonucleotide
gcuuuugcugggucuaauc

SEQ ID NO: 3009062 - RNA, 19 nt, Artificial Sequence
  Description of Artificial Sequence: Synthetic oligonucleotide
agccccgggacccugcuuu

SEQ ID NO: 3009063 - RNA, 19 nt, Artificial Sequence
  Description of Artificial Sequence: Synthetic oligonucleotide
gaagaguauugagcaaacu

SEQ ID NO: 3009064 - RNA, 19 nt, Artificial Sequence
  Description of Artificial Sequence: Synthetic oligonucleotide
ggucaacauuugucuaagc

SEQ ID NO: 3009065 - RNA, 19 nt, Artificial Sequence
  Description of Artificial Sequence: Synthetic oligonucleotide
gaggcagugucuccaggua

SEQ ID NO: 3009066 - RNA, 19 nt, Artificial Sequence
  Description of Artificial Sequence: Synthetic oligonucleotide
guuguuggucacggcgaag

SEQ ID NO: 3009067 - RNA, 19 nt, Artificial Sequence
  Description of Artificial Sequence: Synthetic oligonucleotide
ggccugacacccuuccagc

SEQ ID NO: 3009068 - RNA, 19 nt, Artificial Sequence
  Description of Artificial Sequence: Synthetic oligonucleotide
cugcaaacguucugucaca

SEQ ID NO: 3009069 - RNA, 19 nt, Artificial Sequence
  Description of Artificial Sequence: Synthetic oligonucleotide
caaucagacagcuccguuu

SEQ ID NO: 3009070 - RNA, 19 nt, Artificial Sequence
  Description of Artificial Sequence: Synthetic oligonucleotide
gggacagauauguuaggcu

SEQ ID NO: 3009071 - RNA, 19 nt, Artificial Sequence
  Description of Artificial Sequence: Synthetic oligonucleotide
guucugucacaggcagcgg

SEQ ID NO: 3009072 - RNA, 19 nt, Artificial Sequence
  Description of Artificial Sequence: Synthetic oligonucleotide
cugucacaggcagcggaag

SEQ ID NO: 3009073 - RNA, 19 nt, Artificial Sequence
  Description of Artificial Sequence: Synthetic oligonucleotide
ccguuucagggccugacac

SEQ ID NO: 3009074 - RNA, 19 nt, Artificial Sequence
  Description of Artificial Sequence: Synthetic oligonucleotide
ucagggccugacacccuuc

SEQ ID NO: 3009075 - RNA, 19 nt, Artificial Sequence
  Description of Artificial Sequence: Synthetic oligonucleotide
ugacacccuuccagcucug

SEQ ID NO: 3009076 - RNA, 19 nt, Artificial Sequence
  Description of Artificial Sequence: Synthetic oligonucleotide
ccuggcagcaucucgaugu

SEQ ID NO: 3009077 - RNA, 19 nt, Artificial Sequence
  Description of Artificial Sequence: Synthetic oligonucleotide
cuccguuucagggccugac

SEQ ID NO: 3009078 - RNA, 19 nt, Artificial Sequence
  Description of Artificial Sequence: Synthetic oligonucleotide
ggaacagcccguccuggca

SEQ ID NO: 3009079 - RNA, 19 nt, Artificial Sequence
  Description of Artificial Sequence: Synthetic oligonucleotide
ggucuaaucucuaggucaa

SEQ ID NO: 3009080 - RNA, 19 nt, Artificial Sequence
  Description of Artificial Sequence: Synthetic oligonucleotide
uggcagcaucucgauguug

SEQ ID NO: 3009081 - RNA, 19 nt, Artificial Sequence
  Description of Artificial Sequence: Synthetic oligonucleotide
cugacacccuuccagcucu

SEQ ID NO: 3009082 - RNA, 19 nt, Artificial Sequence
  Description of Artificial Sequence: Synthetic oligonucleotide
uugcugggucuaaucucua

SEQ ID NO: 3009083 - RNA, 19 nt, Artificial Sequence
  Description of Artificial Sequence: Synthetic oligonucleotide
ggucacggcgaaguacugc

SEQ ID NO: 3009084 - RNA, 19 nt, Artificial Sequence
  Description of Artificial Sequence: Synthetic oligonucleotide
gaguuccaggugggugagg

SEQ ID NO: 3009085 - RNA, 19 nt, Artificial Sequence
  Description of Artificial Sequence: Synthetic oligonucleotide
cacaggcagcggaagagua

SEQ ID NO: 3009086 - RNA, 19 nt, Artificial Sequence
  Description of Artificial Sequence: Synthetic oligonucleotide
cagguaauucccagugagu

SEQ ID NO: 3009087 - RNA, 19 nt, Artificial Sequence
  Description of Artificial Sequence: Synthetic oligonucleotide
cacuggaacagcccguccu

SEQ ID NO: 3009088 - RNA, 19 nt, Artificial Sequence
  Description of Artificial Sequence: Synthetic oligonucleotide
acaggcagcggaagaguau

SEQ ID NO: 3009089 - RNA, 19 nt, Artificial Sequence
  Description of Artificial Sequence: Synthetic oligonucleotide
cuacauaacuuaggaaaau

SEQ ID NO: 3009090 - RNA, 19 nt, Artificial Sequence
  Description of Artificial Sequence: Synthetic oligonucleotide
gacccugcuuucaaacgcu

SEQ ID NO: 3009091 - RNA, 19 nt, Artificial Sequence
  Description of Artificial Sequence: Synthetic oligonucleotide
gucuaaucucuaggucaac

SEQ ID NO: 3009092 - RNA, 19 nt, Artificial Sequence
  Description of Artificial Sequence: Synthetic oligonucleotide
ggaggcagugucuccaggu

SEQ ID NO: 3009093 - RNA, 19 nt, Artificial Sequence
  Description of Artificial Sequence: Synthetic oligonucleotide
ccugacacccuuccagcuc

SEQ ID NO: 3009094 - RNA, 19 nt, Artificial Sequence
  Description of Artificial Sequence: Synthetic oligonucleotide
agcuccguuucagggccug

SEQ ID NO: 3009095 - RNA, 19 nt, Artificial Sequence
  Description of Artificial Sequence: Synthetic oligonucleotide
ggcagcaucucgauguugu

SEQ ID NO: 3009096 - RNA, 19 nt, Artificial Sequence
  Description of Artificial Sequence: Synthetic oligonucleotide
aggcagcggaagaguauug

SEQ ID NO: 3009097 - RNA, 19 nt, Artificial Sequence
  Description of Artificial Sequence: Synthetic oligonucleotide
ccguccuggcagcaucucg

SEQ ID NO: 3009098 - RNA, 19 nt, Artificial Sequence
  Description of Artificial Sequence: Synthetic oligonucleotide
ggcagcggaagaguauuga

SEQ ID NO: 3009099 - RNA, 19 nt, Artificial Sequence
  Description of Artificial Sequence: Synthetic oligonucleotide
cccuuccagcucuggaggc

SEQ ID NO: 3009100 - RNA, 19 nt, Artificial Sequence
  Description of Artificial Sequence: Synthetic oligonucleotide
agcagacacugaagcuucu

SEQ ID NO: 3009101 - RNA, 19 nt, Artificial Sequence
  Description of Artificial Sequence: Synthetic oligonucleotide
gcaaacuguccucaacaau

SEQ ID NO: 3009102 - RNA, 19 nt, Artificial Sequence
  Description of Artificial Sequence: Synthetic oligonucleotide
caggugggugagguuugac

SEQ ID NO: 3009103 - RNA, 19 nt, Artificial Sequence
  Description of Artificial Sequence: Synthetic oligonucleotide
cgggacccugcuuucaaac

SEQ ID NO: 3009104 - RNA, 19 nt, Artificial Sequence
  Description of Artificial Sequence: Synthetic oligonucleotide
gcacuggaacagcccgucc

SEQ ID NO: 3009105 - RNA, 19 nt, Artificial Sequence
  Description of Artificial Sequence: Synthetic oligonucleotide
aagccccgggacccugcuu

SEQ ID NO: 3009106 - RNA, 19 nt, Artificial Sequence
  Description of Artificial Sequence: Synthetic oligonucleotide
cccagaggggacagauaug

SEQ ID NO: 3009107 - RNA, 19 nt, Artificial Sequence
  Description of Artificial Sequence: Synthetic oligonucleotide
cccuaaaagcagacacuga

SEQ ID NO: 3009108 - RNA, 19 nt, Artificial Sequence
  Description of Artificial Sequence: Synthetic oligonucleotide
cggaagaguauugagcaaa

SEQ ID NO: 3009109 - RNA, 19 nt, Artificial Sequence
  Description of Artificial Sequence: Synthetic oligonucleotide
gcggaagaguauugagcaa

SEQ ID NO: 3009110 - RNA, 19 nt, Artificial Sequence
  Description of Artificial Sequence: Synthetic oligonucleotide
cguccuggcagcaucucga

SEQ ID NO: 3009111 - RNA, 19 nt, Artificial Sequence
  Description of Artificial Sequence: Synthetic oligonucleotide
acagcccguccuggcagca

SEQ ID NO: 3009112 - RNA, 19 nt, Artificial Sequence
  Description of Artificial Sequence: Synthetic oligonucleotide
cgucugcaaacguucuguc

SEQ ID NO: 3009113 - RNA, 19 nt, Artificial Sequence
  Description of Artificial Sequence: Synthetic oligonucleotide
acgcuuuugcugggucuaa

SEQ ID NO: 3009114 - RNA, 19 nt, Artificial Sequence
  Description of Artificial Sequence: Synthetic oligonucleotide
ccugcuuucaaacgcuuuu

SEQ ID NO: 3009115 - RNA, 19 nt, Artificial Sequence
  Description of Artificial Sequence: Synthetic oligonucleotide
acccugcuuucaaacgcuu

SEQ ID NO: 3009116 - RNA, 19 nt, Artificial Sequence
  Description of Artificial Sequence: Synthetic oligonucleotide
caggcagcggaagaguauu

SEQ ID NO: 3009117 - RNA, 19 nt, Artificial Sequence
  Description of Artificial Sequence: Synthetic oligonucleotide
cacccagaggggacagaua

SEQ ID NO: 3009118 - RNA, 19 nt, Artificial Sequence
  Description of Artificial Sequence: Synthetic oligonucleotide
guccuggcagcaucucgau

SEQ ID NO: 3009119 - RNA, 19 nt, Artificial Sequence
  Description of Artificial Sequence: Synthetic oligonucleotide
ggcagugucuccagguaau

SEQ ID NO: 3009120 - RNA, 19 nt, Artificial Sequence
  Description of Artificial Sequence: Synthetic oligonucleotide
gccugacacccuuccagcu

SEQ ID NO: 3009121 - RNA, 19 nt, Artificial Sequence
  Description of Artificial Sequence: Synthetic oligonucleotide
cuuuaagccccgggacccu

SEQ ID NO: 3009122 - RNA, 19 nt, Artificial Sequence
  Description of Artificial Sequence: Synthetic oligonucleotide
ccucaacaaucagacagcu

SEQ ID NO: 3009123 - RNA, 19 nt, Artificial Sequence
  Description of Artificial Sequence: Synthetic oligonucleotide
guuccaggugggugagguu

SEQ ID NO: 3009124 - RNA, 19 nt, Artificial Sequence
  Description of Artificial Sequence: Synthetic oligonucleotide
cagaggggacagauauguu

SEQ ID NO: 3009125 - RNA, 19 nt, Artificial Sequence
  Description of Artificial Sequence: Synthetic oligonucleotide
cagugaguuccaggugggu

SEQ ID NO: 3009126 - RNA, 19 nt, Artificial Sequence
  Description of Artificial Sequence: Synthetic oligonucleotide
gcacgucugcaaacguucu

SEQ ID NO: 3009127 - RNA, 19 nt, Artificial Sequence
  Description of Artificial Sequence: Synthetic oligonucleotide
cagauauguuaggcuguuu

SEQ ID NO: 3009128 - RNA, 19 nt, Artificial Sequence
  Description of Artificial Sequence: Synthetic oligonucleotide
gcagcaucucgauguuguu

SEQ ID NO: 3009129 - RNA, 19 nt, Artificial Sequence
  Description of Artificial Sequence: Synthetic oligonucleotide
ccccacccagaggggacag

SEQ ID NO: 3009130 - RNA, 19 nt, Artificial Sequence
  Description of Artificial Sequence: Synthetic oligonucleotide
gccccgggacccugcuuuc

SEQ ID NO: 3009131 - RNA, 19 nt, Artificial Sequence
  Description of Artificial Sequence: Synthetic oligonucleotide
cccgggacccugcuuucaa

SEQ ID NO: 3009132 - RNA, 19 nt, Artificial Sequence
  Description of Artificial Sequence: Synthetic oligonucleotide
gcuccguuucagggccuga

SEQ ID NO: 3009133 - RNA, 19 nt, Artificial Sequence
  Description of Artificial Sequence: Synthetic oligonucleotide
ccgggacccugcuuucaaa

SEQ ID NO: 3009134 - RNA, 19 nt, Artificial Sequence
  Description of Artificial Sequence: Synthetic oligonucleotide
ccacccagaggggacagau

SEQ ID NO: 3009135 - RNA, 19 nt, Artificial Sequence
  Description of Artificial Sequence: Synthetic oligonucleotide
gcaucucgauguuguuguu

SEQ ID NO: 3009136 - RNA, 19 nt, Artificial Sequence
  Description of Artificial Sequence: Synthetic oligonucleotide
cagcuccguuucagggccu

SEQ ID NO: 3009137 - RNA, 19 nt, Artificial Sequence
  Description of Artificial Sequence: Synthetic oligonucleotide
gcagugucuccagguaauu

SEQ ID NO: 3009138 - RNA, 19 nt, Artificial Sequence
  Description of Artificial Sequence: Synthetic oligonucleotide
cccugcuuucaaacgcuuu

SEQ ID NO: 3009139 - RNA, 19 nt, Artificial Sequence
  Description of Artificial Sequence: Synthetic oligonucleotide
cccguccuggcagcaucuc

SEQ ID NO: 3009140 - RNA, 19 nt, Artificial Sequence
  Description of Artificial Sequence: Synthetic oligonucleotide
gcccguccuggcagcaucu

SEQ ID NO: 3009141 - RNA, 19 nt, Artificial Sequence
  Description of Artificial Sequence: Synthetic oligonucleotide
ccccgggacccugcuuuca

SEQ ID NO: 3009142 - RNA, 19 nt, Artificial Sequence
  Description of Artificial Sequence: Synthetic oligonucleotide
cagcccguccuggcagcau

SEQ ID NO: 3009143 - RNA, 19 nt, Artificial Sequence
  Description of Artificial Sequence: Synthetic oligonucleotide
cgcuuuugcugggucuaau

SEQ ID NO: 3009144 - RNA, 19 nt, Artificial Sequence
  Description of Artificial Sequence: Synthetic oligonucleotide
ugaaaggucuucuugaagg

SEQ ID NO: 3009145 - RNA, 19 nt, Artificial Sequence
  Description of Artificial Sequence: Synthetic oligonucleotide
aaagauuugugcuugggca

SEQ ID NO: 3009146 - RNA, 19 nt, Artificial Sequence
  Description of Artificial Sequence: Synthetic oligonucleotide
auccguacauuucugaugc

SEQ ID NO: 3009147 - RNA, 19 nt, Artificial Sequence
  Description of Artificial Sequence: Synthetic oligonucleotide
agaguaguagucucuuucc

SEQ ID NO: 3009148 - RNA, 19 nt, Artificial Sequence
  Description of Artificial Sequence: Synthetic oligonucleotide
ucucuuucccucaaaaucu

SEQ ID NO: 3009149 - RNA, 19 nt, Artificial Sequence
  Description of Artificial Sequence: Synthetic oligonucleotide
ucguucaccgucauagucg

SEQ ID NO: 3009150 - RNA, 19 nt, Artificial Sequence
  Description of Artificial Sequence: Synthetic oligonucleotide
aagauuugugcuugggcag

SEQ ID NO: 3009151 - RNA, 19 nt, Artificial Sequence
  Description of Artificial Sequence: Synthetic oligonucleotide
ugcucuaugggauucaggu

SEQ ID NO: 3009152 - RNA, 19 nt, Artificial Sequence
  Description of Artificial Sequence: Synthetic oligonucleotide
aauccguacauuucugaug

SEQ ID NO: 3009153 - RNA, 19 nt, Artificial Sequence
  Description of Artificial Sequence: Synthetic oligonucleotide
ucugagaugcucuauggga

SEQ ID NO: 3009154 - RNA, 19 nt, Artificial Sequence
  Description of Artificial Sequence: Synthetic oligonucleotide
aaaggucuucuugaaggcc

SEQ ID NO: 3009155 - RNA, 19 nt, Artificial Sequence
  Description of Artificial Sequence: Synthetic oligonucleotide
ugaccugaugguaaauccg

SEQ ID NO: 3009156 - RNA, 19 nt, Artificial Sequence
  Description of Artificial Sequence: Synthetic oligonucleotide
uucugaaaaggcacgcggg

SEQ ID NO: 3009157 - RNA, 19 nt, Artificial Sequence
  Description of Artificial Sequence: Synthetic oligonucleotide
ugaaaaggcacgcgggaag

SEQ ID NO: 3009158 - RNA, 19 nt, Artificial Sequence
  Description of Artificial Sequence: Synthetic oligonucleotide
auaccagucguucaccguc

SEQ ID NO: 3009159 - RNA, 19 nt, Artificial Sequence
  Description of Artificial Sequence: Synthetic oligonucleotide
uacuuggguacccagcucc

SEQ ID NO: 3009160 - RNA, 19 nt, Artificial Sequence
  Description of Artificial Sequence: Synthetic oligonucleotide
uucugagaugcucuauggg

SEQ ID NO: 3009161 - RNA, 19 nt, Artificial Sequence
  Description of Artificial Sequence: Synthetic oligonucleotide
cuucugaaaaggcacgcgg

SEQ ID NO: 3009162 - RNA, 19 nt, Artificial Sequence
  Description of Artificial Sequence: Synthetic oligonucleotide
uuccuuuucgacuuccuga

SEQ ID NO: 3009163 - RNA, 19 nt, Artificial Sequence
  Description of Artificial Sequence: Synthetic oligonucleotide
cuccgugugaggaugaaag

SEQ ID NO: 3009164 - RNA, 19 nt, Artificial Sequence
  Description of Artificial Sequence: Synthetic oligonucleotide
aaauccguacauuucugau

SEQ ID NO: 3009165 - RNA, 19 nt, Artificial Sequence
  Description of Artificial Sequence: Synthetic oligonucleotide
gaaaggucuucuugaaggc

SEQ ID NO: 3009166 - RNA, 19 nt, Artificial Sequence
  Description of Artificial Sequence: Synthetic oligonucleotide
ucccucaaaaucucuaucu

SEQ ID NO: 3009167 - RNA, 19 nt, Artificial Sequence
  Description of Artificial Sequence: Synthetic oligonucleotide
ucauaccagucguucaccg

SEQ ID NO: 3009168 - RNA, 19 nt, Artificial Sequence
  Description of Artificial Sequence: Synthetic oligonucleotide
caaagauuugugcuugggc

SEQ ID NO: 3009169 - RNA, 19 nt, Artificial Sequence
  Description of Artificial Sequence: Synthetic oligonucleotide
cugaccugaugguaaaucc

SEQ ID NO: 3009170 - RNA, 19 nt, Artificial Sequence
  Description of Artificial Sequence: Synthetic oligonucleotide
ucugaaaaggcacgcggga

SEQ ID NO: 3009171 - RNA, 19 nt, Artificial Sequence
  Description of Artificial Sequence: Synthetic oligonucleotide
ugucucaccagaguaguag

SEQ ID NO: 3009172 - RNA, 19 nt, Artificial Sequence
  Description of Artificial Sequence: Synthetic oligonucleotide
gucucuuucccucaaaauc

SEQ ID NO: 3009173 - RNA, 19 nt, Artificial Sequence
  Description of Artificial Sequence: Synthetic oligonucleotide
uggugaugcuuccuuuucg

SEQ ID NO: 3009174 - RNA, 19 nt, Artificial Sequence
  Description of Artificial Sequence: Synthetic oligonucleotide
aggaugaaaggucuucuug

SEQ ID NO: 3009175 - RNA, 19 nt, Artificial Sequence
  Description of Artificial Sequence: Synthetic oligonucleotide
acauuucugaugcugcuca

SEQ ID NO: 3009176 - RNA, 19 nt, Artificial Sequence
  Description of Artificial Sequence: Synthetic oligonucleotide
uaaauccguacauuucuga

SEQ ID NO: 3009177 - RNA, 19 nt, Artificial Sequence
  Description of Artificial Sequence: Synthetic oligonucleotide
ugaugcuuccuuuucgacu

SEQ ID NO: 3009178 - RNA, 19 nt, Artificial Sequence
  Description of Artificial Sequence: Synthetic oligonucleotide
auagucgccauacuugggu

SEQ ID NO: 3009179 - RNA, 19 nt, Artificial Sequence
  Description of Artificial Sequence: Synthetic oligonucleotide
aguaguagucucuuucccu

SEQ ID NO: 3009180 - RNA, 19 nt, Artificial Sequence
  Description of Artificial Sequence: Synthetic oligonucleotide
cagucguucaccgucauag

SEQ ID NO: 3009181 - RNA, 19 nt, Artificial Sequence
  Description of Artificial Sequence: Synthetic oligonucleotide
aagccgaugucucaccaga

SEQ ID NO: 3009182 - RNA, 19 nt, Artificial Sequence
  Description of Artificial Sequence: Synthetic oligonucleotide
aaaaggcacgcgggaagcc

SEQ ID NO: 3009183 - RNA, 19 nt, Artificial Sequence
  Description of Artificial Sequence: Synthetic oligonucleotide
ugaugguaaauccguacau

SEQ ID NO: 3009184 - RNA, 19 nt, Artificial Sequence
  Description of Artificial Sequence: Synthetic oligonucleotide
uccuuuucgacuuccugac

SEQ ID NO: 3009185 - RNA, 19 nt, Artificial Sequence
  Description of Artificial Sequence: Synthetic oligonucleotide
ucuucugaaaaggcacgcg

SEQ ID NO: 3009186 - RNA, 19 nt, Artificial Sequence
  Description of Artificial Sequence: Synthetic oligonucleotide
augaaaggucuucuugaag

SEQ ID NO: 3009187 - RNA, 19 nt, Artificial Sequence
  Description of Artificial Sequence: Synthetic oligonucleotide
aaaggcacgcgggaagccg

SEQ ID NO: 3009188 - RNA, 19 nt, Artificial Sequence
  Description of Artificial Sequence: Synthetic oligonucleotide
gaguaguagucucuuuccc

SEQ ID NO: 3009189 - RNA, 19 nt, Artificial Sequence
  Description of Artificial Sequence: Synthetic oligonucleotide
accgucauagucgccauac

SEQ ID NO: 3009190 - RNA, 19 nt, Artificial Sequence
  Description of Artificial Sequence: Synthetic oligonucleotide
agauuugugcuugggcagc

SEQ ID NO: 3009191 - RNA, 19 nt, Artificial Sequence
  Description of Artificial Sequence: Synthetic oligonucleotide
augguaaauccguacauuu

SEQ ID NO: 3009192 - RNA, 19 nt, Artificial Sequence
  Description of Artificial Sequence: Synthetic oligonucleotide
uucaccgucauagucgcca

SEQ ID NO: 3009193 - RNA, 19 nt, Artificial Sequence
  Description of Artificial Sequence: Synthetic oligonucleotide
uccgugugaggaugaaagg

SEQ ID NO: 3009194 - RNA, 19 nt, Artificial Sequence
  Description of Artificial Sequence: Synthetic oligonucleotide
gucauagucgccauacuug

SEQ ID NO: 3009195 - RNA, 19 nt, Artificial Sequence
  Description of Artificial Sequence: Synthetic oligonucleotide
ugguaaauccguacauuuc

SEQ ID NO: 3009196 - RNA, 19 nt, Artificial Sequence
  Description of Artificial Sequence: Synthetic oligonucleotide
agucgccauacuuggguac

SEQ ID NO: 3009197 - RNA, 19 nt, Artificial Sequence
  Description of Artificial Sequence: Synthetic oligonucleotide
cagaguaguagucucuuuc

SEQ ID NO: 3009198 - RNA, 19 nt, Artificial Sequence
  Description of Artificial Sequence: Synthetic oligonucleotide
uccuucucuucuuucugag

SEQ ID NO: 3009199 - RNA, 19 nt, Artificial Sequence
  Description of Artificial Sequence: Synthetic oligonucleotide
aaggucuucuugaaggccu

SEQ ID NO: 3009200 - RNA, 19 nt, Artificial Sequence
  Description of Artificial Sequence: Synthetic oligonucleotide
guaguagucucuuucccuc

SEQ ID NO: 3009201 - RNA, 19 nt, Artificial Sequence
  Description of Artificial Sequence: Synthetic oligonucleotide
uaugggauucaggugguga

SEQ ID NO: 3009202 - RNA, 19 nt, Artificial Sequence
  Description of Artificial Sequence: Synthetic oligonucleotide
uccaaagauuugugcuugg

SEQ ID NO: 3009203 - RNA, 19 nt, Artificial Sequence
  Description of Artificial Sequence: Synthetic oligonucleotide
gaaggccucuucugaaaag

SEQ ID NO: 3009204 - RNA, 19 nt, Artificial Sequence
  Description of Artificial Sequence: Synthetic oligonucleotide
ugaaggccucuucugaaaa

SEQ ID NO: 3009205 - RNA, 19 nt, Artificial Sequence
  Description of Artificial Sequence: Synthetic oligonucleotide
uuucccucaaaaucucuau

SEQ ID NO: 3009206 - RNA, 19 nt, Artificial Sequence
  Description of Artificial Sequence: Synthetic oligonucleotide
uuuucgacuuccugaccug

SEQ ID NO: 3009207 - RNA, 19 nt, Artificial Sequence
  Description of Artificial Sequence: Synthetic oligonucleotide
gaugaaaggucuucuugaa

SEQ ID NO: 3009208 - RNA, 19 nt, Artificial Sequence
  Description of Artificial Sequence: Synthetic oligonucleotide
uagucucuuucccucaaaa

SEQ ID NO: 3009209 - RNA, 19 nt, Artificial Sequence
  Description of Artificial Sequence: Synthetic oligonucleotide
gaaaaggcacgcgggaagc

SEQ ID NO: 3009210 - RNA, 19 nt, Artificial Sequence
  Description of Artificial Sequence: Synthetic oligonucleotide
ugcugcucauaccagucgu

SEQ ID NO: 3009211 - RNA, 19 nt, Artificial Sequence
  Description of Artificial Sequence: Synthetic oligonucleotide
uuccagucaucccacugcu

SEQ ID NO: 3009212 - RNA, 19 nt, Artificial Sequence
  Description of Artificial Sequence: Synthetic oligonucleotide
ugugcuugggcagcgcucc

SEQ ID NO: 3009213 - RNA, 19 nt, Artificial Sequence
  Description of Artificial Sequence: Synthetic oligonucleotide
ucgacuuccugaccugaug

SEQ ID NO: 3009214 - RNA, 19 nt, Artificial Sequence
  Description of Artificial Sequence: Synthetic oligonucleotide
gaagccgaugucucaccag

SEQ ID NO: 3009215 - RNA, 19 nt, Artificial Sequence
  Description of Artificial Sequence: Synthetic oligonucleotide
ugaggaugaaaggucuucu

SEQ ID NO: 3009216 - RNA, 19 nt, Artificial Sequence
  Description of Artificial Sequence: Synthetic oligonucleotide
augcugcucauaccagucg

SEQ ID NO: 3009217 - RNA, 19 nt, Artificial Sequence
  Description of Artificial Sequence: Synthetic oligonucleotide
ucuaugggauucagguggu

SEQ ID NO: 3009218 - RNA, 19 nt, Artificial Sequence
  Description of Artificial Sequence: Synthetic oligonucleotide
ggaugaaaggucuucuuga

SEQ ID NO: 3009219 - RNA, 19 nt, Artificial Sequence
  Description of Artificial Sequence: Synthetic oligonucleotide
uucccucaaaaucucuauc

SEQ ID NO: 3009220 - RNA, 19 nt, Artificial Sequence
  Description of Artificial Sequence: Synthetic oligonucleotide
uugggcagcgcuccgugug

SEQ ID NO: 3009221 - RNA, 19 nt, Artificial Sequence
  Description of Artificial Sequence: Synthetic oligonucleotide
ucuuucccucaaaaucucu

SEQ ID NO: 3009222 - RNA, 19 nt, Artificial Sequence
  Description of Artificial Sequence: Synthetic oligonucleotide
ugcucauaccagucguuca

SEQ ID NO: 3009223 - RNA, 19 nt, Artificial Sequence
  Description of Artificial Sequence: Synthetic oligonucleotide
gauuugugcuugggcagcg

SEQ ID NO: 3009224 - RNA, 19 nt, Artificial Sequence
  Description of Artificial Sequence: Synthetic oligonucleotide
cugaugguaaauccguaca

SEQ ID NO: 3009225 - RNA, 19 nt, Artificial Sequence
  Description of Artificial Sequence: Synthetic oligonucleotide
auacuuggguacccagcuc

SEQ ID NO: 3009226 - RNA, 19 nt, Artificial Sequence
  Description of Artificial Sequence: Synthetic oligonucleotide
ugggguguccuuccaguca

SEQ ID NO: 3009227 - RNA, 19 nt, Artificial Sequence
  Description of Artificial Sequence: Synthetic oligonucleotide
gaugcuuccuuuucgacuu

SEQ ID NO: 3009228 - RNA, 19 nt, Artificial Sequence
  Description of Artificial Sequence: Synthetic oligonucleotide
ugcugcauucuguggcggg

SEQ ID NO: 3009229 - RNA, 19 nt, Artificial Sequence
  Description of Artificial Sequence: Synthetic oligonucleotide
cauagucgccauacuuggg

SEQ ID NO: 3009230 - RNA, 19 nt, Artificial Sequence
  Description of Artificial Sequence: Synthetic oligonucleotide
ucucaccagaguaguaguc

SEQ ID NO: 3009231 - RNA, 19 nt, Artificial Sequence
  Description of Artificial Sequence: Synthetic oligonucleotide
gagguuagcccauguucug

SEQ ID NO: 3009232 - RNA, 19 nt, Artificial Sequence
  Description of Artificial Sequence: Synthetic oligonucleotide
gguaaauccguacauuucu

SEQ ID NO: 3009233 - RNA, 19 nt, Artificial Sequence
  Description of Artificial Sequence: Synthetic oligonucleotide
guaaauccguacauuucug

SEQ ID NO: 3009234 - RNA, 19 nt, Artificial Sequence
  Description of Artificial Sequence: Synthetic oligonucleotide
cagcuccaaagauuugugc

SEQ ID NO: 3009235 - RNA, 19 nt, Artificial Sequence
  Description of Artificial Sequence: Synthetic oligonucleotide
agucucuuucccucaaaau

SEQ ID NO: 3009236 - RNA, 19 nt, Artificial Sequence
  Description of Artificial Sequence: Synthetic oligonucleotide
augggguguccuuccaguc

SEQ ID NO: 3009237 - RNA, 19 nt, Artificial Sequence
  Description of Artificial Sequence: Synthetic oligonucleotide
uugaaggccucuucugaaa

SEQ ID NO: 3009238 - RNA, 19 nt, Artificial Sequence
  Description of Artificial Sequence: Synthetic oligonucleotide
gaugcugcucauaccaguc

SEQ ID NO: 3009239 - RNA, 19 nt, Artificial Sequence
  Description of Artificial Sequence: Synthetic oligonucleotide
augggauucagguggugau

SEQ ID NO: 3009240 - RNA, 19 nt, Artificial Sequence
  Description of Artificial Sequence: Synthetic oligonucleotide
uaguagucucuuucccuca

SEQ ID NO: 3009241 - RNA, 19 nt, Artificial Sequence
  Description of Artificial Sequence: Synthetic oligonucleotide
uuggguacccagcuccaaa

SEQ ID NO: 3009242 - RNA, 19 nt, Artificial Sequence
  Description of Artificial Sequence: Synthetic oligonucleotide
cuccaaagauuugugcuug

SEQ ID NO: 3009243 - RNA, 19 nt, Artificial Sequence
  Description of Artificial Sequence: Synthetic oligonucleotide
cucuucugaaaaggcacgc

SEQ ID NO: 3009244 - RNA, 19 nt, Artificial Sequence
  Description of Artificial Sequence: Synthetic oligonucleotide
uaccagucguucaccguca

SEQ ID NO: 3009245 - RNA, 19 nt, Artificial Sequence
  Description of Artificial Sequence: Synthetic oligonucleotide
cuuuucgacuuccugaccu

SEQ ID NO: 3009246 - RNA, 19 nt, Artificial Sequence
  Description of Artificial Sequence: Synthetic oligonucleotide
ugggaugggguguccuucc

SEQ ID NO: 3009247 - RNA, 19 nt, Artificial Sequence
  Description of Artificial Sequence: Synthetic oligonucleotide
gggagguuagcccauguuc

SEQ ID NO: 3009248 - RNA, 19 nt, Artificial Sequence
  Description of Artificial Sequence: Synthetic oligonucleotide
cucuuucccucaaaaucuc

SEQ ID NO: 3009249 - RNA, 19 nt, Artificial Sequence
  Description of Artificial Sequence: Synthetic oligonucleotide
cguacauuucugaugcugc

SEQ ID NO: 3009250 - RNA, 19 nt, Artificial Sequence
  Description of Artificial Sequence: Synthetic oligonucleotide
ugagaugcucuaugggauu

SEQ ID NO: 3009251 - RNA, 19 nt, Artificial Sequence
  Description of Artificial Sequence: Synthetic oligonucleotide
ucuguggcgggcgucuuca

SEQ ID NO: 3009252 - RNA, 19 nt, Artificial Sequence
  Description of Artificial Sequence: Synthetic oligonucleotide
auuugugcuugggcagcgc

SEQ ID NO: 3009253 - RNA, 19 nt, Artificial Sequence
  Description of Artificial Sequence: Synthetic oligonucleotide
ugugaggaugaaaggucuu

SEQ ID NO: 3009254 - RNA, 19 nt, Artificial Sequence
  Description of Artificial Sequence: Synthetic oligonucleotide
uuucgacuuccugaccuga

SEQ ID NO: 3009255 - RNA, 19 nt, Artificial Sequence
  Description of Artificial Sequence: Synthetic oligonucleotide
cucauaccagucguucacc

SEQ ID NO: 3009256 - RNA, 19 nt, Artificial Sequence
  Description of Artificial Sequence: Synthetic oligonucleotide
cuuccugaccugaugguaa

SEQ ID NO: 3009257 - RNA, 19 nt, Artificial Sequence
  Description of Artificial Sequence: Synthetic oligonucleotide
ugggauucagguggugaug

SEQ ID NO: 3009258 - RNA, 19 nt, Artificial Sequence
  Description of Artificial Sequence: Synthetic oligonucleotide
ucccacugcugcauucugu

SEQ ID NO: 3009259 - RNA, 19 nt, Artificial Sequence
  Description of Artificial Sequence: Synthetic oligonucleotide
cauacuuggguacccagcu

SEQ ID NO: 3009260 - RNA, 19 nt, Artificial Sequence
  Description of Artificial Sequence: Synthetic oligonucleotide
cuugaaggccucuucugaa

SEQ ID NO: 3009261 - RNA, 19 nt, Artificial Sequence
  Description of Artificial Sequence: Synthetic oligonucleotide
ccucuucugaaaaggcacg

SEQ ID NO: 3009262 - RNA, 19 nt, Artificial Sequence
  Description of Artificial Sequence: Synthetic oligonucleotide
ccugaugguaaauccguac

SEQ ID NO: 3009263 - RNA, 19 nt, Artificial Sequence
  Description of Artificial Sequence: Synthetic oligonucleotide
uugugcuugggcagcgcuc

SEQ ID NO: 3009264 - RNA, 19 nt, Artificial Sequence
  Description of Artificial Sequence: Synthetic oligonucleotide
cuuucccucaaaaucucua

SEQ ID NO: 3009265 - RNA, 19 nt, Artificial Sequence
  Description of Artificial Sequence: Synthetic oligonucleotide
gugaugcuuccuuuucgac

SEQ ID NO: 3009266 - RNA, 19 nt, Artificial Sequence
  Description of Artificial Sequence: Synthetic oligonucleotide
gaugggguguccuuccagu

SEQ ID NO: 3009267 - RNA, 19 nt, Artificial Sequence
  Description of Artificial Sequence: Synthetic oligonucleotide
gagaugcucuaugggauuc

SEQ ID NO: 3009268 - RNA, 19 nt, Artificial Sequence
  Description of Artificial Sequence: Synthetic oligonucleotide
uccagucaucccacugcug

SEQ ID NO: 3009269 - RNA, 19 nt, Artificial Sequence
  Description of Artificial Sequence: Synthetic oligonucleotide
ucaucccacugcugcauuc

SEQ ID NO: 3009270 - RNA, 19 nt, Artificial Sequence
  Description of Artificial Sequence: Synthetic oligonucleotide
ggugaugcuuccuuuucga

SEQ ID NO: 3009271 - RNA, 19 nt, Artificial Sequence
  Description of Artificial Sequence: Synthetic oligonucleotide
gaugucucaccagaguagu

SEQ ID NO: 3009272 - RNA, 19 nt, Artificial Sequence
  Description of Artificial Sequence: Synthetic oligonucleotide
gggauucagguggugaugc

SEQ ID NO: 3009273 - RNA, 19 nt, Artificial Sequence
  Description of Artificial Sequence: Synthetic oligonucleotide
uucgacuuccugaccugau

SEQ ID NO: 3009274 - RNA, 19 nt, Artificial Sequence
  Description of Artificial Sequence: Synthetic oligonucleotide
uuccugaccugaugguaaa

SEQ ID NO: 3009275 - RNA, 19 nt, Artificial Sequence
  Description of Artificial Sequence: Synthetic oligonucleotide
gcucauaccagucguucac

SEQ ID NO: 3009276 - RNA, 19 nt, Artificial Sequence
  Description of Artificial Sequence: Synthetic oligonucleotide
ugcauucuguggcgggcgu

SEQ ID NO: 3009277 - RNA, 19 nt, Artificial Sequence
  Description of Artificial Sequence: Synthetic oligonucleotide
ucuuucugagaugcucuau

SEQ ID NO: 3009278 - RNA, 19 nt, Artificial Sequence
  Description of Artificial Sequence: Synthetic oligonucleotide
uagucgccauacuugggua

SEQ ID NO: 3009279 - RNA, 19 nt, Artificial Sequence
  Description of Artificial Sequence: Synthetic oligonucleotide
gugaggaugaaaggucuuc

SEQ ID NO: 3009280 - RNA, 19 nt, Artificial Sequence
  Description of Artificial Sequence: Synthetic oligonucleotide
ccauacuuggguacccagc

SEQ ID NO: 3009281 - RNA, 19 nt, Artificial Sequence
  Description of Artificial Sequence: Synthetic oligonucleotide
gucgccauacuuggguacc

SEQ ID NO: 3009282 - RNA, 19 nt, Artificial Sequence
  Description of Artificial Sequence: Synthetic oligonucleotide
uguggcgggcgucuucauc

SEQ ID NO: 3009283 - RNA, 19 nt, Artificial Sequence
  Description of Artificial Sequence: Synthetic oligonucleotide
cugcauucuguggcgggcg

SEQ ID NO: 3009284 - RNA, 19 nt, Artificial Sequence
  Description of Artificial Sequence: Synthetic oligonucleotide
ugggcagcgcuccguguga

SEQ ID NO: 3009285 - RNA, 19 nt, Artificial Sequence
  Description of Artificial Sequence: Synthetic oligonucleotide
cugcucauaccagucguuc

SEQ ID NO: 3009286 - RNA, 19 nt, Artificial Sequence
  Description of Artificial Sequence: Synthetic oligonucleotide
cgacuuccugaccugaugg

SEQ ID NO: 3009287 - RNA, 19 nt, Artificial Sequence
  Description of Artificial Sequence: Synthetic oligonucleotide
ggcgucuucaucuuccucu

SEQ ID NO: 3009288 - RNA, 19 nt, Artificial Sequence
  Description of Artificial Sequence: Synthetic oligonucleotide
gaccugaugguaaauccgu

SEQ ID NO: 3009289 - RNA, 19 nt, Artificial Sequence
  Description of Artificial Sequence: Synthetic oligonucleotide
cuucuugaaggccucuucu

SEQ ID NO: 3009290 - RNA, 19 nt, Artificial Sequence
  Description of Artificial Sequence: Synthetic oligonucleotide
gcucuaugggauucaggug

SEQ ID NO: 3009291 - RNA, 19 nt, Artificial Sequence
  Description of Artificial Sequence: Synthetic oligonucleotide
augcucuaugggauucagg

SEQ ID NO: 3009292 - RNA, 19 nt, Artificial Sequence
  Description of Artificial Sequence: Synthetic oligonucleotide
agguuagcccauguucugu

SEQ ID NO: 3009293 - RNA, 19 nt, Artificial Sequence
  Description of Artificial Sequence: Synthetic oligonucleotide
aucccacugcugcauucug

SEQ ID NO: 3009294 - RNA, 19 nt, Artificial Sequence
  Description of Artificial Sequence: Synthetic oligonucleotide
cgugugaggaugaaagguc

SEQ ID NO: 3009295 - RNA, 19 nt, Artificial Sequence
  Description of Artificial Sequence: Synthetic oligonucleotide
guggcgggcgucuucaucu

SEQ ID NO: 3009296 - RNA, 19 nt, Artificial Sequence
  Description of Artificial Sequence: Synthetic oligonucleotide
gaugguaaauccguacauu

SEQ ID NO: 3009297 - RNA, 19 nt, Artificial Sequence
  Description of Artificial Sequence: Synthetic oligonucleotide
guacauuucugaugcugcu

SEQ ID NO: 3009298 - RNA, 19 nt, Artificial Sequence
  Description of Artificial Sequence: Synthetic oligonucleotide
agcgcuccgugugaggaug

SEQ ID NO: 3009299 - RNA, 19 nt, Artificial Sequence
  Description of Artificial Sequence: Synthetic oligonucleotide
aaggcacgcgggaagccga

SEQ ID NO: 3009300 - RNA, 19 nt, Artificial Sequence
  Description of Artificial Sequence: Synthetic oligonucleotide
ccaaagauuugugcuuggg

SEQ ID NO: 3009301 - RNA, 19 nt, Artificial Sequence
  Description of Artificial Sequence: Synthetic oligonucleotide
acuuccugaccugauggua

SEQ ID NO: 3009302 - RNA, 19 nt, Artificial Sequence
  Description of Artificial Sequence: Synthetic oligonucleotide
gguuagcccauguucuguc

SEQ ID NO: 3009303 - RNA, 19 nt, Artificial Sequence
  Description of Artificial Sequence: Synthetic oligonucleotide
gccauacuuggguacccag

SEQ ID NO: 3009304 - RNA, 19 nt, Artificial Sequence
  Description of Artificial Sequence: Synthetic oligonucleotide
cccacugcugcauucugug

SEQ ID NO: 3009305 - RNA, 19 nt, Artificial Sequence
  Description of Artificial Sequence: Synthetic oligonucleotide
ucaccgucauagucgccau

SEQ ID NO: 3009306 - RNA, 19 nt, Artificial Sequence
  Description of Artificial Sequence: Synthetic oligonucleotide
ucgccauacuuggguaccc

SEQ ID NO: 3009307 - RNA, 19 nt, Artificial Sequence
  Description of Artificial Sequence: Synthetic oligonucleotide
cgaugucucaccagaguag

SEQ ID NO: 3009308 - RNA, 19 nt, Artificial Sequence
  Description of Artificial Sequence: Synthetic oligonucleotide
accagaguaguagucucuu

SEQ ID NO: 3009309 - RNA, 19 nt, Artificial Sequence
  Description of Artificial Sequence: Synthetic oligonucleotide
uucuguggcgggcgucuuc

SEQ ID NO: 3009310 - RNA, 19 nt, Artificial Sequence
  Description of Artificial Sequence: Synthetic oligonucleotide
cguucaccgucauagucgc

SEQ ID NO: 3009311 - RNA, 19 nt, Artificial Sequence
  Description of Artificial Sequence: Synthetic oligonucleotide
uccguacauuucugaugcu

SEQ ID NO: 3009312 - RNA, 19 nt, Artificial Sequence
  Description of Artificial Sequence: Synthetic oligonucleotide
agguggugaugcuuccuuu

SEQ ID NO: 3009313 - RNA, 19 nt, Artificial Sequence
  Description of Artificial Sequence: Synthetic oligonucleotide
aggggagguuagcccaugu

SEQ ID NO: 3009314 - RNA, 19 nt, Artificial Sequence
  Description of Artificial Sequence: Synthetic oligonucleotide
gacuuccugaccugauggu

SEQ ID NO: 3009315 - RNA, 19 nt, Artificial Sequence
  Description of Artificial Sequence: Synthetic oligonucleotide
gucucaccagaguaguagu

SEQ ID NO: 3009316 - RNA, 19 nt, Artificial Sequence
  Description of Artificial Sequence: Synthetic oligonucleotide
cugggaugggguguccuuc

SEQ ID NO: 3009317 - RNA, 19 nt, Artificial Sequence
  Description of Artificial Sequence: Synthetic oligonucleotide
cugcugcauucuguggcgg

SEQ ID NO: 3009318 - RNA, 19 nt, Artificial Sequence
  Description of Artificial Sequence: Synthetic oligonucleotide
acgcgggaagccgaugucu

SEQ ID NO: 3009319 - RNA, 19 nt, Artificial Sequence
  Description of Artificial Sequence: Synthetic oligonucleotide
ggaagccgaugucucacca

SEQ ID NO: 3009320 - RNA, 19 nt, Artificial Sequence
  Description of Artificial Sequence: Synthetic oligonucleotide
gaggaugaaaggucuucuu

SEQ ID NO: 3009321 - RNA, 19 nt, Artificial Sequence
  Description of Artificial Sequence: Synthetic oligonucleotide
cugcuccuucucuucuuuc

SEQ ID NO: 3009322 - RNA, 19 nt, Artificial Sequence
  Description of Artificial Sequence: Synthetic oligonucleotide
gugugaggaugaaaggucu

SEQ ID NO: 3009323 - RNA, 19 nt, Artificial Sequence
  Description of Artificial Sequence: Synthetic oligonucleotide
ggagguuagcccauguucu

SEQ ID NO: 3009324 - RNA, 19 nt, Artificial Sequence
  Description of Artificial Sequence: Synthetic oligonucleotide
cugaaaaggcacgcgggaa

SEQ ID NO: 3009325 - RNA, 19 nt, Artificial Sequence
  Description of Artificial Sequence: Synthetic oligonucleotide
agccgaugucucaccagag

SEQ ID NO: 3009326 - RNA, 19 nt, Artificial Sequence
  Description of Artificial Sequence: Synthetic oligonucleotide
ccguacauuucugaugcug

SEQ ID NO: 3009327 - RNA, 19 nt, Artificial Sequence
  Description of Artificial Sequence: Synthetic oligonucleotide
cagucaucccacugcugca

SEQ ID NO: 3009328 - RNA, 19 nt, Artificial Sequence
  Description of Artificial Sequence: Synthetic oligonucleotide
guagucucuuucccucaaa

SEQ ID NO: 3009329 - RNA, 19 nt, Artificial Sequence
  Description of Artificial Sequence: Synthetic oligonucleotide
gggaagccgaugucucacc

SEQ ID NO: 3009330 - RNA, 19 nt, Artificial Sequence
  Description of Artificial Sequence: Synthetic oligonucleotide
ccugaccugaugguaaauc

SEQ ID NO: 3009331 - RNA, 19 nt, Artificial Sequence
  Description of Artificial Sequence: Synthetic oligonucleotide
cuaugggauucagguggug

SEQ ID NO: 3009332 - RNA, 19 nt, Artificial Sequence
  Description of Artificial Sequence: Synthetic oligonucleotide
acuuggguacccagcucca

SEQ ID NO: 3009333 - RNA, 19 nt, Artificial Sequence
  Description of Artificial Sequence: Synthetic oligonucleotide
ugcuugggcagcgcuccgu

SEQ ID NO: 3009334 - RNA, 19 nt, Artificial Sequence
  Description of Artificial Sequence: Synthetic oligonucleotide
gcugcauucuguggcgggc

SEQ ID NO: 3009335 - RNA, 19 nt, Artificial Sequence
  Description of Artificial Sequence: Synthetic oligonucleotide
cauaccagucguucaccgu

SEQ ID NO: 3009336 - RNA, 19 nt, Artificial Sequence
  Description of Artificial Sequence: Synthetic oligonucleotide
gcuugggcagcgcuccgug

SEQ ID NO: 3009337 - RNA, 19 nt, Artificial Sequence
  Description of Artificial Sequence: Synthetic oligonucleotide
ccuuuucgacuuccugacc

SEQ ID NO: 3009338 - RNA, 19 nt, Artificial Sequence
  Description of Artificial Sequence: Synthetic oligonucleotide
ggccucuucugaaaaggca

SEQ ID NO: 3009339 - RNA, 19 nt, Artificial Sequence
  Description of Artificial Sequence: Synthetic oligonucleotide
gugcuugggcagcgcuccg

SEQ ID NO: 3009340 - RNA, 19 nt, Artificial Sequence
  Description of Artificial Sequence: Synthetic oligonucleotide
gguacccagcuccaaagau

SEQ ID NO: 3009341 - RNA, 19 nt, Artificial Sequence
  Description of Artificial Sequence: Synthetic oligonucleotide
cacgcgggaagccgauguc

SEQ ID NO: 3009342 - RNA, 19 nt, Artificial Sequence
  Description of Artificial Sequence: Synthetic oligonucleotide
uccugaccugaugguaaau

SEQ ID NO: 3009343 - RNA, 19 nt, Artificial Sequence
  Description of Artificial Sequence: Synthetic oligonucleotide
accagucguucaccgucau

SEQ ID NO: 3009344 - RNA, 19 nt, Artificial Sequence
  Description of Artificial Sequence: Synthetic oligonucleotide
ggguacccagcuccaaaga

SEQ ID NO: 3009345 - RNA, 19 nt, Artificial Sequence
  Description of Artificial Sequence: Synthetic oligonucleotide
gcgggcgucuucaucuucc

SEQ ID NO: 3009346 - RNA, 19 nt, Artificial Sequence
  Description of Artificial Sequence: Synthetic oligonucleotide
ggcagcgcuccgugugagg

SEQ ID NO: 3009347 - RNA, 19 nt, Artificial Sequence
  Description of Artificial Sequence: Synthetic oligonucleotide
caccagaguaguagucucu

SEQ ID NO: 3009348 - RNA, 19 nt, Artificial Sequence
  Description of Artificial Sequence: Synthetic oligonucleotide
ccgaugucucaccagagua

SEQ ID NO: 3009349 - RNA, 19 nt, Artificial Sequence
  Description of Artificial Sequence: Synthetic oligonucleotide
agccccugggauggggugu

SEQ ID NO: 3009350 - RNA, 19 nt, Artificial Sequence
  Description of Artificial Sequence: Synthetic oligonucleotide
gcuccaaagauuugugcuu

SEQ ID NO: 3009351 - RNA, 19 nt, Artificial Sequence
  Description of Artificial Sequence: Synthetic oligonucleotide
gcagcgcuccgugugagga

SEQ ID NO: 3009352 - RNA, 19 nt, Artificial Sequence
  Description of Artificial Sequence: Synthetic oligonucleotide
cauucuguggcgggcgucu

SEQ ID NO: 3009353 - RNA, 19 nt, Artificial Sequence
  Description of Artificial Sequence: Synthetic oligonucleotide
guucaccgucauagucgcc

SEQ ID NO: 3009354 - RNA, 19 nt, Artificial Sequence
  Description of Artificial Sequence: Synthetic oligonucleotide
gguggugaugcuuccuuuu

SEQ ID NO: 3009355 - RNA, 19 nt, Artificial Sequence
  Description of Artificial Sequence: Synthetic oligonucleotide
augucucaccagaguagua

SEQ ID NO: 3009356 - RNA, 19 nt, Artificial Sequence
  Description of Artificial Sequence: Synthetic oligonucleotide
uggcgggcgucuucaucuu

SEQ ID NO: 3009357 - RNA, 19 nt, Artificial Sequence
  Description of Artificial Sequence: Synthetic oligonucleotide
cuuggguacccagcuccaa

SEQ ID NO: 3009358 - RNA, 19 nt, Artificial Sequence
  Description of Artificial Sequence: Synthetic oligonucleotide
cagguggugaugcuuccuu

SEQ ID NO: 3009359 - RNA, 19 nt, Artificial Sequence
  Description of Artificial Sequence: Synthetic oligonucleotide
gccgaugucucaccagagu

SEQ ID NO: 3009360 - RNA, 19 nt, Artificial Sequence
  Description of Artificial Sequence: Synthetic oligonucleotide
gcgggaagccgaugucuca

SEQ ID NO: 3009361 - RNA, 19 nt, Artificial Sequence
  Description of Artificial Sequence: Synthetic oligonucleotide
gggaugggguguccuucca

SEQ ID NO: 3009362 - RNA, 19 nt, Artificial Sequence
  Description of Artificial Sequence: Synthetic oligonucleotide
gcacgcgggaagccgaugu

SEQ ID NO: 3009363 - RNA, 19 nt, Artificial Sequence
  Description of Artificial Sequence: Synthetic oligonucleotide
ggauucagguggugaugcu

SEQ ID NO: 3009364 - RNA, 19 nt, Artificial Sequence
  Description of Artificial Sequence: Synthetic oligonucleotide
gggcgucuucaucuuccuc

SEQ ID NO: 3009365 - RNA, 19 nt, Artificial Sequence
  Description of Artificial Sequence: Synthetic oligonucleotide
cuugggcagcgcuccgugu

SEQ ID NO: 3009366 - RNA, 19 nt, Artificial Sequence
  Description of Artificial Sequence: Synthetic oligonucleotide
ccgugugaggaugaaaggu

SEQ ID NO: 3009367 - RNA, 19 nt, Artificial Sequence
  Description of Artificial Sequence: Synthetic oligonucleotide
cgcgggaagccgaugucuc

SEQ ID NO: 3009368 - RNA, 19 nt, Artificial Sequence
  Description of Artificial Sequence: Synthetic oligonucleotide
auucuguggcgggcgucuu

SEQ ID NO: 3009369 - RNA, 19 nt, Artificial Sequence
  Description of Artificial Sequence: Synthetic oligonucleotide
cccagcuccaaagauuugu

SEQ ID NO: 3009370 - RNA, 19 nt, Artificial Sequence
  Description of Artificial Sequence: Synthetic oligonucleotide
cgggaagccgaugucucac

SEQ ID NO: 3009371 - RNA, 19 nt, Artificial Sequence
  Description of Artificial Sequence: Synthetic oligonucleotide
gucaucccacugcugcauu

SEQ ID NO: 3009372 - RNA, 19 nt, Artificial Sequence
  Description of Artificial Sequence: Synthetic oligonucleotide
ggcgggcgucuucaucuuc

SEQ ID NO: 3009373 - RNA, 19 nt, Artificial Sequence
  Description of Artificial Sequence: Synthetic oligonucleotide
gggcagcgcuccgugugag

SEQ ID NO: 3009374 - RNA, 19 nt, Artificial Sequence
  Description of Artificial Sequence: Synthetic oligonucleotide
gcauucuguggcgggcguc

SEQ ID NO: 3009375 - RNA, 19 nt, Artificial Sequence
  Description of Artificial Sequence: Synthetic oligonucleotide
gcuccgugugaggaugaaa

SEQ ID NO: 3009376 - RNA, 19 nt, Artificial Sequence
  Description of Artificial Sequence: Synthetic oligonucleotide
caccgucauagucgccaua

SEQ ID NO: 3009377 - RNA, 19 nt, Artificial Sequence
  Description of Artificial Sequence: Synthetic oligonucleotide
cgucauagucgccauacuu

SEQ ID NO: 3009378 - RNA, 19 nt, Artificial Sequence
  Description of Artificial Sequence: Synthetic oligonucleotide
ggggagguuagcccauguu

SEQ ID NO: 3009379 - RNA, 19 nt, Artificial Sequence
  Description of Artificial Sequence: Synthetic oligonucleotide
aggcacgcgggaagccgau

SEQ ID NO: 3009380 - RNA, 19 nt, Artificial Sequence
  Description of Artificial Sequence: Synthetic oligonucleotide
ggcacgcgggaagccgaug

SEQ ID NO: 3009381 - RNA, 19 nt, Artificial Sequence
  Description of Artificial Sequence: Synthetic oligonucleotide
ggucuucuugaaggccucu

SEQ ID NO: 3009382 - RNA, 19 nt, Artificial Sequence
  Description of Artificial Sequence: Synthetic oligonucleotide
gccccugggaugggguguc

SEQ ID NO: 3009383 - RNA, 19 nt, Artificial Sequence
  Description of Artificial Sequence: Synthetic oligonucleotide
cagcgcuccgugugaggau

SEQ ID NO: 3009384 - RNA, 19 nt, Artificial Sequence
  Description of Artificial Sequence: Synthetic oligonucleotide
gcugcucauaccagucguu

SEQ ID NO: 3009385 - RNA, 19 nt, Artificial Sequence
  Description of Artificial Sequence: Synthetic oligonucleotide
ccagaguaguagucucuuu

SEQ ID NO: 3009386 - RNA, 19 nt, Artificial Sequence
  Description of Artificial Sequence: Synthetic oligonucleotide
ccagucguucaccgucaua

SEQ ID NO: 3009387 - RNA, 19 nt, Artificial Sequence
  Description of Artificial Sequence: Synthetic oligonucleotide
gcgcuccgugugaggauga

SEQ ID NO: 3009388 - RNA, 19 nt, Artificial Sequence
  Description of Artificial Sequence: Synthetic oligonucleotide
ccgucauagucgccauacu

SEQ ID NO: 3009389 - RNA, 19 nt, Artificial Sequence
  Description of Artificial Sequence: Synthetic oligonucleotide
cgccauacuuggguaccca

SEQ ID NO: 3009390 - RNA, 19 nt, Artificial Sequence
  Description of Artificial Sequence: Synthetic oligonucleotide
cuguggcgggcgucuucau

SEQ ID NO: 3009391 - RNA, 19 nt, Artificial Sequence
  Description of Artificial Sequence: Synthetic oligonucleotide
cgggcgucuucaucuuccu

SEQ ID NO: 3009392 - RNA, 19 nt, Artificial Sequence
  Description of Artificial Sequence: Synthetic oligonucleotide
cgcuccgugugaggaugaa

SEQ ID NO: 3009393 - RNA, 19 nt, Artificial Sequence
  Description of Artificial Sequence: Synthetic oligonucleotide
aaggaaauguucaaggacc

SEQ ID NO: 3009394 - RNA, 19 nt, Artificial Sequence
  Description of Artificial Sequence: Synthetic oligonucleotide
ugauguagaaccagaaucg

SEQ ID NO: 3009395 - RNA, 19 nt, Artificial Sequence
  Description of Artificial Sequence: Synthetic oligonucleotide
augauguagaaccagaauc

SEQ ID NO: 3009396 - RNA, 19 nt, Artificial Sequence
  Description of Artificial Sequence: Synthetic oligonucleotide
ugguugaugauguagaacc

SEQ ID NO: 3009397 - RNA, 19 nt, Artificial Sequence
  Description of Artificial Sequence: Synthetic oligonucleotide
uuaaccaucgauuccauca

SEQ ID NO: 3009398 - RNA, 19 nt, Artificial Sequence
  Description of Artificial Sequence: Synthetic oligonucleotide
ucuggugcaaauccaaggg

SEQ ID NO: 3009399 - RNA, 19 nt, Artificial Sequence
  Description of Artificial Sequence: Synthetic oligonucleotide
agugaauacagccuggcag

SEQ ID NO: 3009400 - RNA, 19 nt, Artificial Sequence
  Description of Artificial Sequence: Synthetic oligonucleotide
ucuucacggaaaaugagag

SEQ ID NO: 3009401 - RNA, 19 nt, Artificial Sequence
  Description of Artificial Sequence: Synthetic oligonucleotide
uguagaaccagaaucggac

SEQ ID NO: 3009402 - RNA, 19 nt, Artificial Sequence
  Description of Artificial Sequence: Synthetic oligonucleotide
gauuccaucauucuggaga

SEQ ID NO: 3009403 - RNA, 19 nt, Artificial Sequence
  Description of Artificial Sequence: Synthetic oligonucleotide
gaaaaugagaguuggccag

SEQ ID NO: 3009404 - RNA, 19 nt, Artificial Sequence
  Description of Artificial Sequence: Synthetic oligonucleotide
aauauauugggcaaggaaa

SEQ ID NO: 3009405 - RNA, 19 nt, Artificial Sequence
  Description of Artificial Sequence: Synthetic oligonucleotide
aaaguugauagucagcuuu

SEQ ID NO: 3009406 - RNA, 19 nt, Artificial Sequence
  Description of Artificial Sequence: Synthetic oligonucleotide
uugauagucagcuuugucu

SEQ ID NO: 3009407 - RNA, 19 nt, Artificial Sequence
  Description of Artificial Sequence: Synthetic oligonucleotide
aucccugaaaaguugauag

SEQ ID NO: 3009408 - RNA, 19 nt, Artificial Sequence
  Description of Artificial Sequence: Synthetic oligonucleotide
accauuuaaccaucgauuc

SEQ ID NO: 3009409 - RNA, 19 nt, Artificial Sequence
  Description of Artificial Sequence: Synthetic oligonucleotide
uguucaaggaccauuuaac

SEQ ID NO: 3009410 - RNA, 19 nt, Artificial Sequence
  Description of Artificial Sequence: Synthetic oligonucleotide
uuugucuggaauuuaauuu

SEQ ID NO: 3009411 - RNA, 19 nt, Artificial Sequence
  Description of Artificial Sequence: Synthetic oligonucleotide
agguccaugugauaagagc

SEQ ID NO: 3009412 - RNA, 19 nt, Artificial Sequence
  Description of Artificial Sequence: Synthetic oligonucleotide
aauacagccuggcagcucu

SEQ ID NO: 3009413 - RNA, 19 nt, Artificial Sequence
  Description of Artificial Sequence: Synthetic oligonucleotide
gaucccagugaauacagcc

SEQ ID NO: 3009414 - RNA, 19 nt, Artificial Sequence
  Description of Artificial Sequence: Synthetic oligonucleotide
ugauagucagcuuugucug

SEQ ID NO: 3009415 - RNA, 19 nt, Artificial Sequence
  Description of Artificial Sequence: Synthetic oligonucleotide
uucacauccacuguggagc

SEQ ID NO: 3009416 - RNA, 19 nt, Artificial Sequence
  Description of Artificial Sequence: Synthetic oligonucleotide
uguggagccacugagaaac

SEQ ID NO: 3009417 - RNA, 19 nt, Artificial Sequence
  Description of Artificial Sequence: Synthetic oligonucleotide
uccaucauucuggagaacg

SEQ ID NO: 3009418 - RNA, 19 nt, Artificial Sequence
  Description of Artificial Sequence: Synthetic oligonucleotide
uuucagaacggucaauugu

SEQ ID NO: 3009419 - RNA, 19 nt, Artificial Sequence
  Description of Artificial Sequence: Synthetic oligonucleotide
uguugguugaugauguaga

SEQ ID NO: 3009420 - RNA, 19 nt, Artificial Sequence
  Description of Artificial Sequence: Synthetic oligonucleotide
uacaacaugggcugugggg

SEQ ID NO: 3009421 - RNA, 19 nt, Artificial Sequence
  Description of Artificial Sequence: Synthetic oligonucleotide
uucaaggaccauuuaacca

SEQ ID NO: 3009422 - RNA, 19 nt, Artificial Sequence
  Description of Artificial Sequence: Synthetic oligonucleotide
cugagaaacgaaagcaucc

SEQ ID NO: 3009423 - RNA, 19 nt, Artificial Sequence
  Description of Artificial Sequence: Synthetic oligonucleotide
guucauacaacaugggcug

SEQ ID NO: 3009424 - RNA, 19 nt, Artificial Sequence
  Description of Artificial Sequence: Synthetic oligonucleotide
cugggcacaauauauuggg

SEQ ID NO: 3009425 - RNA, 19 nt, Artificial Sequence
  Description of Artificial Sequence: Synthetic oligonucleotide
auaagagcgguucauacaa

SEQ ID NO: 3009426 - RNA, 19 nt, Artificial Sequence
  Description of Artificial Sequence: Synthetic oligonucleotide
augagaguuggccaggcuc

SEQ ID NO: 3009427 - RNA, 19 nt, Artificial Sequence
  Description of Artificial Sequence: Synthetic oligonucleotide
ugaaaaguugauagucagc

SEQ ID NO: 3009428 - RNA, 19 nt, Artificial Sequence
  Description of Artificial Sequence: Synthetic oligonucleotide
ugcaaauccaaggggaccg

SEQ ID NO: 3009429 - RNA, 19 nt, Artificial Sequence
  Description of Artificial Sequence: Synthetic oligonucleotide
aucgauuccaucauucugg

SEQ ID NO: 3009430 - RNA, 19 nt, Artificial Sequence
  Description of Artificial Sequence: Synthetic oligonucleotide
cugaaaaguugauagucag

SEQ ID NO: 3009431 - RNA, 19 nt, Artificial Sequence
  Description of Artificial Sequence: Synthetic oligonucleotide
uugucuggaauuuaauuuc

SEQ ID NO: 3009432 - RNA, 19 nt, Artificial Sequence
  Description of Artificial Sequence: Synthetic oligonucleotide
gugauguucacauccacug

SEQ ID NO: 3009433 - RNA, 19 nt, Artificial Sequence
  Description of Artificial Sequence: Synthetic oligonucleotide
uugggcaaggaaauguuca

SEQ ID NO: 3009434 - RNA, 19 nt, Artificial Sequence
  Description of Artificial Sequence: Synthetic oligonucleotide
uucacuuggaucccaguga

SEQ ID NO: 3009435 - RNA, 19 nt, Artificial Sequence
  Description of Artificial Sequence: Synthetic oligonucleotide
gaccgugauguucacaucc

SEQ ID NO: 3009436 - RNA, 19 nt, Artificial Sequence
  Description of Artificial Sequence: Synthetic oligonucleotide
aagagcgguucauacaaca

SEQ ID NO: 3009437 - RNA, 19 nt, Artificial Sequence
  Description of Artificial Sequence: Synthetic oligonucleotide
uugaugauguagaaccaga

SEQ ID NO: 3009438 - RNA, 19 nt, Artificial Sequence
  Description of Artificial Sequence: Synthetic oligonucleotide
augggcaaguugcuguucc

SEQ ID NO: 3009439 - RNA, 19 nt, Artificial Sequence
  Description of Artificial Sequence: Synthetic oligonucleotide
aaaugagaguuggccaggc

SEQ ID NO: 3009440 - RNA, 19 nt, Artificial Sequence
  Description of Artificial Sequence: Synthetic oligonucleotide
ugauaagagcgguucauac

SEQ ID NO: 3009441 - RNA, 19 nt, Artificial Sequence
  Description of Artificial Sequence: Synthetic oligonucleotide
aaaaugagaguuggccagg

SEQ ID NO: 3009442 - RNA, 19 nt, Artificial Sequence
  Description of Artificial Sequence: Synthetic oligonucleotide
caaggaaauguucaaggac

SEQ ID NO: 3009443 - RNA, 19 nt, Artificial Sequence
  Description of Artificial Sequence: Synthetic oligonucleotide
aucauucuggagaacgugc

SEQ ID NO: 3009444 - RNA, 19 nt, Artificial Sequence
  Description of Artificial Sequence: Synthetic oligonucleotide
uggugcaaauccaagggga

SEQ ID NO: 3009445 - RNA, 19 nt, Artificial Sequence
  Description of Artificial Sequence: Synthetic oligonucleotide
auucacuuggaucccagug

SEQ ID NO: 3009446 - RNA, 19 nt, Artificial Sequence
  Description of Artificial Sequence: Synthetic oligonucleotide
ucauucuggagaacgugcc

SEQ ID NO: 3009447 - RNA, 19 nt, Artificial Sequence
  Description of Artificial Sequence: Synthetic oligonucleotide
ggcaaggaaauguucaagg

SEQ ID NO: 3009448 - RNA, 19 nt, Artificial Sequence
  Description of Artificial Sequence: Synthetic oligonucleotide
aacgaaagcaucccugaaa

SEQ ID NO: 3009449 - RNA, 19 nt, Artificial Sequence
  Description of Artificial Sequence: Synthetic oligonucleotide
guucaaggaccauuuaacc

SEQ ID NO: 3009450 - RNA, 19 nt, Artificial Sequence
  Description of Artificial Sequence: Synthetic oligonucleotide
ugagaguuggccaggcuca

SEQ ID NO: 3009451 - RNA, 19 nt, Artificial Sequence
  Description of Artificial Sequence: Synthetic oligonucleotide
uuuucagaacggucaauug

SEQ ID NO: 3009452 - RNA, 19 nt, Artificial Sequence
  Description of Artificial Sequence: Synthetic oligonucleotide
cucagucuggugcaaaucc

SEQ ID NO: 3009453 - RNA, 19 nt, Artificial Sequence
  Description of Artificial Sequence: Synthetic oligonucleotide
uucacggaaaaugagaguu

SEQ ID NO: 3009454 - RNA, 19 nt, Artificial Sequence
  Description of Artificial Sequence: Synthetic oligonucleotide
uuaagguccaugugauaag

SEQ ID NO: 3009455 - RNA, 19 nt, Artificial Sequence
  Description of Artificial Sequence: Synthetic oligonucleotide
gaaaaguugauagucagcu

SEQ ID NO: 3009456 - RNA, 19 nt, Artificial Sequence
  Description of Artificial Sequence: Synthetic oligonucleotide
gauguagaaccagaaucgg

SEQ ID NO: 3009457 - RNA, 19 nt, Artificial Sequence
  Description of Artificial Sequence: Synthetic oligonucleotide
uucccugacaucccaagug

SEQ ID NO: 3009458 - RNA, 19 nt, Artificial Sequence
  Description of Artificial Sequence: Synthetic oligonucleotide
gugaauacagccuggcagc

SEQ ID NO: 3009459 - RNA, 19 nt, Artificial Sequence
  Description of Artificial Sequence: Synthetic oligonucleotide
uagaaccagaaucggacca

SEQ ID NO: 3009460 - RNA, 19 nt, Artificial Sequence
  Description of Artificial Sequence: Synthetic oligonucleotide
agcgguucauacaacaugg

SEQ ID NO: 3009461 - RNA, 19 nt, Artificial Sequence
  Description of Artificial Sequence: Synthetic oligonucleotide
agaacgugccuguauucac

SEQ ID NO: 3009462 - RNA, 19 nt, Artificial Sequence
  Description of Artificial Sequence: Synthetic oligonucleotide
accagaaucggaccacugg

SEQ ID NO: 3009463 - RNA, 19 nt, Artificial Sequence
  Description of Artificial Sequence: Synthetic oligonucleotide
uucagaacggucaauuguu

SEQ ID NO: 3009464 - RNA, 19 nt, Artificial Sequence
  Description of Artificial Sequence: Synthetic oligonucleotide
ugggcugugggguaauggg

SEQ ID NO: 3009465 - RNA, 19 nt, Artificial Sequence
  Description of Artificial Sequence: Synthetic oligonucleotide
gaaacgaaagcaucccuga

SEQ ID NO: 3009466 - RNA, 19 nt, Artificial Sequence
  Description of Artificial Sequence: Synthetic oligonucleotide
aacggucaauuguugguug

SEQ ID NO: 3009467 - RNA, 19 nt, Artificial Sequence
  Description of Artificial Sequence: Synthetic oligonucleotide
gauagucagcuuugucugg

SEQ ID NO: 3009468 - RNA, 19 nt, Artificial Sequence
  Description of Artificial Sequence: Synthetic oligonucleotide
ugagaaacgaaagcauccc

SEQ ID NO: 3009469 - RNA, 19 nt, Artificial Sequence
  Description of Artificial Sequence: Synthetic oligonucleotide
uccaaggggaccgugaugu

SEQ ID NO: 3009470 - RNA, 19 nt, Artificial Sequence
  Description of Artificial Sequence: Synthetic oligonucleotide
acugagaaacgaaagcauc

SEQ ID NO: 3009471 - RNA, 19 nt, Artificial Sequence
  Description of Artificial Sequence: Synthetic oligonucleotide
gauaagagcgguucauaca

SEQ ID NO: 3009472 - RNA, 19 nt, Artificial Sequence
  Description of Artificial Sequence: Synthetic oligonucleotide
ugaugauguagaaccagaa

SEQ ID NO: 3009473 - RNA, 19 nt, Artificial Sequence
  Description of Artificial Sequence: Synthetic oligonucleotide
gucuggugcaaauccaagg

SEQ ID NO: 3009474 - RNA, 19 nt, Artificial Sequence
  Description of Artificial Sequence: Synthetic oligonucleotide
gguccaugugauaagagcg

SEQ ID NO: 3009475 - RNA, 19 nt, Artificial Sequence
  Description of Artificial Sequence: Synthetic oligonucleotide
ucccagugaauacagccug

SEQ ID NO: 3009476 - RNA, 19 nt, Artificial Sequence
  Description of Artificial Sequence: Synthetic oligonucleotide
ugggguaaugggcaaguug

SEQ ID NO: 3009477 - RNA, 19 nt, Artificial Sequence
  Description of Artificial Sequence: Synthetic oligonucleotide
uuguugguugaugauguag

SEQ ID NO: 3009478 - RNA, 19 nt, Artificial Sequence
  Description of Artificial Sequence: Synthetic oligonucleotide
uugcuguucccugacaucc

SEQ ID NO: 3009479 - RNA, 19 nt, Artificial Sequence
  Description of Artificial Sequence: Synthetic oligonucleotide
acgaaagcaucccugaaaa

SEQ ID NO: 3009480 - RNA, 19 nt, Artificial Sequence
  Description of Artificial Sequence: Synthetic oligonucleotide
gucaauuguugguugauga

SEQ ID NO: 3009481 - RNA, 19 nt, Artificial Sequence
  Description of Artificial Sequence: Synthetic oligonucleotide
cugacaucccaagugaggc

SEQ ID NO: 3009482 - RNA, 19 nt, Artificial Sequence
  Description of Artificial Sequence: Synthetic oligonucleotide
cacaauauauugggcaagg

SEQ ID NO: 3009483 - RNA, 19 nt, Artificial Sequence
  Description of Artificial Sequence: Synthetic oligonucleotide
auauugggcaaggaaaugu

SEQ ID NO: 3009484 - RNA, 19 nt, Artificial Sequence
  Description of Artificial Sequence: Synthetic oligonucleotide
aaauguucaaggaccauuu

SEQ ID NO: 3009485 - RNA, 19 nt, Artificial Sequence
  Description of Artificial Sequence: Synthetic oligonucleotide
gagcgguucauacaacaug

SEQ ID NO: 3009486 - RNA, 19 nt, Artificial Sequence
  Description of Artificial Sequence: Synthetic oligonucleotide
ucagaacggucaauuguug

SEQ ID NO: 3009487 - RNA, 19 nt, Artificial Sequence
  Description of Artificial Sequence: Synthetic oligonucleotide
cagaacggucaauuguugg

SEQ ID NO: 3009488 - RNA, 19 nt, Artificial Sequence
  Description of Artificial Sequence: Synthetic oligonucleotide
auguucaaggaccauuuaa

SEQ ID NO: 3009489 - RNA, 19 nt, Artificial Sequence
  Description of Artificial Sequence: Synthetic oligonucleotide
cauuuaaccaucgauucca

SEQ ID NO: 3009490 - RNA, 19 nt, Artificial Sequence
  Description of Artificial Sequence: Synthetic oligonucleotide
ucacggaaaaugagaguug

SEQ ID NO: 3009491 - RNA, 19 nt, Artificial Sequence
  Description of Artificial Sequence: Synthetic oligonucleotide
cacggaaaaugagaguugg

SEQ ID NO: 3009492 - RNA, 19 nt, Artificial Sequence
  Description of Artificial Sequence: Synthetic oligonucleotide
gaaagcaucccugaaaagu

SEQ ID NO: 3009493 - RNA, 19 nt, Artificial Sequence
  Description of Artificial Sequence: Synthetic oligonucleotide
uguucccugacaucccaag

SEQ ID NO: 3009494 - RNA, 19 nt, Artificial Sequence
  Description of Artificial Sequence: Synthetic oligonucleotide
guugaugauguagaaccag

SEQ ID NO: 3009495 - RNA, 19 nt, Artificial Sequence
  Description of Artificial Sequence: Synthetic oligonucleotide
aaagcaucccugaaaaguu

SEQ ID NO: 3009496 - RNA, 19 nt, Artificial Sequence
  Description of Artificial Sequence: Synthetic oligonucleotide
ucccugacaucccaaguga

SEQ ID NO: 3009497 - RNA, 19 nt, Artificial Sequence
  Description of Artificial Sequence: Synthetic oligonucleotide
caugugauaagagcgguuc

SEQ ID NO: 3009498 - RNA, 19 nt, Artificial Sequence
  Description of Artificial Sequence: Synthetic oligonucleotide
ucacuuggaucccagugaa

SEQ ID NO: 3009499 - RNA, 19 nt, Artificial Sequence
  Description of Artificial Sequence: Synthetic oligonucleotide
auuccaucauucuggagaa

SEQ ID NO: 3009500 - RNA, 19 nt, Artificial Sequence
  Description of Artificial Sequence: Synthetic oligonucleotide
aauccaaggggaccgugau

SEQ ID NO: 3009501 - RNA, 19 nt, Artificial Sequence
  Description of Artificial Sequence: Synthetic oligonucleotide
agaaucggaccacugggca

SEQ ID NO: 3009502 - RNA, 19 nt, Artificial Sequence
  Description of Artificial Sequence: Synthetic oligonucleotide
agaaacgaaagcaucccug

SEQ ID NO: 3009503 - RNA, 19 nt, Artificial Sequence
  Description of Artificial Sequence: Synthetic oligonucleotide
guagaaccagaaucggacc

SEQ ID NO: 3009504 - RNA, 19 nt, Artificial Sequence
  Description of Artificial Sequence: Synthetic oligonucleotide
aaguugauagucagcuuug

SEQ ID NO: 3009505 - RNA, 19 nt, Artificial Sequence
  Description of Artificial Sequence: Synthetic oligonucleotide
cuuaagguccaugugauaa

SEQ ID NO: 3009506 - RNA, 19 nt, Artificial Sequence
  Description of Artificial Sequence: Synthetic oligonucleotide
cuggugcaaauccaagggg

SEQ ID NO: 3009507 - RNA, 19 nt, Artificial Sequence
  Description of Artificial Sequence: Synthetic oligonucleotide
cacugggcacaauauauug

SEQ ID NO: 3009508 - RNA, 19 nt, Artificial Sequence
  Description of Artificial Sequence: Synthetic oligonucleotide
aaaaguugauagucagcuu

SEQ ID NO: 3009509 - RNA, 19 nt, Artificial Sequence
  Description of Artificial Sequence: Synthetic oligonucleotide
uauauugggcaaggaaaug

SEQ ID NO: 3009510 - RNA, 19 nt, Artificial Sequence
  Description of Artificial Sequence: Synthetic oligonucleotide
ugauguucacauccacugu

SEQ ID NO: 3009511 - RNA, 19 nt, Artificial Sequence
  Description of Artificial Sequence: Synthetic oligonucleotide
agaaccagaaucggaccac

SEQ ID NO: 3009512 - RNA, 19 nt, Artificial Sequence
  Description of Artificial Sequence: Synthetic oligonucleotide
caucgauuccaucauucug

SEQ ID NO: 3009513 - RNA, 19 nt, Artificial Sequence
  Description of Artificial Sequence: Synthetic oligonucleotide
auacaacaugggcuguggg

SEQ ID NO: 3009514 - RNA, 19 nt, Artificial Sequence
  Description of Artificial Sequence: Synthetic oligonucleotide
acauccacuguggagccac

SEQ ID NO: 3009515 - RNA, 19 nt, Artificial Sequence
  Description of Artificial Sequence: Synthetic oligonucleotide
caauauauugggcaaggaa

SEQ ID NO: 3009516 - RNA, 19 nt, Artificial Sequence
  Description of Artificial Sequence: Synthetic oligonucleotide
acaacaugggcuguggggu

SEQ ID NO: 3009517 - RNA, 19 nt, Artificial Sequence
  Description of Artificial Sequence: Synthetic oligonucleotide
uguucacauccacugugga

SEQ ID NO: 3009518 - RNA, 19 nt, Artificial Sequence
  Description of Artificial Sequence: Synthetic oligonucleotide
uauugggcaaggaaauguu

SEQ ID NO: 3009519 - RNA, 19 nt, Artificial Sequence
  Description of Artificial Sequence: Synthetic oligonucleotide
aaucggaccacugggcaca

SEQ ID NO: 3009520 - RNA, 19 nt, Artificial Sequence
  Description of Artificial Sequence: Synthetic oligonucleotide
uaagguccaugugauaaga

SEQ ID NO: 3009521 - RNA, 19 nt, Artificial Sequence
  Description of Artificial Sequence: Synthetic oligonucleotide
accaucgauuccaucauuc

SEQ ID NO: 3009522 - RNA, 19 nt, Artificial Sequence
  Description of Artificial Sequence: Synthetic oligonucleotide
ggaaaaugagaguuggcca

SEQ ID NO: 3009523 - RNA, 19 nt, Artificial Sequence
  Description of Artificial Sequence: Synthetic oligonucleotide
auauauugggcaaggaaau

SEQ ID NO: 3009524 - RNA, 19 nt, Artificial Sequence
  Description of Artificial Sequence: Synthetic oligonucleotide
uaaccaucgauuccaucau

SEQ ID NO: 3009525 - RNA, 19 nt, Artificial Sequence
  Description of Artificial Sequence: Synthetic oligonucleotide
acugggcacaauauauugg

SEQ ID NO: 3009526 - RNA, 19 nt, Artificial Sequence
  Description of Artificial Sequence: Synthetic oligonucleotide
aaugagaguuggccaggcu

SEQ ID NO: 3009527 - RNA, 19 nt, Artificial Sequence
  Description of Artificial Sequence: Synthetic oligonucleotide
aaacgaaagcaucccugaa

SEQ ID NO: 3009528 - RNA, 19 nt, Artificial Sequence
  Description of Artificial Sequence: Synthetic oligonucleotide
gggguaaugggcaaguugc

SEQ ID NO: 3009529 - RNA, 19 nt, Artificial Sequence
  Description of Artificial Sequence: Synthetic oligonucleotide
ugggcacaauauauugggc

SEQ ID NO: 3009530 - RNA, 19 nt, Artificial Sequence
  Description of Artificial Sequence: Synthetic oligonucleotide
cauacaacaugggcugugg

SEQ ID NO: 3009531 - RNA, 19 nt, Artificial Sequence
  Description of Artificial Sequence: Synthetic oligonucleotide
cucuucacggaaaaugaga

SEQ ID NO: 3009532 - RNA, 19 nt, Artificial Sequence
  Description of Artificial Sequence: Synthetic oligonucleotide
cagaaucggaccacugggc

SEQ ID NO: 3009533 - RNA, 19 nt, Artificial Sequence
  Description of Artificial Sequence: Synthetic oligonucleotide
aaugggcaaguugcuguuc

SEQ ID NO: 3009534 - RNA, 19 nt, Artificial Sequence
  Description of Artificial Sequence: Synthetic oligonucleotide
aauguucaaggaccauuua

SEQ ID NO: 3009535 - RNA, 19 nt, Artificial Sequence
  Description of Artificial Sequence: Synthetic oligonucleotide
aaggggaccgugauguuca

SEQ ID NO: 3009536 - RNA, 19 nt, Artificial Sequence
  Description of Artificial Sequence: Synthetic oligonucleotide
uccacuguggagccacuga

SEQ ID NO: 3009537 - RNA, 19 nt, Artificial Sequence
  Description of Artificial Sequence: Synthetic oligonucleotide
aaggaccauuuaaccaucg

SEQ ID NO: 3009538 - RNA, 19 nt, Artificial Sequence
  Description of Artificial Sequence: Synthetic oligonucleotide
auucuggagaacgugccug

SEQ ID NO: 3009539 - RNA, 19 nt, Artificial Sequence
  Description of Artificial Sequence: Synthetic oligonucleotide
uuggccaggcucagucugg

SEQ ID NO: 3009540 - RNA, 19 nt, Artificial Sequence
  Description of Artificial Sequence: Synthetic oligonucleotide
guccaugugauaagagcgg

SEQ ID NO: 3009541 - RNA, 19 nt, Artificial Sequence
  Description of Artificial Sequence: Synthetic oligonucleotide
ugugauaagagcgguucau

SEQ ID NO: 3009542 - RNA, 19 nt, Artificial Sequence
  Description of Artificial Sequence: Synthetic oligonucleotide
auugggcaaggaaauguuc

SEQ ID NO: 3009543 - RNA, 19 nt, Artificial Sequence
  Description of Artificial Sequence: Synthetic oligonucleotide
ucgauuccaucauucugga

SEQ ID NO: 3009544 - RNA, 19 nt, Artificial Sequence
  Description of Artificial Sequence: Synthetic oligonucleotide
aaauccaaggggaccguga

SEQ ID NO: 3009545 - RNA, 19 nt, Artificial Sequence
  Description of Artificial Sequence: Synthetic oligonucleotide
uugguugaugauguagaac

SEQ ID NO: 3009546 - RNA, 19 nt, Artificial Sequence
  Description of Artificial Sequence: Synthetic oligonucleotide
acuuggaucccagugaaua

SEQ ID NO: 3009547 - RNA, 19 nt, Artificial Sequence
  Description of Artificial Sequence: Synthetic oligonucleotide
ucacauccacuguggagcc

SEQ ID NO: 3009548 - RNA, 19 nt, Artificial Sequence
  Description of Artificial Sequence: Synthetic oligonucleotide
agccuggcagcucuucacg

SEQ ID NO: 3009549 - RNA, 19 nt, Artificial Sequence
  Description of Artificial Sequence: Synthetic oligonucleotide
ucauacaacaugggcugug

SEQ ID NO: 3009550 - RNA, 19 nt, Artificial Sequence
  Description of Artificial Sequence: Synthetic oligonucleotide
gaaucggaccacugggcac

SEQ ID NO: 3009551 - RNA, 19 nt, Artificial Sequence
  Description of Artificial Sequence: Synthetic oligonucleotide
guuggccaggcucagucug

SEQ ID NO: 3009552 - RNA, 19 nt, Artificial Sequence
  Description of Artificial Sequence: Synthetic oligonucleotide
guaaugggcaaguugcugu

SEQ ID NO: 3009553 - RNA, 19 nt, Artificial Sequence
  Description of Artificial Sequence: Synthetic oligonucleotide
aagguccaugugauaagag

SEQ ID NO: 3009554 - RNA, 19 nt, Artificial Sequence
  Description of Artificial Sequence: Synthetic oligonucleotide
uuuaaccaucgauuccauc

SEQ ID NO: 3009555 - RNA, 19 nt, Artificial Sequence
  Description of Artificial Sequence: Synthetic oligonucleotide
aacgugccuguauucacuu

SEQ ID NO: 3009556 - RNA, 19 nt, Artificial Sequence
  Description of Artificial Sequence: Synthetic oligonucleotide
ucagcuuugucuggaauuu

SEQ ID NO: 3009557 - RNA, 19 nt, Artificial Sequence
  Description of Artificial Sequence: Synthetic oligonucleotide
ucccugaaaaguugauagu

SEQ ID NO: 3009558 - RNA, 19 nt, Artificial Sequence
  Description of Artificial Sequence: Synthetic oligonucleotide
ccagaaucggaccacuggg

SEQ ID NO: 3009559 - RNA, 19 nt, Artificial Sequence
  Description of Artificial Sequence: Synthetic oligonucleotide
guugauagucagcuuuguc

SEQ ID NO: 3009560 - RNA, 19 nt, Artificial Sequence
  Description of Artificial Sequence: Synthetic oligonucleotide
uguauucacuuggauccca

SEQ ID NO: 3009561 - RNA, 19 nt, Artificial Sequence
  Description of Artificial Sequence: Synthetic oligonucleotide
ucccaagugaggcaauauu

SEQ ID NO: 3009562 - RNA, 19 nt, Artificial Sequence
  Description of Artificial Sequence: Synthetic oligonucleotide
agcucuucacggaaaauga

SEQ ID NO: 3009563 - RNA, 19 nt, Artificial Sequence
  Description of Artificial Sequence: Synthetic oligonucleotide
ugggcaaggaaauguucaa

SEQ ID NO: 3009564 - RNA, 19 nt, Artificial Sequence
  Description of Artificial Sequence: Synthetic oligonucleotide
aagcaucccugaaaaguug

SEQ ID NO: 3009565 - RNA, 19 nt, Artificial Sequence
  Description of Artificial Sequence: Synthetic oligonucleotide
augugauaagagcgguuca

SEQ ID NO: 3009566 - RNA, 19 nt, Artificial Sequence
  Description of Artificial Sequence: Synthetic oligonucleotide
gccacugagaaacgaaagc

SEQ ID NO: 3009567 - RNA, 19 nt, Artificial Sequence
  Description of Artificial Sequence: Synthetic oligonucleotide
uucuggagaacgugccugu

SEQ ID NO: 3009568 - RNA, 19 nt, Artificial Sequence
  Description of Artificial Sequence: Synthetic oligonucleotide
uaagagcgguucauacaac

SEQ ID NO: 3009569 - RNA, 19 nt, Artificial Sequence
  Description of Artificial Sequence: Synthetic oligonucleotide
ugacaucccaagugaggca

SEQ ID NO: 3009570 - RNA, 19 nt, Artificial Sequence
  Description of Artificial Sequence: Synthetic oligonucleotide
gaugauguagaaccagaau

SEQ ID NO: 3009571 - RNA, 19 nt, Artificial Sequence
  Description of Artificial Sequence: Synthetic oligonucleotide
uccaugugauaagagcggu

SEQ ID NO: 3009572 - RNA, 19 nt, Artificial Sequence
  Description of Artificial Sequence: Synthetic oligonucleotide
caucauucuggagaacgug

SEQ ID NO: 3009573 - RNA, 19 nt, Artificial Sequence
  Description of Artificial Sequence: Synthetic oligonucleotide
acggaaaaugagaguuggc

SEQ ID NO: 3009574 - RNA, 19 nt, Artificial Sequence
  Description of Artificial Sequence: Synthetic oligonucleotide
gggcacaauauauugggca

SEQ ID NO: 3009575 - RNA, 19 nt, Artificial Sequence
  Description of Artificial Sequence: Synthetic oligonucleotide
ugugggguaaugggcaagu

SEQ ID NO: 3009576 - RNA, 19 nt, Artificial Sequence
  Description of Artificial Sequence: Synthetic oligonucleotide
accacugggcacaauauau

SEQ ID NO: 3009577 - RNA, 19 nt, Artificial Sequence
  Description of Artificial Sequence: Synthetic oligonucleotide
caaguugcuguucccugac

SEQ ID NO: 3009578 - RNA, 19 nt, Artificial Sequence
  Description of Artificial Sequence: Synthetic oligonucleotide
aaguugcuguucccugaca

SEQ ID NO: 3009579 - RNA, 19 nt, Artificial Sequence
  Description of Artificial Sequence: Synthetic oligonucleotide
auagucagcuuugucugga

SEQ ID NO: 3009580 - RNA, 19 nt, Artificial Sequence
  Description of Artificial Sequence: Synthetic oligonucleotide
caaggaccauuuaaccauc

SEQ ID NO: 3009581 - RNA, 19 nt, Artificial Sequence
  Description of Artificial Sequence: Synthetic oligonucleotide
gguucauacaacaugggcu

SEQ ID NO: 3009582 - RNA, 19 nt, Artificial Sequence
  Description of Artificial Sequence: Synthetic oligonucleotide
guugguugaugauguagaa

SEQ ID NO: 3009583 - RNA, 19 nt, Artificial Sequence
  Description of Artificial Sequence: Synthetic oligonucleotide
aggaaauguucaaggacca

SEQ ID NO: 3009584 - RNA, 19 nt, Artificial Sequence
  Description of Artificial Sequence: Synthetic oligonucleotide
ugaauacagccuggcagcu

SEQ ID NO: 3009585 - RNA, 19 nt, Artificial Sequence
  Description of Artificial Sequence: Synthetic oligonucleotide
aggaccauuuaaccaucga

SEQ ID NO: 3009586 - RNA, 19 nt, Artificial Sequence
  Description of Artificial Sequence: Synthetic oligonucleotide
agccacugagaaacgaaag

SEQ ID NO: 3009587 - RNA, 19 nt, Artificial Sequence
  Description of Artificial Sequence: Synthetic oligonucleotide
uaaugggcaaguugcuguu

SEQ ID NO: 3009588 - RNA, 19 nt, Artificial Sequence
  Description of Artificial Sequence: Synthetic oligonucleotide
augggcugugggguaaugg

SEQ ID NO: 3009589 - RNA, 19 nt, Artificial Sequence
  Description of Artificial Sequence: Synthetic oligonucleotide
guauucacuuggaucccag

SEQ ID NO: 3009590 - RNA, 19 nt, Artificial Sequence
  Description of Artificial Sequence: Synthetic oligonucleotide
acggucaauuguugguuga

SEQ ID NO: 3009591 - RNA, 19 nt, Artificial Sequence
  Description of Artificial Sequence: Synthetic oligonucleotide
acaauauauugggcaagga

SEQ ID NO: 3009592 - RNA, 19 nt, Artificial Sequence
  Description of Artificial Sequence: Synthetic oligonucleotide
gcaaggaaauguucaagga

SEQ ID NO: 3009593 - RNA, 19 nt, Artificial Sequence
  Description of Artificial Sequence: Synthetic oligonucleotide
ccauuuaaccaucgauucc

SEQ ID NO: 3009594 - RNA, 19 nt, Artificial Sequence
  Description of Artificial Sequence: Synthetic oligonucleotide
gccuguauucacuuggauc

SEQ ID NO: 3009595 - RNA, 19 nt, Artificial Sequence
  Description of Artificial Sequence: Synthetic oligonucleotide
gacaucccaagugaggcaa

SEQ ID NO: 3009596 - RNA, 19 nt, Artificial Sequence
  Description of Artificial Sequence: Synthetic oligonucleotide
cggaaaaugagaguuggcc

SEQ ID NO: 3009597 - RNA, 19 nt, Artificial Sequence
  Description of Artificial Sequence: Synthetic oligonucleotide
gaaauguucaaggaccauu

SEQ ID NO: 3009598 - RNA, 19 nt, Artificial Sequence
  Description of Artificial Sequence: Synthetic oligonucleotide
gaccauuuaaccaucgauu

SEQ ID NO: 3009599 - RNA, 19 nt, Artificial Sequence
  Description of Artificial Sequence: Synthetic oligonucleotide
ggcacaauauauugggcaa

SEQ ID NO: 3009600 - RNA, 19 nt, Artificial Sequence
  Description of Artificial Sequence: Synthetic oligonucleotide
gccaggcucagucuggugc

SEQ ID NO: 3009601 - RNA, 19 nt, Artificial Sequence
  Description of Artificial Sequence: Synthetic oligonucleotide
aaccaucgauuccaucauu

SEQ ID NO: 3009602 - RNA, 19 nt, Artificial Sequence
  Description of Artificial Sequence: Synthetic oligonucleotide
ugggcaaguugcuguuccc

SEQ ID NO: 3009603 - RNA, 19 nt, Artificial Sequence
  Description of Artificial Sequence: Synthetic oligonucleotide
guugcuguucccugacauc

SEQ ID NO: 3009604 - RNA, 19 nt, Artificial Sequence
  Description of Artificial Sequence: Synthetic oligonucleotide
auguagaaccagaaucgga

SEQ ID NO: 3009605 - RNA, 19 nt, Artificial Sequence
  Description of Artificial Sequence: Synthetic oligonucleotide
agucuggugcaaauccaag

SEQ ID NO: 3009606 - RNA, 19 nt, Artificial Sequence
  Description of Artificial Sequence: Synthetic oligonucleotide
cgugccuguauucacuugg

SEQ ID NO: 3009607 - RNA, 19 nt, Artificial Sequence
  Description of Artificial Sequence: Synthetic oligonucleotide
gugcaaauccaaggggacc

SEQ ID NO: 3009608 - RNA, 19 nt, Artificial Sequence
  Description of Artificial Sequence: Synthetic oligonucleotide
aucccagugaauacagccu

SEQ ID NO: 3009609 - RNA, 19 nt, Artificial Sequence
  Description of Artificial Sequence: Synthetic oligonucleotide
gagaaacgaaagcaucccu

SEQ ID NO: 3009610 - RNA, 19 nt, Artificial Sequence
  Description of Artificial Sequence: Synthetic oligonucleotide
cuuugucuggaauuuaauu

SEQ ID NO: 3009611 - RNA, 19 nt, Artificial Sequence
  Description of Artificial Sequence: Synthetic oligonucleotide
aaccagaaucggaccacug

SEQ ID NO: 3009612 - RNA, 19 nt, Artificial Sequence
  Description of Artificial Sequence: Synthetic oligonucleotide
aguugauagucagcuuugu

SEQ ID NO: 3009613 - RNA, 19 nt, Artificial Sequence
  Description of Artificial Sequence: Synthetic oligonucleotide
ugccuguauucacuuggau

SEQ ID NO: 3009614 - RNA, 19 nt, Artificial Sequence
  Description of Artificial Sequence: Synthetic oligonucleotide
cuguauucacuuggauccc

SEQ ID NO: 3009615 - RNA, 19 nt, Artificial Sequence
  Description of Artificial Sequence: Synthetic oligonucleotide
ccugaaaaguugauaguca

SEQ ID NO: 3009616 - RNA, 19 nt, Artificial Sequence
  Description of Artificial Sequence: Synthetic oligonucleotide
gguaaugggcaaguugcug

SEQ ID NO: 3009617 - RNA, 19 nt, Artificial Sequence
  Description of Artificial Sequence: Synthetic oligonucleotide
agcaucccugaaaaguuga

SEQ ID NO: 3009618 - RNA, 19 nt, Artificial Sequence
  Description of Artificial Sequence: Synthetic oligonucleotide
uggagccacugagaaacga

SEQ ID NO: 3009619 - RNA, 19 nt, Artificial Sequence
  Description of Artificial Sequence: Synthetic oligonucleotide
uucauacaacaugggcugu

SEQ ID NO: 3009620 - RNA, 19 nt, Artificial Sequence
  Description of Artificial Sequence: Synthetic oligonucleotide
ggcaaguugcuguucccug

SEQ ID NO: 3009621 - RNA, 19 nt, Artificial Sequence
  Description of Artificial Sequence: Synthetic oligonucleotide
cccugaaaaguugauaguc

SEQ ID NO: 3009622 - RNA, 19 nt, Artificial Sequence
  Description of Artificial Sequence: Synthetic oligonucleotide
auccaaggggaccgugaug

SEQ ID NO: 3009623 - RNA, 19 nt, Artificial Sequence
  Description of Artificial Sequence: Synthetic oligonucleotide
agcuuugucuggaauuuaa

SEQ ID NO: 3009624 - RNA, 19 nt, Artificial Sequence
  Description of Artificial Sequence: Synthetic oligonucleotide
aacaugggcugugggguaa

SEQ ID NO: 3009625 - RNA, 19 nt, Artificial Sequence
  Description of Artificial Sequence: Synthetic oligonucleotide
caaggggaccgugauguuc

SEQ ID NO: 3009626 - RNA, 19 nt, Artificial Sequence
  Description of Artificial Sequence: Synthetic oligonucleotide
gagccacugagaaacgaaa

SEQ ID NO: 3009627 - RNA, 19 nt, Artificial Sequence
  Description of Artificial Sequence: Synthetic oligonucleotide
auuguugguugaugaugua

SEQ ID NO: 3009628 - RNA, 19 nt, Artificial Sequence
  Description of Artificial Sequence: Synthetic oligonucleotide
gcacaauauauugggcaag

SEQ ID NO: 3009629 - RNA, 19 nt, Artificial Sequence
  Description of Artificial Sequence: Synthetic oligonucleotide
ggugcaaauccaaggggac

SEQ ID NO: 3009630 - RNA, 19 nt, Artificial Sequence
  Description of Artificial Sequence: Synthetic oligonucleotide
caaauccaaggggaccgug

SEQ ID NO: 3009631 - RNA, 19 nt, Artificial Sequence
  Description of Artificial Sequence: Synthetic oligonucleotide
gagaguuggccaggcucag

SEQ ID NO: 3009632 - RNA, 19 nt, Artificial Sequence
  Description of Artificial Sequence: Synthetic oligonucleotide
cgguucauacaacaugggc

SEQ ID NO: 3009633 - RNA, 19 nt, Artificial Sequence
  Description of Artificial Sequence: Synthetic oligonucleotide
gucagcuuugucuggaauu

SEQ ID NO: 3009634 - RNA, 19 nt, Artificial Sequence
  Description of Artificial Sequence: Synthetic oligonucleotide
agagcgguucauacaacau

SEQ ID NO: 3009635 - RNA, 19 nt, Artificial Sequence
  Description of Artificial Sequence: Synthetic oligonucleotide
acgugccuguauucacuug

SEQ ID NO: 3009636 - RNA, 19 nt, Artificial Sequence
  Description of Artificial Sequence: Synthetic oligonucleotide
cacugagaaacgaaagcau

SEQ ID NO: 3009637 - RNA, 19 nt, Artificial Sequence
  Description of Artificial Sequence: Synthetic oligonucleotide
gggcaaggaaauguucaag

SEQ ID NO: 3009638 - RNA, 19 nt, Artificial Sequence
  Description of Artificial Sequence: Synthetic oligonucleotide
ggaccauuuaaccaucgau

SEQ ID NO: 3009639 - RNA, 19 nt, Artificial Sequence
  Description of Artificial Sequence: Synthetic oligonucleotide
uggcagcucuucacggaaa

SEQ ID NO: 3009640 - RNA, 19 nt, Artificial Sequence
  Description of Artificial Sequence: Synthetic oligonucleotide
ccacuguggagccacugag

SEQ ID NO: 3009641 - RNA, 19 nt, Artificial Sequence
  Description of Artificial Sequence: Synthetic oligonucleotide
ccacugagaaacgaaagca

SEQ ID NO: 3009642 - RNA, 19 nt, Artificial Sequence
  Description of Artificial Sequence: Synthetic oligonucleotide
auuuaaccaucgauuccau

SEQ ID NO: 3009643 - RNA, 19 nt, Artificial Sequence
  Description of Artificial Sequence: Synthetic oligonucleotide
cagugaauacagccuggca

SEQ ID NO: 3009644 - RNA, 19 nt, Artificial Sequence
  Description of Artificial Sequence: Synthetic oligonucleotide
gaauacagccuggcagcuc

SEQ ID NO: 3009645 - RNA, 19 nt, Artificial Sequence
  Description of Artificial Sequence: Synthetic oligonucleotide
aggggaccgugauguucac

SEQ ID NO: 3009646 - RNA, 19 nt, Artificial Sequence
  Description of Artificial Sequence: Synthetic oligonucleotide
gcucuucacggaaaaugag

SEQ ID NO: 3009647 - RNA, 19 nt, Artificial Sequence
  Description of Artificial Sequence: Synthetic oligonucleotide
cacuguggagccacugaga

SEQ ID NO: 3009648 - RNA, 19 nt, Artificial Sequence
  Description of Artificial Sequence: Synthetic oligonucleotide
cccagugaauacagccugg

SEQ ID NO: 3009649 - RNA, 19 nt, Artificial Sequence
  Description of Artificial Sequence: Synthetic oligonucleotide
accgugauguucacaucca

SEQ ID NO: 3009650 - RNA, 19 nt, Artificial Sequence
  Description of Artificial Sequence: Synthetic oligonucleotide
gccuggcagcucuucacgg

SEQ ID NO: 3009651 - RNA, 19 nt, Artificial Sequence
  Description of Artificial Sequence: Synthetic oligonucleotide
gcaaguugcuguucccuga

SEQ ID NO: 3009652 - RNA, 19 nt, Artificial Sequence
  Description of Artificial Sequence: Synthetic oligonucleotide
gggaccgugauguucacau

SEQ ID NO: 3009653 - RNA, 19 nt, Artificial Sequence
  Description of Artificial Sequence: Synthetic oligonucleotide
gugauaagagcgguucaua

SEQ ID NO: 3009654 - RNA, 19 nt, Artificial Sequence
  Description of Artificial Sequence: Synthetic oligonucleotide
cuucacggaaaaugagagu

SEQ ID NO: 3009655 - RNA, 19 nt, Artificial Sequence
  Description of Artificial Sequence: Synthetic oligonucleotide
cugugggguaaugggcaag

SEQ ID NO: 3009656 - RNA, 19 nt, Artificial Sequence
  Description of Artificial Sequence: Synthetic oligonucleotide
aucccaagugaggcaauau

SEQ ID NO: 3009657 - RNA, 19 nt, Artificial Sequence
  Description of Artificial Sequence: Synthetic oligonucleotide
ccagugaauacagccuggc

SEQ ID NO: 3009658 - RNA, 19 nt, Artificial Sequence
  Description of Artificial Sequence: Synthetic oligonucleotide
gaacggucaauuguugguu

SEQ ID NO: 3009659 - RNA, 19 nt, Artificial Sequence
  Description of Artificial Sequence: Synthetic oligonucleotide
guggagccacugagaaacg

SEQ ID NO: 3009660 - RNA, 19 nt, Artificial Sequence
  Description of Artificial Sequence: Synthetic oligonucleotide
cuggcagcucuucacggaa

SEQ ID NO: 3009661 - RNA, 19 nt, Artificial Sequence
  Description of Artificial Sequence: Synthetic oligonucleotide
auccacuguggagccacug

SEQ ID NO: 3009662 - RNA, 19 nt, Artificial Sequence
  Description of Artificial Sequence: Synthetic oligonucleotide
caucccugaaaaguugaua

SEQ ID NO: 3009663 - RNA, 19 nt, Artificial Sequence
  Description of Artificial Sequence: Synthetic oligonucleotide
ucuggagaacgugccugua

SEQ ID NO: 3009664 - RNA, 19 nt, Artificial Sequence
  Description of Artificial Sequence: Synthetic oligonucleotide
guucccugacaucccaagu

SEQ ID NO: 3009665 - RNA, 19 nt, Artificial Sequence
  Description of Artificial Sequence: Synthetic oligonucleotide
gcgguucauacaacauggg

SEQ ID NO: 3009666 - RNA, 19 nt, Artificial Sequence
  Description of Artificial Sequence: Synthetic oligonucleotide
gaaccagaaucggaccacu

SEQ ID NO: 3009667 - RNA, 19 nt, Artificial Sequence
  Description of Artificial Sequence: Synthetic oligonucleotide
cccugacaucccaagugag

SEQ ID NO: 3009668 - RNA, 19 nt, Artificial Sequence
  Description of Artificial Sequence: Synthetic oligonucleotide
gggcugugggguaaugggc

SEQ ID NO: 3009669 - RNA, 19 nt, Artificial Sequence
  Description of Artificial Sequence: Synthetic oligonucleotide
cauucuggagaacgugccu

SEQ ID NO: 3009670 - RNA, 19 nt, Artificial Sequence
  Description of Artificial Sequence: Synthetic oligonucleotide
gcuguucccugacauccca

SEQ ID NO: 3009671 - RNA, 19 nt, Artificial Sequence
  Description of Artificial Sequence: Synthetic oligonucleotide
cgaaagcaucccugaaaag

SEQ ID NO: 3009672 - RNA, 19 nt, Artificial Sequence
  Description of Artificial Sequence: Synthetic oligonucleotide
gugccuguauucacuugga

SEQ ID NO: 3009673 - RNA, 19 nt, Artificial Sequence
  Description of Artificial Sequence: Synthetic oligonucleotide
uggccaggcucagucuggu

SEQ ID NO: 3009674 - RNA, 19 nt, Artificial Sequence
  Description of Artificial Sequence: Synthetic oligonucleotide
ggagccacugagaaacgaa

SEQ ID NO: 3009675 - RNA, 19 nt, Artificial Sequence
  Description of Artificial Sequence: Synthetic oligonucleotide
ggaucccagugaauacagc

SEQ ID NO: 3009676 - RNA, 19 nt, Artificial Sequence
  Description of Artificial Sequence: Synthetic oligonucleotide
agaguuggccaggcucagu

SEQ ID NO: 3009677 - RNA, 19 nt, Artificial Sequence
  Description of Artificial Sequence: Synthetic oligonucleotide
caacaugggcuguggggua

SEQ ID NO: 3009678 - RNA, 19 nt, Artificial Sequence
  Description of Artificial Sequence: Synthetic oligonucleotide
ccgugauguucacauccac

SEQ ID NO: 3009679 - RNA, 19 nt, Artificial Sequence
  Description of Artificial Sequence: Synthetic oligonucleotide
cccaagugaggcaauauuu

SEQ ID NO: 3009680 - RNA, 19 nt, Artificial Sequence
  Description of Artificial Sequence: Synthetic oligonucleotide
ggaccgugauguucacauc

SEQ ID NO: 3009681 - RNA, 19 nt, Artificial Sequence
  Description of Artificial Sequence: Synthetic oligonucleotide
ccaggcucagucuggugca

SEQ ID NO: 3009682 - RNA, 19 nt, Artificial Sequence
  Description of Artificial Sequence: Synthetic oligonucleotide
cuggagaacgugccuguau

SEQ ID NO: 3009683 - RNA, 19 nt, Artificial Sequence
  Description of Artificial Sequence: Synthetic oligonucleotide
gcucagucuggugcaaauc

SEQ ID NO: 3009684 - RNA, 19 nt, Artificial Sequence
  Description of Artificial Sequence: Synthetic oligonucleotide
caucccaagugaggcaaua

SEQ ID NO: 3009685 - RNA, 19 nt, Artificial Sequence
  Description of Artificial Sequence: Synthetic oligonucleotide
acaucccaagugaggcaau

SEQ ID NO: 3009686 - RNA, 19 nt, Artificial Sequence
  Description of Artificial Sequence: Synthetic oligonucleotide
gcugugggguaaugggcaa

SEQ ID NO: 3009687 - RNA, 19 nt, Artificial Sequence
  Description of Artificial Sequence: Synthetic oligonucleotide
ccuggcagcucuucacgga

SEQ ID NO: 3009688 - RNA, 19 nt, Artificial Sequence
  Description of Artificial Sequence: Synthetic oligonucleotide
aggcucagucuggugcaaa

SEQ ID NO: 3009689 - RNA, 19 nt, Artificial Sequence
  Description of Artificial Sequence: Synthetic oligonucleotide
acaugggcugugggguaau

SEQ ID NO: 3009690 - RNA, 19 nt, Artificial Sequence
  Description of Artificial Sequence: Synthetic oligonucleotide
ccaucgauuccaucauucu

SEQ ID NO: 3009691 - RNA, 19 nt, Artificial Sequence
  Description of Artificial Sequence: Synthetic oligonucleotide
cgauuccaucauucuggag

SEQ ID NO: 3009692 - RNA, 19 nt, Artificial Sequence
  Description of Artificial Sequence: Synthetic oligonucleotide
cgugauguucacauccacu

SEQ ID NO: 3009693 - RNA, 19 nt, Artificial Sequence
  Description of Artificial Sequence: Synthetic oligonucleotide
ggcucagucuggugcaaau

SEQ ID NO: 3009694 - RNA, 19 nt, Artificial Sequence
  Description of Artificial Sequence: Synthetic oligonucleotide
gcuuugucuggaauuuaau

SEQ ID NO: 3009695 - RNA, 19 nt, Artificial Sequence
  Description of Artificial Sequence: Synthetic oligonucleotide
cagcuuugucuggaauuua

SEQ ID NO: 3009696 - RNA, 19 nt, Artificial Sequence
  Description of Artificial Sequence: Synthetic oligonucleotide
aucggaccacugggcacaa

SEQ ID NO: 3009697 - RNA, 19 nt, Artificial Sequence
  Description of Artificial Sequence: Synthetic oligonucleotide
cacauccacuguggagcca

SEQ ID NO: 3009698 - RNA, 19 nt, Artificial Sequence
  Description of Artificial Sequence: Synthetic oligonucleotide
gggcaaguugcuguucccu

SEQ ID NO: 3009699 - RNA, 19 nt, Artificial Sequence
  Description of Artificial Sequence: Synthetic oligonucleotide
ggaaauguucaaggaccau

SEQ ID NO: 3009700 - RNA, 19 nt, Artificial Sequence
  Description of Artificial Sequence: Synthetic oligonucleotide
ggaccacugggcacaauau

SEQ ID NO: 3009701 - RNA, 19 nt, Artificial Sequence
  Description of Artificial Sequence: Synthetic oligonucleotide
ggguaaugggcaaguugcu

SEQ ID NO: 3009702 - RNA, 19 nt, Artificial Sequence
  Description of Artificial Sequence: Synthetic oligonucleotide
cggaccacugggcacaaua

SEQ ID NO: 3009703 - RNA, 19 nt, Artificial Sequence
  Description of Artificial Sequence: Synthetic oligonucleotide
cacuuggaucccagugaau

SEQ ID NO: 3009704 - RNA, 19 nt, Artificial Sequence
  Description of Artificial Sequence: Synthetic oligonucleotide
auacagccuggcagcucuu

SEQ ID NO: 3009705 - RNA, 19 nt, Artificial Sequence
  Description of Artificial Sequence: Synthetic oligonucleotide
cauccacuguggagccacu

SEQ ID NO: 3009706 - RNA, 19 nt, Artificial Sequence
  Description of Artificial Sequence: Synthetic oligonucleotide
ggggaccgugauguucaca

SEQ ID NO: 3009707 - RNA, 19 nt, Artificial Sequence
  Description of Artificial Sequence: Synthetic oligonucleotide
ucggaccacugggcacaau

SEQ ID NO: 3009708 - RNA, 19 nt, Artificial Sequence
  Description of Artificial Sequence: Synthetic oligonucleotide
caggcucagucuggugcaa

SEQ ID NO: 3009709 - RNA, 19 nt, Artificial Sequence
  Description of Artificial Sequence: Synthetic oligonucleotide
ccacugggcacaauauauu

SEQ ID NO: 3009710 - RNA, 19 nt, Artificial Sequence
  Description of Artificial Sequence: Synthetic oligonucleotide
gcaaauccaaggggaccgu

SEQ ID NO: 3009711 - RNA, 19 nt, Artificial Sequence
  Description of Artificial Sequence: Synthetic oligonucleotide
ccaugugauaagagcgguu

SEQ ID NO: 3009712 - RNA, 19 nt, Artificial Sequence
  Description of Artificial Sequence: Synthetic oligonucleotide
gcaucccugaaaaguugau

SEQ ID NO: 3009713 - RNA, 19 nt, Artificial Sequence
  Description of Artificial Sequence: Synthetic oligonucleotide
gugggguaaugggcaaguu

SEQ ID NO: 3009714 - RNA, 19 nt, Artificial Sequence
  Description of Artificial Sequence: Synthetic oligonucleotide
gcagcucuucacggaaaau

SEQ ID NO: 3009715 - RNA, 19 nt, Artificial Sequence
  Description of Artificial Sequence: Synthetic oligonucleotide
ccaaggggaccgugauguu

SEQ ID NO: 3009716 - RNA, 19 nt, Artificial Sequence
  Description of Artificial Sequence: Synthetic oligonucleotide
acacccuuggucuugaagc

SEQ ID NO: 3009717 - RNA, 19 nt, Artificial Sequence
  Description of Artificial Sequence: Synthetic oligonucleotide
uuuaccauguagcaguccc

SEQ ID NO: 3009718 - RNA, 19 nt, Artificial Sequence
  Description of Artificial Sequence: Synthetic oligonucleotide
aagaggaaugaggagaagg

SEQ ID NO: 3009719 - RNA, 19 nt, Artificial Sequence
  Description of Artificial Sequence: Synthetic oligonucleotide
uuacagagcacgaaccagc

SEQ ID NO: 3009720 - RNA, 19 nt, Artificial Sequence
  Description of Artificial Sequence: Synthetic oligonucleotide
uguguaagcugcaggugcg

SEQ ID NO: 3009721 - RNA, 19 nt, Artificial Sequence
  Description of Artificial Sequence: Synthetic oligonucleotide
aggaaugaggagaaggccc

SEQ ID NO: 3009722 - RNA, 19 nt, Artificial Sequence
  Description of Artificial Sequence: Synthetic oligonucleotide
uggaagaguccccaagagg

SEQ ID NO: 3009723 - RNA, 19 nt, Artificial Sequence
  Description of Artificial Sequence: Synthetic oligonucleotide
ugggguuggucuuacagag

SEQ ID NO: 3009724 - RNA, 19 nt, Artificial Sequence
  Description of Artificial Sequence: Synthetic oligonucleotide
uuugccucugcuuaugccu

SEQ ID NO: 3009725 - RNA, 19 nt, Artificial Sequence
  Description of Artificial Sequence: Synthetic oligonucleotide
cuucucacgagcagggugg

SEQ ID NO: 3009726 - RNA, 19 nt, Artificial Sequence
  Description of Artificial Sequence: Synthetic oligonucleotide
uguagcagucccugcagcg

SEQ ID NO: 3009727 - RNA, 19 nt, Artificial Sequence
  Description of Artificial Sequence: Synthetic oligonucleotide
cagagcacgaaccagcgcc

SEQ ID NO: 3009728 - RNA, 19 nt, Artificial Sequence
  Description of Artificial Sequence: Synthetic oligonucleotide
ucuuacagagcacgaacca

SEQ ID NO: 3009729 - RNA, 19 nt, Artificial Sequence
  Description of Artificial Sequence: Synthetic oligonucleotide
auuugccucugcuuaugcc

SEQ ID NO: 3009730 - RNA, 19 nt, Artificial Sequence
  Description of Artificial Sequence: Synthetic oligonucleotide
aaagggugccacccgcggc

SEQ ID NO: 3009731 - RNA, 19 nt, Artificial Sequence
  Description of Artificial Sequence: Synthetic oligonucleotide
uacagagcacgaaccagcg

SEQ ID NO: 3009732 - RNA, 19 nt, Artificial Sequence
  Description of Artificial Sequence: Synthetic oligonucleotide
uccccaagaggaaugagga

SEQ ID NO: 3009733 - RNA, 19 nt, Artificial Sequence
  Description of Artificial Sequence: Synthetic oligonucleotide
aagggugccacccgcggcg

SEQ ID NO: 3009734 - RNA, 19 nt, Artificial Sequence
  Description of Artificial Sequence: Synthetic oligonucleotide
uuggaagaguccccaagag

SEQ ID NO: 3009735 - RNA, 19 nt, Artificial Sequence
  Description of Artificial Sequence: Synthetic oligonucleotide
guuggucuuacagagcacg

SEQ ID NO: 3009736 - RNA, 19 nt, Artificial Sequence
  Description of Artificial Sequence: Synthetic oligonucleotide
uguaggagcggaugcauga

SEQ ID NO: 3009737 - RNA, 19 nt, Artificial Sequence
  Description of Artificial Sequence: Synthetic oligonucleotide
cuguguaagcugcaggugc

SEQ ID NO: 3009738 - RNA, 19 nt, Artificial Sequence
  Description of Artificial Sequence: Synthetic oligonucleotide
ucuugaagcccuguguaag

SEQ ID NO: 3009739 - RNA, 19 nt, Artificial Sequence
  Description of Artificial Sequence: Synthetic oligonucleotide
uuccugaggacacccuugg

SEQ ID NO: 3009740 - RNA, 19 nt, Artificial Sequence
  Description of Artificial Sequence: Synthetic oligonucleotide
aagugagcgcgccucugcg

SEQ ID NO: 3009741 - RNA, 19 nt, Artificial Sequence
  Description of Artificial Sequence: Synthetic oligonucleotide
aaugaggagaaggcccggg

SEQ ID NO: 3009742 - RNA, 19 nt, Artificial Sequence
  Description of Artificial Sequence: Synthetic oligonucleotide
agcgaagccaccgugcuuc

SEQ ID NO: 3009743 - RNA, 19 nt, Artificial Sequence
  Description of Artificial Sequence: Synthetic oligonucleotide
auguagcagucccugcagc

SEQ ID NO: 3009744 - RNA, 19 nt, Artificial Sequence
  Description of Artificial Sequence: Synthetic oligonucleotide
ugcaugagcgaagccaccg

SEQ ID NO: 3009745 - RNA, 19 nt, Artificial Sequence
  Description of Artificial Sequence: Synthetic oligonucleotide
ugaggagaaggcccggggc

SEQ ID NO: 3009746 - RNA, 19 nt, Artificial Sequence
  Description of Artificial Sequence: Synthetic oligonucleotide
gaugcaugagcgaagccac

SEQ ID NO: 3009747 - RNA, 19 nt, Artificial Sequence
  Description of Artificial Sequence: Synthetic oligonucleotide
cuugaagcccuguguaagc

SEQ ID NO: 3009748 - RNA, 19 nt, Artificial Sequence
  Description of Artificial Sequence: Synthetic oligonucleotide
gaaagggugccacccgcgg

SEQ ID NO: 3009749 - RNA, 19 nt, Artificial Sequence
  Description of Artificial Sequence: Synthetic oligonucleotide
agagaagugagcgcgccuc

SEQ ID NO: 3009750 - RNA, 19 nt, Artificial Sequence
  Description of Artificial Sequence: Synthetic oligonucleotide
aaggcccggggccucaccg

SEQ ID NO: 3009751 - RNA, 19 nt, Artificial Sequence
  Description of Artificial Sequence: Synthetic oligonucleotide
uuaugccugggguuggucu

SEQ ID NO: 3009752 - RNA, 19 nt, Artificial Sequence
  Description of Artificial Sequence: Synthetic oligonucleotide
uggucuugaagcccugugu

SEQ ID NO: 3009753 - RNA, 19 nt, Artificial Sequence
  Description of Artificial Sequence: Synthetic oligonucleotide
uuggucuugaagcccugug

SEQ ID NO: 3009754 - RNA, 19 nt, Artificial Sequence
  Description of Artificial Sequence: Synthetic oligonucleotide
accauguagcagucccugc

SEQ ID NO: 3009755 - RNA, 19 nt, Artificial Sequence
  Description of Artificial Sequence: Synthetic oligonucleotide
augaggagaaggcccgggg

SEQ ID NO: 3009756 - RNA, 19 nt, Artificial Sequence
  Description of Artificial Sequence: Synthetic oligonucleotide
gaagcccuguguaagcugc

SEQ ID NO: 3009757 - RNA, 19 nt, Artificial Sequence
  Description of Artificial Sequence: Synthetic oligonucleotide
ucugcgcagggucuggcgc

SEQ ID NO: 3009758 - RNA, 19 nt, Artificial Sequence
  Description of Artificial Sequence: Synthetic oligonucleotide
ucuggcgcuuggaagaguc

SEQ ID NO: 3009759 - RNA, 19 nt, Artificial Sequence
  Description of Artificial Sequence: Synthetic oligonucleotide
cuuacagagcacgaaccag

SEQ ID NO: 3009760 - RNA, 19 nt, Artificial Sequence
  Description of Artificial Sequence: Synthetic oligonucleotide
gacacccuuggucuugaag

SEQ ID NO: 3009761 - RNA, 19 nt, Artificial Sequence
  Description of Artificial Sequence: Synthetic oligonucleotide
gaagccaccgugcuucuca

SEQ ID NO: 3009762 - RNA, 19 nt, Artificial Sequence
  Description of Artificial Sequence: Synthetic oligonucleotide
ugggaaagggugccacccg

SEQ ID NO: 3009763 - RNA, 19 nt, Artificial Sequence
  Description of Artificial Sequence: Synthetic oligonucleotide
acagagcacgaaccagcgc

SEQ ID NO: 3009764 - RNA, 19 nt, Artificial Sequence
  Description of Artificial Sequence: Synthetic oligonucleotide
agugagcgcgccucugcgc

SEQ ID NO: 3009765 - RNA, 19 nt, Artificial Sequence
  Description of Artificial Sequence: Synthetic oligonucleotide
cucuuuaccauguagcagu

SEQ ID NO: 3009766 - RNA, 19 nt, Artificial Sequence
  Description of Artificial Sequence: Synthetic oligonucleotide
ugagcgaagccaccgugcu

SEQ ID NO: 3009767 - RNA, 19 nt, Artificial Sequence
  Description of Artificial Sequence: Synthetic oligonucleotide
ggaagaguccccaagagga

SEQ ID NO: 3009768 - RNA, 19 nt, Artificial Sequence
  Description of Artificial Sequence: Synthetic oligonucleotide
aagccaccgugcuucucac

SEQ ID NO: 3009769 - RNA, 19 nt, Artificial Sequence
  Description of Artificial Sequence: Synthetic oligonucleotide
gcuaccggaagcuuccgcg

SEQ ID NO: 3009770 - RNA, 19 nt, Artificial Sequence
  Description of Artificial Sequence: Synthetic oligonucleotide
guccccaagaggaaugagg

SEQ ID NO: 3009771 - RNA, 19 nt, Artificial Sequence
  Description of Artificial Sequence: Synthetic oligonucleotide
ucugcuuaugccugggguu

SEQ ID NO: 3009772 - RNA, 19 nt, Artificial Sequence
  Description of Artificial Sequence: Synthetic oligonucleotide
aggagcggaugcaugagcg

SEQ ID NO: 3009773 - RNA, 19 nt, Artificial Sequence
  Description of Artificial Sequence: Synthetic oligonucleotide
gaagugagcgcgccucugc

SEQ ID NO: 3009774 - RNA, 19 nt, Artificial Sequence
  Description of Artificial Sequence: Synthetic oligonucleotide
gucuuacagagcacgaacc

SEQ ID NO: 3009775 - RNA, 19 nt, Artificial Sequence
  Description of Artificial Sequence: Synthetic oligonucleotide
cauguagcagucccugcag

SEQ ID NO: 3009776 - RNA, 19 nt, Artificial Sequence
  Description of Artificial Sequence: Synthetic oligonucleotide
augagcgaagccaccgugc

SEQ ID NO: 3009777 - RNA, 19 nt, Artificial Sequence
  Description of Artificial Sequence: Synthetic oligonucleotide
uuggucuuacagagcacga

SEQ ID NO: 3009778 - RNA, 19 nt, Artificial Sequence
  Description of Artificial Sequence: Synthetic oligonucleotide
ucagguguaggagcggaug

SEQ ID NO: 3009779 - RNA, 19 nt, Artificial Sequence
  Description of Artificial Sequence: Synthetic oligonucleotide
uaggagcggaugcaugagc

SEQ ID NO: 3009780 - RNA, 19 nt, Artificial Sequence
  Description of Artificial Sequence: Synthetic oligonucleotide
uuaccauguagcagucccu

SEQ ID NO: 3009781 - RNA, 19 nt, Artificial Sequence
  Description of Artificial Sequence: Synthetic oligonucleotide
cagaccugggaaagggugc

SEQ ID NO: 3009782 - RNA, 19 nt, Artificial Sequence
  Description of Artificial Sequence: Synthetic oligonucleotide
ugaagcccuguguaagcug

SEQ ID NO: 3009783 - RNA, 19 nt, Artificial Sequence
  Description of Artificial Sequence: Synthetic oligonucleotide
agggucuggcgcuuggaag

SEQ ID NO: 3009784 - RNA, 19 nt, Artificial Sequence
  Description of Artificial Sequence: Synthetic oligonucleotide
cuuggaagaguccccaaga

SEQ ID NO: 3009785 - RNA, 19 nt, Artificial Sequence
  Description of Artificial Sequence: Synthetic oligonucleotide
ucaggcgccggcuaccgga

SEQ ID NO: 3009786 - RNA, 19 nt, Artificial Sequence
  Description of Artificial Sequence: Synthetic oligonucleotide
ggaaugaggagaaggcccg

SEQ ID NO: 3009787 - RNA, 19 nt, Artificial Sequence
  Description of Artificial Sequence: Synthetic oligonucleotide
ugcaggugcggcacggggc

SEQ ID NO: 3009788 - RNA, 19 nt, Artificial Sequence
  Description of Artificial Sequence: Synthetic oligonucleotide
ucuuuaccauguagcaguc

SEQ ID NO: 3009789 - RNA, 19 nt, Artificial Sequence
  Description of Artificial Sequence: Synthetic oligonucleotide
uaccauguagcagucccug

SEQ ID NO: 3009790 - RNA, 19 nt, Artificial Sequence
  Description of Artificial Sequence: Synthetic oligonucleotide
cacccuuggucuugaagcc

SEQ ID NO: 3009791 - RNA, 19 nt, Artificial Sequence
  Description of Artificial Sequence: Synthetic oligonucleotide
cuuccugaggacacccuug

SEQ ID NO: 3009792 - RNA, 19 nt, Artificial Sequence
  Description of Artificial Sequence: Synthetic oligonucleotide
cagguguaggagcggaugc

SEQ ID NO: 3009793 - RNA, 19 nt, Artificial Sequence
  Description of Artificial Sequence: Synthetic oligonucleotide
ggucuuacagagcacgaac

SEQ ID NO: 3009794 - RNA, 19 nt, Artificial Sequence
  Description of Artificial Sequence: Synthetic oligonucleotide
agcuagugcccacgcggcc

SEQ ID NO: 3009795 - RNA, 19 nt, Artificial Sequence
  Description of Artificial Sequence: Synthetic oligonucleotide
uaagcugcaggugcggcac

SEQ ID NO: 3009796 - RNA, 19 nt, Artificial Sequence
  Description of Artificial Sequence: Synthetic oligonucleotide
cauuugccucugcuuaugc

SEQ ID NO: 3009797 - RNA, 19 nt, Artificial Sequence
  Description of Artificial Sequence: Synthetic oligonucleotide
uacauuugccucugcuuau

SEQ ID NO: 3009798 - RNA, 19 nt, Artificial Sequence
  Description of Artificial Sequence: Synthetic oligonucleotide
caugcugaggccagaccug

SEQ ID NO: 3009799 - RNA, 19 nt, Artificial Sequence
  Description of Artificial Sequence: Synthetic oligonucleotide
acgccucuuuaccauguag

SEQ ID NO: 3009800 - RNA, 19 nt, Artificial Sequence
  Description of Artificial Sequence: Synthetic oligonucleotide
agagcacgaaccagcgccc

SEQ ID NO: 3009801 - RNA, 19 nt, Artificial Sequence
  Description of Artificial Sequence: Synthetic oligonucleotide
uguaagcugcaggugcggc

SEQ ID NO: 3009802 - RNA, 19 nt, Artificial Sequence
  Description of Artificial Sequence: Synthetic oligonucleotide
cugggaaagggugccaccc

SEQ ID NO: 3009803 - RNA, 19 nt, Artificial Sequence
  Description of Artificial Sequence: Synthetic oligonucleotide
caugagcgaagccaccgug

SEQ ID NO: 3009804 - RNA, 19 nt, Artificial Sequence
  Description of Artificial Sequence: Synthetic oligonucleotide
gaggccagaccugggaaag

SEQ ID NO: 3009805 - RNA, 19 nt, Artificial Sequence
  Description of Artificial Sequence: Synthetic oligonucleotide
uggcgcuuggaagaguccc

SEQ ID NO: 3009806 - RNA, 19 nt, Artificial Sequence
  Description of Artificial Sequence: Synthetic oligonucleotide
ggguuggucuuacagagca

SEQ ID NO: 3009807 - RNA, 19 nt, Artificial Sequence
  Description of Artificial Sequence: Synthetic oligonucleotide
aagaguccccaagaggaau

SEQ ID NO: 3009808 - RNA, 19 nt, Artificial Sequence
  Description of Artificial Sequence: Synthetic oligonucleotide
uagcagucccugcagcgcu

SEQ ID NO: 3009809 - RNA, 19 nt, Artificial Sequence
  Description of Artificial Sequence: Synthetic oligonucleotide
uugaagcccuguguaagcu

SEQ ID NO: 3009810 - RNA, 19 nt, Artificial Sequence
  Description of Artificial Sequence: Synthetic oligonucleotide
acccuuggucuugaagccc

SEQ ID NO: 3009811 - RNA, 19 nt, Artificial Sequence
  Description of Artificial Sequence: Synthetic oligonucleotide
ugaggccagaccugggaaa

SEQ ID NO: 3009812 - RNA, 19 nt, Artificial Sequence
  Description of Artificial Sequence: Synthetic oligonucleotide
agcgcccacgccucuuuac

SEQ ID NO: 3009813 - RNA, 19 nt, Artificial Sequence
  Description of Artificial Sequence: Synthetic oligonucleotide
gaaugaggagaaggcccgg

SEQ ID NO: 3009814 - RNA, 19 nt, Artificial Sequence
  Description of Artificial Sequence: Synthetic oligonucleotide
agcacgaaccagcgcccac

SEQ ID NO: 3009815 - RNA, 19 nt, Artificial Sequence
  Description of Artificial Sequence: Synthetic oligonucleotide
ggaugcaugagcgaagcca

SEQ ID NO: 3009816 - RNA, 19 nt, Artificial Sequence
  Description of Artificial Sequence: Synthetic oligonucleotide
acccgcggcgagcuagugc

SEQ ID NO: 3009817 - RNA, 19 nt, Artificial Sequence
  Description of Artificial Sequence: Synthetic oligonucleotide
caccgugcuucucacgagc

SEQ ID NO: 3009818 - RNA, 19 nt, Artificial Sequence
  Description of Artificial Sequence: Synthetic oligonucleotide
ggccccagagaagugagcg

SEQ ID NO: 3009819 - RNA, 19 nt, Artificial Sequence
  Description of Artificial Sequence: Synthetic oligonucleotide
ugcccacgcggccucaggc

SEQ ID NO: 3009820 - RNA, 19 nt, Artificial Sequence
  Description of Artificial Sequence: Synthetic oligonucleotide
augcugaggccagaccugg

SEQ ID NO: 3009821 - RNA, 19 nt, Artificial Sequence
  Description of Artificial Sequence: Synthetic oligonucleotide
ugccucugcuuaugccugg

SEQ ID NO: 3009822 - RNA, 19 nt, Artificial Sequence
  Description of Artificial Sequence: Synthetic oligonucleotide
cugcuuaugccugggguug

SEQ ID NO: 3009823 - RNA, 19 nt, Artificial Sequence
  Description of Artificial Sequence: Synthetic oligonucleotide
uaugccugggguuggucuu

SEQ ID NO: 3009824 - RNA, 19 nt, Artificial Sequence
  Description of Artificial Sequence: Synthetic oligonucleotide
ggaagcuuccgcgucugcg

SEQ ID NO: 3009825 - RNA, 19 nt, Artificial Sequence
  Description of Artificial Sequence: Synthetic oligonucleotide
guaagcugcaggugcggca

SEQ ID NO: 3009826 - RNA, 19 nt, Artificial Sequence
  Description of Artificial Sequence: Synthetic oligonucleotide
gcuucucacgagcagggug

SEQ ID NO: 3009827 - RNA, 19 nt, Artificial Sequence
  Description of Artificial Sequence: Synthetic oligonucleotide
ugcugaggccagaccuggg

SEQ ID NO: 3009828 - RNA, 19 nt, Artificial Sequence
  Description of Artificial Sequence: Synthetic oligonucleotide
gagcaggguggccaugcug

SEQ ID NO: 3009829 - RNA, 19 nt, Artificial Sequence
  Description of Artificial Sequence: Synthetic oligonucleotide
agaguccccaagaggaaug

SEQ ID NO: 3009830 - RNA, 19 nt, Artificial Sequence
  Description of Artificial Sequence: Synthetic oligonucleotide
cuuuaccauguagcagucc

SEQ ID NO: 3009831 - RNA, 19 nt, Artificial Sequence
  Description of Artificial Sequence: Synthetic oligonucleotide
acgaaccagcgcccacgcc

SEQ ID NO: 3009832 - RNA, 19 nt, Artificial Sequence
  Description of Artificial Sequence: Synthetic oligonucleotide
acauuugccucugcuuaug

SEQ ID NO: 3009833 - RNA, 19 nt, Artificial Sequence
  Description of Artificial Sequence: Synthetic oligonucleotide
guagcagucccugcagcgc

SEQ ID NO: 3009834 - RNA, 19 nt, Artificial Sequence
  Description of Artificial Sequence: Synthetic oligonucleotide
uggucuuacagagcacgaa

SEQ ID NO: 3009835 - RNA, 19 nt, Artificial Sequence
  Description of Artificial Sequence: Synthetic oligonucleotide
agcgcuuccugaggacacc

SEQ ID NO: 3009836 - RNA, 19 nt, Artificial Sequence
  Description of Artificial Sequence: Synthetic oligonucleotide
ccugggguuggucuuacag

SEQ ID NO: 3009837 - RNA, 19 nt, Artificial Sequence
  Description of Artificial Sequence: Synthetic oligonucleotide
cucugcgcagggucuggcg

SEQ ID NO: 3009838 - RNA, 19 nt, Artificial Sequence
  Description of Artificial Sequence: Synthetic oligonucleotide
agcggcucagguguaggag

SEQ ID NO: 3009839 - RNA, 19 nt, Artificial Sequence
  Description of Artificial Sequence: Synthetic oligonucleotide
cgagcuagugcccacgcgg

SEQ ID NO: 3009840 - RNA, 19 nt, Artificial Sequence
  Description of Artificial Sequence: Synthetic oligonucleotide
cugcaggugcggcacgggg

SEQ ID NO: 3009841 - RNA, 19 nt, Artificial Sequence
  Description of Artificial Sequence: Synthetic oligonucleotide
guaggagcggaugcaugag

SEQ ID NO: 3009842 - RNA, 19 nt, Artificial Sequence
  Description of Artificial Sequence: Synthetic oligonucleotide
gagcuagugcccacgcggc

SEQ ID NO: 3009843 - RNA, 19 nt, Artificial Sequence
  Description of Artificial Sequence: Synthetic oligonucleotide
gcaggugcggcacggggcg

SEQ ID NO: 3009844 - RNA, 19 nt, Artificial Sequence
  Description of Artificial Sequence: Synthetic oligonucleotide
ccagaccugggaaagggug

SEQ ID NO: 3009845 - RNA, 19 nt, Artificial Sequence
  Description of Artificial Sequence: Synthetic oligonucleotide
cccgcggcgagcuagugcc

SEQ ID NO: 3009846 - RNA, 19 nt, Artificial Sequence
  Description of Artificial Sequence: Synthetic oligonucleotide
augcaugagcgaagccacc

SEQ ID NO: 3009847 - RNA, 19 nt, Artificial Sequence
  Description of Artificial Sequence: Synthetic oligonucleotide
uaccggaagcuuccgcguc

SEQ ID NO: 3009848 - RNA, 19 nt, Artificial Sequence
  Description of Artificial Sequence: Synthetic oligonucleotide
cacgaaccagcgcccacgc

SEQ ID NO: 3009849 - RNA, 19 nt, Artificial Sequence
  Description of Artificial Sequence: Synthetic oligonucleotide
gccucuuuaccauguagca

SEQ ID NO: 3009850 - RNA, 19 nt, Artificial Sequence
  Description of Artificial Sequence: Synthetic oligonucleotide
accggaagcuuccgcgucu

SEQ ID NO: 3009851 - RNA, 19 nt, Artificial Sequence
  Description of Artificial Sequence: Synthetic oligonucleotide
guguaagcugcaggugcgg

SEQ ID NO: 3009852 - RNA, 19 nt, Artificial Sequence
  Description of Artificial Sequence: Synthetic oligonucleotide
aggcccggggccucaccgc

SEQ ID NO: 3009853 - RNA, 19 nt, Artificial Sequence
  Description of Artificial Sequence: Synthetic oligonucleotide
gaggacacccuuggucuug

SEQ ID NO: 3009854 - RNA, 19 nt, Artificial Sequence
  Description of Artificial Sequence: Synthetic oligonucleotide
gucuugaagcccuguguaa

SEQ ID NO: 3009855 - RNA, 19 nt, Artificial Sequence
  Description of Artificial Sequence: Synthetic oligonucleotide
gggucuggcgcuuggaaga

SEQ ID NO: 3009856 - RNA, 19 nt, Artificial Sequence
  Description of Artificial Sequence: Synthetic oligonucleotide
cgccucuuuaccauguagc

SEQ ID NO: 3009857 - RNA, 19 nt, Artificial Sequence
  Description of Artificial Sequence: Synthetic oligonucleotide
gugagcgcgccucugcgca

SEQ ID NO: 3009858 - RNA, 19 nt, Artificial Sequence
  Description of Artificial Sequence: Synthetic oligonucleotide
gggaaagggugccacccgc

SEQ ID NO: 3009859 - RNA, 19 nt, Artificial Sequence
  Description of Artificial Sequence: Synthetic oligonucleotide
ugcagcgcuuccugaggac

SEQ ID NO: 3009860 - RNA, 19 nt, Artificial Sequence
  Description of Artificial Sequence: Synthetic oligonucleotide
ggccagaccugggaaaggg

SEQ ID NO: 3009861 - RNA, 19 nt, Artificial Sequence
  Description of Artificial Sequence: Synthetic oligonucleotide
ccccagagaagugagcgcg

SEQ ID NO: 3009862 - RNA, 19 nt, Artificial Sequence
  Description of Artificial Sequence: Synthetic oligonucleotide
gucccugcagcgcuuccug

SEQ ID NO: 3009863 - RNA, 19 nt, Artificial Sequence
  Description of Artificial Sequence: Synthetic oligonucleotide
cagcgcuuccugaggacac

SEQ ID NO: 3009864 - RNA, 19 nt, Artificial Sequence
  Description of Artificial Sequence: Synthetic oligonucleotide
cuggcgcuuggaagagucc

SEQ ID NO: 3009865 - RNA, 19 nt, Artificial Sequence
  Description of Artificial Sequence: Synthetic oligonucleotide
ugcggcacggggcggcccc

SEQ ID NO: 3009866 - RNA, 19 nt, Artificial Sequence
  Description of Artificial Sequence: Synthetic oligonucleotide
gagcggaugcaugagcgaa

SEQ ID NO: 3009867 - RNA, 19 nt, Artificial Sequence
  Description of Artificial Sequence: Synthetic oligonucleotide
ggaaagggugccacccgcg

SEQ ID NO: 3009868 - RNA, 19 nt, Artificial Sequence
  Description of Artificial Sequence: Synthetic oligonucleotide
agaagugagcgcgccucug

SEQ ID NO: 3009869 - RNA, 19 nt, Artificial Sequence
  Description of Artificial Sequence: Synthetic oligonucleotide
agcggaugcaugagcgaag

SEQ ID NO: 3009870 - RNA, 19 nt, Artificial Sequence
  Description of Artificial Sequence: Synthetic oligonucleotide
agguguaggagcggaugca

SEQ ID NO: 3009871 - RNA, 19 nt, Artificial Sequence
  Description of Artificial Sequence: Synthetic oligonucleotide
agccaccgugcuucucacg

SEQ ID NO: 3009872 - RNA, 19 nt, Artificial Sequence
  Description of Artificial Sequence: Synthetic oligonucleotide
gaagaguccccaagaggaa

SEQ ID NO: 3009873 - RNA, 19 nt, Artificial Sequence
  Description of Artificial Sequence: Synthetic oligonucleotide
gcggcucagguguaggagc

SEQ ID NO: 3009874 - RNA, 19 nt, Artificial Sequence
  Description of Artificial Sequence: Synthetic oligonucleotide
aguccccaagaggaaugag

SEQ ID NO: 3009875 - RNA, 19 nt, Artificial Sequence
  Description of Artificial Sequence: Synthetic oligonucleotide
gcccuguguaagcugcagg

SEQ ID NO: 3009876 - RNA, 19 nt, Artificial Sequence
  Description of Artificial Sequence: Synthetic oligonucleotide
uucucacgagcaggguggc

SEQ ID NO: 3009877 - RNA, 19 nt, Artificial Sequence
  Description of Artificial Sequence: Synthetic oligonucleotide
ugaggacacccuuggucuu

SEQ ID NO: 3009878 - RNA, 19 nt, Artificial Sequence
  Description of Artificial Sequence: Synthetic oligonucleotide
cucaccgcgaagcggcuca

SEQ ID NO: 3009879 - RNA, 19 nt, Artificial Sequence
  Description of Artificial Sequence: Synthetic oligonucleotide
ugagcgcgccucugcgcag

SEQ ID NO: 3009880 - RNA, 19 nt, Artificial Sequence
  Description of Artificial Sequence: Synthetic oligonucleotide
guguaggagcggaugcaug

SEQ ID NO: 3009881 - RNA, 19 nt, Artificial Sequence
  Description of Artificial Sequence: Synthetic oligonucleotide
aggugcggcacggggcggc

SEQ ID NO: 3009882 - RNA, 19 nt, Artificial Sequence
  Description of Artificial Sequence: Synthetic oligonucleotide
ccucuuuaccauguagcag

SEQ ID NO: 3009883 - RNA, 19 nt, Artificial Sequence
  Description of Artificial Sequence: Synthetic oligonucleotide
agcccuguguaagcugcag

SEQ ID NO: 3009884 - RNA, 19 nt, Artificial Sequence
  Description of Artificial Sequence: Synthetic oligonucleotide
guggccaugcugaggccag

SEQ ID NO: 3009885 - RNA, 19 nt, Artificial Sequence
  Description of Artificial Sequence: Synthetic oligonucleotide
gaguccccaagaggaauga

SEQ ID NO: 3009886 - RNA, 19 nt, Artificial Sequence
  Description of Artificial Sequence: Synthetic oligonucleotide
gcacgaaccagcgcccacg

SEQ ID NO: 3009887 - RNA, 19 nt, Artificial Sequence
  Description of Artificial Sequence: Synthetic oligonucleotide
ucacgagcaggguggccau

SEQ ID NO: 3009888 - RNA, 19 nt, Artificial Sequence
  Description of Artificial Sequence: Synthetic oligonucleotide
gaaccagcgcccacgccuc

SEQ ID NO: 3009889 - RNA, 19 nt, Artificial Sequence
  Description of Artificial Sequence: Synthetic oligonucleotide
cucugcuuaugccuggggu

SEQ ID NO: 3009890 - RNA, 19 nt, Artificial Sequence
  Description of Artificial Sequence: Synthetic oligonucleotide
cgugcuucucacgagcagg

SEQ ID NO: 3009891 - RNA, 19 nt, Artificial Sequence
  Description of Artificial Sequence: Synthetic oligonucleotide
ccggcuaccggaagcuucc

SEQ ID NO: 3009892 - RNA, 19 nt, Artificial Sequence
  Description of Artificial Sequence: Synthetic oligonucleotide
ggccucaccgcgaagcggc

SEQ ID NO: 3009893 - RNA, 19 nt, Artificial Sequence
  Description of Artificial Sequence: Synthetic oligonucleotide
ucccugcagcgcuuccuga

SEQ ID NO: 3009894 - RNA, 19 nt, Artificial Sequence
  Description of Artificial Sequence: Synthetic oligonucleotide
cuagugcccacgcggccuc

SEQ ID NO: 3009895 - RNA, 19 nt, Artificial Sequence
  Description of Artificial Sequence: Synthetic oligonucleotide
ccugcagcgcuuccugagg

SEQ ID NO: 3009896 - RNA, 19 nt, Artificial Sequence
  Description of Artificial Sequence: Synthetic oligonucleotide
cuuaugccugggguugguc

SEQ ID NO: 3009897 - RNA, 19 nt, Artificial Sequence
  Description of Artificial Sequence: Synthetic oligonucleotide
aggccagaccugggaaagg

SEQ ID NO: 3009898 - RNA, 19 nt, Artificial Sequence
  Description of Artificial Sequence: Synthetic oligonucleotide
ggggccucaccgcgaagcg

SEQ ID NO: 3009899 - RNA, 19 nt, Artificial Sequence
  Description of Artificial Sequence: Synthetic oligonucleotide
caggguggccaugcugagg

SEQ ID NO: 3009900 - RNA, 19 nt, Artificial Sequence
  Description of Artificial Sequence: Synthetic oligonucleotide
gagcgcgccucugcgcagg

SEQ ID NO: 3009901 - RNA, 19 nt, Artificial Sequence
  Description of Artificial Sequence: Synthetic oligonucleotide
gaaggcccggggccucacc

SEQ ID NO: 3009902 - RNA, 19 nt, Artificial Sequence
  Description of Artificial Sequence: Synthetic oligonucleotide
ucucacgagcaggguggcc

SEQ ID NO: 3009903 - RNA, 19 nt, Artificial Sequence
  Description of Artificial Sequence: Synthetic oligonucleotide
cugaggccagaccugggaa

SEQ ID NO: 3009904 - RNA, 19 nt, Artificial Sequence
  Description of Artificial Sequence: Synthetic oligonucleotide
ugcuucucacgagcagggu

SEQ ID NO: 3009905 - RNA, 19 nt, Artificial Sequence
  Description of Artificial Sequence: Synthetic oligonucleotide
gcugaggccagaccuggga

SEQ ID NO: 3009906 - RNA, 19 nt, Artificial Sequence
  Description of Artificial Sequence: Synthetic oligonucleotide
gagaagugagcgcgccucu

SEQ ID NO: 3009907 - RNA, 19 nt, Artificial Sequence
  Description of Artificial Sequence: Synthetic oligonucleotide
gcggaugcaugagcgaagc

SEQ ID NO: 3009908 - RNA, 19 nt, Artificial Sequence
  Description of Artificial Sequence: Synthetic oligonucleotide
cugcagcgcuuccugagga

SEQ ID NO: 3009909 - RNA, 19 nt, Artificial Sequence
  Description of Artificial Sequence: Synthetic oligonucleotide
ccauguagcagucccugca

SEQ ID NO: 3009910 - RNA, 19 nt, Artificial Sequence
  Description of Artificial Sequence: Synthetic oligonucleotide
accgugcuucucacgagca

SEQ ID NO: 3009911 - RNA, 19 nt, Artificial Sequence
  Description of Artificial Sequence: Synthetic oligonucleotide
aaccagcgcccacgccucu

SEQ ID NO: 3009912 - RNA, 19 nt, Artificial Sequence
  Description of Artificial Sequence: Synthetic oligonucleotide
ccugggaaagggugccacc

SEQ ID NO: 3009913 - RNA, 19 nt, Artificial Sequence
  Description of Artificial Sequence: Synthetic oligonucleotide
aagcccuguguaagcugca

SEQ ID NO: 3009914 - RNA, 19 nt, Artificial Sequence
  Description of Artificial Sequence: Synthetic oligonucleotide
gcgagcuagugcccacgcg

SEQ ID NO: 3009915 - RNA, 19 nt, Artificial Sequence
  Description of Artificial Sequence: Synthetic oligonucleotide
ggcgccggcuaccggaagc

SEQ ID NO: 3009916 - RNA, 19 nt, Artificial Sequence
  Description of Artificial Sequence: Synthetic oligonucleotide
gcccacgcggccucaggcg

SEQ ID NO: 3009917 - RNA, 19 nt, Artificial Sequence
  Description of Artificial Sequence: Synthetic oligonucleotide
agcgcgccucugcgcaggg

SEQ ID NO: 3009918 - RNA, 19 nt, Artificial Sequence
  Description of Artificial Sequence: Synthetic oligonucleotide
ggcgagcuagugcccacgc

SEQ ID NO: 3009919 - RNA, 19 nt, Artificial Sequence
  Description of Artificial Sequence: Synthetic oligonucleotide
gugcccacgcggccucagg

SEQ ID NO: 3009920 - RNA, 19 nt, Artificial Sequence
  Description of Artificial Sequence: Synthetic oligonucleotide
agaaggcccggggccucac

SEQ ID NO: 3009921 - RNA, 19 nt, Artificial Sequence
  Description of Artificial Sequence: Synthetic oligonucleotide
gcgcccacgccucuuuacc

SEQ ID NO: 3009922 - RNA, 19 nt, Artificial Sequence
  Description of Artificial Sequence: Synthetic oligonucleotide
ccagagaagugagcgcgcc

SEQ ID NO: 3009923 - RNA, 19 nt, Artificial Sequence
  Description of Artificial Sequence: Synthetic oligonucleotide
ggcuaccggaagcuuccgc

SEQ ID NO: 3009924 - RNA, 19 nt, Artificial Sequence
  Description of Artificial Sequence: Synthetic oligonucleotide
cucaggcgccggcuaccgg

SEQ ID NO: 3009925 - RNA, 19 nt, Artificial Sequence
  Description of Artificial Sequence: Synthetic oligonucleotide
aggacacccuuggucuuga

SEQ ID NO: 3009926 - RNA, 19 nt, Artificial Sequence
  Description of Artificial Sequence: Synthetic oligonucleotide
ccccaagaggaaugaggag

SEQ ID NO: 3009927 - RNA, 19 nt, Artificial Sequence
  Description of Artificial Sequence: Synthetic oligonucleotide
cccugcagcgcuuccugag

SEQ ID NO: 3009928 - RNA, 19 nt, Artificial Sequence
  Description of Artificial Sequence: Synthetic oligonucleotide
ggagcggaugcaugagcga

SEQ ID NO: 3009929 - RNA, 19 nt, Artificial Sequence
  Description of Artificial Sequence: Synthetic oligonucleotide
ggcccggggccucaccgcg

SEQ ID NO: 3009930 - RNA, 19 nt, Artificial Sequence
  Description of Artificial Sequence: Synthetic oligonucleotide
cggcucagguguaggagcg

SEQ ID NO: 3009931 - RNA, 19 nt, Artificial Sequence
  Description of Artificial Sequence: Synthetic oligonucleotide
ggucuggcgcuuggaagag

SEQ ID NO: 3009932 - RNA, 19 nt, Artificial Sequence
  Description of Artificial Sequence: Synthetic oligonucleotide
cuaccggaagcuuccgcgu

SEQ ID NO: 3009933 - RNA, 19 nt, Artificial Sequence
  Description of Artificial Sequence: Synthetic oligonucleotide
ucaccgcgaagcggcucag

SEQ ID NO: 3009934 - RNA, 19 nt, Artificial Sequence
  Description of Artificial Sequence: Synthetic oligonucleotide
ggcgcuuggaagagucccc

SEQ ID NO: 3009935 - RNA, 19 nt, Artificial Sequence
  Description of Artificial Sequence: Synthetic oligonucleotide
ccuguguaagcugcaggug

SEQ ID NO: 3009936 - RNA, 19 nt, Artificial Sequence
  Description of Artificial Sequence: Synthetic oligonucleotide
cccagagaagugagcgcgc

SEQ ID NO: 3009937 - RNA, 19 nt, Artificial Sequence
  Description of Artificial Sequence: Synthetic oligonucleotide
gccccagagaagugagcgc

SEQ ID NO: 3009938 - RNA, 19 nt, Artificial Sequence
  Description of Artificial Sequence: Synthetic oligonucleotide
ccaugcugaggccagaccu

SEQ ID NO: 3009939 - RNA, 19 nt, Artificial Sequence
  Description of Artificial Sequence: Synthetic oligonucleotide
cagggucuggcgcuuggaa

SEQ ID NO: 3009940 - RNA, 19 nt, Artificial Sequence
  Description of Artificial Sequence: Synthetic oligonucleotide
ccucugcuuaugccugggg

SEQ ID NO: 3009941 - RNA, 19 nt, Artificial Sequence
  Description of Artificial Sequence: Synthetic oligonucleotide
cacgcggccucaggcgccg

SEQ ID NO: 3009942 - RNA, 19 nt, Artificial Sequence
  Description of Artificial Sequence: Synthetic oligonucleotide
gagcacgaaccagcgccca

SEQ ID NO: 3009943 - RNA, 19 nt, Artificial Sequence
  Description of Artificial Sequence: Synthetic oligonucleotide
gcacggggcggccccagag

SEQ ID NO: 3009944 - RNA, 19 nt, Artificial Sequence
  Description of Artificial Sequence: Synthetic oligonucleotide
gguuggucuuacagagcac

SEQ ID NO: 3009945 - RNA, 19 nt, Artificial Sequence
  Description of Artificial Sequence: Synthetic oligonucleotide
gggguuggucuuacagagc

SEQ ID NO: 3009946 - RNA, 19 nt, Artificial Sequence
  Description of Artificial Sequence: Synthetic oligonucleotide
cccacgcggccucaggcgc

SEQ ID NO: 3009947 - RNA, 19 nt, Artificial Sequence
  Description of Artificial Sequence: Synthetic oligonucleotide
ggcucagguguaggagcgg

SEQ ID NO: 3009948 - RNA, 19 nt, Artificial Sequence
  Description of Artificial Sequence: Synthetic oligonucleotide
cccuguguaagcugcaggu

SEQ ID NO: 3009949 - RNA, 19 nt, Artificial Sequence
  Description of Artificial Sequence: Synthetic oligonucleotide
gccucugcuuaugccuggg

SEQ ID NO: 3009950 - RNA, 19 nt, Artificial Sequence
  Description of Artificial Sequence: Synthetic oligonucleotide
gccacccgcggcgagcuag

SEQ ID NO: 3009951 - RNA, 19 nt, Artificial Sequence
  Description of Artificial Sequence: Synthetic oligonucleotide
gcagcgcuuccugaggaca

SEQ ID NO: 3009952 - RNA, 19 nt, Artificial Sequence
  Description of Artificial Sequence: Synthetic oligonucleotide
gaccugggaaagggugcca

SEQ ID NO: 3009953 - RNA, 19 nt, Artificial Sequence
  Description of Artificial Sequence: Synthetic oligonucleotide
gcucagguguaggagcgga

SEQ ID NO: 3009954 - RNA, 19 nt, Artificial Sequence
  Description of Artificial Sequence: Synthetic oligonucleotide
aggcgccggcuaccggaag

SEQ ID NO: 3009955 - RNA, 19 nt, Artificial Sequence
  Description of Artificial Sequence: Synthetic oligonucleotide
ggugccacccgcggcgagc

SEQ ID NO: 3009956 - RNA, 19 nt, Artificial Sequence
  Description of Artificial Sequence: Synthetic oligonucleotide
ccaccgugcuucucacgag

SEQ ID NO: 3009957 - RNA, 19 nt, Artificial Sequence
  Description of Artificial Sequence: Synthetic oligonucleotide
cccacgccucuuuaccaug

SEQ ID NO: 3009958 - RNA, 19 nt, Artificial Sequence
  Description of Artificial Sequence: Synthetic oligonucleotide
gggccucaccgcgaagcgg

SEQ ID NO: 3009959 - RNA, 19 nt, Artificial Sequence
  Description of Artificial Sequence: Synthetic oligonucleotide
caccgcgaagcggcucagg

SEQ ID NO: 3009960 - RNA, 19 nt, Artificial Sequence
  Description of Artificial Sequence: Synthetic oligonucleotide
gcggccccagagaagugag

SEQ ID NO: 3009961 - RNA, 19 nt, Artificial Sequence
  Description of Artificial Sequence: Synthetic oligonucleotide
ccgugcuucucacgagcag

SEQ ID NO: 3009962 - RNA, 19 nt, Artificial Sequence
  Description of Artificial Sequence: Synthetic oligonucleotide
cacggggcggccccagaga

SEQ ID NO: 3009963 - RNA, 19 nt, Artificial Sequence
  Description of Artificial Sequence: Synthetic oligonucleotide
uggccaugcugaggccaga

SEQ ID NO: 3009964 - RNA, 19 nt, Artificial Sequence
  Description of Artificial Sequence: Synthetic oligonucleotide
gagaaggcccggggccuca

SEQ ID NO: 3009965 - RNA, 19 nt, Artificial Sequence
  Description of Artificial Sequence: Synthetic oligonucleotide
gcgcuuccugaggacaccc

SEQ ID NO: 3009966 - RNA, 19 nt, Artificial Sequence
  Description of Artificial Sequence: Synthetic oligonucleotide
gcugcaggugcggcacggg

SEQ ID NO: 3009967 - RNA, 19 nt, Artificial Sequence
  Description of Artificial Sequence: Synthetic oligonucleotide
ggcggccccagagaaguga

SEQ ID NO: 3009968 - RNA, 19 nt, Artificial Sequence
  Description of Artificial Sequence: Synthetic oligonucleotide
ggccaugcugaggccagac

SEQ ID NO: 3009969 - RNA, 19 nt, Artificial Sequence
  Description of Artificial Sequence: Synthetic oligonucleotide
cagagaagugagcgcgccu

SEQ ID NO: 3009970 - RNA, 19 nt, Artificial Sequence
  Description of Artificial Sequence: Synthetic oligonucleotide
ccuuggucuugaagcccug

SEQ ID NO: 3009971 - RNA, 19 nt, Artificial Sequence
  Description of Artificial Sequence: Synthetic oligonucleotide
augccugggguuggucuua

SEQ ID NO: 3009972 - RNA, 19 nt, Artificial Sequence
  Description of Artificial Sequence: Synthetic oligonucleotide
cuuggucuugaagcccugu

SEQ ID NO: 3009973 - RNA, 19 nt, Artificial Sequence
  Description of Artificial Sequence: Synthetic oligonucleotide
ugcgcagggucuggcgcuu

SEQ ID NO: 3009974 - RNA, 19 nt, Artificial Sequence
  Description of Artificial Sequence: Synthetic oligonucleotide
ggccucaggcgccggcuac

SEQ ID NO: 3009975 - RNA, 19 nt, Artificial Sequence
  Description of Artificial Sequence: Synthetic oligonucleotide
caggugcggcacggggcgg

SEQ ID NO: 3009976 - RNA, 19 nt, Artificial Sequence
  Description of Artificial Sequence: Synthetic oligonucleotide
cgaaccagcgcccacgccu

SEQ ID NO: 3009977 - RNA, 19 nt, Artificial Sequence
  Description of Artificial Sequence: Synthetic oligonucleotide
ccucaggcgccggcuaccg

SEQ ID NO: 3009978 - RNA, 19 nt, Artificial Sequence
  Description of Artificial Sequence: Synthetic oligonucleotide
gguguaggagcggaugcau

SEQ ID NO: 3009979 - RNA, 19 nt, Artificial Sequence
  Description of Artificial Sequence: Synthetic oligonucleotide
cgcgaagcggcucaggugu

SEQ ID NO: 3009980 - RNA, 19 nt, Artificial Sequence
  Description of Artificial Sequence: Synthetic oligonucleotide
ggggcggccccagagaagu

SEQ ID NO: 3009981 - RNA, 19 nt, Artificial Sequence
  Description of Artificial Sequence: Synthetic oligonucleotide
cacgagcaggguggccaug

SEQ ID NO: 3009982 - RNA, 19 nt, Artificial Sequence
  Description of Artificial Sequence: Synthetic oligonucleotide
cucagguguaggagcggau

SEQ ID NO: 3009983 - RNA, 19 nt, Artificial Sequence
  Description of Artificial Sequence: Synthetic oligonucleotide
caggcgccggcuaccggaa

SEQ ID NO: 3009984 - RNA, 19 nt, Artificial Sequence
  Description of Artificial Sequence: Synthetic oligonucleotide
cggggccucaccgcgaagc

SEQ ID NO: 3009985 - RNA, 19 nt, Artificial Sequence
  Description of Artificial Sequence: Synthetic oligonucleotide
gcgcuuggaagagucccca

SEQ ID NO: 3009986 - RNA, 19 nt, Artificial Sequence
  Description of Artificial Sequence: Synthetic oligonucleotide
agggugccacccgcggcga

SEQ ID NO: 3009987 - RNA, 19 nt, Artificial Sequence
  Description of Artificial Sequence: Synthetic oligonucleotide
gcaugagcgaagccaccgu

SEQ ID NO: 3009988 - RNA, 19 nt, Artificial Sequence
  Description of Artificial Sequence: Synthetic oligonucleotide
cgcgccucugcgcaggguc

SEQ ID NO: 3009989 - RNA, 19 nt, Artificial Sequence
  Description of Artificial Sequence: Synthetic oligonucleotide
cacgccucuuuaccaugua

SEQ ID NO: 3009990 - RNA, 19 nt, Artificial Sequence
  Description of Artificial Sequence: Synthetic oligonucleotide
gcuuccugaggacacccuu

SEQ ID NO: 3009991 - RNA, 19 nt, Artificial Sequence
  Description of Artificial Sequence: Synthetic oligonucleotide
gccucugcgcagggucugg

SEQ ID NO: 3009992 - RNA, 19 nt, Artificial Sequence
  Description of Artificial Sequence: Synthetic oligonucleotide
ccacgcggccucaggcgcc

SEQ ID NO: 3009993 - RNA, 19 nt, Artificial Sequence
  Description of Artificial Sequence: Synthetic oligonucleotide
gagcgaagccaccgugcuu

SEQ ID NO: 3009994 - RNA, 19 nt, Artificial Sequence
  Description of Artificial Sequence: Synthetic oligonucleotide
cccuuggucuugaagcccu

SEQ ID NO: 3009995 - RNA, 19 nt, Artificial Sequence
  Description of Artificial Sequence: Synthetic oligonucleotide
gcuagugcccacgcggccu

SEQ ID NO: 3009996 - RNA, 19 nt, Artificial Sequence
  Description of Artificial Sequence: Synthetic oligonucleotide
cggaugcaugagcgaagcc

SEQ ID NO: 3009997 - RNA, 19 nt, Artificial Sequence
  Description of Artificial Sequence: Synthetic oligonucleotide
gccucaggcgccggcuacc

SEQ ID NO: 3009998 - RNA, 19 nt, Artificial Sequence
  Description of Artificial Sequence: Synthetic oligonucleotide
agcagucccugcagcgcuu

SEQ ID NO: 3009999 - RNA, 19 nt, Artificial Sequence
  Description of Artificial Sequence: Synthetic oligonucleotide
ggagaaggcccggggccuc

SEQ ID NO: 3010000 - RNA, 19 nt, Artificial Sequence
  Description of Artificial Sequence: Synthetic oligonucleotide
cgcagggucuggcgcuugg

SEQ ID NO: 3010001 - RNA, 19 nt, Artificial Sequence
  Description of Artificial Sequence: Synthetic oligonucleotide
gcggcgagcuagugcccac

SEQ ID NO: 3010002 - RNA, 19 nt, Artificial Sequence
  Description of Artificial Sequence: Synthetic oligonucleotide
accagcgcccacgccucuu

SEQ ID NO: 3010003 - RNA, 19 nt, Artificial Sequence
  Description of Artificial Sequence: Synthetic oligonucleotide
cgaagcggcucagguguag

SEQ ID NO: 3010004 - RNA, 19 nt, Artificial Sequence
  Description of Artificial Sequence: Synthetic oligonucleotide
ccggaagcuuccgcgucug

SEQ ID NO: 3010005 - RNA, 19 nt, Artificial Sequence
  Description of Artificial Sequence: Synthetic oligonucleotide
ccucugcgcagggucuggc

SEQ ID NO: 3010006 - RNA, 19 nt, Artificial Sequence
  Description of Artificial Sequence: Synthetic oligonucleotide
ggugcggcacggggcggcc

SEQ ID NO: 3010007 - RNA, 19 nt, Artificial Sequence
  Description of Artificial Sequence: Synthetic oligonucleotide
gggugccacccgcggcgag

SEQ ID NO: 3010008 - RNA, 19 nt, Artificial Sequence
  Description of Artificial Sequence: Synthetic oligonucleotide
cacccgcggcgagcuagug

SEQ ID NO: 3010009 - RNA, 19 nt, Artificial Sequence
  Description of Artificial Sequence: Synthetic oligonucleotide
gugcggcacggggcggccc

SEQ ID NO: 3010010 - RNA, 19 nt, Artificial Sequence
  Description of Artificial Sequence: Synthetic oligonucleotide
gugccacccgcggcgagcu

SEQ ID NO: 3010011 - RNA, 19 nt, Artificial Sequence
  Description of Artificial Sequence: Synthetic oligonucleotide
ugccacccgcggcgagcua

SEQ ID NO: 3010012 - RNA, 19 nt, Artificial Sequence
  Description of Artificial Sequence: Synthetic oligonucleotide
gcccacgccucuuuaccau

SEQ ID NO: 3010013 - RNA, 19 nt, Artificial Sequence
  Description of Artificial Sequence: Synthetic oligonucleotide
ccacgccucuuuaccaugu

SEQ ID NO: 3010014 - RNA, 19 nt, Artificial Sequence
  Description of Artificial Sequence: Synthetic oligonucleotide
cggccccagagaagugagc

SEQ ID NO: 3010015 - RNA, 19 nt, Artificial Sequence
  Description of Artificial Sequence: Synthetic oligonucleotide
cgcccacgccucuuuacca

SEQ ID NO: 3010016 - RNA, 19 nt, Artificial Sequence
  Description of Artificial Sequence: Synthetic oligonucleotide
cggcgagcuagugcccacg

SEQ ID NO: 3010017 - RNA, 19 nt, Artificial Sequence
  Description of Artificial Sequence: Synthetic oligonucleotide
ccgcggcgagcuagugccc

SEQ ID NO: 3010018 - RNA, 19 nt, Artificial Sequence
  Description of Artificial Sequence: Synthetic oligonucleotide
gucuggcgcuuggaagagu

SEQ ID NO: 3010019 - RNA, 19 nt, Artificial Sequence
  Description of Artificial Sequence: Synthetic oligonucleotide
acgcggccucaggcgccgg

SEQ ID NO: 3010020 - RNA, 19 nt, Artificial Sequence
  Description of Artificial Sequence: Synthetic oligonucleotide
cggaagcuuccgcgucugc

SEQ ID NO: 3010021 - RNA, 19 nt, Artificial Sequence
  Description of Artificial Sequence: Synthetic oligonucleotide
gccagaccugggaaagggu

SEQ ID NO: 3010022 - RNA, 19 nt, Artificial Sequence
  Description of Artificial Sequence: Synthetic oligonucleotide
ggacacccuuggucuugaa

SEQ ID NO: 3010023 - RNA, 19 nt, Artificial Sequence
  Description of Artificial Sequence: Synthetic oligonucleotide
cagcgcccacgccucuuua

SEQ ID NO: 3010024 - RNA, 19 nt, Artificial Sequence
  Description of Artificial Sequence: Synthetic oligonucleotide
gccugggguuggucuuaca

SEQ ID NO: 3010025 - RNA, 19 nt, Artificial Sequence
  Description of Artificial Sequence: Synthetic oligonucleotide
ggcacggggcggccccaga

SEQ ID NO: 3010026 - RNA, 19 nt, Artificial Sequence
  Description of Artificial Sequence: Synthetic oligonucleotide
gcuuaugccugggguuggu

SEQ ID NO: 3010027 - RNA, 19 nt, Artificial Sequence
  Description of Artificial Sequence: Synthetic oligonucleotide
ccucaccgcgaagcggcuc

SEQ ID NO: 3010028 - RNA, 19 nt, Artificial Sequence
  Description of Artificial Sequence: Synthetic oligonucleotide
cggggcggccccagagaag

SEQ ID NO: 3010029 - RNA, 19 nt, Artificial Sequence
  Description of Artificial Sequence: Synthetic oligonucleotide
gggcggccccagagaagug

SEQ ID NO: 3010030 - RNA, 19 nt, Artificial Sequence
  Description of Artificial Sequence: Synthetic oligonucleotide
gcgaagccaccgugcuucu

SEQ ID NO: 3010031 - RNA, 19 nt, Artificial Sequence
  Description of Artificial Sequence: Synthetic oligonucleotide
cggcuaccggaagcuuccg

SEQ ID NO: 3010032 - RNA, 19 nt, Artificial Sequence
  Description of Artificial Sequence: Synthetic oligonucleotide
gcgccggcuaccggaagcu

SEQ ID NO: 3010033 - RNA, 19 nt, Artificial Sequence
  Description of Artificial Sequence: Synthetic oligonucleotide
cgcuuggaagaguccccaa

SEQ ID NO: 3010034 - RNA, 19 nt, Artificial Sequence
  Description of Artificial Sequence: Synthetic oligonucleotide
gcgcagggucuggcgcuug

SEQ ID NO: 3010035 - RNA, 19 nt, Artificial Sequence
  Description of Artificial Sequence: Synthetic oligonucleotide
cccggggccucaccgcgaa

SEQ ID NO: 3010036 - RNA, 19 nt, Artificial Sequence
  Description of Artificial Sequence: Synthetic oligonucleotide
ccggggccucaccgcgaag

SEQ ID NO: 3010037 - RNA, 19 nt, Artificial Sequence
  Description of Artificial Sequence: Synthetic oligonucleotide
gcgaagcggcucaggugua

SEQ ID NO: 3010038 - RNA, 19 nt, Artificial Sequence
  Description of Artificial Sequence: Synthetic oligonucleotide
cgcggcgagcuagugccca

SEQ ID NO: 3010039 - RNA, 19 nt, Artificial Sequence
  Description of Artificial Sequence: Synthetic oligonucleotide
ccacccgcggcgagcuagu

SEQ ID NO: 3010040 - RNA, 19 nt, Artificial Sequence
  Description of Artificial Sequence: Synthetic oligonucleotide
gcccggggccucaccgcga

SEQ ID NO: 3010041 - RNA, 19 nt, Artificial Sequence
  Description of Artificial Sequence: Synthetic oligonucleotide
gccucaccgcgaagcggcu

SEQ ID NO: 3010042 - RNA, 19 nt, Artificial Sequence
  Description of Artificial Sequence: Synthetic oligonucleotide
ccagcgcccacgccucuuu

SEQ ID NO: 3010043 - RNA, 19 nt, Artificial Sequence
  Description of Artificial Sequence: Synthetic oligonucleotide
gcggcacggggcggcccca

SEQ ID NO: 3010044 - RNA, 19 nt, Artificial Sequence
  Description of Artificial Sequence: Synthetic oligonucleotide
cggccucaggcgccggcua

SEQ ID NO: 3010045 - RNA, 19 nt, Artificial Sequence
  Description of Artificial Sequence: Synthetic oligonucleotide
cgccggcuaccggaagcuu

SEQ ID NO: 3010046 - RNA, 19 nt, Artificial Sequence
  Description of Artificial Sequence: Synthetic oligonucleotide
uucauauugacaaaggcuc

SEQ ID NO: 3010047 - RNA, 19 nt, Artificial Sequence
  Description of Artificial Sequence: Synthetic oligonucleotide
uggauuucaguccuaagag

SEQ ID NO: 3010048 - RNA, 19 nt, Artificial Sequence
  Description of Artificial Sequence: Synthetic oligonucleotide
ugcagaauggucuuguugc

SEQ ID NO: 3010049 - RNA, 19 nt, Artificial Sequence
  Description of Artificial Sequence: Synthetic oligonucleotide
uggguuagcagccuguacg

SEQ ID NO: 3010050 - RNA, 19 nt, Artificial Sequence
  Description of Artificial Sequence: Synthetic oligonucleotide
auugacaaaggcucgcagg

SEQ ID NO: 3010051 - RNA, 19 nt, Artificial Sequence
  Description of Artificial Sequence: Synthetic oligonucleotide
ucauauugacaaaggcucg

SEQ ID NO: 3010052 - RNA, 19 nt, Artificial Sequence
  Description of Artificial Sequence: Synthetic oligonucleotide
gaagcguugggucugcucc

SEQ ID NO: 3010053 - RNA, 19 nt, Artificial Sequence
  Description of Artificial Sequence: Synthetic oligonucleotide
ugggccuucauauugacaa

SEQ ID NO: 3010054 - RNA, 19 nt, Artificial Sequence
  Description of Artificial Sequence: Synthetic oligonucleotide
aguccuaagaggacaagcc

SEQ ID NO: 3010055 - RNA, 19 nt, Artificial Sequence
  Description of Artificial Sequence: Synthetic oligonucleotide
uccuaagaggacaagccug

SEQ ID NO: 3010056 - RNA, 19 nt, Artificial Sequence
  Description of Artificial Sequence: Synthetic oligonucleotide
uaagaggacaagccugggg

SEQ ID NO: 3010057 - RNA, 19 nt, Artificial Sequence
  Description of Artificial Sequence: Synthetic oligonucleotide
uugacaaaggcucgcaggu

SEQ ID NO: 3010058 - RNA, 19 nt, Artificial Sequence
  Description of Artificial Sequence: Synthetic oligonucleotide
cucacaauggccuccuggg

SEQ ID NO: 3010059 - RNA, 19 nt, Artificial Sequence
  Description of Artificial Sequence: Synthetic oligonucleotide
aaucaguccagguucugga

SEQ ID NO: 3010060 - RNA, 19 nt, Artificial Sequence
  Description of Artificial Sequence: Synthetic oligonucleotide
aaaucaguccagguucugg

SEQ ID NO: 3010061 - RNA, 19 nt, Artificial Sequence
  Description of Artificial Sequence: Synthetic oligonucleotide
uucaacagcugccggagcc

SEQ ID NO: 3010062 - RNA, 19 nt, Artificial Sequence
  Description of Artificial Sequence: Synthetic oligonucleotide
gacaaaggcucgcaggucc

SEQ ID NO: 3010063 - RNA, 19 nt, Artificial Sequence
  Description of Artificial Sequence: Synthetic oligonucleotide
gauuucaguccuaagagga

SEQ ID NO: 3010064 - RNA, 19 nt, Artificial Sequence
  Description of Artificial Sequence: Synthetic oligonucleotide
uucucuagguugcgaagcg

SEQ ID NO: 3010065 - RNA, 19 nt, Artificial Sequence
  Description of Artificial Sequence: Synthetic oligonucleotide
caagugaacgggcugcucg

SEQ ID NO: 3010066 - RNA, 19 nt, Artificial Sequence
  Description of Artificial Sequence: Synthetic oligonucleotide
uauugacaaaggcucgcag

SEQ ID NO: 3010067 - RNA, 19 nt, Artificial Sequence
  Description of Artificial Sequence: Synthetic oligonucleotide
agccuguacggccaagugc

SEQ ID NO: 3010068 - RNA, 19 nt, Artificial Sequence
  Description of Artificial Sequence: Synthetic oligonucleotide
uccagcugccagcagaugc

SEQ ID NO: 3010069 - RNA, 19 nt, Artificial Sequence
  Description of Artificial Sequence: Synthetic oligonucleotide
ggaaaaucaguccagguuc

SEQ ID NO: 3010070 - RNA, 19 nt, Artificial Sequence
  Description of Artificial Sequence: Synthetic oligonucleotide
agaauggucuuguugcucu

SEQ ID NO: 3010071 - RNA, 19 nt, Artificial Sequence
  Description of Artificial Sequence: Synthetic oligonucleotide
guuagcagccuguacggcc

SEQ ID NO: 3010072 - RNA, 19 nt, Artificial Sequence
  Description of Artificial Sequence: Synthetic oligonucleotide
uuucaguccuaagaggaca

SEQ ID NO: 3010073 - RNA, 19 nt, Artificial Sequence
  Description of Artificial Sequence: Synthetic oligonucleotide
ucacaauggccuccugggg

SEQ ID NO: 3010074 - RNA, 19 nt, Artificial Sequence
  Description of Artificial Sequence: Synthetic oligonucleotide
agcaacugaaccagggugg

SEQ ID NO: 3010075 - RNA, 19 nt, Artificial Sequence
  Description of Artificial Sequence: Synthetic oligonucleotide
cuggauuucaguccuaaga

SEQ ID NO: 3010076 - RNA, 19 nt, Artificial Sequence
  Description of Artificial Sequence: Synthetic oligonucleotide
uacgcuggcugucccacgg

SEQ ID NO: 3010077 - RNA, 19 nt, Artificial Sequence
  Description of Artificial Sequence: Synthetic oligonucleotide
acuggaaaaucaguccagg

SEQ ID NO: 3010078 - RNA, 19 nt, Artificial Sequence
  Description of Artificial Sequence: Synthetic oligonucleotide
uagguugcgaagcguuggg

SEQ ID NO: 3010079 - RNA, 19 nt, Artificial Sequence
  Description of Artificial Sequence: Synthetic oligonucleotide
ugcucguucucuagguugc

SEQ ID NO: 3010080 - RNA, 19 nt, Artificial Sequence
  Description of Artificial Sequence: Synthetic oligonucleotide
cuucauauugacaaaggcu

SEQ ID NO: 3010081 - RNA, 19 nt, Artificial Sequence
  Description of Artificial Sequence: Synthetic oligonucleotide
ucuagguugcgaagcguug

SEQ ID NO: 3010082 - RNA, 19 nt, Artificial Sequence
  Description of Artificial Sequence: Synthetic oligonucleotide
cagcagaugccucacaaug

SEQ ID NO: 3010083 - RNA, 19 nt, Artificial Sequence
  Description of Artificial Sequence: Synthetic oligonucleotide
ggauuucaguccuaagagg

SEQ ID NO: 3010084 - RNA, 19 nt, Artificial Sequence
  Description of Artificial Sequence: Synthetic oligonucleotide
uguacggccaagugcagaa

SEQ ID NO: 3010085 - RNA, 19 nt, Artificial Sequence
  Description of Artificial Sequence: Synthetic oligonucleotide
uucccaugggccuucauau

SEQ ID NO: 3010086 - RNA, 19 nt, Artificial Sequence
  Description of Artificial Sequence: Synthetic oligonucleotide
uacggccaagugcagaaug

SEQ ID NO: 3010087 - RNA, 19 nt, Artificial Sequence
  Description of Artificial Sequence: Synthetic oligonucleotide
cagguucuggauuucaguc

SEQ ID NO: 3010088 - RNA, 19 nt, Artificial Sequence
  Description of Artificial Sequence: Synthetic oligonucleotide
ugucccacgggacgguggg

SEQ ID NO: 3010089 - RNA, 19 nt, Artificial Sequence
  Description of Artificial Sequence: Synthetic oligonucleotide
uccagguucuggauuucag

SEQ ID NO: 3010090 - RNA, 19 nt, Artificial Sequence
  Description of Artificial Sequence: Synthetic oligonucleotide
cuuguugcucuugaucucc

SEQ ID NO: 3010091 - RNA, 19 nt, Artificial Sequence
  Description of Artificial Sequence: Synthetic oligonucleotide
cauauugacaaaggcucgc

SEQ ID NO: 3010092 - RNA, 19 nt, Artificial Sequence
  Description of Artificial Sequence: Synthetic oligonucleotide
auuucaguccuaagaggac

SEQ ID NO: 3010093 - RNA, 19 nt, Artificial Sequence
  Description of Artificial Sequence: Synthetic oligonucleotide
cagcaacugaaccagggug

SEQ ID NO: 3010094 - RNA, 19 nt, Artificial Sequence
  Description of Artificial Sequence: Synthetic oligonucleotide
ucuggauuucaguccuaag

SEQ ID NO: 3010095 - RNA, 19 nt, Artificial Sequence
  Description of Artificial Sequence: Synthetic oligonucleotide
gucgcagcaagugaacggg

SEQ ID NO: 3010096 - RNA, 19 nt, Artificial Sequence
  Description of Artificial Sequence: Synthetic oligonucleotide
aagugaacgggcugcucgu

SEQ ID NO: 3010097 - RNA, 19 nt, Artificial Sequence
  Description of Artificial Sequence: Synthetic oligonucleotide
uucaguccuaagaggacaa

SEQ ID NO: 3010098 - RNA, 19 nt, Artificial Sequence
  Description of Artificial Sequence: Synthetic oligonucleotide
gucuuguugcucuugaucu

SEQ ID NO: 3010099 - RNA, 19 nt, Artificial Sequence
  Description of Artificial Sequence: Synthetic oligonucleotide
aacugaaccaggguggguu

SEQ ID NO: 3010100 - RNA, 19 nt, Artificial Sequence
  Description of Artificial Sequence: Synthetic oligonucleotide
acaauggccuccuggggug

SEQ ID NO: 3010101 - RNA, 19 nt, Artificial Sequence
  Description of Artificial Sequence: Synthetic oligonucleotide
cuagguugcgaagcguugg

SEQ ID NO: 3010102 - RNA, 19 nt, Artificial Sequence
  Description of Artificial Sequence: Synthetic oligonucleotide
gacuggaaaaucaguccag

SEQ ID NO: 3010103 - RNA, 19 nt, Artificial Sequence
  Description of Artificial Sequence: Synthetic oligonucleotide
agcagaugccucacaaugg

SEQ ID NO: 3010104 - RNA, 19 nt, Artificial Sequence
  Description of Artificial Sequence: Synthetic oligonucleotide
cugcucguucucuagguug

SEQ ID NO: 3010105 - RNA, 19 nt, Artificial Sequence
  Description of Artificial Sequence: Synthetic oligonucleotide
aagugcagaauggucuugu

SEQ ID NO: 3010106 - RNA, 19 nt, Artificial Sequence
  Description of Artificial Sequence: Synthetic oligonucleotide
ccuaagaggacaagccugg

SEQ ID NO: 3010107 - RNA, 19 nt, Artificial Sequence
  Description of Artificial Sequence: Synthetic oligonucleotide
guucucuagguugcgaagc

SEQ ID NO: 3010108 - RNA, 19 nt, Artificial Sequence
  Description of Artificial Sequence: Synthetic oligonucleotide
ccuucauauugacaaaggc

SEQ ID NO: 3010109 - RNA, 19 nt, Artificial Sequence
  Description of Artificial Sequence: Synthetic oligonucleotide
aauggucuuguugcucuug

SEQ ID NO: 3010110 - RNA, 19 nt, Artificial Sequence
  Description of Artificial Sequence: Synthetic oligonucleotide
aaccaggguggguuagcag

SEQ ID NO: 3010111 - RNA, 19 nt, Artificial Sequence
  Description of Artificial Sequence: Synthetic oligonucleotide
gggacuggaaaaucagucc

SEQ ID NO: 3010112 - RNA, 19 nt, Artificial Sequence
  Description of Artificial Sequence: Synthetic oligonucleotide
acggcuccucuucaacagc

SEQ ID NO: 3010113 - RNA, 19 nt, Artificial Sequence
  Description of Artificial Sequence: Synthetic oligonucleotide
gugcagaauggucuuguug

SEQ ID NO: 3010114 - RNA, 19 nt, Artificial Sequence
  Description of Artificial Sequence: Synthetic oligonucleotide
agcagcaacugaaccaggg

SEQ ID NO: 3010115 - RNA, 19 nt, Artificial Sequence
  Description of Artificial Sequence: Synthetic oligonucleotide
ugaacgggcugcucguucu

SEQ ID NO: 3010116 - RNA, 19 nt, Artificial Sequence
  Description of Artificial Sequence: Synthetic oligonucleotide
ucguucucuagguugcgaa

SEQ ID NO: 3010117 - RNA, 19 nt, Artificial Sequence
  Description of Artificial Sequence: Synthetic oligonucleotide
agggcuguguucccauggg

SEQ ID NO: 3010118 - RNA, 19 nt, Artificial Sequence
  Description of Artificial Sequence: Synthetic oligonucleotide
caguccuaagaggacaagc

SEQ ID NO: 3010119 - RNA, 19 nt, Artificial Sequence
  Description of Artificial Sequence: Synthetic oligonucleotide
uggggacuggaaaaucagu

SEQ ID NO: 3010120 - RNA, 19 nt, Artificial Sequence
  Description of Artificial Sequence: Synthetic oligonucleotide
aaaaucaguccagguucug

SEQ ID NO: 3010121 - RNA, 19 nt, Artificial Sequence
  Description of Artificial Sequence: Synthetic oligonucleotide
agaugccucacaauggccu

SEQ ID NO: 3010122 - RNA, 19 nt, Artificial Sequence
  Description of Artificial Sequence: Synthetic oligonucleotide
ggguuagcagccuguacgg

SEQ ID NO: 3010123 - RNA, 19 nt, Artificial Sequence
  Description of Artificial Sequence: Synthetic oligonucleotide
cacggcuccucuucaacag

SEQ ID NO: 3010124 - RNA, 19 nt, Artificial Sequence
  Description of Artificial Sequence: Synthetic oligonucleotide
ggucgcagcaagugaacgg

SEQ ID NO: 3010125 - RNA, 19 nt, Artificial Sequence
  Description of Artificial Sequence: Synthetic oligonucleotide
ucaguccagguucuggauu

SEQ ID NO: 3010126 - RNA, 19 nt, Artificial Sequence
  Description of Artificial Sequence: Synthetic oligonucleotide
ucuuguugcucuugaucuc

SEQ ID NO: 3010127 - RNA, 19 nt, Artificial Sequence
  Description of Artificial Sequence: Synthetic oligonucleotide
ggacuggaaaaucagucca

SEQ ID NO: 3010128 - RNA, 19 nt, Artificial Sequence
  Description of Artificial Sequence: Synthetic oligonucleotide
auggucuuguugcucuuga

SEQ ID NO: 3010129 - RNA, 19 nt, Artificial Sequence
  Description of Artificial Sequence: Synthetic oligonucleotide
auauugacaaaggcucgca

SEQ ID NO: 3010130 - RNA, 19 nt, Artificial Sequence
  Description of Artificial Sequence: Synthetic oligonucleotide
cagggcagcugccaugugc

SEQ ID NO: 3010131 - RNA, 19 nt, Artificial Sequence
  Description of Artificial Sequence: Synthetic oligonucleotide
acaaaggcucgcagguccc

SEQ ID NO: 3010132 - RNA, 19 nt, Artificial Sequence
  Description of Artificial Sequence: Synthetic oligonucleotide
aauggccuccugggguggc

SEQ ID NO: 3010133 - RNA, 19 nt, Artificial Sequence
  Description of Artificial Sequence: Synthetic oligonucleotide
cagaugccucacaauggcc

SEQ ID NO: 3010134 - RNA, 19 nt, Artificial Sequence
  Description of Artificial Sequence: Synthetic oligonucleotide
gcagaugccucacaauggc

SEQ ID NO: 3010135 - RNA, 19 nt, Artificial Sequence
  Description of Artificial Sequence: Synthetic oligonucleotide
gaugccucacaauggccuc

SEQ ID NO: 3010136 - RNA, 19 nt, Artificial Sequence
  Description of Artificial Sequence: Synthetic oligonucleotide
cagggcuguguucccaugg

SEQ ID NO: 3010137 - RNA, 19 nt, Artificial Sequence
  Description of Artificial Sequence: Synthetic oligonucleotide
ucaacagcugccggagccc

SEQ ID NO: 3010138 - RNA, 19 nt, Artificial Sequence
  Description of Artificial Sequence: Synthetic oligonucleotide
aagcguugggucugcucca

SEQ ID NO: 3010139 - RNA, 19 nt, Artificial Sequence
  Description of Artificial Sequence: Synthetic oligonucleotide
gacgguggggacuggaaaa

SEQ ID NO: 3010140 - RNA, 19 nt, Artificial Sequence
  Description of Artificial Sequence: Synthetic oligonucleotide
cagggcccggcccaggucg

SEQ ID NO: 3010141 - RNA, 19 nt, Artificial Sequence
  Description of Artificial Sequence: Synthetic oligonucleotide
aggucgcagcaagugaacg

SEQ ID NO: 3010142 - RNA, 19 nt, Artificial Sequence
  Description of Artificial Sequence: Synthetic oligonucleotide
acggccaagugcagaaugg

SEQ ID NO: 3010143 - RNA, 19 nt, Artificial Sequence
  Description of Artificial Sequence: Synthetic oligonucleotide
ggucuuguugcucuugauc

SEQ ID NO: 3010144 - RNA, 19 nt, Artificial Sequence
  Description of Artificial Sequence: Synthetic oligonucleotide
uucuggauuucaguccuaa

SEQ ID NO: 3010145 - RNA, 19 nt, Artificial Sequence
  Description of Artificial Sequence: Synthetic oligonucleotide
cugccggagccccucaggg

SEQ ID NO: 3010146 - RNA, 19 nt, Artificial Sequence
  Description of Artificial Sequence: Synthetic oligonucleotide
augccucacaauggccucc

SEQ ID NO: 3010147 - RNA, 19 nt, Artificial Sequence
  Description of Artificial Sequence: Synthetic oligonucleotide
cagcaagugaacgggcugc

SEQ ID NO: 3010148 - RNA, 19 nt, Artificial Sequence
  Description of Artificial Sequence: Synthetic oligonucleotide
guggggacuggaaaaucag

SEQ ID NO: 3010149 - RNA, 19 nt, Artificial Sequence
  Description of Artificial Sequence: Synthetic oligonucleotide
ucgcagcaagugaacgggc

SEQ ID NO: 3010150 - RNA, 19 nt, Artificial Sequence
  Description of Artificial Sequence: Synthetic oligonucleotide
ucaguccuaagaggacaag

SEQ ID NO: 3010151 - RNA, 19 nt, Artificial Sequence
  Description of Artificial Sequence: Synthetic oligonucleotide
caugggccuucauauugac

SEQ ID NO: 3010152 - RNA, 19 nt, Artificial Sequence
  Description of Artificial Sequence: Synthetic oligonucleotide
cucuucaacagcugccgga

SEQ ID NO: 3010153 - RNA, 19 nt, Artificial Sequence
  Description of Artificial Sequence: Synthetic oligonucleotide
cuaagaggacaagccuggg

SEQ ID NO: 3010154 - RNA, 19 nt, Artificial Sequence
  Description of Artificial Sequence: Synthetic oligonucleotide
ggccuucauauugacaaag

SEQ ID NO: 3010155 - RNA, 19 nt, Artificial Sequence
  Description of Artificial Sequence: Synthetic oligonucleotide
ugaaccaggguggguuagc

SEQ ID NO: 3010156 - RNA, 19 nt, Artificial Sequence
  Description of Artificial Sequence: Synthetic oligonucleotide
aucaguccagguucuggau

SEQ ID NO: 3010157 - RNA, 19 nt, Artificial Sequence
  Description of Artificial Sequence: Synthetic oligonucleotide
uggcugucccacgggacgg

SEQ ID NO: 3010158 - RNA, 19 nt, Artificial Sequence
  Description of Artificial Sequence: Synthetic oligonucleotide
gguugcgaagcguuggguc

SEQ ID NO: 3010159 - RNA, 19 nt, Artificial Sequence
  Description of Artificial Sequence: Synthetic oligonucleotide
gccuucauauugacaaagg

SEQ ID NO: 3010160 - RNA, 19 nt, Artificial Sequence
  Description of Artificial Sequence: Synthetic oligonucleotide
guugcgaagcguugggucu

SEQ ID NO: 3010161 - RNA, 19 nt, Artificial Sequence
  Description of Artificial Sequence: Synthetic oligonucleotide
auacgcuggcugucccacg

SEQ ID NO: 3010162 - RNA, 19 nt, Artificial Sequence
  Description of Artificial Sequence: Synthetic oligonucleotide
ccucacaauggccuccugg

SEQ ID NO: 3010163 - RNA, 19 nt, Artificial Sequence
  Description of Artificial Sequence: Synthetic oligonucleotide
gaaaaucaguccagguucu

SEQ ID NO: 3010164 - RNA, 19 nt, Artificial Sequence
  Description of Artificial Sequence: Synthetic oligonucleotide
guucccaugggccuucaua

SEQ ID NO: 3010165 - RNA, 19 nt, Artificial Sequence
  Description of Artificial Sequence: Synthetic oligonucleotide
agccccucagggcccggcc

SEQ ID NO: 3010166 - RNA, 19 nt, Artificial Sequence
  Description of Artificial Sequence: Synthetic oligonucleotide
cuucaacagcugccggagc

SEQ ID NO: 3010167 - RNA, 19 nt, Artificial Sequence
  Description of Artificial Sequence: Synthetic oligonucleotide
ggcuguguucccaugggcc

SEQ ID NO: 3010168 - RNA, 19 nt, Artificial Sequence
  Description of Artificial Sequence: Synthetic oligonucleotide
ucucuagguugcgaagcgu

SEQ ID NO: 3010169 - RNA, 19 nt, Artificial Sequence
  Description of Artificial Sequence: Synthetic oligonucleotide
ggggacuggaaaaucaguc

SEQ ID NO: 3010170 - RNA, 19 nt, Artificial Sequence
  Description of Artificial Sequence: Synthetic oligonucleotide
uugcgaagcguugggucug

SEQ ID NO: 3010171 - RNA, 19 nt, Artificial Sequence
  Description of Artificial Sequence: Synthetic oligonucleotide
caggucgcagcaagugaac

SEQ ID NO: 3010172 - RNA, 19 nt, Artificial Sequence
  Description of Artificial Sequence: Synthetic oligonucleotide
agcugccaugugcagggcu

SEQ ID NO: 3010173 - RNA, 19 nt, Artificial Sequence
  Description of Artificial Sequence: Synthetic oligonucleotide
caugugcagggcuguguuc

SEQ ID NO: 3010174 - RNA, 19 nt, Artificial Sequence
  Description of Artificial Sequence: Synthetic oligonucleotide
guccuaagaggacaagccu

SEQ ID NO: 3010175 - RNA, 19 nt, Artificial Sequence
  Description of Artificial Sequence: Synthetic oligonucleotide
acugaaccaggguggguua

SEQ ID NO: 3010176 - RNA, 19 nt, Artificial Sequence
  Description of Artificial Sequence: Synthetic oligonucleotide
gcaacugaaccaggguggg

SEQ ID NO: 3010177 - RNA, 19 nt, Artificial Sequence
  Description of Artificial Sequence: Synthetic oligonucleotide
ugccgcacggcuccucuuc

SEQ ID NO: 3010178 - RNA, 19 nt, Artificial Sequence
  Description of Artificial Sequence: Synthetic oligonucleotide
cagaauggucuuguugcuc

SEQ ID NO: 3010179 - RNA, 19 nt, Artificial Sequence
  Description of Artificial Sequence: Synthetic oligonucleotide
gccuguacggccaagugca

SEQ ID NO: 3010180 - RNA, 19 nt, Artificial Sequence
  Description of Artificial Sequence: Synthetic oligonucleotide
gaaccaggguggguuagca

SEQ ID NO: 3010181 - RNA, 19 nt, Artificial Sequence
  Description of Artificial Sequence: Synthetic oligonucleotide
gcagcaagugaacgggcug

SEQ ID NO: 3010182 - RNA, 19 nt, Artificial Sequence
  Description of Artificial Sequence: Synthetic oligonucleotide
acagcugccggagccccuc

SEQ ID NO: 3010183 - RNA, 19 nt, Artificial Sequence
  Description of Artificial Sequence: Synthetic oligonucleotide
aacgggcugcucguucucu

SEQ ID NO: 3010184 - RNA, 19 nt, Artificial Sequence
  Description of Artificial Sequence: Synthetic oligonucleotide
ugacaaaggcucgcagguc

SEQ ID NO: 3010185 - RNA, 19 nt, Artificial Sequence
  Description of Artificial Sequence: Synthetic oligonucleotide
ugccggagccccucagggc

SEQ ID NO: 3010186 - RNA, 19 nt, Artificial Sequence
  Description of Artificial Sequence: Synthetic oligonucleotide
gccggagccccucagggcc

SEQ ID NO: 3010187 - RNA, 19 nt, Artificial Sequence
  Description of Artificial Sequence: Synthetic oligonucleotide
uggucuuguugcucuugau

SEQ ID NO: 3010188 - RNA, 19 nt, Artificial Sequence
  Description of Artificial Sequence: Synthetic oligonucleotide
guggguuagcagccuguac

SEQ ID NO: 3010189 - RNA, 19 nt, Artificial Sequence
  Description of Artificial Sequence: Synthetic oligonucleotide
agugcagaauggucuuguu

SEQ ID NO: 3010190 - RNA, 19 nt, Artificial Sequence
  Description of Artificial Sequence: Synthetic oligonucleotide
caagugcagaauggucuug

SEQ ID NO: 3010191 - RNA, 19 nt, Artificial Sequence
  Description of Artificial Sequence: Synthetic oligonucleotide
gguggggacuggaaaauca

SEQ ID NO: 3010192 - RNA, 19 nt, Artificial Sequence
  Description of Artificial Sequence: Synthetic oligonucleotide
cagccuguacggccaagug

SEQ ID NO: 3010193 - RNA, 19 nt, Artificial Sequence
  Description of Artificial Sequence: Synthetic oligonucleotide
gugaacgggcugcucguuc

SEQ ID NO: 3010194 - RNA, 19 nt, Artificial Sequence
  Description of Artificial Sequence: Synthetic oligonucleotide
cugaaccaggguggguuag

SEQ ID NO: 3010195 - RNA, 19 nt, Artificial Sequence
  Description of Artificial Sequence: Synthetic oligonucleotide
cacaauggccuccuggggu

SEQ ID NO: 3010196 - RNA, 19 nt, Artificial Sequence
  Description of Artificial Sequence: Synthetic oligonucleotide
aguccagguucuggauuuc

SEQ ID NO: 3010197 - RNA, 19 nt, Artificial Sequence
  Description of Artificial Sequence: Synthetic oligonucleotide
caacagcugccggagcccc

SEQ ID NO: 3010198 - RNA, 19 nt, Artificial Sequence
  Description of Artificial Sequence: Synthetic oligonucleotide
cuggaaaaucaguccaggu

SEQ ID NO: 3010199 - RNA, 19 nt, Artificial Sequence
  Description of Artificial Sequence: Synthetic oligonucleotide
uguguucccaugggccuuc

SEQ ID NO: 3010200 - RNA, 19 nt, Artificial Sequence
  Description of Artificial Sequence: Synthetic oligonucleotide
acgcuggcugucccacggg

SEQ ID NO: 3010201 - RNA, 19 nt, Artificial Sequence
  Description of Artificial Sequence: Synthetic oligonucleotide
caaaggcucgcaggucccc

SEQ ID NO: 3010202 - RNA, 19 nt, Artificial Sequence
  Description of Artificial Sequence: Synthetic oligonucleotide
agcaagugaacgggcugcu

SEQ ID NO: 3010203 - RNA, 19 nt, Artificial Sequence
  Description of Artificial Sequence: Synthetic oligonucleotide
gggcugcucguucucuagg

SEQ ID NO: 3010204 - RNA, 19 nt, Artificial Sequence
  Description of Artificial Sequence: Synthetic oligonucleotide
ugccucacaauggccuccu

SEQ ID NO: 3010205 - RNA, 19 nt, Artificial Sequence
  Description of Artificial Sequence: Synthetic oligonucleotide
cccagcagcaacugaacca

SEQ ID NO: 3010206 - RNA, 19 nt, Artificial Sequence
  Description of Artificial Sequence: Synthetic oligonucleotide
cacgggacgguggggacug

SEQ ID NO: 3010207 - RNA, 19 nt, Artificial Sequence
  Description of Artificial Sequence: Synthetic oligonucleotide
agcguugggucugcuccag

SEQ ID NO: 3010208 - RNA, 19 nt, Artificial Sequence
  Description of Artificial Sequence: Synthetic oligonucleotide
gaacgggcugcucguucuc

SEQ ID NO: 3010209 - RNA, 19 nt, Artificial Sequence
  Description of Artificial Sequence: Synthetic oligonucleotide
caauggccuccuggggugg

SEQ ID NO: 3010210 - RNA, 19 nt, Artificial Sequence
  Description of Artificial Sequence: Synthetic oligonucleotide
ugcgaagcguugggucugc

SEQ ID NO: 3010211 - RNA, 19 nt, Artificial Sequence
  Description of Artificial Sequence: Synthetic oligonucleotide
gccaagugcagaauggucu

SEQ ID NO: 3010212 - RNA, 19 nt, Artificial Sequence
  Description of Artificial Sequence: Synthetic oligonucleotide
gcugccggagccccucagg

SEQ ID NO: 3010213 - RNA, 19 nt, Artificial Sequence
  Description of Artificial Sequence: Synthetic oligonucleotide
agguugcgaagcguugggu

SEQ ID NO: 3010214 - RNA, 19 nt, Artificial Sequence
  Description of Artificial Sequence: Synthetic oligonucleotide
acgguggggacuggaaaau

SEQ ID NO: 3010215 - RNA, 19 nt, Artificial Sequence
  Description of Artificial Sequence: Synthetic oligonucleotide
ucagggcccggcccagguc

SEQ ID NO: 3010216 - RNA, 19 nt, Artificial Sequence
  Description of Artificial Sequence: Synthetic oligonucleotide
agcugccggagccccucag

SEQ ID NO: 3010217 - RNA, 19 nt, Artificial Sequence
  Description of Artificial Sequence: Synthetic oligonucleotide
gggcuguguucccaugggc

SEQ ID NO: 3010218 - RNA, 19 nt, Artificial Sequence
  Description of Artificial Sequence: Synthetic oligonucleotide
cguucucuagguugcgaag

SEQ ID NO: 3010219 - RNA, 19 nt, Artificial Sequence
  Description of Artificial Sequence: Synthetic oligonucleotide
augggccuucauauugaca

SEQ ID NO: 3010220 - RNA, 19 nt, Artificial Sequence
  Description of Artificial Sequence: Synthetic oligonucleotide
cucuagguugcgaagcguu

SEQ ID NO: 3010221 - RNA, 19 nt, Artificial Sequence
  Description of Artificial Sequence: Synthetic oligonucleotide
ccucuucaacagcugccgg

SEQ ID NO: 3010222 - RNA, 19 nt, Artificial Sequence
  Description of Artificial Sequence: Synthetic oligonucleotide
gccagcagaugccucacaa

SEQ ID NO: 3010223 - RNA, 19 nt, Artificial Sequence
  Description of Artificial Sequence: Synthetic oligonucleotide
uguucccaugggccuucau

SEQ ID NO: 3010224 - RNA, 19 nt, Artificial Sequence
  Description of Artificial Sequence: Synthetic oligonucleotide
gguuagcagccuguacggc

SEQ ID NO: 3010225 - RNA, 19 nt, Artificial Sequence
  Description of Artificial Sequence: Synthetic oligonucleotide
ugccaugugcagggcugug

SEQ ID NO: 3010226 - RNA, 19 nt, Artificial Sequence
  Description of Artificial Sequence: Synthetic oligonucleotide
gcacggcuccucuucaaca

SEQ ID NO: 3010227 - RNA, 19 nt, Artificial Sequence
  Description of Artificial Sequence: Synthetic oligonucleotide
uggccuccugggguggccc

SEQ ID NO: 3010228 - RNA, 19 nt, Artificial Sequence
  Description of Artificial Sequence: Synthetic oligonucleotide
agcugccagcagaugccuc

SEQ ID NO: 3010229 - RNA, 19 nt, Artificial Sequence
  Description of Artificial Sequence: Synthetic oligonucleotide
ccaggucgcagcaagugaa

SEQ ID NO: 3010230 - RNA, 19 nt, Artificial Sequence
  Description of Artificial Sequence: Synthetic oligonucleotide
aacagcugccggagccccu

SEQ ID NO: 3010231 - RNA, 19 nt, Artificial Sequence
  Description of Artificial Sequence: Synthetic oligonucleotide
guccagguucuggauuuca

SEQ ID NO: 3010232 - RNA, 19 nt, Artificial Sequence
  Description of Artificial Sequence: Synthetic oligonucleotide
caguccagguucuggauuu

SEQ ID NO: 3010233 - RNA, 19 nt, Artificial Sequence
  Description of Artificial Sequence: Synthetic oligonucleotide
cuguacggccaagugcaga

SEQ ID NO: 3010234 - RNA, 19 nt, Artificial Sequence
  Description of Artificial Sequence: Synthetic oligonucleotide
gcuguguucccaugggccu

SEQ ID NO: 3010235 - RNA, 19 nt, Artificial Sequence
  Description of Artificial Sequence: Synthetic oligonucleotide
ggacgguggggacuggaaa

SEQ ID NO: 3010236 - RNA, 19 nt, Artificial Sequence
  Description of Artificial Sequence: Synthetic oligonucleotide
ggccaagugcagaaugguc

SEQ ID NO: 3010237 - RNA, 19 nt, Artificial Sequence
  Description of Artificial Sequence: Synthetic oligonucleotide
cucguucucuagguugcga

SEQ ID NO: 3010238 - RNA, 19 nt, Artificial Sequence
  Description of Artificial Sequence: Synthetic oligonucleotide
acgggcugcucguucucua

SEQ ID NO: 3010239 - RNA, 19 nt, Artificial Sequence
  Description of Artificial Sequence: Synthetic oligonucleotide
ccaugggccuucauauuga

SEQ ID NO: 3010240 - RNA, 19 nt, Artificial Sequence
  Description of Artificial Sequence: Synthetic oligonucleotide
gcagcaacugaaccagggu

SEQ ID NO: 3010241 - RNA, 19 nt, Artificial Sequence
  Description of Artificial Sequence: Synthetic oligonucleotide
agcagccuguacggccaag

SEQ ID NO: 3010242 - RNA, 19 nt, Artificial Sequence
  Description of Artificial Sequence: Synthetic oligonucleotide
gaauggucuuguugcucuu

SEQ ID NO: 3010243 - RNA, 19 nt, Artificial Sequence
  Description of Artificial Sequence: Synthetic oligonucleotide
agugaacgggcugcucguu

SEQ ID NO: 3010244 - RNA, 19 nt, Artificial Sequence
  Description of Artificial Sequence: Synthetic oligonucleotide
gcagaauggucuuguugcu

SEQ ID NO: 3010245 - RNA, 19 nt, Artificial Sequence
  Description of Artificial Sequence: Synthetic oligonucleotide
gcucguucucuagguugcg

SEQ ID NO: 3010246 - RNA, 19 nt, Artificial Sequence
  Description of Artificial Sequence: Synthetic oligonucleotide
gcccaggucgcagcaagug

SEQ ID NO: 3010247 - RNA, 19 nt, Artificial Sequence
  Description of Artificial Sequence: Synthetic oligonucleotide
gggcagggcagcugccaug

SEQ ID NO: 3010248 - RNA, 19 nt, Artificial Sequence
  Description of Artificial Sequence: Synthetic oligonucleotide
ggcugcucguucucuaggu

SEQ ID NO: 3010249 - RNA, 19 nt, Artificial Sequence
  Description of Artificial Sequence: Synthetic oligonucleotide
ccuguacggccaagugcag

SEQ ID NO: 3010250 - RNA, 19 nt, Artificial Sequence
  Description of Artificial Sequence: Synthetic oligonucleotide
gcagggcuguguucccaug

SEQ ID NO: 3010251 - RNA, 19 nt, Artificial Sequence
  Description of Artificial Sequence: Synthetic oligonucleotide
gucccacgggacggugggg

SEQ ID NO: 3010252 - RNA, 19 nt, Artificial Sequence
  Description of Artificial Sequence: Synthetic oligonucleotide
gggccuucauauugacaaa

SEQ ID NO: 3010253 - RNA, 19 nt, Artificial Sequence
  Description of Artificial Sequence: Synthetic oligonucleotide
gagccccucagggcccggc

SEQ ID NO: 3010254 - RNA, 19 nt, Artificial Sequence
  Description of Artificial Sequence: Synthetic oligonucleotide
ccagguucuggauuucagu

SEQ ID NO: 3010255 - RNA, 19 nt, Artificial Sequence
  Description of Artificial Sequence: Synthetic oligonucleotide
cuccagcugccagcagaug

SEQ ID NO: 3010256 - RNA, 19 nt, Artificial Sequence
  Description of Artificial Sequence: Synthetic oligonucleotide
cccaggucgcagcaaguga

SEQ ID NO: 3010257 - RNA, 19 nt, Artificial Sequence
  Description of Artificial Sequence: Synthetic oligonucleotide
cugcuccagcugccagcag

SEQ ID NO: 3010258 - RNA, 19 nt, Artificial Sequence
  Description of Artificial Sequence: Synthetic oligonucleotide
gguggguuagcagccugua

SEQ ID NO: 3010259 - RNA, 19 nt, Artificial Sequence
  Description of Artificial Sequence: Synthetic oligonucleotide
cgaagcguugggucugcuc

SEQ ID NO: 3010260 - RNA, 19 nt, Artificial Sequence
  Description of Artificial Sequence: Synthetic oligonucleotide
cagcugccaugugcagggc

SEQ ID NO: 3010261 - RNA, 19 nt, Artificial Sequence
  Description of Artificial Sequence: Synthetic oligonucleotide
cgggcugcucguucucuag

SEQ ID NO: 3010262 - RNA, 19 nt, Artificial Sequence
  Description of Artificial Sequence: Synthetic oligonucleotide
gcguugggucugcuccagc

SEQ ID NO: 3010263 - RNA, 19 nt, Artificial Sequence
  Description of Artificial Sequence: Synthetic oligonucleotide
gcaagugaacgggcugcuc

SEQ ID NO: 3010264 - RNA, 19 nt, Artificial Sequence
  Description of Artificial Sequence: Synthetic oligonucleotide
guucuggauuucaguccua

SEQ ID NO: 3010265 - RNA, 19 nt, Artificial Sequence
  Description of Artificial Sequence: Synthetic oligonucleotide
cgcacggcuccucuucaac

SEQ ID NO: 3010266 - RNA, 19 nt, Artificial Sequence
  Description of Artificial Sequence: Synthetic oligonucleotide
ggugccgcacggcuccucu

SEQ ID NO: 3010267 - RNA, 19 nt, Artificial Sequence
  Description of Artificial Sequence: Synthetic oligonucleotide
cggcccaggucgcagcaag

SEQ ID NO: 3010268 - RNA, 19 nt, Artificial Sequence
  Description of Artificial Sequence: Synthetic oligonucleotide
gcugucccacgggacggug

SEQ ID NO: 3010269 - RNA, 19 nt, Artificial Sequence
  Description of Artificial Sequence: Synthetic oligonucleotide
ccggagccccucagggccc

SEQ ID NO: 3010270 - RNA, 19 nt, Artificial Sequence
  Description of Artificial Sequence: Synthetic oligonucleotide
ccaagugcagaauggucuu

SEQ ID NO: 3010271 - RNA, 19 nt, Artificial Sequence
  Description of Artificial Sequence: Synthetic oligonucleotide
gccgcacggcuccucuuca

SEQ ID NO: 3010272 - RNA, 19 nt, Artificial Sequence
  Description of Artificial Sequence: Synthetic oligonucleotide
acgggacgguggggacugg

SEQ ID NO: 3010273 - RNA, 19 nt, Artificial Sequence
  Description of Artificial Sequence: Synthetic oligonucleotide
gggacgguggggacuggaa

SEQ ID NO: 3010274 - RNA, 19 nt, Artificial Sequence
  Description of Artificial Sequence: Synthetic oligonucleotide
gcagccuguacggccaagu

SEQ ID NO: 3010275 - RNA, 19 nt, Artificial Sequence
  Description of Artificial Sequence: Synthetic oligonucleotide
cguugggucugcuccagcu

SEQ ID NO: 3010276 - RNA, 19 nt, Artificial Sequence
  Description of Artificial Sequence: Synthetic oligonucleotide
gccucacaauggccuccug

SEQ ID NO: 3010277 - RNA, 19 nt, Artificial Sequence
  Description of Artificial Sequence: Synthetic oligonucleotide
caacugaaccagggugggu

SEQ ID NO: 3010278 - RNA, 19 nt, Artificial Sequence
  Description of Artificial Sequence: Synthetic oligonucleotide
gcugcucguucucuagguu

SEQ ID NO: 3010279 - RNA, 19 nt, Artificial Sequence
  Description of Artificial Sequence: Synthetic oligonucleotide
guguucccaugggccuuca

SEQ ID NO: 3010280 - RNA, 19 nt, Artificial Sequence
  Description of Artificial Sequence: Synthetic oligonucleotide
guacggccaagugcagaau

SEQ ID NO: 3010281 - RNA, 19 nt, Artificial Sequence
  Description of Artificial Sequence: Synthetic oligonucleotide
ccagcagaugccucacaau

SEQ ID NO: 3010282 - RNA, 19 nt, Artificial Sequence
  Description of Artificial Sequence: Synthetic oligonucleotide
ggguggguuagcagccugu

SEQ ID NO: 3010283 - RNA, 19 nt, Artificial Sequence
  Description of Artificial Sequence: Synthetic oligonucleotide
ggccuccugggguggccca

SEQ ID NO: 3010284 - RNA, 19 nt, Artificial Sequence
  Description of Artificial Sequence: Synthetic oligonucleotide
gcuccagcugccagcagau

SEQ ID NO: 3010285 - RNA, 19 nt, Artificial Sequence
  Description of Artificial Sequence: Synthetic oligonucleotide
gccaugugcagggcugugu

SEQ ID NO: 3010286 - RNA, 19 nt, Artificial Sequence
  Description of Artificial Sequence: Synthetic oligonucleotide
cagcugccggagccccuca

SEQ ID NO: 3010287 - RNA, 19 nt, Artificial Sequence
  Description of Artificial Sequence: Synthetic oligonucleotide
ccaugugcagggcuguguu

SEQ ID NO: 3010288 - RNA, 19 nt, Artificial Sequence
  Description of Artificial Sequence: Synthetic oligonucleotide
cgcagcaagugaacgggcu

SEQ ID NO: 3010289 - RNA, 19 nt, Artificial Sequence
  Description of Artificial Sequence: Synthetic oligonucleotide
cuguguucccaugggccuu

SEQ ID NO: 3010290 - RNA, 19 nt, Artificial Sequence
  Description of Artificial Sequence: Synthetic oligonucleotide
ggggcagggcagcugccau

SEQ ID NO: 3010291 - RNA, 19 nt, Artificial Sequence
  Description of Artificial Sequence: Synthetic oligonucleotide
cgguggggacuggaaaauc

SEQ ID NO: 3010292 - RNA, 19 nt, Artificial Sequence
  Description of Artificial Sequence: Synthetic oligonucleotide
ccccucagggcccggccca

SEQ ID NO: 3010293 - RNA, 19 nt, Artificial Sequence
  Description of Artificial Sequence: Synthetic oligonucleotide
cggcuccucuucaacagcu

SEQ ID NO: 3010294 - RNA, 19 nt, Artificial Sequence
  Description of Artificial Sequence: Synthetic oligonucleotide
ggagccccucagggcccgg

SEQ ID NO: 3010295 - RNA, 19 nt, Artificial Sequence
  Description of Artificial Sequence: Synthetic oligonucleotide
cgcuggcugucccacggga

SEQ ID NO: 3010296 - RNA, 19 nt, Artificial Sequence
  Description of Artificial Sequence: Synthetic oligonucleotide
cccggcccaggucgcagca

SEQ ID NO: 3010297 - RNA, 19 nt, Artificial Sequence
  Description of Artificial Sequence: Synthetic oligonucleotide
cccucagggcccggcccag

SEQ ID NO: 3010298 - RNA, 19 nt, Artificial Sequence
  Description of Artificial Sequence: Synthetic oligonucleotide
gugccgcacggcuccucuu

SEQ ID NO: 3010299 - RNA, 19 nt, Artificial Sequence
  Description of Artificial Sequence: Synthetic oligonucleotide
cggagccccucagggcccg

SEQ ID NO: 3010300 - RNA, 19 nt, Artificial Sequence
  Description of Artificial Sequence: Synthetic oligonucleotide
ggcccaggucgcagcaagu

SEQ ID NO: 3010301 - RNA, 19 nt, Artificial Sequence
  Description of Artificial Sequence: Synthetic oligonucleotide
ccgcacggcuccucuucaa

SEQ ID NO: 3010302 - RNA, 19 nt, Artificial Sequence
  Description of Artificial Sequence: Synthetic oligonucleotide
gggugccgcacggcuccuc

SEQ ID NO: 3010303 - RNA, 19 nt, Artificial Sequence
  Description of Artificial Sequence: Synthetic oligonucleotide
ggcugucccacgggacggu

SEQ ID NO: 3010304 - RNA, 19 nt, Artificial Sequence
  Description of Artificial Sequence: Synthetic oligonucleotide
ccacgggacgguggggacu

SEQ ID NO: 3010305 - RNA, 19 nt, Artificial Sequence
  Description of Artificial Sequence: Synthetic oligonucleotide
cgggacgguggggacugga

SEQ ID NO: 3010306 - RNA, 19 nt, Artificial Sequence
  Description of Artificial Sequence: Synthetic oligonucleotide
gcgaagcguugggucugcu

SEQ ID NO: 3010307 - RNA, 19 nt, Artificial Sequence
  Description of Artificial Sequence: Synthetic oligonucleotide
ccggcccaggucgcagcaa

SEQ ID NO: 3010308 - RNA, 19 nt, Artificial Sequence
  Description of Artificial Sequence: Synthetic oligonucleotide
ggggugccgcacggcuccu

SEQ ID NO: 3010309 - RNA, 19 nt, Artificial Sequence
  Description of Artificial Sequence: Synthetic oligonucleotide
uugguaauauaucugagag

SEQ ID NO: 3010310 - RNA, 19 nt, Artificial Sequence
  Description of Artificial Sequence: Synthetic oligonucleotide
ugaacaaagaguuccgugg

SEQ ID NO: 3010311 - RNA, 19 nt, Artificial Sequence
  Description of Artificial Sequence: Synthetic oligonucleotide
agcauuuucagguacuuac

SEQ ID NO: 3010312 - RNA, 19 nt, Artificial Sequence
  Description of Artificial Sequence: Synthetic oligonucleotide
uaauauaucugagagaaac

SEQ ID NO: 3010313 - RNA, 19 nt, Artificial Sequence
  Description of Artificial Sequence: Synthetic oligonucleotide
aucugagagaaacugaagg

SEQ ID NO: 3010314 - RNA, 19 nt, Artificial Sequence
  Description of Artificial Sequence: Synthetic oligonucleotide
auacugaacaaagaguucc

SEQ ID NO: 3010315 - RNA, 19 nt, Artificial Sequence
  Description of Artificial Sequence: Synthetic oligonucleotide
accaaugucacuuucacca

SEQ ID NO: 3010316 - RNA, 19 nt, Artificial Sequence
  Description of Artificial Sequence: Synthetic oligonucleotide
accaucgucaucuucuucc

SEQ ID NO: 3010317 - RNA, 19 nt, Artificial Sequence
  Description of Artificial Sequence: Synthetic oligonucleotide
cuagauacugaacaaagag

SEQ ID NO: 3010318 - RNA, 19 nt, Artificial Sequence
  Description of Artificial Sequence: Synthetic oligonucleotide
ucuuugagcauuuucaggu

SEQ ID NO: 3010319 - RNA, 19 nt, Artificial Sequence
  Description of Artificial Sequence: Synthetic oligonucleotide
cuagcuaaaaucuucuuug

SEQ ID NO: 3010320 - RNA, 19 nt, Artificial Sequence
  Description of Artificial Sequence: Synthetic oligonucleotide
uaugucagugcuuucuugg

SEQ ID NO: 3010321 - RNA, 19 nt, Artificial Sequence
  Description of Artificial Sequence: Synthetic oligonucleotide
ucuuugguaauauaucuga

SEQ ID NO: 3010322 - RNA, 19 nt, Artificial Sequence
  Description of Artificial Sequence: Synthetic oligonucleotide
uuuucagguacuuacuagc

SEQ ID NO: 3010323 - RNA, 19 nt, Artificial Sequence
  Description of Artificial Sequence: Synthetic oligonucleotide
aacaaagaguuccguggcc

SEQ ID NO: 3010324 - RNA, 19 nt, Artificial Sequence
  Description of Artificial Sequence: Synthetic oligonucleotide
uacuuacuagcuaaaaucu

SEQ ID NO: 3010325 - RNA, 19 nt, Artificial Sequence
  Description of Artificial Sequence: Synthetic oligonucleotide
aguuccguggccuuggccg

SEQ ID NO: 3010326 - RNA, 19 nt, Artificial Sequence
  Description of Artificial Sequence: Synthetic oligonucleotide
uuugguaauauaucugaga

SEQ ID NO: 3010327 - RNA, 19 nt, Artificial Sequence
  Description of Artificial Sequence: Synthetic oligonucleotide
guacuuacuagcuaaaauc

SEQ ID NO: 3010328 - RNA, 19 nt, Artificial Sequence
  Description of Artificial Sequence: Synthetic oligonucleotide
agucuauucuugcaccugc

SEQ ID NO: 3010329 - RNA, 19 nt, Artificial Sequence
  Description of Artificial Sequence: Synthetic oligonucleotide
uuaagccagaacuucacca

SEQ ID NO: 3010330 - RNA, 19 nt, Artificial Sequence
  Description of Artificial Sequence: Synthetic oligonucleotide
uagauacugaacaaagagu

SEQ ID NO: 3010331 - RNA, 19 nt, Artificial Sequence
  Description of Artificial Sequence: Synthetic oligonucleotide
uauaucugagagaaacuga

SEQ ID NO: 3010332 - RNA, 19 nt, Artificial Sequence
  Description of Artificial Sequence: Synthetic oligonucleotide
cuuacuagcuaaaaucuuc

SEQ ID NO: 3010333 - RNA, 19 nt, Artificial Sequence
  Description of Artificial Sequence: Synthetic oligonucleotide
uguaggaacagguggcuag

SEQ ID NO: 3010334 - RNA, 19 nt, Artificial Sequence
  Description of Artificial Sequence: Synthetic oligonucleotide
uuggccgugagcaccagcg

SEQ ID NO: 3010335 - RNA, 19 nt, Artificial Sequence
  Description of Artificial Sequence: Synthetic oligonucleotide
aacugaaggguacucugag

SEQ ID NO: 3010336 - RNA, 19 nt, Artificial Sequence
  Description of Artificial Sequence: Synthetic oligonucleotide
gaaacugaaggguacucug

SEQ ID NO: 3010337 - RNA, 19 nt, Artificial Sequence
  Description of Artificial Sequence: Synthetic oligonucleotide
ugugagucuauucuugcac

SEQ ID NO: 3010338 - RNA, 19 nt, Artificial Sequence
  Description of Artificial Sequence: Synthetic oligonucleotide
auauaucugagagaaacug

SEQ ID NO: 3010339 - RNA, 19 nt, Artificial Sequence
  Description of Artificial Sequence: Synthetic oligonucleotide
uucuuugguaauauaucug

SEQ ID NO: 3010340 - RNA, 19 nt, Artificial Sequence
  Description of Artificial Sequence: Synthetic oligonucleotide
agcgccuccugguugaugc

SEQ ID NO: 3010341 - RNA, 19 nt, Artificial Sequence
  Description of Artificial Sequence: Synthetic oligonucleotide
cagaacuucaccaauguca

SEQ ID NO: 3010342 - RNA, 19 nt, Artificial Sequence
  Description of Artificial Sequence: Synthetic oligonucleotide
uuacuagcuaaaaucuucu

SEQ ID NO: 3010343 - RNA, 19 nt, Artificial Sequence
  Description of Artificial Sequence: Synthetic oligonucleotide
ucagguacuuacuagcuaa

SEQ ID NO: 3010344 - RNA, 19 nt, Artificial Sequence
  Description of Artificial Sequence: Synthetic oligonucleotide
uacugaacaaagaguuccg

SEQ ID NO: 3010345 - RNA, 19 nt, Artificial Sequence
  Description of Artificial Sequence: Synthetic oligonucleotide
cuugguuuugccacugccg

SEQ ID NO: 3010346 - RNA, 19 nt, Artificial Sequence
  Description of Artificial Sequence: Synthetic oligonucleotide
acuuucaccaucgucaucu
